United States Patent Application Publication US 2018/0305689 A1 - sequence listing, part 6

SEQ ID NO: 3633 - DNA, 4001 bp, Homo sapiens
ggaagatgcagggtctgcaagcaatagtggaatagctgggtcttatggtggctcttccaggtcctgatgaaaaggcttgggcaggacagaactgctcagaggctgcagctctgagaaatcacagcaccagcccctcccatagggaaggtctgggggcagtgctgagggaggcagcaccttctcagaagacaaaactggatagcaagtggtgctatatgggtacttccgacacaagatctgttctttaacaatcactggcaaagaactgagatctgggatgtttcaagatacaagagaacttggcaaactgcttatttttttaatgtttttagagagatcaatagtaaaaaaaaatttcacatgtaagtatataagataaatacatgaaacaagtgtcacaatgcaatacttagtggaactatgtataatgcactctgatattttctattctactgcattctaaaatactagttgtggccaggcgtgatggctcacgcctgtaatcccaacactttgggaggccgaggtgggcggatcgcttgaggccaggagttcgagagccttgacaacatggtgaaaccctgtctctactaaaaatacaaaaattagctgggcatgcccactactcgggaggctgaggcaggataatcacttgaacccaggaggcggaagttgcggtgagcggagatcgcgccactgcactctagcatggacaatagagcgagactctgtttcaataaataaataaataatgccagttgcaactcactaaattgatttcatagcccactaatagatcacaatccggtttgaaaagcagttaagctagtcatctcatttttagaccagcccaggtaggtgctaatggttatgcagcaaattagtgacagagtccaagctaaaactcagttctcagaagtccagatgattagtccttccacttagaacagtactgtctccgattgtgtagcaagatatgacacggagaattctaaaatttacaagtgagagggactccgtagatcaaacaggtgatccattattttttaaagcagcagaactctttaaactctagaagcaaccacaaaatatgttttaaagatgagagtggagagcaggctctgagcctgaggcgccttgttgaacctctgccaatgtttcagaactagggttcaatccttacgatttgggaccatgcaaagcctgttaaatcaccggacgggcaaaacgcaatttcctacgcatttctgtgctgctcccccacacccctgagctcgcatgggagggtaggtgaaaaagttaaggtcctggaaccaagtggaggaatgagtcacggggattatcagttccacgagccacggggattacaagtggcagggcgggtgccaacaccttgcaaaccaaggacaatgaccacacccttgggactactattcccggggcctactagggcaaaggctatcgacagtgttgcacactaaagcggggctcctccacgtgcaaggaagccctcctagtactttacatatggggaaactaaggcccacgtctggtagcggctgccttggcaaaatgagaacccaaatctgtgagaaagcctcgagtgcagccccggaccccagggtccctcctgctaccttgtttgagaaccttcttcctggcctccttgtcagttaccaggggcgctgggggccgtttgacatcttcggagaaaggattcggggagctgccagagaatagtcccaagtaaactttgcagaggacggccagcagcagcacagccaggagcagcaccagcggaagccacatcacgccggcgtcgggtcgggtaaatgggacagctccgactgcgctcagcctctaggactgtggctccgcccgggctagttcgctctccagtcaggaggcggaggcagctttgagcactgattaaccagccagccagcgaagagccaactctcaggtgatgattgaccctcccggctctccgtacttcttttgggtttccattgcctactgggaaatgtagttctcggggccaggggagccggcacggaagcggctgtgcgcatgagcagatgaggcctagccgaggcggcgggacccccaagtttggaaagctcttttaacggtgagaacgcgttaacacttgccaaggggagtggttggtgcctgtgcggagctagcagccggcctgaggagggagggagaatgtgatccggtggaaattatcactatggggcgagacaaggccgagagttgtaagactgaaagagaatcccgactgggagacaggagtcctgagttctggtcctggctctgccctggactcgctgccttgaggtgttaaattgctttcctcgtcttacgcctccaggctatgcgaaagttctgtccaaaggctgctcacagcccctgtctgactggttgtcatgatgaattgagctctctgttacctgcgcatcacaaccggtgagcgtctgtctctgtgcccctcaaagtggcccatagttttgtcctgggggcccgcctgggacggagtcctctatggcgggtccctaatgacaccccatccgtggggaacctgggggacggggagccgcccatggacaagcatggtgaaaggatcagctaagggcccatctaatttaaattcctatgcagagaatctaacctccagcaagcagttgaagaatcataccccctccttgcctaaagagggtgcataatgaatacttgattggagaaggatccatttttacaggaaggccgtttccttaggtccaactatcaggaatttgcctttgagtacttccttgtttaatggaattgttgctcttttcttctctgctacagatagtaactgtccctactgaaggccccaggagtgctccagccaggtgtggaaagctggtcacgattctatgctacttggttcattttctacacagcaacagaagagccctcctgagattgctattaccatacccgcctgtcaccttgccaaggctggccaatgtgtgttttgtcataggctgtcatggaggccatgatggaggaaaaggaaaggggaggcagatgttgaggccccagaggccacagtgagagcagtttagttcctggggtgccaggactaagggggcattgccctgtcccccggattacagtgagccacatgtcaagcccaagagccaggaggtattcttcctctcagtgttaataatcaaagcatcctgacaccagcagccagtttttatggcatcctggagggctgacctcatagagaggctaccctccttccttagtcacccaaagttgtgaactatgattgtcagttgtgtgtgggccatctgcccacttaggatgcaatttttgatgtgacagacattccggatgtccaattcccctgtgatgaggtatgagccttgtccagcccttttcctgagggaagcaatgtcagatgaaagacttagaattgcccaaactggctagccagctgccacatgcacagtattgctgataactgagaaaggttagaacatcgtgttgcattttgaatttctaccattgttggaaccaggtctagtattataagcccctgacccagcctgtgtgtgaggcctaaacaaagcctgagcacttcagctaagaccacccaccaaggtgacacctttagcctcacgcctttgataagctggcccaggtcccagtaactccattgtcagaaacagaccccatcccttctagtggtgctgctgccttttggacacagaatccagctcacagtcccctgtgtggtccccttttggccatcctgtggcttgggtagtaagaggtaagcatttggctgaggcaagttgttcattcagaataaattcacagctgcttaaattttgtcaacaggccgagcgtgttggctcatgcctgtaatcccagcactttggaaggccgaggcaggcggatcacgaggtcaggagttcaagaccagcctaaccaacata

SEQ ID NO: 3634 - DNA, 4001 bp, Homo sapiens
agagatactagtaacttaacttgtccagtcaccagctaacaatttgtagggccagaaatctaacctccatgtaactgtgaacttcctgtctttccactacagcagctatcaaagaaagtgctttcaaatatatattatatgtagtcactgcaacttcttatgaataatgaccagtttgttgctggtgaggacaacgtttccttaatgctcttatgtagaatcagagttttgaagttgcgagtgggaagttggaaatgtagtgatcttatatattcaagcacattattttttaaaaattatgttctacttgagacctcatagaaattaattttaaaagagcaattcccatctttacaaaaaaaattaaatatgtacggtttaccgtaaaatagcggttaaggttctacaacaaaagataggagtttggtacagactctaccctcaaaaggtcctacacagtaagagaagacagggctaaaaagataaacgcaacacaggaaaaggcgcaaatagcctaagaattgaatggaagagagccttgtatactggagaatgattcctggaagaggaactttaggtgagctcttaagtgtccagtacaggaaggcagggaacaatacgcagcactggtccctgcacgggcaaacccaagaatatgtgtgaaaggttggtggacagatagatggttcccacaggctgatttgctacatacagaactccatagaaagaaccaaggttatggttggtcctaccctacctaaacaggaaatggcttattctcggagactaaagtgccaagtccggaaagaccagacagatacacagaattacagactgttacataaagtccttaatagttacaagcccttgttgtgctatgtgctagtctgcattattttcacctaaatgaaaccatttctacttagtacatggcgtgagaagacgtggagataaagagaattagcagacgtatattatctgcaatttatcttacggaggagtacattaaggagtgttatgtgagattatttctttacaaactgagaataggtaggaagagcagcgaaacacagcgcggctcggtgcgcccagagcggcgtcactgtaacagtacagaagtgggcaaggggctctcggaaggacagttggggaacggcgcccagcgtatttagcgaacggacaagcagcaaggaaaaacaagggagcaacaaccgccttcggacattccgaccggttctgggatgcaccggggacgtcgaaggcggggtgcggaaaaacgctgtggctggagtgcgggtgggagcggcggctcgaccgggtcgacattctacaaacgcttgtggaacgaacgcccgaacgcgcgcgtgaatgaatggcgcggaactgaatggccggccgaggcgccggcgcaggaggaaggagtttgcggcgcggtctgaccgggccggcgggatgcggccgggcgcggagggaagggccgctgcgccaggggtcggcgcggggcggcccatggggctggcggcggcgcggggccggccgcgccatgacggaagggaaggggaggggaggtcacacattacataacccggcggctgcgagcgtcaggggaaggcgccgtggacagcccaggccgcgacaggacggccgcgggccggggccggggcgacgcacccctcccccgcgccacctcaggccgaccgcgctctggccgctgccgggcgggtctgcggcgcctccgggcgacgcgtgtccgatcccgcccctcccccaccccgccgccggcccgggggtcgctcaccttccgcgttgccccagaccaccatgcccgggcccggcggccttctccggccttgcggaccccggccccgccgccgccagtgccctcgccagggaccagggaggagggccgggggaaggcagccccaccgctgagcagcgccgcggtccacgctcccccacgctcgcggcaaccaaccccgcgcgcgctccgcggtggctctccgcccctccccctccggttagcgcgcgcgccgcagccacgccccctagcgttccgcgcgcgctccccggccccgctcgcgctcacagccgcgcggcgcacgcgctctgctccccccggcccggggcgaccccagcctcgggcgtagcaccgcggcgcccggcgtcggcctccgtgttcctcccctccccggccccgccctgttgttctgcagccgcccgcaaggggcagcgcctgggcggcacgtgaccgtctcgctagctgggcggaggggagcgcagcgcgggcccgcccacgcactgcgccgcctgcccgcccgtcctgctccggtcacccccgcgcttcgttgaccgggtcgcggctcttcggttgccattcggacagcgcgccgctccgtgcacagcgagtccccgcgcctgccccgccttggggctccccagtggggaaggacacaagtgcagacactgaccgggcttcaaaccccggtactgtgtgaagatgcgccagacgcccgggttccctccttaagcaattgatttacagtgacatctagtggagaaagggacacacatgaactgacattttcctatgtccagagcaaccgagaaccacggcccactcaggttcgcgggaaggagcactgcgccacggcgttttcgggattcgtggcctgctcccgcagggcacagacactatcttctgtcctttgagtgcccgggcagcattgcgcctgagtatttgtaaacggagggccggtatcccatcccatgtacagcgctggagttacccgagaaagcagttttctatgaatataaaaataatatcctatattatgtatgcgtaagtacaattctaattgagggccttctagcagaaaacaatccgtccataaggaccactttctccctcttggcagggtcgctttgaagactccacattgttacataatagtctttattgttgtaatgcacaaacatgaagatacttttttcccactcattcccttgcctaaaatgcttcagagtttgcaggtacttaggaaacaatcagtattcttttgaaaactgatttgcagagttggaacttgtttactagcaacacagagaatactcaaatagctcatttctttccctttcagttttttgccattttatagacttctataaatgcacttcaacttcagtattctcgtcgctaatccaacgaatttagattgcatacttttcaaagacgtcataatttaaaacaaattgcgtaattgctttcttttcttttcttttcttttgagacgaagttttgctcttttgcccaggctggagtgcaatggcgcgatctcggctcactgcaacctccgcctcccaggttcaagtgattctcccacctcagcctcccgagtagctgggattacaggcatgcgccaccatgcccggctaatttttgtatttttagtagagagggggtttcaccatgttggccaggctggtctggaagtcctgacctcaggtaatccaccagccttggcatcctaaagtgctaggattataggcgtgagccaccgtgcctgcccataattttaacagactcacgaccagttgccgactgcaacaccaggaggtcatctgctgagatgctacagaaaaacagtggtaaccccttgttatgggtgagttttgttttggttgttgttcttttgcttgttttaaatgtctaaatggcagcattcctgcacgattgtatttcaattttcttttccactctcgtattcaaaccgaagatctttttttttcttctttttgtatttttctcaaggaagaaacacaaaccttgagccaactgaccttggcaatacctttatagaatacagtaaaatggtattaactgcaaactagtaggcagcctctgtaaaggacgaaaaaaaatcacgttgctgtctacataaaataggataaaaagagagatggggaatacataaataaaaatgtatttatggacaaattctagc

SEQ ID NO: 3635 - DNA, 4001 bp, Homo sapiens
tacagatcaaaatggttctgacctaaattcatgaatacacagtgtttcaaggttaaggagagtatgtgtctgtctcctatggatgtacagaaacgagtcctaaaaaaaaattgatgaggaaaatcaatggtgtgaacatagcaccacattacaaatattttctcaaatgaaggtttttgaaaaagtatagaaaaaattcaaacggttgtttggttacttctctgataattgctattatcttaatccatttttaacattcataatttaaaagaaaattaagaaattaagaatattaatttttttcttttggtagccttagctttaaacaaaaataggatatgaacatgttaaaagtctatgtacagattttgtgtatgtccctggaagggagtttgtttgctggccagcttaatttttgacaaagaaaaatgggctgctcttgcttcttgcacaaagatgcactgtttctagagcaaagcaaaaaaaaaaaaaaaaaaaaaaaagaaaagaatgtgtgtaaacaaaaaatttggaaaaaaattaagataatattcaacatgataatttagtataaactttttgtgaattgataaaatgtgtggctcattagaattaaaaatataactataataagaattttactaatatctgataactttaacagcaagcaaagcactctaaatttcatttttactacttcataattaaagatatagcttttttaaaaagctgctttgtctgtgcagttgtacagtactctaaagtttccaaaagaaatgaggcaaagtatttgtgaaatcgagccacctcgattccttccacagagctgccatctgggcttgtttatttgtgtttccaactttctggaacagagagtttctctgttagggacagggcactgagcaaaggaagtgtcttacagaaggctatcttttttttttttttaactacattttcaaaacttatagtttagtttggtcaaaaatatcaaatgactaccataatcacagagtctaacacaattggaagcctcagaattgtcttagcaaacactcttccacgatatgatgcaagtaatatttactacataataccttattgtgattttcaaatctttttcaaaatacaaactgtcactaaggctatatagctatttgtcctggaaatcaagcatttttcataaatccttctataaataagtatttgatttaaaaatgaaagaagtatttccaagcaatttccctaattttagaaggtacatatgagccatgttaccaaaatacgaagcaatcaacaaaacaaaaatcttacaaagtataattaagaagcgaagcattattgtttgaatatacaatctcattatgaagaacagtttaaaaatttattaagtcaacacttaaaaatgactagtagtctcatctctgaaacatttaacaaacaaaatagaagcaaaaagtaccttgtagagtaaaatccagcaatacatattcgtaagcaaattctgtctttgtttccacttgcggtctcttcagggtagaaaatatttttccagggctgctatcatcagggtcttctagctttctaagtccgcaccccatggcaaaatctgtaaggaattaaattgcaggaaaggggagggagagcagcaaattctgttgtttaagctgcaaaaagaaagttacagacttaactgctttgattttgttttcagctaaactatagataaccaaaaaaaaaaaaaaaagcaaaaaccaaaaaaaaaaaaaaaacccaaaaaaaaccatctgggtccaaagaaaggagttgaagaatttttctatccatttttctgtaaagtcattgaacccatgattaagctacagctccaggaggctgggcttgatcttagagaaacatgcaagctgctacaacttagcggagaatttccatgccacgtcaatttacagccagccccctaccagagttctgtcgctcagggcaccagcggtgctttgtctattccagttggctggatgataaaaagaggtgtccaaaaacggaaataaaaaggcaaaagggcaacttggatgtaattatctacaagtagaagatatattcagacatagtggcacacaattctttttctgttttccctctcctctctgtcctgcgcctaccctccttcctctcaactactaccaagaaagaaaaaggagagagagagagagaggcagtaggggggtggagagagagacagagagagagagggaaaaagagagagagagagtgaaagagagagagagaaagaaagaaagagaaaaatgaaaagagtggattctcaacatatttagaaacaaaaatcatttccagaaaggaagtcagctttatgaggaaactatttctggagtctaaaaggaggaaagtaaagtttaaaaaaacagccctttaagtctttagttagtacttttgaggatttctttccatatgaagtttctttctgttggaaaaaatcatatgctaattaaaacagcaaagtataaaaaatttatattaaaatatttttataaaaaagactttacttaattgcaaaggagagacagttatgtgtgtaattagtttccccaacatccttaaatagtttaaaacactctactattagaaggcttatgatagcaactaatacttctataggtctcaaagtatccttaattaaaaaataaaacaaaactgacaacttgattcatttaatttttttttttttgagatgtggtcttgcctgtcacctaggctagagtgcagtggcaaaatcatggttcacttcagcctcgacctcccgggctcaagccatcttcccacctcagcttcccaagtagctgagaccacaggcttcaatgtgattgaaaaaatttttcaggcttgtattctctagaatctcaactgtgataagggtttattttgtaaataatggaagcagtggcagaatcacatgcaaccacatctggctcatttttgtatttttttgtggagatagggtctcactatgtcacccaggctggttttgaaatcctcagctaaagtgatccttctggatcggcttcccaaagtactgggattacaggtgtgagtcactgcaccagggccattcagtcttataaactgccatttaccggaggtcaagaataatttataatggaccaattgtaatgaacgtttattgtattttaccctttacaggtcaggaagtatggtgcgctcatcaaaactgtgagccctggaatcaggctgcctgggttcaaatcctgcttcttaggcctactagagatgtaatcttgggcaagttacttgacctcttcaagtttcaacttcctcccctgtaaatggtacttactacataggcttgttatgaaggctgaatgagataatcttatctcatatgttaacactaggcctggctaatagcacaaaatacatttgttgatgcgtgtacgttataaaacaggttgggagtaggaataggaaggaagtgattctgccactgcttccattatttacaaaataaacccttatcacagttgagattctagagaatacaagcctgaaaaattttttcaatcacattgaagcctgagcatgaaaactctcaaaagggggatggatcctttattttatagatcactattaccttttttcttttcctactgcctccttgcctttaaatgttttatttctcagaaaagtcttagagaaaaattccacagtctttcatgctccaggatgagcactgtcggtggtaagcaatttgactaaaaagacagccaactctgacccagtgtgactcatctgactgttcacagtactttcatgcctgtcattttccgtatcctctttggtatggtgggctgtgaggtcctgtatggcagaaatggaatctttgaaggtcactagcatctactgaagtgcctggaagattatttaagtacccattatatttattaaatgcatgctatattccagccactgaa

SEQ ID NO: 3636 - DNA, 4001 bp, Homo sapiens
aaatctcataatgttttaacaaagtttatgaaggcccagcgtggtggctcacacctgtaatcccagcactttgggaggccgagggaagtggatcacttgaggtcaggacttccagaccagcctggctaacatggtgaaaccttgtctctaataaaaatacaaaaattagcaaggcatggtggtgcaggcttgtaatcccagctactacggaaggataaggcaggagaatcacttgaactcaggaggcggaggtcacagtgaaccaagatcgtgccactgcactccagactgggcaacagagcaagactctgtcacaaaaaaaaaagagagaaaagaaagaaaggaaaagaaagtttacaaatctgtgttgggcctcatgcagcccttaggccaagggttggacaagcttggtctagaccatcataagccccctggttaccatttgaagtgagttcacaagcggtcttaggaggatgttcaggtattttttaatcagtctcatcattctttcaagtctctggagcataatttaaaccctggaaactctaatttactaaatggcgaactgaagtcattgaaaggcatcctgagtcctttcttctaagaacgatgcatgaggggcctgggtcggtgagtgtagcagaaacctagcccggctgtgtaacactgaaaaacgctgtgtacttcagtatttattcatttgattttttttcctctcattgaagataagacatgtcaaaaatgttcttttggaggaaagtggtaactgtttaggcctgccagggttataatcacaaacacgcccttcatttttgtttcactcacatgactttttcaaaagtcttccctgagaaatatgctttgaaacttaaaaagagaaaaatgtactctgttatataacagttattcaccttgtaaaactaaaggtcctagaactggtttcaattatttttctatttaagaagatctgcaaccccatgagtttctcagtcccaagggctgaggatatttttctttcccttttttcctgcttcgacttaaatagctggaagtgaatttcacaatgcggaatgcattgctaaagctaaaaactcctaagctttaaattaggaaacatcccatcctggatctagggagagaaagcttttcctcccctggcaaggcccaggagcttttggatgtacatggaagcagggtccaaccaacgggtccccgcggggcagaccggatggctttccgcgggaagggtgacaacggggaagtcacagatgggaagcccggccccatcgccgattcgggcccggggcttttacgcgtgtgcgtgcatggcaggtccctccgcgctgcggcgggcgagcatcagaaagcgctgggcctggggccgctcctcacacccggctttgacccggcgtcccgagggcagccgtagcgggaaccacgcttcccctccccggccccacctcctccatcccagcgtcccaggcgcctggcggctcaccactggatgacgccgctgtgcgggccccggctaccctcgccgctcgacggcgaggccggcaccccctcggccatggctcggccccgggcctgcagcaccgaggcaggcagcgagcggcggccgtgggcggcgctgggttgcaccggtcctgctaccgccgctcctcggtgtttactttagaaaggagcgcgcggggggcgcgcggggcgcggggcgggagcccagtcctccaggcccgagcccgggggcgcggaaggcgcgcggcgagtacgggaggccacagctccccaacccccgcgccccgccgaggatgcgcggaccccgccctgcatcctgcggtgtgggctggagctgcctcccgctctcacccagcgcccttcccaccggcgtagcaaccagtcaaacagggacgcgaacaacaagcaccaacttacaccttttccaatctggtcgcggtgttgagtccgtgggtgtccttgacttgcttgagcgttggagttattcaggcagttttcaaaaatattgataccccggctgccgctccccatcccagccccgccccaccccaccccaagaggttctgatgaattggtctgggcgagggccgcctgggccaaccggctttttcagggtcccgggtgatgctaatgtgcccgccgttgctgaaaaccactgtctctaggagttttgaaaaatctcggagctctctggcaggcgggcgcatctggacttctaggaggctggtcccaggtgactccagtgtgctgctccaggtgagcagtgccacctcaacgtgagtccccatatctgtagccaggtcctgccagtccttgctctcaagagccatttatgtcagtgtcattgctgtgtgacatggagctgctggccatctccaagttcacttcctttgtggggaactgtgtgggttgttgtgagtattaagcgacattcacttgcaaggctgtgttgtagtcagagctcagtcatgcagccgttactgtggctgctaaccgcttcagagtctccgggtaaggatttctcaatctagatcaaaaacacatttgccgacttgacagcaacaaaaaccaaaccgcccagtttaaaaatgggcaaaggacttgaatagacatttatccaaagaagatacataaatgcctactaagcacatgaaaagatgctcgacatcattaatcattaggaaacgcaaataaaaaccatacccaagaggatggctattatttaaaacacagaaactaacgagtgttggtgaggatgtagagaaattggaactcttgttcactgagggtaggacatttaaagtggtgcagctggccgggggcggcggcccacgcctgtaatcccagcactttgggaggccgagacgggcagataacctgaggtctggagttcgagaccagcctggccaacatggtgaaacccccgtctctactaaaaatacaaaaattagccggacgtggcggcaggcgcctgtaatcccagctactcgggaggctgaggcacaagaatcgcttgaacctgggaggtggaggttgcagtgagccaagatcgtgccactgcactccagcctgggtgacagggtgagactctgtctcaaaaaatatgtataatattaaagtggtgcagctgctatggaaaacagtacggcctcaaaaattaaacatagaattaccttatgatccagcagtcccaattctgagtgtatacccaaaaagaattgaaagcaggaacaaaaacaaatatgtacagcaatgttcatagcagcattattcacaatagccagaaggtagaagtaacccaagtgtctatggacagatgaatggataaacaaaatgtggtacatatacatacactagaacattatttacccttaaaaaggaatgaaattctgatacatgctacaacacagatacactgaaaacattagcacacagaaaagcatgattccacttacatgaggtccctagagaagtcaaattcatagcgacagaaagtagaatgggggttgccaggggctgggggttgggggattagtgttttaatagggactgagtttcagttggggaagatgaaaagttctggaaatagatgctgatggttgcaaaacaataccaatgtacttaataccacaccactgaattgtgtgcttataaattgttaaaatggtaaattttgtgttatatatatattaccacagttttaaaaaaagtctgcccccaaaacatatgcacacacacacacacacgtttgagaaccacttctggaagcaggaaagacatcgattcaacaaaggaaacaactgccgactgcctcccacgtgccagccctggaaggtagttgctggggcccaccagagatctccatggccagcatcctcccttccacagggacaccatcaccagggtgaagctccaaggtcagttccagagagatagcaggacattcagaacctggaccctgaagttcaaccaggtcactggagctg

SEQ ID NO: 3637 - DNA, 4001 bp, Homo sapiens
taatggcaagtgcaaacactcagaggcagaaacatgctggcagtgctcagggaacagagctgaggccaatgtggccgggatgatgtgtgcaaagcattaagaaataagaccaggaaggtgagcaagggctaggtcacatggcaccttataagcctatggcctttactctgagtgacatgggaagtcactgggggattctacgcagaggcgtgacgaacgctacctgacgttatcaaacaggattactttggccactggtctgagaagagactggaacatagacaaaggacatgaaatacgaatcaaaaaataagaactataaataactgatgaaattttgaaaaaaccattcccatttacttatagagaaataagataaaatttctcaggaagctggcaaaggttcaccacaccacaaataaacactgtggtgaaatgggcgcttttaaatgatgctagtaagaatgtcacctgggaacccctttccaaacattacttgacctcacagtttctcttttaagattcaattcttgggaagtaactagagatgtggttaaagagtcgtgaaaaaggatgtttataaattccaataacgaaaacaacagattcacaaggtacaattattagctattggttaattatgataaaactacactatgaagaaatgatggagatattttagaaaaaatttttaatgataacgggaaattttcattggtatttttatatagaaggtaacatcaaaaatatttagagtggttatctctgagtagtataattattttcttaattcctccattttccacattttcctttcataattaagacaaaaaacaagttttaaaaatggatttgctggccaggcacggtggctcacacctgtaatcccagcactttgggaggctgagacgggcagatcacgaggtcaggagatcgagaccatcctggctaacatggtgaaaccccatctctactaaaaacacaaaaaattagccgggcgtggtggcgggcgcctgtagtcccggctactcgggaggctgaggcaggaaaatggcatgaacccaggaggcagagcctgtagtgagctgagattgcgccattgcactccagcctaggtgacagagcaacattctgtctcaaaaaaaaaaaaaaaaaaaaaaaagatttggtgtgcaaggctaaaacatatagaatggtacagctgagctacctggaaaaggggtaattatagtctagagtgattttttttcagagtgacccaggcaaagttgtcctgggagtgatctccaaagctagaaggagatcaccaatactgaagacaccactctgctgattttgtaaataatctaataagggcctgtaaggatgttactgggggaagagggtgagaggtaaggccttataccattaacagagtagatggtataagtacagagtagatggtatagtactcggctaaagtactttaaatctccctcaaatcaaaccttcctcttcacatcctaagcaatatgtgtgtaaaaagacaatcttatcttcagaaaacaatgttaaacaaggagtcagaagatgcagtctagtcatagtttttaaaaaatcacagatctgtgatttctttgtgatccagtttcttcatcaataaaaccaagactatcactaatcctagcataacttgcagtcattttacaaaggtgaaatgagaaatagtcatatatgctttaacattctaaagctcagtaattataatcactagtaaaatgttaacattaaatattaagtgagatttgatttacaacatatagatacaataaaccttaatattattctattattttgaatatggtacgcctattatatagtctcaatgttatattaccaattatgcaaccattacattaacagaataactcataaagaaaacaattgtatttacttacatttctagtccatgctaagcggtctgtgttaaaacccatcacgttcatgagacaagtcacaaataaattccactctgagtgataactgggtcctcctggagcactgtggacattgtaccacttgacaagcatctgaactgctatttcttttggcaggataaacttaattgtttgcaaacacgtttgtactattaaaagcaaagattaattttagtattcttactctgcatgcatttcttttcccctttcaataaccaagtttctttaacttctactatgtaaaggccaattattatgaaaagaaaactgtcattaaagagccaatgagatgcaaacattacctaacccatcatctgaaactaaaaccaactactgaattcaacagggcttgaaaggggtctgaagacagcttttttttttttttttttttgagagggtgtctcgctctgttgcccaggctggagtgctgtggcgcagtcttggcacactgcaacttctgcctcctgagttcaagagattctcctgcctcagccaccaagtagccgggattacaggcgtctgccactgccccaggctaatttttgtatttttagtagagaccatgtttcaccatgttggccaggctggtctcaaactcctgacctcatgatccacctgccttggcctcccaaagcactgggattacaggtgtgagccactgtgcccggccaaggacagctttttgatcattaattttgcatcagaaataaagtaaccaaatagcccagtttgccagagacagtcctgatttacatccattgcctagcaattactaactgctccccttcactcttaaagatgttctagctcgggtgacaaattaaaagtcactatgggccaggcatggtgactcacgcctgtaatctaagcactttgcgaggtcaaggcgggtggatcacctgaggtcaggagttcgaaaccagcctgaccaacatggtgaaaccccatttctactaaaaatacaaaaattagttgggcattgtggcaggcacctgtaatcccagctactcaggaggctgaggcaggagaatcgcctgaacccgggaggcagaggttgcagtgagccaagatcacgccattgcactccagcctggatgactacagcaaaactgtctcaaaaaaaaaaaagtcactatgaaaaacatacaacttctatgtttatacatttatataaaatactgcctacatacttcagtaaatatataatattcaatatatgcatccacgaatagcaatgcttagctagcattacatgatgttctaaatgacttaacatgcctattaaccaaagctttataactttatttctgatgtcgttcagtttctaaaatgtttcacatgctctctgccttaaaagggttaagagttgataccacataatttacaccattctttttttggtaagcggaaacagggtcttcctctgtccccaggctggagtgcagtggtgcaattatagctcactgtcacctccagctcctgggctcaagtggtccaccagctcaagcttcccaagtagcaaggactacagatgcatgccagcatgcctggctgattttatttttctttctgtagagaccgagtctcactatgttgtccaagctggtctcaaactcctggcctcaagcaatcccctcacctcagccttccaaagggaggggattacaagcacgagcccaccacacctggccttataccattctcagtggctccacatcaattatagcactacactgtcatacaatgatcccctcagagtggccagggctaccactgtgaagagacccaaatctgcttttagtagtaaataatcccaaactgcaatgtttgtgtactcacatatcctctcttccaggattcttttttccctttccactgtcatgccactgggcccaccctcatcagcatatcctctatcccgtcagtttgcaatatgcaaactcacacagcacaggttggaagcaaataatattaaaataccatataaccaagtatgtcatagctgaatccaaaataagtgtaaac

SEQ ID NO: 3638 - DNA, 4001 bp, Homo sapiens
gtaatggcaagtgcaaacactcagaggcagaaacatgctggcagtgctcagggaacagagctgaggccaatgtggctgggatgatgcgtgcaaagcattaagaaataagaccaggaaggtgagcaagggctaggtcacatggcatcttataagcctatggcctttactctgagtgacatgggaagtcactgggggattctacgcagaggcgtgacgaacgcaacctgacgttatcaaacaggattactttggccactggtctgagaagagactggaacatagacaaaggacatgaaatatgaataaaaaaataagaactataaataactgatgaaaatttgaaaaaaccattcccatttacttatagagaaataagataaaatttctcaggaagctggcaaaggttcaccacaccacaaataaacactgtggtgaaatgggcgcttttaaatgatgctagtaagaatggcaccggcgaacccctttccaaacattacttgacctcacagtttctcttttaagattcaattcttgggaagtaactagagatgtggttaaagagtcgtgaaaaaggatgtttataaattacaataacgaaaacaacagattcacaaggtacaattattagctattggttaattatgataaaactacactatgaagaaatgatggagatattttagaaaaaatttttaatgataacgggaaattttcattggtatttttatatagaaggtaacatcaaaaatatttagagtggttatctctgagtagtataattattttcttaattcctccattttccacattttcctttcataattaagacaaaaaacaagttttaaaaatggatttgctggccaggcacggtggctcacacctgtaatcccagcactttgggaggctgagacgggcagatcacgaggtcaggagatcgagaccatcctggctaacatggtgaaaccccatctctactaaaaatacaaaaaattagccgggcgtggtggcgggcgcctgtagtcccagctactcgggaggctgaggcaggaaaatggcatgaacccaggaggcagagcctgtagtgagctgagattgtgccattgcactccagcctaggcgacagagcaacattctgtctcaaaaaaaaaaaaaaaaaaaaaggatttggtgtgcaaggctaaaacatatagaatggtacagctgagctacctggaaaaggggtaattacagtctagagtgattttttttcagagtgacccaggcaaagttgtcctgggagtgatctccaaagctagaaggagatcaccaatactgaggacaccactctgctgattttgtaaataatctaataagggcctgtaaggatgttactgggggaagagggtgagaggtaaggccttataccattaacagagtagatggtataagtacagagtagatggtatagtactcggctaaagtactttaaatctccctcaaatcaaaccttcctcttcacatcccaagcaatatgtgtgtaaaaagacaatcttatcttcagaaaacaatgttaaacaaggagtcagaagatgcagtctagtcatagtttttaaaaaatcacagatctgtgatttctttgtgatccagtttcttcatcaataaaaccaagactatcactaatcctagcataacttgcagtcattttacaaaggtgaaatgagaaatagtcatatatgctttaacattctaaagctcagtaattataatcactagtaaaatgttaatattaaatattaagtgagatttgatttacaacatatagatacaataaaccttaatatcattctattattttgaatatggtacgcctattatgtagtctcaatgttatattaccaattatgcaaccattacattaacagaataactcataaagaaaacaattgtatttacttacatttctagtccatgctaagcggtctgtgttaaaacccatcacgttcatgagacaagtcacaaataaattccactctgagtgataactgggtcctactggagcactgtggacattgtaccacttgacaagcatctgaactgctatttcttttggcaggataaacttaattgtttgcaaacatgtttgtactattaaaagcaaagattaattttagtattcttactctgcatgcatttcttttcccctttcaataaccaagtttttttaacttctactatgtaaaggccaattattatgaaaagaaaactgtcattaaagagccaatgagatgcaagcattacctaacccatcatctgaaactaaaaccaactactgaattcaacagggcttgaaaggggtctgaagacagctttttttttttttttttgagagagtgtctcgctctgttgcccaggctggagtgctgtggtgcggtcttggcacactgcaacttctgcctcctgagttcaagcgattctcctgcctcagccaccaagtagccgggattacaggcgtctgccactgccccaggctaatttttgtatttttagtagagaccatgtttcaccatgttggccaggctggtctcaaactcctgacctcatgatccacccgccttggcctcccaaagcactgggattacaggtgtgagccactgtgcccagccaaggacagctttttgatcattaattttgcatcagaaataaagtaaccaaatagcccagtttgccagagacagtcctgatttacatccattgcccagcaattactaactgctccccttcactcttaaagatgttctagctcgggtgacaaattaaaagtcactatgggccaggcatggtgactcacgcctgtaatctaagcactttgcgaggtcaaggtgggtggatcacctgaggtcaggagttcgaaaccagcctgaccaacatggtgaaaccccatttctactaaaaatacaaaaattagttgggcattgtggcaggcacctgtaatcccagctactcaggaggctgaggcaggagaatcacctgaacccgggaggcagaggttgcagtgagccaagatcacgccattgcactccagcctggatgactacagcgaaactgtctcaaaaaaaaaaaaatcactatgaaaaacatacaacttctatgtttatacatttatataaaatactgcctacatacttcagtaaatatataatattcaatatatgcatccacgaatagcaatgcttagctagcattacatgatgttctaaatgacttaacatgcctattaaccaaagctttataactttatttctgatgtcattcagtttctaaaatgtttcacatgctctctgccttaaaagggttaagagttgataccacataatttacaacactctttttttggtaagcggaaacagggtcttcctctgtccccaggctggagtgcagtggtgcaattataactcactgtcacctccagctcctgggctcaagtggtccaccagctcaagcttcccaagtagcaaggactacagatgcatgccagcatgcctggctgattttatttttctttctgtagagaccgagtctcactatgttgtccaagctggtctcaaactcctggcctcaagcaatcccctcacctcagccttccaaagggaggggattacaagcacgagcccaccacacctggccttataccattctcagtggctccacatcaattatagcactacactgtcatacaatgatcccctcagagtggccagggctaccactgtgaagagacccaaatctgcttttagtagtaaataatcccaaactgcaatgtttgtgtactcacatatcctctcttccaggattcttttttccctttccactgtcatgccactgggcccaccctcatcagcatatcctctatcccgtcagtttgcaatatgcaaactcacacagcacaggttggaagcaaataatattaaaataccatataaccaagtatgtcatagctgaatccaaaataagtgtaaacccaa

SEQ ID NO: 3639 - DNA, 4001 bp, Homo sapiens
ttgtgtactcacatatcctctcttccaggattcttttttccctttccactgtcatgccactgggcccaccctcatcagcatatcctctatcccgtcagtttgcaatatgcaaactcacacagcacaggttggaagcaaataatattaaaataccatataaccaagtatgtcatagctgaatccaaaataagtgtaaacccaatgctgcatgagtgtgtgagaaccctttgcaggtaaagtacataaacttatgtgcataaactatggggcttctatttggctataaaggggtaagattttttgtttttatttatttaatttcttccattattatttgtttttatatattttgcttaggcttatcatacttctaggtacctggccttgtgattacgaaataccttttagaaggcaaggaatctctatagcaacttggaataccatttaccagcagtgaaaattcctaaaatgaaaaagttattcttgtctacaatctgccaatgtcttgcctaaccctaaccctaaccctaactctatcacctaggctggagtgcagtggcacgatcttggctcaccgcaacctccgcattctgggttcaagcaattctcctgcctcagactcccaagtagctgagattacagaagtgcaccaccacaccccgctgatttttgtattttcagtagagaaagggtttcaccacgttggccaggctggtctcgaacgaccgacctcaagcgatccacctgcctcagtctcacaaaatgttgggattacaggtgtgagccaccatgcccagcaggcatgtccatatattattatactgcacaatattccccaacagaagtaccttaggccaggccgccgccgccgccgccgcccggccaggtcgaggccgccgcctccgccgccgcccggccaggtcgaggccgccgccgccgccgccgccgccgccgccgccgccgcccggccaggtcgaggccgccgccgccgccgccgccgccgccgccgccgcccgtccaggtggaggccgccgccgccgccgcccggccaggtcgaggccgccgccgccgccgccgccgccgccgccgcccggccaggtcgaggccgccgccgccgccgccgccgccgcccggccaggtcgaggccgccgccgccgccgccgccgcccggccaggtcgaggccgccgccgccgccgccgcccggccaggtcgaggccaaggccgaggccgaggccgaggccgccgccgccgccgccgccgccgccgcccggccaggccgaggccgccgccgccgccgccgccgccgccgccgcagcccggccaggccgaggccgaggccgccgccgccgccgccgccgccgccgccgccgccgccgccgccgccgccgccgcccggccaggtcgaggccgccgccgccgccgccgccgccgcccggccaggtcgaggccgccgccgccgccgccgccgccgccgccgcccggccaggccgaggccgccgccgccgccgccgccgccgccgccgccgcccggccgaggccaaggccgaggccgaggccgccgccgccgccgccgcccggccaggccgaggccgccgccgccgcccggccaggccgaggccgccgccgccgtccggccaggccgaggccgaggccgccgccgccgccgccgccgccgccgcccggccaggccggggccgaggccgccgccgccgccgccgccgccgccgcccggccaggccggggccgaggccgaggccgccgccgccgccgccgccgccgccgccgccgccgcccggccaggccgaggccgaggccgccgccgccgcccggccaggtcgaggccaccgccccgccaggtcgaggccgtcggtctcttcgagatccactcacctttccaggcgacggggcggagccctgcaccgaggcgaggtaccgctccccgtaggccttgctgcgcctcatcgcaccgccaacctggctcccgagacgcgtgaaaccagcgctcagccccgcagcagtcgccaattccaacaggaaagcgcctgaaagccactgacgtagccggcggaggaccactgtgacgcacttgtgtactgcgtcagcactgtgtatccttggcgacgtcggcgctccagctgcactcggccgggctcttggcagcaccctgtgctctgagggtgtcttgcccgccgggcgccgtggctcacgcctgtaatcccaacactttgggaggcggaggcgggcggatcacctgaggtcatgagttggagaccagcctggccaacatggtgaaaccctgtctctaccaaaactacaaaaattagccgggcatggtggcgggcgcctgtaatcccagctattcaggaggctgagacaggagaactgcttgaacctgggaggcggagattgcagtgagctcagatcgtgccactgcactccatcccgggcaacaagagcgatactccgtctcaaaaaaaaaaaaaaaaaaaaaaaggaatataccatggaacctgatacgattgagaaccttaatttaaaaaacactgcataaaaaaggtaaatgctgtcatttcaggtgatcagttgataataaaatgtctacaaacccaaactgaaatcatgcagtaatacatacattaatttttggataatcattaaagaccctagaaaatgtaacagatcctactcttcaaaataattgctattcagtattaaaataaataaagtgaaaggtgttggaaagatagaggaattgataggaataccacagaagtggaagaatagtatgaatatccataaattaatttatattagcaagaaataataatgcttacatcatcagatccagtctcagaaggccttgcttttttgggtgcaatgacaggggaaagtgatccttcaaagtcaaactgaaaagtaaccccaaaagaaaagataaaaatcataaatgcattcctgtcaactgatcaacttaaaggattcggaaatcagttctgccaattatgaaaactgagaaaagccatcaaaactcattttttgatctggaaagtcattatttaaatatctttcttccaggttactgtaaagatgaaatgaaatcatattaatatatgcaaacatctagaacagtgcctgggctcctaaggactgattttaatggtagtttccttccctctcctacttctgtaacgacatagattacatcacatctttggtagaaaaagaaactttaggcatatccacaatataccaagtctcaaaggatcaacccaatatcagtcaaatgttagaactaagcaaacatttatttacagtccacctacagtaaactatctaacaattctatggcagagacaagtagctactctggaaaatcttttttctcctctttctactgaacccacagccagactacatacatacgtctgcctcctttgaagttaggtgtgaccctttgacagagttaattataaatggaagtcactgtcatcacttccaggaccagtccagtcctacccctgctcctccaggctctttgccccttccacctgactggaatgcagtcaaccaacggcaagctttgaaccgaagacaaaagatcctccatcaacctgggttcctgaataactgtgtggcctgtttatctgctaagccctgttatgtaaacaagacagacatttttattgtgtttgagccattgtatcttttgaggcctttctattacaatagtgagcctatcttttaactagtacaactacatcaaagcagttttctgcaagttgctcttcttcaatttcccctggcataatctttgctgccccagctacttcacatggacattgaccatcaactaataaactgtaactctataaatggcaatggctattttcctatgctgaaaaacttacatatttatcaactcactcacctaaacagagttgatttctatataaaaactaaacataggtagcaataaagtgatttttaaaaccgaatgtta

SEQ ID NO: 3640 - DNA, 4001 bp, Homo sapiens
aggtgcctgcctgtagtcctaagtactcaggcaacagaggtaggaggatcatttatgcccaaaaatttgatggcagcctggacaacacagcaagaccctattctaaaaaacaaataaataaaaataagagctgtcaagtagagtttgagaagtaggaatcagctgcagaataagaaaccaacttgacagaacatagaaaaactaaacagaagccatctggaaaaagaaaaactagagaaagaattatatatttttttatttttttattttttggagacagagtctcgctctgtcacacaggctggagtgcagtggcgcaatctctgctcaccacaacctctgcctccagggttcaagcaattctcctgtctcagcctaccgagtaggtgggactacaggcgctgccaccacgcccggctcatttttgtatttttaatagagacggattttcaccatgttggtcaggctggtctctctgcctcccaaagtgctcggattacagacgaagaatatttttaagaagggcaaaagcacatgtgagggagtagaaaaatggcaaaacaagagaagattaacaaatgaaagcacaatggaagactagaaagatatgatatacagacgcatcatcacactccaaaactcagacattctagaaagcatgggcagttcacagatggccagcctctgccaaactgggggagaatactaacctctttatattcttcacagccactgcctcttctccctccattccttaccttctatccaaagcaccctgttttgtcatttcactcaaacctaactttacagaatagcttcacatgttccaaagttactcactagttaatccatattccgttgaaatccccaggttctaatgtaaatgactttaaatttgggggaaaaaaaaagactctaagtgtaagagaggtgaggccgaggccgaggccgccgccgccgcccggccaggccgaggccgccgccgccgccgccgccgccgcccggccaggccgaggccgaggccgaggccgccgccgccgccgcccggccaggccgaggccgccgccgccgccgcccggccaggccgaggccgaggccgccgccgccgccgccgccgccgcacattaaccttttaagttaaagattaagagaaccaacacctctttacagtgaaatgccccaactaaatactaccgtatggcccaccataattgcccccatacttcttacactattcctcatcactcagctaaaaatattaaatacaaattaccatctacccccctcaccaaagcccataaaaataaaaaactatagtaaaccctgagaaccaaagtgaacgaaaatctgttcgcttcattcattgcccccacaatcctaggtctgcccgccgcagtactgatcattctatttccccctctattgatccccacctccaaatacctcatcaacaaccgactaattaccacccaacaatgactaatccaactaacctcaaaacaaatgatagccatacacaacactaaagggcgaacctgatctcttatactagtatccttaatcatttttattgccacaactaatcttctcgggctcctacgccgaggccgccgccgccgccgccgccgcccggccaggccgaggccgaggccgccgccgccgccgccgccgccgcccggccaggccgaggccgaggccgaggccgccgtcgccgccgccgccgcccggccgaggccgaggccgaggccgccgcccggccgaggccgaggccgaggccgccgcccggccaggtcgaggccgccgcccggccaggtcgaggccgccgcccggccaggtcgaggccgccgcccggccaggtcgaggccgtcggtctcttcgagatccactcacctttccaggcgacggggcggagccctgcaccgaggcgaggtaccgctccccgtaggctttgctgcgcctcatcgcaccgccaacctggctcccgagacgcgtgaaaccagcgctcagccccgcagcagtcgccaattccaacaggaaagcgcctgaaagccactgacgtagccggcggaggaccactgtgacgcacttgtgtactgcgtcagcactgtgtatccttggcgacgtcggcgctcgagctgcactcggccgggctcttggcagcaccctgtgctctgagggtgtcttgcccgccgggcgccgtggctcacgcctgtaatcccaacactttgggaggccgaggcgggtgctgtaaaccattcatttgcttatttcaatattttcatttgtatgctttcagataagctgaacttgttccaatctgctatacataggtttgtttatatctttacagtaaatatctcagttaagaattattttctctttgtaaagacattgtgactcagatactacttgtaaagtctataggaacacacagctagtaaatggcataattgaaattcaaatggaaatctgattctaaaatatacttgtagcaacatagctgattcctgttactgtatctgctcctgtaaattttgtaaattcattacaatttttaaaatataaaatattttcatatatttatttagtctttgctaccatgaatagcttcaatgggaatgatgattaattctagaatgtgcttgtcttttacatttctatgatttttagggttaaaataaaccttgttggtttacaaatgattcctgaatgatttctttcctctaaatgctacagcacttcactacaaggtctgcaaagaagctatgtgggggagtgaagtaggaggtgactgagattatgtaattaagttcatatatgtcataatttttcattgttcccactgttttagagaaaagtaacaaaggagaagacatgtgggcgtgtagagaaatgcaaggtggagatattaatgctacagtataatcttctgtgggtgtttagcctggggatgagaaaactaaggagaaccatgccagttgtgttgaaatatttgaagagctgtcatgcagaagagagaatagacttttttctgtaggcccagagggtataactaacattaagggaagaaagtcatagggtagaaaaattttattcaatttaaggaataactttctaatagtgcatagtattggaacaggtggctgcataaagtcccacgaagtgttcattctaatgctgaatacccatgcaccaagaatcctgtggaaatgatgcttgcagggattaaagaatgaagtagaatctaatctaatatagcctcttcctactagaatgccaaactcagaaagactttctctctgttctctctttctctctctctcgtgctctctttgtctaatttatctgtatacctatttaatttccaaaaaatgagattgacaggaagtgtaagagttaaaaagaataatgtgtgtatgcgtgtgcatgtgtgtgtgaaaaaatggattttaaaggtattggatgcccgttgagaatgtttatattcctctaccccttgaggtttatggttagcaaaaaaatagtaacaaagataattttgttatatcttattgtatggcagaaggagatttccatagtagaataaaaaaaacttttaaatcagagataacctgggttcaaattccaactttctcactttcagctttttgaccttgaaaaagtaactgaacctttataaaccttcatttttttactataaaatttggataataaagtaccttaactgtagggttactgagaaattaaatgagacaagtcacatgaagcacactttatattgcctagtatgtagacagcaataataaatcctggcttcatatatttccttactttagtttacattgtttttacaaacgtatcacatcagctgatagaattttgatgtcgtcatttaagtttctggttatctggtgtagaatgcaactgtttttctgatttaagataattcaatcaacaaatttttcttgagctccaattttgctcattctacctttctctcc

SEQ ID NO: 3641 - DNA, 4001 bp, Homo sapiens
tgagccatcgaggccgccgccgggccgggtccaggccaccgcctcaacagagcgcgccagggagcagcgcccgtcgggagccatgacgcctgagccatcgaggccgccgctgggccgggtcgaggccggcgcctcaacagagcgcgccagggagcagcgcccgtcgggagccatgacgcctgagccatcgaggccgccgcagggccaggtcgaggccggcgcctcaacagagcgcgccagggagcagcgcccgtcgggagccatgacgcctgagccatcgaggccgccgcctcaacagagcgcgccagggagcagcgcccgtcgggagccatgacgcctgagccatcgaggccgccgccgggccgggtcgaggccgccgcctcaacagagcgcgccagggagcagcgcccgtcgggagccatgacgcctgagccatcgaggccgccgcagggccgggtcgaggccgccgcctcaacagagcgcgccagggagcagcgcccgtcgggagccatgacgcctgagccatcgaggccgccgccgggccgggtcgaggccgccgcctccacagagcgcgccagggagcagcgcccgtcgggagccatgacgcctgagccatcgaggccgccgcagggccaggtcgaggctgccgccgcctggccaggtcgaggccgccgccgccgcctcaacagagcgcgccaggtaacagcgccggtcgggagccatgacgcctgagccatcgaggccgccgcagggccaggtcgaggccggcgcctcaacagagcgcgccagggagcagcgcccgtcgggagccatgacgcctgagccatcgaggccgccgcctcaacagagcgcgccagggagcagcgcccgtcgggagccatgacgcctgagccatcgaggccgccgccgggccgggtcgaggccgccgcctcaacagagcgcgccagggagcagcgcccgtcgggagccatgacgcctgagccatcgaggccgccgcagggccaggtcgaggccgccgcctcaacagagcgcgccagggagcagcgcccgtcgggagccatgacgcctgagccatcgaggccgccgccgggccgggtcgaggccgccgcctcaacagagcgcgccagggagcagcgcccgtcgggagccatgacgcctgagccatcgaggccgccgctgggccgggttgaggccgccgcctcaacagagcgtgccagggagcagcgcccgtcgggagccatgatgcctgagccatcaaggcagccgccgggccgggtcgaggcagccgcctccacagagcgcgccagggagcagcgcccgtcgggagccatgacgcctgagccatcgaggcagccgccgggccaggtcgaggccgccgcctcaacagagcgcgccagggagcagcgcccgtcgggagccatgacgcctgagccatcaaggcagccgccgggccaggtcgaggccgcggcctcaacagagcgcgccagggagcagcgcccgtcgggagccatgacgcctgagccatcgaggccgccgcagggccaggtcgaggccggcgcctcaacagagcgcgccagggagcagcgcccgtcgggagccatgacgcctgagccatcgaggccgccgcagggccaggtcgaggccggcgcctcaacagagcgcgccagggagcagcgccggtcgggagccatgacgcctgagccatcgaggccgccgcagggccaggtcgaggccgccgcctccacagagcgcgccagggagcagcgctcgtcgggagccatgacgcctgagccatcgaggccgccgccgggccgggtcgaggccgccgcccggccaggtcgaggccgtcggtctcttccagacccactcacctttcgaggcgacggggcggagccctgcaccgaggcgacgtaccgctccccgtaggccttgctgcaactcatcgcgccaccaacctggctcccgagatgcgtgagaccagcgctcagccccgcagcagtcgccaattccaagaggaaagcgcctgaaagccactgaggcagcggcgtagccggcggaggaccactgtgacgaacttgtgtcctgcgtcaacagtgtgtggaacgttggcgacttcggcgctcgagctgcactcggctgggctcttggcagcaccctgtgctctgagggtgtcttgcccgccgggcgccgtggctcacgcctgtaatcccaacactttgggaggctgaggcgggcggatcacttgaggtcaagagttcaagaccagcctggccaacatggtgaaagcccatctctactaaaaatacaaaaattagccaggtgtggtggcaggtgcctgtagtcccagctatttgggaggctgaggcaggagaatcgcttgaacccaggaggtggaggttgcagtacggtgagattgccccactgtactctagcctggatgacagggcaagactccatctcaaaaaaaaaaaaaaaaaaaaaaaaaaaaagactaaactgtgatttgaggcagctgaggaactaagagcccaggaagaaaggacagtaatgaaaaagccaacaaatgagaccagtatttagtggtatttcccctataggcaattatttattcaaaaatacaggaacagcatttatttgcttaactgcagatatgcaaacaaaaaatttaaatggtcttagttactatctacatgcagatgcttccaatcttaatctctagtcatgaccactgatccttttttgattcctttaattcaatttatatatctctaagtgaatatcttgtcaacactgacaatcaagactaagatgtatttattctattccagattctactctaaaagtcaccaggaaaaattcagctccactggtcctggctctaagtctactagcaaaatcttccagagaagtggaaaagccatcagccaatgtgttagactatcatttccatgaccttacacctatcaaaaaggcactattaccaggcttatagaattctaaaaaagttggaaaccattttccattataaaagaaattcttccaaatcacacaaaacactctgacgcttctccaattccccctttcaatgttccgcaaatgtgctggtttgaaggaaaaaaaattcaatgtggcacatgtttaaaaatataatgaagacatagacattatcaaatacaactgatagcactaaccttccctttgaaccgtccctaaacatccacactcacatgtcctttaaatacaaaccacttttctccaggcttcctaacttggtaaatccaggtaccttcccaggtcgttcagagaattgggagcctcgttccacatcacttttccccagcccagcagcacaaaaccaatcagctgacaaattcatttccacctctcaaggcctctcatattaatccctcctttccacacatatactgccctagctcagaccctctcatacttcttaaactgacacagacaacctcacttggaggctaactggtctccttatctttaatcccaaaatacacctatttaccacacagatccaaaacctcgtaactcctttctcaaaatcctgtaatgccctgtcaattgcattcagaagaaaaccaccttttcatcctttctccctttaagagcacattggtaagagtgtaaatcccagttctaccacttagtaggtttatttcatttgtaacctctatctcatttgtaaaaaaaaagaatcatagtactctcttctcaataaaactgttctaaggaaataattaatactaataaagcactgagaacaatgcctagcacatagaaaatgcccaaaaaaggttattattgttatccaaaccctatcctgcctcaccctacagactacttgtacttttataagtatttattctacagatttattgagtccttatgactaggagatgaagatacaaatatccattaaaaaatgttccgcattatctagccttcctgcctgtgcctgtgtggtttctccttgccct

SEQ ID NO: 3642 - DNA, 4001 bp, Homo sapiens
aggccgccgcggggccgggtcgaggccgccgcctcaacagagcacgccagggagcagcgccggtcgggagccatgacgcctgagccatcgaggccgccgccgggccgggtcgaggccgccgcctcaacagagcgcgccagggagcagcgcccgtcaggagccatgatgcctgagccatcgaggcagccgccgggccaggtcgaggccgccgccgcccggccaggtcgaggccgctgcctcaacagagcgcgccagggagcagcgcccgtcgggagccatgatgcctgagccatcgaggccgccgccgggccaggtcgaggccgccgccgcccggccaggtcgaggccgctgcctcaacagagcgcgccagggagcagcgcccgtcgggagccatgacgcctgagccatcgaggccgccgccgggccgggtcgaggccgccgcctcaacagagcgcgccagggagcagcgcccgtcgggagccatgacgcctgagccatcgaggccgccgcggggccgggtcgaggccgccgcctcaacagagcacgccagggagcagcgccggtcgggagccatgacgcctgagccatcgaggccgccgccgggccgggtcgaggccgccgcctcaacagagcgcgccagggagcagcgcccgtcgggagccatgatgcctgagccatcgaggccgccgccgggccaggtcgaggccgccgccgcccggccaggtcgaggccgctgcctcaacagagcgcgccagggagcagcgcccgtcgggaaccatgatgcctgagccatcgaggccgccgccgggccaggtcgaggccgccgccgcccggccaggtcgaggccgctgcctcaacagagcgcgccagggagcagcgcccgtcgggagccatgacgcctgagccatcgcggccgccgccgggccgggtcgaggccgccgcctcaacagagcgcgtcagggagcagcgcccgtcgggagccatgatgcctgagccatcgaggccgcctccgggccaggtcgaggccgccgccgcccggccaggtcgaggccgctgcctcaacagagcgcgccagggagcagcgccggtcgggaggcatgacgcctgagccatcgaggccgccgccgggccgggtcgaggccgccgcctcaacagagcgcgccagggagcagcgcccgtcaggagccatgacgcctgagccatcgaggccgccgccgggccaggtccaggccgccgccgcccagccaggtcgaggccgccgcctcaacagagcgtgccagggagcagcgcccgtcgggagccatgacgcctgagccatcgaggccgccgccgggccaggtcgaggccgccgcctcaacagagcgcgccagggagcagcgcccgtcgggagccatgacgcctgagccatcgaggccgccaccgggccgggtcgaggcctccgcctcaacagagcgcgccagggagcagcgcccgtcgggagccatgacgcctgagccatcgcggccgcggccgggccgggtcgaggccgccgcctcaacagagcgcgccagggagcagcgcccgtcgggaggcatgacgcctgagccatcgaggccgccgccgggccgggtcgaggccgccgcctcaacagagcgcgccagggagcagcgcccgtcgggagccatgacgcctgagccatcgaggccgccgccgggccgggtcgaggccgccgcctcaacagagcgcgccagggagcagcgccggtcgggagccatgacgcctgagccatcgaggccgccgccgggccaggtcgaggcctccgccgcccggccaggtcgaggccgtcggtctcttcgagatccactcacctttcgaggcgacggggcggagccctgcacggaggcgacgtaccgctccccgtaggccttgctgcaactcatcgcgccaccaacctggctcccgagacgcgtgaaaccagcgctcagccccgcagcagtcgccaattccaacaggaaagcgcctgaaagccactgactccgcgtagccggcggaggaccactgtgacgaacttgtgtcctgcgtcaacagtgtgtggaacgttggcgacctcggcgctcgagctgcactccgctgggctcttggcagcaccctgtgctctgagggtgtcttgcccgccgggcgccgtggctcacgcctgtaatcccaacactttgggaggctgaggcgggcggatcacttgaggtcaagagttcaagaccagcctggccaacatggtgaaagcccatctctactaaaaatacaaaaattagccaggtgtggtggcgggtgcctgtagtcccagctatttgggaggctgaggcaggagaatcgcttgaacccaggaggtggaggttgcagtacggtgagattgccccactgtactctagcctggatgacagggcaagactccatctcaaaaaaaagaaaaaaaaaaaaaaaaaaaaaaaaagactaaactgtgatttgaggcacctgaggaactaagagcccaggaagaaaggacagtaatgaaaaagccaacaaatgagaccagtatttagtggtatttcccctataggcaattatttattcaaaaatacaggaacagcatttatttgcttaactgcagatatgcaaacaaaaaatttaaatggtcttagttactatctacatgcagatgcttccaatcttaatctctagtcatgaccactgatccttttttgattcctttaattcaatttatatatctctaagtgaatatcttgtcaacactgacaatcaagactaagatgtatttattctattccagattctactctaaaagtcaccaggaaaaattcagctccactggtcctggctctaagtctactagcaaaatcttccagagaagtggaaaagccatcagccaatgtgttagactatcatttccatgaccttacacctatcaaaaaggcactattaccaggcttatagaattctaaaaaagttggaaaccattttccattataaaagaaattcttccaaatcacacaaaacactctgacacttctccaattccccctatcatggggctggcagcagccgctttgcgtcctgaatgtcatgacagtgatgataacagtaatgatgataacagcaatgatgaagtctcacatttaaaattttcaagtcactcatcacatcccaagtcactcccttcattaccttttatttatactggagtcatcctgtgtgcctcagtcagaccattttgtatgtacaatgaccgtaagtagatcaaccaaactttttggatgatgtcaactatttaaggctttttaaaaatataaggtacttgagaattcattttttccccagctggtgtaagagataaacaatttgaacttgtcagaacatcatatcatttgaataggaggcttaaatttttaaaggccagaaaaatgctaatgagattagacatgatctatttttttctagacactggcaccttttgcacttcaattagatatccagacacgcccataacttagcagtcataggtaatgttgtcggaaaaagagtatgaggtgggttggttgtacaagaagaacaggttagaatttgctttcttctgagcttaagtactaaagtaaaaagcaggtagattcatcatcaggaagaatgtaggcagctaatctgagaagtaaaagactataaaaataagagaaacaaatgaaaatttagctttaactgagagctgatgaacttaggagactcaacattgctttgctaaatagtgatattaaaatattgctagacaaatttttcttaagtgtaggatttaatttggaactgagtaggagcaatactacaatatgacatcatcagtatttgccctaatccctaccacaaaaagatgactgtaaaggaagaactcttaaaaaactgcttggccctgcagtaatgcttccctttcaaatcggtaacttcctccaccatgcattacttggaagatgcagtaattt

SEQ ID NO: 3643 - DNA, 4001 bp, Homo sapiens
actttgagaagtaggaatcagctgcagaataagaaaccgacttgacagaacatagaaaaactaaacagaagccatctggaaaaagaaaaactagagaaagaattatattttttttctttttttcttttttggagacagagtctcgctctgtcacacaggctggagtgcagtggcgcaatctctgctcaccacaacctctgcctccagggttcaagcaattctcctgtctcagcctaccgagtaggtgggactacaggcgctgccaccacgcccggctcatttttgtatttttaatagagacggattttcaccatattggtcaggctggtctctcggcctcccaaaatgctcggattacagacgaagaatatttttaagaagggcaaaagcacatgtgagggagtagaaaaatggcaaaacaagaggagactaacaaatgaaagcgcaatggaagactagaaagatatgatatacagacgcatcatcacactccaaaactccgacattctagaaagcatgggcagttcacagatggccagcctctgccaaactgggggagaatactaacctcttcatattcttcacagccactgcctcttctccctccattctttaccttctatccaaagcaccctgttttgtcatttcactcaaacctaacttcacagaatagcttcacatgttccagttactcactagttaatccatattccgctgaaatccccaggttctaatgtaaatgactttaaatttgggggaaaaaaaagactctaaatgtaagagaggtgtcataataaccaatcgtcaaaattctgccaccactccactttatttaatggagaagttatgtagttgaaagaacattctaacttctgtctagaccagtggtttttaatcttttggaagccaaggtccccactaagaatctcagaaaggctccaaacttgctttttttttttttaagcttgtttaaaaaaaaaaaaatcaggctgagcagagtggctcacacctgtaatctcagcattatttacatgtaaagaggaaaaatacccttaaaacatctgtggaaaaggttaaaaattgcaagccatactaacgatttgtaagaactttagaattttttttttttaagcaaaggcagctaccaaagtgttccgggcggggaggggggcgagggaggtgagtatgaggagtggagtggagctggacccttacaaagggacagcgacaaacacctcatactcaaaacaaggggactttccgtgtcatttgcgccgtcgggccattgcaaatgtccgcgctgagatgcctaccttgtcactcgacgcagccgccaaagctcacccggagctgcgtcagtccccactgggttcctccaggccaaggaggtacgacctccgccgcagcatataaagtaaatgtccaggagatgggaagaaacccgccgatacagcacccgggtgcccaagcccccgagaactaggccgcgcgggtactacggggtgcgcgatcggccagaaagcccgggccaggacgggcccaggagcgagcaccgtcgggaacaagcgtcgggaacaagccgggattaagaggaagcgccggcgccaacggtctcccgcccgccgcggtccccccaggactcttcctgcgcttgcaagcgccacgccgcccacaggactgcgccagccggccggcgcctcaacagagcgcgccacggagcagcgcccctcgggagacatgacgcctgagccatcgaggcggccgccgccgccgccccccccgccgccgccgccgccgccgccgccccccggccgggtcgaggccgccgtcgctctcttcgagacccactcacctgtcgaggcgacggggtgagacccagcaccgaggcgacgtaccgctccacatcggccttgctgcgcctcatcgcgccgccaacctggctcccgagacgcgtgcgagcaccgctcagccccgcagcagtcgccacttccaagaggaaagtgcctgcaagccactgaagcagcggcgtagccggcggaggcccactgtgacgagcgtgcggcgccgcccacggaggcccactgtgacgaacctgcgttctgcctcagcactgtgtatcctcggcgacgtcggcgctccagctgcactcggccgggctcgtggcgccgccctgtggtctgagggtgtcttgacatgatcttatctatagaaaaccttaatgaaacctcgaaaaaaaaagacctaaactatcagtgataataaatgagttcaaagagattgtaccatacgaggtcaactaaaaaaatgagatgtctacttatacaccagcaaggaacaattcaagtaaaattaagtaaacaattccatttataatattatcaaaaataataaaataattatgaataaatttaacccaaaagtgtaagacttgtagactggaaactacagaacactgttgaaggaaattaaagaggagctaaatcaatggaaagacatcctgtgttcattaattggatgtaaacatgtctacacaaaaacttgtatacaggccaggcatagtggctcacgcctgtaatcccagcactttgggagtttttgatgggaggatcacttgagtccaggaatttgagaccagcctgggcaacacagcgagacccccatctctacaaaaaagaaaaaacaaaaacaaaagaaaacctatacatgaatgtttatagcagtactatttttattagtaaaaggtggaaacaatccaaatttccatctactgaagatggatttttaaaatgtggtattattgggcacagacacacgtgcctgtaggcccagctactggggaggttgaggcaggagggtcgcttgagccggagagtttgaagctgcagtttgcagctgcagtgatgctccttgatccatgcaggagctgtgatcaggcctgtgaagagccactaaactccagcctgggcgacatagtgagatctctgtctcaaagaaaaatgtggtatagccatacaatagaatattacttttgcataaaaaataatgaagtaccaatgcatactacaacatgaatcagccttgaaaacattattctaaattaaaggtgccaatcacaaaacctcatatatcatttcatttatatgaaatatccagagtaggcaaactcaaagacacagaaagtagactagtgattgccaagggctgggtggaggggaaatctgggagtgcatgtgactgccaacgtgaatggagtctctcgttggggtgatagagatattttggaattagattttggggaaggctgtaaaacattgcaaatttactaaaaaaaaaaaaatcattgaatgaaattaaatcctatggagatgataggtattttcattttggccaggcaatctacctgattaggttcaagccacaagttcccacccctccattctgcagtctggttccaaagtcagttcagtgtccagagtcttcacaggactattcagttctgtctgacttgtgcaccacccagtggccagttgtgtctgtgggtgatggtctctcagttcagctgtcaatctttggtgtgttgaacaggacgagatctatgcaggagcagctcaagaatgagccctggggtttatagacaggttaatggggttgcttcactgattaactctctctcagcaattaccctgttgctttcatttgctgaggcttctctttttagtcttccaagcagaaaacaggctttcggtatctggctctaccatgcatttctacatctgaagccaagcagtgggaggactgaattggaagagaagcaacatggattgtttctgccctcttgggaccacagctctgtcagttggagaaggttccctcctgcgtcttggctcctgggctcctcttggggctggtgccagtgccactgtgggactgcttgtgggctgaggtatgagagaacagggaaaagaaaaatggggaggaacgaacttctggattccctcgga

SEQ ID NO: 3644 - DNA, 4001 bp, Homo sapiens
taagagctgtcaagtagactttgagaagtaggaatcagctgcagaataagaaaccgacttgacagaacatagaaaaactaaacagaagccatctggaaaaagaaaaactagagaaagaattatattttttttctttttttcttttttggagacagagtctcgctctgtcacacaggctggagtgcagtggcgcaatctctgctcaccacaacctctgcctccagggttcaagcaattctcctgtctcagcctaccgagtaggtgggactacaggcgctgccaccacgcccggctcatttttgtatttttaatagagacggattttcaccatattggtcaggctggtctctcggcctcccaaaatgctcggattacagacgaagaatatttttaagaagggcaaaagcacatgtgagggagtagaaaaatggcaaaacaagaggagactaacaaatgaaagcgcaatggaagactagaaagatatgatatacagacgcatcatcacactccaaaactccgacattctagaaagcatgggcagttcacagatggccagcctctgccaaactgggggagaatactaacctcttcatattcttcacagccactgcctcttctccctccattctttaccttctatccaaagcaccctgttttgtcatttcactcaaacctaacttcacagaatagcttcacatgttccagttactcactagttaatccatattccgctgaaatccccaggttctaatgtaaatgactttaaatttgggggaaaaaaaagactctaaatgtaagagaggtgtcataataaccaatcgtcaaaattctgccaccactccactttatttaatggagaagttatgtagttgaaagaacattctaacttctgtctagaccagtggtttttaatcttttggaagccaaggtccccactaagaatctcagaaaggctccaaacttgctttttttttttttaagcttgtttaaaaaaaaaaaaatcaggctgagcagagtggctcacacctgtaatctcagcattatttacatgtaaagaggaaaaatacccttaaaacatctgtggaaaaggttaaaaattgcaagccatactaacgatttgtaagaactttagaattttttttttttaagcaaaggcagctaccaaagtgttccgggcggggaggggggcgagggaggtgagtatgaggagtggagtggagctggacccttacaaagggacagcgacaaacacctcatactcaaaacaaggggactttccgtgtcatttgcgccgtcgggccattgcaaatgtccgcgctgagatgcctaccttgtcactcgacgcagccgccaaagctcacccggagctgcgtcagtccccactgggttcctccaggccaaggaggtacgacctccgccgcagcatataaagtaaatgtccaggagatgggaagaaacccgccgatacagcacccgggtgcccaagcccccgagaactaggccgcgcgggtactacggggtgcgcgatcggccagaaagcccgggccaggacgggcccaggagcgagcaccgtcgggaacaagcgtcgggaacaagccgggattaagaggaagcgccggcgccaacggtctcccgcccgccgcggtccccccaggactcttcctgcgcttgcaagcgccacgccgcccacaggactgcgccagccggccggcgcctcaacagagcgcgccacggagcagcgcccctcgggagacatgacgcctgagccatcgaggcggccgccgccgccgccccccccctccccccccggccgggtcgaggccgccgtcgctctcttcgagacccactcacctgtcgaggcgacggggtgagacccagcaccgaggcgacgtaccgctccacatcggccttgctgcgcctcatcgcgccgccaacctggctcccgagacgcgtgcgagcaccgctcagccccgcagcagtcgccacttccaagaggaaagtgcctgcaagccactgaagcagcggcgtagccggcggaggcccactgtgacgagcgtgcggcgccgcccacggaggcccactgtgacgaacctgcgttctgcctcagcactgtgtatcctcggcgacgtcggcgctccagctgcactcggccgggctcgtggcgccgccctgtggtctgagggtgtcttgacatgatcttatctatagaaaaccttaatgaaacctcgaaaaaaaaagacctaaactatcagtgataataaatgagttcaaagagattgtaccatacgaggtcaactaaaaaaatgagatgtctacttatacaccagcaaggaacaattcaagtaaaattaagtaaacaattccatttataatattatcaaaaataataaaataattatgaataaatttaacccaaaagtgtaagacttgtagactggaaactacagaacactgttgaaggaaattaaagaggagctaaatcaatggaaagacatcctgtgttcattaattggatgtaaacatgtctacacaaaaacttgtatacaggccaggcatagtggctcacgcctgtaatcccagcactttgggagtttttgatgggaggatcacttgagtccaggaatttgagaccagcctgggcaacacagcgagacccccatctctacaaaaaagaaaaaacaaaaacaaaagaaaacctatacatgaatgtttatagcagtactatttttattagtaaaaggtggaaacaatccaaatttccatctactgaagatggatttttaaaatgtggtattattgggcacagacacacgtgcctgtaggcccagctactggggaggttgaggcaggagggtcgcttgagccggagagtttgaagctgcagtttgcagctgcagtgatgctccttgatccatgcaggagctgtgatcaggcctgtgaagagccactaaactccagcctgggcgacatagtgagatctctgtctcaaagaaaaatgtggtatagccatacaatagaatattacttttgcataaaaaataatgaagtaccaatgcatactacaacatgaatcagccttgaaaacattattctaaattaaaggtgccaatcacaaaacctcatatatcatttcatttatatgaaatatccagagtaggcaaactcaaagacacagaaagtagactagtgattgccaagggctgggtggaggggaaatctgggagtgcatgtgactgccaacgtgaatggagtctctcgttggggtgatagagatattttggaattagattttggggaaggctgtaaaacattgcaaatttactaaaaaaaaaaaaatcattgaatgaaattaaatcctatggagatgataggtattttcattttggccaggcaatctacctgattaggttcaagccacaagttcccacccctccattctgcagtctggttccaaagtcagttcagtgtccagagtcttcacaggactattcagttctgtctgacttgtgcaccacccagtggccagttgtgtctgtgggtgatggtctctcagttcagctgtcaatctttggtgtgttgaacaggacgagatctatgcaggagcagctcaagaatgagccctggggtttatagacaggttaatggggttgcttcactgattaactctctctcagcaattaccctgttgctttcatttgctgaggcttctctttttagtcttccaagcagaaaacaggctttcggtatctggctctaccatgcatttctacatctgaagccaagcagtgggaggactgaattggaagagaagcaacatggattgtttctgccctcttgggaccacagctctgtcagttggagaaggttccctcctgcgtcttggctcctgggctcctcttggggctggtgccagtgccactgtgggactgcttgtgggctgaggtatgagagaacagggaaaagaaaaatggggaggaacgaacttctggattccctcggaa

SEQ ID NO: 3645 - DNA, 4001 bp, Homo sapiens
ctcaatatccacagggttgctggaagcgcaaaataagataacctatgcttagttatgataagagacacaattatgctactattataatcatggtcatccgtgagtttctggttttttttttttttttctggagtctccctctgtcgcccaggctggagtgcagtagcgcgatctcggctcactagaacctccgcctcccgggttcaagcgactctcctgcctcagcctcccaggtagctgggactacaggcgtgcgccaccacgtccggctaactttatttgtatttttagtagagacaaggtttcaacatgttagccaggctggtctcgaactcctgacctcaggcaatccgccctcctcggcctcccaaagtggtgggattacaggcgtgagccactgcgcccggccaatatccttttaacatcaacaataaaaagtgacttgtagctaacatttagtgctatgtgtcaagcaataacctaaatgtttaaaatggatcatcctatcaaattctatcaatgttacaactccatctatggatgaaaagtgtaagtggccccaaatacccagcttataaacgacagtgctgtgattattcaagccaaagcaaactgactcaagattctgcgcacatccacctttaatagcttcttccgtcactctttagatccaatgactaaagtcttattgaatccaaaatagatcacattatttacctgtaaagaggaaaaataccctaaaaacacttgtggaaaaggttaaaaattgtaagccatactaacgatttgtaagaactttagaattttttttttttaagcaaaggcagctaccaaagtgttccgggcggggaggggggcgagggaggtgagtatgaggagtggagtggagctggacccttacaaagggacagcgacaaacacctcatactcaaaacaaggggactttccgtgtcatttgtgccatcgggccattgcaaatgtccacgctgagatgcctaccttgtcactcgacgcagccgccaaagctcacccggagctgcgtcagtccccactgggttcctccaggccaaggaggtacgacctccgccgcggcatataaagtaaatgtccaggacatgggaagaaacccgccgatacagcacccgggtgcccaagcccccgagaactaggccgcgcgggtactacggggccagaaagcccgggccagggcgagcccacgagcgagcaccgtcgggaacaaaccgggagaaagaggaagagccggcgccaaaggtctcccgcccgccgcggtccccccaggactcttcctgcgcttgcaagcgccacgccgcccacaggactgcgctagccggcctccgcctcaacagagcgcgccagggagcagcgccctcgggagccatgacccctgacccatcgaggccgccgccgggccgggtcgaggccgccgcctcaacagagcgcgccagggagcagcgccctcgggagccatgacccctgacccatcgaggccgcccccgggccgggtcgaggccgccgcctcaacagagcgcgccagggagcagcgccctcgggagccatgacccctgacccatcgaggccgccgccgggccgggtcgaggccgccgcctcaacagagcgcgccagggagcagcgcccgtcgggagccatgacccctgacccatcgaggccgccgccgggccgggtggaggccgccgcctcaacagagcgcgccagggagcagcgcccgtcgggagccatgacccctgacccatcgaggccgccgccgggccgggtcgaggccgccgccgcccggccgggtcgaggccgccgctctcttccagacccactcacctgtcgaggcgacggggtgagacccagcaccgaggcgacgtaccgctccacatcggccttgctgcgcctcatcgcgccgccaacctggctcccgagacgcgtgcgagcaccgctcagccccgcagcagtcgccacttccaagaggaaagtgcctgcaagccactgaagcagcggcgtagccggcggaggcccactgtgacgagcgtgcggcgccgcccacggaggcccactgtgacgaacctgcgttctgcctcagcactgtgtatcctcggggacgtcggcgctccagctgcactcggccgggctggtggcgccgccctgtggtctgagggtgtcttgacatgatcttatctatagaaaaccttaatgaaagctcaaaaaaaaaaaaaaaaagacaaaccatcagtgataataaatgagttcaaagagattgtaccatacgaggtcaactaaaaaaaatgagatgtctacttatacaccagcaaggaacaattcaagtaaaattaagtaaacaattccatttataatattatcaaaaataataaaataattatgaataaatttaacccaaaagtgtaagacttgtagactggaaactacagaacactgttgaaagaaaagcaagtgattcatcccccggtgccaaacagcagacgcaggtgttaccagtctggtggggcgcccgagctggggacctggggtcctctgggaggggcaagaaggcagcgatgctggcccccgcctccatctgcccatcccatctgcatccacacaccgccctgcggtagctgcttgcagcccttctctgtcagtttctccattatcttctggtttggtgataaatgagagttcccatcgggggtgccaccctctgtgtgacggggagcagagaagaccctgcatctgagtccttctgggggaagagcgaaaatgctgggaccagccccagctgtcagggggtctccaatcccagcagggaggccccacgcatggctaggatgccccagaccccagggactgcacgaagtggaaaggagggcccccggtcctaactaagggttcagacccccgcaacacacatccaggcacacccccaccccctaggcctggttctaggtctgccagctccgagaaggcccctaacaatggtgcagtcgcaggggctgtgtcccaggccgggctcacgcccagtcccgctgccccgggggtagatggggcccctggcccgcgcgctgtggagccctggagtgtctgtgcgccccttccttggagggcagccgctgaggggctgctgcgggactggggagcctcctggcagcaagcgctcccaatgcgtagcgggacgctgtgatggggacaagatcctggctttgaagaaagccctttccaccctgtccatgtgggggtctcccggtgcccctgagccagcggccccctcctgcaggctccggaggactcccctgcctgcatctggtctcgcatttcctccgtgacctccaagctcccactgggggcacacggctgccctgctgaccccaactctggccctgtgccggtggtgggcagcatctggcacgggggaggcgccgtttcttccacactcgcgcgtcctcagcccagatcatccggtgaagtttccccagcaagtggctccccctgccccctccaccctgccaagtgtggtccctgggcccccgccttcccttctcggcctctgcccctgggtctggggcctgcatccagccatccacgctcagggaggccacctcctccctcgctctcgaccaccacaaagctgcccgggaccttgttctatcctttccaaaagtcctcaggacctgcctgtctacggagctcccaaaacgccctgtgagctctcccgggcccctcctctccttgctaataatgtcccacacggtgctgcctgcctggccccaaaagaaaaggaccctggagtgagttctgaacacaaactcgatgaaagtggccccctgctccacctgccgagtcggcccctcctcagactctccccttgggcagggaaacctgccggggcctgactgtttcttcctgaaacagcctcaggctggaaggagagggatccacccttggccattgaagcattcagcaggaatcagccctcggggacc

SEQ ID NO: 3646 - DNA, 4001 bp, Homo sapiens
ccccaggactcttcctgcgcttgcaagcgccacgccgcccacaggactgcgccagccggccggcgcctcaacagagcgcgccacggagcagcgcccctcgggagacatgacgcctgagccatcgaggcggccgccgccgccgccccccccgccgccgccgccgccgccgccgccccccggccgggtcgaggccgccgtcgctctcttcgagacccactcacctgtcgaggcgacggggtgagacccagcaccgaggcgacgtaccgctccacatcggccttgctgcgcctcatcgcgccgccaacctggctcccgagacgcgtgcgagcaccgctcagccccgcagcagtcgccacttccaagaggaaagtgcctgcaagccactgaagcagcggcgtagccggcggaggcccactgtgacgagcgtgcggcgccgcccacggaggcccactgtgacgaacctgcgttctgcctcagcactgtgtatcctcggcgacgtcggcgctccagctgcactcggccgggctcgtggcgccgccctgtggtctgagggtgtcttgacatgatcttatctatagaaaaccttaatgaaacctcgaaaaaaaaagacctaaactatcagtgataataaatgagttcaaagagattgtaccatacgaggtcaactaaaaaaatgagatgtctacttatacaccagcaaggaacaattcaagtaaaattaagtaaacaattccatttataatattatcaaaaataataaaataattatgaataaatttaacccaaaagtgtaagacttgtagactggaaactacagaacactgttgaaggaaattaaagaggagctaaatcaatggaaagacatcctgtgttcattaattggatgtaaacatgtctacacaaaaacttgtatacaggccaggcatagtggctcacgcctgtaatcccagcactttgggagtttttgatgggaggatcacttgagtccaggaatttgagaccagcctgggcaacacagcgagacccccatctctacaaaaaagaaaaaacaaaaacaaaagaaaacctatacatgaatgtttatagcagtactatttttattagtaaaaggtggaaacaatccaaatttccatctactgaagatggatttttaaaatgtggtattattgggcacagacacacgtgcctgtaggcccagctactggggaggttgaggcaggagggtcgcttgagccggagagtttgaagctgcagtttgcagctgcagtgatgctccttgatccatgcaggagctgtgatcaggcctgtgaagagccactaaactccagcctgggcgacatagtgagatctctgtctcaaagaaaaatgtggtatagccatacaatagaatattacttttgcataaaaaataatgaagtaccaatgcatactacaacatgaatcagccttgaaaacattattctaaattaaaggtgccaatcacaaaacctcatatatcatttcatttatatgaaatatccagagtaggcaaactcaaagacacagaaagtagactagtgattgccaagggctgggtggaggggaaatctgggagtgcatgtgactgccaacgtgaatggagtctctcgttggggtgatagagatattttggaattagattttggggaaggctgtaaaacattgcaaatttactaaaaaaaaaaaaatcattgaatgaaattaaatcctatggagatgataggtattttcattttggccaggcaatctacctgattaggttcaagccacaagttcccacccctccattctgcagtctggttccaaagtcagttcagtgtccagagtcttcacaggactattcagttctgtctgacttgtgcaccacccagtggccagttgtgtctgtgggtgatggtctctcagttcagctgtcaatctttggtgtgttgaacaggacgagatctatgcaggagcagctcaagaatgagccctggggtttatagacaggttaatggggttgcttcactgattaactctctctcagcaattaccctgttgctttcatttgctgaggcttctctttttagtcttccaagcagaaaacaggctttcggtatctggctctaccatgcatttctacatctgaagccaagcagtgggaggactgaattggaagagaagcaacatggattgtttctgccctcttgggaccacagctctgtcagttggagaaggttccctcctgcgtcttggctcctgggctcctcttggggctggtgccagtgccactgtgggactgcttgtgggctgaggtatgagagaacagggaaaagaaaaatggggaggaacgaacttctggattccctcggaatgttaggagacccttttcccgttacttgagccagaaatagagggcatcttctggagctctttctatctgcaccctggtgcccactgccaggttagtcacgggatgccataggggaaacatggttatctcaccaccggtttggtggtacttcaagttctggtcttcttgggaaagctgcctgcaactatttagttttcaatgtcttccaatagctgctccatgcattctgtactgtctcctggctggactccatgcaggaagcctgtctcctccacagtgtgcactcactcaggtcattgctaagttttattgttggcatttgtttgctttaatttttcagactgactccctagaggtcgcttcttgtttgcatagttcgtcagtcaaacatcagttaaagccaatatggtttccaccatctgctgctggatctatgtgcaatggggaggaggcacgccccgggccatttgcaagggtgttccggcttttacttcctaacactggcaccggcacacacacaggctgtgtgccctgggcatatggacatggcttgggcttgctctaatctctgccagctatgagccttcagtccatttgggtagtgtgaagagtttactaagctccctctggctctccgacctcccggagctccctcttacatccatgactaatctgcaggtcgtttgctcgtctccaaaggcccagagcctcaggctaggagtcagtggcctttcttcctcctggtcactgatatcaccaccttaactagccatgctgcaaatcaaaaccttcctcactcttgcctccagcccctgcagcgaggtggcaggggagcttatctccacaggctgccctgctgggggccgctgtgtgtgttatcaacagctggggtaaatgggggtagcagcctgggcaaagatgccacggacacaggctggtcttatccaaggctcactttaattcttcttttttttctttagggacagggtctgtctcactctgttgcccaggttggagtgcagtggtgtgatcacagctcactgcagcctcaatctcctgggctcaaatgattctcccgccttagcctcccatgtagctgggaccacaagtgtgcaccaccatgccttttttgattttttttttgtacagacgggggtctcaccaagttgcccaggctgtttttgaactcctgagctcaagtggtccttctgcttcagcctcccaaagtgctggggttacaggcgtgagccaccgcgcctggccagctttcattcttaaacacatccccatttgtgccgtgcctttggtaaaattgcagaatgctaaatggtttgtccagctatacagttacattttggaaagatttgttgacctcctcacttcatcatgctagaagtgggaactttgattactctttaaagaatctgaagatgaagggaagaccaacgcataatttgagagaatggcaagactgagaaaggtttctgtagcatggtgcatgcatgtgtgtgtgcgtgtgtagggagaggcaaagggttctgacaagaggaagaggctgaggaagcaggctcatctccacaacatgctgctgccacccaatcatagggtctcttgcagcaattccagtcct

SEQ ID NO: 3647 - DNA, 4001 bp, Homo sapiens
cccgcccgccgcggtccccccaggactcttcctgcgcttgcaagcgccacgccgcccacaggactgcgccagccggccggcgcctcaacagagcgcgccacggagcagcgcccctcgggagacatgacgcctgagccatcgaggcggccgccgccgccgccccccccctccccccccggccgggtcgaggccgccgtcgctctcttcgagacccactcacctgtcgaggcgacggggtgagacccagcaccgaggcgacgtaccgctccacatcggccttgctgcgcctcatcgcgccgccaacctggctcccgagacgcgtgcgagcaccgctcagccccgcagcagtcgccacttccaagaggaaagtgcctgcaagccactgaagcagcggcgtagccggcggaggcccactgtgacgagcgtgcggcgccgcccacggaggcccactgtgacgaacctgcgttctgcctcagcactgtgtatcctcggcgacgtcggcgctccagctgcactcggccgggctcgtggcgccgccctgtggtctgagggtgtcttgacatgatcttatctatagaaaaccttaatgaaacctcgaaaaaaaaagacctaaactatcagtgataataaatgagttcaaagagattgtaccatacgaggtcaactaaaaaaatgagatgtctacttatacaccagcaaggaacaattcaagtaaaattaagtaaacaattccatttataatattatcaaaaataataaaataattatgaataaatttaacccaaaagtgtaagacttgtagactggaaactacagaacactgttgaaggaaattaaagaggagctaaatcaatggaaagacatcctgtgttcattaattggatgtaaacatgtctacacaaaaacttgtatacaggccaggcatagtggctcacgcctgtaatcccagcactttgggagtttttgatgggaggatcacttgagtccaggaatttgagaccagcctgggcaacacagcgagacccccatctctacaaaaaagaaaaaacaaaaacaaaagaaaacctatacatgaatgtttatagcagtactatttttattagtaaaaggtggaaacaatccaaatttccatctactgaagatggatttttaaaatgtggtattattgggcacagacacacgtgcctgtaggcccagctactggggaggttgaggcaggagggtcgcttgagccggagagtttgaagctgcagtttgcagctgcagtgatgctccttgatccatgcaggagctgtgatcaggcctgtgaagagccactaaactccagcctgggcgacatagtgagatctctgtctcaaagaaaaatgtggtatagccatacaatagaatattacttttgcataaaaaataatgaagtaccaatgcatactacaacatgaatcagccttgaaaacattattctaaattaaaggtgccaatcacaaaacctcatatatcatttcatttatatgaaatatccagagtaggcaaactcaaagacacagaaagtagactagtgattgccaagggctgggtggaggggaaatctgggagtgcatgtgactgccaacgtgaatggagtctctcgttggggtgatagagatattttggaattagattttggggaaggctgtaaaacattgcaaatttactaaaaaaaaaaaaatcattgaatgaaattaaatcctatggagatgataggtattttcattttggccaggcaatctacctgattaggttcaagccacaagttcccacccctccattctgcagtctggttccaaagtcagttcagtgtccagagtcttcacaggactattcagttctgtctgacttgtgcaccacccagtggccagttgtgtctgtgggtgatggtctctcagttcagctgtcaatctttggtgtgttgaacaggacgagatctatgcaggagcagctcaagaatgagccctggggtttatagacaggttaatggggttgcttcactgattaactctctctcagcaattaccctgttgctttcatttgctgaggcttctctttttagtcttccaagcagaaaacaggctttcggtatctggctctaccatgcatttctacatctgaagccaagcagtgggaggactgaattggaagagaagcaacatggattgtttctgccctcttgggaccacagctctgtcagttggagaaggttccctcctgcgtcttggctcctgggctcctcttggggctggtgccagtgccactgtgggactgcttgtgggctgaggtatgagagaacagggaaaagaaaaatggggaggaacgaacttctggattccctcggaatgttaggagacccttttcccgttacttgagccagaaatagagggcatcttctggagctctttctatctgcaccctggtgcccactgccaggttagtcacgggatgccataggggaaacatggttatctcaccaccggtttggtggtacttcaagttctggtcttcttgggaaagctgcctgcaactatttagttttcaatgtcttccaatagctgctccatgcattctgtactgtctcctggctggactccatgcaggaagcctgtctcctccacagtgtgcactcactcaggtcattgctaagttttattgttggcatttgtttgctttaatttttcagactgactccctagaggtcgcttcttgtttgcatagttcgtcagtcaaacatcagttaaagccaatatggtttccaccatctgctgctggatctatgtgcaatggggaggaggcacgccccgggccatttgcaagggtgttccggcttttacttcctaacactggcaccggcacacacacaggctgtgtgccctgggcatatggacatggcttgggcttgctctaatctctgccagctatgagccttcagtccatttgggtagtgtgaagagtttactaagctccctctggctctccgacctcccggagctccctcttacatccatgactaatctgcaggtcgtttgctcgtctccaaaggcccagagcctcaggctaggagtcagtggcctttcttcctcctggtcactgatatcaccaccttaactagccatgctgcaaatcaaaaccttcctcactcttgcctccagcccctgcagcgaggtggcaggggagcttatctccacaggctgccctgctgggggccgctgtgtgtgttatcaacagctggggtaaatgggggtagcagcctgggcaaagatgccacggacacaggctggtcttatccaaggctcactttaattcttcttttttttctttagggacagggtctgtctcactctgttgcccaggttggagtgcagtggtgtgatcacagctcactgcagcctcaatctcctgggctcaaatgattctcccgccttagcctcccatgtagctgggaccacaagtgtgcaccaccatgccttttttgattttttttttgtacagacgggggtctcaccaagttgcccaggctgtttttgaactcctgagctcaagtggtccttctgcttcagcctcccaaagtgctggggttacaggcgtgagccaccgcgcctggccagctttcattcttaaacacatccccatttgtgccgtgcctttggtaaaattgcagaatgctaaatggtttgtccagctatacagttacattttggaaagatttgttgacctcctcacttcatcatgctagaagtgggaactttgattactctttaaagaatctgaagatgaagggaagaccaacgcataatttgagagaatggcaagactgagaaaggtttctgtagcatggtgcatgcatgtgtgtgtgcgtgtgtagggagaggcaaagggttctgacaagaggaagaggctgaggaagcaggctcatctccacaacatgctgctgccacccaatcatagggtctcttgcagcaattccagtcctg

SEQ ID NO: 3648 - DNA, 4001 bp, Homo sapiens
ctttttttcttttttggagacagagtctcgctctgtcacacaggctggagtgcagtggcgcaatctctgctcaccacaacctctgcctccagggttcaagcaattctcctgtctcagcctaccgagtaggtgggactacaggcgctgccaccacgcccggctcatttttgtatttttaatagagacggattttcaccatattggtcaggctggtctctcggcctcccaaaatgctcggattacagacgaagaatatttttaagaagggcaaaagcacatgtgagggagtagaaaaatggcaaaacaagaggagactaacaaatgaaagcgcaatggaagactagaaagatatgatatacagacgcatcatcacactccaaaactccgacattctagaaagcatgggcagttcacagatggccagcctctgccaaactgggggagaatactaacctcttcatattcttcacagccactgcctcttctccctccattctttaccttctatccaaagcaccctgttttgtcatttcactcaaacctaacttcacagaatagcttcacatgttccagttactcactagttaatccatattccgctgaaatccccaggttctaatgtaaatgactttaaatttgggggaaaaaaaagactctaaatgtaagagaggtgtcataataaccaatcgtcaaaattctgccaccactccactttatttaatggagaagttatgtagttgaaagaacattctaacttctgtctagaccagtggtttttaatcttttggaagccaaggtccccactaagaatctcagaaaggctccaaacttgctttttttttttttaagcttgtttaaaaaaaaaaaaatcaggctgagcagagtggctcacacctgtaatctcagcattatttacatgtaaagaggaaaaatacccttaaaacatctgtggaaaaggttaaaaattgcaagccatactaacgatttgtaagaactttagaattttttttttttaagcaaaggcagctaccaaagtgttccgggcggggaggggggcgagggaggtgagtatgaggagtggagtggagctggacccttacaaagggacagcgacaaacacctcatactcaaaacaaggggactttccgtgtcatttgcgccgtcgggccattgcaaatgtccgcgctgagatgcctaccttgtcactcgacgcagccgccaaagctcacccggagctgcgtcagtccccactgggttcctccaggccaaggaggtacgacctccgccgcagcatataaagtaaatgtccaggagatgggaagaaacccgccgatacagcacccgggtgcccaagcccccgagaactaggccgcgcgggtactacggggtgcgcgatcggccagaaagcccgggccaggacgggcccaggagcgagcaccgtcgggaacaagcgtcgggaacaagccgggattaagaggaagcgccggcgccaacggtctcccgcccgccgcggtccccccaggactcttcctgcgcttgcaagcgccacgccgcccacaggactgcgccagccggccggcgcctcaacagagcgcgccacggagcagcgcccctcgggagacatgacgcctgagccatcgaggcggccgccgccgccgccccccccgccgccgccgccgccgccgccgccccccggccgggtcgaggccgccgtcgctctcttcgagacccactcacctgtcgaggcgacggggtgagacccagcaccgaggcgacgtaccgctccacatcggccttgctgcgcctcatcgcgccgccaacctggctcccgagacgcgtgcgagcaccgctcagccccgcagcagtcgccacttccaagaggaaagtgcctgcaagccactgaagcagcggcgtagccggcggaggcccactgtgacgagcgtgcggcgccgcccacggaggcccactgtgacgaacctgcgttctgcctcagcactgtgtatcctcggcgacgtcggcgctccagctgcactcggccgggctcgtggcgccgccctgtggtctgagggtgtcttgacatgatcttatctatagaaaaccttaatgaaacctcgaaaaaaaaagacctaaactatcagtgataataaatgagttcaaagagattgtaccatacgaggtcaactaaaaaaatgagatgtctacttatacaccagcaaggaacaattcaagtaaaattaagtaaacaattccatttataatattatcaaaaataataaaataattatgaataaatttaacccaaaagtgtaagacttgtagactggaaactacagaacactgttgaaggaaattaaagaggagctaaatcaatggaaagacatcctgtgttcattaattggatgtaaacatgtctacacaaaaacttgtatacaggccaggcatagtggctcacgcctgtaatcccagcactttgggagtttttgatgggaggatcacttgagtccaggaatttgagaccagcctgggcaacacagcgagacccccatctctacaaaaaagaaaaaacaaaaacaaaagaaaacctatacatgaatgtttatagcagtactatttttattagtaaaaggtggaaacaatccaaatttccatctactgaagatggatttttaaaatgtggtattattgggcacagacacacgtgcctgtaggcccagctactggggaggttgaggcaggagggtcgcttgagccggagagtttgaagctgcagtttgcagctgcagtgatgctccttgatccatgcaggagctgtgatcaggcctgtgaagagccactaaactccagcctgggcgacatagtgagatctctgtctcaaagaaaaatgtggtatagccatacaatagaatattacttttgcataaaaaataatgaagtaccaatgcatactacaacatgaatcagccttgaaaacattattctaaattaaaggtgccaatcacaaaacctcatatatcatttcatttatatgaaatatccagagtaggcaaactcaaagacacagaaagtagactagtgattgccaagggctgggtggaggggaaatctgggagtgcatgtgactgccaacgtgaatggagtctctcgttggggtgatagagatattttggaattagattttggggaaggctgtaaaacattgcaaatttactaaaaaaaaaaaaatcattgaatgaaattaaatcctatggagatgataggtattttcattttggccaggcaatctacctgattaggttcaagccacaagttcccacccctccattctgcagtctggttccaaagtcagttcagtgtccagagtcttcacaggactattcagttctgtctgacttgtgcaccacccagtggccagttgtgtctgtgggtgatggtctctcagttcagctgtcaatctttggtgtgttgaacaggacgagatctatgcaggagcagctcaagaatgagccctggggtttatagacaggttaatggggttgcttcactgattaactctctctcagcaattaccctgttgctttcatttgctgaggcttctctttttagtcttccaagcagaaaacaggctttcggtatctggctctaccatgcatttctacatctgaagccaagcagtgggaggactgaattggaagagaagcaacatggattgtttctgccctcttgggaccacagctctgtcagttggagaaggttccctcctgcgtcttggctcctgggctcctcttggggctggtgccagtgccactgtgggactgcttgtgggctgaggtatgagagaacagggaaaagaaaaatggggaggaacgaacttctggattccctcggaatgttaggagacccttttcccgttacttgagccagaaatagagggcatcttctggagctctttctatctgcaccctggtgcccactgccaggttagtcacgggatgccatagggg

SEQ ID NO: 3649 - DNA, 4001 bp, Homo sapiens
agaattatattttttttctttttttcttttttggagacagagtctcgctctgtcacacaggctggagtgcagtggcgcaatctctgctcaccacaacctctgcctccagggttcaagcaattctcctgtctcagcctaccgagtaggtgggactacaggcgctgccaccacgcccggctcatttttgtatttttaatagagacggattttcaccatattggtcaggctggtctctcggcctcccaaaatgctcggattacagacgaagaatatttttaagaagggcaaaagcacatgtgagggagtagaaaaatggcaaaacaagaggagactaacaaatgaaagcgcaatggaagactagaaagatatgatatacagacgcatcatcacactccaaaactccgacattctagaaagcatgggcagttcacagatggccagcctctgccaaactgggggagaatactaacctcttcatattcttcacagccactgcctcttctccctccattctttaccttctatccaaagcaccctgttttgtcatttcactcaaacctaacttcacagaatagcttcacatgttccagttactcactagttaatccatattccgctgaaatccccaggttctaatgtaaatgactttaaatttgggggaaaaaaaagactctaaatgtaagagaggtgtcataataaccaatcgtcaaaattctgccaccactccactttatttaatggagaagttatgtagttgaaagaacattctaacttctgtctagaccagtggtttttaatcttttggaagccaaggtccccactaagaatctcagaaaggctccaaacttgctttttttttttttaagcttgtttaaaaaaaaaaaaatcaggctgagcagagtggctcacacctgtaatctcagcattatttacatgtaaagaggaaaaatacccttaaaacatctgtggaaaaggttaaaaattgcaagccatactaacgatttgtaagaactttagaattttttttttttaagcaaaggcagctaccaaagtgttccgggcggggaggggggcgagggaggtgagtatgaggagtggagtggagctggacccttacaaagggacagcgacaaacacctcatactcaaaacaaggggactttccgtgtcatttgcgccgtcgggccattgcaaatgtccgcgctgagatgcctaccttgtcactcgacgcagccgccaaagctcacccggagctgcgtcagtccccactgggttcctccaggccaaggaggtacgacctccgccgcagcatataaagtaaatgtccaggagatgggaagaaacccgccgatacagcacccgggtgcccaagcccccgagaactaggccgcgcgggtactacggggtgcgcgatcggccagaaagcccgggccaggacgggcccaggagcgagcaccgtcgggaacaagcgtcgggaacaagccgggattaagaggaagcgccggcgccaacggtctcccgcccgccgcggtccccccaggactcttcctgcgcttgcaagcgccacgccgcccacaggactgcgccagccggccggcgcctcaacagagcgcgccacggagcagcgcccctcgggagacatgacgcctgagccatcgaggcggccgccgccgccgccccccccctccccccccggccgggtcgaggccgccgtcgctctcttcgagacccactcacctgtcgaggcgacggggtgagacccagcaccgaggcgacgtaccgctccacatcggccttgctgcgcctcatcgcgccgccaacctggctcccgagacgcgtgcgagcaccgctcagccccgcagcagtcgccacttccaagaggaaagtgcctgcaagccactgaagcagcggcgtagccggcggaggcccactgtgacgagcgtgcggcgccgcccacggaggcccactgtgacgaacctgcgttctgcctcagcactgtgtatcctcggcgacgtcggcgctccagctgcactcggccgggctcgtggcgccgccctgtggtctgagggtgtcttgacatgatcttatctatagaaaaccttaatgaaacctcgaaaaaaaaagacctaaactatcagtgataataaatgagttcaaagagattgtaccatacgaggtcaactaaaaaaatgagatgtctacttatacaccagcaaggaacaattcaagtaaaattaagtaaacaattccatttataatattatcaaaaataataaaataattatgaataaatttaacccaaaagtgtaagacttgtagactggaaactacagaacactgttgaaggaaattaaagaggagctaaatcaatggaaagacatcctgtgttcattaattggatgtaaacatgtctacacaaaaacttgtatacaggccaggcatagtggctcacgcctgtaatcccagcactttgggagtttttgatgggaggatcacttgagtccaggaatttgagaccagcctgggcaacacagcgagacccccatctctacaaaaaagaaaaaacaaaaacaaaagaaaacctatacatgaatgtttatagcagtactatttttattagtaaaaggtggaaacaatccaaatttccatctactgaagatggatttttaaaatgtggtattattgggcacagacacacgtgcctgtaggcccagctactggggaggttgaggcaggagggtcgcttgagccggagagtttgaagctgcagtttgcagctgcagtgatgctccttgatccatgcaggagctgtgatcaggcctgtgaagagccactaaactccagcctgggcgacatagtgagatctctgtctcaaagaaaaatgtggtatagccatacaatagaatattacttttgcataaaaaataatgaagtaccaatgcatactacaacatgaatcagccttgaaaacattattctaaattaaaggtgccaatcacaaaacctcatatatcatttcatttatatgaaatatccagagtaggcaaactcaaagacacagaaagtagactagtgattgccaagggctgggtggaggggaaatctgggagtgcatgtgactgccaacgtgaatggagtctctcgttggggtgatagagatattttggaattagattttggggaaggctgtaaaacattgcaaatttactaaaaaaaaaaaaatcattgaatgaaattaaatcctatggagatgataggtattttcattttggccaggcaatctacctgattaggttcaagccacaagttcccacccctccattctgcagtctggttccaaagtcagttcagtgtccagagtcttcacaggactattcagttctgtctgacttgtgcaccacccagtggccagttgtgtctgtgggtgatggtctctcagttcagctgtcaatctttggtgtgttgaacaggacgagatctatgcaggagcagctcaagaatgagccctggggtttatagacaggttaatggggttgcttcactgattaactctctctcagcaattaccctgttgctttcatttgctgaggcttctctttttagtcttccaagcagaaaacaggctttcggtatctggctctaccatgcatttctacatctgaagccaagcagtgggaggactgaattggaagagaagcaacatggattgtttctgccctcttgggaccacagctctgtcagttggagaaggttccctcctgcgtcttggctcctgggctcctcttggggctggtgccagtgccactgtgggactgcttgtgggctgaggtatgagagaacagggaaaagaaaaatggggaggaacgaacttctggattccctcggaatgttaggagacccttttcccgttacttgagccagaaatagagggcatcttctggagctctttctatctgcaccctggtgcccactgccaggttagtcacgggatgccatagggga

SEQ ID NO: 3650 - DNA, 4001 bp, Homo sapiens
ttttttttttttctggagtctccctctgtcgcccaggctggagtgcagtagcgcgatctcggctcactagaacctccgcctcccgggttcaagcgactctcctgcctcagcctcccaggtagctgggactacaggcgtgcgccaccacgtccggctaactttatttgtatttttagtagagacaaggtttcaacatgttagccaggctggtctcgaactcctgacctcaggcaatccgccctcctcggcctcccaaagtggtgggattacaggcgtgagccactgcgcccggccaatatccttttaacatcaacaataaaaagtgacttgtagctaacatttagtgctatgtgtcaagcaataacctaaatgtttaaaatggatcatcctatcaaattctatcaatgttacaactccatctatggatgaaaagtgtaagtggccccaaatacccagcttataaacgacagtgctgtgattattcaagccaaagcaaactgactcaagattctgcgcacatccacctttaatagcttcttccgtcactctttagatccaatgactaaagtcttattgaatccaaaatagatcacattatttacctgtaaagaggaaaaataccctaaaaacacttgtggaaaaggttaaaaattgtaagccatactaacgatttgtaagaactttagaattttttttttttaagcaaaggcagctaccaaagtgttccgggcggggaggggggcgagggaggtgagtatgaggagtggagtggagctggacccttacaaagggacagcgacaaacacctcatactcaaaacaaggggactttccgtgtcatttgtgccatcgggccattgcaaatgtccacgctgagatgcctaccttgtcactcgacgcagccgccaaagctcacccggagctgcgtcagtccccactgggttcctccaggccaaggaggtacgacctccgccgcggcatataaagtaaatgtccaggacatgggaagaaacccgccgatacagcacccgggtgcccaagcccccgagaactaggccgcgcgggtactacggggccagaaagcccgggccagggcgagcccacgagcgagcaccgtcgggaacaaaccgggagaaagaggaagagccggcgccaaaggtctcccgcccgccgcggtccccccaggactcttcctgcgcttgcaagcgccacgccgcccacaggactgcgctagccggcctccgcctcaacagagcgcgccagggagcagcgccctcgggagccatgacccctgacccatcgaggccgccgccgggccgggtcgaggccgccgcctcaacagagcgcgccagggagcagcgccctcgggagccatgacccctgacccatcgaggccgcccccgggccgggtcgaggccgccgcctcaacagagcgcgccagggagcagcgccctcgggagccatgacccctgacccatcgaggccgccgccgggccgggtcgaggccgccgcctcaacagagcgcgccagggagcagcgcccgtcgggagccatgacccctgacccatcgaggccgccgccgggccgggtggaggccgccgcctcaacagagcgcgccagggagcagcgcccgtcgggagccatgacccctgacccatcgaggccgccgccgggccgggtcgaggccgccgccgcccggccgggtcgaggccgccgctctcttccagacccactcacctgtcgaggcgacggggtgagacccagcaccgaggcgacgtaccgctccacatcggccttgctgcgcctcatcgcgccgccaacctggctcccgagacgcgtgcgagcaccgctcagccccgcagcagtcgccacttccaagaggaaagtgcctgcaagccactgaagcagcggcgtagccggcggaggcccactgtgacgagcgtgcggcgccgcccacggaggcccactgtgacgaacctgcgttctgcctcagcactgtgtatcctcggggacgtcggcgctccagctgcactcggccgggctggtggcgccgccctgtggtctgagggtgtcttgacatgatcttatctatagaaaaccttaatgaaagctcaaaaaaaaaaaaaaaaagacaaaccatcagtgataataaatgagttcaaagagattgtaccatacgaggtcaactaaaaaaaatgagatgtctacttatacaccagcaaggaacaattcaagtaaaattaagtaaacaattccatttataatattatcaaaaataataaaataattatgaataaatttaacccaaaagtgtaagacttgtagactggaaactacagaacactgttgaaagaaaagcaagtgattcatcccccggtgccaaacagcagacgcaggtgttaccagtctggtggggcgcccgagctggggacctggggtcctctgggaggggcaagaaggcagcgatgctggcccccgcctccatctgcccatcccatctgcatccacacaccgccctgcggtagctgcttgcagcccttctctgtcagtttctccattatcttctggtttggtgataaatgagagttcccatcgggggtgccaccctctgtgtgacggggagcagagaagaccctgcatctgagtccttctgggggaagagcgaaaatgctgggaccagccccagctgtcagggggtctccaatcccagcagggaggccccacgcatggctaggatgccccagaccccagggactgcacgaagtggaaaggagggcccccggtcctaactaagggttcagacccccgcaacacacatccaggcacacccccaccccctaggcctggttctaggtctgccagctccgagaaggcccctaacaatggtgcagtcgcaggggctgtgtcccaggccgggctcacgcccagtcccgctgccccgggggtagatggggcccctggcccgcgcgctgtggagccctggagtgtctgtgcgccccttccttggagggcagccgctgaggggctgctgcgggactggggagcctcctggcagcaagcgctcccaatgcgtagcgggacgctgtgatggggacaagatcctggctttgaagaaagccctttccaccctgtccatgtgggggtctcccggtgcccctgagccagcggccccctcctgcaggctccggaggactcccctgcctgcatctggtctcgcatttcctccgtgacctccaagctcccactgggggcacacggctgccctgctgaccccaactctggccctgtgccggtggtgggcagcatctggcacgggggaggcgccgtttcttccacactcgcgcgtcctcagcccagatcatccggtgaagtttccccagcaagtggctccccctgccccctccaccctgccaagtgtggtccctgggcccccgccttcccttctcggcctctgcccctgggtctggggcctgcatccagccatccacgctcagggaggccacctcctccctcgctctcgaccaccacaaagctgcccgggaccttgttctatcctttccaaaagtcctcaggacctgcctgtctacggagctcccaaaacgccctgtgagctctcccgggcccctcctctccttgctaataatgtcccacacggtgctgcctgcctggccccaaaagaaaaggaccctggagtgagttctgaacacaaactcgatgaaagtggccccctgctccacctgccgagtcggcccctcctcagactctccccttgggcagggaaacctgccggggcctgactgtttcttcctgaaacagcctcaggctggaaggagagggatccacccttggccattgaagcattcagcaggaatcagccctcggggaccaagaccctgtgaccagccccgccccacaggcgccggtcctgggcagcctcccttgctcaggccacgctgctcccaagaagccaggatgagcagctcgcaataggccccccaacac

SEQ ID NO: 3651 - DNA, 4001 bp, Homo sapiens
ccgtggagttgtacgacatatgggaaacaaagataaggacagaaacatattcagccttggctttcgcttgcaagtcactatgttacaataattctcaactctaaaactagtgcttacctctggtctttaccaaattctgggtcaaagaaggtataactaaactgaagacgaggcaggtggattacctgaggtcaggagttcgggaccagcttggcaaacgtggtgaaaccgtctctactaaaaatacaaaaattagctgggcgtggtggcagacgcctgtaatcccagctacctgggaagctgaggcaggagaatcgtttgaaccctggaggcagcggttacagtgatccaagattgcaccattgcactccagcctgggtggcagaaagagactgtctccaaacaaagctgaagagatcagaaggccaaagaattaaaaactactcttcaacataaatactaatgctattcttaaaaatcctacaaccacaatagcattagtatgcactgctttaacttttaactgaatatcctgcatccaacaaccttgactacacagaattgagaatcccgaggtaaacaaaataccctctaagcagcagtcccaatatccatgcgctacagctcatatctaccccgctgaagaatccttccagcacaaactatgtacttattttatgcagttctaataagttacttaataacatctttgagggttttctatgtgttttgtgttaaacatttttcttgcatcttcatattccagccctgtgaggtaacatgtccaagtttttccatctaggaattacttcaattcaaattccattatatgtgattccacaatgggtgttatcactacgccattaattctcaaactttagcgtccaggtgcattggtatcaactggaaggcttgttaaaatatatttctgattcagtaagtttgggataagaccccaaaatgtgcatttccaagaagttcccaagtgatgctgatcctagcgtcctgggattatttagaaaccaatgcacttctattcttctttgaaagaatacttgctttccacagcgacggcaggcctgcagcaaaccagaagcctttaaagtttattagaactacctcaaaaagacacacaactgtgagaaattagataaagccttctaataagcaatttcaaagagaaaaaagaaaagcctgggagtcactgagtgtactgcagagacccaaacacctcgataattgaatcataactaggcaggcactcattcattttgacagtaacgctgagtcttcaaaagagtttatgctcagtttagaaaaacaaataaggctgtgatccgtttcttgtaaacgtttatccaaaggtttttaggggttggacagaaagggtttactttggcggattttttgtcctctaataaaagttattactgcggtgaggcttagacttgttctgagaaactgaaagctgtcccgagagcacctgaaactgcatgctctgttgctgatgcaacgtcacttcaaacttcctgctttcaaaaggaaccctttaaactcgctcagcgccaaccccttcctccgagtgtgggcacgtcgttcccgtgcggtccggcggagatgcggcaacttcgacaagaccccaggtggagttaccccaggaaacgccctccccgctctcggacttgccccggacggggaggctgtgcctccagccccgccatgcctccctcgccctagccccccgggaggcgccgacctccgcccagcagccccagcccggccgccagctcccgcagcccggggaaacggcgagagatgccgctcacaaccaacgacagcagccggaccaaacagacgcggaaactcacgctctctacgacccgcctgcgtccccacgtcttcgcgcgcacgtgcgtcatcacgcacgttcccgatccggggcgccccgggttcctggggccgggtgcgggaggggagggccttaaagcggacggctcggccgcggcgcatgcttagttgtgcgcgcccgcgctctgctgtctgcagaccgcgtgcgccggcagtggctctaagggggccgcgagggcacagcggggcaggaccgcggcagagcgcagtaaggagagtgtggaccctcgccctgtcctctaagctccatgtgaaatgtggataatattccttactgccataaatagccactggccgctgactacgcgtaaggcaaacaagcgacctgcgttcaagggacccgaagactaggggagaagcagcgagcgggtcgcggccgcctacccaacggacgcctctgcccaggttctctgccgggaagcttcgtccttccgggccccagcgcagccggaggctggggagctgctgcctggaagggtcagataccgcctgttaggcggagggtgggaaagacactctcctgcttcaggagctatcgcagacaaccggagggcggcttatcgcagagtcccagagccagccagcaaggcaaggtcgcgggtgcacctttcactcccagaagcttgggtctgggactgcaccacgcaacgtttgcccattttgagggctttaggtgtttcatatttcagttaatagaatttcgattaatacataatttgataccattttaattgtttgctactcgggagcaagttttatgtttagctgtaggagttaggctaagttaaatgttgcaatgctatatatatttaataggatatgaaaaaactatcttacagccgggcgcggtaactcacgcctgtaatccccgcactttgggaggtcgaggcaggaggatcgcttgagctcaggagtttgagaccagcctggacaacatagtgagaccttgtctctatttaaaaaacaacaacaggcctggcgcggtggcccacgcctgtaatcccagcactttgggaggctaaggcgggcggatcaccggaggtcaggaattcaaaaccagcctggccaacatggcgaaaccctgtctctactaaaaatacaaaaattagccaggcatggttgcgggcgcctgtaatcccggctactcgggaggctgaggcaggggaatccttgaacccgggaggcagaggttgcagtgagatcgcgtccatgcactccagcctgggcgacagagcatgactctatctcaaaaaaaaaaaatcttactatttggtatggaattttctgatagctagggtaaagatgctctttttccaagaaggaatccgagtatccgaatacaggtggtttagtgttactctttgtttattggaagttgtagcagctgtgtttagatagtctgctaaaacaaaaactgcctaaaccagaagagtttatcttttgccattgtgtattaaaactcttcatagaaatatttattttggagtttgaaatttaagtgaaaatgtggctcatgcataggtgtgggtgtacatatgactttcaagtgacaaagaagattcttagcaaattgtacgtgttcattaagactcataagttacctctttcctagaaaaacaatatactcctccaaaagctcaactgacaatgagaaactgcatttctggacatgaaaagtcaaatgaatgcggggaaaagtaaattgcctatagaggtattttctgtatttccctagagggggaaatgtgtaatttctcaaaaggaagaagtcctcatttatccttctgaaccacaatcatatgaatccattcaattaatattaatcttatcttctattctccatcactctctacatctttctataattgcatcattttcttgtccgtataatacatcaaatgcagaggtgattttaagggagccacaaatcaagaagtctcaattcaataatttcgttaaaatgtaagaaatatatacggattaagaatattcttaggtaattatgttctgtttcaaatatcagtgaaaattttcatagacatttaaggggtaaaagacatttaacagatagaaaaaaatatctaccttttaaa

SEQ ID NO: 3652 - DNA, 4001 bp, Homo sapiens
aagcaaaatttagtgggtttcttttccctctccttgttaaaagtcattttttaaaaacatcagaagtagatgaggttacagcgtacaagtgtggtcagaatgctactgtcgtatgcaaatgacgagtgcattaagtgtcaaacaatgaaacaattgtgcaaagaataaaaaaacaaattttagcctttaaataaatcaaataacatcagtttcttggactgaacaattttcacttctaggacaggcacaaagttcgcttatggcaaaaacaaccccacagcgcatcctccctcctccctccggtagctggtggagggttcgcagcgggctggcccgcaggagaggctgtgctgaagctgtgtcctccccaagtcagttgcaaatgtcttccccaggggttggaaagatggtcaagtcctgttcatgcttgggcgggagtctggcccagcctgggccagagcgctcacccatcaccacccttaaataacaccatcttagctccgaaaataaaattatatctatatttatataacatccccccatcctccccagcagccctcccctcccgcagtacccggggtctatgttacagacaagggatatcaagctcccgctggtgaagggcgaacatctgatggggcgcggccacactcccgcgccaatctcgcccccggggatcagaggcgggggtggggtgaaaatggggcgaggggagtcgaacagacacacagccacacactctgaggcccggctcttcagaaaagcatgctcaggggacccttggcactcagtggggagcccaggcctgtgcaacacagctggacgcacacagacactgggatgggggcgcccggtgcccacgccaagtcctggcgcaagccagaggcgtcagcagacagatgccaggcaggccggtggggtccttgtgggacacgggtctccccttctccgggctcgcgggggactggtccaggagggggagccgtgccggcaggggcaggcgcgacgggcgcggccctcatagcaccttgcagcagttgatgcagccgttctgggagccgtagcgcttctgcagcgcggcgcgcgtggccgtctcgaagacctcgcgcacgccttccttggtcttggcagagcactcgaggtagtcgtaggcttggatgcgcacggccatggcgcggccgtcatccgtgcgcacgggttcctgcttcatgcgggccagctctgtgcggacatgctcgtcgctgcgcaggtcttttttgttggccaccaggatgatgggcacattgggacagaagtgcttcacctcggggacccacttctcggggatgttctccagcgagtccgggctgtccaccgagaagcacatgagaatgacgtcggtgtccgggtaggagagcggccgcaggcggtcgtagtcctcctggcccgccgtgtcccacagcgccagctccacctgcttgccgtccacctcaatgtcggccacatagttctcgaagacggtgggcacgtacacctcggggaactcgtccttactgaacacgatcagcaggcacgtcttgccacacgcgccgtcgcccaccaccaccagcttcttgcggatggccgccatgagcgggccgggcccgggcagcaggagggggcccgcgaacgcctcgctgccctcccgctcgccgctcactgctcacctcgggctgcgcgcaggtggcgagagggtcgctagctgcacccgggccccgcggtggcgcgttctctcgctgcgcttcggctgccgcggcgggggcggtgggggcgcgggggcatagggcgcaccgtgcgtctcgccgcgctgctcccgggcggtggtcgctctgctcaccccaggccggggatcggcggctttgtgcgtaacgcgggctcgggcagcagactcgggcggtggactcggcctagctctctcccgggtctctccgggcctcgctgagcatacaagacaacagctccaaccagactgcggtggcagatgagggctgcggccctagcgcccgctatttaaagagtccggccactttcttaatatagccgtccaatgggaaaccagccggctgagctcatcgctgcggagcttagctctgattggccgccccctgcagcccgagggcggggcagggccagcttgattgacggcccaggccgccgggctgggagaggcagcgaccggggagtccgcgctgctgctgccgctgcggggctctggcggtacccgggtcccctccttcgccgcagcgtttgcgcgcggggtccgggagctggctgtctggagcctccagggtctgggcgagcggttccgagacaggcttcactcagtggggcgttggcgactcccattcagaattgcccctcttcctggcaaactcccggcgggtggtcgggcctgtgggggaggggcagctcttttaacgtggttttgtttttaaataaacagacacacacacacacacacacacacacacaccccacacacacacttttgttcccaaacaagagtgttttctcttttcttttggaggtggcccctcctgtggtttagggccccacccgggtactcgccgtgggccagcctcgggtttggacccgagaggcgaccggctggctgcaaactggctcttccaagtcccgccgcccctacccttcccaacccccagcttaggtctctaggtgaagattaagggaagaggtgcggagtggcccaagcttgacaacggaaagggaaggtcgaggctcgaacacttggaggaagttaccggacaggaagaagccccttcggcccctcttttcactatgaactctgatcccggttcttaaaacagagaactgtctgagataaattgtacaatagaatatacactattgtacaatagaatgtacaatagaatatacactattgtacaatagaatgtacaatagaatatacactattgtacaatagaatgtacaatagaatatacacttgtacaatagaatgtacaatagaatatacactattgtacaatagaatgtacaatagaatatacactattgtacaatagaatgtacaatagaatatacactattgtacaatagaatgtacaatagaatatacactattgtacaatagaatgtacaatagaatatacactattgtacaatagaacgtacaatattccgggttcaatagaatccaaccaccccaagacccctgagcagacgaaaaggcttgaggctggagaagaggggaggagtaaggggctagcaaatggggcacagcgggttagggggtgtcccctctattggggcgtagcctcctgatgcacgccaggactgaactcatttatcctgtagatcctgcatgaaatgacagtaccggtgatccggaaagacccaagtcaaccgatttctacggataaaagaggaagaaggggatagggggaaaggggagtcggggagggctcccgggcaggagaaacagcctgaacacaagcaggaaggtgggaaggagcggggcaaactctaggagctgcatatgctggggctcatgagtgctaaagtattaacagcatgggctgggctctgtctatccattgcatgggaaatgtctgcaaactgttttttcagcaaaggagggacccaccacatgaccgggaggtggttgcctcctgtctccgtctctgtctcggtctctgtcagttgttggagggccaggattctgtcttatctccgcatcttgaagacccagcacaatgcctggcatttacaaggatcagtaaatgactgtggggaattaacccgaatgctcagaaacgcaggtggaattttctgggggtttcttacctcagttccacacttcgctttaacaattatctaaccaggccgggcacagtacctcatgcctgtgatccctgggcgtgggaggcccaggctggagaattgtttgagctcaggagttcaagaccagcctgggtaacatgacaaaaccccgtccctgt

SEQ ID NO: 3653 - DNA, 4001 bp, Homo sapiens
gaaacttctgccagagtcttcaactctaatcatagtgctggattctacaaaattcatcacacacaacttatccccagagcaaaagtgggtttgggaagaggctgaagctgggacagggagacagagagaagaccttggccctttagaagcacagcctggccacctctgatgtgcaaaccctggccagaggctgcagggcaaagtgtgcatcttctttctgcacaattaatctctcccaaagaaaacccagacaaagtcacctggcccttctgaagtagggccggggggaacccctcctcctccaagattcactctaaactcctaacccttcctccccaccccagggagtggctacatggttgttgtttcttttcttttttccctgtggtcctttggtaacaccacaaattacgttttcagggactggagtcccagagtgcaatgatgttgtaataaacataaccaggaccaaatgccttcccatcatattagatgatgccatttcccaccaatcaggctccttgggcaggcagaccactcaccaatgagggaccagacagaggctgtgggggggagacctggtcatctgcaactaaaaataagggcgcttcatgattggctgctgccactttgcaacaggagttgggacccacacaccaggcgccacacagaacgacccacacaggcaaaaactttcacagcccaggggttcacatggggggggcttatccggctctgtttgttttgtttgttttcctaatttgctgacttgttacaagaaataaagacctaatccaggggaagcccgtcgcagacacaccctcccacctagacacctcggtttccaaaggcccttcgcagccacaaagaactggggaacaggaggggggcgtcggccagaggccaagacactcacctgtccggccgtgtcatagagtcctaggaggtactgcttgccccccacggtgacgctgactgcaaggacagaagtgggggcggggagagaagctcacagtgacctgggctctggggcaatttcgctccccacccggaccctcctctcccaacccagctagaggcgtgggggcgctccccgcgagatgtcacccccttttcccgtgcggccagctcactgtgaaccggcaaagggccggggtgtgatgtggtccccagccgtccacccccttctcccaagtcccgtagccacgtctcgctcggtcccctcgaatatttcccccggggccttggggcagtaggaaaggggatgtgggaaggtcaaggaggacggcccagggcgccgaggggtaggaagtgcggggagcaggagccgcgtagggggcgggtgggagagggggtggatcagcgggcgaggggttgccaggagcgaagcttcgggggtggggccggccgcctggcagagggcgcggcgggggaggggagaggagtgcgctctggggaggcggcgagggggctccgccaaagttgctccaaagttcccggcccggggagcggccccttagtcagcagttccgaggcttacctgcgtagtggtcgaagacggtgggcacgtactcctccgggaaggcgtcgttggcatagctcatgagtaggcacgtcttgcccaccgccccgtcgccgaccaccacgcacttgagcatcagcgcgccgggcccgtgagccatgctgctgccggccggcctccgggcatggtccccccggagcccccgccccggccccgggctcagccccagcccgcctggggggtccgccgccgtcgccgccgctccgcgccgcagggccgcccccccggccccatgcagcggctcccctcgcaggaggggagggggcggcgggcccggggcgctgccgccgccgcggtcgccgcccggatccccgccccggccccggtcgccgcgcccgcccgctgcccccgccactcggcgcccgcgccctctccccggcccggcctccccaggaggatccgccggatcataagaccggccggccccgggggagacggcaactttggggagggcggcggaggggaggggccaggcggctctccccgccccgcgccaacccgggcccctcccgcggcgccccggaggagggcgggcccaggcgcctccccgagcgcggcccgcgccacgcgcccccgcctgctgccgccgcgcggccctgccggcgcacccgagccccactccctgcgagggccgcgcggaggggcgcgcaggaggaggaggagccgaggaccgcggaggggaggaggggagtcgcctggggagccgagggctcctcgcgcaagtgcccgcagcgcccggaagcgtccaaaggccccgatgctgggagaagacgtggaggcctctcggggaaccacgacgacctccacgatgacgcaatagtcatgccaaattatacatgcatatttcacctccacccggaaggccagagccatcctctcggcctctaagtgcacaacggaactagaaatcaaggaggagagaccaaaagggtaaaaaaaaaaaaaaaaaaatttaaggcgcgtggggtggtggcggtccttgagctggaaagcaggaaccctggcttattgcgtggtcccccccaccaccaccaccccacgccttccgtagcacgagctttaatcatttactatgaaaccggtaactaagggagatacagcgtgttgaaccactgaagcacgcccctccacacacacaccagccagaaaaaggataccccgtcggctccggacccggcaaatgtacctgggctccccctggaggccacattctccgaggtcgcctttcggtccccaatgttcctcaaaggtattccgttgtaatcccggagaactgatacacactagtgctctgaaacttggcctgtgctcgaggcggcaacccctgcccctctgcctggcgatgccggaacacacccatctggccaggtcctgttcactggccaagaatgcagcattgaacactgggcattggggcgggggtgcactctgcgctgacaccgcacccctcccctcaacttgctgactagaggtaatcgcttcctttcatcgattcacagcgttagaaaaatgcagcattgagaggcagcgcggaggtcaactggaccatcacccttaggttgtagggaagaaaactgagacctagaaaggtgaagcggttgtcccaaaggcttccagctgctcccagtactcaaggacttggagcacacttggggaaatgctcactgttgtattcccgttcctcactatccaggaggcctgaactctcaaactccgaatctgatttccactctcccaggaagtcttcggaaatcactgtaagttccttgcagattctcattgagcctctccccaggacccaccctttggccctgcgtgtctgcgactaggtatgcgcattgctagctgctttagatgcaatgaatctggaagatattttgtatggactgaataacaggttgaggaaggcagaaaagtgccttaaggtcagttcctggttcaagaccggcctctgctacttgctcttagagagaaagagagcagggcctgccccattcttggcttgcaggaccatttgttcaggcagcatttgcagggactcgtgtcctgaaaggagggtctatccaggagcttgaaaaggagagcactcagccaggagagctgagtttggtcctagctctgaccctggttagcagtgttaccttgagcatgtcacttcccttctctgggcctccgttttctcatctataaatgtgagctaagagtaggagaagctctgggaatgtcatagcattcccagtggggaactgatgtccgatgaatcatgcagtggtgacttcattggtgacagtgacctcattcttttggcccacagagttgccaaaactgactgccaggaatacttagagctctggagctgatcccacttggtgtatatgtgggatggggaggggggctatccagaatgcccccctgtcag

SEQ ID NO: 3654 - DNA, 4001 bp, Homo sapiens
gatcattaagaaataatctcatggaaccatggagagttaagtgataaagcgtgtaaggtaattaagaaagtacctgagaagctttaagtaacaataaagagtattataatcagtattattgctgttattttagattcaaagcttttgagtcaactggcaaaacttttaaaaaccaccaaaagtggctggacacagtggctcactcctgtaatcccaacactttgggaggctgaggcaggcggatcacctgaggtcgggagttcgagaccagcctgaccaacatggagaaaccccttctctactaaaaatacaaaattagccggggcggtggcggatgcctataatcccagctattcaggaggctgaggcaagagaatcgcttgaacccgagaggcggaggtttcagtgagccgagcccgagcctgagccattgcactctcgcctgggcaacaagagcaaaactacacctcaaaacaaaaaaacaaaaccaaaaaaaaaaaccaaactaccaaaagtgaaaaactgtttaacaaacagatacatacctttaaaactttgtacagccgaggaagttttttctcaatttctgtaattacttcttttccttcttctccagtcatacgacttaaaaagcaggaagaacacaagtttaagtagttgacaggaaaaaaaaaaatactctcaaaaatacatgtacaatctttttaaaaattactttctaactcctgcaaatgaattgacccagtaggtaaggtccttaagggtatacagaatatataatgcaatatatatcagaaatgaaagtagaaaaaccctcagaataagtttttacatcgagtacatgcaagttgtgacaacctgactccaaaaagacagaacagggatccctattcctagttactaacgatttgctaagcctttccaaagggttttacaaaactttagtacatttctatgaaaattactttgaagcattttgcaattaataaaaatcagtgtattgctctgttaaaaaaactctgggtagccacattttcccaacacatcggaggtttacactgaagacccctcctccaacaactacttccaaccgaaacttttaaaaatccctcgcttgcaaaacacacgtgcatgctccctcgttccaaacacacacctcaagcgcagcagcagcagtacccgggaacgtcacctagaatacatctcccccgccccccaaggcgtccgcgactcgggcgtcctcacatttgctagacttctagaactcacattcattctacgcgcccctcccaaccaccttctttctccccactatagagcgccccactctccgctacgccccgtggcggacctcacctggtcagagtcaggtaagcgtcagtctgccctccatgggaggcagaagggtcttccaaagtctccaacagcggcgcgagggggctctgacccctggccgtcatgtcggccaccctgaggcccgaaccggaagaggagaaaatccagtgaccgatggaaacagccccgcggcggcccagtgtgagtccggccctcacacccgcacgcccgcccgggcctcacagccacgccgcgtctgcaccccaggcctccgaatcaccaaaccccagcgcgaacctcctccggcgcccgacaccagacacctgagcccacgccacattcgggcctgggcccgctcccgccaccactttcccgggcagctttcaacagagggaggagatcggcggagggcgggagaagcccggggaacgaggcatctcgccgcgagggggcggagggtgggcagactgagggttccccgcggcctaccactgtcaccccgatatttatcccacctaggaagatcaggacagggttctctccgcctctgcccctcagcacccagacgctgccagagctcgactttcccagctccggctgtttactcacgcgtgcggcgcgctccctcctagaccaagatggcggctgggcgggcccaggagtgcgcgggagtaggttaggcctggcgggagaagttcgagccaatccaacagtcagcggcacaccggagttatcgatcgcctcccttcccatcccttcccatcccttccctgcccagctgccgcgtcacgcccctctggtgagcatcaggtggtggtgttttgcctaaggcgagagacttgaaattcaaaatgtgagttaattgctcagactcactagactgaacatagtgggccctcagactaagtgttcaaactccaagtccagtgcttgttgaagttttagcaacaaatcagttagcaaaaggagataacgtactgttgggtttaagactaagagctggccgggcgcggtgactcacaccttgtaatccaagcactttgggaggccgagtctgaggtcaggagttcgagaccagcctggccaacacatggtgaaaccccgtctctacttaaaaaaaacaaaaatacaaaaattagttgggtgtggtggcgcacgcctgtagtcccagccacttgggaagctgaggcaggagaatcgcttaaacccgggaagcggaggttgcagtgggccgagatcacgccactgcactccagcctgagcgacagagtaagagtaagactccgtctctcaaaaaaaaaaaaaaagaaagaaagaaaaagaaaagaactgtatctcaagctggtctagattccagctggtctaggttccatgtgactttagcaagttaattaacctatgcctcaatttcctcctctataaaatagggcttttaataggtgaagtgagaaaaggttggagaggccaatggttctcaggtcttaagcgtacataacaatggcctggggatattcgttattaaactgcagattcctgggccccgcccatatgcattgtaattcagtagatttaggtagctcccgaggatgtgcattcttctgttaggcccctggggggttgaagggtgggatttggccagggcttcttccctagagaaacgtcagtaaacacaatgacagtcatttctccttactgtgaatatgctgctcctcccccgcctttttttttttttaagacggagcctcgttctttcgcccaggctggagtgcagtggtgcgatctcggctcactgcaacctctgcctcccgggttcaagcgagtctctgactcagcctcccgagcagctgggattacaggcgcccgccaccacacctggctaatttttgtacttttagtagagacggggtttcaccatcttggccgtgctggtctcgaacccctgacctcgtgatccacccgcctcggacacccaaagtgctgggattacaggcgtgagccaccgcgcccggtctgcttctccccttttcatatgccttcgtgcactctccacaacagacaggattgcattaactctaaatcagacacatgaagcccagcagcaatggaactctccatcatgggttcctggcccaggatttgagccctcactcacatgtgctgcaactctcagctctagaagtgggatgttgctttttgctcttctttgtgtcatctgcacttagcaaaatgactgccaaacgacgcagtacatacatagtatgcttatatatatatttatttatttatatgtatttatatatatttatatttatttacatatatttatatatatacacacacacacatacatatatacatatacatatatatatatatatatatattttttttttttttttttttttttttttttttgagacggagtctcgctctatcacccaggctggagtgcactgacctgatctcagctcactgcatcctccgcctcctgggttcaagcgattcccctgcctcagcctcccgagtagctgggattacaggcatgcgccaccacgcccagctaattttttgtattttagtatagacaggtttcaccatgttggccaagatggtcttgatctcctgacctcgtgatcagcccgcctcggcctcccaaagtgctggga

SEQ ID NO: 3655 - DNA, 4001 bp, Homo sapiens
agtgatcattaagaaataatctcatggaaccatggagagttaagtgataaagcgtgtaaggtaattaagaaagtacctgagaagctttaagtaacaataaagagtattataatcagtattattgctgttattttagattcaaagcttttgagtcaactggcaaaacttttaaaaaccaccaaaagtggctggacacagtggctcactcctgtaatcccaacactttgggaggctgaggcaggcggatcacctgaggtcgggagttcgagaccagcctgaccaacatggagaaaccccttctctactaaaaatacaaaattagccggggcggtggcggatgcctataatcccagctattcaggaggctgaggcaagagaatcgcttgaacccgagaggcggaggtttcagtgagccgagcccgagcctgagccattgcactctcgcctgggcaacaagagcaaaactacacctcaaaacaaaaaaacaaaaccaaaaaaaaaaaccaaactaccaaaagtgaaaaactgtttaacaaacagatacatacctttaaaactttgtacagccgaggaagttttttctcaatttctgtaattacttcttttccttcttctccagtcatacgacttaaaaagcaggaagaacacaagtttaagtagttgacaggaaaaaaaaaaatactctcaaaaatacatgtacaatctttttaaaaattactttctaactcctgcaaatgaattgacccagtaggtaaggtccttaagggtatacagaatatataatgcaatatatatcagaaatgaaagtagaaaaaccctcagaataagtttttacatcgagtacatgcaagttgtgacaacctgactccaaaaagacagaacagggatccctattcctagttactaacgatttgctaagcctttccaaagggttttacaaaactttagtacatttctatgaaaattactttgaagcattttgcaattaataaaaatcagtgtattgctctgttaaaaaaactctgggtagccacattttcccaacacatcggaggtttacactgaagacccctcctccaacaactacttccaaccgaaacttttaaaaatccctcgcttgcaaaacacacgtgcatgctccctcgttccaaacacacacctcaagcgcagcagcagcagtacccgggaacgtcacctagaatacatctcccccgccccccaaggcgtccgcgactcgggcgtcctcacatttgctagacttctagaactcacattcattctacgcgcccctcccaaccaccttctttctccccactatagagcgccccactctccgctacgccccgtggcggacctcacctggtcagagtcaggtaagcgtcagtctgccctccatgggaggcagaagggtcttccaaagtctccaacagcggcgcgagggggctctgacccctggccgtcatgtcggccaccctgaggcccgaaccggaagaggagaaaatccagtgaccgatggaaacagccccgcggcggcccagtgtgagtccggccctcacacccgcacgcccgcccgggcctcacagccacgccgcgtctgcaccccaggcctccgaatcaccaaaccccagcgcgaacctcctccggcgcccgacaccagacacctgagcccacgccacattcgggcctgggcccgctcccgccaccactttcccgggcagctttcaacagagggaggagatcggcggagggcgggagaagcccggggaacgaggcatctcgccgcgagggggcggagggtgggcagactgagggttccccgcggcctaccactgtcaccccgatatttatcccacctaggaagatcaggacagggttctctccgcctctgcccctcagcacccagacgctgccagagctcgactttcccagctccggctgtttactcacgcgtgcggcgcgctccctcctagaccaagatggcggctgggcgggcccaggagtgcgcgggagtaggttaggcctggcgggagaagttcgagccaatccaacagtcagcggcacaccggagttatcgatcgcctcccttcccatcccttcccatcccttccctgcccagctgccgcgtcacgcccctctggtgagcatcaggtggtggtgttttgcctaaggcgagagacttgaaattcaaaatgtgagttaattgctcagactcactagactgaacatagtgggccctcagactaagtgttcaaactccaagtccagtgcttgttgaagttttagcaacaaatcagttagcaaaaggagataacgtactgttgggtttaagactaagagctggccgggcgcggtgactcacaccttgtaatccaagcactttgggaggccgagtctgaggtcaggagttcgagaccagcctggccaacacatggtgaaaccccgtctctacttaaaaaaaacaaaaatacaaaaattagttgggtgtggtggcgcacgcctgtagtcccagccacttgggaagctgaggcaggagaatcgcttaaacccgggaagcggaggttgcagtgggccgagatcacgccactgcactccagcctgagcgacagagtaagagtaagactccgtctctcaaaaaaaaaaaaaaagaaagaaagaaaaagaaaagaactgtatctcaagctggtctagattccagctggtctaggttccatgtgactttagcaagttaattaacctatgcctcaatttcctcctctataaaatagggcttttaataggtgaagtgagaaaaggttggagaggccaatggttctcaggtcttaagcgtacataacaatggcctggggatattcgttattaaactgcagattcctgggccccgcccatatgcattgtaattcagtagatttaggtagctcccgaggatgtgcattcttctgttaggcccctggggggttgaagggtgggatttggccagggcttcttccctagagaaacgtcagtaaacacaatgacagtcatttctccttactgtgaatatgctgctcctcccccgcctttttttttttttaagacggagcctcgttctttcgcccaggctggagtgcagtggtgcgatctcggctcactgcaacctctgcctcccgggttcaagcgagtctctgactcagcctcccgagcagctgggattacaggcgcccgccaccacacctggctaatttttgtacttttagtagagacggggtttcaccatcttggccgtgctggtctcgaacccctgacctcgtgatccacccgcctcggacacccaaagtgctgggattacaggcgtgagccaccgcgcccggtctgcttctccccttttcatatgccttcgtgcactctccacaacagacaggattgcattaactctaaatcagacacatgaagcccagcagcaatggaactctccatcatgggttcctggcccaggatttgagccctcactcacatgtgctgcaactctcagctctagaagtgggatgttgctttttgctcttctttgtgtcatctgcacttagcaaaatgactgccaaacgacgcagtacatacatagtatgcttatatatatatttatttatttatatgtatttatatatatttatatttatttacatatatttatatatatacacacacacacatacatatatacatatacatatatatatatatatatatattttttttttttttttttttttttttttttttgagacggagtctcgctctatcacccaggctggagtgcactgacctgatctcagctcactgcatcctccgcctcctgggttcaagcgattcccctgcctcagcctcccgagtagctgggattacaggcatgcgccaccacgcccagctaattttttgtattttagtatagacaggtttcaccatgttggccaagatggtcttgatctcctgacctcgtgatcagcccgcctcggcctcccaaagtgctg

SEQ ID NO: 3656 - DNA, 4001 bp, Homo sapiens
ctgagggtgaatgaggaaaaagaaattaatgctacctagattagaccaaagacaattgtaattttagaagcacttacttagatgtagattcccaaaaggaaagaaaacagattaatctctgatctctgctttcaagagcacaaactcagattcaagtgcccctaggcaactttaggcaaattaaattaatttcttcacctgcaaagtgatcattaagaaataatctcatggaaccatggagagttaagtgataaagcgtgtaaggtaattaagaaagtacctgagaagctttaagtaacaataaagagtattataatcagtattattgctgttattttagattcaaagcttttgagtcaactggcaaaacttttaaaaaccaccaaaagtggctggacacagtggctcactcctgtaatcccaacactttgggaggctgaggcaggcggatcacctgaggtcgggagttcgagaccagcctgaccaacatggagaaaccccttctctactaaaaatacaaaattagccggggcggtggcggatgcctataatcccagctattcaggaggctgaggcaagagaatcgcttgaacccgagaggcggaggtttcagtgagccgagcccgagcctgagccattgcactctcgcctgggcaacaagagcaaaactacacctcaaaacaaaaaaacaaaaccaaaaaaaaaaaccaaactaccaaaagtgaaaaactgtttaacaaacagatacatacctttaaaactttgtacagccgaggaagttttttctcaatttctgtaattacttcttttccttcttctccagtcatacgacttaaaaagcaggaagaacacaagtttaagtagttgacaggaaaaaaaaaaatactctcaaaaatacatgtacaatctttttaaaaattactttctaactcctgcaaatgaattgacccagtaggtaaggtccttaagggtatacagaatatataatgcaatatatatcagaaatgaaagtagaaaaaccctcagaataagtttttacatcgagtacatgcaagttgtgacaacctgactccaaaaagacagaacagggatccctattcctagttactaacgatttgctaagcctttccaaagggttttacaaaactttagtacatttctatgaaaattactttgaagcattttgcaattaataaaaatcagtgtattgctctgttaaaaaaactctgggtagccacattttcccaacacatcggaggtttacactgaagacccctcctccaacaactacttccaaccgaaacttttaaaaatccctcgcttgcaaaacacacgtgcatgctccctcgttccaaacacacacctcaagcgcagcagcagcagtacccgggaacgtcacctagaatacatctcccccgccccccaaggcgtccgcgactcgggcgtcctcacatttgctagacttctagaactcacattcattctacgcgcccctcccaaccaccttctttctccccactatagagcgccccactctccgctacgccccgtggcggacctcacctggtcagagtcaggtaagcgtcagtctgccctccatgggaggcagaagggtcttccaaagtctccaacagcggcgcgagggggctctgacccctggccgtcatgtcggccaccctgaggcccgaaccggaagaggagaaaatccagtgaccgatggaaacagccccgcggcggcccagtgtgagtccggccctcacacccgcacgcccgcccgggcctcacagccacgccgcgtctgcaccccaggcctccgaatcaccaaaccccagcgcgaacctcctccggcgcccgacaccagacacctgagcccacgccacattcgggcctgggcccgctcccgccaccactttcccgggcagctttcaacagagggaggagatcggcggagggcgggagaagcccggggaacgaggcatctcgccgcgagggggcggagggtgggcagactgagggttccccgcggcctaccactgtcaccccgatatttatcccacctaggaagatcaggacagggttctctccgcctctgcccctcagcacccagacgctgccagagctcgactttcccagctccggctgtttactcacgcgtgcggcgcgctccctcctagaccaagatggcggctgggcgggcccaggagtgcgcgggagtaggttaggcctggcgggagaagttcgagccaatccaacagtcagcggcacaccggagttatcgatcgcctcccttcccatcccttcccatcccttccctgcccagctgccgcgtcacgcccctctggtgagcatcaggtggtggtgttttgcctaaggcgagagacttgaaattcaaaatgtgagttaattgctcagactcactagactgaacatagtgggccctcagactaagtgttcaaactccaagtccagtgcttgttgaagttttagcaacaaatcagttagcaaaaggagataacgtactgttgggtttaagactaagagctggccgggcgcggtgactcacaccttgtaatccaagcactttgggaggccgagtctgaggtcaggagttcgagaccagcctggccaacacatggtgaaaccccgtctctacttaaaaaaaacaaaaatacaaaaattagttgggtgtggtggcgcacgcctgtagtcccagccacttgggaagctgaggcaggagaatcgcttaaacccgggaagcggaggttgcagtgggccgagatcacgccactgcactccagcctgagcgacagagtaagagtaagactccgtctctcaaaaaaaaaaaaaaagaaagaaagaaaaagaaaagaactgtatctcaagctggtctagattccagctggtctaggttccatgtgactttagcaagttaattaacctatgcctcaatttcctcctctataaaatagggcttttaataggtgaagtgagaaaaggttggagaggccaatggttctcaggtcttaagcgtacataacaatggcctggggatattcgttattaaactgcagattcctgggccccgcccatatgcattgtaattcagtagatttaggtagctcccgaggatgtgcattcttctgttaggcccctggggggttgaagggtgggatttggccagggcttcttccctagagaaacgtcagtaaacacaatgacagtcatttctccttactgtgaatatgctgctcctcccccgcctttttttttttttaagacggagcctcgttctttcgcccaggctggagtgcagtggtgcgatctcggctcactgcaacctctgcctcccgggttcaagcgagtctctgactcagcctcccgagcagctgggattacaggcgcccgccaccacacctggctaatttttgtacttttagtagagacggggtttcaccatcttggccgtgctggtctcgaacccctgacctcgtgatccacccgcctcggacacccaaagtgctgggattacaggcgtgagccaccgcgcccggtctgcttctccccttttcatatgccttcgtgcactctccacaacagacaggattgcattaactctaaatcagacacatgaagcccagcagcaatggaactctccatcatgggttcctggcccaggatttgagccctcactcacatgtgctgcaactctcagctctagaagtgggatgttgctttttgctcttctttgtgtcatctgcacttagcaaaatgactgccaaacgacgcagtacatacatagtatgcttatatatatatttatttatttatatgtatttatatatatttatatttatttacatatatttatatatatacacacacacacatacatatatacatatacatatatatatatatatatatattttttttttttttttttttttttttttttttgagacggagtctcgctctatcacccaggctggagtgcactgacc

SEQ ID NO: 3657 - DNA, 4001 bp, Homo sapiens
gggaagtgaaaactgtcacctttgacaacctgttcctaactcttggatgcacccacaacatgtgggagatttggaaagcatcaacaaggaggtgaaggagagtactgactgaacagagatgctcaaagctgaaatattatttcagaaccacaaaaattaactagaaaaaaatagaatcaacggagctgatgttttaaacaaacacaattaaagactaacagttcaagctatgtttgagttttataacagcataaaacaaatgtgcttcaacactgataatttgaaaaatgacacattaaaaataatgtacaaaatacatcagagtacttgcttgccttcagaataatttcaaaggttgtatgaagtcatttacatagctttttttttttagagtctcgctctgtcacctaggctggagtgcagtggtacaatcactgctcactgtagcctcgaccacttgggctcaagtcatcctcctgcctcagcctccctagtagctaggaccacaagcgtgggcaaccacgcccggctaatttttacattacttgtagagagtgagtctccctatgttgctaggctggtcccgaactcctgggcccaagcaatcctgcctccacctctcaaagtgctgggataagcagcatgggccactgcctccagccttgttagctttcatacttctaattatgttaatagtatacacttgtagtataaaaaaatatagtaattaaaaactttaccaaacagattttaaaactctaatattttaataatcagatacaaagtattatgttacgtttcaatttgtaaggtgctagtaaataacaatggaaaatgacattttaatatagattatggcacttaattaatgtgtattattgtgtaatattaaaggttgagatgagaatcaagtattctaaaatgacatcaaaatgttgactctaaagaaaatagaatatgaaatgttttctgaagaaatgtctgaagaaacatttcatttccatgttctagttttatttaaaattaattttttgatgtagaaattatgctttactaaattaattataatgctttcaccataaatctagcacagatattcattaacttcatcagcagacccttagaggagaaaaatataaaatgcataactctaataaactcggggaaggtatgacaaattttgcaaggataaagagacattacaaaaaagcccgaggtttaagtttcctaagagaattgcactgagaccttgaactagtgatcagatttcctacagcgtcctggaaaacctggtactttcgaagtgaattctattgttcatttcatcaggttttcatggtttttttgtattttataatttattttaaatttagggctcccaagtgtttgcctcattcccctatgttggcagcactgataatccggccttcgtttttgtgtgaaataggcacagacggagtctgagagcaaaaaaaaccccacacaaacaaaaacaaaatgtttgcgcaaggctgaaagccgagcgagagcccagcaagtgtctctgttgaaattctttggggtttgcagggaccagccgggccgaggcagcaaactgcctgttccccacgcaccccagaagggtccgcgtgcgaggaaataccagcgacctccggggctagggcttccgtggcgcagggtcagcgagggatgaacccgggaagccactatgggccgctgctccagccccgggaacgcagagcaccgctggctagcaggctcaagcttcgccagggacacaccgacccggaagtgcagtcgcccccaccgcaagtatttccgcttccctccgcaagtccccggcgcggtccggcccccagcggctgagcagccccctcccagactgcgcacgcacctgtgttcactgcgccggcctttcagctgttggagagcggagaccaggacctgctggcgcgcagtggcggacggacagtagccctggagcccgcgggtcctaaggtcccgcgccgcggccgtcgcgtcctgacccagatagcggaggcgccgggggaggagcccgcggccgctcggccccccgctcccgccccctctccctctcgtggtgggttcaactctaccgggactggcgttgggtgcaccttttgcaaaataaaattgcacgtcgcggggcgcctggctcgcgccggaccgtgtgtctcggccgtcgcctcccttcgaagccggtcggcaccttttcccccgcctgggctctgggcctccgcgctagccccagcgcgttccctctcgcgttgctgccactccgcacgcccaccgccagctcgcttcgttccggctctcaaacccactccctctcccctagttaaacctttttctgtgccctttctaggcacaaccttgcactttactcctcacgactgaattaaaggcagacgccttgcactaattactgatatctgcagccccgtgttcatagctttatctcacgttttcttttaatgagcaattttgacagcctcttccttctccccgccattccgagttgcctttagatgaaagccgctgttttttcagatgcctgacatttaaggttttacccagctttctgtggtttgtataatgaaactaattctgctaaatacgctcttaaaaactgggccgggcgcggtgggtcacgcctgtaatcccagcactttgggaggctgaggcaggcggatcacctgaggtcaggaattcgagaccagtatggccaacgtggcgaaacccctgtctctactaaaaatacaaaaaattagccgggcgtggtggtggacgcctgtaatcccagctacttgggaggatgaggcaggagaatcgtttgaacccggaggcagaggttgcagtgaggcgagatcgcgccaccgcactccagcctgggtgatagagcgtctcaaaaacaaaaacaaaacagtacatacactgcttctgtattgtccgcaccttgagtattactgcctcaagcttaggtttgcataacattaatctctaaacttcccaccaatatattgagcagaattaaaaatgggtacactctttctcaaaacagcaacagcagacaacacccataaagccatgaagaatccagaaggcttgttttgcaatccatatactactgtttacggatagggattcagggattctataggctctttaagatgattttttgagcttcaggcaagccgcattgaagaataagtaagcctggccatggtcattttattaaaagtaatttgtagcagggcgcagtggctcacgactgtaagcccagcactttgagaggctgaggcggacggatcacttgaggccaggagttcgtgaccagcctggccaatatgatgaaacaccatctctactaaaaatacaaaaattagccgagtgtggtggcgcacttctgtagtcccagctgctcgggaggttaaggcatgagaattgcttaaacctcagaggcagaagttgcagtgagccgagatcgggccactgctcaccagtctgggacagaatgagactctgtctcaaaaaacaagagcaaaaacctaagttgtatttggaaaaagagcagattaatctttaacctctcagatttggaactagtaaaatattaccttctacaaacccacttcactcctatttattatggtttgcagcaatcttgcaatataatgctagctttatttaactagaatacaatatgatataaaccgatcatgcaaaacaattttctcttttaacaagatttagataccaaagaaacatgactgtctcttcgctaatacttaaaaggagcttttcagtatttaaaacaaaatttaagcttttccaggagcccactgagttgttcactgctgcatccccagcacattgcacagaagaggctttcaataaaaatgtgacgtatgggctgtgaacaaggccttaccagtctattccaagaggaagatggcagctgatactgacttgatcttcag

SEQ ID NO: 3658 - DNA, 4001 bp, Homo sapiens
caccagggaaggccctcatcccctgctgctacttctttggggaatgtgggttccatccagggttgggggcctctctgctcacccactctgcacccaggatcctagtcccctgccctctggcacggctgcttcctgcaagaaagtaagtctttggtctccctgagaagccatgtccctcgtgctgtctcttgcctgtcccacctgcgccctgccctccagcttgtatttaagtccctgggctgccccttggggtgcccctcgctcccaggttcccctctggtgtcatgtcaggcattttgcaaggaaaagccacttggggaaggatggaaaaggacaaaaaaattaataaatttccattggccctcgggtgagctgagggtttctgcaaggaaaaaaagaaaagaaaagagacctagccactggattaacccatgcaaagatgagacagagtcacctatatactctcaagtcttttttgacctgcactaaaattcagtagccagtagcccaagtggctatttaaatttaattacaattaaataaaattacaacttcaatgacataaaaggaaaattcagttcctcagttgcattagccacatttcatgtgctttgtggccagagggggctagtggctaccacattgggcagcacagacttggaccatttccatcactgcggaaagttcttttgaacaggagtggtctagagaattctcagaaggagtcagagtggctacattaaaacagtaggttatacactttggcaagtaattactgccttcctcaatattcacataataccacctgctaccagtaagttttttatattccttttgtcaatatggtctaaactagcttaaatactgactactgaatatgactttaattataatctaagtcaaaatatcactccttttcattttatgtgagcagcaggatatatgactggaacccataatgaaaatacctaaataatagtaataatgataataaccaattcaacataggaaatatcttaaagaaacttaccctccttcactttctgcttcctctgaactattacttgttgctgaactttgaattgtggggagtcttctttttctcgctctgtgctgagggcttatcttatgaacagttattttccctccaagttcatcttgtatatattcctccagctttggaatagcttctttaagaaatctgatttcctctttgagttcttccatatttgtcagtaattcgtttaacttctccagtatctgaagttgcctttcttgaaagattactgttgttccttggtcatcatgtatttcatcttgcaaagttattgaattaaatgtattacccagagaaagaaattcaggtaacttcattgctatccctggtttacggaccttgtggtaccacaagagcagcaagctgattccagcagtgcccaccatgatgccaagtatcaactctttgtttgtggaataaggcatttcttggttttcgtttctaaaattaaaaacataaatgtaaatgaatgttgtttatgtctttgtccaagacaaaaatataggtgctttttcaatcaacaaaagccaagtttacatcacaggatttacaaaaagtaggacaatagcccaaagggtgggaaaggacaaatggaagtatactgttgtaagagtcttagattacaatgaagaattatcatattaagttaaagatgcatagctgtaaaccctagaataaccactaaaaaacaaacaaacaaaaaaaccccaggcaatacatatcaagacaataatagagataaaaatggaacactaaagatactcacttggtccaaaagaaggcaggaaaaggagaaaaaagaacagatgggcaaatagaaaacaaatagaagagaaattacgccattattaagtgcgaaaatggtgccaaaagatcaagaaataacaggttttttttgccaacagaaaagagtccataaaaagaaaagaaaaattgatgaagtagacatatagaaaactgcatagcaataaacttgagaaggcaaaggaggtgggctctatcgcacaagcacaggagttgacctttgatgggaacataaaccattcattcatagtcataaaaggcagattatgtgagcagagatttaaataggtgggtagatgcagtggtgggaggttatgcaagctctctttgattgcttcactgttctaagataggaagtgaagataggaagcaaagtaaatagctgggagtgtgaattggggaaaaaatatcagtaagatgaaaattctgaattaggttgtatacccgaaattcaccatcctctgctttatatcctgtgattccacatattctaccaagcattgtttcttacacttcaaatggccaactaaatgtaatgtttcaaatgcttccttggtggtctactggttaggatttctgggctcgcaaatgccctatggaagagggtctgagagaacaagcagccataatctatttctgaaaagcctgcttaaaataagaacgtctttggattcctatttcactagagtatatgcctggaacacagaaagtatcctgtttggatgttctacacttcattacaggcctaagtgtcaaagagaaggactgactttaaaataatcttccagaaattacctcaggtgttagtgaatattatatccaagagatttaagaattccttcttttaaaccaaagattccagagaaagccttggtacttaatctggcctgctttacctcacagaaatttgcctggaattaacttaaaaaaattttttttcacctaattggtataactgggaactataaccatctgcccactcccagctcatccaggagacatgccagcaacagattccaatcaatttgtaacttcagctgaaattgtagctaattattgctagatgtgtaaatgtattctacaaaaaaattgtatcacaaaactaaattatcttgaaagcttattgcaaaaaaataagtcactctatgcccattaattacaactgcattccagctaatattcacacatcaagtttaatcatctttatttttgtcaataaaattattcaggcaggatgtccattcgctgatatagaggtctattaaaggaaatcttcctattctgattgctttcttttgcccataccttggacttttacattaagaaatatagcctagtttgaaaatattttcatttaataagcaaataagtagaagtaaaaatctacctaggaaggagaacttattcttgagacaggaccaggtttcagcaggtgggaaagtcttattttgcttggccctttctttaggaactgcaccaattccaaatcatctcttccatgcaggtcctattattattttgcagataagtgaactgaggcacacaggtgtcaagtcacttacccagtgatcacccaactgggaagtgaaaactgtcacctttgacaacctgttcctaactcttggatgcacccacaacatgtgggagatttggaaagcatcaacaaggaggtgaaggagagtactgactgaacagagatgctcaaagctgaaatattatttcagaaccacaaaaattaactagaaaaaaatagaatcaacggagctgatgttttaaacaaacacaattaaagactaacagttcaagctatgtttgagttttataacagcataaaacaaatgtgcttcaacactgataatttgaaaaatgacacattaaaaataatgtacaaaatacatcagagtacttgcttgccttcagaataatttcaaaggttgtatgaagtcatttacatagctttttttttttagagtctcgctctgtcacctaggctggagtgcagtggtacaatcactgctcactgtagcctcgaccacttgggctcaagtcatcctcctgcctcagcctccctagtagctaggaccacaagcgtgggcaaccacgcccggctaatttttacattacttgtagagagtgagtc

SEQ ID NO: 3659 - DNA, 4001 bp, Homo sapiens
aatctgaaaaaagcttgaaacaaaatcatctttgacttccatactccaataacatcagtaaactaactttcaaaactacagcaattaaatttacactgcaatgtaggaatcttcttcagaaaatgcagtgaagctttgtgaggaaaggggagttatgagaaatgaattctacaggctatgaaagtgactggtgggaaaactatttgaggtgcccttctaagagagggtaaagtctgaggtgaccttattttaggaatttcaataggtgaagatctgtcttcatcttgaaacaagacagcaaagtcttcatcttcaaacaggcctgaagttaattcgctttgaggtgggataaagcaaccagaatttttataagatgaagaaaatccagctttatggaggaatgggaaagttccactttgagagggatgctgtggaatcatgattggagaatgatctgtgctgtaactttcaggacgaggatgaaggaaatcttttaaatctttacataattggcccctttgttgaatatcattggcaattccattttgttgatcgggagaggaaatatcacttgcaagagaaaagaaggatgatgtgctttgttgataggaggctgtatcaatagtgttcccaaaggctggagaagtagtgtttgtttcaaaattcttaaaatttttagtgttatattcaggagcagagatggttatatgttttttagcatcagtattacttgaagttttagaaaagatttcgatttcatttagattaaacacattctggccacttgcttgaggatcaaaaaaaatggcactcttgtaataggaaactatacttagtttacgggatgagaaacgtcttctgcgggaaataaagctaccacaatggtctgaggaagattttatatcagtgaagcctgtgtcttcttcagaatcaaagttagctctactttgttgccagtaaggggaagcatttcttttttgaaatccaacaaataaagaatatcttctttcagagaaagatggacttgatacagataataaccttctacttgctttggctgcattgactttatgtgttacaggggaataagatgttttatgaccaagagatatacttggttgtgaaatagaagaggctccacgatgctgggcgtctgtactaacttgatcttctggagaacatcgttggaagctctggtcctctttgcagcagctaagagtgagaaaagggtcaaatgaggaaaaaaaatagggagcagagtggagacctgccaagcctcctgaagaataatatccaccttttggtgtccaccaattggtattgtttccatactaatatgaaaacagcagggaataagaagaataggggagcttaagttaatggtcacacagatgtacccaaaagaatgcgggagtctaagaggttatctctacctacacagtacctacccactctattaaaccttgggaagagaagttgaaaaaatcagggaagcaggtagaaagaaagatcaggggaaacatatgcaaggataccagaacaaaaagattcccaaaggaaaagatagaactggttttaaaggtaataaaccacaatatctgttggagattactaactactgtatttaaatgagttaaggagaataaacttatattctgttgactaattgtattttaaaatattaaccatggatgaagcacaatctctctggggagaatgtttcaagtgaatatctggacagtccaggatatccagttattatgggaaacaaaggagagcactaaagcttcgtttatgaatattttcaatgttcttttagcacatgttgaagtttttttctaaggcttaccttaagcactttcccattgtaaatttaatccaaagtaagtctctcccttcccttctaggccgtcatccttaagccataaaatgccctgtagaggtggaacaggtcagaagactgaatgctcaagctgcatgtggagttaacatggcaataacacagaatgtgatgacagcagactctagaatctcatgacatcagtttatattagaactgttctgtagctcacctttctccgaagttggaattcacatggctgtggaatgtgtttctaccttcactgttggaggagtcatccaacaaatccaggggtgggaaaacagctggataaggacaataacatatatgacagctgtacaatcctttaccttggaccatctctctcaccttggaccatctctctcaccagctgccttccacacccctgtactactaactccttcttctttcacttgaacattctttaccccagatttttgcatccttcagtgatacggaaaagcaaatgttagagactttggcctaaagatacattgagaagggaaaaaaagtttaataagtagcaaatgtcattgccaccacaaaggaaacaagcatcgttcaccttggcagtaaagtatgccatctgactgcttgggccatttgcacagattacggggatatgctgtggcactatttatcactcctcagaacaactgatactcacctaaatgcaaggttaatagagttattagaaaagaaacactgtcctttcttatctaaaccaatttgggctattgtccccataacaggtatacgtgtatgtgtatacttacctatgacatgaaacaccccctcaaatacttttatttactgtgcaatttcctgatcctaaatactactaccgcctctagcctttgctcccttcctaacaccctactgcaggaaacccttgaacaaattccttttaagagacccaaagctctctaacgttcaccatacaatggtcggatttgtaatttgattttagtttacatacaaactaataaagtaatctcttactgtatcatggatgctggcagaagacatgagattcgtgggttagagacagaagacttatgttacttacagcatagcaaagcagcataatcaccaggacatttacatcagttctcctttgtcccacattgccacaggggcaatgcagagggcccaaggacacttgccttcacagtggattgtgttacaggaaagaacgctgagcttagatgatctaccacttctatagcaagtagtaagcaaatctgctaaacctgctcttggtcctgaagggaaacagtaactcattcttcaaggttgctcaccagaaccctgaaaaatggcccacataaagaatgatcagggccttacatgtatggctcatgtagcaagatgtctgggagcacaagaagcccaaggaggactgtctgtctctgtagcaatctattacattttccctctcttgtgagactactgtcttttgttcctaagccgcactaaggtctgattgtcattttccaaaaggatctcttttgcacattgcaagaacataatacgtaatgcttataaagtttctataaaaaatttttctttgaaaaattgggccagcttgttgtttaacactcccaccaatggcctctaaaagaagcatctgctcactgagctaccccaaaggaaataattatttgtaactaaatctcaacactgtcaatcactgctgctcagtcgaggtaataaagaggtcagatcactcccccgaccttattcaagcaaatctatgattatgcagacacaaaaaacggtgtttaggtgtgtgcgcatttgggggatgaggaagaagatccagatctgctcagacatcagaaaagaaatctcataccagtacaggaaatatctagaagctgattaatatcgttctaggtgaagaacttacctaaccctctaaatgtctgcaaattgcctccttttggctttttaagagaaccaaaattagacttagcccaaaagcaaatagtaaccccttataatgacaagcatctaaaacatgttcgtccttcaattcattcccaattctctttattatcaattccatgaccccaggtaccttctgcttttatcatgccctatggccacccaaccc

SEQ ID NO: 3660 - DNA, 4001 bp, Homo sapiens
tccagccaccagtaaataggaaagccctcgattctatcttcattaagcccttcaaccttacttcacatgtccaaaaccaaattcaaagtcttcccaggattcctgtcccattccaccttcacttccctgtatctaccaactatatcatcatcgccacgtcagtcaaatttcccttcacaggcagccaccaaggtctgctcgtttttccatactagtattgcaactcctatgagaattaatacggtttttccatattaaaatctcatccactatgactgcaggtttgcttccttcctggagttcaaaaatgactgcagtgtccagaatgagaagctgctgtaagactcctttcccatggaccagcacccatcctcaactgaaacgcagtctgggaaagtgtgaaaaaatgaaggagaaggagagagacactcagctaacgccactgccctcatctcacctgccacaaataatctgcatcttcccccagctaccaaaccgtccttcacataaatttctgttcagcccacaagctgaaaagccccctcagcctcttattaaagacccattaaataagtccttcacttcttgatcaaaaggaatcatcgctgtgacttctaaagtgtaagaaaaccaaacctttaaaagtacctgtcctcagggcttggggcagtaaaaaaaaaaacaatctaggtgaaacaccttctataggaaaatttattttttttgaacgaacttaaccaggcaaagcaagtaactagcaacatgtgcacaatttacttgggcaaatgtcgcccgttcctcctcggtgtcatcagaaggtacactgggagaacagaagggttgaattgagctggtttccaaggaaccatgtcagagccgctgcggagttaagagctgcgtccacacagcagccaaatcatgaagttgcaggagcggctgttgttaacccacagctaagaataacgctcgactttccaaaataaaacgaagaaacgaagtcccctggccaaggattcggggcggcacagaggggaaacggagcttcctgcactgccctcatcactcagaacctggggtcccaggcgattcagtcaccgcccacagaacagcgccgcgggcaccacgtgagactcccggggccggctgggagcgggggacgaggggcgcccactcgggggtcggcagtttgcaggtgcgatgggcggccccctcacccacgtttatccggactggagcccgccgctcccggctgggtttccgggtggttcgcgctccttctgaattggcagcgaggtcgcggcaggttcgaggtaaatcggacgaagaggggaaaaagtctcaggggtctgggggcctccgcgcctcaggggaggcaagggccgggccagaggcgcgagggtgggtgagggattcccgccgcggggccgggaccggggctcgggcagtgggccatgccccgcgcgcccacgcgggccgccctaccgtggctctgcaggatctcgtgcttgaggccgccggtgtagtcgatgagctcctccaggccgcgctcgcacagctgcccgtagcctgagaacttgtgcagcaccttctccagctcgcgctccaccgtcacgcactgatccatgccggaggcggcggcgctcggctcctcggcgcccaggtgtccgcagccgttcggcccgggccccaccgaggccgcgtcctgctcctcgttccccaagcgggcggcgcgggaggctgaggcggccgaggcggcgggcgcactagccgcggcgccgggggagccccgcgcagccggagcccgcctgccccatggcgccctagccccccggcgagtcgccgctgctcccgttcgctcgctgcactcggctccgcgtccccaggccccgctcgcgacgttcgggtgcctgcgacggcgcggccgattgtttttgttttcacgggaaccgaccgatgacctggttctcccgggcggcaccaagcgccgccgactggggggagggggatggccacccgggcgaggaaaggaggcggcgcgggccgtaccaagtacaccctcggggtggggggtgcgacccggcgagaacgggcggaggaacgcgacgggcgcccacacgcgccgccactctaatggtgtgggccgtaccacacggaaggcgtgcgagggagagggcgagggtggagcgaggccccaattggcctgaggagctaaatagggaactttggagacagccccagcgctcggagagcgcaacaactacgcgctccataaacaaggaggcggaaaccggccctcaccactccgcccagaagcggggaaccccaaccaatgggcgcggggagtggtaagaagccaatccctggccgaggcgtaagccttcagccaatccgggctgaggggccaaaccaacgggctcgctgttggagggggtgacttggagagcgtaccgagaaacgagtagtttatggaaagccttgggggaaaactagacaaaaatacaaaaggctgttttccataggacgtcgccctgatcccaatttatttcgtctcctcatcgatcttaagggaaaggggtaccgtcattccgaacttttgggcgacggatccatctcccgggaatgaaaaaccaagccaggccgcccgggggctggttctgcgtcggcggggggtccctaatgggaattaaaggcgggggtgattgggcccgggtgaggggagccgcttgctgctcgcgaaaggcccgcgccggctgtcagcgctgccccgggcttgcgacacccaggaggtcatgtccccatcccccgcggaccgtggccctttggccccttggcctggaacctctcctgacggtggcctcgccccagagccatgtgccgggcagcttagccgggtggaaagaacacgcgctggagagccgggcagcctggcccttgctccctaggaagccttatgctatcggatcggatcggctttaccccctcgggtaaatccttcccatcgcttgctatggcgtctgcagccttggcctagacctccttgatcagcatcggctgcactacctttgcatttcttcaggagcccagctagttcgtgcctcagggcctctgcacttgccctttccttggcccagaaaactcttcctcctacctttttcatcctgaagttcttctcagctcacttgtccccttacagggtcctcccctggctgaccacactaatgtacttcctccccaccgttaataccataacacattttattatttccacaccacttaaactctgaaatgatctgatgttttatttttctgtctgcaccacttacataaaaccatgacggcaggccccctgcttgtctaaattttttgcctagaacagcccctggcgtgaggtggtaggcaattctttttcttaaattaacgtgataacgtttttgagccttaacttccgtataactgagaaataattggaattaatacttaactaaattgttagataaaggagaatatatgtaaatacccataataggctcatgataaccacatgataaaggtggtagtagtcattattagggcagccccaactggtattatttcagatctcccttctccccaccccatttttcttccctcttggcagatgtctctgattcttcactgagattaaaaaaaaaaaaaaaatctagctccagcaacttctatcactcttctccaagtattgctgtgtaccacccattttgtgaacattctcatgtacccaaaggaccaggagtcccttctccctttccaagacagccgttggggcctgcgggctgcctctcacccctgtccagatcttccccctctttctctgcagtaggttcttcctttctactttcagcccaaatgggtttgacctacctgggggaggaaacttaatttaaccctcctcaagcactcatttctttcactgccaaactgcctagacaaatctatgtttattcctcccttttcttcaaggatct

SEQ ID NO: 3661 - DNA, 4001 bp, Homo sapiens
ctcggctcactgtagcctccacttctcgggctcaagcaattctcccacctcagcctcccgagtagctgggattacaggtgtgcgccaccatgcccagctaatttttgtattttagtagagatggagtttcatcatgttggccaggctggacaagtatttttttaaaaaaagacaaggaattatggcataaaaggctgaatggaacaggagagctgagtcctggcttatccctaatactgtaagtaatatgaaccactatttgtaactgctttcagtctgttccctaatttgtaaaatgaaaacaatcacacgaggttccctacatgcctagagggtagctatatagatcaaatgccatctggcatatgaaagcctttgaataggttaaaatgtcacactgatatgagaggtgactaccttctgaaacttccgggcttgcagatttcctgacaaaggcccaggcctcatcctctgtggcaaacttcttaaatctggcagcaggaaaccggtccacctgtgctctgcactcattcctggaaaagatgtgcaatgttatttccttcttccttctctaacttatccccttttttattgagattcttaaggttggaaatacagttgtcccttggtatctgagggagactgattccaggaagtcctccaccccatcacagataccaacatcagaggatgcttaagtcctttgcataaaatggtgtatttgcaaataacccacacacatcttcttgcatgctttaaatcatctctagtttataatacctaatacaatctatatagttgtattgtctttttatgcgtattttaaaactgtattctattttaattttttccaaatatttttgatctatggttagctgaaactgaggatgcaaactggatatagaggaccaatttttgcgtgaaaagggcagagtcgcaccttatagttttatcctgcacgtcagactctacacctgtgttctactgtatgccagccagccagcacaccagcaccataaggctttcgtcaaactcaaagcataacaaaatactgcggtctttgaaaaaaatattaaccatttctttacaacaaaaaggtcaacttctgagatgcttcttcctcaatactgtagctgccgtgcatggggaaacacaggtaacgaactttggtatcttgtagtgggaagagttctggtggtacagtcagaacagctgggctcaagtcctttctctgtcagttacatgccctgggaacttcctgaccccaagaactatacctgaaagtgagaataatccctctcacctccaagggttgttacaaggatccaactgcaaatactggcttattagaatttgccttttttaaaagggaagattaggtactgagttccaatcccaatttagctggtacggaaagtcttctggtaacgggggttcgttctgattacgtgtcactttttgttgcactttaactgcaacaaagatggaggattaaacacagggtttattaggccacccctaacctttacgcgacgtttctgatatttcaaacaagtcttcggtgcgttccagtcccaggccatgagcctcctggaaccccgccggccgagcaggaaaacgaggcggtcccccgaccacccacagccacagcgcgcggcacagactcggaccgccaggctcccgccgccggggttagccgggctccggcctccctcgaccccgatgccggcagggaggcgcctcggcgggcgggccactcaccaggtcagaaagaccccggtcttgcggcccctcctcacggcatagaacatcccgaacccgcgagagccgcggcggcagggcaaggcggccaaggcgactctgtgggccaggaacagaagccagctcatcgctcactcccggcaccgggaagcatttcgactcccggcccagcgtgggcgcgagccgccggcgctcaacaccgcacttccgtcaccggcgcgggaagatgacgcacgtctgggcggagtcctgatgagggccggggcctagggaggggcggtgtcgtagggcggagcccggagctcggcccctgacgagcccgaactcgtcaacttcctgtcggtacttgaagaagcggagccagggctgagatcccgaaggcgggcgaggtctgggatggggcggggcctatgggagcggggctgaagccctgggcccggcagaggaaggtcgagatggaccatgttgggccccttctctccccgcccccaggccgcagttcgggggccacgccccggcgtgctcgggtcaccgcgggaagcccttgaaccccctggcgcccggcacccacgtgcggtaaccgcggctcctcgagagctccagggatgcggatctacagtaagggctgtggccagatgaatgaatgcacattttttagtgggcagaaagatgttagaattcatgaattagaataagcacaaaggagggcgagaggggaggccgtggaagccgcattcctccccttgccttgggcgcccacccccgaaggggcgcgtcccctccctgctccactgcacgtgggtgtttaaccaggggatatccagtgcctcaagcaccacgacccgggagaaaactgagttgagaaggtaacttttagaattctccccatttgaccttttgctctgtaagcaaatcaagtaattttaaaagtgttcatgggttggaggggcgtggtggcttacgcctgtaatctcagcactttgggaggccaaggcgggtggatcaccaggtcaggagatcgagaccatcctggccaatatgatgaaaccctgtctctactaaaaatacaaaaattagccgggcgtggtcgcctgcgcctgtaatcccagctactcaggaggctgaagcaggagaggcgctcgaactcgagaggtggaggttgcatctgggcgacagagcgtgattccgtctcaaaaaaaaaaaaaaagtctccattggcaaacattgttattcgaattatttttaaaccacttttctttaattttcttaaggtcttctaacaagccttttgcacacctgccatgtattttgtcaggccttggggatgaaggtgagaaattcgagaatccccggagataacacatcagcaaatagtgcgcaggcagaacaagctgttggaggtgagagacacagagcagagaagcacccgcacctggagagtcaggagggcctcacatcagaacgcctgagcaaatacagttttgaaggatactaattttttaaaaagttcattcacatgagttagacaaagagaaagaagcaggacattctaggaagaaggaacggcccaggcaaaagcgacgcgtacattggcgtggtaagttgtgttcctctgtgaaatcgaagaacatctttttttttttttttttttttttttaaacagagtcttgctgtgtcgcccaggctggagtgcagtggcacgatgcacgattggggctcactgcaacctccacctcccgggttcaagcatttctcctgcctcagcctcccaagtagctgggattacaggcgcccgccatcacgcctggctaatttttatgtatttttagtagaaacagagtttcaccatgttggcccggctggttgcgaactcctgacctcaagtgatccgcctgcctcagcctcccaaagtgctaggattacaggcattagccactgtgcctggccaaagaacatcaattttaaacatttcagctttcctaattttaatttaaattggccatagctttcattcctcattcctacctattgcacttcaagacggattcttattttaaaataaaaagacacacacagctgtccctaaagtccatttatgactgatcatcctacccttgtgtagatatctgaggaagcccagagatgcccgggaaggctctcaggatgacctgacagctgcccccacctcgtcagcatatctgagggttgacctaccaagggcttgcttttctgtgcccact

SEQ ID NO: 3662 - DNA, 4001 bp, Homo sapiens
aagacctcagatggtgcccccctgccactccccggcctttgacctggcctaaacccctaactcagccggggggccggatgccttcccaccgggagggtacctagccctccctaccaccgcgcgccaggtaggtgggtgggcgcatgggaaagcaataacccggccttgaacctcagacccatgaatataacccaccgcggcgccaataattcaagtagactggaaggtcaaaggcgaatagtgttgcccgcggccttggaggcaagccgagtgggggatgcaatagaggtcaggaggggctggtgtggtgaaggggaaacggacgtgatcactgggatggagtgggggaaaaagggaaaagctcggtacaggtgggcaccgaggcaccgcgggcggccggcagcgcgaagaggaggttcagctgctgcccggcccctgcgccaccagcgcattcctgggtgtaggcgtcacgggcgccgcggctgcctgcgctcagtttctttccctcaacagcggcaattgcacgtaaccgcgtcgcctctgggattttctcccgcctcccatcacccccgcggcgctccccgcctccccgccaaccagcaggttagatctaggaggggcgcccgccttgagccgggtggttccgccgaggcgcacgcagcgcccatgcaacaccccacagtatcgggccacctcggccgacccaaggcgacttgaccacgactccgcgggcggactgcgcctggccactagtggctccaaccgcggggtcaccctgcgggcacacagcgctctcctctccccactgctatctcctcgtccacgctgtcgtctgccgcccccacccagaagggatacaattttcgcccaacagggaccgtgggaatcccttgggaggggcgcagacggcttgtagcgcgcggtttcccgagacccgccgcgcatcccccagcgactggaaacccgccccaagcgccacgcggtcctcccactcttacccgaagtgtcccacaggctcaactctattctttgtgtgtcgatttcaaaactggccgtgtaattctcaaacactgtaggaacgtaattctggatagacaaaatgggcaaaagaggaaggaaagagggcaaagaggttacgtttaaacgcacgacacccattgaacacccttcccctccccgctccccagttaagaaagaaaaccttcacacatcagaccacacactaagcacatggaccctttccgaaacccctgtcctactccccactcaccccacccggctctcacagatctgctgacccgaatctcccaaccccaggttatgcacacaggaacgaacaagtttcaggagctaaccagcccatgtgcaggcgcgtcccaaccctaaaagcttccagcgcactttccctttccccgcagtctaatcaggggaaagtagtaaggaccgagaaagacttttttttttctttttttttttttttaagggaaaacggatgaaagcggggaggcccacctcgggactgggatcccactggccgaccccctcgtggaagccgcggccggccacactcacctcggggaagcagtccttggcgaagacatggagcagcgcagtttttccacactgactgtctcccaccacaactatcttgcatttcacgttctgattaggatccatgatagatttgctggataatttctggctggctcttctctccttcattgatgttgccttattttctcttggaacaggaattttctcttaagaagaaaaaaaaaaatatatatatatatatatatttctctctttataaaaagcagatataaaaataaatcacaaggctgatgggcaacctctgaaacgcggcgcagacgaggaggagagcgagaggagcaggctggttactcccctccaacaagttttaagcctgactcctcaccgcgcctcccaagtccaattccgagccgactgctttgtttcacgctctctgcgcggctttatacgcccggccttccaatcctcttctttctcaatgagaggaggaaactgatctgcctcctccccttttatggagcctgggagcgagcgctgttggcgttgcatgccgaaaatgtaagcagtgcgccctctagggtgcccattcgggatctattttagaccaaggctcttagacaacatgaagatcccaaagatgctttgctgacaagtccacagggcaaggtgggaaactggtatctgtgcatactgatttgaactacaatccctttaaatatagtttaataggggcttatctgtagaagcctcatgagcatttatgaaaacaaaaacatttcccacccaagttaaaggacagtgataaaacataggaagcaaatcttgggtggagaatagttgagtggttctatttttttttttaatggtttgtatcaggtacataggccatggaccaatagatcagcctctttattccagatgcaagaacaggcttgcctgggtcacggtagtagactggcttctgaaacctgtcagtttcagtcgtacaagtggaggcagaaaggtttcgaggggtgggtacaggaggtgggaggggagaagaaagagaagtggaagatgcccatgactgagtgacaaaggccattggaaactcaaccctactgcgctagggacccaaacacttgtcagcttagttgcacctccccacatttgcagtgaggggactggtgggggggcagattttgatactattaattctttatctatagcctccatcttcccggaatcaaagcaccctagactggactcagaaggcacaaacatctttagctgaaaaatgcagatacaaccctccaccctctcttctgtcctcctccacatccatctccctagccctccaactcttccccgcaagcaaaaatcttagaaaggaccagaatagcccgcacatttgttctttttctatgagaagtctttctttttctcatcttcagctcctgcaccctaaatgctcaggaggtttcaattgttacaatgtagtagcacactggccaaaaccagcttatatggtcccctgtggagactcctaggcttgtaaatgagaagataaggtgaaaacaaacaaatcagaaagtttaacatgggaagtgaaaaggcacaatgaagagttgtcaaaagcactgatgtaagtagtggactggtagggcccctgaagcctaggggatccaggaatgatgtcctatttggggctgagaaaattggagccccctcaaagatcattgactcagactccatcggtgggtctgtgtttacacaaggggagggttgacccacagagaagcgggttgctggccctgctagggttcctagagcagcctttgccaatgtttgttcttctgagctttagttccctcctgacacaaagggtgccatggcccaattagtgagggcgacactgtacccacatcactcactgaagattcgccaagcacactaatgttacaaacatttaaaaatcccagagaaaagcagactatttaacatagtttaacctagcatttcccaaaactacttaacacaggaaacattaatcaaattattcacgtttgtttacttgtttaaagagcaatgggcatagtagttggggcaggagatcacaaagaggtgtatttgggtccccaacttcacattttctgtatgactttggatggattatttagcctctctgagcctcaatttcatcatctgtaaaataggagtcataatggtaattatgaggaaatgcaagtgacgtttgcagaatggtttctggcacaataaagagtccttgacctgtgttatagtttgcatgtaaaatcttatttgcacttttcagaactgttgaatgtgtcttgagaaattctggcttcattggtggactcactaattggagctgtgtccatcctatcttttgtcttatttttaacttaatgaaattacccctttccagagatatgatttgacctccc

SEQ ID NO: 3663 - DNA, 4001 bp, Homo sapiens
ctaccaaaaccaacaattactaaaaacacattctttaagacattgaatattctctcagcactatttcacgtatatttctcaacccattaaacaatgcaagggtacctgtgacacagaagacaaaaaaaatttttcttttacacatccaagatgcaaatttttaaaaatcctaacagaaatataatataaactcgaacatggcaggcatttatacaaaatgctcgccttattttcaccaaacttaaagtctgaaaagctaatactgtacggtgtatactgtctatattcaaactcatgatttaacatttaaatcctaggcccaagtgcctctgatagtaagtattccaaagatgtgtccccactctgggtatcttattattactatcgtgacaaatattgctattgacagacaacgttttggagtttttcttacgtttttatgaacttcaactgacaaataatgctttccagtttgtaactagttgatattccagaattttgagaaaatcactcaacttagtaaacaacgctaagaagccacactttaaactgtcattttacgataaccttaaaaggatacaccaacactcctccaaataatttcagactcctcctcaaagctgggatccgcatacttgattgtaggaagcttggacgaagaaacctgggcagctttaacgcttccaggaaaggcctcactctgggggaacagccaggtaccaggaggtacaggtcgtcccctctcccaggtggaggggaccctaggggaagcccgatactcgcctgacttttccaccagctcccggacatccttcttctcgggcaaccctgagtagcccaacccccggcactccaaaatggtcttcagcttcttgaagctcagcgccaccggatccaccagctgggtggcaaagatgccagtttcataccacacaatggcctcaaaaaacctggccaggacgaacaggaccaggaaatagaggagcaagaaaaaaagcttcagccacatcttccctggagtttcctctctttccagagagctcggaatacgggagagagaagggtcgagggcgggggccgcggctcggtggcagcttgggcgagggccccgtgtccacgcgcgggccacccggcgccgtcactggccggccatccccggcggggaagcaggtgacgggatccgcgcgggcgcgaggcggcgacgagggacgcagagacgcagagcctcgcgccgggcctcccagtcaagagccgacaaaaataaaggggaaaaactcaaaacccccatccattaagcacagaaaggagaggggcgcggggagagctcgcggggaagaacaaaacgagggacgcttcccccggggcgggcactgacccaggtggcggggtcggccctccggtgccgcgatctcaagggggagggggagaccaaaaaataactcagatccgcccaggaggcggggatccgggcggcaggccggggcccgaggggccgtgggggccggactcccgcggccgcgggtcaggagggcgcggcgctcggccgggccaggcccggggcccagcgtgttctgcgcggggaggagcggccgccgcaacgccgcgcccgaagcccaggccccaggccccgccgaccgcccaggctccgcgagaagagcggcgggcacggcggcggctccaggttcgctcgggccggctggcgggcggcgcctctcaggcgggcgggcactgcggcccggcccaggatggggcgtcgcggtctctgcagatggaatcggtctcggagggaaaaaaccaataataggccccgagactgctcctccaggcggctacccggctgcctcccggccactcagcgcccgtcccgctcggatgggcagtgccggtcgcagcacccgtccccaacacccccgccacctccggagaccgcggccgtaccctccacaaccgtgtatcagcggcggccgcggccggagccgagacataacaactgacgtcgcgatgaggcggggccggggcggggcctgcagggtgcgcccgcaggggccgagggcggggaattcggggagccgcggggctaccggactaccgaacgaggggcgggaggagaggcggagccgcagcgtggtcggggccttcccgcggtgccgaaagttgcctctccgtgcttttgcggcgtggtctccccttttgcccctccaatgtttagcaattgattttgtctgaggattagtctttagattgtatcactttgtgtattttttgtaaaaatagagcagttaattattctcttaaaatcggtgaaaatagaaatgtacgttttttgatgaatcctggtgaacagggaaatttttggcacagttggtttgagatggtagaaggttaaacccagaaagcaaatgttttgccccctcttcatgagaatgtggctttgcacatgtgtgttggaggaggtttggccaaaactggagttcgcgttatactaggcccagttgtcgctgccagttacagccttttccctccttcagtctcaagggtgttaaaagcctggtgtggactccctgagttcctaggacaaagattgtcgagtgtagataagtccaggtgcaaagttccgggtgctttattttgtacatgggcctggcacagtggctcacgcctgtaatcccagcactttgggaggccgaggcgggcagatcacgaggtcaggagttcgagaccatcctggttaacacggtgaaaccctgcctctattaaaaatacaaaaaattaggccggcgtggtggtgggcccctgtagtcccagctactcgggaggctaaggcaggagaatggcgtgaacccgggaggcggagcttgtagggagctgagatcgcgccactgcactccatccagcctgggtgacatagcaagactccgtctcaaaaaaaaaaaaaaaaaaaaaaaaaaaaaaagaaagaaagaaaagaaaaaaaagagtcacatggacaagcatgcgatacctggttctgtgcttataaatttaaccgggccgagcgtactctttacgtcaatctctgtgtcagtcttgagggaggaaggagttgggttcataaactgaacaaggttggctttgaccagccccttttgataaggaaggaaaaaaaaaacagtaattacggggaaatgttactatttgtgcaaaactgtcaactatctgaaactaggggtgaaagttttaggaagaaagggatcatgatcccaggtcatggagcaagggaggaacgggaagcaaagaatggactgtgagaatgtagcctccgaatggtgcccatttaaaataaagtgaacaagggcatttcagtgccgggctagtgggggaggagttggaaggggatgggcccagggagcattgagaatcagaggaggaggtgtaggaatgtccagccagcaactggacactgcccctgtgtctttagcttccatgtggctttgttctcgtggctggcagatcagtgtgggagactgtgttaaacaactgattctaacaagcctggttctgaaatttcagaattcttgggcatgtcttggtgaccctttgatgatattgtccaaaccttgacactgaaggtgatgtccctcacctcaaaggaatgtatgtactcgctagtgaggagagactgacccaatctcaaaaatacagaataggcatgggcagggaaagttggtgtgtgagctgagggtggaaccagtcaggccagagttccaaattggaaaaaaacattagagtgtgggagggactagaaagaaggaattaaagaactctttttaaatttcttgtttgtttcaactgcctcccatcccaacccccttgctttgtttcattcatggttaacccacaggagggataaaagcattgataagagaacacattgggtcatctgaataagagagtatggacaagcacattctatgttggtggggtatacaatgtgggttagaagccccccataaaatacaagc

SEQ ID NO: 3664 - DNA, 4001 bp, Homo sapiens
aagaacttcaggatgaaaaaggtaggaggaagagttttctgggccaaggaaagggcaagtgcagaggccctgaggcacgaactagctgggctcctgaagaaatgcaaaggtagtgcagccgatgctgatcaaggaggtctaggccaaggctgcagacgccatagcaagcgatgggaaggatttacccgagggggtaaagccgatccgatccgatagcataaggcttcctagggagcaagggccaggctgcccggctctccagcgcgtgttctttccacccggctaagctgcccggcacatggctctggggcgaggccaccgtcaggagaggttccaggccaaggggccaaagggccacggtccgcgggggatggggacatgacctcctgggtgtcgcaagcccggggcagcgctgacagccggcgcgggcctttcgcgagcagcaagcggctcccctcacccgggcccaatcacccccgcctttaattcccattagggaccccccgccgacgcagaaccagcccccgggcggcctggcttggtttttcattcccgggagatggatccgtcgcccaaaagttcggaatgacggtacccctttcccttaagatcgatgaggagacgaaataaattgggatcagggcgacgtcctatggaaaacagccttttgtatttttgtctagttttcccccaaggctttccataaactactcgtttctcggtacgctctccaagtcaccccctccaacagcgagcccgttggtttggcccctcagcccggattggctgaaggcttacgcctcggccagggattggcttcttaccactccccgcgcccattggttggggttccccgcttctgggcggagtggtgagggccggtttccgcctccttgtttatggagcgcgtagttgttgcgctctccgagcgctggggctgtctccaaagttccctatttagctcctcaggccaattggggcctcgctccaccctcgccctctccctcgcacgccttccgtgtggtacggcccacaccattagagtggcggcgcgtgtgggcgcccgtcgcgttcctccgcccgttctcgccgggtcgcaccccccaccccgagggtgtacttggtacggcccgcgccgcctcctttcctcgcccgggtggccatccccctccccccagtcggcggcgcttggtgccgcccgggagaaccaggtcatcggtcggttcccgtgaaaacaaaaacaatcggccgcgccgtcgcaggcacccgaacgtcgcgagcggggcctggggacgcggagccgagtgcagcgagcgaacgggagcagcggcgactcgccggggggctagggcgccatggggcaggcgggctccggctgcgcggggctcccccggcgccgcggctagtgcgcccgccgcctcggccgcctcagcctcccgcgccgcccgcttggggaacgaggagcaggacgcggcctcggtggggcccgggccgaacggctgcggacacctgggcgccgaggagccgagcgccgccgcctccggcatggatcagtgcgtgacggtggagcgcgagctggagaaggtgctgcacaagttctcaggctacgggcagctgtgcgagcgcggcctggaggagctcatcgactacaccggcggcctcaagcacgagatcctgcagagccacggtagggcggcccgcgtgggcgcgcggggcatggcccactgcccgagccccggtcccggccccgcggcgggaatccctcacccaccctcgcgcctctggcccggcccttgcctcccctgaggcgcggaggcccccagacccctgagactttttcccctcttcgtccgatttacctcgaacctgccgcgacctcgctgccaattcagaaggagcgcgaaccacccggaaacccagccgggagcggcgggctccagtccggataaacgtgggtgagggggccgcccatcgcacctgcaaactgccgacccccgagtgggcgcccctcgtcccccgctcccagccggccccgggagtctcacgtggtgcccgcggcgctgttctgtgggcggtgactgaatcgcctgggaccccaggttctgagtgatgagggcagtgcaggaagctccgtttcccctctgtgccgccccgaatccttggccaggggacttcgtttcttcgttttattttggaaagtcgagcgttattcttagctgtgggttaacaacagccgctcctgcaacttcatgatttggctgctgtgtggacgcagctcttaactccgcagcggctctgacatggttccttggaaaccagctcaattcaacccttctgttctcccagtgtaccttctgatgacaccgaggaggaacgggcgacatttgcccaagtaaattgtgcacatgttgctagttacttgctttgcctggttaagttcgttcaaaaaaaataaattttcctatagaaggtgtttcacctagattgtttttttttttactgccccaagccctgaggacaggtacttttaaaggtttggttttcttacactttagaagtcacagcgatgattccttttgatcaagaagtgaaggacttatttaatgggtctttaataagaggctgagggggcttttcagcttgtgggctgaacagaaatttatgtgaaggacggtttggtagctgggggaagatgcagattatttgtggcaggtgagatgagggcagtggcgttagctgagtgtctctctccttctccttcattttttcacactttcccagactgcgtttcagttgaggatgggtgctggtccatgggaaaggagtcttacagcagcttctcattctggacactgcagtcatttttgaactccaggaaggaagcaaacctgcagtcatagtggatgagattttaatatggaaaaaccgtattaattctcataggagttgcaatactagtatggaaaaacgagcagaccttggtggctgcctgtgaagggaaatttgactgacgtggcgatgatgatatagttggtagatacagggaagtgaaggtggaatgggacaggaatcctgggaagactttgaatttggttttggacatgtgaagtaaggttgaagggcttaatgaagatagaatcgagggctttcctatttactggtggctggagatgcataggtctaagattgttttctgatgtcatttctaggaggacagtggaggggatcacttagattgcacagaagaaagactagagtctaaccacagtcttgaattttccttggcgagtggagagccaaggctagatagagccagcagaaatcgaaaagggcgaggacttagaaaaggagagattggtcagcttttatttggctattgggagtcagtaaccctctgtgcttgcagtttcatagaattgctaagacaagccagattactgggggttaagaagaaaaattcgatgtgaaccgaggtgtgggaaatccagtacagcggtgggaggtattccctctgtgctcccggccctgccaaggaaccagtggaggaagagaatgaagggcctagacttggagaggtggaaggaacatttcgtttttagggaccaggtcataggcagagtttgagaggaaaatgatggaacagaaagtacctttcttccatgagagaggatgtaagttgaagggggatgtgattgtgagctttgttttagaaaatttagggccaggctcagatggataaaatgatggtgagaaattgctgaggcaggaatttgtttttgactctccactgggtactagggaacttttctcagaatttatggtttgaggggtattggccacacagtatgctatgctgttaaaaacagtctgagttggtgagtttgtgtgttcccttttcagcctcctaattttttccctcttgtctaccaaattgctagtcttatattggtatctctttgatttcctttaattcttcaataataggattaagtgactaaagg

SEQ ID NO: 3665 - DNA, 4001 bp, Homo sapiens
ggcattagaaaagtgcaaaaaacaaggttccctaatctcagtaccggagaagagaatacaataaaaaaggctgttgtctcctttggagccactgggtgaatcccctgggaaagttcacggtgtcacacaccttgtccctcccccttcctgcgctggagcagctctctctggacagaggcccttcctgccacctctgacctgccccacctgcaagctttgactcagacaccccctcccttgcaaaggggactccctttgcagggacaccctgactccctcccttccctcctgggggctcccacagctccacaggcgtctacaccaacttactttctacctggcatttcatttacaaatccatcttatctgccaggctcaactctcaaccccagccccattcactggggcatgtcctccttccatctcccaggccccattacgggaagtgttttcttcccaggctcttagtgcaggagctagaccccctctcaccgcagggcagcagggatccactggggatagttccctggggccttacctcactcctctgttaccccagccttgatcctgcaggaggcagcgcaggatgtttgttcaatggatttttttttttttttttttttttttttgagacggagtctcgttctgtcgcccaggcgggagtgctgtggcgcgatctccgctcactgcaagctccgccttccgggttcacgccattctcctgcctcagcctcccgagtagctgggactacaggcgcccgccactgcgcccggctaattttttgtatttttagtagagagggggtttcaccgtggtctcgatctcctgacctcgtgatccgcccgcctcagcctcccaaagtgctgggattacaggcgtgagccaccgcgcccggccagttcaatggattttaaaaattattattctctagaaaaaagaccacgaactttggagtggacatcctgagacctgcctacgaagaccattagggtaaagaagtcaccccttcaccccaggaccaggaagcctccaggatggcataagcgaccaaacagctgggagccaagcacagtgcagggggcttggggtcggcggccggaggctggggtgggtaagacccgcagggaactccggggctcgggcggcggctcattccccgggaaagggctcgcggtggggaccaggggcagtagcagccgcggaccccgcgcgcaggggatgtgcggggcatcctcttggccagttccgaccttccccgccggtggcgatgccccggacgcgtcgtcctttcccagacctcctcttggggccgaggctccagccccagggtctgcgggcggggccgcgaaccttgaaagcccccgccgccagctcgcccgcgggaccctggcccggggcgccctgtcccgcgccgcagcgcagacccgcgaccgcgcagggcaggcagggggacgccaggtccctaagcgcccactgccctggggcgcgggcgccgcctgcgagaggcagggcagggcaggagcagagcagggacgaggtcagggacacgggcagggcagggcgggcgtcctctgaacggagcccgcgagtccccgcccgggacgctgccccccgcccgctgccaccgggcgccggggcaggacccagcggggcaggcgcggccgcaagccccgagccccaaggccggccgcgcagcgccgcgtcccgccctccccgctccgcggccggcccgggcgatgcggacacaaaggggacgcgcgtcactctacctgggcctgctcgtccgcggtgcgcggctctgacgcctccgcccggtactggctgcggggtgccgggtgcccgcagtttgccgcccgcgcctccccgcgcccgcgcagcccgcacggcccgcactgcaatgccagccctgccgcctcccgcctgccgagagcccgcgcggggagaagcggctgcgcgggcggggcgcgagcgcgcacagaggccgggcacgcgggaggctcggccccggccccgcccccgcgccgagccgcacagcgccccctgccgcccgcctgcgccggcccgaggcccggagccgccccgcaggccccaggacaggctccggcacgaggaggggctgcggagaccgcccgtgcacgctaacatgaaaatgctattcctgctttagtggcctccagaagacactcccctgattcctacaccgagggaacacacagcagcaagctaggaaagaaggggtgacccagcccaacgctgtaaaccagggcgcgaaccggcgttgagctgtgcagctgcgccctgggctccagtcctgctctgccgcagaccccaccggagccagcacctgcctccccgaccctcgctggggcggctgtgagatgagcccagagccttcctgagccaaccctcgcaaggaaagtctgtctgttcaccccactatccttgtcttgaaggatgaagaaaagagggccccccgggaggtcccaaaaggtggaatggacatctgggatccaagcacagcaatttctttatttttcttaaggtatccagcttgttggaatctaagatctgcgaaggtattaatagaattcctgcatcttctgccactccccatagaagcttgaagttacacaaatgttaaattatacgtcagatgtgcatatatgaacaaaacctacgagtgtgcatgaaataacaccttcttaaatatatagattcttttttctgcaatattaaatggaaaccccactagaacatcgtttttccttaatagcataccctccacactgtgtggtctaaattcaagctctaccacctactagccattaagcaagttattaaggtcttcgtgcttccattttcttacgtggaaaatgaggtggcaatagtatgtatgagttcttcggagggattaaacaagtcaaataggccaagtgccatggcttacacctgtaagcccagcactttgggaggccaaggcaggaggactgcttgagcccaggaggtcaaggctgaagtgagctgtgtttgcatcactgcactccagcctgggcagcagagtgagactttgtctctcaataaataaagaaatagtcaaattaaatataactggcaaactaaaacaactccatagtccttagctacaatttgtctcatttctccaaagaattaaatcagatgattcttaactaactcaaagctctgcataatttgtcttctgctacacatacatctttatagtaaaataaaataaagctgtcccctctgtattgagaagttattctggtaaatatttgacctcttcaaatatatgaacgagcacttgccttctaatgcctcagtttcagattctttttagaaatgtcattattcaagaaaaatgcacaatgggaagaatcttaacaacagcactttgttacttcagcctctcactagaggatgaaaatcgttctgcataaaggcctgggctttatgaaaaatatattcacacctcccgtgtccgagctgggataccaaagaagttcctggttgagtactacttatgaatgaaggattcaggggatgcacaggtgggtgactgcaaatgcacagacgttgtgctgtgttccccacaataaaggggtctgtattaagatgcaggcattctcatggaacacagacgtataacactcaagctgggggactgcaaaggagcatctggggctgcaggaagagagttaaggtgcaaaaatgccctgacccaactgagacttgtaattgctcatgtggtaatacatgtgacttcattcccctgctctgtctttgtgaatgcaaccattgttggggagatagtgagaggggacactggcattgaaagttttgtttgcagcaggcctcaaaaggcactcagatgcagatttccctgcaaagacttcccggcctatcatggagttccccatccctagatctctgatctctgagctggtgtaatacttagtctttgtctgtgttgatcatggca

SEQ ID NO: 3666 - DNA, 4001 bp, Homo sapiens
cttcaatcttcttgaaagagttgtcctaacagtccttacttcttctcaacagtctctcaactgactacctttcccatcacttcacaaaataggcaaatccaaggttatttttctgtcctcacttcactgttaggacctgaacttgcattcaggaagccaaaacagagcaaaaaacagaagtataggaaaaagaatgtctgacttagtagcagtggaaactgaaaacaaaaaccaaaactaaccacattaagctgagaatgagtcaactagttgtgtgatgcataaagtgatgttatcttacataacagagtatgttcactctctgtgtactggtcgttattttacccggaacttagtttcaaggacattttgcaaaataagacttaaactatgactactgcctgaagatacaacctgctgccctagggaatggtatgtgtaggaagggttgcctggcaaatagcaaggtcttttttgtcttttttccttgaggtcttgctctgtcgcccaggctggagtgcagtggcacaatcacagctcactacagtctcgatctcctgggctcaagtgattctcccatctcagctcctgagtgcctgagactacgggcgggcgccaccacgtccacgcgattttaagaaatttttgcagatatggggtctatgttggccaggctggtctcacactcctggcctcaaacgatcctcccacctcggcctcccaaagtgctgggattacaggcgtgagccactgtgcccggccccaaggtcttttcttgaatgaatacagtaattttaaaattttgatcgtaactcaagactcaggaaatctgactggcagtacagccagtgttataaccctaaatttagcaagtcagaaagcacaggtcaaggcttactgactcagtcagatgcaggttttctgactcagtttagaatattcagacatgattcaagaaagtgaagaaaccagagtgccaacgagccatcactttatgttggtgaagggacaaccgatcgtggggcgcgctgggggaagagtttggattcctactcacccctccgactttgggaagcggtgaatggaaaagaggcccatgattaggaatcatgagatttcctcacctgttagaaccacaagcctccttctgtggattttaacgtctttagtactcccttcacctcatcgatcaaaggcgaagatcacatcttgtccgcagacttacctccctcccaacagcgatcggggagccgcaccgagcaaacgagggcttccctgaaagttccaacagccagaggcctgagagccgtgccaggcccgcttcgcggcctgcggttcagggccaaccctgaagaccccagcctcggctgccgcgaagtccccctcccgtcctcgcgccccggcctgctcacccgcgtgagacatgggcaaggtgatgttcccgtagcgctcctcattgtagaggacgacggccgaggcgttcctccgcgccgccaccagcaccttgtccttgaaggtgcagcccccacgagccaccagggcgacccagggcgcggcccctcggccgccgggctcgggcacgaagaagcgcgtgtcgggcgcgcagccctcgaggtctccgccgggcgcccacgggacgcccaccaggccatgcgcgccctccttgggcgagctgtcgccgaagcggccactctccgagacgctccacaccgtcaggttggtctgcgggtccacgtactcgatgtttaccacggccgagaaccactcgagagcccggccccgggccccgggcacgcacagggccagggcgagcaacgccagagccaacacgccgcgagccccgacgctggcttcgcgccgccgccacgccatggcagcaccgctgagctgactagggggagtcagggtcacgcgcgagtgcggtgcagtcgaagagcagagagaagcggacacccaccgccgccctggaagactgaggcggggtcggggccgctgcgcacgcgcacctggcggagtggacgaagggcgtgatcggccctggctccgcccccgtccgaccggccgcgttgtgcgcaggcgtaagctccgcggagcctcggaccgcgatccgtcccgggatctcaggcgcctgtgggccgaggcggggcgcgcagcctgtaccacagcttgcgccacggcggaccctgtggccaggggccaagtttgcgcaataggacgtctagcacccccaaagtgaagggaagtaactccagagaaacgggaagcttccctgaaagcaggtgtgggaccgcagttctgtaaaatcgctgaacagatgtttgtggagagtttattgtgcaaggcacatggcagaggccttgtctaagtcgtttcaaagttaattagccaagcctggtggcgcccaactagagttcccactcgggaggtcgaggtgggaggaccacctgagccccggaggtcgaggctgcagtgagccgagatcaccactccacttcagcctgggcgactaagcgaaaccctgtcaattaagaaaaaaaaaaaatccaaatacattttgtgaaaaaaaaaaaaaaaaatccaaagctacgcacacattatccaactgccttttgctactaatattatgatgctaattgattccttacagcttaagtatatttacaacagccctttttgttatagtattttatgcataatctataattttgaaataggcataagcatacaacataagtgctcatttaagtagtctgatgcctactactgatgacatacaatgtaagtgctcatttaggcgtcagactacctaaatgagcacttacgtttcatgtcaataaaaaagggaaaaggatttattgtttggacatcaatacccagtgatagagaatccatataaaattactattgagtacaaaagcctactgctttcagaaaggaagttcagaacattgatttctgatagactcatcttcctgcgttaagggtctataactgtgggaagtaggttgttactgcctgcatcacgtgttttttgttttgttttgttttgacggagtcttgctctgtcgcccaggctggagtgcagtggcgcgatcttggctaactgcaacttctgcctcccaggttcaagcgattctcctgcctcaagctccggagtagctgggattacaggcgtgcaccacccagctaatttttgtatttttagtagaaacagggtttcgccatgttggccaggctggtcttgagctcctgaccacagcctcccaaagtgctgggattacaggcgtgaggctgtgcgaccggcctgcaccacgtgttttttgttggtccttaaaccctctccatttcctctttgttgctgtctctgtgctccaaaatgcagtctgacccacaacccgtaagttttccatgaagatggatctcctctcctttcccatcaggaaactgaattttaaaaggcccaaagggcctcaggcttaaattatcgtggtctatgcaggctgagaacgggttttaggaacgcctccaccgccaccctttatgctccagcaaaacaaatactgaagttcccaaaaacgtgtccttgcagtttcatgttaggtcttgcaaattcatttacttctttctcccatgacctgctcctggctcttgttccagcaaacactaagttagtcttcaagtgttaactcaaaagctatttttttggtgaaacccgtcttgggtaactatgggcaaacttgggtgctcctccagttgtccatgttgcttgtatgtattacgtttgtacattcatgctgtaccagcaatactgctttccaagttttgggccttcttttaatgttgtgaactttgcaagggctgggattgtgtcctcggtcttttcatgagcctacctcaactagcacagtgatgtatgtgtaattgataatttctgaaataggcagaataggttttttttgttttttgtttttactgtgccagagttgagtactcaggattgg

SEQ ID NO: 3667 - DNA, 4001 bp, Homo sapiens
cagatgggccagcagggaggaaaaccgcagcctggtgccttctgcgatttaggatcaccttccccaacagaagtagagacctgatggaggatgcagagcccctggccaggtctgtgatcaatacagcctcagggtgggtaaagaaacctttaatgaggattcaaggttaataaggaagacgcagagggccagcactcagccccaacctcctcacgtgtacatggctccatggaggttctccagtcggtgttgctgctgctgttttcgagcctgaaggaaagaaggcatgctgggcaggggccaaaactgaaggcctatgggtgaggggatgggcagctattatggggctggctctgttttcaggcctctggcgtctgcattgctgaggctctcaccacaaatcaaagtcactaagaagacagccagagccagggattctgaggcctacccagtcctgctgaggtgggaagtgatggcagcggggacaggactcagggagcccattacgacccctccacttaagcatcagcccctaccttatctcgtctgtgctcctcataagtgtcgtcatcagtgggcagctcatagcggcacaagggacaggaatttgtctgagaaaagtagagtagtgttctagccttggtctgatcttcataagctgataaccaccctcccctgctcccaactgccactcttcttccatcccccagcagtccatgaacagaaagaagcttgagtactgggcccagggcacggtgagagctagaagaagagaagcagtaccttgcttagccagggcagaatgcagctggaatggaaaaggtgatggcaaggcatctcaatggcagtctcctcctcctcaaattccaaaagacacacggggcacttgagctctttaggaaggagtgctgatcaggagagctgctacaggctctgcctcccaagctcccactcctgaaggacacttgcccccacctgacctggaaaactgaaggaccagaccacagtctggcttggggaaggggtgggtctggcccaaatagcagaaagaatcagtgtcctcaccagcctgagagcctctgatgactgtcctggggaggttctcaaccacagtcttggcagctggtggaggcaggtggtggtcccaatctactaccaaccccaagtcttcaaagtccatcctattgaaaagtgacctggggaaggggatgtaaagtcagaacaaaggaaaactatgctttttctttgtccccataatccactggacattaataaacacgctgcccagctagtaggaataatagctacccttagtagttagtagatgctcactagataaaaagcacgatgggaaatagtttacaactgctatcagaccgccccagcacgtaaagtgtttattcccattttacacatgaggcaacagattcagagaagttactcaggctacgctgaataacctggtagagcccagattccaagaccaagccagattccaggtccagtaacagcagtgcctgctgttactgatgaatatacccactcacagcacacggccccaaccccgcccccatgcctcaccttctctgagacctcccagagcctgctgtccttccgcccccacgcccaccactctccagctccaatctttcccgcaatccccttgccccaggccggcccaacggacggcccaaattatcgagatgctcatccccacacccctcagtctcgccgcccgtactaacactccagattactcatctgtcctccccagaatccgctgcccctggtaatccgccttctccagccagccccagcccagaaacctgctggttggaccctatccccaagccccgcgcacccaccttgcgagctccagcagcatgttggttcgcgtctcctgctcagggtccgacggctcgcagtcgtgttcatcgaaataggacgccatggctgcccagccttctgacacagccctcggaccctgctcgatagcggcctagcggcgctggccaataaactgacgagctgagagaggctggccaatcagagtatccgagggacgggcatagtggctcgttaaacagcacggaaagcggaagtactaattcggccccctctcattggcttgaacaagtcaggtgaccagagactaacgccaatgatggagatctggctggtgaggaatcatttgttttggagtcggagccaagactgaattcccggggatttctggcgcgatcgcgtccaagtgtctggtgtgtaaggctcttcagtctgccctgaagctcagagggcttcgacagtacagatgctagaggcctctgcgagcaaaggcggcgctggcccaggggttcaggttcctgcgagcgttggcccatggcgcttccggatgcgctgtccggatccccgccggacacttctgcccccgcggccctctagttggttcaccagtttgcgtttgattcctgcgcatttcttatgtgttaggcataataataaagggtggggcaagcctccccaactgagagagatctctttgccggagaacctggggcctcaaccagctcatgggactgttaccttcagcccgttgctatccctagcttctgtaaaactgctggcttgtactaagaccttttcattcctggctacacatgaattcccagaggagagaatgggcgcggaggagctttagaaacacccgtgtctgataccttcgaagattctgatttaactgatctgtggtggggcctgggcaatggcacttgtataaattatgcaggtgaagcaggtttaagaaccactgcactcaatgatttggatgataggtactatttagcatctagaactgttagtctgatgtatgttttacacgctcgatcatcccctcaatagacccaggagctaagcgtcattatgccctttttacctcagaagtggcttgcccaaatttgcagtctgtaagtggtgttgcagaccagctgcagggccaagtgctttcctccatctttcccaagagaggaagacgctaatgcgctcagtaaaactaacacgctctgtaaggggtgaagctccacacaactcaggcttattctggtttctgtcagtagcgctcactttacccagcaaggaactgcttattttacacacttgaccctgaattccccttgccactcacacctgagtttgaactgcagctaagtagcccaggcagaggctgccctgtttccacagtcttggtgtggctttatttccttcttccatgcctttgcccaatgatctttgctatggccctgaaggcactgcctccctggcctatatggccctgtagctttgaaaagcctgaattcaggctggacatggtggctcacgcctgcaatcccagcactaaaggcaagagaattgcttgagcccaggagttcgagaccagcctcggcaacatagaccccgtcgaaagagggagggagagaagacacaggagagaccccgtcgaaaaaggaaggaagggagggagggagatgggaataccaaggagtgctttaaggtccccatctcttgctgtcacttcccccatctgcagtctgatgtaaagcttgaggtagatagaatgtggaaagagaaattgaggagtgggaagtgttcagaggggaaaccatttatctgaaggtgagagccttatgaaaaattttttgggccaggcgcggtggctcatgcctgcaattctagcacttcggaaggccgaggcaggtggatcacctgaggtgaagagttcaagaccagcttggccaacatggtgaaaccttgtctctactaaaaatacaaaaattagccaggtgtgatggtgggcacctgtaatcccagctacttgggaggctgaggcaggagaattgcttgaacccaggaggtggagtttgcagtgagctgagatagtgccattgcactccagcctgagcaacagagcaaaaactctgtctcaaaaaaaaaaaaaaaaaattggt

SEQ ID NO: 3668 - DNA, 4001 bp, Homo sapiens
aaaattaactggacacggtggtcccagctacttgggagactgaggcagaagaatcacgggagcccaggaggtcgaggctgtagtgagccatgatcttgccactgtactccagcctgggtgacaaagtaagactctgtctcttaaaaaaaaaaaaaaaaaagaagtttccctgaacactttgaaaaccagtagtctagatactcttaataacggccagtactagctgggctccctgaaccaatgtaacattgaggtgtagcctcagtcaagtggcccttcaatacttcgcccaccctagttatatgggtcctggatgggatggtggtaaggtggtgacaacaaaatgggggaggggggccgggcgcggtggctcaggcctgtaatcccagcactttgggaggctgaggcgggtggatcatgaagtcaggagatagagaccatcctggctaacagggtgaaaccccgtctctactaaaaatcacaaaaaattagctgggtgtggtggcgggcgcctgtagtcccagctactcgggaggctgaggcaggagaatggcatgaacccgggaggcggagcttgcagtgaaccgagattgcgccactgcactccagcctgggcgacagagcaagactccgtctcaaaaaaaaaaaaaaaaaaaaaaaaaattgggggagtggggactgaagaatgtcctagtacaaagaatctaaggtgtggagtcagacagatatggatttctattcataattttctatcttttggcaaatcactttacttctttgggactcatctagtcttcccaggtgcctgcacctcagttattaatgaaaaggaggccgggtgtggtggctcacgcctgtaattccagcaccttgggaggctgaggtgggaggatcacttgaacccaggggttcaagaccagtctggccaacatggcaaaactccgtctctacaaaaaatacaaaaattagccaggcatggtggcacacacctgtagtctcagctactcggaaggctgaggcagaaggatcacctgagcctggggaggtcgaggctgcagtgagccgtaatcgcaccaccgcactccagcgtgggcgagagtgagactctgtctcaaaaaacaaaacaaaacaaaacaaaaaacagacttaagtatattacaaatccgtcgtgatcctctcaactattctgaggtaaatgccacacccactttttttttttacagctgaggacactgactcacagaagctagatggcctgttcagcatcacacagctaataaaatgtggagttaacccacattgatcctacttccaaatcccagagtccttccatgttctagtctttggttaagaatgcttgagagaaggactagagggactttatatgaagtgtaaagctttattcatacaatagtcctcactagtgctgtgtgagagagagaaggctgaggaaagcgtcggcggaaaaaggctgatccaaggggaaagggggccggaactggagggcactggttctgagaggagaaagggagatggggaggtctgatgggcaggcatcccccaaagcccctgagaaaattcatttgaggaggagagaaagggatggcgtgaagctggaggaaaagggatcgaaccggatgcggcgaggcctgaactggcctggcgggcgccgacccgttctcctctcactcagatcagcgcccctccaccctcccgttccccagtccagctttcccagagatgtcagcatctctgccatccctcatccctcgctccaccccacacgcccgccgtacggaccgtctgcgacagctgctaggcctctggactagatccaggctgtcagccaaagcccatgcccccaaagttaccagtcctcctcccctgcagctgcagacgcagacgccgccatatcttcaccggcccgcagccggaaccggaaatgcccttagggaagtcggaggcggaaaactaagaggggtgggcagctagcgtcgtttctaggcaaccgcagactccgggtccttagccgggcctgatggccctgaggcagttcggatgtgtcccaggaagtgcccatgtgtggtccgccgtccattccacacctctgagcgcctttgtcctctgaacttctcaccagttctagcgagtaaaattgtaagaaagggagccgaaagagaccggagggagaggcgggtggagaagaattataagtcaggcaacgtatgcaggcagccagaagagatggggctaaacgccagggaatccgtcccttggcctgaggagcttggagctcctaggctgggggtgagagaggggctctggcctgcgaagcgcacgggccagggggtctgagagcgggtgctgaggagtctgggagtggcaggaacttgggggagactcaaaggagcagggttggttgggcgaggctaggttgaaagagtagggtcgagtgagccaggctgggtgagggagaaggggaaccaggtgttagttgggcatggggccgggttggggacaggaggatgaaagtggggaggaactacaaagagaagctctgtttgttccaagagcgcatcatctttgcatgcattccaccctcccatgttttttgaggctttattgtgaaaaagaggaaaaggcaaggtggctaacatttttcctttcccgtgccccaactaggcgtcccagatgttgtggaactgtccctggatctatagctcttcaccgtctctactttcttccttctaagagatcctgaaacctctgtcatggaaaagtaccacgtgttggagatgattggagaaggctcttttgggagggtgtacaagggtcgaagaaaatacagtgctcaggtgttgcacaaagagggataccttttgggtgggatttggtacccccaactccagtggaaaatggatctagaaggaatgtatttataccagtttgtattcctaaggtactgactccctcatacttcttatggagtataagctttgaagttggattatttgggtgcaaattccatctccaccgctttctagccctagaattatggacaaattacttaacttccctatgtctcaatttccttatctctagaatggggataagaacagcaactgattgatggagtttgaggattaaatatgttttcacattaaatcacttagtacagtgcctggctgttagtaaacaacaaatattattagtctctagcacaccatgtaataagaggtaaaccacttgaactctattatttcctcttcattttttttttcctttcctttctcctaaatctcatcttgagtgctggtcaaatcagaacacttcttccagaaggggaaatgttttgcagatgctgtttcctcctgggatgaggaatggggaaagcctggataaggccagggtaccatggagaaaatggaagcgggagactaacagaaataataagagttactcaaacactctaaaatctgacttctggagctctgagattaaggctgaaattctagatcttttcagtagtgtgattaggcgttaacttttcaccttaccactgacaggtcgtggccctgaagttcatcccaaaattggggcgctcagagaaggagctgaggaatttgcaacgagagattgaaataatgcggggtctgcggcatcccaacattgtgcatatgcttgacagctttgaaactgataaagaggtgtgctttgacagttttgggccctgtctccccaagcacaagggttccaggaatttcccaacctcagaatgcatgaatctggagccatcagtgccactgccttctctctgtaggtggtggtggtgacagactatgctgagggagagctctttcagatcctagaagatgacggaaaacttcctgaagaccaggtatgctttctgccttcaacttctccccacctccgacctctctccaggttagagaactggtagagcaagctaaggacactgagagtctccatttcaaagactt

SEQ ID NO: 3669 - DNA, 4001 bp, Homo sapiens
gcatcctccctggcacagggacaggcttagggatttgggcctgagtccctggaacatgcaggaagagaaggggactctacgtgtggccccagccccatggcgctcacatacaaaggtgcatgcctgaggttagagtcgaatactctgccttctgcaagtagggcggctcacaggccaggtgacgctaggccccctgtccacagcctgccaaccctgacaccacgcagacttgggggactatgccactctccctgcccagagtacccaagggccacccagtaggccataggaagccaagagacaatggccacccttgctcactgggccccgttcacagcagcctgctgagggccctggtccggccactctgcaggccagtgttgggcggaccagacacgtgggctccaaacacggatcaaggccaaggagaagcccatccctcagttctcacctgtcatactgggaggcatacttgccaccggtcagagccctggaataccacagcaggggcggggccggctagccagcggcctgcacacccacaggggttctgggaaaaaggtgaggtggcaggtcctgcttagggctcctgggaaatgtacaggaagcccataggggtgcactggtctgggttcttcctgcccagatgtcaccttggctctttgtggcctgaagcctctcgaccacctctccaccaccctgtccatttatgtgccgtgaccagtgacagctggacttcccagcgcctccacagctgtgtgtgtcttgcatatgtcgggtgtcacatgtgtgccgtccataccacctagggatgcagtatgaacccccatgctgtaggcaggaaaggccctgctccatcctgtacacatccccactggtggaggtggagggggtgctgcagccacagcgccagcctcagccacctggcctttcttgcagagtctctggagtggtgggtacccagtgtgcaagccctgcagagcctatgtgtgtctatgttggggtcgcggggcccactggtctcaacactccaccagtgctggccaaggaagccccaaaccgagcatcacaatctccatggccctttcctctgcctctggcttggactcatctgcacgcactggtcacatggaggcccttccgcagctgacactccagcccaacccttggtgccaggatcctgcagatgtacacctcggtgggtgacagaagctgctcatgtccccaggcagggaccagacacctgaacgggaggcttcccggagtgacatgctgtcccgtgtccccgcaggactccggcttctatccgagggtcctaagggctcacaggcaacagctgggaatcaccggggtggggggaggggggcacctgtagggcgcagattcgcgtccctcagcctggccgtgcggcgagaggccgctagcagcgccctgcggaccggcccgcagccccggcgcccgccccggactcacggcgggggcgtcggtcgaggtgtaccgcaggatgacctggaagggctggtgcgcctgcagctcgggcggcagcgtgacggtgagcgaggagccgtagtcggtgaacgggtccaccctgaaggccagcggacagcaggcgggctcggagccgggcgcctcggggaaggcgggcagcgggggcggcggcgcgggccccggcccgggggcggagaaggcgaaggcgcagggcgtctcggcggcggcggcgggggcgcgacggaaggcggctgagtgcaggcgcagagccgggtgcgcgtcgagcacgagcgcgcggggcgcgggccgcagcgcgcacagctcgagcaccaggcagccggccaactcgcgcgcctcgggccgcagctccaggcccagctgcaggtggcggaggcggaagagctgcgcgctggaggccgaggccacgtccagggcgggcggcggctcgggcggcgggcggacgggcgcggcctcggcgccgggcgcctggcggcagcagcactgcgcggccatggccgccggcactaggtgaaatccatgggcggcggccgcgccgggccgcgggcgaggggcgccgggcggcggcggcggcggggcgcgggcacaacaggaagtcgcgccgggagccgcccggcccggccccgcgccgtgcgccgccccgctcgggctccgctcggccgccgccgggggcgctgtgcgcggggccggggcgcggggccggggcgccgggcggggagggccaggagccaggggcgcggggagccggggaatcgagcgcggcgcggggccggggcgctgtgttgggagccgaggcgcgcggagcgggtgagcagcacccccagcccctcgcttcctccccgggcggcgcccgggagatcccaggaggcgggatcgctgctccctcccagacactgccggccaggcccctggggcagccgctgaagggacccgggaaccttggggccacaggggcaggctgcttccaggtgtggttcgtgttcccgaggagcgcagcgtcgcgaactcaatgtcatcctttcatccggggctacgggcagggcaggattctcctggcacccctgccactcctccaagtctacaggtgtggtctgtgctgtgggccctgcggtgcgagaagcgccggagccttcacgcagcgctgtcaactacagcagccaccaaccacgtgtggccatttagatgcgaattaaatacagttagaagttcagttccttcgtggcaggtggagtgagtgagtgtgtgtgtcttcctgggaggagtggctaatggacaaagcaggcaggaatcatttccacaatcgcagaagttcctctgggcagtgctggggacctctcatttgggagccctgtgctggggtacgaaggagggtctggcccgcctgtccccaccccatccgccaggtccacccttcccaacgccattctctgtggacctggcgaaggctgcccaaggctgagcctgtccaggagcctgagccccgagggaaggggtgctcgcctggcagaagctgctagtgagctcacagcggttaaattttgaggctgtggaataacaggggccaccatgatgtcgctgttgtcatcaagtaagaattcaaattcctagggacaaggggcttctggggctggggaactatccaggaacccaggacacctctctcttctgctccattgaggtgtggccgtgcagggctggactcgggtaccgcactcgactcagcgtcagccctgagtagtgtttcctgtgtctggactcagtctcctcgttgtgtaaccctctgtgtctaccctccttccgtggggcgggaaggaaggctgagagggagagtgtgcgttcacgtttgcgggacagagcactgaggcatcatttcagttttcccgtaggacctcaggtccccacgtgccctctttagggacacggccacgatcttggggcacccatcccaaactcaccaggaacccctaggcttacacagtcactcagaggtgtggatcagcctcgcatccaaggctgacagggaagacagctgagatgggaccctcctcactgcccccagcgccctgcccggtggggccctgcagtgccaagggcagactgttttcgatggcacccccagttctacggggctctccagagcccaccgggccatgttcctggctggaagaacctcagttctgcacacgcggtgccacactagctgggcctggccgtccggggggcaagtcaccacagggagcttggggtcttgccacccagagccccgcattgggctcagggagcagaggttggggtctcgccctgggcacctctccgcggccagttctgcacacaggagtccagagttgctgtggcacctcctccccgggggcccaagggagcgcctcccaccgcgcacgtatgtgaggagctgccctactgcaccccatggagcgggaggcgcggctgagccgagggggcggggtctgcaactgagccgcgggagcctctcgcgc

SEQ ID NO: 3670 - DNA, 4001 bp, Homo sapiens
caaagttttgctagcaaaataccaaagtgaaaatgctgggagtgcagcccagagtctccgctttagcctaggaaaagctatgccatccatgcaagcaatcttactcccgattaaagactttcaaagactgctcccattaaaacataggaacaacacattaacccgaaaaacagtaaaacatcaaacacatgtgacacaatatagcacatcattcattactttctgtacactgtgcagaaagacactatatagctaaagtcagttcctgcattttgaccaaacaggactgagtcactctgcaaacgatgcctgaaacctcaaaggataaccaaccgcctctgaccaaaagccagtccgtccgtccctggaaagggaggaggcagtttttctcatcatacagtaaggtttattccaggagggaatagaactaaacatctgcattccagcacagaatgtctaacggatctaaggacctcccaccctagttctagtcttccagagtcaatttaatacacagagtatcgttttcacctttcttcccctccccagggtaaaagtccacacccccttttcccataaatgcatctacactgcacactactcaaattgcgaaatacaatcatctatcctaacaaaaataagaaataagccagcattctacggtgcatttctattttgtaaaacatgctcctttcttaaccaagagccaattagcagcctttacggtgctattaatctggatttcaaaggtcgttataggaaagagacgcaatgaagaggacagatttattccactccacaattcagactgattttttggctctggcgcaataatctcagggaattaaatttacagcaattaaaatgcactaaatagcaagtatggaatgctcaaacgcaagtgaaaacagcaaaactttagctgtgtgttccaagatttcagactaaaaggagagagtgagggcggctctttgtcatgtaccccagtgagtactcgcaacagggacagcatcaggtttctttctccctcgctcgcaccaagtccccacgtagcatgacactttcaaatcagctaacctggtgtatgaagcatggccagtcctccacccacctccccagagtgggcaggcggaaggagaagaggggtgttttcctcccagtgctgcaagaaaggagcagccggggatgacactggctccagcaggaggtagagggaggaatcaaaggcgggtcactactcttggaactcggtgacagaatcgtttggtctccggccccggctgccggaagcagggcggggtggggcaagacctccccctccccacgggcggacgggcacggagggctgggcggagaggggatctgaggtgtgagctgcaacgagcaagctcccaggccccggccacctaccagcaagctctccacgttgatgggggagcgagggtctcggatcagcgcctccagcttcctctggcggctcgcgcctgccccgtcccccggcgcggtctcgggggcgccgggcattttccccgtcggcgggggccggctcatgccgccaccgctggacccgcactcaggctcctcgcgctcaggtcccgcagcctcggggcctagcaccgcccccgaaccaccagctccggccgggactccacccgggcccaccgcctgcctctagctccggcttcgggtctccaaggcggtcccccgcctgggggctgctcccaggggcccgcccggcccagcccggcccagcccggcccggccctgccgggagcggcggggaacagacggcgtccccgcccctcagtcagattcgcgccgccggtccgctggtcctcagcgagtgcccgcaggagtcctcgggcgggagcagggaagtggcgccgccaccgccgcggcccggaccgccccgccctctggggccccgggaggctgaagcccaggcctgggccactacggccgccgccggcccgctgccatggtcgccgccggccgccttgcagtccctcagccagctcccggcgcacacactcccgcgcggccgcccgtctccggccgcgcgccgccgctacccacaagcccctccgcccgcagccgccggcgcgcgtccccgccggccctgcgcgcgctccgccccgccccgccccgcgcaccgcgcttcctccctttctttcccttcctgcgtctgtcccgctccgctttctcctctgcgccccttcctcgcccgccctcgcctcctccccctggcgaggttctctgaggcgaatagccgggcgcgcggtcacggccgagctcctgctgggggaggggagacgcacccaggccgggtccttccgcgcgccccctgcccctcccgccggaccccgcggactaccccgcggccccgaggcggaaccccagacgccgggcccagcgcaccgtgcgctgggggggagcccggccgcgccccccgccgcggcccccgctgactcagcgcgcagctatgcgggcctcgcctcacccgcgcccaaataatagcgaccgagctcggcgcccgcgaggggccgcagggccgggggtttcgaggcgagcctgagagggggccctgggtgtctgggattccgaattagcggaggcgggtggaatcctagtcctggggcaggagggcctgggatcctgaaagcgtttctgcccggcttagacactaaccacttcaagagaacgggagagcaccggaaaaaggctttccagccgcaggccttcgcggggtcttctccttttggggggcggaagaggggtggttatcgggaccgttccgccgcattcctgccctctcggcggccggtgccatcgcttagatccgcccagggcgcaatccgaaaattatgtgccaagagctataaaaccgttcatagagcccctttgacccagtaaacccatttaaggaagtacatttccaaggaaatgatccaaagggcgaagaagggggagaacttgcagaaagatgttaacagcagggctattcacaatgttcgtgatgaccaaaacctgggaatgggcccagttgtccaacaattgagtaacccaaacaggcgccttcacattaacagcaagaatcctggcaggtatgcagactgtgtcaaacatgaaattttggcaagtacatgagaaggtatattagaaataaatgaaacaaaaaaaatcgtttgtacacactaaaactatgtaaaatgagcagctataagaaccagagaatacagtacttcttaaataaatgggatttttttctgtaaagatacttaagaacaaattaaatttcaaaaaatggaaaaaccactccgaaaagcaacaatctgatatccattaagtaataagaatgttaagaactgtctccctggcatgtcagagataaacccgaagatagggtgaagccccagccctgtaaaagttgcattttgatccaaaccattggattagttggagcctcttctttggttttaggttagttaaaaccacccctagctggactcatgcaggaagaggccccgatgatccatccaatgcagcttttccctttcagatagtaacactgacttcacatccagagagtcctttaagtctgtgtattgagctactcattcagacctccacagaggccaccaggagaacagagggagctagacactcccacttatgcattggagcaaaataatgagataatctatgattatggattatttttctgatgacaaaataatatgcaaggcaaaaggagcactctgtctagcggggcgtggtggcctgtgcctgtagtcccagctccccctgaggctgagttggaggcctcctccattgagcccaggaggccaaggctgcagtgagctgtgatcacaccgctgcactccagcctgggcaacagagtgagattgtctcaaaaaaaaaaaaaaaaaaacactgtggttctcagtttccaaattaattttgactggttgtatatttgtatgtagcttggtggaataaca

SEQ ID NO: 3671 - DNA, 4001 bp, Homo sapiens
aacaatgtcttagtcattccctgtaagcctaggaaccacagaaagcatttcatttgagacaacacaagctgttgcattgcttccaaccctggctccaccatttcctagttatgagaccactggcagatgacttaacctctctgtgcccaattcctcgctgtcaaatgctggtggtaataacaccaccaatttcaaacggttgtttgagttaattcacaaaaaaactccagaacagaaacagtcaagtgctcataaacattgctactatggttatcattaataatcctgactggtgaaccgaaacaattactttccccaaccattaacttactcaaacatagtttaattaaaaccaaattgctcaaatagactcacaaatatacacatagctgttccatcctgtgaccctctaggtattttctcaggcacaaaaatgtagctacttacctttgaggtagacactcagggtattattacctgtgacagtttagggctttcaagcaaagatgtcaaaaataaagtatataagtataattacatataatggccaattaaaagccaacctttgtgagaggtaatatttactaaactttttacacatttggcctattatttttagtactctatggtcaaagttttgtcattatcagttgggtggactcctaaggtaactgggtaaaatgccaaagagaaacaatacatttaaccacatagagcaatggaagataaaactcttcaaagccagattaacattaaaaagaaaaggaaatcatcacctttagaaaataacaccaatttgcaaactgaatgagggaacacagggtttttacctatttaaaataaatttatttttccatccccactcaagataatggtatttatgatttttatagtcagttaacagtggggctcagagaactacttggcaaacctaggaagagccaagttgcaagtctgtcacaatcttctgtaatcttgagggagtcttactgctttctctggggttgtttcctcattctgtaaccaacttcagaaactaatatcctgactccaaacaatattatgtgctgtaactacggtgcttaaaaattacttacaaaaaactgacctccctgaagagcagggtgcctgaagagaaaatagacaggaaaatcagaattgtaataatgatgtaattaacaattatagagaacttaatatacgccaggcactgtaaacttctcatgtactcgctcatttcatcttccaagatgcctaagcggtaggttctgttagtagttccatttttcaaattatgaaactgaagctcaatgaggttagtggcttgtccaaggtaacccagcaagtggcagaactcgggaacctaaccgcaggtgccaacttaaatcgttagagaagtctgtttccccagctttgccactaactagctatatgagcttgggcaagtcatgcttctccccttgggcctcagtttctctagctgaaagtgaagaaatgtcctaaagatttaggtcgcttccgggtcctaagtgatggaagaccacacgttacgtggggggaggggaggaactgaggtttgggacccggccgcaacccaggataccgcgtcggttctgctcctgctagagcctccagggctcctaccccacaccccttctagcatcgcgttcagagtgaggcgctcggtggtacagggacgcggtacatccaacaagcagtcaataaaggtgcactgatccgccccgccgcgcggcaagcccgaccggagcccggaggagttacccgtccattacgtccaggtgcagataatcggccccagagtctagcatccggaggcactcggcccctaaattggccaggtcgctgttgaggatggacgggccaatcttgcagcccgacgccataccgctggctcccaaaagcaagttacccacgagtccccggcaaggctagagcgtcaccccgattgggcgcgcagttttggccccgccccttctccgtacaggcttccggattctaccggaagcagccactctgcggtgaggaagtcccgcctcctcctggggtggggcgctgtcagccgtccgcctggggcggggcggggcacacgggcctcgtacacctgattttgaccttccttcttgtgctgtttggatcttaacgtcctcgcagtactcaaggcgtttcttaaccttttttcactttgcttctcctgcagttccctctcctcggctcttgacttaacatcactttttgtttctccaccctttgcatatgcctttctttcctctccagcgcctatgctggccctttaaaacaacaattaaaaacctttcttcctcgtatttctcctagagctcttcttttgagctggaggaaccctggctctgccagatactagctgggtgacctggcaaatcacttcttaacttcggttttctcatctgtaaagacagtgcccagctttagggttgtattaaatgagtgaagccaggtaatgcgcccagcaggatgcctggtgctcagtacaaaatggtagttattattatattaccctctttttctgcctttgcagttcctccttaccttttttgtttttccctctgttgaggctcagaaaatgatagcccaaagtgaaggcctcagacgcaacagtgtttctctgacttcctgccctgctctcttctcagtctcattctaggaggcaggtcatagaaactggagcccatcttccctaagaagagtcattgaaaccggaaccccctttccctgaagccagacacaaaacccaaaagcattactctaactttcctccacctttctgtgtaaaaactggccataaattatttgacccatctcaactgtaggttataaaactcctcttctagagaaggttctatcccatatccaggaggagggaatgctgcacagagaggccaggaatctaaactagactggccaaggccaggtcagtctattagcattagatcgcctattttgtccaatcgtatttctacatggctgtctatactttgttgaacctaagtataaaaatgggtaatcacccctgtacctttgggtcttcattctgaaggctcctgtgtcaggtaaaactataatcaaataagtttttatgccttttctcctgttaatcttctttctgtcagtgattttcagcaaacctttggagggtgaagggaaagttttcccttggcccctacacctctccaatgctcattcacaaattgtgataggtttgtgtgctgttcacacacagttcagaaatggatgagtatcctgatgctaaatgtgcctagggtcaggaaaagagacagaagtaaaaccacttggcggggataaatggacttagcaagagcaatccttaaggggtcagaatagagcacttgtactctgtgtaaaagacggaagtggtaacttggactgagaggtgacagcgtgctggcagccctcgctcactctcggtgccttcttggccttggcacccactctggccgcgcttgaggagcctttcagcccaccgctgcactgtgggagtccgtctgggctggccaaggccggagctggctccctcagcttgtggggaggtatgcagggagaggcacaggcgggaactgggactgcaaggcacttgtgggccagcgcgagttcgaggtgggcgtgggctctgcggccccgcacttgggtgggccggctggcctgctggccccgggcagtgaggggcttagcacctgggccagcagctgctgtgctggatttcttgccaggccttagctgcctccctctacggggcagggctcgggacctgcagcccaccatgcctgagcctcccctccatgccgtgggctcctgcgcgcccagcgtccctgaggagcgccgccccctgctccacagcacccagtcccatcgaccgcccaagggctgaggagtgccggcgcacagtaggggactggcaggtagctccacctgccgccccagtatgg

SEQ ID NO: 3672 - DNA, 4001 bp, Homo sapiens
gggcaggacccactgtgaccaatgctaaatgaaggttaactaccctccaggagcttaccctttaaggggctggaagaaacgaacacacagatgaccaaaacatgagatacaacataaagcacataagaggcatgaagtgctacagaatcacggaagagaaatcttcctctccttaggatgctaaggaaaaactgaaaggaggaaatggcctttaagccaaaccctgaagggcatatatgattttaacaggtgcccccaaaaggtcactgtagatctccccaaaattacctaacttcatgaaatgatgtggtcagaatccagtgttttggggctctagcctaaggtcagggcttgcagatttttatttaatcaaatacatgactataacacaaaggtcagggagatgcgccaccaaatattaatgtaaattcattaacaggacaacttagatatggggcttttctaattgtattctcatgtggattacatttatctattagctattcactgtatgcagatattttgaaatttcagcttattgtctcaattttacaacggaggcactgaatcccaaaggtagggtcaaattaacacattttacattatctctgttaatccccatagaaaatcctattgccaatcagacttacaacaagctacaccagaacagggtagcagtggaaagagtagaaggtcacactggaacatcccttctacagaactggctgagccacaggttaccacattgtccactcccactcaaacaggctgtggtgaagctcatccaacatcatctaagcaaaataattttgtaaagcattaacaaatgtaaagaactattatcggagaagaaaagagactctaataccactttctaataagtagaaacgagagataaaaagccaataagaccaaggaaactacaccacagggcagacatactccacttggcttccttattataattaagatacttgattggtgacagcaaaaccacttggattaaaaaaactccactaacagcaccacacctgccacttaacaaacaagtagggaccacgacctgactgaataacagctaaacatctctgcagacccgccttaaaaaataaaccagcatcctccagacttagtccacccagccctatggaaagaaggaagtttgaagccccgggtcttcccttccctccaagagtacactcaggggccggcgcgcaccaagcccagaacctccttcgactgaaatttcaaagcactagcaaaccaactctccgccggcttccgggtcagtaaagagaaatgaaaacctctccgcagccccaaagcccaccattttccatttattgataaggaggccacaaggcaagtgcctctagcccccattccaaacatcagacagcaccaggctccactttgcaaactgttccagctggacaaggagtctttagaaagctcaagtattagaagattcgcccccaaccgattccacatctaaaaggtctttaaggagcagggaagaggggtctaaactcgggtaaagtgcacaccctctaccctctcactcagctcccgccctgccaggagctaggcgcgccccggcagcacccacaacgcgcaacagtagcccatcacgccaaggacatgcgccccgcgccccacgtttcgaagtgctcaccctcacgtggttctccacagccgcgcggcccgccagcttcttggcctcctcggccttggacatcgtggagggggccgggcagatgctgttggagtccccgcagctggtgcttgtgttgccagcaccgccacgggtcccagactgtgcacgccccggcagccgcacgtgggaacccgggaggtcccagctgttccctcctccgccggaggccgcgcccccggccctcccgggcagcggggccaagacccgcccgtagagggtgctgaagggcccggggcgctgcatcccgacgcctcgctccggcctccgctgaagtcccgcccccggctcccccggaaatctggtcgcttacgcacacagtctgcgtgccctgctgcgcgggtcttgctgggaaatgtagttctgtggcttcgaggaacccctatctgcgcctcagtctggactaccaatcccataatgctctccgcgacggaatgcgcaatcgccggcgacgggctccggcacttcgctctgtgaagtaccattagccgcgggaatatcagtatggtgactccttaccctggggaagtgtacttaggccacggctaggtgaagcccagggatatttctgttcgcccatgcatccgagaaaggagtgttagacctgaccctgttgtttctcccagcagtgagaacgtggccatggacaagaattccaagtagtggcacttctgtagacgacgcggcccttttggggttactacagcccaggaaactcacatgcgacacggcgccagctgaagtccatctagacccccgcagacccaaggtcacaagttgagaaccccctgccgtggacattcttctgcacctagtggtgaagcaggtggagctgcaccttgctccgcccatttggagactggttctgcacatatgagtgtgccctgcagcgatcctgcaatccttcgtgactaacaaggactttctgtgaaaacagatttatcttttcttctctacctttaaggtttcttgctgttgagaatagttaagggacgaggaattcttattgcccccattttacaggcaaagaaactaatgctgaccccaaccttaccgaccacttggaggtccctaaaaacacatgacctttgtgtttctcggctgttagtggaatcctttctgtctgctcatgaactcatcttcaaacgcattccaggccttcagaactcttccgtgagcgcaagtcactggtatgggccactgttaactgccggttatcacctagattttcttaactatgctttgccctctgaggccgtgagctcttgaatcttcaccttagtctgtaggaggaaaagttgtttgagatgatatttgaatccttcattttaggccaaattcagaacatagcaaaaggttctggctaacatgcagaacagtatgtctggactcccactactgttggtctgcaaagttgaaggctactctaggcaaatatgtcacctttaatgtatctccttaggaggagtctttcaccttattcatgctcctcagcacccacaccaaaagattcatgaagtaaatgttacctagtctctgctttaccccattacccccggcctgaggacctttgaaccattttaaatgctctacctgccagcctggccatctgtgcattgcttgctccatccacccttctgactcagctgaaataccaccttcccaaagaagtctaagtgaccacctcatctaaattgggtttcctgcccacccctcctctatcactttgcgcatggttgtatttctatcacagaacttccgtccatcattcgtgtccttcgttttgtacttgtttatcatatatcctctgtagaacagaacattctgagaagacggactttgggtgtctttctacaaaatcctccattcctaaaactgctttacctgtagatggtcctcaacaaatatctaaaacattttaaataacaaatagatgtcatgctttaaccctacactccaccttcggccatacagaattttagtccctgcgtccatgctcttacctccgtggttttgtacactctgtaccgttctaactctcagatattcttcaagacttcattctgttacttgttactctgcaactctaaaccccactcttagttgagttggctgctcttcggtgctcacaattacctgtaacctctctgtcataaccatctcactctattcatttgactgtctcactcaaacgacgtgtcccttgatggcagagactgttgctcataacatggacagtgcattgttcaattactgttttggggtgacaaagtctgtctgtgcctct

SEQ ID NO: 3673 - DNA, 4001 bp, Homo sapiens
ggagttcccatctccttcatggcaaatttccgaatctctttgagtgcccgaggtgcacgcttcttgaagcccctacgattcaaacataagtgaacaaattaaaggagcacaaaactaaattaggtacatgtgagaaatcctcaatgtcgatgataggctcctggaaactgactttaagcaatgtcttatgtaacaaaaccaagtttttacagcatacagtaggccagtgtgcttaaagctcagtgaagacttactgtagatggtatgtcctcctaaaaccagcctaaaccaacccttaaactaggcagtaacaatccttttttcccaccagtgtgcaatgcccagcaattagcataacacttaggacaagaagatgcataatccactttctgaagtcctcaatcaaaatactaaatttgattaaatgtcatgtcttaagacaggacatgtttttggaacagatcattcaatgctattgacttcatctatgcttaaagagcaggggcctgaagtgtgcaggcaggtcgcttcttgagtatgatgaatggcagtagttagcgctatgaacccatcaagcaagctcacttcacttaaatacttaaaacatccagaagtaaacggtactagaaataacagcagctggcaatcccttgttcttcacacagcttatgtaagcaacctattgagtacatcagatggtatctagtactacagagaaagacaaaccagggaaaataaagcattagggaaggggactgcaagtttctataagacggccaaggtgggccaggtgtggtggcggggtccggtaatcccagctactcgggaggcggaggttgcagtgagccgagagcgcgccactgcattccaggctggagacagagcaagactccgtctcaaacaaaacaaaacaaaacagatggccagggtgatattggactcaaagtctgaaggcaacgaagcatttatttgtggaaaaaacattcaggcatagggaaaaaaagggtaaaaattcaacaaagtagctactttgaaacaaaagcatgcccggtatgattaagcgggtcagccaatgtgggatcatggcaagaactcttgatttctaacctaagatagaaggccgatggaggatctgagaatagaccacgcatgtttgggtagggaagggaacaggagtagggagctgctgctgtccgcattcggctaagaaagaataatgggggcggtcagaaagaccaatgcagctggtcagactgtgaatgtattcggagggtagagcccacaggatttgttaaattgccaatgaatgaaacagggaaggccacaagaggaaaagattggggtggaggtgattcggcacatctctcggtaacaaccagacgcgtgagttcgagacccagggcggctagagggatactcacactccatggatgcgcttgtgaatgttgatggtgtattctcgggttaccacttcgttgatggcagaacggccctttttcttctcgccacccttctttgcgggagccatctaaatgcaggcgacaaggaggctcagagcagagtttaacaagctcaagccaagtcctccctcccagcctcacgctgtcactctcggggcgcttccaggtgctgagagtctggccaggctaagtcggtcacccagtggcccacgcacccgcgcccctgcgcccctcagatgcctccgacccggaaatccctgccgctccggctcccctaagcctggtcactttcttcctcaggctctgggagcctttaaaagcagggtgtattcccatctccccacaaccggagccccgggctggctcgggagagattttgcggtcccagttagcacaatcccaaaggaggatggggctggattccaggagcccagactccgccacccatactcactctgcagcgtccaagttggaaaggaagagcgcgaaggattgtgggagaaggaaagccgcagttgcaagtacaacttccgggtcgccaggcaagggggtgtggctagggaaggggagaggcgagctatgatgtaagcggcgcgcgccgaagtggggccagctagcaggcgtcgtggcggggccgcgcttttgggccgcgagcttgaggtcccgcttctcgacggattccttctggctccgcgaaggaacttgcgtcccttctctaagtcttcggataaaaccaagacctaggcctacagatgtatgggagcagggccagggagagagagacttcgtttttcccattcattcatgcatccgaccaacactgactgagcctgcgtcgggcgcggtgcctggctggcggtcccagggtcactaagacgcaacccggcgctggaggtgcttgcgtcgagcagggccggcacaggattgccagtcgtggctgtcctgtgcggtggagccacagggctgtcgcgtcgtccctgtgcgtgggtggcccagtgtgttggatatgacctgagagatgacagatgtgagatgacacgacagggagatctgaggaggtccccagagaactgggaactgcgtgtcaccagtctagagattcggagacagttggatctatggacccatgtcttcctttttcttgtcgaactcccttctttcacaggagcacaccatttttagtggtttcttaagatgagtacactagctaaaaagtttatgagccctcaaatacctgagtatttattcaaccctcaaatttaaattctggcttgtatggaattctagattgaaaagaatttctccccagcattttgaaggcaggcttcattgtcttcagtttttcagtgtggtgagaagtgatgcgtcatttttttctctctgaaagattttaggatcttctctttaaagttcagaaatttcatgacgatggtaccttgaatttaaggaaatttcccagaacgaaggagcttgatgttccaagttgaaagggcccacttaatgcctggcactttggtgaatgggaaaatgcccggaccaagtcacccctaacctactaacagggttttcagcaatggacatgtttcaagacctcacagacgagactggaggcaggcaatttcagggctggaacagggactctgatctcatgaggaatctttgcatcctgtatcagggtagatgttgcacttctaggtatcccagcagtcctcaaaggcaagagatggtggtggacaaggaagcctccccccatgtctcttatcagactccaaaggcctttccagaaacctccagtagatttctgcctgtcattggttaggactagggactccatttcagttaggctgggagagcacatgcctgccaaaagcaaatgggattgtcacgattaccttggcctaatgatgggttgtgtattttgtggcctgggctaaacacattgcttttgttgttgttgttgttttttgagacggagtctcgctctgttgcccaggctggagtgcagtggcgcgatctcggctcactgcaagctccgcctgccgagttcacgccattcttctgcctcagcctcctgagtagctgggactacaggcgcccgccactacacccggctaattttttgtatttttagtagagacagggtttcaccgtgttagccaggatggtcttgatctcctgacctcgtgatccgcccgcctcggcctcccaaagtgctaggattacaagatagacacgttgcttttaatgcacagaagtggggttctgttaacaaagaagaagaggggctggcacaatttgtttcaaccaaatgatgcttgctctcatctcctttctgcctcctcttcctcatgctcaggcaccctaaagcctgcctcaggcctttcataccccatggcccttttgggatcattgttctgatcctgactccctgcaatcacactctgaagatgtgatcttgccccttctatctggctcccagcacctagagagggattaagggacagctttctagggtaccatccattagaggtagtaaaagtg

SEQ ID NO: 3674 - DNA, 4001 bp, Homo sapiens
ccataaaattcaggaactatacctgaaaatcaccatcctgtattgtaagtatataaataattcactttcctatcagaaccaagaaagcactctagttcccattttccattctgccctaataaaaacccccacaaggaatatatatatatttcaacattttccactgcttcggtttaagtttaaattgactgaaactttaaaatccaattctttaattacactagccatatatgtgcttagtgtattggacaacacaggtctagatgctagtttgtagtatagtgtttgtagtatcgccctgtcaggtgatactgagttgcagattcacaaacctgcagcagtctaatactgttcagaaagacgaaactgtggtggtcctgatggcctcaagttccaaatacagttttgaactaactgaccccttcacctatttttatcaaaacttgcagtgcaaatcaacgttcagtagattcagccccactaatggacctgcacagtatcatgacaatgttcacaacaatgtgcccagtgaccatcaaattctaaagtagtctgtgaattagatttccgacttctattttggtagttttgtgtttactctttcaataactgaaaataaaccaccacggaagaatcctgaaaatacaaaggcatccttattctctcagtcctgagaaagtgttaaaactagcccatccagcagcaacctggaatttgggcctatgtggtccacacacttccaaataccacaaggaactagactcacttgtacgtccaggcaccgccagccactgtcttcatgcaggaaccacagtgccagatccccacagctcgtctcttcatcttggtctataaaagagaaccaattttcactatgaaccaagtaagtattttctcttacaagcatccagaagtctaaatttggattcaccttattgtcagggatgtgaaagcctccctttctccctcaaaaacaaaacagggattgctgtaatgcagtattttgcacataaacgttcaaacctttatcaaacaaaaatccctcgcagaacaagtagaatggtattagatgcacagacatcttgggagttggtgcagaaacatcagtagacaaaactgatggaatcatttcccacaaagcaggtttggcttaggctgggggcactctgtcaaatgattattttacccattaacgtttaagcggttttctttaaatgaaaaacgtctcacaaaatctgaagttaccatcaacacttttatcttaaaactcataatcaacggtatgagtaattccaactgcccaccagcacacggcttataaaataccttgaagtcaggcctcacttgggtaagaaacctgccctccctctcctctcaccagagactttgccttacttactttgccacagaaagagcaagtgtacttggcgtgctggctgatttcaattttcttcaccattttccggagggaggccccatagcgggtcccgtatttaccgacgatcccgactttcttggtacgtttggcctgtttagagtgaagggagaaaccagtgatagacctggaacccaggcaggccctggagcctccacacaccgttcctccacctcactgacgtgtgaccgacatgtgaattacatatgacctagttttccctaaattcaacccaacgaaaccagtgcccagggctggccgcgcgctccgaaggcccggcgttaacccggctggagcgcgccaggcccagccaaggcgcccccgcccctccgccttggggagcttccgacaatggtgtctcctgcaaaggcatggagacaggagagaacacggggtaaggcaggagaggagatgggtgcgggagaagaaaacaaggacagatgcaggcagatagagttctaggccgcacagagacccacactcaccatgtcgccgcgacctaggtccgagcccagaaaggaagagacgcggtgcgcaggcgcggtattaggcggacgagcggaagtggctggtagaggcctagctaggaactgagctctatggtttgggcgttttcaggcggcctcctgagaaatgtttgcaattgtaaggcgtctctctcatccaggtttacccagattcgcaaactatggcgacaaacaaccatagcagaagcatgtccggattatttcacatatatcacaaaatcctgcaaaggtacgagttcctccattcgatgcacagcacttggcttggagaagtgcataaatcttacatttgtggggccgggcgcggtggctcacgcttgtgattctaacactttgggaggcggggtgggtcaggagttcgagaccagcctggccagcagggtgaaaccccgtctctattccaaatctcatttatttccccctctgcattatgctctctaaaagtggctgactgtgcaggatgctagcgacagtggtgactaaaatccaaggttccattcccagaacaagttgcaggccagctgcaaacgatcatatagccacattaagaagttagacagtttcaaactggtcagagttctgaaggaaaggacgatggttctgctcgcgactaattcagaagagcctggtgtttcctgaggaaagtctgagattggaaggctggggaaaagttaacagtcaccttggagttttgtgttccagctgctgcatctcagtgcggatggcctgccttccacttcatttcagaactcacttccatggccccacactaggctgttaagacagcttcctggtccaggcctgaacccttaaactccaacatcttaccctttacccaccgtcaattctctgtccctccaggtctctcaaaggggtcagcagggaagaattggatttctggttgaggccgggggtggggagggtgtgttctggaactagacacatgatcttctttcttcacgtagaacacacacactaggaagtttggttgccttttttcaggggatggctaatccagagaataagaagctcagaaaactactggaataagagtgtaagagagaatccatgattagagggccaagaaagaccatgggagctgaaaggcattgtgtggccctgattccaatcagaagtccggtaacaagtagcttccgttcccaaagcttaatattaactgtctcaaataattttgcacctgttcacttttcctcacaattgtattaaagtcaacttgcatacctgggctgaggtgggaagatcatttgagcctgggaggttgaggctgcagtaagctgtcatcacgccactgcagtccagcctggacaacagagtgagactctgtctcaaaaaatatatatgaatcaaatcaaatcaaagcaacttgcaaacagctatgtacttcatatggttacaattgttggagggtaacacatggtaggcactgagtattttatgtggatgttctcatttaattttccattatcctttatgataggaatgattattatcttcattactaagaaaaagagaggaagtctcatgtaatgattaggaacttagaggctctggattcagtatgggttcaaaacagaactctgctatttaccagctgtgggacctctgacaagttattatatacttttctttcttttttctttttcttttttttttttttttttttttttttttgagacagagtctctcttggaaaagattctttgagaccaggagttctaggcagcctggacaatatagcgagaccccatctccacacacacaaaaaaataataggccaggtatggtgacacacatctgtggttctagctgctcaaaaggctgaaacgtgaggattgcttgagcccaggagttcagaggttacagtgagctatgatcacaccatttcactccaacctggacaacagagtgagatcctttctcaaaacaaaaacaaaaaaagaaagaaaaaagaaactcatctcagggaagttaagaaacttgctcaatgtcacacagcaattagaactcaaatctggtct

SEQ ID NO: 3675 - DNA, 4001 bp, Homo sapiens
acgtcactaacgtcactgtgtaccttagcagctacttttcctcgcattttataattccccttccctccgccccccggccccacccgtgggcagcatcccaaagccgcctggctgacgttggttagggtagagacgccctccctaaaggctgtccaagccgtctcttcctttcattagcggtgtaatcctgtgttcccgccggagcctggcacggaagtgtaatcttcccgcgggggcccttctgtcgtctcgcctacctgagagctgagactaaatgaaatataaaatattcacgataagaggaaacaaaggatgctgcctccaggacggctactgtgcctgaggctgggctccttctcagtcatcccagggcctctccgtctggccccaccctcgcccctccaggggatccacaagttgaatcgcagctctccagggttaattgccctggccgggagccagactcctcaccgccgccccgttcccccctgctggggagcgcagaatgaccaccaggaggccaggaacaaaacgcttaaatgttgcatttattaaggaaatgttaaataagaaaaaaacaaaaagtcaaaacggtgtcacggatgtcaagagcacttttgtggcgtaaaccgtgcagtcacgagctacgagttctattctgggtctttgtcccagggccagcaggaacgctagacgcctcccaaaagacccagtgggaaatgcactaaaagaaacaactcaccccgttcaaattcgcaggctccccctccccccaccccttctcccacaatgacaaaactgtaactcctcaggcaggcaaacaggccactggggcagaaaaagacttatcaaacatttgtattcaagcaaacaaacacaaaacctcttaaaacggcacgttacaatcaaaggtatttatcgcccctcccctccagggcagggggggagcaggagaagagtgggagcgcacccggacacggatttgtgagaccccatgagtctgctgcgtggcttttaacaggtcactcttccggtcacaaggcgatcagtgccgctgggtctctcccctgcccgccctctccacctgcccccagagcttggcccacctgcgggtggagaagggccttcgcaccgtcggtctccccgcattccaagtaagtagcagcttccaaagttctgcgccctaatcgccctcttcttgccactttctgctgagttcagagtctgggcgctctcctccgactgccaggcatgaggactttcagagggcgagggagaaaccggtcgcttctttccgaaaggccgaagtcgagagaaataattgactccgacaggtttgcttcgcccagtctctgatagtgaggggcacagccgggctagcaaagtgggcaggcgtgggagcggttgccgcgggggcagagggcgggtcagtagggccccacgaccaccgcctccacctccttagacggcctccggtccttcacgaggaagttgatcatgccctcggacttgatgagcagattgcagccgaggaagaagatgccgaagaccacggtgagtgagagcacgcacatgaccgcgatctgcaccacgcgcattatgtacaggctacgctcgtccgggcctccctccgcgaagccgtcgtcggtcaccacggacgcctgggtgcagcagcgcacggctcgctccagcgcctcgctgctgttggccaggaacaggcccgccacgtccgtctggttgcctagggccggattcatcgcaggaacgggcgggcgccgcgagcggcgcgggtccgaggggtgggaaggcggcggcgctggaggaacaggtgccgggctgagcgctcactcgcagactagcgcgtgcgagggctcctcgctctgctttcgaaagtccctgggccgtgggagtttcccaggagcctctccgacgcgcgcagcagctaggctcttctaaagccgtccgctccagccctggtggtgctcgttcccggcgctcgctcgagggggggctgttggaacttggcggggctggaccagcccggccgtgggaggtgcgggccgcggcggctgcagcggcggggtggctgcgctgagcaaacagcggccccttccggccgcaccgccgcgctgcgcgctgctcttgggaggtggaggaagcaaaggggcgaacctggtcttgctttttattgcttgcttcttttgcaaactccaaaggccaggcagaggtcactgtactcttctagcttgatggatgattaaagagtttgtcgggggagggtgcggtcagctgaaagtttcagaggaactgggacacacgagctctgcgtgtcctttgcctgctgcccccctgacctctgggcgaatggaaagtggcgatgaatcgcaggtgccagatggtgccggctgaggccacccgcccactgcctgtgcttgactccgactcgcctgcgttggatttctagtggagtggaggtgatctgagaatgtttcttacaaagcaatgaatttggaaagacagaaaggcatggaagaaggaaggaagaaaggaaggaaggaaagaaaaaaggaagggagggagaaagaagagctctacacccagcttcctttacaaaagcgattgggagacagagcaaggcaggttttaccgtgaggtttgaggccaaggaaagagggttagaggaaggaggagttcttctgtggcccttgggtggaggtagttgccgggagcagggtcacctctctggtaaaggaggtgaacagagtgaccacttgcttgtaattttaattgcagataagtttttggatgtgcttccagcattttgtccgttggcagtaaatcagttgttgaagggaattgctcatcaacatccatcacctagaacgctggccaaatactgggagccctccccattttccataagctgatgtatttcacccttagtcatttaaactaaacacagatgtttttataggcctgattgacgcttcagccattgtgattttgctctaggttccaacgaaattctataaacctgtcagattaagtttcttaactctgaaagaatattgcatgttcccgctcccccttttctgttttctttcccctccctccttttccccattactccctgccttcctccctctttctttcagctgtaacagctggaaaccagtaacttgagcttccaatagaatacatttactttctattaaatgttctcaccacaaagaactgataaaaatttgagataatgggtacgctaattactctgatttgatcattccacatgtatatgtgtatcaaaatatcactttgtacctcataaatatgtacagttgtcaattaaaaataaaataaaactgaaaaatagtagctgtcttgccattttcaactctactcttaatttcattctgtttgcttggtaaatcctcttatttctgtttcttaaaacatcatttattccatcttcagagtgttccttaaatgtttttgcactgcttcatgactatcataaaatagaatgaaatgccttctggttgagttttcaattttttgatatttatggtatatcagctgcaataagtttgattttttaaaatagctattattattttgagggggatgtttaacagctgaaaattcaggcttgggcttctaccacaattcactggcttattgttctagtttcccataatttaattagaattgaaaaatacctcactctcggcaatttcttctttgaagaaatttattaataattgataagtaagaatttacttaaatctcatcatacaatcagtctatcttagttaatgtgggtagtcctcaagaataataaaacgtaatgtatacatggaaaaaattacaacaaatttaaggcaatataaagtcatcctgagatgaatggtagagaaaagtaatagaaatttagaaaaataaaaggtcagagaacagaggcccacctccagggatcaagttgtacagaactgtgtgttcag

SEQ ID NO: 3676 - DNA, 4001 bp, Homo sapiens
aataccaatactttgggaggtcgaggtgggcagatcacttgatgtgaaaagttcaaaaccagcctggccaacaaggtaaaacccagtctctactaaaaatacaataaattagccaggcatggtggtgcacgcctgtaatccccactaatagggaggctgaagcacaaaaatcacttgaacccgggaggcggaggctgcagtaagccgggacaagcgaatgcactccagcctgggcgacagaggagactccatctcacacaaaataaataaataagtgtccaaattcacgcaagtgaaatacacctcaaggattccaatctaggtactgtgctccccgatcaccaatgtctattgtgttattccacaagtatttcgctttgtcaatctgaccccttcccccatcaccaagagcaggtatgtctagcacctacaggtaggccgaagtctccgcaggttaagttttcttaactacaaaatactacttgccttccttatcctggatcttggcctttacattttctatcgtatccgagggttcaacctatgagtgttaaagtgaaagcatgttggttacacattaaggaactacagcagaactcatttagtttgacaattaccactgaaccgaaccagcgacagggctgagacctactcgagagacctattacccacccagtgggcaacctcccaagtcggctaccggaaagcaccttcatctccccagcccagagcgggcggcggccgcagggccacacgtgctcgcacccggcgggcagagcgtctccttccccaccgcagctcctccgttttaactaactagctggaacccctcgagaggagacaggtccagcctttggccaccgaaaatcacctctaggtcgttgctcagcaaaaggtactcatttcaaagcttaagttttagaacccaaattcggaatcatggtctaagacatggaaagcagcgccggtcctaaaatccacctcaggaccttattcggaccttggcttcctcatgaccacccggcccgtacctcgagggtgatggtcttccccgtaagggttttcacgaaaatctgcattttggtggcggctccacctgaggttgaggaaaaggaagagacaggttaggtcagggatcacaagagaaggcaccatagggtgctaacccgagagcagccgaagtgcagacacccaccgcagatggcggatcgaaaaggaagaacgccgcgcaggcccacggggtttcccggagctcccgccgaaggacccaccccttaggcgaccacaccaaatgcctgactgccgtcccagcgacaatccaacccggtgccagactaggacgtgaacttcgtttctcctctccctagcctgggcttatttctcactttagccttcggaatgctttcgaaactgtaggtttaagcaacgtaaaagatgttttaaaaaggcttttcccgtacaatcaacgtggctaagagaatttttaaaaggaggtcgaggggggcctcttggggaagaggtaggaaatggaagtgcattctgggaactgtagttctccactgctttcttctaccttggactacttgtcccaagatgcagttccacctcccagattccctagttactatctctaagcactgaagtcggtgtttggagaaaaggactcaggtgaggactggaggtaggatgaagcggaataatggtttccggagcgtgggaacgggccggaagtgactagagcaaatgttaagcggggggcaaagggtgcggggcacgaaaggtgtccttcactcacttccagaagcggtgatgggcagagaatcagcaatctaccagacgctccttgggccttcaagggaagggaatttgcgtggcctgctccaggcaaactgaaaaataggtgaaatctgcggaagcgggggttcagccctttctctcctgtagcgcctccctgctttcaaccgccgagtctctcccagcctagggaagagtctgggtcttgtgtgtcactccttagtgtgacacgctttaatatgttgaaaaatctcaggagttttcaaattttaaagtgaagccgtacggaaaagaaacctgcagaatggttatttagttgtagaatttccaaatttgggcattgggagtcttggatctgagaggaagtttttggagtatgtatggggtgcttcttccggcaaggaggccaattagaagcaagttctccctgtcctttctccactccacaaaccagagtcctttctaatgtcttctgtatttatttcttcatcctctgccctctgcgaccccatccccaaattcagaccttaattttctcttgtaggggttccgaatctaactccttatctctctccagtctttcctcctttctaacccaccttcactattgcctccaaaatattcattctgaaaggtaaatgtgtgttattattttatacctcaccttcaggatacaattcaaatttcttagaatgacattcagcctctgccttccttacaacctaatctgctaaacccattactctacattttagtaaatgaagctaatttaatttcctgacctatgccctcccgtgttttggcatttctgaagaatccagtcgtttattcttcctggaacttttttttttttttttcgtgagacggaatttcgctctgttgcccaggctggagtgcagtggcgcggtctcggctcactgtaaactccgcctcccaggttcaagcaattcttctgcctcagcctcccgagtagctgggattacaggcgcccaccaccacacccggctaatttttgtatttttagtagagatggggtttcaccatgttggccaggctgttctctagctcctgacctcaaatgatccatcctccttggcctcccaaagtggtgagattacaggcgtgagccaccacgccctgcctcctggaacatttttcatcccctagtccgccaactagtctctacaacaaaatttcctagagttgcttgtacatattgtctctaatctttcccttccgttgtctgaacccactcctgtcaggcttttgtccccaccattctgatcggatagctcttgtaatggtcactaatgacctccatgttgctaaattcaatggtcatttcatcttatttgatctgtcagcagtatttgacacagttgctcattccatctctctttgaaaacctttcaaagacttcacctctcagtttttctgccaccctggaggctcttttccaggctcatttgctgcttcctcttgatctgcaagacctctaaccatggagtatccccaaggcccagtccttggacctctgctttgtctgcattttcttggttatctcatttttgtttaataacttttaaagtatcatcatatgcaaatgactcataaacttatctgtcagaccagatatgtcacagatatgtcacaacttcatcttcacatatccagctatctactcaacatctctaatggacaggccccaaacacttaatctcatgaaattgctcttcccatgtttatatatggcaattcccatttctccagtcactaaggccaaaaactttatgattatccttgactgttcttttatatcccacatcttatctaccttggcagatcttggctttattttcaaaatatatgcagaacacttcctaccacctccattgttagcaccctgattcaagccaccatcatcttttgccttgattattgcagtagcttcgtaacagcacttccagctttgacccttgcgtcctataatctgttttccacagagcaacaagaacaattcttttttttcttttttttgagatggagtttcgctgttgttgcccaggctggagtgcaatggcacaatcttggctcaccgcaaactctgcttcccgggttaggtgattctcctgcctcagcctctccagtagctgggattacaggcatgcgccaccacgcccagctaattttgtatttttagcagagac

SEQ ID NO: 3677 - DNA, 4001 bp, Homo sapiens
actgacagtttatagggacattaaagaatgcattacattacaccatgggatacaacttgcaaaattcataatgggagaactatagcagtgcttctcaagtatcagtataggagttacctaaaaatctactgctattcgaatgccattttccctttttgtgtgtcaaaatgtccagaatacaccacatggagtggctcacgtctgtaatcccagcgctgggaggccacggtgggaagatcacttatgcccaggagtttgagaccagcctgggcatggtggcgggtgcctatagttccaactacaggaggctgaggtgggaggaccacctgagtctgagaggtggaggttgcagtgactgcgccactcactccaccctaggtgacagagtcagagcctgtctcaaaaaaagtaaaataaaaaatttccaaaataacattttttttttaaaagaggctgctcttcccctagacagaccttttgaatattgtagtcagacaaagtacgtccatcttccagctgcttgccagcaaagatcagtctctgctgatcaggaggaattcctaatgacaaaaaacaaaaattaagtcacagcacaccaagcctgtgatgtgctccagacttataaggtaacaccccttaatcaaatacatgatactaaaggctgacaataagcccttactagaggttaggcatggttctaaatctttacatgtcacattttaccgcatttaatattagggacaatacttggttgtctgcagtggctgacacctgtaataccaatactttgggaggtcgaggtgggcagatcacttgatgtgaaaagttcaaaaccagcctggccaacaaggtaaaacccagtctctactaaaaatacaataaattagccaggcatggtggtgcacgcctgtaatccccactaatagggaggctgaagcacaaaaatcacttgaacccgggaggcggaggctgcagtaagccgggacaagcgaatgcactccagcctgggcgacagaggagactccatctcacacaaaataaataaataagtgtccaaattcacgcaagtgaaatacacctcaaggattccaatctaggtactgtgctccccgatcaccaatgtctattgtgttattccacaagtatttcgctttgtcaatctgaccccttcccccatcaccaagagcaggtatgtctagcacctacaggtaggccgaagtctccgcaggttaagttttcttaactacaaaatactacttgccttccttatcctggatcttggcctttacattttctatcgtatccgagggttcaacctatgagtgttaaagtgaaagcatgttggttacacattaaggaactacagcagaactcatttagtttgacaattaccactgaaccgaaccagcgacagggctgagacctactcgagagacctattacccacccagtgggcaacctcccaagtcggctaccggaaagcaccttcatctccccagcccagagcgggcggcggccgcagggccacacgtgctcgcacccggcgggcagagcgtctccttccccaccgcagctcctccgttttaactaactagctggaacccctcgagaggagacaggtccagcctttggccaccgaaaatcacctctaggtcgttgctcagcaaaaggtactcatttcaaagcttaagttttagaacccaaattcggaatcatggtctaagacatggaaagcagcgccggtcctaaaatccacctcaggaccttattcggaccttggcttcctcatgaccacccggcccgtacctcgagggtgatggtcttccccgtaagggttttcacgaaaatctgcattttggtggcggctccacctgaggttgaggaaaaggaagagacaggttaggtcagggatcacaagagaaggcaccatagggtgctaacccgagagcagccgaagtgcagacacccaccgcagatggcggatcgaaaaggaagaacgccgcgcaggcccacggggtttcccggagctcccgccgaaggacccaccccttaggcgaccacaccaaatgcctgactgccgtcccagcgacaatccaacccggtgccagactaggacgtgaacttcgtttctcctctccctagcctgggcttatttctcactttagccttcggaatgctttcgaaactgtaggtttaagcaacgtaaaagatgttttaaaaaggcttttcccgtacaatcaacgtggctaagagaatttttaaaaggaggtcgaggggggcctcttggggaagaggtaggaaatggaagtgcattctgggaactgtagttctccactgctttcttctaccttggactacttgtcccaagatgcagttccacctcccagattccctagttactatctctaagcactgaagtcggtgtttggagaaaaggactcaggtgaggactggaggtaggatgaagcggaataatggtttccggagcgtgggaacgggccggaagtgactagagcaaatgttaagcggggggcaaagggtgcggggcacgaaaggtgtccttcactcacttccagaagcggtgatgggcagagaatcagcaatctaccagacgctccttgggccttcaagggaagggaatttgcgtggcctgctccaggcaaactgaaaaataggtgaaatctgcggaagcgggggttcagccctttctctcctgtagcgcctccctgctttcaaccgccgagtctctcccagcctagggaagagtctgggtcttgtgtgtcactccttagtgtgacacgctttaatatgttgaaaaatctcaggagttttcaaattttaaagtgaagccgtacggaaaagaaacctgcagaatggttatttagttgtagaatttccaaatttgggcattgggagtcttggatctgagaggaagtttttggagtatgtatggggtgcttcttccggcaaggaggccaattagaagcaagttctccctgtcctttctccactccacaaaccagagtcctttctaatgtcttctgtatttatttcttcatcctctgccctctgcgaccccatccccaaattcagaccttaattttctcttgtaggggttccgaatctaactccttatctctctccagtctttcctcctttctaacccaccttcactattgcctccaaaatattcattctgaaaggtaaatgtgtgttattattttatacctcaccttcaggatacaattcaaatttcttagaatgacattcagcctctgccttccttacaacctaatctgctaaacccattactctacattttagtaaatgaagctaatttaatttcctgacctatgccctcccgtgttttggcatttctgaagaatccagtcgtttattcttcctggaacttttttttttttttttcgtgagacggaatttcgctctgttgcccaggctggagtgcagtggcgcggtctcggctcactgtaaactccgcctcccaggttcaagcaattcttctgcctcagcctcccgagtagctgggattacaggcgcccaccaccacacccggctaatttttgtatttttagtagagatggggtttcaccatgttggccaggctgttctctagctcctgacctcaaatgatccatcctccttggcctcccaaagtggtgagattacaggcgtgagccaccacgccctgcctcctggaacatttttcatcccctagtccgccaactagtctctacaacaaaatttcctagagttgcttgtacatattgtctctaatctttcccttccgttgtctgaacccactcctgtcaggcttttgtccccaccattctgatcggatagctcttgtaatggtcactaatgacctccatgttgctaaattcaatggtcatttcatcttatttgatctgtcagcagtatttgacacagttgctcattccatctctctttgaaaacctttcaaagacttcacctctcagttt

SEQ ID NO: 3678 - DNA, 4001 bp, Homo sapiens
tggtggcgggtgcctatagttccaactacaggaggctgaggtgggaggaccacctgagtctgagaggtggaggttgcagtgactgcgccactcactccaccctaggtgacagagtcagagcctgtctcaaaaaaagtaaaataaaaaatttccaaaataacattttttttttaaaagaggctgctcttcccctagacagaccttttgaatattgtagtcagacaaagtacgtccatcttccagctgcttgccagcaaagatcagtctctgctgatcaggaggaattcctaatgacaaaaaacaaaaattaagtcacagcacaccaagcctgtgatgtgctccagacttataaggtaacaccccttaatcaaatacatgatactaaaggctgacaataagcccttactagaggttaggcatggttctaaatctttacatgtcacattttaccgcatttaatattagggacaatacttggttgtctgcagtggctgacacctgtaataccaatactttgggaggtcgaggtgggcagatcacttgatgtgaaaagttcaaaaccagcctggccaacaaggtaaaacccagtctctactaaaaatacaataaattagccaggcatggtggtgcacgcctgtaatccccactaatagggaggctgaagcacaaaaatcacttgaacccgggaggcggaggctgcagtaagccgggacaagcgaatgcactccagcctgggcgacagaggagactccatctcacacaaaataaataaataagtgtccaaattcacgcaagtgaaatacacctcaaggattccaatctaggtactgtgctccccgatcaccaatgtctattgtgttattccacaagtatttcgctttgtcaatctgaccccttcccccatcaccaagagcaggtatgtctagcacctacaggtaggccgaagtctccgcaggttaagttttcttaactacaaaatactacttgccttccttatcctggatcttggcctttacattttctatcgtatccgagggttcaacctatgagtgttaaagtgaaagcatgttggttacacattaaggaactacagcagaactcatttagtttgacaattaccactgaaccgaaccagcgacagggctgagacctactcgagagacctattacccacccagtgggcaacctcccaagtcggctaccggaaagcaccttcatctccccagcccagagcgggcggcggccgcagggccacacgtgctcgcacccggcgggcagagcgtctccttccccaccgcagctcctccgttttaactaactagctggaacccctcgagaggagacaggtccagcctttggccaccgaaaatcacctctaggtcgttgctcagcaaaaggtactcatttcaaagcttaagttttagaacccaaattcggaatcatggtctaagacatggaaagcagcgccggtcctaaaatccacctcaggaccttattcggaccttggcttcctcatgaccacccggcccgtacctcgagggtgatggtcttccccgtaagggttttcacgaaaatctgcattttggtggcggctccacctgaggttgaggaaaaggaagagacaggttaggtcagggatcacaagagaaggcaccatagggtgctaacccgagagcagccgaagtgcagacacccaccgcagatggcggatcgaaaaggaagaacgccgcgcaggcccacggggtttcccggagctcccgccgaaggacccaccccttaggcgaccacaccaaatgcctgactgccgtcccagcgacaatccaacccggtgccagactaggacgtgaacttcgtttctcctctccctagcctgggcttatttctcactttagccttcggaatgctttcgaaactgtaggtttaagcaacgtaaaagatgttttaaaaaggcttttcccgtacaatcaacgtggctaagagaatttttaaaaggaggtcgaggggggcctcttggggaagaggtaggaaatggaagtgcattctgggaactgtagttctccactgctttcttctaccttggactacttgtcccaagatgcagttccacctcccagattccctagttactatctctaagcactgaagtcggtgtttggagaaaaggactcaggtgaggactggaggtaggatgaagcggaataatggtttccggagcgtgggaacgggccggaagtgactagagcaaatgttaagcggggggcaaagggtgcggggcacgaaaggtgtccttcactcacttccagaagcggtgatgggcagagaatcagcaatctaccagacgctccttgggccttcaagggaagggaatttgcgtggcctgctccaggcaaactgaaaaataggtgaaatctgcggaagcgggggttcagccctttctctcctgtagcgcctccctgctttcaaccgccgagtctctcccagcctagggaagagtctgggtcttgtgtgtcactccttagtgtgacacgctttaatatgttgaaaaatctcaggagttttcaaattttaaagtgaagccgtacggaaaagaaacctgcagaatggttatttagttgtagaatttccaaatttgggcattgggagtcttggatctgagaggaagtttttggagtatgtatggggtgcttcttccggcaaggaggccaattagaagcaagttctccctgtcctttctccactccacaaaccagagtcctttctaatgtcttctgtatttatttcttcatcctctgccctctgcgaccccatccccaaattcagaccttaattttctcttgtaggggttccgaatctaactccttatctctctccagtctttcctcctttctaacccaccttcactattgcctccaaaatattcattctgaaaggtaaatgtgtgttattattttatacctcaccttcaggatacaattcaaatttcttagaatgacattcagcctctgccttccttacaacctaatctgctaaacccattactctacattttagtaaatgaagctaatttaatttcctgacctatgccctcccgtgttttggcatttctgaagaatccagtcgtttattcttcctggaacttttttttttttttttcgtgagacggaatttcgctctgttgcccaggctggagtgcagtggcgcggtctcggctcactgtaaactccgcctcccaggttcaagcaattcttctgcctcagcctcccgagtagctgggattacaggcgcccaccaccacacccggctaatttttgtatttttagtagagatggggtttcaccatgttggccaggctgttctctagctcctgacctcaaatgatccatcctccttggcctcccaaagtggtgagattacaggcgtgagccaccacgccctgcctcctggaacatttttcatcccctagtccgccaactagtctctacaacaaaatttcctagagttgcttgtacatattgtctctaatctttcccttccgttgtctgaacccactcctgtcaggcttttgtccccaccattctgatcggatagctcttgtaatggtcactaatgacctccatgttgctaaattcaatggtcatttcatcttatttgatctgtcagcagtatttgacacagttgctcattccatctctctttgaaaacctttcaaagacttcacctctcagtttttctgccaccctggaggctcttttccaggctcatttgctgcttcctcttgatctgcaagacctctaaccatggagtatccccaaggcccagtccttggacctctgctttgtctgcattttcttggttatctcatttttgtttaataacttttaaagtatcatcatatgcaaatgactcataaacttatctgtcagaccagatatgtcacagatatgtcacaacttcatcttcacatatccagctatctactcaacatctctaatggacaggcc

SEQ ID NO: 3679 - DNA, 4001 bp, Homo sapiens
cccgggttcacgcgattctcctgcctcagcctcccgagtagctgggactacaggcgcccaccaccacgcccagctaattttttgtattttttagtacagacggggtttcaccgtgtcagccaggatggtctcgatctcctgacctcgtgatccgcctgcctcagcctcccaaagtgctgggattacaggagtgagccacagggcccggcctgtaacaggtttcttagtttgatcatctatgtaagcaacccactagacttgtggaaatttaaatatgggaaatcattttcataactcaaaacacagcagtctgtcactttacagacttcttgtttcgactcttaattaaagaacgtactttatctttctttttaaaacttattttttctattttttgtagacagggtcttaccatgttgcccaggctggtctctacagtgatccacccgcctccacctccccgtgctgggattacaggcctaagccacggcgctctgcctgtactttatctttctacccaattggattcataaaaggattgttttcatgactccaactaccaatgcagtctaaatacaagcaattttagcaaaattcacaaacagaaacgtgctgcaacagtagaacagatacctgagcgataaagacgacatgcttcccactgaactttttctccaattcgcgtactagccggacttggattttctggaaagatttcagttgaggaacgggaacaaagattatgatagctttccgaccaccaccaacttcaatttcctaaagaaaaaaacaaaaatccactgtgttaactgcttcagaaagtaaacgttgtggtcaaattagaggataagaagaccttatcactaacaccgtagctgcactacaaactaatactagttttgagttaatcataaatgcatccttcggaaatgttctcatctctctccaaccttcacatttccttattccaggaagggagactgttcaggccaggaggccaatcactaccacttctgcacccccacttgcggcaactccgggctaagggtagagagaatctcatcctgagctccccacagctctttgccgtatctataactaagtaagggcaaataaggtccgaaatgggcccaggccctccctactccacgtttctccaccgcccgcatgtggacagcttaagccgcagggtacctgcaaccccactccccgcacctgggcggtatcactcccaaacaacacggccgaacctgagttcaggttaggcggccaggcggcaagtcatcatcaaccgtaacccaggtccaaccctctcaggcactgcgcggggagacgcgccgcaacctccctcccagccgagggagcgccagcttaccttagctgccgtaatattcagctccctgagctgagccttgaggtccgagttcatctccagctccagaagagcctaagaagcaacgaacagcaggaccgaccctgagcgcgcgtccgagcaccccgggcccaacacacgcgcggccgcctcccctcccgggcggggcgcctccccccaccccagaccccagggaaaccctctcacctgggagatgccggactcgaactcgtccggcttctcgccattgggcttcacgatcttggcgctcgaactgaacatggctttctcctgggagaactgaaggcacagcggtcagcgttacgcggcccgggctgcaggcgccgctggctcgccctcccgcccgcaccccccggccaggccccgctcgccccgcagaagccatcggaaagcacagggcgggtaatcggctgtatccccaccctgtgagcaaggctcgcccctccagggcctgactccaaaaggcgttttcctcaacccaagaagaaaagttctgtcggagagcaggccgccaacctaccttgccgagcgccggcttaggaagagacccaaatctcgcgagagcacgtcaaaatccggcgtccgaaggcaagaggcggaaacagcgcgaggaggagggcggaaaccggaacatcactgagaagcggtaggaggctagagagtcccaggaagcggctctggggacgagtgtcttggtaacgcttttccgccctaggattcgtactttggtgccgtttccgagcgttccggtaccggctcccaaggttcccgtcttcagtgcaggttgcaggcgggaaccggcctcgtcccagccctgggcctgggagagagaaggaggccgaagaaaaccaacttcggcaacctccggagacaggacgtttaaaaaaggctaacttggctgggcgctgaggctcacgcctgtaatcccagcactttgggaggccgaggcaggaggatcacttgagctcaggaaccagcctgggcaacatggcgagaccccatgtctacaaaaaaaaaaaaaaaaaaattagccagtcatggtggtgcgcgcctgcagtcccagctaccccggaggccgacgcgggaggatcgctggagccgaaaggtcgaggctgccgtgagccgaggttgcaccactgcactccagcctgggcgacagcgcaagaccctgtctaaaaataaatttaaaaaaaattgcgaggccttcattctatgctagtactgtactaggtgctaattattaagtaaaaccgactgaactcttgccctcatggagcttacagttcagtggagaagacattacctaaagcagtatgactaaatatataatgacatattgtaataacttacataacagtacaatgagagggtggggagggattatttatgctttaagaagtcgggaatcctggaacggaatgacattagactgagacacggaagagccgcaggatctattgctggggaagagcattccagacagggaggaactcgtgccgaatgatcccgctgtggacagggaatttaatctgagcttcggtttcctcttctgtcaaatgtcatgcaagagttactttcagccgtggtccaggcactgtgaaaaatgcagaagccacactaggtgccctctctcaggattcccaaccacctttaccaagcagagatggtattcatcccacatttttaatgctagatatgctcccgcccggtgcttctctaataatgttttttaaaaggtaagtgactgtctccttggaaaattaaggataacttgaagtttcttccagatagaaagtaaactacagctgcgtctacaatctcatctgggcagtcgttctgagcccttttgtcgaactaggtccatttccttactccacatgcacttttcgacctggcttttatctctgctgctctataaaagtagtaatctaaaagttcatccagtaaagctttttctctgtgaacctatcacttgagaacaaaaaaaattaaagttatttctggtttccagtcctttgttgaataggagtggtgagcaaggacatccgtgccttgttctccatcttaggggaaaaccattcagtctttcaccattaagtataatattagctctaggattttgcaggtatttttaatcaaattcaggaagttccctctgtttctatttctgagaggtttttttaaaatcatgggccgggcacggtggctcacgcctgtaatcccagcactttgggaggccgaggcgggtggatcacgaggtcaggagatcgagaccatcctggctaacacggtgaaaccccgtctctactaaaaatacaaaaaattagctgggcgaggtggcgggcgcctgtagtcccagctactcgggaggctgaggcaggagaatggcgtgaaccgccgggggcggagcctgcagtgagccgagatcgagccattgcactccagcctgggtgacagcgagactccatctcaaaaaaaatatataaataaaaaataaaataaaatcatgaatggatgttggagtatgtcaaatgcattgtttctatgaactaatatgattatgtgagtttttctttttagctgttaatgtgctgttaatatacataaa

SEQ ID NO: 3680 - DNA, 4001 bp, Homo sapiens
tttcaacttgcttttccccacgttacatatataatttgggagaaggaacaaaaaagctaggggaattgcaatgacctaattgagatataaaagatactctctacattgaatagttacaaacacttagaaacagtatgaaaggaggcagagataccaacagcactggaactgacaatggagatcaaatctcaaaaagcagttttctatagcttagtcatacttggctcaatttttcactttttgtacttaaacgtatggcaatttttggtgctttatttagtaattacgtcattttgcctgataatacaatttcagtacattactttccttaaatcatttccctttggttaaacagaaaaagcagaattggtcttcaggcaggtatgctcaaatcaaatgatctcctttccccatcatggcaatgttctttcagtggtcaccttcccttcaatattctttcatgcagcaaagtatctgagtctttaatcttgtactaggaactgtcctggcaccggggaaaccacgtcaacagggctcacatgatccctgtccctgccctcaaggagacagacaacaaataaacgaatacaataattacacggggatcagggctgtaaagggtactctactaaagttagaggctgcggaactaatttgaagaggatagtcagggaaggccactctgagaccgatttaggcagagacctgaagaaagatggatttggataaacagtttaaggagaggaaggagagttcaaggaagaggtaccaattacactcatgctgtgtatgtaaaggaggagggataagaagaacattcactccaggcatagagaccacaaagtgcatcttggagaaaaataagcgcgttgcagagggttaggtggccagagtagctgaagctttaggagcaagagacataaaacgagattataaacgtgggttaagtaccacatcatacagggccgtgcaggctatggcaaggagtctagattttatttaaatgccaagagaagtaggattacttcggatagctgaattacactatctttcttttttgttaaaagatcacgcgggtaaaacgagatgtgtcgaggaaaagttttaaatgcagagaacctaagtcagatgcaaaaattatgcacttttccgggcctcaggttttccataaataaagcaagtggtttgaactagaagccatttccttcccgctgcgacgtggtgagttctaagagcaggggccgcgtcagattgaccatggaattcccctcatcgacgccggcgcccagaacacaactggcgccctgaaactgttggtcagcgcaataaatcaatgaatggcctgctacgggcgtgggaccaggccccggcgcccgcaaagaacgcgatgggtcgcgctgaaggccgcgagaggcgtccggcaaggaaataggggccggctccaccacaaccaaagcgtgccgaggaggggaaccggggccttggagattgagggcagaaaaaaatcagactagggacccgacaccgggaattaggagagaaggccgaaacgtgggtctgagaaaggattctggttccaagcctgggggcccagccactcaccgcagccgtcgccaggctgtgcatgttgtgagcggccgccgctctcttccacagccggacgcgtccgacccgcgtccccccttcagcacccctgcagcggaaaacaatgagccgccgtagccgccatccgactccggctcgctccgcccacttcgcggccctctgacctctcacccctgaccccacccacacatcctcttcccgcctccagggcctagttaacagtcccagagtatgtcctttgccccttaagatttaggaccggaaggacgtccgcgaccactagtccccgcaacttctggctttgagcagttatttccagagagcggcgtgaactctgaccctcctccaaaagccagtgaacggcgggaaaagatggacagtcccggcaagacaactattgcgcatgcccgactgggttgcgtaggagggaaatggtgggggggcgtcgaaatcgggtgaggtggaaagtgcgcgtgcctactacagtcacggcaggggcggggctgcccgggctaggccgctctaggtactggcggggcggggcgagggcgtgtgaggggcggagttttcgactgacgcgcacgcgcctgtctggtcgcgtcgagtgtgcgtgcgtgcgtgcgtgtttgcgtgtggtcacagttcccgccatcagccgctctccctgactaggggtagctagcggcctccctcctttgggttcggtatccctacttccattaccctcggctcctcccactcctcgcgggctccgtgctttccgcgggtctgtccgggggctccggaccctcggcgcaggtaaggcgggccggggtagcttctcaattgagccgttttccctacctcctcctccttctgtgcgatccgcccactcggcgttcactcctctggagttcgccctgctgctactcagcccgcccacaacccctcgatgcacccccagcctcacaggtactacctttgggtgcactgccccggcttccacctctcctttgacttggtctccactgccactcgctccctccgaaactcaaacctggccccttttctctggggctgttgtcgttcgcctcttaccttctaacagggcctgctgtctcttcaggtgactttcgttacggcacatccaccaggccttggacatgatactcattcactctcttgaccatcttcaccttcctcttgaccagtcctcactgcaaaacatgaattgtatttttgttgtgcatttccttgcgcccatttctagccgccagatcaggttgttagatgtaactattttaagtcatgatccatgaaaggaaatgatgattgatgataaaatcctgtgtcctgaagagttgtcctaaagtggttttggggtattcctctcaaaatttcagctctgtataaattcctttattgaggtggcaattcctgacaagtgtctaactggaagagatacctgagagggaatgtcaagtaggcagttggatatagtgggtttggagatcttaggagagttctgggctgcgtacgtaaatgtgcgcggtgtgtgtatgtgtttgtcatctgccatattgatagtaattgaagccatggatgtggatgaaattgccgaaaaagagtatagtgctgtaaaataaaggcacctaggatggagcattgacgaattcctgctgtttaataaccaatagaggaggatgcgtcttgcaagccatgaaaaaagtcatcagtagtgttgcattctgctgaaaggtaaaatggaaggaggactgaaaaacccagtgatataaaagtactcacttgtcttaaagatgtttgatgaagtaaaatgagtatttgggttcagtcctaggtcctcttcttttactcttatattcctccctaagctttaaatttgatctatatattgatgacttaaaaattgttatttccagcctattccctttgttttcagctccacatctagatagccagctgtctgcttgacatctcaacttgatttttttcttaggagtttcagatgcaacacagccaaatccaaagccttgatctttctctccatatcgaaattctttcttctccagtgtcccagtttattaagtggcacatgacacaggctacacacttgggaggcattcttgacttctactctctccaagttctatcctacttccaatacgtgtcttgcatctttttctgtacattttcactgtcacttttctagtttaagccacagtccttaaaaaacctggacttgattgccttggcttcctgtattatcatctgtaaaatggaaatagtaattttcagcctattggattgttatgaggattaagtgagataaccatgataagcacttggcacagagtaaatggccagtaagcattaattgttattgttataagctgatc

SEQ ID NO: 3681 - DNA, 4001 bp, Homo sapiens
tcttggctaaatcgctccacctagtggcaaaacacatcaaagttaagcttgagaaaaaaccaacagcagcaactgtcaacggatactggcagcatcgcactctttgtaccattataaggtttatttctatatatatttcatccaatttgtcacaattctttgatattttatgtcatatgctcaacttacatatcaggaaatagatacatataaaataggatttgtgagcgctcgatttcctaattaatttatgtcaagaaagatccattcgcaataagagatacaaccaaattattattaaaacagcaaagccacaaaaaggagggagcagagccgggcgtggtggctcacgcctgtaatcccaacactttgggaggccaaggtgggtggatcacctgaggtcagcagttcgagaccagcctggccaacatggtaaaaccctgtctctactaaaaatacagatattagctaggcatggtggcgcacgtctgtaatcccaggtactcatgaggctgaggttggggaatcgcttgaacccaggaggcggaggttgcagtgagccaagatcacaccactgcactccagcctgggccagagtgagactctgtctcaaaaaaaaaaaaaaaaagagggggcagatgtggtggccacaaagagtcatcacattgctaccacttaatattgtctcagcttctctagagtcgggaaaataccataagaaagaactgcaaagtgttacaaaacaggaaatgccatgtaatataaaacccagcttacacacacagatgcactcagcatggaaaaacatacaagacgaggaaagcgaactagttcgacctcagatcgtcaacgtcaaatgaatgaaagatgttttggaaactcaccaagttttcatttactatgccatcgcttgctgcaaagaaagccagaacatgggatataaaatatctctcctcgggtttcagggattcccagtgctgaatgtccttggagaggtccacctgaggttcggaagtcacaattttagcataaaaggaagagagtaaagcctacaggactcacactgagcactcaaactttaagtatgctggcaccacttactatgccccacagttagccccccttgccaacgggaacctccaagtgcatttatgtctgaggcgtgacggtcacccctgcaggggtcttctggggtcctccgattacctcctcggcggtccaaaaggaagcctctgccttcttatacatctgccagatatcatggtactcgatggggaagatgacaaagcggcgggggttttctctcagcagcggctcatcctccacgccgggggcagctgctttagttttctgttgggggagaaaataaaacatttaagtaccgggcgaaccatatgaaactaacgtttttctggaccaagtcctttccattggcggcaatttcacggggcccgatgtgaaaacgtggctgtcccgtcgcactccgtgggtcgcagcagaggagcgcacgcccgaaccgggaaatgggccgaggggcgcgggaggcagccctggggaggggccgcctaggcgggaaaggagccggggcgggagtgtgaacagctgaggaaacaatgcggctttggcgccaagacgcccaaggccgtccctggcccctctgccccacgcccgccactcaccggctccgtgggctcctggaagatcctcctcgcggtcttgctggccaggacgcgggtcccgctcagggccggcggctgcggggagacgcgtgtgagtgaggagcggcttcgctttccctgcctccctcccctgcccgcagcgccctccccgcgggctcaccgtgttctccttgtcgaccaagctgagccccttcagcggcgagagctgcagctgctgcgggtccgtgatgggcgcgagcgggacacggagggagagcatagtggaggcgcagcgaagcagagcgagcagccaggacaggacggctgggacagggtgcacgggcgacccctcactccagcagcctttaaatctcccgcgccgcgcgctcccggcccttcccattggctttggtgccccggcccttcccattggctgtgccatgcctccgacccttcccattggctgcgccttgcccctacccaggctggccgcggggccgcgcgcgattttcaagcgcagcgcgggagcctccgccggcgccttccggagacccccggggacacccccgtggacgccccccgggacctcccggttccccccccggcccgtccgctggctgggtcgggggcgccgccgcccaggcccccacaggtcccgcgggaccagggccgcagcccctgagggtctcggcggccttggcgcgcgcgggccccggttcgcccgggaaccgtttaggattgcgtgaggagcagcgattggagcccgcgggcgcgagaggatccccgggccgcggccccgcctcccgaaagcacctcctcccagccgggccgccgccgggcagggggcttagccaacgaggttggtgcaaaggcctggaaaacgctcctgggtgcgggggaggcgttgctgcgaccctttcgatccgtgtccctgcggtgggggtgcaagggccccgaggcctgacattttggcggggtggtcggcgaggaccctacagcctaaaagttagggccgctgagccccgtggctcgttttgctgggacaagcgaccaggcttcttacagattcggtgtccccgtgagtaaaatgggactcgtaaccgcgtggactgttaatgcggtgaggagagcgttcgttgagatgactcatgtaaaatgtgcagtcctttgtaaaccttcaaactacgggacatggcgagaaggcccttggtgcagttttccacagaaatcctgtctcctgtcagacccctgacccctattgtcacccttgccttaagaattgcaaactgtggctgggcgcggtggctcacgcctgtaatcccagcactttgggaggccaaggcaggaggattgtttgaggccaggagctggagaccatcctgggcaacatagtgagaccccgcctctgccattaaaaagagaagaaaaaaagttgttttaattgcaaactgagcaaaaattcctgggagaaagttcacagaatgattttaggactaggaattaatgtactactcattgggcgtcaaatatgctgaagaggagtttgaaaactccactggtgtagagactggaacttagcaatagctttcatttaattttctatgtggctttctgatttgccaggccctgcaacgggcaaaatgccaaaaataaaggaagagaaagaaactttaagatccaagaaagaaatcattaacctgagaaagcttcaacagctgcgctcagggctgttattgagagagacccgggactttttttttcacaaagccttttctagataagatactttaaagagggtggggtgggacaggtaccctccccacctaggtctgtttctctcatttcttaaaagtactacggacttgtaaatcatagtattctcgtgttgcaggaataagtgcccatcacattccttacacaaagccacaactaaaactttggtgtaccatgatttgtttaaagcaactcgccattcatcgccattttcaccccaaacacactaaagcatccatctccaggaaactggtatttttattgattactttatggctgataaagctattatctaacaaaattataatttattggtgtcatctcatactcaactcagatttcaatttcccataatcagcgtctaaaaccctcgtttcggttgccctagggcgccacgtgcttttttgctcctgttaaactcactgtaactgaagtagtcagaggtggcttcattgatagtttagttcctggccacgtaattaacatagccattgtagaagacgccgaaagatgcgtacgtgttgttaaaggccgggtgaagtcgccatcctcccctcccgcgctaaacct

SEQ ID NO: 3682 - DNA, 4001 bp, Homo sapiens
tatgtcatatgctcaacttacatatcaggaaatagatacatataaaataggatttgtgagcgctcgatttcctaattaatttatgtcaagaaagatccattcgcaataagagatacaaccaaattattattaaaacagcaaagccacaaaaaggagggagcagagccgggcgtggtggctcacgcctgtaatcccaacactttgggaggccaaggtgggtggatcacctgaggtcagcagttcgagaccagcctggccaacatggtaaaaccctgtctctactaaaaatacagatattagctaggcatggtggcgcacgtctgtaatcccaggtactcatgaggctgaggttggggaatcgcttgaacccaggaggcggaggttgcagtgagccaagatcacaccactgcactccagcctgggccagagtgagactctgtctcaaaaaaaaaaaaaaaaagagggggcagatgtggtggccacaaagagtcatcacattgctaccacttaatattgtctcagcttctctagagtcgggaaaataccataagaaagaactgcaaagtgttacaaaacaggaaatgccatgtaatataaaacccagcttacacacacagatgcactcagcatggaaaaacatacaagacgaggaaagcgaactagttcgacctcagatcgtcaacgtcaaatgaatgaaagatgttttggaaactcaccaagttttcatttactatgccatcgcttgctgcaaagaaagccagaacatgggatataaaatatctctcctcgggtttcagggattcccagtgctgaatgtccttggagaggtccacctgaggttcggaagtcacaattttagcataaaaggaagagagtaaagcctacaggactcacactgagcactcaaactttaagtatgctggcaccacttactatgccccacagttagccccccttgccaacgggaacctccaagtgcatttatgtctgaggcgtgacggtcacccctgcaggggtcttctggggtcctccgattacctcctcggcggtccaaaaggaagcctctgccttcttatacatctgccagatatcatggtactcgatggggaagatgacaaagcggcgggggttttctctcagcagcggctcatcctccacgccgggggcagctgctttagttttctgttgggggagaaaataaaacatttaagtaccgggcgaaccatatgaaactaacgtttttctggaccaagtcctttccattggcggcaatttcacggggcccgatgtgaaaacgtggctgtcccgtcgcactccgtgggtcgcagcagaggagcgcacgcccgaaccgggaaatgggccgaggggcgcgggaggcagccctggggaggggccgcctaggcgggaaaggagccggggcgggagtgtgaacagctgaggaaacaatgcggctttggcgccaagacgcccaaggccgtccctggcccctctgccccacgcccgccactcaccggctccgtgggctcctggaagatcctcctcgcggtcttgctggccaggacgcgggtcccgctcagggccggcggctgcggggagacgcgtgtgagtgaggagcggcttcgctttccctgcctccctcccctgcccgcagcgccctccccgcgggctcaccgtgttctccttgtcgaccaagctgagccccttcagcggcgagagctgcagctgctgcgggtccgtgatgggcgcgagcgggacacggagggagagcatagtggaggcgcagcgaagcagagcgagcagccaggacaggacggctgggacagggtgcacgggcgacccctcactccagcagcctttaaatctcccgcgccgcgcgctcccggcccttcccattggctttggtgccccggcccttcccattggctgtgccatgcctccgacccttcccattggctgcgccttgcccctacccaggctggccgcggggccgcgcgcgattttcaagcgcagcgcgggagcctccgccggcgccttccggagacccccggggacacccccgtggacgccccccgggacctcccggttccccccccggcccgtccgctggctgggtcgggggcgccgccgcccaggcccccacaggtcccgcgggaccagggccgcagcccctgagggtctcggcggccttggcgcgcgcgggccccggttcgcccgggaaccgtttaggattgcgtgaggagcagcgattggagcccgcgggcgcgagaggatccccgggccgcggccccgcctcccgaaagcacctcctcccagccgggccgccgccgggcagggggcttagccaacgaggttggtgcaaaggcctggaaaacgctcctgggtgcgggggaggcgttgctgcgaccctttcgatccgtgtccctgcggtgggggtgcaagggccccgaggcctgacattttggcggggtggtcggcgaggaccctacagcctaaaagttagggccgctgagccccgtggctcgttttgctgggacaagcgaccaggcttcttacagattcggtgtccccgtgagtaaaatgggactcgtaaccgcgtggactgttaatgcggtgaggagagcgttcgttgagatgactcatgtaaaatgtgcagtcctttgtaaaccttcaaactacgggacatggcgagaaggcccttggtgcagttttccacagaaatcctgtctcctgtcagacccctgacccctattgtcacccttgccttaagaattgcaaactgtggctgggcgcggtggctcacgcctgtaatcccagcactttgggaggccaaggcaggaggattgtttgaggccaggagctggagaccatcctgggcaacatagtgagaccccgcctctgccattaaaaagagaagaaaaaaagttgttttaattgcaaactgagcaaaaattcctgggagaaagttcacagaatgattttaggactaggaattaatgtactactcattgggcgtcaaatatgctgaagaggagtttgaaaactccactggtgtagagactggaacttagcaatagctttcatttaattttctatgtggctttctgatttgccaggccctgcaacgggcaaaatgccaaaaataaaggaagagaaagaaactttaagatccaagaaagaaatcattaacctgagaaagcttcaacagctgcgctcagggctgttattgagagagacccgggactttttttttcacaaagccttttctagataagatactttaaagagggtggggtgggacaggtaccctccccacctaggtctgtttctctcatttcttaaaagtactacggacttgtaaatcatagtattctcgtgttgcaggaataagtgcccatcacattccttacacaaagccacaactaaaactttggtgtaccatgatttgtttaaagcaactcgccattcatcgccattttcaccccaaacacactaaagcatccatctccaggaaactggtatttttattgattactttatggctgataaagctattatctaacaaaattataatttattggtgtcatctcatactcaactcagatttcaatttcccataatcagcgtctaaaaccctcgtttcggttgccctagggcgccacgtgcttttttgctcctgttaaactcactgtaactgaagtagtcagaggtggcttcattgatagtttagttcctggccacgtaattaacatagccattgtagaagacgccgaaagatgcgtacgtgttgttaaaggccgggtgaagtcgccatcctcccctcccgcgctaaacctgagtcatctcggcgtggccctcctgcccccaggtccggcaactttgccccgctgcggaggaggtggcggcgcccagggccacgcggcaatgcgggcggttccgcctccggggaggtcgggcggtgcagccactcccgggagagcgcccgccgcaggctgctgctagcc

SEQ ID NO: 3683 - DNA, 4001 bp, Homo sapiens
atagtacattttaaaaagctgcaagacatatttgtaccaactgctataagctcataagtgaaaagtaaagggcataattatggctgcagaggatcaaggagaattcaaaggaactttgaaagttcaccaacaagatttgaggacagacattctaggaagagacaacaatatgaccatcattttaacaattttgatgtttggagaaaatgagtgtgacaggctgtgtctacagcagaggggacccaagccatcagggtagcagaggctgagagcaacattgagcttgccaggggccttgacaacgatgctcataagaaggagagttaggagttaaatcaccaaaagtacattttaaaaaaagatcaggagttttcaatggggcaagcagagacagtgagttgaattacagtaatcctggtgagaaatgataggaatttgagttaagccacactgggaatgggaagtcaggttctcatttgagcaatcagctttgggtaactaagccaatgtaacgtggagcaaagaagtcagatccaatataggacccactgtatgatttcatttatataaagtacaggatcaggcaaaatgaatctgtgtgttagaagtccagcaagtgcttaccagggtagtggctggagtgcagcatgcacttctggcgctggtgatgctttctctctgaatctgcaggctatttacctggctgtgattgctttgtgaaattcatcagggtgcacatccagaatatgtgtaatctggtgcatgtatgctatgcttttgttaaaaagttaaacaaggagggaaagaagctagagatgttgctgaagttactagttgagaaggtactctaggaaagacaggaagacaaggacggaaggcagaacagatctggagtggaagatattgcattcgaaggtcacgtgctgagttctctccaagacgctgccagttactaatgtggtgatgctcagtaagcattcttgaaggctaagtccttgacatatttgttaaaaaaattttaaggtttcctattaaaagaatatacacaaactcaaatataagattcaactactgctatttttatgtcaaagtttttgtttttgtttccaacttttctaattattaataactgtttctggaaaacccaaattcgttagtgttgtgggcaaactcagaaagtagtacaaacttcccaaaccgcctctttccaaacaccaagtgtaatagggacctgccctttgcatagaccccttcttgcttccaaatggcaggagggacaggtttgctccacaaatcccctgttccagcccaattctgtgatttaggaaggactaggtgcccactccaaaattcactgaattattttctcataggacaacatgctcaccatgcaagggtaaatggtgacctcaagctttggagaagctctccagcttgtgcatacccccagccccttctcgccttaccccactgcccagtggttgagaatcctgatttctgtctaggaccatgtactcaccagcttccttaagcaaaagcaatcctctctttgcttcctcaaggggcagcacaaaggatgttttggctgtgtggaaacagaagccgcatttgtagttgcactggcgagtgaagtgatagttgacgctggttggggtggtgggcagaggagggtcctcttcctcctctttggtctcatctggccctctcaggaccagctgctgctttctcctcttggtagctagcagccagaaggttgccctcagccagcagaacagcgggaccaggctcctccacagagagctcagaggttgcctgaacacactcaagagcttcccagcaaaagcagcaggtgtaagcacccacattgtggcagatgcctggagcagagcagtctctgtatgccagggactctctttatatagggatggaaatcagcagtctctgagcaacctgtcattggggagcaggacacaccttctttgactaacactcagctgagttagagtttcgatttttccacatgtgaaactgaaagttgaaacagggccaagactgaagactagagatcggggcgagcattcctggtttctctgctcacggctgcctcagtccacttgtattataacagtctctctagcttgatgtagttacacatgaggatagcagtctctatcaatatctagctctctgtctgatagagatagacaaggtgcattaatcagcacgctttgtacttgttgcattgctttctcttgacatagccaagtaacagtttttgctccatcatggtgaaggggtttctttttaaagccaaataataaacagactgattggctggtggaggatgagtacaggatcattcacctcaagacccctttcagatcacagtaaaaaggcatggaacaaaattgaatttaggtcttattccatcagctattcagcctaatttatgcaaggtgacagtgttaaaatttagatatttacatcttcctatattttgatatcactttttatagatgtttttaactagaggaaatccaatgcttttctaagatgcttcctaattggtgagaattactgcgacacatcatttatttacctttacagtttttttagaaagccttgttgacctttttactgaaatcttccttttagccctctttcatcagaactgtgtgtaagtgtgtggtcttgtgctttcgtgacacctgtaggaagttggaagagtcctagtagctgaacttccagagccacaaatcatgtagctgggtgactgagtaagcgactttatttctctggatttccatttcttcatcagcaaagcaacgtatctcaggcgatttttgtgcagagtaaaactgctaatttttgtgaagaattcagaatagtgcctggcaaactttaagtgttcagttagggttagctcctgttattctgatactgtcatattctgaatagaaacagaaatgatttattttacttaaaaaaaattaaacatgtttaacttaacatttaacatctgcaaaattgtatgcttaatgattaccaaatattcaacagtagatatgtctcaggtccttgaaatctcagcccaaagtttcttaaactctcatgccatggtcttgcacaattgaaaaccacttttggatagatctcacttcttcataaacatgtgatcatgagaggcatacaggcacctgttaaatttgaatcaaattcttttgggttaacttggttcccctttctggctggagcaacctttgaagtctcaaaggttaggtcagcacgatcctagtgggggtctcttgcaggcatctgttaaaataggctaggaaaatcttaaagaggctccaaatgcttagcccaaacataaggaggatcaagacttgtagggtggcatgcagaaggaaccctactgcaggggaagccggctggaaatatctggagatcagaaacttaacctagaaggtccagccaggaggctttttgaagctgtttttcagagatttggctagccttaagatcttagatgtttcaaattcaacctgcctggaagtatttaccctgtggaaagtggcagcaacagcacaaacatcactctgtgcagggaggagatagtctaaagcaatgtgtttgtctaggaccacacgagcaagggagtctatggacctctgttgcaccctgatggcctgggtggtagagcaggcaatcctgcgaacagttcaggaagggtttctgatcatttatgaattccaagcagaatctagtttaaattgggaccggaaaaaccttcctaatctagctccttctagggttaacccttctagatgaattatatccttgagagtatccacaactattatcttcataatctgagggattatcatgagtgttggattatagctgttagagaacagggcaggtagtgttggggataactgaatagatgggaatttgggtaaaaggtatttccatggccaaatctcctggtgaggataact

SEQ ID NO: 3684 - DNA, 4001 bp, Homo sapiens
gcacagagtgtccagtctcgctttggtggcagctgttctcccagctgtggaagaaaaaggccctttcattccgactctggccgctccccagcccccgcccacatccctggcctggtggacagggaatctgtgtgcggagagggcagtgaggggcaggcacaactggaagggggcagggaaacgacgcctcatgcaggttctagagtcatggggtttgcaggaggttggagcttcccgagaggggttccagcttagtttgagaaagttgggaaaaagagccacacaggtgaggacctcaggggagagtgagcccagggaatgggacaaaggggtgagttggcaaagcagcccagccctagggccaccccttccaactcagggcccccatccagcccgctccaccctgggctcacaattacctcgcttttccagagaagggaggagagggagagaggaaggcaggggtgtgcctgtctgctgctgtccccgctcccttctgcaggccccttcccttccagacaggaaaccagccccgattccgagccagctgcagcctagcgcccccgcctccacgccaggcccacggagtcacacttcactcggcggccgccaggccctgcggctccgccccagctcctccgagctgtccccgaaggccgggctaatcccaggggcggccccagctcacaggcccctccccctggtcccgggcctcgccccttactcccccacgctggccccacgcgggttcctcgggcccagtcgcttgggggcaaggggacgcgacaaaggccccctctccccaggtccactagcttctgagtcagagaaggcccgggacgccgggacaagggtgtgaaagagcctctttgttctgggcaggctggagggaaagggcagaagccaggcctggaatcccagccgggaggtagagggggcggaaggaaggcccacctcacttaaccctttccagacccggaagggaaggcttggaactgggctctccttgggcgagtgtgagtctgaccttggggacagaagagtcttcggggtagctattcgccctctcagtccccgctcaaccacacaccttcagccccgccctagcccttagggcgttacaggtggggatccaacaggttaacgcgtggacggcggacgggggaaacgctcagcctaggggctggactcctcttaggccccagaaaaggaggcggaaattttgcgtgtgggaagtaaccccaaggagttaaaagccctgcaggggcatagaggagcctttgaattgggcttcggggaagcgagcggccccggcctaaagtcggggttgatgacagaggctggcccagatggctgcgacaggttgtgggatggggctggcgactggggaacaagcgggagcccaggccaagagtccgagcgcttggggcccgcctagctgcccaccgcccttggcccggggatgcccaagacattttggggttcaggcacattttaggagtcgagctggggccctacaaattgagaccaacccgggctttttccaggctcaggcagataatcctaaccaggccgcggaatgggcagcatggatccgatgaaaatgcagaccgtccacaccttactttttaagtcaacaactccgtcgggtttgtacccagaccgtgcgtctccgcccctcggcgtgcacgcgggcgagggaaggaggccgaggtggctggggctgcccccgggagccgcggaaggggaaggcagggacgcgagtctctcacctcgggcaggtcgctgaagaggctgagtcggaagcggccgcgtttgaactccatctccagggcggagcccctggccacggtgacccggctccggtggtttcgggagaacatgctggcggccctgcgactttgcctgctcagtgcgctccccgcgccgcccggcttagcctcctctcctcggcttctgtctctcgacgctcgtccgccagtccggccgggaatctcccgctgcggggctccaaaccccgcccccggagacgacacctgggccgggcagggcgcggcaacctcctcttccacccccgccaaaggcccagcccgtccggccagtccctgggcgccaagccgacctggcccgacggccccggagcccccaggggcgcactgcacctcgcgagcactgtgggagcgcgttctccctgcccgcgcgggtcgcgagcgcctacctggacttgggacggaccgagaagccctgccccgccagccgccccaacctggcaagcctggcttcccgggcgctgaaaaccccgtggctcagggatcgccgcgtagcacgctctggctctactcgggccctgggaccttgcccagtttcaatcccggcagcctccgaagagaccatttcaacatcccacagtcccaaatgttccttcttcgtccccctccccacctaggctcctctgcgaggctatccgcctaagcctagtggccacaactgatggggcggtgcttaaacacgtcgtgaaaccccagctctgtcactaactaaccgtgcaatcattaacttggtccagtcactggcctttctgagcttcagttttctcatttgttcagtgggaatactgtaattatctccactcctcaagttgctatgaggattacctataagaatgagggtaaaatgcccagcatagtgcctggcacaaggcaagtgccccatatttgcagtcataaagagcagctgcgcgcggtggctcacgcctgtaatcgcagcactttgggaggcctaggagggtggatcacctgaggttgggagttcgagaccagcctgaccaacatggagaaaccccatctctactaaaaatacaaaatttagccggccatggtggcacatgccggtaatcccaactacttgagaggctgaggcaggagaatcgcttaaacccgggaagcagaggttgtggtgagctgagaccccaccattgcactccacccttggaaacaagagcgaaactacgtctaaaaaaaagatggctgggtgcagtggctcaagcctgtaatcctagcactttgggaggccaagggggactgatcgctcttgagctcaggagttggagaccagcctgggcaacatgaaaccctgtctcaacaaaacacacacacacacgcacacacacacacaaattggcctggcatggtggtgcacacctgtagtcccagctactcgggaggctaaggtgggaggattgcttgagcccgaaagttcaagtccagcctgggcaacatagtgggaccccatctcttaaaaagcattacaaatatgtataattttttatttttatttatttatttatttatttattttaattttttttttttaagacagagtctcactctgtcacccaggctggagtgcaatggcatgatctcgactcactgcaacctctgcctcctgggttcaatcgattctcctgcctcagcctccggagtagctgggattacaggcgtctgccaccatatctggctaatttttgtatttttagtagagatggggttacaccatgttggtaaggctggtctcaaactcttgacctcaggcgatacacccgccttggtctcccaaagtgctgggatttcaggcgtggcccacgcctggccaatattatctatctatagatagatatagatatagatagatatagatatagatatagatatagatatagatatagatatagatatagatatagatatagatagatatagatataatcagctgctttgctggatggctggacttgcccggctggacttaccactccctgcttccataaaaacagggttcccgctaggcgcggtggctcacgcctgtaatcccagcactttgggagaccaaggggggcagatcacgaggtcaggagatcgaaaccatcctggctaacacggtgaaaacccgtctctactaaatatacaaaaaaattagccgggcatggtggcgggcgcctgtag

SEQ ID NO: 3685 - DNA, 4001 bp, Homo sapiens
catggccttcaaggccctgcatgatctggcccctgcccatcagctccaccccaactactatattccagccacactggctctctctttcccacaaatatattaccctcatcctcatatcagggcctttgcccttcctccagtcttcacatatctccaaatcctcctgggcttagctcaaagatctcccaacagaggcttcccctgacctccacatctaacattgcctccctcatctgattttcattacatccccattttcatcataatttctttatgtgatattatttatgtgttcgtatgtatatttctgttctcccactacaatggaactttcttgtcttattcactgaggtatcctatggtcgaaaagagcttggcagatagtacataaaatttacatgtgtttaataatacatagcgcaaggtgcagtggctcacgcctgtaatctcggcattttgggaggtcgaggtagggagatcacttgagccaggaccagcctgggcaatatagtgagacctcgtctctgtaaagaattgaaaaaaacaaatacacgaataaacagcaccttgctgtctcaagggccagcagaatccttactcatagcccagagtccttctcttctctagcaaggctacatcctttctgtaaacctctctcacattgaactcctctcttcttcccatgcctaaaaggaacccttgtccccagaacagacatttacactcacccacagagcttcctgaaataggtgtaaagaccctgctgcaaacataagactatgatgggcagaactgagcctgggtccacacactgcacccaacacaaggcatagggaaccacctgtccctcttcccactttaagcaggcctggctctccccaccatgctgtagcaggaatgggcagggcagagattggggctgggatgcaagtgaaggaggtgtgtactccaagggtcgggggattacctccaggctgagtgccatctgccgaatgtagagcatattcaggtcctccaggatgtgcaatctgtcctgcatctctgtgccccccggtgccctttcccttgtcaacccctccagaggggggacagataggtaccacactgtcccacagttcctcctcccactgttccctcagtctttaaagaggtggccagctcttgggcagagggcagaagctgcccttatccctctgcactcctgttaaacccctctggctgctgtgacaaattttcctcgcccactgctgctccggggccctgccgggagccaggcagggaagaaaaagaaagcgaagtgaggataagtggggtcccaggaggaaaggccagctgcagagggggctctaggcacagagtgtccagtctcgctttggtggcagctgttctcccagctgtggaagaaaaaggccctttcattccgactctggccgctccccagcccccgcccacatccctggcctggtggacagggaatctgtgtgcggagagggcagtgaggggcaggcacaactggaagggggcagggaaacgacgcctcatgcaggttctagagtcatggggtttgcaggaggttggagcttcccgagaggggttccagcttagtttgagaaagttgggaaaaagagccacacaggtgaggacctcaggggagagtgagcccagggaatgggacaaaggggtgagttggcaaagcagcccagccctagggccaccccttccaactcagggcccccatccagcccgctccaccctgggctcacaattacctcgcttttccagagaagggaggagagggagagaggaaggcaggggtgtgcctgtctgctgctgtccccgctcccttctgcaggccccttcccttccagacaggaaaccagccccgattccgagccagctgcagcctagcgcccccgcctccacgccaggcccacggagtcacacttcactcggcggccgccaggccctgcggctccgccccagctcctccgagctgtccccgaaggccgggctaatcccaggggcggccccagctcacaggcccctccccctggtcccgggcctcgccccttactcccccacgctggccccacgcgggttcctcgggcccagtcgcttgggggcaaggggacgcgacaaaggccccctctccccaggtccactagcttctgagtcagagaaggcccgggacgccgggacaagggtgtgaaagagcctctttgttctgggcaggctggagggaaagggcagaagccaggcctggaatcccagccgggaggtagagggggcggaaggaaggcccacctcacttaaccctttccagacccggaagggaaggcttggaactgggctctccttgggcgagtgtgagtctgaccttggggacagaagagtcttcggggtagctattcgccctctcagtccccgctcaaccacacaccttcagccccgccctagcccttagggcgttacaggtggggatccaacaggttaacgcgtggacggcggacgggggaaacgctcagcctaggggctggactcctcttaggccccagaaaaggaggcggaaattttgcgtgtgggaagtaaccccaaggagttaaaagccctgcaggggcatagaggagcctttgaattgggcttcggggaagcgagcggccccggcctaaagtcggggttgatgacagaggctggcccagatggctgcgacaggttgtgggatggggctggcgactggggaacaagcgggagcccaggccaagagtccgagcgcttggggcccgcctagctgcccaccgcccttggcccggggatgcccaagacattttggggttcaggcacattttaggagtcgagctggggccctacaaattgagaccaacccgggctttttccaggctcaggcagataatcctaaccaggccgcggaatgggcagcatggatccgatgaaaatgcagaccgtccacaccttactttttaagtcaacaactccgtcgggtttgtacccagaccgtgcgtctccgcccctcggcgtgcacgcgggcgagggaaggaggccgaggtggctggggctgcccccgggagccgcggaaggggaaggcagggacgcgagtctctcacctcgggcaggtcgctgaagaggctgagtcggaagcggccgcgtttgaactccatctccagggcggagcccctggccacggtgacccggctccggtggtttcgggagaacatgctggcggccctgcgactttgcctgctcagtgcgctccccgcgccgcccggcttagcctcctctcctcggcttctgtctctcgacgctcgtccgccagtccggccgggaatctcccgctgcggggctccaaaccccgcccccggagacgacacctgggccgggcagggcgcggcaacctcctcttccacccccgccaaaggcccagcccgtccggccagtccctgggcgccaagccgacctggcccgacggccccggagcccccaggggcgcactgcacctcgcgagcactgtgggagcgcgttctccctgcccgcgcgggtcgcgagcgcctacctggacttgggacggaccgagaagccctgccccgccagccgccccaacctggcaagcctggcttcccgggcgctgaaaaccccgtggctcagggatcgccgcgtagcacgctctggctctactcgggccctgggaccttgcccagtttcaatcccggcagcctccgaagagaccatttcaacatcccacagtcccaaatgttccttcttcgtccccctccccacctaggctcctctgcgaggctatccgcctaagcctagtggccacaactgatggggcggtgcttaaacacgtcgtgaaaccccagctctgtcactaactaaccgtgcaatcattaacttggtccagtcactggcctttctgagcttcagttttctcatttgttcagtgggaatactgtaattatctccactcctcaagttgctatgaggat

SEQ ID NO: 3686 - DNA, 4001 bp, Homo sapiens
tttttagatgaggaaaaactcattccatgacagcttccaacttctcagtgatttccaacttaaaccttactctgtaatcttaaatattactctgtaataataaaattgtctgctgatagagaaaatactaaaatataatttaaccactgactcagaaaaacaggcaaagttaatcttaccgaccaaaacagccagacaggtactaaaaaatattaggccattccacttacaaagtgaggctccccagagatattcaggagtaaattcaattttacatttgagtacctaaaaataatcaaacaaatctctggaaaaaatatgaactacattggaacttaatttctcctgtctcataatacctttaaattacttcaacaaataaagaacttaagatgttatttaatgatttaagacttaagttattaataaagaaccttaatagttgcagaatgagccctgatacgacttttcacctacttttaaggcctgtatttattgtattattatcatttgtatcattttcacttagcaaaagctaccatatatcaattcatcaatctgtaacgtcaacggctaacaggatgaagaaataaaaatccttctctttaaattcacatgtaaagaaatcctaaaggcaaaacccaaagctgtattgttttctattattttttaagttgcaaccataaaatcttaccaatgtctcaatatggtctcaatcttaaattcaccttttccccacatctttattgaacaaatttttaaaaagacattgtaaaagttactgtaattagctctacatacttttagaaatattgttgccaatcctgctagaaggaaataattttttttaattataaaacttgaatgtagccaggaaaaaaattgcttacgtagaatgtctattttggactacttaaaaatagctctaataatttaaaggtaatttattataagtggtcagatatacagcctaccactttcttttaaagaaaaaaaggtagatttaaccatctacataataaaatattctttaaatattctagtcaacattttaccatttacaggcttaaattcttacacaatgatccactgagatttgaaaggatctgggctttcaagggggaggaaaagggatcaaaatcactgattggttattacaaggacaaaggttagtgacttaaatatagacatgcatttaaaattactgcgtaattatactgtgtaatttgaatgatttcaagatgcacataatctgattaaaagaaagttggtaataattttaaaggttcaaatcagattttcaaagaagaggcttactgcaaacacaatatcttgctacctacaaacctttgcacagaatttcaactacaccaagtaaggttttttaaaatagtcacggaaaatatgtcactgtgaaacacaaaaacagcaatgtgtatttaccacatccaagtgacgaacaaatgaaatctgttagatctatattgtttacaatgtgcaagattagagaacagaacctaaacggcaggactgaaaagactaaaccgaatgccagtgaaacagaacagcatgacattttctggtatacaaccaaatgtaaaaacacgtgagatagccgttttaatcctttagacttcaactcttcagaggtttcactttcaatccaaaatatctaaattccaaagcttattcatagaaatatattagtggtcacatataaaaactgaataagaaattaaaaagcagatatacccttgtccttccaatttttcttctgaccgtccatctcttgtcacgatctgctttgcagctccaattattaattatgcataccaacagaaaagctgtaactgcacaaacctactccctgagacatgaaatacccgtttcctcaaccgaagtctgcagtctcctctgctgcacaactgcagcaggactgaagtcacctgacgtcttctgggtgtggaacagtctgacgcagtgcaatctgtaactaggctactaatactccagcattaatgctttccttctatctgttgattgttttaggcatttgccttgttgctcataccaaatggagctgcatttgcagggagagggcaggctaccaaaagaaaggaaataagggttgttcttagaactaaccactgaatgtatctgaaatgcaattaaagccatatgcagtttttttttctttctttttttaacagatggtcgaattatgctactggttttcagtttcatttaaaactctaaaattaatggttacctaataagataaaaatggactgatcaaatattaatagcctaaatttcaagcttgtgaaatgatgagtctccttaattgctcctaagttcattaagacgtaaaacattcagcattttgcaccttatgaagagataaacagaaaataaaagtcaaattactaatgtttattgaacatattatttgaacagaaaactttagcaacttaatcttcctaatatcttttttcctcttttacaattatggaaatccagagacttacaaacatacacttactcttaatcatcatctgctccaactcaatctttgaatatttattagacacctctacagacagtattaatagattcttagcttggggagatatattcatgggctaatgatataatctgccatgggaaaatgacataaaagcaaactataattttattttattttttatttttttctgacacagggtctcgctctgtcaccaaggctggagtgcagtggtgcaatcattggtcacatggcaacctcaacctcccaggctcaagagatcctcccatctcagtcaccacaggcatgtgccaccatgcccagttaattttttatttttacactttttttagagatgaggtctccctgtgttgtccaagctggtcacaaactcctgggctcaagcaattctcccacctcagcctcctaaagtgcggggattacaggtatgagccaccacacctggcctaaaattttactgaaaaatataaaaacaaatctatgtacagcatttttaaaatctgtgttcaactttataaaactgattttcattccaatgcagtgtctctacttatgttccacaatcaattcacctgatacttatatctgcctaagcagaaaaggcactaacaaatcagctaaaatattttaaaatgcaatttgcgaaaatactataagatacgtagcctatgtacaaaaatacatacttaagactgtatagctaaaatgaaatagagataatattttctggaacctgctatctgtgggctgcaaaatccttaatatcagaagtggcttgatattaatatatactcctattatgtacccaaaaaaactaaaaacaaaacatgtaagacttaaacatagaaagaactaaaattaggaaaatgagaggggaaaaaggaagtggcttgaatatcaatgacacatttatttccctatctgcctctctaactccaaacataaataaagaaaagtaatttttaaaagagcccagtattctcagctcgagttaatatttaactttaaactttattcactgaacccctgcataatgtgatatttgagaacccggtcagcaagccatatcatggcctgaaaatgtctggcctctccacgcaacattcagaatctcaaactatttagtaaatacaaaatactgactttctaataacaagtcccttaaaactgaaagccaataaataacgagcattagaataaaacactcaactatagtactcaaacactattttcaagtcagagattacttcactagtagaagaaaaaagttttactgtgatcaagttactcggcacttaagactacttgtatcttccgtggtacttgatttggcttaacaattaaagaaaaaagtctgagaggggcaagaatgtgtaataagacatacccactcatctaaacattaaacatacttaatagcacccctgacagattaaaaagtcaaaataggagccct

SEQ ID NO: 3687 - DNA, 4001 bp, Homo sapiens
cagctccattacaaccttatggagccaccgttgcaaatgcggtctgtccttgacctaaacgtcgttatgaggcacgtgaccgtattttgattctgtaacctaaaacatatccttctgaaaaacagtatttctaaccaatatatatgaaaatgtctgtctcaaaacatttctctgtgtctcatggtaaatctgccacgagttcaattagccaattcctggcaaggaatccacaggttttcccttctttaggaatgtcaaccattttgccttttatttttttctgtaagattcaattatgatgcactaagaggctgggccaagtccacactaacagcaattcctccgaccctgcagctgaaaccccggcagaactacgccccctcgaacacaatgcctagatcccctttccctggctcggtttagctggtggggagcagtccacatcacaccccggggagctgggcggtggcaggactttaccagaactctctccttcccatttctccacgcaccacaccactggaggcgctctcccttcactgcggttgggtcaatgtggacgttttccactcggccagctccccacgagcacaggaggagggggaggggaagcgcaaaggggccacccacgccagccaggaggtgaggagggagcccggggcagaatgcaggccaacagacccgcagcaaaactgcaccttttccaaaggagcaacccagacgggtagacaaaagcacctcctaaaaatatctgggtgccaaggcctttccttcctcacctcgaagcccaaccaacccgataaatccacaaccctggctctcgggtatatacccggctcctactacgggtgggtgcctaacttccgagaatccgtacgctgggcatcacacagggtgaaagtgggagccgggagcggtgcacgtgttccccgaaaccaagacggacaataagaacaaacccgggctccaagggccgccccacccttctccccgcgcttccaaccagacggggcgccatcgccccgaagtccgcagacaaagcgccctcggggcggagaggagggaccagcccaaagcatctggggctgcacacaaaagagggaggggcgcgaggggcggcgcgaagcgagaggtcgcggcactcacccactgagcccgaggagcccctgcgcttgggcgcggccggggtggaggggggcgcggcgggagccggggctggcggggtccacacgggctctgcctgggggctcacgctggccgggggaggagggggaggccgggccggaggctcgtcgtcctcagggagcttggagggcgagactgcggcagcagacagcggggatggcgcgggcacggtcgacgacaccgggctcgggtcccaagacggctgccgctccggggcgacggggggagcggccggcaggggtccccggggcgccggcggcacgaagtcatttccgaagtccatcaggggcgcgccggcggcaggggcggtgggcactggggccgcggacagcccggcggcgggcttcctctccagcacctccagctcctccaggtcttcgtcctcgtcctcctcttcctcctcctcttcttcctcctcgtcctcgggctccctcacgaactggtacttgaacgcgggctgcggccggggtgggctgtccgaggacgagaccagaggagactggtccaggtcttccatggctggagggtggagatgatgctgcagctgctgccgccgccgccggggccgcgtctcagagccgcgggcggttgtgggggttggggaggactgagaggggctgggccgactgagccgagggacctactgtggtgacggctcccggaacaatgagactgctcctcctgcctccgcgccggtgatgcgccacccgccctgtccccacttgccgccgccgcccagatgagctaggagtgaggccagcggactctccgcccagtttggcgtgactcaccctccccaggggagggcagggactggcgcgggagggagagagccaatcggctacaggatcgagaagataggcgaccagccgggccaacagaaagggaaggagatgaaagtgggtggggactacggcacttcctctctcttaccggctgggattgcgttcaatgggcggggctgagagctgggagctccacccccactttgggtaaccgtgagttggggtggggtcttggccttgcccgcagctggcgtccgtatgtcgttagagcactgggaaagggggcgggctgctggctgggaggggtcggcgcggtttctggcgcgccaccggaagggcgttatcctgggggaactgagagtggaaactttcctcccgggaaaggaagaaacccgactggagaaaggtattagcgggactgggaagtgggccctaaggatttttaaagatttttgaaataaaagattatttgttcactcaaagttccaaactacatcactactactaccaccctaaaataagaaaaaaattgttttttgacagttaggctcactcagtctaaaccgcagcccccgaaattgggaggaaaacagctgtgctgaattaactagggatctggggccgaccatttgaaagtctgctcttcttccaaagagagtttggggccttgcctgctggactcttacatggtaagagagtgagtcacccaaagagagaggcagcggggagacaggaaagtggaaatacaaagatgccttggaaagctaatttggttcacgttacatttcagtcaccttaggttcatgagtcaacatttcggatgattcaggctttctgggagtcaggaagccccatagtcattggtttgatatgcaggaataagcatgatccccattccactttttatgaggctggagagtttaaagagagtagttgcagaacatctttgtaagaatcaggatccttttatctttctgatttacctttcaaaaatattcactgcatgcctactctggaggccctggagagaagaggataacctgctttcaagttgctcaaagtctaaatctgtgctgtacctgacaggtactggctacttgtggctactgattgaacactcggaatgtatgtagctaggctgaaattagatgtgctgtaagtgtaaaatgcgcactggatttcaagaattagtacctccgaaatgtaaaatatctcagctttcctgttgactgaatgttgaaattgatattttggatatattgggataagtataatattattaaattaattttacttgttccttttaaagcagcttctagagttttttaaatacataatggctcacattatatttcttttggacagtgctagtctagattaataattaagaaagtttgattgccatggggaatcactggcaaattcttagctccaactaatttatattactgtggcttaatttgggtattaaaaaagaaaagtaagagttggagggagggataaataggtggaacacagaagattttgggggcagtgaaactgttctgtattatcctgtaatggtggatacataacattatgcatttgacaaaacccacaggactatacaacagaaagagtgaaccctaatgtagactattgactttagttaatgatatatcaatatcagttcatcagttgtaacaaatgtaccacctcaatgcgttatgttaataataatagaggaaactgtggttagggggcaggagtgagagtgtatgggaactctgtacttcctgttcaacttttctgtaaacctaaaactgctctaagaaataaagtttatgaacctttaaaaaaggaaaagaataaagatttcctggcaatgttacttgattgggttaattatcaacaatatattcaagacctatcacattaattccacggagaactggctttatttgtgcaaaacgtttgtgacttgctttgagtttggtgttattttttggaggggttgggaagagtaggaagagagatgtattgatgtagaat

SEQ ID NO: 3688 - DNA, 4001 bp, Homo sapiens
gtggtggcaggcgcctgtaatcccagctactcgggaggctgaggcaggagaatcacttgaacctgggaggcggaggttgcagtgagccaagattgcgtcattgcactccagcctggtgacaagggggagactatctcaaaaaaaaaaaaaaaaaattcctgtttaaaaatatatttcatatttttctcttacctcagtttccctcaagtatgtctttttcataaagaaaaaggaaaagattgagttactcctcatcttctaagacctttaatatggcaattagtgttttgagtagtatgggggtgaggagtccgtcaacatcaaaatattactaaaaagcatcgcaattggcttattttcccccattatggagaagtgaattgagaaaaaaaaaaatcagactgattttcttttaagaaatgaatcacctctaacatcctacaaggctatgaagatttccaagcaggcagttacactacttgattcttgaccttttatacataaaggtcctactgctagtgggacactttctgtccccgaagtagcaagtacttatgaatgtatctaatattatgcattctcaatctctaacaaacgtgatttttttcgcttccaaaataatttcccaagatgaaaacggcaataaaacaacgtgactaataataacatacaatcaggaacttaggtgaatgaaagaacttgaaaactattttacagaccatacatagtcatgcctcgctgaacagggggaacaggatctgagaaatgtattgttaggcaattctgtcgttgtgcaaacctcacagtatacttacagaaacctagatggtagagcctactacatacctatatgtaggctatatggtataatcaattgctcctaggctactaacctatacaggatgttactgtaggcaactgtaacacaatggtatttgtgtagtgtttatctaaacatacctaaaataacactgtacaaaggattaaaagatggcacacgtgtgcagggcactggccatgaacagagcttgccagcctggaagctgctgtggacgtgagtagtgagtgaatgtgaaggcctaggacattaccatgtactactgtacaacttacagacactctacggttaggctacactaaatttatctttagatatattttttcaataataaatcaaccttagcttactgtatcttttctattttataaactttttggctcttttgtaataacgtttaacttaaaacacaaacacattttaaagctatagaaaagaaattttatattcttattctataagcttttttctattttttttttaacttttgttaaaaactaagatacaaacgcattaccctaggcctacacagggtcaagatcaagacgtcgctaggcggcaggaatttttcagctccattacaaccttatggagccaccgttgcaaatgcggtctgtccttgacctaaacgtcgttatgaggcacgtgaccgtattttgattctgtaacctaaaacatatccttctgaaaaacagtatttctaaccaatatatatgaaaatgtctgtctcaaaacatttctctgtgtctcatggtaaatctgccacgagttcaattagccaattcctggcaaggaatccacaggttttcccttctttaggaatgtcaaccattttgccttttatttttttctgtaagattcaattatgatgcactaagaggctgggccaagtccacactaacagcaattcctccgaccctgcagctgaaaccccggcagaactacgccccctcgaacacaatgcctagatcccctttccctggctcggtttagctggtggggagcagtccacatcacaccccggggagctgggcggtggcaggactttaccagaactctctccttcccatttctccacgcaccacaccactggaggcgctctcccttcactgcggttgggtcaatgtggacgttttccactcggccagctccccacgagcacaggaggagggggaggggaagcgcaaaggggccacccacgccagccaggaggtgaggagggagcccggggcagaatgcaggccaacagacccgcagcaaaactgcaccttttccaaaggagcaacccagacgggtagacaaaagcacctcctaaaaatatctgggtgccaaggcctttccttcctcacctcgaagcccaaccaacccgataaatccacaaccctggctctcgggtatatacccggctcctactacgggtgggtgcctaacttccgagaatccgtacgctgggcatcacacagggtgaaagtgggagccgggagcggtgcacgtgttccccgaaaccaagacggacaataagaacaaacccgggctccaagggccgccccacccttctccccgcgcttccaaccagacggggcgccatcgccccgaagtccgcagacaaagcgccctcggggcggagaggagggaccagcccaaagcatctggggctgcacacaaaagagggaggggcgcgaggggcggcgcgaagcgagaggtcgcggcactcacccactgagcccgaggagcccctgcgcttgggcgcggccggggtggaggggggcgcggcgggagccggggctggcggggtccacacgggctctgcctgggggctcacgctggccgggggaggagggggaggccgggccggaggctcgtcgtcctcagggagcttggagggcgagactgcggcagcagacagcggggatggcgcgggcacggtcgacgacaccgggctcgggtcccaagacggctgccgctccggggcgacggggggagcggccggcaggggtccccggggcgccggcggcacgaagtcatttccgaagtccatcaggggcgcgccggcggcaggggcggtgggcactggggccgcggacagcccggcggcgggcttcctctccagcacctccagctcctccaggtcttcgtcctcgtcctcctcttcctcctcctcttcttcctcctcgtcctcgggctccctcacgaactggtacttgaacgcgggctgcggccggggtgggctgtccgaggacgagaccagaggagactggtccaggtcttccatggctggagggtggagatgatgctgcagctgctgccgccgccgccggggccgcgtctcagagccgcgggcggttgtgggggttggggaggactgagaggggctgggccgactgagccgagggacctactgtggtgacggctcccggaacaatgagactgctcctcctgcctccgcgccggtgatgcgccacccgccctgtccccacttgccgccgccgcccagatgagctaggagtgaggccagcggactctccgcccagtttggcgtgactcaccctccccaggggagggcagggactggcgcgggagggagagagccaatcggctacaggatcgagaagataggcgaccagccgggccaacagaaagggaaggagatgaaagtgggtggggactacggcacttcctctctcttaccggctgggattgcgttcaatgggcggggctgagagctgggagctccacccccactttgggtaaccgtgagttggggtggggtcttggccttgcccgcagctggcgtccgtatgtcgttagagcactgggaaagggggcgggctgctggctgggaggggtcggcgcggtttctggcgcgccaccggaagggcgttatcctgggggaactgagagtggaaactttcctcccgggaaaggaagaaacccgactggagaaaggtattagcgggactgggaagtgggccctaaggatttttaaagatttttgaaataaaagattatttgttcactcaaagttccaaactacatcactactactaccaccctaaaataagaaaaaaattgttttttgacagttaggctcactcagtctaaaccgcagcccccgaaattgggaggaaaacagctgtgctgaattaactagggatctggggcc

SEQ ID NO: 3689 - DNA, 4001 bp, Homo sapiens
ggacagtgaccgcactggagcctgcggcggggaaagaagtgtgtgtgagtgcaggagaaagaggccccacgcccagccctcgcactctgctctgcggcctccttgcccatccgaccccagcgcctcgctgccccctgcctcacatcccacactcaaacctcaaacctcaccccccagccacccagggccgcggccaaggcagcctagcacctgctcctgcctgtgccgaggctctgaaaccaccagcccctcggccacacacaggcaaaagcaggcccatgcgcactagcccgcagccccctcatgtggagcactgagaagcaaagcaaacctcctctcagcagtttttcaacaaaacccgctccagcctggcctccgtgaggcgtcggcagcctgccacctgcgtggctctgctggtgttttgtgagttggggttaacacaggaagaggcaggcctgccgacacacttaggaggggaaaagcatgcatgtgggggctgtccctgggggctcagcaagtgggggtccctgtcctgactgagaggaggcgatccaggaggtcgcctgccagctgaggggaaggatgtcacggaggcctgcggtcatggcccgggcagccctgctgggcgtcaccaggcgaggagaggtttggggagagcactgggagggattggcttgtccatggcggtcatcagaccggtgaccatttgctagccacacaagcagctgtgagcttcagggaaccctgcatgagtgagaggctatgattcagttccaggcagtggaagtttctggatgacagaatgttctatagccacactgccctgcctgcagcctccaaccacactggccacagagcccgtggacacgttcgtgctggaggaactgaactgctgactttatttaaatgggactgaggagccaaagccacgggcgctggggctgcatgttggggcagccgtcctcagttctctcccgccagctgggagccgctcagagccatctccacctggctgtgggaacagtgatgtgcttcccagcacttctcagaccccaacacgggttattactttcccagcttctgaaaaagctgggattctgcacacacctggccccaggggtctcaggcactgaggagctgtgtcaaagggcaggacgactccccctttgcccagggtgtctccacagagggacggaccagccagcagcctgggggcctgtcaggccgggcatctgcgaggatgtggagctgccccgcgcccctcccagctggcacccggccgagctgtggatgccttgccagttggagaagcgcatggcgcccgccctgctgcgctgacggcaccacaaccgtgatgacggcctgtgaggctcacttgtgacccacagccaccccgggcccccgatcagggccgagcaccccgctgtgtgcaacacagggccggatggtgaccacaggctccggcacgccccagggcccacctgtcagcactgatggctgcgagaccacggcagtgccatggaagcaggagatgagcctgtgtccaagggcagcgctggcccaaggagccgagtgagggaaaccaaactctccatgaggcacccgccatgtcttccccgggacccctgcgtcagcagccgtgtgcccagcatggcgaggcaggggctccggcgggagaaggagcacccagccccaccctcccgtctcggggacaagacgaggcccaacagccccacccagcctctgggaccacccaaggtcccgtggaaaagcaccttcagccccctgcctctcccagggtccccaacctctggccgcacctcgagagccccaccagcaggtactggacaccaccgccgtccaggcatcccgggaccaggctgtgctcaggtagcagaacccagacgtcctggggcttcctctcggccatggccagggtgaaggtgctggcccacatgtctgccccagcccggtccatgctgccgcctggctccgcagtgtgggctgagggctgcgcccgccgggggcccaaggaaacgtccccgcatcccgcgccggccaatcagccaccttgacaacagcatggtctccatggcaaccagatttgtctccgagaaatgggaagcagaaaggaaaaatacaatacaatgcaatctcccatgaccccgccccccagagagcatccctgtggcagcaccgtggtggtggtggtgggcgtgggcccgtggacacgcaggggcctccccagacccgtgcgtgtagaggcccgggtgttttcacacatcgcaccaaggaatcatccacagccctctctttctagtgcacatcaggagcggtggcccacactcatcccttgctgaacacttggtatttttccagcttgtggctatcatgtaacttattcactcagcttctctctgcaaacagcactaatgcttttcacacaaacaaagctgagaagaactttatagaacgtgtatcattgcagattgtcccgtgggtgtattctcttaaactttttactagtgagaaatataaaatatttacataaaatgcctaaaacataaatgcagagcttcacaaattattctaaagtcttaagtcaccacgtcctataggaagaaacaaaacctcgctctgccagcctccagagctggctgcctgttccctcccgatctcagcccgcggccccacccccaccccctgccctcctggcagaggtgccaccagcctggccgtgcctgcacagacaacgttgaggcttcaacacctatgatgcctccctcaccgagccctttagctgtgcagcttctgagctttacataaacaattcatgcatgtgcccagcttctcacgccttttcaggttgtttaatttctgagattcaacagcattgctgtgcgtggcagccacctgtcatggcacaacaagaaagggtgagctgagaaggagccgggacgtgcaggggcggagacagccagctgatccctgcaaaacctcagcacagatctgcccccgggaggctcccggccacccggctctcctcacagctcccatctcgccatctctctgccctgcacactgaacaatctcttctcatttttctaccacttcacacattatctcctcgtctctgtcgactctgcagctaatgctggcaagcgccttgtcatagttttcatttctgaaccttcttttcggccctttcaaacctgtgacatcttcccgccttgcagctaggtgtgactgcaagatagaagaggaagccagtgggacgcactctgggaaggggcctccatacagggccagactgccagggaaagccccgcgtttctcatcccagcttcattttcttctatccatcagtgctgggatgatggccgcactccagcctgtcttagacctgcctcaagcacagagctgtgagcccaaggagcaggaaggcgggagcccggggctgtggtgacagatggagtcgtcacaccactggagggtcgcccacctctgggtttcctgttcacacgagaagtaagccagctgccactgtggtctcgaggcactgttctctggcactgtggatgatcacacagctagccggagcaatcctaactcactcgccgggctgtatctaaggtcctggggtttgctggttggctccgggccactgtgcgtgtgtgggccccttgtggtcctggtcgtgtgcccccgcaggggtctaagagacacctactgtccacttgcctccaaaagcctcggtccacaggggtccctgcagaggacctcctcccaccacagccccccagagccagtgtttcctggctgcttccgtgccacgctggggccacagccctgcctgccagtcccacctctcaggctcctcagccctggaggccacacctggctctgagtttagggaaaagctttggaatgatgactgaccacagtcacccaaaataaccttttggatggcaattccggcccttatgaaatgcagggagctg

SEQ ID NO: 3690 - DNA, 4001 bp, Homo sapiens
aactccaagagtgaggttaggtgtcaggagggagagggagatgacacagtgcatggtaaggaagggggctgtggctcctccctgattttccaggaatgtcccaccagttatctgggtctggggagagggatggggaaggggaggagaaggtcccacctgcagcagcagctccaggcagccacagagtctgtgcagctcggcactggtgtccgtcactggcccctgcccatccccatagccctggaggatggcagagacggcagctgctgggaggatggcagatgtcaggtcgctgagggaggggctcccagaccctgacttctcccatgactcagtcccagagcatctctcaggacacactcacctcttaggtctttggtgaccttgaggatggctccctcttctgccatgggtacttggaaatgatgtgattccttgcaacttggactgtgagctcaggaaggactttcggcctcactgcccagctctctccttacacaaagcaggacgcagagcctacagagggaaagtgactaatcttgggtgacatagcaagttacctagtagggggagaatcccagctctatcttgtaggccagtgtgtgaagatgatggtgtggcctccaccgattgagcagtccctgggtgacgacactgtgctaacacttgatgtccttgtcccattcaatcctcacataatcctggaggttattaactccattttagaccaggagaaacaggggattggagagggtaagtcttttatccagcatcacagaggtacccaggacttgaactcaggtgtctgtgcccacagggcctgtgttctgggtcctgacttggtgtgagtgaccccgtgagggctcatgatatgtggacactaggctgggggtgtccactccttccccatggagtgcccctagccttgcctgggtactcagtctcctcgagacacctactcatcctttcctgtgccccagctgaatggaaaatatgtgttctttgaggagagggtgcagaagtaaagcacggccccagggctggggctgagcacatgctgcgtgtgtgtggggagcagggcgcctggttgtaatactgcctttctctccagggggatctcatcctcttctcctccccatgggtcctggggcccagagagggacactgtggccctgacagctggtggccttattctgagatcctagagtcaagaccaggcatggagcggaaaacccaggtgtcctgcctcccgggctgtggctgttggagtttggggtggggtggcagtggtacagcagtgggacacagtggagggaaggggagagggaaacggaggtaaatgagggaggtgggtggagcatgggattcagggaggacggggtcaggagtccagagacctgggtctccatcctggcctggctatgaactcactgtgtgatctccggcaaatcactcaccttccttgagcctcagtttcccaacctgtagaccaaagattggactgatggtctcggcagccccttccagcccagatcctgtgtgaaatccatgaacggctccatgtgtctcctcctctccctcgtctctgccaggcattttcctcccctggctcctggcatcacactccttctatccccgtaagttccaggggtctccctgctactcacccaggagagcctggctggctggggcacgagagcgcagctctgctgccagagtccgtccctagtgactctgccttgcacagcagtcccaggatttacagcctgggaagaagtaactcagtcccagcccagcagcctggagggggaacctggctcacagcggtgggggaaccgcagacgctgcagggaagaagtggtagaggcaggatccagggcgctggggcagaatggtgagatgggggatgggtcctctcaggcccacctggggtagagtcacctgttggccaaatgggggctgatccattgtggtagctgggactgctgctagtttccttttcgttttcagcacctgctcttgcttttctccttctcaccaccagggggcagagggaggccatggagctccgcagctgctattcctgtggttgtctcgtctctgtcacttggttgggctgagaggcagcgctccagagtggggagggcagggcgagggtcccaccacgctcctccttccttctccacctcagtcagctgagcggtccacctgagtgctggtcaccagtgccgaatccctagtcctgatctcattcccaaaaggatggatgtgagaccaccagtgagatcctgtgcccagcaatgggccaggtgggtttcccaggtgggctggggcttcccttcctggctgtgctctgcctccttgaggctggggtctttccatgctgggtcctcgtttctccaggctgggctgctgcaggggctagtatgggggcagaggagcaggggcctgggaggacggctgttttcacaaaccccaggaaccgcatctaaaaaccagcacaagggatgccccagcccgtctgccctctcctccgtccctatatcccccatgcagaggctgaaacccccatctctgtctcccgtgtcatgtccctgtctcccatccctgtctttccctcattccttccctttctctgttccctgtgtctcactttgcacccttggtctctttcttgccctcccaattcagtctgtctgaggccctgtccaggatccctgcccctgcgctcctccagcaccctgcccttctccagccccctgcctccctccagtcccctgccctcctctaaccccctgccatcctccagccccctgccctcctccagtcccctgccctcctctaaccccctgccatcctccagtcccctgccctcctccagtcccctgccctcctccagtcccctgctgtcctccagccccctgccctcctccaggtctgagctgggaggcaggtgtctgccagggaaccactctgcctggtacaggtgtggcgctggtttctccctgggagagtaagaggaggtgtttggcatcaccagggatgggtaactcctctctaggtccctgtgacctcaggactccctgttggtgggtctccttgcttcaccccatgtccctgcctccccacctcccacacagccagctttgacacggatgagggggtgcctgttgggccaggctagggtgggcaggagcagggacagtcagtggggctgggatggagcgaggtgccaggggcagtggaggtggatgatcaaggcgagaaggaggggaaggtgtgtgtgctggtgtgcaacagtggcagggacagggatggggatgagtgtctatctgcatcagatgagctggtttctaagcggcctcttgggagagcctggagcttgcctgtgactccctccctcctctaactgtggggaacaagctccatcccagctggtgtgccctgactctggctccagtgggggttgctgctgcttggggctcccctcttcaggggcttagggaagagcagcctgcacccatcacctgggccctcactagaggaggtgtgataccctcgttcttggggtggataaacatctactgggtgctgatcccctcaggagccaaggctcagtggctacccggacatctgggctgcctgccagggcactcctactgccagtcctgctacttccatgcccctattcctctcctggctctcctggagccctcccatgtgtgctgtgtgtatatggattgggagggcagaaggcagagcaaggggcccgggaggtggggcagccatctgcggggtggtgccagtggctggggttagagacattatgagccagggagggggctaagtggggccacgactaacttgggagaaaggaccggatgcggagatggcttgtacatgggtgataaagagcgggaggaagttgaaaatgacctctctcatctcacagagacggtgactgacaaggcagcttcagacatttgtctgtattagcgtgt

SEQ ID NO: 3691 - DNA, 4001 bp, Homo sapiens
gtttgtttgttttttatttgagacagagtctccctctgctacccaggctagagtgcagtggcaccatctgggctcactgcaacctgtacctcctgggttcaagtgattcttgtgcctcagcctcccaagtctgggattacaggtgcctgccaccatacccagctaatttttgtatttttagtagagatgggttttgccatgttggccaggctggtctcgaactcctggcctcaagttatcccgcctccgcctcccaaagtgctgggattacaggcatgagccaccgcgccctggccctcaaagagttttgatgttgatcatgactacactgtacttgaaaaagctccattttttttaaacaataatttctatcaaatcactcacttgtgcaccactcaccgatttgtcccgggagatcttcttgaagataacatggttcggttcggacttgctggtcttcccgctggctgccatgttatctgtccctggcaacttctaccaccttggggtgttggtcaggtgttagagggttggagaaaggtaagacaatcctaaatatcaagtcaagaacatcctagttatgaaacctactcacgagatcctgtgcgtcctcaccatgcccttgtaccggcttcaacatccgagtttcatcggtgagtctttgcttagtttgtattttactgcagcatgctttggggtgttttcaatattttatttttcttggtaagcttcaaacatttctcagtacaccttgccagggagtctagctagattccaatgaggttttactttctgactaacctttggtgttatcacacttagccaggttgaatttaaagttctatcgtgactgtgtctaatggcgaataaatcagaaaagttcctgaaaaccacaacataaccacttcgcaaagactgttttcaagaagatattaatggccgggcactgtggctcacacctgtcatctcaacattctgggaggctgaagcgagaggatcatttgaaaccaggagttggagactggcctgggcaacatagcaagatcctatcactttttttaaaaaaaaagaatatattaaaatcccaaaagttctatttggcaattcctactaagagatagccactctgttttacaattaagaggccatcttagcggtctagaattaagcatactctgaggttttttttttttttaagatataggagctcgttctgttgcccaggctggagggcagtgccacaatcatagctcaccgcagcctcgaactcctgggctcgtgatcctcctgcctcagccagctgagtagccaggactacaggtgtgtgacaccatgcctagctaatttatttttatttttgtttttttgtagagactgggtctgactgtattgctcaagttggtctcgaattcctggcttcaagtgatcctccagcctcagcctcctgagtcactgggactataggcatgagccattgcacccgctcactccaagtctccttaaatagcaaccaagtcttatggaaaccacacagaaaaggtgaaggcgggacatactgtctgcaggaaaacgcccatccttgctcttccccacacctgccccaggtttctgataaggttttggcctgtggtggtcacataccttgtgatttgtcaccaaccaggtgggaagggccgggtggcaaggagagggtctctatgctctgagatgatgaatagccagcccctgttctgagcaagctggtaccgtcttgccagatgagcctgaaggggcaccgctgaggctcctggcctacgtatgtggggaatttgtaggggatctagcgaggatgcccagcatccaggtctcaatgtctaaaagccaaatcccacttaaggagcagagttggattagtgctgagacagtgaactggtagtttcagcagttctaagcattaagcaacaccccccgccccggtctccatacggagggtctcacagatgtatgagtcacccagctgacttggggaaggttggtgggagggccaacagctaaatgaaagctactttttcttctaaacctctttggattctggaaatagactgattatctcttcattcccgggcattgccaggacaggaagagatttgattaaactcagcaggcagctaatgcgaccttgcgggtggggactaaacaaaaaggtcaaggagaaatgtcaacctcaagatgaacctggtgttatgcaagccaagctggatctgtccctctcctccacccggtcctactgattgatggcttcaggagtcctgttgatcccctcagtgtctctggaacctgtctgcatcctcccatccccagcaccgcctttgcttctcaggaccggagtgattccccactgtctgactacatctatttcttttcttttttttgttttgttttttgttttgagatggagtcttgctctgtctcccaggctgaagtgcagtggtgcagtctcagcttgctgaaacttctgcctcccaggctgaagtgcagtggtgcagtctcagcttgctgaaacttctgcctcccaggttcaagtgattctcttgcctcagcctccagagtagctgggactacaggcgcctaccaccacactgagctaattttgtatttttagtagagacagggttttactatgttggccaggctggtctcgaactcctgacctcaggtgatccacctgcctcggcctcccaaagtgctgggattccaggaatgagtcaccgcacccagccgaccacatttatttctaccctccaagcccttttccacacagaggcagagagaccttctgagccctgtcatccctcgcttacaatcacccattgctcttagaatgcaggcaaaaagcttgcagcctctggaacctctgcctgcctttccttccacgccgtctgccacgcttcctccttcccactattatttctgcctggaacaagcctctcctctctccactttgttgactcttcttggcctttcagatttttgaccaggagtcacttcctcaggggagctatccccaacctccaggaccagattggaggcacgcttgcatttcactcttttttttttttgctttcgagatagagtctcactctgttgcctgggctggagtgcagtggcgcgatctcggctcactgcagcctccacctcctgggtgcaagcgattctcctgtctcagcctcccgagtagctgggattacagttgtgcaccagcatgcccagctaatttttgtatttttaatagagatggggtttcgtcatgttggccaggttggtgtcaaactcctggcctcctgaagtgctgggattataggcatgagctaccgtgcctggccacatttcactcttgcttgggaattattctacagtctctcttccctcactggagtccaggctccatgagggcagggcctaggccattttgtttccttcacttttgtcttcacagtgcccagaacaatgcctgctcccaagaacactcagggaatggatggaggggactctgcgaccactaacacacttacatgggggactgacttgggaatgaaacaagtatatgcagaaagcctgttctgacgtttggggtatcagcatccacccaaacattccaatggcttcccatttaagtctggacaatgcttgccaggtccggcatgctctggcccccctttacctctgactttatttctcaccaccctctcccttgcccacttcactccagagtactgagcctgttttcttttcttttagagacagggtctcgctctgtcacccaggctggagtgcagtggtgcaatcatagctcactgcagctttgaactcctgggctcaagcgctcctcccacttaagcctcccgagtagctaggactacaggcacatgccaccacacccagctaattctttaacctttttgtagagatggggtcttgctatgttgctcaggctggtctcgaactcccaacctcaactgatc

SEQ ID NO: 3692 - DNA, 4001 bp, Homo sapiens
agtactctttagttgtgacaaccaaactgtctttagatattgccaagtactcccctggaggaaaaatcacctccccaaacacctgtcactgagaaccactaatttctaccactcaaagggtataagactaaaaaccaagttttatctatgtgtatacaatcagccctctgtatccatgggttccctgatgtgaattcaaccaactttggatgttaaatattcagggggggaaaaaaaccctgcttgcatctgtactaagcacatacagacttttttctcttgtcattattcccttagcaatacagtataacaactatttacataccatttacattgtaggaggtattacaagtaatctagagatgatttaaaatatactggaggataggtataggtaatatgcaaacactataccattttacatcagaaagtggagcatcatggattttggtatctaaggtgggtcctggaaacaatcccccacagacaccatagggaaaccgcatatcctttgttttccacttcttttcctagataataaacccctaaaagacaagatctgttccttaaacacctctgggctccctcacagcactaatgctatactcctggacattaattaaacaagaatatattaatgcatttcaaaaacagttcttacaggcacgctttgctataagttgcatgtgtactctatgtgaatgaagtggttaaaacaggaaggaaaaaaagccttgtttaaattagaatagtaatataccctttcttcaaattcaagaaacaagaatttactaaaatcctagaagaatctgctaatttttaagttagaaaactggtaatattcttaaagtaggaaaaaatatattagaatattacatatctcacctgtagcagctgggtttatcaatccagcagaaccactgtttgcaatctgagaaggggcctggctcagcccggtagaaggggctcctaaccgaggaaactgttgagaactcatttccacctgtagtacatacagttatatggttattactagattctgagatctgaatcaatactgagaaattaaagcatctttagtacctatgagatagtcccttggaaaagcaaatgctgcatcatttatttaaaaacaataacttgggatcaatataaatgcagacattatctaaactacctaagttttctacaaatattgtttatacggagctggcgggtactatgaccctccataaatacttgtggattgctatgctaaaaaaatcaccattgaatcctgtacaagagtcacatgacaggtattaccacaatgcatgtgtatttctctgtgtaaagttttatggaaaatggcatgtctctttgaaacactcaaatctcacaccaaggtgaacagaactgtgattagtatgtcataggaacattcggaggaagatatccagccctaagaaaagatccgatatcttacatccagacccgatgcaaaaggaattctccaatgcttttcggcaaaggcctccatttacggatttccttttccttctcttccacagatcccctcacagagccagaggaccctacaccttctccatcttccctaaaatcgccccccacttttccctcaggagccaagcgatctcccgattcgcccgcaaccccaccccaccgcgaagcccccgctgagaccggaggacgccggtttccagacacctcggagtgtgagacccccgtctccggggtgggggtgcggacgggcgatctggggacccgaccacaagacgagcactgtgcctctttacctgtagccgccgcccgccgcccgcaccgcccgcttctatctcgccggcctgggggtgccgcggagggcccatctcggcggcggcgatgtgctcggcgggcgcggggagggatcgcggcggcggcgcccggggcccgctgctgtccagccccgctggccccactcacccccgccacccggccgccgctgtgctcgcagtcctcttcccccgaacctgcccctgcctcccccgcccgcccattggccccacgcccgacgcgtcagtggaggcccaggaccaatccacagcgacctgcacgttcagagcccgccccaccctcccgccgactgccagccaatcaggcgcgagcctggccggggcagcccaaacccctcgaggctgagccaatggcagaggaagacaggcgcccccggcgaagggggcggggagcggggaggccccgcctcagccagggtctgaaagcggcgggcgcagggcccggatgtggagagtcactttaaactgctccaggagccaaactccctgggccggccgcccgcccgcccgcccgcccgcgctcccccggccgctctgcttccccgccaaggcccacgtccgccacgcccccacgcccgggtcagcccacccctcccggtgcctctcccttcctcgccacaggacacccagcccctgtcgccggcccaaccgccgtgaccagctcgcgaaagagccgcggtccgagccgcaggagacgaggatcctctgcccttccccggggacgcgcaacgggacggacgctgcagcccggctcagccgccccgccccctcgtctcctccccttccctcccgggcgcccgtcccgccattacctgggtgctgcgcccagtggccgccgcgccgccttgagctcgctcccgcgcgctctccgtctgtggggccgacgtccccaggctccggacccgcagccaccgccggggagctagcactctgccccccacccctcactccagcgccgctgcttccgccgccgtaacgagcctcccgtctattggctggcgcaggccccgccccctgccgagtcagccagtcgccggtggtcgtgagcgggagagcggacgggcccgcccctctgagccgcggcgtcctgtgggaaatgtagtcgccggagtcaggagggcgggccgcgaaggaggtggagagcgccggggcggggccgcaggcgacccggccagggcaacacacccctttgctgtctgaagtcggttctgccttttctcttggctaagtgagaagacagtggatcccaccctatgccttaacctgagggcactgggtttcattttccccgcggggaggcgcggcgcgggaaagggtaatggaggccaactgcggcggccaagggatccgcgggccgggccagtgtcgtgacggtgcccgcctccctatgccgcgagtgggactcggtgtccccaccgggaaccgcggtcggcacagcctacgcgcggcgggagccgccaggcgcagcgcgggcgcggctctgtgaaagcaggccggcagggcgcagggctctgggcggccggggcgcacctgcgcgcgctttccggattataaaggagctgaagggggcagttttattttgtcattttgcttggggttcagggttggagtttatgcacctgtagaagacttagccatatcttttgaggccacatttgtgtctgataagagattaagtctccctcttcccttaccagatggtaatttaggcctggagttttgtgattagttaggaaataaatggggctcaaacccccctcttcctatcatgcacagctgtgtaagacaactgcttggttagaagagagtagctcctggctatagcccagggatgagtctcagatactcctcctcttcaagccactttccttttccaccttcatgccttcattctcaaacttctaaagagtgactcctgtgatagacttcagcctcctctctgcctaggcagtccttatcccttttggagttgccactcttctcagactgctccccaaaagttgccaacacctactcaacttcaaacccatcggtcctcacttagatctcatcttgtttagcttactgaccagtagtaattcctcctcatgtcttcccttggcctctagaaccaggctgtctcctgcttctactcctatgtcaagctccattatacctcctctttctcat

SEQ ID NO: 3693 - DNA, 4001 bp, Homo sapiens
ctagggagggggtggggggaggaagggggagggagaaaaaagagggaaaaccgctcatacacgtgatagacgttcaggccagtggcagagcgctgcaccacagccacacaaacttcctcccacgctgcccgaggggcccgagccgggaagccggtcccaaccttacactgggcggcccccaggaagcccagcgcctcggttcggcgactctgcccagtcgcagctccccagaagtcagccctcggggtcgcggccggggttggcacccaggggcgcctagaagtggtccattcattgggacggggttggcataaaccgttcctgggtgctacagcctagcccgtcccggggtcagggttgcggaataagtgaacttcagaaaaagacgttccacccacatgggaagggagttgggggtgtgcgcaagtccataaccgaattaaccacccggtaaatgcgctgtgaatggccaggcaggagccaaaggccgggcgaaagaaccccttgaatacccgctttttacctatacggagcaagtcctgagataagcacacacctgcataaaatcaaccctaattccacattaataagcatccgaaaacacttggaggtatttatcagaataacctccatcacaaaggcgggcgctacaatcgttattattttggagcgttcttatcttcatctgatccccagtgcttttttaaagctcttcaatataaaacacaaaagcaaaaagcatttgaattcttagtgcaagagcagccttcatccgccccaattttaacatcgctccagaaagttttcctctgggtcactaggttggcagtgcgctccccacggaagccgcaggtctcgacacccctggattgggggggtgggggggggcggggaaggaggggaaacacctgatgaaacggcgctcgcgttgtcactgacacccgcaagaagcaagaccccggcaccgtactgcgtgcgcgctgggaatcctcgtgggcgctctggccgcgcgagcagtgtcggcgccacgggtcaaggagacaaggtgggggtggcagggggaggtgaaaggaaggatgcgagatgaagacacggagcaggagggctgagggcgaggcttccgcctgcattccccgacttcgcggtccgagaggccgagagcggcggggaggggacttcgttggccctgggcttccccgaactcccgagcgcggcgcgggagccctcgccctgcgtacttactgctcacggtctgtctgaaacttggctgactggggctctgtccatggagcaaaagtagagaatccagggtggaaagtttctggtgcttggctttgcagtgttctcctagtcttcctctttactccttccccttccctcttccccaggtcctaatgtttaaggtcctgggtcagggtgtcttcttctggtgcggagatggttgttatgatgatgatggggggagggaggagggggaggaggaggagagggaaaggactcctccaaagggacacccgagcgagcgggggaggggacggcggaggaggggggaagagaaggaggctgaaagagccttttcacaccttcgggaaggagacccgttctggagagaaagggctgagaacccggaggcggcggcggcggcggcgagccggggctgctggttcgcagggcggctagctcgcgaggaggcgcggccagagcggtgggaccggtaacaccaagagccgagaagacgcagggacccgggaccgcgcgcgggaggaaacgcggcggccgcccaagctgtcacctccagcctctcccctctcggccgcctctgccagcagccagagccggactcactgacaagccgcagagagagacacactgagagggagatgattattagttgcgttgagtcatcaggcaaagtgagtccttttgggttgtcctcggtttccgatttctccccctccccctttcggtccccagatctagcgccttcaaaataataatttggggtgggggtaggggaagtctctggattatttcgggatgggggtgggggggatggatctaaacccaagccagactggtccaccgcaagaaaagaggggagtggggggcggggaggagggctggggaggttgcggggggaggggggccccgcctggcaggaaattaaacatcaatcaatcaatcgctgtgagcacggcgacccaacggcggcggggctgcgaaggaggcagagggacaggcgaggggcgggtgggaggcagggaggagggaagaggaaggggagagtcggcggtcggagcggggtgacgaggacctcatgcacgaggcggcgaaggaccgatggcagagaaccgagtgcggcgcgaggcggtggccgcggccagcgggtgggtgcgtctgggcgcaggcgggcaccggggcccagggtctggtcctcctccttgtggcgggtccagggcgcggccgcctcgcccagcccctaggcgcactcgtcccggcgcggaggcggcggcgacaaggcagtcgctgggtgccgcgtctgccggcggagacgcagaccgacgcgcaagaggcgaccgcggctgcctcggctcccagctctgttaactgcgcggagtactttcgactttggagataggagggcgatcgcctcccccacccaccgcctccgcccaccacccaccgcctccgcccctccgagcaacttttcccggtgcctgcgagctccccctccgcgccgagccgaacgtcccggcccgccgcgcttcgtgccgccgcgcgcgcagggaaggccgcttctccttcaaagctggcacggccgcgagtccggaacaatagtcggggtgtcccgaatgccaggagcacggccactgcccgccgggctgtgggtggcacaggaatgggggttgcgtggtggatgcagagcggggtgcatccctggatggcatcgctggagcgctcgccgctccggcgacatcgcgagcggtgcaaaccgggccgcctggagcccgtgacgcggtggcggcgagggcggtggggctgcctgtcctcgggctacaggactggggctcctggggaccccaagctgctcgagcccagggctgctggcgccaacagagctgtgccctgaggacccggcctccccgcccggggggaggccgcacaggagcgtccccagcaggtcccgcgaaggcgtaacagagccacaaacttttgccgactcccgcggccgcggccgccggcagcccgactccggccgcggtgctcatttaaggtggcgcgggcactagccgagcaggctggcctctggccgcgcttttgtccctgcgattccgcttgggcgcgctgcctccttaaggaaaagcacgtgggcaggggccgcagcccccgcgagatacccggggcgtcggcggacattagccgctaggaccttaggcgagaaaatgtggacgcatccccgccggccctgaggccagagaatcccccctcaactggttgcacctcatgtccctcccgcacacgttgactctccctcctaatccccaggaccccgagggctctcccacatctcccgcagcaagagccaccgatcccccttaagaagcgttgactgtacggcggcgccagagggccaaactaagttcggtttcgggaaacgctctcgggagcagttctgtaaatccctgctgggagcagagactgcgaaaagctgagtccgccgatcgtgcccgggacaaggctgccttccactcgccctcgccgcatctacctggtaggcggcatgcgcacgggcttagaggcttgagagcctctggaagagaaagggtcccaggaaggaaacctgcccccggcctaagtgtcggcgcccagatcaccacgaaccccgcacctaggcgccgcccaccaagttccaaagaagtccgaggcgacctgggagtcggtcggatcccagccgagaaaagaaacaagcaggatagcaattcttaggggagccaccctgg

SEQ ID NO: 3694 - DNA, 4001 bp, Homo sapiens
gaagacggagggtcctgcggcctggagcaccaccctaccacaccaggcaacgccccccggggcgcccttcattcttttgcagagcccagaacttaataggtgggtccccttctgcaaccacgctgcgagagaatgactgccctgctaatctagtttacttgtagaaatcgactgtaaaccgggacaacaaggcaagggtgggggaagaaaaggaagcgccgaaggagccgccgctgcgtccccgcccccagctcggagctgccggggttggggccccgggtggcgctcccgacccgccgcgttttccttagggaaacaccgagtgaggcagaggatctcaggcccaaggtggctgcgaagagccccgaggcctcggcttggcgtcaatgtcccgccaccctcgagcccgggtcactgcccgggtcccggcccggagccccagcgtcctctcccgacagcgccaccgcgtgggctgaggccgaaaccttcggcgccggctctgccggtcgcgtcccggagccaacccttccgcgtcgcctgcagtccacgggttaaggatgtggcgggggatgggcaggtccctggcccagggtaccaccgggccactcaacacaaaaacgccctggcgcgtgcaaaatacgaacgcccacagtttgtcccaaccccttgaaatgaaaagtacacctggaaagcccaagatagcacccggtccgcaccccaaatttcaggcaggccagcaggcgtccagaaatccgctcccacccctcgtaggggcaggcaagctcaggcagccgggtgcaagggggcccaaaccgcagttgcctcccgaacgctttgaggctatgggcccacgccggtcttgaaccaagcggagagggcgaaaaagcccgctgcgggacccacggtcccagacacctactggagccagggacgaggggggcagtgtatccggcggcccaaactcgtaaggagtgggggccaacttagagggcttcccgagctggcgcctcgcctgttttctcggtatcacgaatcccctcggacaccgtttcagtccgtcaagaccttggcctccgggaaaggcccaagtgactgtgacggcggcgactcgggctcagttctcccccaccccgtggtgccttccctccccgccctacagccaagcccagaggaacagggcatcgcctcgcgcggtcccggagccacatccggacttgggaaccccgtgtcgggcttagaggacttcactgggcgggttggggtttattttcaataaattcagctgttcacatacacccccaccaccatttccacgcgcgcgcgcgcacacacacacacacacacacagagggacttgtcaactattgagacagcgacccagaaaggtgtaaattcacctggtgcccacccaattgcaaagctcccagacccacacaaaacactagcgagccctggaggtctgagacgccccgcgcccgactcacggcgcgaacaccagcgctccggccgggtcgcaggggccggtgcccagcgggccggggtctggcgagccaggcagcgggccggctgagctcctgcgccccgcggtcgcgtggcctactcgcctactcccttattattggctgggacctgttcctttccaaagtgtgatgcccggtgtcctaccctaggccacgcggagctctctcccggcgtgtcgggccctgcgcccctgcccagtggctcacctcggctcgctgcgcccgccttcgccccaagtgcccaggacggagcgaggggctgtgggtcggcgcagggacgctggctgctcacctccaggagccgacagaaggtgccttcggcgtcacgcgtccaaccctggggctgatttaaataactaataagctcagagaaattttacgaggggaacttttccttttagtatcaataaagcctagtaattgggtttgttggttacctaagctcgagttcgactttctcagtctctctctctctctctctttctcattcagaggcaacgttttcaaaaaccggcaattgcgtgtgcgtttggggtgtgcaagtgtgagtgtagatgtgtgaaagttatttgtttcagcagtccttgtctcgagagcaatcatcattgtagctttgagtgaagagttttcaaaggtgaactgttgttatttctgtcaacagaaaactgttgacaaccattcaagtctcacaatacaagtataatataagggagggtggaatatctaaagactgtcccgttggatatgacagaaagacatctgcagtgtttccctaatagtttgcattttaattaactttcattacattctgacttccactcaatatccgttgttttcagtaaagacttctatatgataaaacgttgtaatttttgttctggttttccaatcttcttgaaaaccagttcttaattgtaaggaatttttccacctgggaaccatgccgtaatttaaaaatataaaagacctttcatgaacaataactgcaaataacccatttgttagtgtctgcggagttgctggcacctatacaaagtctctgaaatataaaggcaatctaagaatgtttctctccaaccatagtgatatatacttttttcgtttttgttgtgtggaagttaaaaacacttttaaagttactttttagaaaagtgttgtgctaaaatttacctgaacttaaattccttatcaatgttagcctaacgaaatgaagagtatttctgaatcagattattgttagagtcatatgctaaatagtaaaggaaaagaaatgggaattaaagtttgcaaaccaagaccagggaaaagtcggctccagaagttaccaggaacccacccaaacctgtgcactcatatctcctgtatttacatattatagacaacttttcctttccacttttagctagaaaagtggtgggctccccttagttcgtctcgttttatgctgtaagacccaaagtctgctgagggctgcccctgccaggtaacttccggagacccggagttacttggagacagacccggccctttgcacattccaagtgaaggacgtctcgcgcattcttcccagagctaccacacacctaacctcttctggacacccaacagctggggcactggagcacctgaccctactcaagatcatcccccagcccttgccggcacttagggacagcagaatctgagctgtgggtgtacatactccccattttctgctttcccagaggatcacagacaacttttcttcccatctgctcccgctggactcctatgatcacccatcatccccagttgttgctatctctgagctcttggtgaccagcccttgtcccccaagctgaccaagttgagagagtacttgtcctcccagcactgtctctcagtatcaggaagttgagatcagtggcagggaaagatggaaggattggcaaggaaagtgcagggccaagtagagtagctcagagcctcagcaatgggcacctgtcctcccccaaacaacctgtggtctctccggctccctgcttttccaccattggtcccatcctgggctaccagcctccactgagctgctctgggaacttagggtgtctcacattacttccctgctatggcatattttggtttcagttgagctattttctgaagatgtggatactccagttttattctttttctgtctgtgtctcagtactcttttccttttttaagaatgttccccaagcctggcttttgccagaccctgtgccatctccccaagctctatttacaagaacaagaagtgatttgtctgtttatagcaggtttaattaagacagttatgcgccgtgaactctttgggcctcaatcaatgcacttagatttggaaactcagatagaatcacatcttacacgtgcggccccggctggccgcccaggctgaggacagagctattgttttctacatcagcctcactggaactgggcaagtcccctgcagaactg

SEQ ID NO: 3695 - DNA, 4001 bp, Homo sapiens
ctcgatttcgccgcagaattacctgctcaaagagccaccccaagaagccctcagctccgaggtcttcccgcccgtcgtctgcgggaagtaaacggcgtcctccctccaaagaagtggatgccccttcgactctcctccgccccccggcggttcctaaatctaggaaagccagccccggcatcgctcactactcctgcacctcagctctgggatacccgctcagtacagacagaccatcaaccaaaaaagaaaagaagaaaagaaaagtggtggtgggggtgggggtgggcagggagcgtaaagtagcgagatcacttatttgactcttctgttttcttaggaacctgatcctggcccccggcagagcataagggcccgaggccagggacctagaggccggaccaagttcgcgcgaggtgttcacagcctaggcgccccgggcttggcttcgtactctgcaacaagccaagctcccttgccacgagtatatcagcaacttcagaaataaacaccagcgaaaccccttcccacattagcttgttgctgtgctactgacactgggcttagtcgatgttcacacctattacatttttccggaaagtgggaggagcagggggtagagaaagctgtgtgtattgagggaaggggagatgtgtgcaacaccttccagaaaaatggggaggtagtttagaaagtttttctctgtaacagcacagcttctgagaaggcagagagaagaaagcagacaggaaacgaatcccttcctcctctcccctttacccccttccttcactccctagaccaagctggtcacccggctgggaatcaagattgtgtggctgggaagacaccagtctctgtgctcgggttcagcccagtcgggcaagaaagtctgggcagctggagaaggtcgtcacagtctcccgtggaatcttgttgcctgagagccccataacggaaagggctaagacgactcttccacacacaggtcgcagcccctgccgcggaggatccccaggaagatgctggggacgctctgagcatcggcctttctttacccccgactccctggagcttggtctcgggatgccaacttggggcacggaggcgacgggctgctccgaagctggagggtttctgcttgggtcagagggatcacgacctcagcagagccaggagaggttgggtgacacccactgcgtattgcacttgactcaaaactgccctcggcctgcggaagaggcgagggcaagaagcctggtggcgggtcaaaccttcaccctattattttctatcattttttatgcccatatatttgttaaatgtatggctgctatacaccaacagcttattctacaagaagtgcccccgaggaggattgggttaagctttgcaaatttggcttcccaggtaatgcgcttcattattctgctcccgacttacccaccacaccagtgggtacccggagcagcacccacttggcagaactgatgactgcttgggcccagcggagtgcgcattgcgctaacacgcgcacgggaattgcacccttgccggagcctccgcaccgtgcgcccttcaaagagctggcgaccccgctcacgtgtaagcaacctcccactttgaaactaattcgcacccgggtctttcaccccaaaggactttgctgcggacgctgctctgacccaagacgcgggagagaagtcccaaaggctacagccaggggctgggggactcctctgctcaccttagtccttgatttcgaaggccccaattaactatctgttgtgtcagaatcggcgagtgcaaagtagctgcgccccgctgacgcgctctctcctgggtccgggtatcccagggcatccggagctggggagggttgtgcggactacccaaggcacgcgcagataccgggcagggaagaagggctccgtgttccaaggatggtcgtttacctctcctgagatcagccctaatcccttggtaacttaagcgcctctgaactcggggagcgcttggtggggcgcctccctgcatccacccctacccctggctccttcccaggcccagcatctttcccaccattctcacccccaccacccccacggccccgcccgtttagaggcgtgcggtgggcacttggtttacagaaccggcgtttcagatgtttatttgcaactaatttcttgtgctggaaaatgcttgttacccgggcggagcgcttccgctctgcgcggtccggcccggcgggcggtagctcgctgatccctccggcgaagcctccaaggagcgggcggctgggagaggttgtgccacccgggaccaagccatcggcgctgctccggactcccggtagggggagccgccgcgggcgccaggccggattgtgttctggcctcggggcggccctgctgccagcggccgggactctcagcacagagctcgggaggactccacctgctctccagataaggcgccatgagcagagaagggaacagacggccaagctccctcctaattccccgttgttgcagagcaaagaagatgggggagaactaattatattctctaggtctaaatattgttgaaaaatttgtaggtgagatcacctcctttgcccatatccatatataatatatccattacatgtgtttgcccatatatatacgtatgccatatgtaaatatgtacgagtgtgtatgtatgtgtatagcagtggtttagaattagtctcagttccacaaattttgagcccttttaatattttaggtgacctaataccttctcactgtattttccaagtcacttatttccaagagttttaggtgatcccagcataggagctgagcataggagctcagatgagacttgccagttttgctgcagtaatgtcagcaaaagagtctctctctttctgactctatagacttaagtaagggtttacaggctttcattttaaggtatgactgatatttagagaacaagactaaaccaaggtcaaggggaaaacagttagactgtgaacctgcagaccactccactgcacccagtgtggccgtacacctgtgctgaacggccagagacttcctggtcaatactcccacagataaaagactgcaggatctgcttatacacaaatccatctttcgctgggaacccacaactcataacaactctcctaatgccaagtcatcaaggcctcttgaaagagaatcataaaaaacaaagaatttcaaacttggaaggaaacctaaagtttactggtgaggagcttgaactgagtagaagcaaagaatcatactccagatgagaaacgccccatgcactgagctgagactggaactctcctcttcttactctcagtccagtaagtttgactacagagcactcattatcattgtgattattatgttcccgcatattttgtcgttcttagttaggcatactcctttaacactattgtaataaaagcaaaatctggaagatctttaagagtgtagcagttgcttccaagggaggctgaattttaggaatgaagttacatataacattgacatatctgggggaaagactagaaaaatatagtttcattgcttttttgtgtgtttttgttcttgtttgagacggagtgtcactctgtcacccaggctggagtgcagttgtgctatcttggctcactgcaacctctgcctcctgggttcaagcgattctcctgcctcagcctcctaagtagctgggactacagacgcctgccaccatgcccagctaatttttgtatttttagtagagatggagtttcaccatattggccaggctggtctcgaactcctgacctcaggtgatccacctgcctcgacctctgaaagtgtgggattagaggcgtgagccaccatgcctggccagttttattgttttatccctgtttaataatgttggatatatgaggccaggcacagtggctcacgtctataatccctgcactttgggaggccaaggcaggt

SEQ ID NO: 3696 - DNA, 4001 bp, Homo sapiens
tttaatattggctattttgttgtaaacaaaatgaatgtaagaggagtttacaagtttgttcatatctttaccagatcatggttttgtgatagataagctaagttatatgtatacaattttctgttagcttagacatcaattgtagaaaataccattgttcacaagatcatattgatgattttgtttccagttttttagagcccaataatggcttagttatgaaaacattttagcatacgtatatacctatttaaatgattcacgtttaccagagtacttaatttattgaaagaaacatcttgaaaggcatttgagaggatacttccaaaatatttattataaatacatgtttactataagtaattttattcataaaataatgaggttcaaataaaaatacattatgcactcttgtttatattatttcaggattaatgtagctttggtaatcaactttcaacattggcatttgaaataataatcttaaaaaccttactgaacttattttttttgaagccacaatactgaaatagtcttaacatgtggattatatgctcatctttaaaatcattatcttggaactgcactttgctgtaaagttgaagcagactactcattgcagttgtttaaaccacagcctaagaagtgctaccctttgcttaactattcagcttcagtttgaatgacatagttattgcctttgagtgagacccaaaggattcttttcccaggtagcagctctttcaagtagtaaagatgtttcaacagctctactattctatatggggtttgatttaaaattgaattttctgaaatccaaataattagaacattatttttcccctgatagctatcattaaaatctctcaagttaaaatgtcttttctgttgaattcaggctagagcattgacacatgcaggtgactatatgtaatttaagcaattcaactagttgggatacagaaaaaatgaaatacttgtcccagacaaaatctttagcaacatattgaacatcctctttaaatcaaattatagcaataacaataacaatttacaaagttatgagtattttcatcatgtattcaaaatgatcatttctctgtaattcatggtcacagccaaattacaacccaagataatattttgccctggaaaaaggaagaatccagtgttcaggaaaatcctaagttaacatcttagaactaaaattaggagataataatgtaagctctttcaaatatacaagttcagaaaagaattttatgtggttagttaattcagagctcttgtaagataaatatcaaagaaaaaaaacctagttccaaaatgggttgcctttatgactaacatgcttgacagcctttgtatcattggaaacctactgttaagaatattaaacatataaattatacccctggcttcgtatctggctcttagtggcagaaataataaattttggaaagaaacaagatattgggcttggttaactttacattaatctgtgtattgacactaaaatccttaactttttcactcttttttatatgattatctaagtaacattctggttagtaaatatccaacatcaagtagtataaagcatagacccgatcatgtatatacacatatgtagtgtccttacattggctgatgagcagcaggttgctattcagttatcctatcgacataagcttgccaaacagtctttttcttctcagctaggaattaaaagaagagcatgcaatttggaactttccaataaatcaaagagaaaagcagccttacctctttttgtttatatggcagaggagctccacagcatattcctccccgttctccgggcgagcttctcgggccgtttcagcacacggacagctcctctgcttatagggagccgctgcgcctgactccgcactgccacactgacgtcaccgggttcagccacaaaccccagcacaagcgaggtttttcaaagaaccaagagaaaataatcactttatatttaaaaaaaaaaaaaaagaaagaaagaaaagaaaagaaaaaaaagttgcatgcttacgccacctgtctttttgtggcaaaaattgcagttttcctttttcttttatcaaaatctttgagacggaataaactgctctgcacgatttctcttacaaagaaagaaatgtgtgtcagacagacatggctaattgcaagacaatctcatctatgttctagcaacttgttataatagtttcttggtgtcactgttgtaattgttgtcgtcgttgtaagaaagttttacagacaaggattattttttcatctttgcccacaaagaaattacattaccatttcctgttataaccaagatgaatggaggacacattataaatatgaaaggccatatttcttatcatgaccacagccatcattcttttaaaatcatatttatttgaataaaacagagagttctctctcttttatatgagagccaactttaatagcttatatagttttttaaatgggtatttatcagacttcaagcttagtagctaataattctttatatctctgttactgtctttcacaatatctgatctcagaaagggaagctcagaagttgagtgctgatgaaaatactttcatctacttaaaaaaaaagtcttttcactgtttgggaaaaatgtgacacatacgtaactagaattcatttgcaatcgaaaggaagttgtactataaatatttcccttctcctgttgaatcagatgagttgaataccttccatgaatgtgaacaatccagggaataatacagcaattaactttcaacctctcagatttataattcataatcattcctctgccttaccagataacctgattatatatttcaataatttatatggatataaattttaaactttattttattaaagatatgagtttctaaaaactgtatatgttgacatatactttaagaatgcaacagaatcttgccatataagagatcccatgtgtttctgctaaatgaacaatcagccactgactcaataaattgtaatacctactaggtgccagatacattgctaaatgcacaattgttaactaatacaaaaataagtgatttttttgcctttgatgagcctttcagctaatggggatgacatgcaaataaacacataattttcatataaattggaaagcatcaatagagaggttagctagcagtgtttggaccatttggatagccaatgggttcaacctagaaattcagggggaaacaatgtcctggaataaaaggcctaagctgagatttctcactatcaggttttcttacaaggatttctaactatgttagtacttttgaattcctcgaaaaaataggaaatggcttaaagtcttacagaaaaaatcttggaaaaatgtgcctcgattctccctatttggttttcctaaacgactaggagatcatcatttgtggattgatatgaattcatatacactcagactggggttatatgtccaattcatccaacaaattttgcctcatagtggttttttagggcatgatcaaatgctgggttgaagagacctaaatatgacccatttctcaagcatcatctcaatgacaccagctcattcactgacatccttagctaagattgccttaaatcttaacaaagccctggctagctgctccaagtttgacctaattttctgtccagcagttctgtgtgaccagttcaactaaccagtatcaacgcagctttagaaaactctgcaattattcttaaaatgttgagtttgttcagcataggtctcaaaagccctccagaaagtcatcctgactaggctaattcatttatgtggaactaaactttttggcaagaaccagaagctacggttcttctaaagccccagagtcaacatcttgcctggaaatatcttcaatcatccaaaagacatgcaaaacctcattcaaaatctccaagtagatgtgagatgccaggaggctgttgc

SEQ ID NO: 3697 - DNA, 4001 bp, Homo sapiens
actaatatccaaaaccttcgaaagcctttagaaaaatgtgtagtagtagtcctgcctgatattaatttatctagtttttaaataaacagtgcttacaccaatccacatgaaaacccagatacaatgactaactgtggctgttaagccactgagtgtggacagaatgtgcattagttgaaatgaagcatcttttctgttcaaaatcactcaacaggctgtgccctgtggctcacgcctgtaatcccggcactttgggaggccaaggcgggcagatcacctgaggtcaggagttcaaggtcagcctggccaacacggcgaaaccccatctctactaaaaatacaataaaattagctggacgtggtggcacgtgcctgtaatcccagctacttgggaggctgagacaggagaatcgtttgaacccgggcagtggatgttgcagtgagccaagactgcaccactgcactccagcctgggtgacagagtgagactccatctcaattaaaaaaaaaaaaaaaaatcactcaataggtacaaggctttgacaagtttgactcgccatcctttaccactctggtactagtattaatagtcctaggaatcccccagcccggcttgactttgcatgtgcccttatatctgtttttctttcctataaataagcatccaaagtaccttaggctagctagtgtttgttgagcgactgtagctcttcaatctgctgctgggctgaacaaatctattttgttcagattaatactttacacattcctttgcttcattatttgctgcttccttaaaatgctatcagtattggatgagcaggctcaactttgttagcttcataaccaaaaaataaaaaatcttgggaatctcgctccactgattccctaggggatattttcccagatcccttcactttgttccaaccaaggtagaatgccaaatgtgtgtgctttaggcctggaccccctcatattctaagcatgggtagcgaatgagctcacaaaaaggaaaaagaggggtctggaaagaagacacacaaaccagaaaatgcatacccctgcctcctgctcttctcggacttaactagtatggataccacgtgcttcgggtctccgcgcttctcagcggtggccatcccgtttcctgcagctgggccagcagtctgggagaacccttgattccctttcacctgccccagtgcaccagcttcctaccaacgcatccgtttctgggcgcacaccacatctctctcctaggttgttacaagatccccaactggcttcccggcttcctctcgtcccatgcctacccgcgcccctactttctaggaagcagccagaaggactccttcaaaacacttaaattgcatcgccccgtgatcaacttccgaggccccataaggctccgaatgaaccccaaagttcttcccgggctcaggggctctgccggttcacctccggcaagtcccctgcccttcgcatctgctgtgccctcttcctggcaggctctgcttccccagaacctgcaaacctcacccctggaagtcactcgggtttcggccccaaagtcacctctccgtgggcccttgcggggccacagctcgcacccgctcctccttgaagctcgcatccctgacttaggccgacctcgcggacatccccgcgcgggacgccccacgcgagagcggccacaggccgggagcccccttcgtcctcccgcgcgggacaatcggcgacaggcgccggccgctccccagccctgccctaaaggcgcgcacctctccggcgagttgtgtttcccgcagccgctgggctgactcgccgcgggtgccggcgcatccctccccggcgccacggccgcctccatccccgccccactgctgccgggcatccagcctccttcccgcggagcgctacgggcccagagcgccggggaggaggcggggccgcgacgcccgggcgcgtccggattggctgagcgaagcaccccagccaatccacccgcttcagagggccgccgagcccccagcggggaggcgaggctgcgctgggtcaggtgacgggtgggggcggggcttagcgcgtcacagagcttcccgggaaccgggcgctagaagccgcgtctcctgggccggcggatccccgcactttcacttccgggggagccccgtgacctttgctgtctgcggcagggccgccatcgggccgcggccggttagtcggcgtaagagcaggcggggcccgagctggacctgaggagcagaggcggctgggcagtcctgcgggtgcctccctctagccgcatgagcgcgggaccgtgcactccgggagagccggggccgcgcggccttgttccccgcgaaccctcgaggggaagtgccggggccgcggcagcagggccagggccccgggggtctcccgcaggccaccctggacagtgatgagcaggtccgctggacctgcgcgtccgttagtcggagcggctccataggggacctggatggcgtgaagttaagagtcacgcatcgaggatggacttgaggggatctggagtagaggatgggagggcattgagaaaatagggccagagatgagggactctaagtgggcgtggaaacgcaggaaagattaattcaagatctgtttaggccgttaaataggaattggggcatgagggacaggaaggaagcaaggattagacaagtgactgggaagatgttagtgcctttatctgggtaagagggaagacgggagggggaaagatgatgggtttagctttggacatgttgagttgtctgtgagacagtcacaagtgtaaacatccaccaatggttggtgtcccgccaaccattaagaaaagtcagttgagaaagtggtagaaatgagcaaaaatcctcacgaagccatcctaccgtcactttttttgttgttttttgtttttttggcataatagtgtctacctttaattgagccttgaactatgccaggcagtgttctaggtatttttcgtgtgttcactaatttaatcttgatgattaacccagtctggtaggtatttatgtatgaggaatccaagatacagaaaggcatcttgcccaagttcacacgagtagtggctggagccaaaattcggtttcaagcatgctttgccaagaggttgaattttaattggcttttcatgggctttctctattttgtgtcctgttggggtccagaataacttggcttttccagcacagcaaatctgcaaatttctggactcattctctctcattcttccctataaacgcagctcatttcttgccaaatgcagccaatagcaaagggcccaccaacatttaagaagcaaatggatgcacaggagcatgagaacagtcaaaagaggaggaaaggaaagggaattgagaaggaatgtcaaaaaagtcaagaagacacataatagtgtaaagtgtggctgagaggcaatccgaagtctactgtgcgtaacaattaggaggcactgataaactagcgagagaagtctcagtgatgggagaggcatggaagttagaatgcaaagatgggatatgaaaaaatgaagaatgcagtcaactcttaaaacggttgagaaaggaggaattaaaaaggcgtataagattacaggcaagctgggcgcggtgcttcacccctgtaatcctagcactttgaaaggctgaggtgggtggatcacctaaggtcaagggttcgagaccagcctggccaacatggcaaaactccgtctctactaaaaatacaaaaagtagccgactgtggtggtgcatgcttgtaatcccagctactggggaggctgaggcaagagaatcacttgaacctgggaggtggaggttacacagtgaagctgaaaccatgccactgcactccagcctgggagtcagagtgagactccgtctcaaaaaaaaaaaaaaaaaaaaagattaagagcaaatagagactgaacatgttcataggctaaagggagt

SEQ ID NO: 3698 - DNA, 4001 bp, Homo sapiens
tagcactttgggaggccgaggccggtggatcacgaggtcaggagatcgagtccatcctggctaacatggtgaaaccccgtctctactaaaattacagaaaattagccgggcgtggtggcaggcgcctgtagtcccagctactggggagactgaggcaggagaatggcgtgaacccgagaggtggggcttgcagtgagccgagatggcaccactgcactccagtctgggccacagagcgagactgcgtctcaaaaagaaaaaaaaaaaagggaaaatatgttatacttaaactgactatatcctgaaaagttaaaaaaaaatctgaacctaaggctagtcaaccttttgtgacgctctttcctccgaaactgtagctgtcaatcggaagtgatttataaaactgcctcaaattcacatattacaaatgccaaacttttgcatgcatttggcaaggactaacttcacacagaactgggccagaaacagagtccctaaaagtttagggggtattttaaggtccaggtccaacaaaaaaatttacttaattacaatctttgtgccctacctttccactaagattcacaaatgcattgtgtcaagtgataaagaagaaaatgttacgaatcacctaacgtcatacatttaatttaaaatcaatgcaataatcttaaaaaaaattttatgctttttgttttggtttggtgaaatgacagtcataatgaacggttggatgcttaacataagattcatttcaagcatggatatgaaaaaagcacgcattcaaatattgtttataggttcttcaggttatgacatttttgttaattcttgccaatattagtacattaataccaaaatattaaataacttgtaaaattctagtttatgtaaaaatgttattttacaggtaacaaaatttcttcaggaaattaattgatttgttgtttataacatgacattgaaattgcaaacccttgtggcatcaaatttgtttgcatgaaaaattagtactaatattttgtatagtctttataactcatgattttgagatttccaagtatttccaagtacagaaagtacaaaaaaattgtatagtaaatcgaatctgtggagagaatctgtcaatttgttaaattagctgcctctttctttccttccttccttccttccttccttccctcccaccctctcttctttcttttttttttttttttttttgacacagtcttgctctgtctccaggctggagtgtagtggcgtcatctcggctcactgcaacctcggcctccagggttcaacaagggattcccctgcctcagcctcctgagtgactgggactacatgcgtgtgccaccacgcccagcaaattttttgtattttagcagagaaggggtttcaccatgttggccaggatggtctcaatctcttaacctcgtgatctgcctgcctcggcccctcaaagtgctgggattacaggcttgagccaccgcacctggcctctttttatttgtcatggtgcatttgggacagttgcatatgttatgatataatcaattcatttctcatgtatatgcataaaccacccacaaatgtgtttcatttcttaaacagaaggatacttaagattttgtgctaatttggcatgtgttggtgctacaacagtccaaggaatgcagtaggcaattagcagcaaaatatgcctgataaaaaacactcactttcttattgatatagtaggggtccaggtcctccaggggctctgacaccatctctggaggaatgtctccataaataaatggaaggttctttccagcttccaagtcactatttggctttgggccattttcgtcgtcatcttttttgtctggtttgggattctttgccttttcttctgcaatgcgtctttcaatagccgcaagagattctctggtgaagaagttgaagctgtcaggtcctggtggtacaagcactgtttgctccatcttgtcatcctgcacattttaattaccatttattctgcatatgaaattcctaaaataaaaggaatacagatattttaaagagtggactaagagatgttaatataaataaattcttgtcatgaaacatgagctagaggatttaaagtctgttttctccttaaattgaaaggtgatttctaaagaaaaaattttaacacaaatggtttctgtgttgagtttagttaagcatcacttatttattaattcttgtgctttactgatacaggaactgtgccatgagttttaaaagtggttcaaatatggccttaatcaaagtacattaggctaattaacactatatcactaatgagttattcagtctgtgacacacccagaagatggagactgtgcgtataaaggcaaaggatagctcatttaacaaggatgaggggaaaaggaattgtctctgagaggacataaaatctaaccctctaggtctgacaagtgattcctggccaagatagtcaggatagtttgcagtgaccaaccttaatgaccaatcaaatagttattgctgtcttgactgggctttaacctcttctaagatttgagacaactggaactatgtcctgctcacttcactagccatgcatggttggcttacttgaacacataaagataaagacagtccacggttggacaaatgtcatttatgtgagtaagaaggagaggaaaactaggctgtaaagaaattgctagatggaggtgggggtggaagaagatagctgtaggtgcaggagacagcaggagtctcctgtttcaagaaaaatgatcagaaagaagtcagggtgccataaactcaatagaaactaagtgtttttcttcactgaagcaataatgaaattcttgctgattctatagtcctatagtgctaaccatattatgaaggcctgaggcaaaaccgtcaaccccatacagcagagtcagacctgatctgatgccagacgccaaatcccaaatgtattgttttaaggcatatttaatatgagctcagatttcacagatattactgagccaaaatattccagagcctaagctgccacttggccatgaattttatttggagactgcattaactcattaaggtcagcaagctatggtacagttaattatagctttggtgtatatgaactacaataagaaaattgcaggcataattattttgtgagggacagagacctcaaatttcaaggaggttctcattgttgtgaggtttataaccatatttttcagagtggatgatcaaaagaagggaggactcaagtttaaatttgtacccttagtctactaagtgaagttttcagcggttcttagaacttaacctgcagttatttagtacctgcaagaataggttgtctgtaaatcaatgaaaactgaatgttctgtctacaaactctggttcccctacaaggcatcaggaaaatactaacatttattttttgcaaataaaagtttagggataacaaatatagtaacttttctcaaaagggaaataaaatattctgatgtatatatatagtttttatttttaaatagctttttgatagaaaatatatgtaaatgatataaatgcaaatatctaaaagaaaatgcagtataatatctcctttttaccttgtttccccaggcccagttccccttcctagaggcaactactactacttatctcccatatatatttccaggtattcaataggtatatgctagaacatgagtgtatgtatacatattctattttaaaatacatattcaaatggaatcttattatacaaactgttttacaccagcattttttacttaaaatgtatattagagttcatttatcttaatttttatagatttgactcgtacctattactggctacatgggtttccattgcatgttatgtgccataatttatttaaccaattccctgaatgtgagtatttgggttgtttccaatctttagctaatattgaataaagttgcaagtaatacat

SEQ ID NO: 3699 - DNA, 4001 bp, Homo sapiens
cattcctagcaagttcccaggtagtactgatgttgctggttaggagaccccactttgaaaaccactgtcctagaatttagtaggtacttagtaaattttggcttaatattgtaaatattcaaacaatataatctcaccaaaaaatgtaatctcactttaacatagattagttaataatgttaattcccatttagaggaatacaaagatatatatggtagaatcaaaactaatttaaacctcatttaattcaaattccccattttaaaatgaaaaaattaatatattttaagcttattacaacaaagaagaatcccttttagcaatagccaaaagaaacaatattaaatgcaaatcaattatagacaatttgaacactgacattgttatctgaaagatatataaactcaaagattataagtacaattaagtatgtatccatcattttttaacttatgaggaatagtctgaatgccaaactgagtaaaacctggtctgatggggctcttatctcaagctatgtctagggaaaatgcctattgacttcagtaatataaaatcaggccccgagggaccataattgtctctttaaattatttgggaaatcatgtacatgtttaatcaactaaatacagcatacaattgtaagtggtatattttcatcataaataatcaatgtgctgctgttaatatggttaatagaatgaaaagtaccttcaggggaatttattttacgatcactcattttcattcctttaatttaatttttaaaatgcaagaaattttagatactttaaaactacctgtttacctagaaagtatgtgctaagtaacctgcctaatgccagtcatcactgagagacaccaaaacaaatgattgatagttaactttccattttgctctttgagatcacgtagacagtttatgcagactttactttcctaactcatgtcatcctgtccaaggtactgaacttcacttgccaaggacacacaggaagataaaccctctcaaatgtgctacatttgtcttcaactttttaaatatccatctattttttagattagatgccatctgttgtattatcatatctggttaaatcttattaaaattcctggccaatatatcactctgctgcggcaatcttaccctgctacctctctaggcttttctgcagcattcaataaagagcctgctattttaactaattgctgaggcaggacacagtgtgagagtctaaaacagaatcagcgctatattgtttctacttttacccatagagtgaacaactgttcatatcaaacctggaatcatcccttcaagtctcctaaacacagcacagtttgagccaatgcagttaatccaccctccttcagtgctagtgtcgaatggcgcttttgctgcagtattcaccttgaaactaagtaggcaggattcattatttgttgaagtcacctaactgccagtttattcttatacgatcacaaacaatcacaacagaagacaaatacaggcatatatataactcacttacaagggaagcaaatttgcagccagagacaagggcaacgtaacagccaagaactgcagtaaatctctttgagctaatagccacctctaataatgctctcctacaacacctccaatcaaataaattgtattcagagtttaaatatcaaatcaacattcattccttgatggttacagatgatgtccgataagcaaatttgaatttatgatttatttactccttaagtgtctcaaagccaggattactggaagacttactatgcttattcaagcatgctgacagaactgtaatctcagtaatttctccctgcacctctcagcatgactgacaggcatctgccaagactgtagtacataaactgctgaaacatgcaaaaatatttacccccaaaagatgtagtaaaagctcagcttcctccagcttccataacccctgaagtgttaatctggaggaacagttccatgagtttccacaggccagcagtgtgtctcctacacttgacctagacagccttacataacgaagcaccagtgctggggagctctctgaatgtcatcaccagcaagagcaagaagtattggcagcagcaggcagccaggcaggctgggagtttgcatggaaatcatgaagtctttcttgtcttcctcttttgaaatattttggaaggcgagttaagaatagctcagaaactggtctcattctttttgtgggaagaatgaccagaagcataaaagctaagtcttccagcaagtgcaagacacctcttttggtgtttgcagtaaacctaacaagaatgaattgctatcagtaaagtcctgtaccatgacacctaaaaggaaggaaatggtaaagcaaagtaataactcaaagacagtcaccgagggcttttgtccacctttaactcattgtggtgagtagagggaaatatgtatatatgtaatgagattattattgggggtgtgagttgttttgcaggatggtaactaaaggatttgtaaagagtgtttatgttccttaaagatcttgtttgtgagcaaggtaataggatatcaaattcagaacgtggtgggttaaactggttgtatttaatgtatttcaacttctgaaaatcttatgcaactaataagaaagcagatctctgcctatggtgggttgccgataaatgtcagatgtgttaattaattacttctattgtctatactgaaaaataagatcttaattttagctttcagattttgcatataatcaatcttttagactctgaaaataatttcttataatggagcaagaggattgctgtgcttttgagataatctgtgttagacttactcctagatatctgggggataatgtgaacagcaaatttaaaacaatgtacactccatctaattttctttcaattatcccaaatgtgtgcaatgcaagttatgcttttaaaagctagaaataataaaaccagtcttctattctgattttgagtatggtgatatagtattattaataaaagatgacattatattgtttaattatatataaaattgtggtttgatatgagttgttggctaatatgtataattcctgaggtaacagaaatagagaaggaaccacacatcatttaaaaataatcttaatgttctgctcttagctgggaaacctatctgctaatgcatcacactaagtagagtgaggaaataagagaatttagatctatgagggaacacagtgatctaattccaacccattacttaactcataaggaaactgaggtagaaagaagttagatgatatgcctgacatagaggaagaggtgagtgaaaaatggttttcctgacactaacttgttattttgtcagctatactgcaatgaataattgtcttttgatactggagtaaaggcttgatgtacagtgatttttttatatcatacaaatgacagaaaaaaaaagtggagtagtactaaatatctgcttttagcagtagtctgattttggaaaaacaagttctgtactgattggaatgagaaactttcttcagttatttctcacaacagtaatgaacacattggtgcaacatttaattaaatattcaatgatgaatttgtgttctgaacattaagctatgtacaccaatttgttggctcagatccttttattttattgatgttgattatggtgctaggcttctctatcccttggagagctaatgtatgtgaaacaaacaaccctcaggaagcaaagaactggaaaatagaatgtttttaaaaaatattctgtcttattcttttcaaataaactaagccttttgtaatcaggtgtgtgtttttcattcttgcatccctgcccctagcacaatgctttctgggcctccaataagtgtttgctgaatgaatcaatggagggatgaaaagtattcataatgtgtccctccctgtataggaagtgcatagagtatggcctagtagagttatttgg

SEQ ID NO: 3700 - DNA, 4001 bp, Homo sapiens
aggtaggagggaaagccatgtggccatccacatcattcatgagcatagggtagaagagtatacaccacctaataatgaaaaaggcatactaagaaacagagtttccatagttgtcattcagttttcttggatgctttgacaagaaacctaagaaaattgagcactgcatataatatgccattgagcaacagtatactgaaagaaactctattttacagaatataaccaaacacacacacacatgcacacacacacacacacacacacgcacagtgaatatcatcatacctggtctatgccatcctgatatgttcacactagaggtgaattgtgttactgctatggaagatgtggaactgtcaatcactgttctagccttgccttattgtaatttagtacgtgactctgggaaatccaccttatctctcaattacaattgcttttctttaaatgataatggggataaatggttaaatatctgtaattctaaaaatctccatgtatatggagccatgtagaactacaaactctatagattccacacatttaaaaaacatgtttttttcatggtttgtccaaaccattttataaaatcattccccatagctttcacaacctctgacatggcaaaactacctctttacaggaaaacaatgactgagataaaaacatcctgatgcacctccaccgcctgccacctccaccatcacacacacacacacacacacacacacacacacacagctctttccacaggagaaagaagtgaggcatttaaaaacaatcttacaaaactatttttaaaatatttgtaaaatctctttaaatttctctaaatgaaaatcagtggtttttaaatataggatttctatatgtctttattcctgttattctaataataatcaagcaaggatttaagggaaatcacgagaagcagcagagagaagcaaggctgttgcatgcaacttccacctcctgagtcattccactctttaacacagataatgtcacatgacctaaaataatttaaaatgtgagcaccttctataatatcaactatttaaaatggccacggttctattatcccaaatccaataaaatacagaaaaaatcaattttcatggcaattaatttgtgttcagcatactcctcacatccatactgggggaggagggagggtctatagtctcattccaagtctattaaacacattacataaatcttgattcatgtgggagaaatgacttacgtattatttctaagaggtaaaaataaagacataaacaatctgtaccatcatagccagcagaaatcgttcaaaaggcctttggactcagaatattggcttgcctctgaggctgcaatcagaaggctcagccctgagctttggcagagccactgccatgttaatctgcttcattatatctctacaatttgttcactgcattaaggagcagtatttcccttgtgaaaggaaaacccatccttcactttgaaagctttacctttaaaaggtaaacaaatacagccagagacagagaccaacagctagaaagccaaagaaataataaaacacggtatgtcatagtcagagctcatttcagcctaggaagattttaaattgcacaacagctagaattagagcttttgaatctcttagatctgaatacaagctaacaaagcacacatcttatattaaatgtcattcttaacatagataacaatccgtggataagtcaaaaatagaatcatgctggcttacctgaaataaagaaaaatgtaaatcataacacagaatccacgtatgtgttgaatataacagtctccaatgcaattcttcagaatttttactggagtagaaagtaaaatctcacatgtgctctatcctcattaaagaagaaaaaaacaagaaaggatgaccacagcatcctccctcctttgccttagctttctgttctgacagtcattcgatggtacccaatgtctgttagaaaacagcatgctaaattagaaaaataaataaataaaggcagcatcttacatgacagctccatctcctggtcaaaagtggaaccatcttaattcacgttcctttggctatgtagcagtcagcacataaaattaaatgatgtacagcccataattccactctatttgaaatcaactactttaattaactgtaatttaaacatttaagaagaattatagtatgaatttttagaattataattctattttggggattcaaatttctttacattatgtttaaactaaatggaagcttttcccatcattgaaaacttaagatttatttaactttatataccatctgaaaaagtaatatgtatctcctataaaacaattttagatgtcaagcttattgataatgaacatcacatctctttgtggagaagtataagtttttgtcactagagaagttaacacataacacttgtgttgctattgtttggaggaatgttgaaaggttaaagataaggcaggaaaattaaatgacttaaaggcaaacttgaaaaatctttagttaatctaatctaactacaaaaatacagacgacaagttacatgcaacatgaaatttgataattgtagtagtatactatagtgtgtagttacatcttcttagagagataagagaaaattaaattgtcaaaagaatccatttggtaaatgacaccatttatagaatcaaagttttactgagcatatgatgttctcaatatatgtttgtttaattaattattcttcttatgaacagttgtgaaggccaggatcatttttttaaaatttgaagtaaaaggataggcattttttttctcccacttttttacaacaccattttaatttggggccaaatcgatctttaatttcctattgcagtaacgctgtccatggtgctgagaaccaattttagaactcatggtgagttctaggtcttaaacgggtctgaaatactgtctttgtcagatttgatataaaatttaccattaaaagtccccagatcagccagaataattgatagtatctaatataaaaatagttaagtaatttttttatccacaaaatatgtatatacacatgtccatcagaagccaaaatgctgataaatacatttaataaaatacatgattgcaagctacactttctttggattcataatattttattttctgtgtgctaaagttatactgaatagattgctttaacataaggttgttcccacactattaaatagacgaggaaaccaaagcccactcttcagtaacttatccagtattaataagcaagtcagaagaacaaacccagtttcttaaattttaccttacttccatttctacaacattattaagatgtattagtttggttatgaaaatatatttttaacactgaacaaataaataattaaagtgacttggtagatcaaattattttaatgtatacactcaactatttcatctcacaagtttcctgcactatcataagatacataagctctcagggcacataattatgataattttgccaaattaatttgcaatttcaacaaattactcctgatggccaagaagcttaaacctgtaagattaaagcctaagatgccacaaatatgaaatattattgatactttatttttaaaatcacgggaattttacaataatttatataaaatttaaatgtttttcttaacacagtaatcatttttccccatagtcttgagggtaaattttatccttagggaagatgtgactaactgatcctgggattttgtgtacctctaggcacgccacctcatgcccccagggatacaatatcccagtttcaagaccatagggttatatgacacagaaactggagcaatccttttcaaccctaaatcatatcacatactcttcttctcaaaactttttagtagctacccatctccttgtgaatagtctatgccttccccagtgttcacaatgctcacaatctagactcctttac

SEQ ID NO: 3701 - DNA, 4001 bp, Homo sapiens
agacttgtgacttcaataaaacataggaacaagtgataaaaagaaaaagaaaggaaaagaatagaaagcaaaagatcaataagaaggctgttgcgaaacaaatttggaaaagtatttgaaagggtgttatacctacagacacaattgtaaacgcttactaactcaaagcttttaaatgctaaaatagaagaaagtcataaaattcagaccaaaaacatacaaaattgtaattcagattatgtatatttattttccaaatgtaaaagcagtaaagaaaattagctcatggagtttactcccttacctaacattgtaaattgaagacttacaggaggaaagcctggtaacatggtcaaaattaatgagaaaggcttgggatgtggcaagcaattcgtaagggagaagaaaagagaagaaagaagtaatagtgagttgggtagagaagaaacacttagaagacgggggaaagtaattcacttacctgtgatctcattttgcaacatgctaacgattgagtaaaaggaaagaaaaagaaagaacacataacattgccaaccacagatattttggaaaatgtgtagctcaataacttggtcaaagaagaaaatcatattaagtgacgatttgaaaaaggatatgaatgtaccaaaatcttaatagctaattttctaatagggttgaagggagttaaaatgtaaagggcaggggtggcactgaatcgagagattgctttccctttattcaatactataaacgtctgaaaaagaaaacacaacacataaaataaaacttagaatatatattaagaatattttaagagaaaagtaaaaccattatttataaatattgccctgtaaaatagtgtataacataataattaccatcatatgacatgaagatagatgctttttttttctgagcactataaactttcctaaatttgataaatgacatgaggattattaagaaaatttgtgatcaatgccataggaattcttagcaactttatcaagttttaatgtaagtattttaaaaccgcatttataattcacataaagcacaaaattgaggctttgatttttttttttggttagaaaattttctcatgagaacttcaaggttttccaggtgtgttctttgctcagaatcttatttggcacctacaagtcacctgctattattccttctgtggagagcaatagaaaggagaaagtatggtataaaggaataattaaacccactgaagatcaaagtgacttatggagagctagagactataaagaggaatttagatactactcctgcaaatataaaaaataaaatttaaatagactcctagtttacagtttttgcttctcaacattattagggaatcagggtcaatttacactggtttaagcatataatttgtattcaagaaggtgaataggcttttgtccttccttaattcccgcgctggaggatgcctcaccagttctctgcctgtctcacaaatgcaggttcaaatgagtgcttccaaaagacttctaggatcattggtccattacacggtcaggcccatccagcatcttagtgatactttagacagagggaaggaggccagccttcttcaccatcatccctgggactagcccagaaccaattagtaaataggcagtgaaggcaacttgactaagaactcactttcttattgatatagtaggggtccagatcctccaggggcactgacaccatctctggaggaatgtctccataaataaatggaagagattttcctgcttccaagtcactgtttggctttgggccattttcatcatcctcatccttgcgttcctgtttgggtctcttagctttctcttctgcaatgcgttgttcaatagcagcaagggattccctggtaaagaagcggaagctgtcaggtcctggcggtaccagcactgactgtgccatcttttcatcctgctcctttaatcactgtttagctccttgcataagaaagtgctacagaaacagggagggaaaaaaagcaatgaccattagaataaaaggtgattgtgtcagttacatgacactgagcactgagatacagcatagaaactcagatagctataatattttcaaagaaagctgtatttggtattcagggaatctcatatgtgcatccatttgctcacatggagatctatctctcacattcagtaggtgtctatgaggtaatctaatctcccactcccaaaatgttttaagtgattgtgctacttgtgggaaaatatgcaattcagagctcagaaatggaggatactggtttgtgcctgctgtttcacttgtgtgaatattttggcagccatctttttcagcattctttctgaaaaaatagcagagatccaaaacaagagatgaaacatcatattaaattgtagaacctgagctgaggatcttgcacatatctctccaagtctttgcacgtgccctttggctcactttatcacatttaagagtttattccaagtcaattcactgggtaaaaatctctggaaatcctaaaatgccaggctatggaaacataggtagatcctgcttgaaagaaagggagtgggaaggagcagaagatgcctggttgtgtttggaactgctcggaagctgcacaggaagggacccagctcctgccaaaccgggcaggaagtcatccacatcagaggtctgtagctcggaccccctggcttagcaacctgctgctagctagtgtaattgcttcttaaattaacacatttgcagtaccttaggaaatactgtagagatagccaatttcctcaaattatgcccatttcataaaaacgtagcatcacagtcttagtgtccatatcagaatttggacttgagaaaaaataataagtttacgatagtttatcttttcaagcaaactcttattatatgagtctttgcaataacctaaatagatttttactggtattcaaatcatatttcaccagactaaagtagataactcaaaagagcacatcagtcattccaaatgttacctctgaaccagtggcaggagtttctatgctatttgaaacaatacaatcaacatcttgactcctaaatgacacttaatctattttttccatcttttcaaaaaatcaatctatttcacccccatactataggagtcagagttgtcatttaaatatatgaaatgcattttctaagagtgaaatgtgttatgcagttcacttctgcagcatacaccagataaaacagagggaaacctaaaataacaaaaactactgcacagttttatttaaaaaaaatgttgaagtaaaccaggacctttcagctaccagctagcagactgccctccccagtattatagtgcctccaaaacatccctcatttttttcacccattcctagagaccctcatgcctagcgacagacataggcatgaagatggtccttgcacactgggggaggaaactgccatgcctggattctctaatagaagagacatgctaaaacatgcagccagcagcttcaaaatgaaagtggtccctctgcagatttccccaaggattctactactgtaaaggtagagaagcatcacagagaataagcataataagaataataaaacattacccctgtagaatcttttacacccagagtttgggattgataagctggcaccaagaagactgcagctaaaattccatcatgctttaaaaaaaaaaaaatcttttttttttttttttttttttttttttaattctccttcaaagaccacacctaacttcctgtaaaaggattctggtaactgaagtaagaagaggcatttcctgtacagggactacaaaatggcattattgtaactaccactagagggcggggaactgtgaagagaaacaccttcacagcgtacacacagacatatgtctgaagcagcccaaagctctcagttgtggaactgatcttccacaggcttttcttggaacgaaacattaa

SEQ ID NO: 3702 - DNA, 4001 bp, Homo sapiens
tgtgccatcttttcatcctgctcctttaatcactgtttagctccttgcataagaaagtgctacagaaacagggagggaaaaaaagcaatgaccattagaataaaaggtgattgtgtcagttacatgacactgagcactgagatacagcatagaaactcagatagctataatattttcaaagaaagctgtatttggtattcagggaatctcatatgtgcatccatttgctcacatggagatctatctctcacattcagtaggtgtctatgaggtaatctaatctcccactcccaaaatgttttaagtgattgtgctacttgtgggaaaatatgcaattcagagctcagaaatggaggatactggtttgtgcctgctgtttcacttgtgtgaatattttggcagccatctttttcagcattctttctgaaaaaatagcagagatccaaaacaagagatgaaacatcatattaaattgtagaacctgagctgaggatcttgcacatatctctccaagtctttgcacgtgccctttggctcactttatcacatttaagagtttattccaagtcaattcactgggtaaaaatctctggaaatcctaaaatgccaggctatggaaacataggtagatcctgcttgaaagaaagggagtgggaaggagcagaagatgcctggttgtgtttggaactgctcggaagctgcacaggaagggacccagctcctgccaaaccgggcaggaagtcatccacatcagaggtctgtagctcggaccccctggcttagcaacctgctgctagctagtgtaattgcttcttaaattaacacatttgcagtaccttaggaaatactgtagagatagccaatttcctcaaattatgcccatttcataaaaacgtagcatcacagtcttagtgtccatatcagaatttggacttgagaaaaaataataagtttacgatagtttatcttttcaagcaaactcttattatatgagtctttgcaataacctaaatagatttttactggtattcaaatcatatttcaccagactaaagtagataactcaaaagagcacatcagtcattccaaatgttacctctgaaccagtggcaggagtttctatgctatttgaaacaatacaatcaacatcttgactcctaaatgacacttaatctattttttccatcttttcaaaaaatcaatctatttcacccccatactataggagtcagagttgtcatttaaatatatgaaatgcattttctaagagtgaaatgtgttatgcagttcacttctgcagcatacaccagataaaacagagggaaacctaaaataacaaaaactactgcacagttttatttaaaaaaaatgttgaagtaaaccaggacctttcagctaccagctagcagactgccctccccagtattatagtgcctccaaaacatccctcatttttttcacccattcctagagaccctcatgcctagcgacagacataggcatgaagatggtccttgcacactgggggaggaaactgccatgcctggattctctaatagaagagacatgctaaaacatgcagccagcagcttcaaaatgaaagtggtccctctgcagatttccccaaggattctactactgtaaaggtagagaagcatcacagagaataagcataataagaataataaaacattacccctgtagaatcttttacacccagagtttgggattgataagctggcaccaagaagactgcagctaaaattccatcatgctttaaaaaaaaaaaaatcttttttttttttttttttttttttttttaattctccttcaaagaccacacctaacttcctgtaaaaggattctggtaactgaagtaagaagaggcatttcctgtacagggactacaaaatggcattattgtaactaccactagagggcggggaactgtgaagagaaacaccttcacagcgtacacacagacatatgtctgaagcagcccaaagctctcagttgtggaactgatcttccacaggcttttcttggaacgaaacattaaaactttgttgattttaagtgttaattttgttaacagataatgcttctcctcatgctttttatttgctatgtcagaaagtcattcaacccatataaagaattcaaatttaaagtaaagagaaagtacagtagtgcactgcttaatggcatttttggtcaatgacagatcacatatatgacagtggtcgcataagattataataccatattttttactgtaccttgtctatgtttagacgtgtttagatacacaaataccattgcattacaattgcctgtagtattcagtacagtaacatccagtataggtttgtagcctaggaacaataggctataccatgtaacctagttgtgtaataggctctaccatctaggttttacgtacactctatgaggtacacacaatgacaaaaatcacctaatgacacatttctcagaatatatcttggtccttaagcaaagcatgacgtaaatagggaagggttaaaaataaaaactcatattaaatagcaattaacccttactatatgtaagggttaaaaataaaaattcatattaaacagcaattaccgtatgtaggcttgtagccaaggaactacaaacatagagtaggatttgatattagcctcagccccagataatcttaaatccaatgtagttctttgctaattcaataaagagatggcctgtgccacacaagttaactctctccagaaaaaatattaacccagtgagacaccaatcttatttatctctgatttaagtcactaaaaagcaaccagaaaaaagaactgataaaccagtgagattgtgaatgctaggctttcaattaatatcatagtgaagatttgaggacttactaagtgccagtcacttggctaagacatttgccctgtattatttcatcctccacacaaccctattggataagtgctttcattatccttatttgcaaactgaagtaaggacatacactgagattaggaaaagtctcctaagatcatacaggcaggattcaaactcaaaatctgatagcaaaaatctgtgatcattactcaatcataaaaagaaaacaggcaccggtatcaattataattagaacagttctaattgttaaatcaatgtatttcatactttctggcttcatcattttcattggaaaatgtatttgttgggcaaaaacagaaaacaaaataccacatcttctcacttataagtgggagctaaacattgggtacacatggacataaacatgggaacaagagacaccgtggactataagtgggtatagggtgggggaagcaagtgttgaaaaactacctattgggtactatgcttgctacctgggtggtgggttcaatcgtgccctcaaactttggcatcatgcaatataccatcataacaaacctgcacaggtacccactgaatctaaaataaaggatttggagaaaagaagaaaatgtgtttgttggaaatgagcaaggggaagatgtagcccaaaataatattttagtcactttagcagataacttttgattgtaagagaaaaagatgtctcaaactaattgaagtaaaaaataaataaagacaggagtttattggttcatggtttgtccagggctagtcttaggcatatgatgattcaagagctcagctgatgttaccagctcatagttatgctgtatccttttgttctgactttcatagtgataagtttcctaaagattcttctcttagccgtagcttccctacagctagatgctgtagcagctctagcctcccaaccttccagacctcaattcagtgggaagaaagactccgaaaaactcattgcatctcactgacacctggtgggtcacatgcccatcctgaagtaattactctgtccagggtaatgccgtctttgattggcctctcctaagccacatgctgtagccttgaaa

SEQ ID NO: 3703 - DNA, 4001 bp, Homo sapiens
taaatcacagcatttttctcaactttacaaatgaaatcaccactacattcttttaaagagtaagttattcaaatgtgtttgatatatcatttaatcaaagcaggtttaatttccgaaatttttgaaagagcgcattttgtgaagtgaagaactctgagtgtatttgctttttcacatggcgaccacatgtatagatgaataactaagagactgttgcaactataccaagaaaaataaaagctaacatttggggccaaaattaagcattcattcataaatgtaaaccagttcaatcaagaccagctctgatgcttactcagaacaaagttactcacatttagtcacctgtagagaagcatggtgtgtacaatacactcaagttaattaacagccatttctgggaaccctgtccaaagaaatagttttctttatctcctatggtaggaattcttctgaaatagacaagacccagggctctcctctcaggcaaccactattttgaaatgtttttggggggactattattgctactcaatgtaaaatattaagtgagatgtcaatatttttcaacatatcattaggaattacagtttggaggccttaagttctatttttgaagcccttttagccagtactgactggaagccctgttgaaatcagaagtcttcatttcatatagggcacactctatttggagtgaatgtgatgaaatgtttccatgcaaattcctacaagcacttatgcctttatctttgtcctcataagccacattatactacctgttgtgtattttaaaaccctgtatgatttttaaaacttatctttcaattaatatgtatagattttctgtcaataatttcttattctaattatgtggtggctaactgaatgaaacatttatggttatgatatagaatattctaaatacaactacagacaatatggatcatagataaagtaaattattgttttatggctccagtggttcttcctggtaattaataaaaataaacagttattaaatatatacagaaaaacagcaatctatcaagcttatagaacaattaagaatatataataatctttaaatcaataaattaaaaggtaaacatttaatataaaatgaatatattaaaggataaagaagtagcatattatggaacatatagagattattttattttttgaaggttcaacctcttttaaatggttagtattggtgttcttttctctatgaaaacagattttagagaaaaatgatagtgtatttcacaaagccaaacacctctatattgttatcactccctatatgcatggcctctctaaagctgttaaataaaaaactaaagcacaagaatgatagttccaatttcactatacatttatgtttaaaaaatactggacacactgggcatttaaatagatgacatacagccaggaaactcattagactagctttaagtataataaaaaatattttttctgaatacaattaatcataagcatctacaaaaacacaagaccattgatgcctagtatgtaccataaatcaccatttccagacaggctctattttctttgaaagataaagaaatagtaagcagtttacacatcaaacgatgcctttggttcctgtaatttacatttaaacaacactgggttaaaaatagcagcatgaagatgattttaaagtaaggaaaatgacctggtagctaggttctatggtgcagataatgaaatgttttgtcagcttacctgataaaacagagccttatgaattacagcataacaaagcccagcatccaagatggttagggtataacgtgtcttcctctgcagctgttcagcttttttttttttttttttttttgaccacagaggtttacaaattagttacaattttttttctttctttctctgtggataagaaaacaaagagacctttccagaatcctctctgcttatgcctccgcttcctgttctgagattcactctatggtacccaacatatatcagaaaacagctttgaggaaaaaaaaaaagaaagaaaaaaaggccgatcgcactcaaagtggtaccgccatctactggcggacacacacaaaattgagccaaagaaaaaacattcccattatcctctgtcacagggaggaaagtaaacctgcatgaagcatgggtagtcatgaaagtgccccaagatgacagtagagaggtgatgtgagctaaaatttcccaacacactaaaaaaatgtaacttatctactacatataaatatgtatgagaccttttacatattcagttatttgcatctcactaatttttttaaaaaattttatcactttgttgttttgcatgattgtttcacacataaactactaaaattaaaagatatataaattactgtttgaaaaataggttttaagtttacattaccctttacgtgtagagttttgcgaaagctcccttgtggcctgctctagtcttttgaaaaccttttctcttcctgggatgaattattttcaaggtgaggaatttgactccttagagaacagtgtaaacacatactcactgatagtatttttgtgttgctttctggtaaaacatttgcaagaaatatctaaatgtagaaaaagattctatacatcagtgaacctagctaatattatttattaggatattgaagcacacaatacataaagaaaataaaaataatccatcagttattaagatatttctcaatccagatgtatgttattgtttcatctgacctttcatatctactttagagcaaacaactatgattttattacagtttatcatcaattaaataaatacattcatattgacaaaccaactgtatggatggacaaaaatgatgtcaagtattatattagacttgaaaagacacagagagaaacacacagtgcctgccataaaggagctcatacaaagaagaaaaacaaatatagctgataccatatttcccagccatgtgttcaagaactgttaattacatacttcgttttcaattgtggcccccattttgtctaatggcagaaaaataaatctagtcagttccaggtaaactaaattacttgaggcttttcccaatgattttgggtttgcattcaaccaatacatgattttcctcttctatctctccttctcatggagactgatctaagttcaggattgtgtacatatatagagaaagcagagtatgatcccgttccccctttctccacatgggcatccactgaggccaggagtcctgcatgatccatgaccatcattatccctcatatctactaacgtacccacaggcccactgggccccgggaatagcatccctccagctttgcatggcagcatcccctctttgtcacttcttcctctaaggaaacttttgttcctgtcctttaggaggagagaagaaaaagcagcatgttcccagggtcactcttggctgtaattggctgacttaagccttcctccctgccccaggcgcctcacacagccatctctgttctgctgtttgtaaaccatgggatgtaatgcactctgcaggcttcaggcaagcgaggcacaatctctgccacactagaatagtgtaaatagatggaaacttctcatcttttcatctttttagctaatcctagattggcaaactatgtaaggagcccttatcagagactcctttccttcttcataacttccttcacagactcaaaagagtttttgcttgggtctcttctttctgtaccaaaggtaagctggagccacttgttttcccttgaaatctttttgtcttatgtctaatgtatcagtttactagggctgctgtaacaaactgccatcctgaggggcttagacacagaaatcatttttttcacaattctggctactcagaggccagaatcaagttgtcagcatgatcatgcttcctctgaaacctgcaggggaaggatactttcttgcttctcttagcttttagtagccc

SEQ ID NO: 3704 - DNA, 4001 bp, Homo sapiens
aaaactgggaagaatccatcaaaatgagaatagatttataaaaataaaaatggaagtctatttatccaatagaatacaattagcaaaataatcaatgaactactaatacacataacaatgactgagtgacaaaaacattgtgctgagtgaaagaagtctgacatgaaagattacaaactatatgatccaatttatataaagtgctagaagacagcaagctaatcttaccttgttaatctctcaaaatgattagtttcaagaggaacagagattggaattaaaatcatctcaaacactggtggatctggttctacagattatgtgttaaattttccaataatatgggacaactaatatctctcttgttgagggaaggaacagtctaagacattaagcttcagaatgagagtcaacagagtcaacagacacgataggattagaagtccacaaacagtgccagataaccaaagcaaatcactctgtcacatctgattgcaaatatactaagatcaatgagcataaggaaggcttaatggcagttgaaacactagaaaaggacacgaatcactgggaataagatctttttgagggtctcctgcctcactgagaaatgtgactatgacagtgataaaggcaatagaaagggaggtttctaggaataaaaagtaaagctggttctgcctgaaatgttcctgctttgaagcttccaatacaacgaacatctttgattccctaccagtaactctgggaaagtggtcgagccccacattctaaagaactcaatgttcccagtttctccagatgttctcgaaacttccactgctttgcaaaataagcctctagaattctaaattatcctttgttatctcatcaaaaagagcaagttgtaaaggagccaggattgtcctggaattctatttctagtggatccagtctgttaaatccttgaccaaaaattcctggctagtggccacattaggattcaacaagtgaagaaaagtagcctgtgctgcttctcagcggaatacaaaggaggctgtatgatgcaaccagattataacttgcccttcatcctgaggtctttgatactaattgttcccctaagatgcaagacctgatctctcaacctctgtttaaaaagttccagaattaggacatccctgggactcttcgggacctctcagaactagctgacctccttgagtatcctcttaatctgtggttagacttaatctgtagatttccttgacccttcattgttgccagcttctcctcagcagtggaactaagctcatagatccacaaatgataccctaaatcagtgaatagacagaagagttctgaaccagtgtcatataaggtcactcataaacccctagcaccaagtctggctccatgttagattcagatagacacaaaaccttcaacaatgtaccagaccctggaaggttgaccagatataacagtgtcaaatctgcagttcccaagtcctggagcttctacgagtacagagaagatgagaggatgacctctggttaacacgctggtactgagagctatagataaagaaaatcttggtacaggtgatttcgatcatacaagctctggagtgcatatcagaaatctcctggggctaatactgaaaatctaggagccagtggcccaatccagacagactatttcagaatagcttgtgctgcagcctttgagatgaatctgatgcagactgctaggcagaaagatgccttggctgatagctaagcttcacccaaccaactttataaagcaagcagacacatcattacattttcttgtttgttttttctcatctgatagcctgagtatgagagatagagcatatacaggagttgctgaggcaaatacctgttgaacaacagcacttctccagaagatccacactcttttcatatctttgggcactagttttccctcagctctaatgacctggccatgttggcattcacatggtggaggacctgttgcaaaacagttctaaagcttgaaatcagacaaacacaactgggacattcacttttgcatgtggctcccacccacctccaggataacaactttcttttttcttccactctgtcctctcctttccaacccatccaatctcatgtttaagtaatgtttcctaaagttctaggttacttggaggcagtttgggtttatgcctgttgttgaggattaactattaattacatcctttttccttttcagaaacatcctgagttggatgataaattacatggccactcaatcagtgagcgaatgctgtctctagagagcccagttcccatgcaagaggctgcatcaacagcattttgaaacagcaactgcagctgcattttcttagataatgaaggatggggaagaaaaggaatgccagaagtcagtatttttcttcttccctactcacaattcccaattgtttcccctgtccctcagttttatttctagagcacagcctgccagcaatgcactcaagctgtggagagagattctccacctgtaggagatgactgcccaggccagtcacagcctcttcatttccatttattcccatcttagggaattgaaaatacagcacctaaagaatcaatctctgtgctttctgagaaactggagttgatcctaggggagacaaaacaaatgttagattagctttgccaaatagaattgtcgaatgttctattctatattaaatatatattcctaatgcattccaaaaagattgaggttcacattcaagaatgtagaccatagagcaagataatataaattaagaaaaatgaaacaaaaaagtaaggacagtggatcaatagactgaggataatattgcaaatgccaatttcattccgtgtgcagcaggaaataaggataaaatgacttctcacttagttgttttcaagctattttgaaacaattatgctgtacatcagacatggacaacgtaacatgtctattgcaccaatgacatttagataggtgtaaaaacaaagcagtgatgataataagactaagttaacttgggatcagaaggtaccatcggcataagcaaagatacagagttaatgtgaccattgtacataatctgtattgttgagaatgtaggactcatacctgctgatcaatttagcaatttagtgaccaacttatattgacatttttattggtttgggcaacttgactgcacttaatagatatatcatggcttatatttcatctttctcacattccataatgacttacagctaaattctctaatgcagggccttttcccttagagctttctgactagaatgctttcccctccagggtttacaacccaaatgatattaaatgcattgctttttttaatttttatggaaggctatgaaaattttatcattgacttctaggaagcagaaacctatgaggaagatgactgaagctaacgaaattctaaaggatagacataaagttgcctaaatcaataattttaatagtctaactctgtagagacataattgagattcatctcaatgaatatgaccatttacaggctgggatatggaggcaaaggctacccacacacagtgcaggtgagaatataacttagtgcagttttttaaaaaagctacttgtcaacagtttctttttttttttttatttttttttgagacggagtctcactctgttgcccaggctggagagcagcggtgtaaccttggctcactgcaacctacgcctccctgagtcaagggattctcctgcttcagcctcccaagtagctaggattacaggtgcatgctactacacctggctaatttttgtattgttagtagagctggggtttcaccatgttggccaggctggtttcaaattcctgacctcaggtgatctgcccacctcagcctcccaaagtgctgagactacaggtgtgagccactgcgcccgaccaacagtctcttaaataaagtttcatgtactctttg

SEQ ID NO: 3705 - DNA, 4001 bp, Homo sapiens
aatttatttatttgtttatctattttgcttctgaaactcagcacagcaacaggtagtaaaaacatagaagcattaccacagaagggctcccatgattatatgcaggccctaggggaaaggaggcccaagatgcttttggcagagagccagacctgactcatctttcttctgtagaagcatcaggtactctgtgagcctagccctgcaccataggaatcaaggcatatcatatatccagtcactgtaaaaacacatcactgagtcccacaactgcacagtggcttacttaaggaaacctccttttaaacctctacaaaattttaaaaaacttgtcttaagccaaactatcagttgcctaaatagagggcacattcttctttacatcaaataccatattctgtctagagttttgttgttgataagctagtctaacaatcatgaaaatttgcgacacagggatcagataagactagctttcaaactaatcaataatttttaaaaaatctcaccataattataagaaaaaattataaacttttttaaatagtggaaaaaatctgaagaatttgcaataaaatgaacagtttaataattggatttggtttgcagtttatataaaataggtttatattgatgttaaagcaaaaattataaaatatatttaaataacaaggaaagaaagagaaagaaaatctttatcttgtctacagggaagaagaaatagaaaagaataataaatatgtttctgaaaagaactgaacttcccaacactgacttcctattcagtaactgacaagctatcacttccttgaaagcttactttgatttggcttttatcttactgacactagcttcttaaaaacccccctaagtttctcatgtaaattgctcttaacatcagagtagatataatctatgaacgctccaacttaaaaaaaaaaaactaaaataatgagtgaaatgtttactataatcacaaaaactggcattaatgtttctagtttcttgttctgatttttgtcttgaatataaggcacgaaaatatccattttttcctaaaagtaaatgagtttcccaagttgaattcgataaaaagttaaaaggattctgcatcttttctgaatttcactataaagtgcttattcgaaaaaataaataaataatctgcgctgagaaataggggcagagctgtcctgtcaattatttgtgtttgtgtgctcttaaggggtgcggggttcttttctgtccccacaggttgtatctgctaagctggttctgcacgctcagctttgcagatgggaaatacagcacatgctttttgctcgtaaaaaatgtgagctgccccttgaattgaagtccatctaacaactctgctagcgtaaacagaaataaaagacagtaaaccaccaggcattgctacccttcctttccacagtttcagaacctggcagcaaacccacagagtcaaaaccgcacaggagctgcccagctatcgaaataactacgcttccagcccttcttcctcccattgctggaaccacccggtcaagcttctcccctctcttctttccaggtggcgtaatacagggttccagaaccgagatgtgaaaatagacacaggtgggtgtggcggttgaggcgagcacgggcgaaagaccgagggcttctcctcccctccccacagaagcagcaaaagaaaaggcacttacttgcaacctagcccgccgatcatccccacccagtgcacctgcagaatctggctccaggagagggcgcgggcctctccttccccggcgctctctcagggctgcttctttttctctgggctcctgttgctcaggggacgcctgccgctagcagccactggcacccaggctagcccagcctcagccgagctggcggaattggaaagccgacagccgccgctggagcgctggcgaccgcctgcaagcagactgcgcccctcctgccagggcgcgcccgtggaggtagcagccccgcctccccgagggcagctgcgccgctttgcctcctccactcctcccagcgcgcccgggtccccaccccttgctccctccctccctccctctctccactcctgcgggcggcgcagggcggggacccagctaggggcgcggtggtggcgacgctgtagcctctgcaccatgcgctaatagaaggcggaggagggggttgcacgacctgccatccacggccacccattgggtggggcgtgtgtgtgtttgagtgtgtgtgtgtgtgtgtccagcagccagaagagcccttcccttatctcacccccgcccccatcatccctttcctcccttcctgctcagcagaatcggctaatgtttccgagaagtcactttgtgtggcttggtggggagctggagaaaaactccggagcagaggaggtggggaccaatggcaaagccctgagtctggggcagtggctggggagccagacaacaccgccaggccagcgcctccccgaccttgggctctgaagagtctaggctgggaattggtttcttccgtagggctttgctcacaaccgcgagtggggcggtgacgctcaagaccggtatctaggctatgttttctgttttctttatatatatgtatatataaaatcaattgaattgcagcgtcttccaggcaagcaaataatacattttctttcgaagatgcagtgaagaatcagaggaggtcctaggtggggaaagaaacgtggggaaaaggctgcttttccagacctgggacccgattatctgaatatgccatcagtcatatgggttctgaatttcagagctggtaggagcgactgtgaaaataaattttttaaaaattcattttgtgtggagtgtgtgcgtgcgctttcctacagcagcctgggaggaagaacaatggaaacagggttgaattatctttctcaaagagaaacaggaaatttccaccaagggaagaaatcaaaggatggccatagggcagggtgcctctcaaaagggcagaccactttgcaggataaacactagtgacgggcacttttattatttgcttccacaccttctatcatggaaatgatgcttagagataaccggaaggaaatcaaatcccagggtctacttttccctgctgctttctttgcttctgagatttgtcctggggctttggaccttacattcttgacttgtaagatgtgctattgaaggaaggaaacttcagtgactgagactgtgcaatgaaggtgaactagctcacttgtgataattctcagtgccatatcctggacaaatcgccttctcttccctgattggtggtagatataggaagaagagttcaactgcaataggaataatggtcttttttattagatgcaagcaatgccacattcttttatttttaaaattttatttttagagcaattttaggttcacagcaaaactgaagggagggtacagagatttcccacataaccgctactcccacacaagaatagcctcccccattatcaacattccccaccagaatgaaacatttgttaaaattaatgaacttactttgaggtttcattatctcccaaggtctgtagttcacatttagggttagctcatggtgttgtccattctatggggttaggcaaatatataatgacatgtatccaccattacagtatcttacagagtaatttcagttctctcctgaattctctgtgttccacttattcatctcccatttcaacccctggcaagtactgatcattttactgtctttatagttttgccttctccaggatatcctatagttgcaataatacagaatatagccctttcagattgactcctttcacttagcaatatgcttttagttttcctccatggcttttcatagcttgatagctcatttctttacagtgctgaataatattccattgactggtggtaccatagtttattcattcacctactgaaggacatcttgtttgcttccaagttttagca

SEQ ID NO: 3706 - DNA, 4001 bp, Homo sapiens
gtgtatatataaatccctttactggacaatgagatccttgagggctgggagtatgtcttactaatctttatattctctttgctggaacttgtcttatggaaaaaaatcttacgtgcccagtacttcctcaaaggaaggaagaaggggtcttatttgagctgggaaataatacacattataattctgatgagactgaaattttgaaacagactcattgattcagacaaaaatatgtcaatataattccaaattgctgatatttctaggagaaagttcacatatttaatttataaatcgcaattatatactttaatatctagattacctcttcagttgtaacttggaaaatcttagatcttcacttataatagaacacctaaaggtccttattttgctgccagaacagacacattgttttacagagtttccttctttcctttaataatggcaaaaccttaaaatggctttacacaggcagatgctagcaacttaaaaacaaaatttaaatataataaatgtttccttaaaaagaaaagaaaatgactaaataaaaacttcagactgaaactcttaagggttttcctcttctcctcagtgacgagaagtctgatgtcttgatggcttctgttattttctttctgtatttcaactcttatgtcctggatctccttctatttgtgttttatagttagttctatcactatataactttggcagactatttaatctctctcttacctatgccttctgcctcatcagaaaaataagacactatttgatgggctgttatgagaacttaataaggcaacacgtaaagtgttttgcacagtgcatagaacatagtagatactcacatgaaagctgttattgttattatttggtaggagagaaaatttctcataaaggcttattcgttttttgttttttttttttgatggagtttaactcttgttgcccgggctggagtgcaatggagcagtcttggctcactgcaacctccgcctcccgcgttcaagtgattctcctgcctcaacctcccgagtagctgggattacaggcgcgtgccaccacacccggctaatttttcgtgtttttagtagagacggggtttcaccatgttggccaggctggtcttgaactcctgacctcaggtgatccacccaccttggcctcccaaagtgctgggattacaggcgtgagctaccgcgcccggccaaggtttattcttaacattaccctgatagagaacttggttggtggatcacctgctgcagtagcagccacgtccactcaaaaacctggagtcccaagggccatcaagctgcaatagtaacctgagctgcctaactggggtcgtagggaaagctaaggaaacttgccccctggttagaattgcacctagcccactgaggaggtgaagccttgagagattttaccaactcctaacgcgtattcgtcattcaataagtatttattgaacgtctttcggcgccagtaccgtacagctgggtacaaaatagacagggcctccgttcttgcagagctgtctgtcattctatttcacgcgctcttagttcagccggcgctttcagaaacatcatattgttggattctcgcaagcatactacggttagggccggaattattatcttcataacatagatgagaaaaacagtgcagaaaagcttttgcagctcgagtcagagtccacagaaagtaatgggctcgagcttcaagcacctttggtcgaagggccgccgcggtccaccccgcaccccggccctgggcgctcaaaccgcagccggtgcagctgggctccggagcccctcggtcaagcagtgccgcgccacagttgggtcttccgggtttctgtctcaactatgcacgcccctcccccgtgcgcgcccctcacctggcctcccagctacccgaagtgacaggtggacggagggaggagtggccagtggaggcatcagttgccggaagctgtcacctttgatctcggaagttcccccttgctgctggaaacgcagttccggttaggcggctgagtttgtttacgttgctaacagatctagcccctgctttccctagttccagttccaagatggggaaatccttcgccaacttcatgtgcaagaaagactttcatcctgcctccaaatccaatatcaaaaaagtgagtaaacagacccggggagggattaggcccacagggaccgccttcccagaggctgctggaagtgaaagtgatggtgtctctgagatccctaggacagcctccgcttctctaggcctaaagccctggtggtctcgcctttctctgctgagcagctcgctgacgcagcgggtcctcagcgtttattctgcaacagcgaggagaccggtggcctagagaatctttgtcggccagaatgcaaatccataatatgcgaagactaatgtcaaaattcctcagtacttccttcagctgattctggttttttgtcttttcggatcccagggatcacggcttctgaactctacttttctgtacaaagaagcctccccgtttacttaagatagatctttaaaaaaattacctaataatctagtgtctttttgatgactaaactcgttgaagtttagtgttttacataattacaggtctaccagttgtaatactttggtgaatatcatagtaatgaaaagcaaaagagtgaagtagaaagaatcagctttggagtcaaacctggattctagttattcgagcagtcacttttagccttaagaccttgcacaaaatatttgtaatatctgaccctcagtcttctaatctgtaaattaaggatgattgacttaattgtgaggattaagtgaaatagtgaagataaaggatttgaaacaacgtaggcatctatcactgtgtccactacagagaggaggtgctcaataaaatgttgattgcccctacatagaaacttgtgaaaataactaagcttttatttgtttttagaacgagttgaggtgatgagatactgctatatactctcacttctagaccagtgattctcaacttttttttcactgttaccttcctaaggagtcttattaaacattttttcttaataactcccccatgaaattttaataacacagatacaccttgaaagctctttggtaatcatccagccccatctcctcattttataaatgaggaaacaaatttgccaagagttacacagctagttaaatgttgtaccagaactaggatctggaacacctgattaacccagtgattttttttccactgcaccagtttgtgtttgtgtggttgcaactgtgggagggagaggtttcttgtatttggttggctcaataacttttgacaccaaacacagacatttcctttctctgcatacttagggggtcagctgttactatttttacaagaatgaagagattagatggaattcaggtgcttgcttatttgctgtttatatttagagacaaatatacctgagaaatcataattttttactggaacttttgacatttcgctttataaatttcaatgtatcagctttcttacaagaaaaaagaaatccacagagaataacttttgcaagtccgctatgagaaattcagtaaagcagttataggcttagaacctacattcttctcatctgtgtaaagtgttatgtaaaatgtaccaaatattgttggcctctttgatctgttttatacttttcccaggatagaggagaagaatgaaatgtttttgattagcagacctttctagatagttaacactttatggggagagggggtgacctctagcattctttattaactaaggataaaggaactatattaaatgaagataaatagaaaaatttattagggtaggaggaaacttttggaggtgatggatatgtttatagtgtagattgtgatgatggtttcacagggatatacttgtcaccaaactcaggttgtatacattaaatatgtacagcttt

SEQ ID NO: 3707 - DNA, 4001 bp, Homo sapiens
acttgctgatctcgggcagctcccttctctctgagagtctcagtgtgctcatttttaaaatgagggattgggaccatagcataatgaagcatccttccaaggtacactgaagacttaaaccaagtgaagcctctcattttccccttccatttattcctgtgataatccagggatttccttgagataaaaatgtaggctgaacctcagtcctgcactcgaggtaccagttacgacagtctcagagtcactgcaaatacttaagaaggaggctgggagggtcccaaggaaggagctattgcctctcccacccccagccacggaataacacaccttctggctctacctggctttgcactgtccccagtatcccagttggcatttctccaaattgggagtcaaaactcatgagtgcatgctgttgctctagcgtcttccaaggccagcactgccactgaagagaggaggctccacggtggcaagggagctccaagcaagctccaaattgcactcatcccaactactgctgctgaaagtcttggggctaccagaaaaatgagcatctcctgagtgtcaacactctggtcggctccgggagcattggttttccttataatcaaaccagaggagactaagggaagacaaggaggctggacaccatgagacttgcccaggacagagatcagagactcagttgggtccccaagcgcgttccctggggagcttcttggaagagacgacttggggaccaatttggaatgctagtgggaagggatgattctggaatctggcccccacctctaacccccactccctccccattccttcctttctgctggtctgggtggggccactctctttatcagagatcccggagctcagagaggcccgggactcccaggaatttctgttggaaagaaaaacaaaccacccatcctgccgctattattattattattattattattattattattattattattattattttcctcctccagccccttgccaggacctggctttggggaacagcagcgccctggagccaccaggcacgcagacattagggagccgcatcccacacgagacggtgtggggagagcggcaggcggtcccatcgcagacccagaagctcctgccagagctccctcaggttttcccatccgcagcccgtgagtgtgaaaatgtcaaggtttgggggcagactgatactgatgtgggttccaatcctctttttctgacttgcagcaagaatttttattccccctctcctctcctttcctttcctttctttgtctgtaaagtgacggtgataatagcagcctcgaaaggtgattaccaggtttcaaggaaagattggaggcaaagcgcccaggacacagtaggcactgccacgggcggctccagaatttccgtgtaggagagtttcagaagccagaccagaggaaggggtcggtggtgggcacagggattcatcttagagccgccttcgtctggcgcgcacgatgtttttctttgggaaagggtccctccggagaagagctgggagagattaatgttgggaggattgggagggaagagtccctattcctcatgggaagatctgctagtccctctccacctgcatcctgcccgaggccggagaaagggcgagactgtcgctccctcgggtccccagcctgcagaagggcgcagtactcaccgagtgcgcggcgcaggcgagcagcaccggcagtagtagctgctgcagcggcggcgacaggtggggacgcatggtgcccgcacgttccccgagggcgccccgacgtccgcctgcccgtgccctctgcccgctcgggagctcagcgccccgcgcagggtcccgggctccggccggccgctgcgccccgaggagccatggctgagccacccgacctgcggcgggccccgggactgctcctcctcggaccaggtggccgcgcgcgctaagccgcccgccccattgatcaggacgcggctttgccggcgcgcctcctccacccggcagggactggcgcggggtcggcgcggaggctggcaggggaggaggcagagggagggcgcggggacccggagtcggctcccgcaggctgggcccaagctggaggaggccaggagagggcacgctggcttagccttctacgcggcaatcccgcccaaccccgggtccggaaagagcactgtctctggagtccacggacagaaagcgcaagctcgctgggggccggtgggcaacttaggtcacctttgtaagcctcggctttctcatccctaacaacacgtctgataatacccactctcggactgaaagttgtcacacagtcgaggcccattgcatctattccccccgatagctaccttgcactttatttccgattttttcattattgaagtcattagcgctaattccatgaagtttcactcccatgaactcctcctttgatgatgaccaaggaggatctgtggtacactcaggcatctggggaccgtcctgaggatgaaccccctgggaggctatttaagcctcaggcaggtagtcccagtagccctctccatcggtgctgtgtatcctggaggtttgcttttggcctcttagtacaaggcgtctcttagtacaagacgtcctcttagtacaaggcgtctcttttggcctcttagtacagggcgatggcccttttttactgttacataaaaaagagagtctcaccatgttgcccaggctggtcttgaactcttgggctcaagagatcctctcacctcggcctcccaaagtgctgggattacaggcatgagccactgggcccagcactagatgggtcttgcaaactcaattttccttagtctgcactggtgcccactcccttccttcttctctctcctcctttcttgatctttctcccaggcactttaagtacatcagctcatttaattctccctcacacccctaggtgatacgatgtccatttgacagaggagggcattggaggtggaggaggattcattacatgtctgggtactgcaactcagaggctcagacaggaaagcctgaatctacccttacatggctgacccgactctctgtaactggcccttacgcagaaggccatgcagctgttaaggtaacaatgtgttgtccttagcagccttccctaccggaagagactattagtaaattgaggctggtaaatcccagcagaaataaaagggaggaaaatccattcagctcctaggtccaaaaccaatgctcagtacacatcaaacctaaagtatacataatcaccaaccccctgctagaaactctttctacataaatactcacccaagggcctaatgaaatgtgcaaggatgtttgcggaagcactatgacagtggcaggaaacgagatgatatatggggaaagggaatcacccttatttctttctttctcatgggcagcagtcattactataatgctcctgacttgtttctaccccttccctctctctgtctgtctatcccccacctctctctcatgtgcacccacacgcaagcatgcatgcaggcacgtatacacaggtgaggccagcttacatgattgatgcatttggaataaggaactggcatgagttcggtcccctcctctctccttcctttgacagtgtgcccccctacagagagcctgtaactggatttccctgggccaggctgtgattagtggtcgaggctctactggaactggtccagtatgaactgttgtctctctaattctggggtttagttaggaaacccacttgcctacaagtataaaccacattctgcaatactgactttataaagtgatatttggccgcatctgtcttgatcttatttctcaattggttcaagtttcaggctagaaagaaaaatgttatttcctaggctgcttgaaccgcagcaccctaaatatccatcgcaaagtgcctgaggtaaggacttgcaatttttactatacagatttctgtgtt

SEQ ID NO: 3708 - DNA, 4001 bp, Homo sapiens
gtgcctccctttgccagagctggggaagtcgaactgtccagatgtagtggcgagacaccgccacttccggaaggggaagcgcccctggctccgcacctcccctctgcatccctggggatggccgagccggcccgcaggagggaccccgggacgccagcaccgggcgcgggggctggggaggcgaactcgggcggcagactcgggcaccgggcggcccgcgctgacacctggctgcggcccaggtcccagcccccgtcaaggccggcgttacggggctgttcccaggaaagggttacaggggccgagaacaaagcgcccccattggggaaggcgggctagcggccggtggccggggcgggagagccactttctggggaccctcaggctgctctttgtcggccacgtccctctttagtggagcgtcagccccgctgaaggtggatgctgcatcccacccaaaggcctcttacagccccgagctccacatctgcccctcttttctcccagctgcactgggcgggccaagggacccgccttccctccgcgcggcttcagcacaaagccgagccggggagcgggaggccattcccgggtcccctcgcgtggaaggcgcctgcgcctcggccgtgcccggcacgggaacgcgccctccggggccagctcaacttcagcagcccagaagttgggctcctccgggtctccagcgttccgaggccaacttcccggaacctcccgctgccgggccggctcagctcacctcgagccgcccacggcaagcccgagggccctgcagacgctcgcccgcgccccccacgcagccctggcccggctccccgggccaacgcggccgcctcccgctcccgcgccggccgcgctgcgcccaaacttgccctggcgcaaggggcggggcgcccgggctcggcggcgctggggcgcaagcccgcgggtctggtttgaattagggtctgcagggggggcgttgtggccgcggtcactgcatccccccgggtcaccgacgggggcccggccgccgcggtggccggggcgaggagggtgggaacgggcgaccccgggcgccgctgtgggctggcgggctccgacagatgtggagacgttttacataattgagcgcggggccccggccccccaccctccccagcgcgggaccggtgcggcacccaccgacagcggaggaaattggggctggagccctggtctcggggctcaccgtcccgggacccgctgggctagcgcgggaagaagggaagtcttcgctccccctccccctccacgtgcacccgccggcatccgcgggtgaccagtcccggcttcccgccgcctccccgcctggccgccggccgcactcaccggcagggccggctgcaggctcagcgccagcgcgcacagccagagccagagcgccgcgcgcctcatgctgcccggaccggcggcgggagagcggcaggctgcgcgggtcgcggctgcgggccggcttcgcgggttccgctgctcgatgctctcttgggcgcctgcccagcgcgccgctgtcccaggcgagggctgcagggtccgccggctggagtccgctctctactgccggattcctctccgctcggctcggattcggcccgcacctctcccgccgagctccgccttataataaacccacaggcccttccttagccgttgcaaaaactggccccccacccccagctccgccaggtctcccggccagccccagtccacaccccccaggaccccgccccccagccacccctcccggccccttcggaacgccccacccccggcccgctcctaaggttcttgcctgcttggctcccgctcctccggtggccgaacgtcgctttcgggagctgtggtccccgcaagccgcggttcccggcctttcagctcggctgctccctgggtggtggggccgaggcgcacccccttctgcccgggcccggagtgcggaggcgcagcccgggagaggggctgaaggggggcaggcagtcctcgggcgcgagtgtgcagcgccctctgggcgtggacgcggagcgcgctccaggtgcgcaggactcctagctctcttggggaacgctttctggggcagggcggggacccgggggcgatggggccttcaaccgacgggcaaacacacacagacacaccccggctgtcctccagctgcgatgcggctcgctgcgccccgccggcccagattctcccgtacgctcgcgttcttcctgcactccacaaagtgctggagacttggggccttagtttaaacagctgcacccgcacggaagggctgcaagaaaaagggggacgggggcggagttcgcagcgtttttctgtggaagacaacgccctctctcttcatctgagctaaaaggaaaaataagtaacttctttgttccccggtgacctcgggcacgcggatctgaggagcaccgtgcagttgctgctccttcgagatcccctgcgaggccctgggcctcagttcaaaaagctgtggaaggcctgcgggtgtaggggaaacggccgagagagcaaaggggaagaaccggacgggccctgcccacatctggcaggcaggagagatggtgccaaacgaccttcgcacctgggccctgagaccaaagatggcgtcgtcctcccctgtcttccctaggcggaaggcaagaacttgggtcggcctgagctggggaccaagaaaatatcgggaagtgtccagtgttcctctttaaaagaattaaaccttcctgggccacgcagggactgaccgtgggaccctggactctcctccaccttccaccgtggagcaggctctggagccgagcagcctcctgcgtccccatctcatccccccactcctcctcacagcactaaaagatgatggcctgcttgtacccctgctcctgagcacctgtttgacctcaaagagctctcgcttttggggtgtccgtctccccaagtctgtctagggggcaggaagaccttcatcagggttcttgggggccgatgtgggctcgctgagtgcctgagtgatggatggtctcacagcacggcaccacggaggtccagccgagctcgaggagtccctgtggattaaaaatgcccttttcgaaggttctacctctaccagagggtggctccacagatcccttcaacccagtatggtggaaaaataggaattttggaatcttacctttctctactgctcacaacagaggaaactggggtcagggaggatttgatggagtcttttcattttttaaaagtcactcacggccaagcgcgatggctcacgcctgtaaccccagcactttgggaggccgaggcgggcagatcacctgaggtcaggagttctcgaccagcctggctaacacggtgaatccccatctctactaaaaatacaaaaattagccggatatggtggcaggtgcctataatcccagctactcgggaggctgaggcagggagaatcgcctcgacctctcgggttcaaacaattctcccgcctcagcctcctaaatagctgggattacagtcgcacgccaccacaggccggctaattttttatttatttatttattttgtatttttagtagagacaaggtttcaccatattggtcaggctggtcttgaactcccaacctcaggtgatacacccgtctcggcctcccaaagcgctgggattacaggcgtgagccaccgtgcctggcccttatacttgtcttcttgagtgcatgtgtgaggctttctctagaagtagagctctggattataggtataaacatcttcaactttctcaggaattgttgtaagcaattgctctaagcaaattgctctccaaagggcttatagtaatttacactcccaacagcagttatgagcatttccatttttctacatcctcctatgacttggtgttgggccttttatattttgccagctgatgcaagtaaaattatatcttattgctgtttgagtctgac

SEQ ID NO: 3709 - DNA, 4001 bp, Homo sapiens
ctcctggaccggaaaatgtctggaagcacgagtcacctgggaagcagggagggcgctttacacatcggtctcagaaacgactgtccctacctcatctcccatgagacagactctgtaaagaaaaaaaaaaccaaagcgctcaataactggcagctactacacgaggcaacgcttacggagggtcagcgctgctgagacttgtccagatgccacattagcagtggagaacccgagtgcccaccccgcccccgccccttccctgcccacgtgcctccctttgccagagctggggaagtcgaactgtccagatgtagtggcgagacaccgccacttccggaaggggaagcgcccctggctccgcacctcccctctgcatccctggggatggccgagccggcccgcaggagggaccccgggacgccagcaccgggcgcgggggctggggaggcgaactcgggcggcagactcgggcaccgggcggcccgcgctgacacctggctgcggcccaggtcccagcccccgtcaaggccggcgttacggggctgttcccaggaaagggttacaggggccgagaacaaagcgcccccattggggaaggcgggctagcggccggtggccggggcgggagagccactttctggggaccctcaggctgctctttgtcggccacgtccctctttagtggagcgtcagccccgctgaaggtggatgctgcatcccacccaaaggcctcttacagccccgagctccacatctgcccctcttttctcccagctgcactgggcgggccaagggacccgccttccctccgcgcggcttcagcacaaagccgagccggggagcgggaggccattcccgggtcccctcgcgtggaaggcgcctgcgcctcggccgtgcccggcacgggaacgcgccctccggggccagctcaacttcagcagcccagaagttgggctcctccgggtctccagcgttccgaggccaacttcccggaacctcccgctgccgggccggctcagctcacctcgagccgcccacggcaagcccgagggccctgcagacgctcgcccgcgccccccacgcagccctggcccggctccccgggccaacgcggccgcctcccgctcccgcgccggccgcgctgcgcccaaacttgccctggcgcaaggggcggggcgcccgggctcggcggcgctggggcgcaagcccgcgggtctggtttgaattagggtctgcagggggggcgttgtggccgcggtcactgcatccccccgggtcaccgacgggggcccggccgccgcggtggccggggcgaggagggtgggaacgggcgaccccgggcgccgctgtgggctggcgggctccgacagatgtggagacgttttacataattgagcgcggggccccggccccccaccctccccagcgcgggaccggtgcggcacccaccgacagcggaggaaattggggctggagccctggtctcggggctcaccgtcccgggacccgctgggctagcgcgggaagaagggaagtcttcgctccccctccccctccacgtgcacccgccggcatccgcgggtgaccagtcccggcttcccgccgcctccccgcctggccgccggccgcactcaccggcagggccggctgcaggctcagcgccagcgcgcacagccagagccagagcgccgcgcgcctcatgctgcccggaccggcggcgggagagcggcaggctgcgcgggtcgcggctgcgggccggcttcgcgggttccgctgctcgatgctctcttgggcgcctgcccagcgcgccgctgtcccaggcgagggctgcagggtccgccggctggagtccgctctctactgccggattcctctccgctcggctcggattcggcccgcacctctcccgccgagctccgccttataataaacccacaggcccttccttagccgttgcaaaaactggccccccacccccagctccgccaggtctcccggccagccccagtccacaccccccaggaccccgccccccagccacccctcccggccccttcggaacgccccacccccggcccgctcctaaggttcttgcctgcttggctcccgctcctccggtggccgaacgtcgctttcgggagctgtggtccccgcaagccgcggttcccggcctttcagctcggctgctccctgggtggtggggccgaggcgcacccccttctgcccgggcccggagtgcggaggcgcagcccgggagaggggctgaaggggggcaggcagtcctcgggcgcgagtgtgcagcgccctctgggcgtggacgcggagcgcgctccaggtgcgcaggactcctagctctcttggggaacgctttctggggcagggcggggacccgggggcgatggggccttcaaccgacgggcaaacacacacagacacaccccggctgtcctccagctgcgatgcggctcgctgcgccccgccggcccagattctcccgtacgctcgcgttcttcctgcactccacaaagtgctggagacttggggccttagtttaaacagctgcacccgcacggaagggctgcaagaaaaagggggacgggggcggagttcgcagcgtttttctgtggaagacaacgccctctctcttcatctgagctaaaaggaaaaataagtaacttctttgttccccggtgacctcgggcacgcggatctgaggagcaccgtgcagttgctgctccttcgagatcccctgcgaggccctgggcctcagttcaaaaagctgtggaaggcctgcgggtgtaggggaaacggccgagagagcaaaggggaagaaccggacgggccctgcccacatctggcaggcaggagagatggtgccaaacgaccttcgcacctgggccctgagaccaaagatggcgtcgtcctcccctgtcttccctaggcggaaggcaagaacttgggtcggcctgagctggggaccaagaaaatatcgggaagtgtccagtgttcctctttaaaagaattaaaccttcctgggccacgcagggactgaccgtgggaccctggactctcctccaccttccaccgtggagcaggctctggagccgagcagcctcctgcgtccccatctcatccccccactcctcctcacagcactaaaagatgatggcctgcttgtacccctgctcctgagcacctgtttgacctcaaagagctctcgcttttggggtgtccgtctccccaagtctgtctagggggcaggaagaccttcatcagggttcttgggggccgatgtgggctcgctgagtgcctgagtgatggatggtctcacagcacggcaccacggaggtccagccgagctcgaggagtccctgtggattaaaaatgcccttttcgaaggttctacctctaccagagggtggctccacagatcccttcaacccagtatggtggaaaaataggaattttggaatcttacctttctctactgctcacaacagaggaaactggggtcagggaggatttgatggagtcttttcattttttaaaagtcactcacggccaagcgcgatggctcacgcctgtaaccccagcactttgggaggccgaggcgggcagatcacctgaggtcaggagttctcgaccagcctggctaacacggtgaatccccatctctactaaaaatacaaaaattagccggatatggtggcaggtgcctataatcccagctactcgggaggctgaggcagggagaatcgcctcgacctctcgggttcaaacaattctcccgcctcagcctcctaaatagctgggattacagtcgcacgccaccacaggccggctaattttttatttatttatttattttgtatttttagtagagacaaggtttcaccatattggtcaggctggtcttgaactcccaacctcaggtgatacacccgtctcggcctcccaaagcgctgggattacaggcgtgagccaccgtgcctggcccttat

SEQ ID NO: 3710 - DNA, 4001 bp, Homo sapiens
gggtaggaaggcttctaacttggcagagcagattcattttgaaaaagaagactccctcggtttaaatcccaatttctaaatctctcttgggagatgaaggctttccctgtgtgcctttcacaatcaaactgttggttatagcctctcccctccatggctttgaaatcctctcctattcatatggtcacaacgagacagccctggagcgaggatggcaatcgcttcctgggctctgtgctggctggattccactgggcggaagggcttccagcattaggcagggctgccctgggattcacaaatgcccaccacttggcggaacaagagccccacgcaatctccctgtccccagatagcctcttgctacattaattgcatcattgatgcattaaaaaaaattaagtggcctttttattctaaggcaaccgtttgaaggagaaacatttaagactagcctttgtgactataactgataacactccttttattttacttaacagttgtggtctctctgaacaaggagaggcacgtctagtgtgtttgtactctctttttctagtgcatttgctagaaaagaactccacaagattgctttgccccaaaaaagtcttaaaagaacaaggctaactctaatggaatcaatcctctatttgattggtccccaaaacgttgatagcctttgtataaagggatagtttgactttttggttaaaaaaaccacaaaatacctcacatgatcacttcatttccactaagagttaatgaacagccactgaattaatttgccctgtccagctaacagctgcagccagagccctaagctcctaatgcaaagagacaaatgaatttgactagggtgcacgcacctgcacatcttcccaacctgtacagagtgcatccaggtgctccctgacaaatgacccggggcctactaagcccggggacatcttctttggattagtctgtagtgacctgggaaattcccacccctgtgtgaagatttcacatttgctttccgcaggcagacaggggacagtgccttgtatgtgtgatccctgacaggcaggacaaatgtaaaaatggctgtgagagccaggatgagcgagatcaagaatgataaggagttccagcccgcctgtaaggaggcatagggggaactgacctggaagatgagcactttgaaatggttgcgtcggaggagctgggcgtggttgttctccagccgcttcacctgtgcgcactgcctatccatgcgctctttgaccgcgcgcgtgtgggcgctgaccttgcgggacttctccagcagcttgctcaccgtgttgctggtggaggcctggtacttggagagcttggtgaggtcattctggatgcccttcacggagccctccaaactgatctgtcgctgctccatcttgtgctggttctcctgcacagcgtctagcatgttcaccagcttgtccaggagcgtgagcaccgtgactgcgttcacctgtgagttgtcccggatggcctcctctgtgttccctaggttcaggctggggcttggtgtggaggaaggcatcgggctggggctcgagggcttttcctgccgcatgtcagacccagggtgctggaacttttcggcctgtgcagcgtcctctcccatggctaggcaggtgggaacgttctttctctctgggagctgcttcttgctcgggtgagaagttgcggtggtgagggtgtaggatgaggcccgctggttggagctcagggcaccagtctccaggactggcagaggttcagacaggcaacaactggctacgctgatcaggggaactgcattccagctgctcttaaaggccctactccacccagtgggaggagaagtttacagaactgagaaccatttagggttcagacgtatgcacacacttcctaaccgcgttctgggcacaggacactttgttgcaggtttagcttttctttcctgttccccttccctttcaatgtcatatttcaatcatgacttcatctagaggcggagaaaaacatgctaacttggcccagctccacagcttccaattggctaaagctggtaaacttttctctggctgctatgctgcagatgcaacagggtgcctgtttctttttcctggatacaagttattgtaacggaaagtattgtttgcatttgccctagaactgactgatgggttgcagaacaccgggtgtcctactgggaggcatagagtttaaagggtactgcagccaagtttgtattattagtttctcatttgcaaaggaatgggactaactctgataatgataaggaaaacagctcagttcttattactcttgcagttgcagatacaaaataagttaaaagagattgaacttcagggatatttaaaaaaagtaatactgctgttatgactgttatgtaatatatggaaactttttgaatgaccacatttaaaaaaatgattgtttttttcaagaagtgagactgaggaaaaataaaatgtggtctttttaagaacctaccgtgatgatttgttttaactaactttgagttggtgaggagagactttctcaaatgcccatctctgcaaggcatttattgacacgtgcccagaagtgtctgttggcaggctgagttggagtttctcaagtggttctaatgtttgacattttaaaattcctgctcagtgaagtggcacacctgttctcaaatgtggccctcctcagctgaaccttgggatgtggggcttattttcctaaaatggctttacatgcttgagttgattttaaacgtatccagcctttgaaagtgctttcagcaggaagtttgtaataggccttctatgaacaattttgagacgaacaaatgccagctcataccaggtcagggattgataatggaacaatgccattcgtcaatagtaacacctacatgtaagccaatcaatcagcaggccattggttatcacgttggttgaatctctgccttctgctatatgcatgaagcactatccagaagacattggcaaagcatgacggagaccctgctctcaatgagtatagctgccagttaggaagatgaactaaagatatttacagaggccttcaatttcttcagataattggtgccaccaaaacccacttaaagcaaatgctttaaaaatagagaccaaaaaaggtgaaaagaaggtttggttgagatgttatcttttaaaaaagtaagaacattattaaaattaatttaccttatatttaataaaatttagttggtcaaaaatgtgttaaatattagaataaaggatgaatcaagtgttgattttaagaagcataattttctaacaaaattatatgatatcatgacacgacgtccttttacatttgacttttgtgggcaaatcatagagtgtcactatttcaaaaatatttgagggcttcatcaattttccaagagcctctcttaaattttgacattcaaatcatttctttttgaagcacttattgtgccatcatccatgtagatttgttcttcttcaaatgttaatgttaactattccagctgcagattctcatttgtcagaggagttgcccatgattcaagggcttctctaacattaccttcatcaacttcatgatttcctacatattttgcaaaatttgcgatttcacattataatcacttcaccctgattttgcattgatttgcgctgattttgcattgcattgttggatattgtataatcagctagatgaatagagacattaaagagatggggtgtgaggtggtaaaaggaaagaggctagttgttaaatagaaagaaaggtttgcgtgtgggcttatttatttttaaaatatatattttgaataacacaagtaatatcagtcatctattgctgtgtaacataccagcatgaaactcagtggcttaaaataacgttttatttactcatgattctgtggttggctagtcagggctcaactagaatggattatttctgctagg

SEQ ID NO: 3711 - DNA, 4001 bp, Homo sapiens
acaggactcctcatcaggccttccaggagccccggtgccctccttccccttctctttggaggtggacctaagtccccacacttggcctctgcctaaaagaccacaggtctccctgggaagcggggaggagttgagttggctgaaggctaaacaggctccgggaagccctccctggcctccagacccaccactacctctgcgcaacaggaaatcatttgagaaataaaaaggggacccccgcccaacatacacactcaggcctaagaggtttgagtttcttgaaagaacctcaggcagcaggccttgcagccactggggctccggaccctgccaacacctaattctgggaggaagactccttagggcgacgagggcatgcggtggggtaggcggtcgggaaagccccaaaggggaaacctggtgcggccggctgcgagcggaggtcccggtcccggcctgtccccttccccagcgcagacaatagccctgcagaaccccaaaccccgttccacatcagcagggcaggagtgtgagaagggccgggagcgaaggggcccagcttcccgaggcccctttgttgcccaagagggaggcaggaagtgggtgggatgggcgtggaaatgaccagggcctcatcctgttcctcgcactgcctcctccgaaacaccagccctctggcggaggggcggtggggggaccgagctcgggtcgagtcggggactccggcggcgcgcgcaggcgacggggggaggtaggggcggggacgcgagggggttcctcccgggccgctggcaacgcgccgcgcacggccggcacccgctgcgctcccgcgactctgacgaaccttcccaactcggggactgcgccccagggaccctggcctgggcgggccagcgggattggcttcccctgctccagccttcccgtgccaggggcggagacgcagaagctggggacctgctcacccccaaacaaagggtccccgccaagaccccgtcccgggtccccccgggttctcccctcccccagctccagggatttgaacgcaaacaaagcggcggcgcggggagcgtggcgagcccggcctgcggacgccccctgtcggcccagagccccggcgcgggagagcgggggctgcgccccagaccagccccccaaaacgcccgcggcctcatctcggctccttacccgaggatcgggccgcaccccgtggcgtgctccgaggatccgcccggcagcggtgctcccacccgcagctccccccagggcgaggaaacgggcagccgggaggaggggttggggggaggggtgcgggatccaggcggggcaccccacaccctcgcccaccccgagcggccagccgtggaccgcggccctccctgcagggcgagcgctccagccggggacggcgcggcccggctcggcccgggggcctggctttccgggacaacccgcctccccagcggaatgggcgggcgggcggggggccgcggcagggaaatccgatcccacaacatcggcctccctccaagcccgccccaaactttccatcgggggtgggagcgccgagggcagtccaggagcctggcgaggatcccggccgcggaccggaccgcgcgaggaaccctcgctggcgcgcccctccggccccggggctgcggggctgcaggtgctgtgcgccccactcccgagaccctgcgaagcagccgcgggggtcgcaggaaggatccccgcgtacagccgtctccgccgccgcggctccccgcgccccagcccctgtccctcccgcgtccggcagcccctgcccaagcaaagggacaaagcggcggctccggggccccgcggctccagcctcacgcaagcccggcctcgctcacctattgcgcgcagctccagtccccgggcgccgccctcgcgttcggctctgaccgccgtccacccctgcccccgcgtcgccgcctgcccgcgctcgcccgccagccctccgcggcctctctgccaccgcccctccgtccccgcccggctccgcgcccctaggctcgggctccccgcgccaccacggcgggcgccggctctttctccagcgcggccgcggctctccgcccccttccccttgacgtcaggctgggggggtcgagcggaggccgggggcgggccgcgaaggctcgctcaggagggggctgcgacccgcagcgacctgtggacccgcccgctctccgcccgggggctcggacctccgcctctctgggtgcccggacctcaacccctccgggtgtccagcagccccggggctcggagtcgcgggctgcgccacagcgcctggagggaggtggggcgggggagggactccgggtatggccacgggggaatcacactcacccgatctttctgaagtgtcccccgaagactccgggcgggctgggctggggagagggactcccgaccgtgcagttgcaggaacgaccgcgggcgagccacgtcgaggcgagtatccaggggaggcacgctgggggaaccgaggcgtcttttggggcggaccagaggggtctgccgtttggcccccaattctgcctctttctaggccccgaggaccactggtccctgccctcaagtctggaaagggcttcaccagccaggaagacccttcaatcaacagaaagggcctgctcctgcttctcacgctttgggcaaagcgcctatccccagaaaatgactcctcgtgccactggaaggctgattaacaagtggcatgagccctactgttcagatgaaaggggctgtggggagccacgctgcagaaccaccgccaccttcagaaccaccagcctccgcccacagccactcctagaagcaacttgtagctctggcctcatgggcggtgcagcgtctttcctgccagctggtcctctgagctgggcaggtggttagaagaggtggtcctcatggaggacaccccacgggcacctggagacagatgctacctcctggctaggggcaaaaggcagaggtgaaggggcttgacgtcctgaggtttggaggtaactttaagccagggtgcagtcctggaggggaggaacacttcaggctgcgtcagcagatctggattataaatcagtccgacagcagcttttgttctgggttaaaacttggcatctgaaaagtggagaccagaaaagtggtggagataattgagaaaagcagcccagtttggtttcagtaacaatcgggtctttgctggtacacataatggccccttctcccttgctggccaaagccacgtttcccagctcttttccactaggaaaaagaaaaaaagctgtggccttggagatgctggagataatgaccatggggtgggcagggaaggcctcctgcttcagctgacaaggtgggagaaggtgtgtcaccctcgtgtttagtttattccccgtatctattcaagcggagggtaaactgagatgcaagtgccctcacttgtgttctgtgctttagatttttgcagcttgtcttgatgtacattttcttacttcacccttatgaccaccctttaaaaagtaagtaatttgggaggctgagatgggaggatcacttgaccccaggagttcaagaccagccagggcaacatactgagaccctgtctctacaaaagaaattattattattattttttttttgagacagagtctcactctgtcacccaggcgggagtgcaatagcgcgatctcggctcactgcaacctccacctcctgggttcaagtgattctcctgcttcagcctcccaagtagctggaattacaggtgcctgccaccagacctggctaatttttgtatttttagtagagacggggtttcaccatgttgaccaggcatgcgccaccatgcccagctaatttttgtatttttagtagagatgggacttcgccgttttggtcaggctgggctcgaactcctgacctcaggtggtccacctgcttaggcctcccaaagtgctgggattagc

SEQ ID NO: 3712 - DNA, 4001 bp, Homo sapiens
agaccagcctggccaacatggtgaaatcccgtctctactaaaaatacaaaaaattagccaggcaaggtggcgcgcacctgtaatcccagctatttgggaggctgaggcaggagaattgcttgaacctgggaggcagaggttgcagtgagccaagatcacaccactgcacaccagcctgggtgacagagcaagactccgcttcaaaaaaaaaaaaaatctaaacctcatattagcattcaaaattcgtatctatttaaagactggaataagttggcatgaatttaccttcctagctcaacctctggttctggggaccctacccttgcaccaatacagctctgctctacctgcttcctctgctcagtaccctcaagactgcagactggacaccaacccattcattcctagatgtactgatgagtcccgcccactccttcctcccacacccatacttacctctgtgcccactctctcatgcttagtataagccctggatcacctaacttcccctcacatcctcaactctgcttcaccttgcttgccatctagacatctctggatgcctggacatcaacccagcctggcaatctcaacttactttgtggctattgcttgggtgcaaactgaaaccccaggctctggccacaacttcgccttctggaatcacagcatccctatatggcactagtctgaatttaaactctaaactactattaaccagtccagagttgttgccaacaggttgtactcttggcttcactggttctgtctgcccaaggtgctaataacactcaatgcccactgagaagacaacaaggtccacggccatgctcatacccacctcagcagagtctaaaatgtgaatcgccccaatgatcacttttaaccttgtgacgtctcctagcttcttccacatcttttcaaaggatcatatccccctcctctatttttccttctgaagacttgaaaaatcatttaagcagaactttacatcaacacattgaatggtttaccaatattcaatgtagggaatgggcagaggcagcgaggaacactgaggaagttaagagagttaacgtggatccaataatgggagaatgggagctgctgtcagagatgtcaggggagcgggaagggctgtcagaagggccaagaggctcggatgatgtatagaactgatagggaaatgaattggagaagatggaaatgctgacctggagatcggaatggaaagctggagtagaatgaaagactgatgggtctgaaagcagagtgggcgtcaagctggaatgatggacccaggtgtatgtgcggggaaacaggggactaagggagacggaacttcgaaatgaacgacctcgggcagcccccacccgagctctgggcctcagtgtccgagtctgcacggtgaggactggacgctcctgcggctccgggaatagggcccgctggtgcagcctgggcgtgtcgtgggagccgaggcgcgaggcccgggctggggatgaggggctgaggggcgcgggagggatgcagagaggatgcggtgaagtgcgaagatctcgccccggtcccggcggggcgtgggcggcgtgaaacgccatacaccaggctgagaggcccgggtccggccgagcggtctgaggagcaggtgggtgtgggtgtgggtgtgggcgcgaagggctgagggcgtgggcgtccgcgccttaccagagattggaagcgaggttctgggcaccgagcgggggacgcggccggataccgggccgctcagcaccgccagcagcagtagcgggaagggcgaggctgtaggctgcccgggacccgggcggggccgcgcagcagaggccggcatctttggctccgcctggccgcgggtgcggcgcaagctacggcctctgctcagggccccggggctactggcctcggccccactcgggtcctctcggctcggtccggctcagcctgaggctgagggatgaaacaccgcccggctccgccccctcagaaaggggccaatggtcgggcctccttcttcctccagccaatcgggattgagtgaaggcggggctgaggggaggagaggcctaacccaggcagaggcggagctagacccaggtgaaggtgggagttctgcctcggaagtgcgctggggctgccactcagggacctcgagtggcgagtttgctccggccactccaaaaactcaaacgcccatagctgtactaataaggaaaacttactaataagaggacgtggatacacgcaccaagtttctcaaaattaatactttgcaagcatttaaggacggctgcctatgtgctgggcaggcacagtgtaacgcgcgcgcgcacacacacacgcacacacacacacacacacacacacacgattatacagaaaatactaaaaatcacggcccttgccctagggagttcacactgtaatggggcttccaaatgtaagcaaataactgcaaatagataattgcaatacgaagcaatgcacgtttgctataataacgtgcaataagtgtgcagaagggccaggttttgccagaggaaatcaggaaggcctcacagaagaggtgacatttgaactgattcttctagggttggtaggcctttgagggcgaggaacaaagactgcctatgggcatatccacttggatatcctataaacaaggcaagcataggtcctgaggataactcactatctcctccatcccaaccctagctccttctttttttttttttttttttttttttgagacggagtttcgctctgtcgcccaggctggagcgcagtggcgcgatctcgactcactgcaagctccgcctcccgggttcacgccattctcctgcctcagcctcccaagtagctgggactacaggcgcgcgccaccatgcccggctaatttttgtatttttagtagagacggggtttcaccgtgtcagccaggatggtctcgatctcctgacctcgtgatccgcccgtctcggcctcccaaagtgctgggattacaggcgtgagccaccgcgcccggcccctagctccttcttcaagcacttagtctgcacttagtaggtagtctttgctttctcctctttcacccccattgtattagttatttaggctgcaaaacaaatgtaacaaattaacctcagaatttggtggcttaaaacaaacaaacaaaagacatggtccctgaattcgaattgcttagcctggagggaaaatcagacatttggaataaacttttattatctctcacaatctctctgcgtcagaaatttaggagtagtttagctaggtggtctggcttccagtctctcacaagattacagtccagatatcaaacggggcagcagtccactgaaggcttgcctggggctggaggatccacttccaagatggcggacttccatgcctgccaaattggtagtggctgttggcagtaagtgaaggttgttctccacatgaatttctccatggggctgcttgaatgtcttcacaaaatggggtgacttcctcagagcaagtgatccaaaagaacaaggcaaaagagcaaatgatatatttgtgacctagcctcagaagtaacacacaatctctcggccatattctacttgtcacacagggcagccctgatgcactgtggaaggggacttcaccaggtggtacagggatttcactgggaatacaaggatttcagcctcctttcttggagactagctaccatgcccatatgtaagaaatcactatgtccttataaatctgactaaaaagtaacttaaatccatccttttctttccattatcatcatagttcaggacatcatcatcattcacctggactgtgtgataatttcatttaaaaaacaaaaacctagcctccagtccctccccttccagactgccatcaggataatctttctaaagtgcaagtactagttctagtttgttctttcaacagttattaagggcctaatatgtgccaggcat

SEQ ID NO: 3713 - DNA, 4001 bp, Homo sapiens
caaaaggttactaactgggtgattccattatataagtcttggaatgacaaaattataagaataaaaacgaatcactgattgtctggggttaagaaggaggcagggcaggaaagaagtgtgtgtggttataaaaaggcattaagggatcctcctggtcctgggaacatcctttatcttcactgtatcaatcaatgacaatatgctggttgtgatatcgtactatgggtttgccagatcttattgtggaaaggtggataaagggtacagggttctcactatactgtattatttcttacaactgcatattaatctacaattaacgcaaaatacagtttaattcgaaaataagtaaagttagcctcaaagcaaattaagtacaattaaaaataaatctaacatcagctaaatgaagtgttctcttctgctcaagcttgtttggatacgtaatctatgaatcaaagaatttataaaacacattttcctcaccaggacccctcaattttccctcactcacacatgcacacaaacacagcaactgagacaagggggtccagacagaaaatttgagatttttaaaaaatacgcgatagaatgaaaagagacctgggctgaatcagggagaaaaatctttgtccaggttctataaaacaaaccaacggtgtcactttggacggatcctctaatctctcagcctgcaatctgaactgtttctacaatttaaacttctcatgtaggaggttgcttagtagagtggttctcaaactttttggtctccagcctccaaagagcttttgtttacacagatgaaaaccaccaatgtttactatcaaaaattaaaagggagaatttgtttttaagaatacacaggcatcgggcctccaaacggcggtgagatcactccataccatgtagcctttggaaaactcgatgtacacgaccttggtactattaacgaaaatagttgtaaccacacttggaaaaccgctggcttactaacaagcgagataaatctacaaaagtaactggaaaggttcaaaacagtgaacaaacgcgttcttttagagtacaaaagagtcaaggcgggaaaaaaacggtttaaaatcccaatggaggaaaacttggacgaccacaccatcggataaaacgggagagcttttgaaaagccaggggagccgggctttctcccggcggcagggaggctcggaagtgctcacggctgcaaaagatgaccgctattcaatcagtccgcactgcgccttcaactccgttatagccgtaagagacccacaaacaccgctgtggatgtaacttttggcaaagaccgggaagtcgttcaagaactctcccaccgtcccgacgctggcgccgcgccccgcgaaccggggtccggccgcgcccaggctccgcagaggctcctctcccgccccaggcgcccggccgccgcggaagccggggagcactgggcgggcggggccggagggggcgcgggtcacaatcccgggccggaccagggggccggtgggtcgagggcgggaagtcccgcgggggccggggagcgcggggctggggccccggcgtcggcgggactcaccaggtgccgcgccacctcggaggaggccatggtcgcgggcaggggcacggtgaagcggctgtatcagcccggccccgagcggctggtcccggcgacggcggcgggaaggccggagggcagaagcaacgggcggggcgcgaggctaggctgcctccgcgacggggaagggacaggggcggggccgagctggaggcctccgggggcggggttggggcggacgccctgtggtgcgcgctgagcgttttgcctgcgccaagcgagcccctcacaggagctaccctcgacgcctgaggactgagcgtcagcgttggggcgggctgaaggagagctgggactccaggaagacggcgcgaggaatgcaggcgggaactgcggagcagtgattgcggccctcgcgaggccggaagtgggcgggccttgaggcgaggccgccctaggtaggtgtggccgagacagcggggagcggaagtgggcgtggcctggtggcgtgggcgcggggcgggggtgcggggggcgtgtccgcccgggcgcggcccagtgaggcggtggccgagtcctctggcctcagacgcgtaggctggcagcccgctgagcccgccagactccgccgccgtcgggagccggccgctgggagcccgtcgctatgggaccgcgctgagccgcccgctggcgggggagcagcgcggtcgaggatggaggggccggcagagtggggccccgaggcggcgctgggccccgaggcggtgctgcgcttcctggcggagcgcgggggccgggccctgcacgccgagctggtgcagcacttcaggggcgccctaggcggcgaaccggagcagcgcgcccgcgcccgcgcgcacttcaaggagctggtgaacgccgtggccactgtgcgcgtcgatcccgccgacggcgccaagtacgtgcacctcaagaagaggttctgtgaagggccgtccgagccctccggggacccgccgcgaatccaggtgaccgccgagcccgaggcccccgacggccctgccgggcccgaggcgcgcgatcggctccccgacgcggcggccccggagtcgctccctggacagggccgcgagctgggcgagggagagccccccgcccccgcgcactggccgcccctgagcgccggggctcgcaggaagaactcgcggcgcgacgtgcagcccctaccgcggactccagccccggggcccagcgaggacctggagctcccgccacatggctgcgaggaggcggacaggggcagctcccttgtgggggctaccgcacagaggccggcccgccagaacctccgtgacctggtgatgggcagctccccgcagctgaagaggagcgtgtgtcccgggggcagcagcccgggcagctcctccgggggaggacgcggcagaggcgggggcgactcagacagcgcatcggtggcctcgtcgtccgcggaggaggagagcagcggcggaggctccgtgacgctggaccccctggagcacgcgtggatgctctctgcctccgatggcaagtgggacagcctggagggcttgctcacctgcgagcccggcctgctggtcaagcgggacttcattaccggcttcacttgcctgcactgggccgccaagcacggcaggcaggagcttctggccatgctagtcaacttcgccaacaaacaccagctgccggtgaacatcgacgccaggacgagcgggggttacaccgccctgcacttggcagccatgcacggccacgtggaggtggtgaagctgctggtgggggcctacgacgccgatgtggacatcagggactacagtgggaaaaaggcctcccagtacctgagtcggagcatcgccgaggagatcaagaacctggtgggagccctggacgagggtgacggggaaagcgccgcgggtagcggcggcgggcgctggaggctttcaaaggtgcttccctcgcatctcatcacctacaaactctcacacgccctagaagatggaggggaccatcaccaccatcaccactcggctgaggggtgggtcggaggcaaagccaaggatccagggcgcaaagcctcgggcagctctagtggacgtataaaacccagactcaacaaaatccgattcagaacccagatcgtccacaccacaccctctttcagggacccagagcagccgctggagggcaggggggaggagggagtgggggaggaacgacctgttaaaggccactcgcccttcacattgagaccaaagtccaatgtatttgggtaaaaattgcttcttttagaaaatgcaaaggtttatttgtcttaataaattgaatactaggtgttgtaaggaagtgagaccagaaggacaagctaaattatgcattcttacttgagggatcggaatggatggggcggagttct

SEQ ID NO: 3714 - DNA, 4001 bp, Homo sapiens
tcactgaaaacaatgaggctcaaatcagaagtatcaagaatcagctttcatgacccctacaccatgatgtttttctttatgacggcagaactattttgaaacattaaatatatcggcaggcactgtgattcaaaaagtatttgagaacctactaggtgctagacaccaaccgaggcaatgagtatgggtgacaacatgtgccctgccctcacagcaccaatagtccactggacaaataccatctggaacatcaggtaaacacctaagcctgtctggaggaaatctaatttgggcggaatcccacaagcacagactaggtaaggagaaggcagttaaggtgggaagtagccagatttaagagtttgggcaatggccaaaggtgcagaagtttgaactacaagaagttcagtgtagttggttcgtgtgtttccgtggagagaggacaaggtctggtggcactgacaagaattagaccgaaaaggtaaaaaagcaagccaggtttgtctgggccagtaggccaggtcacagttgggactccactgagaccacggaagccacaggtttgctcctcatccccgggccaactcggcggcctccaaccctataccctaccccctgctgcctgtccgtgcctcgctggtgcagaccttcgtcgcctctcctcgccgaaggtacccgcagacagggcctagtcgctctcccctcgcttatccacggcatccagccgatgggcttggaggtttgggggctggccagtcctccacgcctcagggaggaaatggcaccgttagaaagacaagatggccacacaagctctaagtgtttgtcgggcctaaacctgtatcctccctccaagcaccaaacctcccgacctcgaccgcactcgacgccccgaggcccagcaccgacgacagtgcagaggaattcccgcagggtcaacaaggggtcaccggaatccccactcccgcgcccgggcctgcccgtgtcggagccactgtcgccggcactaggaccgcccgggacgggggagcccacgataagtgccgaagagcctgggctcggccgcccctcccccacaccgccccgccggcaccccagagccagccgaccaccgcccgagagtatgggacgagcggcgcgtcccccgcagctcctcgggagggccggcccacaacttgtgcggggtacaccggcgagacactcacccgccaaacagcccgagaacaggcgccgaccgaccgcgccgcggacccgcccagcgctcgcggtccgctcacagcccgccccagcccgccccgccccgcccagcgcgcaggcggattgcgtcaccgcgtcaccccgcccctttgccaactgcttcctggctcagtgcgacctggccttcttcccctcccccatgcggccggcttccgagtgcgcaagcccagagtcgtccgcgttgtccgcctctgcgcaagcgccgtgctcctcccacggcagttggccatatagaggctgggggtggggggggaggtcaagcgtagcctcttctcctttaccaagatggcggcttgtccctgtttcgccacagttcctaccttatgagctcggttttcttatgcttataagagtggaacaggtaatgagaatcttcgccttgcggtgggtaactggagtggggggaaggccgtttgttagaaggagacaagtgcccactgaggaggagagaggcggtcgcgggagggcaggtggtggcgggagtgcggagcgatcacggggagggggagccttcgcctctcctcctgtcctccaagaagatggcggcagcaccgagctggggcgccgagtacgactgggcgggggacggcgagcggccgcgcgaaactcgtctagcccaccaccgccgccgtctcgatgatcggggggcctctctgggattggctgcgcgcacgtcacgtggggccgacgggccctgcgcagaccatcgagtcgggcgtccctccccggggacgtggccttcctgtgcccgggctggggcccgccgccccgcgggggagggcggagctggcgcggcccctagctttctccttctggtgtggggcccgaggtgagacctggggagtgctccgcgagcccacgagcagcgacgtggctcggggacgggagggtgccgtgcctggctgcggcctgagcgggatgggcgcgggcggctccggcccgcgggttgtgccccggcccggggtgtcctttcctccctcccgcgtggcctggaggcactgcaactgttcgagactcacgtcaaggcttggcgcaaatacccctcgttcaggaagccttcctaggtttcccccgcttagaggaaacacttcctgagttcctaatggctgacccgcatggtgttgggaacctgagcctttctgacaccgtggcatgttgctagggtatttttgtgcgtagctcctttgaaaagtggttaggtgctcaaggctagctgctacatatcctctccattcgacttaaaaaatgagagggtcagacttgacatggtgtttggacgccatgtaaaatcgaaggaagtcgacttgggctttgcttattaaacagtgcctattatggtgaaattaaacggctgaaggaatgtggatgagtcgtaatcttaaggaacatgacgatttgcccctcagttttgcgttttatgtcctcagattcatagctacctataccctaagccctcaatcaatgacttcacatttatttggtgtctgcttaaggatagtcactttcttagcagctaacttccttaaaaccctattaagataggttaagtcacaattagggttttgtctaaggctcctggtagcggcacattgcataataagcttaatgttcatttagggaagcaaatctgggatgctgaaacactggatgaaacgtagtgcttaggtttatattttgattttttgacatgtaaaagtatccctaggctaaattcattaagtacacatgatattaggatgcttggcaacagtatttaaaaatagttgaaaaggtgtttgggtaagaattatttccatcatttggattaccgaatctctgagtctgaaacatcaacctatcaagttttagacttggggaaaatggagctggagcctactgcctcaagtctcagggacagcgtttgaaaccccattaaataattcatcatgaggattaaactttcctgttactgctattagttttgcttggtgccaagcactgttgaagggacttagctcatcttatcaggagtcaaattaacgtcattcgggtaaaagtgcattgagtgtaaggagagcacctcaaagatatagttgacctatatcacgtccctcagcgccactaggcttacttgaatccctgttacagtgtcctctccagtgggcaaagctaacttctcagtggcctggtgggagaatttcttcttgagtaaatacgtatttttccaggttttgttgttttggccttccagttgtctgacttcagcctcatgacctcacttcttcatttcaattcaaaaaaatatttgctggaaattgctgtgtagggttaagggttctgcagatacaaaggttgagaggatatagtcttttcgaccaggtgcagtggctcacgcttgtaatcccagcactttgggaggtcgaggcgggtggacacttgaggtcaggagttcgagaccagcctgaccaacatggtgaaaccctgtctctactaaaaatacaaaaattagcctggcatggtggcgcgcgcctgtaatcccagctgctcaagaggctgaggcatgagaatcgcttgaacccaggaggcggaggttgcagtgagccgagattgtagcactgcactctagcctgggcgacagagtgagactgtgtctcaaaaagccaacaaaaaaagaggatatagacttttcttttcctcaggcagcttgtggtctagtgtgagagacttatttgtagaagagtaattacattatggtgtgataagtg

SEQ ID NO: 3715 - DNA, 4001 bp, Homo sapiens
cttgacccacagcttatttcttccacagaataaccccaatacacataaaaaaccaattttcgcaaaacaaaagatagaagatgaacaacatctggcgatgtagaacccggaaggtccatgatcttattcaaagcatctggattctttggattcggggaaggtccacgttcagtatacccacataacactcctaacagggactggggcagggataagtggcatgtatgactactaacagaacagacaatacaaatggccttacctcacctctgctgccaaatgagttttggtgtccccattcctccagacaaaaaaaaaaaaaaaaatacccacaacttcttcttttacagcagtttctgtatgctggtattggggataaaaaggggccctgaattacatttatgaatgatagagggaaaccctggcccctttccctaggtcaccttgctagtttaagagccagtcagaatgtaaatctgatctaattaaaacgctcttgttctttattcctggctgtggcactggtgagagaaatcaaggtggaagttgaggaaaaaaaatcaggacaacctttatagctaatgagatcaatgccaagattatacataacagtacacatcatgagttaggatgctgggtggtgcaaagaacccattaatgggagctatcaaaaatcactgaaaacaatgaggctcaaatcagaagtatcaagaatcagctttcatgacccctacaccatgatgtttttctttatgacggcagaactattttgaaacattaaatatatcggcaggcactgtgattcaaaaagtatttgagaacctactaggtgctagacaccaaccgaggcaatgagtatgggtgacaacatgtgccctgccctcacagcaccaatagtccactggacaaataccatctggaacatcaggtaaacacctaagcctgtctggaggaaatctaatttgggcggaatcccacaagcacagactaggtaaggagaaggcagttaaggtgggaagtagccagatttaagagtttgggcaatggccaaaggtgcagaagtttgaactacaagaagttcagtgtagttggttcgtgtgtttccgtggagagaggacaaggtctggtggcactgacaagaattagaccgaaaaggtaaaaaagcaagccaggtttgtctgggccagtaggccaggtcacagttgggactccactgagaccacggaagccacaggtttgctcctcatccccgggccaactcggcggcctccaaccctataccctaccccctgctgcctgtccgtgcctcgctggtgcagaccttcgtcgcctctcctcgccgaaggtacccgcagacagggcctagtcgctctcccctcgcttatccacggcatccagccgatgggcttggaggtttgggggctggccagtcctccacgcctcagggaggaaatggcaccgttagaaagacaagatggccacacaagctctaagtgtttgtcgggcctaaacctgtatcctccctccaagcaccaaacctcccgacctcgaccgcactcgacgccccgaggcccagcaccgacgacagtgcagaggaattcccgcagggtcaacaaggggtcaccggaatccccactcccgcgcccgggcctgcccgtgtcggagccactgtcgccggcactaggaccgcccgggacgggggagcccacgataagtgccgaagagcctgggctcggccgcccctcccccacaccgccccgccggcaccccagagccagccgaccaccgcccgagagtatgggacgagcggcgcgtcccccgcagctcctcgggagggccggcccacaacttgtgcggggtacaccggcgagacactcacccgccaaacagcccgagaacaggcgccgaccgaccgcgccgcggacccgcccagcgctcgcggtccgctcacagcccgccccagcccgccccgccccgcccagcgcgcaggcggattgcgtcaccgcgtcaccccgcccctttgccaactgcttcctggctcagtgcgacctggccttcttcccctcccccatgcggccggcttccgagtgcgcaagcccagagtcgtccgcgttgtccgcctctgcgcaagcgccgtgctcctcccacggcagttggccatatagaggctgggggtggggggggaggtcaagcgtagcctcttctcctttaccaagatggcggcttgtccctgtttcgccacagttcctaccttatgagctcggttttcttatgcttataagagtggaacaggtaatgagaatcttcgccttgcggtgggtaactggagtggggggaaggccgtttgttagaaggagacaagtgcccactgaggaggagagaggcggtcgcgggagggcaggtggtggcgggagtgcggagcgatcacggggagggggagccttcgcctctcctcctgtcctccaagaagatggcggcagcaccgagctggggcgccgagtacgactgggcgggggacggcgagcggccgcgcgaaactcgtctagcccaccaccgccgccgtctcgatgatcggggggcctctctgggattggctgcgcgcacgtcacgtggggccgacgggccctgcgcagaccatcgagtcgggcgtccctccccggggacgtggccttcctgtgcccgggctggggcccgccgccccgcgggggagggcggagctggcgcggcccctagctttctccttctggtgtggggcccgaggtgagacctggggagtgctccgcgagcccacgagcagcgacgtggctcggggacgggagggtgccgtgcctggctgcggcctgagcgggatgggcgcgggcggctccggcccgcgggttgtgccccggcccggggtgtcctttcctccctcccgcgtggcctggaggcactgcaactgttcgagactcacgtcaaggcttggcgcaaatacccctcgttcaggaagccttcctaggtttcccccgcttagaggaaacacttcctgagttcctaatggctgacccgcatggtgttgggaacctgagcctttctgacaccgtggcatgttgctagggtatttttgtgcgtagctcctttgaaaagtggttaggtgctcaaggctagctgctacatatcctctccattcgacttaaaaaatgagagggtcagacttgacatggtgtttggacgccatgtaaaatcgaaggaagtcgacttgggctttgcttattaaacagtgcctattatggtgaaattaaacggctgaaggaatgtggatgagtcgtaatcttaaggaacatgacgatttgcccctcagttttgcgttttatgtcctcagattcatagctacctataccctaagccctcaatcaatgacttcacatttatttggtgtctgcttaaggatagtcactttcttagcagctaacttccttaaaaccctattaagataggttaagtcacaattagggttttgtctaaggctcctggtagcggcacattgcataataagcttaatgttcatttagggaagcaaatctgggatgctgaaacactggatgaaacgtagtgcttaggtttatattttgattttttgacatgtaaaagtatccctaggctaaattcattaagtacacatgatattaggatgcttggcaacagtatttaaaaatagttgaaaaggtgtttgggtaagaattatttccatcatttggattaccgaatctctgagtctgaaacatcaacctatcaagttttagacttggggaaaatggagctggagcctactgcctcaagtctcagggacagcgtttgaaaccccattaaataattcatcatgaggattaaactttcctgttactgctattagttttgcttggtgccaagcactgttgaagggacttagctcatcttatcaggagtcaaattaacgtcattcgggtaaaagtgcattgagtgtaaggagagcacctcaaagatat

SEQ ID NO: 3716 - DNA, 4001 bp, Homo sapiens
tggagatcgcttgcattgaagattacagtgggagtccggtttgcaacccggaaggaaggagcttgcgggttggaggcactaagagttttcagaagttgagcatctcaagagagggcaagacttggaggtacttagaggacttggtagctggagtacatggaagacactggatttgagacagtcaaggaagtgcgcatctagagcgtcccccacatggactttaggtctagaggaggagaaatagcccaagagccaaagtccccatgcgatgggaaaagaactggctggaagaggacagcaaggctgagatgcacccagggacgtggccaggtcaccacctcatttccaactctaccacctcaaacaatctctgactggtatttaatcacccttgtgtggaagtgaaaattagctttttttggagacagtacttttaaaattaaactaatatgaagttcatgggacacggaaattttctgcatagattcatttttgtttttagaataaaatacgatgacattttcatgaccttcagtaattgccctgcatggtacgatattttcaaacattattttaacaaagaatcaaaatttgggggttaaaagaaaccttagattactcaggttagtaccttcatttgcatagccaaaaatttttctattgaaatactgcaaatagcaaataagtactgatttagaccttcagatagtgttgaaactgtcttcaattttcgaagtgtggtttaggatatacaaattagcaatgttgacaattcttccagttatctgtgctcaagttttgatataaaatcttcaaagtacacaattatcacatatattgttccacaacaattcagacaaataaacggcttcttggcttgaaagaggaagtcacaccttcgaacacctttttatgctgatgctaaatataagaacgtcccctgcaaagtagccaaagcaagacagcagcattcgagatttctccagagacacacacacaaagaatgtgtttcgttcattaaaacactaaaaccttcaacagcatcttccataatacctgaaggtggagtgctgtcttatgtaatagaagccttccttccccgctcagtttgtggacacattaaatgcctaattccttccagaatttctgagtaccgtactttcattttacctgcagtcactcatccgcctcgcaactcccgtttctacagatgatgaaaatagcaaagacctgctcgctcgggttaaatcggctgccagaggccaagttaaaggctttccccacaccgcgcgtcacctccctctgcccaggcagaggtaacaagtaagagtgcgccagtctctccccatccggcggcgcgcagcctaagtccggggtaggggttgccggcgagcagctggaaacctcaggttcagggtcagggccggctcggatggccgggcaggagccacgccggccccggtgctcccagctgcgggtatcactggacgccaccccggggcggccccgccttgccctgcccgggtcccgctcggggctcccggcgggcgggaccgggatgcccggcgagcacccagccccggccaaggcggcccgcgggaggctgagaaagttctctgctccccgacgtcggcgccccagggtcccgctggccccgcagcttcccggccgggcgcaaggtcagggagcagggccggtggcgcgcggagccccggggagcgtcccccgccgagggcagcgccggccgcgcccgggactcaccgcgcagcctgtactcaccgcgctcgctggatccccagggggcggccgcggagggcggtgcggccgcaaccggagcgggagcctggtctcggcggcgcggggagtcggaggacgcagccaagcggcggcggcgaggagggtcacagccggaaagaggcagcggtggcgcctgcagacgccgcgcagcccgggcagccccacagcgcaagctggctgccgcggcggcgggggctttatcggcggcgccgcgcgggcccccgccccttcctgccgcccccgcccccggcccgccttgccccgccttcccgccgcctcctttgtgtggccgcgggccgcagcgtccccgcgcccggcctccaggacgccccctctccgcctgcgacttctcggatgccgccccgccaggggtccgtgtcgtggggctgcgcccggaacgcgccggggagacgcgcagaccccgaggtgcggcgccagcccgggcccagctgcacgtgggtctcccggatgggggtgtgtgaggtggcggggggaataccagggctcgtaccgcgtccctgagacgcagggcatgtcgtcttggctgccccctggaagagacagagggcgccctgagacagcgctcagtcctccgggtgatggggaaacggtgccaggacgcggccgggaaggggcagataacccctcgaggcgttttgcagggtgtcctagagctgacttctccctgcctaggggacagaggaacggcggcaagtcgccttaggcaaatacagacgaggggaaccagaaaactggattcccggctatggtgatagcatgaggtacccgcagcgtcctgggaacccagcccttctcagccggtaaccactgctgctgggacccggtgcgcgatagacaggcacataccccaggggcctgcaacaaatgaccgtcccgctccgggctctgttacctggacctctcttagttggttcctcctttgcctctagttaggtttctggggacccaaggacccaactttaatgacagtaatttatgtagccgttagtgtagaatcgtcgctagcaggcagacggccccaacagcgaggaagaaatgtaaatctccctatacacagccctggattaagggtacagctactgatgagagccacttggaagatcagcctgcagtcaccccttggcatgcaggtggccgtgccagagtgtgcacgtgtgtgttggggaaggggttgctctgaaaagtgtaaaatctggaccagcctaagggtgttctcagtctctcatagagggaaacaggctatgggaggcttggtcctaaaataaggagcaaacagtctacaaaaatgagcatctgtttaattattttacagtcataccaaatatttatattcagttacagggtaactttcttattctctgtgcctgaaatgctttttgtcccaggatcttctatgttgtctgcatccttacacttgaggtcacaactcaaatgtcctctcccctaggaagcctcccctgaccacttgagataaagtcactttatcccctctaacctatgacttccttcataaccctcatcatgaattgattttttttttaccttgtttcttgctagttttcttctactctctctcattggaatatactcccagagaccagggaagagaaactaatttcaatattgtttccaactcactctatccctagtgcctagagccataccacacatatagcagttactcaataaattttgttgacgagtggatgaactactagccaagtgacttttagacatgctaagaactgtttcagtgacagtattgtgcttggtccagtcagggcggtgtgggctggagctgggaacaattcaaaggaggggggaaagcccacaggtgtgaatgagctcgttcagtgtgtttgaaaagctgggagtatcctcttccagatggaagggagtcattcaagaaactactggagaaataactgggaaatgtgggtgaagccagattattatgaaaatgtgccagaatccctgcatccatttctgtctcaatcacatttctaaattaaaatttgtaatagaggtaattgtaggctggcatgcagttgttaagaaatgattcagagaggtctcttttacactttgccaagtcttcctcatggtaacattttgcaaaaccattgtataatatcacaatcaggatattaacattgatacgttgattcctatctcacacactt

SEQ ID NO: 3717 - DNA, 4001 bp, Homo sapiens
ttaaaaaaaaaaaaaaaagattgcttgttcaggaagtcacaggccttgaactttgaggagactctggccagcttgcaaagagctgaacaggaagggcagaccagtttaagaagcctggagagacgtggttgtcactacaggtgagctgaggatgcagggacaagggaggttaaggcattcttaaaatactactaaaaaagaaaaaagctcacagggagagactgaagataaaagtaagaaaagggagtaacactcacaaggagagagaggcactgggagttgggattcaggacacagctggagacattagtcactgccccaaggaggccatctctctatatttctctaagttctcagtctaacttgatttttctttataattctaccttattcatttatcatacattttacaacatattatgtttgcttttagttggttttctcccacaagaatgacagtttcaagcgagcaaggatctgctctatttaccacctatgagtatccaacaaagtacccagacacagtagatgcttaagaagatttattggatgactgggtaaacacagaaaagtctgtacaggggagatgggggaggacgtgaggagatacttatgacctctattctcctggtagaatgggctacaaagtcacctgccaaacccgcaagaggaaaagcattggagatcgcttgcattgaagattacagtgggagtccggtttgcaacccggaaggaaggagcttgcgggttggaggcactaagagttttcagaagttgagcatctcaagagagggcaagacttggaggtacttagaggacttggtagctggagtacatggaagacactggatttgagacagtcaaggaagtgcgcatctagagcgtcccccacatggactttaggtctagaggaggagaaatagcccaagagccaaagtccccatgcgatgggaaaagaactggctggaagaggacagcaaggctgagatgcacccagggacgtggccaggtcaccacctcatttccaactctaccacctcaaacaatctctgactggtatttaatcacccttgtgtggaagtgaaaattagctttttttggagacagtacttttaaaattaaactaatatgaagttcatgggacacggaaattttctgcatagattcatttttgtttttagaataaaatacgatgacattttcatgaccttcagtaattgccctgcatggtacgatattttcaaacattattttaacaaagaatcaaaatttgggggttaaaagaaaccttagattactcaggttagtaccttcatttgcatagccaaaaatttttctattgaaatactgcaaatagcaaataagtactgatttagaccttcagatagtgttgaaactgtcttcaattttcgaagtgtggtttaggatatacaaattagcaatgttgacaattcttccagttatctgtgctcaagttttgatataaaatcttcaaagtacacaattatcacatatattgttccacaacaattcagacaaataaacggcttcttggcttgaaagaggaagtcacaccttcgaacacctttttatgctgatgctaaatataagaacgtcccctgcaaagtagccaaagcaagacagcagcattcgagatttctccagagacacacacacaaagaatgtgtttcgttcattaaaacactaaaaccttcaacagcatcttccataatacctgaaggtggagtgctgtcttatgtaatagaagccttccttccccgctcagtttgtggacacattaaatgcctaattccttccagaatttctgagtaccgtactttcattttacctgcagtcactcatccgcctcgcaactcccgtttctacagatgatgaaaatagcaaagacctgctcgctcgggttaaatcggctgccagaggccaagttaaaggctttccccacaccgcgcgtcacctccctctgcccaggcagaggtaacaagtaagagtgcgccagtctctccccatccggcggcgcgcagcctaagtccggggtaggggttgccggcgagcagctggaaacctcaggttcagggtcagggccggctcggatggccgggcaggagccacgccggccccggtgctcccagctgcgggtatcactggacgccaccccggggcggccccgccttgccctgcccgggtcccgctcggggctcccggcgggcgggaccgggatgcccggcgagcacccagccccggccaaggcggcccgcgggaggctgagaaagttctctgctccccgacgtcggcgccccagggtcccgctggccccgcagcttcccggccgggcgcaaggtcagggagcagggccggtggcgcgcggagccccggggagcgtcccccgccgagggcagcgccggccgcgcccgggactcaccgcgcagcctgtactcaccgcgctcgctggatccccagggggcggccgcggagggcggtgcggccgcaaccggagcgggagcctggtctcggcggcgcggggagtcggaggacgcagccaagcggcggcggcgaggagggtcacagccggaaagaggcagcggtggcgcctgcagacgccgcgcagcccgggcagccccacagcgcaagctggctgccgcggcggcgggggctttatcggcggcgccgcgcgggcccccgccccttcctgccgcccccgcccccggcccgccttgccccgccttcccgccgcctcctttgtgtggccgcgggccgcagcgtccccgcgcccggcctccaggacgccccctctccgcctgcgacttctcggatgccgccccgccaggggtccgtgtcgtggggctgcgcccggaacgcgccggggagacgcgcagaccccgaggtgcggcgccagcccgggcccagctgcacgtgggtctcccggatgggggtgtgtgaggtggcggggggaataccagggctcgtaccgcgtccctgagacgcagggcatgtcgtcttggctgccccctggaagagacagagggcgccctgagacagcgctcagtcctccgggtgatggggaaacggtgccaggacgcggccgggaaggggcagataacccctcgaggcgttttgcagggtgtcctagagctgacttctccctgcctaggggacagaggaacggcggcaagtcgccttaggcaaatacagacgaggggaaccagaaaactggattcccggctatggtgatagcatgaggtacccgcagcgtcctgggaacccagcccttctcagccggtaaccactgctgctgggacccggtgcgcgatagacaggcacataccccaggggcctgcaacaaatgaccgtcccgctccgggctctgttacctggacctctcttagttggttcctcctttgcctctagttaggtttctggggacccaaggacccaactttaatgacagtaatttatgtagccgttagtgtagaatcgtcgctagcaggcagacggccccaacagcgaggaagaaatgtaaatctccctatacacagccctggattaagggtacagctactgatgagagccacttggaagatcagcctgcagtcaccccttggcatgcaggtggccgtgccagagtgtgcacgtgtgtgttggggaaggggttgctctgaaaagtgtaaaatctggaccagcctaagggtgttctcagtctctcatagagggaaacaggctatgggaggcttggtcctaaaataaggagcaaacagtctacaaaaatgagcatctgtttaattattttacagtcataccaaatatttatattcagttacagggtaactttcttattctctgtgcctgaaatgctttttgtcccaggatcttctatgttgtctgcatccttacacttgaggtcacaactcaaatgtcctctcccctaggaagcctcccctgaccacttgagataaagtcactttatcccctctaacctatgactt

SEQ ID NO: 3718 - DNA, 4001 bp, Homo sapiens
gatgtcaaatccaaaataagatttctcatctgagaacaacatggttatgtatattttaattagggggtgaaacaagtaaaaaaaaaaaactgttaaaggattccaaacttaatgaacgacataaacaattttatattaacatataatacccctctaaagaagtcaatgaagctaaaggaaaacttttaaacatttgtctcttttaaataaaaagaaaaaaaaccctgaaaaaataaacagaaaagcagagatccacaaacaaactattcttgttcactccagaagttgggatcttaggatggatattttcatcttcacagcacaccctagcacactcatatcagaatagactgctataaaaagggggagggatgggagctgccagggtgagacatgccttctgctgagctgagcaactacccccaacccccatcggccaagcagcccagacgctctcaggtggacggtccttcaggggcggagcgaagcccaaagcccacttcactcttgtcagggactagtctctaactacaaaaagctactgtgaacacttagggcctcaggaatcctggtgactacaacttctagcctctttacacacattatggatatttcttaacatacattgggaaatcaaaaagcgtatttcatgaacaaagcttgaaaacatgtactctctaccctaagcccaactgaggctgcccaattcgattcaaataaaaactgctgtggtctgaggctggctgtctcactctgctgactgtcctccccattcagtgtctgtgaaaacttactttctacctcctgaaacgactcggcttgcaagcaaaaagttattccaatgcaaactatacctgatattttcgtgaaacttagaaactaaacctaaaactcgactcccatcgcaatctattactaccacttctgctaaaggtaacttatagccaagaaaacaaaacaaaatacgattttctgtccatgtagtggccctgtgacgacaccccctctcttactggtacaaagtctagggcttgggacagctggctcccctcagccccctccctttcagtcataggcggttaccacgaagatgacttgtagatttctaacttaaaaaccaacgagacgttaagtttaatatacatgtagatcccaaatcaattcatttgggcatggacgaaagaaaagagggtggagaggaaggttttcaacattattaaaaaaaacaccgggaaattcacaaaaacgcactacagtaagttggatgcaaacccggccacggaactcaaaagtgaagcagccttcgcgccagcaatccgagccttaaaaaaagtctcgcacgttcacaacaacacaaccgccacaacgcgcacacacatcccagctgtagaggcgacagctccaggcgcccccgcccgccgctcggctctccgagctcccgaccccctcctgaccccggccctgccccccagcggctcagcccgcaggcgccgggggtccgagagcgcggggcccggaccggggccgcgggagggagcgctcctcccgtacctgctccgtccccggctccctcccgcggcggcgcccggcccctcctccgccctccgggctctcccagccctggccgagtcccaacaccggccccccatccacccggagccccccgcgcccgcggatcccctccagcccgacgccgggagaacttaccacatgcagctccacctgggaactaacgcatcaggaggggtttccgcccactcctcagctactcccgctccatgcggagtgccccgctccaggggcccgagggtggcgccggggagcgggcagcaggcgaggctgaagctaagactccgccgttctctgcctgcgcgccccgagcattatacaatggtggaggcggcggcggcaggcagcggaggaggaagcaggaggcgggcggagggggcgccctgaccgagcgagcggtacgtcgtgctccagcactcgccgtgcaggagtgacgtgcggcccgcgagcctcccgcgagctccgggccccggcgccgcaggccccgcccctggccgcccgaccccgcccccgccggccccgccccggcccgcctctccccggcggtcccgggaggcgcgataaaggccggggccggccgcggccggccgcggccgcaggaggagcaggaaggggcggcggggcgcagtgggcgcctggtggcagcgccgcccccagctccctgccgggccggcgcgcccctgattttctcgtaaggacgggctgaaagaggaggggagacagaaggagacactccggcccgaggaccaccactgccactagtaacgccccctacacactctagaagtgctcaggcgaatgacgaagcggctggtgacaaaggcggcggcgagtgcagcgcgtgcacagcccgcggagccgcgcgaccgcaaatatgacaagcatttgagctatttggcaacgtggggccggtcagcggggcgggcagggtccccgcggggggcgaggggcagagagctggcccgggcgcccgtctcgctgcctgcaggggttcctgggcgggggtccgctgcgggacactcctccgaggcccgcactggtccgaacggcaggatgggggctccagccgtgagccggggacagaaaaagtcccttgcccgcgtggcctcagcccgacacgagaagtgggtcaccaagtccacggcactttgggagccggaccgaacgagttgcatccttcggggccggccggggctcggtgcagacccggcaggagggaagccaagctaggagacgcagccaggtcggaggcgcagtcctctgcccacaagtttcacattgatagcctttccctcccgtggagtaagcttatgcttggaactacttaaatttaccagggaaatttatactagttggaagagaatgtgtgtatgcccaaatggtgagaatttaagagcactagggaaagaggccagatagatggttccactggaaaattaatgattattttaaaaattacacgtgcattcagcgtcaagatgtaaaaggcaatgcaggcaggcaccttaaaattttggctgccaccccaatcaatatcatttcagatcactttggagtttaatggtccactatactagttgtatttaagaataataaagctttaagacctaacataaaggcgattgtaagtcgttaacatcaagagaaatttagacttgtttaaactgttctgtaatgatttgttatcaatcaaattgatgatctcatcgaaattaaacttgtgctgaaatgttgatagaggagacaacgcttcttgttttatctttaaggaggatggaaaaggtttttactggaccctcagtataattaaagtcttatacagtataacctaagccaaaagctaattatttgtggatatctttgcaaagtctcattataatggcattcaaaatgacatattatggaagctgtgctcaccggccctctgcaggtcttgctcagtttgcgcctgagtggcataacattcaaacattttgctgtgaagcgaagatatttttcatttccagagttctgcagtttagagagggcattaactactaacagtttcctaaccacccactcacttatactttcagtgctcactttaaggaaaagccattgaaatagaagctgcaataatctcttcctgtgatatctttgtagaggaggccagaggcattagctctgttgaatttaaggtgaatttaaactgctatttgtgaatttaaactgctattcttgaattaaagtaagcaggaagttacacttgcagaacttttgtgacacttggatattttctagcaaatagattacaccaaatgcagtgtttctgtataaaataacaggatttaagtcaaagtgacaattttgtgtcactaggatagacaggattctgctgaagtccataaggtctgtattctgtacctgctcaaacaaaggtttgcgctcttaac

SEQ ID NO: 3719 - DNA, 4001 bp, Homo sapiens
aaaatcggattagtttggtacaatttcattttttcaaaagaaatgtcattaataccaagttcatttttagagagtggaaaagcttcaacaagtccttataaaaatacattttttaaaaaggtcaaaatgcaatactttgttttcttaattattggacatttcattttcagatatatcattagtagattacctgtttaaaatgtcattaaatgcctagcaatgaattaaaacccaagtagatgcaactttgtgacctctacttacaactttctacattctgcattctgttgtcagattcctagtccatcactagctcctaatctcttacatcaattattccattcaattcttattcacaggggctaaaatgtttggtaaatgcaatcaattcatttttctaatgctggggaaaaactagagtgggcccaatttttaaggttaaatttagtccagaatgtttgaataaatattcaacaaaacgatttcctggaatttggaacataaaaacagcctatagagttgtgaaatgctttctaggtccttggggaattttttcacgtatttagtcatggggcaaagtattacgtataaaagcttcctggtcctagaacaaagacgtattttactgctcaaagctaaaggaattagtattgttaaactaaaatagcataccaatgaaaccagctaggtattggcataacttaaccaaggtatgtaaccaaagataaattgtaccttattatgcattcttccttgggaggaaaaattctcacattaataagatttagccagccaaaacagaaaaagtatatagatatatgtgtgtctgtgtatgtaggtatgtataaggattaggattttgagtggcaatttaaatttgacggtttgccaagctatgctgggatacatagtgggcatgcttgacacaagcaaaacgtgaagtaagagacgacctgtcaaacagctgctatctagttactccctcggcagcactcccaacttctcccgcgatgtctgtgtgtaagagaaagatgtcaaagcaccaagaaaaccacgggggctgtcagagcaacagccaagtccaaaccgtgcatcccagggtgaaatcccacccgtaccctcaagagctggtcagactgcggctcttttctaatatgagtctacctaaaatagaaaaataaacacaaccacagaccctggccaaccctctctctcctcccctttgtgactctcccaaacgctggagggatgttaacctctggcaggcccgtggaagccaagccccgcgacctgaggaggcgtccaggagcctcggcgcagccctggggcctcgagcccgtgtcctccacccacccgacagggccggtcaccggtcacacaaaggagccagtcgcgggcgctggacgcgggactcgcccgagagcagggagccacatctggttcctgcacgctggcaaaagagacccgctggaaaataaggactaacgcccaaacctgttgcacaattcgggtccctttcacccagaaatgaacaagggcgctcaggaacggaaaagcgcgcggcccggtctctgcgggccgcggccgcacccggcagacggcgcggaggcaaaggcggcccgcagggctcccacctccggcgctttgtctgtggcggcaaggcggtgggggcggtcggggcgttgggagcagaggcggtggcggggcgggggcgcccctccttcactgcgtagcccctccgccccgcggcccgcgcaggggaagaaagccgggcccgctaccgccgccgccgccgactgcaccggcccaagccggccacccggccgcggggcctgcgcgcttctcccgcccgggccgagcggcggccacactcacctggctggcgctgacgctagcggccggcggctccggggcgttggggaagacaggggaacgctagcgaggtgcgggcggaggcggagggcgcggcgggaggaaggcgggctgggggcggagcgggcccgggcggcggcggcagcagcggcgacggctgcggctccagtcactcgcggcaaatcgcgtcccggcccctccgtgcgtcaggcggggagcgggggtgcgggtggcccggcgacctctcggcacccgcggcccgagccgcgtccgcgcgaccccgcgcgcgcccgggtgacggcggtacagcaacccgcccggcgcgggaaggaggaaggaggcggggcggggcggggcgtccaaccgggcctggggctgagggctgggcgcgagtgggactctggcgctccggacggaccctgccgtccccacccctagccgaggcccaggctccccaggcgggaggcagtcttggagagtggaagggtacctagatctggagtcagaagtctgggcttaagagagggtccgttacttgacaccctggcaggtcatttatttcctctggcctcatgctggagttcgaaggttcgagtacaaagtctccaagagctgctcccaagtactcactgccaagcggtggtgtggctgaaggatgaaggcagatgaaagggaaagggttgcggtgaggaagggctggattcagggcatttgttttgctttgaggatctttccactggacagtccaaaattaatccacaatggggctccctgataatggctacttccccatttttaccaacctagttatttttctccaagtatactgacttaagagtccttgttttcattttattgcgcaaatcatttgtatgtcatttcctgaattcagttcaaaagagtcatcagcaaattcacaccagatcagagcagctgtgtggtcccaatttcaagacttccatattattcactcagccactcacttcagtatcacctaattccgttgataaaatcttcctattccaacaactaagcaaccaaatttctctccactaaagttttctgacttaaaatcccgtggattaattcttcctcttaattctgtgaatatcagtctgtctccatgacttccacctctttgccactctaggtcaagcctttaacttcactgctgcttcagttccatataactgccagagagaatgctccaaaaagacagagctaagcatgaaacgtccctctttaaaatcattcaaagtctctccacctggttgaatcaggttcaaactcattaccatggtttacaaagccatttaaaatctgatctattgacctccttggctccagcttcaactcctaatatatctacgtatcacacaaattcaacagactttgtctttgtgcccttgtagttttcccccacctgaaatccatccctcatttaaccagttgaactcctattgtccttcaagataatgaagataatgcatcccttcctccttggaatcttccctgacatcatctcctttcaccacatctgtatccttaccccacacatttacaatgaattaaatactctttttctctctgctttcataaaatcgtctatctacagtattccctatgataatctttaatacttgcttttttcctgttgctttgcttggtggccttttcttcctagactgtgtgttccttaaaaggacagggattttgtctagttcattttttttgctccccagaacatagcacagtgctcagcacaaaaaaggttctctttaactgtttgctgaagcgttgaaataattttccatcccaacaaatagatgttgagcatctactcaacgaaaagaaaatacagggaagtccacagtcccagccttttttagccttccgtggtattctgtttttcccttctctactatgtggcattctctgcttatcattttaaactctctccaactaccattcacattctttgcttatcctagtaaaacaagagcatgccaagcaatccattataataattcacaaaatatccctgcccttcctctttacatacttctggttccacattgtattacctaggtgttagataagaggtaactgctataatggaaaaaacatta

SEQ ID NO: 3720 - DNA, 4001 bp, Homo sapiens
taattctgcttcagtttatcaaaaatggcttaacaagagaaaacagtgatggaccatgaagaactagagttccattaggaaggaagcaacaagctatgtcagtattatgtgtatttctactaaacatttatcatcccctgacatatcccatagggatgggcacagacagtgctcaagtattgaatgttctgctattttcttatggtatcacttaattcacattgatagaataatctcaaaaataacaagtttggccaatgaatagcaatagaccaaagtttttagctgggtttctaaaaaattcaggaaaactgatcagaattctgattttcctgtctgagggcatcttatactgaagttaccaataaataagtatcaaagctatactatcaatatccccaaatgaataacatcctgaatgaacaaaaacagcacaactttatattttctacttactttgcaaaaggttatatttgagatagtctaaagacaaaataataaagcctaggaatactaagagagcatttaaatcctaaatacctaaaatggtatactaatattaaagtcattgacaattcattagcatgtttgataaatagcagaaagctggacttcaggtcctctgggtgacccaactattcaaagccattcacattctggtcctaatccaacctttccagattcatttatttcttctctacttgcaccctctgttcctgctacagtggactactactcaaacacacctttcacgattcaataccttgttacaagatgttctcaggctcagatgtccttcccgatttaaaactgactgatccttttaaaacacggtcatgtaacctcctcagtgaaacaaccctaaacataatcattccgttacccaggttcccagaacatgctgctttttcttctacttaagcatgcatctggcctcatgagagaatgagaacatacacatctgtttctcctatcagactgtaaaattttggatggcctcagtctcttacctctcacagactaataccgagccaaatacccagaaagaacatatgaaacaaaagtgacttagaagtctcgttctcagtgaaaatctcggattccaagtcagaaatcaaagaatgcagttccaacttctcatgcctcgtcttttctgaaaagtgatcccattttctgtcatctctggatacttcctaatgaactccagtctattcccaacgttttcctaatttgcacactctgtattccataaaacgatcaactagcttgaaagcttcggccattaatgaaagtaatttatgttttcctcttccatctgctcctccaataaccagtctccaaagaaaaagatcaatattatactaaaagtgactaagggagggaaaacaactaccagattttatccccaaatcgtttcgtgcaagaaaaataaacaagtaactgacgcttgaagacacacaagggtaggagtaacggaatctcggtttaaccaaattcgattcagtctgccggaaaagcggctgccgtatttcagtgcttttctgaccctcttctgcacaaactatggggacgacagtgtcgagaggcgagtgagaccttctccccacgcccgcttccccgatcccttgcccacgaatcctactgaggaagccgcttaaacgaggccctctggtcagagaagagaagctactctgaagtagcaggtcccaaacactgaacaaagcgcctgtcgggggtgtaagaggaggacgccattacgcggggcagtggcctgcgccgctggcgcggaggagacgacccttggccccgaaacgcgggctcagctcctacgaaagaaaccatagaaaaaggcagaatcctaggaaaaaaggcttttattaggctagcaacgaagaaaacacgtaagcagggaaagaccgcttaccttcgtgagtcttggcgatcttcgccattttgtccactcgaacacacagacggaactggcgctcccaagaacttccgctcgtcgccgccgccacggagaaaaatagctgggggctgcactctgcgcgtgcgccaaacgggagcgcgctccgtcgggtgacacgtgacagaactgccacctagagggaaccgcgaggtgcattgtgggtgggggaggagacacggttgggccctgaagtcgcctgcgtggtgacccaggaaatccccgagccgagccgtaaggtccttaagtgagtaactttgccctggaggaaagtggattctacgaagggagttaagaacagacactgagtcccagcaactctggaggctgaggcgggagcatcgcttgagcccaggagttcgaggcagccgtgagccgtaatcgtgtcgcgccactgtactcaagcctccagaccgggcgacagagcaagaccccgagacccctcccattaaaaaaaaatgaacactgtacgaaacgctgcggtttcagagctggaagagacctcagacattcaatcccttttcccaaaattcactggaagagctcgaggaaaactttcccttgcagctgtctcagtctttacagtgcttagttacgaagacagtcttaacagtcccatctttcgccctgtaattcaaggtcatttttcattctttctgtttaataattgcaaataatttgggtaggaatttcgttgagcctcacaaatcgttgctgagttgcacagtgacaatcttgccacccttttaaagccttttactttatgggttcctagaaaaccactcatcgtcattattaacattcattagatgtttctcttaaatcctagacggtattcctaaatcaggaattttaatagatcagaatacggcagtctgttttcctgggcatcaattataatataaccttgtactgtcacactggtctttgacttcgacgatgaaaaagaaagaaaggctcagaaagatgggtcccggaagcagccgaggaaaacaggtagttatcaaggttagagccatcacaaagagaggagtacctcgctatgtgataaacctgcaacccaaatactaaccataccatgggtcagtatggtcgtttgaagggagggaaatggtatgggtgtattcctcttgcaggaagaccccatatctactttgggtaaagtgaggagccattttcctgaggctagcggtaggtgggagatatatggacaatggcactggactgagagcttagataacctgtccctggtgactcctgacctgcagccttgctccctctttccctctcaccagactccctcccttcttcagatcaggtgacacaaacgattttttttctgtttttttgacacacagtcttggtttgttgcccaagctggagggcagtggtgcgatcacagctgaccctaacttcgaccttaaggttcaagagactctcctgcctcagtctccagagtagctagtaccaccaacatgggccaccatacccagctaatttttattttttgtagaatgagatcttactatattccccaggctggtctcaaactcttggcctcaagcagtcctcctgcctcagactcctaaagtgctgggattataggcgtgagccaccacagatttttattagcatcagtaaaggaataaatttgataaattaaaatttttggccaggcgtggtggctcatgcctgtaatcccagcactttgggaggctgaggcaggcggatcacaaggtcaggagttcaaaactagcctgaccaacacagtgaaaccccatctctactaaaaatacaaaaattagccgggcatggtggcacctgcctataatcccagctactcaggaggctgaggcaagagaatcgcttgaacccaggaggcggagtttgcagtgagcggagatagtgccactgcactccagcctgggcaacagagcgagactccgtctcaaaaaaaaaaaagaaaaaaagatgtgatggttaattttaagtgtcaacttgactggattaaggaatacctagaaacctggtaaag

SEQ ID NO: 3721 - DNA, 4001 bp, Homo sapiens
cccaggagtttgagaccagcctggacaacatagtgagacccccatctctacaaaaattttaaaaaattagccaggcatggtggtgggtgtaggcctttgcaaaccttaccaccatcactcctgctaacacctgagttgggctgtaccctcttccctgcccatcccaggagatgaccctgattcttgtttcttggagaaaatagacatgaccaattgaaatacttttcatctatatccaactactttccctctattactacgccaaccttcatctactcaaaaccttcacttctaaactcaacctatctttcttccatatcatgtttcgcacactctgctggattgctcccattggcataaagatacacctatatcacacatcttttaaaaagtcaactatctggccgggtgcggtggctcatgcctgtaatcccagcgttttgggaggccaaggcaggtggatcacttgaggtcaggagtttgagaccagcctggccaacacggagaaaccctgtctctactaaaaatacaaaaattagccgggcatggtggtgggcacctgtaatcccagctactcaagaggctgaggcaggagaattgcttgaactcaggagacagaggttgcagtgagccaagactgtgccactgcactccagcctgggtgacagagtgagagtccatctcaaaaaaaaaagtcaactatcatccaatttccctacttcctatttaaatgagaactcatggacagagtgtctttgctgtttccattttctcaacttccaccatcttttcaccccactgcaatcaagttttcatccactgaaatgattcctatcatcaaggtcaccaaaagtctccatttacatatacaatggtcaattgcttgtcttttctttctttctttctttctttctgtttttttttttttttttgagtcagggtcttgctctgtctcctgggctgaagtgctgcgcagtggcacaatcatggctcaaggcagccttgaattcctgggctcaagcaatcctcccacctcagcctccaaaagtgcggggattacaggcatgagccacctcactcggcctaacttcatcttacacctctaagcgttttactgttgactaatctcttttttgagttttttttttttaaaagtttccgtaacactgtactctcaaacactagaatgtaagcagaaggacttgttttattcactgctgtattcccaatacgtaagactagtgtctggcacatagtagctattcaataaatataattgatgaattatgtcccacatggcaagcagaatacatagtaggtgctcaaaaaatattgttttaattaatgtgttaatgaaggatccgaaaagcaccatgatctgaggggaatcccaggtcctagttgttggtgaaccattaagttagttgaggactcttctgagatatcgactttaagtcaaggagataatcctaacgccaggtccttaggtgcgggtcaagcaaagaggctataggggtaacactatcactgacactagggtagagactgaggaactctcaaaaggggtggggacagaaatgtggctcaaggagcatatctctgaggatggggccggatagtgtcttcgctgacaggataggaattctggagttctccgctctggggacggaggaggagcaagaatgctccgatccacgccgctaagaaagtcaaacccgaagttctcccaccctccgcagaacacccgatactcacgttcgccctcttggccgcttgcatcgccatcttggcgggctgatgaagttaccgtagcagatactgaaattcctccggagctcgctcggcttcgggggttacaccgcgttagatgcaggacatcaacatccaggacccgccggaagctgttacagcggaatagcgccgtcttacgctgagacgcgctgacgtagcagcccccttcgaatagactccggggtaaaaccgagcctgagcgagactcgaggccggaagatggaaaggcgagagtccaagacacttccgggctctgtaccgtaaagggcggggcgtagcctccaaaaggcgagatgttccggtcggggaggccctgagcagaggaacccgggtggagagggcggggcctgaggagggcggagagctggggcgggtctcaggtgagtaactggggagcggaggaggcggggcttgagcagggttatgacaggtagggcgggacccaggtgagtagcgggagggggcggggcctgaggagggtgcggagagctggggtggggcccaagtgagtatccgggagggagccgggcctgagcaaggcggtgagctggggcgggacccaagtgagtaatggaaggggcggggcctgaggagggtggtggcggtggggcggggcccagatgtgtagcgggaggtggtggggcctgaggagggtggcgagaggtggggtggggcccaggtgagtagcgggcgaaggcggggcctgaggaggactgagctggggcgggacccaggtgagtagcggaagggatcggggcctgaggagggtggtggaggtgcggcggggcccagaagtgtagcaggaggtggttggggctgaggaaagtggtggaggtggggcggggctcagatgtgtagcgggaggtggtggggcctgaggagggcggcgagaggtggggtggggcccaggtgagtagcgggcagggctggggcctgctgtggtgcccactggttgcggggcgcgcgggcaggtgccggaggtggtgggcctgggcctctagctgtgcgcaaggcggaatatgtggggttctggcggcttgtgtcacggctgacgctgtaactatacccagaatctccgtccctggaggggccctcaggttgagcgtcagctgatcgggcctcagtaatccccgctgcgacgcccgtccggactcccacctcaaccccgccgcggcggccccagtccgcgtgccacccttccagttcactctttatttcctcatatcagctttaaacggctctggaggaagcaccgggtttcttggcctgtctattgtgaatcttctccaggtttgctctggaaaggcctggggtggccgcgtcctgtcctgccccatcctccttcactggggcagttccaggacgatcttgcctatgttcttgttggcctccatgtacttatgggcctcctggatttcggtcactgggtagattctgtccagaaccggcagcagacgttgggggccctccgtggagaagtgaggcagaatttgctccgtgaaagcattcaccagcatttgcttgtactaagacaagggaaaggagatcatcagcctggggagagagcctcaccctgccctcctcatcctcctcagccttcttgctctctctgaagccacgtatctgaaaaagcacacagggacacttaacccctcacttcctagcatgtgtgtgaaatacccttgaaggagtcatgtgccatctcagaatatgtccgataggtatattgttaattttgaggtgaaagcattggagaaattgtagtttcagaaaaggctagctgacctgtctcttcttgcatgtagcaagtcataaagattcctctgagaggggtaccctccccatactagggcaaaaagcccttatcaccagagactggaaacggggctgcaatggaactgaataaatacacttaaggaagtaacccttatcttccactagttttacaccccccacccccatatatctcctagtgacttccctagaaatttactatccctagccagattttgtcttatttcttctcaaatttattgttctttgtctaaaaattacaaaagcatcttactttggccgaatcacttgagcctgggagtttgagatcagcctgggcaacatggtgaaaacctgtctctataaaaaatacaagccaggcatggtggtatgccttcagtcttagctacccaggaggctgattgtgccattgcact

SEQ ID NO: 3722 - DNA, 4001 bp, Homo sapiens
aagatcagcctgcaaattgtaaactagtttacaaagcaggctatacaatgaggaataattcgagcttgtagaaatccatggtttccaccagatacaggtattccggatctagaattatctttctatttgcaggatttccgaagagaccgttaagcatctacgcgccccttcctggatcccatgcttcttggggcaggaaatttcttttggtccgtcgctttcgtcgtgaaatacacaactaattttcctttcatgttataaggcaccatatttatgattttgttaactgaagaaaaaacccgagataaaccatcttaagtacttttaaaagtccagtggctgaattcggtgtttaatctgatacccttctggattcgctgacactggagagaataatttccaagtcttagtatagccaaaacaaaaaactaccgtcgctaagctacatctaccactggattttaaaatgacaaaacagcctgagaaaaatcacaagagcagctaactcgaagaaaaatcctttttctttactcagccgaacctaagaccacagttacttcgaaagcaacttctaataaccgtctcacatcctgtcaccagttcaatgacaaaatctcagttttcagagcgtgtgccaagtccagcacaaaaagctgacatcgaggagctcccaacgctgctgtcgcctccgctggcagcagccgctcccggattagactcgcaggctgttagggcagggccttcgccacgggcttccgcacagcggcgtgcagtcctcagctcggccggcgcggtctccgacggcgctggctccgcgtacttccccagcggcgagggcgcgaggtcctcacacgggcagcaccttggcgaggccggcgccgcggcccaggcgacccagtgcgaggcgcagcgcggtgccgccgccccagggcagcagcccaaccagcgcggccagcagcgcggccacctgcgcgcccgcgcccagcaccgtgagcagcgtgctgcgaaggcccagcgcggcgaacagcgtggcgcccagcgctgccatgtagagcagcgcgggccgggacggcgcttcttcgcagcgcagcaggcgtccgcacgccgcgccgccccgcagcagcgcgcttcccgccaacgccagcgccgagcccagtgaccagagcagcgcgaacttgcgcgcgcgcagcagcaacaccggtgcgtagagcgcggctaggccgaaacacagtgcagccagcagcaggcacccgccgcccgccgccagccgctgcccgcgcgtcacgctcgggaggcacgtcaggccggccgctgccgactccgcagggctccgcgcccacgtccagcgcaagcccgcgcggcccagccactcctccgccggccggtccccgggctcctccgccttctccgcggcgagcagcggctccgcggccgccgggccgccagctttcccctgcgccaggtactcctgcagctggcggtggaggtccgccatcttggacaaggcggtggcagaaaggaaaagctgcggctcacttccggccctccgctgaagcggttcggtcttcgggcggcaattggtcggcgacggcgaaaggggcagggcctgcggcgctcgcggaagtgccgcggtgcctgctctgcggacttttgtggtgtccccaagtaccgtggtcgcaggtgctgcctgtccgcttgcagtcgccctcccagcgcctgaccctcttccttgttcggagtaggcgcccttgcggtctggctaagtcctgccagcattaatagttggaaggcaggggtgggtgtggttctaaaggggcacaagaagtgacccttttgctgacggaaatgtcttatggcctcactgcgtctaccgtggcggtgatattgtgctagttttgcaacatggaggaatgggtaaagggtacacagaatctctcttgtttcttacaactgaacacaaacagtgatctcaaaataaaaatttaatttttaaaaaagttcagacctgtgtaactcaggtgggttttttggggaaagttgcgttctgattagttacctcacttgtagtaatagtgaccatcctgatcatttaccatggggttgataaaggaagggttgacacccagcaccctcaacctgcttctctattctgttctcagtttcggccacaggcctggcaacatccttgactccttcgcgccccttgtccaagactcggtgctgctgtcccatgtgtttggtgtcactctcgtgctctggacagcgccacgcccaggtgtcctgactcatcgtcacatcactgtgacaagctggctcgcacgcaggtcaatcctgatctgttcccaggccgcacccacgtgccctgctgtttctcagagcctcctagagggtgtttgcttgtggttcctctcacaggtcagattcctccagattcttccagctgcctccacagctcccctcaccaccttggcttcccctgggtggccctgtgtcctttgtcctctgccctaggtggatgtaaggttaacggcttcctgctgtttggcttctcagcctttccatcccctgtgtgtaactaatctcccccattaagttccttttaatgctttctgttttcttggttggatcctggcagatgcaattctttttcaaaatatattctgatttgttatctcacttgataataatagtgaccagcctgatcacttagcatgggctaaaccattaggatggctacaatcaaaacaaaaaaacaaaaacacaccagaaagttacaagtgctgtcaaggatgtggagaaactagaagccttgtgcaccgttggtgggaatgtaaaatgctatatccgctgtggaaaacagtatggaagttactataaaaaaaaaatatatatatatatatatacacacacacacacacagacacatataaacgtatatacacacatatttgtatacagttatgtgtgtatgtgtgtatataattacaatccaatccagcagttccactctggatatataccccaaagaattgaaagcagggtctcagagatttgtataactcttcacagcagaactattcatgtcagtcaagagatggaagcaacccaagtgtccaccagcagatcaataaaatgtgatatatgcatacaacggactgttacgcagccttaaaaaggaaggagattctgacacatgctacgacatggatgaaccttgaggacattaggctgagggaaataagccagtcacaaaaaggaccaatactgcatgattccacttctgtgaggtacttagagtagtcaaatacacagagctagaaagtggactgggtgcataaatgcccatcagtgatgttacctaatcatttatgcagctaccgtatagaaaaggcaggagtgtgctgctcattttataggtgagggaagctgagaaataccaagaagtgaggtaacctactcaaggtcacctacaaaactgacgatagggcagcgttaggttgtgattcctggtttctaaccttgtgggcttcccattgcagaaagaggccttcactgagggtccctctgtgtgagccctggatgcgctttctgctgtggtttggttgcagggagggaaggtcattaacaaaacccactctcctctagcactgcagcaaaactcatcctaacaatcatcttcacttgcttccctgtctcccttgaagcccttcaaccaggccttcgttccaccgtgccagcaaaattgttcattacaaaatcgccagacgctgtcggctagtgcggtgagtttcggccctcagccccaggacggcaccgtgggctcctctcttgactgttcctcctcctgagacctcagcgttgttgcgcctgggatatcccctcttttctctctcggcaccctctggcccagcccgtgttgttaaaaccctctgcgtgcagagcgtcccccacttctccaccgggcatctaatagacaccctggaggtgacatgcagaaccaa

SEQ ID NO: 3723 - DNA, 4001 bp, Homo sapiens
cctgggaggccagagggggccgtcagctgggcctctctgaggtctaccccgcccaagtccctggacacaaggccccaccagggcagactgacccctaatcccccagggtgctggagttcacgagtgccaaggagttaagtagttgggcacatgtaggggcccttcccctcagggaagaccatctctggctgtgctattgagctcagggccatgacctgctcccagccaggaggagctgggacttcccaggcacccaggcctcctcctcagcctggaaatggcccctttagggggctcagctcttccctgctctgtccctcatctcttgggccccaaccttcatccaggatctgggcatcattacctggaaaatggcctccttggccatcttgttaaggatgtggacgatgtcctcacactcttggcataggtcatcctggggagggaggggccccaaggtggaggacacatgagtgggggaggctcccagctccaatggggaggttctcttaggaagaggccaacagagcactccaaggcacatgcagctgcccaccagcccaacttgtcccatctcatccatatcaatttatcccatccatctcttctattcatccatcccaatccatccatctttattctgtgtcatcccatcccatcccatcccatcccatccatctttattctatgtcatcctatcctatcccttcccctcccatccatcccatcccatcccattcatccgactccatctattctatgtcatcgtatcccatcgcatccatcccattccattttatcctatctcatttcatctcatcccatttcatctcatccatcccctatgggggctccactctcctcctgcccatccagagcccacccagcacccttcatttcagacccccagttgccatgcatccttggtggtactcacggctcccacatgtccccagacttcctgtaggcaatgccctagggctctgcactgcaatgcttgctccaggctttggcaccagaactcagggccctgggcacaggccaaggatgaggtggtccaggcagctgtggtttggggccagagcaaccttaatcaggatccaggctacacacctggcatcatgatttcacccaccctctagacccagttttgctgggagtgtgaggccattaaacatgtggacgtcagacagctctgggttccacctgctcctggacccgccagctgtgtgaccttggataagctctgaaccctctctgaaccccagctgccttgtctttaaaatgaggacagacttgggttaatgcctagcacaaagcagtgctcagtgagtggtggagctgcctaggagaggggaggctgggggagactcaccagtgcctgggccacagagcgtgggcagcagcagcagcagccactgcagcaggtgtgactcagccatggcacctctgcagcctgggtaccctgcttggtgcatggccccttatagctgggcggggcgtgggggctctgtaggagtggcagcgacctcagtgtttgtctttgctctgaagagccctccaggtgcttgatcccaccttttcccagcaggaacactcctgcctgccttaccacctgtcctggctgatggcctgttcctgcctcctttgccccctgcccagactcccatgttcctggacttgtggcttcctccaaccaggggctctcaagcctccatacctggtcccacctctccaggccgtgggagggaggttgaggagggtggagggcatctggttgggggcagcctgggtgttcccctcccatcccctccctgggcctcccaggccccctctactcttgagcaatgctcttgagagcttcctgcctggctcttaacccagggcaagccctggaagggcagacccaggacactctcaccacctccttaccttttcccctggaaaaatcttctggttctatggacacatggtttgcattagtcagaagagcatttacacaaaacagaaaacaaaataccctgagtcagagacaagatttctgtggccctggagtggctcccagacagccctatacaggaggtgctgcccatggcccctggggacccctccagggtaggggctggggcatagctgcgatggttcagcagaaagaaactgtcctctgcagctgcaggggctctcaggcagggcccccactggcagagcacactggagaaaaagctcacaggctgagggagacagaggatatcttgagtggaagaaagagagcattagcacattgccaccaccccagccattgtgatcaatttatctgatctctgcaggagccctctccctagtggaggctcacaggcctctatactcgggaagcactacagtgcttttgtgggtggacgggcaggaattagtaccatgatgaaaagagatggggctgggtgtggtggctcactcctgtaatcctggcactttgggaggccgaggagggaggatcctttgagccctggagtttgagaccagcctggccaatatagtaagactccataactacaaaaaaattaaaaaattaaccttgtgtggtggtgcatgtctctggtcccagctactcagaaagctggggcaggaggatcgcttgagcccaccaggtcgcggctgcagtgagccatgattgcaccgctgcactctggaatgggagtgtgaggccattaaacatgtggccattaaacatgtgactgagctgagggtgtcctggctcctggtccctgggatgggcagtctcctgacaccatgttggccaggtaacactctgtctcaaaaaaaaaaaaaaaaaaagaattagatacaaggtggctaatgccacactcaaggttacccaaggatttatgtagtttctgttggcctcaagtccttgtcagtacaacaaacacagctgccatcatgggagtccaccaagactgtgtaaaaatgagtaaccaaagactgggaactgagtgaccttggtagaacctcaggaaggtggaactgaaacgtgcttgttattcagtatgtattaaacaaatcagcgagtggtatctcgtttgaatacaatcaggacaggctgcgcaagagagtggggatttgtggctggctgcctccaggggcgtattggtcagggtggtcccactaccataacagagagccctccagtctatgggcttcatgcaagtttctttttctttttttttttgttttttgacatggggtctcactctggcgctcaggctggagtgcagtggcgtgatcttggctcactgcaacctctgtctcccaggctcaagtgatcctcccacctaagtctccagagtagctcggaccacaggcatacgccaccacgtctggctaatttttttctatgatatttttggtagagacagggttttgccatattgcccaggctcgtttcgaactcctgagctcaggtgatccacccacctcagcctcccaaagtgctgggattacaggcataagccactgtgcctagccacatgtttccttctttttttttttgagatggagtctcactctgttgcccaggctggagtgcagtggtacgatcttggctcactgcaacctctgcctcccgggttcaagcgattctcctgcctcagcctcctgaatagctggggagtacaggcacccgtgatcacgcccagctaatttttgtatttttttagtagagatggggtttcaccatgttgaccaggttggtttcgaactcctgatctcaggtgatccgcctgccttggcctcccaaagtgctgggattataggtgtgagccaccgcgcctggcccacatgtttccttcttactcggttacagtgcagcacaggttggctccgggtggtgagactcaggtccgtaccgtcattcaggtgctcggagtcccccttctgcttgcttggagggctcagagtcctcccctgggtcccctgcatctggccaacagggagaagagagaaag

SEQ ID NO: 3724 - DNA, 4001 bp, Homo sapiens
gaaacacaaatcttttactcggcacattactatatgcctaacctgtctccatcagggtaagacagaggcagagaagggcaagatcagccccttcttgcaaaaggcctacagggggtttgaggaaaccaagtcgtcacacagcaaacatttagaagaccacagggcagactgtatggagagctatgaggatctgactcaggtggccaaagagatgtgcaggaggaagcctgcgatctgatgggaccagagaagaagggagcaagtgtttgccagagaggcaggcccgactgagcctttaagaacgagcagaatgggggtgggagcggggacaggcaatgtaataaggtcactcaagtccaggcagggacaccccgacactctcgccctagatggcctcctacactggaaggaagatgccagtctcgcctcggatacctacatgctgagatggcctacttttaaaaggaattaaagtcctgttaagaaacactggggacatttttttcagacggctcaggagccaagttccctaattatcagcaaagctcggggcacccccttgctggaaccagtccccttccaccacaacaacaaaaaaagaaaaaaaaagccaccgcaccgaccttagcacaatttcctttcttccttcaaagttcttttctggccgcctcggctgccgcccacccctggcaagccccggttcacttcagcggtctctctgcctgtttcctaataaattccgtctcattggtgcgggaggcgcgggagcccgagggtctgcggcgcgggagcggcccctccccggctccggtctccgggcccaaccaggcgcccgggctccgcgttccacccccgcctccgcagtctagggccgagtcggcgacgccccagaggaggtcccggagggaaaggacccctgtcgccgtgccccgaagagcctgagcgggtgtgcccagagccagtccccggcggcgcgggggcccgggcgcgggagaccctccgcggagaacacagcgaggaagaggctgggggggggttcccaggcggcagcccctcggagggacgacggccccaggggatgacacagcgtttcccccgcacgccctggctgcgtcccctcagggcatcggccggcttgctgcgtcagcgaatcctcagcccgagatggagagcagggacgggggacgccggaccgccgctcgcctcggcactcgccccctcaacctgctgcgcgcgccgagcccggcttgggggccagggctggggagtgaccgcggggcgcgacgctgcccggcggcaccgccagcagctcgaaaggaacgtcagtccccaccgggggaaaaagttagaaggcatcccggccacgccaacttcccatccagggccagactagaactttgcgtcccgggcgggcagctgcacaacccggagcgaccctgagcagccgctcgaagccgggcgctcgggaccttgaccgcagccgccggtggccaatcacagggcgccgcgggcgggaaaggctagagggcgcgggcagtcggggagtgacggcgccaagggccaataggaagccaagatgggagtccgcgcccgccccgttgaccaatgggaaaagggtgactgtgaccgaggttccccccctggcgctagctgcaggctccgctggccgcgggtgggagacccttgggcggaaggggactttggaggggagtttgctcgtcctctctttgccacccgccggcccgcagaccacagcccggtcctcacctgctggaagcggggtttgcccagttggaaaggaggtgcatcgctcgaggcgctagcggcactagccgccgccgccgatgctgtagtcgctgtatccgccatggccactgacgcccgcaatctccggcccttttaaaatgtccctcctcggcccccgccacagctgcctctcccgattggccctaatcaaccgcagcgagcgggaggcgcaaggcgttgtggggagtgtagtttttcgcgtcgcggcgcttacaaccgtagactgcggagagttgcggccgtccggagaggtctcggtgcccgctgtccgcgttgcaaggtgcaaggtcggcagtccaggaaaggtgttcctgtacgacgaccacgggccacccctcgctgcttagttgcccccagaagttagagttgctgccgtgggcgtcgctcctggggccaggcagcgcagaagggtcccattcaagggggaacctgggaccagatgggcaaagactccaggcggagtagggttaacctcggaaggctttctccaaggagttgcactgcggaccttctcgtactttcctccgtcgccaccctgcccactcgtcctgtgctctccggctgccctgacactcagttcctggagcatgctggggcctgcccgcctcccgacccctgaacattctgtacccggaagactaaatcttcgcctgatgctggctttctggctttagcctaaacattgcatttcccagtccatcactctgcttgcacaaaatcccacagaggctccgtggcacccagcacttctcttttgcactcacaactacttactgttctggacagtctttcttactgtaaagttcacagggcaggggctatgactttttgattcacttcagttttcagagccagacataaaagggctcacagtagagactcaaataagtgttggctgtgagttcatcagtgggggattaagagccctggcagctttcaccttgtctggccaaccaaggaagatccctcctgggcctaattcctgggcaggaggagaacttgggactagggtgggtggggagggtgttaggtaagggggagtattacagattgtggagtaaggatcagtatggataataaacacatacagttgtagaatggattagctgaagattcccagctgaattacctggtcagtgagccagacttcgggagctgcctgttttgcccaagatgacagtagaaatatttggtcttctagggaactccactttgggtctcattagtctcgtggtggagtgcagggttggctcatgtctgccagtgtttctggacactacatgagctgtagcagtcaaagtttttcatcctctagtagttgaaccacaagaaacacttttcataaagctagggggagattctagctagccacgaagaacaatttgtatcttggatttgtatcttatcttagagattctatctagccatgaagaactatttgtatcttggatttgtatcttatcttcccctgctagaccatgcaacttgagaataggaatccatttcttaccctctgtattaccaataaatgggcccatcttaggtgcgcaataaatgtgggtaccctgggagtcagaaaagactaagttcaggctgctgggcaacactgtgctgctgcccccttataaggggcagggacagtgtcatccaagaatcccatcaccttgatttaaggtgctttctcccacagcagcctcctgtaactgttcattccaaaacaggaacacaacagagccacctgcagtacatgaatgttttattcttcataaagtgcttaaaacatgaagaacaagctctttataaagagccttaactaggaagacaaacagcaaagcagaaccatgcctgctccctgcccaacccacctgcaactttcctccaagtgtggctaggagaagaaacatcaacaaggaccctgggcttcgattcaaaaactcctctgaagccatccatgccctgggcattagggaggcccacaaaggtcagggccagggctgggagtgaataaagcccagaggaatccccagtagggggggtgactccccctctctcagaaaagatacttacttctctaatacccaatgacccccaaaagcatgactgaaaccctggggaccagtggatacttttctcagatttgatgagtggagtttaaggtaggtaacgttacaggggctttcctccatgtgtggcgc

SEQ ID NO: 3725 - DNA, 4001 bp, Homo sapiens
tgacacttctcttccccaattaatcatcagtgaacctttctaatccttttcattaatctttctcttgctcaataatctctggccacactgcctaccttgacatgctctaaagcagaaacttttattccttcttccctttgtatcaactcttccttcaaatgaccacagggcttgctcacttccttcgagcatttgccaaaatgtcactttcttagtgagccttcccagtccaaactacttaaaaactgcacacttacccccattctccccttctgttttatttttctccgttaacttatcaatgtctaagataaaattaaatagttaacttattatctgttttctcctactaaattgtaagttcaatgagggcataaacttttgtcaaatttgtttgcttctgtaccttagtacagaaatgtgcctgccacatagcagctgctggataaacatttgtggaagaagtgactatgaatgaatggaagaactttccaatagaaaaaccgcccactcttggaatgggtctcctttgaaagtgttaagcagatgttgggaggtgtcaagcaaataacggaaagatggttttagaagaaatttctgcaatggggaataagttgaaccagaaacctttcaagattaaggctcaacagttcttttaaacgttttgccaggaagaaactttaaaatcaaagatcactatctatctcaaagacagtagaacacagaaactccccacaaactgttgcatctcacacacctgaaagggatcctaacatagaaatctagttcatctcccaaaaaatccagtctggaatatcaaatctcactttactaattaggaaaccacagctggactgccctccccaataagctggttctgacacaattccttaatttaataaacgacactgtcaatcgcctattcaaatcctcatgccagaaatctgggagtgttccttgacactgccctgcaaccccctacatcaatgacctcaccaagggaaactttaggagccagaaccaggcatttggggtactgttccagggtgatttaccatatagacactgagacattatgatagtgattacaactgtgttggagctccagttccaacgtttcatagctatgtgatctcaacacctcttcgtctcaatttccagatttataaaaccataaaaaataagggcatctccttgtagggactaaatgagccaatgtatgtacagtgtctagtacgggacctggtaaactatcagcactcaataccagcactctgtgacacttgtccggccagcatctcgactatctctaaatacgaaatactcagttccacatccaattctcctgaattggatacctcatctaaaaaatcattgtccctattctctactgaaatcctacctgtacatcaagcagctcaagttctaagttccaagttctccctagtcttccatcaccccttcgccttcagccagcctctccaaacgagagggctccttcgagaactttggcacgcagtccctaacattcattccgcagacacgtactgagcgctcacaatgccctagaaactgttcaagggagtagagcagtcccagagacagaaatatcttcccttaagtagctgacctaactggtggctctccccgctcgccctgccggacgctcaaatctcagaaacaagaggcagcgactcaaagccaaaacaggactccgtcaacgaacccctcgtagccggagaggggccgccgtcccggatcccggaggacagagggcggaagacgagccggagaccgaggcggacagcgcctagagaaccgactcaagaacgacaccgatcccgacagggagagggcggtcacgtcaactgccgcaggccactaacttacctctctttcagcgtggggcacccccacccagctccgggagctcggcgagcagcagcggctgcggcttgggtttaaacgccacagccgttggcggttgccccatcagccaatcgggtcctgcgaagatggagcaagggagggcggttactaggaagtgaaaggcggaaagggcgggacgccgctgctagggcaggaaggggcgtgcccaggcgagccgggggcggcacagtctgcgtgacaggggtgctcttccgccctgtgttggtggcggtccgctgtctcctgaagcgttgatggaaaaggaaactctcctctgacattcattatcaatcacatgtctgaaaggcttgacagccacctcaagtctgttagaaggtttatgttgtttactgggatactacccacccacatcttaccatttcttctgcatccttgcatttccaagtgtgacgccagcacatttagttttcacttaaaagctctccccgtttttcttttaactttctgggggaaaagcagcaatgacatttcgttgcaaaccccggatctcattaatatttaggtcttgcactaatggtctgttttagctgaatatacaagaatgacgttttccattatacacaactacattttaaaaatgtattattcaccttatattccatgtcaattcgcttatttttcgcaaattactttcataatttttacaaagaatttggagaaactacaaagaataaaatttcctctttgtatgccattggactgaaaatgaaaatagcttgttaaatcaaggttccaataattgatgatacagtaatgcagtcagcttcatattcttgtcaattttttgttcattcgaagacatttgagaattacagctttccatttttactttaaagaatctagacaaatgatgcaaaacatgcttttgagttaagatcttttagtctaatataaatcacgatcagtctccaaacagatctggttacatgaatcttgtgtaagtagaaaagtatttactgattgtccagctgctaaaattccagaagacagtggtttacaaagtaatatactggttatagaaatttatgcttacctaggagttaactagcactatatcttgtttacccagcctgacacattaaatgctcaatgtatgttatatgtttttttaaatgaaccttgtagtgactgtgccatttaatggttatttaatcttggccaaactacttaatctctctgggcttctgtttccttatttgtaaaatggagttaaacagcatcccatatatttttatgatggtttcaatcaatgggcccttttgttcaaatacattaatattgctctcttcccaatggacacattttgtagttacagcttcaaaaccaaaacaaatagaaaagggagacaggaaaatcagaggtagaagagatgctaaaacatttatcaagacatgaataccaagacctctttaaaaaaaaaagtgctagccgggcgcggtggctcacgcctgtaatgccagcactttggaaggccgaggcgggcggatcacgaggtcaggagagcgagaccatcctggctaacacagtgaaaccccgtctctgctaaaaatacaaaaaattagccgggcgtggtggcgggcgcctgtagtcccagctactccggaggctgaggcaggagaatggcgtgaacccgggaggcggagcttgcagtgagccgagatcgcgccaccgcactccagcctgggcgacagagcaagactccgtctcaaaaaaaaaaaaaaaaaaaaaaaaaaaaaaagtgctaccttatctcagagcagttgaaaggatttaactgctttgtaaattgtaaaacctcttgaaaatgtaaattagtatcatatacaaccataaacctaaaagtataattagtcgggttaaatttaacgtgatctcagcttgctttttagttatttgccttttgcctcttggtataatggatagaggcaggagccctggatgagaagtctggagatgcagttattatagttgtggctgagccattagctgtgtgttccttgtttcaagtattttatctgtaaaagaaactagttacattaaatgagctcaca

SEQ ID NO: 3726 - DNA, 4001 bp, Homo sapiens
ctgggtgggtgtggggaaaccgccacaatttcactcactgaagacccaccaggattgtcaagcagtaagaagataaaactgtgtaagaaatctgcttagcttgcttttaaaggtcaagaggatccaactgtggagtttaaagttaagttaccaggggtgatgtttaaaacagtttgagaagcactggtggaacaattcactctttttcagcttcctgaattagagaaacagggtagaagcttgtgaagagagcaacagaaagcaactcacgtgtctacctgtgggtgtaaacagtgtgtgcaccgaatatgtcacggcacgtttcagccatgggactgttttttgtttgtttgtttgtttgttttggtctttttttttttttttttttttttttgagacggagtctcgctcagtcgccctggctggagtgcagtggcgtgatcttggctcactgcaacctccgcctcaagctattctcctgtcttagcctccggagtagctggaactacaggccgcaccaccacgcccagctgatttcttatcccccctactctgccccgtttttaagacaaggcaagagaaaaaagaggggttctcatactcatctataggttaccggaatgtcacatgggataaagaaggaacaataaagaggaaaaaatacagaggaggatttctctggagtagaacacacaaccaccctcaccctcccaaacaaattctgtaatccaatgcctataatattccattccacacagaagccaggttcttcgtaattcctcagttactacatctagaaatttacacgtaagtaaaggccacctttctttcaccaaaaccttctaggaagaacaaaatgtggctgtgtacaaggaattcgaattattaatacgtttatttctgttctcctgcgccacacttttgactttgccgagggaaaaggcaggtgctgccagtgctcccggtagacatgcgtccccagaagccaagtgcagcccgtctggtccctgctgcctaaagtccctgtgcactgcgacgacgacgcacgctggttccccccaagccgcagtgggttgtataaccacgctttgaacacctagcgggagcgtagcgagcttccctcccagaagcatctgttagaagtcactggtgtcggtccataaaagacccaccaggcaggagggacccccagactctgggggagggcaagcgagagttgctgttaagacatcatcgccgggggtagtgcagggaggttgtaaatctctctaggagctgtgtgagccccaagttctgtgcccagagctggcggtgcagcgcggtgaggagcgcgctgagcccggctgcacccgcatttgtgcgcatcagggaagggggatgggcggaaatgcaagaatacgggggtgggggggagtctaagaacgtctccccggggaagtgccaaggacatccccgctcctccgttccattacgtaactcttacatatttgctggcatctacgtgaatttaactacttttgaaagtgggaagtctctaaatggactgcattgaaagcgtctggggatatctcaatagacccggttgcccctggcagcgttggagggtggcatcctggttactggaaggccaggcctccccgtccgctcgcagcggcgggagccgggtcactgccggggacggcgccctctcggcccggccggccccgcgtggcggagtcgcagggacccgcacgtccgcagccgccccctccccgtacccggcgaacacctgcccatggttacctccggcgccgcggctctgcgcagcccgttggccggagcctcgccgcccttgccgttggctgcggggagatgctcgaccccggggacccgcgccgcgcgctccgtggggtccgcgccgttctcccgggggccttcatccggagcggggaagagcccgcagcggcgctggaagcgggcgacgagctgggaatcctgcaggctccgcagcagctcggccatggtgtgcccggggccgcgctccgccgccgctgccacgccgggccggtgccctccgctggcaccgccactcccgcctcgcccccgccgatcccgcactccgggcggaggccgggcgggcggggccccgggcccagccaacaggtgcgccgcccgggtcctagcgcccgcccaggtgtctgcctccaccttgcgcaacgcgtccccctttctctccgtcccggagggcttgggcggccccgggcggccacgggggcaggaccgcctgtaactggacggaggagtgccgatctccgaactgcgcctctcttctcccggcgcccccaaccccccaccccaccttcttcccccggcagacgtaacactaatgggagcggccgagcgcgcgtgcacctgcggccgctcccattagcccatccttttgggctcaggctgatcccacagtgaccttccttgcaactctgagcccaaggtgaagtcggatttcctcccacgccagctccccacagccagccacgtactctcaccttcctgcaagactagttcccagtaaatacagcgagccccccagggagaattcccaagttctttccaaactgcgtgatgcaacgtctccctagaggtccgaacacccttgagcttgctcaagtacccaggaggttcaaagtgggccctgagtcatcttccgcgtcgctgcccctgcccttctgatttggcaactggggaacattttcaggtgggtgggaaggaaagtcccttctgggttttccgcattgagaacaaagatgcttaccgctttctcctacttctttctttccgctctgcctctctttaagcaatgacactgggaaaaccccaccagaccatttagggagtttaaacgagaagagaacaaagtgctggaggactggggacaggattaggtatctcattgcacctgcacctgctttagagcactcagcagaagatagcaaaggaaacatcctgcaggccggccttggttttccctcctccctcctacatttccctcctgggctcagagatcccttgggaggcaacaatcaaattaggcccaggtgatcagtctgcaacaaaagtgcaattcaaccccgtctttcgtttgcagcagaaacctgcatgtttcctgattgtccatgcaaagcctactaagaatttggttgcacaaatgattaatgaacacctgtcaatgccttatttattcagttgtccttttaggcctgaatgtctttgggatgtgactttccaggatgatgtagtccccttcatgccctagtttctacttttcttgcttctcagtcctgtctggagagcaaagtcaaggggactgagagaatgctgaagctcttaagggaaaccattttcctcttacagaagacacgcagagttattgtcatgtctggcgggatcacacacagaaatgtccggcccaggaggtggaagcatctctccacaatgcttctggctgtcatttacaggtgtgaggcaaaaccctgtggtttggttttagaagctggagctgtgatcgttggggacctgttctgcttatgtgttaaagaaatatgttttcctgtgaaggcacttgcatcatgtgtctcccgaatttagtgcttcgatttttctttctaccagttaggaaaaataggcaaagcaaaacatggcacacgcagcattaagttaattgccaaagaattgtatttgtagacagagcattttatctccatggaggatcagttactgattccagcttctagtggctcaccaagtcacctgatgtaagtcaccatatgtcgcagtttatccctgtaatgaaatgataatcctcacttcttgtctttcttataaggctcttgtaaaaataaccttgagacaagctctataaggcctagtgagatcatgataagaaggtgtattgtgctggagtcattcaatctaggaaggaatcctcaagagaatttggctctgaacatcttgagtaggacatc

SEQ ID NO: 3727 - DNA, 4001 bp, Homo sapiens
gagagggcagtggaaggctctaggtgagcatggggtggggtctccaggacccttccctgggcctccaggcaggctttccccattaatgctgcttgtgggcactgggaaaggctagggtgaggaggggtggggaaggagagaggaagacagcccaaggtggggcgggacaagaagcaaactggggccaaaggcggtgtgtacttcgctgtggcctcaaggcttggtggggaagagcaggcaggtgagttcccggctgccgctgtgtctgtccacaaggggcagagggtgccacatgaagtgctggaccatggccgccacggaggagaagagctggccagggaggcagggcatccgtgagtcccatgagcctcatgctgggagcaatttcctgaggcaactgtgggactctggcaaggggacttttgacatttttctagatatcttccttcctgtttgccccatgccgctccactgccattttgctgccccgttccaggcctcaggcaactttcctgctgctgcacccatgggcacgccactggccagactcttatgtccaaggctagatcaaactgactctagggtgcgcctctgccctggtcctccagcgtggggagctgtgtgatgggtgtctctagtttgcatcctagcaaatgctgggtgcgacattgagtcctgggggaggtagacaagagtctgaagatcctggaccccgccctcctcccagctgggttcattaaaggcacaaaggccccacctcgaccctgtgcagactgagccatggcaggaggggcacctcccccaccagagggccaggtgtctggaaggagttcagggctctgggctctgtcatttctgcccaccccagaaagatacaaaatgaagatttttccctaggcaaatgctcttggctaggcctggggtactgctctgtggtccctccttaggcccctgcctcctccagctcccacctcctcacggttcctgccctcccggcccagggcatagtggcgtccgccatccagccgccggatgggaatgttgaagacccggcctcggagaagcactgccagggtgaagggctgggagccatgaggccctgagctggggcgcacggtataggccccatcctgtggaggagaccccagccatcaacctcatcttccaatggccctcccactgccctgacccatgatggggccagaaccctcctggccctcctgctccccactgctcggccagccacagcctgtgagcaaaaggggttttggagaagacccggggtccgtggctgcccaccttttgtaagtggagcagggcactctcaacagcatagcggtcacagttccccgagtaccaaggctgagtcagcagatcactgtcctgtgcatacacacagtcactcagaaacatgccagggcactcaatcaggcatgcggagccgaggacccagggtgcagttatttatgttcccatctcctatgctcaactgagtccccctcaggcagaacaaagtggtgtccctgtctggggcacggcggggtgccgcacacgtgtgttcaatgtgttcttgcagtggtgcacccttcagcccaagagggttcctgggtaaggactctcaggctctgctcccggaacctctccctacagcctgctcccagcccctcctcacctcagcagctgaggcactcccagtgggggctacagagggaagagacgatttccttccttctagaagaagcagattattgagctggggtggggtggggtggggtgggggtgggcaaaggtggcttctaggggacagctgcgggggtggggggtaggaggaggcgtacatggccccgagcccaaaccccggcacccagtgcttcctccactctccagatccagtgccctggcaggacccaccagccaggcctcgtgtgacctccaaatgaggcgtgatcttggggcacagactaggagcttcctgatttggtgcaggcaccggaaaatgcccaagagggtcccctcaggcctgatctcagctggagtcagagcttcagggacatcctcagtaacttggggcctgagggagtctggcctgcagggctggggctggggcaggccctggcaggaccacctgcattcatgctgaagatgcctgcattcacctagttttttttttttttttttaagtctagtcaagtgcagtagtgagaagtggggaaagggtagaacaaggagtttgatctgtaactgactgtgaacaatcagttgggataactcactacctttggaccagcctttactcacctttagaggcagcatctgctgttccctggcatacaggaggtctgatcagaagaggccgggccccaggtcccaccctgagcctccctccctgcctccctctcttctcccctgaccatcagcctcttacattccgagtttcctggggggctgtggtaggcctgtgggaagcaaatcgggggacagaactcagggtctttatgtttttcaagagaaagggccagtgaacccagcattccaagctgcccctgccaccactgccaacaaccatgggacagtgcaaggagattccatcccagggtcagggctggggaagcctgaactggggtgctgtctctctctgtgtctcacatacatacacacaggtgcacacctggtggggcacttacctgggcaccactgatgtcctgggcagagggcctgagggcatcaggacttggaagctgagagtctgagtcaaagccaggactgaaacagggaggggcaggctgggctcggctgagcaccaggcagggaatccatgctgaccagggcagggctgagaacagctgcagggcctgctgcttctctgcagcctggactttctgggagtgcttccaaccagaggcagatgctgtcctggccgcagcagctggggagccccacccagcccatgctctaaggggagcacctcccttgctggcacagtgtgggtcagcctggaccacaggcaggagtgtgatgtccatgcggtgactgaaggcaaatgcgtgttggtggggggtggtgagaggcagcaagggaagcagatggagccaggagagtgtgttgtgctgtgagcagctgagggcctcgggcaggaggggtctggagctgagggaggggctcacctggatccggctcacattccaagtagaggtcctcatcaggtttctttggagggcctggcacctaaggtagggaggggtgtgtgagaccatgggtttgaccagtcctgaggctccatttaggactggggttttgggggaggagccatcgatttgaaggggtggcaggcacctcactccctcctcacatggtgaccctctttctgggagctagcttgaatgattacaatttctcctctgtctcagagggggcatcccacgagcaccttccccttcagaggcgcccatgggccccagctctcagagagtgtgaggaggatccctgggcggcaccctcaggacagctggctcattgcctgccaggggcctgtggctgaggggcaggggccctgctctgggccttttcccttggtttcagggatatttcctggccctccctaggccccaccccacccctgccagtttcttaaccagaagcctggaaactgaggtggaaatggaggggctgctcaccactctggacgatgcaccctgctctgaaaggaaaaggagagaaccacctgtcatgcacggcagggagcagaaaggaattcagcgggactgaggctgaaaaagcagagtctccttagggtgcctccgaggaggacatctcagagccagctttgaagccccaggagaaagcttttctcatcccctgatggttctctgcacagccctatggtgtcacctttcctgacctcccaactgacttggcaggcctggctccaaatgactttggactgttcaaaaaatcatagcagctgggcacagtggctcatgcctgtaattcccagcactttg

SEQ ID NO: 3728 - DNA, 4001 bp, Homo sapiens
agtgggcaatctggggtcccgcctaaatatcactgcccccttactttaagaaatccgcctacaagcagaaagcagaggtggaggagggggattggagagcgctgcctcttcccaagcttcccactctgagggatttggccgagtcccgagggcactgagcaaggaaccaggaatattgtcctcagggctccactggacattcctggagtctgtttcctgggcaggacggccaggtgagaggcagcctattacactgcatgaccactgcaatgaggaacagtagaatgttccccagcgccttaaagtacagccgctgtccatccacggatgtcaaaacgctctgcaaaccacccattaatttttatggtggcttgagaagcagattgagaatcattaccttcatttttacaaggcaaggaaccaaaaccacagagggcggtgaggatccaggcctctcccatcatttcatctgggccacggatctcaaggaaagcccccagcccactgggaaggggactcgtggccagcagagattctgcccgggtagggagcaaggaaaaaacccaaactttggagctcagagacggtcacaagggtgagaaggggcggctgcattcagggattctctggtttaggcaagaatggctccagttctaacttaatgttcaaatctgccaggctgtgacaaggctggtaaaaaatgtgggattggggatggtttcctgtttgctgtttatatttctctttatctctagctttctgtcctgagcatacattgtttctgtaatcagaacaaaagttatgcgaactttattattatcacggataaattctatagttccaatctgcctactaacttggaaagaataagcaggaatacaatctcgcacagtgttctttttcagatctcatcgatccatcaggctccacgaccctctgctcgctgagtccggcggctctcccgcggctcctcccgcgcggcatctctgggcgcccgacacccggtcagggccagctgggcctgtccccaacccccgtctacaccgcaggccccgggctaggagccgcgggacccagggttggggtcccaactgacacccgcccgtgccgcggagcgggcttctcggtaaacatcgctcagagaacaacgcgcctctatcccagccggtccccgcccgcgggccgccggcgctgtcacctcgcggctgctcggtcacccgatcgccaagccagaaaccggagttttcaatttcatcctcacaggagggatctccgaagaagttgaaatatgcattgtcaccaacaagtttaaccggagaccgcgcgtccttccctcctccccagcgccgctcgaggggggcgccccgacccctccacgccctcccgtggcccccacggcccccgtgagccgagcgcgccccccgatttgcgcccgaggacgcgtccggttgcccagggaggccaccccgcagggccgcccgccgggaagtggccagagccggggttggggggcggcccgagcgcacgcggagggctgcggctcggcgcccggaaccccgggccgggtccctgcccaccagcaccagggagacccgagcgcccgggggagcggcgaggggcgcgcgaggcttccccgaagccgccccacgcccaggcacccgcgcagccccgaactcaggcggcggtggcacgatcggcgcccgcggcacgatctgcgcccgcaagggagtgcaaagcccccgagcacgaccccgcgcccccgccggcccccagggccctgccgcccgaggcgctccccgccgccgcctgcctacctggctcgcatggcgtccccgccggctcctgaggctccgctcgtcggccagcggctcggcccagccgggggcgcgcgcggctccgcgggactcacggcggcggcggcggcggtagtggcgaggggcccggaccgccgagagtgccgggcgcgctgggcccccgcctcggcgggcggagggtggtcccgcgcctgggcgggggcgggggcgggggcgggggcgggggcgcggggggcggggccaggaccggagctgaggccgcggagggggtggtcccgcgccggggcggggcttcgggagaggggcggggcggggcgcggccgtctgaggctggcgagcgtggggcgggctgggggtggtgccgcggctccgggtccaggcgggtatccagtctgggcgcctcctcttcttcctccgcccggagccggccagggtagcggggccttggccgcccggcatcctcgggtctgggtccccggtaccgagcaggtctgggtgctggcccgcgctcctgtgcccccccgcacccccatctcccaccccttctccgggaacccctagcgaggacccctggggcggtgcggtccccccgcgagcgggcgtgggcgagggtcgcgccgcgttcggagacgctttactacaccttggctgaggacagtggagggaaggcaggcgcgaggctgcgggggccggagcgaaagttacaaactaacaacagggaaggcagtccggctgaaaatcataaaaggaggagagtttcctgcgaagcggaatgcagattgaagggctctggtcggaatcgtttacactttgtctgacctgggcgcctctgggcccccggcgcgtaaaacaggcctggcacgtagtaggcgctccatcaatgcccagtgagtgaacgcaccacttaactatgtggccagcaacgtctatggaccgacacatctaatcctaaaaaaaaaaaaaaatcccaattttggctagtccatttcacacgagtaaactagagctcggagggttggttcgccacagaggagaagggtagaaccagaatctgaaccgaggccgactccagaggctggggtctaaccactgcgccactgcctggggccctcgggactgcgcccacccccaccccgggaacccggagcccaggagaaagcgcgggtctttgccggggaagaagccaacatttgttgctcctggtcctgagcgagacacacacagtcagtcctcaccattaaccccgaggcagatattgttattgtccccgtttttataggtggcttgagacgtgcagcactatgttatgatcgcatggggcgtgccagagtctgaattcaaaccgggtatgttcagactcccgagcccctgcggctgcccctaaggcctgccgctcctgccgtctgggagaccttcctttccctaaggaatctggttttctgccactccatttgaagtctgtgttgaagtttcaggagacacaggtggacagaggcaccgacctagggctcgggagaagggtggacattgctgttccgattttggtgtcatctgtgtgtagatcatggaattcctgaaaatggatacgagtatccctaaaatacatgccgcagattttgaaaggaggcagtgaggcgaaggggcaggtggaggaagcagagaagcctccgagcagaggagagtttctgggtggctaggaggtctgattggtgtagggatgtgtctggagtgtgcttgaatctctggcaagttatctcgcctctctgtgactcagtttcctaaatgagtgtaaaaatgaaaggcagcatgtaaagtgctcagcagactgcctggcacacagtagctttcagtaagttttagctactattagtactgctatcccaaatgacatccacactgtgttttttaaaaaatgcctataaaaacattgaaaaagacaagccagtagaaaatggacaaaagctatgaaggtaattcctgaaatgccacaaatggctcaaagcatgaaaagctccttgactatactagtgagggagctaaggcaaaacatacacacacaaaaaacaatcgaataagaaaactcaaggcctgtccaggcagctcagttcactgagcagagagggagaaagataccctaaaaaccacaaagaacaaagtgccatggaaacgcagaatagaacatgaata

SEQ ID NO: 3729 - DNA, 4001 bp, Homo sapiens
gaatgtcccagcgttttactagaagcggggctccgaatatcacataatttatcagaacagaagaaggtaacccacttattctgcaaataaagatatttaattataaataccttacatcaaaaacagcaaggccaggaaggaaaagtttgaaaatttctaacgcaagcatttagctggatttaatcacaattaaaaccaaagaaaaaaattccccttcagcagtgccccccaagtgacccccagtgactatccttgactgtccccattcttcctgatccatagaaaaaaaaacccattgcagcaaagtatggcatttaactcaagctcaacatccaagggtttaagttcctaaccttaaccttagagatttgcagtactgcctaatccaggtgctagaatgttcccagcatttcaggattacacatagtggaaggactaggcatcaccaactccttaaatggtcaaaagtagaggaataaagttgtgtttctaaagcaaatgattattccaatagataatgtattttttttaacatttaagtgcttttctccatttaaagaaattaacaaaacccgggtcctttcttttctcatttaaaccagcatcccatgccctctctcctggtaactgttcacaaggtggcaagggtgtgtaataagaagctgtaagaagcttttaaaaccaaatcattgaagccatccagagaagatctttcgtctaaaacagaagcagcgaaggccctaaaatgcggctgtaccaaaaataataataataaatataaatgacccccgtgggaatgcaaccctgcctgggagcccaggagaagaccttggcttctggttagacactgccaagtccaaaagggctgggtcaaaaggctcctggggcctccagattaactccttccagactactagaagcattcctccaaaccccagtcccactctgccttctgccctcccctccttagccacaccgcaggcaggaggcccgcgggcttcccagagcagccatcagagccctgtcagaaacgttaagggctaacttttctctaggcaggcccagggtgtgcagagggagtgtctggggacccagaggaagaaggtccccgtttctagggagacgcaagggcgatgctaagtttaagaggcagggtaacaagtccggccaaggaatcgggggtgagcgacgggacaggaaggcgtgcccactccacaggaggatgggacacacgtgaacaagcggcgagctgcccaggggccggatgccgccaccaagcaagcgaagttggaggaagagcaacagcggagtgggccaacgcaggaccacccgtggtctcctccgcacctcatcactgccccccacgcccaagcacccacccacacactcccacgtgccgtggccacttccgccgagacagatactcacctttgccgccggcgcggtcctgctggtcgccagctcccgcagactgccggcggtgctgcccgcggccgcggagaggaaaaccggggaacccggggtgctgcctgccgcgccgcccccgccgcccgcgagcgtgggggccgcactctggcctgggatgggacgcgcgggcgggctgccgccggggctggtgcccgcgcggggccgctgacggatgccgtccagcagtcgcaccagcaagatgttggcgggcagttcgtccacgccgcagcccaccaggatgcggcactcggggcagcgcagctcgtggcgcgagcacacgatgctctccaggcagcggcggcagaaagtgtgttggcatggcagcaccttggccgtggtgtccaggcgctccagacacacggagcactccagcaggtccagcagcgacgactcgtccatgtcctcgcccgcccccgcggcggtggccgccgcccgacgccgccgtcgctcgcctggcctgtcctcgtcgccctcgctctgcgcagcagcggcggccgccttggatgcgcacagccaggacgctccgagcagcatgggggaggcgcccgcagcggtctcgcgcggctgcctaggtcccggggccggcgtggagcccgccaccggcagccagcatcaggactggggagccgggctccgccgtgactttcttcaccccggctggtggcccgatgctagggctgtggcggtgcgaagtggctcaccgaccggcctgcgtggcggggaccggcctgcgtggcggggaccggccagccgagcccgcccagtcctgagcgcagcgcctgcggctgcgggctacacctgtcccgccgcaagtccgccccgcgcgggggaccgggggtgctgccgggcacgaagctcaacgggttctgtgctgcaagcggcggctcgcgcctgggagaccagcggcaggaagtgcgggcagcggccggccaggtccccggggaggccggggcgcggcgtgcacgctcctccgcgcagctggcgagccgcaccgcccccgcggcacctccatgcgcccctggcctgctcgctagtcgctgtcctccagaggattcagcaggaccgttcctcttcctcggccgcgagcacgtgcgcgggggtgcgcgcggaggtcacggtcactgcggggctcagggaaggaggcgccgtgcctgcaggacttcccttcgcttgggcgcaagccggcgattagcctggtcccctaggacatctccagggctccggggaacctctcctgcgcaggcttggccctgcctcctccaagcgtccgagtctttttcggcttttcgtgagcctcagagagggacgtttcctgccaacgctgctgcgaaggaaagtttgggcggcgttatcccgactgccttcctcgccagcgccggcgagcagcttggggacacagccgacgcccgggcatcctccccgacgaccccccggagcgctcccagttcagactcctttccgagaagcgcgcagaagtgacagccccggagcttcgttccggtgtaggtgtggggatgcgccgcaaggcaggaggggaaggcgctccagttgaagggggcaccccggggcccgcgccgactcctcccggcgcagccttggctcgccggagtcgcgggtcggaggctggcgccgctgcccgccgaccagcaccctggcgccaggcgcccggctccacgccgcacccttggcgacgctgtgcgaggggctctagcgcccgccgcggcgcagtctcgtgaacccccgctccaattttttcctacggaggcgcagaggagggtgaattcgcgctctccttcccgacgccccggcttctgggagcgtcagagcaacggaagtacgtacaggaggaccgagagcagcagggaagtttggcggtgggctggggtcggcggcgaagattccctgccgtgcgctgccccctcgtggccgctttgcgttcccgtcgggaagggctgggttccagtccagggcccagcacaaaccaggattggttggacgctgcacagcgagttcagtcagggctaacatcagaagagtcgtggggggcctgcctatcggccagcctgtccttgtggtttgtgaagttgtatgatctttctgttattattaaggaaaaaagtagtatttgttgaggctaaaaggccaagagcgtgctatatattatttaatcctctaaacagctctgccagataattattttatttatttatatttacttccatagctttagacaggatctcgttctgtcaggcaggctagagcgcggggtgctatcacggctcactgcagcctcaaactcttgggctcaagccatcctttcacctcagcctcctgaatagttgaaactacaggtgcgccaccacgcctggctaaatttttaatttaaattttttgtagcgacagggtctccttatgttgcccaggctagtctcaaactcctgggctcaagagatcctccaacctcatcttcacaaagtgctgggagtacaggcgccagccacggtgcccaacctgtgataattattttaaactca

SEQ ID NO: 3730 - DNA, 4001 bp, Homo sapiens
agaggctttcaaatgttgctttaagctacttttattaacaaaactgcattttgaactccactgcttgacaactatggcctttgtttcttaagtcaattcttacctttctggggccttggtttaactacttcctttgttttaaggacacaaagcttgtcagttctcaaaataaaaacctgtctctctggtcagatcattaactccctagtcaaactttcagactaccgtctgaacatcaagtgctagcctgagcttgtttccagtcccccaaccccaggctgtggctggggaaggaagaggacagcgaaagctttctctgctccctcgggagacaggaaagccctttatttattcctgcccttcctcttctccaactgaagagtgtgatcttggtacagagcagttccacacatgccacactggtctgatcttttagagtaaaaaatgggatcttctcagagaaaatttttttaaaaacttcatgtgcttaggtctcagagcagagaattttgtcttatcatgacgccactcactggcaaacaagctggcgtgcacagggacttgtgaggctctcagcagagtcagggtagcagttatttccctttgactgcctcaacttcctatgtttgtgttgacatgccagatccttatttctgcggaatgagaaatctcttgagaataaagttttcctaaacagaacaaaagtatcaaatcacttttgatgagcaaacattattttaaacttttttttaacttacaaaagatgaggggtaacatttactagttttacagaaattttctttaaacagaacattagtgaaccaaataaccaattctcctcaaacatgatagacaggatggaggttatcactttgatcattttaacctccaacatagtaatttgtaaacatcagtcgctgcacaagtattttaataacaggccagcccacgggagtaaacagcaccttagcctcgagacctgttctctcaactgtgtgtacagattttctaagtcgttatgaattcagatattccctacatctcaataaaaacacctaggagaacaagaaatcaggacatgcatctcctgtaagcagaagagaaaccgagcacctgctctcttgcgggggggcagcttcgtgtcactttccaactcagcctccacaggagcatgggcatattggttcaaatgaagtgtaaaggacacatctctgtccacagtgtaaatcctatttccttaaggtggtcaaccgattgagaccagttccacacttccttaaagaaggaaaaactcagcagccagcgccaaggcccagcgatcagagaggacccgtgctcgccgcgaccccgcgctcgccctgtggccccgcgaccccggcgccaggtgttggggggaccggcccttcccttccgggtgtgaggggctggcccttctcttccaggttggggggctggcaaactcgaacctcgccggcgccctagccaaggcctcctccccgcgcctgccgcgggttccacgcacattccaagcgcgcgcattcgacccaaacttcagagacgcttctgtggaacggaaggatggtcgctgacacctcgccgttcaaatatcaggaagttaaaaataacacgaccatcgtcatcattccaaacttcggaatagcttttctaaaaatggaaaagacggtggctaaacttcaatcaaaatcgctgtggtcaagaaagtcctggaagctgctctatcttaactttgggcggtttgcggttaacagacgcgcgacctagaaaccccagaggcatcgccggttttcccgtcctcctcctcccaccaccgcccagctcttgagaggggagggtgctgccggacaggtgggtccccgggtactcactgctgcccgcccggccgcggcgccccgtcccgaggctgcccaggaagaggaaggcgcgctgccccgccccgcggacaaggaggccccagcgagggcgtacctgcggcaggtgacgaaggaggcggcgcaaaacacccgccgtgtacgtttcgcgggacaaaaaccacgcgcccgccgggccgcgctcaggccttcgccctcagggacttcggaaccgccccgtcctcaagatcgaaaagcccagagccccgcggcggctccaagcacggtgttgggggtgggggtctcagggagcgcccaggcccaaggccgccctggtccggcgtggaccccgcggggctcaaggcaggttccccgcgtgacccgcccagcccctctatgcgaactcgaacgacaggcaccacagcccgccacgtgcgcgagactcgcgctgtgccccaacccaggtgggcggcccgcggagccgcgaggcctgagcccgccctgcaggtgacccgcggcccttcctcctccaggtacccctctcctgcggccccgtcccctataggtaacctttacctcccgcggctccttcccctccaagcgacccgcagccccgccccctccaggtgactcccccccgccaacccccgccaccacacacacacaccccctcgccttccgcggccctactccctccaggtgaccccacccccgcagctcctcctcctccggacaacctgcagccccgcccctgcaggtgaacggcggcccagtccctgcaggtgacccgcggaccctccccgcccgtcctactaccgtcataggaccgcctccgcaggcgcactggagccgattgcgcaggcgtggctctcacacgcgctgccctgttggcgttggtgcgggactgcgcaggcgcgcggggcaagagggtggcagtgcgcctgcgccgcgtcggcgtgcggaacgccgcggtgtctcggcgcctctgcgcgcgggaagatggcggaacaggctaccaagtccgtgctgtttgtgtgtctgggtaagagggcgccgacttactcatgttctgacgtcctctggagagttggatcgggcttgtgcgctgtaggttgtgccgccggcctaggaaccatgagggggaggaggccagggactgggaggcctagggtgttctaggagtgtgccgcagcgcccctgttccccatccgccccgtgcacccgcccagcctgcccgctaaacctgggtcccctcgcgcctgccatatatccggggctcttggcatctgcagccacagcccctacaagccaaggtactttctttgcgactactagaatccctctcgttcccctccaatgggcccaggtaggcctggaggttgtcggactgatgtggtctcttaggggcctcctgagtcctatgacaacattgttttgtttgctagtttccttagcccatgcttagatagggatctgagttaaagggagatgaagttttacggtttcgggtttcttgattgtaaaagccaagcaaaggagacctggaggtccctatataactttggcccatgaaaaatgaaagtgtattttattaatggcttttcaggaactttccagcttaaattattttcactcctagaatttcaacacttagcttgccttacttcaaacataatttattttccgtttggtcttcagggatcttcctttggtgtagcactacaaggttatattcctcggtgcctccaccctgagaggaaggcctaaattgtcagtagtccggttacttaaaaccttctgtgagtttgcatttcctgcagtttctgtttatttttacagactcctcactttatctcctgtaccttttcctgctcacaccctcgggacactgccttccagaacctttcgttgttcggtagcacttcacatgcttactgagccttcatcgctgggtgcccattatgcattttgcctggaaagcctttttattttataaagtcaaacctaaatatttcctcctttgctttcccagatcatgagttgcttccttatcgacatcttttattacacaaattttactataatttgtgtaatatagtaaaagatgtaatacagaaaaggtgtgattcctta

SEQ ID NO: 3731 - DNA, 4001 bp, Homo sapiens
ggtaacatttactagttttacagaaattttctttaaacagaacattagtgaaccaaataaccaattctcctcaaacatgatagacaggatggaggttatcactttgatcattttaacctccaacatagtaatttgtaaacatcagtcgctgcacaagtattttaataacaggccagcccacgggagtaaacagcaccttagcctcgagacctgttctctcaactgtgtgtacagattttctaagtcgttatgaattcagatattccctacatctcaataaaaacacctaggagaacaagaaatcaggacatgcatctcctgtaagcagaagagaaaccgagcacctgctctcttgcgggggggcagcttcgtgtcactttccaactcagcctccacaggagcatgggcatattggttcaaatgaagtgtaaaggacacatctctgtccacagtgtaaatcctatttccttaaggtggtcaaccgattgagaccagttccacacttccttaaagaaggaaaaactcagcagccagcgccaaggcccagcgatcagagaggacccgtgctcgccgcgaccccgcgctcgccctgtggccccgcgaccccggcgccaggtgttggggggaccggcccttcccttccgggtgtgaggggctggcccttctcttccaggttggggggctggcaaactcgaacctcgccggcgccctagccaaggcctcctccccgcgcctgccgcgggttccacgcacattccaagcgcgcgcattcgacccaaacttcagagacgcttctgtggaacggaaggatggtcgctgacacctcgccgttcaaatatcaggaagttaaaaataacacgaccatcgtcatcattccaaacttcggaatagcttttctaaaaatggaaaagacggtggctaaacttcaatcaaaatcgctgtggtcaagaaagtcctggaagctgctctatcttaactttgggcggtttgcggttaacagacgcgcgacctagaaaccccagaggcatcgccggttttcccgtcctcctcctcccaccaccgcccagctcttgagaggggagggtgctgccggacaggtgggtccccgggtactcactgctgcccgcccggccgcggcgccccgtcccgaggctgcccaggaagaggaaggcgcgctgccccgccccgcggacaaggaggccccagcgagggcgtacctgcggcaggtgacgaaggaggcggcgcaaaacacccgccgtgtacgtttcgcgggacaaaaaccacgcgcccgccgggccgcgctcaggccttcgccctcagggacttcggaaccgccccgtcctcaagatcgaaaagcccagagccccgcggcggctccaagcacggtgttgggggtgggggtctcagggagcgcccaggcccaaggccgccctggtccggcgtggaccccgcggggctcaaggcaggttccccgcgtgacccgcccagcccctctatgcgaactcgaacgacaggcaccacagcccgccacgtgcgcgagactcgcgctgtgccccaacccaggtgggcggcccgcggagccgcgaggcctgagcccgccctgcaggtgacccgcggcccttcctcctccaggtacccctctcctgcggccccgtcccctataggtaacctttacctcccgcggctccttcccctccaagcgacccgcagccccgccccctccaggtgactcccccccgccaacccccgccaccacacacacacaccccctcgccttccgcggccctactccctccaggtgaccccacccccgcagctcctcctcctccggacaacctgcagccccgcccctgcaggtgaacggcggcccagtccctgcaggtgacccgcggaccctccccgcccgtcctactaccgtcataggaccgcctccgcaggcgcactggagccgattgcgcaggcgtggctctcacacgcgctgccctgttggcgttggtgcgggactgcgcaggcgcgcggggcaagagggtggcagtgcgcctgcgccgcgtcggcgtgcggaacgccgcggtgtctcggcgcctctgcgcgcgggaagatggcggaacaggctaccaagtccgtgctgtttgtgtgtctgggtaagagggcgccgacttactcatgttctgacgtcctctggagagttggatcgggcttgtgcgctgtaggttgtgccgccggcctaggaaccatgagggggaggaggccagggactgggaggcctagggtgttctaggagtgtgccgcagcgcccctgttccccatccgccccgtgcacccgcccagcctgcccgctaaacctgggtcccctcgcgcctgccatatatccggggctcttggcatctgcagccacagcccctacaagccaaggtactttctttgcgactactagaatccctctcgttcccctccaatgggcccaggtaggcctggaggttgtcggactgatgtggtctcttaggggcctcctgagtcctatgacaacattgttttgtttgctagtttccttagcccatgcttagatagggatctgagttaaagggagatgaagttttacggtttcgggtttcttgattgtaaaagccaagcaaaggagacctggaggtccctatataactttggcccatgaaaaatgaaagtgtattttattaatggcttttcaggaactttccagcttaaattattttcactcctagaatttcaacacttagcttgccttacttcaaacataatttattttccgtttggtcttcagggatcttcctttggtgtagcactacaaggttatattcctcggtgcctccaccctgagaggaaggcctaaattgtcagtagtccggttacttaaaaccttctgtgagtttgcatttcctgcagtttctgtttatttttacagactcctcactttatctcctgtaccttttcctgctcacaccctcgggacactgccttccagaacctttcgttgttcggtagcacttcacatgcttactgagccttcatcgctgggtgcccattatgcattttgcctggaaagcctttttattttataaagtcaaacctaaatatttcctcctttgctttcccagatcatgagttgcttccttatcgacatcttttattacacaaattttactataatttgtgtaatatagtaaaagatgtaatacagaaaaggtgtgattccttatcgacatcttttattacacaaattttactataattatttgatagtctgttgaaatcccagctgagtttaattttgtcgatggcaataactgtggcttatttttcattttgttttcagctttaggacaatatatgataaacgctgactaggttttgtagaagttaacttctgtgaaagacgaattagaaggcttaccttgtttcacattggtagtgggcatcatttgatttttaagactcattgaaggctgaatgatgaaatcaataagtttattaaacagtagtttggttaaggatggttactaaataatattccattcccttgtatagttttggttggtattgtcgattatgctggcataatgcatcatggttgctgttaatggggaagtgtatccttgcatatacagtagtcccactttagctgtaggggatacattccaagactccccagtggatcccgaaactgtgggtagtaccaaacccaattgctgtcaattggaacatgtgtctgctcgtttcttacacccacaaatgtaataccgttgccaccttaactaagcatttaaaactgtggtcgcaacttttgcagtttgaggcaagacagcagacgatcaggaatttctttttccttgtttacattttcatggatagaagatttgttcgtactgtagatcttagtaacctcggtataagttttttttttctttccataagaagtcaaaaactttcacctttttacttaagggtagtgcttatggcttctcttt

SEQ ID NO: 3732 - DNA, 4001 bp, Homo sapiens
atatcgagaagatagactattctcttgttactggacgagggatcagcagagcgaagaagctgaatagcttcagtgtaggaccacaagtgccctgaggctgagaagttcttgtctcactgtctacaattaggaggcacatgcgtgactgactgcaggatgccaggatctggaaggttgaaggcattcatttccactgtttcgcctcagtaatttacagaacagagatgaagtacgctaatggaagcttgcttttgtaaaaggaaaataaatctcaggaccccagaatcactgagccaagggaaaagtcaagctgggaactctgtgaggcaaacctgcctcccattttattcctaaaaagatagctacaaaggtaagaagctacacacctccctcacaatttgatcacaaggaaattccctgtggacaacagatggaactcagactcatccctctgctcacgtgagacaaatgcatatctgattgtttcctttgccctgttgtttcactaagccagactacagcctaagtgactattcctgtaaatcacaaaggctaatcagacactcaaaagaatgcaactgtttgtcttctatctatttatgatcaggaagccccctacccacttcaagttgtcccgcctttctggatctaatcaatcttacatatattgattgatgtctcatgtctccctaaaatttataaaaccaaactatactcaaatcgccttgagcacgtcatcaggacctcctgaggctgtgtcatgggctgtccttaaccttgacaaaataaacttttaaaattgattaaaacctgtgtcagagctcatgtataaactcatggtttattctttcgacagatcaaatgctgaaacagcagagaaaaaaatccctttcttttattcagcaaaatataaatatctccaataaaatgtgatatattttggtgcctggaatgtttgaaacatgtaatttatcttaaaagtgaaaactggctgggtactcccagcactttgggaggccaagggaggaggatcacttgaggccaggagttcgagaccagcctgggcaacatagtgagacccccatctctaccaataaaatgatttaaaaaattagccagtcatggtccttgctgaagtccttgctacccaggaggcggaggcaggaagatcacttgaactcaggagatcaaggctgcagtgagctatgactgggctactgcactccagcctgggcaacagggcaaagccctgcctcaaaataaaataaaattttaaaaagtgaaaactgacttagggtcattttggagttctatttaaatttctttaaaagatgtcagtatcagttctttgtggctcaacacaggagtattaacaagatccagaccaggaaaaaaatccatcccaagattcatcaatggtattaagtcagatagaggaaggtatttccacagatactttatgcaaaattaagtgtgcatgatgcatgtgtgtagctctttactccttttaaaaacaagtggcatcacagcattagtgtattttggcatgttgcattttttaatcaatgttatctcagaatagttaaaatactgcctctcagtgtaggcttttcaaatcaacttcatgagatacaatttacaaaatgaaatctacctgttacaggtatagctcagtgtgcatggacagaggtagagaccactcctgatcacagcatccgtgccctctgtagtggtcactcctatacccagcccctgcctcaggttagtgccaatctgatttctgtcattaagtatgaattttgtctgtgccagaacttcatatagtcatcagtgtgtgttcttttctgtctagcttattttactcaccatgaaattactgagactcaaattgctgcacagatcagctcttcctttttgactgccaactggtattctaatgtgtggacatagcacaatttgtccttccagtcactgttgatagacaattgggttgtttccagcttttggctattacaaataaaactgctataaatattcctttgtaagccttttgtaaaaaaatgttttatggccggacacggtggctcacacctgtaatcccagcaatttgggaggccgaggtggggggatcacctgaggtcaggagttcaagaccagcctggctaacatggtgaaaccccatttctactaaaaatacaaaaaattagccagatgtggtgacgtgcgcctgtaatcccagctactcaggagcctgaggcaggagaatcacttgaacctggaaggtggaggttgcagtgagccgagatggcgccattgcactccagcttgggcagcaagaacgaaactccatctcaaaaaaaagaaaaagaaaaaatgttttatttctcttgggtaattacctaggataggaattgccagttcatgtggtaaatgtgtatttaacaatgtaaggagccacctaagagttctctaaagtgattacacatttcaggcttccaccagaaacttttataagagttctggttattccatatcctcaccaacacttgcaatgtccagtttttaaaattttagttattttagtggtacacagtggcctttcactgtggatttaattttcgtttctcagatgactaatgatgttgaacactttttcctatttctatatcttgtaaagtgtctgcttaaatcttttgtccacgtcctttaaccacttattattattattatactttaacggagttgtttttttgcttgttaatttgtttaaatttcttatagattctgaatattaggcctttgttggatgtagagcttacaaatattttcttctattctgtaggttgttttctctgttgatagtttcttttgctgttcagaagctctttagtttaagtaggtcccatttgtcaatttttgtttttgttgtaattgcttttggcatctttatcataaaatctttgccagcgattatgtccacaatggaatttcctagcttatcttccagagtttttacagctttaggttttacattgttaaaacaggctaaatgtgacctgagaagaactccatacttcaatatttgagtccttgtagatgaactgccacctaacttaatatgtagacaagattgagaacttaacttaggagtatgcatctgtaacaatagctcagtcttggccaatcccagcagccatacttcaaccactcatacactgctaagtgttcacataaggaaaatgatgagctgtaaccaatccagttgtttctgtacttcatttctgatttctgtacgtcacttccccttttttggtctataaatttgttctgaccacgaggcatccctggagtctctctgaatctgctgtgattctgggggctgcccgacttgcatatcattcattgctcaattaaactccttaaaatttaatttggcttaagtttttaacaacattcaagtctttaatccatcttgaattgtttttttgcatatggtataaggaaggggtcctgtttcagtcttctgtgtatggctggccaggtattccagcaccatttattgaatatggagtcctttccccattgcttatttttgttgactttgtcaaatatcagatgattgtagctgtgtagcatgaattctgggctctcgattctgttcattgttctatgagtctgtttttgtaccattaccatgctgttttcattactgtagctttgtagtatagtttgaagtcgggtagcatgattcctccagctgttctttttgcttaggattgccttggctatttgggctctttcttggttccatatgaattttaaaatagttttgttttctaattctgtgaagaatgatattggtagtataataggaatagtattgaatctataaattgctctaggcagtatggcaattttaataatgttgattcttcctatccttgaacaaggaatgtttttccatgtttgtgccatctctgatttctttcagcagtgctttg

SEQ ID NO: 3733 - DNA, 4001 bp, Homo sapiens
gtaggatctcttgtcaccagcttcgggagggtttttctttctgctttcctgggagggagcttcccacagggctggcagctgagacctcaccactgtggaaactccaacctcagggtctcagatacctggaagtatctgagcctgcagcactccccctaagatgtttctggttcagcaccctcacctctgaccctgatcattcaaactcagggtggaacacaccccatatcaccaaccccaggtgtcctgttttgctcttaccccgggctggattctgttcccataataagtttctctccaggtttgaggtcctgaggggttatagggcaggcagtggcaagggcctaatgatcaacctttaggctggttcaggaagtcctggtttacctgaggacatccaactcccagcccctctgtgcctctcagctcaccgcagacattccgacctacccatcagaggtagggcctaaggagagaggcatcaagggcctggagtgccagggaagggcggctatctctagcaaggcagaaaacagggcatgcgtctcttctctcccagaactgacacttcctccctttcacctctggatcctttctaaggagataaaggacccgctctcaactccatgtgacaacgaaaattcatggcctggcttttccccatccaggtcattctagggaagttccagccccagtcccgaccccatcacactttggcctggagctaaggctggggggaaatgccgggaagcaccaccagcaagaaatctgcaaatcccctttcatctgggctcaaacccctctgtcctgaggatgaccagacctactgtgcctgcctcacaggggatacaggcccacagttctgcgctgccccgaagctctctgcttctccacccttttcctctagcgaccgagtagttagttgacaacttcctgaattgctctgcccgctttagacaaatccctgctcgccgggtctccggcatagaaaggcctaagcatcgtccaagtcaggccgggctgccgctgggctgtggccgggcctgggggcccagtttaggcctctccgggggaccggcagaagccctgcgaacccctcccttgggccccggggagctggcgccgaagaaggtctacttactcgtacctttccttggcctcggccgcccggtcgcgctgccgccggttcttgaaccagttgctgacctgtgtggtggtgaggcccgtggcctccgccagctcacgcttctcgcggggtgaagggtaggggttgtgcgcgtaccactcgcgcagcacgctgcgactcttttccttgaagcagtagctggtctcctcgccgtcccagatggagcgcggcagcgggaatttgcggcgcacgcggtatttgcccacggcgcccaggggtcggccgcgcagcttctccgcctcgatgtagtgtgccttgagccacagctgctgcagcttggcgtggttgtgcggcgagaactggtggctctccaggatcttgtagagctcgcggaagttgccgcggtggaaggccaccacggccttggccttgagcacgctttcattcttgtgaaggtgctcgcaggcgggcagcgaccacaggaagcggcccagccgctcgatgttgccgccctgctgcagcacctcgcacacgcacgccacttgctcctgcgtgaagccgaaggtgggcagcatggacatggtgccggctgcgtccccgcccgcccgcgcgcgccctcaccgggccgcgcggtcccgcatgggagcttcctcgccgggccgtccgggccgagacgcgggcggggctggccccctggcccggcactggcccccggtgagccccgagtcactgccgtacgtccccgcgccggccgcgggtcccacgaagctccgaaccccaacggcccgcgcgcctggcccaagccctcgcccaagcccgggggccgcccggggcgccgctccgcatgctccgcgcccgcccgccgttccctcgctcgcttctcactcgttctccctcccgtctagctggctctcagctttcttaataatattattctaagcgggcatgaggcgcggcggcccgcgccctgattggtccggttatctgacccggggcctgccagcgccagacaatagtcggagtcaaattattcgccatggagacgctgtcagtcactggtaacccgagcctcggcgggccgggcggctccccccggccggctccgctgacagatcgccccgctccgcgcagaactgagggcggctctactggagcctggggcgctctgagagcctgggaggcggagaggggccgggttggggccggcggcggcggagattgacggggcggatgcccaaagagggagggaggaggaggacaggagagcggggggagcgggcgaagacgaaaaggggtggatcgaggtggggagagaagaggagagaagggaaggcggagaccgtttaagggggtgtccaggaggaaggggagggagaggggtggaaggagactccaggggaagaaagtttgggcagctttggctaggagagggctctgcagcctcgcccagaccctacagggttccccttctccccaggtcaccgcgtccctcccaggctctctgttcaccgggcacattctaccccggcgcaggccagtgggatgggagagtttggacgtgctcgggtgccgcccaaagacttggctttttctgctgacagcgccccacccccatcctagaaactctggactcagcggtcctcgagggaaaaggggagggagtagacgaaagaaatggggaagatttggcagtggccgcaggcggacgccggagaatcgacttcccggaggatcccgcctttcctccctctcctagccccgccggctgcctggcggcctgtaccgccccaactctgcgctctctgctcctcgccgggcggggactcagacttaaccccacgggtcccacagcccgaggagcgccaggcagttccgtgtggcctctatggaagctgactccggccggcagctgcgacgcagaaccccggacggcgcagacccgcagtctgcccaccggggcgggggagaggggcgacggcagggactctaggacggtggtggggcttccccggtgggtggtcggggaggagaacggaggcaagattcccagtcctcccgcttcgccgctggggatcggctcggctcctggccactccagcctgggaaccggctcgctgagctccgggatgaggtgctttaaaagggggtcctgttttttgcttctttgtcagggtgccaatggaaacatgtggtgctggtcctgtgggagaagggctcgcacaaaggtgggagaactgaggatgggtgtgttcttgctctacgttttgaaaagcccggggcttagctccttcccggacatgtcctttccacttccttcagtttcctcctcttcccccctcagctgctgcaggccaggagctcctagggccatactcagtgcctgacccaagccagcacaaatcctgggctctgccctcagccagtctagggctatggaacccgagtctaggccagttccttctttcccacccttttatgctttctatggagtttgtgctaggagcgcggaatgggagtctagagccctgggttcaacttttggttttgcttggtgtctatggtaaggcatatatttatgcctttgtgtttatttccttctctgcaagatttcaaaaattttccctgtgctgcagcattccggaagtcctttgggagtgttgtaggcatgagagaatggaaccctgggactcctcttaagactttagcttccaggggcctaccctggcatgttgaatgaggccacagggctgacaaagtaggtcccaagccagtgcgggtgcagaaaggggaagctttctgcagaaatccaggtggcatctttagagtctgtatctgtgggctgggaggaggtctgctgtgtccaggccaccctatc

SEQ ID NO: 3734 - DNA, 4001 bp, Homo sapiens
gtcccggccgcctaaactcgaacacacctccagaaactcacacccagcccccacccacgggcagctgtcagcagctgggggtcctgctccctgaagtacaccaggccctgggccttcctggctggatagagaaagacacaggctccacatcagggctttcacccaacttcctcttttctttctcccttctctccccactcctttcgcctatccacttctttccctctggttctttttctccttcccccaggcccagctcctgtgatgttggtcaagccctatacaattttgtgactttgtggccaacttgccggcaacgaggctgctcgtgcccgcttcccagcttagaggaccaaagggattctcctcggctgaaacaggagggcgagtacatgcacacgggcgtgcacacacacacgcacacgcacacgctaggcctctccactcccagcccggctctcctgctcccggtcaggcaacgtgcagcgttgcggggaaacaggcccgctgcgcagtggcctctggccttttccccttgtgatagggacccaggttcactttcctctctctgacgctagtggatttctctcggggttttgcaacgcacagaaataagaaccagatggcaaagagtgctttccttccctccctgtctctaggctccagaggatcgccgagctggcggcagggctgaggaggcaggcacgggtgcagcgcagggctaagtctcccaggggctgcgggtactcgggtcgcaagcacacactctctgccctgacgaaagcccctcttggtcaaagcaatcaatacacccacagccagcccggccccctcttccgcgcgtcccggacaagcggaaactttctccgactggccaggagtcacggcttccctggctctcagcggccgctccgctagccccatctcaacccctctccccttcccaggcctctgaggctgtagccaggccgcgggccccgccactaacctgttcttggccgccgcggcgcggtcgcgctgccgccggttcttaaaccagttgcctacttgtgtgggagtgaggccggtggcctgcgccagttcgcgtttcttgctggggttggggtaggggtcctgtaggtaccactcccgcaacaggctccgagtccgctccttgaagcaatgcgtcttctgctcgccgtcccagatggtgcgtggcagcgggaacttcttgcgcacgcggtacttgtccaccgggccgagtgggcggccgcgcagcttctcggcctcctggtagtgcgcctcgagccacatggcctgcagcttgccgtgagactccttggtgaacttgtggttctcaaggatgtggtagaggtcgcggaagttgcccgtgtggaaggcgaccacggcgcgcgcgcgcaggatcgactcgtgtttgttgatggcctcgcacgccccgggggccacgggcagcgaccagaggaagcggcccagccgctcgatgtcgcccgtctcctccagcgtctcacagacgctggccacctgctccggcgagaagttgagggtgggcagctggaacatggacaactcttccgggggggccctggagccgccgccgccgccgccgcctgctccgccagcaccgccgcctcccgcaccgttcccgccgccgctgccgcctcccgcgccgccgccgcctcccgcaccgttcccgccgccgctactcgccagaagtatggagcggtggtgagaatcggcgaagtttggcaacaagaagtgggaggaatagaggtctaggggggagcggaataccatggactgacctgagaggagaggagaaaattcagggagaggaagagagaggggaggaagaggaggagaggggcgatgaggaccaggaggagggagaggagaggggggaggaggagaaggaaaggaggggggagcaggaggaggagggagaggaggaagggcgtaagggacacccacaccccacacacatccacacacacacacacccgcgcagccacatagagagggaggtaggagagcggcccggtgcgcgcgcgcagagagagaacccgagacagagagggagagggagagggagagaggagagggagagccaaccaccgccgagtcaagattcagcgattccaccgcaatcgccctaatgacaacagcctcataatatctcccctaaatccacagtgagtgcagcattgaaacattttgtttcgcttttctattggtctgtggcgtgtcgttgtggcgttgccacggcaaccactgccaatcactgtcagccctgccaatcaataccgagaacgtaaggacggttttaccacttagccagagggcggggggagggggagagcagggaaggagggagaagtggggggataaagagaattttttttatctttgcaactcttaatctcgctacctccccctcctctcttctctcttctccctctctctcctcttttctctaccgctgtctctgagacttcttcttccctttttcctaaagaagttgatccagaaattcgaaaagccctgggcagagttgttgaatgggatgtgcaattagagaggggattttgttgggaggcaagagggtcccccaggctccacatagtccaggtcggcaggcaaggaaagacggctgaccagcccagcgggcgcggtttgcacatggtttgcacgtcgggccgcctctttctgcctatgtgagcactaatagtggcaaggaagaaaggagagatgagatcatggggcccaccaagcaccgaccttggcccagcgggccgtggcgccagccggggatcccggattccgagggtatctggcgccagggagcctgagcccaattcccagggtgctggaggccgctcttgcctcccccatcggtgcccatggaccgcattcacctcaactccctcttcatcaattaggcttctctttactccctccccggccaaggagcctcgatttcccccaccaccctgtattttaaaataacagtccaaacagtacacttctttccatcttaagaagcaactcaactctttgtttcttcccagaattcagctgcctctctgaggagtggtggaggagctgcgggagccgagaagcccaagagccctctggacccagaaaagtcctacagatgcccactcctcaccacacaacagaaggagctctggtcctgcctgccagccccagagggcactcaaactttggaggccagccacccggatgaagtgaataaggcctgaaaattgcttgtttgctcgtattgtaaaataataataattaccattattatttttaaactgtctaatttctctagggaaagtaacatcgaaagcctaaaacagacgccaaaaggcccatagaacacagagggccctctctgcctctggccaccacagcccctaggccaggcatgggtatttattcttaggtatgttgcttttaagaagctgtaatcagcatcttgagccgggcctccctttgtgaggcttctgtaactatggaagtgtgatttacgcagatttgtcggggtcagagacgtctttccctgagcactgtgtatatttagacaggactcggtttggtgttaaaaagtgtatatgttgaatggattcacacacagtagccaacaatgaccacattgtcggcccgtgtacaacgcgtattgaaacgcagcgcccagacttcaactaatctgccctcaataaagctgaaataattatcctaagctgcctttccagaagaaaaatcattgaggaattcaaaactttttttttttttttttaaagatcttttctgcattccgatgcagatctgggggcaaggcgccgtgtccacaccactttggtgatctcaatgagggaagagagaaagagaggttgagagagaatttaaatgggaaacctaacgtgactggggctgtgagtgtcccagcccctaaaccccgagctggagccctgcttaggccttgactcccgcagtgc

SEQ ID NO: 3735 - DNA, 4001 bp, Homo sapiens
ctgttaagctcagcagccggcttgcacctgaactgcctgcccctcaagccctgacttgtcaggtcctcagagacctcacagggggctgtctaagggggtgagggggccaagcttccctagcccagctcctcccttgccagctccttttcagaccacggggcctcctctctgtggtccgctgaggctatggtccccccaccctgttccagagcatggcatattgacttagaaatctgctgaagatattggaggctgggagcgttggctcgtgtctgtaatcccagcactttggaaggccgaggtgggtggatcacttgagctaaggagtttgagaccagcctggccaacatggtgaaaccctgtctctagtaaaaatacaaaaattagcctggcatggtggtgcatgcctgtaatcccagctactcgggaggccggggcaggagaatcgcttaaacttgggaagcggaggttgcagtgagctgagatcgcgccactgcactccagcctgggctacagagcgagactccatctccaaaaaaagagaagatactggaaatgcaggtgacagcatcctagatgctagatgccagcctgcagcctccttcacttctccctatgccctttcctaaatgctataacatgtcctcaaggctccaatcccaattccccctgggcctcttttccttcataggaaagctgagattcattgagaaagtcatttaatcgcttttagacaaatactgaagcaccccagctaagcactggggacggaagcaggaaggggcagttgccactgtccaccactgctgctcagacctggaagggacttgccacccatgatcataaggagaccccattctccagcccatgggatccttcaggatcctgtcaatcttgcaagcccccaggaagtttccagcatcccaccggttttgtgtctgggatggggatcttctcactcaggtaggtctctctgggaggtgcttgctgtggccctgggctggtcgggctggtcgggctggagatggaaccatagctggacccgcttagcctttggggacccttgtcacctgtgggggcccatgaagcatggtgagtgtcctgcctctttctggtggcccagagttaaagccgcctgatcctttccctcctcctcccggaaaagtggagaaactaaggtccctggcccccatcttgggtccatcacctccacctctcaaacaaacattccagatgtgtgggacatggcagcttcagaattactgtcctctcatgtgaggacagatgcccagaggcagatctcctgccacagagaatgcagagagaccctaggctctaagaagggcaagctgaggccacatgtctgccccttggctggacccctcaccttctccggcagcccagaaagctccaggggctttgatccacggacttcagacaaaggaaaggtagaccgcttaggggtgtgaaggactccacccagtgagattgagtctggtgtccagaactgtgttctagactaggactcccacgggggaccagaggcttccacaggggaccaagggctttcttgcttcctcaagtctccaccagcctagtgatctcctccactccaccccccaatcaggctctgtccctaggggccactactcacctgtcattgaaatgccgacttcaggtactctgggagtgtgagcggtgctctgggcagctcctcagcctgcaccccctctctgggcactggtgcaagtaagtgtgccagcccacgccctgttacccatccgcagccgagtgccctgcctcttacatcaacattcggttcacatcggccgattcacacacacacacaacatggggcgttgtgaaacattttccaaaggcagaagtggccagccctggcggaagggtctggttacccatggagtggacctttgttcccctcccagcctgccctgtgccccacaacacatctgttccccttccaggcaccccgtgttctgtgcctcccaagttagctctgatttcagatgcttcctgccccttgcgtattcatgtcaataccccatgaccacacccccctctgccacacacacacacacacacgtacacacacacgtacacacacacagagtcaggtctttcttattctctttgatctggagttccaagacccctcgttggcctaatgcgagtcttcatgtcctcaaaggcttcagtttccctttgagggccacagaggaaggcactgcagaagggacatgcattgaagattcagacccaggacgtccccagaagatggggcactgggatctggtcctggttcaaccactgattcacttgagattgtcaccagatcatgtcccttctcagagttgtttattctattccacccccaccctttttttttttggtttttcgttttttgtttttttttttagagacaaggtctcgctctgtcacccaggctagagtgaggtgtgaagtgcagtggtgccatcttagtttactgcagcctcaaactccttttttttttttttttgagacagagtcttactctgttgcccagactggagtgcagtggcataatctcagctcactgcaacctctgtcctccatgtttaagcaattctcctgcctcagcctcctgagtagctgggactacaggcatgcaccaccacacccggctactttttgtatgtatgtatgtatgtatgtatttatttactttgagatggcgtcttgctctgtcacccaggctgaagtgcaatggcgcgaccttggctcaccgaaacctctgcctcttgggttcaagtaattcttcttcctcagcctcctgagtagctgggattacaggcacctgccaaccacacctggctaatttttgtatttttagtagagatgggatttcaccatgttggccaggctggtctcaaactcctgaccttgtgatccgcccgcctcagtctcccaaagtgctgggattacaggtgtgagccactgtgcccagccaatttttgtattttttttagtagagacggggtttcactatgttggccaggctggtctcgaactcctggtctcaagtgatccacccacctcaacctcccaaagtgctgggattacaggtgtgagccaccatgcctggcatatagccttaaactcttgagctcaagagagcctcccttctcagcctctcgggtagctgggaatacagacctatgccaccatgcttgactgtttcttctattaactgaggggctcacaggagtttgagaccagcctgggcaacatagtgagatctcatctctacaaaaaatttaaaaattagctgggcatgaccgggtgtggtggctcatgcctgtaatcccagcactttgggaggctgaggagggtggatcacgaggtcaggagatcgagaccatcctggttaacatggtgaaaccctgtctctactaaaaatacaaaaaaaaacccaataaacaaacaaacaaacaaaaaacaattagccgggcgtggtggcgggctcctgtagtcccagctactcaggaggctgaggcaggagaatggtgtgaacccgggaggtggagcttgcagagagccgagatcgcgccactgcactccagcctgggtgacagagcgagactccgtctcaaaaaaaaaaaatttgctgggagtgatggcccacacctgtagtctccattacttggggcagggctgaggtgggaggtttgcttgagcccaggaggttggggctggcatgatcagtgagccgtgatcatgcccctgcacttcagctttggtgacagagtgagactgagtgaaaaaaaaaaaaaaagaaagactcaaactggctaagaggtcaaaaatgtagctgcccaaggatggcaagcaggtaagataaactatgagagaggttgggagtaagaaaaactgcatgggaagggagaaaaaaatgaaagaaagaaaaagaggccgggtgtggtggctcacgctgtcatccc

SEQ ID NO: 3736 - DNA, 4001 bp, Homo sapiens
gaagcacgaagctaaaattgaaattacagtcttccccaaagctacgcagagcgtggtggtagcggctctgcatcccacgcaggtgagtgcgggcttcacctttaattctgctctgcaggcgcttccgcgctcttcacctggtgtgtacagggcatttggggcctttagagggcgcacttgcggccagcaggctgaagaggctgccgcggagaaggctggggagcggagctgagctgagctggtgcagacagcataggagaaaaacagaaccgaaaaattcacaccgaattaggaggactcaacacatacatgcttcgctctgggtcagggactgtgcttggtggcttctcctccagtccaattggcatgaatgtccgcattttacagaggaagaatctgagccatcaaatgggagcaatgaagcttagaaaggttaaactagcaggctgtggaaaccaaatcggaacccaggcctgcaggatcccaagcctgttttacctcctcccacccccaacactgcctctctcccctctcttctctctctctctctctctctctctctctctctctctcacacacacacacacagccgcacacgcacgcacatgcaaacaaagaagccagacaaggcaaaggagaatctctctaagccccaataatggccctcagtcatccttgttaatgagcccgaatcaacttttcctcagaaagaaaatggcttaattggaaagcagagttcagctcctaaaacatcgtcatggccttggcagcgtttagccccgaaatggccgtccccggtctctcaccccatttcagcctctcttgaggagcctcaatcggaagcgctaagggggcccagcctctgcgcgccctgggtgcgggatcgtgcccgcggggtccggcctcgcgccccacccttcgagcgcccgcccccacccgcgctcggtgctcccgctcccttggcaccccgagaccacatccccacttcgggcaccccgcatccctcggcgcgttcggaagccagcagcccaccggggaagctgggccggctgcagcaccacagcctgtgcagagaggcatccgcaccccgcgaagtccctaggcgcagccccgggtcccccgctctgcgcctcatcactgtccagttcgagtcccaaacgggcctagagagcagccgggcagcgaggctgggctccgggcagaacgcgcttctccagccggacgggggtgcccaggatgacgctcgcggggccccggccagcttgagcagcaaggcgcgcgtccccaagctccgcctggcggtctgccctgaaccgccggttaccctgcccgcccgcagctcccaagcccccgcggcggccttggcactaccacctgccccggcacagtctcgccctccaccgcccgggcagcctttcccgagcctgccttgggctggggctgccccttcccgggggtccctgggggtgcagcggccatctgaaacctaggctccgatgcccccggcgtcgctccattccccaggcccgcggcgcgcgcggcctcggatactcaccgcccgaggcccgctgggctgcggcctcactcggctccacgcccggatcctcgaacttgctgctctgcttggagccccctgagctgctgggtgtagagatttgttgcaatgtcgcctatcatcctggagacgcgggtgcctgcggctcagctctccgcccggctcggtgcgctctgtgaggggctcccgggctcttccgccgctcgctgccaggccaggtgagcgtttggtggagctgaaagctcgacgcctcagtccaggtggctttaaaacgggtgcgtttggaggtgcccaaacctaacctgggcttccttccaatcggagcaatttcaaatcttcatgctcgttcattcctataccggctaattctggtttggcagggaaaaaaaatgcagtcacctcacatgcacactcttgtggccggttgaagtttatagctttggctgaggttccgctaaggcgctgcacatttatcactggcggaaaggtcctgaaatctaatccaggatgcaagtgagactagcagtagcctccatttctctgagatgggagagaagggatgaaacagaccctcactgaaatatttttggccaaagaggactcaaagtcccttattctctctcttttagagacacgggtttcactatattgccaggctggtctcgaacacttggactcaaggaatcctctggccttggcctccaaagtgctgggatcacaagctgagccaccgtgaccggccagtccctcattcttgtttccaccctgggtcccacctctccctgctctttctgcacgtccattacctaccttcgtgggcaccaggcacaactttcatctcaatacctccctacctcattcccagcagggcacacaacatagtgctttgccttggacagttttctgtattattgaagtgaatgtgtgagtcgatgaagcctgtgctgttttttcccgcctgaaggttttgcagtaattctctgctgctgttgtgataaactgccacagtaatagcagaggaaaaccacacaaattcactattttacagttctggaggtcggaagtttgaaatgggtcatactaggctgagatcatggtgttggccaccttgaaggctgtgttccttctcgtggctgtaggggagagccaccagcttctgcaggccgcccacattccttggctggtggctcttcctccatcttcaaagccagcactgctgcgtcattttgtcttctttccatactcacattgccttgtctccccttttctgcccccacccctgtccacttttaaggaccctggggattacattgagtccaatgagataatccagataatctctctattttaaggtcagctgattagcaaccttaattccatctgcaaccttaattcccctcttgccatgtaaggtaacaaattcacatgttccagggattaggatgtggacatctttgggagaccattattctgcctaccacagatttccttctttcttcttttcctttttcttttcttccttctttttcgtttctttgaaaaaaaattcacatgtatttcacattgccttcctcggtcacccaagctggagtgcagtagcatgatcacagctcattgcagcctcaacctcctgggctcaggtgatcctcccacctcagcctcctgagtagctgggactacaggcacacgccaccatgcctggctaatttttttgactttttatagagacggagtctcattatattgcccagactggtcttgaccttttggactcaagtgatctggctgcctcaccctcccaaagtgctgggattacaggcatgagccgctgcacccggcctatattgctatttcttatatcaattctgtctctctttttttttttttttttttttgagatggaatctcactctgtcacccaggctagagtgcagtggcaatcttggctcactacaacatctgcttcccaggttcaagcaattctcctgcctcagcatcccaagtagctggggttataggagcgtgccaccatgcccagctaatcttatatcaactcttgatttaaaaattattgaggctgggcacagtggctcacgcctgtaatcccagcactttggaaggccaaggcgggtggatcacttgaggctaggagttcaagaccagcttggccaacatggtgaaaccccgtctctactaaaaacacaaaaattagctgggtgtggtggcgcctgcctgtaattccagctgcttgggaggctgaggcacgatattgcttgaatctgggaggcgagaatcgcttgaaccttgagctgagatcgtgcctctgcattccagcctaggcaacagagtgagactctgtctcaaaaaaaaaaaagaaaaaaaaattttgagaaaattgtgagaaattgtggccaagtgagggcattttgatgaggtgctaggcttc

SEQ ID NO: 3737 - DNA, 4001 bp, Homo sapiens
tccttgagatgcagtgaaagtttctgattaaatgcactgagagaaggtggtgttgtagggaaaaaactggattaaagaaaaattagaggtcatttgagctattttacaactctgtaaattttaacaactgatggcaatgttaagtaattattgtctatagacatgcaaataaggtttatcccatgaaggacaacagtcttcctttcccccatggaaaaccagtttcaatattcctgatctatatttcattattcaatattcctgatctacgaatgtacccattctttgggttcttctttgatctggctactacagactcatcagtttcgtcactaataagtgccgggactcagaagccgataccccaaaatatggggctttgacatgctggagacctcaaggtctctctgaccttcccggctcccagctcaaaaaaacctttgtctgcctaagatccagacccaccaaaaggaacaactgtttcttttcccttccctgtaagaccaagaatataccccacacctgaacagacccattcacaagataatgtagcttattctctcccctgacccattcatgctccctagcagaagcccatccacttctgctggatgctcttcggctccctcccgtaacctcatttgccagggtagtctataagcttctgagacatgttgcagggtgggtaatcaatcactctgattctccctgtgtgcatgttaaataaatgtgtatgcatttaccattacacaaccttaaaagagtgttgttggtctattagcaataatgactgaaggaaattggtatttttgtccatttcagctactactaggataatcttataagatatttgggaagttatgttttggtctatttaatatatgtgcctcgatgaaaaaaacaccttttgccacaggagacaccaatgtttcaatattgataggagcaaaacacatgagagtgctttttttttttttttttttttttttttgaggcagaatcttgctgggtcgcccaggctggagtgcagtggtgcaatcttggctcactgcaaccttcgcctcccaagttcaagccattcttcagcctcagcctccagtgtagctgggattacaggcacccgccaccatgcccggctaatttttgcctttttagtagagacggggtttcatcccagggccaagctggtctcgaattcctgacctcaagcaatccgccccgctcagcctcccaaagtgctgggattacaggcgtgagccactgcgcctggcctgagagtacttttagaaaacattattcctttacctttttcaaacttgaagcactccgaaagtcccaaccttttgcacatttgcggcagcgacattgatttggtaaacagctgtcacactatttattatttgatgacttaggtatcctttccagcagtgtttttgtaaggtgtagttgcgttttcttttagtttcaattaactaaatttcaagtggttcccaaaaaagcccctgctctcttaaattcaaactcaccttcctttttcccactaggaaggaccttttctccatccttggattggaatttggaattctatgctaaaatgccttttcagttaaaatctgtgaacgtgggatgtaaccataggaggtgctggcactttacgggaatcatgattttatttaatctgcgcttccagaaggctgcaaatgggaattccagacaaacccacttgggtgaatcccagcacgcgggctgcggcgtagggggagagctcctcacgcggctcagagtgtagcccaggcccgcagagccaggaacccgcccccagctctccaaacccgggaagagagaggcgacactgctaagaccgagggatgacggtgcttcttcaattaattcgccccccgagatattcttacctacagaagggagtgtctgttcaccaaatcgctcacttgccgcacgaccacgcacccgcggctgtcggatggatccaggcgctcttggtgggaagggggcggagcctgcctggcccggagcccggggccacgcccccacgctttgcatatgcgaatccgggcgtccagacctttcatcccagtgtggaagcccagattttcctggcccagggccggttttctgggcagaaacagtcaactctgctgaaaggaacaacttaagtaatacactgacattcagcataatgaagcaagagggcctgaatccaacagcgatcgtttgctttatttacaaatatgtcctttcttatgaatccatttatttctctccaaaagcttaggagagagggctggctggctgtcacccccactctacacatgaagaaagtgaggcggaaggaagtaggcctagtaaatagagaagcctgggttttagttggggctcctggctccagagccagtggttataatcactctgcactttttttttttaaaggaggtagagtgggatggtttcctggcactttgaaaatctgatacaaacaattttttcttttcttcttctttttcttttcttttctcttttctttctttcttttttttttttttgagacagagtctccctctgtcgcccaggatggagtgcagtggcgcgatctcggctcactacaaccctccgcctcccgggttcaagcgattctcctgcctcagcctccaaaaattaacgcccagttaatttttgtgtttttagtagagacggggtttggtttcaccatattggccaggctcatctcgaactcctggcctcgtgatccgcctgcctcggcctctcaaagtgctgagattacaggcgtgagccaccgcgcctggtcttttttctttctttctttctttctttttttttttgagatggagcctcgctgttgttggccccgggctggagtgcaatggcacgatcttggctcactgcaacctccacctcccgggttccagcaattcttctgcctcagcctccctagtagctgggattacaggcgcccgtcaccacacccagctaatttttgtatttttagtagagatggggtttcaccatgttgtccaggctggtctcaaactcctgacctcaggtgatccacccgcctcggcctcccaaagtgctaggattacaggtgtgagccacagcacccggccacctggcctcttttcttttcttttctctttctttctttcttttttttttttttttgacaaagtctcactttatctcccaggctggagtgcagtggtgcaaccccagctcactgcaacctcaatctcccaggcacactgatcctcctgcctcagcctcccaagtagctgggcttgcaggtgggtgccaccacgtcacattaatttttttgttttttttttttggtagagacagagtctcactatcttgcccaggctggtcttgaactcctgggctcaaaggatcctcctgccttgcccgcccaaagtgttgggattacaggcatgagccactacgcttagcctgcaaagagtttatatattaaagtgaaacttcttattaaacagagaatttttttaaagcattacaaggttcttattggttaaaatggaaaaaatatttttatttctgttcatctcttggtggacttgaaaaaccctccctaaagataaacactgcgtggcttctaagggctaccagtggaagtgaaatggattaaaacaccccgaggtgtcttggttctctgtcctacgactctgcgttttctattttcatcttcctatgatttgtgaaaagtcctgagctgaaccttaggtgtaggagtgccctgctcattgtgcaaccttgcaaattgctgggtcctcccaaagaatattgtgaaattttcttaaaggctgaaggtgtcatgatttccttcacacctcttgaagaaaatgagttcaaattggaccttgagaagtttactctgattctctaatatctcatagccacagtctaaatcagagagagatattgaggaattcattcattcatgcatagaa

SEQ ID NO: 3738 - DNA, 4001 bp, Homo sapiens
ccctaacaaacgcccacctaacggtggggactggttcttgctcaaagatgcggccctgctctttcgattgtgcggtgcgccccagctgtttgcaaaggtgtggtcagcacgcaaaaactccagacgtcattttgatatttttaaaacgttaaacgccaccagcagccagctaagaattaactcttaggagtgtataagcatatgggtgtatgaactggagggcatccgagaactggcgtctcccactgggccctgggagaggtggagagtgttacctggccaggtcgaggaaagagtccaccgtctctttggggacaggaggaggccccgagtcctccagccccaggtcgctggactgaagggtctgcgcaccggatcctggcttgatgatgaacgccaaggccacggcgagcgccgaggcactcagtgtggtgaggccaaagtaggcgacagcgatgccgcccagacgcccgaggcagctggcatcgagcgaggcggcgcccgacaccaggctgcagaccaccagcggcaggatgatcatgcgcagcatgcggagcagcatctcgccggggaaggccaggtaggtgacctgcgtgcggctcaggctgagcccgcgcaacgccgcgcccaggcccgcgcccgccagcaccccggacacggtgagcagcaccagcgcttggcgccgcaggaagcccgcgcaacgccgtgcgcgtcccgccgcggtccccggagctccgggcccggccgcaggccccgcctgagcgctgtcaaggtagccgttggtctcgttgctcttctccatggcgctacacgccgctccgagctagaggtggcaggggacgtgggctctggcaaaagacggggttcccaatgaatgggtcggtcggccagttgtgctccgcaggttctgggaagccgccccgggggtctccgggcctggcgcaggagcaggtgcgagaaaggcgaggagaggcgcagagtgcgggttggagccgcgggcggagaggatcgcgcccagcctccctggagcagccgccggctggagatgatgcaaacgggagccgcgaacgcggacgcagacggggaagtaggagggcgcgccagcggccccagcccgctcacttcacgcccgccgtcccgccccctgtggcgctggccaatcacagcccgggagccgccgccgggagccgccgccgggagcctctggtccccacccgtgtcgcgggtgccgcagggggcggccgggcgggaggctccacccgaggccgcgggggcgcgggcggcgccggccaatcctggcgccaatagccgcctacccgcccggctaacggaggccggctccgggcgaccgcggggaagtgcgggctgaaggaccgcccgggctccttggcacctgccgggccctctcccgcggccgggatctgagtcctcggggccagagggcccgggagaacttagaacgcagcggcgttcctcctcctgaggactgtgggaggggagggaggggaggggagaagagaggaggagaggggaggatccctctctcccgggtggcgctttcgccccgcgcggcccgcgctcctctccagagctcgccggcctctcccgccagggggccgggcgcggtgagggggcccggggcggtcctgccgtcgcgtcccctcctgcggaagatcccttcttccaggggtcctcaggggcttgtgcggtaaagcacgccatggtgcccagcaaggccccggccttgagacaaaggacggaccggaggatggatgaataaggggagccttcgcacgcgctcattagggctctaacgcagccataccgctagagaaagggggctcgctgtgccaccaaacccggcgcccctgggccgcggaaccgcgcgcaccggggcgctcctgggcttgtgtcctggggccatcaggatggggctgggtcgcccgccaggcagctgtctgcggtatgggcgtttaagacgcaaagctcttctagaagaaacagagctctcacgccaccacttccagttggtttctgccacgtaaccaaagctgaaacacaagccactggattttaacctcttccgttcccaggcctgagccctggcgagaaaacagcgcagacggcggtttggccatcctgaacggttccttattgttcacgttctatggatttcctgtttatttcatcttttatttgatatctgctttggccacgcgagttacaagggaaacttctgctgagtctttttactgtatcacagttattatatttttatatttttttattctgcttgtgaattgttctttaaagacttccgtgggtggtcttttgttttttctttttccttccttccttccttccttccttccttccttccttccttccttcctccccccctccctccctccctcccttccttccttctttccttctttccctttctttcctttctttcctctctttctgggacaaggtctcgctatgttgcccaggctggtctcccagttcctgggcttatgggatcctccttggtagctggcaccacccactgtgccaggcaagggaagacttaattgtggctaacctcaattaaggaggaaggcaatttactatagatttcttgctataaaggagtcatcttaaaacatgtcatgacatatttgtgcaaatcaaaatgccttcataaggaactttaaggagctgtccaaattttgagacagtgagtattttattgcttggagccagccagctattggctagaacttgtaaggattgtgtgtggggggggggggggtgggcgggggaggtagtgtcagatgaagagctgcacatatttatatctggctttccagaatgcagttcatttctctatgtgcactgaagaaagagtaattcctacagacacacactgtgttttgccaatcagcccttccctttgttttgactaccacgtttatgcaaaagactctcaaatcatgctccagaaatgagtcttcggctgcctgttttacatcttcacctgaatatcctgcaggcgtcccaactaaaatgttcaaaaccaaactcatggttgccttcctcaaacctgctcatcccttcggttaaaacataattgatgacccagtcacctctgtgtgaaacttcaaagcgaactttgattcttccctctgtggtgccttctctcatctaatgaattgccaagtcccacagagattcctttcacaatatttatcacatctgcccatcccatctattcccactgctaccacactggctcagttcttatttcctcacttcttatctgggctattgaaatgttctcccaattagtcttcccacctccaatgctcctcttgttccaaccatcctgtattttgccttgccccaggctaatcttcctaatgagtaatatacatgttaggataaagttcagctttcacccagcagaaaagaaagagcaatgagggcatggcatctctctttaaaaacacttcctaaaagtcatacacattatttctcttatatttcatcgataagaatttagtcaaatgaccattcttttctgcaagaaacgttagggaatgtaatttttgttttacacaggcatccacccagttaaaaaattggagtttctgttactaaggaaacacagaaaaatgatattggaggacaactccttcatatcacttcttgttcaaaagctttcagtggctcccagtgaattaagaatgtgttcctcatcctggcattcgagacctaccatgatctggcctcagcctgctctctagccatgtgccctctatgcctcctgcaaaaatggcgctgtgtgctccttccacattgttttgcctctccatccagtcccagttcagataccacattcctcccatagcctttctgaatcctctttgcaccaactctgcttgctgcttgcagctttttatgctgtacctgtgcactccaaagctgcaataacagtcagtcaaccctcaattggg

SEQ ID NO: 3739 - DNA, 4001 bp, Homo sapiens
ttggtctccctcatgagtggtttttttttgttgttgtttgtttgtttttaaatacggatgtcctagatttttgttgttttaagtgaacaatctctctcttaagtgcagacagccatcacattttccagaaggagaaatggaaacagttggaaaggcaagtcactttgcccagggtttgctgtttttcacaacctcagcaatgaggagctttgcctcaataactcaagacaaaatatattaataactccaaggctcagaatccaaaatcatcagaaatctggagaaggagccagctggactcctcactcaactgaacctggttagatcagtaaatgcctccgggctgcagtttccccatttgtgaactttgggctaatggagaaaccaggagagaccaaggttttggataagtcacagaaaggatactacatcatctcaaaggatgaaatgcaacttctaagaattgcaaaaagcaggcaaaactaagtgaagatgcttctctccctcccctctagaactcacactttcgcacaaagaaaggcctttgaaacacagcactctgccgtggtctttactggggtggacagcaacctgtcccaagccccaagccctcaggagaggcatatttctgggcaatatgtctcactcaactaaccccagccctattatccgtgggtccactgataactgcagaaaattgccagcttccttcgcagccaaggactgtaacagagaaggccatagattgcaagccggatgacccaagaggcaaaacttaaccaatgctcccagaagcttttaggcaccatgtgggagaaaatgaggcgaagccactggggcgtggtcggaacatttttaccggggagagcagcgcgagagtataaggagtaaagaacaggcggggcggctggctcttccctaacaaacgcccacctaacggtggggactggttcttgctcaaagatgcggccctgctctttcgattgtgcggtgcgccccagctgtttgcaaaggtgtggtcagcacgcaaaaactccagacgtcattttgatatttttaaaacgttaaacgccaccagcagccagctaagaattaactcttaggagtgtataagcatatgggtgtatgaactggagggcatccgagaactggcgtctcccactgggccctgggagaggtggagagtgttacctggccaggtcgaggaaagagtccaccgtctctttggggacaggaggaggccccgagtcctccagccccaggtcgctggactgaagggtctgcgcaccggatcctggcttgatgatgaacgccaaggccacggcgagcgccgaggcactcagtgtggtgaggccaaagtaggcgacagcgatgccgcccagacgcccgaggcagctggcatcgagcgaggcggcgcccgacaccaggctgcagaccaccagcggcaggatgatcatgcgcagcatgcggagcagcatctcgccggggaaggccaggtaggtgacctgcgtgcggctcaggctgagcccgcgcaacgccgcgcccaggcccgcgcccgccagcaccccggacacggtgagcagcaccagcgcttggcgccgcaggaagcccgcgcaacgccgtgcgcgtcccgccgcggtccccggagctccgggcccggccgcaggccccgcctgagcgctgtcaaggtagccgttggtctcgttgctcttctccatggcgctacacgccgctccgagctagaggtggcaggggacgtgggctctggcaaaagacggggttcccaatgaatgggtcggtcggccagttgtgctccgcaggttctgggaagccgccccgggggtctccgggcctggcgcaggagcaggtgcgagaaaggcgaggagaggcgcagagtgcgggttggagccgcgggcggagaggatcgcgcccagcctccctggagcagccgccggctggagatgatgcaaacgggagccgcgaacgcggacgcagacggggaagtaggagggcgcgccagcggccccagcccgctcacttcacgcccgccgtcccgccccctgtggcgctggccaatcacagcccgggagccgccgccgggagccgccgccgggagcctctggtccccacccgtgtcgcgggtgccgcagggggcggccgggcgggaggctccacccgaggccgcgggggcgcgggcggcgccggccaatcctggcgccaatagccgcctacccgcccggctaacggaggccggctccgggcgaccgcggggaagtgcgggctgaaggaccgcccgggctccttggcacctgccgggccctctcccgcggccgggatctgagtcctcggggccagagggcccgggagaacttagaacgcagcggcgttcctcctcctgaggactgtgggaggggagggaggggaggggagaagagaggaggagaggggaggatccctctctcccgggtggcgctttcgccccgcgcggcccgcgctcctctccagagctcgccggcctctcccgccagggggccgggcgcggtgagggggcccggggcggtcctgccgtcgcgtcccctcctgcggaagatcccttcttccaggggtcctcaggggcttgtgcggtaaagcacgccatggtgcccagcaaggccccggccttgagacaaaggacggaccggaggatggatgaataaggggagccttcgcacgcgctcattagggctctaacgcagccataccgctagagaaagggggctcgctgtgccaccaaacccggcgcccctgggccgcggaaccgcgcgcaccggggcgctcctgggcttgtgtcctggggccatcaggatggggctgggtcgcccgccaggcagctgtctgcggtatgggcgtttaagacgcaaagctcttctagaagaaacagagctctcacgccaccacttccagttggtttctgccacgtaaccaaagctgaaacacaagccactggattttaacctcttccgttcccaggcctgagccctggcgagaaaacagcgcagacggcggtttggccatcctgaacggttccttattgttcacgttctatggatttcctgtttatttcatcttttatttgatatctgctttggccacgcgagttacaagggaaacttctgctgagtctttttactgtatcacagttattatatttttatatttttttattctgcttgtgaattgttctttaaagacttccgtgggtggtcttttgttttttctttttccttccttccttccttccttccttccttccttccttccttccttcctccccccctccctccctccctcccttccttccttctttccttctttccctttctttcctttctttcctctctttctgggacaaggtctcgctatgttgcccaggctggtctcccagttcctgggcttatgggatcctccttggtagctggcaccacccactgtgccaggcaagggaagacttaattgtggctaacctcaattaaggaggaaggcaatttactatagatttcttgctataaaggagtcatcttaaaacatgtcatgacatatttgtgcaaatcaaaatgccttcataaggaactttaaggagctgtccaaattttgagacagtgagtattttattgcttggagccagccagctattggctagaacttgtaaggattgtgtgtggggggggggggggtgggcgggggaggtagtgtcagatgaagagctgcacatatttatatctggctttccagaatgcagttcatttctctatgtgcactgaagaaagagtaattcctacagacacacactgtgttttgccaatcagcccttccctttgttttgactaccacgtttatgcaaaagactctcaaatcatgctccagaaatgagtcttcggctgcctgttttacatcttcacctgaatatcctgcaggcgtcccaactaaaatgttcaaaaccaaactcatggttgccttcctca

SEQ ID NO: 3740 - DNA, 4001 bp, Homo sapiens
ttttaaaattttccaaggccgcatacctatacaccaatcacatctgcaaaagtaccactgggtttgaaatcgattgggtgtgctccatgaaaggtcttcatacgggggagaaaggttaccttatggaggatgaatgcacgaaccaggaagaataaaattccagacataattccagaaagcagtggggacacgaaccaagacatcactggaatagaacacattaagaaaaaatatcaaataatgaaaatcagaaaccaaaaaccactttaaatgtttaagagttcaaaattcttgggtctgtccctcgacgttagaacacatcctcccatacctaatgccatggtaacatatgacgaaaacgaaaattaagaagccgtttggaattaaacataccaatttttatcagttcagaccacttgacaccctcctgcccctttgccacgagggagaaaccaatagttgcaccaacaatacaatgggttccagaaatagggagcttcaaaaacgaagccacgagttgccacacagcagaacctgaaacatagtaaagttttattaagtaaatatcaaaattccattatgtaagtggcacattcagaaaggttaatcggaaaggttatgcacaaaaatggaaccacccatgatacaaatttgctcacccaccacgaagaggacaaaacataaaaagaacttaccaaacatagcactgactgagccggccatcagcagcccttgagtcgagttgtacatctccacgtcaatcaagcccttccggatggtttcgctcactttggcccccagtaagacagagcccactgtttcaaagatgctagctaggatgcaggcttgcttcagggtcactacacctgagcccacagctgtaccaaaagaatttgctacatcattggctcccacggagaatgccaagacaaatgcaataatgaagcccaggatgagcatccataggtagtccaccaaaggaccagaagcggcggtagcagctgtagtactggtaatcagcgttgccattctctggagtagtggttgtttagtaagagaactactgagcgcctttcaagatgtgtaaacagaatatgaggtatcaaaaatgctataataaataatatatattatataaaattaaatactgtaaactacggcacagaaaccgagctggggagttactgctatacgctgcgtatgggcatctgttgtctggggtttctttggctcaggagggctaaaagcacggagcagaattccatggcggagaagagaaaggacgcaagttcatcctgcgggggaggggggaaataacaatagctgcgtgcccctggggggccagtggggcaccccgctctacccacgcgcccggggtcccgcaatagcctctgccggctactccagacccccatccccagtaggacgcgcgagaaggagaggcacgtggctccgggtcctccgcggcccgcgcgcgcccagcccagcccctgcgctgccagcccgcgcgcgccctccgcgcgaaaatcggaaaagggccgttcccgcgcgcgccgcccggggaccgccaaaaaggcccgcgggcgggcagacgggcggagtggaggcggccagcggcgaagagagaagccagccgcgccgcccacggcgtccgcctccagcgccacggcgtccgcgcccggccccggggagaagaaagagcctttacgaggcggcgccactactcaccagggaaaagggagggcggagcgggagacgaggagatcgaggcgacagcggctggagccacgggcacacggcccgggtcggcggcaccggggacagctcagcgggactcacgaccttcccaggaagcagccgcgggggtttcagcggccgagaagaagaaccacgcagagagcgccggcagccatcactccagcggagcaccccgccggcccctacttatagcccgcgcagcgacccgcgtgaccccgccgcgcctcgcgccggccccgaagccccgcccccggcatgacgcagccctcctcggcccggcgtgcccagccgggtgagcccgacggtggcgctcattggcccggcccgcttcggcggccacgcccccagcggggagccggtccacgtggggcgggacagccccctccctgcggcctcgccctggagtctcggcaccgtctggccccgccggctgattacagccagagatcgagggggacctcgctgtccccctagaggccgtcatgcggggttacagaggctgcgaccaaagtcattcctagctcctctctcggggctccggaaagccgtccgcgcctccagccgcactttcagcgcacgcaggacctgccgcgcccggtggccacacccgtccctctgccgggtgacgctgcgggagatcttgcgccctggggctccggatccagttctggcacgttgttgcacctgtgacttgtccttggcctggcactgtccctcgcctgggggaagcgggggggtgggggggggatgctcacgtggtcgctttgctcccgcagtcatgcacttgggtgaaaacagactgaagagtcacgggaaccagcttgtctccccagttatggcgcagagctgcaaggatggctgtgggtcattaatttctccgtggctgacctgtgtttgtaacgccgcagctgttgcgagggggaaggacactgcttcggattcaaattctgactccttgctgcagtgtgtcaccttgagccagtcccagatctctgcgttctcacaattgtaaaatgttaacagaggctgcctaccttgtggctggaattaaatgaattaacgtgtgtgaatgtgactagaattcagtacatgttcaggaaaagctgatttccgctttgctgttaccgtgaatattactgttttagggtgtagaaaagggtggaaggggatgttattgcatcctggaagcttatccttttgaggtaaagattgatttctggtcccctgcgtggtatatagtgtagttttgacattatttagatgtgttatgcacatttgggtgttgattatatggcttacgatcaagactaaccagtcatgccgtgggagattaaggtcgtggtctcttgtcaggattgtagtgagatttaaaaattccagccagaaataccaggcttagaatgctctgaagccctccccacatttttgccatctctagcaggagggcactgcatagcagaaacaaagacgttgtaaattgttgctgcctgagtcatttatagaggcttaaacaacctgaatgtcctctgacctacctgtaacatttgatggagttgtatgagtaacttacaaagctgtaggtcccaaggtcggtctgaaaaagaaagttcatatccgggagcactgaccccgtagtgtaatcctggcaccttaaaacgtactgctccctccaccttcacttcaaggttatgaaaacattgagtaaaagggatgatctgttcaaagtccttagtgttctgccaatttaaaacagtaattttcaaagcagttatttgcaaggaaattgcctagaacttctcccagtgtgcggttgttttgtgtgtttgtgtgtgtgttttgtttgtttgttttcagtctgtccacaggcgtacttttataggtctgtgatagtaggtagctcttcaagttggcaaacacctgctggacaacccctgagagattcatctgagtgagagagcactctccagccccatcggagtgggtttgcagggaaatcataaggtagagattcaaaggaattcccttgcgttgcaaatgaaaactgtatcttcagactctgatatagtgtaatccttcctttttaggaagaaatccttatctttccaacactgagatgcttctgccgaagagtagaatgggaggtgaggaattggggtgggccctcactgctttgcctccggatcagtagggtacagcccttggagaccaggatcttccttggctgggacaccttcgtcctcccc

SEQ ID NO: 3741 - DNA, 4001 bp, Homo sapiens
gccttgcaggggtagacagaagccaaaaggtaggggatggagtgagcactccaggccagcccttctgacctctactgccctgcccagacccacacataccgaaaggagccggaagacagggagaggagtgtgagttgatgacgttgaagctcgcctccaggggcacacatgaaactggcaggagcccaggtgctgagaacagaccaccatgagcaggataaccctaggagacagaaggctttaggagcaagaggcagtgggtatcctgagggatgggaaaggaggtgggagtgggcagaatatcataagagcggggggtgataccagagaaggaaactcccatggaaggaataggaagtgaccttgggggacagcagaaaacagtgtgaaattcaaggagaccagatgaatcaaggaaaagtcttggattccaaatataaaatatgtccctattccagtcgctgctgaatctgataggaccagcagttctgccctcccctagtccccccatacacccccactgggcaccatcccacgcctctcaggactcacgtacagcaaggccaacccccagtgtgtgaagcagaactgggctacctccctgtgggcagagagccctgccacaaccaggctgggagccagcaccaggggcccacagtgggggaacacgtggccgggactccccagcagccccatcatgccctgcagcagcccagatactaccactgccccggacacctggtagaagagaggagaggatggagagaaaacattctgctcaatcaaactggcctcagcctggtcttcctaattctaagtatgggttcctcccaaaactcctttccaggagcatctcagtctgtgcataatggaaacaagagccccccccaagcctggcaccacccttatcccttctcacctccagatacccacctcctggagagaagtgttccagtgccccaggccatggcagctaggtcccctacaaaggtgcagcatgagggaggctaggaaaagtttggggcatggagaagagaagggtgaatggaatggagacccattgctctacagtcccactcctggcacaggtccaagccccctatagtgtcacagtctcaccactgcccaatctcaattctgcacccacctacacctgcatgctcagatgagaacccagccccacccttaccccttgcccttgctctgtgctcacagtttccaggtgtctggatggcccggggtagcttctggctggtcagcaccagagcagggataaggaactctaaggatggagcctggacaagaggcagcctgtaggaacagcagccccagcaggtctgggactatgtggcagccagcaaggctcccccaaacctctcctaccctccaggactctgcccctctctccagggaggttcctctcacctgctgcccatccaagtttgcaggatggtagacataccacatgaaaagaagctggaggccaggagctgagaaggggagtaagagagtcctcctggggagagactgcaaagcaggagcaggtgggagacacagagcagagaagccatgaccaagacatgctgcaggtggaggaatggggagggcagtcttcagagaagtggaaatacctacaatacttccagaggctttcacatgccacatctacacctacttccccacacacaccatcaggcagcaccaactcctgcacctctgcctcctacctgcagagccagaagacagctgaggccccaaggcagagatccacacaaagggtcccaagagtgggtggagggattctggggagcaggtggaggcaagggggccagggcatcctgggagcccactgatcggagttggctgggattgaggggtgatcggctcatgctgccttgcctttcgctttgtcttggctgcccgggaccagagttaagtagagagagtaagaggtcagagtttgggtgaagcctggggtggggagaaggtggggagagggtgggggtgtcaatgaagcggagcaaaggtataaggaatttggggcagggcaccaccctttcacctttgcccagctgttgtgcaaattccatcagccattaactggggagctgagttctggggccctcccccgagaatcttcttccagatttcctgcccctagaccaggctgtagaaagtaggataggaggggtggggaggagaggagctcttcaaaataatatggggaaattttgcagactttattccctcccatttaaaactatcactatttgatccacagtcctcacccctttcagaaccaaggcccctggactacttcaaaatgaaacttgtgggctcagtatggtggctcatgcctgtaatcacaccactttgggaggccgaactgggtgtatcacttgaggtgaggagttcaagaccagcctggcaacatggtgaaaccatctctactaaaaatacaaaacttagctggatgtggtggcacatccctgtaatcccacctactcgggaggctgaggcacaagaattgctcgaacccagaaggcggaggttgtagtgagctgagaccgtgccactgcactccagcctgggtgacagagtgagactgtgtcaaaaaaaaaaagaaaaaagaaaaaaagaaacttgtggacaatatatcctacatcacatgtgacaaccacaactacctgaaacatgctcactgtaaagaataaaatttataataacatgtatttcattacgtgaaggcttaagcacaactaaaccagaagacaataaagtacaatgaagtagtccaatcccacaccctatgagaattgctgtggttgcaatagctgcaatgccagctgatattggtgctttatcggtgactctgatgttggtaacccgattttcaaaatggcaaacaaactcttggttaaggtgccaagcaaaataaagtcgtcttaatttacatgggaatgaattcctagcaaactgagtcttttcaaaacgcacaaacgctatttcacgtttacatgtgcaaagacagttctaggctcagataaacagggttttcatatacataaagctggtcattcaaaagttgtcttgggaattcttcacagtacgggaggtctgagcatttcatgatgtctagcatcccgcccaggttgacgaaatgccagtagcaccccatccccttgaatccttttgacaatgaaaaaatagcccataaatttccaaaatgccccctagggggcagaaccacttcttccgtgaagtatcctcagcagtcccaaataccctcagccaagctgcccagactgttttccttcctccagtgatgacccagccttggagttcttcaagttcttggaattgttaagcaccatgtgaccatcaccatgtgtcagaccagtgaggaggtcaggagagagaagcgtcctcgtggcttgccctcaggagctcacaaggctctgctggttacaaggcctggcccctctccacgagatgtgctttgggatccacaaggagagtgcttacccagaacaagtgacagacaaggccaactcagggacaggacagtcaccatgtgtgtcccatggcatcccaagttgagcagtgctagggcccagggtcctgggagcaggaacaaagttggaaatggaagcctatgcctatcaaacgataggaaagtcctgagatgaggctgagaaaacagtttgtgagatgacaggatcaggaagcagggaggcttggaaggcagatacagggaggaaaaatcttcaagggctgccgcagaaggaaaagtccaggccatgcaactgaaactgtttattgaaacctcagttctacaaaagcgtgaaaaaccctgatacaaagcagtggccagagaggcctgggaagagaatacctgggagaagaaccagaagagagggaaacctaggagcaggacactaagagaagactggaagacaaaagatcagggttgaaggtcccagcagtccttggctccatta

SEQ ID NO: 3742 - DNA, 4001 bp, Homo sapiens
gctccgcttcccgggttaacgccattctcctgcctcagcctcccgagtagctgggactacaggcgcccaccaccacgcccggctaattttttgtatttttagtagagacggggtttcaccgtgttagccaggatggtctcgatctcctgacctcatggtccacccgcctcggcctcccaaaatactggaattacaggcgtgagccaccgcgcccggcctacatctacttcttaagtacaatttcctgcataggaaacttttgaaatttaagaaaagaaagcaaaacaaaaaactaagccaaccttttttttttcttttttcttttctttttaagtctacagccaagtcactgattctaaaagcttagaagttaaggtagaccattgcaagaatcttaagaggtaacattttggggtaaaatccccaaggcttaaggatacaatgtaagtaagacacacaaattaagaatagctataatattcttatctctgtaacaaattacatggaggatagctcataagtaggaaaactttgtaaacatgcaactttcaaggaagagaattttagtcatcatacctattaactatacaagaatgccaatacattttgaaattttatcttggtctctgtgcttaagctggaaattttttttcaaaatatatatcttaagtcatgtaaaaaaaaaagcagtaacttgaggaaaaccttttatcgacccttaattaaaagaaggccttaaatcaaaccttattaagagaagtataagctatattgtccggtcatgtttgaaagaatacatgaaaactgaacattcctcaaagttaaggcatgaataggactaaggacatgtacgttttttgtttttgcaatgaaaggcacactatgcaagccaatttacctgtagaaatatgtttcttaactcatgaggatcccctcgcttagttgtctgcacctgtaagcaaaaaagaaaaaaaagccagttaatgcttcactagagaccacacaatctcttcagattagaggtcacatggctaacaatcaatgctcctatcttttatcatttagtttaaaacaaactaaaagccctaattgctgataagaactgtcaaactggataactgtgactagagggcagaaaaacaggtgcgaatagcctaagatacagcaaagctatcggacagtgcttcctctggactggaaagggaaggcaatgaggatcttttactttattccacatctactagcaacacagtagtaaccacccaccttcaaatcaagaagctaacaagagtagatcaacaggaaagttaaatcacccaaattaatcacttggcctagcagcctttctccataaaaagcaaacccaacatgtaattatctccgcgtccctctccccatccaacctaaaatatgagagctgccacaaatacaaatactttccataccctgcaatctgcaacgcaaaagccaaccactgccctcggccttattgaggccccaaattactcaatacttactccctcccccaccgcaattcactgataccctaggtatccccagctttacttgccacttcctcccacaccctttctgatgccctccaactccggactcacaatcccatgcacctaggacaggacattactcttccttcactgacccgtgttaccgtacaagccccttcaactcacaatccctcctccttcccctcccccagccgggcatcccctcctccggtccaagccccgcacagctctccccgcagcaagccggagccccaggacaagctatctaagacctagacaatgaataaaatgggaagcagtggggggctgcaggcagggcgctcggaatgtctcttatgcaataaaagcagcagcagagagttggagtcaccttgaccgccatgctgtgctcggaagccggggacgagcgagtgagcgagcagggccgagctgtcagggcgcgcgcgcgccgtcttcccggccgcgcccgccctccctctcgccggcgccgcgcgcgtccctatgcaaatgaactcggggcgcgccgcgtgcggaaaggggcccggcgtcccggccagaaaggcagctggtccagggccggccggccgggcggaggagggggacgcgcctcccacggggaaaacaagcgcgacccatgggatcccgacgcgccgcgtggttgccacagctaggtcgccgccaggaaagccccaggtttcctaaggcctcttagtgggtgtggctttgggcaccgaccagccaaagtcgttttccccgaggcttaaaggaacatttggggcctatactgagcaaggttccgacggatcaaagagcacttcccattaataacaatgaattaatgacaactgatggcaaataccgacaaaacaagattgggaaccactcactctagggaaaacctacgtaaacataatttgagaaatatgctcctaaattggcatgggacgaatacgctgaatttatttttgctttgcgtgctattacaacggtttattagtagactcgctccactttcctaatcacccaaatcctgtgtgcaatgagaaaaaaaactctatgtgtctttgacagggctggcaatgaatcgcttgcccatacatgaacagaaagtaattctccattcgatttctagccctacctaagaagtagaagaagcagtaactctatcttgaaccaaaacaatgtttctaaacccgtcttgccaatatcactgtattaggctacatattgattcaaacatgtatgggcatccattatatgcctgacatggtcctgcttgtaaaaaacgcaaataacctatagcccccaccctctaggggcttacagatggtcaatgcttctccacaaccccaatcacatgtgtattgtgtgtatgtgtgtctgtgtgtgtgtgtgttgagactgagtctcgctctgtcgcccaggctggagtgcagtggcaccatcttgactcactgcaacgtccacctcccaggttcaagagattctcttgccttggcctcccgagtagctgggattacaggcacccgccgcaatgcccagttaattttttgtatttttagtagagacagggtttcactatgttggccaggtttgtctcaaacttctgacctctggtgatccgcccacctcggcttcccaaagtgctgggattacaggcgtgagccaccgcgcccgaccctgtgtatgttttcatttttaattttttgagacggagtctcgctctatcgcccaggctggagtgcagtggcgccatcttggctcactgcaacctctgcctcctgggttcaagcaattctcctgcctcagcctcccaagtagctgggattacaggtgcacgccaccatgcctggctaattttgtatttttagtagctatggggtttcgcccaagccacttataattagacactagataaatgacacactttagggcttctctatactgtacaactattctccctatatgaacatttgctgtcattgaaataaattctcgttttggtggaaatggaagagaggggtatcaaaaatcagaagaaatagttgtactcctgcagttatgtcttttcctgaactgtcttcctcacagcctgactctaaatcctataaattatgcagtggagatgatggtgatcttatttttggaccacagccttctttattcccttggtgaagcaataacaaacagttttcttttcagtgaattttggaaggaattcatggaatgagctgctctagacatatatggctgtgagtactctatcactatactaattatgtataacctggtatttagtaggacactatataatcagatggaggattgaactagatgagctttaatgcttcttcaaacactctaatttcatgatttaaaaggagccaaattttagttaataaacatttattgagtgccttgcgtttgtgtaaaacatgtgttgcagccgggtgcagtggctcacacctgtaatcc

SEQ ID NO: 3743 - DNA, 4001 bp, Homo sapiens
agatgagacctagttggagaagggtgttccagacatgtagaatgacaaagacgaggtttgtggcttggagtctaagcgtgaagtgtcaggggagggctgaggaggaaagtgatgggctcaaaggaacataaagggagatacactgactgcttgaacaaatatctcctgagcactgagatgaccttgctgatgggaggaagagaggagaagagaggaaatggaggggtctagaacaaaccaggccagagcttccctggaggggcaggtaggttaggaaatgcctttcagaaaatgctgcaggattcggtgactaatggtcatatgagtgaagatggactggagttggagatgtgagtctgaagcgcagaggctgggtggctttgggggcagtgggcaacattcattccctggccttgtaaggcacagcacagccagtcatcaaggtggccacccatcaacaggctgctcccttttgttctgcataatttgggcactaaggaagcctggctgttggtgtgtgggggtgtgggcatgtggggtggctacatgctgtttagagacaaggaaaggctgtttcctctccctggccctccgaaacccccaaccaacaaccgatattgagcggggaagaggggtgacgtagcaggggctgaaccaaaatcaaaaggacacctgaagagatgccaggcctacggcagagcccccaccgcgtctctgcaggcccctgcaggaaggggtccagctctcttctgctcaccccctcccccaacccagcttgaaggcccccacccaaagaaagagcgagaagcacacagaagcaccacgtcagagacaaagggaaagggactaggagagaaacagaaagattgagagaggtgggggaagagaaaaagccggagaccctgccaaattccggagacaaacggacggtcagccgacagacaagatggcccacgggggtgggcagggaggtcggacggccgctcagaggggcaggtggacggtggcggcaggcgcgggggccggcggggcgcgttggcggttctcctgccacccccggcccgctgtcccggccgctccgcgcgcctcatttcacacctcgccgcccccggccccgtctgtgcggagccgggaatacccccgctgcccagaccgcacctgctccttcctcgccgccccctcgcttcccggcggccgcccgccccccaggggcccgcaagacccgcgcggagcccggcccatcctcgggccccggcgcccacagctggccgcggctggagggggcgcgcggaggggagcccccggggcctacagagggagctctgaagcctgggcagcgaggcgctcccgccctgggcccggggcaatgcggaccttggcgcaccgggcgagggctccggcccgaccgagcggcagctgctcccagggaaggcaggcgccgcgggggtggcggaggggtccggcggcctgggacgccggccggaggggagtgagaggccgcttcacccgaggaagtcaggcggccgggaggaggcgtagccggctgtgtagggctgggcgctccgtgtggccagaggggatgaagcggggtgcagcggagcgagggacccgcggtgcgctggggcggccgccggggcccgcgccgagagagacaacgaaatggacggagggtagtagggtggcgcccccgggccgagggccagcccaggtctgtcctacctcttcaaacgcaggctgcctccggcgccaccgcggtcccgggggctcaccaggcgagtggtctccaagcccccagcggctggagagggctccatgttcccggtgccccgaccgtctaggccccaccgaggaagagagaggccgggccggccccgcgccaagtccgagcagcccgccgacccccgggatccccgcagggcggcggggccaccagagtggagcgaactgcagcgactgtggcgcgcggagtccgaactgcagatcccgctgccgccggagccccgccccgcgtggggcgagctccccaagctccgcctccaggctccccggcctctccccacccttaagccccgcccccactgccaaagccccatttccccgcgccagagcccgggagcgccccgccacccgagttctggagaactcctcatctccacagccccgtcccccaggcgagctagccccacctctgcacacagtcccgcccaccggttccaagcctcgctcctgaagcccaagaacctcacgaccaaccttcgcccaacgaccaccactctgtgcatgcctgcgcgggggtgtcgcccaccacgccgtcaccctgtggccgcaaccctcacgcggaggcagaaacaggagcggacccattacctatctccagagaaccagaaagaacatgaggtgagcggtgacacagggagattccagggactccagaaacccctttacggagaatctggggtcggaattcacgagcccagtctgctgccaatcactgtaccgcgaatgatcatttatttttatacagaaacattgggtgacaagcttcctgctctccttcaacccactgttatccctgcttttcaaatgagtaaactgagacccagaggaagaagagtccaaggtcatgcaggctgtgaataaagggcccggcctggacccccatcctctttccctccccggctctggacgccgcactggcaactggagagcgctcacagttctcttacgggcgggggtccagtgaagtcgagccgcctatctggtgtcacggccactgtttatggagaggggctgaggggcagcggggcagcgtgtcagctagtgattcccatcctccacacctgcagcgccctcctggacattaccgcattctgcctcatttgggggaaactaaaacccaggggagggagcgacttacagcaaagtcggtggccgagcctcaagtcgaagcttcaaatgctcaatgttctctcccctcgcacctgccgccactgtagaatgggagggggtgggaagaggattgtgcactcgaagctgtgacagtctgtgaagaggagggtccgtaggaggaggggagcgagtgagcagggatggggaagcgtggagggtgggaatggttagtgagcccaggcaagaaactcatcagccgcatccttcagaacacactgggcgtcctgaacttaggcttctggggacagacacctaccctcgatattgttattccaacgagcccaagagtgcacttgcaaaaaaacaaaacaaaacaaaacaaaaacgggagcacgtgccagatacagtggttggaagtgatggggttaacccgggagagcttcgcggaggaggtgaggcttaaacggattaggaaagctgggcggcgggctggctgttccggcgggggagagtgtggcttggcccgtgccaaggtgtgcgggcggcgcgtgcgaagggactgtcctgcgccgctgctgcagagcggcacgggagagccacaggggctgcgcgcgccctccgcgccgtccccacccccggctgcgccagcctctcctccgcgccagcccccagcctccccagtccaaagcccatgaggggtgagggggtaagggagcgagggggtcgttctccctctaacctccctttaaggcgcgggacttgacggacctctgtttctcctcgggtcacagggaagcaaattgaggcggcgagagcaggaaaccaccggccaagttcaccttttcgggctacttatcagagccaaggtggaacccaagtccctgcttagctatgccagggctctgggtacgtcgggcccggcgccgtcggttttctaagcgtcgcacccatcctagggctctccccaattctgagaaccctggagctgggatgcgcagcggccaccgcgcactccgcggctcggatgcggcagcctggcccgtagtgaccctggcgggtgagctcgagaatggggagaaactgcggggtcctatgcggggaaagggattctt

SEQ ID NO: 3744 - DNA, 4001 bp, Homo sapiens
attagggctgtgagttaatgaaggtgtataatctgaaagacctctgaattttaagtctcttatccctttatcttcaactcccttcaaatcatcagtattataggcaagttaagtttctattgtatgtattcgttttgtgcagctttatgtaacaaaactggtgtgtgtgtgtgtgtgtttgtgcatataaaagcacaaggtaccaccagagcacaaaggagaagcaactaagaggatactggaacatgagggaaaggttcatgaaaaataattaaggatatataagggttattctgataaggacagccgatagagaacagagaacaattctggggatggaagagcatatgcaaattaggtacaaaggctcaattaatacagcatgatttgcaagctattcactgtggctgaaatacggatgttgcatacatgtatgcattaaaaaaaaaaaaaaaaaaagagtttgtggcctggcacggtggctcacgcctgtaatcccagcactttgggaggcagaggcgggaggatcacctgaggtcaggagttcgcgatcagcctgaccaacatggagaaaccccgtctctactaaaaatacaaaattagccaggcgtggtggcgcattcctgtaatcccagctgctcgggaaggtgaggcaggagaatcgcttgaacccgggaggcggaagttgtggtgagccgcgatcgcgccattgcactccagcctgggcaacaagagtggaactccgtctcgaaaacaacaacaaaaaaagaggctgtaaaagtaagaagcttgataatgagtggctttgtatgccatgctaaacaggactttatcttgagtgctacagaaaaaaaaaaaaggagaaaatttgagtaagggagtgatgtggtcaaattttagaaatataactctggctacaggcttcacaatggtgaatgttttgaagaagagcgtaactgaaggctatttgatcattagccaaaaagtgtaaacttttacccattttctgtgtgcaaaaggattacagaaaatttacaaaacataaagtgtgtgaatgaggcattttcccgaccatatccacttaagtaaaaaacttagtacagtgacaaaagcttaggcacagaaatgtggtctctttctcatacgtaggctatcaataagtactccataaatttttctaataaatgcattttcaaaaggcacacgccacttggacacttcaaatcccaaccaactgcttatctttaaagttcagagctatatatttgagctctaaaggcaaagaatgactaattctaacaaatttgagagaaaacaccatatcccaacaaccataacgtctactgggtcttccattagtttctacaaacccagaaataaagcagcaataaaatgtcctaccaacaccttgactttctgtagttactgcgcttatgaaatttgctgccgtaatcaggctacttaatatttagtaaagccaagttgcagagtgagacgtctgccctaaaaccctattactaaccttttttttttttttccgctggcgttatcgccactgctctaagaatcactattacagttgttgctgtggacttgttttcagatcttttgttggtggcctagttgttgacgctggcaaaaacttttattaccttaaagaaatctcggcagagggaagtcagaaactcgccaggagctgaaagctctgcctgcagcggggcctagatcgtgagcgcctgcggaacaggtgagggaccgaaagggaccagaactctgaaggggaacattttgggagacagccgctcctgccaaggggcccgacttcaactccaatgacccctcctctgggtggctgagggatttcaaggtcgcttcgggaccaaataagataaaccgaatcagctacagccgaaaccctcaccccaacagccaactcaccatgataaggagctgcacagctcccgccggaagccgttctgggtgctcgagttttcccagaacggaaggggtggggcaccagtgggcgattggctgtgaggaaagcgtgggaggaagtgcgtgctctggcctccggcttccgtccccttcccggctgtccctgcactccgtggcggaaggcggctagagcggctccctctgagctctccgagagattggtcgggacctgaagcgttgaggttaagggcaaggcaaggagcaacgaggagtttttcgttacgttagaaaaatttcgttgcgtgctgaagcgcttttacctgtgttgtatgatttaaccttatgaaaatggacagtattccagttttacaagtgaggaaagaagattaagaaacttgcctccgccaggcgtggtggttcactcctgtaatcccagcactttcggcggcgaggcaggcggatcacttgaggtcaggagttcgagaccagcctggccaacatggtgaaaccccggctctactaaaaatgcaaaaattagccgggcgtagtggcacgcgcctgtaatcccagctactctggaggctgaggcaggagaatcgcttgaacctaggaggcggaggttgcagtgagccgagatcgcgccactacactccagcctgggcgacagcgcgagactccgtctcaaaaaaaagaaacttgccttgagtcctacatatagtttgctgtagtagcagaatttgaactcggaccgactaatggtctacttaataaaatgctatttggattctctataaaattaataatatagaagtaatgttaattatagaaaacttggaaaatattaaattcattcgataaagattgaatatgtagcacgtgtgtttgtcagatactggtctcgtgaaaattatattctggtagggaagacagaaaacaagtagggataaagaaatttttaaaagatattcataagtagtgtcgtgtagaaaactgggtataggttgagtatccttcatcccaaatgcttaagaccagaactgtttcagattgtggctctttatcttggggatggggccagaggctaaacttgaaattcatttatgtttcgtatacaccttatgcacatagcctcagggtaattttatgcaattttaaaaattgtgtgtgtatcaaacaaaattttgactacagctttttacatgcggtcaggtgtggaattttccactgtggcatcgtgttgatgatcaaaaagttttgattttggagcattttaatttcagatggttggattagggttgctgaacatgtaatggtatacagaacaactgagtaggtgtggtgctcacgtctgtaatcccagcactttgggaggcctaggcgggcgaatcacgaggtcaggagtttgagaccagcctggccaacatggtgaaaccctgtctgtactaaagataaaaaaaattagctgggcgtagtggcgggtgcctgtaatcccagctgctaagaaggctgaggcaggagaattgcttgaacccgggaggcagaggttgcagtgaggcgagatcgtgcccctgctctccagcctgggcaacagtgcaacacttcatctcaaaaaaataaataagaagtaaaaaataaataaaatcgtaggtattatcatctatcgacaatctgttctccacactgcagccacagtaatcttttttagtagaggagaggtcttgctatgttgcgcaggctggtctggaactcctgggctcaagtgatcctcctgcctcagcctcccaagatgctagcattacaggcatgagccaacacccctgtcctatacctaggatttaatgaacattcaatatgtggtaggcagtattctaagaatttgaggccaggcacagtgcctcatgcctgtaatcccagcactttgggaggctgaggcaggcagatcacttgaggtcaagagtttgagatcagcctggccaacatggcaaaaccccgtctctactaaaaatataaaacttagccgggtgtggtggcaggcacctgtaatctcagctactcgggaggctgag

SEQ ID NO: 3745 - DNA, 4001 bp, Homo sapiens
ttttgcatcctgacagttatttcactagaaaataatatttacagaaagaatttgaatttagaaaaaaagccacgagttacactttcaaatgtaagaaaatatgcatagtctctctaagtaaccctccctaaaagatacaagaaaactgtatgaaacaataaaaaggatcatcctttcagttttaacttcaagtggcaataattcaacgttttttaaaaattcaatagtatttaagatactgcttttagaaagcaggagattgtaacggctagagttactacaggttaagagttaacattgtggctgtaatgtaacatcattcctggaccaaaggtacataccgaagtaagttcagaggaagcaacccatatcacatcaacaagcagaagaataacaatcccaagagccattcgcctgcgctgagtgaaaccactgttctgggaattcattcggttcatgacaaatacacacaccatttgcagtctgttttttagaaaatacagatcacattagagatgattttagaaaaacaaccattaaaaatgagaacattagtataacagaaacatttgacttttgttagctaatgttcagtgtgaaagttacatagaggataaacgtggaatctaccttgtcttaagagcccttctgagatcctcaagagcaatgccggaaaacttggcagatctcagtctaaaaggaggtgaagaactcagcacccctaaaaacaaccatgaaattatgctatgaaaacgtgaataactcaaggtaagattcatcacatcgttttttactcttcatcttcaaactcaaagcaaatcaatgaaaaggaccaaaatgtgttaaacatacttgccacctttctcagtactttcatggtatccactgcacgcttcagattatacttagagagatacgcgatacggggcgggcagggagggggagtaatatacaacatacggcacatttaagaacagttaactaccagaaaatagcttctctgagtttcacaaatacggaactccattcacctctccatccagaggaatccatccctggggacagcgtctagacactgtttctaaaagtgtcttttctgtccctgatctgctggagtggaatttggttatcggagagtaagtgatttgctgtgggtcttgaaggcacctttccaatctcttcaagtggtaaaagaaaaggattctccatgctcctccacccacctctatcaaaacatccagtcattttaaaagaaacagctgggaaaagaaatcatccttctgttttggagcggggaagacagttaaggcagcgacgcctccccggggagccgaggcgagggcgcacgcacggcttcctcaattgccagcggtgggcgcagggctccggcgcccctgtcagctcccgctccctccgcccctagagaccttcacggtttcggtcaaggcgctcctgctgccaccgagggcaggaggtggtgctgctggtgggcactccgtcccggtttgggctccggtgatgtcggggcccttccctgcctgcctacctggccttcctgccccgcgatggcgtcgtggcggcaccatgagcggaccggtcaggccccgcagccgcccagcgccacggccgcggcctcggactcacagagctgtcaccgcgcctgacatcgcgccgcactggaggcccagctcctgaagacgcggtgcccctcagggagaggctcccgacaccacccaactccactcggcccaggagggcgtggagcgggtgaggggaagggacggcacagtcagctatggccgcggaggcccggagatctgctctggccccggccccgcccccggcttgccctccgcgcggccccgcccccagtccccagcccggaagcggtggcgcgcgggtgacgtcataggggcgcgacggcggactgcgcgcggtcgcgtatgcagcgaggcttggcggagctaggggaagtaatgcgaggctctggtcgccgagcgagggctcgcggcggcgaggcgaaagaagagagaagataggaagaagggaagtagggcgaggtggaggaagaagaggaaagcgagcgtgggtgtctggggcagagcaaaggacgagggagtggctaaacctccgcccgccttagaacgaaagctggccgttccgtttcacaaactgcgaacctgaaacttcggatatccctttctcgatgacagccgaaacgcaaagtggcttagagtacttttgattcttgaaaccttttgtatataaacaagatctcagctctaggagttacaacctacatcctaggccaagctacttcaacttctctggtcctcggtttccttgtctacgataatgatagtacctgccacattggttttttgtgtgtatgctaggattgcatgagtttacatatgtgaaggacgtagatcaattcatggcacataataagaacctcacagacgtcagcaattttttgttcgttcgtttgttttgagacagggtctttctctgccacccaggctgcagtgcagtggcacaatcacagctcactgcaacctctgcttcccgggctcaagcgattctccagcctcagcttccagtgtagccgggactacaggcgcaagccaccaatgcccggctaatttttatattttttagtagagacagggtttcgccatgttggccaggctggtctcgtactcctagtcttaagtgatccgcccgcctcgacctcccgaagtgctggaattacaggcatgagccctgccaaatgttggcagttattaaactgtatagatttgttccttaaatattttgactattccatgagaaaggtttgtccagcatcttgatttctatctacaaaacaaaaacaagactaaagggttcagtaatttaacatcttggtcagatggcgtgaagaaattaaattttcttactcctatagtcgcgatgtagtgtacctcttaccttttaagtctcgtttcagtgaagttgaatgcatattctagcaactaataaaacaataccaatgaacattttttaattgatcgaatcagtttcaaactatcagcatcaaacacctctaataagtcattcagaaacctattgtgcagagtaaaaaaaaaaaccaaccaggccggtcgcggtggctcatgcctgtaatcccagcactttgggaggccgaggcaggtggatcacgaggtcaggagatggagaccatcctggctaacacggtgaaaccccgtctctattaaaaaaatgcaaaaaattaggcgggggtggtggcgggcgcctgtagtcccagctactcgggaggctgaggcaggagaatggcgtgaacccgggaggcggagcttgcagtgagccgagatcgcgccactgcactccagcctgggcaacagagcgagactccgtctcaaaataaataaataaataaataaatccttaaccaactacttggtattactacttaggggaaatttggttgcagacattaatcacattagtctggcaccagtttgttttttatttcattagcattctttagggtatcagcccataatacgcctaagaattctttatgctacatatttgatgtatagtcttaaaaaataagagcattataaatctctctcagaatctaagagtcaggaaagctggataccaatgctttatctgactacaacttgttatgtaatcctgaggatcattccactctctactgtgccttagtttcttctataaatatgggtttctgaattaaaatattgtaaatgatagtactttgttaagttaccattattaccacctgtttccagaccatctgttaaaggacaagctgtggatattcttgtaacggataaagtaattctggcagactgtcttcagcgagtctcaaaacatagttcaacttccattaatgtcttttccctgggttctttaagggaaattccactggactgctgtaacataggccctagtgtgtttctgtgctt

SEQ ID NO: 3746 - DNA, 4001 bp, Homo sapiens
gcagctgctcccacatgttctttctccctaagagtatcccttcttgtggtttgaccttagaacactgtttagggtccaatttgggggcccatcttggggtgggaggatcctgagaggccccacaccagctgtcaggcaggggacaggaccaaaagttgggtctgtcacctgggagcctctttcctgactctcaggcagcctttaaaggcgacgccttctgggattgaggatctctaagcttcctacctgactggtttggagttttctaaggaaggaggtgaatcagcacagtttaccccagcagtaactggcaatctggattctccttgtgggcagcagccctggtggacttacaaccgctctctaagcacttgacagaggccctggctggcatgacagaacagaagacttgctttgctgtgttcagatcctgagatgggagccctcaggctggggcctctgaacagctaaggattcagcatgaggagtgatcctcaggaggatgcagggcctgggaagctagtagttctccacaaggcacagttggccagaggtgaaccagaggaacaggtggggcccacccaggactccactgactgtgcccaccgtttggggaagggagaacactgtgactgtcgtgtgcgtacacgtctgtctcctccacctcagattccaagcatctcaaaggcagagatcgcctcttggtcacttctgtccccttcccttacacaccgtaggtaccttatacatgggatcgtgccattgcactccagcctgggcaacaagaaaaggaggggcaggaaggccctgccctgagatggagacagagagagacaaagaaatgccatcctgcccacaacagaggggaggctaggccctgtccctcagtctcatgactgcctgggtccttagtccctaacctcctgggaactgtcccccctctcacccccatacatcagagctgaactggccacttgccctctctgtctgagttaatggcacttttcttctcccaggcagaaaccctggagtgatccttgtttcttgctcatgtgggtcaggcctgtggccattcacacctggtctctgccaccagttgtcccttcctttctcttctcactgccacctcctagttcccctcatctgctatgcagcagccttggagtggtttttcctgcaccaaaccactcctcatgtcattgagtcaatcatatcactttcaacatgtcattccccagctcaaaagcacttttctgattatgagagaaaatctaacctgggcatttgatgctggttacaatcgactttgatctggcctttccgtagactttccttgacttacagtctcagacacattccgaaatcccacctaagcttcaaagcacagctctaacccctcatccttgaggggccgtggggcacctccctgtctgccgcttgaggcctccacgctcactgggtcactcggcctgcacagccactactgcggctcatgtgcacaagtccaggggtctctcccagctcgtggagggaggtgctcaggcttggacgccagcactggaagggccgtggaaaggaatcggccaaccctcctgttaaaagacgtggaaacaggagcggaggctgtacagcaaatcaaagccggggctcggatccccccgtccggggcgcagccccgctccgcatttccccgggcctcgcatcccttgggtggtcataacgcgcgcgaactgaccggagcaagtgggaaagcaggggaagccaggagggcagggccaagaagggggaaggcgtagaacgagcgccggggtcgccagggcccgcacgcccggcagggcccagactcactttgccgagagcgtgttgatggagccggtaacaagcatgagcccggccaggaacagctggtacttggtccaggccatgtcggcggacgctggggttcgctccagttagcggcgccgggccccgtcacccggggtctcctgcgcgagcgcttccgggccgggcgtcacgtgacccctcctgctcgccccgcccccggggagcgcgcctgagccacggtgcccgcgctctgccgagtcgtcctggagcgctttggtggccacgccgtggccctggcaaatcacggcccaggccttccagttttttttttcttttcttcctcactctcccccgcctttttgggtttcttttttctatttttttgagaaggagtctcactctgtcgcccaggctggagtgcaatggcatgatctcggctcactgcaatatccgcctcctgggttcaagcgattctcctgcttcagcctcccgagtagctcggattacaggcgcccttcaccacgcccggctaattttttgtatttttagtagagacagggcttcaccatgttggccaggctggtctcgaactcccgacctcaggtgatccgccctcctccgcatcccaaagtattgggattacaggcgtgaaccaccgcgcctggccttggtttcttatttttatctttgggtcttcctatttgtaaaaggggcggatgggacagtgcagtgagggtgcatcgtggctattacagcattttgtgaatcgttttgagaggttgagctgggcggtgtcagaaaggagccctgaagtgggcctgccgggagttccttggggaccctgtagagaggagattcccacgctggacgtttccacttcggggctcctatctgataccgcccaccttgggcacagttcatatctttcagcaaagtggcgaaggcatctagctccagttgccgaggacaccattttatagctgaggacagtaaattcagcgaagcagagtgatttgcttaagaacctgctggtgagcagtggggtagggatttgcgcttgggttctccagtctccaaaaatccgtgccttccgcatggcctctgcaccaagccctgcttcactgctcctttgtggactttctggtcgcagctgaggcatccaggcagaaagaccatccctaggtttgtttgaagagggtgttgacgaagagtcacactctaaaatatttgaagggatttattctgagccaaatatttgtgaccatggcccgtgacacagccctcaggaggtcctgagaacatgtgcccaaagtggtcggggcgcagcattttagaaagacacgagacatcaatcaaatacatttaagaaatacattggtttggtccagaaaggtaggacaactcaaagccgggaggaggggagagggtggggcaggaaacgggaaaaatatctatctatgttaatagagatttttgtttttttttgagacggagtcttgctctgtcgcccaggctggagtgcagtggtgcgatctcggctcactgcaacctccacctcccggattcaatcagttctctgcctcagcctcccaagtagctgggactacaggtgcctgccaccacgcctggctaaattttgtatttctagtagagatggggggggtctcaccatgttggccaggctggtcttgaactcctgatccacctgcctcggcctcccaaagtgctgggattacaggcgtgatccgccacgcccggccggtaatagagattctttacagatgcaaattttcccccacaaaagacagatttgcagggccatttcaagatatggcaaagaaaaatgttttggggtaaaatcttttgactttcttcttagtcacataatattatgccagagtcagattggaaagtaagtcatgatatatagggttaaataaaacccatctgatgagaatttatggtttgtagggcatgactctccagacctcttaggtaggaatttgggcaaggtaaaaaaaatcagagcttagtcctcaaggggttctggtgtttaaaatcctactcttggctgggtgtggtggttcacacctataatcctagcactttgggaggctgaagcgggctgattgcttgagctcaggatttccagacaagcctgggcaacatggcaaaac

SEQ ID NO: 3747 - DNA, 4001 bp, Homo sapiens
taagtacagctgctcataccttcatggtacatggaggtagaattgtaaacaagtctttgtccctgtttccttctactttacctcaggtaactccattttatgtatcatttggagaaaaaaaaaagactatccatagaaaaatgtaaaatcaagaaccatattaacttgtgaaaagtaagaaaagtaattcaagagtaagaaaagtaactcaatccagataaatgtttaattttcagaaggtgatgacagaaacaaaaatgttgcaactttataaaacattgtattctcaaaaagtattgcattttgcaggattttgttttcttcttgtcttttctgagatagagtgttttcagataccaaaaagaataataaccactgaaaatatagctgcttttattactataatgcaatgcacttttaacttttttcagtaaatttcccttgcttctaatacaatggaaaaatctgagctatttatttattttaattctgattgtatggctcctttattaggaaaataatacgcattttcaatgaacaaatttgcattgttgactaaataatatttaaaattaatatattgtaataattttgtactttaaaatttaacactgtatagataggtaaagaatgtatgaatttaatttttcataagattggtatgttttcatattaaacttttcacctccaacatttacaaatatctggaagttttatacttctagaaagttaaagaaagatgattcaaataatgatggacccttcagtaagtggaaaaagtacattcggtaacactagcaatcaaccacgcagcctacagaaaaatgattcaccaccacccatatgcagtttcaccttaatctaccacatgtggaagatgctctcaactgtggaaacagtgtgaattacagccccatcttcagcataaaagacatgcatacatactgttacactagaaaaaaaggaagccttttatggaagaaaattaccaattttcttatttaagtctttttttctttaaaaataattaatgaacactagcagcgtagcgagtcttaaattttgccctttcacttaaaatttaaaccaaagcaaatacacttacctattataccagatcctataatcgagttgacaacattaaaaagagcagcagactgacaggttttctctttatactcatgttcagaaacaagggtttctctgtcatctaaatctctctaatagataaaatagcaattataagcaaatactagttcagaaaattagaaaagtaacaaatatgtaatgcaggatactaacacgattttctagtaataataagtaatgtcactaatgaaaataaaataaatgccgggataacagtaataaagaataacaataacagctagtaattcaacagagcttggtaagcaaactccatcctaaaatttccagattacagctgccccagctgctaagtacaggatctgttaggaattcagtgatgtgattttgtgaaattaaagtgcctgctaagaaaaaaaaaaaaaaaagtcagattaaggcaaaactttttgtcccagagaacttttcgcggtgctaaaccaagagcccaggtgaaggtaggtgacctgacctgttgcaaggtgaatgaaatttccggacaactggcttcagaacctgcctagtcgctagttttacctgcggcgggatgacaggctcctgcctctggtagcccatggctgagcggtggtcctcagcaggtggaagatgctggggctgggtacggattcgcacccggccagcctcctccgccacctcgcacacagccgaggtccgcgtgtagccgcagagctgcagggagccagttccacgggcgccccctgctccctcggcaggccgcgagggctgcagccccaagatctctaggctgtggcagcctggggcgcttttccaccggagttcgcccagacaaatgtatttttcctccggagacggagatgctgcaggatgtttctgatccgggcagccctgtctccccgcctccccccttcacacccccgcctccctgagagaacagggagagctactcttccctggagctgcagaggacaacttgttccacccacgctgccctgccccgatctcacagagttatgaccgcctcgttgcagtccgttcctaagttagcttctcctttgctggggtctgaagcccaggtaagaacgcagaagcacccttgggcccatgggccatcttccctattagcacctcctcctcgctacccctcttcaatggcagagacgacgagtgaaaatttgggacttttattgtaaatggaaatggaaagactcataagaaaatgaatagcaaaacaaaaaactttcctagggttttagcaaacttgactactgagcatgctttggtcaaacgcttcctggtaacttttagaaaaaggagcgatagagaaaatgaaggtggattgttactgcattcaggtaatgaaccttgaaaagggaaagaggagtacaagggtttgggaaaggggtggcacctacagtgcctgagctagaaagaatcttcaatgaccacctattcagtcctcttacattacagatgaagcaacaagcccagagagtattcaatatcagagacagaatgcatgagacaacagtttcaggggcaataagagcggtgatatgccatcatacttaacaaattctgccttcccttgatatccataggggattggttctggaacccctgcagatactgaaatccaggaatgctcaggtccttgatagtaaacagcatggtatttacatgtaacctaggcacatcctccagcatactttaaatcatctctagattatttataatacctaatacaatgtaaatgctatttacttgttgttatactgtattgtttaggaaataagaaaaaagtccatatgtgttcagtatagacacatccatcctagccctaactacatttttgatctgggattggtttaatgcatggatgcagaagtggggatatagaggccaactgtacctaattaaagaggttctgtttcatacatgtttacttataattaagaaaaaaaattaaaaaccgtgggaaaacaaaagacttataaactttatatacactctgccatcaaatgttaacatgctgtcatattttcttcaaattgtaaaagtaaacacaatgtcacaataggaacccccttgaccttctccattcctttccccaggccttcagccctggagtcatcggttcatcaagttagtgttatctttgctattcatactttgtattttaatccgttcatttatagccataaacaatatataacattggcttttgtattttcaacatttacaaagatggtgccatattgtacatgttatttttccactggcatttttgttttcagcatgtatgatgtagatatatgcagatttttttttcattttatctaacagttaagtcagccttcccctactgaaagatattaaggttgtttctcgttttacactcttccagagcataaaagtgacaatttctctagatgtagaagtgttaggtagtaggtcatgcacactttcaacttcattatcattattattattattgagatggagtttcgcttttgttgcccaggctggagtgcaatggtgtgacctgggcttactgtaacttctgcctcctgggttcaaatgattctcttgcctcagcctcaggagtagctgggaatacaggtgcctgccaccacgcccggctaagtttttgtatttttagtagagatggggtttcaccatgttggccaggctggtcttgaactcctgacctcaggtgatccaccctcctcggcctcccaaagtgctgggattacaggtgtgagccactgtgcctggccttcattaaatatttttgaattgctttgcaaattgataacatgaatttcacttctaccaacagaggtgaaattcttgtttttctacattgtctgtaa

SEQ ID NO: 3748 - DNA, 4001 bp, Homo sapiens
ttccagtaaggagccactggagtaaccagtgtctgcagaatgtgcgttgtctggcatggatccaagatctagaaaaagtaactgactcatattaaggtactcaaatatttgtacaatagagtcctaatacaaaacaatacacaggagtcttgacttgaggctttcaattgcatactaagttagaaggaactaagttctacatctccagcttttccattacttgctttttcttaattatgtacaatttagatacacatccaaaaagaaaacaaatacaaacctattctagttttgctccaagaatgactcagttccaatgtaaaattagaggacttaacagcaaaaggcataaataaaagtttcttttaaaaaacagtataacctaccatactttttgtttttttctaacatgtgttttgtgtcactgttacttagaataggtactcgagtgaacgacccttccaacggagggcttcaggttctgcagtgatatttcttcctcgtgccagatccttagtacagcccatgtggacaggctcccacgtgaacatttctttacagaagccacaggaagaccttgaacgtcatgttgctcgcgccctggcaaggcccccgcccttcttagctggggcgttcgagggaccccaggagaggcaaggagttcagcagattcccagacccggagaggcggtgcgcgaaggttcctctacgcgatccccctgccgcgccccacatcgctctccacctaagggctttccggaacaaagccgtgcggccgcgccacctccggcccacccggcctgtcccaccgacccggccccaccctcaccctcagctccagggacccccagcaggccgagatcttcacacccccgcgctccgcctcggcttttcggttggtccgggagaaaactagtaggagcagaggcgccgccgtccgttagcctcggtccggaacagcggtgccgaggctccatcccggggtcccctcgccccattacagaccagagagaaggactggagaagaaaaaaccggggcgctggtcgccaagcccccgaagacctgcctacagatccccaaagcctcgcccgcccgcgcctgcgacgccatccgcggccggcgcgcagccccctaaccgccgccacccgcccagcggtcactcccccaccccgggcgcggcccgcgaggctccgccaacctccacaggaaggtgaggggggcgcgaggctccgcacgcgaagtggatgccgccggctcccgatcccgcggcccgcagcagcccagaccgcacacgaggagccgcggcgcccaacactctgcccaccacgcgctctgcttcggctggccgccgccgactgcagcagctgcgggaaccccagcgcccgcatccccgagggaaccagccccgactccccggttctgttctccctttctacccccacgccgtcccgggactcgcagtctccgccgcgcacggggccggttctgggggagggaatgtaaacaaatcggggttttatagttacctcacactcgagtgccgtgtgcatctcctctccgctcggtaccaaaccccggctgcaccaaatcgtgtattcaccaaagcagactgcgctaactgcgtcgcagaaaccggcgcgtctgacaccctgctacgcttgcggcgtacaaggtccactcagctccctgcgcagccgcaccccgtccgcctatgggtgctacgctatgggcgtacacgcgccacctagctattcacttcggataacgccagttgcgtaaaggagtcgcactactcacggattccacatggatcgtccgaggaataggaaattcaagtctacgcaaactgcggagttccgtggctccgcgctagttttgttccaagaaagaacgccgcgggggagttggggcggcttcttaacgcatgcgtggagcgccctttatcattcgccttttctcctggctttcgaacgtcggttgctgaggccttgggcaaggcgaatgagtaatggaagctctaaacccaaacgctttagccaaaaagcttcagagtgatcaactggaatgttcatctgtatacgagttaaacatctacgttaagttaaccccgccccctttgttaaagtaaccttttcagtctcttagggcaacagcgaactttatttagtgctaagtgcgaggtgttttgcctagctccccttcccacccatttaattctaaagcacacttactgcgggtcttccaaacctaaaagaaaaagttgagtcctgagaacatgtcacacatgtagagaaattctcgaggcttttggcaactttccaaggtcttcactcctctactcctcaactgatcgactatttcttaacactctatgacaaaaaaatcccgatccagccaagcagttccatggacttgtgcctacaccgtgctcattcttgccctttgctcacgccatacatcccatctaaattgtctcctcccctcttaagcaaccaccaacccacattttcttaaaaggtgactctggacgtcttatttttgcttcattactctgcttcctggctcttacttaatccacatgttgaggcgtatctgcattccgcctggggtgcctgtgtttctatatccaaccagaatctacttaacacagcgagttctgggggtgccttactggtgtctagtagagaaaataaaaccatgaacagcagtaatcgcaggcttgactgtgtgtcaagtactccacatatatattaatttaatcaccataacacggtgaggtaggaaactgaggcacacaagactttaacttgcctggtatcacagagcaggtagagaaaagagttgggatttccaaacccattcagtatggacggctaggtagtcccgctaacctgcatattataccttcatgaaagaaggttattttttgttttgtatctctacaaaaaacatccaaaacaacgaaaatggtgcttgataaatgcctactgattgccatacgtagttcagaacactgaactactcatatgcccttttccttgtttggaaagccagagcatggacctcactcctgcttacaaagggagaagtcctgaggtgtggagaaaagagattaagcctgagtcctagtttcaagtctcaccattgccactaaatgtgagacaatagctgtggtcctcagattcattgataaattaaggggatcgttttaaatatattctaaggttcatcctagaactaaagtccttagagttcataaaatcatgatagtacatcctttgtgtgcaaagcataagaagcttccaaattagcttgatattttatggctcatacttattttattgaacacattattatcaacacccttaaaacatacataacctttctttcaaatatcaataagatatagcgcttgcagtccttacattttagggcacctacactgcttttttagttatggatatacaaggctaatgttcagctggtacacacaagtacggctgaaccaactaatcaaatactgaaatacttcaatgcaagttggttaacagctgcaactctgagtggtatccccccatgcttctcacccctgtgccagtccttcctctcaagattccccagacctccacattttaggaactagtgggttaatacctggctaagatagagccctttggacccagctcttattagtcactcccattctacttggttggtgcctattctttactaattgttacatattttaaatgtcatccctatagaaaactatgtggtaagcaacttgaaaatagagactgtgtctcctaacactttttaaactcacccaaacatttatttactttcaagtgtatacacactgatttgggcagattttcaagcaaaattatcagatagaataaatgattctctgcatactagcatattacttttcctactgagaaaaggaatctcagaaaatgacttgcaggcttacacaaaatcacctgctgagtcaaat

SEQ ID NO: 3749 - DNA, 4001 bp, Homo sapiens
taacctctgacatttacttatctcttcagttacgaatgcaggcaaaaattacagcgatgtgaaatacctgatagcaattttagattaaatttaagccaaattctttaaagatcatttacagtcctcactaatgctttactaaaatatagatgtcatatttaatatcttcattatttcataactggtttctgttgcaattctatgtatttcatacatttaaaaccatcattctgtggttcatcacataaaaaagttaaaaatccataccagcacatcattgttttattttcttcacagcacttatcactgatattatatgtttccagtaaggagccactggagtaaccagtgtctgcagaatgtgcgttgtctggcatggatccaagatctagaaaaagtaactgactcatattaaggtactcaaatatttgtacaatagagtcctaatacaaaacaatacacaggagtcttgacttgaggctttcaattgcatactaagttagaaggaactaagttctacatctccagcttttccattacttgctttttcttaattatgtacaatttagatacacatccaaaaagaaaacaaatacaaacctattctagttttgctccaagaatgactcagttccaatgtaaaattagaggacttaacagcaaaaggcataaataaaagtttcttttaaaaaacagtataacctaccatactttttgtttttttctaacatgtgttttgtgtcactgttacttagaataggtactcgagtgaacgacccttccaacggagggcttcaggttctgcagtgatatttcttcctcgtgccagatccttagtacagcccatgtggacaggctcccacgtgaacatttctttacagaagccacaggaagaccttgaacgtcatgttgctcgcgccctggcaaggcccccgcccttcttagctggggcgttcgagggaccccaggagaggcaaggagttcagcagattcccagacccggagaggcggtgcgcgaaggttcctctacgcgatccccctgccgcgccccacatcgctctccacctaagggctttccggaacaaagccgtgcggccgcgccacctccggcccacccggcctgtcccaccgacccggccccaccctcaccctcagctccagggacccccagcaggccgagatcttcacacccccgcgctccgcctcggcttttcggttggtccgggagaaaactagtaggagcagaggcgccgccgtccgttagcctcggtccggaacagcggtgccgaggctccatcccggggtcccctcgccccattacagaccagagagaaggactggagaagaaaaaaccggggcgctggtcgccaagcccccgaagacctgcctacagatccccaaagcctcgcccgcccgcgcctgcgacgccatccgcggccggcgcgcagccccctaaccgccgccacccgcccagcggtcactcccccaccccgggcgcggcccgcgaggctccgccaacctccacaggaaggtgaggggggcgcgaggctccgcacgcgaagtggatgccgccggctcccgatcccgcggcccgcagcagcccagaccgcacacgaggagccgcggcgcccaacactctgcccaccacgcgctctgcttcggctggccgccgccgactgcagcagctgcgggaaccccagcgcccgcatccccgagggaaccagccccgactccccggttctgttctccctttctacccccacgccgtcccgggactcgcagtctccgccgcgcacggggccggttctgggggagggaatgtaaacaaatcggggttttatagttacctcacactcgagtgccgtgtgcatctcctctccgctcggtaccaaaccccggctgcaccaaatcgtgtattcaccaaagcagactgcgctaactgcgtcgcagaaaccggcgcgtctgacaccctgctacgcttgcggcgtacaaggtccactcagctccctgcgcagccgcaccccgtccgcctatgggtgctacgctatgggcgtacacgcgccacctagctattcacttcggataacgccagttgcgtaaaggagtcgcactactcacggattccacatggatcgtccgaggaataggaaattcaagtctacgcaaactgcggagttccgtggctccgcgctagttttgttccaagaaagaacgccgcgggggagttggggcggcttcttaacgcatgcgtggagcgccctttatcattcgccttttctcctggctttcgaacgtcggttgctgaggccttgggcaaggcgaatgagtaatggaagctctaaacccaaacgctttagccaaaaagcttcagagtgatcaactggaatgttcatctgtatacgagttaaacatctacgttaagttaaccccgccccctttgttaaagtaaccttttcagtctcttagggcaacagcgaactttatttagtgctaagtgcgaggtgttttgcctagctccccttcccacccatttaattctaaagcacacttactgcgggtcttccaaacctaaaagaaaaagttgagtcctgagaacatgtcacacatgtagagaaattctcgaggcttttggcaactttccaaggtcttcactcctctactcctcaactgatcgactatttcttaacactctatgacaaaaaaatcccgatccagccaagcagttccatggacttgtgcctacaccgtgctcattcttgccctttgctcacgccatacatcccatctaaattgtctcctcccctcttaagcaaccaccaacccacattttcttaaaaggtgactctggacgtcttatttttgcttcattactctgcttcctggctcttacttaatccacatgttgaggcgtatctgcattccgcctggggtgcctgtgtttctatatccaaccagaatctacttaacacagcgagttctgggggtgccttactggtgtctagtagagaaaataaaaccatgaacagcagtaatcgcaggcttgactgtgtgtcaagtactccacatatatattaatttaatcaccataacacggtgaggtaggaaactgaggcacacaagactttaacttgcctggtatcacagagcaggtagagaaaagagttgggatttccaaacccattcagtatggacggctaggtagtcccgctaacctgcatattataccttcatgaaagaaggttattttttgttttgtatctctacaaaaaacatccaaaacaacgaaaatggtgcttgataaatgcctactgattgccatacgtagttcagaacactgaactactcatatgcccttttccttgtttggaaagccagagcatggacctcactcctgcttacaaagggagaagtcctgaggtgtggagaaaagagattaagcctgagtcctagtttcaagtctcaccattgccactaaatgtgagacaatagctgtggtcctcagattcattgataaattaaggggatcgttttaaatatattctaaggttcatcctagaactaaagtccttagagttcataaaatcatgatagtacatcctttgtgtgcaaagcataagaagcttccaaattagcttgatattttatggctcatacttattttattgaacacattattatcaacacccttaaaacatacataacctttctttcaaatatcaataagatatagcgcttgcagtccttacattttagggcacctacactgcttttttagttatggatatacaaggctaatgttcagctggtacacacaagtacggctgaaccaactaatcaaatactgaaatacttcaatgcaagttggttaacagctgcaactctgagtggtatccccccatgcttctcacccctgtgccagtccttcctctcaagattccccagacctccacattttaggaactagtgggttaatacctggctaagatagagccctttggacc

SEQ ID NO: 3750 - DNA, 4001 bp, Homo sapiens
tcttcttcaatgagtgacaatgcaggatgatttttaaaacgagaatgatacagccggatgcggtggctcatgcctgtaatcccagagttttgggaggccaagggggggcaaatcacctgaggtcaggagttcgagactagcctgaccaacatggagaaccctcgtctctattaaaaatacaaaattagccaggcatgatggtgcatgcctgtaatccctgctactcggaacgctgagccgagagaattgcttgaacccaggtgacggaggttgcagtgagctgagattatgccattgcactccagcctgggcaacaagagtgaaactccatcacaaaaaaaaaaaaaaaaaaaaagaagagagagaatgataggagcgtgaaaaagaaaagccttctactagtgattaaagaaagctgcaggtttcaagaattcatttgtagcattttaaagatacattaagcccattcctactttccacattcatatcatcctgttttgttttcttcaaaccaattatcattgtaaaacattagtttgttagtttccttatttgtttcctattgttgccttgaagtagagtgaccataccaaccaatttgctcagaagttcccagtgtatgcctgccatctggcataattttactctgaagtatgttctggtttgagcaatatattgtaaggatgttttacacataacccaccaagaaattaacttagcttttaaaaaataatttttcacttttttttttttctttttggagacggggtctccctatgttgcctaagctggctggctgagagctcctgggctcaagcgatcctcccacctcagcctcccaagtagctgcaactacagtcatgcgccactacccctggttaattctttacttgttttatactaatacggacatggttttaaacaatccttaattcaagtaatgacgaatgcatactgctaccccttttctacttcccttccttttttagaatttaaactttaagactcagcctatactttttacagatatcacttgatttttaaaaaaatattatttatgctttattcactaatacactcccagccacacagccaaactagctgcttcgtatactgggaaagcaattcccaactgccaccctgacatattcaactataaagtccccagaaacaggacatagattttagaaggaaggctgctctaagaagttagaattgatgactgaacaactgtatgtacttagtgggcaataaattaaacaactcgtttggctcaaaggccttcagcaaatagcccttcagctagtaaaataactgctgggttctgctgagtgattttctaagaatatcataaacaaggagcaacttggcatgaccagtcataatggaatgtgcttactgaacaacccaggcataatttggttctgaagaacaaaagaaccataaaccaatctcatcctggcacccaccctaaatgatctctgggcatgtacctttcagatctccgttcccatccttgttactgtccttgaaagaccttgggtagatctggtacatgggcccctcctgccaccagtctaggcactttggagagagggcaatgatggctatggtggccgcgatgagcaccagcacagaagccactgtgagccagaagaggatctcccgaggtatgcggtagcgggcctggccagagaactggaacagcacctccttgggcatccccgcatagggctggacgcccttgaagtcgggctcctgggagccaaggatgcccctggtgctgtgcttcaggttgtctgttgagcttcctggatccggggtctgctccagaatgtcttcattatggacaaacccgttgtttgtctggcatcccttcatactcatctcgatggagtctctcttgcttttatcttcagccatgtctcaccgacttatgtcttcggagtgccttcctgcagtaagggaggtggaagagtggcttgctgaatgcttggtcttgttaatgaactttgtgtggtttataaataaacctagctggacaaagtccagccaaggaagaaagggtaaaagtacagaggtttaaaaaaaaaatctcgggactggcgcggtggttcatgcctgtaatcccagcactttgggaggccgaggcgggcagatcaccaagggcaggagtttgagactagcctggccaacatggccaaaccccgtctctactaaaggtataaaaattagccaggcgtggtggtgtgcacctgtaatcccagctgctcgggaggctgaggcaggagaatcgtttgaccccggaagacagacgttgcagtgagccgagatcgtaccactgcactccagcctgggcgacaagagcgagaatccatcccacaaaaaaaaaaaaaatctccactgggcatcttggctcacacctgtaatcccagcagtttgggaggctgaggcaggcaggtcacccgaggtcaagagtttaagaccagcctggccaacatggtgaaaccccgtctctactaaaaatacaaaaattagccgggcgtggtggtgcatgcctgtaatcccagctactcaggaggctgaggcaggagaatcacttgaacccaggaggcagaggttgcagtgagctgacatcgagccatggcactccaccctgggtgacagagggagactctgtctcaaaaaataaaataaataaataagaaagaaaataaaaataaaatgaaactaaaaataaattaaaaaattaaaaattggaaacaacccaggtagctatcatcagatggatagataaacaatgtggttatacatatagtgaaatattattcagctttgaaaaggaatgaaggctgggcatggtggatcacgcctgtaatcccaacactttgggaggacaaggcgggtggatcacttgaggtcaggaattggagaccagcctggccaacatggcaaaacccatctctattaaaaatacaaaaattaggccaggcgcggtggctcacgcctgtaatctcaatactttaggaggccgaggccagtgaatcacctgaggttgggagttcaagaccagcctgaccaacatggagaaaccccgtctctactaaaaatacaaaattagccaggtgtggtggcgcatgcctgtagtcccagctacttgggaggctgaggcaggagaatcggttgaacctggaaggcggaggttgcggtgaatggagatcacgccattgcggtccagcctgggcaacaagagtgaaactccatctcaaaaaaaaaaaaaaaaaaaatagctgggcatggggacatatgctgtaattccagctacttgggaggctgaggcaggagaatcgcttgaacccaggaggcagaagttgcaatgagctgagatagcaccactgcactccagcttgggtgatggagtgagactgtctccaatacataaataaaggactgaaattctgacacatgctgcaacatagatgaacctggaggacattatgctaagtgcaataagccagacccaaaagggcaagtgtgatttcacttagatgaggtatcttgagtagtaggattcataggaacagaaaatagaaacgtggttactggaggttggaggaagggaataatggggagttattgttcattgggcagagaatttcagtttgggatgatgaaaagtattcctgagatgatagtggtgatggttgcataacagtataaacatacgtaatgccactgaaatgttacagatgttttaccacaactttttttaaagcttaaagctttctctatttagccaggtataagaaaaatgactttggggggaaattatttttcttatacatggttaaatagagaaagtgggaagatagcttaagcccaggagttggagaccagcctggacaatatagtaacacctcatctctacaaaagaaatttaaaattagctgaacatggtggtgcacccatgtagtcccaattactcaggaggcaggctgatg

SEQ ID NO: 3751 - DNA, 4001 bp, Homo sapiens
tatttcttagagaaccaataatgtagcttaacaatttctcaaaggtattgggtatagatttcctcttccagtggtttccatccatgtcttaaggatgatccaatataagtttccaatttaaaaggaaaataacattcaaaaaatttactctcaaaattctttccattctttttaaatacatatgagccatggacagaatatagccagatttattgcttttaaacaataattgtttaatgttaaagattctaatcatcactgaacatatatctagcacccttctagtttattatttttcggagagagttttaggagcccagatctacagaaacactaggtcttttccaggacaacctagaaagtcagagggaaaactgtaaatccattgctgatattcattggatgattaattttaagatagcctccactgccccaaactttatctaactatagataacatttttaaagaccagaatttttgtcactcagatatttgttctgggggtcatttatgtttcaattaatcttagaatgttattattagcttaagtcagtcactctaccattctattgtattctcatggtgctgcacgctggaactaaattttaacaaaaaaagaaaacaaaatattttaaaatgtgaagaagagaaggtatatgagacatccatccatcttttgtagcagatatgtctatttaccaaagctactaatgcaacataaaatttaaaaacaaggcaaatattcctttccttgataatcttgtctggatagttgtctatctacataaactacgatgatctgataattaagttgcattaactaacactcatggggaaagatcttcgatgtaaataacgttttcattaaagcatgtgtacttggatgatttatttctttaactgcttgacaaaactggaagttggcttaatacaactggctagaacgaaaggaaataaaaaattgcgcaactgtgttgtaagactatgcattctcacttacccaagtagagagagaatgaccaaggtagagaaggaattttgcagaggtcaggtagtcggccaaggatcctgcaaagacacaggcggggtgacaaaaagcgatggtagtcacttaatgagctgagggcagaatgcttatccatttgatctcattagaacatgattattaaaaactactttgcaggacaaaccacgtacattttatcaagttacctatgaaccgatgtatttcgttcacttaataccattcactaaattcagttattgacctagtcaataactgcccaacttcacatttcacatacagtgaagaaactcttgtttcagcattcttttttgggttggttggtttgtttgttttgtttcttttttacacaaggcaatccaaactgcccaatctactccatccgtgcctgtgtgcaaaccccttttcccacaccctgaatttcctttcttccttaacgtccaccaaatatgagtcaaaggatctttttacaaagctatggttcacagcagagccacattcctccagaactcgtgtagagttgcttgtctccaaagccccacctgggtttccaccatatgctttcggtcaacgacactcaccacagcatcctctctggcggttgtgatctcccgccctggtcatgacactaggcgaccccgctggctcttctgcggctgctatcgctgctgctgctctcgctgaggtgcttgttaacaggagtgcaaggaactggagatagcacctctaaaaacacaacagccttgggcaaaaagactacaacgacgactttggcaaagaacaaaagaaaaggggcccagggattttcttttttccttctttccaaacttagctaacactgtagctgaagttggaaaggcaaagccttatggaagcggtttgggaggctcagcaggtcgtccgagcctagcggacgccctgagccagctctctccgccgccgccgccgccgccgtgggccgggcccagctcttataccgagtcgggggcggagctccctgcgacctccgactggggccgccccgtccccttcagggccgcccgggcgtccccgcggcgcgagacgagctcccgtcaaccttgcgcgccgggccgtccccgcgcccttgcccggaggagtcgcccaccccgggcgcaagcgtccaaccggccgcagacaccctgcgcggcttgcggggaccttcgcctcgacgcgttccactccccgggttttcctgctctccgggaagccgcgagggcaacctcggggggcggccgtggggctgggaaaaggaggaaggcgcgtggagccggcggggcggcgtagggagattctgcgcgaaactaagcgtcaggtgctggaagaaagcgctgcgcaccggctaccccgcagttcagggaaagggcggccgccggacggtcgcagtgcaaagctccagcgcgagcttggtgggtggggattccttttttaacgaaaataatttttaatacaggtatctaaataaatataattcatgccacagaggccgctttcctggccgtcccattccggcccgcctgcagcagagaatgcctttccttccccggactgcatagcagggcttccctcaaagaaccagaatcaaagggcaggaagggggcgcaaagatcagagtccatccctcttgagaggagcaaacggaggcttgcaaaggtgaagtcccgcagcgagttacagacctacccgtatccccaaactggggcctccaaatccgtcctggagacagaatgaggatgctgcagccccagcaaacccttcaccatcattccttctccctctgtaccctctcaccccgcccccacgcgcgcgtcccttccccacctaacctccaaatgccccagtgacaggcttaccaggaataccggttatcccagttgtgtccctggatctgtccctgtccagataaagccattcggtggcctcctggagggtgaggtgaatgactaaagaacaccagactctagccttggttgacttcgttttaatcctgctgtgccaaaccaacccctggggcataccagccccttttgccagtaggttaccttacccttcttaatctcacgaaaaccctggtagtggatcctacatattgaaactccaaccagatgccacaccttgagcacaggccagactgacacccagtagtgaagggagccacgcatgagtatgtgccctgtatctgcactctcaatcaggagccccaaaggtctacggggtgggtgcagctggattcggttgggatgtggtctggtgagtagagataggggttacagtttaactactgcttttcactgctttttgccttttcaagccctcttttttcctttctttcacacgacattcaagttctttctcccaatttagagaggttttggtttgctaaccgtggagaatagggtcatttatacatgcatccttgagaataaaccaaagtatactcagatgagtgaactaaagtgaaggagtgaactggtaaataaacccctccactttatggcgatcccttattagagatgaattttttgacaggtcctcaacaaggcacaaaggatagtgatagtttgcacatttgtcagagtgtgtctcagcaacaaggacctccaagtgctttacattaattattacatattataagaaggggtgtcatgctgtccccaacttccaggtggctttttaaaagttcggttggttaaaaaaaaaattacttcccgtagacactgtttaagaagtatttgtggaaagagtggctaagtcagcatatacctcaaaatgtgatatggagtctctgttctccattgtcaccaaggagtccccagaagccaaaaccgagagaatgttataaagaacaaatgggatactgcagtgaagcaagtaggaaagatactttggaaagaaaacaagcaaggttcatgacattaaaaccagtgagtgagctgtggaaggggaatcttaaatcct

SEQ ID NO: 3752 - DNA, 4001 bp, Homo sapiens
gtaatgtcatcctcttttaaattcctctagttaatcctcatttggtcctaaaccctttaactgttccccacaagtgacaatccataagccacatcaaactggctttagcctgcttttctaggacaggttccaacaccccaccccacccccactgccagccaaaaaaagggttgggggtttccctaaaccttccctaatccccataccacgattcctgtgtatagttcccgtctctcatccagggaagaagagttccctggtattcttaacagtatttattctgagtactaacagaatcctaatttatgtatttgttcaagtttgggaagatagacaaatcttttacacgtatttttttataactccactttgatgccacaaagaaatatctctatttttaggcagacagggtaattgacaaacttctttctcctgttccctttctcccggccccctaccccgacactgcccctgtcctctgttgagactctattcttggtggtaactccttgcattcttcccatcactctgctccctccctgctcaaacctggcgtccgcaggagaactgggcatgctcagtcgccacagttgattccggggatgcaaactggaatctttttgcagcatgtgagcccggcaggagaggtaaggccctgaaaatactgtggcccagaatttgcccactcctcctacggaagcattttgttgaaaacctaggaatggactcggaaatggacagctcaccgccagtcccttccgcgcaaggtgggtcaccaaccttagtaacagggagctgagaaacagcccctccgtctggtttggtgcagggaggggatttctgctgtggtagcactgatagatggctggaagctatgactgtcatctctgttgcatcaagaaaatactgggttttttttttcttttttccttaaacacagaaacagcagctgctccagacagaaaaagatgttgcctgaagatctccaaagtctgcgagccagacagagagattgtggagaggataggcaaatccatcacttacacaaaaattaaatgtagggaaacagcttaagaacccagaggtaaacagatgggctattaccaaatgacagttcagaaacctttctaatattcacatctgaattgtgtgcctgtcccccaaaaatgcataccttctttgtacaaaaaccatgacacatttgcctttgagaaagagacagaacacacacacacacacacacacacacacacacacacacacacacacgatccttctgttctttcccctggtttctgtagagactaaatctctagagctgcaacagcagcagattccctcacctcactgcctggggatgaggcagggggaggaaattcgatagggattaaacatgataaaagggggcttctctgcaagggcttaaaccagcacacagcctgagaatcagagagataagcagtaacaggcaggcagagagacacgtaactgcccctgctgctaaaacctagccatttcttcaaacagcagcaaacatgagacatttcatcaccgtagtgcatccatattgagaagggggggggaggagaatcgtgtgctttgctttatgcatttcagtctcccaagatgggaggagacccctgtccatatgtcgtaggagctatccaccaccccaaaagtacactcgctgcacctagctagcagaccgcttgcctaacaggttttgcagcaaacgcggttaatctatgtgatagcaggttgtctcttaccgtaggcagcagcggctccatttgggctccctggtctttaatctccatgttttgtaacgcctctggaataagcaccttgctctgcagtgtcttcagtgtcttacactcagcccggcactcgctctgcttagtattcggatcaggtagctctgaagcaggaggcaattgcacactccaactcaccagagtcacatggctcctactcactcgggctgctggccaggttttgcactgaatgccttggatccctgggccggtaagagagatcccccaagccctgtatcactgcccacacctggctactagtataaaatacagcaagcaatgctacaagtctaatgggcattaaaaatctcacctaagatgctcacttttcatatagactagtccaagttggcctccaaccagatcagtctgattttgacactttgaggtactcgcttcattctcagaaccctataggagacataattcaagcaagatgatgtaaataaggtttactaggtgttccgctctgagtacctgggggcttttaaaacagataagatgactttaatattagcatgtcttagtgaggctgaactattcaccaccaacgacaacaaaatcaagcatttaagtcactgttgactcagtaaggattggacagatatttgcagtattttaaaagtgaaaaacttaggtaagtcacacattattaaaaataaagtatatgtttttctatgatttcccaacaaaaatgacagaaagaaaatattttgatagtaggaatgatcaggatactaaagcactttgaaaagacaatgaatctgacaagaatagcccaagcatatatccctttgcctaaaagtctcaacaaaataggggtaggggattatttaaataatccacagaagaaaagacatgctcttttgtaggaagaagtagttggtgaggatcatcaagtgactacacatatttcctaaaactgattatagatctagagtattttaagtaatgaagcccatatatcactgaactccagactaagtgtatggaggttacaaatgaagagtaataaagaactttcagggattaaaagagggtgactaaaaattattaacatagtttgtcttaaataagaataattttaccagattctaaaacctttaataagcaggaatgaatattaaattattttaagcaatacaccaaaattttccataatgctcattgcaggtagaattatcgataacttttatctgctttccttctcaatacaattctttacaacaagcttttattatttttataagaaaacatttattttaaaaccctaatgattaatatatttaagtggctactttctgcatagcatactgagttgataccaagggtttaaataacaagatatctgactgggaatttactgatattggggtcaatttgattttctaccacagactgatgaataaaagctaccttctcattcaaatgaccataatcaacaatcacaaacaatttgttataataaaaataataacttcactttagaaagattgtttctatcccattgagaagcctatgttgttccactgacatttcttcaaagttaatttaaatataactaagaaaaagtctggcccttaattccaaaagccaaaataaaagtaaaattgtatttaaaattactttttatcaatattttcttaaaatgtatattattaaactacaaaggtacttttctggaacaaccattgcttgagtgcttacgatatgacagagctactatttctgccaatataataggactcagccagggttgcaacagcagacagtctacttctaaagatcaagaaagcctatgtatctaaagttctctgatccaagatgtcaaatactagcctagcacaacaaagtggagaaaatgatcctcatttaatctgctacctatctaatagaatatacgaaaattaatgccaatgacctgacagaatacatccacatactaaataagtcccaatgaagaagatatgtataaaactaataactcctaggaagaaaaccatcagtaggtagtggaatttttactaacaaaatcatagaattttacagctcaacttctccattgattttcaaattcagaaagtgaagagaaacagatgggaacaggaaatacaaattgcatgaacaactttttctcaactacatattacctgccttggagattctgatatgtccttggtgggggtg

SEQ ID NO: 3753 - DNA, 4001 bp, Homo sapiens
ttacaacagtaaagtcagtgaatctctctgggttttggttacctcatgtgcaaattgtgtttgccctatctatctcaaggagccatgaaaagctgtatgatttaaaaaaacatttaagggtaccacttgtaatgaacttaaaatattaacctccggcagcaattttaatttcttacccattccccaggtgcaacccatctcatcatcttggctaccagcatttatcttcctttcagaggtatccatttcctcttcttcatctgagtcttctcctagcatcttcttctccaacaatatttgctgctgcttgcgcaattccttcaactgtgttactgttaactcggattctgcctctcggtcttcctctggtccctgatgaaccaaggaaaaaaaggttatttatttatttagagacagggtcttgctctgtcgcctaggctggactggagtgcagtggctgtaatacacctcactgcagccttgacctcctgggctcaggtgatcctcccacctcagcctcctgagcagctgggaccatgatgcctggctaatttttttttttttttttaagagacagggtcttgccatgttgcccagcctcctctcaaactcctgggctaaagcgatcctcccgcctgggcctcccaaagtgttgggattacaggcgcgagccaccgcgcctggccaaacaagttattttagagttcgggattgtgaacatgactttcagaaatatagcaatgtgtacagccgtctgaagatgataggccagacttgattccttcactttcgtaatcgctgagtgggagattcttcttcctcatccaaagcttaagaagcacaagaacgcagtccaatgaacccgaaatttcaattctaggtttttctacctacctgcaggataaagagccgggtgctgcctccaaagcgaacaacatgcccaacgtggactcgacagtaggtgcgaggtgggatgcgagttttgttgagaaaagtgccatgggtgcttcccagatcgtagaggtagaagcccggcccgttgctgtcgcattctccgtcagggccggacgccctgtgctgcagcactgcgtggtaccgagacaccgaagggtgctccaggcacacgtcgcagccagacagcctcccgaaaaggcagtaactcgtccctttcaagctacgggtgccaaggatagtgccgcccttcagggtctctaagctgtagggggctgtggcagggccaccccatggaggctcttggtaggggggagcccgggctggaccgccaggggaagaaaccgctgtcggggggcgcgactgctcctcctgtagactcctaaaatcaccgcagtccggctgaggaggagggatgtcgggctccccagaattggagtcctgcaacgcagtgggcccttccttctgtacctcctcagggtttgaagaactgctggccggggccttactccgcgccgctggggacaccggcagagctggcttcttgaagtccccactgaggtcttgcgacgccagggtctctgactgagagagaatgtcagccatcctcaaccggtgcaacttcgaaatccgctccttcgaaacccacccttcggtctttacgttcctgtccacgtcccactctcccaagctcccagtggcgtctgtaggcggcgatggtgaagttgctccttcacgacctggagcgttgcgaagtggtgctaacatgagaaggtcataatatgagaaaaacaaaacggttatcgggatgctgtgcagaacggggacatatttagaggttacaacgggatcgtaatgacttcctgttgcatagcttgattgagaagaagcgcttccggcggtcttagatcactaatcaacaaaccagctttcggggtctgacgcgatccttgcctcaggcctctcgaggtccagacagccgcccagcccgctctgcgacgcagcagtgaatagtgtggtacctccttgtctcggttcaggtccagacctccccgtcttccggctgccctgaacgtcaggcgacctcaggaccctgtgattggcgcctgcgccggcggaccgtgaccgaggaaacccctggagggacttgggcattccttgggctccgtgcctgttcttcgtgctcctttcggtaaagtaagggaagagggcgacttttttgttatttcgttcattcatttattttttttctgaaattattaaggcagaatagttaagtggttaagagagcagactctggagactgtcgatttttgacctcgccatttgtgacattgggcaagacactaggcctcagccctcactctgaaaaatggggataagattattagcctcatagggttgttggaagaattgaatcaaacaataaaggccagccagaccggtggctcatgcctgtaatcccaacattttgggaggctgaggcgggaggattgcttgagcccaggagttccagaggaggctgggcaacatggcgagaccctgtctcgccaaaaaaaaaaaaaaaaaagaaaaaatccaggtttgatggtgcgcgcctgtagtcccagctactccagaggctgaggtgggaggattgcttggtcccaggaggttgaggctgcagtgaaccatgactgcaccactgcactccagcctgggctacagagtgaaaccctgtctcaaaaaagaaacaaacaaaaaaggtgaagtctggcatatagtaaacattcaacaaatgccagatatttctgtgtgcctggccctgtaacaagaccacagccataagaaatagacgggcagaaaaaatctattgcgataagtactaattaaaatccaaggataactgctgtgacatagacttgcaaagcactgtgagaatagagaaagggagatgcactggtgaagtgacggacggtggggacttatgctgtacttaaaaatgaatatgagtctgccagggatgtgcaaggttggcagagcatttctggcagagttcacagctgaaagtgtcaattgtggaaatgtacagcattctcaagaaactgagtagtataatgttgttagaacaaaggtagtcatttcacccaggaagctcctcctttgtgcttccagtaccccaggtccatatacctctagaacagtacttaccatgtttcatattgaaatattctgcttctgtttctcttcctcacttcagggcaaggatctcacattatcagtctttgaccgacacagaatgcctggcatttgataaatgtttgttgaacttgaagagacatatggacaatgaatctgcaaaggtgagttgaaaccagattgtgaattttgttgaatggtaagccaaggaattctgactttttccaataggcaatgggaagccatttgatttaagttttaaaaagagtaagtctagcagcagtgtagagaatagatgacatacaaagagagattggaggaagggataccagttagaaggcagcagaaatctctcacgttctatatgtcaaaagttgaaagcataatgccatttagattaatggttcataaatttttccaccaggatcatgcctaagacacacagagtaagaaccacttcttattatctttaaccctactagtttttctcctattgatccagcacagatgtatcaagataccttatcatgccttgcttattgttcaggattgagcgtgatggtagttctggtaatgagttagtgagtgagatgggaaatagggatactagagctccagatgctgttgtagctattggtccactaatgacccaaattctaccctgtggttcagtgtagtaggaattgtcatagtatgacaataaccagcatctaacagttacatttctcttaatttatttagggagaacacctttggtcctacagttttgctgacactgacatttttctaagtggtcacaaatagcctactttttacataaataactggctagacctcgtatttttcactacagaagcctataatctaaagtt

SEQ ID NO: 3754 - DNA, 4001 bp, Homo sapiens
tagaatgtgccctggggccttgccccgacctaccatacagcccccaaccctacccagcctcacacaggcccccaacacgcactcctctcctcctctctgtacccctccctgacccctgacctgccacccctccaaagggaagcccctacctttgccttctgtggggtccctgagtgggggggctccacaggttctgcctcagattctccttcctcttcctcctcttcctcctcttcctcatccactccagctcccccctcctcctggatgggaggggtcccctcggagggaggagcagaggttttctccttcttcctctttctcctggtgtgccgggcagaggtggggggcagccgccgcagcttgtggggtggaggcaggcgcgctgagagcgggtggtgggtgtggtgggatgtgtgccggtgaactgggggtgcaggagatccggttgaggcccccacagcagaaacaggggccctccccacccgagggcacacaccttccagctcaaggccgcaaacaagggcaccctagtccttcctccagggccatgaccccccaacacctgtgtccacgtgcctgtcattgatgaggtctggtggagtgggaggagagggtggatggacagggaaggtcatgaagggggctgggaggggagacgtgatacagcaaggaggggaaaggcggagttggactagccgaggtgggacaaggagggagtgagtggggacgaaggggaaggggaaggtcaccgtggaagggcccaggcccagctccctagatctcccctggtctggggcccacctccccaggcaggcggacaggcgatgggtgggggaggcaggatgactgaacacggcatgtggcccagcacagagtccagcacagtgtccggcacaggatggcactgggtgaccaagccggaggtgagcgcggtgatggtggcgatgaaggtgatggtggcgagggcggccgcactaggggtccccaggctacccacactcaaagtcccgctcgctgtagctgcggctgggcttctcggggtcccaggccgggggcttgctgatgaggtccccaaacctgctcacagccaaggtcttgcccaagtcatcgtcctcctcctccacgtctggacttagagggggctcctccaagggcacccggacctgcaggcccagacggcctctgctaaggacccctgacccatgaaggccccacacccaccccaactccaagccctagttgggggagctcagcaggctctcacaccatcgggccccctccccttgctcccaggcctgtgtcagcatcccagaaaccaccctctctgggctcccagagcttgtaaagagagagggctacggatctggaaaatatcaaaaacccccctctttctccgtaacccccagcccagctcatccctggatctggggggtcccggggtcggccagaggactcctctgcccaccctaaggtccctcccctctcctcccccatctctcccccgcccccgcgcgcgccgatcacctggggtaggggggaggcgcccccgggcggcgggatcactccgttggccatggccaggtaggcggctggggacgctctcgctcactaggggacccgagacccaggtgagaaggaggggccactgagggggcctagcggggagccctgggggaggagggcggggtcaggttccttgcgctggcgccccccacccgggagccggatgcacgctcccggcccaagcgcccctccgaggcccagccacgcccgggacagcccgggtcccccgccctgcccggcgtgccccgccccgcggtacctcggggctccggagcctgcgaggcccaggcgggccgccgcgccccatgtcccccgcgctctctcccgagcgcagccgcgactgccgtccggcctctcgcagcgcagagccgggctggccgggcggacgcaggcgccggagcccgcagcccgcggctccacctcctcgcgctccgctccgcacctccgccgccgccgccgccgccgccgccgccgccgggccgcacaatgggagcgggcgggccgtgactcaccccgccccggccggcgcggcccccacgcgcgggccccgcagcaccccacctgcccgtgcgccccttctccaggcgccccacgcatcgctgggggctggggcgcggcccgatattcccacaatcccccagattcgctccccaaccctgcttttagcctcccctcccctccagagcccaggaagccaccccctccgcagacacaggcccctccagtcttgggaacggagctcacagacccctggaagcacccaccacctcccctttcatttctaccacagccttgcctctcaaaggcctggcttctgtcgcctggcaccacccaacgtttgaccttgacacagtacctcccctcctcccgcctcagcttccccagctgtagcgagaggggcctgcaataggggtgttccaaagttctatgcaactctaagactgtgtggctccgtttccacatttcctctcccttctccccctatccctgaggtcacatctcattttccaagggcaaaaggtctttcgaaggagccactggaccccaatcggcccctatcccgagatcaatgaaactggacttctacacagtgcgatgccataacagccctgtgaccttggtacttcaccgcgtctgacccctggcctcatctagatctcagctcaacccaaggaaagattttctgtgtgcatagccttccaaggggaagggagctaggatctgttggacgcccacattgtcttgtgtgtgctcacagtcctgtgctaggttggccctctccagactggctgcctcgtctcaggcataataataagaggagctgttatgattcccatttggtcggcagaggacagtggagactcagggaggctcgttacctgccatggtcacagctggaaagcaggctgccgacaggtttgggcatcattatccatgtattgaagtgactctccaagccacaaacaaaatttttaactgaaagagatgaactgtcctcctaagtctcacatggtgagtcccaaggtgggaattcctagggtgggaatcagctatgcctaggcagagcacagctgtgccccaaaactcagaatgggagacccagctgttgggagttgagtagtgtcccccaaaatttatacgttgaagtcctaacccctggtacatcagagtgtgcccttatttggcaataacgttcttgcagatgttaagataagggtggactcatccattatgactggtgttccagtgaaaaggggaaattggccaggtgcggtggctcacacctgtaatcccagcactttgggaggccaaggcgggtggatcacgtgagatcaggagttcgagaccagcctggccaacatggtaaaaccctgtctctactaagaattagctgggcgtggtggcacacgcctgtaatcccagctactcaggaggctgaggcaggagaattgcttgaacccaggaggcagaggttgcagtgagcagggatcgtgccagtgcactccagcctgggtgacagagcaagactccatctcaaaaaaaaaaaatatatgtatatatatatatgggggaaatttggacaaagagacgtgcattcagagaacgctttgtgaagactggagttatgctgccacaagccaaggaactaccaaagctaggagagaggcctggaacagatccttccctagtcccttcagagagagcctagccctgcagacacctcgatgtctggcttctagcctccagatctgtaagacagtagatttccattgtttaagccactgggtttatgatactgtgttacagtagccctagcaaaccagagctatcccaattctttattcctctgagccaggcaatgtggttccaagtccctaccttgaattttgttttggtagggccttcacgtccttagagacactcaagagccttgg

SEQ ID NO: 3755 - DNA, 4001 bp, Homo sapiens
ttttaatcttccccctttttggtctttttttttttttttttaagaaacagggtcttgctgtgttgcccaggctggcctcaaactcctagcctcaaacaatcctcctgcctctgtctcctgggtagcttggactataggcacatgccactatgcccagctcctcctctggttttaactgagcactttatatgattctgttttctctcatctctgagtgtataaattatatcccttaaaaaattctagtgtttgccctagactttgcaatatacagttagaactaatctatgtccactttcaaataacgctatactgtttctcagctgaactatggagaagcatgtctaagccttttagagagaagttgaatatgctttagagagatgttgaatatgctttagacagatgttttatgagtctactctggttggtgcattcctaggtactaggggtcaggttacttggatgtcagtgtccaaatctgtctaaagtcccagctcaccccactgcatgctcttctggatcccattctctcctggatgtaacagggatgaagaaaacgaagtggagattcttatgaagtatggcctcacttcctagggcacgggtgtcagaatgactagtttcccttcttcctcctctcacctccccacatcatggtggaacttcccttccctatactgcattgtttaagcaagctgcaatttgagataagcagtagacactagcacttagaggtaagtagttccactctaagggcttagcatatttgggtcttccaacagcaagttcctattctccacccttgaggccaggaatggaaatgaaaagaagcaggtatatcagaaaggccccaacccaagaggcagctgccctaggtgctccctggcttgtcctttacttgatctgtggccatcctgcttctctgggactcggtgaactcatctgtaatgtgggaatgaaaatcctttctctaccaaactggcttctgaaaagatagaatgggatcatgtataagaacatgattatgcaaattgtaagggactatacacaggaagagtatatttattatagaaatcagaggagatggctgtcaaaaaactattttactttctgttctgaatctaaattgtcccatcttttcttggcttctatcataatcaaaagagcatggtgatttagctggtgaactgtggggagtggcttgccctcccccaagtctacattctcctctgtggctctacaagacctctcctctcacggtaagtatcttgcagtttggctcaggacatgtgccaagttctcctagcaactctttagggcatttttcttgcttgacagctccagagtggctctacacattctgcagctcaccgagcctctaggtgggcagcgaggttggtattttccttcaagtggggctggggtaacgatggcagtagccgcccatctgattgccttttcataagccccatggcttcttctctgtagtgtgtaggaggctttgggcagctaaagtcagcaattctggagcaacagaaatacctgccacctcaacatcctcttgcactggttttaattgtgctgtcagtttgggaatctattaatataaaatgttgatatttggcatttattatggtttgcagatcttgtaaaattaggtgagttacattttgtgttggggaagctatattctaatccacataggcaaagtggcagtttcctgtctccagcttgaccatgcagtcacctggggataccatgaaggctggtcccaccagcctcaaggagacactgtggatgagtcaggaaaagggacctgctccctagactctcctgctgaaagagctgtcataaagacattcagagaattctcagtgcctcctgagatttgcatcaagtcctcaaagtgacctcacctttctgatccggaaatctcctcctgtggttagtgtggtccagctttcctaccccagccttctcctccttcaccttcatgactataaagtaaaaggaacacagcctcaaaatgtatacattaaaaagggtaggatttcaaggagaaatggtcaaatccacagtcataatgggagattttaatacagataaaaaactaagacaaaaggacatataactgggtgcagtggctcacacctgtaatcccagcactttgggaggctgaggcgggtggatcacctgaggtcaggagttcgagaccagcctggccaatacagtgaaactgcatctctaataaaaatacaaaaattagccagatgtggtggcattcacctataatcccagctgctaggaaggctgaggcaagagaatctcttgaacccgggaggtggaggttgcaatgagctgagattgcaccactgcataccagccgggggaacagagcaagactctgtcttacgaaaagaaaaaaaaaaaaaaaaaaggacatataaacaaattgaagaataatttccaacaagcagagaacacacttctttttcaagtacaaatgacacatttacaaagagagcacatatactacgtcacagaaaagcctctgaaaagtaaatttattatgcttatataataatatatataaaagtaatatattatgcatatatatatgcgccaggtgtgatggtgtgctgtagtgctaagctacttgggaggctgaggcgggagaatcatacaagcccagaagtttgaggctgcagtgagccataatgattgtgccactgcattacagcctgggtgacagagtgagactctatctctacgaaaaagaaaaaacaaaagcaatctatgcttttgtttttaagtaaacaacactaggactgaaaaagggacataaaatatagttgagaatttaaaaattataattccattaaaaaattcatgccaattaattttaaaacttaaataataagaatagttaacattgctatgtgccagaagtgctttgcatgtatgatttaattgaatcttatcaacaatcctatgacataaataacattattattcccattttacaaatgaggaaacccagacacagagagcttaaatgactacccacatggaaaaacaaatctggacaatctgtttctggaactatagccctcagccacaaggctaatacatggatacttctctacaaaaacaatagaagtatcaaaattgacttttaaaaaaattagaaaacctaaattaaccaataacaattaaaatgattgtaggaaagacaccacaatcagtcatgtattgataattattgaagctaggttatgctacaaaagagttgtaaaaaaaaaaaaaaaaaaaaaaaaaaagagttgtaaactaaaaataaaatcctaagcctccccaccaactgaacagactccctcttggccaaggggatcccagagatacattaaaaaccaaaatcctggccaagacaggataggaggtcagacacacctggttatatcatctcccttttgcagtgtagacataactgaccagcatttatgttaaaattgagaataagactgacagaacagaccctttatggcaataaggtaccaaactgtaaacaagacctaaagccaggccaggcaagggttaagttatacacgcctacacttgaagaataaactgtgtcctaactgccacacggtttttcttttcctctagcagctaagcaagcactggccttgagacaagcaatattagaacaatttgcagcacatctaccagcagatgctgactaaccaaccccctgctccataagccataactatagctttgattggacaaaagactgactttagtaactccctcctgataagaagatcatgaaccatggactggttctggtcagtttacagaggctgtgcacttgaacgcatttgtgtcctacaaagaccttctaacgtataatgcctaatgtaatacatttaaatgttatggctccatcccaaggtgaacatgggcatgcgtaatatgcatgtttgttcaatacacat

SEQ ID NO: 3756 - DNA, 4001 bp, Homo sapiens
gtgcacattagctttaattgttaattaacacgcatctgttaaataaccttgtatctgactttggattttaagctttctgagggcaaggaccatgtgctgtttaaccccacactgttcccacagcctggcaaagtgcctcaaatttacacagggggcactgagatggctgctgagtgaattgctgaccaagagggactgccccacatcaggcagcccatgccattactgtgctcacactgtgcccgacacagagcaagggatcataagtcctgggtggcttgaattgactcttcctaaaaaaagagtctgtgatctaggaagtccaatataaaaagatgttgcggattgcccagacttagagtaagaggggcagaaatgaagtaggcatggatggtaattttgtttttccatcagggctgctcttactctggagtaaggagaggaaggctaagacacaaaagggggactccgcccaacccagcttatgtcctgtgataccagaagggagcattgcaatgacctattaaacctcaaaccaagctgaatccatttctgagtaagagactcttacagggctcctgtcctcaaaactatataaaattgctcaaattatgtacttctgagataataaattagcagaagaagcacatagcccacctcttaagatagggaagtagatctgaagtagctcaagaaacaaagttttctacagatgaaggatgagggaaggaaacccaagaccagttgattctggtttgggaaatgataacactggagaacacactctactatctgtttcttgtgacatcctttgtgctaaagttatctcctttgttggcatggccaccatccctacttctagtgcagtggagatgtatgagtgtctccattgctaagtgtttagttactcaagataaacttgactggagagggtgtgggcaggcattcagtcaagcaacaagccactcactgagtgccaccaatggtgtgggaaaagatgactctccttagactggtccatccaaaataaaggaggtggggagagcatacctgggtggtcttcagggtactcctggaaacatccatcagctcatgagctcacagctgaattccaaatcctgggatgcctgcttggagggagggtaaaacaccatttctcagggacagaagcccacaaagctaagggcactgggtttctaagtcaggatttcatcacggctggatgacccttttttaaggaaagccagctgatctccaggactcctgatacataagagctatgcagtctgtcacttctagggagagagatggggactagctctggttcctcatgcgttccttccctctcactccctaaagacctcaagaaacagatccttggtaacaatgccttctttgggccagaaagcttagttgaagtgtggattcttatacaagtctcatgttttctggactcctaggagactcagaggagacaccataggtaacccttattgaactggaagaagtgtgaagtactatcaaccactgagactcccatggctcaagaatatgcacagaggtctaactagatataggtctcagcccctgactttagaagtctgacattccacagatatgcacacactacacgctcccctcacagaggaaactggagtagggggacacagcagaacaaaatcgcaacactactacaggaaaacctcgtcattccgttacttgtcctttgctatgttggaatacttatagattagtttcaacaatcaggttactccttatctttgctctaagtcttgtacaggcctttagcaaaaagcaataaaattctcatctgactcttggtgggctggggaatctgcctattctattcagttggttcactcacatctccaaaccagaacctacaaccactctgtaactttatttatgtaaaatccactctacttaccccagtgcagtggcctgtggctcctgggccctgactccaattcctttagggtggaccttgcagttggaaccatccacctctcgttttttctatctctgctattaacatagcccctcctctattgcctcaccaactattttcaaaccaaaaagtctttgtctattcatagccactgtaaaagtaacattcatttttctgttttttaatctaatgtctgcgtcttcagtggttctcactggctaatctaatcagtgtgttctagggaggtttattccttgcctgttcagcttgtcccagcacaacaaaggtaagtcatttgcctggggagaatcagctcttttaaatcagacaatcctcaggaaagatgtcaggacttttgcctcttttcttcatgggactgagattcaggagaacattccacattccactgccacacagctctgcaaaccccaaatcctgactctccgaagaaggatatgggcaaggaaaacaaagaaggcatttgaaaaaaccaaaccttgcaagaaaaactttgcgtacttggtgatttttccaggtttatcctgacttttggcctctgtttttatgaattccatttttgtttaagtgaaaaagatacggtgagagagacatagtggaaaatgggaagtttggaggaagatgggaaggaagaagccagtgagtaggaagtgagaatcgggagtggagggagtgagggacgcggtgctgagcgatggggaagagaagcatgccaggaaggcgcagcgtctctgggcacccagcatggggcctggtatatgcacacatttcccctcattgaactctcaacagtccagtggggagagcattctcgtccccaaccttacagagctggaacagaagctcagagacttacagacaggaagaaaagtaggagctggaagccccattaaaaaagcaactctacccctcttcttccagtctcttctgtggcttctctaagggtcttcagcctccttatttcagggttgaccttctctttcagataggaaatttatcatctggttggatatcctcactttcttcctagatcacgtggagttttcccttagtggaaaagcctcattcctggatctagagcctgctggtggcagacatgtaaaaaacatgtttcggaggccatgcccaagccaacacattaacccaacattatagtttctgttaataatccatggaatcaaagacaggcaagactagggagatcaacacatgctgggtcaccagaggctttcctggttttagcacagaagatctgtgacccaggaaaccccttagtcccaggaagatcagcacagcctaggccagaaacagtttcgggccttagggaatttccagctggttggggattcaacaaattcagaagagtgtgaggctccaaaaagaagcacaaagggagggaagggttcagtgaaagaaaaatcacccttgtttggaggattaccttgttccacaaatgttcatggcttacctaccagccccatgtgttaaagaaaagctttgtggagaaaatggccttggagatgcagtgaagggataggataggggtaggatttagaacagtagaactaccaaggggtatctgaggcagagggaagaagccacaaaaaatatagacataagaggtgggagaacatagcataaatatcctgagaactggagagcagtttccctggcacagggcaggtttggggaaataaagctttgggcatgcgacgataggctgggtagtctatggagaggtgtaaacatcagcaaacatgtctgaagtgaaaggaatgtggaaggggacttggtacaagaatggaataatggacttcacagtggattgtagcacaggtggaaagaccagttgagacgttactgccaagcattcaagtgaaaccctttggtttctacctacccaggttttgttcaaataatttggacatttatttcagacacttcaggtttggggtttttttgtctctcacttcacacaggaatttgagggtgagcttcatctggtttggtgagg

SEQ ID NO: 3757 - DNA, 4001 bp, Homo sapiens
ctacattgatccaaacgctatggtctcgcatctctccagaaagagggcggccaaaagcaagagctagctgttgtttcactacaactataacatgccaaggcacaaacagcagattgtgggacccccccccctttttttttggagacggagtctcgctctgtcgcccaggctggagtgcagtgacacgatctcggctcactgcaacctccacctcctgggttcaagtgattcttctgcctcagcctcctgagtagctgggactacaggcatgtgctaccgcgcccagctaattttttttttttttttttgtatttttagtagagacgagatttcaccatattggccaggctggtctcaaaactcctgacatgacgatccacctgccttggcggatcggtggcctggccaccgcgccaggccaagttcaggtttttaaaaggggtcccacatcactgcctgtaatcccagcactttgggaggccgaggcgggcagatcacgaggtcaggagatcgagaccatcctggctaacacggtgaaaccccgtctctactaaaaaatacaaaaaattagccaggcgtggtggcaggcgcctgtagtcccagctactcgggaggttgaggcaggagaatggcgtgaacccgcgaggcggagcttgcagtgagccgagatcgcgccactgcactccagcctgggcgacagagcgagactccgtctcaaaataaaaataaaaataaaaataaaaacctgaactcactttggtcacacactgcagtggatcgcattgactcctacaaaaggcaatgagaccactgcaggactaactgttccaaaaagattccctcaaaatctgtcctggggcctataattcctcaaggtgtgaaaggctttgggggccctccttaaaatgctaatagctactaacaccttagaaaatttgccagccagctaaacgtaaacctttcaggaacttccaggcagacaccatgggggtaatgtggaagggaagcctggctcggctactcgagatgatcacttgggtcggctttaaggagctttctggctggccctaaccaacactgtcgcgccgggagcagggatcccctggcgcccttcagtcagggcgctggcccaccctggggcagcaacgcactcccttacctccgtggttcagtcagagctaggaaggtccctttgtgcttcctgagatcaacatcgctcccttttcctgggaaggcaaagaaaatgagttagggaagcgtctatcccgctcctacctcctcgccaggctccgggacgctatgcgctatcagcattgaggtgaagaggactaggtgcccggggcgatccaggctcgtgtcctcccgctggagtttgaggtttgcccttccctcatcaccctcaccctcgttctttctcggtttcccgcttccctctacgcggcggagaccaccaccttaccgctcgcacttaagatctcagacccacgccggaggccggctcgctccgcccctccccgcccccttgtccccgccccggctcagacgccgctccccggtgcctctcggcaccggctcacgctctccaggcccacctgcccggtctccacacgtgggtagccagagcccggccgagagccctggccgggagcccgcgggggccccgccccctgcccgccccctgcccgccccgctcgccgtgccgccatgtttactgagggcggatggaggggcccgagtttctgcgaagccgcgacctcggcgtccggacgcggggaacaccgggctgagggagtctgcagtcggctccgggaagccgcgcggcgacgggggaggccttcactaaaggggaaaaggaagagggggtcggccagtatccccgaaagagggctagggcgcatgaagaccagcgcagagctccacgagcaggaaaagcccccaagcagccccagggcgactggaccgggccgcttaggccacgcccggggaagagggcctgacgcgctgcggggcggggccgcggggccgggtcgcgcgagcagcggagcaccaagggaacggaaaatggcgcctcacgacccgggtagtcttacgaccctggtgccctgggctgccgccctgctcctcgctctgggcgtggaaagggctctggcgctacccgaggtacagaagcaagtttgaggtcgggctgaagcagggtcgctggccagccgtgcgtcgcgctcgccagcggctcccccttctcctcggcgggcctgcggttctgatttcgtccctgacgcttcccgaccctgcccagccaggtcctgttcccaagtactcacgtcgtgcaggccttcggcgccccagtcctgccgactttcaaagacctgtgaaacttgatttcgccccttaattttagaataactttaagttctttctacagacgggtcctctgcctcttgtgtaatctctctacgcacgaacgccatatatcgtgcggtggtagggctgtacttttgtaatgcttgatgagttctttacgtacctgcggtcgttttacaccgcgccaaactagggctgtcagattgagaagtctctgcagaaagcataataaataagttcgaatagtgatcttcagagatgaggaccttccctgtgcgatatctggtactgaaagtgtcgggagctgattcggcgcaggactctggaggaagagatggcatctcctagcctagcctgttacaagggtgggacacgagccgtttatccatttatcggccccgtgttagaggaattctggaaacgtgtactggcagttaattcttgatcgccgtttgttcttttcttggcttttctttctggagttctaatgtttctttctcttctgcagatatgcacccaatgtccagggagcgtgcaaaatttgtcaaaagtggccttttattgtaaaacgacacgagagctaatgctgcatgcccgttgctgcctgaatcagaagggcaccatcttggggtgaggggaagacatccctagatgctggatacaggccattccttagcctggctgcttttatacccttatattatttaaagaatccacctattatggtttcagctgtaatcatcacgcagatgtctaccaaaactagatctctttagtgtcttttttaacctttccacactccaggtacatacgggtacctctagcttcctattaagcatttcctactgagtgcaccctaacttcaaactcaaaatgttatgttttgcttccattctcttctttccttcatctacctaaatacttctctgtattaagcttttagaaaaccaacattttccattatcactctcttgctttaatactatatttagtattaaattttgtctcaggacaaaattcaaaccattaagtaccatactagtcccaacccacttttccaacattatttccaattacttgtccgctcaaacctccataatggtctgcaccagccagatttgcctgccctcaaaggcattccacctttgttcaggcctctctccatacctgaaattgccttcctctaccaaattaggaaatatccatccttcaattccaacatcttttgtgaatatttactactactaagttccagagtaataccttttttaaattattatttatttatttttttgagacggagtttcactcttgttgcccaggctggaatgcaatggcatgatctcggctcaccgcgccctccacctcctgggttcaagcgattcagtaataccttttttaaaaacttcctgtaatctttagtgtccactcaaatatatttatacactgtcctgtggtttcttttatattgtaatttaatgtttacagtgcttttatttttgggcagtgctcttgttcctctaactacattgtaagccactcaaaggccaaaatactgtgttacatatttttaacattctcccagtgtttgcagtttgtagggactcagtaaatatttgtagaataaaggaatggatagc

SEQ ID NO: 3758 - DNA, 4001 bp, Homo sapiens
gttcaagtactactgagttgaaaccaatttatttttaggttttaaatcaatagaaaattattttaaaatatatataactagtgaacataaagaatccccaaaggacaaagaccaacatttgctttgtcactctgaagccacacgctgcacactcacagatgccaaggaagggaggactgcatggagccggcggcgtctgaacgtacctgtcatggtaaatccaccaaccaataaaccaatatctcggccaccaactatgatggcttcgctgcgctcttctgcgctgccactgtttttggttctccaggcagcccatattccaaccagcaaaattagaaggtagaacacgatgatagctatcagtccttccacatggaaagccatttttatctaatgatccagattcttctgcagctggctacttcattaagtcttctgaagaaaatacagggatgcattataaaccagtcaagcactatgcacatgtaggcagccaggaataaaccagctggctcatgcgagatcctgtgccactcacagaaagagtacaaccctgaaaccacacgtgaaacgggcagttaacaataagtgtccactacattatcctacttctatttaacaatttaacattattttgagtttgcaagaaacagaaaaaaaaacggaaatgtagtttaacaaatggaatcataatccttgtgtgtttcatacatgctttaaatttaaaattaaccttgtcgtgtatatcttaactcagtaactgtcaaatcatttacaaagagtagcgctgtatctgcgttttggaactaagttactcttctagaattatttattctagaagtgttaagtgtttcataaatgaccattctgaaaattttaaaatattcattaatttattcattcttttatctgtcctttcaaacaacttcagagaatggcttcagtagtaatctgatataaaaatatctgaaaaaaatctttagaaaaatccatttcaaaaacacatcaaactccacattttcaacaagcttctgtagttcaagttactatagcaactaagtatgttttttgttgttgaaaggatccattctcttgatcttcttcgcccaatatccttcattcaattcatcaccccccattaatggtacatacaggaaaaggttttgttgttgttgttgctgttgttttaaacacaattgcctaaaagcacatcagaagcctcaaagatattaaaatcaagactcttagaagacagatgtcaagttcgaaagcattcaccttctgaaattcttgtccccttttatttttatttttatttattttttacctttgtgaccacagctgttccatgaacccaaactctcacatacaagtttctgggggaaactctgacatttgtgcgtgcaggtgggtgaagagacgttgggggaaagaatcagcctctctggaatttaaaggaggcaaaagaagcgcccgcgggctgtgtcttctctgcctttgtgagcaaccaagcaggcaagttcctctccgcagcagcccgatgctctcccggccccctgcggcctttcctcggccccctctacccatttcctgcgcccagactttgtagcctcttgcaccctgacagcaacggtgccagacagcaaacccgccctcgcatcccaccgagagggaaaaacgccgcgtccctcccctctaaaaccgcccgggctcggtgcccaaggcgtttccgagggtgcgggcccgtaggcgcaggaatgcccgctccgctcctacctggagtggtggctgcacgcgaaagcgctccgcccggggccgccgccccctggaaccgcgaggggtgtgggtgcgagggtgcagaaagggagggtgcggggtgggtcggggtgcagtgcggagcggggccgggcggtcagggcggctcctcactcggcgtctccaagaacctgggagcgcgcagagttgacaggtgttggcgccggcggagggcgcgcggcgcagggcgaggtgggaatcgatcgagtattgggaaaagtcccctttataagggcggcaggcgggggcgatcgtcagacatccggaggcggacgtcagaggagagtggtgctagggcgtgtgctagggacgctgccctcgcgaggagggtgggtgtgcgggatgcgaaggaaacggggcccaaggagctggggggcaggctgggctctggtccgcgctgccagccatggtatccccatcctgagacaagtacctgctactcccatctcctcctccagaaaactgggcggagattccttagggtgattcccagtcgaacttctcatccctctggttggaagctgggaatggggagggtctcagaggattatattttcagaagcagcagctggaagcctagaggagagaagtgtcctgttcttttcttcccaggtcagagtctggaattgtttcctgacgagtctctctgagagggaaggggtcctctcccgcggcctcccctgggccctgttggaagctgttcctggcgtccctggtgatgggctccctgaaggagacatttcaggaaggtttagaaagtcctttttacattcatacccctgccacttaaaagtagggctaccatgaaggacactaggcgtggtccagattaacaatgaggttatcacagaagtcagacaagatggctttcctggtagagccctttgggcagctggcctgctgaatatcctattccagcttacaaaaatttgctgtgttagtttacaatatatccatatacctacctatttttatagattatttatatattacacatataaatatgtatctatagatgtatttctacatctaggtgtacatggatagatgcagatacctgtgtgaatgtgaatggaggaagagagaagggtgggagagaataagatagaagagtcacaagccacaaagctacaagcactctggccactttctcacttctttccgcattccaccatgagagtgtatttaacagtgaaatacacaagtctaataagggatagaataaataagagtgcctctgaactactgttcacctctctaggccaatcagaccatctccccttttcttacactggattttgaaattaacttccaaatttatgttactaccccttttctttcttctctgtataaacaataactgcatccaactacctcttttgaggtgagaaagcctagggagttcaaacagaaattaagacgggccaaaaggcctgcaaagatagttatttcccctgggtaatatgactagttcattgattttctggaaaagacttaggttgccttttaatataaccccatttttacatacacattttattaatttaagcaattttaaggaactgacagagcgaaacagagatgggatttcatataattacccatgtgttttaaaagaggttcattcattcattcatccatccattcattcattgtttttgtcttctataactcattttctgattctgggccttagcctcaggttaactgatgtatttcctgccagaatatactaatgatgatgatgacacacagcttattgctgtagcagggcaggcatgggcaattgcagtgtctgaaatagtgcacaggcctaaggtcagggagcttgactcagatccaaagagagactgaagaggcagccgtcctcagagaacatcaccagcctttcggtatgagaattgggagtgcagccaaagcacacctcccagagcccacctaatccactttgacaagccaggcttgccagactatggactcagtgccagatctgagaatggacaatgaccttgacagtggccaaattcttgcctggcagagcggctgtcctccatgacaagaaacaccagttgaaaatgacaactgctgatgaattgagtctagttctggggagacatttcctcatttgctgagtcctttgcgctccgtgtctgatctaaggatgaagctgcatgtgaatttctgtg

SEQ ID NO: 3759 - DNA, 4001 bp, Homo sapiens
tggcacccaagcaaagactgatatcttgaaagggatcttgtataaaagctattccattccttgcatgctatttaatttaaaaaatgatgcacagactcacattcataaacacactgaaccacacacacacacacacacacacacacacatatataatatagaacttacacaatttcatcattctggaattcgagctctccacaagtgtcctcaaaatcctcccctccacctctggcagtcccttcgatggttttatatggaacgataacatttcctcgagctccagatgttctcaatactttcacctccatgatgccaatgctctcactcacatgagtcacaggttcctcaaaagtaaaaatgcctgcgtggtcatcatcaaaaatagttacagtggcagtggagggagatccgaggcaagcaagtgtagaaacatgattggcttccagtatgccatcttctgaagcttcagaagatactttgacattgctgagatgcacaaggaaattttcatcctcctcaaagatatcatcatctatgatacccactctgatttccttctgggtatcaccaggcttaaacaccacagttccttcagtaaattcataatcagacccagcatttgctgtgccatcctctgttctgaagtcaacaaacacagtgttagtcaaatcaccacctctgcggataatggtaagggccacagtaccacagttctccagacactgatatgtcccttgttcaaagaagatcttactaacagggtcattttcagtcacttcagtgttgacctcgtgcatgctgacagccttccttgcttggtcagctgcatgcctctttaaaatgttgccagctccagtcatgaggcgagtagcttgaatgcgataaaatgctctacttttttgctgctgacttaggacttggtagttagctaattctattaattgctctatttctttatctggatgcttctgcttaagttccttcagaatcctagccatttctcgcctagcttcttcatcatcttggtccctctcatccacctccagaaccagagcaccatctaagaaattttcaacatgagaattgaccactttcccgtccatttcaatttcagtcttagaagatggcctgtctccttcatgttcaataatcatccccctctgcttgccagctcgatacctcttgtagacatacttgtaaaacagaagtctcctatccgctacccaagcgaacacaacacagatgggaaagaagaagaaagtaagcaaaccttcccagacctccacaacaccaggagatatgacagacaaaataatgtaaagccaggtgtaggcaaagatgctccaggctgctgtcacaaagaagacacgcaaatgcttaatcttccttgtctctccgtcaggcaccacataaacacagagtgcaataatgatgaacatattgaatgcagcacttcccacgatggtgctaggaccgaggtctcctgcagtgaagttatggccacacacttcaattactgaaaggagaatctcaggagcagaagatcccagggccatcaaggtcaggttagaaactgtttcattccagatcctcacagttgtcttggtggtctctccattgggtttctttatggttatttctttttcttgagatgtgatgacttctatagaggacatgaaccgatcagctatgatagagactccaagaaacatgtagaccatggccacaaaatacacagtagctctagcaattttgtccccaaaagaagggtcttggggttcccaaatgggcaaaatcacccctttcttacagtaatatgatccagtacattcaccagtttcatttccttctccttccatttctgtctcagcaattacatggtccacatgggaaaataagagactcacagtaactaacagatgaaatcccattgaaaaggtgggtgaaagacttaatcgccgcatgttgtacatgacacttccaactgtcacaacctactggtaaaaataagatgggggagagggcagaaaaaaagtcatgtcattagagctgcagccaaagcattactaattacttatttttattactcttaccaaaatttgtttatatttgaccatcacaaaaccgaaatttgtttatatttgaccatcacaaaatctatggtgaatgattgttctaagactccatcagtgactaagcaatcctttgtaaagtttacaactcaatctttctgtgaatttactacatgtagtacccattcactgagcaagatacacaattgacttactggaaaggaaaagttcaatttatatagccttgccttattaaacacacatttatgcatgctaatagccaaaatcacaggacttttgaagcattaaacaatttcctcctttttactaaagcagattttcttctaaatttgtgttagtacatcatcttccaaaaacggtttcaatgccaaaagcaccttattacaattgatgctttgaaaatcagactccgaaaaaatcccaccaacacaaggcctggtgattatcttaaacgccagagagcatcttacactgtatttcatgaaatcatgtcctattgctccacacttacttggaaacaaaacttcaagcttgcctgaaatcaaagctcaatggcatttgttcttgaggagaaaaaaattctgctataatgcaatatttccacacattaagtacagtttttaaaagcatgttttgatgagagcacatttctttctaattttcagccagcccaggtctgctgatacattagcagctgggcatctggttcttcaagcacagctcttcacatctgtgtacagagcctgtttttctgcaggctggaaagggagataaacaggccaaggcctagttgtgggtaagcgcctggcaggctgtggaatcagcgtcaccaaccttaaaatgttccttctcggtgtcggtcatattttccatggtcattctaaaatacatattagttctgtcgagggttcaagtgaccaaaaaatgcaggaccaataattccatttaaattagctcatgtggcatgacaagagtgaccacaaaatatacacatgatgaaggactgtaggcaaggagggccatggcaacagagtcagtgagcagcacacaaagcttggtaggcatagcagtggactcaaccaccatggccttaagtccacccaccagctcaagcaaaactctactcagaccttacatcccttctgcttccagaacctgggatggaggtgaggggaaactgaagtagaggaaggtctgctccaagtcaaggtgactgtctcccaggccttgcaggatggactagttatgacatcagataaagcagcaataggaagaagccctgagtcagaacatacccttatgtcctggaaaaagttaaaagaggaactggattacaggctttcatagcttcgggctggctgagagccaccccacattcgcctacactctctggctcatgtttgctgctgatggcttatactgcaaactgcaccagtgcccaggagaacaccgctgcctaggacattctggcagaccctgagagatcccaccatagactaaagccctttatagctcatcactacagggagataagcttctttgacatttttcccatactaaagaaaatcagaggagggttatagcagtagaattcaaaactaagtaaaaggctgaaaaatagaggtagcatattttcaaaatatgcaaaagttctggtcagtatgtctgcttgttcagtctttgaaaggctttgagatttctgcttgaaacaaggtgaaatttaaccatcctgcaagaatgttggaagatctagttccaactcccttgtgtatccatttcatccacaatatttatgcatgcttaatatgtattttagaaagacttactagtctgtcttctagatcctgagaattcaccagtgataaaacaaagtctctgtcctcacagagcttatattctaatggt

SEQ ID NO: 3760 - DNA, 4001 bp, Homo sapiens
agtaggcaaacgagaagatagtagctgatatcatatatgcattgcatctgttcacaaacactagtggcatcatttatgtcaaccttttacatattgaaaattgcaaagactcctgctgtgctgtttcttttgagaagccggctggtatatagtgtttaattaagtattttaaagccatcttttcgtaggcctgttccactttagcaaaagttatgacagcttgtctctgttagtttaaaaaaagaaggcatagtttattctctctctctctttctaactctctcacaaatatagaatattagtatttttaagtaaaatagcctattttagaaatatagaaatatgttattttaatgtgctctcaatgtaaataggcatataaaagaataatttgatggaaacaatcccttagtattgtaattattttaataattatagtgcactattgaaataaaaacacatttcctctttctctgccacttttttggtgtaatgggacattcagagcttgaaagaaaccaccacataagtagtcatttcatctgtatctgttaaatgaattgcttttcccagacatctaatttatccagagaacatctccttggtcagtattacaaattgtttttattttcttacacttgcttattaataattttccatgtcatgtctgtcatcagagaaggaaggtcacattcaatatttctccatttctcttttcttttttcccactcatactctagattgaaaacttagctaagtaaaaacaattggttcaaatcttatttgaattatggacacattattctcagtaaaataaatcttgagtttaaatcccattatcttgtgtaaatttttttaattcaatcttggcaaaacatgcatattttaaagatatgacctataattttttctcttgacttttgtgtttggcaggagttcacagactttgctaacaattttaacagatatgctttaatttaataactacaatttggtaattagctggagtcgcatttcaaaatgcaattgatatgatttggctggatttatctgtattctagaaaatacaggacagtcgtatagatactggtgttgttactctgttcatattcacacttttaccttgcatcattcctgagacacagaatttttgatattctgccacaatctattcccaaaacatcactgatgacaaaacgataataatctttggaaacatttcctctcaagttccaaagttttcagtcagtagaaaaaaaagaaagaagacaaaattttaaaggtgctgagaaaagcccagggctcacagctggtttcagcaacttcaacttgcgtaagaccccgtgtttgtgaaaacaacccaagaatctttgaacaggatgtaatcaacctccgaactgctgagaaatattgcaaaaatgacttcagctgccaaaaataatgtcgtttacaagcagctcttcctatgtctaaggaagaactagtcacacatgcgagtttttgctggcttgagaacaagcaaggaaaaagacaaatcccacctaccctagcctaaaatacacagtgagtctcagaaccccgcggaagctgtggctcatttctaaaggtgctggcaatatcgaggaagacttgtatccacaaaattccaaatggtaagtgacccaggacagagggattttatttggcagcaaatctgtgttgccactttccttccgttgcaaagcttccctgtcttgtggaggcagagctgttaaatacctcttagtcactagctccaacctatttttttgtttgtttgtttttcttttcaaaatattatctggcaccttcccttaaaggacatcaagggctctggaggaaatatttgcaaatgatcctttatagaagttccatcacaaaagcccggcacctacctctgtcaagctttggctgctcagtccgcatgggctggatgtgaaaaaagatcccagtatgatgccttctctaaatttaccagaaagaaaggacctgggatgcttgtcctttaagtgtctctaaacatggtttgcatagctggatctcagcttatctgtgcctttcggctttcgcttccatacatggatctgttcccaacagtaactccaagctgtcgaaaagaagctatctggcagctctctgcttcatccaacacatggatgataaaaatacacatatagcgattcttccagccaggcccatttcccaccacatgatcctgtcactatgcttttttttttttttttttttccaaaacacttttgagattggcatttctactctccaaatatttagatcataaccaatttttacctgattcccacataaagcttttagggtgtgggttcgcctagctttatgaaaacagagagacaattatggttccttactagagtcttcatccttaaagattctagtgacagcatgtatatgggacctgtgaaatgtttaatgaatgaatgaatttataaacgaatggctgaacagatgaataacactgtatgtgaatgaaaaactacgtactttacatatttacttaactgggaatagtggttaacattttggattatttgtcttcaaggaaaagatagcagagggtaaaagttatcaatatctctaagagagaagaagctgttattttaaacagcttctcatatagcgtattgtggcagttcccattaaactactttctagaacatagtttaagatttgtaatttttttaaaaaaattaaagaatgtaaatatgaatagaatactaatttttacatttgttaattgtcaaggatagtttaaatgacagatatctgtgacctaaatgttagatgggggataaattctgctctgcgtggtggagaagtactcccttagggggttgctgaagctctgcttaacaccccagttctttagaaacttcacttctcatttttaacatttatttctctcattttttccaacttgttaatcttgtgcaacaagaggtcaaaatatagagagaaagagaagagaggatttcaaaataataattttccattgattttttttcgaaatcatgttaaaacccttgtaagttattctgtttgaagaagcaaaaataaattagaggcatagatacagacataactcattttggtgtggcagaaatgaaatgagttttgttaaaatattcaggagggataaaaggagggaatagtcaaaaccaggctggtaaaatgttcattgttgcaggtggttgataggtacataggggttcattatattatcctatttatcggtgtgtgtttaaaatttgtattaaaaattgaaggaaaagagagaaaagagaacaacaaacagatgtgtgaaaaaaagacacgaagtacaaaacggatgtattaatggcaaatgtgagtattcctagatttgagtaattttcctgccaaagcatttaggtcagaacaagaagggatgagactgtgttttttaattcaaaatattctgatattccaacctcctccttggaacctccaattattctatgtaataataatttgtatctaatgaaaattaagatatgatatttaaaaagccaacctaatgcagctcagtgctagacatggtagatgggtgcttacccaggagccattcaataccctctcttcccttactttttctactttagaagttcaaaagcaaaaccttttttcctattgtccctcacacctggagatgacaaggcaacataatattgtccaaacagatgtcaataggagttccctgggtgggacttcaggaaagctcatatttgttaaaaaaaaaaaaaaggacaggctcagcttttgcccctcttgttcctgcaccccttccacctttttccttcccagagagtaaacttgaagcctgaaattgcagcactcatttggtgaccaggagtgggcaaacagaaggacaaaggcctacaaggtaaggtaaatggagcagatggaaagaactgcagttcttgccagta

SEQ ID NO: 3761 - DNA, 4001 bp, Homo sapiens
tgtacacgtctctccactcatcagtaagctccctgaggatggcagacaatgcgtcttttcattctttatggaaatctgcctcatctcacagggtaaagacgtaaaacacatgtaatgcatacattctttggacctaacaacttaatcgaatcattataacaatagttaatatttcaggatttttctaaagtctttaaaatataaagtaaaaataatataaagcaccatgctcataacatgaaagtttctggggcgtgggtaatgaagatgagaaaatatattctgaggtttctgctttcaaaatgagagttaaaggtagtatgaaagtgggtaatttttttttttttttttttttccctgagacaaggtatctctctgtggcccaggctggagtgcagtggtgccattcatggctcactgcaaccgcaacctcctgagtttaagcgatcctcctccctcaggctcccgcctcagcctccaagtaactgggaatacatatgtgcaccacaacaccaggctacctaattaattaattaattgattgattaatttttgagacagagtcttgctttgttgcccaggctggagtgcagtggcaatctcggttcaatgcaacctccgcctcctgggttcaagcaattccctccctcagcctcccgagtagctgggattacaggcgcccaccaccacgcccggctaatttttttgtatttttagtagagacgaggtttcaccatgttgatcagtgatcctcgtgatccaccttgcctcagcctcccaaagtgctgggattacaggcgtgaatcacctcgcccggccaattttttatttttgtactgtttggtcttgctatgttgcccatgatgatcttgaactcctggcctcaagggatcctcacgtctgggcctcccagtgtgctgggattacaggctgggccattgtcctgggcccagagttaattatttttaaatatgcatctcacctcactggcctcagccaccccgaagcaaaagcttcctggagagtgacagcctcaacccaatagagggaggagaaagggcgttcctattgcagctgcaagcactcaggtgtccctggtccccttccatgcacctcattagtcaggcgcacagcagggtctgtgtcactgccaaggcgcctctctcctgtagcatccagggttttaaccacattatgcatagctccggggttcgtcggcacctctctccctgcaggtgagactggtacacttcaataaacagatctcactcaacttaagcagagagctgacaaacttggcgttccgtgcggcagaagtaagcagcaatcgctgagtttgtagaacttacacttggggccatttcaaggccaatgttcccttaagaaccaaaacgcgaaactgctcttccaagggtccttttcaaccagaagaagctgctccatctgtcgtccctgccctgattcaagatgaggcggtcactatctagaggtcagctggctgacccggtcaccctccaggtgtccccccgagatcgccccctcccattccccacaagtccagttcgctcaccaatcttggccagggaggccagcaggatccaaagggtgatctcgaaggggatctgcacgtgggggtaatccagcgtaaacacaggcagccggctctcctcgaacagcgtcgttccgggagccaccacgctcgcagggctaggcgggctggaactggtgcccatggccctcggcgcgttcagcaaggtctccgccagggcgcccacgggccccgccacctgcaggagcagcagcaacagcatcggaggcagtggcgcccgcaggctcctccagttgcccagtggttccatgggtgccgccggttgccgccaaggggaccggcggttggccctccgagcgctcaacgcatcgcgcccgggctgctcagcccgctccgccctgccccgtgcagggcagggcagcgacagccacccgccgctgctgcggcaccgggtctctgcaaccagagggctaggtcctcgctgcgagcaggcgcactgcctggcgaggcacgtgcagggcgacgagaggccgctgcgcgtaccctcagcagccctcagccgccctccgccgccggccgcctgcccatgccggtgcgctgctctccagccgcagcggcaggccctgcccagggcggcccgcgggcgggggcggggcgggcgcggcgcccaagccgcagggcaggaggacaaggggacctggccggcacaccgcgcacctgcccgagcccgcggggaacgcggggccccagtgaccgcgggggcgatggctgccctcccttcgcgcaggcaccgcgcgccaagacccgccacccccagagccagcgaactgtgggtggaatcgccgcaacgggcgcatggtggccggagctgtctccgccccggaggcagcgtcggacgtccatccagtgaaggaaccagcgcgacccacgagtcgcgcccttccctcctcccccgcccccgcaggctcctccaaggggacaccccggtgcgctgggcgcgcggggaggcgccacaggctcgcggtccggaggagaagcccgggccggtggaggaggagtgctgtcaccccagcctggcgctgcggaggccaagacaaggcatgggattctctggacgtacagaaagtttaggaaagccaaattttgtttcctttccgagagttatcaactcgcgcacaaggtgctctgaacagggaaactccctgcgcggaactcagtgttcccacgcccccacggaatcggaatcctgttctctcctcttgccacattgtgctgctttcacccatttgctacactgtcgctgccacttttcttctccctcccccagctcacgtaaaaaaaaccaaaacatctttctccgcttttaggcttagaggtgtacatgtccaagagcataagaaatataattatttcatggaaaaccagtgatttgcctcgctcagattgacttgctccgctaattacaggacaggctgtggtcaggaaaagaaaggaagcgtgattcttcttctggatctaaaagggctttctcatgcagagccaacctttcctgtccttcagagcgcctccttcactggttgcgatctcactgtttgagcatctttatcgccagaaaccgaaatgagcacaaaggggactagttgccattcaattaactgaaagttttccctttgatatttatgaaataaaatccttctcttttcttaatctttgatgtgtcaaaacacgtggcttctactattaaacaaacaccaggcagttcgaccttcaaagccgttttttttttttttttctttcaaagttctaacatagaaaatcagtgagatgtcagcagagggtacaagaaaaaaaaatcctccacctgcatagaagaaaataaggaacagtcctctttgggtcttcaaagtaatggagggacaagtccaggctaaaaagagagaagaattctgggagatgttacagagcactacttcatttgatatttcacaaagcatcagtttttcaaaagcgctacagaattgaaactaaagatattatcttgagaagaatcattgggcatccaaaactcagcctccccttctcctttcactggaaacgtttattaaaggtatgtgcctaacatacccctgtgaaaaggcagcaaataagagatttttaaattttttgagtatctgtctctacatgggaagctcaatacaaggcactttacttgcatttttttgtcaatcgtaaaaatccaaagaggcagatattttttacccattttataagtgaagaaatatagtgtagaaatgtgtaaaaataaacaaatagacttaatcaagtttacatattaagtaagtgtctggatggaattcacacccaggcctgcccaggctaacactggtatcatctcaccctctaccccatgactagttgcccataaacagcacgctatattctcagctacttt

SEQ ID NO: 3762 - DNA, 4001 bp, Homo sapiens
ggaaaactcaagtaccaagtaagatcaccttgaacacaatcagtgtctatatgatttcacaaaagatgttagactgttctgaactgagaatgttatccatttggaaagccatttttacttgtatacctcttaaaaatatagtaagatcctttgtgtaacttattcactaagcaaattgcacaagacttcttcaaactaacattcctatttaatattcacactttactagctcaaaatgaatagcaactataaaggagagtctaaaggggacacctataccagtgtccccacacccacagggagggagctaagtgaatagccagagcacacagaaggtaactgccagacctcaaggctcaacccacattacacacccatcctagagaaaacatacacatataaataaatgagaattaaaatgtttcattgattctatctcaataaggcaatctacatactcaaatagcataaagtttatagctgaggcaaaggaggcattgtgcttagcatttgagataattatattaattttccactttagaataagctggttttaaagagataaggaggagcagttagggattaaacagtcacagagtatagccacctctttggtttttgacacaaagatcccttgattggaatttaatctattaacttggattcactttatttcacaaaggaaattagaggtgcctcactggccccacttggtaggtataaactaatattttactgacagatataatcttatatgccccgacatcccatcactgagtaatacaagttgcctatggttttcttgttttttgctttctgtcaatttgcaagaagcacacgctacttttaaagaataaacaatggggtgattgatgaagcccacaattacacagccaagaatattttacagaagaaacattatgtgtttcctgaaatttccaccttgcatcatgcccaggtctacgtgctttattctctatatttttaaagcatagaatttgagagttttgcatgtcaacaatgtcacatggttgtcaccctgaaatgagaagaaaccaacacagcccagtacccagaagtatgctctcaaatttcaaagagcaatctcaaagtattaaatagcttagtaaaatgcagttatgactttcccttgactgaagggaagagaatttttaatgtaatagcagtaacagttaaaatcctcttagcccgttatctataaggcattttcacattcactatcttatgtaaaaagataactcaccaaaccaggtgtttaaggacttacctatttttgcaagggatgctagaagtatccagagagtgacctcataaggaatttgcacatagtcataatccagttcaaaaacagatatcccttcctctggctctgagctggcagcagcaaaccaagcgttagatgcatactgagcagtggaatttgcagattcattcaaatcagaagatgcttcagaacactcaagagccactagcagtagcaaacaattccaaggactgtaagtcacgaacatctgcagagccattcctgtgggcttctcctacctacacccctgtgtggatgtgtgccacacatctgaagtcggggaggcttctagagagtgactgcatccacctgggtcaaaagtaatataggtacagtctgtgggtcctcccaagaagattccgagtgtgttattgagctctgtatgtagacactttctaatctggtttaaatcgtttgtgttcaggcaactcagcttccaactcaaatgcagttattcaatagacttgttaaagtccatggagctacctggaggacctccatccaatcatggcttgagcaatttatgaaagaaataaaaatctcttcacttaaaggcatttcctcatttcactgcatactggctttgtcttgtgggtgaaaatttaaaaggatactgtagtgctcattccacagatcactggagtccttctaatgaggaaaggaaaccttccctgtctatcagatcccaagaaggagctacctgatctgcgcttgttccttctctcctccccctgtcctctcatttgttttgaatgaccacggcttcaggtagctctggaactacacttaattatttgctttgatttgacttttgtaatgaaatcctttctctgagggttctctggaggtcacactgctgacacctagtgggcacctgcaatacaacacccttgacactttcagttatgaacgttaaggtgaccatgaaattatctaaaccaggacactttggggaatgaataataatgataattatgcaaagctataggcacaaaccagaattgtccagcaaactgtcttatatggtctctatacatgaggaagaaggaggataagaaggaggtggtaacaacaaggatggtagcaaacactgaaacttttgcatgttaccagactccatgagcagtcattcatagaaggaatgaagttccagatctctatgaactttacactataatttttaaaaaacaggaagccaaagaacaagttccataaatacacctaaatacctggatttgtaaaactccatggcacatccagattttccatttaaaaaacatttgttgttgttaaaaagaagcagcatcatagaatgttgatgaaagaattttgagataatttttatgagcctacttctcgctcttctacttgttgccaggtgaccttggtgaagttaattacctttcagaaattccttatctgaaacagagaggaaaatatctgcctcattgagtagctaggaacattaaatgagataaagcaagtaaagaatttggcatgtagttggcacttaaatgttagtttttattttaaattacatttcttatacttttaggataagatacaacacttttgcaatgattactgatactcagtaaaaaatgagaataatacatcatccatatactaccccaacatctcttttacatcaaactgcaagatgctttgtgttttgttttttcttagttcatattagtgagtgcaggggatttccccccagccaacacacacacacacacacacacacacacacacacacacacacacacactcagctaacatcactgggaaattgagaaaggaatggttgagaagggctaacacctagatgcaaattcatagtgaggcaatagaattaaaagttcacatatgaatattttttctttttccttcagtttgactccagaatagattagattcagtcactgaaatgagactatcaggtggactacaagaagggtacacatattgagtcgattattttttctcaaagaatatatgaatatcctttaatagaaagctgctttataataggtgttttatttttatttgcattttattgtacttttctttctaaaaagaaatgagggagcaagtctcacatagtgccttgtggaaagaccaaaatgaagaatcaaaagacttatgtactcagacattagttatctgattggctttggaaaattacctgtttgagccttatagtttgagcctttatagttttctcatctataaaataaagatgctgtccatacctggtaaccctttcctgctctaaaattccaaattttgtgagtatatggcaacccgtttagccttatgatcacctgatggctgatagtccagtccctctcagagtaaaaatgccaatcttgggaggatggtaagagaacaacttgagctctgcaacagtctactaacttgtggtccaggttaagatgtagcagcccacttcatcaaccatcggcatcacttccactcatgcagtactttcttacagatgtcagaacattctttctaaaatgatttcttagtataaggtccccagaaagtgtatgtgagacaaagcttccatgagaagtgcaaactaagggcagcaaaagtgaggggaaagggggaagaaaggagaagctcttctagaatgacagcataagaagcaccatagatttcctagtga

SEQ ID NO: 3763 - DNA, 4001 bp, Homo sapiens
tctcttcaatctttttcctctgctcctctgtaagaggcaaggacattttcacagagaaatgcttatgcaggaatgtcaacctttaattggaaagttggcaaaagctgtggaagaaagtaagaagaatgaaatgaacattacatgtattaattgtcatactccaaccatgattttaacaagcttttgtcccagaaaatgcataatgagcacaactaaaggatgtattaaagtttcttttataattgcacacacactgaaatagtaggcagcatatgctgaaataaagaccctgatcaaaaagcaaaaagcaggtcgggtgtaatcccagcactttgggaagctgaggcaggtggatcacttgaggtcaggagtttgagaccagcctggccaacatggtgaaaccccatctctactaaaaatacaaaattagccaggcgtggtggtgcacgcctgtaatcccagctacttgggaggctgaggcaggagaattgcttgaacctgggaggcagaggttgcagtaagccaagatcgtgccaccgcactccagcctgggcaacaagaacaaaactctcaaagaaaaaaaaaaaagcaaaaagcaaatccaaagctaaaaaggcatttcagaggcaatatttctctccttctcacatggtaactcacatggtaactcaatggttcgaagcactgccaaaatggtgagtaactcttctgataactcacatggcccagccaaggtgagttatcagaacctaagaaagttatgcattgcaacgtaaatccatcagataatgagaaaggtgacatttttaaccagaaagcataatagattagactgaaatagaccaaccaaccacataccatggcgtgacacttgctaacatagtctttttccaacctagaagaaggaaaaaagcattagcctcccatagcctgcacactgaattctcccctcacattcacccctttttatcattcctggcaaatcagtctgcctgtggctcagtgcaagccagagcagctggccttaggacctgacttccaacacaacacacggagcaactgactgactctcctgggaaaataaggagcagaaaaaaaaaaattatgtgttcactgtgcaaattaagatgctacataaagatgtaaacaaaaaagaataaaattactctgtaatcttaccagccatcaataaccacagttgaaattaataatttagagtatatagttcggattttttttcatccataacaaaatggcacatatttaggagatataagaatttattataaagtaggatcattgtaaacattccatattgcaccctgattatttttttccatgaatttacccggaacatttattttcctatgagctgagacatgtttacaatattttagaagcagcgggcaggacacaccaatttgtctggcttggttcagactaaataggctgcatctaatgtaatgctgtgtaacggttacaatgatgatgtaggggtactccagtagcattgcttaggcctctgggcagctatagggttcaaagccttccttccctgctggggctccctttggccagaacccaacccccctcccccctcccccaccacgaagtatctatccccagagaacttccaccttctccaaccattagcagttaggaaggggtgaagaggttaggaaaaggttttggaggtgcacagcagaagccctcagtctctctgggtaacacactcctgcctaagtttccaaccagggatctcctgcacctccaaactccccagatcccaggcctggtaagctgtctccactaaccagagagactcggccataagacccactgatcagccccaaaccataaatccattccgccacatggacgcccctcttcccctctaggcagggacctctgccccccgccccccacgccccgcatttcggggcgagcctcacccagcctcaaggtaagcgggcgccacgccccactcccacccctacgatctccacttggattcacccttcccattggcccacttcctcctccaggctggcattggtctcgtccgcctccgccgccttcctgccagtctaccactttctcacccagggaggcctagaacgcgagccacattcgcccccggccctgaccccaggcgcgactgcagagcctcccgagcgggaccggtcttccgagtggacggttaggccacgggtattcaagcgctgcgagttcgccagccttattgtagcggccaggcctgaagggctaggccaccgctgaactacatttcccagcaggcaacgcggccgcagtttcgcttccaaaagtaagaatgatgagacgagaacgcgagcggggctgcagtgtcttctgggatttgtagttcgggccgggagcctggcgagaaacgggagctgcaacgtcatgggcggggcgaaagtggtgcaccctggaagttgtagttctccagaggtttagccaaacactaggtcctgaaagcctaggacgttgaggtttccaaacccggagtcggctgtctccagaggacatcccagacagccatactaacttggcagctcttaataaaaagtatctccccggggcatccattcctggtattgctatacttgccatttaagccccacccgctgcgcccggctgccatcatcgtcatcattgtagtcatcagtcattgtgtttagcataaatatgagttacctcatttaaccgcactacaacctatggaacacattcttgtcccccttttacagagggggaaactaagacagctatttgataatatttctcaaggctttattaagctagcttgtgattctgattccatagcccctcctcttgagagaagattagtcatgagacttaaagagtcactttaccccatcctgagcaccaacatcctgagccatcctgagcaccattggtgataaatataacatttctctatcagtgtgcatatgaatgttgctattgttctattttcaaacatggctcatttaaaaacaaacaagtctactaaaggatttgaaaaaatggaccagacatgctaagaaaaaggaagcacagcaatgtgtgtagtttgatttttttttttttcatccttacctgtacatgtatgtaaactcataaaggtctgggaaggaaacttaaaaagtcaccaaactgttcaggagcagagtggcatgaaatacacttttcagctttttaatctctatttttcagaatgatttgaattttctaaaataataatgtagaatttgtgtgacttttgaaacaataaataatctcccttcttccttccttcctttttttttttttttttttttttttttttttttttgagacagagtctcactctgttgcctagactgagtgtggtggtgtaatcttggctcacttcagcctctgactcctgggttcaaatgattctcctgcctcagcctcccaaatagctgggattatgggtgcatgccgccatgcctggctgattttagtaattttagtagagacagagttttaccatgttggccaggctggtctcaaactcctgacctcaagtgatccacctgcctcagcctcccaaagtgctgggattacaggtgtgagccactgcgcccagcccatttgtcttaaatgacaaagacattgcctgtcttaggggatctgtgtgaggtttagtagtagaaagtattcaaatctcagctctaccccttttattgacctgacatacccagtgattgtgcctccattttctcatctgtaaagtaaatgtagaaaacaataccaccttggtaaatcttgttattagaatcaaagcaaggtattatgaggggaagtgcttagtgaactgtgaaatcccagaacaggtaagagagggatgttgttattatttgaggtaaatctcttatatcgtccgtttctctatacctagcgctcatttcctactgtatagtgtgaacagaaactagttaatgaacacctgt

SEQ ID NO: 3764 - DNA, 4001 bp, Homo sapiens
gaagctgaggcaggtggatcacttgaggtcaggagtttgagaccagcctggccaacatggtgaaaccccatctctactaaaaatacaaaattagccaggcgtggtggtgcacgcctgtaatcccagctacttgggaggctgaggcaggagaattgcttgaacctgggaggcagaggttgcagtaagccaagatcgtgccaccgcactccagcctgggcaacaagaacaaaactctcaaagaaaaaaaaaaaagcaaaaagcaaatccaaagctaaaaaggcatttcagaggcaatatttctctccttctcacatggtaactcacatggtaactcaatggttcgaagcactgccaaaatggtgagtaactcttctgataactcacatggcccagccaaggtgagttatcagaacctaagaaagttatgcattgcaacgtaaatccatcagataatgagaaaggtgacatttttaaccagaaagcataatagattagactgaaatagaccaaccaaccacataccatggcgtgacacttgctaacatagtctttttccaacctagaagaaggaaaaaagcattagcctcccatagcctgcacactgaattctcccctcacattcacccctttttatcattcctggcaaatcagtctgcctgtggctcagtgcaagccagagcagctggccttaggacctgacttccaacacaacacacggagcaactgactgactctcctgggaaaataaggagcagaaaaaaaaaaattatgtgttcactgtgcaaattaagatgctacataaagatgtaaacaaaaaagaataaaattactctgtaatcttaccagccatcaataaccacagttgaaattaataatttagagtatatagttcggattttttttcatccataacaaaatggcacatatttaggagatataagaatttattataaagtaggatcattgtaaacattccatattgcaccctgattatttttttccatgaatttacccggaacatttattttcctatgagctgagacatgtttacaatattttagaagcagcgggcaggacacaccaatttgtctggcttggttcagactaaataggctgcatctaatgtaatgctgtgtaacggttacaatgatgatgtaggggtactccagtagcattgcttaggcctctgggcagctatagggttcaaagccttccttccctgctggggctccctttggccagaacccaacccccctcccccctcccccaccacgaagtatctatccccagagaacttccaccttctccaaccattagcagttaggaaggggtgaagaggttaggaaaaggttttggaggtgcacagcagaagccctcagtctctctgggtaacacactcctgcctaagtttccaaccagggatctcctgcacctccaaactccccagatcccaggcctggtaagctgtctccactaaccagagagactcggccataagacccactgatcagccccaaaccataaatccattccgccacatggacgcccctcttcccctctaggcagggacctctgccccccgccccccacgccccgcatttcggggcgagcctcacccagcctcaaggtaagcgggcgccacgccccactcccacccctacgatctccacttggattcacccttcccattggcccacttcctcctccaggctggcattggtctcgtccgcctccgccgccttcctgccagtctaccactttctcacccagggaggcctagaacgcgagccacattcgcccccggccctgaccccaggcgcgactgcagagcctcccgagcgggaccggtcttccgagtggacggttaggccacgggtattcaagcgctgcgagttcgccagccttattgtagcggccaggcctgaagggctaggccaccgctgaactacatttcccagcaggcaacgcggccgcagtttcgcttccaaaagtaagaatgatgagacgagaacgcgagcggggctgcagtgtcttctgggatttgtagttcgggccgggagcctggcgagaaacgggagctgcaacgtcatgggcggggcgaaagtggtgcaccctggaagttgtagttctccagaggtttagccaaacactaggtcctgaaagcctaggacgttgaggtttccaaacccggagtcggctgtctccagaggacatcccagacagccatactaacttggcagctcttaataaaaagtatctccccggggcatccattcctggtattgctatacttgccatttaagccccacccgctgcgcccggctgccatcatcgtcatcattgtagtcatcagtcattgtgtttagcataaatatgagttacctcatttaaccgcactacaacctatggaacacattcttgtcccccttttacagagggggaaactaagacagctatttgataatatttctcaaggctttattaagctagcttgtgattctgattccatagcccctcctcttgagagaagattagtcatgagacttaaagagtcactttaccccatcctgagcaccaacatcctgagccatcctgagcaccattggtgataaatataacatttctctatcagtgtgcatatgaatgttgctattgttctattttcaaacatggctcatttaaaaacaaacaagtctactaaaggatttgaaaaaatggaccagacatgctaagaaaaaggaagcacagcaatgtgtgtagtttgatttttttttttttcatccttacctgtacatgtatgtaaactcataaaggtctgggaaggaaacttaaaaagtcaccaaactgttcaggagcagagtggcatgaaatacacttttcagctttttaatctctatttttcagaatgatttgaattttctaaaataataatgtagaatttgtgtgacttttgaaacaataaataatctcccttcttccttccttcctttttttttttttttttttttttttttttttttttgagacagagtctcactctgttgcctagactgagtgtggtggtgtaatcttggctcacttcagcctctgactcctgggttcaaatgattctcctgcctcagcctcccaaatagctgggattatgggtgcatgccgccatgcctggctgattttagtaattttagtagagacagagttttaccatgttggccaggctggtctcaaactcctgacctcaagtgatccacctgcctcagcctcccaaagtgctgggattacaggtgtgagccactgcgcccagcccatttgtcttaaatgacaaagacattgcctgtcttaggggatctgtgtgaggtttagtagtagaaagtattcaaatctcagctctaccccttttattgacctgacatacccagtgattgtgcctccattttctcatctgtaaagtaaatgtagaaaacaataccaccttggtaaatcttgttattagaatcaaagcaaggtattatgaggggaagtgcttagtgaactgtgaaatcccagaacaggtaagagagggatgttgttattatttgaggtaaatctcttatatcgtccgtttctctatacctagcgctcatttcctactgtatagtgtgaacagaaactagttaatgaacacctgtccctgcccttcctgtctcccaacagtcagttaatttactaagaaagctgggtgccgtgcacttgactcatgtctgtcaccgattcatatgaccatcacttcgctttcctgggcctcagtcgtctcacctgtaaaatgataccctgctttgacatatgctaagagggcctgtggaccagtggatcctcatgttagatactagaattcttatagattcacagatcttaccccagaaattccaattcagtaagtctggaattgagttagaagatgtgattacctttctagctctaacattctaaaattctaagaataggaaattaaaatatgcctttga

SEQ ID NO: 3765 - DNA, 4001 bp, Homo sapiens
aattcctaaaagtaagccaagtacagctttaattatttttcctaactttggtctaaaaatgacagtcaagatttaggtaggttttacataaaattctacagattcagtaaaatacactcagtaaaataaacctttggggaataaaacttgtttttcactgtaatacctttaacatgacttgtgtactttttgccaggctcaatactaactggtttatacggattgcagacagatgtcgatatataactacataactttctcttcctctctgtgtccacatatttaagaatcctgtcagctaggtacagtcaatccctaagaattggttccaaaatgacagcccctctctctcactcagataccaaaatccacagatgctcaagtcccttatatgaaatggtgtcatatttgcatataacctccccacatacttaaaagttatctctagattacttatataacctaacacaatgcaaatgctatgtgaatagttgttatactgtactgtttagggaataatgacaagaacaaaaaaaagtctgtgcaaccatccactttttttcctctgaaatattttcagtcccttgattgagtccacggatacagaggatgcactgataactgtattatttcttccaacttgcataagaagaactgaaacttaaagaggtggtaccaacctgctcagagtcacacaattctggctttttgtgatataaatacacgcttttaggcaatatactagtggcctccaaacgttttgtacttgcacccattaagcaaaagaaatttgaaatacatgttccaacataaaattaataccctatgtttcacgtagaaatcaaatgaaataaatctaaatagaagttctaatatgttccctctctacccacacacccatggaacaaactgcatgccactgtatatactattgtacatgttaaaagatcacactgcaaccatataaaagtcaggagatttgggtttttcttttttcctttgaatatatattactgagaagtttgcctttaaaacactggcttttaatctactactcgtgacatatgcagagtaataagcgctcacaaaacttctgtcttgagggctcaaacaccaaatgattgctctaagaattttcacagtattacctcaaaccctattggttctacaacctttctctaccctagagtcctgttttccgcaattcccaattgggattcttctccggttcatttctgtaagaaatgagggcagagaaatgccatcagtaaacctttgaacacatgttaatttttctaggtaatacaatttgcattttcgtaaaactgggctttaatgacaaatccgatttcagtgatctttgcatacaccctttaaacacaccagttgccgcctgcgagatatcatcagactcatgctaagagccactccctaccccagctttccccagacctctccccgctttacagttattcgccacagcccgggagagtctggggacggccgcctgggaggggacggccgcctgggaggggacggcccggagcagacgccaggtttcccgcggctcaggagaccggtgccgcctcggagagcgcgcgaaggtgccgccggccgcccgacccgcccgaggaacggacatctcccgcccgggcccgcaaggacgaccatgaacaccgccgcagctcagctgaccctgcctctcccgggtggctgggggtcgccagccaagggggcagcgggcggaggatgaaccccggagcaagggaaagcgacagcgcgcgccttcaccctaccgccaacaagtcgaagtctcccaaaggaacctgatcggcggggctgccgtggtacgaccggccgctaaggccaccctgcgggcgtctcgacctcggctgaccgccgctggccccctgggaaccgcgtgccggccgcaggagaaggtagattcccgggagccccggcgcccaccgcggtactaaccgcgcctgcgccccgccctccctcccttcgggctccgcccgcgcctgcgcagttgcggggtttcgcgccgccggagtctgagaggccggaagtgccccttagcgggtgggggaagctggtaggcacgggcggctccgcagtgaccggactcgggggaggtgagtgatttgcctaagtaaaagggaaagataattgagcgcccccggcagctggtctacgcatgcgtccgctaggccggctgggagccggcaagggaaagccgagcgggccccattgggggaaaggggtcagtcacttcccggaagaggcggggccgcgcgggcccggcgctggattcgaaacgcttcctggtgctcctgggcctggcggttgagcccggggagctagtctttgcttgggtaaagaaagaggactttcctttttttttttccttttgagaaaattcagaaatttggaggcacagtagttaggattcaggccaaactggtaaatgacgaaggggcttcttccagagccaaggaggaagggttgtccgggtaagtcccgcgggacgtggagagacggcgccgcccgggtcctcccactgattcctttgaccatctggcttacggacgagctctttgttcgctgctcctccgaaaacgccttcaatgactccctttgaataaagtaggaagtccgaaccgagccgccaggccgcgacttggcccctgttttccactcgcgagggccctgcgtcaccccgcctcgggaaagctgcgcgttctccggccgcttgcgcttggccgaagctgctgggtcccgctgtgcttcccccgggcatgcgatggggataattcccacgcctcgctcaaagccatcccgggagagccctccctggtccccataggcacagttgggtgttcccttttccgtgttaaccttgtatttcggatatagttctgttatagtaattactttaaggtattgtagttatttacaatcagtctttcccccacggtaacctagagtgtaaaccccctaaataaacgtcagaagtaatgaagtcttaacttccttggcttaggtttcagcgcccttctcaaccccacactcccgcttcagtctttacacaacccttcccatgaatatgctgacctaacaagtaacctacttttcatactccaaaatcttctcttctgtgtggggaaaataatgcattgactgccacctcactccacctccaaataaattgatgttgaaattctggcctccggtaatggaattctttacatcaaagtcactttttatttctaaaagtaatcacatatatattatattcctactgtggcccttgccatggatcaacgaaaaatatgacatagtcaaaatagaccaaaacatctggccttgttgtaaccaatgggaaacacggttgggaggtccctacttacatgtcacttgcttcaggaaccgttccttgattcctaagtgggggaccttttttcctaaatacaactatagcttgctttcttacctcttaagccctttttatctgcagtctcacttaccctactaaggtctttaaatgcagggcttgatcttccattattgtatctccagcacctataaagctttcctgttaaatagtagacatttaataagtatttattgataaacgtgaagtatgcctcaacgtttaggctaaattcatatgaaaataaaattgaaaaaataattttaaagaacagcattagttactgagattatgtggtaaatcccttaaaatataatcttgcattgaaatagttttcaccatttaccagtctttatatgaatatatactcatctaaatggaaattgggaaatttaagcattttctgcttttccgaagtaaattttctaatgtttttcttaaagctgaactaaattgcaaaacttgctttaataaagtgtgtatttttgcatcagttaagcccctgacctctttatgttctttaaatttgattcattagtgaaattaacaaggttctgtgtttttc

SEQ ID NO: 3766 - DNA, 4001 bp, Homo sapiens
cctgtagtcccaggtacacgggagggtggggcaggagaatcgcttgagagagagggagaggaggcagaggttgcagtagcccagatcgcgccattgaactccagcctggcaacagagcaagactctgtctccaaaaaaaaaaaaaaaaaaaaaaaaatacacatttaaaccccgccccccgcccccgcaaacttttcaagtctttttaccgagttggacatcttaataaaatgtattcgaattcacattttctctccaaatctaggcttcacatttaatctaaaatatttcaccctattcccatacacccttaaaggaaaaattaatctaaaaccaacaatcaaaccaaggaatgaggagactagatgactattaaaattttattgaaataaaaattttaaggtctaaatgaccacttcaagccattcgttttaacaaaagttgttttattgcattcccagtttaacaaataatgcaaattacaaaacaaaaacatcatgacagggattaaatacttagtatagaaattacagtgctgcatttatcctttcctcattaagaacaaaagaacaccttctgtagaagtgatgactatttaaaataaaagggaacaagcaagaatacaaaatatgtcaagactaaacctaagattatttttctaactgcctatatcagttgttcaaatcaagtccagattatactataaaaggcattttaattacggctctacattttgtaatttaaaatacttcacatgactacaataaaccaaagaacacagcagtttacaacctgctttggtgtcccaacttgcttagattgtaaggcattcactttctcatagcgccttctacaaaggcagcccgaagaaatgcagactacagatgtatgtgcttgtgtgtccatgtatcgtggcaacagtcagcaatacagccaggaaaacgtgcctttcggttttccccagcacctgtcgactgtggcacctggggcccgttggtacaattttttttttttaaaaacactcggaaagaaaagtttccctaaaccgtttgtactagacgtataatggataagtaaataaagggggaggaaggtgtcagctcctagggcgacatcagtacctagtctctcactacttcctcccttctctctcacactctcccctcttcaaaagaggagggactggaaaggaaggagtccaatccttaagagagatgggagaaggacagagagtctcggtctccgaggataagtccagtcaaaagtacagtactttgtttttgccgtacacaagagccagttcagaaccaacgcgctgtcccgaaggagtagcaacggtaacgggcccagggccctaaacccaagctgtgccccaaccagaggcactatcccctattctacagttccgataaccttaccgtcggactctgcccgaaccagcagcgacatccccttgagctcctccacgtaagtggaggagacgtgcccggtgcctcggtcgtcccattgccggtcttcgttcagggtatagaccttcactcgccgccgcgtatccgacatggtggctgctgtctccaccgctctagccgccgcctcctcgcttacctcgtccgcgctcctcactcttaggagacggtaaaggcagtagtggcggtggcggcggcggcggcttcggagaggcccgaattcaccatggctccaaaggttcagccgcgagaaggggtgacaagagccactgaggcctctccgcccggaggccccgttacctctcacttcacccgcgcatacacccactctcccgtctctttgccccccagggctcgcttgctctcccgccgccgcggtaactactacagatccgccatcttgtaacccgactctctctgcctttctcttcctcctccagcaggctcgcacgggctgtcctagcaggggctacggcggccgacaagtcccatgagcagcacctccgcttctgcacgcgcttcccaggccggaatgctcggcgctctcgcgaggaggggtaccgactggggcgggagtacttcggcgagacttcctcctctttcggcccgacttcctcctctttcggccccgcctcttggcgcggggtcgcaattgggcgggaggttctcgcgatctccccgtccacgcctgcgccgcgagaggccgctaggtggaaggggacttcggttccgcacgtcgtcatgttgttggatggcaccagtatgtgacgttcctaggaacttagctctgaggaaaaaacaaagcaaaccggggaagtacgtagccttgaaccggagtaaccagggacagaaaggaaggaaaagggtttcataccttcacggaacgacgctcacttcgtccgcctgaggaggaaaaataagtttaaacctttctgtgaaaaagaacgtggagccctttctgccgaatggaaacccgctaaaccccgttatggagtctgctacaattaagcatctaaccaggaattgtctatggacacaactctccaggcaattcatgcagaaagtgtgttgacgatttcctgtttcttgcagagcgcttcaccgttaaggctcttagtagctggcgattgtaaagcacattttccgcttcatgaaaatacagtgctcttcttgtgtttgtaaccttggaaagtaagtctgctatgataagtttagggaagtggcggggagctactttcctaacatatctgtgattgttttgatacttctcagtttctcgcgggcatttcctgcgttctctatagggctctcttgcactgaataaggaaaggaggaattctctctgcattgaggctattatcgcacattgtgcggtggatatagtcacgcgctgggtcgtagtagcgtgtcgtttatttcagtccagctcactcttggtagaatccctttattcgttttgttgtttttgatagtctctctctgcttcccaggctagagtgcaatggcgctatctcgactcactgtagcctccgccttgagggctcaagcgatcctctcacctcagcctcccgagtagctgggaccgtagacgcctgctccccatccccgctatattcgttctttaatacagtctctcagcttgttcagctgccacttctgtgcagctcattagcctgatcggtgaaaactaggcgagacgcgcacactgaccctgcagtgcatcttgggagttgtagtcataactaatcaatggtcttgttaaaacgtgcttatgttttgaccagatcgcttaagtgtggacacccttcagcagtacactacaacgtgggtcagtgtacagaacacatgctgatagaaataatttcaaaatctggattcatagtttttttttttaatctagagacctcagaaaatgtacttgaagaaaatcatcataatataatacataacaatagagccaattaattgatgtgatgaaagtggacaaaatgtattttgacctcagagaaaataacatttctgtcttggaagagtcagagaatgcttcacacaatttttgagcctgatgttagactctccagccttctgtccaagcctcaccctttggttactccccaggaagactgaacttgggaagaggattgtgcagaccctggagtcaggcttggcgtttgggatagggaatactagagtgcccacagcatggtctggaaaagggaaagtgggctgcaggtggctacagtcccatgattccatggatttcagacccctccaaagcacagggctcagtgcttatccaagtctgagggccccccataaccacatcttccccagcagatgttctttgcttcaggcagtcatcaaagttccacttcaaagagttgctaaccaaataagcccacaatcttccttttttgttgttttgaataagtaatgcctttacacatatgaaattaaaaagagaggccgggcatggtggctcacgcctgtaatcccagcactttgggagggcgaggtgggcagattgcccgaggt

SEQ ID NO: 3767 - DNA, 4001 bp, Homo sapiens
aattctcctgcctcagcctcccgagtagctggaattacaggcacatgccaccacatccagttaatttttgtatttttagtagagatggggtttcactatgttggccagactggtctcaaactcctgacctcgtgatcagccctcctcggcctcccaaagtgcagagattacagacgtgagtcaccatgcccggccgctttttcttttttctcctttttttttttttgagatggtctcgctctgtcgcccagagtggagtgcagtggcgcgatctgggctcactgcaagctccgcctcccgggttcacgccattctcctgcctcagcctccctagtagctgggattacaggcgcccgccaccacgcccggctaattgttttttgtatttttagtagacagggtttcacgtgttagccaggatggtctcgatctcctgacctcgtgatccgcccgcctcagcctcccaaagtgctaggattacaagcgtgagccactgcgcccggccagctttctctttttcttttttcagacggagtctcgctctgggctctgtcgcacaggctggagtgcagtggcgcgatctcagctcactgcaacctccgcctcgcgggtgcaagcaattctcttactcagcctcccaagtggctgggattacaggcgcccgctaccacgcccggctaatttttgtattttttactagagacgaggtttcaccatcttggccaggctggtcttgaactcctgacctcgtgatccacccgcctgggcctcccaaagtgctgggattacaggcgtgagtcaccgctcccggcctcaattcttaacctagctatcaactgcagtgttaaagaaaaacgcctcagtcctaaggcacttggtcaagaaaacgctgcactactacaaaatgatcaaagcagcattaaactgtggactgttcggtaagtgcggagctctagagacgatgaaggggagagcatctctgctcagaagaagctttcatgggcagcgactgaaagaatgaggcccagaggaatttctaggaaatttccaagaaaggaaattcaaacccgagaattcccaagaggtgtctcccacacccctgttatctgactctgccatggccaccctcccccgtcacaggtctctgcgtgccatgcacctagagtccacttcatggcgactctccaacacctattttctccaggagctgcttcggaccccgtttgttttttgttttgttttgtttttctgacagcgacagcccttgggcaacgctaatcattccaagcaaattctgtcatgccaagacctcccttaacagcacgcgcccacttgttcccaactctcctgccaattgggcttcgggagcctccaaaaccaaggctcggagatgtggagcacacaggggaagggtcgagctgggacccacacccggctcttacacccacaccgcctgttgagcccaaggctcaacttcaacacaaagctctccttccctcaattccttcaacgaaggttaaccttcagcgaacacctaccggaccgggacagagtgtacgagccgcgcgggaaggtggcacaaaggcatggcccagaggggtggcagaagactcaaccggggccctccactccccagcctgccctgcctgggcagagccggctggccggcccgagtcctggggctcgcggaggaacggagatggcctccgcaggggctcggggaagcccccagggcgccggaccgtctcaggcgcgcatcccgcgccactcacctgtgggatccatagcgtcgctcgcctcagagatggaagccgccattccgccacggcgccgaaagtcgtcatcaagctgcgcgcagagccacgccccgcggccgggcgggaaaagcgcttccacctctttgggccgttacctcaaaaggcgcgtgcgcaaagcgaaggccggccgggcggggaagagaaatggcgaggcaggagtgcgggggagggagtggtccttagctgaatgcgcctgcgttgtggcggcctccggcgccccaaggtactttctccccagcaaggaatccgcgtgcgcgtaagcagtattgttgattagtgccccccccttccccccgcccgccccgaaaagcgacccctagtggtgcaccggtgcggaccagaaaattgcacgctttcttgaaagaggcatttaccgagcgcccaatgtatgcctggcactgggctgggtgctgccacctaagcgagcacgaccaatgcagtctatcagggaggcccagatcgccaagcagcggacccctgcggtccgccatgccactcccggctcctagagcgccgctcagcacaccgtgagcgcccaataactgttgggcttcaatgacgccgcggaggcggccccgtccccgcgctcccgcccctcccgccagggcagcccgggaggccagacgttgacgctgcagggagagggtggtgggcgcagccgctagggggcgcggcggggcggagcgcacctttccgcgggccgcggggatggcggcgcagggcgtagggcctgggccggggtcggcggcgcccccggggctggaggcggcccggcagaagctggcgctgcggcggaagaaggtgctgagcaccgaggagatggagctgtacgagctggcgcaggcggcgggcggcgctatcgaccccgacgtgttcaagtgagcggggcgggtgggggccgcatgctagccagacaccccccgacctctgctttccgggtacgcccggcccgctggtcgggaggagcccccgcccccgtccttgtcgggtcttcagggaggtggccgcgccgggcggagagggctcaccggccccgcgtctgtccccgccaggatcctggtggacctgctgaagctgaacgtggcccccctcgccgtcttccagatgctcaagtccatgtgtgccgggcagaggctagcgagcgagccccaggaccctgcggccgtgtctctgcccacgtcgagcgtgcccgagacccgaggtcagagctgggcccgctgtccctgccccagtggcgggggtggcgggcggggagggggcaggcgcggcacagcggcggcgtggccctgagtggccaggcctgtctgtcggtctaggcccagcacctgcagggcccatccgtgggctctgctcctgggcttcgctgccagccttaggaggcacgtccaggtcaggtggacgcagagtgcgtaccccagggtggtccaggctgggtagggctcctccgcttagctcccctccacctcttcactcaggccttcatcctacaacgtcgggaatcaagacagtttggggctgggcgccctggctcacgcctataatctttgggaccccagggcgggaggatcgtttgaggccatgagttttagaccactctgggtgacagggtgagatcctgtctctaaatgtttttcaaaagacagtctcgatctctgtcctgtggtatacagcatccagggaagtgcccagggaccagggcaggcagaggtcttcctgcctttaccccacctgggcccagttcctgcgcaggggcttggccagtcctggtcagctttccctctgatgactgcaggaagagagtcagacgcggaactcccagggtgcagaggcctgcggggtctgaagggcctcctccctctccagtgtggtgactgggctgaggagattctgggactgagagtgtcatggtggagcctctgtccctgctcatcctctccgcatgttgcttctgctcccgatggctctctctgaaatgcagcacaacctcctaggccaatggaagaaggcccagagctggctccctgcctggaagcacgaggagacccgcacaggcatcctgagaaggcgtggagagcaggctgccttcatggggggagtgccagggcctgggcacccacacccgctgacccaagagggcccgggcacctgcgtgctggcctcttcactgaccttcgctctgtctgc

SEQ ID NO: 3768 - DNA, 4001 bp, Homo sapiens
cctatgttttaaaacaaaccgaaaatagatacccaacatgttaagagtggttatcgctgtgtgatgtcttatctttctaaattttctaaaatgacaatgccttgcttttataatggaatgaaagcccattcaactttaaccttcttgaaatggaactgattggctagattgactttggggaattggaagcagcaaatggagatgttcttcacaaggccaggcagtaactcactggcagcgccagaattagtgttgacagtccctgtgtttctgggttgttttcactctgaatccagctggctccctaactgtactcacccctcccctgacacatacacatacacacacacagattaatgaaataagacaagctccccctgaaaaagtcacctcagccccttattttcctcaagtggtggtgagccatatgccccagttcacacccttttccctgaaggtcttagtgggcaggaagacaagagaatgtgaatactaatcaagttatctgtgggaagcagtgccctttcccagggtggtcagtgcagccagccaaccacaaagcctaggttatcagactcaaaccacatagatgtcaagcaggtcaccccaaccttgatctcagaaaatattgacaatttaatgtaatcaccatgtaggtttgtttaaaatgaagatttattactaatttaaaagcttggtagtctagtgtggccaaggtcgtgaggaagcgggaatgtaaatttaatagagcctgtttggagagcctataaaactgaaaacatcacatcctacggcccagcaattcctcttctagtcctgtgccctggagaacaatcgaacatatgtacaggtagacacgatcaaggattttcattttatttcatgaaaaattaaaaactaccaattgtctctcaataggggaatggataaataaaatgtcatatatttataggatgaaatatttaaaattaagattgatgattcatatggcatatgaatctatatggatagctctataaaggaaatagatctttggaatttaaaagaagtatctatagatttaaagttcctgcaaggatagacatcaaaaacgtgttgtttagggaaaagagtgagttctaaaatgacatctgaagtatgacaccatttctgtaaaaaaaaaaaaaaaaccagacagactacagccatccatcttgttaagtgcagatatatgtatgtaatagcacaggaacattctagaaggaaatacattgaaataatagcaggggtaatatctgaggaaagacagaggggactgggattgggtgatactcagatttttcaagggaaagtggattcctgggttattcataattataaatatacaaatagttcataatttttaaagtctcagcaattactttatctggtaatgtatttataataaaaagaaagctaaaaatatagagctttctgtcggaaaatgtttcccacagcaccacacccacctttccactcccagcacaccctctcagccaagttggccagtattgggagaaagtgcccccgaagcctttgctcaccttcaccacccttctaggagccacagcaaatcacactggcaatgatcccttgcagaaaaatttgtgccagaaaaattagctctcagaagtgccattttgttgaaaaaagagcacatgaattttatcccttcccctgatgatttttgagagcaaagtattttagagtttggccccagccaaactaacaggagagaaggcaactccccacatttcatacctgtcaaaaaccactgcggaataagcccgctcagcaaagatgatatctgcagcccagaactccttggtggccttcagaccccttcctttgccctcagcggtgaagacctccacgttctccattctccctattgtcatctcagagactgtcaggccagcgcggcagttatttaacactgagccaagtctcttgtcattgctatttcagcaccttcagcatcccaaagagcaagactataaatggacaagccacctccccttccctactcgctctcagctactgggccctcacctccccctctgctacttttcctggaggtggggatgggacagacaagagaacaagtgaactgggaagagtttcattcatcacccagcaaagccgacagaacagaaaatgaccatgggttaatatggcatagggcctgaaaagttttgagaggttccattgcaagcagaagctatctgtatgtgctaagttctgaactgcaacaatcctgttcggctttagttggagtagggaacatttggtcaggagggtatttttagcagccagatgcctctgtcaatcaaaagcagacagctggaatggtcccatagaaacaaggtgatatttgctgctctgggacccttcagctgtcaggcttgcactttctcaagtgagatgggccctcgccccacccttttcagtctctctcccaagggtggactgtttagcagcagaagctaaactgagggctgggcacggtggctcacgcctgtaatccccaccttgggaggccgaggcacatggatcatctgaggtcaggagttcaagaccagcctgaccaacatggtgaaaccccgtctctaccaaaaatacaaaaattagctgggcgtggtggcgggcgcctgtaatcccagctactgaggaggctgaggcaggagaattgcttgaacctgggaggcagaggttgcagtgagccgagatcgcgccattgcactccagcctgggcgacagagtgggaccccgtctcaacaaaaaattaataaataaataaataaataaataaataaataataagaagaagctaaactgagcccttggcatatacgtaacagtactatttaggctccaagggggcatttttcctctccagtatcacctggggctcttacagcaccccctactccacagcatggaattccctgttcttagcactgctggtgatgctggtatgctggaggcaggctggatacagacaaggcaggctataaaaatagcaacccccatctctatctttctatcaaatttcctttaacatgtgtctgctgccaggaaaataccaacgtgctctgtccttcttcttactcaggagtgaggacactggaaagacgaatctaaaatccccgttgaactaaatgccactgttcttggctatcaggcagcttttactgaggtttaaaagaaatacacttgcagatctggagctctggcttgacttccatgtaagatttttagttcctgggatgcatctatttcctggtgggggttgggggtgggggtgacggcgggggtggggggcagtgggcaggggcatttcctggatttttctgagtgtatggtttctgagtcagatgaatctgagtttgaattctaagcctgctactaccacttgagatggaacctgtgaaacaagggtgataatttctacctcactggattgtgagagttagataatatgtaaaaggggataacacagcacttagcacttcataaagtactcattaagtgatagctattctattttatttactctgtcacattatcctccctaaactatcacgatgtaccagaaattttaacatgtcttcaaccaattgaatctcccaaaacaccttcgactcttggaagcatgttgaaagttcattgtctgatcatatatcctgatttttaggtaagaatacatagccatgacagcaagagaatatctctgcagcttctgatgtacactgaagagcaaaataacttaagacatgtaaagttaggtgcctcaaaaagtaaacactgcatgctcccaaggggaaaaacaattctacaaaacagagagttaaaaaaagagaaagaggccgggcacagtggctcacgcctgtaatcccagcactttgggaggcgaggcaggtggatcacaaggtcaggagatcgagaccatcctggctaacacggtgaaactccgtctctac

SEQ ID NO: 3769 - DNA, 4001 bp, Homo sapiens
agaagaaagcccacaataagccatgctgctatccggctagtgcaccagtatggtaatccagctggcttccactggacctggtgaggtttctgttctgactggtcatgtctctggcataatagttgataaatttttgaaaagtcattcctatccacagaagcaataaacagtagtcaaaaactactcccacttgaggcccctggtctatatagtttcatgacccaattctctcaaacctttaaagaataaataatgctcatgctatttaaacaatgtaatgacagaaagcatttctgttttaccaaaaaaaaacaagtataaccctcatgtggcaacttgaggaaaataacacagagaaaaaaatcacaaaccaatctcatttgaatagagaagcaaaaagcccaggataatccatgctgttaccaagtccaggcaggtatgttattttctccagcagcagatcagatgtaggcaaggagagggcaatcagctagggccttgatagaagcctgggacaggaaaactgtgcaaggagagtggctgaagtgaagaagcgagagggaagaaatgaagaaaggaaggggctgagagactgggggctaatgaagaaaaaggtgaagaatatcactgcaaaccaagaatgatggaactgagaggccttcaaactgtggccacccaggagcactagagactatggagatggagataggaacaggtaaggagaccagggatgtagggaagctgatttaccagggaaggagcaaactgctccagatacctctagagcagaaagggggcacggaaggttgagctggaaaactagatcaatatgatgacgctgagagcagacaacagacaactagaggtcttacgtcttgggcaagaaccaaccatacacacagccactacacaggataaattattcaacctcactagtaaccaaagaaacgtaaatgagaacaaatataattttacacatatcaataggcaaagataactaggaaaaaaatactgctggacaaaacaagaggatgtttgcacagaaaatgagctctaagacttttgactctggggatgaaaaataccatacaacaataaagggtccattaataaggggttggttgagtgaactgtgaccctctcacggaagaagctactactcagctcttaaaacttaatatgtagaaataggcttgatattgaaagattcactgctgcatcaaaaagcagtttctaaaaatgtaattttaacgtactcatctttgcacaagtatagaagtatgggtgatttttgtattttctttccttacatgcattttgtatttttttctacaatgaacttttggaacacaataaaaacgacaaaatcacgtcaccttcctgctaaaaactctcccaatgcccccacggcctttggactctggtccaaattcctcagcactccaaggaccctcgtgaaggatcttggcctctctcctcatcccctcacccaaatctcacacatgaagttcgtgaggactccctcttttacacctcagttctctctgcccggcacatccccgcccaccgttccagggatacagcagcaaagccccctagccccgccccgagcagccacagaagggcctcccgcgggctggccgaattccgctgggaggaaatgcgcacggagactccggaggcccgggtctatcgcgtgaccgcgccacgagcctgcgcgcagggacagactgggagcccccgggccgcgagcaggggcagggccgtagcgtccgagcggcacagaagcctctgggctccgggcatggagtccggccgggctgtctccatggccggactggggagaggctcccggcaggacccgccccgacctcaccttggcgctgctcacgaaacggacttccacggagacccgcgcgcggcccgccacgcccacgcagaaggagaacacgtcgcacatggaggccgccatcttgggcgcgcctccgccttatgacccttaaccccgcctcgacctgagaggccacacccccttctggtcccgcccccggcgagagtgcccctgaggctgcgaggttttgggctccaccaagtctgaatttaggttccgtggtttgttgacgggagtgtaactgggcctgcctttgtgcttttacatcggtgcctttttgtgtctgtacctctgtatcagagtctgtgtgcgcgtacagttttgatgtgtgtatctttgagtccgttgcatgttttgttgtggttttttttttttgagatagtctcactctgtcgcccaggctggtgtgcagtggcgcgatctcggctcagtgcaacctctgcctcccaggttcaagtgattcattctcctgcctcagcctcccgagtagctgggcgtacaggcgtgcgccactaagcccagctaatttttgtatttttaggggtttcaccatgttggccaggctggtctcgaactcctgacctcaagtgatccgcccgcctcgacctcctaaagtgttgggattacaggcgtgagccacctcgcccggcctccgatgcatgtttctatgtatgttgtctctgtccacacagtggcctgtcttcactgagtaaagcgctctttggacccagccctagagtgggacagcagaaggccaacttactcctatcctgtctagctctcagcctgaagggaaggactagcttataccccggagctcactcaccccacttgaagagtccaggacaagatttcctttctcggtaatccctctggcagcagaacagtcctgccaaaggtcagggtggacttgtgcctctgtcagattcttcaatggcttagggaccttgcaaccgggggtagcggaggagtccataggggacctcagatctgagaacctctgaaactggatacagaagtgagtgtgcatatgcacacactgtcgtgaaaagggggaggggcctgttctctcaggaccccaagaagctgcaaaccacagacctatggcatttgtccccacagctaggcctgactatcaagccttgttttgtttccttgtcccctgattttgtgagttttgtttgagacagggtctcgctttgtcgcccatactggcatggggcgatctcggctcacggcagcctccagctcccgggctcaagaacagactgggcaacgtagtgagaccttgtctctccaaaaaatagaaaaatttgccgggcgtggtgatgcgtgggaggatcacctgaacctggggaggtctagactgcaatgagccgtgatcaagccacaattatctatcaaataattatagatagatagatagttggcagggacagagaaaggttcttgaaactgaccctgcctctcctcaagcttgcaacctggtgtcaaggagcgaatagtccacggacttgggggagatagatagttggcagggccagagaagaggctcttgaaaccgaccctgggtcccctcaagcctgcagcccggtgtcagggagcgaatagtccacgtacttgggggcaaacctacccgagagcagctgggggccgtgccctcactcaccaccaggtggcagggcaggcttccttccatccctcagctcagtccccaagagccattctagaatctgaatggtctgtgctacagaaatcagctctgcaaatcctggcagcaggcttctttcagagaaatcgagcacattcttgagaagaaaaaggagccatgagtcagagtcatgaaagggggaaattataactgtcctgtgaaaacacagcagagtttatgacaaaatgccagccttggcatacacaaattattctataaaaagatggggctttgggaggccaaggcaggagaaccacttgaagcctggaattcaagaccagcctgggcaacaagtggacgttgtctctacaaaaaatgttaaaaattagccaggcgtggtgtcacgcgcctgtagtcccagctgcttaggaggctaaggtgggaggatcactagagccc

SEQ ID NO: 3770 - DNA, 4001 bp, Homo sapiens
cactgcaggcactgtgtccacatcggcaaatggttttcaaataatatctttgtttcaggaaaaagctccgatggagataaatgttttgttagcagccagaaggttcatttctgacgaaaccctagttctcctagcagatcttcccacgttagagctgtttcccctagttgctctggcaagggcagatgtttttggtgaggctgttaagtgggttaaccattttaataatattttcacctgtgactgtgagtgggaaagctgagcctggcccaaatgcttaaggagcctcttgagttctgttcggatggtgccaatgtgagtgtcccatacctcaagtggacaggcctcctccagctcgggccaacgctgagcaccattctgtcctacccacttcgtacttccaggagtcagtcccgttcctctgtccaagtcccggtccagagggactttcagggggtagcaccgacagcatggctgcccctcccaccagtcaggtcacccagtgctgccaccgaggtggggaggccttcctgagcaggtgtggaaaacgcagtgggcgctgtggatggtgttggcagttgtggggtgggaggcgcactagagggcatgtggtggaggaggccctgtggatggaggtggggagggatgatgacaaccatgcagaggatgtggatggtgacgacgggaagctggggaccatggggaaggtggtggtggaggcagtgctgctggtggtggggttgaaggaggtggtgttgacggaggagttggcagtacaggtggtgttactccgggcagcacagatggcagaggcgatgtggctggcagtgggttgaggctggaggtgggcgagggtatgagagggctgatggtggaggtggccgtggtgacggagctggaggggactctacttgaggctggcccagcagttttctagatatgatctggggtgtttcagggaaccaccaggtaccagtgcaccgtggcctactcagggcgagtgctccatgcagttaccaggtgcatttcattccctgggctgccataagggcttggcctggggtcacactctgggagccatggagacagaaccggcactcgggcctgttccttcagctgagctgagcctgctgtcatgagtccctggccccaggagtcccactgggagtcctgtttggagagtctgagcctgagcggccagcccccagactgcggagaggacggcagggaggggcaagcctgttgctagcccgcctaggagggtcagcgaagaagcaggccctgccctgagcgcctgggcaaggggtccagcctcctggctctgggccgcactggcgtccacggggggcggggctgaaatggcccaaggaggggctgcaaccttcgcaggcccggcgccccacttgggaaactgaggcccgggaagcccgtgcccacggccacattgccatgtgtgaaaaccagggcagtaccaggacccctgctctcccctgggaatcaggcgccgggaagacgcgctcggcaggtctggcaggggccggggcgccgcgctccactcgcccccgcctcggtgcccggcggctgccgcccccgccccgcccgcgcgcctctcccgcgggccgctgtccggccttggccgccgaggaggaagcgctgtcctcattccacctcgggccgccccggtgccaagtggctggcggcggcggcgggagtccgggcccggcgggcagcggccggggcgcagctccctcccctcccgggcgccccgcgagcccgggggttactcacgtagagtccggagtgctcggcaccgaagaacgggaagggcaccgagagcggccgcagccccgagccgccgtcgtcctgcttgggggtgacggcgtcgccgcgctcggcgccgaacgggtagaagtcggcaagggccaccgcgccgcgcaccccgcgcgccccaagccccagggccgcggccaccagcagcgcccaggcgacgccgtgccgcatcgcggaggtgtgcgggcgggacggggcgctggcggagcagggcgctgggggactaggctgcgcgcgggggtggccggcagggccaggcggggtgcggggagcgcgggcgcgcccgctggccgcgccgtcgggggctccgcgtcccgcgcccgttcggccgggccgcgctctcgccgcagctccgcagaggaaagcgccgggcgggaccgcgttcggggccagccccgcccctggggccacgatttaaatatccagcccggcggtcactcgggggggcggggccatgcaaatcgggcgtctcttaaagcgccaggccccgtgggagggcgcgggcgcgcggggagctcagtcccctggcgtgggcacaggcaaggtgagggctctgcgggcgcgcgccctgtggtggggccatgctccgccctgggtccctaccctggtggaggcgcctgggccctcagtgccgtcctgggacagacctgtgtccctaaggcctgagacgctgggcccgccctgaaggcgtgtcatcacgcggggggcgggaggggaccctggccaggcagtgcctgaatgaacccgttccgtgctgcccccttcccagccctgagcatggggacgccaggcttccagccacaggggcagactaaccccggagcccactccctgcctgggtctgtgtgaggaagagcccgggccggagactaggaggcatggaacaaagtgtttgcatctgcgtggccgcatcaggagaaattcctgggaggctcgggacctcggggcgacccctgggtaaagcaaaccctccgtggggaagactgacccactcaggccctgggggcaagtgcgtgcatgacaccggccttggcaggtgggggcaggactctgagtcccagtatttgaattcagggtccccaccctgtggcctgccagccctgccccctgtctcttgggctgctggcctgggctgcctgtctgtccttcctcagggcctcagccgggaccacctctatgtccccaggcccatggcagggtctgattcctggaactcacccggcccaccgtggtctcttctcttagatcctggtgttgggtggtgttggctgcgtgccacactggggcccccaaagataagagtgcacccctcgaagacaagcaggaaaggccgggctgatggtaactgcatctaccactgaggtgctgggtggttttttgtttgtctttgcgtttgtatcttctgaaatatctcaagtgagcacgtgttgtttttcagtgagagccaggcacagtcaatgttatttttaagaagcagcggagggttctctgcgtgtgactgggtgttgccggttctcacagatcctgcacttggtgttttcactcagaggttcatgaccctttagacttggtgtcagggccgggtgcagaattgttaaggaggagctgaccctgcactggcacctcctgaaagcttgcccctggcgcctctcccaccctgcatggggtggcaattctgtttgcagagaggcaaactgggcctgggaggggaagggctctgtcccgcagttagcccttaggtcaccgtcccagctttcagagctccaggacagcagcacagccatggttccagggccagaaaggtcaaggcctcctgtctttggagggaggcaccagagagggcgtggaactgtagaatccctacttgaggccggctctcggtgagagcctggcaaggagagacatgtctccacgcacatgcacacacgtccacgcacacatgcatacttattcacatgcacggaggcagcatatgcccatacgtggggcctcaagaacatgctttaaccccttcctcagcccagccctggcctccctggtcagggagggctgctcccacctctggctggcacaggccgtggagtcaggacaaggccccatgtagcagcgttgggaacagagctgccaggcgtcaccgtggcgggaatcagggagaacgcttttctatttgt

SEQ ID NO: 3771 - DNA, 4001 bp, Homo sapiens
acaatgagatgtttctcatttaaaaaatacaaccctttggccaggtgcagtggttcacgcctgtaatcccaacattttgggaggccaaggcaggcggatcacctgaggtcaggagttcaagaccaacctggccaacatggagaaaccctgtatctactaaatatacaaaaattagccgggcacagtggcgagcgcctgtaatcccagctactcaggaggctgaggcaggagaatcgcttgaacccgggaggtggaggttgccgtgagagagatcacgccactgcactccagcctgggtgacagagtgagattccgtctcaaaaaaaaaaaaaaaaaaagtacaacccttcatacattgtatgagactattatataataggattttgactagtttttcacctctccaatgcattttccctttctagctagagaaccaagctctaacagaatctactgccgttgactatcaacaaagtataacaaaactggaaaagaagatatagcacaaagtggagataatgtattaactcatttcaaacataactactttaatcaaactaagcctaggaattttggaaacttcatcataggaaagggagcaagacaccaagatattcaggatcaaaagataatgatgaggtaaaggtaagtttttgaaacatatccccaagaaatcttaaaaaaaaaaaataaaggaaaaaaatgcaaactaagaaagaaacctgtctttcatactatggatgcttaaattagtttgttacaacaaaataggtagaacgtggacaagagtaaatggaaaaagtaggggtaggaagttagtaatgggaaaaaaggaaaacgaattactgggacataggaatagcaagggtcttgaaaataccctgaagaaaattaagatctgtctatggaccagaaacacacatgtaagaaaaaggtaccaacaagttattttccacttgagatgcacttgttaaggccaaaaaatctttaaactctcctggtctgtttttaccttcactgaattgttttaatgccactgatcttacaccaagcattccagcaaaaatgctgctcgaatgttaaagggaagagactttggatctgaaggaaaaaatagtatccccttggcactcacttggctcttctttcctcctgcatctgcggtttggtccgttgagccttgtctcccatacgggtgccctccagcttcccaacaagggacagcacctctcctgtgggttcatcccggcgggtccggtcaatgagagaacggtcagcttggagcacaagattcgagttctgaaaagatcaaaacattattgaagctttgacatgagcagggccaattcctactatcatagttaccccagctgatggaaaaaatcgtagtaactagttgcttatcatcactaatcgtaataaaaatatattttccttaagaattgcatagtataacgctgtgcagaagcgtacagctgaataagtcttatgcgctgtcgaatcagctaaacaattcttgttcctaacagcgcccatcataacccacacctgtgaaaagtagtgagtgggttgggagtgacgtgtggaagggggagggcttagcgttgaaggtactcgagaaactcctcctagagagatcttagcgctccccagaccccagtaggttattcacgtcatcgtataacccccaccttcaccccgattccatttccccttcgttttcgtggctctcctgtaggccttcagactgaaactccctttttcagcctccccctccccattggactcctgagcctggaatccttccccaagaccaaacgcaccgccttgtactcgtattgcagactacgggcggttacatccgccatggccgcggctgctcggaggcttcagaccaccacgcctccctaccgcaagctgcaaacggccgcagatctctgctcccgccgcgccggaacgacgcaggaaagacgcactggggaaggaaaagaaacgggttcccttccgcttccgggtcgcgccccagaagtgcggggcggggcgtgtctggggcgtgtccctgccgtgtgcgcgcggctttccgcacccttctgagcgggatatgtgggcctggtgcgtctgggtccccgaatccctagacccccgcactctggttctggccgcccgctggcactaaggacccagggcccgtgctctccccgacctcagtctccagcccccggcacccctcacatcataacgaatgcacggctgcttagcccctgtcctgtcccaagacctttccttccggttccttcctctttggcaacagtcccatgaggtaggcaggaaaagaggggccgaaaaccccatttccgtttgaggtaactaaagtacccagcgagcaaggtgacttgcgcgtgtgtctgtgtttgtgtgttttaatgattggcgccttgctttgggtttctcttctgtgttcaacaattgaaaaagaaagctactatcccccaccaatcccacctaaacctgtgcccccaagaccctcgttttcacccagctgaacgaacagggccggggcccccatttgctcccacttgtcggtaacattctatggtagggccctccctgccgcccagggaaaccggtgaaggcagggccaaatccttggtgactatgacttaatttcttccccagctacaaagtcttctctgtcccacattccccaccacttctcgccagtagaatggcgccttatggctgaaggtgacctccctcctcacttagagcatgtttgcttttgagaagatgaatgaacaggaggatgggtgttaagccaaaggaattcatcctcaatagcagtcccctagaccagatttgttctgtagtggtatcgtgtttggctcactgttggctccttctttaaaaattgggataatttcatgcaaactctggctctcccccatcagttgagatactagaaaatcagccacatgacacccacactgctgcatggcatgacctgctgctggtcagcagctgccaaggtcagagaataggcaagtccttcccactgctcctgttttctcatgcctgcccatctccttatttttacttgcccagcccctgtaggcatggagtttgctgctttggtgggtgtttgttttttttttaataactcgtcttcccaagggacagtcgagtcctcatggctctgctcctcagtggctgtgtgactttgaagtagctagctacctggcctctcggtgagcaccattttcctcatccttaaaattgaggcaattggctggacacgctggctcacgcctgtaatcccagcactctgggaggccaaggcaggcggatcacttgaggtcaggagtttgagaccagcctggcccacatggtgaaaccctgtcactactaaaaatacaaaaattagccaggcgtggtagtgggtgcctgtaatcccagctactcaggaggctgaggcaggagaatcacttgaacctgggaggtggaggttgcagtgagccgagatcaaactctgcactccagcctggatgacagagtgagactctttgtcttaaaaaaaaaaaaattgaggcaataaaaccttcctcccattgtgattaaatgggatagtgtgtttaaaagcacctagcaaagtgcctgactcaaggtggggttcactgaaagttattgaaatctgaatccttaaggctgacttttattccatgatcaggctgtggcccacccacctgacacgaaagggtctcaaaggtatttcggagattccactctgtttctgtagaagtagcattcatgttcacagatgcagctgggctgtgggcaaacctgtgaagcaagaaaaaaaggaaactttccccatcttttcttttcctctctaatcaggctctaccaaatgtaaatcctgcatttagtcattcagatggacttataagtttccatagtatgttagacctggtaggagccttagagatggagtagtctggttccct

SEQ ID NO: 3772 - DNA, 4001 bp, Homo sapiens
taatgttcttccaagatcatccattcttgattacatacttgaataaatcattatcaccaaaaagttaataaaaaagaaacaacaggccgggtgcagtggctcacgcctgtaatcccagcactttgggaggccgaggtgggtggatcacgaggtcaggagatcaagaccatcctggctaacacgttgaaaccccgtctctactaaaaatacaaaaaaaattagctgggtgtggtggcatgtgcctgtagtcccagctacttgggaggctcagcagcagaattgcttgaaccaggggaggcagagattgcaggggaggcggaggttgcagtgagcagattgcgccgctgcactccagcctgggtgacagagcgagactccgtctcaaaaaagaggaaaagaaaggaaaaggaaaagaaaaggaaaggaaaggaacggaagaaagaaacaaaaatataaaatacttatttctttttcttgccaagcaccatgctctggggtttgcatgcattatttcttacttactctttcaagacaactttgtgatgtagagtactattagcaccatttaaccaaggtgaatgttagctttagaataaggttggattaagtttcctccatttcaggaaaccgtaaatccccttataagcgatgaaaacaaagttaagagctgcgaccagtttcttagggactttcggtaaataaaactcttggcttattttctgcccttaccgggagcgtcttcggtgcggggatcgcgagcggctccttctccgatctctctcccgagacctggacctttctcggcgcctgcgttctctctcccgggatgtggaccgggaacgcctacgttctaatgcaaacgcacacaaattgcagaactgataattacctcaaatatctagagctgcgccgtccagtagaaaaataatgcaaaccattactagtcacattaaaaaggtaaaaagaggctgggagcggtggctcacgcctgtaatcccagcactttgtgaggctggcgggcggatcacaaggtcaggagttcgagaccagcctggccaacgcggcgaaaccccgtctctaataaaaatacaaaaattagccaggcgtggtggcacggacgggtaatcccagctactcggaaggctgaggcatgagaatcgcttgaacccaggaggtggaggttgcagtgagctgagatcggccactgcactccagcctgggcgggcgacagagcgagactctgtctcattaaaaataaataaattgatttaaaaaaaaaacgaatcaggggcagaaccgagggtctaagttagatctcctaatggaagtccagggttctttacgtcgcgctgcctcatttatggggctggtagccagaaaacattacgaagtgagctcccaggactcaaaattcttaatatcgatttccctgtaatgacctgggcaggaatctaacatttattaagtatttaagaaccaggcagaatcacatactgtatgttatgggatgtgacattaattctcacatcagtttttaaaagttggcaatactaccctcaatgactcattctgggaattcgattcagaaaggctgagtagtgacttgcccaccgtcgcccagaaattcagcaaaggaactgaggtctaattctaaacccaccggccacagtgtaataaaagttattgtatgaaggtgacaaagacttaatgaaactaattcagagacaaacaactgccttcaaaccggagagggcgggctgaagagggcagggcccaggtctacgttcctttatccacccctcgctctccgcctgggaaaagggcccgcctctctgctacgcggctaccaaaaacaaaacaaaataaaacaaaagggacaggcctccaacagagccccatatcctccgaattgctacaggactcacccctccgtggagagcggctgcgactgcgacccatttggagtcccgcttcccggaaacaactgtgcaacaacttccgggagggccgggaaccgagcttttaccgccgaccagaaaacgtcaaaacgagttgcgagggttccggtcttctttgttcacggtgggcattaaaacatgcgatttggtgttattatagaaattcctggaaaattcagccgtatacccattatcctaacacagctttcatttttcccccatttttgtccacatgcacaaaatagagcaaaccaattgtaaacatagcatagacaaacagcttatgttcttccacttttccacataacattcataaggagtgaatataccaaagttcactgtccatctgctttatattttctcatgccagcattgagaaggcacccaaaacctcctatgggctcttggaaggaaaactaaaggccccagattccatcctacccgacaaagtacttccccaaagttgcctctgtcctcagggaaaacaacaacaacaacaacaaaaactttagaatgttcaaaactacaaaaattaggagaaagactgtcttgccccaaggctgaaccgtctgtggtagagcataaatatgcttaccaggaaagactcaaacctctatttcttattttattttattttgttccagggtacatttgcaggatgtgcagttttgttacataggtaaatgtgtgccatggtggttcgctacacctatcaacccattaagccttgcatctattaagctattcttcccaatgctctccctctccccagctcctccccctacaggccccagtgtgtgttgttcctctccctgtgcccatgtgttctcattgttcagctcctacttataagtgagaacatgcaatgtttggttttctgtttctgtgttagtttgctgaagataatggcttctagttccatccatgtccctgcaaaggacattatctcgttcctttttatggctgtgtagtattccatggtgtatacgtaccacatttttttaatccagtctatcattgatgggcatttgggttgattctatgtcttcgctattgtgaatagtactgcagtgaacatatgcgtgcaagtatcttcgtaataaaattatttatattcctttgggtatatacccagtaatgggattgctgggtcaaatggtatttctggttttaggtctttgaggaaacaccacattgtcttccacaatggttgagctaatttacattcccaccaacagtgtaaaagtgttgaacctctgtttctaatcaaaccaactcttttcagtcagctctctctagaattatcaagtctagtgacctggcttttaaaatacaaagagctgggggatggaaagggactttattaggttggaaaaaatgcccaccaatcacataaatttttaattagatttatacattcagagtggcctgtttaatacctgtcccaacccaaacttccaggaaagatccagccatgacatctaggatttctaccaacagccccaacccccagatgcctttggaattaccctggcaaagcatgcactaggtgtagaatggggaggttcaagggaggtgcagaccccagggaagaagatttagggacatcattggagaaacacaccactaatgatagccaggcgtggtgacgcatgcttgtaatcccagctacttgggaggctgaggcaggagaattgcttgaacctgggaggttgaggttgcagtgagctgagactgcgccactgcactccagcctgggcgacagagtgggactccgtctcaaacaaaaaaaaaaaaaaagaaagaagaagcacaccactaatgattgaagaaattatccacaggaaagacaggatttatgggaagcctaagggggtatgtactagatgtgtaagagaggaagaacatggtggcctcaggtggtggctgaaaatactctttctttctctttctctttctccttctcccctcagggctggggtctcatctgatgaaaatgctttttaagaaacccctcacccggcgcggtggctcacgcctgta

SEQ ID NO: 3773 - DNA, 4001 bp, Homo sapiens
ttaaaactagcttccttctctgaaattttcaaaaactatgttatgaatcagaaagaaaatcttagattacaagtagagaatggtctttttgttaaaaaaaaaaaaatcaccatttcaccagtccctgatgaatccagaggatacttacatcaccaaaaataactttcagataaaaagagtaattttcacaataatttctgagtaacttctatttttttttttttttttgagacggagtctcgctctgttgcccaggctggagtgcagtggcgcgatctcggctcactgcaagctccgcctcccgggttcacgccattctcctgcctcagcctcccgagtagctgggactacaagcgcccgccaccaagcccacgtaattttttgtatttttatagacacggggtttcaccgttttagccatgatgatctccatctcctgacctcgtgatccgcccgcctcggcctcccaaagtgctgggattacaggcgtgagccaccgcgttgggcttatgttttaataattaattccttaacagacctaactaaaatatacatagaagtagttttcatacaaaagatggctttgatacaaatggacctttaaatgcaaaaatattattattttttgaaacagagtttcggtcttgttacccaggctggagggcaatggcgcgatcttgactcactgcaacctccgcttcccgggttcaagcgattctcctgcctcaacctccggaatagctgagactacaggcgcacaccacctgcctggctaattttttgtatttttagtagagacgggggtttcaccatgttggccaggctggtctcgaactcctgacctcaggtgatcctcccgcctcagcctcccaaagtgctgggattacaggcgtgagccactgtgcccggccgcaaaattattaaataggaactttaccttttgtctgacttccatgggcctggtaataaatgaactaactatacacaaagccaaccacatgctacgccagaaaaaactgatccctgtaaaaattttgcatcctttgtgcaatccaactaatacatgtagaattccagcatcaggaagtataagcaaaacagaaacgtagtcaggaaacacataacctgttaagtccactcaaaaagtatttgaggaattcaaagctttacgttgagtcctacctaaagtaaggctctcctacttaaagttgtttgactttactgggtgtgtagaaaaaacttcaaaaaattagccttctctgactagaaaaaattaatgttcttaaaaaaaaagaaaaatgaatgttcttatatagtttcaacatcagagcaagataacacatgacattcaagcttaacgtaaaagaaggcaagaaaaaggaatgaggtttctaagtaaaagctcaaacacctacaaacacatttgctaagactaaagtggctttcggattctgatgcctcacgtagttttaaaaacacttccttcccttccagcccctccttagttccttcagagaatttccccctctagccgtctatctagaacatgatactattcgagatgttcaacaaaaggtagcactggagatcttcaaggaacgagggacagcgccgggtgaccaggggccagaccgcgggacctggagactagtcggccggaaggaggtgccgtggctgccggctgtaaccacaccgacgcgcgagctctgcgcgggcttcacgtctcatgcgcgggagcctggccgggatcccggcgacctcggaccggaagaagaaatgaagtgaagcggctcaagacattcggctaacggagagggaaccaagggactcgcaggacgcaaataactgaccacttcggtttggctctcacacatacttactttttcaactcgggagggtgagctttgctcatggtgtatactccgcgggctcacagatgccttggaacgcaacgcacggctttcctcacgctcccgctgtaggcccggcgtcttgcgtctggcgtcatcgacctcgttagccaatggattgttggcagtttttacatttcacctcgcgatatctcagcgcctcggtcatcgttgagcttccggttatgtcctcagcgattggccaggacggaggggtgcgtcctctaggcacctttctgaattccgttttccttgtacaaaattgagataacgggtattccaccggtgggtatccctgctctttttcttttctttttgagacggagtctagctctgtcgcccaggctggagtgcagtggcgcgatctcggctcactgcaagctccgcctcccggcctcacgccattctcctgcctcagccacccgaatagctgggactacaggcgcccgccaccatgcccggctaattttgtgtattttttagtagagacggggtttcgccgtgttagccaggatggtctcgatctcctgacctcgttatccgcccgcctcggcctcccaaagtgctaggattacaggcgtgagctaccgcgcccagccggttatccctgctcttgtctatggaacagccaaaataaataaaaataaataaataaataaaaaaagccgggcgccgtaaatcccagaactttggatctcttgagcccaggagttcgagaccagcctgtgcaacatagcgagaccccttctctatttaaaaaataaaattgagatattgagataacggtcccgtctctagctcctgggcaaacccggccaatcccgcatgtctgtggatcgtatcgcttattttcttcatatataccaatataccaaatgataatgatccctggaggaatgggcctctctctatatatgtatatttttttgagacggagtcttgctctgtcgcccaggctggagtgcagtggcgcgatctcggctcactgcaagctctgcctcccgggttcacgccattctcctgcctcagcctcccgagtagctgggacaacaggtgcccgccaccacgccgggctgattttttgtatttttagtagacaccgtatttcactgtgttagccaggatggtcttgatctcctgacctcgtgatccgctggcctcggcctcccaaagtgctgggattacaggcgtgagcccccgctcccggctgggcctctatatttttttggcaggtaaccctacagcatactgtcagaccaagtagggttcccgtaacatgtaaattagcagcctctgaaccattgtagagtaaggtgactgggtctgtctccaagaatttgaatctatttctgactgaggggtcttgcaaaaaaaattttttttgagatgagttcttgctctgtcgcctaggctggggagcatggtgtgatcatggctcactgcaacctcgaactcctggcctcaagcaatccttccacctcagcctcctgagttgttgagactacaggcgcacgccactgcacccagctaatttttttttgtagagacgaggtcttgctttgttgcccaggctgttctcaaattcctggcctcaagagatctgcctgcctccggctcccaaagtgctgagattacaggggttagccagcatgcctgggaattctgaaatttttcaaacactacctccagaactcactgatgtgctattgcccctgtatataaaatgtgaagtgcagcacacaaacattttctaatataaggtgttcttttttcatgtcaagatgtgtaaaaagtggtctcggacttgttcccagttgttaccccaaaattatagaagactaaaccaaaatagaataccttgtgtttaaataggggatagttctcaaaaattcagttaattcctgatattctggaatggctctatataaatatcaatgatagtaaagacttaaactcatcacatattttgcactctcttagtactcaaaatcctagacactgaattttttctagcagggtcatagctttgtacctttactaccacttgctattagtgtttagttgaagctagagacctgacatagataatga

SEQ ID NO: 3774 - DNA, 4001 bp, Homo sapiens
cattcatgttttcaagacaaacctgccaacaccaatacttaacagattcgttttaaatacataagaatctgagctaacatgaccatgcactggtgtctaaggtaggcttagcacatacctaattacttatgactgcaaagttaggagtcttgctcttaaaatgctccatcttattgtaatacttggcctccaacgctaaaaaaaaagtttctttcaatacaattcagacaggctgtttcaaataatcaaggtccttattagaaagaaagcgccaatcacatcttgtagcaaacaggtgagcagaggccactcttgactggaaaacatcaaatttagcaccttaattaatactgagcgcaaaggagagcatttactagaatacgcgcagttgctttatttgttgacgttattgccaataactcatcaagtgggtcaatcatgaagtatgatgaatccacttcaacgcttccgctataattacaatgattaaaagcaagaattgctttgctcgaatgtctggagaaaaatgcacaatccctaaccgtgggagggcatcattataaagctgaaggcagtgaccagacggaaagcctgtgattccacagcgcctgcagtttttactgcggtttatttccaggtaatccccgcatattttctcgggtttgattaccatgggcaacagtgggatagctattcatattacaaagtacttcaagaaacgaacacccacattttacatgaaatttaattttcatattttgtagtaaaagcccagaaaggtgctacttgaatgaagatgcacctgtctctacatagaaatctttttaacatcacagtagcgacgaccacagtcctagtttagaatcattattatgacgataggaatttgtagcagccctcaacccgtggccttctgaaccgtctctccactgtcctataagggagggctaactgtattcctggtcgctcctgggactgggagctcctggggaaggaatcctaaaggagtggttgtcaatgcattttcattaacagccgcgcttctcggcagcctcctagggctggggtggccacgtgctcccttaaactgttttcacaactcgaggctgtgctgtgggtggcaacttgaaggtttccaagaacttttcgtttttctttgggccaacatttctgttttctgtcaatcaatagtttagttatttaaaaataagaaggtgaagagggagttatttagggtgggaaccagaatagacttcaaaaaagaaatccgtattacccagttggcgtcccagcggttccccgaatggcctagagcccccagcacctgccgaggccgcgccatgcacctggctgggctcaaactggccaactcagacctggcctgggcgcccgaaggctgcaggggggacgctccggtccgagccaccgcctgggcccgaaagagccgctcctgggaagcaatgccgggccaatctcaaatcccaaattctggaaagcactacttcccacgcagtaaagggaagcccgggcgcctcaaaaccaaaccttggaagacgctggaggagcaaagcctgcaagtttccagtaagacactgggctggagggagcagagcggccagggggcgggtgcccactgcgtcccggggctccggcgcccaccctccggccagccgtccccggagacagggaaggggtcgcggggagcgagggggcgtggagggaggaggggcggggggagaagggcgcgaaggagagggaaggggggccggaggtgaaggggcgctgaggggccgcactcacccgcgcaggtaccagcaggcagccctggcgtccgcgggaggcggccgggggcgggggtccctcggtgcccatcgccgcccctgcggctgggtccgcgctccgggccggccgagctcaacgccaggaccccgtccgagcctcccagggccccgccaggcgccgcgtccgcgcccgcgcccctctgccggctccggctcgggctccaccggggcgcagggctggggaaccggagctccgcccgccgacccggagcaccgcccacgcagacccgccccgggcgagggaggggccgggcgcgcacccgcggggagggcggcgagcggggatcagccgaagtcgggagaggggcgcttccacggggcgggaaactggcgcgcgactctgggggaagtgcaggatggggggacaggggcgctcccgcgggggtggatgggggaccatagcggggctggcggggcaggggccggcgcacgaggctggaggaggggagcgcgcgcttctacccgggctgggtcgccgaggtccgcggcgcatcgtggcggcggtgggcggaggggggcggggggcacctcttctcccttgtggcgcaggtgggcgcgctctggaccggcttgacgacccctccccgccgccccacctccctggccaaaggttctcagcttctaatcagggacatttctagtccacagcctcgaagccatgggttctccccggccctctgaagccgccacacctgtgccagccggccgcgtcctcagacctttccccgcggagtcttcccagcacttggagacgcagcgcagggccccgaggacggcctggcccggagaaaagataccgaagctccaactttccccaaccccgctcccctcctccttccaccctcccttcccgcccccaaagctcgggggtcctatccctcctccggtccgcggagtctcccgaaccctgcggggacccggcgctcggcggtgccctcctggggcgcacggggctggggcgggagcgaggagaccaggtggggaggggaccccagatctcagacgccaggggagacggcgtttcccgctgttcattcaggtttgtgccaaaaggagcctcacagatgcagtattgggtttggtagactcaaatcgtcttgttttaatgtaaatgaaagtaagtttaggataaattccagtgcggcgggggcaggcaaggctacccacattttttaaaaagaagccagcccgtatttttctccctttccaaatcctccgccccccagtccttcgacccaggcacgagcgcccatcgcggaggccacgatgcccgttttattccctctccacggcaaggaaaagcagcgaaatctgaggtcttcagaggttaaccctatctaggagcagaatgtgacgcattgtaaacaaataaatattgaaaactcgatgttaaacactttactttttctgactccgacttgcttgacccctgagcagacctgggtttcgaacacagacgcccttccccatttctctattctctgtattcctgtttcaccttcacggcagtctgccagcacttcttagcactcagtttaaccagaggacaagctcttgaatagcaaaaaccaggtctttttatacgtggcacagtggctgttacaaaatatgcttcttgggtgaattggtaaaaaatattgtattactttttatttgtagcaaaacctagaataagaaaaagtacaagagattattgtttgcctttaaattgcatttttaaaagagcgtgcatataatctctgagaaattaaatgtctacaaatagcacaaagatattgtctcattaccttgcaaagggacattctattccagggcctgaagaaggaaaaacagcgtgttgcatgcataaatgttgactttgagagacaagtttttgttaaaattttatcgttaaatgaatagacacatatatttttgtttttcagaccaaaggtaattgttaattcatttgtaaaataatgtagttttggctaacaatctctggaatcctttctataataaaattttgtgattccaggacgtcgtaggcgctctggggctgcttttgaaaggctaattaattcaagttttaactgcctatctgcttttatgcatctgtgtcaggactgcacgtaagggttattttgcttattttaaatactagggttctactgcaataac

SEQ ID NO: 3775 - DNA, 4001 bp, Homo sapiens
tggtcatctgagaaacaattcctttgacagcggtagcacctcaagggagctgtcctagatataagttgtgctctattttactgtgtacaagtcagcccctccacagtacggggaggatttgtactgggccaggacctatagggagccccttgaccacctagcaagactgttcactgaacccttaaaggaaggaaagggctttataaagtgcacagttaatagctaagtctgttcacaaaatatcttaggacttaaagggactttgcagatcaaagaatccatctttcagttgtagaaactgaggcccaaagaaatcagtttctacaggcctcatgcctgtaatctcagcattttgggaggcaaggtgggtggatcacctgaggtcaggagtttgagaccagcctggccaacatagtgaaacccctctctactaaaaatacaaaaattagctgggtgtggaggcagccgcctgtaatcccagctactcaggaggctgaggaaggagaatcgcttgaacccaggaggcagaggttgcagtgagccgagatcgtgccactgcactccagcctgggcaacaagagagaaactccgtcccaaaaaaagatatcaggtaacttgttcagggttgcacaactaattatcagtggagctctactgagttaaatagagtttaagatctggtaaggaaggaggagaaacattgcatcacagatacataacgataattggcacagctaaacacactgaaatgagccgaagaacacaaaaggaaatcggtgaatcgtttgtataagcagggaaaagaatttcaagttgccgctcagatgacagaaggaatgtgctttgacagcctgggtggaggtagtggggggaggggttggtttgtccatgcaggggtaaaggctactagagcagtaagactggacagaaaaccagaatataagaacaggaaggagcagttgttgcgcggacattaagcttcttagggagttcccggaaatgtcagacaagataaaccagggccctaccctgtggcagtgattaaaggggaactacagcctacgggaacaagaagagcgggtaaagggagacactgatgtccacgtgtagggaagggcttgaagctgtctcaaggcaggggtgctagtcccacctgctcgtgcagccccaggagctggctgtagcgcacccgacagtgcaggactccattcacgtgaatgttataggcctgaggacacaaaagtagtcaagcattttagggttgcggtctgcgcaacccccctgagaaccctggccggaagttgcctggcaactcgccggagtaacgcgctaatctcccgagggatagttcgcttgttttcgccagggccaagtcccaaagctgaagagccagtccgggggaaattcggacgcttgtgttgcagtctcactgcccaagaggccagtgacgcccaccagggcagctgcggcctagctcggggaagcgacccggcctaagggcctacaggagctcgggcgaccactgcacgaatcacacacatgagataagctcccagagaggccgtcgggagtcggcggcccaggaccaggcccgaagggtggcggtcaggcctcagaggccgctccgagatggctcgggcccgttatccccgcccctgcccggcccggctcggctccggccgctcctcaccacgtaggcggagccgccgctgtccccgctgcgggactcggtttcgggaatggaaaagtgcatgttccctacggcacggcacggccgggctccggactgtgagggccgcagcggctctgcacgctccccctccgctgctcagcgagtccccgcagcctcactcgccattttgggagccctgcgatccgatgtgggaaggcggtgggacgtcggttctgggacgcaatcgcctgggcatgctgggaactgtagtctaaagggcaagagccacctgtccggatagggagcccaaagtggagttggccctcattgcaacccgtagtgcggggcggggcctcggggcccgtcggaaattgtagtccgattggggctgcgcgcttcgcttctgcggctcagcctccagcccaggtggcgctgtggaccctgcagccgcggagcgaggcagcggggcggctccgtgaccacggcgggcggagcctaggactgagggcgatggctgctgtggccgtggctgttcgcgagggtgagtgaagagccgggcctgcctactggtacgcggagccgacgagctccggacagctagtgccgggccttgagcgcctttgggccccgccgctccgttccagcgccacgctgggctccggtctacacagtctcgagcgcagtcccgcgccgcgcaccggctggttgctgtgaggagggtcggtgacccctccattcctttgatccgccgcgcagtgcgtccccacgcggatccctggctcgcctcgcgcctgccggcggatccgtggtcatgccaacccagcagccggctgcgccgagtactcgtgcccccaaaccctcccggagtctctctggctcactttgtgccctgttttctgatgcagactcgggatccgggatgaaggcggagcttccccctgggcctggggtaagtgaggcttccctcccaagccgcctgccaagcgctacgcaggaggctgtgccagctttattccgccccagctcccatcccgtgtcggtttatttctcagtaaagccaggagattttacagaggtcttgcaaccctagggatatatgattctgtccctggaggagaaacgtcagcctctgtggatgtaagcttgcaacaggtagcttgtggaagttaggaagaactagggatttaaccatgtggaaatcttgtaagcatccaatagtatttgttcccctttggaattgttggggaagagcagtatcctatgtctgtgtctcaggcagtggggagggaaatgaccaaagaagaaaagctgcagcttcggaaggaaaagaaacagcagaagaagaaacggaaggaagaaaagggggcagaaccagagactggctctgctgtatctgcagcccaatgtcaaggtgagtgaggggtctcttttaaagggctggggtgtggagctggtagagggatgtggtgggagagataagggagagacaggacaaagttgatttgagcaagtgtgtaaagcaaagaggtttacaaggagagaagctagttttagctggggcacggatatcacctgcctgcagcttgggcatttttttttttaatgcttttagtaggcccaaccagagaactgccagaatcgggcattcagttgggcactcctcgggagaaagttccagctggtcggagtaaggccgaacttcgggctgagcgtcgagccaagcaggaggccgagcgggccctgaaacaggcaagaaaaggggaacaaggaggaccacctcctaaggccagccccagcacagctggagaaaccccctcaggtatcttcccttcattttaagacctcccttactcctaattataacgccagctcaggctgcccaatagtaaaacagctctcccctctcattcttgggacccagagttctgaattgttcctgcaaccccattatcctatccctatttccttttctaccctattctcccgttttctccacctcatcctgtttttcttgatgccccttataccctaagagcaaattacacatttcaagacctacagtgtcctgaaaacatgatgattatctttcaggagtgaagcgtctccctgagtaccctcaggttgatgacctacttctgagaaggcttgttaaaaaaccagagcgtcaacaggtaggaagtgggtttggtgcctggctagaaagagcctagggaaatggactggagggaggaaaggtgctgggtgcaaagtgagaaggataggtgcttgggtcagagtagtcttactgttcacttcctttccagctttatcccatcctttttaaactctg

SEQ ID NO: 3776 - DNA, 4001 bp, Homo sapiens
aaatatgatatacaaatttttccaaaatatgtttaagtactaatcagctttcattttgtaaaccgtaaagtacgctacaaatgtaaaaaattactaacatatataaaattaagaaaatattcataagattaaagatctcagtgaaatgaagaaccgccacggactgccatggaggtgcactctggagaccaccactgcctaaacccggtgtgcattttctatgttctcaagagtgctatataaaggaaaaattattaaaattaaactaaacaactgacattaagattaccaattgttaagaaactcaacctgattttagtattgcttaatagagctgctagcttaccacctccttcccagtcaacacaagttaaaatattttaaaacttatatagaatccgtagttcaattttgcatcatcttgtagagaaacgaaagtaaggaaaagaaagaatgtgaattacttattagtcttctagaataaaagtcagtagtacataatagcacaatccattctaaacgttaaatagggaagaagtaagccaccactatggatagagaggttgctacaagaatttcaaggtgtagttatgataatttccagaaaaacttgtgactgatagaataccatcaaacatacacatatatttttcaataaaagataactgacaaagtccagcagccaggcaccctttagttggaatgccacaagaaaatgtcaaaatttccttgtgactccaatccctcaagcctttcaaagttcggaaccaaaccaagatgtatttacactgtttttttagcatccttctttaaatgcaattccctctccacaaaaatcactccgcttctgctactcggatgcccaaaccccacatcaaagactcttaggagcccaagtagttgcagaggggtcttccagctcccgcctccgcatcccttacccaccttggttagttaaacctcccggggcactcaattcatttcccacatatgtactcattggttccctccctcatccccaagaggatcttttctcctcgaccttgaagacccccagatcgggctcttggagccccaagtgacttggtcggtgctcccttccctgcagcctgtgtaactgcttcagtctccggtggcctccccgcgacccaccacgaccccgatcacggatgccctcctactggccccggacgacccccttccccttaggaaccccacgttcctccaaccagaaaaacaattccacagaaatgcatcgagagcctactaagcgcaagctcccactgtgagcggcgtggtctgcacggggctcgcggcccgggctagcagtccttttcccggccagcccatcccagccagaggccggcgctgcctccgccgcggtgcgggggcgacagccgggggcggaatgcgccgggcgcgggcactggggcaccgagaggcggccgcggacgacggcgcgggggccggggagcaggcggcgggccgggcgcgaccgcggggacactcaccgtttggggcgcgcggggcggcctcatccagggcacctgcggccaggcaggacgggcccggacggcgcagtcaccgacagggcgagtccgcctgccctccggtgcgtcccgtcccctccgactgcccagcgagcgcagcgtcgcttcctccggacggagcccggggaccccagctccgccggatgcccccgccaggcccccacccccttccctgccgcctccccttcttcacccgtttcccctcccccctccccccaacccccaccagaatggaaaatacctcccggggcggggggcggggggcgggcaggggcacgcctctctgaagggcagcctaccgtgaccaatagcaggcagggctttagaggggcgggattcctagcggccaatccggaggcgggtaggtgaaggccgaaggagggaggcagggcgcgagacgggggcggcccgggagtcggggaggtccggccgcttgggtgcgcgctctgcgcggctgccattttggagtctggcagctgcgacgggcgccgtgtccggccggggaaagggaggagccagtcaggtgggagagaggcggtcacgtgggcctgagaggcggggtaaagcgggctgcggcccgaagggaggggtcgacggcggggagtctcggggattgagggggaatgtcacgtggtcggagaagggcaagcgatgggcttgtgggtggaaggtgaacctgaagtaggagtggggggaaagctttgtccctggtttcaagtcttagggagaaggagaggaaagtgctgaatggagggcgtgagtgccgagtaggaaaatgtgaatgagtctctccagcgcccttcagcatggagccacccagttagcaagttccaagatccacgggaaaccgggcacctcctgcaattcaagtattcctatccccgcccccagctgccacaaaaatgactcacaaatcggagggaggggtgtcggtctccgtcgttttgtctgcattttatatggaagggccccctccctggaaatggctgaaagggtggaggaagagaagcatagttcacgcctgcaagggctcttcccgctggctttttttttttttttttttttggtagacagtgtcttcctgtgttgcccaagctaatctcgaactcctgggttccagggatcctcctaccccggcctcccctcccaaagtgctggggttacaggcgtgaaccaccatgcccggccccactagtgttttagaaaccttgtcgtcgttcacaaacgtaccggtcacttcttaagtgttagacataaccttgatcatgttccagcgcctcaacttaataaaccaaaaagctctcctgtgagactgtctagctctcatcctttatttcaattcatccctcaagtactggctaagttattctcccaactaatccactaaaaagtgcttctgttaaggctcgcagtgacacccgtatgaccgggttcaaaggtcgatttgtagtcatcctgcttggtctcctgcggtggattttgtggactacatgaagcctttttctcttccctgatgtacccctcagcccacttttctaacaccctaaaccctcagattgtctttctgttcagttagcctttctaaatctgttctctgttgactctacgcccaaggatctgaccctcagtcctctatttagtgggcatgcagtcgtttctctctctgcccactgggtgatctgaccattctgatggctcaacagctgaatgtatgtttaatgacgtccagatctgcaggtataagtgcctcttgggcatctgcacttgcaagccatgatgtctccacatgggacctcatataccctctgaggttcacaaaacctgctcctccttctcatctgttccttatctttttttgatgataaccaccatccacttatttgcccaagccaggaaccttgaagtaacctttcatgccacttcctcactgctctaacatctccctacctcttctaactttatcgtgttggtaatatttactaaatgctttcttctgttcacttctactgccactgccactgcctcacctgcatcatttatttattaggccagtacttaactgagcaccttactatgcaccaggcattgtttgagatgctcaggatgtagtggtgaacaaaacagacaaagttcctgagtgggacaagacaaatggtaaaagtacattagtaaataaatgagataattcagggaatgataagtattatgaagacaataaagcagggaaaccgataagaacttcccaagttgttgctcagctcttcactgatgtccattcccccttccttctgctttcttcttactctccaagaagaaattgccttgatcctttcacttagtgtgttgattccatgccctttcatcagccaggactttcctctatctttatatttttatattacagctacctgaatacaaatccctcaactagatgataagctatttgaggtc

SEQ ID NO: 3777 - DNA, 4001 bp, Homo sapiens
ttgccatagatgattctcaaggtgaataatgtagaagctattataatgttaaaaggtgttaggtttcaatattttaggctactgtattgtaagccagtacattctccctgaggacgaatagtaaaattcaaggacaataaggagaaaatatatataattatccattagttattcaagaactaagaaggtgccaactgaaaatattaacacctttttgcagaaatgttttctctgatggataaaagggccaaaatatgatatacaaatttttccaaaatatgtttaagtactaatcagctttcattttgtaaaccgtaaagtacgctacaaatgtaaaaaattactaacatatataaaattaagaaaatattcataagattaaagatctcagtgaaatgaagaaccgccacggactgccatggaggtgcactctggagaccaccactgcctaaacccggtgtgcattttctatgttctcaagagtgctatataaaggaaaaattattaaaattaaactaaacaactgacattaagattaccaattgttaagaaactcaacctgattttagtattgcttaatagagctgctagcttaccacctccttcccagtcaacacaagttaaaatattttaaaacttatatagaatccgtagttcaattttgcatcatcttgtagagaaacgaaagtaaggaaaagaaagaatgtgaattacttattagtcttctagaataaaagtcagtagtacataatagcacaatccattctaaacgttaaatagggaagaagtaagccaccactatggatagagaggttgctacaagaatttcaaggtgtagttatgataatttccagaaaaacttgtgactgatagaataccatcaaacatacacatatatttttcaataaaagataactgacaaagtccagcagccaggcaccctttagttggaatgccacaagaaaatgtcaaaatttccttgtgactccaatccctcaagcctttcaaagttcggaaccaaaccaagatgtatttacactgtttttttagcatccttctttaaatgcaattccctctccacaaaaatcactccgcttctgctactcggatgcccaaaccccacatcaaagactcttaggagcccaagtagttgcagaggggtcttccagctcccgcctccgcatcccttacccaccttggttagttaaacctcccggggcactcaattcatttcccacatatgtactcattggttccctccctcatccccaagaggatcttttctcctcgaccttgaagacccccagatcgggctcttggagccccaagtgacttggtcggtgctcccttccctgcagcctgtgtaactgcttcagtctccggtggcctccccgcgacccaccacgaccccgatcacggatgccctcctactggccccggacgacccccttccccttaggaaccccacgttcctccaaccagaaaaacaattccacagaaatgcatcgagagcctactaagcgcaagctcccactgtgagcggcgtggtctgcacggggctcgcggcccgggctagcagtccttttcccggccagcccatcccagccagaggccggcgctgcctccgccgcggtgcgggggcgacagccgggggcggaatgcgccgggcgcgggcactggggcaccgagaggcggccgcggacgacggcgcgggggccggggagcaggcggcgggccgggcgcgaccgcggggacactcaccgtttggggcgcgcggggcggcctcatccagggcacctgcggccaggcaggacgggcccggacggcgcagtcaccgacagggcgagtccgcctgccctccggtgcgtcccgtcccctccgactgcccagcgagcgcagcgtcgcttcctccggacggagcccggggaccccagctccgccggatgcccccgccaggcccccacccccttccctgccgcctccccttcttcacccgtttcccctcccccctccccccaacccccaccagaatggaaaatacctcccggggcggggggcggggggcgggcaggggcacgcctctctgaagggcagcctaccgtgaccaatagcaggcagggctttagaggggcgggattcctagcggccaatccggaggcgggtaggtgaaggccgaaggagggaggcagggcgcgagacgggggcggcccgggagtcggggaggtccggccgcttgggtgcgcgctctgcgcggctgccattttggagtctggcagctgcgacgggcgccgtgtccggccggggaaagggaggagccagtcaggtgggagagaggcggtcacgtgggcctgagaggcggggtaaagcgggctgcggcccgaagggaggggtcgacggcggggagtctcggggattgagggggaatgtcacgtggtcggagaagggcaagcgatgggcttgtgggtggaaggtgaacctgaagtaggagtggggggaaagctttgtccctggtttcaagtcttagggagaaggagaggaaagtgctgaatggagggcgtgagtgccgagtaggaaaatgtgaatgagtctctccagcgcccttcagcatggagccacccagttagcaagttccaagatccacgggaaaccgggcacctcctgcaattcaagtattcctatccccgcccccagctgccacaaaaatgactcacaaatcggagggaggggtgtcggtctccgtcgttttgtctgcattttatatggaagggccccctccctggaaatggctgaaagggtggaggaagagaagcatagttcacgcctgcaagggctcttcccgctggctttttttttttttttttttttggtagacagtgtcttcctgtgttgcccaagctaatctcgaactcctgggttccagggatcctcctaccccggcctcccctcccaaagtgctggggttacaggcgtgaaccaccatgcccggccccactagtgttttagaaaccttgtcgtcgttcacaaacgtaccggtcacttcttaagtgttagacataaccttgatcatgttccagcgcctcaacttaataaaccaaaaagctctcctgtgagactgtctagctctcatcctttatttcaattcatccctcaagtactggctaagttattctcccaactaatccactaaaaagtgcttctgttaaggctcgcagtgacacccgtatgaccgggttcaaaggtcgatttgtagtcatcctgcttggtctcctgcggtggattttgtggactacatgaagcctttttctcttccctgatgtacccctcagcccacttttctaacaccctaaaccctcagattgtctttctgttcagttagcctttctaaatctgttctctgttgactctacgcccaaggatctgaccctcagtcctctatttagtgggcatgcagtcgtttctctctctgcccactgggtgatctgaccattctgatggctcaacagctgaatgtatgtttaatgacgtccagatctgcaggtataagtgcctcttgggcatctgcacttgcaagccatgatgtctccacatgggacctcatataccctctgaggttcacaaaacctgctcctccttctcatctgttccttatctttttttgatgataaccaccatccacttatttgcccaagccaggaaccttgaagtaacctttcatgccacttcctcactgctctaacatctccctacctcttctaactttatcgtgttggtaatatttactaaatgctttcttctgttcacttctactgccactgccactgcctcacctgcatcatttatttattaggccagtacttaactgagcaccttactatgcaccaggcattgtttgagatgctcaggatgtagtggtgaacaaaacagacaaagttcctgagtgggacaagacaaatggtaaaagtacattagtaaataaatgagataattcagggaatgataag

SEQ ID NO: 3778 - DNA, 4001 bp, Homo sapiens
aattggaagaaccttacatatcagctagattatgtacacttccacctcctcctatcacttctactgcaaaagtatctctaacttaaagtcaaaagctgttttatgtaaatatgcaaaaaggacaagtgggggctgtggtaaggtggagatacatgacctgtctaaagaagggagccatttactcaactccagcagtttagtgcctcgcttgaatacaggccctaaatgacaagaccttcctattcttcaagaaaagccgaaaattcaggttttatgtaatatctcccattttcaaatattagcaactaattacatttaaaaataaaacaacactatgccagccaaacaaaatgcttttgtggacagatttcagcaagggccaccagtgtggcagaattaaacaacgtctgtcaactcctacaatattctttccactgcttcaaaggatcctcagctgataccttggtgattcccctgggaaaggagctgcttttgcctctaagcaaaatggcccctatttggcaatgctttatgagttcctttacacgtttttaaacaatttccgtgtctccccttactctatccggacaccagcttctagcatcacagagacctcctacaccccttccattacaagctaagaagtcaaacttgcaagtaaagcaaaagtaaggagtgagagcctgaagggatttctaaggagtaaagtatgtaagatatatggcatcttttcttctgttttttaaaaaaaattacatagatgtttgtgactagtcagacacttgaaggggaaaatgtccgtaatttaagccagaaatatatgagcaaattctcctgaaaaaccaaatagtttccactgtaagacagcaagagggaccggaggagaacagggcaaaagggaaagtaaaagttactggcctttgagaaatatcagacaccttttaatgtttagcataaaaggtaaaacataatctccattcttagtagaagcagttagcatgaaacattctttgagcagcaagaaactgggatttagaaacactattagaagagtaaagcaatctttacagaaaaggtaaatgaagaaaagaaaacaaaaatagtctggttgtcacactgctgctttagaagctttaaaaacgtaagaacacttcctaattatactaaaacatttaaaagcacagatcgggggtatgtaacttcaggtaacaatgtagcaaacttaaacatacaaaggctaaaaattcttaacaagccaaatgacagcaccaagaatctcgaacgctgcaaaaacaaaacaaaacccccctgaaattggtagcatgtgcaccagcccctgttaatcggaggagcgggggaaaccaggagaatgaggagtgaatactgacggcgagcagagcaggccacgttcctactggcaggcgagctcgcaattcctttgagcaagccttacggccagggcattctcaagccactaaaaccagcgtactggacacctaaaacggtaggctgacagcagctccgggctaagaccaagaagacggaaaagtggcctgctttgacctccgctgaaaactgaggctcctccaactgttgttgtcctggaatcaaagggcaaagcattcacctctcaggggttggattatccggataaactccccccggctccctgcggcattcccacacacccggtggatgtcaacaccgagagccagccgtatgaggggggcctctccgtgtgcgccgtccttttggagacgcggcgagaccgggaagaaagacggccctgcgcgcgccccgcctccccagcccttccccagcgcccgcgctggggggctgcggccgggaagcggggtcccgcgtgctcctcacctttttcagcgcaggcaccagtagtccccgccacttgggcgcgttctcttcgctgaaaaactcgtagggcagctgctgcgcctgcatggtgcccccggggcgcctctgggcggggagaggggcggcggcggccgggccagggagccgcgagagggcgagctcgcagcgcggaacagggccgcggccccaccggacggcccggccccctccgggcgccgcgcagccgggctagccctggcgagggggctggggggcgaggcccgcgcctggccacccacccgacacaggtaccagccgtggagaacggacgcggcccggaggcggcggcatcccgcaccaccgccccggggccaggccccccgcccctccccggcccgccggcgccgccccgggctgccctctgccgcggccgccgcccgcccgccggggctgcactcccgggcccggtctggccccgcggcggagctggcggctgggggaggacgtgtggagggacgctccggccgcggcgcccgctccgcgtagttgggactccgaaacgcaagagccccgggcggggcggagctggggcggaggtctcgcggggaaggggaaggaccggaggtcgttgttggggaatctggctgccctgaggtgccgccgcggccgccgccgccaccgccgccgccggtgtagcgctggagcttcctactagcgaactgaacctgctcgctactgagcatgcgctgccgtgctgggctggttcgctccgggttttccggctcccggtgaaggaggaggaaagctcgagagagaaagagagagagagacagggagggcgcccggccgggctgtggctgcgctcctgggggctgcaggggaggggcgaaggggcccgagaagtcgcaccctggcaaagtggggcctgcaagggtgggtgatgactagggtaaagaggctccccattgtgtggcctggccgtgagggctcccacccttctcggagtccctgggcccttcgtttcggaaaggggtgtgtgtactttgttcctgaacacgaagataaggactgcccagagcacgcaatgtatagtaaacagactggacaaaagacaggtgctctgtcacgaaacctactgctcagtatctgctgagtagtagaagtgattgcggtgtttctaagtggtctttccacaaaataataaaatgtgtacgtgtagtattgattttgtgtgaatgttttagattccctctgttcatcttttaaacccactccagaaatgaactccagtaagcactttcctccagtggatatcgagacctcttttacagctcctagagcactgcacttatgcccctctcagggcgttcagtctattgtgttttgttatcttttgcggttctttcgactagataataaactggaaggcagatctttttcaccagggcctctacacagtgtagaacaggcactcagtcaatgttagtggaatgctaaaggagcagtatttataaactgtccctccaggccactgtttgtttataataggggcactttgtggcagacaccttatgatttatcattaattatcatttttttgagtatcatctcatttaatccccatagcaaccctattattttcatttcaccgataagaaggcagtttagaggaactagcctgggttaaagctgacattgtgtcctgctattcctgagaacagtaaccaggatcacataaacgagaaaggttcagtggttcttaatctttacaggacctctttgaaaatctggaaaaacaactcttaggttatttcctttaaaaatacacaggccggccaggcgaggtggctcatgcctgtaatcccagcactttaggaggccgaggcggatggatcacctgaggtcaggagttccagactagcctggccaacactgtgaaaacctgtctccataagaaatacaaaaattagccgagcatggtggtgggcgcctgtaatcccagctacttgggaggctgaggcaggagaatcgcttgaacccaggaggcagaggttgcagtgagccgggatcatgccactgcactccagcctgggcaacaaaaccaaaactccgtttcaattcaaaaaaaaatatacacacacacacacaca

SEQ ID NO: 3779 - DNA, 4001 bp, Homo sapiens
agatacatttctagtctccagaaacggactccagggcagggaagtggagggcagagaagaggtacaggtcaaggtatgatgaatctctgaaaaagacatccacttttcccagaaggctagcctgaagagaactccgccccatccattccgatccctcaagtaagaatgcataatttagcttgtccttctggtctcacttccttacaacacctagtattcaatttattaagacaaataaacctttgcattttctaaaagaagcaatttttacccaaatacattggactttggtctcaatgtgaagggcgagtggcctttaacaggtcgttcctcccccactccctcctcccccctgccctccagcggctgctctgggtccctgaaagagggtgtggtgtggacgatctgggttctgaatcggattttgttgagtctgggttttatacgtccactagagctgcccgaggctttgcgccctggatccttggctttgcctccgacccacccctcagccgagtggtgatggtggtgatggtcccctccatcttctagggcgtgtgagagtttgtaggtgatgagatgcgagggaagcacctttgaaagcctccagcgcccgccgccgctacccgcggcgctttccccgtcaccctcgtccagggctcccaccaggttcttgatctcctcggcgatgctccgactcaggtactgggaggcctttttcccactgtagtccctgatgtccacatcggcgtcgtaggcccccaccagcagcttcaccacctccacgtggccgtgcatggctgccaagtgcagggcggtgtaacccccgctcgtcctggcgtcgatgttcaccggcagctggtgtttgttggcgaagttgactagcatggccagaagctcctgcctgccgtgcttggcggcccagtgcaggcaagtgaagccggtaatgaagtcccgcttgaccagcaggccgggctcgcaggtgagcaagccctccaggctgtcccacttgccatcggaggcagagagcatccacgcgtgctccagggggtccagcgtcacggagcctccgccgctgctctcctcctccgcggacgacgaggccaccgatgcgctgtctgagtcgcccccgcctctgccgcgtcctcccccggaggagctgcccgggctgctgcccccgggacacacgctcctcttcagctgcggggagctgcccatcaccaggtcacggaggttctggcgggccggcctctgtgcggtagcccccacaagggagctgcccctgtccgcctcctcgcagccatgtggcgggagctccaggtcctcgctgggccccggggctggagtccgcggtaggggctgcacgtcgcgccgcgagttcttcctgcgagccccggcgctcaggggcggccagtgcgcgggggcggggggctctccctcgcccagctcgcggccctgtccagggagcgactccggggccgccgcgtcggggagccgatcgcgcgcctcgggcccggcagggccgtcgggggcctcgggctcggcggtcacctggattcgcggcgggtccccggagggctcggacggcccttcacagaacctcttcttgaggtgcacgtacttggcgccgtcggcgggatcgacgcgcacagtggccacggcgttcaccagctccttgaagtgcgcgcgggcgcgggcgcgctgctccggttcgccgcctagggcgcccctgaagtgctgcaccagctcggcgtgcagggcccggcccccgcgctccgccaggaagcgcagcaccgcctcggggcccagcgccgcctcggggccccactctgccggcccctccatcctcgaccgcgctgctcccccgccagcgggcggctcagcgcggtcccatagcgacgggctcccagcggccggctcccgacggcggcggagtctggcgggctcagcgggctgccagcctacgcgtctgaggccagaggactcggccaccgcctcactgggccgcgcccgggcggacacgccccccgcacccccgccccgcgcccacgccaccaggccacgcccacttccgctccccgctgtctcggccacacctacctagggcggcctcgcctcaaggcccgcccacttccggcctcgcgagggccgcaatcactgctccgcagttcccgcctgcattcctcgcgccgtcttcctggagtcccagctctccttcagcccgccccaacgctgacgctcagtcctcaggcgtcgagggtagctcctgtgaggggctcgcttggcgcaggcaaaacgctcagcgcgcaccacagggcgtccgccccaaccccgcccccggaggcctccagctcggccccgcccctgtcccttccccgtcgcggaggcagcctagcctcgcgccccgcccgttgcttctgccctccggccttcccgccgccgtcgccgggaccagccgctcggggccgggctgatacagccgcttcaccgtgcccctgcccgcgaccatggcctcctccgaggtggcgcggcacctggtgagtcccgccgacgccggggccccagccccgcgctccccggcccccgcgggacttcccgccctcgacccaccggccccctggtccggcccgggattgtgacccgcgccccctccggccccgcccgcccagtgctccccggcttccgcggcggccgggcgcctggggcgggagaggagcctctgcggagcctgggcgcggccggaccccggttcgcggggcgcggcgccagcgtcgggacggtgggagagttcttgaacgacttcccggtctttgccaaaagttacatccacagcggtgtttgtgggtctcttacggctataacggagttgaaggcgcagtgcggactgattgaatagcggtcatcttttgcagccgtgagcacttccgagcctccctgccgccgggagaaagcccggctcccctggcttttcaaaagctctcccgttttatccgatggtgtggtcgtccaagttttcctccattgggattttaaaccgtttttttcccgccttgactcttttgtactctaaaagaacgcgtttgttcactgttttgaacctttccagttacttttgtagatttatctcgcttgttagtaagccagcggttttccaagtgtggttacaactattttcgttaatagtaccaaggtcgtgtacatcgagttttccaaaggctacatggtatggagtgatctcaccgccgtttggaggcccgatgcctgtgtattcttaaaaacaaattctcccttttaatttttgatagtaaacattggtggttttcatctgtgtaaacaaaagctctttggaggctggagaccaaaaagtttgagaaccactctactaagcaacctcctacatgagaagtttaaattgtagaaacagttcagattgcaggctgagagattagaggatccgtccaaagtgacaccgttggtttgttttatagaacctggacaaagatttttctccctgattcagcccaggtctcttttcattctatcgcgtattttttaaaaatctcaaattttctgtctggacccccttgtctcagttgctgtgtttgtgtgcatgtgtgagtgagggaaaattgaggggtcctggtgaggaaaatgtgttttataaattctttgattcatagattacgtatccaaacaagcttgagcagaagagaacacttcatttagctgatgttagatttatttttaattgtacttaatttgctttgaggctaactttacttattttcgaattaaactgtattttgcgttaattgtagattaatatgcagttgtaagaaataatacagtatagtgagaaccctgtaccctttatccacctttccacaataagatctggcaaacccatagtacgatatcacaaccagcatattgtcattgattgatacagtgaagataaaggatgttcccaggaccaggaggatcccttaatgcctttttat

SEQ ID NO: 3780 - DNA, 4001 bp, Homo sapiens
attaaattaacaaaagttgcaatggtccctttttttgttaaaaaaaaatcaccagttctttaagttctcttaagaaaaaaaaatatctccaccaactccctagagtaacagttgtgctgccaaaagggtcctctgcagacgtcttccagacttcaaagaccgacaagcttcaaacagcgccttccggagcgggtcctacctcccctcccccgccccgccccctctgcctttgttgcaatcacgaatttcaggaaaaagaaatagtaattacaaaaacacattttttgggaaaataatcacaactccagactaggtatgcaactaccttgagacacgataaaggaagggaggggggacaaaaaaaggacaggaaaaatgtttaaaaactactcatttcactttaactccaccaaaattttcatcatgttttccaatttctttgcgtcacgacatcttatcaatatcatcagcatcttcttctctcccctccaccctaccaccgccaccatcaacaccaccatcatcatcatcattatcatcatcatcatcaccactacaacttcctcccaaggaacccagctctgcaccctccgagagaaagagcgagcagcgggcgcctttcaatatgtgaacaccaggtcggagaagttcgcctccagccagtcccccgcgatcatctcgctcagctccggcgtgcagtagtcggggaactcgaagtgggagcccaggctgccctcgctgaacgaatccaaatccttatccaccagcgacagggacaggttcccggccgccgcgccgccccccagctgctgctcgctggcgctgtgcgcgctttgagagaaattcaagctcaggtcgaacatcaggtcgtcggcgtcctcgccgctgctgccgctgctgctgccgctgctgctggacgaggaggtggacaccgagcgcgaggacgcgggcgacagcgcgggctgcgcgagcggcggcgggtgctgcttggtgatgttcttgaagctgtagtagaggcggctgccgcccccggcgcccgaggtcgcgccggcccgcacctcgtcgtagaggctcgctccctcgggggactccgccgagctgctcagcgtagggctggcgggcactttggcgacgttgtagcgtctcagcagctgcgacggctgctgccccggcggctgcaggagctgctggtgcggtggttcctcgtcctcctcgtccggctcctgtttgatctgcagctgcagctcgtcgtcgtcgtcgtcgtcgtcgtcgtcctcatccagaaacacgcacttgaccgtcttgcccgcgccgccgccgcccgagccgctcacgcgcaggctgcccagcacgtagtcgtcgcccgcgcccccgtagtccccggactgggccgccttgcccgcgcccgccttggcgcccgcggccgcgggggccttgagcttgccgcatttcttgctggagcccttggaggtcttggcaccgcccgcgcctccgcccgcgctcccgccgccgccgccggccgcgctcttctctgggctctggctggcgctgggcttggccgaggggtccattttgggctttttccggggccggtacttgtagtcggggtagtcggccatgtgcttgagccgcagccgctccgcctcccggatgaacgggatcttctcgctgtccttcagcattttccagcgcttgcccagcctcttggagatctcggcgttgtgcatgtccggagactgctccatgatcttcctgcgttcgatcttggaccataccatgaacgcgttcatcggccgcttgatgtggcccgacgccgtcttgcaccagtctgggtcgctctcgtccagggccaccgggctgcaagccatgaattcgccctcctccgtgtccagcgcctcccggggcaggttgctctccgcttccaagctctccgcctgctgcaccatgatccgctgcagggctggacgctccaacccgggccgctgggtctcgtgcggaggtccccctccccctcccacccctccaccttcctgggcaagttgcaaagtcctcggcaccccgctttcgcggctccccccctcccccccgcccccccttccaggctgcacacagcggctgtggtggcttcggcgacgacggccgccggcgcggtgggagctgcggtcgcgacaggagaggcggtggcgacggcggtcgaggcagcccgggacccctctctccggctcgtggctcctaccgcaagcgccggaccccgagctctcccaggcgcgcgcgctccttctgcaaaaagttgaggtctctctctcaactagttatcagggtgtcatatgggtgacatcactcccccagctagccaatggctgggggccggctccgcccatcttcctttattaactcggaggccccgcccctccaccccgccctccgggctgctttgcaaagatgggggtggggggagaggaggcatgtctagaaatatgttatttttaaaaaatccgcgtgtgtgcacagatgcgcctgttcccgggatgctcggaagcggcgcgcggcaccacggggagcgggcggcccggggcgaaccgggatggttcgggcgccggcgctaaccgaggaccgggtcccgggagaggccccgcgcgcctttgtgcccagtccccgggaggcccgacggcgacagcggacggcgcgcgctcactccccgggtgcacacactcgggcacgcgcccagcctgagacggcggcctccgcccggctcgcggtcagccgcgcccggcctgccccggggtgggcgcagctgctccccggcgagcccctcgcggggctcggccgctcccccgggtcgccgccccgagcccgcccggtagccccgcggcggccctggccgacggaaggtggcgcttgaagacagcaaccttcccggcacgtgggctctgctctccttttccctttctccctttttgtaaggcaaagaaatcaatttaaagctcgagaggcggtgagctccctcccccgttttgcatttttctgttttgtcctttttctccgtctgttttccctcctcggtggtgtttggggacgcggctgtgcgggttgggctgcgccgcgcccccgcgcgccccgccccgggcgggggccggagtaacggtctgcggggccctcgggttcaagctggccactcccagggctggctccggagcgggctctgggtcccgcaggctccagcaagcccgcgccccgcccggcgtccctgcgaggggcccggcgccctccttcccttctccctctgctccccgcccctcctctccccgccccgtcctctccccgcccctccgccgctcctttctccttcccaggcctcctcttcctctttgtccttcccccatcctcggtcgccagcgcttctccggcagcctcgtcctgaaatcgtgcgattgtgagctagaagccttctgggtcactcataaaccaaagagaaaataaggtgcactcgagtttcccgtctaaatattttccctggagatggaaaggtgcgctggcggccggggagccgcgacctggggcgcgctgggcctcgcagagcagccgcggaccccggcgatcgtgccgtgttcgtctcctttgtgtttctttattgagtccctactacctctacggatattctgggggcaattaaagaaaatcaccgcttcataggtatggtctgtcgccaccctcgccttctccacaccccccagcactgggtatctgggaactttgagcagttcctaagacactgcccggatcccttcaccagagaaatcagccgtgtaggactgggaaaattatccgaatctgcttcctttcaggtgccctcctgcaattaatactacatttcttaagtattggatcttctctgaggattctaatatcataaaataataccgtgttttacacagatcatgatttgaaaaaattaccgccattgcgataagccattcccgcccccgtcccccacttccccg

SEQ ID NO: 3781 - DNA, 4001 bp, Homo sapiens
taaagtggctccaatgtaagaatatttttgtttaaaaatttaaaaaattttcagagatattagaggaggaactcttcctggaatagcggtagcagcgaatctgccaccttaacacagaaataattgtaaaaactaagagtgctcacagagggtgtcagcatcacctcgtttataacaagggtgcatctatcttaaaaaaatctgtatcacaagaggcctatatgttaagttttaagctttaataagataaaagtcaccatagacaaaggtaatggacaagaaaagtatatttatacttacagaatatttagtgaattctcccatatcacgaaaaaaaggacaaacacctcaacggaatcatattggcaaaaaacaaacaagcaatttatagaagagggaatttaaatggccaagaaacatgaaaagctgatcaattttcccatcgtaaggaaaatacaaattaaaacaagacataactcttcattcatcacctttgcaaatcgtggctgtgtgcaggaagatggttcatctcatttgctactggtgaaatacattcattcagcctcctagaaagacaatttggcaggaccaagtaaataactggaccctttgcctcaataattacatttttaaggtttagagacaagataaatatttgtttagatgtaaaaacccaaaaagaaatatataatcattgttatgatagcttattggtaaatgtgaacaatttaaaaacaatctaaatgtccttcaattggagaataaataattatcatatatcaattctatggaatagcatgtataaaaagaatgaggcagatctatatgtattaaggttaaaagatctctaagttttccactattaaaataagtaaaaatgcaaaatgcagactagcacatgtaatataatttattataaatcaagaacataaattacgtatttacaaaaaatgcattagatatataaatgcatagaaaaatataagaaaagctgtgcccaagactcttcacaggactgggaagagaagctacaagaatggctgagtggcaaagatgactttttccttaatatacttctccactgttttaaattttatgaacaataatgtacagtgtatttcttttgtattaaaaaatttaaaagattaagtaatgttatttctcaactcactactagagaaaagttaggatttccttctcttttctggtcagaggtatcccccatcttgggacaggaaattgaggtaaaaatgaaaatatttagccgtttgtcaccctgggcctttttcttccctttccttcttttgatcaaggttgatggaataagaactcagaccctgagccagtcatgggaacagccggcagaggccccttgccaggacaggtgagaccacagcgtctgatgtttaaaagtaagccaggtgtttaccctggagtgtttattttctaaagcaccttttttgacatgacatatttgaaggtagaggaaggctgaggggtgaaagggttcacagatcatgaggaaatagttaatcccagccaccaacaactgctatgtttagagtgtcccggtcagctgagcagtaaatccaaaacaagaaagtcacgtgtgttatggcaagttgaactcacaccaacagctgtcctgctcctgtttaaaaaatctgatttcctcattacttgtctttcatttcattatataacatcgcatacctatgttcttgcaaagaaggattaaagtgaagccttaggcacaaactgaactaaaggcatgaaagctgcaatatagccagagataaaggttaaaggaagggagataaagactcacctggtgctcaggtcgccgcccccacctgccatcttcccaccctaggccctgcgtgggcctcagagcctggcctctgagcccctcagtcggcccagcctgcgtgcagtgtggctgcccaggccccaagcaggaagtcggccgacagactgactcagaaagggctccgcccaaatggggaaaagagaagtgaaagtatttaacctccttctgggctacggacactgtgtttctcctcctttttcactccaagggattctcagcttttctgaaatgtggcagagggttggaggagaggcctgacaagcagcaagacctgcaggaccagggaaggagggcccaggggacgagcagggccagctcccgggtgtccacttgtttgtgcaatacacagccaaaaaaaatgtccttgaaacaaaattgtccttagctgctctgccctctaagagggggcatagtttacatgggagttgggggggaaactccatgtttgccccttccccttgctgacatggcttggggtgggagttggagggttggagggaaagccagaaacctcaaatcttctctcaggcccatgggagagcatggactggactaaggtaggtcctgacattgggacccagggctggagagaaccaaaatgctcagcattataacctggggagagtgtgcttagccttcctggaaatcagccagaagtaagagagaactctccacacccctgggaccagaggctggagccagcatggtaagaaaggcaaacattttaaggggcaagggtttaaggaatcttgactatggggccgccttggaacagccaggggtgaagagacacctaagcttcggagaagtcactggaatcttgagagaacaaaagcttctcattggaggaggatggaggttggaacccagatgatctagacatggaagggcagggtggctcccgcgggaggttctatctctgcccagattttccatttagattctgattcatcattcctcagagaacaagaagcgaccgagaagactcgctttacatcagtataaagtcataggtaaagaaacagaagcaaagggcgcatgagaatggggccacaggacacaaccagggaccagaactccaggccggaccatggggcagagacagggaggcagctgggagcctgggggcgctggaatccagggcccaaggtgagcagagggtggaagctggtgaggattcaggggccagaggggatggcacttcagaacggtgttttccaaatggcattctactgaatccaacttcttccagctgtgaataaggatgcttgtccaggtacatttgaaaatgtgggggaaggggctttctaccctcactctacttctgctcttcttttccccatgagtgaatgaccaggcaccaggacattggtgaggacagctttgccggtgggcgaaggtcactgtttctatcaggcactgcacacctgtaggtctctctctctttctctcacctgtaggtctctctctctttctctcattcttcctaccccccatgactccccgactttatggggctgaagggctggtaagctgagcctcttttgggcacagctgtcctttgatcccagtctccatgaggcacattggtcccaagaagtcctggcatggaccacacagtatgctttggtgtggttcacgttctcccctctcgctgcctctgggcagcaggcaggctcaggccattgagtggcactgacataaacgtgccagcttttccctggatgtgcttaggggctactaagagcagcacctggaattccagaccaatgagccacaggctggcagggaattccttacgggttgaacttcacgggcagacatgcccatgctggggcacctcctggcagcagggaaggagatgttctcatcagatgaggttggagacagatgagcatgcaccatgctccgctggtatatggagaatctgtaggcctctgtgaagaaagcaaagtttctctgatccagaaaacaatgtcagacacactggggttgggaaagggacgggaccacattaagaagacatgtgagctaaaaatcctgctggactgtttagaaggaaataatggaactcctggggcattttccatggctgcaaggagcacaggcaatagggaatatttctgttgtc

SEQ ID NO: 3782 - DNA, 4001 bp, Homo sapiens
ccaaaaagggtagcactgcgaatcagcagggaaaaggataatttaatcaatcaacggtgaactcagaaaaattgataagaatcaaaacaaagacttcaaactgtagctcagacaaaaaacaatttgatctcagataaaacagggaatgttaaaaaaaaaaagaaaaaaagttcatccagattatgactaagcaaacgggaagtttggggtgacctgccctggccaagcctggctagaggagctgtaaagccaccacaggcacgtggaacacaagatcagacagaatcagtctggaaaaataactaagagacaacaaggagaatatcccaaagttcttaacagcacaggcaaacctaaataaagcaagactgtgaagactgaatgacaagaggttatggagcttgcaggcgtacagaaaccaattaagatccctcctcaaaaataaacactatcaatttttaaaaaattagaaatgacaagaaacaagaaacctactagaaggtaaataattgtcatggaggaaaagtttgagacaactattatgaacacaaagtgaaagactgaaaagatgaaaacggggcaaataaaagctgtgaaggctaaagtggctccaatgtaagaatatttttgtttaaaaatttaaaaaattttcagagatattagaggaggaactcttcctggaatagcggtagcagcgaatctgccaccttaacacagaaataattgtaaaaactaagagtgctcacagagggtgtcagcatcacctcgtttataacaagggtgcatctatcttaaaaaaatctgtatcacaagaggcctatatgttaagttttaagctttaataagataaaagtcaccatagacaaaggtaatggacaagaaaagtatatttatacttacagaatatttagtgaattctcccatatcacgaaaaaaaggacaaacacctcaacggaatcatattggcaaaaaacaaacaagcaatttatagaagagggaatttaaatggccaagaaacatgaaaagctgatcaattttcccatcgtaaggaaaatacaaattaaaacaagacataactcttcattcatcacctttgcaaatcgtggctgtgtgcaggaagatggttcatctcatttgctactggtgaaatacattcattcagcctcctagaaagacaatttggcaggaccaagtaaataactggaccctttgcctcaataattacatttttaaggtttagagacaagataaatatttgtttagatgtaaaaacccaaaaagaaatatataatcattgttatgatagcttattggtaaatgtgaacaatttaaaaacaatctaaatgtccttcaattggagaataaataattatcatatatcaattctatggaatagcatgtataaaaagaatgaggcagatctatatgtattaaggttaaaagatctctaagttttccactattaaaataagtaaaaatgcaaaatgcagactagcacatgtaatataatttattataaatcaagaacataaattacgtatttacaaaaaatgcattagatatataaatgcatagaaaaatataagaaaagctgtgcccaagactcttcacaggactgggaagagaagctacaagaatggctgagtggcaaagatgactttttccttaatatacttctccactgttttaaattttatgaacaataatgtacagtgtatttcttttgtattaaaaaatttaaaagattaagtaatgttatttctcaactcactactagagaaaagttaggatttccttctcttttctggtcagaggtatcccccatcttgggacaggaaattgaggtaaaaatgaaaatatttagccgtttgtcaccctgggcctttttcttccctttccttcttttgatcaaggttgatggaataagaactcagaccctgagccagtcatgggaacagccggcagaggccccttgccaggacaggtgagaccacagcgtctgatgtttaaaagtaagccaggtgtttaccctggagtgtttattttctaaagcaccttttttgacatgacatatttgaaggtagaggaaggctgaggggtgaaagggttcacagatcatgaggaaatagttaatcccagccaccaacaactgctatgtttagagtgtcccggtcagctgagcagtaaatccaaaacaagaaagtcacgtgtgttatggcaagttgaactcacaccaacagctgtcctgctcctgtttaaaaaatctgatttcctcattacttgtctttcatttcattatataacatcgcatacctatgttcttgcaaagaaggattaaagtgaagccttaggcacaaactgaactaaaggcatgaaagctgcaatatagccagagataaaggttaaaggaagggagataaagactcacctggtgctcaggtcgccgcccccacctgccatcttcccaccctaggccctgcgtgggcctcagagcctggcctctgagcccctcagtcggcccagcctgcgtgcagtgtggctgcccaggccccaagcaggaagtcggccgacagactgactcagaaagggctccgcccaaatggggaaaagagaagtgaaagtatttaacctccttctgggctacggacactgtgtttctcctcctttttcactccaagggattctcagcttttctgaaatgtggcagagggttggaggagaggcctgacaagcagcaagacctgcaggaccagggaaggagggcccaggggacgagcagggccagctcccgggtgtccacttgtttgtgcaatacacagccaaaaaaaatgtccttgaaacaaaattgtccttagctgctctgccctctaagagggggcatagtttacatgggagttgggggggaaactccatgtttgccccttccccttgctgacatggcttggggtgggagttggagggttggagggaaagccagaaacctcaaatcttctctcaggcccatgggagagcatggactggactaaggtaggtcctgacattgggacccagggctggagagaaccaaaatgctcagcattataacctggggagagtgtgcttagccttcctggaaatcagccagaagtaagagagaactctccacacccctgggaccagaggctggagccagcatggtaagaaaggcaaacattttaaggggcaagggtttaaggaatcttgactatggggccgccttggaacagccaggggtgaagagacacctaagcttcggagaagtcactggaatcttgagagaacaaaagcttctcattggaggaggatggaggttggaacccagatgatctagacatggaagggcagggtggctcccgcgggaggttctatctctgcccagattttccatttagattctgattcatcattcctcagagaacaagaagcgaccgagaagactcgctttacatcagtataaagtcataggtaaagaaacagaagcaaagggcgcatgagaatggggccacaggacacaaccagggaccagaactccaggccggaccatggggcagagacagggaggcagctgggagcctgggggcgctggaatccagggcccaaggtgagcagagggtggaagctggtgaggattcaggggccagaggggatggcacttcagaacggtgttttccaaatggcattctactgaatccaacttcttccagctgtgaataaggatgcttgtccaggtacatttgaaaatgtgggggaaggggctttctaccctcactctacttctgctcttcttttccccatgagtgaatgaccaggcaccaggacattggtgaggacagctttgccggtgggcgaaggtcactgtttctatcaggcactgcacacctgtaggtctctctctctttctctcacctgtaggtctctctctctttctctcattcttcctaccccccatgactccccgactttatggggctgaagggctggta

SEQ ID NO: 3783 - DNA, 4001 bp, Homo sapiens
gcaaattaaattacagcactggattgtgatcaagactctatacaattcatttccccaattccaggtgtcagattctagcatgcttagcaaaatgaagagaaatcttccaggtagaatgaaagcattgatttacctttggggattatgacctacttggcctaaatctggatgggggaacagagccaggaggcaggccggagccttctgactccactggtcacgtggcagtaaaggaagacattgggaaccagagatggtctgatggtcctacatatgcctggcccaggaatcccttacccaggagaggttctgtagtgagcatagggaaaaacaagatagtgggaaatagaactgaaatttcaggctatccttacctgggctaatgcatggtgttgcaaagtagggctttctagtagtagcagcagtacccctgaagtaccaatcttaccaccagtcagctgaggaacaccaatggccttgtgcttataagcaaaagaagctggcacattttcaaaaatgtccagttcattggtgtcctgggtctgcctactgcctaagggcagagagaagagagagaggggatgctggagcaggcggtatagtctgtaccaggccttgttggagccccatggagactgggaggagaggacagctgtgtctaacagaagcccagcatacttttccttcttgttttaaagagggagggagagggagggagagagagggagagggagggagagggagggagagagagggagagagagggagacagaggagagagaggacagagagagagagagagaggagagagagagagatactggaaaaggtgtcctcatcagtgttctagagtttgtctcaaccagattggtgtttgttcctttggtagaaagaaagcagaagtgtggaaggggtagaaatttcttgcactctgtattttgcaaacttatgtatgcaaatttccttgcatatgtgtaatgaaccagaaaaagtaggattcaggagcacatgttttggaaaaatactgctttgcctctggcttttcaatcctcactactgttctgtcactggccctggattctacccataccctggctctcatcagccccctgtctttgacccatttttctgcctggatttctagtcctgtggttatattttttatatttgccctttgcttccatttgtttatcactcgactttatgctgatatagtgtgtttttgtaaattgtttcaaatcctttacagaatgagggctgggtataaatgaaaaattgtgtgcaaacataaatgtaatacagctatcctcctgtatcatattgtccttgaaggtctagataatctcagctccaaaccctttccccatccagtgagaaggctgtcactctcctcaagatttcagtgaaatggttgaagctcatttttttcccagtcacccctggctgctgttgtaaagtgcccacatatttgagaaaacttagaattgcacctcatttctctgcccaacctcagcacttgcctttggctggaggagttgagagagttgtcttttacctctgtctgctttcatggagtgctaagagcatctcccccactttctaatgcatgctatttcagttctccctggccccatgtccaaacactgggcctaagccatccagcccaggctcactaaggtgcatggccagccctggagcctgactgaagatttgaaatgtctggtcttcacttgtccttctcagccacctcagcaaggggtggggacaaatacagagtttacttcctcctcatgatgccaccttacctcaaaacaactttgatctgcttgagttgaatgacttttccaccctctttccttggcaggaacaagtgaccctgtcttccgtggcctcgtggggctggctctgctcctcctcccttgactgagagacgtcatggagattgggtggagggaggactgtagagttggtgcacccacgtcagctagttaggcaatttcacttttcttttcctctttgactgagcaccgaggggcagttggcagcttcacctcagagctgcaggaaggaacggggcagtgaaaatcgaatcgggtgtgatcctaggccaagctcatggcccagcagggccagcaggggcagatggcaagtggagacagcaatctcaacttcaggtgggtcatcgtctcctttcccgtctgtccttcatctctggtagggttccctttcatacttgttatttaatgtctacccagcttcactctacaggtatacaatagaattcagttacaaataaataacgaggcaatcagattttttaaattgcagggattggctgttggagaaactcaaggatgccgtgactcacatcatcttcctattctcttacatctgcaaatggctggactggagctgtttgaacatcatgcctgttctgaggctttgtgtaggattggatgattccccgtgacctctgaaccctctcttctcccccaggcctcctttatccccactccaaaagacaactctgtctaaaaaggatctttttagaagaattaaaatccaaacgcctgtctgttgtcacactttccaggctgtgtagttggggaccggttctgctctgagcccatctatgtggctcttagccctagaatcacttcaggatctctgaatacttggtaggaggaagtgaaagcagatgagacccaacaaaaaaggcaagcaggtagagagtgagtgctgcttctgctttttttattcttctgttctggtattttttacatatctggtcagagaagcctggaaatcatctttaaaaaatgtaagacaatgagaccagtctgaccaacgtggagaaaccctgtctttactaaaaatacaaaattagctgggtgtcatggtgtatgcctgtaattccagctactcaggaggctgaggcaggataatcgcttgaaccagggaggcagaggttttggcgagccaagatcacaccattacactttagcctgggcaacaagagtgaaattccatctcaaaaaaaaaaaaaaaaaaagacaagtacatcaatacggtcatttcttcttatctgtggattctgtatccatggatctaaccaaccatgaatgcaaaatattttctaaaaattaaaaacataaataacaacaataaaaagtaatataaaaatttaaaatacagtataactatttgtatagcatttacattgtattaggtattataagtctagagatgatttaaaatatacaggaggatgtgcataggttatatgtaaatactacaccttttatatcagggacttgagcatccatggattttggtatccatggagggtcctggaaccaattccccctggataccaagggatgactgtacattcttgataaaaatgaaaatgtgtggaatgtaaaaatgtatggaaacttgtctaattgggactctgtgctaaggctacttctggcgctggtacagccccaagaaagcaaaagctattgctattatcagcagtagtggtggcaccagactggttttcagtgcccagtgccaccactcccagacaggcatccctgtcatctctctttcacttgctctctagtgaagggaagatgagccagcggagctcaaagtccagccagcccatggtcaccaagcaggaagaagacggcactgagaggtgacaatgggctaatgctaacctcaaagaatgagttaggaagtgttgcctctgctcttatttttggaggaaattggggaggatgatgtcatttcttccttaaatatctggtaggattagctagtgataccatctgggcctagtactttcctttctggagggctattaattatcgattcaaatttctttaatagatgtaggcctattcagacaacctatctcttgtgcaagttttggttagtttgcctcttaaagaatttgttcatttcatctgtgaccaaatttgtaggtgtagagtccatagttttccttt

SEQ ID NO: 3784 - DNA, 4001 bp, Homo sapiens
attcttgacaaattgtcaagaaaaggaaaagcactaacaaaacattcaatcaacttgacagtttttaacaaacagaacaaacatggattccacttttccaacttcattttgtgttgaacagaaaagtaaatcgtaattaacaactgtttacagggatttaatcccagtggcagattaagcaccctagtctctttctcctcattccccaatttttttaacttggcagaaaaaaatactcatgaaaagaataatccgcaatcgcataggaaaacaagaaaagatgccattgagagtctgtggtggtaaagaagtcttggaagatagagaacagataggagagaaatctactatccacaatatgcacaggggaaggagatagtgcaaagatcagtgcaaagtcagagaaaggcagagtaaacatatactaagaagaggaaggggtcttggaggctccttttagaacaattcattatacagcagcgctcagaacaggaagtctagagcttcctcattcttcatctgtcatgagtcccaaagatgaaagggaggcacagagaggtttagtaactcacccaaggtattcagtggcaaagcagagcttgtctgactctaaagccctgtttctttctatgcaagatactacatctcatatatgactgttcagatttttattatgtaaagagattttgcaaacgaataagcaaaagacaaacatccaactagaaaataaaaaagcaaaatacatgaacagagagtgataaaagaataagccaaatgtgcaatgaataatacgataagcatgttaactagctagtagaaagcataaagaaggccaggcatggtggctcatgcctgtaatcccagcactttgggaggttgaggtgggcggatcagctgaggtcaggagttcgagaccagcctggccaacatggtgaaaccctgtctctactaaaaatacaaaaattagctgggcgtggtggtgcacatctgtagtcccagttactcaggaggctgaggcaggagaatcgcttgaacctgggaggtggaggttgcagtgatctgagatggtgccattgcactccagcctgggtgacagagcgagactccgtctcagaaaacaacaacaacaaacaaccaaaaaaagtgtaaatgaagacaatttgataacatatttgtctatcaaattggccaagatagaaaataatagtaataatctcagacactgtgagtgggaaggtcaacaggtccaaatgttctgaaggctgatttagtaatcagtgtcaaatgtcctaaaacatgtgctcctttgaatttccacttctaataatttatttcaaggaaataatcatgtatttagagaaaatatataaaaagttcatgatacactagagacgaaattaaatgtactctcatttttttcttttccaccagcttcccaagtacctctagtcatttacacaatggataacagatgagccgcctattgcgggcactgaaggatcagagcttaggtgagggtagagggcaaatctcggctccattcacaataacaggctggactctggcgaaaaaaagaggtgtcagtgttccctccatgtgcccccttttaacagtctcctaataagtaccacatgtctgagctctgagagagcctcagagtttaaatagttgaactccaccctgcagctgctgccgcgaagttaactctaagagctgcagtcaccaagagcgaagaataaagcagcaaagacagaaactcacctggactttgagtttgtcgttcctgcccctttccaggggctgggacagggatcactcctcaagattgggagagttacagggagatgctagcaggcaaaacaggaagtctgtgctttgacaaacgcagtaaggggccgggcttccgagaaaagaaaagtgaaagttttcggagtttgccaagccggaagctgaaggcaggtcggtgcctgcagcctctctccacctcctcatgggcacttgtgaggctcccaggacgtcttggcagttggggtttgggggagggcgtgttgccagttgggatcagcccagagagggaggtatgggaggaggaggcataagggtacagccccagcggcaataggaactgggaactcagcgtccaaatgcttccctaaccacatctattttcccatgacttgtcctcattctgtacattttaggttgatgaaaatgttctcaaactggattgtggtgatgtttacataactgaatgaattcactggaatttatccagtgtgttatcaaactctaacaacacacaaaaaaacaaagagaatgtgccagaaatgcctagaacttgtcaggataagattattacaggaagaaattgaaatgaaagggaacctgcacatgaactggaattgtgcagaggcaggcagacctccaggcagaaaaatggctgagagctgggcaggtagttgggagccaggagtctgaggcagaactgggacctgctgattccagagagcagtaactcaagggctggcagggacaccccttctcatgccccttttaaagatccctaatgtacattgacatgtggggcctatgaaaaatcctaaactattggccaggcacagtggctcatgcctataatcccaggactttaggaggccaagatgggaggattgcttgagcctaggagtttgagaccagtctgggcaacatagtgagaccccatctctacaaaaaataaaaaaataaaaaattaactgagtgtggtggcatgcaccttgtagtcctagttagtgaggaggctgaggctggagacttgcttgagcccaggagttcaaggctgcggtgagctatgattgcaccactgcactatagaaatctgtgtaactttgggccaggctcggtggctcacgcctgtaatcccagcactttgggaggctgagatgggtggatcacaaggtcaggagtttgagaccatcctggccaacatggtgaaaccccatctctactaaaaatacaaaaattagccagatgtggtggcgggaacctgtaatcccagctacttgggaggctgaggcaggagaattgcttgaacccaggaggtggaggttgcagtgagccgagatcgcaccactgcactccagcctgggtgacagagcaagactccatctcgaaaaaaaaaaaaaaaaagaattctatgtaactttgattaaatcaataattctcaaatgtatttgacccacaagttcccctaccaggacatccacaaactcctcagataaaagatgggagacatggatctaaagtttaagaagctttgaaaccaaggctaactgcataagagcaagcccttctatgcaggcacaaacagcatatcccaccctagtatgtacagaatagcagacccggccttgcgggtaatggctgtgggtgaaacagaggcatggaagccacagccaggaaaaattcaatgctaacagctgaggagagggtgcattgatgcctcagcatgcagtaacatacagcgctgtgatgcaggggatggcggtggtaaaggaattaaggttattttatgcaaatgtcacatgtcacttacctgaagcccctccccatcacctggaaagccccttcatgggcatctgaggatcctggcagcaagaacttcttcctttagatctattcagagatacaccaggcaaatgcaaaacaaacaaacaaaagtaaagcaggagtgggaaaataaagtcaatgtcaaatcaggcaaaaattgttacatgaaaaaaagacagctgcgaatgaggatgaaagatgtttattctaagccatatatgcttggctgggcacagtggctcaggcctgtagcttagctagcactttgggaggctgaggcaggcagatcacttgaggccaggaattcaagaccagccttgccaacatggcaaaatcccgtctctactaaaaacacaaaaaaattagctgggcgtggtggcacatgcctgtaatcc

SEQ ID NO: 3785 - DNA, 4001 bp, Homo sapiens
aaaggaaaactatggactctacacctacaaatttggtcacagatgaaatgaacaaattctttaagaggcaaactaaccaaaacttgcacaagagataggttgtctgaataggcctacatctattaaagaaatttgaatcgataattaatagccctccagaaaggaaagtactaggcccagatggtatcactagctaatcctaccagatatttaaggaagaaatgacatcatcctccccaatttcctccaaaaataagagcagaggcaacacttcctaactcattctttgaggttagcattagcccattgtcacctctcagtgccgtcttcttcctgcttggtgaccatgggctggctggactttgagctccgctggctcatcttcccttcactagagagcaagtgaaagagagatgacagggatgcctgtctgggagtggtggcactgggcactgaaaaccagtctggtgccaccactactgctgataatagcaatagcttttgctttcttggggctgtaccagcgccagaagtagccttagcacagagtcccaattagacaagtttccatacatttttacattccacacattttcatttttatcaagaatgtacagtcatcccttggtatccagggggaattggttccaggaccctccatggataccaaaatccatggatgctcaagtccctgatataaaaggtgtagtatttacatataacctatgcacatcctcctgtatattttaaatcatctctagacttataatacctaatacaatgtaaatgctatacaaatagttatactgtattttaaatttttatattactttttattgttgttatttatgtttttaatttttagaaaatattttgcattcatggttggttagatccatggatacagaatccacagataagaagaaatgaccgtattgatgtacttgtctttttttttttttttttttgagatggaatttcactcttgttgcccaggctaaagtgtaatggtgtgatcttggctcgccaaaacctctgcctccctggttcaagcgattatcctgcctcagcctcctgagtagctggaattacaggcatacaccatgacacccagctaattttgtatttttagtaaagacagggtttctccacgttggtcagactggtctcattgtcttacattttttaaagatgatttccaggcttctctgaccagatatgtaaaaaataccagaacagaagaataaaaaaagcagaagcagcactcactctctacctgcttgccttttttgttgggtctcatctgctttcacttcctcctaccaagtattcagagatcctgaagtgattctagggctaagagccacatagatgggctcagagcagaaccggtccccaactacacagcctggaaagtgtgacaacagacaggcgtttggattttaattcttctaaaaagatcctttttagacagagttgtcttttggagtggggataaaggaggcctgggggagaagagagggttcagaggtcacggggaatcatccaatcctacacaaagcctcagaacaggcatgatgttcaaacagctccagtccagccatttgcagatgtaagagaataggaagatgatgtgagtcacggcatccttgagtttctccaacagccaatccctgcaatttaaaaaatctgattgcctcgttatttatttgtaactgaattctattgtatacctgtagagtgaagctgggtagacattaaataacaagtatgaaagggaaccctaccagagatgaaggacagacgggaaaggagacgatgacccacctgaagttgagattgctgtctccacttgccatctgcccctgctggccctgctgggccatgagcttggcctaggatcacacccgattcgattttcactgccccgttccttcctgcagctctgaggtgaagctgccaactgcccctcggtgctcagtcaaagaggaaaagaaaagtgaaattgcctaactagctgacgtgggtgcaccaactctacagtcctccctccacccaatctccatgacgtctctcagtcaagggaggaggagcagagccagccccacgaggccacggaagacagggtcacttgttcctgccaaggaaagagggtggaaaagtcattcaactcaagcagatcaaagttgttttgaggtaaggtggcatcatgaggaggaagtaaactctgtatttgtccccaccccttgctgaggtggctgagaaggacaagtgaagaccagacatttcaaatcttcagtcaggctccagggctggccatgcaccttagtgagcctgggctggatggcttaggcccagtgtttggacatggggccagggagaactgaaatagcatgcattagaaagtgggggagatgctcttagcactccatgaaagcagacagaggtaaaagacaactctctcaactcctccagccaaaggcaagtgctgaggttgggcagagaaatgaggtgcaattctaagttttctcaaatatgtgggcactttacaacagcagccaggggtgactgggaaaaaaatgagcttcaaccatttcactgaaatcttgaggagagtgacagccttctcactggatggggaaagggtttggagctgagattatctagaccttcaaggacaatatgatacaggaggatagctgtattacatttatgtttgcacacaatttttcatttatacccagccctcattctgtaaaggatttgaaacaatttacaaaaacacactatatcagcataaagtcgagtgataaacaaatggaagcaaagggcaaatataaaaaatataaccacaggactagaaatccaggcagaaaaatgggtcaaagacagggggctgatgagagccagggtatgggtagaatccagggccagtgacagaacagtagtgaggattgaaaagccagaggcaaagcagtatttttccaaaacatgtgctcctgaatcctactttttctggttcattacacatatgcaaggaaatttgcatacataagtttgcaaaatacagagtgcaagaaatttctaccccttccacacttctgctttctttctaccaaaggaacaaacaccaatctggttgagacaaactctagaacactgatgaggacaccttttccagtatctctctctctctcctctctctctctctctctgtcctctctctcctctgtctccctctctctccctctctctccctccctctccctccctctccctctctctccctccctctccctccctctttaaaacaagaaggaaaagtatgctgggcttctgttagacacagctgtcctctcctcccagtctccatggggctccaacaaggcctggtacagactataccgcctgctccagcatcccctctctctcttctctctgcccttaggcagtaggcagacccaggacaccaatgaactggacatttttgaaaatgtgccagcttcttttgcttataagcacaaggccattggtgttcctcagctgactggtggtaagattggtacttcaggggtactgctgctactactagaaagccctactttgcaacaccatgcattagcccaggtaaggatagcctgaaatttcagttctatttcccactatcttgtttttccctatgctcactacagaacctctcctgggtaagggattcctgggccaggcatatgtaggaccatcagaccatctctggttcccaatgtcttcctttactgccacgtgaccagtggagtcagaaggctccggcctgcctcctggctctgttcccccatccagatttaggccaagtaggtcataatccccaaaggtaaatcaatgctttcattctacctggaagatttctcttcattttgctaagcatgctagaatctgacacctggaattggggaaatgaattgtatagagtcttgatcacaatccagtgctgtaatttaatttgc

SEQ ID NO: 3786 - DNA, 4001 bp, Homo sapiens
agtgcctcagcaactctctgcatcactatttataatgagggtgcatctgtcttataaaatctatgtcgtaagatgtttatacatgaaattttaagctgttaataagataaaagtcaccatatacaaatgtaagggacaagaaaagtatatttatactttgcagaatatttagtgaactctcccatatcatgaaaaaaagacaaacacctcaactgaatcacattggcaaaaaataaacaaaaaaattatggaagaggaaatttcagtggccaagaaacatgaaaagctgttcagctttccacattatcaggaaaatacaaattaaaacaaattgtaattcttcatcacctttgcagactttggctgtgtgcaggaagatggttcatctcatttgctacttgtgaaacacctccgttcagccccctaaaaagacaatttggcaggatctataaacaagtaaataacagcaccctttgcttcaacaattccactttttaaggtttaggcacaagagaaatacttgcatatgtgcaaaaaaaagagaaatatataatcattattatagcttattgataaacgtgaacaatttaaaacaatctaaatgtccttcaattggagaatggttaaaaaattatgctatgtaaattctatggaatagtatatgtaaaaagagtgaggtagatctatatgcattaaggtgaaaagatctctaagatttccaccattaaaatgagtagaaatgcaaaatgcagaatagcacgcacaatgtaattccatttattacaaaacgagaacacaaattatatgtttacaaaaacatacttcatacacgtaaatgcatcgaaaaatatgagaaaagttatgccgaagactcttcacaagactgtgaaaggaagctacaaggcgaagtgagtggtgaagaagactttttcgtttatacacttctccactgtttgaaattttatgagtaagaatgtaatgtatttcttttgtattaaaaaatttaaaagattaaaatcgcttgaacccaggagacagaggttgcagtgagccgggattgtgccactgcactccagcctggttgacagagtgagaccctgtctcaaaaaaatgaaataaaataaaaagattacgtaatgttatttataaactcgttactagagaaaagataggatttccatctcttttctggtcagaggcatcccccatcttgggacaggaaattgaagtaaaaataaaaatatttagctttctgccatcctgggcctttttcttctttttccttctttggatcaaggtcaattgtatcagaactcacaccctgagtcagtcaaggaaatagccccaaagctgactgaggccccttgccaagacaggtgaaaccacagtttccaatgtttaaaagtaagccagctgtttaccctggagtgtctatttccaaactaccttctttgacatgacatatgtgaaggtagagagggcagagggatgtgaaagggttgggagatcatgaggaaatgtttgttgaaacacaaacatataatttgtgttcctcattctcatgaggaaataataactctcagtcacaaatgactgaaacgactgttcagagtgtccccgccagctgagcagtagtttcaaaacaagaaaagtcatctgtgttatggcaagctggactcacacaaacagctgtcctgctgcagttgtaaaaatctgatttccttattacattctcttttattccattatattacactacctacctatgttcttgcaaagcaggactaaactgaagctttagacagaaactgaactacaggcatgaaagctccaatactgccagagataaaggtgaaaggaagagagataaagactcacctggtgctcaggtcgctgcccccacctgccatcgtcccaccctaggccctgcctgggtgtcagagcctggcctatgagctccccagtcggcccagcctgcgtgcagtgtggctgccctgacccggagcaggaagtcggccgacagactgactcaccctcacagatttctgcccaaatggggaaaagaaaagtgaaagtatttatttaacttcctgctgggatacagacaccgtgtttctcctcctttttcactccaaggggttctcagcttttctgaaatgtggcagacggttggaggagaggcctgacaagcagcaagacctgcaggaccagggaaaggagggcccagaggacgagcagggctggcttccgggagtccacttgcttgtgcaatggacagcaaaaaaaaaaaaaatgtccttgaaccaaaatagtccttagctgctctgccctcttaagagggggcatagtttacatgggagttggggggaaaactccatgtttgccccttccccttgctgaaatggctgggggtgagagttggagggttggagggaaagccagaaacttcaaatcttctctcaggcccatgggagagcatggactggactaaggtaggtcctgacatggggacccagggctggagagaaccaaaatgctcagcattataacctggggagagtgttcttagccttcctggaaatcagccagaagtaagagagaactctccacacccctgggaccagaggctggagccagcatggtaagaaaggcaaacattttaaggggcaagggtttaaggaatcttgactatggggccaccttggaacagccagggatgaagagagcttcggagaagtcactggaatcttgagagaacaaaagcttctcattggaggaggatggaggttggaacccagatgatctagacatggaagggcagggtggctcccgcgggaggttctatctcttcccagattttccatttagattctgattcaacattcctcagagaacaagaagcgaccgagaagactcgctttacatcagtataaagtcataggtaaagaaatagaagcaaagggcgcatgagaatggggccacaggacacaaccagggaccagaactccaggctggaccatggggcagagacagggaggcagctgggagcctgggggcgctggaatccagggcccaaggtgagcagagggtggaagctggtgaggattcaggggccagaggggatggtgctccagagccatgttttccaaattacattctgctgaatccaactttttccagcccccacccccagccatctcagcaaggggaaggggcaaacatggagtcctcccccaactcccatgtaaactatgccccatcttagagggcagagcagctaaggacaattttggttcaaggactttttttttttttgctgtttattgcacaatagttggaagctgtgaatgcttgttcaggtacatttgaaaatacgagggtggggggtttctaccctgattctactggtgccctgctttccccaaaatgagttaataagcaggtgccaagacactggtgaggacagcttttccagtgggcgaggtcactgtttctatcaggtactgcacacctgtaggtctctctctctctttctcttgctcgctcccccatgactccccagttttatggaggcacagtggctggtaagctgagcatctgttgggcacagttgtcctctgatcccagtctccatggagcacagcagcactgacaaggcctggcgcggaccacaccagtcggctctggcgtctgcactcacccctctcactgctcttgggcagcaagcaggcccaggccactgagtggcactgacatatgtaccagcttttctctgggtgtgcttaggggctggaattccagaccaatgagctggctggaaatctgcaagtgttgacctttacaggtggacatgcccttgctagggcagctcctgacagcagggaaggagatgttcttgtcagacagggttggaaaaagctgagcacacaccacactctgcaaaagcaatgccagttaatggagaatctctaggcttctgtgggaaaagcaaagtttctttg

SEQ ID NO: 3787 - DNA, 4001 bp, Homo sapiens
tcacccatatttccttccttctcccctcccccatctgtaaactgatatctaaactttacaaattacagttacaagaaaagttttgttccatttgaaatacaaaaaagatcaggagaagcaatctgctttttaattttacttatgcagtagttttttaagatacagtcaatttgttttggcactttggaactagagggatacagttcataaaaaaatctaccaactctcagcgaagctgaaatgaggtgaacagaaggcgtaccaatccataaatgtatttaaaaataacaaagcctaatataattttacatttttacatgttaatctgcttatgaaaaaacaagacattaaaactattcacatcccctataacgaagcactaaaattacaaattatttaccagtaatagcttaacattggtttaacttaaaaaaaaaaaatacctggacatactaagcatttgttgtagactataccaaataccaaacttctgtcttcagtgactattgaaagtatcactccacaaatcaattcctatgatccaccacacacacacactcaaatgagggttttcattattttaataggtgaacaaatctacacaacagtgatgacccaaatgtaaaattcacaattaacagtctaaaaactgttcctatcctattggtattaacccctcatataacacaggcgagctcctccccttgcccagacactgaaaacactacagaaagaatcccaccatatcttacctgactagcagtcgtaataaaatgaaaacatacttttgccaaccaaattcagctataagtattgtactactagtatgcacgtaaatacaattccttacacatacttttctaacactgttatattcagtttcaaaatctaaagtactatctaagcaacttgctgatttcaaaggctgctaaatgtttcatttaccccccttacaaaaaaaaagtcactgcaaattttagtagtctgcaaaaactaaaattcaacgattttgaatggtcaactaaaaaagcagtcttcactcctgcatacaaaagggtaattcaaagaataaaccctcattttttttaataatgtatgatttaaagcagtaagatcctgtaacgtccaacagaaaatgctccaggttcaaaaataataaaaactaaagacattgcctctagttgatactatctatggccgataggctgtgcttgaaaattttgtagtgttaagcgaaggagttttcagcactgatatgaattgctcaaacatccattttggagtcctctacccccgccctctcagacttcattttgtgaagattttgcgcgaggtgctgcagtgacaatttcgagaaagcctgggctggcttcagatccaaaccgggatgcgaaagagcaggaaagggcgccctggagcccagcggcccgtgcgggtcgggggaagcgcgggcgccggggaggccttttgggcaggcgcgccacgggtccgggatggcgggcgcccggcctcggcgggggcgggccgcgcgcgggacttaccgctccggcggcggcgggggccccggctgcggcggccgcctcctcctcgtcgtcgcccggcgatggcggccctatcttgctgcaggtagcggccagcagagcgagcggtgacggctgagtgtcctacccccaatgggcgggttcagagagggagacagggggagggggtggcggttagggtcgggccgcctttcgcacaggaagtacgactcggtccccgccgactgcgcccgggcaagcgccagcccgcgctctcctcctcctcctcctcctcctcctggtcccgccgccagcccacgcctggcgtcccccgctccaagcaccccggctccccggtccgcgggcaggcgggcggcgggctgcgcgccgggcctccgccttccgcccggaacccacccccgggagggcacgctggggcccacactcacacgcgcacaaaaaggcggcaggcgggcgaggcggggcggcgcgggcggggtcggagcgttggcgcctcgggcgggcagctcccggggcggggggaggggagtggaggggaggggagagacgaggagggaggggtgaggcgaggagggaggggagaggcgaggggaggagaaagcggcgcgaggggggagccgggccggggttcagccgctcctcacctgggccgccgctgccgccgccaccgcaccgtttccgtgctgttgctgctgctgcagatactcgccgtggccgccgccgccgccaccgccgccgccgctatccacgtccaaggcagccatttcctcttgtttcacgggcttttcgggagctgcaggcacagcgcgggggggtgggggtggggaggaaggcgggtggcggagagggagggggcccgcgggccgaagcgaaattactcccaaagcccggacccaggccccttcccctcccccacccgccccccggcggcggcggcggcggcggctccctcctcccctcctgctgctgcccccgcccgccgctgcctgtaaccctcctcctcctcctctttccctcctcctcctcctccccgcgctgcccctgccccctctcctctcctcccctttcccttcgcgccgctcgctctcactcgcgctcgctcctctcgcaccgtcagtcactcacacacgcccgcccgcgcccgcacacagggggatgcgctcccggcggaccgggccgcccgccccggggcctggcggggagacggcgttgctggggcttcgggggtggacggtggctggcggggaggggagggaggcgcaggggagtgcagctttctgcctctcacagacactcggtcgcacacacggggccgagaccggcggcagcggccccgggctggctgtggtcggcggcagcggcggcggcggcagcagcaagggttgctctctcggctttacgtaccggtcatagtgtgtttagggcacctcaggcggggctccccgccgccttacacatggtgaggagcgaaggcggcggcggcgggagaggatgcgggaagcggcggcggacacggccggagcggtccggggatttttttttcctattttgattgactgtgcgggaaacacaaaaggtggagcctccagcccaaaaggggggaagagggtgacagcccgcccggaactcccgcccctcttcttggctctcattcgccgccgtgctctttgtcggctgtgctcattggtccaggcgcctgtccgtcggtctgccaggcggcgcgcttcctgtttgcccccgggtggaaggggagagacaatgagcggccgtggcagcgtaggttttcgagagcggctacggctcgccggttaccccgctgtgcccgcctccctcgccggctgccgctgccaggcccgaggcgcaggcctcctccaccttgcaggcgctcggagcaggcctagccaagctgtaggggagctgagctggggaggaaattcgtccccggtgactcctgctccactggacgcttcctccatcccggcagcagtcttggccggatctccccagggcctcgcgctcttggagccgccgcttccctgcgctgccaggaggccaccgctgctcagccccggggctgctgctgcggccgctgccgctactgagcaaaccagacccgccccacgagcccggggggagggagctggtattaggggagacaccccctccgaggctggaggaggatttttctctctcacatccagcttcctgattcagtcacagccatctcgctcccagcccccttagccccagttttccaaccggtctcccactttcacgtaccctgaaggcaggcatttaaagcaaaaaagaaatctcaagtcacctcacatacggaaggagagttttaattttggccagtggcaccaaaacgggcacttaaaagtatatttcattttacttgtggtatgtgtatgtattcagtggggcagaattctgtgttttaaaaaatcggtcacataa

SEQ ID NO: 3788 - DNA, 4001 bp, Homo sapiens
cgggtccgggatggcgggcgcccggcctcggcgggggcgggccgcgcgcgggacttaccgctccggcggcggcgggggccccggctgcggcggccgcctcctcctcgtcgtcgcccggcgatggcggccctatcttgctgcaggtagcggccagcagagcgagcggtgacggctgagtgtcctacccccaatgggcgggttcagagagggagacagggggagggggtggcggttagggtcgggccgcctttcgcacaggaagtacgactcggtccccgccgactgcgcccgggcaagcgccagcccgcgctctcctcctcctcctcctcctcctcctggtcccgccgccagcccacgcctggcgtcccccgctccaagcaccccggctccccggtccgcgggcaggcgggcggcgggctgcgcgccgggcctccgccttccgcccggaacccacccccgggagggcacgctggggcccacactcacacgcgcacaaaaaggcggcaggcgggcgaggcggggcggcgcgggcggggtcggagcgttggcgcctcgggcgggcagctcccggggcggggggaggggagtggaggggaggggagagacgaggagggaggggtgaggcgaggagggaggggagaggcgaggggaggagaaagcggcgcgaggggggagccgggccggggttcagccgctcctcacctgggccgccgctgccgccgccaccgcaccgtttccgtgctgttgctgctgctgcagatactcgccgtggccgccgccgccgccaccgccgccgccgctatccacgtccaaggcagccatttcctcttgtttcacgggcttttcgggagctgcaggcacagcgcgggggggtgggggtggggaggaaggcgggtggcggagagggagggggcccgcgggccgaagcgaaattactcccaaagcccggacccaggccccttcccctcccccacccgccccccggcggcggcggcggcggcggctccctcctcccctcctgctgctgcccccgcccgccgctgcctgtaaccctcctcctcctcctctttccctcctcctcctcctccccgcgctgcccctgccccctctcctctcctcccctttcccttcgcgccgctcgctctcactcgcgctcgctcctctcgcaccgtcagtcactcacacacgcccgcccgcgcccgcacacagggggatgcgctcccggcggaccgggccgcccgccccggggcctggcggggagacggcgttgctggggcttcgggggtggacggtggctggcggggaggggagggaggcgcaggggagtgcagctttctgcctctcacagacactcggtcgcacacacggggccgagaccggcggcagcggccccgggctggctgtggtcggcggcagcggcggcggcggcagcagcaagggttgctctctcggctttacgtaccggtcatagtgtgtttagggcacctcaggcggggctccccgccgccttacacatggtgaggagcgaaggcggcggcggcgggagaggatgcgggaagcggcggcggacacggccggagcggtccggggatttttttttcctattttgattgactgtgcgggaaacacaaaaggtggagcctccagcccaaaaggggggaagagggtgacagcccgcccggaactcccgcccctcttcttggctctcattcgccgccgtgctctttgtcggctgtgctcattggtccaggcgcctgtccgtcggtctgccaggcggcgcgcttcctgtttgcccccgggtggaaggggagagacaatgagcggccgtggcagcgtaggttttcgagagcggctacggctcgccggttaccccgctgtgcccgcctccctcgccggctgccgctgccaggcccgaggcgcaggcctcctccaccttgcaggcgctcggagcaggcctagccaagctgtaggggagctgagctggggaggaaattcgtccccggtgactcctgctccactggacgcttcctccatcccggcagcagtcttggccggatctccccagggcctcgcgctcttggagccgccgcttccctgcgctgccaggaggccaccgctgctcagccccggggctgctgctgcggccgctgccgctactgagcaaaccagacccgccccacgagcccggggggagggagctggtattaggggagacaccccctccgaggctggaggaggatttttctctctcacatccagcttcctgattcagtcacagccatctcgctcccagcccccttagccccagttttccaaccggtctcccactttcacgtaccctgaaggcaggcatttaaagcaaaaaagaaatctcaagtcacctcacatacggaaggagagttttaattttggccagtggcaccaaaacgggcacttaaaagtatatttcattttacttgtggtatgtgtatgtattcagtggggcagaattctgtgttttaaaaaatcggtcacataaccattttgctgcacaaacgtattattcccggcctctttatcctcttggtaccaagtcagatatctcctgaaataagcccatcaaccactgccaacgttttttaaagtcgtgaaccggtgaactaccttttttcccccattggaacatttttgttgtattttaaaatcttgtttctcttactggattaggttaacactccttccttctttggcatccttggtatcttgctgtcatcctgggggaaaatgctcaggttttaagtgtgtgttttgccaactaagagacatctctccctgttaccttcaagtatagttgccaagaaagaagttaaattcaagaggtggaaacactgtccacaatacctgttttttagaaatctggctcaagattcagttttcccattactgtgattattatattttgtgtgatatgtgatgtgctggtggatgaggttgtgaagtccaagcactttaaccagattttgtgtgtcctaacttaataggtaatccatttgtgagatactgagtttacatcccagttccaaagcacttaaccgcctatgctgacaggatcagaaacattgtatggttactttgctcttaattgtacaaagatcaaatttccagggaattaacctaaaaaccacaaacatgcggaaacgagactcaaaattctgagtccaagaatagggttcatctcttctaatagtccttgtagtctcatatttaagtggaaaagtcactttcaaagttgagtcgtataacctatgtactattttacaacaaaaacttttaaggaaataaaagtcacaaaataacctgatttggggtggggaaaatggaaaaagagatgggtgccttgaagagcgggacaggtgaaaataagtggactgggagggaggaagggaagtcactattatcactctgttcctacccggatctcttgggtggaaggtagctctttccctagaaaggatatttcaggcattttcagttttgttttgttttttttttcaggagtggggatatgttctacgctatcgccataccctttttgcaaagtgttagtccagccaccttgagagcaaagtacttggccacaggagttaaattcgtttcttcattgataccaattggcaaatgatatgagacatgaattgtcttttttctttcttttttggggggtggggacggcacgtccgcagaccattttgacaagcaaaaaaaacacttctgaaaaagaaaaaaatagcctagctgagcgtggtggctcacacctgtaatcccagcactttgggaggccaaggcaggcagatcacttgaggtcagaagttcgagaccagcctgattgccatggtgaaaccccatctctacttgaaatacaaaaattagccaggcttggtggcgcacacgtgtaatcccagctactcaggagactgagacgggagaatcacttgaacctgggaggtggaggttgcagtgag

SEQ ID NO: 3789 - DNA, 4001 bp, Homo sapiens
attctggtgagtcttgacgtgcttcgcgaggtggtcgctgcgcatgaagcgcttgccgcactcgggacaggcaaagcgcttctcgcccgtgtgagtccgcaggtgccgctgcagctcgtccgagcgcgtgaagctcttcccgcagaagagccagttgcacacgaagggtcgctcgcccgtgtgccagcgcaggtgcgccttcaggtgcgacgtcttcccgtacaccttgccgcagcccggcacgtggcacacgtgctgcttcttcttccccggctccgcctcgggggcgccgcccgccgcctggcagttgggacagcggcagcggcggcacctcctggccgtggccgccaggggggccttggtctgcagcagcgcggcgatctggctctggtactgcgcaaagtccgacgggcccaacaccaggcctctttgtagggcggcggcggccgcagcagcagcggccgcagaggcggggaagcggggcgcgtggggggccccggcacaggcgccggagaggccgcttcccggaaccccggaggcccccggcccggcgcccgcctgcgggatgctccaccacgggaggtcgtcgggggccgggttgggtgacaactggcggcaggtgggcggcgggggcggtggcggcggcggaggcagcaggttggagtagcctggcggcagcgcggcctgcgccgcgtagggcacgtaggcgggcgcgcagctggcgggcagagccgccatgctcgagggcagcatcttgaccggcgagaactcgtaggggtacgaggggtcggcggggggtgtaaggggaagctcgtgcgcagccccgaaggacggctgcaggtgcgtcttctgcggcgtcagccccaagctgggatgcgggggcggcagtgcgcctggcgagtgcgccggcatgtcggcggtccacgggtggaagagcctggagggtgagcccagcgcggggtcgtagggcacctgcaggaagtccgggggcgccgccgcgcccggctggccgatgcggctacaggtggcggccagcaatgccaggggcgagtgcttgcccaggtccggggaggcgctgggggtgcggtcctgcataggcggcgagggagggcggagaagagacaaaaggttagctccaagcgcggactccgggccagcccgccgcccccacgcccgctattataccgccgcccctcctccgtcccggccgtccctcccccgccaccgcaccccacgcacgcacccaccggccgagggaaacttttggtgcctgcgctacctgaacgtggggcccgcgagcgcttcttgctaaactacttggtgcactgagacgccatccagccttagaggaagcaggcgcgaagtgggagggggaggcatccgacgggcccctcccggctccgtggtcagtaagagtcgggaaacacccacaaccccgccggccggccgctctccctcccatcttttaagctctcttgtcctcactgccttcgcgctcctccctggcccgccccaggctgaaatcagcaggagggcccagcagggtgagctccggtcctgttctcggccagccgggcacctccgaacaatcccggatccacgcgtccctccagcaaaggccacaccggattaggtgtgaagttggcgtgggcacccctaggcctggctccagctgcacccatcggcggggttccctttgaggttcaaggtgcacggagtaccaggagagatccggacacggccctttccacctttctcccgccccctccgggctcggccctgacctggagaaaggcctgcagcgagtcgttccggaggacggccaccgcggccatggctacggcttgcaggcccctggctgcggagcgggacgccgccgccgaggcatggacacccgaaggcgaggacgaagggccgcccagcctgcctccctggcgcctgctctgagcgccggggccctccccgcccttgcccctcgccgcgccccgctcgctcgccccgcgcgcggtctgagcgcttcaggatcacctccaagaatttgataaggactttgctgggccgccagccagtcagagggaagatttatggctttgaagtttgccgctacccaatcatcaaagaatagcggctctttcagaagcgaaagcaaatcctttgaatccacaaagctcctatggtgtgtttgttggtctggataaaagaactgattattaggggggatgggaagggaggagataaaggcgggacaattaatgaagtaatcactatgtgggaaatgtatatacacaaataattggattttcctgatcaaagggggccttgccgcctggagacccgcgcttgggttgctcgagacactcttcccgccccccccaacatacacacacacacacacacacacacttgcaattaaagatttgcaccgacgcagcgcccaaagtgacaaagtgtctttgttatctctggaaaaatctgccttcggcttccaggcgccggactttgagacggcaaagagtgtaactctcccctgtatttacttgcacaccctgcaccctcgccgcacacgcacccgcccgcgcacacagcggacccaagcgagatccccggtggggcgtgggaccgacagcgcccggcccgccgcgtgtcccccgcccgccgcggtggggccgagggcagggctgtgacctggggcggggccgggcggccgcccagcgcggcgttgggtggcgcgcacgctccagggccgcccgcctgacgagcgaccggggctctcctgtgacgttcctgctggcgacctggaagttttcctcaggccacaacttttgcagagtggacctgggaaaaacacccgcgccgcgcataccctcaaagctgagctcggcaggacacccaaggcgacccgtcatgcccacccgaggggaagaagctgtgctgtcccgcccccttctccccaggccacccaggaggcccgggctgggctgtggggggccgaaagccccagcgctgctggtgatttctcgcccggagccccgccaagccagcgcgccctctcgcaagcctggcagaccaggagctactggaaaaaaggcgcggtcgaggaagcctggttgttgtggtcccacaaaccacaaatcatacgagagaggatcccgaaggcgggagaaaagtcagtacagacttgttcctgccacctttggaaagaaaaagttcctcaccaggcgcggggcgtgctttgctctgggcagggtcgcgcttgcaggggcttgggtgacccccatccctccctggcggctcacctcctgccgaggagggccacctgcctcctcctggcccagggcgcagggcgcgtcctgccccggcactgcggacgcggggatcgcctctcccgggcgcgcgggcggggaaggaggaagaggcgggcggggaaccgcggggtgctcaccgccctggggcattaggggtgcggaaccgcgttggaggcctcgcggccccggctcgcgagagcgcactgcggagtggccgccggagctcggcctactcctctcccccacccacctcccgtcggacacagtctccactctccaggccgccggccgtgggggagcccctaatcagttcgcgcccggcctctctgcccgtcttcctcacgggaaccgcactgcgaccgggacggacggggtgacctatctcccgatgcagcgtcagaggttagcctaactacaacggactcggaatctggactgtataaggatgccctccgcacttccatcaggggtcggggatgcgatgcctccgggcccaccttctcccacgcccagggcgcgcctgcggaatgagaatatcgtactcaagacgggtgggctgcttgcgacccaaatacaatgggtccctcgcacatcctgcactcgcacgcccccttctcccccaacgagttgtcccctctaaaacgcgagcggcgaccacacaacttggccgacccgatctggcttctgaagatgagg

SEQ ID NO: 3790 - DNA, 4001 bp, Homo sapiens
aatgtggcagctgtgcaggcccttgcgccgcaggctcgccccggccgggcccagccgctccgcctcctggcagttggggcagtcgcaggtggcgcggcccgagtagcggcgggcagagcgtgccgagctccccccggcggcggcagccgcggcgcccgatatcatggcgctggcggcggcggctgccacggcggcgctggagtccgaataggagggcaacaccggcttgaagccgtcctgggccagcaggtgctggctggtggagagcaggtgggaggcggcggcggcggaggagccgaggcccgtggagctgaaggcggagtgcgtgagcgagctgaagtcggggttgtaggtgcccagctgcgagtgcagcgaggcctggggggcgcccgagtgcagcgagctctggagccccccagcggggttctgcacttccagccacgagcccgggctgctgtgcacgtcccaccacgacgacgccgcgccgttggtcacctcgccggccgccagcgtcgaatggaagcccgacttgtaccaggactcgtacgggtgcgccatgcccacgcgcgggtacagcccgtcggctgccgtcgtgtgcaccttggaaatgaaggccgactggccacccgcctcctgcggggacaccccggccgctgccgccgcggcagccgccgagttggagaagaggccgccgtagtcgctgctgaaggcggacgacgtgggcgacgtggaggccaggcagaaggcgctgttggcggcgcccgagccgcccgccaggccgcccgagccacggcccccggtggccaccgcgaagcccgagaggctggagccgaggttgcagctggacgaggagcgcttccaggggtgaaagccgcctttggcgaaggcgctcgactctggcagcgtcgtcagcgggctcgtgttgccgatcttgttgcaggtcgccgccagcatggccaacggggtcgttccgaagcgcggctcttcctagagtgggtgggatgggggagggagcaagaaggaggagggcaagaggaagtgggggaagaaacaaagtgcacccgtgagcagcctcgtcccctgcggctgctcccggggggtcctggctccccgcctcgcgcctcctccccacgcgcccgcggaggagtcgccgcaccgggcgcggagcaggggcgatcacccgggcgaaggtccaggcgccggaaagttgcacttcgctgaggctataaatcaaagatgcctccgtgttccccgctgcaaccctgcctacaaccggacttgggttgtcgccgtaaaccggctcatctcccagaagaccccaagtcgcccttcggggtgaagcgcgaaggtaaacacagagaccagagacaacaaacaccgggtgagggcggaggcggccgaaacagctgccagggacgggcgaaacttgcagctctcccagggtggctacgacttgacttttcttttttaatagaaaacgtttggttttaaagtttacatacacacaaaaacagcgattatgaaaacaataatccgaggataagcggccagagacagatttcaaagtcatgggcgaattggggagccgcggaaatgtaaatgtttattagcgtgactagatggactgcaaaacgattaagactgttttctggaaacaccattgtcgcataattgcaacaaaatccccaaagcaatgcgggggatggggtataaatcacgaggggaagaaaagaaacctctagcttttttttgaaaccaaatgaaaaaggacttgattaagaaggccttttcttgcaaaggcatctttctgggttccaaaaacttggggaaaaatcagtcccagaaatgtggaaagtgctaatagaagctgaagctgcagtctagcagcaacagtttctccggagccgcagaccccagaagccataacgaaaaattactccggttaaaacaagcaaatgcgttgccgcgcttgcgacttaccccgagtatagacgtggccatagcaggtctctggctgcgcagcgaggctgggagcggggctgagcctggcggctgctcggaaaaactgcttgggtcccgcgcggctcccgcgtccccgcgctcgtgccgagcggactccaggctcccgccggctaaactcagcctaagtgcgaggagcacccgctttgaagtgccgctggctgcgcctctcgcccaatgagggcgcaggcagagcagaccggagctgccccgcagccaatcagacgctccgaggggcccgagcccgggctcccggcgcgtgccagtcaagtcagctagctagggccgcgggggtgggggggagtagtgggggatacttgcggggggggggcgagggcgggctggggactgaagaaattacagtgcaattaaaaatttacactcacgcaccaagccaggtttaagtaccaatgaaaccgagccacaagcacccccccacacacaaaccaccccgagatgttgcaagttagggctgacagtcctactcgactccccacttgtaggaaaggaggcaggaggggaggagacacccagacacagcccgcaccagcagggcccaagtggagacggaaatgtgagccctcactttgtgtgtccaggcttttgcctacagaacacaacttcagcttgtatctatcattcttgcttgtgatttttatcattttcgtgtgtcttctacccaattccttattccactagattcaatttcactctcacagttatactggggagggggcgcgaagggacagctcctccgagaggagcgaaataggcctctctgtacagatctacatccacagatttgttgggagggcctggagcctgctgcatcccgccatttccccccagcggtgtaagtgacttcctaattgtcgctctggcctctgacccggggggtaatacaagtgccactcacgctagaggcttctggtggtaattgagggcaccctttgtacggtttcgccagcgcttagataccaggttaacccagttgtcaaatatgactaaacagtgggatgtgctgattatctgccgggttttgctgtgggctggcatgggggtgggaggcatcagcccatacaacacgctgcacgaagccgcttattttctcactgtaacaactttggaaacagagaccggcgcgagcggcgtccgcccccacctccacctccgctgaagctgcagcttgctcggctgtttgtttaacccggtgaagatttgcatgtcgcgtttcatcctggagtggagttttcttgtcccagctccaacccactcccattccagaccaccagggcctagaggctcgtccgtagggcaagtgcgctgttttaagaggtaggctccccattagtgccctgctttcacggacgcgcccgagaaatctctccaggactttcacccgggagggcggaggaccaggccacacgtgggcgcttccacattttgcaggctggaagcatcctgaagtcctccctggaccttgtcagtgtgaaaagaggcgtcctcaagcagaccagggtgcgtcttcgagtcccccagcaaccgctgacctgcttgtttttctctttctgggccccgctttctctttcttctccagggtagccagaagctgtttttgaaccagaaataccagcgccctcgggcagacctgggcactggttttaatatagcacactccccactaaacccacaccctgcttcttaggaaaaaaaaaaaattaaactaccaaccccaaaccctcgggtgcaaacgacgagttgtcgcggagccggtgcaagtgacaaggatgtggaactgtgcctcccgtgttttctctcctcttttgcaagatctcttgacccaaaagtacgaccagagtggcgctgctctcggccctgtgatggagcctgggtgcgtcttggcgcactccgtgggtggggagggctatgtgggtcgctttcttggattcatcttaaaatactttggctcagaatgggttttt

SEQ ID NO: 3791 - DNA, 4001 bp, Homo sapiens
cctcttccctcagcatggaatatagcaaaataaactggttaaatgtttaactgtgtatcccctgactaccatttggttaaaatacaaaatagcagtcagtcaaccaaagaaagaagaaaagcaaatgggttggataattcacacaacggttagtaaaatcctaaaaagttacagttgcttatatgtgttaaagttcaaataagtgtgattatttgaaaaagtctttgtaagacaggtttgcaaactgctacatcttggcaggtgtgactcagtgatctccctgcacattaagtaaacctgattttcattgctgaaagttgtgttatgttagactcctaccatttatttcacaaagatgtttgcaaaaagttacctcattgtgtcaatctcatgttaacaattaaactatgtgttcacggaaataattttaatgcaaacaaaattacaagatgcctggttaccattcagtagcaagggcactggatatagataagcttaggaagaattatgaaaatcgttgttaaagaggaatatcactggaaaagactgcctgttacatctacgaaaacagtataaaacctcatttatgacactaaagcacccatatatttctttcaaattcatttcaagcgattcaaatttctattcctgtaaaagtcgtttttgcacccaataaaatactacatattttctttaatctttcagctaaattcttcaaagctctctgtagtgtggatgtgtactgagcctgagtcaggacaggttaatcggcttgtcaaagctcacgaaatgaatcattgctggatttctgaaatcttgaattaaacctggagaggattacagttggacaaacaaataagatttggcagattttggagtttccttggtatctttaagaactgaacagataatcatctctttcttacctccctgaataaaggagttacatgtctttttctcatgaaccctccccgtctccctagtaggaattaatctatataactagaggaaagaagttctaaagccttacacaagaaatagtggacctaattatccacacattgttattcaatttttctggtacttccgataaaaatcgctaatcaccatctgctttattcctaatatctctgagctgtgtagctcaccagatcattatttatttgctcaagaaaaaaaagcaactatactattagtatttattattaagtagtcaaacttggaactactcaggaagataatgctatcaaaactaagcatttaagcattaactggaccatcgaacaggatcgtgggttgggtattctgagcttcagctccttaaagtccaatggcagaggtctttccctagtctcctaacgttcctccgttgaatttattgggacggctttctgaaagattgagggcttatttaggaaacccattatttgaaaggagggttgaagcaatttgttgtgctgtcttaacataaaaagcaaccctccatccaaaatgtactgagtggttactaagtatgaggccttggaaggtctcccaactcttctaacaggtacaggacaccctgggctactaagggcgagaaattcagtgagtggctctcaggaagactgtggtggcaaaaacagcaccttgaagtccaacagaggctcctccggagtggccccaaggctcaaaaggcgccgccagtgggaggccctcgccttcgtcccaacacccattacccgccagcgcagcgggccgcgcctccacgggaaggatacgttccaggtagtaggcgccctcagccgccaccgcgtccgccgtgtccctcgcgtccccggctgccgtcaaacccatgcccaacgcctcttccaggaccctcacggcggagctgggcatccctcgctgagcagccatctctggcgcttcgggcccccacccccagcaggcccacagccgtccctaagggcaacagcgaagacgctacccaacggcccccgggagctctcgcgagattccggcatctctcaccccgccccacggaccagccccgggcacgtaagggttaccgggagtccagggagctgtcgccctcccgcgcctcccagttaccgtggcaacgatgttgcctagttaacgcgagagctcgggcgcagctctgggagcggacaagatacagtaaacaattggcttgcattgcaccttcctacccaagcagcttggttttctttcgctttgaccctgtaatttctttcccacttcgttgtcgtctctgaattacctttctcttgattcttgcccattagcatcctccaatttcagatgtttgtagatccccaagtgttcccagggaaaactactagaaaaggtgagttctcaacacctggaattttttaaaaaatgaaaaaataaagttctagaaatcataatagaaagactgacccaggggagctaccagacgctcctcagatgcttagcaatgaagaactatggtgttcagctttgtcaattcctttcttgtgatctttaatgcatttagctggacatctgttttgagtttggttccatatactaagacttggaatagtatttgtagcattgattctcgccaaggtaaaaacagttgcataaaaattatgagctacaaatttggtcctgacaaatgtatgcagttgacacttgccccatcatgtatagtcttattgctgagaggatcttcctcaggttatatcgcgtatgtatcagaagcaaattcaaggcccttttctttgcaaatatttttttttcccttaacttttattttaggttcaggggtacaagtgcaggtaagctcatgtcgcaggggtttggtatataacttatttcgtcacccaggtactaagtgtagtacccaatagttattttttctgatcttctccctcctcccactctcctcctcaagtaggccccagtgtctgttgttccttctttgtgtccatttgttctcattatttagctcccacttacaactaagaacatgcagtatttggttttctgttcctgcattagtttgctaaggataatggcctccagctgcattcatgtccctgagaggacatgatctcattcttctgtggctgcatagtattccatggtatatgtgtaccacattttctttatccagtccgttgatgggcatttaggttgaatccatgtctttatcatgaatatcaatgaacacgcatgtacatgtgtttttatggtagaacaatttctgtttctttgggtatatacccagtaatgggattgctagggcaaatggtattatttttcattctacatttcttggtgaaaactggaagccagtgatcctataaaagctcccatttattaccaaaaggtagcagtaacttcctaaggaggtgtttgagagtacgtgtgtcagagccagagagacagctttcagagcctgcttccatcacttactagctatgacacattgggcaaactactacttaatgcctctaggccccagtttcatcatttgtagaacaaagacaacaatattacctacctcaaagtgctgttgcaaggggtaaagcaacaaaaagcattaagaacttactgggaacatagaagacactaagaaatgttagctgttatttctattaaatgtgtttgatattgttttattttttagaataatcaagggtcacagatataatagtcgggtaattcattcctggtacctattcttttactaccctactctttgtccttgacttctcacatcagacatttcctgagtactcattaaatgcaaggaacaattacaggaggctgaaaatacagaagaattctgacattggagaatccactgcttttacagaaagctttctctttatttcagaagaaggcattaccttatctctcaaggttgtttcctataaatccagccttaacaaatgacctgggtaaggagtggtcaaggccttacatttttggcatatccagcaagacatgtaggaacacaaaagacatga

SEQ ID NO: 3792 - DNA, 4001 bp, Homo sapiens
taaaaggggagaattgtaaaagttagacttctcctaatttcacttattttccataaaagaaatttcattattagcacaggtttggaataacctcctttatcttttgggcctcattttcttcatctctaaaatgctgataccaataataccttcatctcacaaagttattgtgaggattaaataacacttttcatggtctgggatggttgctattttttttaaaaagaaaaaagataacacatgcaaagctaatagcacaatgcctggcacatataataaaaaatgttagcttaaggccaggcgcggtggctcatgcctgtattaccagcactttgggaggccgaggcgacccgatcacgaggtcaggagatggagaccatcctggccaacatggtgaaatccctactctactaaaaatacaaaaattagccaggcgtggtggtgcgtgcctgtaatcccagctactcgggaggctgaggcaggagaatcgctggaaccagggagtcggaggttgcagtgagccgagactgcaccattgcactccagcttgggcgacagggcgagattccgtctcaaaaaaaaaaaaaagttagcttaaaagaaacccgaaagatgtagtatccttgctttcattcagaaacatacatagttgttttaggttttactgtaaagtggtatgtttaagtttacgcaatccattcatcaaacatttcaacttggaaattaaaggctactttggaatactgttttaattaaaatcaaagcaacagggggaaaagttttatgctaaatataacttcattgaaaaagtattcaggaatcgttgtactgataaaatgattatcttgattaaaatgatgcaaattcaactgcagtcatatgcagctatttctttcaaaattgtcaccatttgttctttttttctgacactacaatactctgctttcattaaaagccagtaaggcggcactgcttcttcaatatcaaaaccttttggaaaccttggttcagaggaagctgcacactcttcacagtgctagaaaggatcagtgtggtcactctaggacaaatgtcactgtcatcaacacgtctgggtgtctcatagtgacctgggtcatgcagaagtgtgggggaaggctggtgtctgaaacaaagtcgacagctacagtgccctgaaaggggagaggttttaagaatactagaagatgaggctccgacctacgggaaagcagtctcccggggcatatcaattccgggggtgcaccgtcccctcccgcagaaaagggacgcaggtgttgccctcccccggcgaccccaccgccttcttcccggcgccgccgccccctcccccagccccctagttacctttctcatcctcatcgatgcgcagggcaatggagatgtactcgaaggcctgtttgtggaagactcggacgcgctcggcctcgccgcccggcaccggcgccggggccgaggccgaggcaggtgctggcgcggccccggagctcctcttggctgccatgagggcgcgggagaagcgctggcagagccacacgaagaggagccccaggtggaaggcgaccaaacgcagcagcgcgaagcctacaaacagcgggtaggagaaatagtacaggttccgcttatgcggcgactcgggcggaggggccggcccggcggcgggaggggcgggggccaggcaagggggcggaggcctgggaggcaccgggttgctggcgccgccggagcctttcttcttccctcgtccacccggagaattcattcacagctctcactgccgccgccgccataacccgcctcccgcagaccgacgggaaccaagcgacggcggcagccactgctacggcgggggccacagacccccgtgtgcccgccggtctcaggagctccgcactgccgcacgctgcccgccggccccgcccctttctccttcctcggccaggagcacaaccccttctcctcctgcagtcggtggctcgggcccctcccttcctgtcgctgtcctctccgccgcctggtggctcccagcggcggccgcgcacgcgcacgtcttcccgtgtttttctccggcgcgcgcgcgcacggcgcgtctttgttgaccggggcccctgtacgcgtgtgcggcccccgcctctcggctttcccactcaactacagttcccaatgtgcagttcggctcacgtcggcagccctggagagctcctgccaggaagccttcgtaatcgatccacggaagggggaattgcggcttggggtcgctctgctggttcgctaggctcctctctcagtgtcgtcgttttcttagatttctttcatctttttctgccaggcgacctaagtcttctccgaaggataattggcccatctcagaagcaatggatatcaatctgggaattaaattagccgggcgtgggggcgcgcgcctgtagtcccagctggttggaaggctaaggccggagaatcgcttgaactcgggaggcagaggctgcaagtgagctgagatcgcgccactgcactccagcctgggcgacagagcgagactccgtctccagaaaaaataaaataaaaatttaaaatctgggaattatttgagaggaaagcaattgtgaagataagaaacttcaggtcactgcaaacaacagcaacaaaaatgttagctcagtgtgatgagatcaactaacccaggggtttaactaaattagtgcatatttagatgtctaatatgaaagataatttatttgaataagggaaatcttaggttttgcatagttaccatcccatagtttactgaagaatctacactttttttttaatctactcagcatcccttcctttgggaaactacctgcttgtctctgctccctgtattctaatgagctgcaagcacagaacccagaccgcaaaggcggaagcaaacactaggtcagtcagattctcctgggacctggaatcttggctggagacccaccgaatagaaagtaactggaaacgagtgctcttaagagcgggtttatcaatgcatcacattgagctcccccagagctgctgggttcctgactggtcacttggttatgtaatctatccaatacactaatcagtctgtttctctgtttctctcttcctctctcctttcccccttccttcctttcgtcttttcctctctctccctctctctctatctccacgtcttttttctcttctctttctctttttacttgagttagccataattatttcttgtttcctaaaactaaggaagccaaactgataaaaagactccgttatttacaatgtgaggtttccaaatgccccatgagagcttccagcttccaagaatctccacattctgccacagctttatttttttattttttggacagggtttcactccattgcccaggctggagtgcagtggcgcaaacaacatgactcactgcaacctccacctccctggctcaggtgatccttccacctcagcctcccgagtagctgggatcacaggcacacgccactgggcccgactaatttttgtattctttatagagccagggtttcaccatgttgcccaggctggtctccaactcctgggctcaagcaatccgcctgcctcagccttccaaagtgttgggattacaggcatgagccaccccatcgcgcccccagctaatttttttacttttttgttgagacagggtcttgctatgtttcccaggttggtcttgaattcctgggctcaagcaacctgcccgcctcggcctcccaaagtgctgggattacaggcatgagccacagcaccagccaattttacttaattattccccgccagtactgccctacaaatgtcacaggctattgcaaaaatgacctactccctgtttccctcttattgctcccccttctctgtgcttatgctagaccctcattctgaaatgccctctttcggccgggtgtggtggctcacgcctgtaatcccagaactttgg

SEQ ID NO: 3793 - DNA, 4001 bp, Homo sapiens
atggcagatccaggagatgctcggacagagatgttcttcctcttgtggagactcctaggcctcttggaatggaaaggtcagtgctgtggtttaaagtgagggttctggagtcagaatagagtgggtttcccttctcagggctaccagcgtctgctcaggagcaacctgtttgactcctatgagcctcagtttccccatctataaaatggagataatatggaagaacttttataggattatcacgtgtgaaaattaagacacctgatctgaatgctaggtacacagtaaatgcttagtgataatgttagtttgctatcaccattattgttagtagtataaaccagcccacctcctgaactccacttgaattccctctacacaatccaatgcttatacagacactgtttggctcccaagaagacagggaaccacttttcctgacagccattccattttcagacagagctaattgttgggaagttttttatgttgagccgaaggctttctgtcactaatgtcttccatgggtaagattgctaatttagcaaataaaaatataggatgcccatgcaatactggggacacacatactaaaaatattatttgttgtttactaaaattaaaatttaactgagagtcttgtattttgtctggctatcctatccatgggcctgtatttgtctgttttcacactgctgataaagacatatctgagactaggcaatttacaaaagaaagaggtttgtggaacttacagttccacgtggctggggaggcctcacaatcatggtggaaggtgaaaggcacatctcacatggcggcagacaagagaagagagtttgtgcagggaaactcccttttttaaaaccattagatctcatgaaacttattcactatcacgagaacaccacggaaaagaccctcccccgtgattcaatcacttcccactgggtccttcctacaacacctgggaattcaagaagagatttgggtggggacacagccaaaccacatcagacccttagatctctgaggacaataaggaacaagtctattcacatcttccacttgacagacagacatcctccaattccttcaattgactgtcatacactaaatggtctccctgatccttctcatcctccatcaacccagactatcttccttggactagtttgtcaggcatcttttacagcccaaaaggatagcttgatgaggacagaataaagcagtatcatcacctcccttattctaaaccatatacttctataaatgcatccttggtttttattttttagcagttgcatggcactgctgattcctagtgagcaagtattactatggaaccaagttaaatgtttatatgtatgtgtggctgtcttcagtgagactcaggatgatgagaaatgacaaaacccaggaatcctggtctcttgggtagaaacaaaaacaaaaaccttcccactctacagcacagctccaggatacacgttaaccatgcatcactatcctacaagaaccagcctttgggatgacccagaactccatcagcaggaaggctggaactgctgaagctagaagacagcccacctgctttcctggattgaggggctgccttcacgttagcatctggagataaaaggcagcaagaggagcggcggatttcgggtgctggaagggcttggaatgctggctgccgggaggtggtttcaaggctggaatgctgtggtgtggattcagggctaggctgctgtggtgtggattcaggactaggctgctgtggtgtggattcagggctaggctgctgagaggtggaattggagctagcatgctgggaggtggagtctcggtggcgtctggcctctgaccttttcttcttgaccttcttcatggtagatcctcccaacctaaacgtggacctacatggagctgcgtaatctcccggctccctcctggaggggccgtttgccctctgccctaggagcctggcttgggcctccagctggacccaggccccacagagaacagtgacccacacctcctgtgaggtcataaaagccagggtggctcctatggcagggcttcaagggacagtcttctctgcagacaccagcctggtgtcctccttcatcccaggctgccaggctaggcaggggacagcggctgccctggtcctcacagccctggctacggggctggtgacagccagatcctcatgcttctgcgacctgagcgctgccttcagacacctctctgctggcgtgttcctgggtccatgtgagctacctgttttgctctaagataccctggatgtgacgctcagctctgtcactggcttccacataccccctactcctacacctcaaaaatccatgttccccacgcattcatcttcaggtcagcttcctgaagatttggagcttcttcgaaggctttaccatggcccagagcctgctaccatctcagagtagcttaccccttcccccaaagcctgccctcccgcactgtgggaggggagtttgggggttgacttgacttttataagaacctttgcatttggcagataattttccctgagaacataacagctgttcagaaaactaacatttgtctcaaactcatggcaatggcaaccacagactatctcccaaaccccaattggttgggttaaacaggtgactgaatctttctctagattaattaatttaatgtgctcattaaatgtgatttttgttttaggatggaagaaggaaaagtatttttaaaagacaatctgaagctcatactgtgactgcaacataaaatgtgttcacctgaggagactgctttcatcgccagtgtgtcacaggtgggtgagtgtgggactggcaagcgcaggagctcctgccccagcggaaggtttagagcagacctatgcagataaaaagggcttcggtcacgcctgtaatcccagcactttgggaggctgaggcgggcagatcacgaggtcaggagattgagaccatcctggctgacatggtgaaaccccgtctctactaaaaatacaaaaaattagccgggcgtggtggtgggtgcctgtagtcccagctactcggcaggagaatggcgtgaaccttggaggtggagctttcagtgagccgagatcgtgccactgcactccagcctgggcgacagagcgagactctgtcttaaaaaaaaatggggggctttgggccacacaaagccagacccaacatgaactctgaaatgacaggacatagtttagggcttctagagcctaaaaataccttaatgatgacctttcctcagaacactgaggtttagcgaaattaagttactttcccagggtcacacagctggctgggggcatcggaaggactaaattccagtttggggctcattattttcatgatcccagaaaacaatagggagtcagataattatacaggctttgaaataatgaattaaaaagtcccccagtggcctggtgcggtggctcacgcctataatcccagcactttgggaggctgaggcgggcagatcatgaggtcaagagattgagaccatcctggccaaccaacatggtgaaaacctgtctctactaaaaatacaaaaattagctgggcatggtggtgcacgcctgtagtcccaggtactcaggaggctgaggcaggagaatcacttgaacctgtgaggcggaggttgtggtgagccgagattgtgccactgcactccagcctgacgacagagtgagactcgtctcaaaaaaaaaaaaaaggtccctgagcgagaagattgaagaaaacaaaggcaggaaggatcagaagtgaaggcaagctcagctcaagagtattgggttgtgtttggttgaccttggcctaaggaggctctgggagcaagtgaatctgtatgaagctggtaatttcctgaagccaagagcaatggaacccttgaggggactccatttagaatcagagagactggaaaccgaggccgggaac

SEQ ID NO: 3794 - DNA, 4001 bp, Homo sapiens
tatttgaagtcttttttttttttcagagtgaagagatttctgacttcctgtcctcttccctgctatattacatacatctgcttaaactctggaaaacagtaccagtcaaagtggtgctgaaaccttcctttaagacaaactaaaacgatgttaaaaaggttacacgaccttactatttcaagtactggtataaaaccactttctctgcacaggttctaaaatttcacagtcgtttgtcttaaagtctgtcggcttgtgagggggctggtacatattttaatatttaaatttcaaaaaataagcaatgagactgtgtttgaagttcaagggttttcactagttctcaagctacaaaccctgtaatatagccaaaagaaaacgtacagaaagaatctttcacgaaaagtgtcaggtctccaaaaccccgacatctgctaaaaccaggattgcgggggggatgagaagctcgtgaagttcaaaaacacaccaaccccgcgggaacacgaaacctccactcgcgaagacgcgacgcttccgccgcatccccgcgcaggtgaagactcggcccttcagccccgcgtgtgcggcagcatgatattcagagtgcgccggcgtccagcgcgagcgcatcctacgacaaccccgtctcccgctggggtccgcagcccgcggactccggggtccccccgcccaaatgcggcggcgcgaccgcttcgtcccgcggccagggcgctccgcgtctgctccggccaccccagcccacccgcgcagcgcggacgccaacgcatcccactcccgctgggcgccaggggcgcggggttcagtggggccgcggcccccgcacccggctgggatccgagggcggggtggtcgcggctgacgtgggctttgcggctccgggccagagagcagcctgggggacggtgggtctctttccggcttgggagggaacgggggcgcccgcgcgggaggacggcaggcgagggacggcggccgcgggcgattcagatccggggcgggcgggtacacgtcggagcgcggcggccacacgctcgcccggggagcgccactgtgcgtcccagccggcgcctcctcccgcttgcccgcgccggctggagaaaggaaggacggcgaccttcgcgtccggtccgcgccaccagcccgcctcggcgccgagcgcgggccacacccagcgctccgggaggcggcggaggctgggcggcccgggctgcggaatgctcggcccagccgagtctccgtcccggccgcgcaggcccctccgcgtccgcccgcgccctgcatccccagccggcccggcgtggagggggtcctgggcttacctctgtgtcgagcgccggctcctccgtcccgggccggagccggggcccgggggcgcggtcgccaggggaggcgccgcggcggtggcggcccctgcggctcggagggcgggccgagcgggagccgctgcctgggccgcgcgccgtccggagctcgccccgcgctgccggcgcttgcagcggagggcgcagccagctcggcccccggactggattccttcactgacacaactccggctcggccgccccacgcagggacactcccgcccctcgcaggctgcccccgcccgccgacccgcccgccttcccctcggtgtcactcaccaggagcacacaccccagccggcgcccctcgctcccgctcgcaaacacagcgctgctcacgcctctctcgggttttgtatccgctcacacgcacgttctgacacagatctcgtccctccacacgccctccctagctcctttcccaccccactttctagaagaatcccagtacagcttccgcactttgcttgcttgctccagaccgacttcctcgcctttccccaaacctccacttcaccgaaactccccttgttaatgaaagattttgtcacaatccgcacgtgttgcaagagaatcatcttctcctacccgagaaaatgaactttgctccctcagcactgtctgcaaatacgagatgtttttccttttagaaggtagtaatgctttctggagaggatccaagctcaaaatgtaagcaaagatagcccattcgaaaatgacctgaaaaatcaggcgcggaaaaagtgctggagctcgggtcagcccttggaaacccgaccaacccggggtgttccgccgcctcctctgcgctgcgggtctgcacactgggctccaaacgtgtgtgtaataaccaagttacacatgggcatcgtgggcttcagccgtgggtttctgcctgggagtacagtagtcgggagagtaaaagcagtttctcaatcattattcatgatggaagcactttagataacactcttcttccagaggcagtagagtgaaatgcaggcagctctccaattcaggtttttatttatttatttatttatttatttatttagaagggtgacttcttagcttccttttttttttttttttttggcaataccaataactgtttctgagtggctccttggctgtcaagctccttacaaatatcagaccagagtttgttatgcttctcgagctccagactctaatgggcctccgagggcactgcagaatcgtacataatccgatgttcaggaattcataatttgaaataaaatacaaacacctttcggataaagttcaaatctgctaacataatgtggccctgttgacaacgcactgctgaaataaagagaggagctaaaacgaaaggaattcattttcttatgtgacttggagtggttcttgctaccttatagtcgccttggattggtgtgtggataatataatttatttaacagacattagcaagtgctttataagtactagctcatttaatccttggaagaaccccatcaggtaggtactacttttgtcctgttttacagataaactgagggctgggcccagtggctcacacctgtaatcccaacactttcggagaccgaggtgggcaaatctcttgagccctggagatcaagaccagcctgggcaacatagtgaaactccatccctccaaaacaaaaaaactaataataataattggccgggcatggtggtgcacgcctgtagtcccagctactcaggaggctgaggtgggaggattacctgaaccaggtaggctaaggttgcagtgagccaggatcacacccctgcgctctagtgtgggcaacagagccagagcctttaaaagaaaagaaagaaagaaactgaggcacagagaggtgaaataagttgcctaagtttttagctagtaagtggtaaaggaagaatttgaacctagaccgttggaccctgcctgtgctacagagaggaaagcttgcttctagaagccataccacacataaagaacaaacatcctattgcttattaaatttaggtgtaataagtaacttgtagccatttgacttgaaatttgatgcacttcttaggtcctctggctaaataatttatttatgtttttgggaggtttcctccataattagaattccaaaatgaataataaacaacacttttcctaggaagggctttggaaataacattgaactcagtcttcattcttttcttccaccacttcataatcttcccatgactccaaatctaacttgcttagtgaagtccgacagaaaaaaatgccttcaagaacagaatatgaccagagggaagaaagggttttaagaagaccatataccgcctttctaatcgaaggctgcttcttttagtaagtactgtaggtaggagctataagaataaatgctgtatgtgttgagagcaaagatgttaaagcagtgaatcaatgaaaaaatagagactaggcaggtaggagtagccactgtaccacagactaggctaaaactaattctctactgtgagtggaggcctagcgcgtgaaaagacaagtatagaataacttcgaagaaaacaattgtatatttcaagagttagctaaggggcccagcacccccccaaaaaaat

SEQ ID NO: 3795 - DNA, 4001 bp, Homo sapiens
tgtgtgtgtatttaaagccacacagatacagaatttgacatgttttctgccacacagatacagatttgacatgttttctgttctgctgctccatacaataggttttaacacagcttgagcttattccaaaactctaattagaaactgcagtatttgccttgtccaaatagaaacccattcccaaagttgatttttccccagttaaaattcaacaaagaatatcatacacagatatttttaaacacgacagttactagataaaactgccctatctaacaacacattgctttctggttaagcaacacaatttcataaggcctatcaaatactttatccagacggccactctattttcagggtattggttgtattatttgaagtcttttttttttttcagagtgaagagatttctgacttcctgtcctcttccctgctatattacatacatctgcttaaactctggaaaacagtaccagtcaaagtggtgctgaaaccttcctttaagacaaactaaaacgatgttaaaaaggttacacgaccttactatttcaagtactggtataaaaccactttctctgcacaggttctaaaatttcacagtcgtttgtcttaaagtctgtcggcttgtgagggggctggtacatattttaatatttaaatttcaaaaaataagcaatgagactgtgtttgaagttcaagggttttcactagttctcaagctacaaaccctgtaatatagccaaaagaaaacgtacagaaagaatctttcacgaaaagtgtcaggtctccaaaaccccgacatctgctaaaaccaggattgcgggggggatgagaagctcgtgaagttcaaaaacacaccaaccccgcgggaacacgaaacctccactcgcgaagacgcgacgcttccgccgcatccccgcgcaggtgaagactcggcccttcagccccgcgtgtgcggcagcatgatattcagagtgcgccggcgtccagcgcgagcgcatcctacgacaaccccgtctcccgctggggtccgcagcccgcggactccggggtccccccgcccaaatgcggcggcgcgaccgcttcgtcccgcggccagggcgctccgcgtctgctccggccaccccagcccacccgcgcagcgcggacgccaacgcatcccactcccgctgggcgccaggggcgcggggttcagtggggccgcggcccccgcacccggctgggatccgagggcggggtggtcgcggctgacgtgggctttgcggctccgggccagagagcagcctgggggacggtgggtctctttccggcttgggagggaacgggggcgcccgcgcgggaggacggcaggcgagggacggcggccgcgggcgattcagatccggggcgggcgggtacacgtcggagcgcggcggccacacgctcgcccggggagcgccactgtgcgtcccagccggcgcctcctcccgcttgcccgcgccggctggagaaaggaaggacggcgaccttcgcgtccggtccgcgccaccagcccgcctcggcgccgagcgcgggccacacccagcgctccgggaggcggcggaggctgggcggcccgggctgcggaatgctcggcccagccgagtctccgtcccggccgcgcaggcccctccgcgtccgcccgcgccctgcatccccagccggcccggcgtggagggggtcctgggcttacctctgtgtcgagcgccggctcctccgtcccgggccggagccggggcccgggggcgcggtcgccaggggaggcgccgcggcggtggcggcccctgcggctcggagggcgggccgagcgggagccgctgcctgggccgcgcgccgtccggagctcgccccgcgctgccggcgcttgcagcggagggcgcagccagctcggcccccggactggattccttcactgacacaactccggctcggccgccccacgcagggacactcccgcccctcgcaggctgcccccgcccgccgacccgcccgccttcccctcggtgtcactcaccaggagcacacaccccagccggcgcccctcgctcccgctcgcaaacacagcgctgctcacgcctctctcgggttttgtatccgctcacacgcacgttctgacacagatctcgtccctccacacgccctccctagctcctttcccaccccactttctagaagaatcccagtacagcttccgcactttgcttgcttgctccagaccgacttcctcgcctttccccaaacctccacttcaccgaaactccccttgttaatgaaagattttgtcacaatccgcacgtgttgcaagagaatcatcttctcctacccgagaaaatgaactttgctccctcagcactgtctgcaaatacgagatgtttttccttttagaaggtagtaatgctttctggagaggatccaagctcaaaatgtaagcaaagatagcccattcgaaaatgacctgaaaaatcaggcgcggaaaaagtgctggagctcgggtcagcccttggaaacccgaccaacccggggtgttccgccgcctcctctgcgctgcgggtctgcacactgggctccaaacgtgtgtgtaataaccaagttacacatgggcatcgtgggcttcagccgtgggtttctgcctgggagtacagtagtcgggagagtaaaagcagtttctcaatcattattcatgatggaagcactttagataacactcttcttccagaggcagtagagtgaaatgcaggcagctctccaattcaggtttttatttatttatttatttatttatttatttagaagggtgacttcttagcttccttttttttttttttttttggcaataccaataactgtttctgagtggctccttggctgtcaagctccttacaaatatcagaccagagtttgttatgcttctcgagctccagactctaatgggcctccgagggcactgcagaatcgtacataatccgatgttcaggaattcataatttgaaataaaatacaaacacctttcggataaagttcaaatctgctaacataatgtggccctgttgacaacgcactgctgaaataaagagaggagctaaaacgaaaggaattcattttcttatgtgacttggagtggttcttgctaccttatagtcgccttggattggtgtgtggataatataatttatttaacagacattagcaagtgctttataagtactagctcatttaatccttggaagaaccccatcaggtaggtactacttttgtcctgttttacagataaactgagggctgggcccagtggctcacacctgtaatcccaacactttcggagaccgaggtgggcaaatctcttgagccctggagatcaagaccagcctgggcaacatagtgaaactccatccctccaaaacaaaaaaactaataataataattggccgggcatggtggtgcacgcctgtagtcccagctactcaggaggctgaggtgggaggattacctgaaccaggtaggctaaggttgcagtgagccaggatcacacccctgcgctctagtgtgggcaacagagccagagcctttaaaagaaaagaaagaaagaaactgaggcacagagaggtgaaataagttgcctaagtttttagctagtaagtggtaaaggaagaatttgaacctagaccgttggaccctgcctgtgctacagagaggaaagcttgcttctagaagccataccacacataaagaacaaacatcctattgcttattaaatttaggtgtaataagtaacttgtagccatttgacttgaaatttgatgcacttcttaggtcctctggctaaataatttatttatgtttttgggaggtttcctccataattagaattccaaaatgaataataaacaacacttttcctaggaagggctttggaaataacattgaactcagtcttcattcttttcttccaccacttcataatcttcccatgactccaaatctaa

SEQ ID NO: 3796 - DNA, 4001 bp, Homo sapiens
tacagaaagaatctttcacgaaaagtgtcaggtctccaaaaccccgacatctgctaaaaccaggattgcgggggggatgagaagctcgtgaagttcaaaaacacaccaaccccgcgggaacacgaaacctccactcgcgaagacgcgacgcttccgccgcatccccgcgcaggtgaagactcggcccttcagccccgcgtgtgcggcagcatgatattcagagtgcgccggcgtccagcgcgagcgcatcctacgacaaccccgtctcccgctggggtccgcagcccgcggactccggggtccccccgcccaaatgcggcggcgcgaccgcttcgtcccgcggccagggcgctccgcgtctgctccggccaccccagcccacccgcgcagcgcggacgccaacgcatcccactcccgctgggcgccaggggcgcggggttcagtggggccgcggcccccgcacccggctgggatccgagggcggggtggtcgcggctgacgtgggctttgcggctccgggccagagagcagcctgggggacggtgggtctctttccggcttgggagggaacgggggcgcccgcgcgggaggacggcaggcgagggacggcggccgcgggcgattcagatccggggcgggcgggtacacgtcggagcgcggcggccacacgctcgcccggggagcgccactgtgcgtcccagccggcgcctcctcccgcttgcccgcgccggctggagaaaggaaggacggcgaccttcgcgtccggtccgcgccaccagcccgcctcggcgccgagcgcgggccacacccagcgctccgggaggcggcggaggctgggcggcccgggctgcggaatgctcggcccagccgagtctccgtcccggccgcgcaggcccctccgcgtccgcccgcgccctgcatccccagccggcccggcgtggagggggtcctgggcttacctctgtgtcgagcgccggctcctccgtcccgggccggagccggggcccgggggcgcggtcgccaggggaggcgccgcggcggtggcggcccctgcggctcggagggcgggccgagcgggagccgctgcctgggccgcgcgccgtccggagctcgccccgcgctgccggcgcttgcagcggagggcgcagccagctcggcccccggactggattccttcactgacacaactccggctcggccgccccacgcagggacactcccgcccctcgcaggctgcccccgcccgccgacccgcccgccttcccctcggtgtcactcaccaggagcacacaccccagccggcgcccctcgctcccgctcgcaaacacagcgctgctcacgcctctctcgggttttgtatccgctcacacgcacgttctgacacagatctcgtccctccacacgccctccctagctcctttcccaccccactttctagaagaatcccagtacagcttccgcactttgcttgcttgctccagaccgacttcctcgcctttccccaaacctccacttcaccgaaactccccttgttaatgaaagattttgtcacaatccgcacgtgttgcaagagaatcatcttctcctacccgagaaaatgaactttgctccctcagcactgtctgcaaatacgagatgtttttccttttagaaggtagtaatgctttctggagaggatccaagctcaaaatgtaagcaaagatagcccattcgaaaatgacctgaaaaatcaggcgcggaaaaagtgctggagctcgggtcagcccttggaaacccgaccaacccggggtgttccgccgcctcctctgcgctgcgggtctgcacactgggctccaaacgtgtgtgtaataaccaagttacacatgggcatcgtgggcttcagccgtgggtttctgcctgggagtacagtagtcgggagagtaaaagcagtttctcaatcattattcatgatggaagcactttagataacactcttcttccagaggcagtagagtgaaatgcaggcagctctccaattcaggtttttatttatttatttatttatttatttatttagaagggtgacttcttagcttccttttttttttttttttttggcaataccaataactgtttctgagtggctccttggctgtcaagctccttacaaatatcagaccagagtttgttatgcttctcgagctccagactctaatgggcctccgagggcactgcagaatcgtacataatccgatgttcaggaattcataatttgaaataaaatacaaacacctttcggataaagttcaaatctgctaacataatgtggccctgttgacaacgcactgctgaaataaagagaggagctaaaacgaaaggaattcattttcttatgtgacttggagtggttcttgctaccttatagtcgccttggattggtgtgtggataatataatttatttaacagacattagcaagtgctttataagtactagctcatttaatccttggaagaaccccatcaggtaggtactacttttgtcctgttttacagataaactgagggctgggcccagtggctcacacctgtaatcccaacactttcggagaccgaggtgggcaaatctcttgagccctggagatcaagaccagcctgggcaacatagtgaaactccatccctccaaaacaaaaaaactaataataataattggccgggcatggtggtgcacgcctgtagtcccagctactcaggaggctgaggtgggaggattacctgaaccaggtaggctaaggttgcagtgagccaggatcacacccctgcgctctagtgtgggcaacagagccagagcctttaaaagaaaagaaagaaagaaactgaggcacagagaggtgaaataagttgcctaagtttttagctagtaagtggtaaaggaagaatttgaacctagaccgttggaccctgcctgtgctacagagaggaaagcttgcttctagaagccataccacacataaagaacaaacatcctattgcttattaaatttaggtgtaataagtaacttgtagccatttgacttgaaatttgatgcacttcttaggtcctctggctaaataatttatttatgtttttgggaggtttcctccataattagaattccaaaatgaataataaacaacacttttcctaggaagggctttggaaataacattgaactcagtcttcattcttttcttccaccacttcataatcttcccatgactccaaatctaacttgcttagtgaagtccgacagaaaaaaatgccttcaagaacagaatatgaccagagggaagaaagggttttaagaagaccatataccgcctttctaatcgaaggctgcttcttttagtaagtactgtaggtaggagctataagaataaatgctgtatgtgttgagagcaaagatgttaaagcagtgaatcaatgaaaaaatagagactaggcaggtaggagtagccactgtaccacagactaggctaaaactaattctctactgtgagtggaggcctagcgcgtgaaaagacaagtatagaataacttcgaagaaaacaattgtatatttcaagagttagctaaggggcccagcacccccccaaaaaaatcagagttttaaaagttttagagacagtgaatttcaaatcaaacttgaaccttttgctgttcaaattaatttcttctggaaataatgaaaacttctgtttctgttagagaggatttaatatgcttattgaaacatgtaaaagcttcttgcacatcatataactaacaaagcattatttttctgaattaggcataaatgatttttaaaatatgcattatattcctattattatagggagatagaaaagtctgaagaaacaaaatatgaataagatatatgttgatgttttcaccagatggtcaaagtttatttgaaaaattacattgtttgaaatcttgatctgtgtaatgctagtttgacagtattgttcaaaatgattctc

SEQ ID NO: 3797 - DNA, 4001 bp, Homo sapiens
ggtctagaggaacgatgcaaacaaaagggcagaaagaaccaatgagagtaacatgatcagggcaggctgacttgaacttgaagaatgtggttaggtcagagaaaaaaagaagagacacattctaaaaggcagggcatgaacaaaaaaggacacatgaaaatgagcatgtcatcttagaagggcagtgagatccaactagtaggaacagaaggttcatgttggaaagaagtagaaaataacattggtaagttaatttggggcaagactgtgaggtacactgaaaccaagttgagaggctgggcaatgggggaggccatggaaagtatttgcactctggtgcaatactaaacaatgctaaagtattgttcctgtgaaacaatccttgaagagttttgagggaagagttttaggaaggttgatacggtggaagtgcgtagaatggggaaaactcaattacagagagaccaagatgtagactataattatcctagaaacggtgatggctgacggcctcccatccgatcagggagagtgaagaatgaaaacgaaatgcaggggtggctcagagaaaccattaaaaaggaagagttaacaggacttgataacacagtttcacagaggcagtgagagagcgaagagtcagcaatggttcctacatctccagtctgggtgatgaagagaatgctaaacggatcaagaaaggaaagtcttttcatcataaaaggaagaagtttagagagaatacaaaaagtttgttatcaagcatgtagtctttagcttgacagcaggccatccaccataaaaagtctattaattaaggaagtagataaataggaatggagtttggatcagtactagagacaaagatttgtatgatgcaaggaaggataacatcacatttaaaatttttttatcagaaaataaaaacactagctattatcaaaaataataaaaaattacataagttgtagagagaaatatatcttcataagactatttttctcagctatggtacttaggggatcctacccattaccacaacactgaaggaataagcttctgcagaaattcaacatatggcctatttacataacaagcatcacaactccaaattagccattttgatgtgtcaaagacataacaccttcatagcaagactacttcaaaaaagggaagaaaaaagaaaggtttgtttttcttctataattatgtttactgggtttttaactgtttgtaacatgaaaatcttattttaattgtgtgattacactttaaggcaaaacagtgatgaaatggattagttgaatgttgcacaacattcagagatcaataaacagacccaatcacttaaatctgtccatatgagacacctactctcatgtcctgtgtcatgcttgtaaaatctactcttctgtgcacagaaattataaaaaacatatgatttaattatcacagtcaaatgacagtaaaagtgctacagaagatggctaggaaagaagtactatgaagcagtgactaagcagtacctgtcaagtgcacataaaatgcattccactcttgtcatacagtgggacaggtagtagcagcttagatcttacgaagagcaaccacaactttttccatcctatccaaactgtaaccagaagttcttgtcctggctcacctcagaaaatgctgattaaaactgtgtaaagtaatagaatgaagaccacctatgccctttcaacacacaaccattcacgaacattcactgtgattgataacacaactctgatcgcagactgagaaactcacaaaaattaggccccaaagtgagatatttctaaagcttaacttctgatgtaaaagcttaccacttacatggcaaaacgggtccataaaatgcttcagactggcatgcaatcaaagactgcaacggtgtggcctaagtattttctttccctgatccttactggtgtggcagagcagcttctcaagcccacagataactctctccacaatggcctcaggaaaatcagtgcatgcagaaaaactatttactgaagactttcattagggggctccctaaaacaaaatgaatacaaaaggagtcttgatcattttgcctgtctaaatgagcacattaaactaagttgattcttagaaaatcatttaatattttcagggattaaagaaagaaaattgccaattaatacagtcttttcccagatgttcagtttttactaacgtctttagctattctctgcattcaagtgattgtatttttatgcaaattatcttttggggctagtctctagtttgtgtgtctgtgtgtgtgtgtgtgtgtatttaaagccacacagatacagaatttgacatgttttctgccacacagatacagatttgacatgttttctgttctgctgctccatacaataggttttaacacagcttgagcttattccaaaactctaattagaaactgcagtatttgccttgtccaaatagaaacccattcccaaagttgatttttccccagttaaaattcaacaaagaatatcatacacagatatttttaaacacgacagttactagataaaactgccctatctaacaacacattgctttctggttaagcaacacaatttcataaggcctatcaaatactttatccagacggccactctattttcagggtattggttgtattatttgaagtcttttttttttttcagagtgaagagatttctgacttcctgtcctcttccctgctatattacatacatctgcttaaactctggaaaacagtaccagtcaaagtggtgctgaaaccttcctttaagacaaactaaaacgatgttaaaaaggttacacgaccttactatttcaagtactggtataaaaccactttctctgcacaggttctaaaatttcacagtcgtttgtcttaaagtctgtcggcttgtgagggggctggtacatattttaatatttaaatttcaaaaaataagcaatgagactgtgtttgaagttcaagggttttcactagttctcaagctacaaaccctgtaatatagccaaaagaaaacgtacagaaagaatctttcacgaaaagtgtcaggtctccaaaaccccgacatctgctaaaaccaggattgcgggggggatgagaagctcgtgaagttcaaaaacacaccaaccccgcgggaacacgaaacctccactcgcgaagacgcgacgcttccgccgcatccccgcgcaggtgaagactcggcccttcagccccgcgtgtgcggcagcatgatattcagagtgcgccggcgtccagcgcgagcgcatcctacgacaaccccgtctcccgctggggtccgcagcccgcggactccggggtccccccgcccaaatgcggcggcgcgaccgcttcgtcccgcggccagggcgctccgcgtctgctccggccaccccagcccacccgcgcagcgcggacgccaacgcatcccactcccgctgggcgccaggggcgcggggttcagtggggccgcggcccccgcacccggctgggatccgagggcggggtggtcgcggctgacgtgggctttgcggctccgggccagagagcagcctgggggacggtgggtctctttccggcttgggagggaacgggggcgcccgcgcgggaggacggcaggcgagggacggcggccgcgggcgattcagatccggggcgggcgggtacacgtcggagcgcggcggccacacgctcgcccggggagcgccactgtgcgtcccagccggcgcctcctcccgcttgcccgcgccggctggagaaaggaaggacggcgaccttcgcgtccggtccgcgccaccagcccgcctcggcgccgagcgcgggccacacccagcgctccgggaggcggcggaggctgggcggcccgggctgcggaatgctcggcccagccgagtctccgtcccggccgcgcaggcccctccgcgtccgcccgcgccctgcatccccagccggc

SEQ ID NO: 3798 - DNA, 4001 bp, Homo sapiens
gtcccagctacttgggaggctgaggcaggagagtggcgtgaacccaggaggcggagcttgcagtgagccaagatcgcgccactgcactccagcctgggcaacagagcgagactctgtctcaaagtgagaccctgtctcaaaaaatgacacaaaaaacccccacaatactaaacaatatattgataggttagttgtggaaggtgggagaaggtgtaacataggatgttctttcttaaactgtatagtatgtcaatgtttattcctatatataagcacatgtatatgtgttaatgtgtatgtatttgtgtgtgtatgtgtctatatatatgtatatatatatattttaatttttaattttttttttaaatcttttgtagagacagggtttcaccatgttgcttgggctggtcttcaactcctgagctcgagggatccacccaacttggcctcccaaagtgttgggattacaggcatgagccactacatgtacgtgtgtgtgtgtgtgtgtgtgtgtgtgtgtgtgtatatatatatatatacacacacacatatatatgtatatatatacacatatatgtatatatatacacatatatatacatatatatatacacatatatatacatatatatatacacatatatatacatatatatacacatatatatatacacacacacaacatatacacacttgtgtacacaaaatacattgtcttacttgtatgagagatttcatgataaagatgttttatctaaaaaaaaccccatgatttatactttttcacatacgattttgatattccagaaacatctcaaccattcgttcttcttcctttaatttcacagacagcttttctgaaagagaaattgaactttcaattcagctgcaataacactaaaaaataaactagaacagcaaaaccagcatgttacaagttaacactaggtacctgcaaatgctttgatggaatccttgtaggtatctcttagtcccgccatctgacaggaggtgtccgtacttttgaatttattccaaaattcatttatgcttttatcgaaaagtgccagttcgtcctctaccattatgtaggacaatgctaaaaacagaatacatattgcattttttaagttactgaaatcaaatcacccacatattccaatcgggtatacagtattttggcaatttgtcctttgctagaaaatagcaacttatctttaattctaggtattcaagggtagatcaagccacctgggcttaactgttgttaacgtgcagcaataattcaggacacctttacctcctagcagcttgttagtaggtaagtgtaactgcacaggacactcacacgcactatgaccctgggtccattttctcacaagtaaaactgttgacttctgaaacccctgatccaactctaaccctttctgaacagagatcatcaggatagccaggtggccggcaccctcccatagaataagaccccacacatctatcctgtctctctcctccacctcagaacagtaaaagttaacagtaaaatagggactaaggtgggagtttagtaggttccgtcgaggatgtatacaagtcacctcgggcctcagtatcctctgtaaaaggaggtcctgggagaatcctggacccaccagtactctgcgacgctaaaaccttcccaggaggaccaaagatacctcctgcagtgaaacccagaacgctttgggttcgcagctgcccaccccaccaggctgtgaggcccaaacagcaacaagatgcgcatttcacaaacgccgccgcaaatacacacatcccgccctcaaattcactttcccttattgcgacaggggggccaaggagcccagctcggcgcccaactcccttaccttcgcaggcaggcctgagtcccgccgccttccccacaccagatccgcgcccactctagccaacagccggactctaggctcagctcccgcagccccgccaactttccgatttcaaacctagtgcacttcccgccacccgcctccaggcgcaggctggccttctgattggccgatagcgcaggctctccttgacaggattggttgaactcacccttggattctcgaggggaaaatgggggaacagggcattctgggattcgtagttcttttctgaacaacagccagagtctccgctgtgacccgaaagtattaatagcacccgaagggctcgcccacgacaagtcatttatcggcttcaaataaaggtttctggaacaaatacagatattgacctttaatcgtatcttttgcaacaaatacatcctcttctttgtattcaccttgtaaagttgacttcaattgtgagtgggcagaaacattcagatggtcctcagaataggtttttactgcttacaaaaatattccttcttttctactcccccagcttctctaacaatgtttttgaggcctaatagaacactatgttactatcttgcagaagtggaagaaactagagcactatcaaaatcacctgctatttccttgaggacaggaatgaggcacaaggtattcaactaggatttgccagagtagacaagctgcagggaatcagcgttgtccagaaactctgaaaggtgacatagattcggtatttgaatccttcttggtaaagctgaggaagaaagaaaactagggaaagaacctagagaatatgctttctgaagaatggaaaataaagttggctaaaataatgaagtcaaagttattattttaatcttagactatgatatgtttgtgaaaataaagcctcttattatacaccaaaaggtctttactatactagtttcttttcattttcatcaacaatacaaacaccaacaagaagtaaatatgtaaaaaacattctcagaggaccagatattagccattctttatccaagaactaaattaagacctatgaaatcaggacaagttattatgaatatttaacacttcacaatatacccaaaagtcaccttgcagcctagagactgctattaatacagttagacatagagtttactatgataaatctcctttcatttgcaaatattttcccaagaacttctaattttatatatctgatactatttaccttaaagcaaaattttatgagttgagcatctcagaatttcagctgattgagtgctggtactcatttttagggttttctcagtaccaaattagtgaagacagtatttaagaagattcatggaagagggctgatttggtaccatgttgatgaattcctcactgggtttatacactggtctttatcagactgttcagtgaagattcttgctctctttgggtcttcagctgaggggagtgattgccctaccaatgtgctgtttttagggcagcctcaggttgtctattgttttttattctgtgagtgctcctccccaaccaggatgtgaggaagaagtttgtcgtttgtcaaaattttcatttctgaaagactggctgaataatttctctctaatccccaaggatagctagagacaaccagctcttctttctgctcagtacacagaatagggccttcagctttctcagcattaaaaaggggaaaacagaccccccgacccattatcattcacacaactccaccatgaccaccaccaccatacttacatacctttcatttcaaaccaaccagggtttattgagtttctattttgtgccaggtactgagctgagcactgccttctctgggatatacggtctgtgacccagggttgggtttctgcagggtggggaatagaaagatgccacatgttcccaggctggaggtgtttctggatggtggttatagtcttgctcagattgaatgctccattgctcctcccctgaaaacttaattctttctccaaagggtgaatgataatggcgtataaggataaaagatcattgtcctctattacacatacacttgctgggtagatactttgcatcttggggggcagagctaaagat

SEQ ID NO: 3799 - DNA, 4001 bp, Homo sapiens
tagagagggggtttcaccacgttgccccaggctggtcttgaactcttgagctcaagcgatccacttgccttggcctcccaaagtgctaggattacaggcatgagccaccatatccagcctttttttttttttttttttttttttttgagacagagtcttgctctgtcacccaggctggagtgcagtggcatgatctcggctcaactgtagcctccacctcccaggttcaagcgattctcctgcctccgcctcccaagtagctgggattacaggcatgcaccaccacgcctgatggggtttcaccatgttggccaggctggtctcgaactcctggcctcaagtggtccgcccccttcagcctcctaaagtgctgggattacaggaatgagccactgcgcctggcccattaattctatttatagttctttctttttttttgagacagtttcactcttgttgcccaggctggagtgcaatggtgcgatctcggctcaccgcaacctccacctcccgggttgaagcgattctcctgcctcagcctcccaagtagctgggattacaggcatgtgccaccacacccggctaattttatatttttagtagagacagggtttctccatgttggtcaggctggtcttgaactcctgacctcagctgatctgcctgccttggcctctcaaagtgctgggattacaggcgtgagccaccgcgcccaggctctatttataatttcttaagttacctaaaatggtacagccaggtattttcccgtgtttctgatgatgagttttgggtactaaaaaagtttgcaggtaataattttgttctgctcttaatgaaaagaaggggaacttttattaacattctaaatctgatggggaagcatctttatatctttttctacttatattccttacattttttcctgtttcatcttttcattttgcttttctttaaatcgtaactagcttgctttaatgcgcctgaccttcctctagaaacaagcaagctacaatctaccagactgtagcatctacttgacttgattcattactccaaatatttttcagaactcatctatcctacccctttttctaatctgtttaccttattaccctacctcaaaaaaaaaaaattccctctctttcctagttaggagtacagtactataaagaagtttctttttgccaatgttaagaaattatcagcaaagtagcactgtctcataacctaaacaaattcaaactcagtttcattatatggacatgataaagcatagttaatttttaacaatgttcccaaactgttatcctgaaacttctctagtgtgaccaagcttcctagttttcttgggtttagcagagaaagtcctgggaaaccccttaggcccagtcaaactgggtcagttagctcacctgagtctttatgtagtattttattttaggtcaaataaaactcatgccatgggctatgaagttgaattgcccagaatttacatttgacatctggatttaagtagtctagaagctagatgagtatgaatttttaatccataaggaaacaaaacaaacaaaaacccaacattgaaaaaaaaagactaagtaaaacaaaaacaaatttggttggagatgggaaatttaatacaaaaataatgatatcctctttgatcagaataaaaacatttagatgtttacattctaggtttttagtactttataattaccactattacaatattttaaacctaccaaataatttaaagaaagcagtcatatcctgacgctgtataaccagacaaggtcctttggggcgtttagatttgttgttattatgtgtatttttttcaaatgcttgccaattatctttacaaataggacgcttcagagtaatgggctttttaggctgatgtgatctatttgaccctgattttacataaacagtgacagtaggtggtgtctcacaacacatctgattgtgcctcattttggtttcccaatattcctgtaaaaataaaacatacaattattcatcacacacattcatttcatatataaacaactaactggatgatactaccatatgcagtcatataaaatgttactaaacttgccattaaaatgttatttgtgacagtgactcccattaaaaattgcttttgaaattcagcgctaggaaaagctatgcttcttttgggtaacaaacggacatcctcttcccaaataagaagatactgtatgccattttgctttggctgcagaactcgaccaaatttgaaagttaattatagaaatgatgctgacttcataatttatttgtagtcttcttttttccggctaattttctaattttttctattctgcttgaattgacataattttattatattgttgttatatgccacctcaaattttttataaacaaggacaactatttccagaatgtattatcaagtattaaattacaaagcaccccccctcccacaaaaccccatatctctttattggtaaattccttgatatattataaaattcacttattcaataagcatttattggtatttattgaaaagttgaaagcaattctagcaaaaaatgtagatgtgctttgaaggcttttcataaattggtctaatttttattttacttacttttctgttttcctttttttctcgtgtgtgtgtgtgtgtgtgtgtgtgtgtgtgtgtgtgtgtgtgtttcagacagggtcttgctctgtcacccagactggagtacgttggcatgattacggctcactgcagcctcgacctcctggactcaagtgatcctccttccttagcttcccttgtagttgggaccacaggtgtatgccaccacatctggcttattttttaaatttttgtagagatgaggtctcactatgttgcccaggctgctctcaaactgctgagcttaagccatcctctcgcctcagcttcccaaagtgtgggaattatgggcttgagccatcatgcctggcctgttctaatttttaaagttgtaagtgtatgacaaagctatttgagtgactgattataagtgtatatgaatgtatgttgtcataatctaataaaatctgagacagttaatctatcaatatttaacaatatacataatcatcaccttctttggtggtgattagttcacataattactacacttagtattatttttgtggtcaaatatttctaggataatgggaaattgaggtatgaataggcaacacaggaaactactctaggaccctactgagaacctctgaatgcaacctcacagtgactcaggcagccataccttccttggtgttcaaggagtgaggtacagattccccttcctgaccctcagaaatttcccttctgaaggaaggactggaaaataagattggatttagcgaggttagaacagcactgtccaatataatgtaagccacatatgtaattttgtatttttagagccaccttacaaaacaaaacagataaaattacttttaataataaagtttatgtaacccaatatgtccaaaaggccattttaacatgtaatcaatataaaaatcagtgagatagttcacattctaagtctttgaaatctgctgcgtattttcctcttacagcatatctcaatctttttttcttttttttgttactttagatgaatatgcttatatacaaatctgttctgatactaatttttcaacagtaaaagtgaaatgcagtcctatttttaaaaatgaagtaatttgtaggagaaaaatatgctccttcagtttttaaagtaaaaattaaattattcagtttcaagtgtttaatagacacaagtggccagtggctaccatattagatagcacagggctacattttgaagaactaggcagaggaatatacttatctaattgctcctctcatcccatctttcttcctagatcctaaagtcctgccaaattgaaggcaattatgtacttggggtgcgggttataaactccat

SEQ ID NO: 3800 - DNA, 4001 bp, Homo sapiens
cccaggctggagtgcaatggctcgatctcggctcactgcaacctccgcctcctgggttcaagcgattctccagcctcagcctcctgagtagttgggattacaggagcctgccaccacgccccgctaattttcgtattttcagtagagatggggtttcgccatgttggccaggctggtctccaactcctgacctgaggtgatcggcccgcctcggcctcccaaagcgctgggattacaggcgtgagacaccatgctcggcctccttcagtgaatttttatatggactccatgaacattaaaaaaatcataccaggattcatacttgaataggatgtttgggattttctttctttctttctttcttttttttttggtaagtaaatcacaaaaattctagaggcatctgaaataacctcttctctggggggtgatataaagggtggtggttcccagccataatatgaaacaagcagaagttgtctggggattcatttgcctatatgaaaaacctaatagcaatatccattggcaactcagtcaggacaggcaagtaagccttaacttccttatgaatgcagtcacacacagagaatatgtgccagacactgatgaatgtgttacatgcattatctcatttaattctcaaaacatctctgtgtggtaggtattattttatccttattttctagataagaaatttgaggcttaaagaagttaagaaatttcccaaaggctcatagtaagtgataaagctagaatttgaatgcagaactgacatcaaagtcccatattctttaaccagtaaatcagttttaaatattaaataaaatcatgtgtaaaacacttgacacatagtaagcactccagtattacttatcgtcaccttgccaagaaaacaaaaccagctaaccccagctataaggcgatctcggatcactgccacctctgcctcccgggttcaagcgattctcccgcctcagcctcccgaggagctgggattacaggcgcccgccaccatgccaggatactttttttttaagttattttttgtagagacgggttttagctcactgcaacctccgcttccagggttcaagcgattctcccgcctcagcctcccaagtagctgggattacaagtgcgcaccaccatgcccggttaattttttttttcattatttttttgtagagacggggttttcgctgtgggctgctctcgaatcctggcctcaaggattcgcccaactcggcataaggctttttaaaagattgaggctaggggccctccagtcctactggatgtcatgtaagagaatcttcgtgaattctgagaaatgagctacgggcctggtactgagacacagcagctcagatctcaaaattctggggcagacgatcttggggacaaaaagaggtgtttaatgggacataaggaggtaggatttatcaaaaagaccccccaaatctccattcctcccacaataaaggcggcaggcacacgtggagacgggagcgcctgcccagggccctccctccgagcagacggccgagcttcgggagcagcctccggtatcggccctgcccgtccttcccctggaaccttcacccgctacgccgccgggcggagggcggccaaagccccaacctgcgcggccactgcctccctcgccaggtccctcagcccagagcccgctgcggggagcgcgtgtgtcgtcgccgcgaaggcagctgagggcgcccacgggaggcggcgtgaggacgaggctggagcgctgccttctcatctaaggcgggcggtggggtcgccggcgagcgaacccagggaccgggcacactcgaaactggagattcgcctgcgaggccccttcccgggggcgagcacaggtacctgcggaagcccggggctgcgcgggagagggccgggcaacggcggtcaaggctccgtcgcagcgctcctggcctcagacggttgctcgtcggtcgctagccagcagcggtacccgctctaaggtctcccgccaacccggagcgagggagcgcgaggccggcaggggccaatcagcgcgcacagccggccgagggggcggggcctgcctgggagtgcgcgccggcgaaccccgcccctccctgccccccgcccgcccgagcctcggccgcgggcctccctcctccgttatcccgcctgcccgcgcaaaactcacacaaccctcttcattcgacctacctcccttgggcacgtctcgcagtcaggcttgcgttggggccgtttacttcccttcgattagacaaccaggcccccggggctggggctgcggcctcccctccccgcccggcacacgcgggcacagcgtggttaccctggttactcaaaaggaagaggccgcttgaactgagaaaagcacaacgtgtgaatacggtggcttcttgtgagaaggggccattctattgtaactgtgaatctgcagcagtaatctttttggctttgtcctagcctttgactacgtgggtgcttaatacatgcatgttgaatgaacaaataaaaagaattctaaacagctttttgatcccatcctttccttatgtccctcctaaggtataaccggctttttctttctttttgagactgagtcccgctctgtcgcccaggctggagcagtggcacgatctcggctcactgcatacctctgcctcccgggttcaagcagttctcccgcctcagcctcctaagtagctgggaccacaggtgccgccacgcccgcctaatttttaaacatgccttgtagagcagagtcctatgtggcccaggctggccttgaactgaactcaggcaatcctcccactgggattacaatcctaagccaccacacccagtgtaaatcttttttttttttttttggtctccatatcacggcttttttcatgttgctagtctttcgaaacgttttcaatgactgcataatattccagagtggatggaccatttaagtcatttcaatatttggattgcttccagattttttggctaatacaatgattactcttaaaaggcaacctggctctgcctacttgtggtacttccagcaaatagctcctcaatcagcagttctgaagaacgagttaattccttccttcttgtgcttccacacacagcacaataatgacaaattcacctacaagtacgaggagggggccaactgggaacttatttttccttacacatgcccttgactctttctccctggcctataaatgggagaatgggccaagaagcatcaactggttgtgaaaatcttgaggaaaatggctgcttcaagcttcattcctctagcttttccctaaggatccttcctgacttctctctgctcttccccttgtttttgcaaggtaccggtgttgtgatgattaatttccagcctcgagtataaaatatttactgaacaattaatgtccgctacatgaaaaacacagaggcatggcaagtaccacaatgatgaagacaacatggccttacctttctagagcttccaagctagacagatatggacacaactaaaatacaaggcacagtgagttgtgccatgaaggaaatgcaagtggctgtataacgcacaaagtacagttatgagaaggttctttaggatcccaaaatctttacaaaggaaacatgtaaaatttgcatataaaagccagcaaatacacataaatattcattaagctatcagggaagcagcttattgcttaagttttgacttcaagtaaagggttactaccaactaagccttcttgagtgttctcattcctgagtttgttttgttttttaaactatgttggtgtgtggagaaaagtgaatatactttagaatcatatacacttggtttgaattcaggtactaccattttactagctgtatgaacgtggtcaaatcatttaaccctggcacctctcattaaatgtaaaagtagggtgataccacctactctgtaaaagcgtctggggcgaatt

SEQ ID NO: 3801 - DNA, 4001 bp, Homo sapiens
ccaagtagctgggattacaagcatgcaccaccacatctggctaatttttttgtatttttagtagagacagggcttcgccatgctggccaggctggtctcaaactcctggcctcaagtgatccattcgcctcacctctcaaaatgctgggattacaggcgtgagccaccgcacccagtcatttatcccaaatggacagacatgagacccaaacccctccccagaaggggaagccctaaataagcctggaacatggggcaagggacagggtgccggggggagtacactgctgtccctgagatgaggcccctgaggcagatcatggggaagcccaccaagattccatttccttccacccaaagccagacctcccagagccaggcctggcatagagtcgctggtgggtggtggaaagtgcggctactcaccaggagaccacaggcttgggctccccctgcacgcggatgctcatgatgacatcttggccttctcttactgactggtccataagtgagacctgaagggggtaccccaaagtgtcaggggaagacagggcagagccttgggtcctgggggctgtggaatctgagacggaggactcttccacagccaggctgagactggctctgggtaagagggtttgaatgggagcaaagttccaggtcttgatgttgcctaggcatggccccaagaacaagggggcacccaaaggaacgggggcacacaggaggctaggccccagcctcaggggtctgaccttgaaggtggggggtgccttggagccagtgtcagaagaacggcggttctggctgggactgggcttcatggtgggggttcgcggccaggtctccccaggctctgggaactcctctggggggctcaggtattcctcgtcggaggtgatggggctgctgaaaggggatgtagacccacctggagagagacagagatagctaccagggaggaaggcgagcagagagcctgggagagctggctggaatgtcgcccagagcccaggagttgcggcagctccccgcaggccggccctgccctgacttcacccccaggctcctgcgacctcgcccagcttcttcccctccctgagcccctggaacctcctctgccactggctctgccaacaccgaccctgctgatcctcccaggaggggacaccatagggaaaggcctggggcaaagggttcgggcagcagaggggccactcctgggcctggtgggagaattccactggagcagggcacccacattcctgacatggactagagacctaaactaccaactgcaggctccaaaagcaggggaagcaggtctatggaaccctggagcagcatggctaggacgcccatttcttgggtgagctgggcctggtgcagaggaacacacaccgcagacaagtcacatcccgacctcggtccagggccaatgaggcggcactatctagcctgcccctccccctttcccttctcagcttcctgccgtgcaaaccccaggggcacctgttggccacagccctacagcttgcacccccaaacgctcgagggataggaaagcagagctggagtcatccaccaaaaagggcagctcagcctgggggaagaggaggggggcaccagagtcagccttgggggaggggtgtccccagggccctgacgccctcccctgcaactggccagggtcccagtctcgctgagctggctcctatccgactgccaaatacagacatgaaactgccacagccccctaggttctccccagggtccccccaccccaagcccccagcagggctgtaccccaactcaccccgaggctctgcacacagaccccagcctgtgcctgtcctgaaggctctgccctggcaccaggccctcctgctgcctgcccactgcccaccccagcgtggctccccagggagcaggagcccagcctgtccagcctgcccagccccactcactcggctgacccagctgaggccctgcacggagaaggccctgggggaggggaaggcgcctgaggaggggaaggaggaggttggatggcaggccggcaggcagctggctaggaaggtggtgcctgccgagaccacaggcagcctgggccctggtgtggagggggaggagaggggagaggggagggagggcggagcgcggccgtctggatttagccactctgctcactcccaagccgcgggatctgcctttcttctccttacagcttcagaccctgacaagagcaaagcccgctctgcggtgccttgactcaaggtgtggggcctccgtccccgagcaagacaggggaggggtggcactgcgctgtgccaatagggacacttgccctgacccatttgttctgacacgtccaccaaagaaggtgcccgtgggaaatgttccctgtgttgccccttgctctgacggaaccaccaagatccctgaccggggaatgcgctaacgagcctcaaatactacagagccagggcatacctgttttctttggccccgaaaatcggagaactgtcaagatctttgccctccttcacagaggtgggggaagaatctgagggggcccagaatcccacctctgccccctcatccctgccatggaaggtctggccagcagccaccacagggcctaagcccacatccagccttcctacccaaaccgccagggcacctgttggcaacttgcccgccacccaccttagccccgctaaagaggacagcgggggctgcctcccccaaatggccccttatcatgagaacccatttgtatctgggatggggaaagggtttggacacagaacctgagagaagggggctgttgagcaggggtcacatgtccttctccctcttcctatcacctcaccccgcaacccggggccacattcccaagccatgacctgtgtttcccagcatggccagtaaggaaggagggctgggggccgggcagaggaggggcccacggttcaggctggctgtcttgaggtagggttggggagggaagtcagaatggcatttggtgcttaaggcatttgatgctgagatcacaggcatggctccgcaggtgggcggtcctacccctctatggagcctggagtcctgccccagggtcacctccaggctggacagtactgaggaggctcacgggcccagggactgggaacggaagcagagctgaaggccagatggtcaaggtttgcagggagcctcagagacccctggtggtgcccaggggaacagcatgctggagggcatctagccatgaagcagacccccatcctcaagccccttggagagacagactgtcagagcagcccaggcctcttccagacaaggcagtagcctctgcccctccatacctccaaaagtgagtgaccaaggaagctgatcgaggattcctgaggctccataccagaatccggtgccacctagttttttccctggccacatagcaaaaaccatctttggaaccagtccctgacatcccagccctgctgcacccacaagcccaactctcactgtggcaaacacagttacaccagccaggaaggagggggcaggtgcccccctaaacctaataggcacatacactcaatggccccgaacaacccaccacggaagtaccgccccttcacactggctcccaatcccccacgctgaccccatgctcatgtctgccctttcaacatcactctcaggtcaaactcatttgatgaaaatactggcgttaggaagcacacagggaactccctctcctcagaccagcacatccaccgaccccaactgtttcagcgtcccctgatgtgttctcacaatagacagagttgcagccaccactgcgaattatctagtacataaaaggtgtcgcacacagccctttgcttcagggcttctcagaatgttacttgacctactcacatcaggaccacctcgggcttatttaaaatatagattcctcaaccttactccagcctgcagaattagattttctg

SEQ ID NO: 3802 - DNA, 4001 bp, Homo sapiens
actctccttgtcagctctttcgttcccttccctaatctctcccccagtcatattctcatcaactcatctatcttaccctttgatctatgttctattttcagccctctttgcccctggggggaccagagctgagatccccaaggagtccacaccttccccagctccgaagtctgctagaatgcaccccatcccctgatcccaggctcgggaggcctgtacttgtccaggtgctaggccaaccaggagacgccagccttggccctctctggcccaggcctggccacagagactccaggaaggtgggcagagcagggctggggggaggagatgccgatggagggaggccagcccggctccctctcctgacttggctgtgtcctagagacttcttgcccacctgctgctgagggctttcctccctgtgcctcctccccagcctccaaggatttacccctacacagcagcacccaggggagtgacatgtccctcttagaaacgtccaagggagtgaacccccagctccttgccatctctcccagctgtagcctacttcctcagaattctgtttctcaaggcgcagcctgcccaaggctctgcctttggctagagaagtaccacttggcttactcaaggactgaggaaatcaaaaaggaagcccccaaatggatccaaggctaacggccctggcctggcctccatggtagccccagctggaccatgagcactgggcccagcctcttgccctccccttctgcctcagaccctcagccttttcttcacactgcacctggaaatctatgggcgggggacaagcactggtccatagcatcccccttccatgctctggaaacatccactctggaagctcaggtagacatggtccaggagcttcccattccagctccacgtgcccatacctcacctgtttgcaccaccacacagaatccagggccctccacagcacccatgcaggcacacacctgcatgtggattctcaagcactcacctccattcatgcccatggggccctggctcgggctccacctcctcctaccctggaccctgttcacacgtggccaaccataggcctcttccacaccccacctagagctgaccacatcaaccctgccacggcaatggcctgcagggagctctgagccatcccttcaacagtgcagcctggaccagaggagctggccccctccttcggacatggactcccctgttaaggagctgatcggagtgtcaatctcaagtttaaatcatggaactgaaggacaccctttcccccaggaggcttttctccacaggaggagaagaacttccaccccagaattccctgagaggtgggagtgggtctcaggcttggcttatcaaccgcttgctgccccttgacctctgaccttcctgtggggagcctctctaccttgacaccccattccctgcacttggctcttcgtctcacttctggggccgggcagccgagaagccagggcacctgggaagaaggcggcggaaccagtatccagtaccttacccgcgtggcctgggcagcccttttctacctctgagcaccccgcccctgccgggcgcggcccccacctgccctttacctccgacctccagcactgtgagcaccgcctcgcaggaggcccggccccgctcgttctgggccatgcagctgtacacgccggcgtcctgcgccccgcagcgccgcagccacaggcagctgggctcgggggccggcgcgggcaggagctgcccatcccggaaccagcggaggctgggctggggcgtcccgctcaccaccacccgcagccgcacgtcgctgcccgcgcacaccgccgcgttcttcaggggccgcaggaagactggcgccccggccacggccacaggagccccgccgccggcccccaccttggcccttttcgggggcactccggggctggggggtgccctcgtgcccgcatcctcgcctcgcgtgccccgggctttctgcatggccactgagagctgggctggggggacgccggaactgggcggccacgggggcacccgcgggacggtgccctaggagacaagtctggggggccggcggcctgccttcctgctgcccgcccgccttcggcctgtgctacccagaaggtcaccggggcggccggcgattgcgcctgggggctatttttaggccccccggctcgggttgcgagggagccgtggagggagggggcagcaggggagggacttgactccacttggctccttctctccctccaggagcccccatcgccggcccggcttaagggagtccctcggtatttgttccaggctttcccctccgtagtgtgcctggcccccacacgacccactgcagggagtcaggttacccctgggctcaatcccatttcccttcctccctcatctcagacccctcatccctgcccggcttcgctgggaggggaagaagaggaacggtcctggtgagatgcctgagaggtggatggggaggcaggcccaagtggaggtgagcagacagctccgaagagggaccatggcctcccccagcgcctccattacagctggcgaacagtaagaccaggagcctgggagtcaggtggattggggcctccactgcgccctgcccttacttgctgggtgacaccaaacctctctcaacctccaagtcctcatctgtaagaatgggtggtggaatagggttgcaataggcagaaaagagtgggcaggacattccaggcagagggaacggcatgaacaaaatgagcctgatgaaaacaaaggcgtcctgggaattagagaggtttggagggattgaagcgtagtgggtggggtgagtggaagaagggaggtggggcctggagaaggctttgtttgctaaggctttggtttctctaccctgaaagcagggggcgccactacacagctttaagcggcagaaaaaacacggtgggagctgtgtcttaggaggatcctcttggcggccacaaagtggaggatggatagaaatgacggccagttcaagtaaaggccagattcccagcctccttgccccacactggttcagcagctgagctgggaggaatctgcacatttaacaaatgactcaactgattctgatgtgcctaagtgttgcacgttgagaaacatcaagagtccagatgagacctttgtgatagaacagttctgtatcttggctgggcgcggtggctaacacctgtaattccagcactttgggaggccgaggtgggtggatcacttgaactcaggaattcaacaccagcctggccaacatggtgaaacctgtctctactaaaaatacaaaaaattagccaggtgtagtggctcatgcctgtagtcccagctactcaggaggctgaggcaggagaatcgcttgaacctgggaggtggaggttgcagtgagcctagatggcaccactgcactgcagcctgggcaacagagtgagactctgtctcaaaaaacaaaacaaaacaaaaacagaacagttctgtatcttgacagtggtaatggtggtggttatgtggatctacacaagtgataaagttgcatagaactaaatgtgcatttgcacttgtacgcaacactaacagtacatgtaacactggtaaaacttgcagaaggtaggtggattataccaatgcccctttcctggttgtgatgctgtactatagtcatacaagatgttaccctaggaggaaaccaagtgaaggtaattcaggatctctctgcattatttcttataattgcctgtgaatctacagttatcataaagtaaaaaattttttaagaagtccaagtaggagacccaggcctgaccttgagccctgagggatgaaacccaggaagggctgagaggagccatgagtattcagaggcagagaatgttactcttacccttgcctcctcttccccatcctcattctgggatactgaagtcaaagagaaagagagagagcgcgagaga

SEQ ID NO: 3803 - DNA, 4001 bp, Homo sapiens
tcaaaaagcttagtttgctgcagctgatattaagcctatattaacattttgataggccactacaagatacagagcaatatcatcagagttgctttgctctttataaggtcattttatagtactgagacagaaataattgtaataaattactggcacaatgtgtttctagtaatttagaaaatgttccggtatttgaatagaaatataatcaggattcaggcgcagctatattggtctgtaaaaccggattaaagcaatcaatctgttatcaaaaatctctgtcggaagattattaggaccacccaattcaccgtttcaattctaatgaccatttgccctagacagtagaatagataggtggagaaagtgagcttccaatttacatgactttccaaacaccttaatgcctttgcgtaaacatcactggcaattttttttaagttaaaaaatcggcaaaatggaaagacagcggtggtcctttgaccctgttccgctggggcagggatcgggagggtggggattgagacttcacttaagagctgcttcaaggagtgcacagaaaccacagcgggccttttctgaaccatttgctatccccgcagcgaagggacgcttaaggaggaagtgcctgtggagctgagaaagcgttatttcatcgcggaatacaaataattcaggtctctagatggcagccttcaatgcctttggaaagcagtctctctcctcctccgccacccccacctcccctcccaccgcatctcggctccttggcaatgtagtatcactccatgtgtgccctggccagtggatattgggttttgctgctctccaagaatccgaacttaaagtgtttattctagggcctggtgctctgctctggaagctacctacctacctgcttggggaaaagagggagtagggatggcacgaagagccacgctaagccgctgcccaggagaggtggggctgcgccgcagccaggacaccctctccctgggagcaacagcatccttggctcccggcgcgagcgctccgcgcccagcgagcgcaaagagcgcaaaggccacctgcccggctgggggagcaggcccagcaccaccgccccgatttacccagacatttatgggaaagacataaaaatctcaggttcttaatttcgcaaaggactgagttagaaggagtgtggaacaggggcaaaaaagagacaggagaaagaaacacaccccgaaaaacacgttactcgcacccggcagcgcctggggtggcgtccgtgacctaccccggtgtgggggacgagcaaaaccaaaggtgttaaagaaggaactcgcagactggcagggggtgtggggacggtggaggactgtgggactgcaggggacctaggtgttttctgccctgtcttaagatctcgctttgggggcagtctaggtgtcggtcgggggtgagggacaatcttccccaccccagcagccccagacacccgcccaggtcaaggtggaaggaaagcgggggtactttgccctagcccggttccctcctgttttagaccttggaatctgtctctccacaaggtgtgaaacctctccaagctgtgtccgcggaaagtccggctcctggctccacctagggcagagcagacctccgtccctgggccttagaggcgggcacggggctgacccccaacccgtgccactccagcgcacaggccccactcagcatcgcgccctgtggggcagttgacagggtcccctgtagctccagcgaggctgggccggacttatttacaagtgcagtgacccctgtctcctcgctgggagccccgtgcaaaccgaagcgctctggggcaagttggtgagcgactcacaacgcggaacggagtttgatcgacatggtattgggcatagaaagaagcgggtcttaccttggtaccgagagcagggagttgccatccattgttggtgggcgcccagagaagaaagacggaaagtgcaggcgaaggataagtctgtggtgctaggacccagctcccagagtgccagactggcgcgcgccaggagagaggcgcgcaggctggggcggcggcggcgcccacggagactagctcctccctggccagcaagctctgtgcgctgcgaccgcccgctgtcccctcccgccgtcctctctgatcttgcaggagcgcgtggccaacgctcccacctttctgcctggctcctgcctcctgcaggcgggccccagtctcagttgctcgaggatcctgctctatcgctcattcgtgcccagaagcataggtgactccgacaaaattcctctctccccaaccaccatcgtctcccctccctttctcgctggcgtacagtaggtctgagccctgaagttgttcacgcactttcccacattcacgccctcactcctggcaatgccgacactccccactggttgcgcgccactcctctggcttcctgtgtcgatttcatttttgtttgtggtctaccatgttatggtcgatcactcagaacgatgctggctttgacctcctaagtcttttccctttatttggactttctctcttggttttggttttcacgtttctttaactcattttgcttaactgtgacttagtcttctctctcttctgttagaaccgtgtgcgcacatagaaatctcaaaacctatgagagcggccatccatccgaggacagcactcagaacctgggagggagagctgtcacaaacttccccagttgacggctgggtatctccctgagcaaaaaggacagttttcttaagaagaaagacactgatagtagcaaatatctgctaaaatgagggcgctgttgaatctgcttctttttccaattaaaaaacaaattaaaaataaaatttgggacttccacaaatgggaaggttgagccaatgtacttttagctattcctcctagtaagtacaacgaaatcccccggatattatctctgaaacaggcatgagaaaaaggtggacagaagaatgcagaccagctagagatcctgggactcaaggcttggcatgatgatgggttcctgaggttctcccagactttggctgaagaagatgacaacccggaaatgtcaaggggcagagacaggaaaagccttgacaaaggactcctctttctagccaaaggatcaggagagaggcagcttagcaagatggaaaatttacacacaataatagctccactgtggccaaacaccatgagaaaaaacctgtggacctttttcaactacaccatcaaaggccaagtagggagcctacatttcaccatctgtaggctctaaggatgtaagtcagtcccctgggcgaggtggtgtcagaggagactaagtagggaccaggactttcatcccctccaaacactggccgcactcacctcttcatgtctcgtttcccccgtcatggtgccaagaagagcttgaacttccacatccacacagaaataatgaagtccccttcccattccacacatacaggtggcattaaggcaaagtagggagccaggactttttaaaaaatattttttatttccatagatttttggggagcaggtggtatttggttacttaagttctttagtggtgatttgtgaggttttggtgcacccattacctgagcagtataccctgaacccaatttgcagtcttttatcacttacccccttcccacactttcccctgagtccccaaagtctattgtagcattcttatgcctttgcatcctcacagcttagctcccacttacgagcgagaacatatgtttggttttccattcctgagttacttcacaaagaataatagtctcgtgttccatccaaattgctaaaaatgccattaattcattcctttttatgactgagtagtattccatcatatatatgtatagcagaatttctttatccactcgttgattgatgggcatttgggctggttccatgggatccaggacttttaatcctaacaaggagt

SEQ ID NO: 3804 - DNA, 4001 bp, Homo sapiens
tttatctgtaaaatctcattttccagtatgatgaatctgttatacacagtactttcactttgtttattctcaaaacaaaggtaaaattgtagaagttccaaatagacatctgaaataaggactgacctatctgtagcttggtagttagctgccttgaaaatggtgggctaaaaccctgtagttttcaaatcagaaggaattaatttatacaataacaaattatacatgctatctatatcaaaaaaggttgttaaatgtcaaagaataagaaagtagctttccattcccaccttcctgtcttagaattaatctacccacaagccagatcaagtcaaaccaagaagtgatgatagcatttatcagatatttgccctgtgccaggtactgttttaagtactttacttgtatttacttgtgcaattactagcaccatcctgtgatgtcatatcataaccccattttacagctgtaagtatactgaggcgaagaaatattaagtaacttccccaaagccaaagctggtagatggcagagcaagggtttacaccctggcaactatatactagtctgagctctagagaagagttcttaaccactaggcaacatttctcacaagaatgatgaaatggtaatttgaaatattccaccaatctcatcgtggcaggagagatgtaatttttcaaggtatgaaccttttacctctgtcagtttctagtccaagaaacagtggattcaattgcaagtgggaaagtgagtaccacaatgggtcaaactaggcccaagattattcaaaaatagacaaagcatcagaagcctggaaagaatcactgaatgacagagttcagtcaggaaagagacaagcgaaagttaggataagcagatggtgaatcttatttctactgggttgtgtgactgctttgagagagaaaatgctaccttcccttttcttttatgttgaatcaatatacaaatacattgactcaaaaagaattaggaaaaaggagagcagcaggaatacaagtgggctctttgaagacttggaccccgaaccgcgcggttagcttgatgtactctggtataagtgagcaaaaatgtattagaaagcaggttaaagagaggttaaaggcatgaccaccggactggaggtagtgagcggtctgcgaagctgagaactctgcctaaaatgggctaacagggacgagagtttcaagtgtctgtatttgggatgaggaggtatgaaagtggacgctgcgcggtggcagagcatgcagtttctgcctttgggcagcactcaggtaaaaaggggcaggtgtggaggtatacaggtatagaggaggagagaagccagaggaaaagaaggggcgaggcccgggggtaaaactaaaggggatcctggaaggtggaggctgggaaatcaaggagggattgggggcaaccccggggaaagtggtgccgccgcgcgagggaagggcggtccgggggcgtgggaggtagtccccagagcaggccggagctcgccgcccgagcaggggtccgggacccagagagcagagggcgcagtgaggcgcgagcaggaggccgccggtctacggagagccgggggaggggagcaagcgcctggggctgccgcggggactggggggaggggaaggggcgcctacctggacgtgctgggcggcagcggtcagtcctggtggagactcctctcccgctgaggcggtggccgtgtccgccctgggagcccgaggctgcggtggtggcagcaggggtgatggcggcaagtccctgtggcggccgcctccgccgaaccgcatccctcctccccgacccgccctccttccctatctcccgctcctaaacttcttccccgggataaacaaacccgccgccaggggcggccacctccgccactcccgcccccgcgcagcccccacccccccgccgcgggcccgtctgggctccggcttccgagttacgactccagccccggctccagcccgcgagggcgcgtgcgcgcggcggcggcggcggcggctcctgggcccttgctccctcctacagcgccgggcacttccgggcgggcccggatttgccgccgcgcttgggaagccgccaccgccgccgctgctgcatggcactaggctcccggcggggcaggttccgcagccggcaccgctctggctaggcgcacggaggcgccttgcttagtctgacccttatttggccaggcgtaaaacttgtcctgcctaaaagcctactgagacctcctaactggtctaatccgcgggagacgccaaaggcggcggccgtttgtgcgcacaggatttttcttggagctgtagcagtctaggaagccagggtggaacttttgctaagctcccgttgtaagcccagagctgtaataactgctgagacacaaccagcagtatacaggctccagttggaaatcgagaactttccaggtagatgaagtgccccatggagcagttttcaggtggaggggatgaggctcagctggaagtctcaggccagaaggagaggctgccgaggggcggccagggatgcctaggaagtgagcgcagaagaccaggcggcctcctgggaccgcacggtgggaaataaagctgcacctgcacaaatgtgtgaagagaggatgggattgccttgtctcttcggacatttagtttaaaaagggggtgacaactgaactttttattccccacggccatgggacaaagatacttaatcgagctaccaggagtaaacttctttaaagaagtttgggggaccaacaatcccggctttgccagaacagacatgaacgtcattcaaggatcccaactctttttgctttaactgtgcatacgtcagcaatttttgttttgttttgtttttgacagggctgtcacccaggctggagtgcagtggtgccatcacagctcactgcagcctcgacctcctaggctaaagtgatcctcccaactcagcctcccgtagctgggactacaggaatgtgccacgcccaggtaatcttaattttttgtggagacgaggtcttgctatgtggcccaagcagatctcgaactcctgagctcaagggatcctcccaccttggtctcccaaagtgctgggatttgcaggcgtgaaccaccacacctggccataaaccaacttctcattgcttacctggctttccaagaaaagagagagggcagagggaaaatatttattattttgctatgtactgagtattctaagcatggacttgtatcgtctctgttctctcaacaacctctctaaaacttcaacgtagaaatttccatcttaaaattaagcgacaagaactagaaatggcaagtaattcatccagaggttactgggatttgaatactggacaggcagatccccctcatttcaaattaatactacattagctgtcttttttatttcttttttctttttgtttgtttgagacaggatctcgctttgtacgccaggctggagtgcagtggcgcgatcctgggtcacctcccagattcaagcaattctgtgcctcagccaccaagtatctgggactacaggcgtgagcccggctaatttttgtatttttagtagaaacagagtctcaccatattgcccaggctgggctcaaactcctggcctcaagtgatcctcccacttctgcctcccaaaatgctgggattagcacctgaccttacgttagcaatcctgttgacttatttaagacaaaacgtgctttaagacaaaatctgtgccaaaggttttcagataaagataaaattagcaatgtaaccataaaattcaaagttgccttgggctgagttggtagaatgtttatgcagatcaaggaactccaaaagttaaaaaacagaagtggaagtgagcattagggaatggggaaagagttggtggagagaggaaatatttgtgtaaacatttaaccatctccaaacaccagcaaagaacagttgaaacgattt

SEQ ID NO: 3805 - DNA, 4001 bp, Homo sapiens
caggtaaaggagcagtgtacttgaggtggagaggcaacatttttcatgtgctcatcaagagtcacacacatcgcatataattgtatctatttttaggtgcatgtgcgtctgggctcaagtctgggtgactataccaagatggcacatgagccagaacacgctctggtggctgtgcctcacaatagctcatctccacagggcagatttccacggtgtcagtaattggttctcttgggatctatcctcatgctcttattcatctaataaactgctaactttcttctgtggtgagcaatagctaaatcaaaagtaaatttaaactgttcatctgcaaggttggcaaaaagaccccgattccacaccaccacaagtggatttcattaaatgccaatggaaactggcatttgaaatacaatacaagcaaggaaagggggttctgtattctgatccaggagcagctcaacctttggtgtggcagctgaccagtgcctccacaccacaacatccagagcaagtgactccactctggccatgattctggaatggcacctaaaaaaaagcatagcccatagtcttcatgaactataatcaaactagaaaataaaactgggtccttttgattcatttcccttgaaatttggaaaagagaaactaggagccaggttctgaggaagatcaagctgaatatgttgtatttggagactagaactaggaaatcatgagccatgtgctctacagagtagcagagggaacaagctaagagtcagtccaggagggatgggagaaggcagcaggcagacagagagaaagcaatgtccatctggcctctgctgcctggaccttcagccgtgtcttcattctcattcccatgctgcctggctatacagagccttcattcctaagatgtgcaactttatagaacctctctacctcccaccttaacctaaatttgcttgaaaatatgttcatccctacctccaaatgagccccatgcagatgataataaggcagtgaaattacctggggaacaggaagaagggagatgacttgctgcttatgtttctcatttcctttgaaggatatttttacatttctttccttgcatatcacagacttagtcattggaagcccaagtgattactctttctttagctcccaaagctaagaggaaacagactattaccaaattgacaaggaaaggtgaatttctttgactcaaaagccagattatttccagtaagtattaggagcagaactgctgaatttgaaaggaggctcatttccaataaatgagaagttcgtaataaaacacctcagaaagaatcgcgaggacttcaagtacaaaagcaggctgcagggaaccagaagacaaggttagagaggagaatacagcagaagaatcagtcatcaaaagtggtttggatagcctcatgacaaaaaattgtaattaaatctttctctgtcaaagaaaagagacagtatgaaagagatgactagctactatcatttttaaactggagaaaatttcttaaaagtatatccaatgaactgacaaaaggcagacagcattggaaggaggagtagagaagatttcattttgcacttactctttttaatgagcttctgaatgcccgaaacagatacggactcagtgactgggaattcacttttaccacagaggcactgagggcatcccttaaggaggatggatcgtagtcgtacactgggaaacctggacacgcaagcacatggggcacagtgagacaagacacaggcgccagcatggctctgcatgatccagagcaggtggccaggttggtgaataccttacctgagcaagaccagtagttcattccaagagcaaacataatcaatatcttcatcatcatcgtcatcttctccattctggaaatcatgattgtaatcgagagacagagagtgtctctctatgtgtttggggatgacagttcttcctaagaggagctgtctttatcaaacactggctgcttattttgactgcagcaatctgtaacttaaacagaaacaattgatcctggggtcaatattttctgctgacttttcctatggaaaggttccagtttgaggacacttttgaagtttacaactcacaagagaactttagcccaaggcaaaaggcatcaagaggctcaggattccacgtgtgctgtttatttttctctattttaatttcattctttggaggggatataatcttacattcaacaaaatggttaatcttaaattgttgtgtattgagatcccctcatggttctaaagatcttgcagttgactacttatgaaaatagtgtgggtataagatcttcttggaaattatgactttggagaagataattttatataggggtcctaaatattcgaagcaagtacaagtgcagtaaaaagctgggacacaccatcctattaaccaatcttctgtgctactggacacttttgcacatcacctggataataaggtatttacatattgatgattcccatgcactgtaagatcccaaggtagtttttgaatgattaaaaaggagaactacttaattggaagtacagtttgtgttgtatgtaggtcattgtgttcttatttgtggatttcacgcataagaagctgtgttttgtctcagaaagacctggactgagatcttggctctaccatgtaccaggagtatccccttgggcatggcactcaacacctctgaacctcaattttctcatctataaaataggcataaatggttagaggtcaggtgtgttcttagtcagggttctccagaaaggagaaccaaaatatagagggaaagaaaaagagagattttttaaatatatactttaagttctggggcacatgtgcagaaccttcaggtttgttacataggtatacatgtgccatggttgtttgctgcacccatcaacccatcatctacattaggtatttctcctaatactatccctcccccagccccccaccccccaacaggccccggtgtgtgatgttcctctccctgtgtccatttgttctcattgttcaactcccacttatgagtgagaacatgtggtgtttggttttctgttcttgtgttagtttgctgagattgatggtttccagcttcatccacgtccctacaaaggacatgaactcatccctttttatggctgcttagtattccatggtgtatatgtgccacattttctttatccagtctatcattgacaggtatttgggttggttccaagtctttgctattgtgaacagtgccacaataaacatacctgtgcatgtgtctttatagtagaatgatttataatcctttgtgtacatacccagtaatgggattgctgggtcaaatggtatttctagttctagatccttgaggaattgccacactgtcttccacaatggttgaactaattcacactcccaccaacagtgtaaaagtgttactatttctccacatcctctccagcatctgttgtttcctgactttttaaggatcgccattctaactggcgtgagatgatatctcattgtggttttgatttgcatttctctaatcaccaatgatgatgagcattttttcatgtgagtgttggctgcataaatgttttcttttgagaagtgtcggttcatatcctttgctcactttttaatggggttggttgttttttccttgtggctagccatatgcagaaagatgaaactagatcccttccttacaccttatacaaaaattaactcaagatggattacagacttaaacgtaaaacctaaaaccataaaaaccctagaagaaaacctaagcaataccattcaggacataggcatgggcaaagacttcatgactaaaataccaaaagcaatggcaacaaaagccaaaatagacaaatgggctctaattaaactaaagaacttctgcagagcaaaagaaactatcatcagagtgaacaagcaacctacagaatgggagaaa

SEQ ID NO: 3806 - DNA, 4001 bp, Homo sapiens
ctgctctgtcaccaccttctgattgcagcaacctcaagcctaaaagagactcctcactattaagacaggggcgctgtggcatcagaaactagacccagtatcacaagactccctgtcctttggcgttcatgagagcaagggatctattctatttatcccagaatcctcaatagtgttccagcacagttcagccagggatggtcagcactcaacaaagtctgtctgctctccatacagctagcatgtcctgcagcttgccttagtgtagtgctttgctaggtgttaggaacacacatctgcatagtgcaaaggctttcctgtcaagggagggaaggaggcaagcaaacatatgcagacaatacagtgtggtcagtcctatttaacaatgaggcaacacttcacaggtcagggtcattttcacatacagtatctcattcagtcttcccaagtgccctgtgaggcagggagcgtcttccccatttcacatgaggaaggcctggaactcaaaccccagtcttctcccaaactccatctaatacctcagaccttcctgccccaccctccagtccaggaaactcctcactctctaccagtatccccggcccctgccacctctatttcccctgggtctgtatttcccctaaggggtgatgggtcaagattcaaggacaaaatcctgtgggttgtttcctggagggggcggactaggccgcttgcccagcccccagaggcgcaccagtgggttctggaggacagggacggcaggacttcccacctacctggggcatagttcagcaccctcacattaggttcctccagcgccaggacctggaacagcatatcacgagcagcctttcctgcacagtacagcgcccagcctttgaaaggttgcagggcacagagggacgagatgttaaccacggttctgttgaggccaggactgtccgggaaggccttcaggacgctggaagtcaggcagagcatggaggtcaagttcagtgcccagtagttgttcacttgagtggagtcactcaggtccacgaagcctttggacacatccccaagagagcctgaaaaaccaacccttaggagtaactcagtgcaggcggggctttcttcttccccagccctcccaagttcctccagatatcctcttcccatgcagacctagaggaggaagctgcctagcgcttctgaagaggcttctctcttccccagctctgcggaaagacacagctggggaacctagccatcccaagctgcagaatgagaaggcacctgccttgccgtggggctgaaggaaagctctagcggtcctttggagaagcagagagtttacttgtttggagactccaagccctgactcaggcctccgccagagggcgcagagcaaggggctcgggaaagttctacaggcgctttggaaaacccggctggccaattttccaggaagtgggggcagactgttgtcccgacggcaccgagtcttcctgtacacctcgcctccacttgctactcaagctggaacaactagggctttagatttctaggcgtcctatctgacccctaggagtagcccttaaattccccagcggtggaggaagtgggcgctcacatggggagtccgctccagccccggggtcttacccgcgttgttgataagcagcagtcgctgcagccccttgggccgggggagctcgcgcagggcgccgagcagctgctgcaagccggcctcggcgcccaggtcggcgggcacccgcaccacgcgcaggccagaccgctcggcgcccagctcggcctccagctggcgcagtgcctcgtcgttgcgggcgctaaggacaagcacggagccgggcgacagcagcgaggccaggagcggggccagcgtccggccgaagccgcgggaggccccggtcagcaagcacacagcacgccccagcccgccctccatgctcctgttctccgccggcggcgctggcacccgagaccaggcaggaggcggtgcggccgcggggggcgggaccgctacgggtgtcggcggggccgccctgccggggcggggcgggaacctcaggcttcgggccgcgagcgcccaggggtgctggttcccttgggatctggttcccttggttgctggtggcggaagtcaaaccgtggcggtagcccagtccgtgccaagtgggacaacagagagggccggcaggcgcggcccacacggaaagccctagcccggttcccagcgctgccgtgttcttcgcccgcaagctcagcctccggctgggacgcatgctcgaatttcctcccagttccagccctaactttgcactactgacctcttccagggcaggccctgcactgggtgctgggcgtccctggtcgtggccagtgaacaccctgaatgaagcttatgcctgtttaggaattgaagtctctgcttgtttgggagctcaccgctctctggatgacaggagcttcctctgggagaaccacagtggctccaaatgatattaaaacctttcccttttactaggccctgagcagctccgtgatcccaccagtaacccctgcttctctgagatttctgactcctgtccctaaaagtgtgttccccaggattctgctcctgctcatgctacagtctccctggcagcaattccatccactttcagcttcaagtttgcgcaatcatctgtctgtacctccaggcaggtgcttcagaaaaatccacatttttttttttctaggagaggaggaacgtgagacaagttggcatgcagctacatatattaaaaaggaatctcttcatggtttccttcttagtggccgagtggtattccattgtgtatatacatatgtccaaatattgtgtgtcagtttttaaaaaacgaatctctttagagtttagcaagggcagtaagtaacctctgataacttagcccaattccccacagggctgatccctcccctggggctaaacagcaaagttaccgcctttccactattattgccaactctaaggaagaaacaacttggaggaaggcttttttcttttcttttttcttttttttgacagagtctcgctctgtggcccaaactgaagtgcagaggtgtgatcacagtttactgcagccttgaattcttgggctcaagcaatccttccacctcaggctcctgagtagctaggattacaggtgcgcaccaccacgcctggctaattgttttttaagcttttggtattttaacgctgataagactctgtatatgtgtataccatttgaagttgccctgcttttcacttacctattcacactgaagataaagatctcattggcccaacagcttactatttaaagaattttaatagcttctccctgctctccaggccttagaagacaggttgatgaaagcacgatcccatccatccattcatttgacatttgttaaatttctaccatttgccagatttttgaagaaaaggagggaacaatgaagggatggcaaaaaatcagacctagactcttctgaacctagctgcttctaggaggaaccacttgggaacagcccctaaggagaacgtggttttcctatactaggagagggtctggaaaattcttcttttctgaggaagatgattatctgctctcgctaatttttgtgtttttttatagagatggctcttgctgtgttgcccagtgtggtcttgaactggactcaagcagttctcccatctcagcctcccaaagtgcagggattataggtgtgagccaccccacctggccaacagtaactcttttaaaaagatacaaatgcctgaaaggtaagaaatgtgtaaaaattgtgttaaaaacataagcctgataaaggacatgggtaggggaatgggtgaaatttgaataaggtctgtaggttagttattggcattgaatcatttcctgactttgaccagtgaactattgttatatcagagagtgttcttgtttttggaagtacacagaagtatt

SEQ ID NO: 3807 - DNA, 4001 bp, Homo sapiens
atgtttccgtgaaagcacaggaaattagttattctgtctttaaaataaaacaaaattaatgtatatttttctaatgaatttgataaagtgaaccctaagttgagtgtggcattcaccaaaactataagaaaaaaccccgtttactataagatggcaaaatatgggtcttagttcaagctaacacttttaaagtagcctttctttcacaacttaaaaaaatgttgttaataaaaaatggccctcactttgaatctgaagtattttttaatgtcaccaagtgctattattaaatgtgtactatatatgcatgtatacacacataaaaataagcactacagatgtgggcatgaaaattcttagcaaaacccccacatatttcaaatactgttcttcttcattattgtcctctaccataattagcacgttacagcataacaggtggctttcatttatagaatgcaaaattaatgaaatttagagatggtcttgtctccaaaaacaaattggccattctataaaaagtacaccccttaatctacaaaacaaacagaaacaaactcccttcatgctggttttccaaattataggaatttctgaatgtagttaagtaaattgaatgcatttactgacagcttaaaattcatacacttcaaggaaaacaagtcattattatggattttataagaaaggggaagagaaacaaagattgccgatttttccagcttggtaaccccagatctgtttaatgctctctgagtgataacaggatttactgctatacactgggctgctccacaaatgctaaatcttaggcaaatttgtgggcagttgtgttataggtcctgacctagccattctggacagacagaccaggaaagcataaatagtactgctataaactaactatagcatctgtccctaacaagcaagactcacaaagtatttttttaaaatatgaggagacactgaatagactgtcaacacacataggaatgtttaatacactcaaataaataagatatgtgctttaactagtcagacattgtttaaatttagtgggtgaagaaagagagagggtcagacaggcagacacagcctcccaattatgcagaatgatccttcagatcatgtgaacgctataattaaatgttgctaccaaatccccactaccctttctcccacctagaaaaagttaatgcatgaattcagtatgagcaaattgtgatttataaaaacaaacaaacaaacaaacaaacaaaacccaccctattcactccgtaggggaataaagctttcttgcattaagtcacgcatcatgggggtaggaaaaaagcacagtactgaaagaaatccaacgtaacacaatagtaattgttagaccacctccttcagctcacctctgcttattcatttgttttaaagctctacactacccacccaagaggtataccatctctgcaagctgtttcctaggcagcatcttttagattcaggacttaataataaaaaacaacaacaacaacaacaaaacatttctatcagaatatctaaggagaaatttgttttcagaaagaggcatgagaggctaagagctctgtgtctatcaacagaccagaggttacctatctgtccttgcacgtgggcacacacaaatacaaacacatacacactgtggtcctctacaactaggataaattttctcctttaaaaaaatgctaaaagcaggcaccagaaaggttaagaataagagaacaatgaaaaaataaagttcatgtaaacagtaagcacgtacctgccaggcgatgccatttcctctacattgtggagcccgagtgctgggtattagcattattgctactataaagcttccgataaaaatggatcgtctcttgctgacctgagaaccagctggctgcctgagaagtggtttcccccatatatgattcagtctccttgacaaatatactgcattgtaccggatgagtcatccgagggttagtccgcattttataggcctgttgtgtcattactcacattcaacatcctgcttctcaaaagtggaaactggaagcctgacagctgacagatgcgttttccaattaaaatattgttttaaaaattcctgtaagttatgattaccaatcattgatgaaaggatgaaatgcccaggaagcaaatggcacagttcaatacctgagattacattctggagaaccacaagtgcaaattcttcacctgcccccagccccaaaccaaagaatttcgtccaaagttgagagcaaggatccctctctttaaagttatcagctgaattcgtgtaggcatggacttgttgattcttgtgctgtgaggttacccagctgcagaagctatgtaaaaagtatacatcaaaattttggtcctggattaattttataggtgggatagtggcattgtgtttataaaatgtctacttttttagagaggcatgttgaagtatgttaggggtaaaatgatatgatatctggggtttgttgtgaatattttagcaaaaaataaataagggacggggtaaagaaatgtggcaaaatcttgataaatggttgcatctgtgtagtgcgtatatgcaggctgactgtatttctcttttttgaagtatctttgaaaattttcataataaaatgtttttaaaaattaaaaaaaatttttttttcagtccctgcaatctaatttatacctaaacaaggcacttttctagttaggtatagagctaccacacatgtgagtgtgggagctgaacttgaagttgtttctgccttccagctgggaggtatgatacatgtatcctgcggctgttgtgagtgttgcatcaacctcctgaacaaacgcctagtgccttctcctcccagggcgatctggtgattgtttccttatgcattctctgaggacacaagccctggcttcatggctcagtgttaacgttatgaaggagaggtgactatacccagcttccttacaaggttttggaaatgctccatgagaggttatgtaagtcacatccatagtctcttaaaccagcaggccctttggtaatgtggcacagggtttgcttgactcacttaatgttcaaattgggtgtcttaaaccatctggaggaggaagagctttgatttagtggctgacaaaaaaaaaatccagatatggaagctccaatgtatgtgaaataaaaccactgttgaaactggctgtcactttaaaaactatccatattgatgcgctgtgaaaacatgacaagtcaccacaggaaacaaaatagaggggtcactaaagcccagagctcctgcatggcccccttagtcctgaaacttaaaaatggaagcatgtttcaggctgaggttcacacctcagcaaacagctgactctaattcttaaaggaccctgtctaataggacttcaaactggctccaaatggttgggacagtcccatccaacatcaaattacaacctcactaatccagactgattaggattgtgcatgggcctcaactgaagacttccttggctttgacaattctttcctcctcacgaggactgcaggctgcagccttatcaaaatgtttccttgaaattttataacttttcacacacttgaaaagcataatttaccttaatgcagcaggtagaaatgggggaaattaataaacttgtagtctaatttgagtttctatagtattttggagaaataagttcacagttcattgaagaattttataattcagatttcagtaatgaaaaatacaaaaataatagcaataataatgtgtgcacacatgcacaaacaatgagaataaggcaaagatagtaaaatggtaacaaatggggaaatgagaataggggagtccttcatactgttcttgcaacatttctgtaattatgaactgtttcaaaataaacttaaacattcacaaacacacaggaatgaatatatataacccctattcctaaaaaaattaaaaaagaga

SEQ ID NO: 3808 - DNA, 4001 bp, Homo sapiens
cactgtcacctgctgcaagagacaagcctcccagtcgcccagccctgagtcacttcccctcccagcactcttgaggctcaatgcctgcggggggcaaaagacctggggcctccggagcacgccttccgaagcccacactcccctgcaaagacgcgcgcggggcctccctccagggcgcgtccccgcggctgccaaccagctctttgcgcccaagcccgcgccgccgctaccttggctaatggcagcactgaatgaaaggaacggatgcaggctccggatttatgaatgtgcaggggaggaggggagggatatcatgtgacaataaaggagcgcgtcttattcacaaaaaaaaaaaagtggctggtggcgggcacagccactgagcagcagcggcggccgccgcgcggtgaccgctcaaaccccaggcataagacttgaggcgtcgggccccgcggccccgcccccgtcgcacccgagactgaaaacgcctcagaccagggagggaaaatgccaaactggacccctggaccgcgaggcaggaggcagctgcacctccgccccgggctggcgacagtcacgggtcccgcgcggggcggcccaggatccctccggcggagcgccccgagcattgttcccctcgggcccgcgggccaggcacaagcccgtgcacgcgcacccgcgaggacactcacatacacacacacacacgcgcgcccccagcgcgatgccccgcacgcccccgccgcacacgcctcggtccgccccgagccgcccgaccccgcaggacgcgtgtgccggccacaagcgcgtgcacaggcactcacgcgccgcggggcccctcgggcggctccagcacgccggcccgcgcggggaccctggcgcaccagacccccgcgcagcccgcgcctgtcctcctctcgctccgccgtgttttttatgaatgaaaatgtggtatgcaaatgagagcgattcaagaaaacgaaatggcggagcctaggccccagtgggctccggagcggactgcagggctcgcggggcggcgggagtcacaaagtcactgtgcaaaaacccaccagccccgggaagccggagtgggggtgtcaggtcttccgctctagccgccgaggatttcgggggcgggggagctgtaagtcctccgagagggagcggagaccgccgggaggtcacccgcacgcccttggcccccggagctgccaccagcccgccgaccctaggcgtgcgcccgccagcccgcagcagtttttgccctctcctcacttcaacaagcagggaagcctcgcgtcccaacgccgaaaggtcagcgagtcgctgcaccccacgccaagttcacccaataagcgtccccgcccgcatcctcagccccggcccccacgctgcccctgaggggcaccctcgtcccaccccgcgaccaaacttactcgtctgggtgtgtttcttcggtcattttcttgttcacctagacgcctgtcccgcggcgggcagctttgctcccttcatcttcctgtccgctcgccccccttcttcacatctccggagatcgcctgatttggggagggggggcggctagagatgaagagggcgccgcagcagaaggggaagcagggcgcgggatagggtttgggggaaggggtgcaaaggcaggctgcgcggggagtgaacgccgcagcgccgtggggagaggcgggcggaggctccgggggctcgggagcgggcagagggggcgagatttgggaaggggacggcggtgggggagagcaggagaaaaacaagcgcgcctcggagcggcagggactgctgcgaggaggaggagagcgccggccgcgggtgggggggctcagtccggggtcgcccccggggggccgggccaatcacggttccggggagcggtcggcggccgggggaggtgcgcctgggaggcggtgcagggcgccccgtccgagccccatctctcgactccaccgatttactccatattggattctcaccgccgccaacaggaggaggaagtagggcggaagcgatgacgtcttcccagcggccagaggtggtggagtgcaaaaagcttcctacttgcgaccgaaaaaaagggagaagaaaaaaaaaaaaactttgtcccgcctactgagcacgccccgcttcctctccccctccctcctggcttccactcccgggggagccgcggagccgagttgtttgcttgcgccgcgaccgtctggctccgaatcctccttgattagggctccgggttttaggaagcccgagaggagggaggaggcgggagcggaggactcgtacacatctggctcccgtttttgccccctccctccttccaaacaccaagattaaaaatcggggggttgggcgggggcagagatgggaaactcaagggaggggagggagtaaaacagctgaagaggtgctcaggctcagaggcacaactacccccaccgcggggtgggaaggtaggggcggcgcaggtgccaggggctggcttctccagcccaacccaaccagagaggggagggggttcgactttgccaaggttctgaaaggcagaggcttttccgtttcacgtgaatcttgtgattttttttcttttttgtctcaatagaggaatggatttttgttttgttttgttttgagatggagtctcgctctgtcctcaggctggagtgcagtggcgcgatctaggctcactgcaacctccacctcctgggttcaagtgattctcctgcctcagcctcccgagtagctgcgactacaggcgcgcgccaccacgcccagctaatttttgtatttttagtagggagggggtttcatcatgttggccaggatggtctcgatttcttgacctcgtgatccgcctgcctcggcatcccaaagtgctgggattataggcatgggccaccgcacccggccaaggaacggatgtttttaagaatcattactcatgcaaagaaaaaggtcaacccagcacagcccagaaacgtttgcatttccgtagaaattatggaatttctcgcgttaagaagcagccccggccgggcgcggtggcacacgcctgtaatcccagcactttggaaggccgaggcgggcagatcacctgaggtcgggagttcgagaccagcctgaccaacatggtgaaacatcgtctgtactaaaaatacagaattagccgggcgtggtggcgcgtgcctgtaatcccagctactcgggagctgaggcaggagaatcgcttgaccccaggaggtgaaggtggcggtgagccaagattgtgccactgcaccccagcctgggcaacaagagcaaaactccatctcaaaaaaaaaaaaaaagaagaagaaagaaagaaagaaaaagaaacaagagacatagtccctatcccttgctgctctccaaacacagtagacttttccatcctcttgaatgtccatgggacaatccagatacgatgttaactaaatagcaaccactgaacaggttaagagattaaatatttgcctcaggctgggcgcagtggctcatgcctgtaatcccagcactttgggaggctgaggtgggcggatcacctgaggtcaggcgtttgagaccagcctggccaacatggcaaaaccctgtctctactaaaaatataaaaattagttgggtgtggtggtgggcacccataatcccagctactcagtaggccgaggcaggagaattgtttgaacccaggaggaggaggctgcagtgtaccgagattgcaccattgcactccagcctgggcaacaagagcaaaactttgtctctaaataaataaataaatgcctcaaatttagtattcctaaaatttacatacatataagagccacaaatgctccaaaaagtttcaccttgagtcagggataaactggtggtttactccaggctttgtgcttatcacagccatgatctctgtagacatggagtagggttcacgctggtgatgtgtggtggtgggg

SEQ ID NO: 3809 - DNA, 4001 bp, Homo sapiens
ctatccattaaaaaacatataaattccttttaaaacaacctactgaattttaatatacttataaatgtcttagtgacataaaacccaaaatgcattaatcatttcatttaaaaatggtttcctacagaaaaaatgcatacttggtattaaccaaagacagacgaggtactgtaatgtcacagttgtgaaggtccaattaataaacaccaacttttcacgtagaaaaaattaatgcatagctgggttgtggttacagattatggacgatccacagaaaaacgctgcgactccccacactgcaacattgcctccgcacaccactgggcccagtccttcctgcagcccctccctatggctcaggtcccctggtcgcagatcagattccgatccgcaaccacaggccggctcccctctgcctgcactggtgatgcagggcgcccctccggcagagcgcagcccaagaagaggtgcaggagggatcatcccaaaagaaaagactctcccctgctcacacctagctgacctggtcctcctgacgccacatccagcagaagctgcaggacaaggtagcagcagctccaggcctcggccaagggcagccccgggcctgggtggggccgggcgggggccgcaggcgccgagcggccgtgccaagccccgccagcgagaaccaaggaagctgcgatactgctgcattgtgctgcatcacggcgagggcaccgtgagccatccatcttgccaaaaaagcacatccccgcccaaataaaccccaccgaattcaattttctgctccgccgaagcacccccacacgcaccctgtcctcacttactatctggcctggctttcgattggaaaaataatggacagaggtttgcgttctgatccccaccccctcctcatctgatggcagcagttggcacctttcctatcacaaaaacaaagagaaggcgccccctaaaagagggccgtgggcgtggtgtggggggtgatgacgagccagcccacctacccaaagcaggcccggagggtccctgcgctgagacaaacctgttgaagagagggtggcaggagctgaagggcgggcgcagcggcggctcggcgcccggaggcggctcacgcccagccctgggagagtggggacggcagaaagggcggggggggggcgggcgcacgagggtagcaagcgcagggatggggcggaggtgggggcgcggggccgccgcctccggctcagctgcagcgcggcgcagccgggaccacgcctggccgcatcccctgcaccgctacgcgcagagcccggccctgtcaccgccgcccccgctccccacccgcggggccacagagagggcacctgaaaatagaccctccggctgtccgctgtccgctccgcacccacctccgcgccaggggcctccgcgtcaggggccgccgcgcccggctgcagggaggcgccggcggaggcagggaggaggaatcgccgcgccgcgccggggctggggccggacggcagcggtgcgcacggcgggtctgctgccgcctcaccgcagagcctgccgcccctcgtcccgcatcatccgagtaccaatgagcacccgcgacccgggctccccgcgccgcccccgcccgggctttgcagcctccctgcccccacgcggctccccgggcgcagggcaggcgggcagcggcgtcctccggccctgggcccgcgcccctcctcccgcccgtccgccgccgcggagcccacccgggaggcagccccagtgagttggcatctccctgcctcgggccccctacctacctcccggggatggggtgggggcgccggggtcccgtcctcctcccgctcctcggcggccgggcgggtgggccgggaggcgactccgcgggtctgtccgcggctggggccggggctcacaggacgggaccagtgggcgctgctgcgcagggctgcgcgctcgctccgggaggagaggcggccgagggagggactggaggaatccgcagcctgcacggcaacagcggcactgattccgggggctgggcgggagcgcggggggcggggggaggaggagaggagggcgctcgcagggagggggcgaggggcggggagaggagcgcgcggggcgggcgcgcgcgcacacacacacaagcgcactcccgggatccctcccgcacgccctccgccctccgcactcctccctccccactcccgcccgctccctctgcttcgcccgccctctcctcctgcccggagccccgcagccgcccagggagccgagcctcgggcgcgtccacgtcctctccagctgaggctcttcccgggtccagcccggacctcatcctcccagcggcggggaccgaccaggctggccggggcggggtgggcactgctgctgccgctacccgagcaggacaataggggctttgtctccacagccggagagggccaatttcacgtttaatttgaggctaattcgattatcgccatggaaagaggcggtctaattttctacgtgatttgtgcagcctcttttcgcccttgatgttgcgttcggaatgctggggagagagggtatttagggaggttttggagcgtcacttgcttggttggtttgagatgcagttggtgatgccttataggttctacccaacttggagaagggcgacggcgacctcttcgtgggaaaccttgggcgctggaggatgggtggtgggggtcgttccttgtgaggttaatgtattcttttgcaaatgctttttcgcccaccctttcgctttgggtagctgggagcagaccctacaagtggttcatccaactcctgcctctcagtgcaggctccgctcgaacctgaggccaggtgccctgccccagtcactcccgagagaggggtcgtccggccgcggtggagggccccgtgatggcgtggggacttgcgttttcccctatgcgcattccctgaaacggaaactggacgtttcctcaaatttttgtcatgtgccactgccccttcccagtcacctggtctaccccgtcagcccctcaggctgtgtagaaattccagaaccgtcactgttgtgaagaaaagatggtggaatcaccaggaccacgaatggaaacgctctttagaaaagcagtttgaagaaactgactttctccttgttctgtaaagtgcacagggcggcactgcgggcattcagagggaggagggcccttcctgtttgaaaaagccccagggctttttccccatacagacctgatcacctggattaaaataaaacaaaaatacacggcagccaagtagtttgtatcatgcttatatctcagatcactagaacctggcctgatgggtttatatgtttgtatgtatttttaaatgaatattttaaaataaaactcagtgaaatcgtcacagcaaactgaagatgattcttccttttaggccttcataggtttgaatgtttgaacctatgtttacttttgataggaaaaaaattgaggaaagcaaataacattttttctcagaaggtgaatcaacacaaccagaccgtaaactctcttaaaggtagggttatttctttcttcactctgtacatatagcaggcacttaggtactaaaacaaatttgttgaattgaacacaatcaacttgtaagctgctgccctcattaggtaataagggaaatccactagaaagcaaagttgtttgcctttcacttacttatttttttaccatggaccccagcacctccccactcacaatgttaatgaaataccaaagaaaacagtaacaatattgggaagtgcatccatttaaattaattcttccagtgttattctgaaatggttattcctttatcacagacaacggtatttaaataaattttcatttgatgaatgattcacctcccttaccccattccactcccacttacgttgttttttaattaaaaaaaaaaaaaaggccacacacaccttagcaaggtactctagtaaagcccca

SEQ ID NO: 3810 - DNA, 4001 bp, Homo sapiens
ttctcccagttttgctttttttctgagacttccaggctaggctggcggtggagtgggctgacgatcccggtgggtgctttcccccaggcgggatgacacaatgaagctgggagtccgggccaggggaagaggaggagcacgcagtggattctccgacccgaaaaccgtgaggcccctaacaaacctagataatgaacgcccccccccaccccaactcctctatttactacttgcaagcgcccccagcttaagttttcaaaaaagcaaatttgactgccgaagagctcaagagaaatgaaccaaagagacacagaaccgttccccagagcgaagggagcttcctctgagctaactgccagaggaatgtggcacagcccagcaaatgtttaaaatcacgtcctgttctgcctcgttttccagagaagtgtcattactgtcaactatttcacaagacaaataaaccaatgaatgaaagacatcctcccccctcttcccaatgaaaaacattctagggctgagcggcttccttccttcctcctcctcacaggaaccacatttgcagcactgaggaggttaaaataagaaacacacagtcctcgaatactacttttttacagtgctagagccattcccagcctactactgactccaggggcttccaaacggaaggagttctgttttcagttaggaaccttttttcatgtataagctctgagacactgctggccagggcctgctggctgggcagggacagctgaggggtgcaggggccgcagggaaaacagcacactggtgcacacacaggcttctgctctccctaaaaatatgttcagtaaaatattggactcattcaattgtctgagccttaaaaagactccaagaaacctgtaattgatccaactaatccaacccatagggttgaaatgacaataaccggctttcattagaaattatatagcccactaaatagatgggaaggctcttcccaacacatcagaaaaattaaaattaagcttctgaataaaaaactgtaatttaccaaaggcttaggaacaaaaagacccctccctcctcccctttgctattgttctacaggactgggtctgagcacggcactttacacctttaaagcttcccagaggtaagaggctgggggctgggagccagaggcgacccggaatcaaatacctgcatactaataagtctatgagcactgatctactaggaggtaaagttagctaaaagtaaagaaaatgtgtgtgcagcagttatctgacaacctagaaagccaaaaaggtgctggagagacagggactccaaatggtagctcttctggagtggagtatgagcaactgccttccctaagtcgtgaatggggtgcccgcagccaaccacagggtctggggccgagctgtgaagccgcccgtcttcattagggtcacaaataaagcctccaagaacccccgttggcacccaggacaggcccggcctttgggagggggcttaccttgcagctgcttgaatctgccttccagctggttgtagttgtaaggcacctgccccgtgtacgccggcgacagcggcccggagatactagacgtcctctgcaattccattatgcccggcgtaacgccccggaggactgcgccctggaaatctcgctccagccccctcccactcccatccaacacgcagcagcctccgcagcgctcggctccttaggcgagccccattccggtctgcaagtccagcagggtgatctgatgggaagttggctgcaagagagtccaccttagctccgcgaggagttaccacacaggcatctaatttcttgctttcccttcttccgtggcccttgcctggaagctcgaaataaattactgaggaggagggagaagcagagaggaggcgcaggttctacttcagaacttttaaatatggccaatcctaagcatgccacggttgccgagcccgggagctcgcgggcgcagcgcgcacacctcctcccagctgcccgcggcggccgccggtttgtaattttatcaggagccactcgccgtgtgctgggcggtgatgtcacctgattagcataacagcattgtattagaaatgcaggctataccacgaggaggggcgcgggggagcctagccggcccgcgaccccctaccggtcccgcacggtccgcggtcgccccagccgcccggcagccgccgacccccggccgggccctggactcgccgcggtagtgccttcccaaacagagctgctggaattacaatcttttgttgagcctcatgtaacggaaaagtctccgattactatcacttgaaaaggctagcgcgcccacgggacggcctggagagtgaagagccccaagggtcccgggcccgcgcggctcattcactctctagcgtctgctgaggtaacgcggcccgcacctgggcgcgcgcgactgccccagtgcgctggcgccaaccacgcggcggcggcccggcgagccaccgggaagaagtcagacaaagtcactctcagggcgctgtgcagcgccacagccaggggaggtgtaagttcgggctcagtgaagaatctcggctgacttacgctgccatcaggggatatgaaggcggtggtttcctggaataacacgggcctatgataggaattcgacgcaaggaagatttatgggagcaccgatttgcaaggcattgtgggaaaaaggtacacaggtaaacaccgccgagatccctgacctggagttgtttatgatccggaggggagatgagggaaccgaaactaccctcaaattcctactctgatttgtaaaacaaggcctctaaacttgtggttctccaaaattttaaatctctccttcccagcttcttctcccaccaatctcaaccaaaaatgaaatcttccacatagaaaagagaatgatcaaaatgtattcttgggaaattgactctagatctcccccctctctctccaccctcctgtcccccctttttcctcactacctaaacaggcagacaacaaattacacttttggcatttccagtttggagccctacagcaatactcactgaagaaggtaatttcattcctcagggatcccaatatgtagtaaagacgtggtcccccaccccaggttcacctcagtccccagggcacttgtaattgaagtaactgcatcctgtccaggcttagaattaaacccagagcctagctaactgctcaacgctgaacaacccccaactccttccagccacataactaggtttttaatacttccacatgtcaacctttggcttttgaaagccaggcccaacctgaagaagacaacatttcttatcatctaagatgtagaacattttttaaagcccctaagtgctgccaattcacaatgctgatgggaggctaggcagagcattacaaaacacttggtcttggaaaaagcacttgactaggattcccaagacctgagttgctagtcctggccaagcctcttaattaccctatgaccttagaagaaaccctggattctttctaaacctcagctgtcagactgagtaataattaatgcccacctccacagggtcactgaggagatgatgtggaaatgttctaaaaattatcatactttcaaaattaagagtatattcttcaaaatgcacccctcctttcatcaccccccgcccacacacacaaacacacacacacacaccacatcaagactacaagagaagttgaattgggaaccgtctcaatgaagatctttttaacaagccctttttcacaactaagtatactggtgaaatgataagtctctaagtgtccagctatggcactgaaaatgagattacaaagtgctttgccaacttataacgttttaatcattgggccacttaatgaagaaagggagtcaccactcagtatctccctttcagctccctctagtatgggttagtacatgaaataatttttaattaaccaggttgcacat

SEQ ID NO: 3811 - DNA, 4001 bp, Homo sapiens
cacatatccagactattagtaagtcacataagatcctcctccaaaatgtcttgaatctccacgatcttcagtgagcctttagtcctcaacctccctcacttgaactaccacactcgcctcttaactgccctccctacttccactcttgcccctgcaactcattctccacttatcaactcaagatcatttagaatatgctttagaaacaacgaattacttcccaccccatccttcacttagaatcaagccacatttttatgaggcctttgaaaaggccctgtcggactgagccctgctcacctttctaaccacctttactacttgctggagctcctcagctcttgtcataacattctttcccacctcaggtactctctgcctggagtattcttccccctgcttgtcaattggctggctccttgcatcccttagatcttaacatttcaggcctaaaataggtttctcaattatattttaaaaggagcctatttacttcctgtatacagtaggttataacacaatctgtaattatttttattttacttgtttattgcttgcactgctgtcaagagagtaaataccatgaaagaaggaaatgcatgtgccttattcacttccatatcatagaacctagcacttaacagatgccctacaactattaaatgaacataatatgtacaaatatggtctctacagaggaatatacatttattttccaccactcttaggcaatgccacacattgcattcatctctttctgaagaagtgatggcacataagaatattcctattcttcagtgacttgggatttttccctcctttcaaactatcttaatcactgtaggcacatgagcatattccaaaccaataatttggaggttgctatgatgttactaagggaagagccactaaactaggacgactgcaaatcaggacaaaggggcaaaaggacgtgcacactaacaaatactaaattaaaattggaaaaaaaaatttaaattcaagaaggcaaacaaaggaggacaatttcttaagaagcacctaaacaagtttccatgaaggaccaacagagtgcttgaatgttagcagattcccaagtcacaaaaacaaaatactagagctgaaagaacctgagatcagacagtcccgctatattcagaaatctgagacccaatgaggtgaaacagtttactcaaaggggaaagatatgtggcaaaggactatagcccagtgcctggaacaccaagactagtctcgtttcccattccacacacaatatgttaatgacatgtcacgtgaggggttcgaggaaagttgcctagagagttcccaattcattcctttcctccggttactgagcgcctcctacatgccaggcgcactacagaaggtgcagttgattcagacagggccaccatgaccgtgaaaagggtgcttcctctcccacctccgataattttaggtataaaaacaatccaggtaaattagccgggtgtgatgacgggcgcctgtagccccagctactcgggaggctgaggcaggcgaatggcgtgaatccgggaggcggagcttgcagtgagccgagatcgctccactacactccagcctgggcgacagagggagactccgtctcaaaaaaaaaaaaaacaggcttgcccaggcttttctatgtctgttatgcgctaagagctgcagcaatttggctgaaaagaggtgtcacgaggtagctaggaggggttttcgggtggtcggttgtgagagaccgctgacagtaaaatgtaatgaacttctcacttttaaaaaaggggtgttattgcccaaatgagcgctcagaacttttttaatggccccaaagatcccggagcccggacgccgggctcttgagaacccgcaagacgaccgccaaggcgcacgcacagctcaccttcccgcccggcacgtcagaagacccgagattccgtgagtgccaccgcaccttccggttcccgccggaagtttttcaaacgccagaaggtccgcctcgcttcttccggaccaagttagccacagacctccaaggcgcggcgctaccgaacggggcggagccaggctggacggaggcggggctagagcgaggatcccgagggagcgccggggtggggctggttcgtagaaatgaaaaatgactttttttttacgtgttatttaccaagaacactaaactcttaagcccacagatacagccaaataaattagattataaaagtagggaaataaggctgctgttgtctacattcgaatttagcagatcaaaaccccatggatttgttttagaaaattctaaaaagcagctttccactgctaatgacttatttccagggactctgagtactgaagagcctagcaagttattgaaatgacctgtgaccgtgccttgttgcagatctaccggaagtgagcatagattttactggataatttttgtgattgggggaaaaaaaaaaggattctttctaaatttagtaaatctaatcttctatatctgagattgttggccaggaaagatcagtttccgagattgtttagggatttttttttccttttaattagcacagtcgtatgttgcctttagtgatggttccagaaggcctagaattgtctactacaatcacagtctccttcacaatttatggtcctgaagaaatactagagaacaccttaccgttcaggattgtgggaagagaaaccagatcatagaaatcaacaacaataatgtactacttactattcacctacttttgatgttgcatttgctactcaggtttatggtaaggggttgtcttggtcaattttctgctgctgtaaccaaataccatagactggtagatttataaagaaagagatttgtttggcttgtagttctgaaggctgggaagtccaagacagagggcattattgttgtgtcaaaatatgatggagggcatcatactggggtaggggtgggggaggcatgtgaacccaattgactcccgaaataactaaccctcctgtgataatggaattaactcattcatgacctaatcatttcctaaaggtcccacctcttcatactattacaatgacaagtttcaacttgaatttttgaaggggacattccaatcattgcagaggtagtaagggtaaaggtgaactaatatactgcaaagtcttttgacataagtcctgccctggaggaatttacgaccaagagtaggaaccagatacagccagaggaaacagacacccaagcaaaacagtctagcttcaagggttgggtatgcaggtagtagccacactacagtgaggaggagagtaagagtgggccagcaaagcattgaagcttgactttcctctccccacaagggatttttgccttacagctggggaagaaaaaaaaaatcacaaaaataaatagcctgttaagattttagacatcagacatctggggaaaataaaatctgaagcaggttctctaaaattaaagtatgtaggtagtggcctactctaaaggccaataaggactgtccagagaatatttcccttggaattctataagagagtcactcccactacacgctgtcaaggaaaatttgtaatcacttaagtataaaacaggccctcccacaaaaactgccttttctgtctaggacattgcccaatctattgtttacttttggatctcaagtgctgaattccaagaaattcatgggtttagactgaaagcctggaataatccggacacccacctgagactatgcaatagggtttgggagtaatgaaaacatgttttggatttgatggaggttgttttatccctccaaagtatatagctcttcccatgatattcactgatacattatcatttgtatgttattatctgttttcaagtccttcccctatgggttctagctccccagggcaaatgtaataataatagtaataacttacctttattgattacttacctgtgccaggcactaagt

SEQ ID NO: 3812 - DNA, 4001 bp, Homo sapiens
acaaaaatcacatttctgtcaaatgtctgttcaaaaatcagtgaaataaaaaactaatctcttatctcctgtatccaacatccttctttctgtgcaaattaaaccatctaaatctgagtaaaataaaatctgtgtaaaataaagaatcttgttcacagcaggcttttagtaaatatttgttgaaaggatacagtttagttcttattacttgacaacatttgccttttaaaaagagtgagaattcagttaagattgcataaatattaaatcttgaccaataaagaagattcagaggataagaggaaattaagaaagacagtttgaaatccgtctctgacaccttcttctctcgaaatgaggcatcactttctctttacgagacagattatgccagaggcattctttatcctaatttctaatccaaacttccttgatcttttgaccctaggaatcttctactcaaaataaggcaaaaccttcaaggttttgatttcgtttgataacttttctctgtttatgggctctgttctcttcttgcatagaatatctgcctacttaaaacggctaaaaggtcttaaacctcagagattcacaagctcagatttgcatcttagcgggcaccagctgtattgtcttctttcagtcccataaccttactcagcctcagtttctttgtaaagtggacataataaatatctctcaaaaggttacaacagagttaagtgagaccatagatactaaacgattgggcatggtaggcaatttaacaatgtgttcgttcttccctttccctgtgagactttactgaggctggacagtctttctctgaaccctgacatcccttggtctctttcctgtctttccttcccagagcagaaagcaaagttctcctgaacccggattttttaaatctagaagaacatttgagctgtaagttacccactcacatttcaagtcccagggaaattggaaaggtagatgaattggtggtgtgcttggtcccttttgggaggggcctaagaagcggggaccctcgcttgagtcagtgggatctcactatattctcttccccatctgtgaagtctggatttgggctctacccaccttcctccttagacctgcaaagactaaatcaatgagaacctctgagctgagtttccctcgggagatgccaaacgcgtaagactctcccaagatcccagaactaatctgtccccaccctgcaaggaaaaggtgaaggaagaaagggaagcggggcggggcgcgatatgccacaggtaaccgccgcctgcgcgcagttaaggaacagtcctgtccaataggtctccccaacctgagctttccaggtcgcctcccgcccgcaggacctctttctctcgagcagccagaggatttggagctgctgagagcggatgaggtcctgggggagtgaaggcggcgtctgtgccgcagccgcttgtcaactctctagcgtccaagccccggccccggcccccgccaggtgcgccaggcaggctggcctccgcgttcctcacagcgccccacgctgcctccttggcgttcctcggtgcgcgctccacgctgcgctcctggacgccgggagcagggcagtgcgctgcactgggcgcccgcaagggaaaaacgctacctgtggaagtaatgtaggcagaagaggcccagaagtaccgtcccaggtggcccgaagagggagaggggctgccgggcgaggatccccgcgggcaccgcgaaggaaggcagctcctgcaggaaccaggcggcgcgggctggcaggcgggtagccgccggcttcaggctctccgtgtgcttcccgtagccggagggcttcgcgacgtacaaggccagtgccccaagggcgaccaaagtggcgctgcctgccagcactgggctctgctggcactgaacctgcatcgcgccgtgttcctcgccggtggccgctgccctcccagaagagagcgcggcccccgcaacccctttatggagcgccagacgccacccgtgtccgccccctcggccttggctcccgcccctccatcctgcctcccacctcgccgcgtccagccctggcgcggttcgcagcaatacccctttctcaaggatgcagccgcggtggccggaggagaacgaaggccttcttagttcgcccgccctctccacggctttacattcacctcccgcttaggctgtccttccatgacttgttcctcaactattagcgtctgatgcgcatacttctggaactaagacacgggaagaaaaccccacggggacgattcagctggggtggttcttccgccccaacacacaccctctgtgccgtcggtcaccacgcagtcccaccctcgaacacccaagccaaggtctttccatctcctccggttcctcatgcactttcactccctcacagctcccacccaacataggaccttccttggaccctgaaccatcctggctctctgagcgtctgccagcccttctgctctggggcgccgcgctccttagccactctcagcatcagtgccagctctgccccaccacacgcccccggcaggtaccagtctctcccggccctaattcctcagcggtttctctctgcatccccgcacgcgtccctgagccgcctgcctgggtcagagaggagcgtccgctgagctcgggtgatcatgcacagattggggccagaagtcgagattctgcgcgtcctctcccgccaccccactcccggtcccctagagtggcccagactcaggctaaagtctagggcttctttcctgggatgccctttcccagctcctagagccaatgagccgtggcccatcaggtggtggcctggcgaccccgctgttctctgaactcctgtctagccgtcatacacgcagacgcggttctttctctcttccgtttcccacctttatgttatcctccagcccctccgtcttctacctcttccgttctatgattcagcttccaggctttcttggctgcctcctcctctgtttcccaacccttcttttcttctcttccttctttcttcgacccggctttctcctttaggttgacctcctcttcccacctgctgtttacctcattctttcatcttcctgtcccatctcccttgattactttatccctgttttctcctctggtccctacttggggctccaccccagtccttctcatttttcactcttcccttactttggaggtctcttctcttccttccccttcaactcacgcctcccaggagccccattcagtgtatctccatccacttctgctggatcaggccagctggtccaatgacagacacaacccctcatctgctcccgtttggggtgtctcctgattcttggcacacatggtatatggtgatgctttagcactacagggcaccctctgcttgctgaccaagagtcgtttatcatattcccattgggttataattaatgctaatcatacttcagtttttaattgatcaccactttggaatcactcatactgaccgaagcatttttcatggaaaagccaggtcttagccatcatagccgtttcaagctttttttgcactggctttagagtacaagtccagtcccagcttcctcagctacaacctgcttgttgaagatgcccaaatctagattgccagcaaagatatgagctttagctctgcgttttctccctgctggaaaactccacttacatgtccttcagagacctcaaaaccagccctacccaaaactaaacccagttatttttccctccacccacttggacccaaattctccttctatgttcctgagtgttacctcttccctgtcctcaattgccatagcctccctaggaagctggctcatagactcagtaaacaatagatttcatgataccatacagcattaggagaacaggcagtgcactatttcaaacccagctcaatggaatatttttttaaatgaaatgtcttctgtctcaatttcttcctctct

SEQ ID NO: 3813 - DNA, 4001 bp, Homo sapiens
agaataccaaccattcctttattaaaataaatacctgcttcttcttcgccggctgtaacgatgacaatcataagcataatgtcccttttcgccacactcatagcatctatcatttggatcaaagggacgtcgggcaggtggtctatcaaaacgtgatctccgaggcatgcctgtcgatagttcaaccctcactcgggagccacaaatcaccctaataaaagcaaattaacaaaattctaaagttaaaaatatattcaggacttatagatttaaaaagaactctttccaaccactcactctttccaaccactccttcccccccaacaaactttggcggtctttaccaagccctaactccatctccgctatcttctttaaccttcgtgtgcctttagcatttaacactatgaccagctatttaaggtctcttccagacttcagaatccaaatttagcactaagttcattatctagccacagtatattttaatgaacagaagattcataacatcttacttactttccatccagtcctcgtactgcatcttctgcatctctaggatcttcgaattccacaaaggcaaatcctggaggatttctcgcaatccatacagttcttaaaggaccataataactgaaagccctttctaactctcctttgccagcgccagttcccaggttaccaacatacaccttggtttctgtttaaaaacgcaaatagaagaatgcacgttacgcaaaatctggcccaagtttcaattacttatttgccttaaaacgggccatcctcaagattgggtaaagcacatttaatgccctctatccaagacaaaacttagtcgtaaaactggtgaaagtccgcaaatccctgagaaactagacttttgacaaaattcttaacgttctaaataatgcggggtgaccctcccgaacacaagcagaaacgcgtggtaggatacaccgaggcgtggggcggaacctggcccggccccacccatgagtcccggcagccccgggcgcaccgggagcgcgcgggcccgcagcggcagcggcgtcggcggcgggagggcctcggtaggggccgggccaggagagcagggctgcgccggctctcgtcctccgcggcaaacgtcccaggcacaggctcgcccaagactccagctccccgccccagagccataaaccgcgctggaaataactaaaaaaaacccagccgccagtcgcagattacgtccccattcccattccgcaatttaaccgattgtttgacgagaacatgcagctcacagctgccaatttcgttctatctcaaacacaaccacgatcttacagctgcggccagatctgtccgctgaagtggcgggaaagcgctgaggaaatgcgccaccacggtcctcaatgtgcgcaaaatggcagccgccgccgagggcggggggggaggggggccggcgggcagctccgagaaaggcaacgcgaaaaccgtcatctcaaccctgctttaggctggattgggccacaaaaatgcccaagagtacggaactcggcagagatgtacacccgccatcccgtctcccttcagcaccccgcctccgctgcctccggcttcgtctggcgtgctcctaagccgccattacgcacgcggaataaccgtctcccaacctccgcgacaaccctacggcctcgcagtgctcactacacccacaccaacgtccctcaccggactccagcttcttacctcctccgtaccgcccgtaacgcgacatgatgacagacccgcgtgctcggctctttagcaagcagcgcccagggctcgagtgacgcaaaagctgacacacaccttcacccgccaagagtcccggcggcactacgaggaagagcccgggttcgcgtttatatatgcggccgctgcgctttgcgcatgcgtcatctcgttgttctgcgcggcacaaaggagctgggcggaaacagccaagaaacgacgcggaaggaactgaagagactaacacgcgggtcatgggcggagggatacgtttctatgggaacgccacgatctctccagtaaacctgaggccttccccatgctgtcccgccccctcctctccccgttttctacaccctccttgtcttctttcccgtctccctaccctctgcctcctttcgtttttccccaggctagggaccctcagccttaacaatcttagtacggatgcattagaccggcctatgaaaggctgtacaatttaaccgctgatgttgcagccgtcgcgcccttctgctgggggacctggcctagtcagctactctgatctttggggctcatcagaggtaatcgaaggtttggccatggtgaaaagtccatgaaccccgccattctgagtagtggtttttacaccatagaccttgacgcaccctgggactggtggtaaagcctcctgtcctacacgccccctccaacttcttttgaaccagtcaccagtttgcaccaccacggtctgagttcttggagtctgaaagacaaaggaatagagctgtggggtcccgctcccccctcccccctttatattgaaattgtgacaaaaccctgaatgtttaaagcattttggccagtgacaatttggaaattatttgcatctgaagctcaaagtaactgatttgcttttcctaatgctttctgctttgtaacacgtgtgatccaccaatactccgatcctgaggactgggactcctaagtcatctttgtgtatctccactcagtggaaatagcagccttgctgctcagccactcaacagtaccaaataaatgcaaaacttctttacattagaattgctctagacaccaactacaaatagagaaaaagttcttttttgctagaaacatagacattacatcgtaaattcttggaatacacaaaagttggaaatgtacataaaaaaagacatttaggtatttgcatttttatctttttcgtcttttgcaacttcatttggtgagtataggtgtggaatggagagtacagggaaagcaggcctagttggtgaataaagcatggattctttccaggtcatgctatgattttatgcatattttttacgttgattaagttatggagagaattaatctctctcaggaagatctctaagaagaaaatagaagctctgtagagtatatgtgttctcccttagtcttggtgatttttttcttaacaaggttcttctcaaaagaaacaataattataaagatctataggttcttctcaaaagaattaaacaataattataaagactatataggggccaggcgcagtggctcacgcctgtaatgccagcactttgggaggccgaggcgggcggattgcctgagctcaggagtttgagaccagcctgggcaacacagtaaaaccctgtccctactaaaatacaaaaaattagcctggcgtggtggcgtgtgcctgtagtcccagctactccggaggctgaggcaggagaactgcttgaacccaggaggcggaggttgcagtgagctgagatcgtgccactgcactccagcctgggcgacagagcaagactccatctcaaaaaaaaagattatatggtatctgaaagataaaatataaattctgtaaagcctcactaagttgactttcttctgttaagaagctatgaaaattactgttgaggccgcgcgcagtggctcatgcctgtaatcccagcactttgggaggctgaagctggcggatcacctgaggtcaggagttcgagaccagcctgaccaacatggaggaaccccgtctctactaaaaatacaaaattagctgggcgtggtggcgcatgcctgtaatcccagctactcgggaggctgaggcaggagaatcgcttgaacctgagaggtggaggttgtggtgagctgagatcttgccattgcactacagcctgagcaacaagagcaaaactcctaggccgggcgctgtgactcacatctgtaatcccagcactctgggaggc

SEQ ID NO: 3814 - DNA, 4001 bp, Homo sapiens
acctcaatttgatgacagattttggcctccagggcagccatcttttcattatcaccattttcagccattgcggctatctgtaaaatttcccaaattagcataaagttattttttatataaaactcaagaatagaaagataatgtttacaaagtattaatatcccgttttcttaaaaaatcaagaatttctattttcacgggttcagtttctttactcagttctcaaatatctcaacaaagcaacactttggaataagtgatgaaaaaatctaaaaactataaaaaacttgtctttcagtaaatcactaccccatcttctataacaagaaactgtttatcttcacttagctggtcaagcaagctttagggaaaaaaactccaatcacttaccaaccatttccagttttaaacagataactatctatctgtatattaccatggctctctgtgcatttgtttggtatgggttcacctctttttttttttttttttttgagacggagtctcgcttttgttgcccaggctggagtgcaatggtgcgatctcggctcactgcaacctctgcctcccaggttccagcgattccgccttcgcctcctgagtagctgggattacaggcgcccaccaccacggctgcggctgactaatttttgtatttttagtagagacggggtttcaccatgttggtcagactggtcttgaactcctgacctctggcgatccacccgcctcggcctcccaaagtgctgggattacaggtgtgagccaccgcgcccggcctcatttcttttaaaatgtagtcacaactgacttacccaaaccttgttaccaagttagacatcataactttaaggtgaaaaatgttacagttccttagatactctatgctaaggaacatacgaaaacaaaaatgggagaatgtggtcatactaacacaacattaaactggggagtatgcctactaatttactaatacattggatagccagtttcctgtttcgtattcctgacattagcactgcaatgaaaaaaggaagctgtgctattagtttgctagaaattacaaaccaagtcttctacttacaaagtacttgcctccaggactctactaagccacccagtcatcccaactgtacaaaagttatgtgaacaaatcatcgagaatattgccattagttgactctagttatgaactgatgtaggtacacttcctggaagcatcccctgacacactgcaattgcattcgataccatggatacacataggaagcacttgcaacggggtactgtgtgatccacatccccctagagaaattactcaattttatgcattgtcttgtctatcacaatctacactcctaagttactaccgtgatctagggccccctacaaagcaaacgatgaaataaaataactatttagaccctgcaaaacctatttggcctaattttggaactgcgtttcatcagatacttttccagaatgtacgactgtaaatgaaatattacccacgttttcccgtttcacactgaaacctgatgtgagcgatgaaggccctaacagaccaaaagagtgacgctggtgtacatctgcggcccaaagttctttggcctccagtcagtcccataggctccacagaaccctccggcgtttaccccgtgcccacctccccagaaactttacagagatggccacaagccttcggtgagactagaaggcggtggaggtaaaaaaaaaaaaaaaaaaaaaagacgcaatggggatgagggcagccacagtcccgtctctaagcaaccgcggaactgcctgggcaccagccacgtgcggggaaccccaggatcccgcattcctcgcgggggcagcctcgccgccgcccgcgccccctcggctccgccgcctccggctgcggcccacgcggcgctcggcctgaacgtgaggaaggcgaggggcggacggacgccgcgagaagcagtaaagaacggaaacgcgcagtcgcgcaccagcaaagcggacccttttgtagcttctcattagccaccgagagttactcacctttaaggttccggcccacagaagccgcgccacaggctcacaaacagcaacagcaacgactccacctcccagcgccgccggccagcctaaagcgctccaagaagatggggaccgtcccggcagctcttgcggcctgggtgggcagggccacggacgaggtggagcggtccctgtgctctgagcatgcgcggctgccggggcctcccagggaccctggagtcccgccctcaatcccaaacagattgggttaaaaagtactccaggttgtaggggaatggctgctagtttgtgttagtataaacatttatttttaagtatttctggacggcgtctgtaccccagcccttcctttggccctccattcatgtgaagtgctttgggttttttttcagatattttccaaaaatgtgtgtgaatacacacacacatcgtgttgtagtagttctcaaaaaaaaaaaaaggacaagtgaaatttaaaaaaaaaatcaaagatccatgaaatcttagagttttgaaaacaatacagtacagcgtgtaaaaactgggtgtctggaatcagactgcctgcttcaaataatggtcctcctgctgtgaaactgtgatcttggacaagttgttcaacttctctgttcctcaggtataaatagggccggtaataaatactacctagttcatacaattgctgtgagtattcaacttgatgcaatattgtcaacctaaagggaaaaactgaggcaaaattaatataagtagacagtttatttgagccaagtttgaggactgccacatgagagcatggattcaaattgccctgaatatatgctctgattagcagcacttacaagtagcttttaaagaaaaaagaagaggcagttcctaaattgtttaccgataacttacattacaataacaagctattgattggctatacattcttctttgtatcacaaattcgaagaacatgaaaatggatgaagcaggtagtaagggacaaagtgacttgaaacaattgccccccaagcatggcgactgatatagtttggttctgtgtccccacacaaatctcatctcgaattgtaatccccataatccccaagtgtggaggggaggaaccacacacagggtgggaggtgactggatcatggggatggtttcccccatgctgttctcctggtggttttatagggcagttttccctgctcttgctcgctccctctcacctgccactgtgtaagacatgcctcttccccttccaccatgattgtaaatttcctgaggtctccccagacatgcggaactatgagtcaattaaacctcttttctttatgaattaccgagtcttgggtatgtctttattgcagtatgagaactaactaatacaggggtgtagggacatgactgaagtcccaaactcatatctctctgtgcctgataaattccgcatacctcacatagttcaaactgctctgggctcttttttcttttcttaaggccaatgagaaaaaacatatttaacagggttgtgctcaggtagtttaaattcaaattaattagattatcttttatccactcaaagaatatttatctactctctattttatgccagacacaattgaaaccttaattcttgttttgatcaagtcagtgagaatatatgtatttaacagaacaaataatatcagtgtcagggtactctcattcatccattcagctaactgtttattacatgcctgttaatgtcctggtatggaggcttaacactgggaatagaaagaagagtcagaatctgcctagagacagagccacctaaacaaatataactgcttcttcatgtcccacaacatctgggcagaactgcagtacagcctattatcagaagtcacaccggcaaaaaaaacatttatttcatgttctcatcaggtccctggtcctttgctctccctttcttg

SEQ ID NO: 3815 - DNA, 4001 bp, Homo sapiens
cagttctcaaatatctcaacaaagcaacactttggaataagtgatgaaaaaatctaaaaactataaaaaacttgtctttcagtaaatcactaccccatcttctataacaagaaactgtttatcttcacttagctggtcaagcaagctttagggaaaaaaactccaatcacttaccaaccatttccagttttaaacagataactatctatctgtatattaccatggctctctgtgcatttgtttggtatgggttcacctctttttttttttttttttttgagacggagtctcgcttttgttgcccaggctggagtgcaatggtgcgatctcggctcactgcaacctctgcctcccaggttccagcgattccgccttcgcctcctgagtagctgggattacaggcgcccaccaccacggctgcggctgactaatttttgtatttttagtagagacggggtttcaccatgttggtcagactggtcttgaactcctgacctctggcgatccacccgcctcggcctcccaaagtgctgggattacaggtgtgagccaccgcgcccggcctcatttcttttaaaatgtagtcacaactgacttacccaaaccttgttaccaagttagacatcataactttaaggtgaaaaatgttacagttccttagatactctatgctaaggaacatacgaaaacaaaaatgggagaatgtggtcatactaacacaacattaaactggggagtatgcctactaatttactaatacattggatagccagtttcctgtttcgtattcctgacattagcactgcaatgaaaaaaggaagctgtgctattagtttgctagaaattacaaaccaagtcttctacttacaaagtacttgcctccaggactctactaagccacccagtcatcccaactgtacaaaagttatgtgaacaaatcatcgagaatattgccattagttgactctagttatgaactgatgtaggtacacttcctggaagcatcccctgacacactgcaattgcattcgataccatggatacacataggaagcacttgcaacggggtactgtgtgatccacatccccctagagaaattactcaattttatgcattgtcttgtctatcacaatctacactcctaagttactaccgtgatctagggccccctacaaagcaaacgatgaaataaaataactatttagaccctgcaaaacctatttggcctaattttggaactgcgtttcatcagatacttttccagaatgtacgactgtaaatgaaatattacccacgttttcccgtttcacactgaaacctgatgtgagcgatgaaggccctaacagaccaaaagagtgacgctggtgtacatctgcggcccaaagttctttggcctccagtcagtcccataggctccacagaaccctccggcgtttaccccgtgcccacctccccagaaactttacagagatggccacaagccttcggtgagactagaaggcggtggaggtaaaaaaaaaaaaaaaaaaaaaagacgcaatggggatgagggcagccacagtcccgtctctaagcaaccgcggaactgcctgggcaccagccacgtgcggggaaccccaggatcccgcattcctcgcgggggcagcctcgccgccgcccgcgccccctcggctccgccgcctccggctgcggcccacgcggcgctcggcctgaacgtgaggaaggcgaggggcggacggacgccgcgagaagcagtaaagaacggaaacgcgcagtcgcgcaccagcaaagcggacccttttgtagcttctcattagccaccgagagttactcacctttaaggttccggcccacagaagccgcgccacaggctcacaaacagcaacagcaacgactccacctcccagcgccgccggccagcctaaagcgctccaagaagatggggaccgtcccggcagctcttgcggcctgggtgggcagggccacggacgaggtggagcggtccctgtgctctgagcatgcgcggctgccggggcctcccagggaccctggagtcccgccctcaatcccaaacagattgggttaaaaagtactccaggttgtaggggaatggctgctagtttgtgttagtataaacatttatttttaagtatttctggacggcgtctgtaccccagcccttcctttggccctccattcatgtgaagtgctttgggttttttttcagatattttccaaaaatgtgtgtgaatacacacacacatcgtgttgtagtagttctcaaaaaaaaaaaaaggacaagtgaaatttaaaaaaaaaatcaaagatccatgaaatcttagagttttgaaaacaatacagtacagcgtgtaaaaactgggtgtctggaatcagactgcctgcttcaaataatggtcctcctgctgtgaaactgtgatcttggacaagttgttcaacttctctgttcctcaggtataaatagggccggtaataaatactacctagttcatacaattgctgtgagtattcaacttgatgcaatattgtcaacctaaagggaaaaactgaggcaaaattaatataagtagacagtttatttgagccaagtttgaggactgccacatgagagcatggattcaaattgccctgaatatatgctctgattagcagcacttacaagtagcttttaaagaaaaaagaagaggcagttcctaaattgtttaccgataacttacattacaataacaagctattgattggctatacattcttctttgtatcacaaattcgaagaacatgaaaatggatgaagcaggtagtaagggacaaagtgacttgaaacaattgccccccaagcatggcgactgatatagtttggttctgtgtccccacacaaatctcatctcgaattgtaatccccataatccccaagtgtggaggggaggaaccacacacagggtgggaggtgactggatcatggggatggtttcccccatgctgttctcctggtggttttatagggcagttttccctgctcttgctcgctccctctcacctgccactgtgtaagacatgcctcttccccttccaccatgattgtaaatttcctgaggtctccccagacatgcggaactatgagtcaattaaacctcttttctttatgaattaccgagtcttgggtatgtctttattgcagtatgagaactaactaatacaggggtgtagggacatgactgaagtcccaaactcatatctctctgtgcctgataaattccgcatacctcacatagttcaaactgctctgggctcttttttcttttcttaaggccaatgagaaaaaacatatttaacagggttgtgctcaggtagtttaaattcaaattaattagattatcttttatccactcaaagaatatttatctactctctattttatgccagacacaattgaaaccttaattcttgttttgatcaagtcagtgagaatatatgtatttaacagaacaaataatatcagtgtcagggtactctcattcatccattcagctaactgtttattacatgcctgttaatgtcctggtatggaggcttaacactgggaatagaaagaagagtcagaatctgcctagagacagagccacctaaacaaatataactgcttcttcatgtcccacaacatctgggcagaactgcagtacagcctattatcagaagtcacaccggcaaaaaaaacatttatttcatgttctcatcaggtccctggtcctttgctctccctttcttgtcttttcttttttatctttttctttcttcttctttttttttagacagtctccctctgtcgcccaggctggagcgcagtggcaccacctcggctcactgcaacctctgcctcccaggttcaagtgattctcctgcctcagcctcctgagtagctgggattacaggcgcccgccaccatgcctggctaatttttttatttttagtagagtcagcgctt

SEQ ID NO: 3816 - DNA, 4001 bp, Homo sapiens
cttcaagcagtgtatttgcctctgtgcatctttaaacagaagttattccatatatgtcatcatatttcagaagggtctatgacacttccaataaagggtacgagttctgtaataaagagtgttcaataaggttccagtcgattcatcaaaacaaggcattaatatcatggtagccaatatcttgtctgtctttagaggaggcaaactggcatatgaatcactttccacaacaaaacaaaacaaactaccctaactctaatatttgaacaaaatattaagaaaatctaaattgagaaagcaaaaatatgctcgaaagcaaacaccaacaaaagtttaaaggctacattcctgattttacaactagcaaagtggaataagaaacaagtacattttgctgtagtcagatttacgtgcaacatgattcatctcctctgtattttatcaaacatttttgtaccagttgccaaagcatgtaattaaacagatttatgcagtctgaatgcttttaaaagttctattccctgagaattccagtgccatctgacaattccatgttcaagaagtaaactataagtacaaagttagctagttttaatagctccccaaacagaaacaaaattaaagcccatttagtgtagttaggtaaattaaactcgtctaaaacacatttgaaaggaaaatgattccgtgccagttgtacagatgccaaaactaaagcaaaacaaaatatcctgttcgagatgtgagaattctttcaaataaaaacagaacaaatatggcatgattatctgttctggatttctgatctctgatgctaacacgatgcgtgagtagctcaagtcctaactgtaaagtcaacacggtcaccaaataatcagcggtcacagcacttccatttctaatcgcttagaggaggaagctatccgccggctcactttccggtttgtagcttacaacggtcgcgggacccacagggacgcggcccgagtggctctgctccggcgtcccgtccgcacggatctcccccgggacgcgggcggaccagggagcactcaccggcagtccttgagccatatcgcgatcttctcgttgggcacgtttcctgggggtagagagaggggacagcacgttaccacccaggagcactacgacggcggagtcaccctggaccctcccaagtaggaaaatctaccacggcaaatgcagcctaagcgacacgtctcagtgtcccttggcagggaaatcggatggcacccagttgtctgtgttgacgctgggggcgcctcgttcagcgcgcgcgtttgaaggtcggaagtgtcccctctcccctcggcctaccgtgcccgaggctctcccagaactcgtggcaggcgcccagggcgcacgagactctccccagcccaccagcctccccccggagcccggccgggagcaccgacctcttccccccgctgccggcagctgcgcgccggggaggtcctcctcctcgtcctcctcctcgtcctgcgtcgtcgcttctgtggacagatcctccgtctccgacgcttgccaggagctgcggcacttggcccaggccttcctcctgcgactcgccacttgccactccagttcctcctccgcctccgccgacgacgacaggggccggtccatggccgcactgggggctccgctaccccagccggaccctgcgcgagacaaggcggcggcagggacccccgcccttgctgtcagcgcccggccgggcagggggccccggggagctgaagcgggcgccggaggaggaggaggaggaggaggggacagggagggagggagggaaggaaggggagggaaggggcggagggccggcgcttcacatgaaggcggccgggcgcgcgcgggagcgctagtggcccgagggagcgcggctgggagccgagcgcccgcccggcccctgctccccaccccctgcctgacgcgcccggagcaggccggccgctgcgcgtctgcgcgccttccctcggcggcggcccacgcccccttccggccggggccgcgcggggcgcggtagggcggggcgcgcccggcgcgacgcggagcaggccagcccccgactactgcccgcggaatgggcaagattagtttgttaataatctttcctcctctcctcctcctcctccctcacctaaaaatagaacgtaagtggggaggccaagtctcacaaaacatcccccgcgagaaaacaagtgtctgcttgggcaccctgaaacatacacttgaaagagtcgcctgaatatagactctttagtgtccaaggaattggggtaaggacggaaagaggtgcttgattggtgttgccaaaatgtaaaaactgcaaaagactaagcttcctggagtgctactttcatacttaaagttatttatcgtgtttatgttatgaatgaaaatgaattgtgaaaggatatttaatctggaaatttcacattgaagttggactttggtgagggagaatagaggaaacaattgggacaatgtggagatagttgcttggattttggtgagacagcatgatacaagaaacaaatgatgtcagggttcaaaactttttaaagccagctttggcattccgttttgttatgtttaaattctcattagcaaaaatactcaaattctatccaaaaccagacacaatgtgacagacctatcaagcagcattgttcccctaaatgttacatctgaactatacatataagtaaggcttccaatattttattgtacttggctatgctctgaagaacaagttagaacactttttaaaatcttaacgtgattgaaaagaatattttgcgtagacaaaatattttaaggaaggaattatttttcatttgaaattaaaatccagagcatagtaaaattcctaatggaagcattcgaattacaaggtaattaagtgcattgtcattgatagctacaggaaaccataacttttggagaatttggaatgaagaatgctctggagatgaaatagtgcctagtttttgtccaggcatttacacataagtcatagactactaaaatagcacactgattttcctgccttcattctttcctatctcctttctagcgcattgctctagatttacaattccaagacatcttctaatggtttactaatatccccaagatcaaatccaaaatccagactagctttccagaaccatcataatattctcctgagtctcatctatgtactgccaaatgtcaggggagttagaacagtgatattaatatctctatggcttgaaatttcactactagaaaatcttttctttgaacctataagactttctcagccttcaagggtcctgtagtaggatgcagctaacagtttaatggctctccaaaataggtcagagtctcgctgcctgtgtggaagatgaaaaagagaatgaataaagaaggtacctaagaagaagcattgaaagggctggtcaagtgccacaaaatatgctgccttcaaagttttatccagggttcttacgtatccaccctgttcctctgctgctcccagcttcaattctatcatatctaagtgctgttgcctactctgtctttgctaattaattcattcctgttctttctgtccactaccttcatgactttcaaaatctagctaagccagaactttttgactccaccattccaccactcctgatcacacccctcccacagggatctgatatacaacagcatgtctatgtcatttatttggggactggattgtagagtaaataatatgactggccctggaaggtatgtttggcttactagccagattgtaaattgtgagagatgatagaacattcttcagtattcttgcaccccttacacttttaaatgctgatcccacaagggataatgggtcttcttgaggtagtttctgttttctgtgttcttcaaagagacacctaaattgattattttaaaatttgcttcatgttatttctataatgcttatattt

SEQ ID NO: 3817 - DNA, 4001 bp, Homo sapiens
gaatgatactcagttcacaccaaagtggacctccagagaacaaagatgactgtggtaagagtatgagaaagactccagggcttccgcctccaggtgctctgttgctgagccagacagtgctctggctcttgttctactctgcccgtcagactataagcctgtaaatattttccgaactctctcttaccagctggcttctcgtaaagttgtgatcctaggatgtgctggtgaaagactgggaggcaatctttcttttcccctgacttggtgaagctttggatagcagtagtagcaggcaagggaaggtgtctacatgtgactcctgcagcagtcgtgtgcattcggattcttgggtttttaggcagcagatgctgtggcacttccagtaactttgtgacaagtacaagcttcagactaggggtgacaatggctccctgaagaccaaatccatctctctaatgtggacctctcacctaagcccagacctgtatacctaatgtcttgtttgctatcttcacctcaagcaacattcctaaatggaacctggcattttcttctattcctttcattctttggtatctgaaccatctgttcagccataagatgaaaacctgcaggtcaaccagactttcattctcaaccccagtcaatccccagggcctgccaataatacctcctgaatttttcctgttcactacatgcctttaatagaagtcacttacctcgaatgccctgatctcaattttatcgcctcaaagccgtctttcaaaaatacatatctgcctactggttcccagcttatttcagattctgtgactccatgtgacaaacctgtctatcacactgcacaaagaagtactgttagaaacctggatgtgccaaattgttacttcagtgcctttgcacaggatgtgctcacaatctggaatcccacccaataatctgcctgctgagctacttttcatccttaaacccagctcaagcatctctttccttatctctgaggtcatttttcaccaccacatccatccctgggcacgtccctatctctgtttaccacaatgaactgaattttcttttgcagactcctggaggaatgagctgcagagccagaactctgttcacctttgtatccctaaaacctaggacagagattggcacacagcagccccttaagaaacatctcgaatggaatgaaatgtgcattacatgtttgtagcctgtcatcaaacaagataaacttccaagaaaagcattttctcaatactgattaagagtaaaactaaaactgaatgttaacagaaattataatggcaagaataaagcataaactctattgaaacatctaaaatggctgggtgtggtagctcacacctttgggagacggggatgggatgatcacttgaggccaggagtttgagaccagcctgggcaacacagtgagaccctgcctctacaaaaaaataataataaatgaaacatcaaaaatgtccaacagcaggaaatttgttggtaaattacagcacaaactacatgaatactctacagtccttaagatcttgctacacagcagggtctctgactgacagcatcagtgtaacctggaagtgggttagaaatgcagagtctcaggcccgccccagtcttgctgactcagcattttaatgagatcctgggacattcatatgcatattaaagtttgagaagcactagcttaaagtactcagtacttcacatttattgacactgaaaaatataagaaaaaggcagttttataaaaatctatgcatctacacatgtagttacctcctgggatatatctattaaaggtatgtgctctgtggtgggcaggcatatgcaaacccacccccaaaggccaaggaagaggctgacgaatccagtttctcagaaagaaacgtgtgatggggacttacgaacagaagccatgtcctgggtggcggcgagacaggataatggttgcccatgctattactccccagactgagggtgtatacacccaggtcttaaataccatactgaaggaatgtataggacattgacatccaaccctcaggaaaatgcaagaatttgccgaagggcaggacttatggtataacggcaagactgttttgacctaagggcaagatttacagtaagtatatgaaagtagaaaccttagaagccttcctgggactggggttagtcagaagtcaacatggcagattagcatccaagatggcattgctttagcctccacagtataagagtttgacttcccaagaagtttcatcaaatccctctacttcagctcagcaggcattacttcttctgatttgcaagggaccatgtggattccacgtccctcaacatcacaagagaagggccaagctgggaacaacagacaaacggcagagtggcctctccatgatcccttggagaagccagggcttatcagctgaaagtcatgatcaccttgacaccatctggactgttttcactcatttcttttgtttgcgattttctgttcggtgaaaaggtggcagttgaaggttggattacatgaacattgaatcaggggcatgctttgttaattgctagaataactgtgtcataaatttcaatagcaattatacttttgctttttggtttgagatgggatcttgctctgtcaccctggctggagtacagtggtgtgatcacagctcactgcggcctcaacctcctaggctcaggccatcttcccacctcagcctcctgagtagctgggactacaggcacacaccaccatgccgagttaatttttgtatttttttttttttttgtatagacggggttttgccatgttgcccaggctggtctctaactcctgggctcaagccacccaccagccttggcctcccaaagtgctgggattacagttgtgagccatcatgcccagctggcaattaaactttttttttttttttgagatggagtctcactctgtcgcccaggctggagtgcagtggcgtgatcttggctcactgcaacctctgcctcccgggttcaagcaattctcctgcctcagcctcccgagtagctgggactacaggcatgcgccaccacacctggctaatttttgtatttttagtacagacaaggtttcatcatgttggccaggctggtctcaaactcctgacctcaggtgatccacccgtctcagcctcccgaagtgctgggattacaggcgtgagccaccgcacccagccggcaattatacttttaaccaacaaaaaacgatcagactgcaggggaagagtgttcacgtagccataggtaattataggcgtagaggcatctggaagaaagtacacctgtcatcaacagttagtacaattgttttgtctttgtttttttagagatagggtcttgctctgttgccaaggcaacagtgcagtggtgtgatcataactcactgcaccttcaaactcctgggctcaagcgatactcccactttggtcttctcagtagctggaactataggcatgtgccattgcacccagctatctgtttatttgtagagatggggtctctctctgttgcccaggctggtcccaaactcctggcctcaagcgatcctcccgcctcacctcccaaagtgttggggttaagggcgtgagccaccatgcatggcctggtggtgcaattgtgagtgagtttatttctttttgcattcctttttttttttttactacctgaattccatacattaccagttctatttttgaaaaactgaaactattttcacttagggaggaaatccttaagctacgattgaaatttaagctatgaaaagacatttgaaaatcacccaaataaaatatttttaggatcccttgatcatctctttagtatgggacaaaaatatccccaaaattaagcatttaggcttaaaaagcagaaacaaatcatgaggaacttcactaagaaaggaccacacgtttgctgaactggaaaaaaac

SEQ ID NO: 3818 - DNA, 4001 bp, Homo sapiens
gctggctccaagacacccacctcagccctccaggacctggaatggactcccacagaggactcaccaacctcttttcattcattgcctcccgaggccaacctgctagataaattcccctcattgctgcaaatagtcccacaaggcaagcagggaagaactagaggagcaaaccaaagaacaaagagtgtgttcttattctgccacggatatatccttaacgttcatcaccaatctattttgataacatgcaacaatttacaatttatgccaaaattataagaactgtccaaatagtcgtaaatgtgagctctcaaaatttctgcctgtcagccctctctcttccatgagccccttcatgccttcctatctcacctgtttcttttctcgcctagacgaagaaatgctgatcataacccagaatatccaagggtcatttcatcttacaaaaacagcagcatccatataacaggcacatgggtaaaagactcaagacatgctggttatatgctctcgcagttcgtatgaatctctccttctccaagtgacagctggaattcaggtgcttctaggctctgttactagcaatgttagacactcctcgaagctgtcaagctctcaggattacacaagtgaaaccacaacctgtcctgactgtattcaagtctgtgccccttcatgcagcagaaatggattcctcttccacagtttcagcagctgtatccttccgtggaaaaggattagcagccataagcccgggggagggcagctaaacaccagagggcaggagatgagtctccttcctctctgtgacacccagcacggccctgccacgaggagcaggcaaccactggtgccagatgaagcgcagcacataaaaccattttccccttcaaatgaacgatgcctaattaagcaaaagccgcatgcatgacttaagacatgaggatataaaattcgtcttccgagtcagctagagattctgcaggatcctctaccctcgtaaacgtatttttttatgattagaaaaacccggggcctggaagggacctcggccatcggcagggtaagcttctcaggagagaccatgagcccgagccccacagggggatcagtgtctgccaaggtcaccaagcgggtgtgaggcaagggcagggctcctcggggatgctctcggaaaaccctgcgttacttacacacgcaaggcgtacaatgaatgcacacccgcgtcaagccacggcttacaattcagaagaaatcaaaaggtcgccaaaacctgtcttctccgcaaggctggctgcagagagggtgcagggaaggtcaccggcaaatttctaccagcggccccacatcacgcctccccgatggatgcagagagaggtttcaggagctgctagtaaccttgcagggggttccctaagcccatcccaggaaaacgagttaactcggctctgctaactccgaagcttccagcaatgaattaaatcccgagctgcagcggaaagcggcggggaaagggccactgcggcgggacccgacacccggcggtccgccccaccctctaccgcgtacacacctgcgtgggaccccccgcccggtccacacggcccgggaccacgaccctccgcccgcgccccagccgggctcgcctgagggtgtcgtgccctgggcgctgcccgcggggttcgaggcggaaacgccgcgcccagccggcccgggaagagacaagtcgccgccgcagcccccagcccgcgggcccccgcgacgccgaggagggggctgcgccacgtacctcggccggcaggtgccgccgctgcctcggtccgcggctgcaggggacgccgctccgcgcagcccgccgccttcgtccgcatactaatgagggggcgccggccggccgccagcccggtaccccgcgcccccacccgcccccagcgccgctctcgcgcccattcagctgggggccgccgctcccccgctcagatgcggaggaggggcgcgtgggcggggtctgacgtcacgaggacgcggacggccaatcggagagcacgatgcctccgcggcggcccccgcccccgggcgcgcggccagtcagccctgcggtgcggtgggcattgccagagcagggcgccccctgcagggacgcacccggggcgggggccaggctggggcgagccccccttggttctggagaggaaatgacatacagtttgtgaaagcataaatattcgtgaaaataagaaaattcaggaaggaaacaaagcttaaggcagtgattgataggttatttcttggacacagctgaacgtatactgtgcgcctgcaactttccggtggtttcggaccggacttcagtgaagccagtgaagtcggtcgacttgcagaacttcctttcagaggggcgtacacagcaccgcggccgtgtgcctgtgatctccttctgagtttgaaaaagaagatcctagacaccgagccaaatatgtttgcataaaccgggagacttgtggctctattttgtaacagcttggcgcagggcagctggtttggagatgtctctgttcttcccttggtgggggtgccggaaaaaatgtgctgcctgggcgatcgaggttggggcaaaagcgttgcaaaggaaaaggtgggaggactctactttcacatttcccaaaagagttttaccataagactatttctggattgttctaacgtgaggatattgggagcattttgaaaatactggaggaaaagctgtcactgggcgatttaaatccggtaagttggccaaggcagagcagctgctggggtcagcgacagctgacccttgcagctgagtatcttgccctcttaatcttggagatcagcccaaggcccatgtgttacaggaaaggggtcccgatctagaccccaagagagggttcttcgatctcacgcaagaaacaattcagagtaagtccacagtgcaaagtaaaagcaagtttattaagaaagtaaagtggtggctgggcacagtggctcacgcgtaatcccagcactttgggaggctgagacggacagatcacctgatgtcaggagttcaagaccagctggccaacatggcaaaaccccgtctctactagaaatacaaatattggccgggcgtggtggcgcaagcctgttgtctcagctactcacggggctgaggcaggagaatcgcttgaacccgggaggcagaggctacagtgagccgagatcgccactgcactccagcagggcattcctgaaaataagaggagggacatatccaactaaggtacaatgcttgtaatgcttgtatatatgggcagatgtcttctgctacaagggtttgtgataaaggattaattttccctaattactatattttgcaataatcaatattattatttttaaagcaaaattaggaatgcctttgttctccagatatcgggatatctggactctctcaagtctgggtctgtttagtaagcattattaatttgttctcttaaccataaacacctagaggctaggaatgcctagctttcaggaaatgcagcctagcaagtcccagcctcatttttctagccctcactcaaaatggaggcgctctggtttgaacacttctgacacatgtgcttgatgcaacactctttacctctctttgtctcccctgtccttccccttctcttccagattccccttgtcggcaaagccaggcgctgatagcgttatggctgccatgagagtcagcagtatcccagcttccaaggatgggtgtaaggtgggggtgaggaagaaaaggaacttgaagctgcctcctgtcccagaatcacaagacatctgttaagcccttactacctcattcactccactcacattaggttgacccacttgggcagcaagacaagcaggcctgcaaacttccttttcttcatcagccacagagacatcctcagctattattctggattaaggcagagatctccaaacagcagactaagatcagc

SEQ ID NO: 3819 - DNA, 4001 bp, Homo sapiens
cgtacaggaattttttcagcagtcccttcgctatttaatctttgctggctggattggccacaactccctagactcaacttatgtcttcaccccacagagtaaaccttttccctcttaattatcctcatcagaaactcaacacagataactgccctcttctgcataataaatcattcacatattttcaaatgttaaattgtctcaactttgaatcctctagtctaaaaatcctgaattttgtatccttgcttcctagatcctgtgcaccacatagcaaactcaccaaatgttggtccttgctctgacctcactctttccaggagtatccatccaaagcctctctaaactgtggagctcagtactccatataaagcagtgactcctatcacaatctctacaagacatttaactcaaaactccagaagctttcacagcaccaagcaaaaatgtaagatgctaccatttgtatctattgcggcaaaaattggatagagtgcctttttaactttgcagtaaaattcaaggcacttcacctattattttagactttcatcagttttgagcacaatatccattcacctttgccaacagtttcttttaatgcattagtacaaaattcctcaagtggtatataaaaattttggttgtcagttccagaaaaataatgggggaaggagagtgggtaaaaacaggttcaaggccacacatcagttttccttttaaaaaaagttttaaccctaaatttgcagcgcatatatatatatatatatatatatatatacatacacacacacacatatatacatatgtgtatgtatatacatatacatcatatatatatagcacttcactttattggaattcttccttggtcataaattatatttcaagttggcaaaaaatgttgatcagaatttcaaaaaagggaagcatcaaagtaaccagcatggggtttttcaagtgtgcagaaagttctctaaatacaaaatgtgcttccagcccaccaaagacccccctcacccaagcaggcagtcctcggcgaggagggtcagcatgcccctttatggtcagaacggcagtggtgcaaaagacaatgatttcaaccaaatatggtttgcctctcgccaaatttttcgcatgtccaataaaaataagttcacaaaaatccagccaagcattactttccccccaaaagtgcttctcagattacaaaacagctttgaaagttcagcctgacaaaacaaatatggtactaggaggagagacctggaaggcaatcacaaaaagtctcatttaaattcctggaaagcacagcttctccaaacacagctattcagctctttggaaggcagcacttgcgggagccattgagtttaacttcactcagtcccccaacacagaaccggcaaatccgaatgagatggacgtcacactccctactcaaaagaatgcatcaaatatccactccgtaacaccgcggaaagtaaacccaaaagcggagtttgccgcctgccaactacataagaattaacactcgggtatttaggattctaaagatccctactaccccaaacattatagccacagagaaccagaaatgaacagaacacactttaacctttaagaagtgcagttttgtacgggggttggctgaagaaagacaaaaatcttcactcccttccagagccaaaagagccaaaataaaagatcacctttactgagccacaggggcacaactgtatccgcccgtccccaaagcgcaagccgtcctcccgttcgcttctccagaatttcctgcttttccccaaaccaccttcaacattccccacacacgggtctcgctcctaaacacggagtgtaactccgcgcacagcagcgcggaggctgcagcgccaccaagaaaggcgtcgccaacccttacccagtgccctcccttaccagccttcttcccacgccgcgcctcgaagcgcacgacaccgtggtgctcggtgctccccctggcagcgcggcactggagtccaaggcgtgcgtgtcacattttattccccggcagccgctcgggtgcgcgcgctacgcgctcccacactcacgctggcgcccgctagagctgggaccctggccggggtccccgactcacgccgcggaacttgggggctgcagaaggcgagtgcgcggcgggagtcgtcctgccgcaggctcgagtcctcctcctgccaccgtggggtctcggagctgccccgcgctcccgtcccaggcggcctgcgggatcacctctccggggccagcgctgctccgcgccggcggcagctgcaagcgcgggcggcggggcacagcgggtggctcggcctcaaagccggcgggaggctacgctcagccccgcgctgcacgcctcattgtttcgggcagcgcggcggcggctcccgcggccagaggaaccgcggccccgagccccggggagaggcggcggttcccggcccacgcaccgaggctgcgccgcgccccgcccccgagctccgctcgccccagagccccctccctctccgcgatccctttcatccttcccgctccaggctcacctagctggcgggagccgggcactgggaagttgggctgccccctccccgcgcccccggcccggcagctcggcccgccggcgagcgcaggcggggcgctccctggctgcgcgcggatttctgcttgtcgcggagagtgactgcagacttgggctgcgtggggcggtgcggggcagcacggctgcctaaaaaggcgtgtttctccccggccgccgcctccatccagccctagttcttccgaaggttacctgcacagtacccgcctggcaccgcgcctggacacctccggggcactcgggtcccgggcggcggcaggaatgcaggaatgcgcacaggctgtgggcggccaggagggagtcccggcgcctgccccggcggaagtgagtctttgtgtaccctgtccaacacctccccccgccagcgcggaaggccgggctacctgcgcgcctggcagcgcctggcagccggctgggtggggcgcaggggagcgcagcatcctccccggctcgctagctccctttgttcatctcgctcaaccaggctccgcactgccgcctggccctcgctcccagagcttctctaaggatatgggatggacttgggagcgggccacctttcatttgggaagggtagctcgccaagtccggtgacggtgctccctggagacccccacctgcccgcccctccacactgccggtccccaaccccaagagggacggaaagttcttggggtagaagccggcgggacaagtggttgaagcagcctccggagccagtgggcggctgcgagctgggcagctggagcctgcgggcggggccgcggggaggtgcccatcgagtgtcggtctggtcgcgtgcggaatgtccacttgtcaccgcggcccttgcgttttctcgagacggcggcagctggtcctaggaccccaaaccgcgccgccctttgtttgctggtaaatactctcctgtgaacttcagcgtgtctctccgcgcgcactcctggcattgggtgccccaccccgctggttctctcgcggacccaaagagctgttcaggtgtaggggaatcccaggtagatggataatattgctaaggttgggcccatctcagggggactggttagtcacccctcaccccaccccacaccctcagtcgctagaaggacacacgttttggagacagagatctgccattaaatgtattatttaaaaatccgcaaatacttttattcaagtaatttagactttttttttaggggggaaaaagcaattaactggctacccaattcattcagcattcattagtgcctaccttagcctggaactctgagctagacagtgggcgcccagaactccctcaaagagtttacagaaatgtaaaacagcacgggaattaaactaaaatcgagtgggtataatgcactgtgttcaa

SEQ ID NO: 3820 - DNA, 4001 bp, Homo sapiens
ttttcaagtgtgcagaaagttctctaaatacaaaatgtgcttccagcccaccaaagacccccctcacccaagcaggcagtcctcggcgaggagggtcagcatgcccctttatggtcagaacggcagtggtgcaaaagacaatgatttcaaccaaatatggtttgcctctcgccaaatttttcgcatgtccaataaaaataagttcacaaaaatccagccaagcattactttccccccaaaagtgcttctcagattacaaaacagctttgaaagttcagcctgacaaaacaaatatggtactaggaggagagacctggaaggcaatcacaaaaagtctcatttaaattcctggaaagcacagcttctccaaacacagctattcagctctttggaaggcagcacttgcgggagccattgagtttaacttcactcagtcccccaacacagaaccggcaaatccgaatgagatggacgtcacactccctactcaaaagaatgcatcaaatatccactccgtaacaccgcggaaagtaaacccaaaagcggagtttgccgcctgccaactacataagaattaacactcgggtatttaggattctaaagatccctactaccccaaacattatagccacagagaaccagaaatgaacagaacacactttaacctttaagaagtgcagttttgtacgggggttggctgaagaaagacaaaaatcttcactcccttccagagccaaaagagccaaaataaaagatcacctttactgagccacaggggcacaactgtatccgcccgtccccaaagcgcaagccgtcctcccgttcgcttctccagaatttcctgcttttccccaaaccaccttcaacattccccacacacgggtctcgctcctaaacacggagtgtaactccgcgcacagcagcgcggaggctgcagcgccaccaagaaaggcgtcgccaacccttacccagtgccctcccttaccagccttcttcccacgccgcgcctcgaagcgcacgacaccgtggtgctcggtgctccccctggcagcgcggcactggagtccaaggcgtgcgtgtcacattttattccccggcagccgctcgggtgcgcgcgctacgcgctcccacactcacgctggcgcccgctagagctgggaccctggccggggtccccgactcacgccgcggaacttgggggctgcagaaggcgagtgcgcggcgggagtcgtcctgccgcaggctcgagtcctcctcctgccaccgtggggtctcggagctgccccgcgctcccgtcccaggcggcctgcgggatcacctctccggggccagcgctgctccgcgccggcggcagctgcaagcgcgggcggcggggcacagcgggtggctcggcctcaaagccggcgggaggctacgctcagccccgcgctgcacgcctcattgtttcgggcagcgcggcggcggctcccgcggccagaggaaccgcggccccgagccccggggagaggcggcggttcccggcccacgcaccgaggctgcgccgcgccccgcccccgagctccgctcgccccagagccccctccctctccgcgatccctttcatccttcccgctccaggctcacctagctggcgggagccgggcactgggaagttgggctgccccctccccgcgcccccggcccggcagctcggcccgccggcgagcgcaggcggggcgctccctggctgcgcgcggatttctgcttgtcgcggagagtgactgcagacttgggctgcgtggggcggtgcggggcagcacggctgcctaaaaaggcgtgtttctccccggccgccgcctccatccagccctagttcttccgaaggttacctgcacagtacccgcctggcaccgcgcctggacacctccggggcactcgggtcccgggcggcggcaggaatgcaggaatgcgcacaggctgtgggcggccaggagggagtcccggcgcctgccccggcggaagtgagtctttgtgtaccctgtccaacacctccccccgccagcgcggaaggccgggctacctgcgcgcctggcagcgcctggcagccggctgggtggggcgcaggggagcgcagcatcctccccggctcgctagctccctttgttcatctcgctcaaccaggctccgcactgccgcctggccctcgctcccagagcttctctaaggatatgggatggacttgggagcgggccacctttcatttgggaagggtagctcgccaagtccggtgacggtgctccctggagacccccacctgcccgcccctccacactgccggtccccaaccccaagagggacggaaagttcttggggtagaagccggcgggacaagtggttgaagcagcctccggagccagtgggcggctgcgagctgggcagctggagcctgcgggcggggccgcggggaggtgcccatcgagtgtcggtctggtcgcgtgcggaatgtccacttgtcaccgcggcccttgcgttttctcgagacggcggcagctggtcctaggaccccaaaccgcgccgccctttgtttgctggtaaatactctcctgtgaacttcagcgtgtctctccgcgcgcactcctggcattgggtgccccaccccgctggttctctcgcggacccaaagagctgttcaggtgtaggggaatcccaggtagatggataatattgctaaggttgggcccatctcagggggactggttagtcacccctcaccccaccccacaccctcagtcgctagaaggacacacgttttggagacagagatctgccattaaatgtattatttaaaaatccgcaaatacttttattcaagtaatttagactttttttttaggggggaaaaagcaattaactggctacccaattcattcagcattcattagtgcctaccttagcctggaactctgagctagacagtgggcgcccagaactccctcaaagagtttacagaaatgtaaaacagcacgggaattaaactaaaatcgagtgggtataatgcactgtgttcaaacaaaagtgtgggccgaaaacgcttactcagtatttccccaattgtattaattatgtctgacacatggaattctgcggaactgcctgaatgaacaatgtgttacacagatattttttaaaaaaagaaaaattatggccgggcgcggtggctcacgcctgtaatcccagcactttgggaggccgaggcgggtggatcatgaggtcaggagatcgagaccatcctggctaacaaggtgaaaccccgtctctactaaaaatacaaaaaattagccgggcgcggtggcaggcgcctgtagtcccagctactcgggaggctgaggcaggagaatggcgtgaacccgggaagcggagcttgcagtgagccgagattgcgccactgcagtccgcagtccggcctgggcgacagagcgagactccgtctcaaaaaaaaaaaaaaaaaaaaaaaaaaaaaaaagaaaaattatattttataaatgtgaaatacatacagtgtggttaaaagtgaccaaaacaaaacagaaacaaacaacctgatagagacccatagctggtggggatagagaaaggaaatactgcagaaagactcaccttcttaatagtagaggggcgcagagggggttgcaaagtctgtgggcttctgtttctcttctgtataatggatgtaatagtacctaccttcagcctggcgcggtggctcacacctgtaatcccagtactttgggaggccgaggcgggcggatcacgaggtcaggagttcgagaccagcctggccataatgttgaaacctgtctctactaaaaatacaaaaatgaaccgggcgtggtggcaagcgccagtagtcccagctactcgagaggctgaggcaggagaatcgcttgaacctgggaggcggaggttgcagtgagccaagctggtgccactgcactccagcctgggtgacagagagagactcc

SEQ ID NO: 3821 - DNA, 4001 bp, Homo sapiens
tttgtttttttaatctcaacagcagtgcctcctttacaactgtaggactaaactgtgatccactaaaccaatgctggggcctcgggagccaggcagggaaaggtttagaacagaacagacagagcaactctgcctacttgtaccagagaatttttccatcagaaaacaatgaactttcaagaaaaatttatattgaagaaaagaattcacggtttttaagttttaaaatcatttgtctaattctattttgcgccttctgttttatttcattagaacagaatcaaagtgttcataatagcaattttttaaaagtacaggttgcacaaaggttgtatgattcaaacaaaagaatactgcaatgaggcgttccaaaaggaaacagtgagccttaagagtgatgtttcccagatttacgccagtcacctgtattcatccaccaaaaaaaaagtttaatgaagtaaggaacatacatatttgaactatttacatatattatttgactcaaacatgttttttaaaatggcttaggggattacacaacgtatcagaatagggcactttctacagtctcctaataaccaaatgttaactatgaaacaggggaattactgctgagatgtgcagtattcttctgagtctccccgccccaaccccatttccaagttctaaaaatttacctagggttctgttaactactgctacaaaaacaaacaaaaaacaaacctgtagtcccagctactcgggaaggggaaacggaggtggaggctgaggtgggaggaattctagtcgcacctgggcaacatagtgagacccagactttcgagaatacatacatatatttctcagtttgttttagtgttactcaaatttcctaaataatttcgtatatatcttatccatgtttttctcattctatagtcactgagagaccagcgctttatgactgcaacatgtaaaatacttgttgttctggagtgttttgagactggagatttccttttcatactctaaaaccgaacatctcctagcacccgcgcaatctttgcaatccggggatgaagagcaacacctttacaattgtaataaatcttaaagctaccctatcagggattgaatgcatgagtaatataaataatggggaagtaagttcttcctattcaatgcggttgtctaggtgtcaagtgtctagtgttgggcttctctagacagcagggtctccactgctgcatcatcttcagaaaacgatggggcaaagacggaggtaaccagctgtcgaacgagcaggaagtttttaatcaccaactccacaactacttaatcagtccagtctccagcgagccctaggctcttcccaaatcctacgcttggcaaggagaacggccctttgagggtccccaaactcaggcggcaggaagcactccccagaccgctagcgacgcgccgaggttgccccagaaaaatcccaacgtcgaaggagcgggcggcaccgcccctcccctcccttcgctttgcttcctagtccccggagtcgctaccgcccactttctagccggacaaacagcagtccagggccaggcacacagcagtccaggaccgggcacagcactcacccacgtcttgctcgaaggggttggcggtgaacaaaggcatctcgccggcgcccgagccctagtcgctgctgtctagctgacactcagcaactgctacccgccgggtgacccgcggccgcggctccctagaccgctccgcttcggcctccgtccctgcacttccgccaccgcacctgcccggctcttgcctgacaggccggctcggagtccacccttcgatcccgcgctcctgtcccaacttttctcccggggcgagatccctccgaccatgggcgtcctcccaaggcctttgtcgctgcccctgtcccagacttttgtaggggtcaggcggccgctacggccacctttccagcgctaggaccccggctagccacgaagccggggaccttcggagccggaagtagtcccgcctggaactggacgaccccggaagctgcagtgccagcggcggcgcggcagggggcgcggttacccgtggtttttcgcgttggacgacgggctctgagggccaagttcttgtcacgaatttagtttgtttcagagcggcaggactcgtagctagagaacgaggacccacgacgcgtacgcgttacagtcctgtttccctagaaacggagctgccggcgcggaggtggctttgagattctgcgaaagacctgactgctcttcaacaattattgtgttgcaccctcccaggcgcccagtccaaaccccgtcagaataaccacccgggacagcggtggtcgaagtaactacgcctaacttttcgctttccatcgtgtcccctccataaaaacactgctgggcccccggaatccaaaggcgaaggaggcacactccctgccttagacttgttgagagttttataggggcagtgcataacgtacatgatggtgtatgacgattcggatggtagtacgagtcataaactcaaattccaacagcatccagccaggtatttaaatgaatgcaaaagcccaagcacccttcccacccacatattctctgttcctcttagaaaactgtagtaatgattatgttgcctgtctctcctcctcattagattataaactccctgataagttttggtcactactatatccccagcgtctaaaacagtgtcccaagtaatagacgctcaatgcttttcgaatgaagctgtaactttctaactgaacagtgcgtatctaaagatgtcaactactggtaaattgcagccatttattgaaatgtgggtcctactagagtttgcaatttttcaatgatgtttaaatgttgagaattactccaacattttaaataatagattaatcaaaaccattttacaaactctagtataaagacctgatgctatagagagctcatacacattcagaaaggtggttgcattttataaagttcggggcacaaatgagaaggaatcgtgcagaaggggctgtttttcatagaacgttgaacctagggatgttcaagataaattgggaggccgggcatggtggctcacgcatgtaatcccagcactttgggaggccaaggcgggcagactgcttgaggccaggagttcaagaccagactggctaacatggcgaaaaaccgtctctactaaaaatacaaaaattagccaggcatggtggcgcaagcctgtaatgccaacttcttgggaggctgaggcacgagaatcacttgagcccaggaggcagaggttacagtgagccaagatcaggcaactgcactccagcctgggcaacagagcaagactctgtctcgaaaaaagaaaaaaaaaaaagacttagagattttttggacagataaagactttttgtctaagacttagtgttggaatggaaaacaaggctgactaggtataagaggaaacagattgacaagaattttaaagggcaagctgggaattttttattttgattaaggcactcaataattatttaaggatattgggtagcagaatagtaaaaaaaaattttttttgagatggagtctcactctgttacccagactggagtgcagtggcgcgatttgggctcactgcaagctccgcctcctgggttcacaccattctcctgcctcaggagaatggccaaaactggccatagacaaaatctctgcagcactgtgacatgttcgtgatggccataatgcccacgctggaaggttgtgggtttactggaatgagggcaaggaacccctggcccttccagggtggaaaaccacttaaaggccttcttatgccacaaacaatagcatgagtgatctgtgccttaaggacatgctcctgctgcagttaactagcccaacctattcctttaattcggcgcatcccttcgtttcccttaagggatacttttagttaatttaatatctgtagaaacaatg

SEQ ID NO: 3822 - DNA, 4001 bp, Homo sapiens
ataatctcaactccagagcggaagtaccgacggggtggaatgtcttcattcacctctaccgcactacccagctgggagagagccctcacccggtcttcgggcgggaggctcacatctccatggtcagacatcaggaccaagttctgagacagaaaaaacagatggcatcaataccgttgccctcatcatcccagcagttttacagtttatctcacagacctctaccttaagaagaaaatataagagaaacataccaaatgctgtggctcctattaaataaggactttcctacaagaaggctgagaccctcaaggaagcccaaatcacaacgatgagagtactggcagactagaaaacatacaacccctgtaccataattaggtggtataaggagtagaaccacagtggaccaaccaaaggttcagttcaagttaatcaaatcctttgccattagggggctccgcccacagcactgtaaaagtgggaacagcatcttttattttctattatttctccttccagatacccacatacctccaccccagtacctggcagagtgcactcagtgaactttcttgaggattgttaactaacttcaaggttgaccatttttacttaatctgagagtaactgacattttctgtggtatcctttttcatatttgagcacaaggtgagttaggggaactggtctgggaattaatgctcataattgtaactctgctcactaaaccactatagtcaatctataaaatcattcattcatcattatcatggcaagagacttaaatcttgaaaacaaccatttactcatcttcatagactaaacactgaataacaaaaaggcacgatggtaacttgcattgcaaaaacccctggtgtcccaaaactccagtaattctagtctttctagatatagttgctgttagaatcagattccaaattccaaccagatatcaccactatcatctccaaaataaaactgggcatttgacacacattgcattacagcaaaccctaatcagtatgctctagaatacacaaactacagtagaataaatcttggaattcaaggccctgtggcaactggccctccccaacagagatcttttgcttcagtcaggattccaatccgcccaggcatcctcacatttcagtttcatttatctatccagtttttcttttctactacaactcttccctcaggggtagtcttctctcagccaattccatctttaggtctcttcaatattcgggtcacaattcctccacaaaccttcccctctaaaacaccctcactaatagcacaaaagccgtgaggactactagggatgcagagatagtccatctctcacgaggcctccttagggactcagaaagccgcaagcatatctaaaacctccccaagtaattagtaaacctagtccacggcccatgaaagttaactgaaacagaggatgcttgttgcatctcagtacctcttgggagaggttcttgtgggttaagaaaggaaccacctcccaaggccaggaagcggcgccggttaccacctggttgagcaattccaaaaaggggatgcagcatctgcaaatgagggggaaaggcggcgtaaaggaccgagggggaaatacgaggaggagaaaggaagtagcaggaatgagcggagggggcgtatacagtagggagggctctatcgacaactgcttgaggaacccttcttgaaggcactcaagacgaacttgccaaccccaggcacaatcatccagggttttcgggatctttcaaatgcagtaggcggggaaccgctgggcctggctggtcaggcgccagcccgcggagacagaagccgtcgggtgcctcgagcgaggcaggccgggcaggggactcggggagagtaggctgcaggccccacactcacggcggccgatccccttcaaagtccaaccacgctcggaggccctgccccaccacgttcccgggacccttccccacctttccccgcggatgacacccggaggttccggaaacgtcacatccggcgcccgctccgcccactcccgttcgtctgtctattacattcccagtgatttaggacttggaacggagagctagtaggtggggctagaatcggcacctgcggaaaatccgaccaatgaggagcgaacgacacagcggccatcttggtaaaggaaaaggaacaaggaagaaagtggaaccaattagcaagctaaggtttgcttttaaaattattttgatttggggtagtccctcatcacactcacaatactcctgcatttaaggagggattgctgatcccagcacaactgcagacttagctaaactaaccaggatttataaattgggggacagaaagtctttcgaatgtattttttagcttgtattacattctacacaaaaattggtagtcttagatattaggcaatatctaagactaattttattgcttagaaaagaacataagtctaactttttttttttttaagacagggtcttgcggtgtcacccaggctgtcacaggagtgcagtggtgtgatcatagctcactgtggtctccaacttcagggctcaagcgatcttcttgcctctgcctcccaaagtactgggattactggcgtgtgccaccgcacccagatgagactaacgttttaatgtcaaaaaacctataaaatatttggaaaaaaagcgtttaatctctaagagccgctatgcaaaagcagtggagacacaaaaatctgtatgacactgttcctgccctgagaccgggacaaggtggttttatgcatcaaatacagaatggcacgttctgcatgtagatgtgtgtctgtacgaatccatatacatcctctttacaaaaaggtcctacaagcttgctaatcattctgtctcagaagactttgtgaaacattaggctttggtttaaaagtctaagtctctgggggacactttcccaaaatttgggagcctccctgtgagtttgttagtgtgatggcatgacctattcttcaaggtctagcttaaatccctaattcaggtgttgcctcctccacctagccagcctccagatctctcatttctcccaacctccgttgtgtatatttctgttggagttacctgaagtgattttgtgtagtcatcaacttttcagacttagggttgaaagtacttgcttgcatcatatcacctccccttctgcccccagcaagcattaatgtgcatgggtctactatcaactctcatggatctactgcagataaatctgggaagataattgtatagggcactctactgtgtcttcaaaactctctctactgactctcttcagaatgtaaacatgatgggttgggcctaaagaaattgatgcactggagatgctggtcattgggtgggcattatagtgcagatggggtcctggcaggaggcaacacaggtcaaaatctgatccattcaacctctcactcagtaaatgtttactgagtgtctactatgtgccaggttctgttctaggtgttagggatacatcagcaaacaaacccagcaggtggatactctaatggtggaagcacaggtagaagtacagctggtggggtagggaggggcatctgctcccattcagcacaatctctaaagtagttcttttttttataatgtttagcttaacaagtaaagaaaatttacaaacatcctagattttaagattatgatgagaagactttaagaagctataactgagacacacatataaggggtgtgcatagtcgtaaacatagctagcgccacatagaggctgttcctgatattagaaagttaatatgcccagttgctagcagttcttaaggtaatagctaagtgaatataggaagcaggatctagtctttttagggagagaatttgtaaatgttgaccagagtttttgatatctggggcaaagttcaatactcagctttctagggacctgaaataagaaaatcttggccaaggtaa

SEQ ID NO: 3823 - DNA, 4001 bp, Homo sapiens
ctgggagagagccctcacccggtcttcgggcgggaggctcacatctccatggtcagacatcaggaccaagttctgagacagaaaaaacagatggcatcaataccgttgccctcatcatcccagcagttttacagtttatctcacagacctctaccttaagaagaaaatataagagaaacataccaaatgctgtggctcctattaaataaggactttcctacaagaaggctgagaccctcaaggaagcccaaatcacaacgatgagagtactggcagactagaaaacatacaacccctgtaccataattaggtggtataaggagtagaaccacagtggaccaaccaaaggttcagttcaagttaatcaaatcctttgccattagggggctccgcccacagcactgtaaaagtgggaacagcatcttttattttctattatttctccttccagatacccacatacctccaccccagtacctggcagagtgcactcagtgaactttcttgaggattgttaactaacttcaaggttgaccatttttacttaatctgagagtaactgacattttctgtggtatcctttttcatatttgagcacaaggtgagttaggggaactggtctgggaattaatgctcataattgtaactctgctcactaaaccactatagtcaatctataaaatcattcattcatcattatcatggcaagagacttaaatcttgaaaacaaccatttactcatcttcatagactaaacactgaataacaaaaaggcacgatggtaacttgcattgcaaaaacccctggtgtcccaaaactccagtaattctagtctttctagatatagttgctgttagaatcagattccaaattccaaccagatatcaccactatcatctccaaaataaaactgggcatttgacacacattgcattacagcaaaccctaatcagtatgctctagaatacacaaactacagtagaataaatcttggaattcaaggccctgtggcaactggccctccccaacagagatcttttgcttcagtcaggattccaatccgcccaggcatcctcacatttcagtttcatttatctatccagtttttcttttctactacaactcttccctcaggggtagtcttctctcagccaattccatctttaggtctcttcaatattcgggtcacaattcctccacaaaccttcccctctaaaacaccctcactaatagcacaaaagccgtgaggactactagggatgcagagatagtccatctctcacgaggcctccttagggactcagaaagccgcaagcatatctaaaacctccccaagtaattagtaaacctagtccacggcccatgaaagttaactgaaacagaggatgcttgttgcatctcagtacctcttgggagaggttcttgtgggttaagaaaggaaccacctcccaaggccaggaagcggcgccggttaccacctggttgagcaattccaaaaaggggatgcagcatctgcaaatgagggggaaaggcggcgtaaaggaccgagggggaaatacgaggaggagaaaggaagtagcaggaatgagcggagggggcgtatacagtagggagggctctatcgacaactgcttgaggaacccttcttgaaggcactcaagacgaacttgccaaccccaggcacaatcatccagggttttcgggatctttcaaatgcagtaggcggggaaccgctgggcctggctggtcaggcgccagcccgcggagacagaagccgtcgggtgcctcgagcgaggcaggccgggcaggggactcggggagagtaggctgcaggccccacactcacggcggccgatccccttcaaagtccaaccacgctcggaggccctgccccaccacgttcccgggacccttccccacctttccccgcggatgacacccggaggttccggaaacgtcacatccggcgcccgctccgcccactcccgttcgtctgtctattacattcccagtgatttaggacttggaacggagagctagtaggtggggctagaatcggcacctgcggaaaatccgaccaatgaggagcgaacgacacagcggccatcttggtaaaggaaaaggaacaaggaagaaagtggaaccaattagcaagctaaggtttgcttttaaaattattttgatttggggtagtccctcatcacactcacaatactcctgcatttaaggagggattgctgatcccagcacaactgcagacttagctaaactaaccaggatttataaattgggggacagaaagtctttcgaatgtattttttagcttgtattacattctacacaaaaattggtagtcttagatattaggcaatatctaagactaattttattgcttagaaaagaacataagtctaactttttttttttttaagacagggtcttgcggtgtcacccaggctgtcacaggagtgcagtggtgtgatcatagctcactgtggtctccaacttcagggctcaagcgatcttcttgcctctgcctcccaaagtactgggattactggcgtgtgccaccgcacccagatgagactaacgttttaatgtcaaaaaacctataaaatatttggaaaaaaagcgtttaatctctaagagccgctatgcaaaagcagtggagacacaaaaatctgtatgacactgttcctgccctgagaccgggacaaggtggttttatgcatcaaatacagaatggcacgttctgcatgtagatgtgtgtctgtacgaatccatatacatcctctttacaaaaaggtcctacaagcttgctaatcattctgtctcagaagactttgtgaaacattaggctttggtttaaaagtctaagtctctgggggacactttcccaaaatttgggagcctccctgtgagtttgttagtgtgatggcatgacctattcttcaaggtctagcttaaatccctaattcaggtgttgcctcctccacctagccagcctccagatctctcatttctcccaacctccgttgtgtatatttctgttggagttacctgaagtgattttgtgtagtcatcaacttttcagacttagggttgaaagtacttgcttgcatcatatcacctccccttctgcccccagcaagcattaatgtgcatgggtctactatcaactctcatggatctactgcagataaatctgggaagataattgtatagggcactctactgtgtcttcaaaactctctctactgactctcttcagaatgtaaacatgatgggttgggcctaaagaaattgatgcactggagatgctggtcattgggtgggcattatagtgcagatggggtcctggcaggaggcaacacaggtcaaaatctgatccattcaacctctcactcagtaaatgtttactgagtgtctactatgtgccaggttctgttctaggtgttagggatacatcagcaaacaaacccagcaggtggatactctaatggtggaagcacaggtagaagtacagctggtggggtagggaggggcatctgctcccattcagcacaatctctaaagtagttcttttttttataatgtttagcttaacaagtaaagaaaatttacaaacatcctagattttaagattatgatgagaagactttaagaagctataactgagacacacatataaggggtgtgcatagtcgtaaacatagctagcgccacatagaggctgttcctgatattagaaagttaatatgcccagttgctagcagttcttaaggtaatagctaagtgaatataggaagcaggatctagtctttttagggagagaatttgtaaatgttgaccagagtttttgatatctggggcaaagttcaatactcagctttctagggacctgaaataagaaaatcttggccaaggtaaaaattttacattcctcatttcttgtttaactggaaaagtttaaaaactaaacaattttgtatacacaatca

SEQ ID NO: 3824 - DNA, 4001 bp, Homo sapiens
atgccattcggataatctcaactccagagcggaagtaccgacggggtggaatgtcttcattcacctctaccgcactacccagctgggagagagccctcacccggtcttcgggcgggaggctcacatctccatggtcagacatcaggaccaagttctgagacagaaaaaacagatggcatcaataccgttgccctcatcatcccagcagttttacagtttatctcacagacctctaccttaagaagaaaatataagagaaacataccaaatgctgtggctcctattaaataaggactttcctacaagaaggctgagaccctcaaggaagcccaaatcacaacgatgagagtactggcagactagaaaacatacaacccctgtaccataattaggtggtataaggagtagaaccacagtggaccaaccaaaggttcagttcaagttaatcaaatcctttgccattagggggctccgcccacagcactgtaaaagtgggaacagcatcttttattttctattatttctccttccagatacccacatacctccaccccagtacctggcagagtgcactcagtgaactttcttgaggattgttaactaacttcaaggttgaccatttttacttaatctgagagtaactgacattttctgtggtatcctttttcatatttgagcacaaggtgagttaggggaactggtctgggaattaatgctcataattgtaactctgctcactaaaccactatagtcaatctataaaatcattcattcatcattatcatggcaagagacttaaatcttgaaaacaaccatttactcatcttcatagactaaacactgaataacaaaaaggcacgatggtaacttgcattgcaaaaacccctggtgtcccaaaactccagtaattctagtctttctagatatagttgctgttagaatcagattccaaattccaaccagatatcaccactatcatctccaaaataaaactgggcatttgacacacattgcattacagcaaaccctaatcagtatgctctagaatacacaaactacagtagaataaatcttggaattcaaggccctgtggcaactggccctccccaacagagatcttttgcttcagtcaggattccaatccgcccaggcatcctcacatttcagtttcatttatctatccagtttttcttttctactacaactcttccctcaggggtagtcttctctcagccaattccatctttaggtctcttcaatattcgggtcacaattcctccacaaaccttcccctctaaaacaccctcactaatagcacaaaagccgtgaggactactagggatgcagagatagtccatctctcacgaggcctccttagggactcagaaagccgcaagcatatctaaaacctccccaagtaattagtaaacctagtccacggcccatgaaagttaactgaaacagaggatgcttgttgcatctcagtacctcttgggagaggttcttgtgggttaagaaaggaaccacctcccaaggccaggaagcggcgccggttaccacctggttgagcaattccaaaaaggggatgcagcatctgcaaatgagggggaaaggcggcgtaaaggaccgagggggaaatacgaggaggagaaaggaagtagcaggaatgagcggagggggcgtatacagtagggagggctctatcgacaactgcttgaggaacccttcttgaaggcactcaagacgaacttgccaaccccaggcacaatcatccagggttttcgggatctttcaaatgcagtaggcggggaaccgctgggcctggctggtcaggcgccagcccgcggagacagaagccgtcgggtgcctcgagcgaggcaggccgggcaggggactcggggagagtaggctgcaggccccacactcacggcggccgatccccttcaaagtccaaccacgctcggaggccctgccccaccacgttcccgggacccttccccacctttccccgcggatgacacccggaggttccggaaacgtcacatccggcgcccgctccgcccactcccgttcgtctgtctattacattcccagtgatttaggacttggaacggagagctagtaggtggggctagaatcggcacctgcggaaaatccgaccaatgaggagcgaacgacacagcggccatcttggtaaaggaaaaggaacaaggaagaaagtggaaccaattagcaagctaaggtttgcttttaaaattattttgatttggggtagtccctcatcacactcacaatactcctgcatttaaggagggattgctgatcccagcacaactgcagacttagctaaactaaccaggatttataaattgggggacagaaagtctttcgaatgtattttttagcttgtattacattctacacaaaaattggtagtcttagatattaggcaatatctaagactaattttattgcttagaaaagaacataagtctaactttttttttttttaagacagggtcttgcggtgtcacccaggctgtcacaggagtgcagtggtgtgatcatagctcactgtggtctccaacttcagggctcaagcgatcttcttgcctctgcctcccaaagtactgggattactggcgtgtgccaccgcacccagatgagactaacgttttaatgtcaaaaaacctataaaatatttggaaaaaaagcgtttaatctctaagagccgctatgcaaaagcagtggagacacaaaaatctgtatgacactgttcctgccctgagaccgggacaaggtggttttatgcatcaaatacagaatggcacgttctgcatgtagatgtgtgtctgtacgaatccatatacatcctctttacaaaaaggtcctacaagcttgctaatcattctgtctcagaagactttgtgaaacattaggctttggtttaaaagtctaagtctctgggggacactttcccaaaatttgggagcctccctgtgagtttgttagtgtgatggcatgacctattcttcaaggtctagcttaaatccctaattcaggtgttgcctcctccacctagccagcctccagatctctcatttctcccaacctccgttgtgtatatttctgttggagttacctgaagtgattttgtgtagtcatcaacttttcagacttagggttgaaagtacttgcttgcatcatatcacctccccttctgcccccagcaagcattaatgtgcatgggtctactatcaactctcatggatctactgcagataaatctgggaagataattgtatagggcactctactgtgtcttcaaaactctctctactgactctcttcagaatgtaaacatgatgggttgggcctaaagaaattgatgcactggagatgctggtcattgggtgggcattatagtgcagatggggtcctggcaggaggcaacacaggtcaaaatctgatccattcaacctctcactcagtaaatgtttactgagtgtctactatgtgccaggttctgttctaggtgttagggatacatcagcaaacaaacccagcaggtggatactctaatggtggaagcacaggtagaagtacagctggtggggtagggaggggcatctgctcccattcagcacaatctctaaagtagttcttttttttataatgtttagcttaacaagtaaagaaaatttacaaacatcctagattttaagattatgatgagaagactttaagaagctataactgagacacacatataaggggtgtgcatagtcgtaaacatagctagcgccacatagaggctgttcctgatattagaaagttaatatgcccagttgctagcagttcttaaggtaatagctaagtgaatataggaagcaggatctagtctttttagggagagaatttgtaaatgttgaccagagtttttgatatctggggcaaagttcaatactcagctttctagggacctgaaataagaaaatctt

SEQ ID NO: 3825 - DNA, 4001 bp, Homo sapiens
acatttcatcatcaaaaatgaaaattaaaagttaatgataatttgtcaacttagaagttttcttcctattcttttatttcccacacccaagagactgtgattataaccaatggccaagtagcaaaagaatactaataggaactaggcaaaatacctatcacgctttgatagcttaacttttttgtgaataaggttgtttgtggttattattttaagttgcatttataaaagttatctttcctgctaggaaaagtattcccagttcttaagatagacttgcatttacccacaattcatagtgtggcacaaatagctgcctggcatctgggtgttacacctcccacacaggccatggtataaactttattggggtatttccatttttaacctaacaaaaaatgtggaataacaggttgtttccctgtggaggaaatatcaagaataaacaggcgagtgtggaatctgcggagggaggggattgtctctggttcccgaaatcacggcaaagtactttctgtgcagggagggcacagtttaagaatatctgttgcaaagaaaatacagacacaaggtaaaccaaaaaccaaagcaaagtttccccatgacattacctggaaactacagtctcagaactacagattaacaaacgtaatcaatggtactgggcttttcacagttttgatgacgacagcatgacttcagagtctaatgggacactattcccaaagttctagttaacgtcgcaaaaatctgacctaattcttacaggttcaaatgtctgggctgctggtttgtgtaacctggacaaaatcgcttccaggctctcaattttgccacgagtcacgatgacagagggctctcctggcttttctcacaggcctgagtcccatctggattgaagtcattttgcaaatagcagcccaccacccttaggccaaatttaaaatttgttttgaatttgcacctttctggttgtgttaaagattacagattacatgaacaagggcctccatgccttcgctatctaattgatttctacagtgttgtttctttactgtcttgctcgccccactcaaagtctccctcctacacaccagcctacacactttcagttctattttataacccgacaaatgcaaattgacacacagagacaaataacaacgcggtttgctgaagcaggttcaatcgactgtattgccaattaaaagaccaccgggtaaacaagggccaacgaccacagggcaggccccagggttcacaagcccccccaccccacggcccagaaagagctcgccgcagcgcccacctctgcaactcctcctcctggatcctctcctcgtcccaaacgaagacgccggctaacgccgccatcaaggcagaggcatggccaggacggccgtgcagccggcgccagaggcggccgaggagaacgcggcgtgagctctcggagtagaggcggccgtagagctgcgcgatctgctgcgcgcgccgcacgcgcaggcccgtgacgaagcggcactgattggccagaagcgccagcaggcccccgccccgcgtccccgccagccaggcggccagcagcctccgcgggagcatgccgcctcccgcagggcccgccgcgagcttccggggcccaaggaaccagtccggaggggcgcaggcggtggtcgcagcgtccccctaaatggccggccacgaacccgtctcacggtcccgcggccaggagccgccgctcatctgtctctgcagccaccgctgaggaagagtctcctctgaggggagagtcggtcatggcagcagacgccgggatggctccgcgactgctacaccaggcactcctgggcccgggcagcagaccagtcagccctgtggctcctcggcgacctccagcgggcgcccggggccgggatgcagggcgcgcggacagaaacgagacagacagctcaggcccagcagcacgcaagctcccgcgccttccgcgactgccacacgcgcggcgcgcgcgcaccctactttttctccgccacctgggccgtgattgggcgcgacctgggctcctgggtgctcattggcgccgtgaagtgctcgtcaccgccccctcctgccccttcatgcatgcgcggaggccgcctgctagcaaggtaggtggctcggcggcgagagccgtcaagggcgcattggagagtgaccctcggacccggctgccgccgtcgccgccatcttccggccgtcccagccccgccccgcggagaaacctggccaggttcctgttagaatcctgccaggtgttaacttgttttaagaggccggcacgctggcccccttctttattagagtgcagggtgggggcggggctccgcatgtctctgcgggggctgggggctcccagtgataaccgccattgcagaattaaaactgagacagtgaaagagatctgacctaaccaattccatcttgcttctgtccttgttcattcctgagcttaggtgaactaattttgggaggaacttagtttatagtttaaaataaagaggataacagccctttcccaaaacaaatcttcttatctgggaactagactgcctttgtaggactaataagttagccataagattggaaattatggtttaggagtcatgcagctggaggctacgatattgtgatccccctaaactgctcttaagatcagtgcttgagatattttgctgaccccgcactggttggatcctggcaccacccagatggataaactggctcatctgaccttgtggcccccacccaggaaccaactcagtgcaagaggacagcttcaattccctattatttcatctcgacccaaccagtcaacactctggactcactggccttcccccacccaccaaattatccttaaacactctgatcccggaatgctaagggagactgattgagtaatgttgaaacaaactccagtctcatagtgggctctgcgtgaattactctttattgcagttcccctgtcttgataaatcggctctgtctaggcagtgggcaaggtgaacccattgtacggttacaaatttgggggttcgtctgggataccccttgtggctacctgtccatggttcggtagccccacctctggtgacagatccagaggccagcctaagcggccacatagttctcttggactaggggctaactctggcaccgtctctgccagtggggcactgctagcccaatatgcatggacttaatcgcaatggagaaatagtcctggggagacatcccataactgtagccctgtcacagggtatctgtagctccatagcggggcgctgtagccaggtcatggagtgtctgtagctatagccccatcatggggtggcaggttgctgagtatcctaggtgctgccagtgcctccttccttctccggactgattctgtagccacatggtgggtgtctgtagctccaccatggggtgtctgtctcagtttggctcctggggcatcccagttggctgtccctaactaggaagagtcttggttcgggagacttctcaatcaggaatatttcagggagatttgtcagatggagaataggaggatagtttggaaggggtactcttggagttcttggttagggaccttaatttggaaggccttctgtctgtcttgtcttcgtgtgtgtgtttgtatatatggaggggatctctgaaggaattgctgatgaaaatccagcaggcctaacttggagaacactccttatttatctagtcacattcagtgagccctgaaagaagtttaacaggcctgattcagggtgactgctcagagaccacccattgaattcacgattcaatgacccaccgtgcctggccttaaaaggattttttcttagaaaaaagagctctaggccgggcatggtggctcacacttttaatcccagcactttgggaggccaaggcgggcggatcacgaggtcagaagatccagaccatcctggctaacacggtga

SEQ ID NO: 3826 - DNA, 4001 bp, Homo sapiens
aaaatacaaaaaaaaattagcagggcatggtggtgtgcacctgtagtcccaactactcgtgaggctgaggcaggggaattgcttgaacccaggaggcggaggttgcagtgagctgagatcgcgccactgtactccagcctgggagacagagagagactctgtctctaaaaaaaaaaaacaatgaataaataagctcatgttcacaaatctggagtcagtctcatctactcacaaaacctgttaccaactcagggagtggcatggccatctcccagtcactgagctcaaatctcagatttagggttgattccttccactccatcccaagacctgctccttcctgtctccaacattctaccttcccagtccagcctctgctgcccacagattggaccacatcaatctcctgtgcaaaaatcctatgatctgtccattcctaggcagatttccaccccaccccatcttcatccatcaacaaagcaacccagtcaccaaatcatttactgtttttcaactgtgcccaacatttctgctttgctccagctactcgcccttggaaacagcctctccacaaatttttgcgtctctaaatcctatagcattcaaagctatgtacaaaagccccttctttcataaagttgtctgagacttactcacaattaagctttctttgacttgcgtctcactgaattctgtacctctattagagcatcggttccagttttccttgtaaagctctgtgatgcctccagagtccccggcgggggaaggtgggtggggagggggtagagtagtggggtattttgctttttaacatcttatggaccttggacagtgccctgcatatactatgtgctcgaaacagtttgttgaattgaaattatgtatatttcagacggaattagaaagtaaaaagcaaaccatattatgatctcacaagtgtgagtccagcatcctcattaagcaatggttgcacaatggactgtgctggaggctcaagtcctgtttctgttctatgaaaataactccttatctatacaaacaacattcaaagcacaatcaaccacacctctgcatacctaccacagaactcttcagtaccggccagaaatttttttaagactatattattttggggtggggggtctgcaaaaactaaacatcacttttaaactctaggaagacattaagcccttccatctttgaacatagaaacataattaagattccgaagtcatgtactcattcatctgattccatgaacatttactgacctgccaccttgtgccccaacaagggcctggggattcaaccaaaggagcagctacgcacagcacgttaggtgccaagactgtcgaggttatatacacagagtgcgaacgttaacctagacagctctcgaggatggcatacagcaaatgaaactttctgcgaaaagaagaaaacgtgactgatggaaaggggtggaaacgggagaaagtgacggtaaatgggaaggtgcagtgccttctagaggaaaattatatttcacaagtcctcttcactgccagagcacgactggcaaggacaatcgtgctgagcagtgccatctccgagaacaggtggcactgctcgcacttggaatactcaggacgcgttcttcctctgggatcactattcgcgggtcagcacagacggcccgtcctcgcccggcgtccaactgcacggcccgaggactctgtccctgcgcgtcccacccccggcacccggaacctcacggccactcactctgcgcgcaggatccggaagggctaggcgggggcgcggcggtgcagcctctcccgagcgcgctgggtcgcctctgctcggtctggggtctgccaggcgcgatccccccggtgcagccgagcccctccgcagactctgcgcaggaaagcgaaactacccggcaggagaaaaggcagcgctggcgcccggcccccttccgcccccaccaatcaccgggcggctccgcgctcagccaattagacgcggctgttccgtgggcgccaccgcctccctctgcgggccgctgctccgcccacgcgctggggtatttccgccggcttccggcgggggccgccggctgggtgagctgcagcccagtcccgtgttgccacgctgggaactggcgttctgtttacatatcttagagaacgatcagaaggacgtgctgtgtttgcagaagcccaaacttggaggtctctgtagtagtttcatcgccgagaatccaggcagaggacagatttggcgacgtcgtcattctagaagctccctttagcaactgacctccgtgttgctaaacccagggaacgcttttctgtttttctcactttacttgacagctcggaagcatggggcagagttgacgcctttgttcttgaaacacgtttcttccttggtcatgatgataacacatccttcttgctttttcctgcctctggcattctttctacattgcctccacctccactatcaaaccattatatgttaaggttgtcagggtccagacattcgtcagcttctttacctgggcttctcctaaacgctgtgctgtgatgacctcacccacagcttcagtttccttctagatggaggagtcttaaatgcttatcccgtccacacctctcctctgggcttcacacctacaactcccacttgcctctccacttgtatgtgcagtgagctctacaaactatgttcagaaccaaacatctttctcctcaaacctgctctttttctagaaatggcacatgacagatacctaggattcatagttgacattgccttctccctcacctcgcaacacctgatcctcaaatcttaattgattcttcctcctaaatatttcccaagtctcatttactctgctccatctcttctgctgcctccttctgcagtagattcccgaatggctgcctcacttcagcccttatctaccttttaatccattctccatacaagagtttgagtgtttttttttttaattgaaaagcagatcatgtcatttgccaacctgaaaatccttccatggcttttctttgctcttataaaattcagtttcttaatacatactataaagccctggttgcccgatctctttgtccaaccccataatgtgccactctgctttgcttacttcagcatttagttcttcaaataaaccacactctccaaactcagggacttctcaccctgagtttggaaaaccccttgagccaacatctgcttcacccaactcttcgctggctaactcatcttttagatcttagtttaaaaatctcagcttaaatgtcacttctccaggtaggcattgctgaagccagacaaactaaatctttttggactatatgctcataaaatcaattagttccttcaagtagacgggatttgagtcaagccttgaataattaggcactttggggtaggagaaggatctgaataatttcccatggatatgcctatatgtgtgtgtatgagttttttttctttgcacatctatttgttcttcttgtcacaaatgcaccctcacaaagcaagttagcagtgaaattagacttctctgccaagagatgccacggcaccaaaagtgtcccttctgctcttactcacccaagaaccaagacaatgttttactgttctctgaaaaaagctgtattaatccatttttaacgctgctaataaagacctgagactgggcaatttacaaaataaagaggtttaatggacttacagttccacatggctggggaggcctcacaatcatggcgggaggcaaggaggaacaagtcacatctttcattgatggcggcaggcaaagagcttgtgcagggaaactcccatttttaaaatgatcggatcctcgagactcattcactatcacaaaaacagcgcaggaaagtctcgcccccataatttaatcacctcccaccagtttcctcccatgacaggtgggaattgtgggagttatcattcaagatgag

SEQ ID NO: 3827 - DNA, 4001 bp, Homo sapiens
ggcgaaatgacgcctgcctaatgtgtgaggcttctaagggacaacctgaggtttcctgagtctgaaccatttgtttttccagatatcggatgtatatatattccatcggatgtgtatatattccacacaaaattggaacatttgttctcatgctactatcaacattgtcctatctatcaatttattttagttaatgacaacagagaacatgagttgaaaatagcattacagtttttcatcatactattgttaaacccccgctatgatttggatgaaaaatctattttctaactaaaacttacaggtagatgggaggaataagttctagtgctgtaacactaggatgaatatggttaacaataacttagtgtatattttcaaaaagctaagaggattttgaatgttcacaacacaaagtaatgataaatgtttgaggtgatggatatgctgaatatcctttgatcataacacattgttcatatttattgaaatatcactgtatattccataaatatttacaattgtgtgtcaaatgaaaataaaaggaaaattaaaaaaaataaaaataaacaccgaaaaaaatcactactaagatctgagtctttcggagagctgaattcaaagctgaaaaaaggaagaagaaggaatacatagtcctaggacattttctattgcagcctctgggaacgcctttagacatccttcagcaggtttctttgctttcactctctaggggctacttctttctcatgaaaactgtgacgttgcttctgaaaactcagtgcctgtctgtcctttttgcgtgcatttcctagaagatcccactaaaggggcattttgtcccaccgtctgtgagctggtggtgccgctttggctctgtggcctgtagcttgcaaaaggagatgacctgccctaaaatgtcactcgcgcccatcaaagccacagtcaccggctgccgtagctgcaagcttttttctgaaatccaggtacgctaatctaaagtcagacatcacagctctagagaagctggctaagaaagtgaagaggggctcactttcagcctccgcgaggacacacctccgcagccgccgcagctcccctggcccccgcagggagattcgcccgggcaccgtggcgcgggcctgcggagcggtttccgcggagaacccgtgccagggcgcatctgtgggtcgtggagtcgggcgcttccttctataataagcctcctcaggaaggttaaaatgaagcaattgtcaaaacgccaagggaaagcaaagcttcagagtatcctgcataataagcatgtcctccttacaagaggcagccagaaggtgtggtctggccacttacctagcgctctctcagcacaggtcccaggcagtgctcaagtccaaagtcagaagcgcccctcacagtccctaggagaaagccgctgacgccatcatcagtaggggatttgcatttctcctcccacttgaggctttcctgtgcgtcagtgttcgagtctctgggactttacttgggtcagttcccacccactctattctagaaatgctaacacgcagaaactgccaggctggagccccttcaccgggcgtcctcttccctcttatccctcccagcggctctcgcaactgcaggtggctcagcagtgccaggaaaaaggggaggggcggggcatacattttcttcagtggtttccttagacaatctgagatcctctgcagagttacttacctggagcccagttcttcagcttcctctctccctagtataaggctccactcagcctggtgaaccacccctgggatggaagggatgggtagccaggatcaaaacaccaaactcatagaccttactgggctccaattccagcggggtccgctcactccgacgagggtgacctgacccagagggttgggccaagtcctgggtaggccaccagtgcttgcccttcctgacctagcctcctcctactctccttgagtagccttgcccctggttgctacggtgcgttcttctccctttgtgacatcagcctgttctagaatcacagagttggaggaagtcttggtcccatctaatgctaaatcctctttcatatctgaagagacccagtgaggtgaccaagaggactcaataagttagccacggagcccgataatagcccaggtgtttcccttcccacttcagtggtcttttcatttcatctccttgtagttagctcttaaccccttgattcacagtaggggttcaataaaataaagagaagtccaggcgtgtggctcacacctgtaatcctagcactttgggaggctgaagtggaaggactccttgagcccaggagtttgagaccagcccaggcaacacagtaaaatcccaccgtatattaaaaaatcaataaaaatgtttaagaaagtaaaaatagtaaaacaaagacaaaaataaagacagacagacagactgaaagaaaggtagaaagtgtcactcaatttggttatacacatgcttagagcaatataccaaggtgaaaggcctgcctccctcttccctgacgggtttcacacaggtacaccctctggattcttctctcccaggtgacattatcatgtgcttaaacttaccacccacccccaaataggtcaatcaatccaaagtcacactttccatatcactgtaaatttcctggttaggtaggcctggtccccactgcttgttgagcaggcagtttccaggagcttatgctgctctgaccctacataagaaagtgccaatttcaggctattccataagctactaagcaaagtctgattttcttctggagaagctgtcactgcctataggaaaaaaatccaaattcttggcagtttaagttctgtacagtttggtcccaacctatccaggaaacttttctcccctataagagcccatgatgtgacccaagcagtcacctcagctgcccagattaacctcatatttcactaccgaggctttcttcaactggatattcctccctgagcctacctacttagtgaaatcctatagttctcagtgaagacttcccgatgacctgaacccacagcaatgtttccctgctccaaattcttcatacttcctgtccaaaccagcgctctccaagagaaataaaatgtaagccacatatgtaattgtaaattttctcatagccatattaaaaaggaaaaaagcacaggtgaaattaattttaatattgtaaataacccaatatatacaagaatcttaacattttggcatataatcaatataaaaaattatcaataagatactttgcattccttatttcatactcaatctctgaagtctggtgtatatttagcacttacagggcatgtcagttaggactagccacattccaagccacatatggctagtggctgccgtgttggacagtgcacatctagaccacttatttagcacttttcacttcctgcctcatagtgttagtcacactggttttacatgtccttatcattatcatattcaattgttgagtgcctgctgtacaaaacagagtttgttctcctcctccttttcagggccttaccttgcggcttccacagcagtttttaaaccttttgttctcaagataccattattcccttaaaaattgttgacaaacccaaggaatgtttgtgtattactgttctggatgaaatttttatttactgtgttaaaacttaaatctgagaaaaaattaaaatatgtatttattccttcaaaatgacaataataaacccactccatgttaaacatgttttaagaaaaacaaatatatcttccaacatgaaaaacgtaatgagaagagtggcattttaaaaatctctttaatgtctggtttgagagaagacagctggattctcatatctgtttctgcatttaatctgctgcaaagtattattttggttgacatatttgaagaaagtatggactcacacatttatgtagttggaaaaggggagtat

SEQ ID NO: 3828 - DNA, 4001 bp, Homo sapiens
ttcatatatttcatatacatattctttgggttttaagtagaatcattttgagcaccttttccctgagctcctggtaaatgacttaaaatttataaaaaaacgtgttgccaatgttttgctaaagagaaagcaagtgggaaaagaagtaatgttttatttgcatatcattttatatttatgaaaacctttacactttacaattctaggcatattgtaaatgctcaatcaatgcttgttaaatgaagaatgagtggcactcctgacattgctatgaatatggtaggtggatataagtagtatgtcaactttaaaaaggaaaaacttgaagatcaaataggcgaaatgacgcctgcctaatgtgtgaggcttctaagggacaacctgaggtttcctgagtctgaaccatttgtttttccagatatcggatgtatatatattccatcggatgtgtatatattccacacaaaattggaacatttgttctcatgctactatcaacattgtcctatctatcaatttattttagttaatgacaacagagaacatgagttgaaaatagcattacagtttttcatcatactattgttaaacccccgctatgatttggatgaaaaatctattttctaactaaaacttacaggtagatgggaggaataagttctagtgctgtaacactaggatgaatatggttaacaataacttagtgtatattttcaaaaagctaagaggattttgaatgttcacaacacaaagtaatgataaatgtttgaggtgatggatatgctgaatatcctttgatcataacacattgttcatatttattgaaatatcactgtatattccataaatatttacaattgtgtgtcaaatgaaaataaaaggaaaattaaaaaaaataaaaataaacaccgaaaaaaatcactactaagatctgagtctttcggagagctgaattcaaagctgaaaaaaggaagaagaaggaatacatagtcctaggacattttctattgcagcctctgggaacgcctttagacatccttcagcaggtttctttgctttcactctctaggggctacttctttctcatgaaaactgtgacgttgcttctgaaaactcagtgcctgtctgtcctttttgcgtgcatttcctagaagatcccactaaaggggcattttgtcccaccgtctgtgagctggtggtgccgctttggctctgtggcctgtagcttgcaaaaggagatgacctgccctaaaatgtcactcgcgcccatcaaagccacagtcaccggctgccgtagctgcaagcttttttctgaaatccaggtacgctaatctaaagtcagacatcacagctctagagaagctggctaagaaagtgaagaggggctcactttcagcctccgcgaggacacacctccgcagccgccgcagctcccctggcccccgcagggagattcgcccgggcaccgtggcgcgggcctgcggagcggtttccgcggagaacccgtgccagggcgcatctgtgggtcgtggagtcgggcgcttccttctataataagcctcctcaggaaggttaaaatgaagcaattgtcaaaacgccaagggaaagcaaagcttcagagtatcctgcataataagcatgtcctccttacaagaggcagccagaaggtgtggtctggccacttacctagcgctctctcagcacaggtcccaggcagtgctcaagtccaaagtcagaagcgcccctcacagtccctaggagaaagccgctgacgccatcatcagtaggggatttgcatttctcctcccacttgaggctttcctgtgcgtcagtgttcgagtctctgggactttacttgggtcagttcccacccactctattctagaaatgctaacacgcagaaactgccaggctggagccccttcaccgggcgtcctcttccctcttatccctcccagcggctctcgcaactgcaggtggctcagcagtgccaggaaaaaggggaggggcggggcatacattttcttcagtggtttccttagacaatctgagatcctctgcagagttacttacctggagcccagttcttcagcttcctctctccctagtataaggctccactcagcctggtgaaccacccctgggatggaagggatgggtagccaggatcaaaacaccaaactcatagaccttactgggctccaattccagcggggtccgctcactccgacgagggtgacctgacccagagggttgggccaagtcctgggtaggccaccagtgcttgcccttcctgacctagcctcctcctactctccttgagtagccttgcccctggttgctacggtgcgttcttctccctttgtgacatcagcctgttctagaatcacagagttggaggaagtcttggtcccatctaatgctaaatcctctttcatatctgaagagacccagtgaggtgaccaagaggactcaataagttagccacggagcccgataatagcccaggtgtttcccttcccacttcagtggtcttttcatttcatctccttgtagttagctcttaaccccttgattcacagtaggggttcaataaaataaagagaagtccaggcgtgtggctcacacctgtaatcctagcactttgggaggctgaagtggaaggactccttgagcccaggagtttgagaccagcccaggcaacacagtaaaatcccaccgtatattaaaaaatcaataaaaatgtttaagaaagtaaaaatagtaaaacaaagacaaaaataaagacagacagacagactgaaagaaaggtagaaagtgtcactcaatttggttatacacatgcttagagcaatataccaaggtgaaaggcctgcctccctcttccctgacgggtttcacacaggtacaccctctggattcttctctcccaggtgacattatcatgtgcttaaacttaccacccacccccaaataggtcaatcaatccaaagtcacactttccatatcactgtaaatttcctggttaggtaggcctggtccccactgcttgttgagcaggcagtttccaggagcttatgctgctctgaccctacataagaaagtgccaatttcaggctattccataagctactaagcaaagtctgattttcttctggagaagctgtcactgcctataggaaaaaaatccaaattcttggcagtttaagttctgtacagtttggtcccaacctatccaggaaacttttctcccctataagagcccatgatgtgacccaagcagtcacctcagctgcccagattaacctcatatttcactaccgaggctttcttcaactggatattcctccctgagcctacctacttagtgaaatcctatagttctcagtgaagacttcccgatgacctgaacccacagcaatgtttccctgctccaaattcttcatacttcctgtccaaaccagcgctctccaagagaaataaaatgtaagccacatatgtaattgtaaattttctcatagccatattaaaaaggaaaaaagcacaggtgaaattaattttaatattgtaaataacccaatatatacaagaatcttaacattttggcatataatcaatataaaaaattatcaataagatactttgcattccttatttcatactcaatctctgaagtctggtgtatatttagcacttacagggcatgtcagttaggactagccacattccaagccacatatggctagtggctgccgtgttggacagtgcacatctagaccacttatttagcacttttcacttcctgcctcatagtgttagtcacactggttttacatgtccttatcattatcatattcaattgttgagtgcctgctgtacaaaacagagtttgttctcctcctccttttcagggccttaccttgcggcttccacagcagtttttaaaccttttgttctcaagataccattattcccttaaaaattgttgacaaacccaagga

SEQ ID NO: 3829 - DNA, 4001 bp, Homo sapiens
gagagctgagggcttcatgttacggggtaaggagctgagatttggactcgtccatctgactccaaagccagactatccccagcactcagccagcgaccttttgcccactcagctctcaggtgtgcgcctttggacttcactcaagaactttcactttttaaccacctgaagccctgcccagcaccttggtctctgataagtccaagaagggaagggctgtgggccaaggataggagatatgaatgggagaggaatctacctgtttgacatctctaggctggagagggaacatgtgtgatcccagcttgacctggcctggtcctggggacctcagcaaacctggggcaggctgttcaacccccaggtggacaagtggcccagcctgagctccctgctggctctgaggccagcattagactgtgtcacttccatacctgctgccggattgcctggctgaggccacctgctccatttaagcccccttcaggacactagtgacaccatctaccccaccccgcccacttacccattagacattcactaagcacctgctccttgccagcccctctgcaggccaccagggacagagatgagtaagacatagtctgggtcctccaggtgcccctagctgattcagtcagcttcggatgggacttggggatctatatttttaacaagccttgcaggtgactgagaggacacacccaggtgagaccctttggttttgtggaccttctggctctcagcactgtattcttggggctgccagaatccccgtgaggacacagcctgtttcgccccagtggtaggttcctctgggctccaagtcagataactctgggttcaaattctacttctgcaacttcctagctgtgtatccttgcaaaatacgtggactctctgaggctgtttccccatttttaacaagagataatggtgccttcctgttgtgaggattaactgggatattgtgctcaaagcccttagcaagatgcctggcacacataaatgggaatatctgctgttaattatattatggctgcactctgatggacagaaatacctccctgggggcatttccagaatccccacttctggagcccatctctgaggtggccctggatatttgggaggcctctctgtgccctctgccagggctccagcgggaccttcctgcttctccccacggatccggctttctggtccccaaaccgcatattatctgggcacaccctccccttcatttacccagagtgaccaaagttccaaccacacctctccgggcagcctgtccccaaatttcggggaagtgggcaggagggggagctttgccgggcaggagggggaactttgccaggcaagggctccgcgggcagaggcgggcactggtgaggccagcctcctcctggggaccaaggtcgggcgcccctgcccagcccctgcacctgcccctgtccctgccctgttcggctgcgaagggactgggaggtctggcgaggaagagcctggaagatccccgcccacagctaccagccctcctttgggaccgctggccagagccccagccgtggggcacacgggacctgtggactcagccggggtcatccggaggggcgcccacatctgcacccggggctccggagcctgctccccgccactgtcgccgccggccctgcctaacctgcgcggcgcaagcggcttccacgcctagggaaggaaggcacacggggtgggggccccggaacccggtttctctgccgccgggcgcacgtggctcggtcccaggggacagaagtcgcctccagacgtgtggcggcacccgaggtccgcgcagcgacggcgcagggtgcaaccgggcgggcgtctcggggaccgggcgcagcacgcagccccgcggagaccgggggagggtacactcacctctgcggcccgccgctcggagcgaccgcggcagctgaaggtccgcggcgaaggcggtggctcggcccgaggctcctcctcccccgcgccccacccgcccgggagggccggacctgcaggggaggtggccgccctccagcccgccgcagcttatccggctcggccacctcccccggggccgcaatcaggagccgccgggtcctcgctccccgcccagccctgcacagccccggcagcggtggcagcgtccaaccaccctcctcccctggccccaggcgggaggtcgccagccggcgccaacacttcctgatttgcagtgcccggcacacggctgaagtgagcagaactccgggacctcctcttaacccggccacggagggcaccgaggccagggtgacctctaggcccccctctcttaacctgaggagcacctcgaatccttgtccattttataaccgaggccaagtggcagccacggttgcaggtgggaagagaccagggctccagattgggtccggatcccttccctctcaacaaggttgcgcccaggcctttgtggtccccccccaatctctgtcccttgtccacccttagggcagacttttgacccttcccagcagtcctcaggttccaagaccggtgggatggcgggtacctttctcccggagctgcctccctgtctaggccttctgggctctgaaaccctacccgtccccccttccccctggggcactgcccgctgccctccgcacttccaatgccgatggcttcacagcactgcagcgaagcagggcgtaagtaaggggaggctgtctgtgggcacctctctagaggtgtgcgccctggtccgaagccccttctcacctgtggtcacatttgccggctgcagttattttctttacaggtgaggagacccgggcttttccgctcagattcgtggaggctgagtgggggttcctgacccctggtactctttctagagtattcctgggagacatacactattagcctctgataaggagcttcaggttatttttaggaagtctaagaatcctgttttctggggagccagcctctgttggggagataagcctccggaggccagaggcaggagctgggcctcaaggaaggccccacaactggaccccaaagggcacggtggggaggaagaggcagagctctggtctccctgtggagggagtgctgctgtaaagcgcctttccctccacccccaactcccgccgagaacccccccacccccgcaggcagtttgctttccccctccacagctttcctcctacccgaatacccacctcccagctctctgctcagccagggcccaaggccagagcctctcttctcttgcaagaactttcctgtcccaccttgccccagggcaacacctcttatggcaattcttacaggtcctttatccattcaacactcacagtgccccaggtgccagacagtgctcccagtgctggagacacacgtgcccaatggaggttcctgcccttagggtgccagggctggtgagtggcccctgcagtgggttgtaaactttgagaagacaagacccagttcctagccccctctggtgcccctaatatgctccccctgcagtagctgttcttttgatgcctgctcctgctgatggggatggctgaatagccttcctttaatgcccaaggacagcacaaggaaaccgagcttgggaaatgcaaacactgagaggtcttccagcatctttggaagaatccctgggaaccagtgtctttttgtggggctctccatgcatgagtaagagagaggaagacttttttttgaggcggggaagcggggctctccatgagtaagagagacagggggagacattttgaaggctgggctgccagaggtctatagaggattatcttaaaaggaacatgaactcctgctggaaaaagtagaggggtctgaaatttctcacagacagggagggaggtgaataccctacttgggcccacacactttggcagagaggccaccgcccacgccgttgacctttggtgcttgttctgtccactgaccgttggactaag

SEQ ID NO: 3830 - DNA, 4001 bp, Homo sapiens
tcccagctactcgggaggctgaggcagaagaatcacttcaacctgggagggaggcaggggttgcagtgagccgagatcataccactgcactccagcctgggtgacagagcgagactccatctcaaaaaaaaaaaaaaattcaggacactgatgttggtacaatatgtatatatagctatatgctgtttatataaattcctgcagccacgcaatcaagatacaaaactattctgctgccacaaagctcttctcctgctacctccttgtagtcacacattcacacacccaccattcatcactgaataaattaacaagtcctacaacctgacatgaaggattctgtatgtactagacactgaggatagatacagacatggttcaaggactcttcccacgttcaaagggcctcctagttgtctcctcccagagaaggatataagacatttgcaaagttatcaatacaagccaggaaatgaaactgctactggccaggtgctgtggctcacgactttaatcctagcactttgggaggccaaggcaggttaatcacttgaggtcaggagttcaagaccaacctggccaacatggtgaaaccccgtctctactaaaaatacaaaaattagccggtcatggtggtgcacacctgtagtcccagctactcaggaggctgaggcaggagaatcacttcgtcccaggaggtggaggttgcagtgagctgagattgcgccactgcactccagcctgggtgacacagcaagactctgtctcaaaaaaaagaaaagaaagaaaagaaaactgctataaagagagcttccacagatatcgtcaataggagcatggagtgatggaggacagctaacattaactgtagtatgtaccagatgactttggtatctcattcaaaccttctcagaatctctcaaagagaagcactattaaccccatcttacagatatgaaaattgaggttcaaaaaagtgaaaaatcttgatggagatcatataattggtaggaagttacttctcctatctgatctcaaagccaaggctttttctaccacaactaatgccaaccaagtattcaacaactactgtggctccattatgcccaggcacagtgccaagcatcagggaaatcattacaataacaatagctcccaactgtaagcagttactatacttgcaggcattgtactaaatacatgaattaaaacgaatccccacaaatgttaagtacaatcactatgccaatctgtgaggaaaactgagcctcaggaaacagtatggcaagtttgaaagagggttgatattccaacccaagtgggtccgactccaaatctcgtgcttctatctactgtatttagtaccttgctacacaataatgattatgaccgagatcagtccctggtcctgaggggcttttagtcaggtaatgatcacttccttctgacagtgtcagagaaggcacggagggagggataccgccctttggcctcaaaggacggctagagtttaggctatcacaggcaaaggacactgtaagggcgaacaaacctgggaaaagtaaagaaattgaactctgacacctggtgaccctaccagtcgtaactccatgactctcagggcgtgtctccagaaagcaccacccccacctcgtccgaggtccgaggcccagcccaaccggaagtccactcaccggactcccgcagcaaccccgcgagcttccacaacagggagtccctctgagcggtcgtcatggccacgggacgctggggggcggagcctggggggggaaagaggaagcggaagagcctcaggtgggcggtagtgccaaaagcccagggcgtccgcgcaaaccgaggcgtcatgcggagaaaaaggcgagaaagaaaagagaggaagagcatcctcctggccgccctttcgaggaacataagtcctggtcagacataccgaacctccccgtctggtcctcctaccagctcagctgcccggcgcctatcaatgatggaaaggaagtcccgccccggaagaaaatcgagccaagggacgaccggaaaacatgtctctgccgccggaaaccgcgccgtagatcatgcaaacgaatcgaaaaggggcggtgcgggggctgtctcctgaccgcggtggtggctgcagtggttccctgggcttcctggcccggagctgggcacccattattcccccgccctgcgcagcctggggctcccgcttggctttcggcgagcctaccgcgccggtgaggaaaccctgactcgtttgcaaactgggcggggaagcaaagtttagagaaatggagctttgttagataaaaattttttcaacgcaaacagtcattttccagtgaaaggagagcgtatccgccgtaggatggacttagatcgtgtaaaagctgaggccaccgaggatataacctccggggtcctttgcctccttttccttagactccctccaaactcgtgtatctttccttcagcagtactgggctccacgcgaacctagtcctttgtctttaccctattacctttcataacatcctagttgaaaagtagttattcaaccgcgtttgaaaatgagaacaggttcacagaggctaggttacttgcgaaggtcgttcaattagtaaccagtagcgccaggactgccagtttcttgcttccgaattctcatggtagctttcaccaggctccccgtcaaatgctaacgtcaactactgaactagattagcaaaaaggtcttttaacagaattcctggttttcagagagagtttctttcatgaagcgccccatttctacagaggaaaatcaaaatgaatcctaagccagttgaaaggagggataggatcatagtcatctttatcccaagttgccagatttgaaagattttattttctcaagacaaaatatttgaaatggcaaatatttcaaatattttgaatatttgaaccacacaatttcgcattcatggcatactacttgtgctctgagctgaaagccttttaggttaaataaagtaagtggagatacatccgaagcagcagtgttgagctcagaaaaacaataccccaaaatacggcgctttggtatgctgactattttgaactaaaagagactggaaggcctcaggcacagtctctccgaccttttcctgccctcctgtctcccagccttctttcttccccaaggcaagccatagaaaccagaattcctcttccccaagatgagtcacagaaactagaagccctctcccccaaagccagccataaaacctaaacttccccccacctttctatgtaagagctggccgtggcctggcgcggtggctcacgcctgtaatcccagcactttgggaggccgaggccagcagatcaccagaggtcgggagttcgagaccagcccaaccaacatggagaaaccctgtgtcttctaaaaatacaaaattagccgggcatggtagtgcatgcctgtaatcccagctattcgggaggctgaggcaggagaatcgcttgaacccgggagacagaggttgctgtgagccgagatcacgccattgcactccagcctgggcaacaggagggaaactcagtccaaaaaacaagctggccgtaaagaacttctctggcctaccttgtctgataggccgtaagaccctcattctggaagagatcctgcctcatacctgggaggaaggaatgctacacagaaagacctcgttgggtttccacctgctgtctgttactattaagtggcacactttttgcccaaccacattactgcaggctgtccatttttcatagaatctaagcattaaaaacaagttttccctggctctttgggtagccatttctgaaggctcccatgtcatgtaaaactttgattaaataaacttcttagtttattttagatttttctcttaacctatcttgttatacgagctctgacccttatgatgaggaagaaaggcatcacaacttttcagccccta

SEQ ID NO: 3831 - DNA, 4001 bp, Homo sapiens
ccattaaaactggctgcccctcatctccaagcaatatattggtgggcttcaagtctctgtagagaagtagaagtgacctatgagcatctctggacaggaaggctggaatcccagcaagcaaaagaatcatacaggctgtttcttgggagaacagagacctcccatgtctcctggtgaggctcttcctctgggccccagcaagcacacagggtcctcccactgacctgtgggcataacccttggcatgaatggcctcaaggcctctgcagatccccagcagcagccaaaggatttgatcctcggtcaggaagttgcctttgtccttcagcctttctatctcattccacagcgtacctctctgcaacacaagtttccctacagttggagatgtttttggagcctctgctccttaggcctgatcccttccctatgtcaaagcctatcagccctttcatgatacacacctcaaactcaaaatctaaagtggccaaacccaggacatggtccctgcttcctaacatgctggactgctcacacagcccttgagtaggtggctctgctgcaaccccctccataaccaggagtctttctgaccttgaagaatggtagcagcagccaggcctcatgcttagcaccccgttccctcagacagtaagccacgaggcgaaggatgttggggtgattgaagaggcgatgcatgtcggcttctcgctgggcctcctcccggtcctgctgctcgtgacacaggattcgcttcagggcgtagaagtgtccatcatgtaacccttccactaggtccacatagctgaacccactgtgggccaaaggggtcaataaagggccatggtcatctcccacatggcttggacctagagaaatttcctggtggggagtggggtgtccttcccatttagcagaaaccttcccaagatgtggctctaagagaaatctgaagaatattacaccgtgagctcctcaggagcagagatatagaaatctttgaggtcctatggtcgtaatagagacctctgcacttgacagatgctaaataaataatagccaacacttatcaagtacttgtcaaccccgcattgggtgagacattttatacacattatctcatttaatcctcacaactccatcagtgagggataataatcatctccattaagctgatgaaaaaaacatggtttatcaaggtcacacgaggtggatttagcaggcctggctccagaatccaccttcttgatactgtgtagctaggttctgtcaggtgagagaggacagggatagggataaaacccttgtgccccaagcatatgcacaccgctgtccttcaatgatcataaacttgaggactagttaactgacttccaaacactcacccctcccccagtttctggatgaagaggtagcgcttattgtcaatgatgacagttccccgagagcagacacacagcgcgtggcccataatgtctcagtcatcctcttcaaggacggtctgaggctaccgaagagctcgtccagggtgagtgggctcttccaggagatgcgctgggggcccagcggatcatgctggaaagaaaacaacggcagggtcacaggtccggcacaatccagacgacccatgaagtaccaatgcggagagctcaggcccaggtctctggaacctacactatagtgtagagaaaacaggccctgctccgtcgccagcttcaggggtggggtcaggcgccttacggcctcaggacacacagcggctaccgggccacttcctccaaccccagcccatctttgggcagcccccgctcccacgcccatcgcgccgcaaaagcagagcatagcgtagtttcagaggacgtgcgaggctcaggcccactcctggcagggcccaccccggtctaggagcccagagcccgggatgggccatctgcactgccggactgacctggctcgggccagagagaagcgccaccgaccggaagcagtgctgacatcatcagtccgcgccggcgtaacggcccgcggtatctcagcaaccgctgggcatccggaggatgtggggacgcggagctgagaggctccgggctagctaggtgtaggggtggacgggtcccaggaccctggtgagggttctctacttggccttcggtgggggtcaagacgcaggcacctacgccaaaggggagcaaagccgggctcggcccgaggcccccaggacctccatctcccaatgttggaggtaggaggcttcatacctctggcgctctggggcagaaagcggccaactacactgcagcctggagggggatccagtgaggggcgggtctggtggcctggtctcctgatcccgtacaaccttctgggctctggcctgtatcccactacccctagtctcagtggttaagagctcaggcttgtgaaccagacttccagtttctaaattgagtgttaatagcatgctagctgtgtaacctcgggcaagttacttaacctctcggatccttacttttggtagctgtaaaataggtataatagtacataaggttaagtagcttaactgtgaggccagactgactagttcaaatgacagctccgttaacgtagttgtgtgaccttggacaggctacttaatgtttctgtcctttcctctcctcctctgtaaaatggaaataattatctacctcatggagttgaagattaaatgagatgtacagtgtttaatacaatatctgacacatagccttcagtacgtgtcaataaaccgtaattattattaccctgatcttcacatcccattcttgagactgtaaaggcaaaaggaacggaaattcacagattttcgagctttggcacaaagcagttgtccttaatatctgttgcggaggcaggcaggggtaagctggagaggggtgcacttccaaagaaggtggaatggccaggagggaatggctgttttgctgaaacaggactctccaggaaagaggtccttcttgtgacctggttcctcccttccacaccccggatcaccctgaagattttccaatggtttcccctggttctgaacctgttttagccttttggttatgacattgattcatccagatttaacctactatatacccggccctgtgctagaggctgaggatttgagatgaacagggcactccctgtcctcagggagcccagtcaagtaaagccatgcttctcaattttgaaggtgcctaggatcacctgggaatcttgttaaaatacaaattctgattctataggtctgaggtaggatctgagattttacatttcttttgtttgtttgtttgtgttttttgagacagagtctcgctctgttgcccaggctggagtgcagtggcaggatctcggttcactgcaacctccgccttccgggttcaagcaattctcctgcctcagcccctacccccacccccacccccacccccacccccaccctcggagtagcttggaatacaggcgcgtgccaccaggcccggctaatttttgtatttttagtagagacagggttttgccctgttggccaagctggtcttgaactcctgacctcaagtgatccacccgcctcggcctcccaaagtgttgggattacaggcgtgagccatcgtgcccagccagattctccatttctaacaagttcccaggtgatgtcgatgaagctggttcgtgaactgcactttaacatgatgtagaaattttacaaactagtagagtaagggggtggctgcaggctggagaggaagtccaggctaaacgcctggcaacttgaggtggtttccgcccccttgctcgctgaggttccctcccaggaatccgacacgtgacggtctgtccgccgtctcagactagaggagcgctgtaaacgccatggctcccaagaagctgtcctgccttcgttccctgctgctgccgctcagcctgacgctactgctgccccaggtaagatgagacggtgaaccagcctgccgggt

SEQ ID NO: 3832 - DNA, 4001 bp, Homo sapiens
aaattatctgattagaaacgtcagccataaaaatgcttgtatcttcttcaaatttgttactcatatgctaacacagcgattagtcaaacctccaacttcctaaaaacgcattctatcttaaccaaatcgtaattcactaatcaatgatcccaagagaaaccgcaaccattctattcacacacaaaaaaggatggtcttcaattacagaaattctacttttaaaaagtcttgccatgtaagcaaatatatttcacctcaattttggatccctactttagaaaaaaaaaaagatctaaaatgtacaatatgtatctcaaaaataaaacatctattaatacctccaattattaagatactagaaaaagtttaattgagcatctgctcagaggaggaggatccgaggcagatgagtttaaaacttttgcaccgcttctatggaccagttttcttaaaaaatacacaatcctaggggtacacggtctaatatttataaaataagcacttgttgaaaattacttccgaacagttcaccataaaactaaaaaacagtgttatcaatgagaaagtaggtttattttcctttaataaaattgtgctcctgggttcaaaatgccaggttacatacgctgccactcatttctacagagctatgctgtctccgcgcagacattctcatagacttgaaaacgtaaagtggccacaccacgtcaaacgtccctggcaaggttctgcttatcattagcaccacagatgtaaacattacgtcgacaaaacaatcggtgaatgtgatacacagtcctcatgtgtttaaatattagtgaaatctgataagtattacgattttaaaaacgtattttcttaattccaatttccaaattgatgtcagagtgcctctagtccagacagaaactaatgccagctaccagctgctataaagcctctttcaactttgtctctacttctccctcggaggaaattcaaatgaaacgcttttccctacaataaaacaaagagcctgggtaaatgtcaaaaatcgttggcatccagtagtggtatagtttgaggatgagtcgtgcacactaagtgggtcacaaggcatcaaagcaaaaatcagatcgctgaaaatcacggaaacagctgtagcccgtcttgatctctcgctggttttaaaacactgttcccaagcagtaactgaaaacgtcccacaagatgaacacgaactttctctagacgaaaggcagctgggagcaggacgcgtccacgagtcccgatgggaacgcgcccacgccgcagctgggactcgggagaggctagggggaccgcgtggccttgctgtggaagggacccgcgcgggcccgccgcgaagggggccctgcctggcgcgacctggggagagccggggccggccgggtggagggcgcacggggacacacggacacgcacagacacagacacgcgccccgggctgaggagggtggtgggaggaccgccggccgccccccgcgcggagccccagggaacccggactccagccgcaaagcggagaggcgccagcagcaatcagccacctcaggggcggcggagtccaagcccctctcagccggaccgtaccgcctaaaccctcctcgggtcctccttcctcacgtatgaggtctctgtaccgaggcggctggttccatcgcagccccgagccaacccgccaatcccgcaggacactaaccgctccggccgccgcaggttctcccgggactgccccctccagggggccgctgtcccgccccacgccgggggccgccacaggacgagttctctagctccagccgggcgaggcgccagggagctccgaacgtggcaggatccacttttacttttccagacaagggccgacggttgtgacctggcttctcgtgaagtgactcctggcgacagcagcggagaggactaccgaagcttgcagtcgcggtttgaaaactgcagccgcgtctggggcatcgccgttcgccagatccctccccctaggtcgggagagccaatcggaacgggtgcggagggtgggtctgtcacgtgacgggaggggcggggcaccggccgggggcgcgtgtgcggggcggggcccggcggtgagagggtgcggcgcctggctggcccgaggcggggcggggaggcgcggcggcgtggcggcgcaggtggggcgcactcgggctgccgcgagggaggggcggagggggcggcgctgcagagggggcgcgcggggctggaactactgctctgtgtactccttcccaccttcagagaggtcagttcgagaggtgtgaatatccggagaccggggagaaggaagccgcaaaattcgtcccagctgcctgcgactagttaccaaacttcagtgcctaccaaagacctattttctgactcttcttgagagtcttccttaggaccggaacgtaccctgtaagtggagaacccagtttgctacaacttggcagaggttcctcggagtgtcaacatcagttggggatttatggaacctagaccccactgctaacgtccgctgtcgcgaatggtgtcccttctgaggcactgactgaaggcagtgtagggagggtcccaataggctgaatagccgattttgcatttatagtgctaaggaaaaagatgaaagccctcagcaacctactcaagatctgttatcctttgaagacagtggaaattttcaaagttctgtgcaagacacaaatgttttacatagatatataatcctagtttatatgtataggatacacacatactcatacatatatgggattagttatgtaatctaggattgctttcagaggacatttacgataattgcagaaaacccttccgtgggaaaggatactgggagtggagtcgtcctcttgctttcaaaagacttaatgttcagttagcatataaaggacaggttttcttgttctatcccagtaagccaagcaaattcctgtgaagctagctgtttccctttcctactgcattttccccaagataaaggtatagaatgcatcacagcccttttatgaagtctgtttgttgttacttaggttaactcctcctcccaggttaataatgtcttgcccctaaaccttgtcaaatggagaatattgcttccatctatctaatttcttgttgctaacaattgggctgactagagaagcctaaagttaggatgaaaataaaatgccacacactggaattaacttttctggggtataagaatccgtaagcaatgagactgttcccatcttttctttcatgagcataggtgttgcattccagaggtctcagcaccagtaccaaaactagtaacctcttgggggtcacaggattacatcattatggtggttttggggttgtgtgtttaactttggacctccttaatttcaacatttcatcaattgccagcttttagcaatcttctcacactcaccccatactccccgtcactaatccagtcccagatcacttcacacctagacacagacttttctctctctggcaccactgtaagccagtcctcttggtcacaatacctctgctgtaaccagccagcctcctagggatattgtcatgtcttgcattttcctgcttctgccttagctccagcttatcaccatcctcctcatccatacctgttcatcagtttctgactttaagaaggttaccctcttcaggaatcagaactctgctgattcctactttctgttcccagcctgatcacctctgccttatgttctttggtgcagggctgatagtttgtgtttcttttatgaccctaaatagattgttaacccttgtgcctgatgtcagatttgttaactaggacttaccacactatcccaaggacattcaactacacttacttggtctcaggcactgtggttcaagtaacaaggaattcctggtgctgaggaggaggcagtacatctgtggccttgcaggaaaattcagaagtcaatacattc

SEQ ID NO: 3833 - DNA, 4001 bp, Homo sapiens
ggcagagggtgcagtgagctgagattgcaccattgcactccaacctgggcaacaaaagcgaaactccgtctcaaaaaaataaaaataaagtaaaataaactggtggcagatttttctcccagcaccttagtcatgtaagttaccagatacagaatgccaaaagcaaaccaaaaatctgttagcttaattcagcaacagtcagcaagccccagtctcatctgtgaccacgcaggtccaggttgcctggcccaacagctgcacatggtgttccgggtctctaggctggtccggtttcctccaaagcagccctgactccagttcctgcccctacgcgaacagacgcccttcctgttccactgcaggcccaactctccattcagcacataggagtgaacaaggagggccacacattttagcggcgattccaacgccttaggtagagccaaggcatcaaggagaataaaaccgaacagctaagatgtaagaaaacccagcggccagagtcaaaaaagtggggaggggtagagaatgcaagtccccaggccccaggttggctgaccccaccctccttccccggcaagccctttggcaccagcagctggtcctcattccaggctaagggctcgccgtagtggctccctccgaggctgtcccaccagacgcttaaaggtggctccatagtggaaacgacttctttaaagaagaaagatgagtctcatgttcgggcaaccgcccgtcgcaggggttaaacggtcctgacagagcagccttttcaccctcccctgggccaaagcacacacgtgttctctgctttccctgcacaccggccactcagatctgcttctccacaatctcagcccctcagcgcccgccagggtctcccctacagcccctgcccagcccaacacggccagaatgacccgcggcccaggccgaggccgcagggtggcccccgaccttccactgccttcggatgctgacatgaggttcccgccccgcgctgggggcagcgccccgtccctgcgccggtgtctcttcacgcacctccaccgccctcgcacaggcggagccaccaggggctcggtttctagaggcctgcgagcttctgccacgcaaaacgccacaggcacacggcagagccccggggccgccctgcgcccacctcaggacggctccgctggtcgcacgacgcgcgctccttccctcaccccactgcccgctccggcgtggcgctcccctctgaacccccaggagactctggagcccctcggtgagaggccgctagtcttcctgacctgcacccttctcacctggttggcaaatccccggaggtgagccatggccgcgccgcctcagaccctccgccagcagccccaggaggcgtctggatcccgcggagaggcgcggagccggctagctcgcccctgcggcgtcagtccactgcgagggacaccaggggcgctcggtgcccagttcagtcatctgagaccgacctccggggcggcgggctccatgggtgggggggggcccaggagaccccccaggccgccggggccccgccacgcccgggcctaacgcccaggctcccgggggctcgccgcccctcccgtcgccgcccccacctcttccaaggcagcttcctcccggtgcccccgccccggtgtccccgccaccgagccccgccccgggcccctccctctgccccctccccaatcgccgcaagcgccccgcccggcagcgcgcccacctccgcggggctccatcccggcctcccccggcccgctctgcagcgcccgcgaaggctcccacccgcagcctctgttcgcccggggaccccgggcctcccagcccgcgaagcaacggtggtggcggcagcgaccggagaaagcccggaggcgacggcgagggcggtgctcggcgtcgcggcccgcgcacggctctctgggaccccgagtcccaccgcccactccgggcccggaagcctgctggcgttggactacaagtcccggcaggctgcgcgagagggggccggggctcgcatgcgcgccgcgaggctctctgggacccctagtcctgctcccgaaaggtttggactgcgtctcccggcaggccgcgcgcctgggcgggcggggcacgtggtcgttgtcgcgtcgcgccctccctgcctcgccctcgcgggtcttctgcgtttgctggcgcctgccaggcgtcgtctccgacgttacggcggccgcgcggccctctcccttgggctctgccctgcgcagccctggttcgagcgggccagtgaggcccggcgccctccccgcctcgccacgaggatccaccgcggccgcccaggcttctagccttgtcgtcacggcacggagataagcccgcgctggccacatcgcgaagcccctgttcgtactgagaccccgcccgggatcacgcgcacaggccagggcgcaccaggccttggagaagctaccggcacagcccattccttgggcgagttgcttcgcctctcctgcctcagtttccttacctgtcaaggggtggtcataggacgtccttggtcacaccgttgtgggacccacctgggctagagcgcgggacgcgcccaggacagtgactgctgctggaagccgtcatggcactccccagggtccgggagggacttgcagatcccaaggctacctggtgcgtccccgtgccccgtgggccgccaggtcatagtgccccctgtgtgcattcccctagtgcaccgcagggatccccacctgtccggtgaggaagatttgtccctcctgcatactgtgtccacccttacaggccctcactctccatgatggctcagcacaggtgactatcctgacctcctcacatccctccttcttcgagagggttctggcgtttctctctgctccctggtgcgtgtcttctcatggtgcactgccgagtcctttaagaagctatgcttccctgtcatgcgtccaggacagccccttgaacccctcctgggtccgcatctctcatcacccctgcttctttacgtactgacttggctttgtttgtgctttgactccccaggagaaagtgggcttcctgcaagcggagctgtgcccaggaccatgccagcccacggcaggcgctcagtaatgtttgttgaatgaatgtgtaaatgcatgaagataatatatgtatttaatgcatgtaaatagatgcctgctgcatctctggccttcgtgtggtcagtaatcgctgcacttttccgaagtgcctagaagaggctgggagcagtggctcacacctgtaatcccagcactttgggaggctgaggcaggcagatcacttgaggttgggagttcggggccagcctagccaacatggtgaaacttcatctctactaaaaatacaaaaattagccaggcatggtagtgcgtgcctgtagtcccagctactagggaggctgagtcaggagaatcgcttgaacctgggagttggaggttgctgtgagtcaagatcatgccacagtactccagcctgggagaccgagcaaggctctgcctcaaaaaacaaattaataaaagtgcctagaagagtttttcagcctttgcctgcttttggccaattgttaaccctttgctcctggctgctgtcttgctaagctgccgtccggacgtgatcatcaccatgtcttttcctgcattgaccttccaggcccttcatcccgtttctcttgttttccatttcttttttgttgttgtatacttctgttattcttcggggtttttgtttgtttgtgtgtttgttttgagacggagtctcactctgtctcccaggctggagtgcagtggtgcgatcttggctcactgtaacctccgcttcccaggttcaagcgattctcctgcctcagcgtcctgagtagctgggattataggcgtgcgccaccacccccggctaatttttgtattttgagtagagacggggtttcatcatgttggtcatgttggtcaggc

SEQ ID NO: 3834 - DNA, 4001 bp, Homo sapiens
ctcccttccctgtgtgcgatcgcaccaagaaccaatagcacacagttacagggcacctcggagctccaatttctcatcctgtgacccaaaggagttatttctgcagttcttaaaaataaactggtggccgagcgcggtggctcatgcctgtaatcccagcacgttgggaggccagggcaagcagatcacctgaggtcaggagtttgagaccagcctgaccaacatggtgaaactccgtctctactaaaaatacaaaattagctgggcatggtggcgcatgcctgtaatccaagctacttgggaggccaagacaggagaatcgcttgtacttgggaggcagagggtgcagtgagctgagattgcaccattgcactccaacctgggcaacaaaagcgaaactccgtctcaaaaaaataaaaataaagtaaaataaactggtggcagatttttctcccagcaccttagtcatgtaagttaccagatacagaatgccaaaagcaaaccaaaaatctgttagcttaattcagcaacagtcagcaagccccagtctcatctgtgaccacgcaggtccaggttgcctggcccaacagctgcacatggtgttccgggtctctaggctggtccggtttcctccaaagcagccctgactccagttcctgcccctacgcgaacagacgcccttcctgttccactgcaggcccaactctccattcagcacataggagtgaacaaggagggccacacattttagcggcgattccaacgccttaggtagagccaaggcatcaaggagaataaaaccgaacagctaagatgtaagaaaacccagcggccagagtcaaaaaagtggggaggggtagagaatgcaagtccccaggccccaggttggctgaccccaccctccttccccggcaagccctttggcaccagcagctggtcctcattccaggctaagggctcgccgtagtggctccctccgaggctgtcccaccagacgcttaaaggtggctccatagtggaaacgacttctttaaagaagaaagatgagtctcatgttcgggcaaccgcccgtcgcaggggttaaacggtcctgacagagcagccttttcaccctcccctgggccaaagcacacacgtgttctctgctttccctgcacaccggccactcagatctgcttctccacaatctcagcccctcagcgcccgccagggtctcccctacagcccctgcccagcccaacacggccagaatgacccgcggcccaggccgaggccgcagggtggcccccgaccttccactgccttcggatgctgacatgaggttcccgccccgcgctgggggcagcgccccgtccctgcgccggtgtctcttcacgcacctccaccgccctcgcacaggcggagccaccaggggctcggtttctagaggcctgcgagcttctgccacgcaaaacgccacaggcacacggcagagccccggggccgccctgcgcccacctcaggacggctccgctggtcgcacgacgcgcgctccttccctcaccccactgcccgctccggcgtggcgctcccctctgaacccccaggagactctggagcccctcggtgagaggccgctagtcttcctgacctgcacccttctcacctggttggcaaatccccggaggtgagccatggccgcgccgcctcagaccctccgccagcagccccaggaggcgtctggatcccgcggagaggcgcggagccggctagctcgcccctgcggcgtcagtccactgcgagggacaccaggggcgctcggtgcccagttcagtcatctgagaccgacctccggggcggcgggctccatgggtgggggggggcccaggagaccccccaggccgccggggccccgccacgcccgggcctaacgcccaggctcccgggggctcgccgcccctcccgtcgccgcccccacctcttccaaggcagcttcctcccggtgcccccgccccggtgtccccgccaccgagccccgccccgggcccctccctctgccccctccccaatcgccgcaagcgccccgcccggcagcgcgcccacctccgcggggctccatcccggcctcccccggcccgctctgcagcgcccgcgaaggctcccacccgcagcctctgttcgcccggggaccccgggcctcccagcccgcgaagcaacggtggtggcggcagcgaccggagaaagcccggaggcgacggcgagggcggtgctcggcgtcgcggcccgcgcacggctctctgggaccccgagtcccaccgcccactccgggcccggaagcctgctggcgttggactacaagtcccggcaggctgcgcgagagggggccggggctcgcatgcgcgccgcgaggctctctgggacccctagtcctgctcccgaaaggtttggactgcgtctcccggcaggccgcgcgcctgggcgggcggggcacgtggtcgttgtcgcgtcgcgccctccctgcctcgccctcgcgggtcttctgcgtttgctggcgcctgccaggcgtcgtctccgacgttacggcggccgcgcggccctctcccttgggctctgccctgcgcagccctggttcgagcgggccagtgaggcccggcgccctccccgcctcgccacgaggatccaccgcggccgcccaggcttctagccttgtcgtcacggcacggagataagcccgcgctggccacatcgcgaagcccctgttcgtactgagaccccgcccgggatcacgcgcacaggccagggcgcaccaggccttggagaagctaccggcacagcccattccttgggcgagttgcttcgcctctcctgcctcagtttccttacctgtcaaggggtggtcataggacgtccttggtcacaccgttgtgggacccacctgggctagagcgcgggacgcgcccaggacagtgactgctgctggaagccgtcatggcactccccagggtccgggagggacttgcagatcccaaggctacctggtgcgtccccgtgccccgtgggccgccaggtcatagtgccccctgtgtgcattcccctagtgcaccgcagggatccccacctgtccggtgaggaagatttgtccctcctgcatactgtgtccacccttacaggccctcactctccatgatggctcagcacaggtgactatcctgacctcctcacatccctccttcttcgagagggttctggcgtttctctctgctccctggtgcgtgtcttctcatggtgcactgccgagtcctttaagaagctatgcttccctgtcatgcgtccaggacagccccttgaacccctcctgggtccgcatctctcatcacccctgcttctttacgtactgacttggctttgtttgtgctttgactccccaggagaaagtgggcttcctgcaagcggagctgtgcccaggaccatgccagcccacggcaggcgctcagtaatgtttgttgaatgaatgtgtaaatgcatgaagataatatatgtatttaatgcatgtaaatagatgcctgctgcatctctggccttcgtgtggtcagtaatcgctgcacttttccgaagtgcctagaagaggctgggagcagtggctcacacctgtaatcccagcactttgggaggctgaggcaggcagatcacttgaggttgggagttcggggccagcctagccaacatggtgaaacttcatctctactaaaaatacaaaaattagccaggcatggtagtgcgtgcctgtagtcccagctactagggaggctgagtcaggagaatcgcttgaacctgggagttggaggttgctgtgagtcaagatcatgccacagtactccagcctgggagaccgagcaaggctctgcctcaaaaaacaaattaataaaagtgcctagaagagtttttcagcctttgcctgcttttggccaattgttaaccctttgctcctggctgctgtcttgctaagctgccgtccggacgtg

SEQ ID NO: 3835 - DNA, 4001 bp, Homo sapiens
tctcccctacagcccctgcccagcccaacacggccagaatgacccgcggcccaggccgaggccgcagggtggcccccgaccttccactgccttcggatgctgacatgaggttcccgccccgcgctgggggcagcgccccgtccctgcgccggtgtctcttcacgcacctccaccgccctcgcacaggcggagccaccaggggctcggtttctagaggcctgcgagcttctgccacgcaaaacgccacaggcacacggcagagccccggggccgccctgcgcccacctcaggacggctccgctggtcgcacgacgcgcgctccttccctcaccccactgcccgctccggcgtggcgctcccctctgaacccccaggagactctggagcccctcggtgagaggccgctagtcttcctgacctgcacccttctcacctggttggcaaatccccggaggtgagccatggccgcgccgcctcagaccctccgccagcagccccaggaggcgtctggatcccgcggagaggcgcggagccggctagctcgcccctgcggcgtcagtccactgcgagggacaccaggggcgctcggtgcccagttcagtcatctgagaccgacctccggggcggcgggctccatgggtgggggggggcccaggagaccccccaggccgccggggccccgccacgcccgggcctaacgcccaggctcccgggggctcgccgcccctcccgtcgccgcccccacctcttccaaggcagcttcctcccggtgcccccgccccggtgtccccgccaccgagccccgccccgggcccctccctctgccccctccccaatcgccgcaagcgccccgcccggcagcgcgcccacctccgcggggctccatcccggcctcccccggcccgctctgcagcgcccgcgaaggctcccacccgcagcctctgttcgcccggggaccccgggcctcccagcccgcgaagcaacggtggtggcggcagcgaccggagaaagcccggaggcgacggcgagggcggtgctcggcgtcgcggcccgcgcacggctctctgggaccccgagtcccaccgcccactccgggcccggaagcctgctggcgttggactacaagtcccggcaggctgcgcgagagggggccggggctcgcatgcgcgccgcgaggctctctgggacccctagtcctgctcccgaaaggtttggactgcgtctcccggcaggccgcgcgcctgggcgggcggggcacgtggtcgttgtcgcgtcgcgccctccctgcctcgccctcgcgggtcttctgcgtttgctggcgcctgccaggcgtcgtctccgacgttacggcggccgcgcggccctctcccttgggctctgccctgcgcagccctggttcgagcgggccagtgaggcccggcgccctccccgcctcgccacgaggatccaccgcggccgcccaggcttctagccttgtcgtcacggcacggagataagcccgcgctggccacatcgcgaagcccctgttcgtactgagaccccgcccgggatcacgcgcacaggccagggcgcaccaggccttggagaagctaccggcacagcccattccttgggcgagttgcttcgcctctcctgcctcagtttccttacctgtcaaggggtggtcataggacgtccttggtcacaccgttgtgggacccacctgggctagagcgcgggacgcgcccaggacagtgactgctgctggaagccgtcatggcactccccagggtccgggagggacttgcagatcccaaggctacctggtgcgtccccgtgccccgtgggccgccaggtcatagtgccccctgtgtgcattcccctagtgcaccgcagggatccccacctgtccggtgaggaagatttgtccctcctgcatactgtgtccacccttacaggccctcactctccatgatggctcagcacaggtgactatcctgacctcctcacatccctccttcttcgagagggttctggcgtttctctctgctccctggtgcgtgtcttctcatggtgcactgccgagtcctttaagaagctatgcttccctgtcatgcgtccaggacagccccttgaacccctcctgggtccgcatctctcatcacccctgcttctttacgtactgacttggctttgtttgtgctttgactccccaggagaaagtgggcttcctgcaagcggagctgtgcccaggaccatgccagcccacggcaggcgctcagtaatgtttgttgaatgaatgtgtaaatgcatgaagataatatatgtatttaatgcatgtaaatagatgcctgctgcatctctggccttcgtgtggtcagtaatcgctgcacttttccgaagtgcctagaagaggctgggagcagtggctcacacctgtaatcccagcactttgggaggctgaggcaggcagatcacttgaggttgggagttcggggccagcctagccaacatggtgaaacttcatctctactaaaaatacaaaaattagccaggcatggtagtgcgtgcctgtagtcccagctactagggaggctgagtcaggagaatcgcttgaacctgggagttggaggttgctgtgagtcaagatcatgccacagtactccagcctgggagaccgagcaaggctctgcctcaaaaaacaaattaataaaagtgcctagaagagtttttcagcctttgcctgcttttggccaattgttaaccctttgctcctggctgctgtcttgctaagctgccgtccggacgtgatcatcaccatgtcttttcctgcattgaccttccaggcccttcatcccgtttctcttgttttccatttcttttttgttgttgtatacttctgttattcttcggggtttttgtttgtttgtgtgtttgttttgagacggagtctcactctgtctcccaggctggagtgcagtggtgcgatcttggctcactgtaacctccgcttcccaggttcaagcgattctcctgcctcagcgtcctgagtagctgggattataggcgtgcgccaccacccccggctaatttttgtattttgagtagagacggggtttcatcatgttggtcatgttggtcaggctagtctcaaactcctgacctcgtgatctgcccacctctgcctcccaaagtgctgggattacaggcatgagccaccacgctcggccttattcttcggttttatctttcaactttcatataaaaattttcttttcagtgattctttctttttttttcccagataaggtcttactctgccacccaggctggaatgcagtgcggcaattttggcttactgcaacctcgacctcccaggctcaagcagttctcccacctcagctccccatgtagctgggtccacaggcacatgtcaccacacccagctaatttttgtggagacggggtctccccatgctgtccaggctgttctcaaactcctgagctcaagtgatccttccgcctcagccttccaaagtgctttcagagtacaggtgtgagccactgagcctggtctctatttttcacctccaagaaattttagttttttctctgggcactcactttcttccttgggaatatggcgctaatagtacttttcttgtagattgtgagaataacaccgtatgtggcgggcctggcccttggcaggtgctcagagagtcactgtgtttattattgacaaggctgaccttgggtgggaggagggaacactcacaattgagccccttgggcagcttaccttcaggtccagtcacttggtgactgcaacagccctccgaggcaggcaagggataactaagaggtaaagggacgtgcccaaggccacaaccagaatatggcaaagacaggattgaacccaggtctcctgagtcctgtttgtatgctgctgggaattcaggtaggagtggagagaagctggagttggactttgtgtcaacctgggtcaggtgtgagttggc

SEQ ID NO: 3836 - DNA, 4001 bp, Homo sapiens
gcttgctctaccagttctctaacctggagagaggtcggaggtggggagaagttgaaggcagaaagcatacctggtcttcaggaagttttccgtcatcttctaggatctgaaagagctctccctcagcatagtctgtcaccaccaccacctacagagagaaggcagtggcactgatggctccagattcatgcattctgaggttgggaaattcctggaacccttgtgcttggggagacagggcccaaaactgtcaaagcacacctctttatcagtttcaaagctgtcaagcatatgcacaatgttgggatgccgcagaccccgcattatttcaatctctcgttgcaaattcctcagctccttctctgagcgccccaattttgggatgaacttcagggccacgacctgtcagtggtaaggtgaaaagttaacgcctaatcacactactgaaaagatctagaatttcagccttaatctcagagctccagaagtcagattttagagtgtttgagtaactcttattatttctgttagtctcccgcttccattttctccatggtaccctggccttatccaggctttccccattcctcatcccaggaggaaacagcatctgcaaaacatttccccttctggaagaagtgttctgatttgaccagcactcaagatgagatttaggagaaaggaaaggaaaaaaaaaatgaagaggaaataatagagttcaagtggtttacctcttattacatggtgtgctagagactaataatatttgttgtttactaacagccaggcactgtactaagtgatttaatgtgaaaacatatttaatcctcaaactccatcaatcagttgctgttcttatccccattctagagataaggaaattgagacatagggaagttaagtaatttgtccataattctagggctagaaagcggtggagatggaatttgcacccaaataatccaacttcaaagcttatactccataagaagtatgagggagtcagtaccttaggaatacaaactggtataaatacattccttctagatccattttccactggagttgggggtaccaaatcccacccaaaaggtatccctctttgtgcaacacctgagcactgtattttcttcgacccttgtacaccctcccaaaagagccttctccaatcatctccaacacgtggtacttttccatgacagaggtttcaggatctcttagaaggaagaaagtagagacggtgaagagctatagatccagggacagttccacaacatctgggacgcctagttggggcacgggaaaggaaaaatgttagccaccttgccttttcctctttttcacaataaagcctcaaaaaacatgggagggtggaatgcatgcaaagatgatgcgctcttggaacaaacagagcttctctttgtagttcctccccactttcatcctcctgtccccaacccggccccatgcccaactaacacctggttccccttctccctcacccagcctggctcactcgaccctactctttcaacctagcctcgcccaaccaaccctgctcctttgagtctcccccaagttcctgccactcccagactcctcagcacccgctctcagaccccctggcccgtgcgcttcgcaggccagagcccctctctcacccccagcctaggagctccaagctcctcaggccaagggacggattccctggcgtttagccccatctcttctggctgcctgcatacgttgcctgacttataattcttctccacccgcctctccctccggtctctttcggctccctttcttacaattttactcgctagaactggtgagaagttcagaggacaaaggcgctcagaggtgtggaatggacggcggaccacacatgggcacttcctgggacacatccgaactgcctcagggccatcaggcccggctaaggacccggagtctgcggttgcctagaaacgacgctagctgcccacccctcttagttttccgcctccgacttccctaagggcatttccggttccggctgcgggccggtgaagatatggcggcgtctgcgtctgcagctgcaggggaggaggactggtaactttgggggcatgggctttggctgacagcctggatctagtccagaggcctagcagctgtcgcagacggtccgtacggcgggcgtgtggggtggagcgagggatgagggatggcagagatgctgacatctctgggaaagctggactggggaacgggagggtggaggggcgctgatctgagtgagaggagaacgggtcggcgcccgccaggccagttcaggcctcgccgcatccggttcgatcccttttcctccagcttcacgccatccctttctctcctcctcaaatgaattttctcaggggctttgggggatgcctgcccatcagacctccccatctccctttctcctctcagaaccagtgccctccagttccggccccctttccccttggatcagcctttttccgccgacgctttcctcagccttctctctctcacacagcactagtgaggactattgtatgaataaagctttacacttcatataaagtccctctagtccttctctcaagcattcttaaccaaagactagaacatggaaggactctgggatttggaagtaggatcaatgtgggttaactccacattttattagctgtgtgatgctgaacaggccatctagcttctgtgagtcagtgtcctcagctgtaaaaaaaaaaagtgggtgtggcatttacctcagaatagttgagaggatcacgacggatttgtaatatacttaagtctgttttttgttttgttttgttttgttttttgagacagagtctcactctcgcccacgctggagtgcggtggtgcgattacggctcactgcagcctcgacctccccaggctcaggtgatccttctgcctcagccttccgagtagctgagactacaggtgtgtgccaccatgcctggctaatttttgtattttttgtagagacggagttttgccatgttggccagactggtcttgaacccctgggttcaagtgatcctcccacctcagcctcccaaggtgctggaattacaggcgtgagccaccacacccggcctccttttcattaataactgaggtgcaggcacctgggaagactagatgagtcccaaagaagtaaagtgatttgccaaaagatagaaaattatgaatagaaatccatatctgtctgactccacaccttagattctttgtactaggacattcttcagtccccactcccccaattttttttttttttttttttttttttgagacggagtcttgctctgtcgcccaggctggagtgcagtggcgcaatctcggttcactgcaagctccgcctcccgggttcatgccattctcctgcctcagcctcccgagtagctgggactacaggcgcccgccaccacacccagctaattttttgtgatttttagtagagacggggtttcaccctgttagccaggatggtctctatctcctgacttcatgatccacccgcctcagcctcccaaagtgctgggattacaggcctgagccaccgcgcccggcccccctcccccattttgttgtcaccaccttaccaccatcccatccaggacccatataactagggtgggcgaagtattgaagggccacttgactgaggctacacctcaatgttacattggttcagggagcccagctagtactggccgttattaagagtatctagactactggttttcaaagtgttcagggaaacttcttttttttttttttttttaagagacagagtcttactttgtcacccaggctggagtacagtggcaagatcatggctcactacagcctcgacctcctgggctcccgtgattcttctgcctcagtctcccaagtagctgggaccaccgtgtccagttaattttttattttttgtagagatagtgtctcgctttgtt

SEQ ID NO: 3837 - DNA, 4001 bp, Homo sapiens
acaggagggaagagcctctgcaaggcagcaaagaatggaagaccagatgtgcggaagacagcggtgtattcaggaagcaatcactgaagagtagacaatgggaggaggcaggcaggttgagggtacagggcctatatgccaggttaaagaggtttccatggaatattccaggctttgagaagcccctgaagctatttcaggcagtgacatgaagactcatccctttagagtctttggtcaaaaattatgaaagatctgggttttcaaagaattttgtctacagatgcctattataggttatctgaagcttgtatatatcctaggttacggacctgcccaacattttctcacatatttttatgtatatatttatatatatatttccgtctatgctgttttattccccaatagcaggtgataaaggctcatttaaacacctagtgaaatttttatatctgttttaatttttttaaaaggaggtgaagaattttttgaagtgaaagttagaaaaaatacttaagataaatattctgaactcctttttcatcgctgtacttatataccaagattctggaaaggcaacatcccatccctgcgtcagtaaggttagacgctgagggcccacttaacctggaggcttccctaagtgacaagactctcaaactggatgatccaatagggaaggttctaagtcaagggacaaaacaaatctcctggcccttcaagtgcttggcccaaggaaaagtaacgccgagccctgcgactctgccaggtatttaaaaatgtaagataaggtgatatttgtgagccggccagaaggcaacgaaaggcagagagcagatcaccggcagcctcggatttcactcttgcagctcggcctgaaacagagggaagcatcggcccggtgcagggcaggaggccagggcacccgctttccccggggagccggactgggcggcaggcggcgcaccctggcacggagggaggcgggtacccgggcgcgccgagtggcgcggagagccgggctgcaaggcgggcgtggagtggcggctgtcaggaagagaggccagcatcctccccggcctcagaaaagcactggggcctccgcggcttctacgtggccccgttacccacgacgagagggtcacgacgggaggcagaggagcggctgcgcccgcagagtcccccaggacgcggcccccggggccctggaaacccagggcggggcccccgcaaccacaccccacccgcggctgcctgtccgcgtggccaccggccacgggctgcggtcccggcacgcggggggaggaagatgcggcggcgccgcctggtcctccgctccaccgccccggcgatccctgagataaaagtttgcagcatgcggctcgtctgcagtgcgagtcacatccgccgcgccgcctcctgcagcaccaacgctcatagaacgaacaaatacattaaaaattaaaaaaaaaaaaaaaaaaaaaaaaaaaactgttgaagccagtaggccccgaagccggcctctctgcctccagggcgtgcatgcaggctagcccagcatcccgcgccccctcccgcccggcctcggcgcccggcctgtgccggccccgccgcgcccgccgcactgaccgataacctcctgcagctcgtacgcgtccctgcagatgggccagccgacagcctgtgccgccggggccggggccggggccggggccgcgggagctgccggggccggcgctgctgtcgcggccgccggggccgccgccgccgccgctgtcaccggggccgcctgctggggaagctggacgtgcacgggcgagccgctcggctccgccatgatgctgcggaggagagcaggaggacgcgccggccgacggacgaccttccacttgaaacttcctttgcctcgccgccgacacctctcggccggcgcacgccctccccgcccgccgccgccgccgccgtccccgccgaagccagctaggaggggagggagcaagggaggccgagctgggcggagggaggaggcagcgccggcggaggcggggaagggaggaggcggcggccgctgcgctcgccgcgcgcccagagcctagcgcgcgctgttctccgcctcggcgaggggaaccgccgccccccctctccgccgccccctcccgctcccgctccgctggcggccggggaagttcccaccaaaggagtcaggccgctttgtgtgtgctttcggggccaccggccctggttctcctcctccctccctgctcgccctgcgccttggccccagacgatcaggcttgccggaggacgccccctggggaccccgagggcggggtcgttgaacggccgccaggttctcacattcagaattctcctgccaccaaagagaacctgaagttcatttacaagttgacgagcgggatacctacatggtgtccctttgcaagacgccagttagaaaataacccaagttgtaagtttccggcgctttacttgccggtatccctttcccaccttgcctaatctaatcgcagtccttctagtttttcttagtaaatgaaacttgattccttaggtctctggctgttcagacttcattttttccaagccgcctggatcccagggaggcgatttaaggggctgtggaattagaataagacatgcaggagaggtttagaaagtttgctcaaattctacacccttaataattgccacgttagcccgtgaggacactgaggccagacatcaggcgtttctttaagagcgtatacttggtggggaaataatttattggggcatgaataaactgtgttggaagcttttaattgctgttttttcaacaccccaaaaataacctcgtctgtaaaactgctatggtaaaaccataggttttcctaattataggtgtcatatttaacagtgaatgttctctgtgttccctccgtggaggtgaccaggatccaccgttcttgtctccaactgaaacggggcagtaaaccaatagtattggtcgtttggccaagatgatcttgtctggttctcattgctaggactgctgaagaaataggtaagaataatgaggatgtaataaaaactctagggatatcatgattttgtctcccgagtgtatgtacagaaatctcactaaaatttttgaaagattattcagaagaagcccagaaatttattaggaaagttagttgtctaatcaaaacattgatgtccactgaagatgagggcacttaatctcttggagcattacaaaagttggagtaaagcagctacctcgctctggtcttgaagcagaagttcatgctgaactaagtgtacattctttgatgcggaggacttcaaaaactgtgtcttgtcatgtctgtcaagaaacagagcccttcataaacaaattctaggcctctgaggaacaggggagctctttataccaagccatggctgctgacctcttcaagtgctgcctccaccctaccccaaagaacttttaaggactgtttttaaaggaaaagaaaaatgatcaaatgaatatgacttccattttgtcatatgaatttctatttttgactttcaaaccatgaagtgggattatgaagaccaggaatgttcttgggacttagtaggaaaacatgatgccgtcaagatcaatatcacagaattgaatcaaacacagatcaattagtctcccacaaaaagcaactgttccccagtcacagactacatgtcggtctctagtcaaccgctttccaaatggctaccaggatgaagacttgcttgagtggatgactcagtgcacatccatcatttctacagtaaatcggtttaaagaagaatgtcccctggcattgctctttggcatcatttttataaatgaagaacagaatatgaataatattttaaaattatacaaaagcattagagttaatgtttctgtaaacaattgggtaaaatggtacttaaaacttagaaatatatgttttttagaagtattc

SEQ ID NO: 3838 - DNA, 4001 bp, Homo sapiens
catcaggttggccaggctggtctcgaactcctgacctcaagtgatctgcccgccccggcctcccaaaatgctgggattataggcatgaaccccgtgccctgccttaatgatgttgtgccctgccttaatgatgttttgagaccacaataaaacctaactgattcataccaatggggaactgtcaaactgcatcagtggagagaagtgaattacatcctttttaacataaactcttttatttccagtagaattcaaataaaataaaatctttatttccaaatggttcaatacttggacctgttttttaaggggttgttcagaatctgatctactacatttgttacaaccacatttattgtttgtatggaaacaggaatggctaaagttttgagaagtgtgttcttcctaaaaacgtaaaacattcaacatcccccagcaaccatgctcacacagttcgctccttggtagagctttttcttcccagatcatgtggaagaaaaccccagctcaggctgctcccggctgctctggttctgagtgagtgtgcagaggtttgcaatatcagcccaggtcaagccctgaaaaatctctccagactccagacttgatctgtccagacccatccgagaattaacaggctccccatcgtgcccacagaagcaagactgtcatggaaacactgattcaaccataataactactgacagaaaaaccacacaaatgaactaaacaattcttccacccaatcagagtccaggggagtccatagcctcaggattaaaataagtagggctgtttttattatgtggtccagctcgtttgagcctctcccattgccttgttttcacagctcccttttatgagaaagaaagtgggggtgggggagttgggagggagactagagctatgcagacgggaatgccaggctgggaataccaacaaacagtgtgctgcatgtcaggcaaattaaaacttctagcctggaggaggctgtaatcgtgtttgcggttagtctgaaaacaagctacactgaacttctatctcccaggaaaacagtcgagtgtggactgaagtcaaaaatgagtatttttagcaagcattctctctcttccgtttattttcttccttcttctgtctttagatattagaaacgctaattacatgaagtatcattattattcgaagaaagcacagttagaagggttaaaaataaaaagatgccaaaccaacagaagcagtacaatcctaaggaggaatatattttaatttttccctgtacccacgaggttcagtttgtgggtccaagggacccaaccccaatacccagtgaatggtcatacctgcaggaaatatttgggccagtgtggtggcccccgcggctgtggccccgtggcctggctccttgccttccagggcaggaggggactccgggctgcaggcacaggctaaggtccgagctgaggtaccagggagcggggagggacaacagcccaaataacagcagtcagaaggaggagggagtccgggagcgggagagagacacagagaccccgagggaggcgtgaggggcgcagagctggtggcccgggtccgagaggtcgaggggccgcgcgcgggtgagaacgagccccggcccccgccctcggaactgagtcgatattcctttttttgctgtttgagttttctctttagagtcggaccccggtcccagcagcagtctcagaacagaggggagccgaggagtccctgccgggaggccatccctctgcgggccccagggcgcccctgggggcggccagggcgggcgcggggagatggggaggcgccgagcggccctggagatgcccgcgtcccggggcgcccgcaaactttcccagacacggcgggaggccccaccctggagagggggggtcccaggcctcccgtctctgtcccctggggctggtcactcaccggcagcgcggttggggctccgattctggccgcagccagccacaccaggaggcggaggaagaggagggggaggaggagggggaggaggagggggaggaagacccggggccgccgagtggagggcggggaggggcggccgcggcgcagtgactcctcccgctcccgcccccgcccccgcccctcctcccctgctgagcctcccttctctcttcacgccttctttctcaccccgaatcccccaaagtttttctggtgtccgacgctccgttctcttccctccagcgcatcttctgtccccgagtctccagcctcccagaggaggggagagcgctccctcctgcaaaagtcggggggcgggggcggtaagtctatgagttacctttcgatgccctcttgaagcagatagcttggacccgtggaaggtctgaagccacccagcacccccagaccttgtcctcacctctgggtggggatgatggagggcctttgcggtcgtgctttctaagttgcttcatggagttttgttttgttttgtaccccccgcctcaccccacccccaccccccaccccccaccttgtaattaggagaactaaagaattatatttgaaaggtaaagatgaagccccaccttcctgggcgaatcaatcatagcaggaggaaggacacaagatagtttagtgagggccaagctgtgggggtggggaggaggtaaacgcgtccagatgcctcctctttgctgcctcaagagtgcatggagagggagaaggggcgttgtcctcccaggagaggctgcagggtgtctcgtagtccctattccatcgcctgctggcaaatgactccaggcaagtcacttggcatctcagcctcttcctcaaggggggctgcctcactgggagccagtcagaatgaaggcaccctccccacccctttaccctggagagacaccaaaacccaggacgagagactgagctgagtttgaacaggctcagaggggagagaagagggcattttaggccccatggcatggtgctttggaggttggcaagactggaaggcttagggtaagtgggcaatgtttagatgggaaggtggagctgggcatgaagcagaatacaggaaatctctgaaagttttcaagcgaaggtgtagagtaggcactcagtgaatccttgaggattcaaaatggcaaataagaaatattggtttaacagtcctgtaggatggaccacctaggaagaaaggggttgcatccaaagagaggggttaggaggccccggtgagcatctcaacttgaagtactatgctggaaggtggaaaggcaatgaattattttttaatcgtaaatttccttgaggagctgggctaactcataggcagtgcacccagggttggtgaaaatcagtggacacttctttgtatttgcacagcagtgtaattcttttttaaatgttctgtcaggtgtagccttgtttttgaccttggagttcgctggtgaaatggaaatatagtcagtaccctatttgacctccagccagtgttaagaacctgccctcggggctttgaggaaggaaactgacgttccaggagggcactcctcgagcgcctgaaatcacacagccaggatctatttaggatacttttattctcagataaaactactaattgtgcttatgcttaatatatcctaaacacagaaaaaggcactggtttctcctcagcttctcatttcctccagctaccttccagtaatggttaagagttgaggaagggcaacttgcctagggaagaggagagcctagggaataggaagtcaactgactggctggttaacttgtcagagattgttccatggaaacagacaggtactggacccctaagtcaggcttctggtaaggagctgagagaagtggagcaagaaggacacaggaagcaggaggaggaggaacggaagaaaaagagaaggggcaactctttgttgtcctcatgctttgaccgcaggcattttggggtccccaaattgaacccccaaattgaacctttttggtcc

SEQ ID NO: 3839 - DNA, 4001 bp, Homo sapiens
gtagaattcaaataaaataaaatctttatttccaaatggttcaatacttggacctgttttttaaggggttgttcagaatctgatctactacatttgttacaaccacatttattgtttgtatggaaacaggaatggctaaagttttgagaagtgtgttcttcctaaaaacgtaaaacattcaacatcccccagcaaccatgctcacacagttcgctccttggtagagctttttcttcccagatcatgtggaagaaaaccccagctcaggctgctcccggctgctctggttctgagtgagtgtgcagaggtttgcaatatcagcccaggtcaagccctgaaaaatctctccagactccagacttgatctgtccagacccatccgagaattaacaggctccccatcgtgcccacagaagcaagactgtcatggaaacactgattcaaccataataactactgacagaaaaaccacacaaatgaactaaacaattcttccacccaatcagagtccaggggagtccatagcctcaggattaaaataagtagggctgtttttattatgtggtccagctcgtttgagcctctcccattgccttgttttcacagctcccttttatgagaaagaaagtgggggtgggggagttgggagggagactagagctatgcagacgggaatgccaggctgggaataccaacaaacagtgtgctgcatgtcaggcaaattaaaacttctagcctggaggaggctgtaatcgtgtttgcggttagtctgaaaacaagctacactgaacttctatctcccaggaaaacagtcgagtgtggactgaagtcaaaaatgagtatttttagcaagcattctctctcttccgtttattttcttccttcttctgtctttagatattagaaacgctaattacatgaagtatcattattattcgaagaaagcacagttagaagggttaaaaataaaaagatgccaaaccaacagaagcagtacaatcctaaggaggaatatattttaatttttccctgtacccacgaggttcagtttgtgggtccaagggacccaaccccaatacccagtgaatggtcatacctgcaggaaatatttgggccagtgtggtggcccccgcggctgtggccccgtggcctggctccttgccttccagggcaggaggggactccgggctgcaggcacaggctaaggtccgagctgaggtaccagggagcggggagggacaacagcccaaataacagcagtcagaaggaggagggagtccgggagcgggagagagacacagagaccccgagggaggcgtgaggggcgcagagctggtggcccgggtccgagaggtcgaggggccgcgcgcgggtgagaacgagccccggcccccgccctcggaactgagtcgatattcctttttttgctgtttgagttttctctttagagtcggaccccggtcccagcagcagtctcagaacagaggggagccgaggagtccctgccgggaggccatccctctgcgggccccagggcgcccctgggggcggccagggcgggcgcggggagatggggaggcgccgagcggccctggagatgcccgcgtcccggggcgcccgcaaactttcccagacacggcgggaggccccaccctggagagggggggtcccaggcctcccgtctctgtcccctggggctggtcactcaccggcagcgcggttggggctccgattctggccgcagccagccacaccaggaggcggaggaagaggagggggaggaggagggggaggaggagggggaggaagacccggggccgccgagtggagggcggggaggggcggccgcggcgcagtgactcctcccgctcccgcccccgcccccgcccctcctcccctgctgagcctcccttctctcttcacgccttctttctcaccccgaatcccccaaagtttttctggtgtccgacgctccgttctcttccctccagcgcatcttctgtccccgagtctccagcctcccagaggaggggagagcgctccctcctgcaaaagtcggggggcgggggcggtaagtctatgagttacctttcgatgccctcttgaagcagatagcttggacccgtggaaggtctgaagccacccagcacccccagaccttgtcctcacctctgggtggggatgatggagggcctttgcggtcgtgctttctaagttgcttcatggagttttgttttgttttgtaccccccgcctcaccccacccccaccccccaccccccaccttgtaattaggagaactaaagaattatatttgaaaggtaaagatgaagccccaccttcctgggcgaatcaatcatagcaggaggaaggacacaagatagtttagtgagggccaagctgtgggggtggggaggaggtaaacgcgtccagatgcctcctctttgctgcctcaagagtgcatggagagggagaaggggcgttgtcctcccaggagaggctgcagggtgtctcgtagtccctattccatcgcctgctggcaaatgactccaggcaagtcacttggcatctcagcctcttcctcaaggggggctgcctcactgggagccagtcagaatgaaggcaccctccccacccctttaccctggagagacaccaaaacccaggacgagagactgagctgagtttgaacaggctcagaggggagagaagagggcattttaggccccatggcatggtgctttggaggttggcaagactggaaggcttagggtaagtgggcaatgtttagatgggaaggtggagctgggcatgaagcagaatacaggaaatctctgaaagttttcaagcgaaggtgtagagtaggcactcagtgaatccttgaggattcaaaatggcaaataagaaatattggtttaacagtcctgtaggatggaccacctaggaagaaaggggttgcatccaaagagaggggttaggaggccccggtgagcatctcaacttgaagtactatgctggaaggtggaaaggcaatgaattattttttaatcgtaaatttccttgaggagctgggctaactcataggcagtgcacccagggttggtgaaaatcagtggacacttctttgtatttgcacagcagtgtaattcttttttaaatgttctgtcaggtgtagccttgtttttgaccttggagttcgctggtgaaatggaaatatagtcagtaccctatttgacctccagccagtgttaagaacctgccctcggggctttgaggaaggaaactgacgttccaggagggcactcctcgagcgcctgaaatcacacagccaggatctatttaggatacttttattctcagataaaactactaattgtgcttatgcttaatatatcctaaacacagaaaaaggcactggtttctcctcagcttctcatttcctccagctaccttccagtaatggttaagagttgaggaagggcaacttgcctagggaagaggagagcctagggaataggaagtcaactgactggctggttaacttgtcagagattgttccatggaaacagacaggtactggacccctaagtcaggcttctggtaaggagctgagagaagtggagcaagaaggacacaggaagcaggaggaggaggaacggaagaaaaagagaaggggcaactctttgttgtcctcatgctttgaccgcaggcattttggggtccccaaattgaacccccaaattgaacctttttggtcctgtatccagcccacctttcaccagtgggtcttccacagaggccagctcatctcagaaactgccacagctaactggagacaggactcatgcaggaagcaacgacacatttgacaaacagtaatcatcattgcatttacagagttctgtatgcaccttttaaactttgtcatctttgaaagaagcagtatggcctttattagtgggtagccacctggtgaaagaaatctcttttggaaactctgac

SEQ ID NO: 3840 - DNA, 4001 bp, Homo sapiens
aaacttggggtgttgaatatttacttgaatttttgtctggaagccgatctatcttccataccactgcctggtaggcactctcatattttgctgaccccacagtgacttgaatgacaggttcagattcaagttcctgtaaactccccagacatgctcggcggttcattttagctttcagagacttctgcctctggaggttcatggtccaaagggccttgatccactgcgatgggacaggaaagtgtatccttatattgtcacaggaccttaaggaaccagcataggatgacctctgcgccaatgaggccatgttgacaaaagcctgaagttccacgtatgctccctggacaaccactacagacttcaaggaaaagggaagattatccccattatacaaagtcttgaaacgcatcagctcaaaccggcaggcatccagaggtacaaacttaatgattcttgattgctcaaattcttgtacattcacacacttatgaaaatggtagtcaagaatatcaatcccctttttttctgagtccttctcataataggattcatctcgcttcggcaactcaaggtcattcaaggttaaaaagcattccaggttcccattcacaaagcagaggcaataaatttgagttatcacagcactttcaacaaattttccttcttttgtgactttaccccaaaagttgtccacaatttccaaggaaatttcttgctcctcgtagttcttttttggttttgaaacagctggcaacttcatcagctcctcctccacagtagtcagaaagtcaaggaagtcatggtacgatgtggaccccaacttcagcatctgctctatgtcaggttcatgaactacttctgtcttagaatggtatttccttttttctgtgtaagacacatgttcaatcttcacagtgtggatttttcctgctacactgaagttctcaaccttgggttcagaaagcctacaatatggatcaagctgtatctctttaaatggtttttctaatccctgttcataatacatctgcaaaattcctccaggcaaaactttcagaaaaattggtccccattgccgggaagacatcatattcttcttctcaggaattctcagcatgaaagaccatccggattttggctgactcctgaagagtgtgtgggggacaaaggaagaggcattttcttcagcacatagacagtgcatagacaaacttctaagtgagtcttggttctcagctgactggagatgttcaagcttctcacagatatagttgagtgaacacttatttaggcttttttggtcaataggcatctccttgtttcttgatgagaacatctttttgcttcctggtgggtcaagggtgaaatgggaatcactgccttcatctttccaaaatggacttgaaaaagcacagtcctctcgaaaatactgaaactgggggagatcatcactttggaatcctaggctttcagcctgttgaggattaacttcatctggaagacctactttgggagttggatgtgtacatgagtggtcactgggtaacaaggcatgggataaacatgttggtctggtaggcagtaaggaagattctcctcctgatattgcgagtgggctgtctgaagatgattctggaataggataaagcacatgagtccctgctttggggatgccaggaaaacctgggaagtctttggtaggtgtagaaagaggagagttacttggaggtcctggactgaaataaaaatctacaatgggggaggagagaggagtgctgctggtggaggaagatccactgggaaattccctgaggccaggaaggttcagcttcagtccatttggtctacagacaccttgattctccagaggaaaattctttgacttttgagaagattgaacagcaggatcatcatcaaaggtgacccatttgcctggatttgtggagcacatctttgggatcagattgtggtcttgtcaagaaatcaaataggttgactctgttaaaaaaataaaataaagagaaaataggtatataaaatgaaggggggaatcattactaaatgtctttacttctgataaatgcttaaaaattataattctgttggtggctaagtggattaaaaaaaaaacatgatccaactgtatgctgtctataaggtactcactttagatttaaagacagacatatgctgaaagtgaaaggatgaaaaaacatattccatgcaaatgttatccaagagagagcaggagtagccatgcttaagcaaaataaactttaagtcaaaaactatcataggagacaaagaaggacataatataatgataaaagagtcaattcactaggaagacgcaacaattataaatatatattaacccagctgggaatggtgggtcacaactgtaatcccagcactttgggaggccgaggcaagcaggtcacctgaggtcagcagttcgagagcagtctggccaacatagcaaaaccctgtctctacaaaaaaatacaaaaattagccaagcatggtggtgggcacctgtaatcccagctactcaggtagctgagtcaggagaatctcttgaacctgggaggcagaggttgcagtgagctgagatagtgccattgcactccagcctgggtgacagagtgaaactccatctgaaaatatatatatatttatatatccaacatcagagcacccaaatatatgaagcaaacattaacagaactgaagagagaaatagatagccacccactaataattggagatttcaacaccatactttcaacaatacacagaacatccagacagaagaccactaaagaaacaatagacttgaacactataaactcaactaaactgccatacatatacagaacattccacctaacagcagcagaacacatattcttctcaagcacacacagaacatttgccaaagcagatcacgttaggttacaaaacaaatcttaacaaatgtgagaagattgaaatcacacaaacattttttctaaccacaatggaataaaactagaaattaataatagaaggaaaactaaaaaattcacaaatatttgaaaattaacatactcttgaacaaccaatggatcaaaggagaaataaaaaaggaaattagaaaatatcttgagacaaatgaaaatgaaaacacagcacaccaaaacagtactcacagggaactttatagccacaaatgcgccactgcactccagcctgggcaacacagtgagactccgtctcaaaaaaaaaaaggaagaaagagggctgggtgcagtggctcacatctataatcccagcactttgggaggctgaggagagcagatcacctgaggtcaggagttcgagaccagcctggccaacatggagaaaccccatctctactaaaaatacaaaaaattagctgggcatggtggcacacacttgtaatcccagctactcaggaggctgaggcaggaaaatcgcttgagcccgggaggcagaggttgcagtgaacagagactgtgtcattactctccagcctgggcaaggagaacgaaactttgtctcaaacaaaaaaaaaaaagtggtgttgaaaaaacttgatatccacatgcaaaagagtgaaactaaactgtaatcttataccagagatgtctaatcttttggcttccctcagccacactggaggaagaattaaggccaggcacagtggctcacgcctataatcccagcactttgggaggccaaggtgggtagatcacttgaggtcaggagttagagaccagcctggccaacatggcaaaacccagtctctactaaaaatacaaaagttaaccaagcatggtggtgggtacctgcccaaaaattagccaggcatggtggtgggcaggagaattgcttgaacctgagaggaggaggttgcagtgagctgagattgcaccattgcactccagcctggacgacagagagaaactctatatcaaaaaaaaaaaaaaaaaaaa

SEQ ID NO: 3841 - DNA, 4001 bp, Homo sapiens
agctgggtgtggtggtgctcctcacagctactcgggaggctgaggcaggagaatcgcttgagcccaggaggtggaggttgcagtgagccaagatcactccactgcactccagcctgggggatagtgcaagactctgtctggggaaagacaaaaaaaaaaaaaaaaaaaaaaaaaaaactcagagacagttgagacatcaagattctgaatgaggcccagaaagaaaaggagtatgtattatggctagaatttctagaaatccatttctgagtttcgaaggtttctaggaaagtgtttgcttcctctttagactattagacattttcttcagctgtctgttttcaaagcactgaactcaagaagaaattaaaagtaggcacacatgcctattcacaccaggaataacaaggatctagtatacaatggtttgcaaccttagacctcaatatgtgtgacaaatggcattcaaaagcctagcacgtgctcttggatgtacccagaatttagcactccccatatttagggaagccctgaactaactaattgtccctaccattttaagtggtgatcagcaataggagggttcacacaaaacacgaacaaaggttgcacttgcacacagtttgtacaatccacccctttctcccacttaagaaatcatattggaattctttttttttttaatttgagactgagtctcactctgtcacccaggctggagtgcagtggtgcaatctcagctcactacacttctacctcccgggttcaagtgattctcctgcctcaggctcccgagtagctgagattacagatgtgcatcaccatgccctgctaatttttgtatttttagtagagatggggtttcgccatgttggccaggctggcctcaaactcctgacctcaagtgatctgtctgccttggcctcccaatgcgctgggattacaggcatgagccaccatgcccagcctggaattcttgtaagagtattacggagattatcatgaattgactctaaatcgtttaaaaatacatctttcacaaacagcaataccttaaatattattacaaattgattatctctaattcaaaaacacaaaatctgaattgctccaaaattcaaaatgttttgaatgccaacatgacactcaaaggaaaagctcacttgagcattttagatttggggatgcaaatactccaaaatccaaaaaaatctaaaacacttctggtctgagcatttggtgtaaaggatactcaacctgtaacaatattgcaaattacttgcaacaagccctataaataagaagcactggtatggaaaaacaatctcacaaaaaggaatttgaagataaaatctttcaagccatcataggaaaaaattcatatactctttgtgagtcagactgaagctttttcaaggaaagagcatgtctcatttattaagacattttccacactgtctacaaatgcctgtgacacaaatacaaaaagcttaatacatttctgattgaataattttaaatggtcttttcacttttccacaaattaagtctctctacttccctcccagttcaaagaatcattggataagacattttccacactgtctacaaatgcctgacacaaatacacaaagcttaatacatttctgattgaataattttaaatggtcttttcatttttccacaaattaaatctctctactgccctccccagttcaaagaatcactggattttagggttaggaagacatttaaggctttctgttcaattaaccacactaacaaacatttatcaaataactatgtgttcatggtgtgctaagggctgtaggctgtatatgcatgatctcatttaatactcacaaactcatgaagtaatattatcattatttggtagaaaaggaaaataagttcggaggagttaagctacttgcctaaagttgctcgaccagtaagatgtagaacctagactgtgaccaggtctgtccagtcccaaagtccaccacccggaggtccagagagatccaatgccttgctggtgtcaggggtcctgccttttctgcactttccaccaccccacccttcactaatgaaatagcaccagggtagagccaccaccacttcctggagccaggagctctagattggaaggatgctgttctcacgtgagaagagcctatttctccagcaagcccaccacacgtatctgccccttggacatcaggctgtgggaaaagcagactgataattttccccaaggttgctcaagaacaacagctcagtacaaatttgggtcatttctgagaatggctttcataactcagctcgccctatttcctgccccttcttgactgcatcaactgactgtcctgcccttagtgatgaataatttctcagaattgttgtctaataaatagatttaggtgccctgcctctcttttagtggcgattccagtattctctgtaattttccaaattttgtgtaactccctgcaaagttcatccctcccacaccatcatcccctactcccctccaacctcaagagtctacttctgccgttctttgcagttttcctctacttttcttcataaaccactcaaataaaatgtaaatatgaagttctaccttctcctgtagattgttgaagtcagattagatgcatgtgataggtgaaacagcaatccaggtcatatggcagctgaagactttgtccccacttcagtatgcatctgtggggaaaagcacgccccaatgtggtccctaatgtctggctcctctgtttctgctagatgttgggggaggactgatgccaaggaggtattcagcagagctcaggaaggcatcatcgacacctctcagtagcctcctggtatcagcccaaccaaactgtccctgttgggtcaattcctactcaagcctcaggaacaccctctccttcagcagagggctgaattgagtcctttattcctgtggcttttctttgctctctaacaatgctgcataatctacagaaagaatgtcttaatttcagtgtgtctgtgcggttccattggctgtttttcaaataaggaattctcagactccctatagcgccagactcctcaagagcaacactgtaactagactttagcagcatttccaaaccctcagtctgtttttgtatgattggagggctgcaatctagctactgtacattccagaaacaactgtatatcctggaaacaaagccaaagtcagggacaggccagtgtgttaacatgcagctgtgaagaattttcttaagggcttgctatgacagtatttaaaataccattcctggccaggtgcagtggctcacgcctgtaatcgcagcactttgggaggccgaggcgggcagatcacctgaggtcaggagtccgaaaccaacatggcaaaaccccgtctctactaaaaatacaaaaattagccgggcacggtggtgggcgcctgtaatcccagctactcaggaggctgaggcaggagaatcgcttgaacacaggaggcggagactgcagtgagctaagatcgcgccattgcactccagcctggatgacagggcaagactgcatctcaaaaaaaataaatatataaaaataaaatatcattcctgtaaaaggcttcgttctaaaggggaaagcgaaagtttggaacaaaaaggaatcatcagaaaacacaataccttaaggaaaatcaaaaagcctcaccttcatcttaggtcatgggagaagtgcccacaggctgcatgaaccatattattagcacatatgttctgcagctcataatgcttaatcgcaaacatgtggggtatttagttcagctatgtgacagggaataacatttgtaaaatattaaaccacagcaaaacctaaccatgctttcaaatattgtcagtgctggttccagctcaattccctaacactgcccctcccctacggcatttaaccttcatttttccagcataaacttgggtgccaactttttt

SEQ ID NO: 3842 - DNA, 4001 bp, Homo sapiens
actgatggcagtacaaaactataaggtttatttggaaagcaggttgtcaaatgtttcaataaccatgaaaatattcatactttttgacccagtaaaattccccggagtgatctattctaaggagatatccaagtaaatgaagaaactacacatcatagtcaatacactgttaatctgttaacagccaagtaatcattacacaagtgtttaatgagtggttaccatgggtcaggcactgtggacacccgctggtaatcagggcagacaagaccctggccacttgtagctgaccttcccacaagcagaagggttatggatgtcatgattaaccaaattttctggttatcatgattttgtatcctgcttttttcactcaatgtcagcaagttgttactgattttgtcttaataatgtgaaactccattacgttgtctatttttttctctttttcagaaaagctcagaagaaacagacacaatctggtaagaattgttagtaataaaagggttgtccctatggggtggtttaatctcagagatttttgccttagatacaccagactattaagagataattttacaagacattttgaggtcaaggcagcagctgcacccagcaaaggggtgggggtgggggatttgctgttattataattttctccggcatgctctttcacgagatatgaatataaaccctttcttaaaaaaaagtcatatttaagagacttatatttcgtattcacaagtacatcagtgcagtcccttacacttgtatccaaaacgctaattacgataaagctttataagtaatttcagtttgttccataatagaatggttcatgtgaagactttgatctgaaagattaacactttctgtagaaaccaaagggcgcatcttctagaacacgggttttgagttaatttaggcattcaacagaggccactgttacagggaatgcaaaaatgacccgatgtaactctttgttgagctttaaaattactgtaattttcaaagtgatcttgggaacccataaaatcttaacaaagatcatagcgacgcacagttcaggagaattttccaagcttagtgactcatgcgttcaacaaatctttactgagcgcctactgggtgccaggcaccgtgctaagcaggcgccgtgttacacatccgtatcaagttttggggaaaaggtacttgacaaagacccagcagggaaaaacacagcgttgaattgaaaaaccgaagacaaaacgacactcgagtatttaattttgtaaaaggttccttcctagtcctgctatgggggactttgcagcgaacttgcagaaggcggcagatagagctggggtctgagggtgtcttcgatatggcaactccccaagcccgagagcgcggccaaaggtgaggggtgcggggagagggcgcccgggcggcctgggccccgcgcacctggcacggccggcacggccaacccggcaggcaccactgggcgggctgcgaacccgcggcccgggccccgctgagcccgagctgcactggcgcagtggctgctcgccacctcgggccgcattcttgccacggctcccgccagccgccggtgctcgggctggaggtgggctagcgcgttctggcctctggcttcccgggcgtgcgcggaccaaggctcactccctcacacgtcccccaccggccccgacaccttcccttcccgggcctgcctcccgtctttaccctagcggcgaccacggccagcgactctcttcaggctgccagcggtgcggacaggggcgggcgccagagccctgctcgcggaggggcgaggcgagcgctctaggcccgctcccggcgcggggcgcgggagggcggcgaggccgcgaccggggccgtgggcttggaactctgcaccagtcccaggctacccgctgggaacgcattcgccccacccgcgccggggtcgcggccccgcctccctccccggggctgggcagcgagaaggcggggccttcgagcttgaggcggggcgggcaggaaactacaattcccagcaggtcttgcgctggggccgtggaggccgctgggagagtggctctcctttggcttccccaattgtgtgggggctgccattgacccggtgtcgccgcagaaccgaggtcgccgagtgatgatgttgtgaagtcgcccgcctgtccctgccacgcccgggcggttgctggcagtgggagcagcggcagcagcttcggctgctgctttcaggctgccgctgcattaggggcttcctgaggaagcgcgggcggacgacagaggatgccgaaccactccagtgagtaagctgtccgcgcagaacccgaacttgcccttgacaacttccccggaaagcggagggacctcctcgtcccaaggtcctccggtacccggaggtcacgcgcggacgtcggagccggaggctgggtgctggagggctgggtccgggtcccgcggtgaggcgtgggttgtttcctaagtgtgggtgcaaagtaatgggcgctaggcgctggcgtcggtattcagcccagctgcacatctgaggcttggcagcttctcatagcgccttatcctctgccatacagcatccatctggagccctgtcttttaggatgagtggctttagggtcgggcattaaaccttaagcttcagtcgccatctgtgatgtaagtgggaggagagggtattggaaagagctctttctgggtcaaatagagttgggcttttcttgcaattgattttgagccagatgccacatatcttgaaaaagaaaaacggctgactttagtttgaagcgtaaataatagatattcgcacatgtcctttttagtagcagcccaaaaattgaatttcaacttaaaaaaaaatctgcgtcataataatagggatgttacttgctcttgctcatgcaccttttgcttagacctgctgtttctacgtcagaaaaaaaaaaaaaaaaggtaacttcacaggatattcatcaagttgatggaatggaccataggaacaaaaggaacactttcagttcttggtctccgtaaatcttcccgacctttagatctttgctgttgacttggaagtctgaggtacagtagtctccaaatagcaggttaatggtggtgacatgacacttaaaaacaaattgtgaaggacatttggaggtgagaaaggtcagggatgaagacattttatcatcctagcagttattccaactttcttttcttttttttttttaagacagagtctcgctctgtcgccaggctggagtgcagtggggtgatctcggctcactgcaacctccgcctcccggattcaagcgattctcctgcctcagcctgcagagtagctgggactacaggcgcgcaccaccacgcccagctaatttttgtgtttttagtagagatggggtttcaccatgttggccaggatggtctcgatctcttgacctcatgatccacccgctttggcctcccaaagtgctgggattacagacgtgagccgccacacccagctccagttttctatttttaaaattaagtaatgtccagcaagtctcagacatttagcaagcacataccatgtgaaagacagtgttttgttatcttacacacttattcatatgatggaagaggtttgttagaaagaaccaacatttggccgggcgctgtggctcactcctgtaatcccagcactttgggaggccaaggaggacagatctcctgaggtggagagttcaagaacagcctgaccaacatggagaaacccgtctctactgaaaggaaatacaccagcctggccaatatggtgaaaccccgtctctactaaaaatacagaaattagccgggcgtggtggcacgcgcctgtagtcccagctactcggaggctaaggcagaagaattgcttgaacccggaggcagaggttgcagtgagccaagattgcacccctgcactccagcctgggcaacagcgagactccatc

SEQ ID NO: 3843 - DNA, 4001 bp, Homo sapiens
tattcaaatttgttggagactatataaacaaggtcaaagaagacttgcaaatatcagatagactagatcgactaaatactacagcaatataacaataggaatgaaaaagttgccaaataatataaacatgtaactacagacttacaaggaaatcatagaaactactggtcactccctaacttcattcagctgctcatttgtcatctctcagaggcctaccctgactaccccatctaaaatagctgcccctatcacacgctattcctgaactctgacttatttcttcctcacagcagttgccactataagccattatattctataggcgcatttgctggactgtttgcctctccactaaaacataaactccatgagggcagaagcttggtcggttttctttcaacacagggcctagacacacagctggcactcaatacacaggtgctgaataaaatacatgataaaactgaaacccagagaggttaaaggatttcctcaaggtcacagagctagcaacaaacacagcccttactataaccttgtctactacagccttgtgtgttcgctctttccacagccacttccactacaccagagcctgttccagcacatgattctatttaacagatttctcctcttcttttttttcttaagcgccaaatacatgttaccaaaaaaagtgacacactgggtagcattttaaactcaagtgttttgccaactaaaactatactcaaatttcataagtatacaggcttagcccgtaaaacagaaaggcacaactattcatagttctttaagttccttttgaaattggtgtgtatgccctggaagttttaagaacaaccactgaaaacctattcaccaattctgaatggcttgtaaagtatcagcctcactttcattcttttcagagcccacagttatctcctccctggatatactttatcttgcagattatgcaaggcaatgtaactaacttcaaagtccctttagttccttttaaagcacaagaaaatctcccaaaacactgaacataaaattaacccttgggaagtttcagattctgagaacaggaaccacctcttaaccattctctctgactgcgatcatctaggtccttcattcaaaatgcattaattggaaatacctaaaagaaacgtgggagggggccggggggtcggaagaaagtggagaacagacatttacatatataaaaaaagggatctgatatatgaataacacttttgcccaacgtcaacttctcgcctcgactcaaggcctgacacaacttctgttgtcttcttgatcaccttccttgaagagaggggccaaagccggcacgttctgcggagactgtctctagacctaggaaggggcacaccagggcagcggacgatttgctccgcgtctctcaaaactactgccagcccaattagtaaaccgagagggcagccctgagatgcaggatggccagagagttgaaatgagtctgggagttaagagtgggatggggcggacgaacaggcgtggggagggtaaacaacgcaccaggagcgggagtgagaacagggtcgaggtggggtcagcgaaaggcaaaaggcgaagagaagaaggggacggggctccgggtgggatgggcggcagcaaagggggaggggacgcgagaaggctgggggagggggagaagggtccggggcggggcggaagggagcaaagaggcgggatgaagacggccaggccgggagggtctttacctgcagctccgcccgctccacctcccactgggctctctccacctcgaagcgggcccactcgtgctgcaggaagtgcaggatccccgggagactgtactgggctcgggccgcccccgccgcagccgccccgtcgccggccgcggcagcctccgccagaggcccgagccccttggcaccgccggcgcccgggtggttgttgctgaagaagacgccgggacccgcctgctcgtccatggcggccgcagatacccggggagctgccccggcgcccagcagcggaggcaacagcggcggcaagcagcgcctcctcctccctccgccgctcccgcccacaccccagtcagcagggagcagcctcctgggcgcgggggccggccgagcccgtgacgggccgggaaatgggtcaactgcggcgcgctggcggcccggggcttgccgggaaatgtagtcgcggggcggggcgcgggctagcgcggcccgggcggcctgtagggctgtgcctcagcttgggcgtggcctcgggcccgccccgccccggctcgccgcgtagggggccggctgggcggggagagcgggtttcctctggggccggctgggcgcgggcgggcgggtctccagtcttcctcgcacgcggaagttcgcgggcggcgcaccctgttgcattcaaaaacacacacacacacacacacacacacacacggaagttgtcacgccaagatacctgcccgagctgcacatcttttaaggcttcctggccgttctgtgaaggaacaggctcaaagcgagctacccggtgcggccgcgggaccggggttctcccgccagctgccctgcgtgctctcgcttcggcttcgtgttcggagtttctctcaccctagacgctcctccattctgccaatctgcgggtcgctgtcgctcttgcctttctcttttgactcgaggggctcaaacctgttacctgaccagttttcatttctaaggaacgccgatcacctttctaagacaacgccgcagctttctgctgctgcttccaaattgtggtttgttgacagcccatctgaaaaactgctccgttgaagtttctttccctttgcagtcctcctgcagtaaatcctgtaaaagttttagcatccaataatagatgttctgttatttcggtctcatttttcctatcttattcccgctgatttttactctacttaattgaacaaatattttgattatcggttttctcttgcgctgggaatattaagataaatgacatcgtttctgtcatcaaagattggcgtataatcaaatatcacaaaggcttaatttaaaagctacaccaccttgaaaaagcaagttccctttctgctccctagcgcggtcttagatatcctggcccctctccgttttcacttgtcctgttcccagtttctttcacgattcacctgccaactggcaacagcatccgcctaccaaaggtacaccaaagtcctttcaagttactctctgtaaatatttgccttctccgaagtctgacaatatgtcactataaattcacactacaacagtggcaaaaaggaaggcccctgaaaacaatttaacaaatgcaaatgaaattaagcacttattttgtcaccctaacaagttatctgaaattcttacgttttgtaggacgtacttgtgggttatcagacttgatggccatgaaaaaatgtaaagatctaggctgctgagtgacatgtcagggaaagacatcctgtccctgtcctctctcccctccccccctttcccatggctacttgcagaaaggacaggaaacacattgtgtctgctctggttgcaaataaagatggagaactctcttctctcgcttaattaatgtttctgctttatgaattcattctttattatcatcaaagattgatccaggcctggccaaattccctgtgccataacttattttggctgtcagtgtcctttgagatacagcccagtcttctcatttacagctcaaggaactaaattccaaaaaaattgagacttgtcaacaatgaggccttgagtgagacgacatatccgacaattcctttaagtcaattcatagcagacacaaaatgtaattaaatgtatagataatctggactaccacacatatacaaaaactattttaattcgtagttcaactttattactcacaatactttttttgctttacgaggactcatttacattttggccaggcgccatggctcacgc

SEQ ID NO: 3844 - DNA, 4001 bp, Homo sapiens
tctaggaagaacacacttccagttctgtgggaagaggattgagaggactgctaagggtggagtaaggaactagatcttttagacactcttcctttattctctagatttttctagacagcagacctacctgaggctaggatctttcagaacctcagactagcaagaccacagaagcgaaagacacaggtgggcaacttcttcctagggtttcccaccacagtggctgtgctgcacatctgatcttctacattctaacccactatctattcaaattaagctggtttaaaaccatatccaatatacttcattcttggtgctcaaactttattgacctgagtgattactgggtataatgaattctttttgtccttctgcctacaacactctcaagaatctccagaaagctttaccaaacaaaccatttcatacttgctaacgttatctagccagacctttgtcctcaagtgattggcaactaagtgttagctattgagtgcacactcatcaatgtacactttcagaatgtaatcttctcaagaaaggaattaagtctcataaaatattcagtacaagcagaattaagagcaaagcggaaaaagaaaactaactttgagtgtttgttacatacgagatgctttatataaattgctccacttattctgcagtgaacccagatcatcctgtacatcatcattgctaaaatgcacattttttttcactttttaaaaaaccaggatacatgtgacaaccactggtgtgtcacagttttaataagcaatcgttcttcattgttagtggtaaacaaaataatggtccaccttacaagtgatggtgcttcaggccccttaaaatgtgttaatattttcatgtgattggaaacactgaaaaacagattaagtgtccagggttattacacagactgaaaagggactagccagacttcaaaccctgatgtggctgattccaaagtttctttctactataacctacctgacaagcacagagactttgaatatggcaagaattttccatagtcagcgtgtctcaaagactagcaaccttgggtactaagttttcgggaacggatgtgtccacaaatcgcctggtggagacactgcaaataagctggtttaggtcccagccaaccataagcttctagtagtctatgcggctatgccgaccccactccgtgtgcagaaaccatctttccctgacatacaatcctgcagagggggaattcgaagtgcaggacctttccgtactagggacagcctcatcccccaacttcctactgagacactcttcctctacctctcaacccagacccttaccttccccaccaagttcaccttggacctcttcatccccaactccaaataaggccagtctagacgccacccccatcctgtcatttgtcaccgcggggccgagagcaagctcccaaatttgcagggctcccggacccgaatcctggctcagccacccaatatctccatctgccagcggcctaagtcatgccccccgccccacgtatccagcaaagctccttccaccgtaggggtccccgactcgaagccggaatcccaagcggctcccaggcccccgccgaggtccagccctgagggcccagccgcggcctgggccaggaggttgggtccggcggggccaataacccgcgggcgccaggaagacagtactggctggactcacggaggaagctgcgcgacaggagacgggcggcggcgaggccgctgctgccggagaccatggtagcgatgtcagcggcagcggcaagggttgcggtcatacgccaatgacactcccaggcccccggggacctcccaggggcagaggccggaggaggcagagggtggccacagcagtcgcctgaacaaatttccctttacagaggattcttcacgaaacagcgggaatggcaggtgaagacaaagaggcatcctatcggagaggcagataataactcggctccttcctagaaatgtgggtttgattaacattaattataacagcagctgagggaaaaccccacgcgagactggccagcgcgtggcattgtgggcaatgtagtctgacggccgcgactggttcgtagcttttgagtgaggcggcgggaagggagcgagggaagagcggcagtgagaccggggagacaagggacttgaagactaggagggaagaaacagcgaggtgaggtgcgaagagcagtgccagaactttgtatcccaggcccatctccttcccccttcgttttcctcgtttgctattagagagaataatatttctcaccgcgtacctgtgcctggacccggaagggttgccgctggggacgggaattcgaactggcactggtggcctgtgaagggaaagatgtgatgagaaagaccaaaacctatcttactgacagttaacttcttggaatgtgaatttttttagttaaataatcatgcagtctttgactagcactaagtgcatgagtgtttattccctgaggatcctaagggctgaaattcgaggtcaaatgtgactttgctccctgattggacaaacagttccctcttctgtaacagctttagaaggaacctcagagagtcccagagtcaaaaggtaaacaagagatgaagtaatctgcgtctctgccgaaaatcgtgctcctgagattcctcatcagaattgtcaataaaattgcaatcctaatttacttaggtagtcattataattggcactgagctgtgggatggatgagtgggattaccccaggagattgcccaatacttcctttatgatccaaatattgtcattaacaggttggacttcactgcaaataaactcctccctcatggatcatgttcttgtgataactaaattcctcagagttaaatagtatcagtggtttccagatatatccattataacaaaatggacatttttatggcaaataaatagaaaatcccttgctattttaaatagcaaaattattcctgagctgtcgcttgataagttatatgtttagtttcatttaattgataaaatgcatgatgacaaaaaatataatttcagtacacttttaatgaaaatttgtatttccatgaagacggggatttttgtttgttttgtatcctggagtatccccagcacctagaacaatgccttacacaaataactcatcgttgaattgaattgatatatataggagaaatagtagtatatagattattttttggatccacaggcaatgtttgatggacttaggatatttcaacctcttgtaataactgcacccctgtggcagaccaggtctcactaacgcaggcctccataacaatgtttcagtgctgactgagtggttaagttaaatattaaaagccagtgcccttatacaaaggctgagatgtaacagaaacccaccaagggttttgcctaggcctttcctgggccttgaagcatgacaaattaatgaagaaattcttaacaggacccatttaggattaaacaagttttattggaggtccgaagaaactccccaggcctccacaaacaagtttattggaggtctgaaagaactctccaaacctctgtgatttagcaggggataagataagggtaatcaccccagcacctaaacccatgtagattaagtaaatttattgaggcttcagaggatggtcttcagtactcagaccttagttatagattaaaagaagttaatcacttatgtctttagataaatgcacacttacaagtaaacatatagcttagaaggtatataagctctggaaaactgtaattttaagttggtctgatgataatttccaggccttctccctgtaatcggttgcagaaataaaaactctcttcctccccagttcatctacatctcattattgggccacaaaaaatagcagcccaaccctcagtttggtccgggaacacccctacctcaattctgtagctcataggtaggggacaaccacactagtcaa

SEQ ID NO: 3845 - DNA, 4001 bp, Homo sapiens
ttcttcaccatgtcttgatgcagcatggccctcacgagaagctgagcagatgccagcaccatgctcttggacttttcagccaccagaatcatgattcaaaataaacctcttatatttataaattacccagcctcaggtattttgttatagcaacataaaatggactaagacggacattatcgtggtttgaattgtgtctctctaagttcatatgttgaagtcctaattcatagtatattagcatgtggctgtatttggagataatgtctttaaataggtgattaagttaaaatgaggctgctaggatgagacctattccaatctggtatccttgtaatgagaggagattaggacacacaaggcaacaccagggatgtgtgcacatggaggaaagaccatgtaaggacacagtgagaaggtcctccatagggtgggggtgaggggatggtgagtccaattctggggttgagtctgatgtatttatgggacttcccaatgtacacctgtaggcaggtgtacatgtgagcttagggctctggccttgaactaatgccctgagaataatccacgcaacacattgaccaactctgtggtaggcgttgtgctctgggcaggtagctgatgaccgagggcctgggcacagctgtgaacatgtgtggaagggcacctgctgctgctgaggaccagggcggttaagggcttggctgtccagtgaactatggatcccactgtattgctcttgttggaggcctgcacggggagtgatagaacctggctaaagctgggagaaggagatgcagcaagagattgaggcagctgggtagtgcagtgggagcagagggatctgccagttcccacaggagaagtcccaagtccttctcaccctccccaggcccctcattgctgggccacatcagcacatggttcctgcccttggagagtcaggcatgtagacacatacatttccccttgagcagccagcagggacattttcatcatatcaggccagatcactatggcctcctttgtggaggcatccctgactctgtaaacagaagtaatcactcctttccatgggatcctatagtattttgtgtgcaaattttataggtcttactccacgtcctacaattacttgcttataagtctggacccttggagcacaggatctggttcagtccccttgcaggcccagcatgtgtcttagtcaatggctggcataagaggagggctgtcatggaagaagaaatagtcttggccagagaagttgagctggccctggaggaggatgggacagggagggtatttgggaaaagatcagggtgggagacagagatagtattacaggagagagagcttttggaggtgatttgaggggggtcctgaatttctaggtctgaatttttaggctggaggctgttaacaaaactcttttatattattttatcagattcttaggatcttttctggtttgaataaatgcatctgtaaagccacacctatgtggctaaaggttaaaaaataaattaacgagttaggtacagaatttcttttaagccatattcttaccttcaagttccagctgaaagtcagcagctcaaaggcccactcaagggtcagtgggcacggaaaggactttcacaggaagcagacggcaattgcagaggctcaaattactactgtgtcagagttacgggggcgctcagcaggtagccagcactttgggaggctctcagcttcagtgtgggaagttgaagcttttactggaagaatccggattgaacagaaacaaaccctgtgacctggccctgggagggagaacttctcactgtaccatgatcactcatgtgaccctgactgctgtgcaaataccaactccctctagttcatatgaactaagggcacactctactcctcctctcggtcaccagctagagtttttcacatctttcctggccctcagctgcctggcccctccctcctcccactggcctcgaagcttaaacaggtgggggctggggggaaatggaaggttggctctaggaccagatgcatcaggcttcaggtaggctcctgcttatttggtgaactcccttttccttcctccttagcctgagatttaatttctgcatctatgaagtgtgggtaatactgcctgtctccaatccatgctttaagattgaaagcaacaatgttgatgaatacactttgcagagcaaatagtaagtgcttaaaactgctggttcttctttcctttcttcccaagttgtattcatccacaccgaaaatgcagagaggatagaacaaaagtctagagcttaggtgtgtacttattttttctttgccttattgtacaaaaggtacactttagtggaggcagattatattccatggtgtctttggttacctgggaaattaaatggatcaagtgttaatgatctctgaactgctactcttctgccagccccaaccttgtatctaccccagtgctttcctttctggaattgaagcataattctgcaccccatctgcccttcttgccaaagctttccttgtcttctttgaccctgaacctcctaatgcttctttgccgacacttcttcttcctccttgtttccaaagggctctttttttcccaataaattgaactttctttttctttcttttttctttttttttttttttttgagatggtgtttcactcctgttgcccaggctggagtgcaatggtgcaatcttggctcactgcaacctccgcctcccgggttcaagcgattctcctgtctcagcctcctgagtagctgggactacaggcgtgcgccaccatgcccagctaatttttttttggtatttttagtagagacggggtctcaccatgttggccaggctagtctccaactcctgctcccaggtgatctgcccgccttgacctcccaaagtgctgggattacaggcataagccactgcgcccggctgaactttatttttctacttctgctctctttccagttccacttatcccagtgctgtcaattttcagccccatagggctgattcacagttcttagtgcaacctcacattttctctgcagttaaagtccctaagtctactaaagtgtctgccagtatcggtgccatgctgcgctgcatgctgcatctccctgcctttgctgtctgcatgggtcacagtctctacaatcccagaatttacagttagtaaccactgctagtatctgcttcctccacatttgtggaggatgaactgggatgttgcacaatcttctagcagtctccttatttctggtctcttccctactagtctctcatactttcagcatataaattaagctcagctcagatcaggctatcctttggttgtttatggctcaaattctgggtgcttccacttggaattcaagaccttctaaattcattaattcttattttttataagacagggtctcactcttttgcccaggctggagtgaagaggcatgatcatagctcactgcagccttgacctcctgagctcaagtgatcctcctacttcaagcctcctgaatgcctggctcaaggccttctttaatataacaccatccccaccatgggccccacacaccaggtgaactgaatgacttactgtcccctgtatgcatcctataatttcctgcctccctggtttactcctgtttctccctgccaaaaatgctcttactcttagcctggcacactgctgtgcacctgtaatcccagttacttgagtccagcctgggcaacatagtgagatcccatctctaaaaaaatgttcttactctgtttccatagagtcagattcttcagctttgaacccatcttttccttgaagcctttccttaggttatagctggaagcaatctctctgtgaactaccatatgcttttttaaaaataagttttattgagatcaaattcacatactgtgcacttcacccaagtgtacagttcaatgtttttagttgtgca

SEQ ID NO: 3846 - DNA, 4001 bp, Homo sapiens
tttctgtagattagaaattggggttaacatggctagtcctctgtttagggtctcactaggctaaaatcaaggtatcagctagggctgccattctcatctgggacttcagggtgttttgccaagctcctagatgccaacagaattcagttgcttgtggctgtagtattgagataactgttttgttgatactttctctcttcatcattaaatctataatcatgcagtgaacttttattatactttaaatttctcagactttctcctctgccacatctctctgacttcctgttcacatgattccactgggtccgtcaagatagtccagaataatctccctattttaatatcagctgattagatagtttaatagcaactgcaaaatccttttgggaatgtaatctgaaataacggcagatgtaataacagaggactaatgtcatggggaccaaaattctgtccatcctatcctgattggagcacaaaagtctctcatgcttgtataatctctaggaattatatggctaatagttttctggtggttccttgcctgatctcatggagctataggctctatggaagtgcagtctaccattcaacaataaactaaaagggtcctctctaaagatatctaaaggtatttatttgtgtagtttccttctgtctggtactcttacctgcaaatagcagccacttcaacctctcagaactcctacacctggctcttgaactcaatgagtttgctatggctttttcttttgcaccctataactataccctattcagaaagcatcttcagtctgaggattgagacaactgtcatccaaggtcagaaaccagtggtttcatatattttatccagtttccttttttattatggctggagtacacatccaatcttgtcccttcggcatggctgaccaggaggtttttatttaatgttctcccaatcagttagtgatcattcttttggatgctcaaactgtcccaaatgtggctactgtgagagccccttcacgttggttcttgtatccttctacatgtccccatcaatttttttgttattatgtgtgctttatttttacagacatttaatacaaacaaacaattctgggaatatatactgatcacttactccttcaaaaagaagatgtagtacattccccttgcatattctattcccaagagtgggatcatcaattctcctaatagctgtggttcattttaatggagaatggcctatcgaaagtgagttctgggcattaggtgtgcccattgactctagcatgtgttccagtctaggaatttttagagaagaattagaaatctaaggcattttaaatcaaggtcagtcattgggcttttctgaatgagactaatttggtacagagcagaaaattcatggctgacatcctccaagagctttagaggattagaaaatcaatttgtgtttaatatctgagataatagattaatatttggagtaggacatgcttttagaaggctgtcttgagggttgatgtttaaaaaagccataggtctttcaatttgttgaccttatatttgatgtatgctatgggttctggaatgggagcattatctgccctactaccaaagcatttagaaatcttttctgttctcttcagagagtgctattggaaattgttgtcctagggatcaggaatgctaaatgtcctgcagcaccaaagaacagatctccataatgaggaattgtttctctccaaatcccaatcatgcttcatttatcaatacagattatgcaataatttcacgtgaaaatattgaatatttttatgttttgctacccttacctgactttgggtaagttgccagaataagatcatcaggcttggcttggaaattacatactttttcccaccattcttttgataatatcaacgtagggactccatctacttccatgatgttaaacagttctggctttttttccatcgtgggagcgtttttctcaatcttcgccattgggaatctgggatgggtaagatcaatactaattaaaatttttaaaaatgttgttttatggttcatagtatgggttatcatcttactgcctttgattagaatagcataaaataagtgaaagctaacatataacatgctaacaacttactctatgtacattaattatttaatcttcatagcaaccacataaaataggtaatagttttttctgttttctacatgtggaaacttaagtcattataagtttaaataatttgataaaagtaaaataatcaatacctgttggggctgagatttatacccaaatagtctttttcctgctgcatgacctaacaaccatattacttgttaatcgggaatataatgggttatgtgtcatatattgcttcattgtcttcaagatattattttgtataattagaagcgagacaattacattgaagaaaattcaaaacaatggttttaaggagcattctatactcaattttcttgaatagttttcacagagaaaatcttcaaaaaacataatttcatgtagtttttttttcattcatggaataatttttgaaatatcagtcatgggttacagcagaaaaaactctcttgtacccatgtacctgaaaactctcatgtctactaactctggaaacttggaatttagttggggtctgatatggttcgcctgtgtccccacccattataagggggagttcccctgcacaagctctcttttcctttgcctgctgccattcattgccttccaccatgactgtgaggcttccccagatacgtggaactttaagtctgttaaacctcgttattttttaaattgcccagtctcaggtatgtctttattaacagcatgaaaagggactaatacaataaatttgtactagcagagtggggtgctactgcagatacctgaaaatgtaaaattgactttggaactgggtaacaggcagagattggaacagaagaagacaggaaaatgtgggaaagtttggaactttctagagacttgttgaatggccttgacaaaaatgccaataatgatatggacaatgaaatccaggctactgtggtctcagatggagatgagaatcttgttgggaactgaagtaaaggtcactcttgctatgttttagcaaagagaatggtgacatttttgcccctgccctaaaaatctatggaactttgaacttgagagagatgatttattgtatctggtggaataaatttctgagcatcaaataattccagaggtgacttgggtgctgttaaaggcattcagttttataagagaagcagagcataaaagtttggaaaatttgcagcctgacaatgcaatagaaaagaaaatctcatttttggggaagaaattcaagccagctgcagaaatttgcataagtaatgaggagctgattgttaatctccaagacaatgagaaaaatgtctccagggcttgtcaggagtcttcatggcagcctctcctatcacaggcccggaagcctgggaggaaaaaatggttttgtggactaggcccagggtccccgcgttgtgtgcagcctagggtcttgttaccctgcttcctagctactacaaccgtgttaccctgcttcctagctactccttgattgtcccattggccagaaaatggccattcaattcccgtgttcctttaaggcacctattctgtctcctattcagacagtgcttaattagtaaagggattctaagtctggaagttaaccagaaccctttttctatgggtaaatgctttagcataggccatcatagcaggatatagagttcaatctagcatgctccctcccttaaaggggccttgcccaattatgtgatttttcttgaaattcattttttttttggaaggcacgcaggccacacaagtctaggaggtcaaagggaaataaaaggcagaagactaagactgcctgtggacagtatgactaaggcccaaaagtttagttcctctggggcca

SEQ ID NO: 3847 - DNA, 4001 bp, Homo sapiens
atgggaatttatagccataacactgaatgtctataatgaatgaattgaatgaatttatagacatgagccaacatgagggcagattcaaatgttgctagaggctccggggtgagtggaatgacttctcaatttattctctagaggccagtgattctatgatgtatttttttcttgtgtcattcagagtattattcttttaaaaatttagggtgaactatttttgccatctatgcttgtttcttcttccttctaataaaatagccttcattaatgtatatggttttagttatgattaaatattactttagatggcaagtatttaattttcttagtgtgctttttgaattgcttaaacctcattaatgccatgaaaaacctaaatgaaccatatctttgtacttgcgtttggcagatagagaaaagattatttatgtattgaattgataatcaagtggaattgtcaatgaaattaagatgatgagatgtgatcctcaccagtggctacttttagaaatttacattcagaaaaatttgatcctgaatgggctcctgatgagtaagattgggaaatcaggaccaaaatgaaacagatggacaaagaagagaccaaggcctccatgtgcctgcagaatcttctgtcaggatcttgagagataagaacaaaagaggattttgaacagtctcagaaaatactgaggtttagattttttgatgtgtgtgtgtttgtgtgtgtataacaagagtttttgacagcttgattttgcaaagagcaaatgtatatacaatttgtgtgtggacccagtaatgtatttctagtagatatgtagatatgcaaaaatatttatagagaactatttccacctcatcatcacccaatttttatgacgtggtggctcggcttaagctagtcctacttttacagacaactttgttaaactgattgttgagataaggcagttggttcaaaacttaccacaaaggaaggtggaaatcagaaggatggttctcagaccctgagatgggagggctgctgaggtgatatcagcattgcagaaccaaagctcccctatttctttcccaaatcagactcaggatcacctttctagctcacacactcaaagcagctttttacaagatctacaataagggcctagattgggaatgaataaataaacaagtctacccttttgctcttaactgttttcactctctcctgggaaagtgaaaaaaaaaaaaaaaggaagtacatcatagtatcataggaagattgaattctaaaaatttgtatgtcattttagtatgtttcggtatagcttcagtttccactagtaactttccttagccatatcactctgtccagagttttccagatcaacttctttatttcatgactaatgcatacttccacttaccttcctaactctcctcttccccttcccctgcaagcccttccacctacctgctttaggataggtagaaataagcaggtcatcaggcttggcttggaagttccagatcttatcccagatgtcacaggtgtctgtcggttgaagaattcccttcacgtagttgacacttaagcgctttgttccatcaaatgtaaaatcctccatgtcgtgtaaggccattagtgtaagaaatcagagggctcttccagacacaaagttatcttcagtcagcatatggctgcgttgtggatagaggcagcactctatccaccacactaccacactatccagccctctagcacaggcctgtctgggccagcaaacagggagaaagtgagttgcaggcctcccgactcaggttccagggaactggaactcttgtttatgactttgtccactggcagtttcctgaggaactgcagccccctcctcaccaggctgtggcgtcacagcagaggcggccacaaaccctgctggccagcaaacagggagaaagtgagctgcaggtctcccgactcaggttccagggaactggagctcttgtttatgaatttgtccactggcagtttcctgaggaactgcagccccctcctcaccaggctgtgacgtcacagcagaggcggtcacaaaccctgctggctgggtcccgttccagcccttccgttctctgtgagttaacaggacatagtatcacattgtttatagctctcatgtctgtgtccattaaacccttcatagataatttcagtaattattccttctgggaattttaaacaattaaaaagttgcaggacttgcctgtgaaattacagattctacacagaatgacttccctgagagactgcagggactttcccgtgggctattaacagtgggggcctggatggatctgaatctcccagtacaaacatctgccagggtcagctttgttattttttaagagtaaaataaataatgctaaactggagaattgtaggggtttcatcacagctatgaaaacatgtatgcctcatttaaagcaaaagggatgcagaaaactccagagttaacagaagacagtggctgccttaggaatccattctgcccctgataatcagaaatttcacaacttgcttcagtccctgcccccggcctggcctgcaccccagggccatgccacacttgctccccatggcagcactccttctggagatcttgtcggctcttgtgtgtctggctgtctgattctctttcttcgtgtcccagctttgatgccccctttctggagaagccttctttgactttctatgtcatctcaagtaggtccctcctatttccttgctcatggcactttgtgttcctttagagcaaccattgacagttagtttttgcgtgtttacttgttggcattttctgtctccttcactacactctaaggcacatgaaatggggcctgttgttttctcactgtttgatagctgtatgcctagtgtctggcattcttctatttctcgaaagaatgaatgagtaaaactaagcaaaaattgaggaagcgagttccttgggccatcattatgtggggactaggtgagtatggtggctgtggcttgacatccttcagagagaagtcaggctgcctgtatttgaaccctgtgccaagtcccagtagctgtgggcaatggcaggttacagaatctttctctgtttcatatcacgcttttcctcaggtctgaattggggatcttaacattatctacctcatggttgtggggagataaaacagcttatttaatgcttggcaacagggaaatgttgaataaatcatagctgttaataataatgggtgactttgttcaccatttctctgtggcccatgttctggatgcaaactcagaaaagatcaattctttggctttccctattcctcatcccctccctccagaccatggtgaggtggatgggcccttgagacagagactgccaggtggaatgcctgggatgcatatgcatttaaacagacttataaaaatcacctataatttttcagttagattttattctataatctttttggccctgtgtgccatcagagtagagtggtagatattcagcaatgccttagcagttttctccagtgcgttgtgtgctagagggggagggctgggagatgggggaggatatgcttctggacccaaagatgactgactgggattgaaaatagatccagggaagatgggaagttccaaataatttgaaaagtgatcttgactacaaacactgctcttattctcacttaatgtttttactcaatagtactttctcatgaggttaggagaattaaataaatatatttagtgattataagaataaagttggtgctaagtctatatttgacaagcattgctttggaattctaaatatatgggtttgaatttaaactgccccctaatagctgtgtaacttttctaatacttatctcttctgagcctttcgttttttattaatctcacagggttaatgtaatgttggatgtaaataaggtatcctataatcttgggatatattgggtaccca

SEQ ID NO: 3848 - DNA, 4001 bp, Homo sapiens
ccttcccatcccttacacacacgtgaatcataactgagatagggaaatcaaaaatcatgtctggctgggtgcggtggctcatgcccataatctcagcactttgggaggccgaggtgggaggatcacttgagcccaggagttcatgaccagcctgagcaacgaaatgaaaccctacctctacaaaaaaaattaaaaaaaattaaccaggtgtactggcacgtgcctgcagtcccagctactcaggagggtgaagcaggaggatcgcttgagcccaggaggtcgaggctgcagtgagccatgatcacaccactgcactgcagcctgggcaatgaagtgagactccatttcaaatagaaatcatggtttactaggaaaagactggtgattcctactaccatcctgcacaggtccatgtcttcagagatgagacttttctgttcatttcctgaggtttctcagcttactttccccctacttaaaataaaaagaacaaaaacagcctggctatacagtatagttgttaaaagctcaaactggaaaacttgggttcaaatcttggctctatcatttattagtcccttgaccttgggcaagtccctagcatttctatcttttgtgaaatggtaataaggttattttgcagaaaatgagatgatacctgaacagtgctgaggatatggtaagcacacagtaaattgtggtaattattagcattgcactttctaaactgaaaactaaagaatctccaaaccggaagaaatctttctatgataatttgctgtaaggttaaaggctggttgtactaacctgatatttttctgaatccccacattcaagaactgggaattctggatatttatacttttttttagaaacagcatatattaattcactgacaatgtggagaatccagtttgaacctatcagaaaaatcagagaataaaaactcattacggagtcttgatataacaaaaggacgttactttagcatatacatgataaaaattaaaatctacaaccattccctgatgtgtatatttagttcttctgtctttgaaataacttgggctatggaaagaaatggtttgattgaaaacagcatttacctataattagtataaaattcaactgagaacagatggctcctttaacaagggacaatgcttcattttgaatctagaatatgtttcttataggacaatgttatgttatagaaatagtttattataagttgtatatattattttacattaaattaatatgtattttctacaggaatctataattttgattttatgaaaacacagcatcagttaagaaaaaaagatattaaatgaggttggctttagtaaacaacagtagaaagaatcaaaaggagatggtagaaagcaggatcatctagattcttcatgtcttattttccgttgatgaaggatctttgtaaaagtgatttgagaaactgatggagcaatatttgatcctgaaaaataatttataacatggaaatcatcatgtaaattatagaagtggctgtgcttttgtccagccagaaatcaagacaaaatcactgctactgtcactgttccttgccaactggactttcccacattcatgctcctcccttccaggcccgtcatccacccccttctgccctccatcctccatcatggcctttccgcacagagctcttccttcagacactggagttttttaatctagcagttctatttactgattttacaacctacgtacttaaccactgtggccctcctcctcactgatgctcagacagattcctgcaatgaggaaccgccttcatcccacctttgtctcataccctccccaacctactcactatgagaagtgtacttgtaggaaacgacttgtcatttaccgcactttggataagatgctagcacgatgtcatcatgtctggcttcgaaggtgtccagcgcttggaaagtttctgaggtgcacatggtgatggggtaaggaatcccctgataggtgaaaaataaatgagagagtgcagtttcttttgatttttctaaagcttcgtcaatgtattcaataaatttggatttatcagccatggtggctccctgtaaaagaacctgctctgtggctgttcagggggagtgattgcttttaatggagttgggcaggggctggaataaagggctcctcccagtcacatgaaaaagaaatcatttaattctcatccacccctccctcactattacatatcctcctgggaaaagctaaaccacaggtgcaaaacaggctgaggatcagggaatattaccccaagggctgattacatgaccatttcggcaacctgcccaatgaaagtaagaatggaatatcctaatagaagaaaatatatattaaatatctaacaaataggtatttaatcaggcatgcaatttttctattagaaattcacagaatgaaacctcagttctcttctgggttgatagatttccacacatatcctctgtggtgtgaaaggaagcaatgggattgtgaggtaatttggtggggtggaaaagagaccagatttgggggcagtcttaggcactctcatttactggctcaatagatacacaagtctaaagacctgagtttgaaccttgactctaccatttactagttgtgttactctgagctaatgataatatatctctaaaagtttatgtaaaattgttaacagtggaaatgtatctgagttaccccatatgggtctgcagtaacctcaattcttgcctcctcagaagaaagaattgactgaggatgtaaggccgaaaaagagactgaggcaagtttcagagcaggagtggaagtttattaaaagctttagagcaggaaagaaaggaaagcacacttagaagacacccaagtggatgacttcaagtacaagtgcaaaatgtttaaccttgatgctaggccttcataggctggcccacttccagcatctcacaccactttcccatgattcttcctttagggtgggctgccctccttaccccagggaagtaagcatgtgcagtgtgtttaggaagctgtacacatgcccatctgaggctttcttcccttttctagtgtagtgcccccagaaggtcatactacgtcattgtgtctcttaatgcgtgtgcggggaaggtgcttctccctggaacatttcctagggtacgctctttctctagcagccactctcccctttttcctttgggtaagttggcccacacttcccatctcccagcagcttggtgtggccctgtggctaaaacagtaagttgatggctctccaattttctttagtgccttccccatacctggaaggcagatactgtgttggcaaaccagatttgctaattcggaggaaagcagcactccagggggtggcagactaacaagacagaggaagccagcttactggatggccttgagaaagagagccaccctcccatgactcacactgtgtaacaggcctcgttctgacctgtatgtgaaagagcataattgttcatcttgtttgagccactgaattattggagtctcaacaattacaattgcaattactcaaaagttatagcagtttagcctatatcctatctggtacattttctgggtcataatttactctttggcctcttgataagtcaaatatctataaatgtagactgtatatttcttcttatttctctcccattctcttccccacatctttcttcttatgcttcttccatttttctaagaaggtaatttttttcactgtatttacctttctcttaaccaatgttaaccagtgaagaagatgacttctagttattcttagttaccaagctgtactgtcattcatgtatcagttaaaagggtagctaacattattgagtacttgcatgtaccacatccccttccaaattgctaagattacaggaacgatctgatgtaatttcctaacagccttatgaaatgggtgttgctttgctaccttttgc

SEQ ID NO: 3849 - DNA, 4001 bp, Homo sapiens
tctttatgtatctcttaaataacctgacttcaaaatggagcaataaattctacattttataattatttctttatgttgctcttccatcagtctacaataaatttcaaaatgcttcctagacgcttctgggaaacaaaataaaaggctgacgaaactaagcatttacgcctatacttttcttcctagtaaccaagtaaacaactacctagggaaacacaatgcccacttgggaattaatctagattattagtaagtagatccatccaaaattcatctagattatggttaagctttaaaatgttaagtgtacattttgtacaatagtaccaatctgcaaaaacctcacttgctctcacgaaatggtacaaaactgggttaaaagccaagggaataggtgtgttaaatttaaaagttcaagtacatcgtggagttgaatgaaaaatagttttctgaataactaccattaaatgagtaaaagtccaaaaataatgtaaaaagtcaaagtcggctgggcgcggtggctcacgcccgtaatcccagcactttgggaggccgaggtgggcggatcacgaggtaaggagatcgagaccagcctggccaatatggtgaaaccccgtctctactaaaaatacaaaaattagctaggtgtggtggtgagtgcctggtggtgagtgcctgtaatcccagctactcgggaggctgaggcccgaaaattgcttgaacccaggaggcgggagggtgcagtgagtggagatcgcaccactgcactccagcctggcgacacagcgagactccgtctcaaaaaaaaaaaaaagtcaaagtcgtctgagcaaacaaaagaccagacaaaaactttatgaattaaaaactagccataaagttgtttaattagaacaggatgaggaagaaaaggggaaatcgatcactcctgattaagtgcaaatcccaagtaaattattgatactaacagtgagctggagcactttgccttaccaggcaactttctgcaaatattctgcaacgactctacatacacaaagttttcctatgcttttcctcaaaaatatgagacttcctcaggttaatgcccaggtgagatgctttttgttgctctagcagtttagttctattttctttcttggttattatgaatgctctcttacaactggagagctaggatgaaccaatcccgagtaagaaacgggaaagtacagtaaagaggcgacagctctgcacccccacacggaaaaagactcagaggagagcagcggcatccttgccctagctccaatccgaacggaggcaggattcccaacaacatcggacgtctccctccctcgccgccccacgccctcccgacgaagaagcaaaaagtggagagtccagccgcttctcagggccacggagcctcccagtcagggattctctcccgttacataactaaggcctagggccctgcttctgcgattagtcctctggaaggagacggacgggttctccagagaccctcccagggaggtggaagcggggctctgcacctagtcgacccgggagaaagaagtgggacgacatgagggaggccgccaccaaaggcggtggggtacgggggtgatgagcgagcccggagaggggcgggcggctccgggagccccgcagcaggccccggcacctccggccgtagtcggctcctctccctcgcctgcctagtccccaccggccgccccctcccccattccgcgctcccctcccccgcgcctccatccccgaccccagcctagcggcaggcagacctgcagggaaggccctggccaccgccgttggatggctcccagcccggtacctggtcagacatgatgacggtggcttcacccgggggtctccgcacagcagcggcctcgggtaagcagaacctcgctccggggtttacaaatccttctcccttccccacagcacaacaccgcggctgcagtaacttccgctacgcctcgcgtcacttccgcttcgcgcagggaggagggagagagagaagagaggaaagacaaggcgggaaatgggtgggggagcagccaaggggaggggcaggctgtggagctgctttgccggtggtcgcgcgggtgaacggcagttttgtcagctccttcaaggaccaggtcctgcgcatcagtactagggccatcccccaggagcaaaggtcctggctccatgtctcaatgtttggagccactctcacaacctagattgctctctccgttacaccttgcgcgtctctgacgactgagccgagatacttcttttgtctcctcccagccttgctcatcaacccccaacccccaaatatgtttatttgaatgccagtacttctagctctagaaccaacattttcggttaaccagcacccttgccaaacacatgaccgtgatttaaaacaacaagaaagcaacgacccaacacaatcttgacggctactgatgctaaagaccgctgctgaaagttctaaatggggagtgagtaattccaacccttgaattggttgctttgagttaaggttaaagaatgattcttcttggcagggcgctgtggctcacgcctataatcccagcactttgggaggccgaggcgggcggatcacctgagatcaggagttcgagaccagcctggccaacacggtgaaaccacgtctctactaaaaataacaaaaattagccgggcgtggtggctggcgcctataatcccagctactagggaggctgaggctggagaatcgcttgaacccgggaggcggaggttgcagtgagccgagatccgcgccattgcactgcagcctgggcgacaagagtgaaactccctctcaaaaaaaaaaaggtggcggggggggcgattccgctcccctcgcatggggaagcaggctctgaccggcctgcagagctgcagcagccctttgcgccctcctcgccctccccaccaacatcatgctccaattcctgcttggatttacattgggcaacgtggttggaatgtatctggctcagaactatgacataccaaacctggctaaaaaacttgaagaaattaaaaaggacttggatgccaagaagaaaccccctacttcatgagaatgcctccagcactgccttcgggatatactgattctactgctcttgagggcctcctttaccatctgaaccaaaagcttttgttttcatctccagcctctgggctcctctttgctagaccctgtgtttttggctttagagcaagcaaaatggggcctcaatttgagaactaccctacatttccaacatactcacctcttcccatattccctttccaactgcatgggaggttctaagacgaattgtggtgctagattagtaaacatgacttttaatggaaaaaaaaaaaagaatgattcttcttagatttcttctgtaaaacacaatggccctactggcatacacagtggccctacgggcatactcatggaggataagaatataaacaaatagaattgagaatcctgaaataaatcaataaccctcacatttacatcaacaaaaacaccaagacaaatcaatggtgaaagaacagtcttttcaacagttggtactaccactgctggacattcacatgcaaaagaatgacttcgttttgttttttgtttgttgtttgttgttgtgtttttttggtcaccatctcaaaaaaaaaaaccaaaaaacacacacacaaggaggccgggcaccgtggctcacacctgtaatcccagcactttgggaggcccaggtgggcagatctcttgagcccaggagttcaagaccagcctgggcaacatgttgcagtgtgccaagatcatcccactccactccagcctgggcaacagagtaagaccttgtctcaaaaaaaaaaaacaatcaggcgtggtgcttcacacctgtaatcccagcactttgggaggccaagacgggcagatcacttgagatcaggagttggagaccaggctggcc

SEQ ID NO: 3850 - DNA, 4001 bp, Homo sapiens
ctggatcaataggagaaaaactagtagggttaaagataataagaagtggttcttactctgtgtgtcttaggcatgatcctggtggaaaaatttatgaaccattaatctaaatggcattatgctttcaacttttgacatatagaacgtgagagatttctgctgccttctaactggtatcccttcctccaatctctctttgtatgtcatctattctctacactgctgctagacttactctttttaaaacttaaatcaaatggcttcccattgcctattggaaaaagtcagaattccttggcttaccattcaacaaaattcacaatctggtttcaactcacctttgcagattcattgtccatatgtctcttcaagttcaacaaacatttatcaaatgccaggcattctgtgtcggtcaaagactgataatgtgagatccttgccctgaagtgaggaagagaaacagaagcagaatatttcaatatgaaacatggtaagtactgttctagaggtatatggacctggggtactggaagcacaaaggaggagcttcctgggtgaaatgactacctttgttctaacaacattatactactcagtttcttgagaatgctgtacatttccacaattgacactttcagctgtgaactctgccagaaatgctctgccaaccttgcacatccctggcagactcatattcatttttaagtacagcataagtccccaccgtccgtcacttcaccagtgcatctccctttctctattctcacagtgctttgcaagtctatgtcacagcagttatccttggattttaattagtacttatcgcaatagattttttctgcccgtctatttcttatggctgtggtcttgttacagggccaggcacacagaaatatctggcatttgttgaatgtttactatatgccagacttcaccttttttgtttgtttcttttttgagacagggtttcactctgtagcccaggctggagtgcagtggtgcagtcatggttcactgcagcctcaacctcctgggaccaagcaatcctcccacctcagcctctggagtagctgggactacaggcgcgcaccatcaaacctggattttttcttttttttttttttttttggcgagacagggtctcgccatgttgcccagcctcctctggaactcctgggctcaagcaatcctcccgcctcagcctcccaaaatgttgggattacaggcatgagccaccggtctggctggcctttattgtttgattcaattcttccaacaaccctatgaggctaataatcttatccccatttttcagagtgagggctgaggcctagtgtcttgcccaatgtcacaaatggcgaggtcaaaaatcgacagtctccagagtctgctctcttaaccacttaactattctgccttaataatttcagaaaaaaaataaatgaatgaacgaaataacaaaaaagtcgccctcttcccttactttaccgaaaggagcacgaagaacaggcacggagcccaaggaatgcccaagtccctccaggggtttcctcggtcacggtccgccggcgcaggcgccaatcacagggtcctgaggtcgcctgacgttcagggcagccggaagacggggaggtctggacctgaaccgagacaaggaggtaccacactattcactgctgcgtcgcagagcgggctgggcggctgtctggacctcgagaggcctgaggcaaggatcgcgtcagaccccgaaagctggtttgttgattagtgatctaagaccgccggaagcgcttcttctcaatcaagctatgcaacaggaagtcattacgatcccgttgtaacctctaaatatgtccccgttctgcacagcatcccgataaccgttttgtttttctcatattatgaccttctcatgttagcaccacttcgcaacgctccaggtcgtgaaggagcaacttcaccatcgccgcctacagacgccactgggagcttgggagagtgggacgtggacaggaacgtaaagaccgaagggtgggtttcgaaggagcggatttcgaagttgcaccggttgaggatggctgacattctctctcagtcagagaccctggcgtcgcaagacctcagtggggacttcaagaagccagctctgccggtgtccccagcggcgcggagtaaggccccggccagcagttcttcaaaccctgaggaggtacagaaggaagggcccactgcgttgcaggactccaattctggggagcccgacatccctcctcctcagccggactgcggtgattttaggagtctacaggaggagcagtcgcgccccccgacagcggtttcttcccctggcggtccagcccgggctcccccctaccaagagcctccatggggtggccctgccacagccccctacagcttagagaccctgaagggcggcactatccttggcacccgtagcttgaaagggacgagttactgccttttcgggaggctgtctggctgcgacgtgtgcctggagcacccttcggtgtctcggtaccacgcagtgctgcagcacagggcgtccggccctgacggagaatgcgacagcaacgggccgggcttctacctctacgatctgggaagcacccatggcacttttctcaacaaaactcgcatcccacctcgcacctactgtcgagtccacgttgggcatgttgttcgctttggaggcagcacccggctctttatcctgcaggtaggtagaaaaacctagaattgaaatttcgggttcattggactgcgttcttgtgcttcttaagctttggatgaggaagaagaatctcccactcagcgattacgaaagtgaaggaatcaagtctggcctatcatcttcagacggctgtacacattgctatatttctgaaagtcatgttcacaatcccgaactctaaaataacttgtttggccaggcgcggtggctcgcgcctgtaatcccaacactttgggaggcccaggcgggaggatcgctttagcccaggagtttgagaggaggctgggcaacatggcaagaccctgtctcttaaaaaaaaaaaaaaaaattagccaggcatcatggtcccagctgctcaggaggctgaggtgggaggatcacctgagcccaggaggtcaaggctgcagtgaggtgtattacagccactgcactccagtccagcctaggcgacagagcaagaccctgtctctaaataaataaataacctttttttccttggttcatcagggaccagaggaagaccgagaggcagaatccgagttaacagtaacacagttgaaggaattgcgcaagcagcagcaaatattgttggagaagaagatgctaggagaagactcagatgaagaagaggaaatggatacctctgaaaggaagataaatgctggtagccaagatgatgagatgggttgcacctggggaatgggtaagaaattaaaattgctgccggaggttaatattttaagttcattacaagtggtacccttaaatgtttttttaaatcatacagcttttcatggctccttgagatagatagggcaaacacaatttgcacatgaggtaaccaaaacccagagagattcactgactttactgttgtaaagaaattgacttataggcactttggattttttaaaaatttatttttaatgcactctcttgttcaaaacttgtcctaagcataaaattattatttttacaattctaaaattttatatttattaagtactgaccttgtgctatgtgattatcattggaggggatggaactctattcaatcaaataaatgggatgttattcaatataggatattctcttgaattttttgtactttgtgaagatatcctgaaatgtggaatatctaatcagataaagctggtcccttagccaaaataataaactttctttaacaccagatattttagaaaatggatattcaggagatgggagtataaaaaggtagaagatggca

SEQ ID NO: 3851 - DNA, 4001 bp, Homo sapiens
gtgcacacatagacatacacattggagacctaagatactcacaaaggagacaataccaacagagctgtgctccaataatcaattttccatcatgctacctgaagagccattcattccagaataccatccccagtgtttgaaatgccaaccttttcactttcagtcagctttgggaaccctaacctgttggttgccggaacagaagagctctcaaatgcctttgccaagcatgtttctctgtggatagagacaggctaaatacatacattttacattgcaggagaaatttagaacacctcttgggtaagcttcctggatccctatccgtggagtttcttaaggatagcataactgtctctcattcctgaatgagaattcctagcattacagagtaaactgcattagaattctgagtatcttatgatactgatgaaatgctctttcacatccaaaacaaacaaacaaacaaacacaaaccaacgaaccaaccaaccaaacaacaacaacaactacaacaacaaactggagagttgcagtgggagcagaaagtcccagaatcctctaggtgtacttaaaacaggaaggcaacaagaggctgtctgacagaaaaacaggcctggaggaatttacaaagccccttccagggtctagtcctttgaccaaaccctaggtattgtttgcagcctgcaagggtaaaggggagaaggaatatatggaaaggagcaaagcagaagttgaaagtgtcaggaagatgagtggagaagagatgaagaaaggggagttaaatgaagaaaagggggatgtgtgttgaaaggaagagagagagtgatgggtaaaaaagaggaaaaaaagttgaaatacataagatgaagttccccatcaacaaatgactcagttgatcagtaaaaaaaccctcagagtggccaatcttccacttgacccataccccacccagttccaaacctcacagcaatgccgtggtcctctatgagcactttctcgccttttcacaaaggctaatctcacctatcaaaggccacagccgtcatggagtagatactggcgaagacagcggcgatgggaaagaagttgtggaacttgcagtagaacaggccgtagtaccattcgttgtggacagcataggtgaagttcaccactgtattgaatgcagccatggaggcctccgcgaaggccaggttcaccagaaaatagttcgtcactgtcctcattcttttgtgggctaagatgatccacatcactaccacgttgcccaccacagaggtcaccacaatgaccgtgtaggcagctgcccaaaggacaatttgccaggctggttgcacgaactgattgggttccgaggtgttagtggagatgtttggggagaggtctgagtccaccgggaggacgttatccatttcgaagctaggcggtaaagccctactatctgtacacaacccccctctgcagcagagtcctgtggctggcgcctggggctcagggtccttctaaagccagacaggagggtggaaggctttttctgggcagcactctttttgaaagctgaactggcgctcagaatataaacgcttctggatgcactgcccgcctgcccgcggtggctctgaattcctccactttcaagcttcaggagacgtttgagttcagaagtctggagacagcatctctcttgcggtaaactgaaaaagggaaagaaattccaccggtcacagttctaggaagcaagagatcccccgcatttatgcacctgctgctgcctgcaactcctatttctccttcctccgcagggaaaggcaaagccctgtgctgcgtgaggacttaggagcgaagtgggggcccattgcagcgcgacctgtaaaagttctgagcctatggccaggattctggagcttcgtatccagctggagatttttccttctcttttgctgccgctgccgccgcctgcagtttcgcgggcacctctcggttcgggttgctcagctcgcgagttagctgcgcacgaggcttttataaccccctgcagagacgtcactgggaaggggcagtacctgggctgcgtactcgccagtcccggtgcgcagcgcggcagctgcgccagctgttgacaactgtctcattccaccgccgcagctaccacgccttttgctgcttgctacttgccgtgggagtctgcgagccgggagccccacgcactccgcgagggggcagtaggtggcttggaagtaactgacacagatgcggtccgcagctggaatcgtcgttgcacgaggggtgctgggaggaaggaaggatttgggaaacagctggagtggaggacaatcaacttccagggaatgaagcccagagccctgagacagctctgcagaggcggcttgcctgtggcaatgggaaacggtcatgtgtgggggcgatgtgccagcgccgcgctccgggccgcgctccagctaccgagaagccagaggcgacgactccctggtccaggtgtcccgaaaacaactttcctgaggctgtgtttaggaaacacccccacaaaatatctagctcagttacctggctagctgattcacctgggaagtgacagtctctaagctttgaggacactttcctcagccaccctggtgacttggcccctcgttccaggagaagctccatttgagccctccacctgacccctctggatgagcctctgctcaatcactggggacagggctgagctccctgcgaatcttggtgagcgcaggagccacactcataggcagcttgtcgctcagacgcgcggctctgggctctccgccagcaatcactgcggcgctgcgtttgcctcccggggacctggcagcctccgcctccgcgcctgccaagcctgcaggccagagccgggctcggggtggcatcggtggtccttctccctgttccccttccaggtttgcataggggctggaggacaggtcagccagccttctctgcccgcctccatcctgccctgccgtcttctgactttgaggcctcgtatcccagtccaagaccatttcaaacggtagaactggtgccagacacttggaggaggcagggcaaagactcgccagtccgtataaacccttttggagaagccaagatgggatgagctccgcagcacgttcccgccagactgctgcaggcagagttccgcggaaaactgaaccccgggagtcctcaggggcccatctaccccggtgcaccgccccctcctttcactgcggggactcggagctgtgggactggagcgcgcaccggcagacttgcgcgcaggttggagttggcgcacacccgcgccagccggggagcggcgtttacgcactggtaccgcgagcgctcaaagcatctctcgggaagtgctttaaggctgggaaatttactatacacttatgccgggcaaaaattggatcccacgccggggaggagaatctgctgtttcactctgtattttttcggagcctgggattttagcgtatataggaaccgcacattgctttgccaggttctcctaggcacccgtaaacacactgcatagaaaactctagagatgctttcaagagaacagcgtccctttatttagagcggctgcacaagaggtcttctttgtggaagggaatgcctcctccaccttggatctctgcttgaggcttccaccatctcaaagagctgacagagagagggaggaaaagggagagggaaggggatgcggagggtgggggaggggggaggggaaacttctctatctttaattttccttccaagctgtttaaagttatcttttcttttttctccctgtccattagagccaggctgacgttttcaaaaggaactttattcagtggttaagggagaaaaagaaagctaatcgaataaaatctaaatatgtaataagagctaaatataaaataaatatgaaatagctaaaaagtaaacattaatccatttatcctccattagtacagcaagtt

SEQ ID NO: 3852 - DNA, 4001 bp, Homo sapiens
tggaatgttggcattgcatgagtgacaaaaatcaacccaattctttgggacttagactacatatcaggctgaaatggcaatttttaaaacataagcaaattcataaatgatatttgttacttacctctgtaacattgtggcaagaagtgcaataatatttgccttcatcagtaagaccccatgagacagcagcacactgagtacagcgttctttaaactcttcctatgggagaagaggacagaaaaggtgttcccatcaagccacattcaatacatcgtacctaaaccttgcagttctatttaatgggttcctggcaactttattaataaaaaatcatagacaataaaaaatatgtcagagagattatccgcaaacaaggagaggcgcggtatgaaaccgaattaaactactggagaaaatttattgaaatatgcagtgtgacaggaaaaaaaaagaaaaggaggtagtaggggtaaactggaaccaaagatgagtaaacaaagctccttgaaaatactgtgagaagatgacaaacaagtatagagaagacttttaaaaaatgcaaatacaatttggaactcctccaggacactaaaagcgcataccacagaggaactagatttgtaatggtttcaagtttcgatttattcactcggcagcataaggggtatcaactatgtgtgtaccaggctttttactaggtgctggggattcaatggtgagcaaaacagaccagacatgatccctagtctgggtatacgctagctaatggtgagttacaattattcatttcatcagcctagcatttacagaagttagccaaccatcatcagtaaacattttttaagcctctactataagaccgtactgctcctgtatatacaggcctaattctctgatccccaactctttggagtttgacttgttgttagcattgatctaattatcgagtatcatttaataccatcaaagcgtgtgccatttggccgagggcgggggatcacccctataatcccagcactttgcgaggctgaggcaggaagatcgcctgagcccaggagttcaataccagtctggacaacatagcgagacccctgcccctacaaaaaattaaaaaaaaaaaaattagccgggcttggtggtgcatgtctgtagccctagctcattggaaggctgaggcggaaggatctctcgagcccaggattcgaggctgcagtgagccgtgatcgtgccactgtactccagcctgggggaagaagtgagatcttgtctcaaaaataaaaaacaaaaatgtgccattttacgtagtacctaaaacaaaacaaaatgcatgccaaatcaattttggcaacttggtaaagtgttcagtgaccccgtactaacactacgatgaatgatagctggacaatttggggagttcccaaacccgaatttagaatccctgctggagacagtggcaaggattcccggagagaccgacaggggttacccggcggcatctcaggttccaacccctgcccctccctcacccaccccagcattaaagggaacttgtgggtggtccagtctcgaggatgagccctgtgggtggccaccccacaaaacccacagcttcatccttaaacacacccataacgacaaacaccacaccctccctcccccacaacctcgccgagccagaaactccagcctctttaccaaagccgcgcgcgcatgcggccggccagccccagtccttagcccgccctgcagccctccgccccgccttcctccagccggtggcgtcgccgccccaacccgcggcgtcctccgccgctcctcctcagcttctctctcctccggccccggcgatcgtggcccgccaggtgcaccgcctccttaccgcctcctcgaggtccatcgcggcgccgcgggagcttccacagccgggacccgttacccgggtagcgagcgcagcttccgggaaaggctggagaagcttccggccggaaacgcgagatccgcgcctaggattccgtgcgcctgcgcggcagggaaaccgcgcgctcgggggcgaggctccgcaaagctcgcagacccctcgcggactacctaactttcctactcttgagaaccaaaaccaaccaataagaaagtgggcgacgcctactgctgagtggtttgatcaagctccgttccgacgatcattcattccaagacagacttgctcctccggcggcacggggggtcggacaaggccgtgctcgcgagcgcgggctctgtcctctgtgggttccgccctccgtgggttctgccctccgagtctcgccccttgctggcttttttaaggggaagcctcggggcttggaggaaagctcacgggctgtgagttagacctaggtttctaatcacggctctcctgcttacttgtgcctcagtttactcctctgtaagaattagatgttatctgtgagccccttataattgagtctccaccgggcgtgctggttcacgcctgtaatcctggggaggctgagtcgggaggattgcttgaggccaggagttggagaccagccggggcaacaaagcgagaccccttctctgcataagtaaataactgaataaataaatgcatgagtgaatataattgagtctcagtaagtgctcaataaatttagctcttattgtttcttcatctaacacattcattccttgttttatttattaaacaggaactggtttgtgtcctggggattcagcagtgaacaaagtaaacaaaagtccttgccttcatggagattgtattctgatggggagagacaaaaataaataaggaaaatatgtggtatgttaagtggtggtgagttccaaggagaaaaataaagaggagaggagaatgggaacaacaaggtgatttcagtctgaaatgtgatgttcaagagagatctcattgagaagaggatttttgatataatcgtacatcccaagaagttagaaaaaagattaaactgaaaaataatgggatgaaggaaatgtttaaaaaagagaaattaataaaagagaaagcaagcttcgataggctccacaaaggcttgctgtggtggctggtgcctgtaatcccatcactgtgggaggcgaaggcgggcagattgctggagggcgggagttggagaccagcctgcccaacatattgagtcctcatctctataggctggagtacaatggttcaatctcagctcagtgcagcctccacctcccaggttcaagcaattctcctgcctcagcctcccaagtagctgggattataggcacgcgccacgacgcctggcgaatttttgtatttttagtagagacggggtttcaccaggttggctgggctgatctcgaactcctgacctcaagtgatctgcccacctcggcctcccaaagtgctaggattacaggcgtgagccaccacgcccagcctaaaagatattttttaagaagagagtctcaaccaactaacattagctctttgaaaatactaatacattcgataaactctggaaagattgatcaaaaagaaaagagcccagcttggtgatgcacacctacagtcctagctacttgggaggatgagacgggaggtttgcttgagctcaaggctgcagtgagctataatcgggccactgtgctccagtctgagcaacggagcaaagaaaatcaaaataaactgatatcagtggcatcactaaccaatatgtaggggcatcactgcaaataccacagacattaaaaagatcataagggcatattctgaacaactctaggccaataaatgtgaaaattccaccaatttttttttttaagacagtcttgctctttcacccagtctggagtgcagtggcaccatctcagcccactgcaacctccgcttcccaggttcaagcaattctcctgcctcagcctcctaaatagctgggactacaggcgcctaccaccacacctggctaagttttgtatttttagtagagatggagtt

SEQ ID NO: 3853 - DNA, 4001 bp, Homo sapiens
tacttttcatttcagaaccaccaggatatatttatgatgctttttgactaacactcaccaagcattctggctgacacaaactgcagaaactggcatactctagggaaggtcccttgtgaggtctttaagtagcttagatgagtaaaacactcagactacttctataatgaagtagtctcagccgctcataaactccttcattcccagcaatcaagaagcagctgttaaaatcctggaatcttcctagtagcagatctgaaatacctccaggctgacccaggaagcttcacaactgctttcctctccttcccctcccctgcctcaggagtgccagcctggcaggaataaagatgaccaaggaaggaaaaaagagggtagcggatctggtgaaagcagagacgcagactcccttcatttccactacagagaaataccagccctctgtgccaactaaccaggtttctcctttcctctcccacccccacccctccaaacacgcattaacttctgcagtctggtgtgtctggcatttccagagcgagcgatctcagcaatcttgagccctttcctcaaagattctgaaccaggaacttcctttccgcgccagccagagtttgcggtccaacccacgttaagactcagcttccatttaccttgtaacctgtacggacgacgctgcttctggggtcaagttcaagatgaaagttccctcctcacctcccaagttaactccagcagggaacaacgccactgagaacggtcccaacactggaggcacgcggatctggagctggcaggagggggctgggagaaggccgttgccgagcctggcgtcctccgccccttggccgcagcgccgcgtttctacctggccaacgccacatttcctcccggagctttacacaataagtccagtaagttttgagaacaccggtccagggacctttctgtctgcaaacacaccacacaatgcctagagcttccttcccagccaggcgttccggaaagccgccgcgccaaagccgggagccccgcacacccacagcgctgcgcgcccgcaccccaaagtcctccaggaagccagtgccctgatatcgtcccccgaaaatgaccactctgcatccaagaacaagggggctcacaatcttgacaattaccgctcttctcagcgccccacccctaaagaaaaacccccaacgtctaatcctaactcacccccacccccaataaaggagtgtggatatgctaatcgcagtgttcttggaagcaaagcaatagactttcagcccagactggggcaataccatgcctccggcttaagttctctcggcaacttcgcgacccgcgcaccccaacactccggggggcgcccaggaccccgcggtgccaggcgcgcctccccccgcctcccccgcgccaggtaccaggcgtagcccaggcccttgccaagcccgagggctacagagaaggcgggaaagggggcgagcgggcgcgccgggcgggggtggtcccagaactcgagcgtgccccaagcgttcccggttcccaccacaccggttccaggggaggccggctcggtccggcgcgggggaaccgcgcaaggaaggtgcggactccccaaagccgccgagagaccaaggcccggggcgcccaacatgtctgtgcctattcccggaaagctcccgggtgtgcccggcggaggagggggcgctccagaaactttcccacacgcctttcccttctcccatcaccctctccaccccgggtccctctcgacctctccgcacactggcagctggccatgcccggggcgctcgcaggcccgcggcggagtccgggctgcgggagttacctgccgggaaagtttccagctcctcagcgcggttccccacacccagggccgggcctcggggcgaggccagctcggcgctccgcggctgcctctcctccggctcccgaggcggccgccgctccagcagctgccacagcaaagcctccgctccggcccgtccccccgccttgctcggcccacaccggggcctcattggcagcgcgaatccccgcccttgcgcgtgttcccgaaggcaccttcctctcgcgcgcccgccccggccgcgcctcccgcgcccctccccgccccgggctgcggcggatccagggaccggctggagcgcggagcgcgaactttccgcggggcttgggcgcgaggtccccttgtcccgcctctcggcgccaggtccgggcctgaagcaccctaccatccctctgggcaccgggtcccccggggctgcgcctaggcccctctgggaccaaaatgagatgggccatagtcttttttacagcctcttcaaaatcaataaagcgacccggccttccctcctcgctgcttttttaccacagccgaggaggacatatgggagcaattaaccgagctggagtttccgtggacgctttggggtggcttgtgcggctttcttggattttctctgcctcacttaactacacacaaacacaaacacactttctggggccagaatcagctaaatgagctggaaggtctaagaaggcatctcaccggctgcgtctttttatttcccaaaaggaatgggggacgttctggggccggtgatttcccgggcgtccctggggccgcgggtctggagcctcctgcgaccgctccgggctggcccgtgctgtctgcgctacattcacagagggccagcgtcgtgcttctgtcggaaggaggtgggagggacggaggggagagaacacacaaagatgctattattttgtcggttggtggcagtaaattaaactcctgagttcccaaaatgttttgttattctccagcagagcaaaaaccaggatagggactagggattcgggtgtcctgggttctccaagatcctcccaggaatcccaggcagccaaattggcctaagggactctgctcacttaatacccgaagctctctaagacagccttcgttgatctagttgacgaaggaaggatcaactagaactgccgctgccttgtgtggccagcgggaattgtgcacgggtcaccccattggtgtgtctggagcagagaatagagaagttgctgtaaaccgatttattggtaacccctaaccttgctgtggcaaacccgccttaaaatacgattgtgttttaaacaagtttcctcataaaaacttcaacctcacgcagagcttccctatataaagacaccagcaggaggggtgtccatatttaaagttcttatgaaaagggacaggaagcaaaatgccacacaatctcttttcataaattaaaaagactgaaatggactggatttttcacccatagtttcaaaggcctgattactgctgtgttgatatttgagcagtaaacacatcagcggccttgaagtattcccgaaacaaggcaggatagaatattgaaaataaaaatacaaacttaaaccagaaaactattgacttctttctccatctgaaatgtttcattgctgaaaaatatggtaatgttttatttaatttatcttgaaacgaaatctttcaacagacaaaaaagccagacagcaaccttaatgataaaagaatgatgcaaacaaaagacaaaaactccaagcagtctaactaatctgaaatattaaaatataagagaaacaatcctaagaaaatagactggtaagatttcctgctccagacttctttataatgggagaaaggtataatggatgaaatttatcatttgtaccacatttttctggttttggctcttctcagctgtatttccaaatttttgatgaaattgcttagttaaatagggctttgaaggcagtgcaatttttttccctctactctcaaagctccttaagtagcaagtagaaaatcacataaatatgttcattactgacatcatctttaaattatttttagttgaaaaagttttgtctttatagtttcagaagtcacagtcactaaagaagtaacttcatca

SEQ ID NO: 3854 - DNA, 4001 bp, Homo sapiens
ggccagatacataaacactcatctacataccagtcacaaaatataagaaaatataatggttaaatcccaaaaagagtattttaatgaagcatgaacagtttatgttaaattttatctcaaagataatgcaattatattcaagaaaattttgaaaaggaaaaatgaagagggacttgtcctatgaattactagaaaacgtaatatcaaagcagattggtatttttaaaggaagagacaaaaagatcaaagcaacagatgagtctaaagaaaagatgcatgtacacttgagaatttactatattaaggaggtatttctagtcagttgggagagaaatgatttcaacaaatgatttcaggaaaaaatggctgcctagtcataaaaacaaagaaaaaaattaaatccttatcttagcatacaaaaatcattttcagatgttttaatgagtaaatcataaaaagagaattaacaggcaatataggagaagattttaagaatttttgagtggggactaccttcttacctgagataaaaagcctgggcattttaaaccaaagcattgataattcttgaaaatatttgccatatatttcacaaaggattaatgaaatctgtagtctaatgagaaacagataattttgaagaatactgggcaatatatacggacaggacatagtaagtgacagttaactataatttggtacatctacacaatgcagtaccacgccaacattacaataaaatagagctacatatggcaagactttcaccatatatatatatttaatctgaaacagattatcgaacagtatgcataatctcattttcataagaaagcaaaataacatggttatgcacatacaggaaagatgtggaaggcttggattacaactggggagaggactgagaaggatttcacttcctgctttgcacatagttgtattatttgaggatccctcctctctcaaatgaggacacaataatttttaacagaatgcactgcttgcttctctgctacctctcgtttgggtgtgtattccaaccgcggtaagaaggcaggtcattttcttttccttcaatttcacgtcgcttcttcacttcctttactaccatctctcccttattataacttgtcaaaagcatctcctgtgaggtgagataaacaccactttacatagcaaggctgctttacttttgctcgttatagcataacaataaaggcacagctcttctttgattatcctccccctttctacttctagaaaagcacagcttttttgcctgtaactcgttgctagtcagtttacaccggcgtgaggactctacctaacgcctgggttcccactgtgggcggggttggcttctgttcttcctgccttggccacccactccctccgtgaccctctgggaagttacccaacttctcattgaccaggctatgatgacaccccacaggaaggcagaggggaattgtgcaaccaccttgggaaaacaacagaaagaaccaattaagttttcgaaagagtaaccacgatactacttgattctaggaggcagtctctctcccgaagggaagtcgggaatgttcctggagggtccactgctcacctcgacaccgcaggcccttccacccccatttcccgggcaaagcagccgggacgagtccctcccttgaagccgttggggcagaggccgacgatgctatgctgacatcgcgggcccggaaaccaacccacaaggagtccgctccgggggaaggactcgcgtggtttctcccgcacaaaatccctccccaaactgcaaattggttgtctccgctgctcctcggcttctctccctgcggcgcccctactgtcagcgcgtccctctcgctcacgcatacaaattctccgacgtcgtgcttgacggattcggacacaccaattcacaaagtttcttactcacacagttcacgctttcagctgcgttccctctcccctcaggtcgccggcgcctggccgagtgactccaaccggaagttgcattttgttccagttcagagggcagtgcctgcgcgcggagccattaactcttcacctccacccaacaaggccagggcccttccgccctgccccacccagcccagggctcttctgccccgcccctgcccgccccgcctagcgccctcccccagccctgcccagccaagtccccgcctcttagaaaaaaaaagcgtcagcagcggaagagaatcctatgtcaagtgtaaaggtcacttgtgagtctttgctggatttttttgccaaacgataaataaccggtaaataaataaccagtaaataaataacatcaccctatatatgagttagagtacacaagaatcacctgagaaacaaaatgtagtttcaccaaccgactcctacagctttcatttcagagcaactggagtgaagcccaggaacctgcattttcaacagatcctcgtaaatttatgtaattaaacgtggttaaagtccacactctgagaaacactacatatacacatacccatttggtttctccccaactggtagtatttttcactaaatgtatttgttaaagaggaatggctggaaatggaggtggaactttattagaaaatttcccatgaattaagactttcccattattccaattcctagccatgcatgaatattatctaagattcatatcttagataccgcaagaaagatatcttttccctttagggcaagaggatgaggtctggctgccccaatttctccctgtatttctgaatcatggatgtttacacatctttccttaggccagtaagtccaaggatttaaaaacctgccaagttgcagtgcattctgtctagttatcttgaatgttgctgtatacttttaaaagtcaaagcctaaatatatttgaaacaatgtttttaacaaacagaaacttcttatatataacgttttgaccagttgaatagttttcttgtaataagtaattgagttaaacatcacaatacagtactgctttaaaaaaattatttaaactttttttgagggcagttttagattcacagcaaaatggaaaggaatgtccagagattttccatatactttctgccccgacacaagcatagcccttccccattatcaacatccctcaccccagtgtgatgaaaaaaagctgttataaatatctgtgtgcaggtttttttgtgcggacataagttttcatctcctttggataaataccaagtagtatgattgctggatcataaggtaagagaatgtttagttttgtaagcaattgccaaattgtcttccaaagtggctaccattttgcattcccaccaggaatgaataagagttcctgttgctccaaatccttgccagcatttggtgttgtaagtgttctggattttggccattctaatagatgtgtgtcatattttattgttgttttaatttgcatttccctgatgacatatgacgtggaggatcttttcatatggctatttatttaccatctggttaacttctttggggaggtaaaggcctttggcccattttttaatcaggttgttttccaaatgttgagttttaagtgttctttgtatttttgataagtcctttatcagatatgtcttttgcaaaaaattttctccttgtctgtggcttgtctttttactctcttgacaatatctattgcaaagcagaaattcttaattttgatgaagtccagtttattcagcactgcttgagcaaattaaataagctgatttgaagatttctgattgaaatagtggaatttagtaatatactcagagtctaaagctgaatgcataggcattttgaaatatggaggtgctaaaaactttgaataaggaaatagctagatatacacatttcttaaatgcgtatttttctctttccacttccatgatgttgtagtcttgaagagaagtggctgcataattcccctgtatgtgaaatatgcataaatgctggtagaatta

SEQ ID NO: 3855 - DNA, 4001 bp, Homo sapiens
attggaatacatttaatgataaataaagaacttctatgtctactgaggccttaatacattaaagacatattaatagaatattcaggcaggaagtttctatgctataaggatgatcactttcctcaaattagtgcataagtttcatgaaattctaatcagaactttttcaggggagctttatttatttttaatcatctagttagttatctctatgactcaatgtcataagtgtttaaaagaagtaactagacattgctctaggtccccagttggctgctgggcagaacctgaaggcaggttagactgggtatacaaccccacatcttcttccggctctgaagctaactgcttggaggcacactagtgtgcccacctgtatgcatgtggaagtgtatcctggagggagtgaagagatgggagtgggtgagtgagaagaaagacctagcttctaaaaatgacttggttgctgcgtgaacatggccaagtcatcttcctttttctatcataagaatctccatcttttgggatatgacatctctcaaatattattttaacattataagaatgcagggcagtagtaacagaaagccctggataaagaggtgatatgaatttatgtttaagccctggttctgccacttacaagcttgaatatgacagctattataataatgtaacaatagtgataataattcttgacttttaatctttttgagctgtcatttttcctatgattattcttaagaaaataacttaatgaaatattacatggtatttaatgttcatttttggttgtgaaaatatgagggctaattgataatagaataagactagtttactataactgtgtaagtttaaatggtccaaggagatgcagcattgtctataagattaacactttagtgtaatgaaatattcactatcatgtgctttttatgagatgagaaaaatactaaacttgagttaatcattattattattttttttttgagacggagttttgctcttgttgcctaggcaatagtgctgtcttggctcattgcaacctctgcctcctgggttcaagtgattctcctgcctcagcctcctaagtagctgggattacagacatgtaccaccatgcccggctaatttttgtatttttagtagagacggggtttcatcatgttggtcaggctggtctccaactactgatctcaggtgatctgccggcctcagcctcccaaagtgctgggattacaggagtgagccaccatgcccagccttgagttaatgtttgtatagacacactggatcaggccaggatcgatttttaaaaatataaccaaaaaagtatgaatacatttttactttaatttacttttcagcctagtaagttatgaacaacttaagccaaatatctttcagcataatgtcaacattatgttataaaaatcattcattggagaaggctctcattccagatataaacttaaaaaaatcattgaggtagagacataaattctatcttaaaagttagaaagaaaattaaaaaaaatttaaaattttccttggtcttggctagggaccccattatttacttatttatttattaaatagagatggggtctcactatgttgcccaggctggcctcaaactcctgggctcaagtgatcctcttaccttggcctcccaaagtgctaggattataggcatgacccaccacgtccagccattttttaaaggccaaatttctaactatgacgttaactacaaaggcattattgaatcatgtcataaattactcacatagcaagagtaagagggtaacacatctgcaacacttcagtttaagacatccaggcccctttcctaggttaagaatcagtaggaactattgaaattagattacctcttctccaggttacaagtcttcctttgtagactattcctctgtaaagatgaagacagttacacagttgtaaagtgttttccacaggctctaacaatgctgctcaaactgtccagagctctcccttatgttgaagtgggaacttccactgagaaatcccccaacttgaagacttccttatttgtagctagcaacagccaatcatggcacgatactgaaatgaagcaaagactatcagaaaatattctgtaaaccactcgtgactgtagctctgacttccttttgaagcaagatactttatgtgaatagttaaggcattttaacaacaacaacaacaacaaaaaccccaggaattgtaaacacaaaaatacttttggattaagcattttatgtaagaaaatttaaaagttcagtttatttgataagtggctttttaacctttaagaagtcgctttttgacctaagaagcatgtttataaacaggaggtaaaaaccaaatttgattatagttgtctttatggcctacagaagtcacttggaagaagctttgtagtaataaggtttaagctcaattgcagagcctgagcttaggtactcagaagagaggtgaagcaaacaaggctcttaagacagcttttctgccttgagaacttaaggttcactgttcgtgggataaaagtgtgttccagcaaactcgggaaatgctttacaaatacatgtatttctcttaggttgcttagagcaaaacatcacattttacatgcaaacggaagacagcatgtgcaccacagacatttttctttgatataaaattttagagctggaaatgtccttagacaacatctgttccatttcctttttattacagatgagggaaacaggagaaggtaaatgctcaatgtcacaagtaaagttagaagcagcgcttagattaaaatgtgagtcttttgaatccaagtgcatttcttttttttactgcactacactcttggcatataaagttactgagctggataaaaactgaattaagcagtctcctttttcagctcctgcattttacagatgagaagtctgaggctttacctaaacttcaacagttattaaaaggtctagaatttagaacttctgattcttagtctagtttgttttccactttgaaacactgccctctcttaaattatatgttaaataaatctgagatattgctacttatgatgaaattattctataaaaaataatttcaaaagtatctaaaatgctgaataaacttatgattaaaggcttctacgtactcatctaacatacaatgaagcattacatttcttttggaactatgggttttataactatcttactgatgaaatgctaaatattaaatgctattgtgtgcaatggaaaaataaaaccaacctatcccgtgctgtaaatatagcaaaacaaaccaacaaaaaagtgagatagccactagtgaaaggaaaacttacttcttaagaatttacagttttgaatgagcagagttttaaaaacacagcttttaaaaaaagcagcgctcctgtctagactgggaaatgcccctttctttggtctcttcatcctgtgccccctccctcctctatttactttggcatttgagcttggctgacacccaggatcctgcagaactggctactccagggtatgctggcctcaatctggtggggcattgtttgagagagggtcctacagccaaaacagagaagctacagttagagaagctttttgaagaaattctgagtacatgaaatttaaaacctatgccactaaccagttctagactaggcaaaatatgtgaggcagatggaagttttaatttttgtcgtctctagtagttccttttcctatttccctactccccacctttttccttctcttggagtcgtaaatcaagtgactagggctgacaaaaatgcagaaattccttcagaggaggaagcaaactggtactaagccaggattggcaagggttagggtataatgaccagggcaggagtgggatgagcagctccaagcccaagttagagggtgggaggcaaaactcaggttcctattcagggagagaagaatggctga

SEQ ID NO: 3856 - DNA, 4001 bp, Homo sapiens
cctccgtgtctggaaccatctcacccactaactagatggtgaatcggctgaaggtagccggccctcaccgcctgctctcgggcctctttccagagcagcgagcagagtatcctacatatgtgcacggaactcagtgaatgaatgagcgtttacgggacaaactgtccttatgtttctcacttcacaaatcttcaggccttgtcctcactctctactaaatgaaacatttatagaccaggaaccctgctaaatgcaccataaataaagatacactgccctcaaagaaagggagggacgacaaattcctgcctcttcgcctcttcccagggcaccacccacctccatttcctgagagcctgggcactaagcaccagggtgcgtcacggggcccaacaaggccactgtggcccctgcctcctgcacaactccctcccccaaagctcaaaacagctcctggagcaggcccacgtgctgcccaagttgcccaagttgagtccttgttgccactcaacaggaccactggttaccaaagcaccgcctccgtccagaatcctaactacactctgccccttccatggggaaccctcagctgcctacagctccctccatgcagcaacctgccaactcccacccactcacccggtctcagtgtaagtctgcactcctctaacaaacccaaccgccagctttctcagaagctaaagtccagcaaaatccagttcctttgcacttggttctgcggtttccaggcgtgttagtacatctcctaccagactcaacctcaaaaaggccttccctagactggtctgagagcagaaagagccgccaaccactaacccggggacctaacctaggtcctttgacctctctctggcctctgtcttctcctcagtagaacaggaacaagacaggagatctaagctctcttttattccgattccaaaattggaaagaaaaatataggccccctagatacaaatgaaaaagtctaattgttccttcactgacctttaaacaggtgtcctagctactgcaagttggcgtcaatttcaaagagctttggaacaaaacttttagaaaaaaaatgctttgttttatcatcaactttacgagcctgggttttttttcctatcattccttgtaagacactgaaagagaggaaaaaactgatctgttcaatttctctactgagatcacgagcttgggattcgcccaccctcagtttcccctccgggcgtggagacagttcccgctcaccgcggcctccaagagctgcgccccgcgcgcatcgccgcgcgcccccagccacgacaccacctggagcctccggcgcctccagatggccgagtccgggctggctcggcgcaccccgctgtcacctggccccacacagcagcctcgctgctccagggcggccccgagccctccggccccgctccacccggcgtttctccttcgattcccaagtcgagtccggcctccagctcaccgggccaggcggcgaagacacctgcctcgcccggaaaacgcacgcgcccgggagccccctctaccaccacctcgacgggagcccgcgggagaaacgcagaaaaaaggaaaacaagcccgcggcagggccgtccgggccccgcgtctcccaagaaatcgcctctggcgacgcagcccgggactgggggccgcgggcccggcggggtgcgaggccccgggcccggccgccgcgcccgccccggcgagccccttaccggtgaggcggccgcccccctcgccgtgcccgcggcgccgctgcaggatgaagtagcagctgctcttctgggtcacccagagcttcagcgcgttcttcagcagcacctcctcgggcttgagccacatcgcggcggtccggccgcgcccgccggccccagctcacatctccccggccgccggtcgctgtgagccgagcccgctcgagaggcgacggcggcgcgcggggaccacagcccggccggtgcccagcgctctgagagcccgcggagcgcagcaggcgcagctagccccgcgcacccagcgcggccctcacgtggccccgccccgcacccgcccctggccccgccccgcacccgcccctggcccctctccagccgccggccccgcccccgaccgcccctaccccgcggctcccgcggcgcctcccgggtttccgcgtccaaggcgctccggcgcgcagttccggagtggagggaggaagtccaatcctgcgccaggctccctccctcccgcctctccgcgctctcagggggaactcgggagagctgccgtccctgacctcgacctgagacgtggaggagggacagggaaaaagccttcttctcgcagctgcaggttgccccaccgagggcatttttccgcaccgagggggcggggggcagaatgcacgccagaaaacctaagtgcgctgggtttaaaatagcaacaacaacaaaaattacaaataaccaaaaaacagcataagaattaaaaacagttatattccaatgtttttaatacttggttcacattttggatgctctccccagggatccgacggcgctgcggaggcggcagcgatgtttgggatcctaaagaaagcatcagaccagactcaggtctggacgtccctcaagtggcccggaggtaccgatattagtgtcaccgccgtcagtgccctgcccagaaataaaacctttgttctgagagaaattgaaaagctggaaaatatggagtaggcgatgtgaagagaaactacagggaatgtagaggtcgggttttaaatgcgtatttcctcaaggatgttgtggaagcagagacaaggtggctggcctggagcaggctggaggacctccaaggatctccacagggaggcagttacatttaacaccctacctagcaaaagaagaaaagaacaaccccatgaaaacatccctggggttttaacaaaggaatccctgacaaaacgtgactgataactaggacagaactgaaaagtggaagtaaagtcaatcccgaccccccaggacgcctgggaactcagggaagcgcctccagaagggaacagctcagaaaccctgaccagacctggcggacaagaaccgtgtgggcgggggacaggaacgcccacccagaggccgggagagcatggtccaggactggcagccactaacagcctctgaatgaaactgaggaaggaagtcaatggtaatcgggaccattagggtgcaccagggcatatagaacagtcggggacggtaagaaaacattccttccagagacattcactggcacctcccgcgcagacacactgccaggcccgggaatcgcagagatgaactgggagacttgtctgccctggagaactcacaggtaggaaaatgaggcagaaaagagccgtaggcttcctaacaggagcccacgcaggggggcagtgagcagagagcaatgcgcagaccgcgtggtcagttcttggggggagggaattgagaaagtcccacagaacagctgttgctagatcagtacttgaatatgagtttgacaggaggtcaagtaggggaggtcatgtctggtaaatggatgagcacagatgaccttgtggtttagagcagcctctggtggctgacagccccaaatggaatcctgcaactgctgctaattagctgtgtgatcttgaccttgggcaagataccaatctcaatgagcctcagtttactcaactataaaattaggataatcgtagtgcctcccttgtaggaactatcaagagcatactgtagtaagtacttagaacacaaagtaagtactcagtgaacatcagccattattattaaatgttcaaaaacttctgaaagggttcacacacgctcacccatgttttaaacattattcagctctgatctgccaaatattaaatatgaaagaagcacggagagggatatgaaagtcattgggaaggcatgggagggtactatgaggtactgtgtttctattatctc

SEQ ID NO: 3857 - DNA, 4001 bp, Homo sapiens
acacacacacacatacacacaccttactccaccatgaagcccattaactggggcttttttaggccattctttcttcctattaactgggggtgattaaaatagcttttgcataatcctcccccttctcgcagctcagtctgtccccctgtccccctcgtttccttttagaagtcattggccgatcgttttaaaagtcgctcgagccagtccacaaaggctttaattaatcattctcacctaaataagtgtcaagaaaatgtgttaattggaaggacttgccttgcacattggtgtccgctttgccgcaaggaacccatttgcctccttgaaacctccagtgattgggatccgccaaaatcacatccacaaaaatattgtaatgagccgtgggatcgagaccagaaatgttaaaacttaaaaaaggaaacatgcgcctatttaaattaaggggtggggggagaaaacaaggaaaaaagaaacataaatgttaaagattaaatgcaagaagcggggcgccagttagcaaagcaaaacttgtacttgcagcaaataggcgaatatttgctggattagaaaaagggtggtgggagaagaaaagaagtgcaacccaaatcagggagagcggcgggtgagctggagtgggaaggtggcagttatcactgcccaggtggagagcgaggttggcgacctgcgtctccacctgtccgtgcatgccagtgttgatgcgtccctcccatcgcccagccgctggccagggctcttcctttttcttgccttcctctggccactgactggctctcccactatgttcctagaacggggtcccccccaccaacatcaccctggcggttatcccttccactttccccctttccaaaactagccaactctagggcgccttccactccgctcccgaccccaaatcgtcgctgccgcggcagtcacagcctaggtgcacttgtccccggctgcgcctagagcagcggcagccaaaaatgtagtattaccttccctgtttggtgatgatcatctccgtttggtgccggtgaaatttcagccaaaggggcctgttgcacaggtacacctgtgctttgccgggcaccagccccggctgggtggaggagaactggtagaacggagctccttggtaggagtggccgtactgctgtgggtaggggtagccggccgtggggtatccctgcggcgaggagttggacaggaggctgttgtaggctccgttggtgatgaccgggtggtgggccatgtagcggctagggctgccgatggagaaggcggggtgcgccggtccgtgctggccggggtacgggaacatggcactgggagcagtggccgcagactgtggctggctggactgagagaggaggtagcgatctgcagcagagccatcgaaactgtgacgaagctcagagaccccgtccaagacaggagagagtttacttctctggacgtcccctggtgagtccttggagtcaggaaaattgtctgtatctgactgattcgtcatccccctggtaatttttttcaaaggtgaacttctctccaggttgtcagtggtcgagataatgggatgatcgtgcaagacaagctcggatccgcctgaatgtgggtagctgctgctcacattgagaaatttcttggagagcatgatagaaggagaaaggcagtgctccagctgcatagctctagaacctgaacactcgccctcccgtccctggtttttaaagtcctatttatcataaactagaaatccacagaccccctcactagacagaaagcacttcaaccagcaaatgcttctcaaaggtttgatttacttttttttttccctgggagaagagattggccaattgacactatgcagcaatcagaaaaggctcacttttgatcttgctgcttgtgcagccgatgaaacggctcctgccattggttagctgctgacagtaatttaattagatagacattaattaggataatcacctggctcctggtagcgacgatcatggcaaattgaaggggatgattttattgttggcttggggggtggggaatgtgtgttggtttacgtgagcactgttgtgtcacctttaagctctgtgaccactgctttaggaagattcaaagatgtggaatttactaaacatttcctaccttcccccccttcccccctttagagcggaggggcggaggagggaattcgacgatgctaggagacttttcggatctgaatgagccaaatattcagttgaatgtaacgatttcaagtgcaaagtatacaaagcgcgagccggtggcctcttctcgccctgtaaaagttccagagtctgtcttttccagctaatacaaaagcacacaacacctgagctggtgctttgtgagcagatcctacatgtcctcggcgcccccacccccaccttttaaactgcaaacataaataaataaatccctgctgctgagagccacagcgacaagcagaaggggggaggagagggggcgaaaagcagcaactcacccaccaatccacccacctcaggaaggttcggtttcttggttgagtacagaaacagtgacaatctatgatctcctttttaagttttgaaataatcataagctgtcgggctgaaatgccttaatgtatttgcagtgatgtttaccggctctttattaaatattttatcagcgcacttggttgcagattatctgaagaacatctaactgggggcaggcgccatgcatccttctcgtccctctgcatttccttctctctgaggtactggcttggcgacaggttcaaaagcctcgccaggaaaagagagggccgagtccccgtgcaaatgggctcgtcagaagcgctgatctggggagacagagtggaagtggtgtcaacacagtaatcgctactgaaaacgtgtgtgtgtgtgtacgtgtgtgtgtttaatgtttatataatctggaggggagaaaaagcatccatgccaataatttttaaaaggaaaaagaatctaaagaggaatagaaaaaaaccaatttaaaaagatgttggcacaaataaatagcacgaggcccgaagagaccccgaggtgtagggaggaagtctcccagcaccggctctacagaggagcccagccctcggcctgagccagagggccaagagcggcagaggctttttatctgcccaaagctgcctcccgcggcccggcgctcgctgacctgccctcccgcggctttcctcccggacgccgagccgcgcgggaatgagcaggaggagcgccgcccagagctccgctcggccccgagagctggccggcccgagggcgggctccgcccgggagactgaaggagcaaggggtgagctgcgtctggcgcagaccccaggggcacacgctcttcccgggctggaggagcggcctgggcacctcagccgggggagcctctggcttcgagcgagcgcgtctgtcctacccgggccggggcagctcccggagtgagagcagcgcctggggacattgggtgggtcctgagcatgggcggagacgggttatccagactcgccgcttcgccactgtggtgcattttcagagctgcgcctcggtgggccgagcggtcagcgctgagccgagactgcgcccctccaggcgggctgagcgccttggctgcagagggcaccagctgcggcctccatcaacgcgccgcgggcaaggccctgcgctggcggcctgggcagggcaggttgttgaccagatgtcccagactaaagccgagacaattttctgggataaaaagagagccagacccatttttcctttcgaaagcaaacctcagctcctggccaggaagcttcataaacaagcagtcttagctgttgaatcgttggggtgcgggggaggggagtaggggatgccatttgacacttgtttttctgcccttgaccttctactgccatttgccctcatgagaggcttttgacctcttgactacttttg

SEQ ID NO: 3858 - DNA, 4001 bp, Homo sapiens
ttaaaagacaaaaatacactaacgtacttaacccagctcctggcctatctttagcactcaactgttagctgttattgcaaagatgattaatgttcattagactttccattttgtactctggaagagaagtaaggctcatgttagcttctattttacgtgtaataaaactgaggttgagaaaagctagattgcagtctggcaagtggtgcgcgccttccctgtactgctgcctgctaactcccccagcttggttgcttctagaatgacggtccctcagaccgttgttctcctggaggacagacctctcttgcaacagaagcctagaaagcaccaaggcaggcacaatgggctgaagctgcatggggatctaggactctccttggtataatttcctttcccaggccccagacttggaacctgctacatttttccctgtgactctaagaaccccagagtctttccctcctcttcaaggaggtgcattcccatgaagccatttccagccacactcccatgagaaacccagggtcagcgcagccccaagggtcagccttggctcctctccctctgagacagcaggagaaattggctccgacgtcagttctgcacagggcagggggcccaagtccaatgtcccccctcattccaatccctttctccaaggccctgggcattaagatccgcctctcaagtcccagggcttgtgacttaccttgagagggtgcaagtagcggagtccacgcaggaagggcggccaggcagggccaggcaactcgtggccgagtgtgcgggtgaggtgggctatgtagctggcggcgagcaccagcacgtccaacttggagagcttggtgtcgggcggcacggcaggcagagcagcctgcaaggccaagaaggcctggcgcagcgtcctgacccggctccgctcccgcgcggcattctcaggactggcctcgctctgcacagagggccccagtgagtgtgtgtgacctggactcccaactgccctgacttctgagagcgtttgagcacaaggtctcccaccagagtagaagggtgtctagcagtaggcaccagagggcctctgcccacctacgtcatctgcagccctgccgcgtttcacagctgaggaagttgggggaaggcctggccaggggtcagatggctgcaggatggcagagcttggctcagaacccagagtcctgtgttctctctactactccactcatgcctcctcagagcctttgtcctgtcccatgcccaatctgaatcctgcttatcagggtgtgctggggccagggggagttcagagctacaccctgtttgggagggcggacccttgacctagccaggtcctgagacgacgaggctgctgtgggaaagaggaaagacacagaaccaggggtcaaagcacacaggctgaagtcccagtcctaccactggctgctgctcagtgaccttgggaaattcacatccctcttcccggcctcagtttcctcaagagaagtgagttagtgcagctctctgagctgcactctggttaagaccagctctgatctatcccaactacccaaagcatgatgccttggagtctaaggggccagtgtcccctctcttgggcaggaatggtaatactgagtgaggctgtaccatcagaggtgacatctccccaccttccaaccccttcctcccctggacccctctgcaggtgcaggatttccttaccctgccaagagccaggcccccagccctggtccctcgagggccaggggtagctctgctccatctctggttgctccagcttctttcttcccacgggtcctgccttgtcctgctgaggcggctcctcttcctgtcagcgcctggcagcaaccgtgctttggcctgagtctggctatgccccacccctggcatggctggtggccctctggccttcctctgtgacatgccaccccactggggctgcagcccacagagcagaaacacagtgcctgaggaggccttggactcaagctagctggctgtggctggtcatccagccagcaatatctacatccgaggaagctggcgccaactcagtcctgtttgctccctgctctgggaaaaccgcccaccaggcacagcccccgcgaaaagcctccgcctgcctcctaacccagctgagaggtgggggtgctggatgctgggagtggccaagccttgggaggaggcccatgctgaagaaggcaggaggatagtggggaagggagctcctttccggccatgcctaacctcaacagtggtcctatggtggacctgtgacttccgctttggagctcacgtccatggagaggacttgaacctccttcgtctgtgccagaaggctgcctgcatacatccctgaaaggcctttcctccccttgccaatgaacgtgaccttccagccacagagcgcgatttgccatgccccaaatatgcctccgatttccactctgtgtttaaatttacctttccacgccccagaataccttcctccagctctgccaggaggtactgcccatccttcaggtctccgcctttcattcgtgaagacttcaaatcccgcaggcccagagcccatgggtccctgtttgattggtacaatcacagcctggctactttcccagaagttcgatattcatagattactgtgtgccaggcactgtgctaagcatcttatttatttctcagagcaaccttttaagaaaaaaagagactcagtttagatgtgtgggaactggtatactgggaggtgaaataacttgcccaatgtcaaacatccgttaagtggtggggtgggatgaaaatccaagccgtcagttggactttgaaggctacccctcacctgatgctagcctgcctcccatgggttactcacgcgtctgtccccatgctagacatgaggtctctgaaggcaaggaccatggtgttcctgagttgcatcacatcctccaagagctagttaggagaaggcgggctgaaggaatcgcgaatctgccacagcagcccctgctgtcttccagggacctctgcctgtagcagaatccagcctgatgtcccttgtcccccattctcgaacctcaggggagatcaaataagtaaggagaaagtaaaaaggtggatgtacagtgagaaagatatgcagcccaccacagagaaagggaaaaagaggccgggcgcggtggctcacgcctgtaatcccagcactttgggaggcagaggcaggtagatcatgaggtcaagagacggagaccatcctggccaacttggtgaaaccccgtctctactaaaaatacaaaaatttagctgggtgtggtgccacgtgcctgtagtcccagctacgcgggaggctgaggcaggagaattgcttgaacccgggaggcagaggttgcagtgagccgagattgcctgggctccagcctgggcgacagagcgagactccatctcaaaaaaaaaaaaaaaaaaaaaaaaaaaaggaaaggaaaggaaggaaggaagggccgggtgcagtggctcacacctgtaatcccagcactttgggaggctgagatgggcagatcacgaggtcaggagactgagaccatcctggctaagatgggtgaaaccccatctctactaaaaatacaaaaaaattagccgggcgtggtggtgggtgcctgtggtcccagctactcagggggctgaggcaggacaatggcgtgaacctgggaggtggagcttgtagtgagccaagatcgtgccactgcactccagcctgggcgacagagcaagacacggtcttgaaaaaagaaggaaggaaggaaggaaggaaggaagcaaagaaagaaagaaagaaaggtaggtaggttagtagaaacaacctgcatgtccatcagtagggaagtcgttaaataaattttggcatctccatactatgaaataatgtacagtaataaaaataatgacagccctttgttaaatgacatgaaaaactcttcaaaacacac

SEQ ID NO: 3859 - DNA, 4001 bp, Homo sapiens
gaagtggcaggcaatgggaatctgggcgggaagcaaagaactactacgattcacatcgcgcccaagcagcagcacgcgggaacctggcacacagtaggtaggcgttcacccaacatctgtcatcggacccagcacctgggcagggagcctaggggtggagtggcggcttgggggacacaaaggcctcgccagcccccagctgcgcccctcgcaacgcggggggcgggagtttagagccagagagagggggcgaaggaatccgccctcatttgcacgtcgtctggggcccggtcaatttgcttaatcaccgctctaaatgccagcgggcagcacacaatacgcgcccattaacaggtttaaagtgtcgcagcgctcgctttaaatgagaaaagcaggcgacaaaagggggaaaaagccaagttcctcaacttgaagaatgccttgggtcgcctcgaaatcatctacgcgagtttaaaattcggagctagctccgcagaaaagctgaggccccggtgcgagggctgggggtgggaacgggggctgtgaataacccgccacgaaaactgggtttcttaggaaccagcctgcagccgcccagtgaacccggagtcggaggacaacgtcgccaacccagctccctaggccccttgccccactgccagagaaagctgaccgatttccaagaaggaaagcgagacccccccaaagcgggcacaaatccaagtttccttcggtgcaggcgaagaattctggaggccaaggaagatcccagaggtggactccaaaacctcaacccgcaagaggggaaaagttaaagtaactttactttcatccaggcactggccagcgcagcctcgcgctcggccgccagagagtagttcaactccgcaaacaagttctgcttgggatcggcgcagaaggccccatcccccactccatggccaagcccgggggcgcatcctgcgggccgcggcctcccaccctccccggcgcgcccgacgggcactcacggtgcgcgctcctccgggagacaggggtccgttggagaggtacgggctgctcaggtccgggatcatcaggaaggggtacccagggtacgggggtcctttaaagaacgcgctgtcctgaggccttctcactgcgaacaagaccaaggcgaggtgaggcccaggcccccgggactgacagcgccgcggcagggggctcgaggcgggagctggggaccccagcgccccccacgcgcgccccacgggggctgccgccaataaaggcggagggcaagggtgcgtccacccaagcaagggggacggtgggccgcccgggctgagcagcggagcgcagcgggaatcgagagtggggggctgtcccagcgggcacataccttcggcgaaatagtcccgcggcttctggaaagtgtcccggacgggctgcgggcgcctctccgcctgcggaggagacacaaaggcaagagcgggtgagcggacgcagggccgggatcccccgggggtggccgcggtgcttccttacctccgagtccgagctgctgctctggttctccgactcgttgaccagggacgacttgacctcgtctaggtcccgctgcgccgaggcgctatcgctgctcggctcctgctcctcgcccccctcgtcctggaaggggatcagctcgtcgttcgccccgaggtcgtcccctccgccggccgccccggcgctggagccgccgcctcccccgctgccgccgccgccgccgccgcccccgccgccgagctggggcatggtggggccgcgggccggggccgccgctctcggagcccctagccgcccgcgccctgcccggcccggcccggcgcccctcccgcccgcttgcgggcccgctgcgctagccgccgcaacaaagtttgacagggcgtggccccgcgggaagcgggcccggcgctgcccggccggggcgcaggcggctcggctcgggcccctccggcagcgccgagcctagggctccccaactcgccaccgccgccgcctgctccgccggggcgtcccagcccctggcccgccggggaggggcgagcggggagggagggaggagggaccgccgggctgggcaggggggccggagggaggagccccggctgcaagctgacacccgcgcgcctcgcggaacccggagagctgcggtgcgcgcgcacacacacacatacacacgcactcacactcacacgttcacactcgcatcttccaggggctgcgtctccctgcaacgtgcaccgcccccaaccccctcctgcgcctcacactgcaccctcggcggccctccccacggcctccctggagtcctggaagtcttgcgcccacccctccgcatcccctaactttctcccaaagaacctccagaactccgcgcaggttcccaccccctcccaccgtatcggcgcgcgggcgggcggcactgccccctgcgggaaagcctcggacgcacatactggccgcggggccctccccctgcctagagtccctccgagtgcgcgagctgatgcacggactaggacactggggacatctatggaaccccggaaaatgcccggcggctttccgcgcctttttcctgtggggttccaacgcgacccccggcccaggttttcaaccttgtacagatatacagatttccctgctgaaatcttgaagatcaccttttcttcattgtttgggactaggtcctaaatcgaaaaatcgcggtcttgggttccaaaagaatttggatttggttcattgagagggaaaattgcctgtccagtgatctccgaagccattcacaaagctgcgtgagtagccagtgaacacgagaaaaatgctcaaccagcctcatacctaagtaatgcctgtggtgcgagcgccacggcccgcgcctggagttccatctactcccgaggcctaggcaggaggatcgctggagcccaggagtttgagaccagcctgggcaacatagcaagaccttgtctccaaaaaaaaaatttttttaataaagaaatgcctgttacaatgacattaagatgtcgtttctctccaacctgtgcgggaaagtttgaggaaaatgaatatcttgtgttatcctccgtggggaactattagagcataaactttgaaaacagcttggaaggcagtatggaactatgtaaaactattttcagcccaactggcagaagagtttctacagaggtgcccgcacatatgggcaaagccacatatgctaggttcaaagcatcagagagcttggtgacatgcattcttcatctttctttacagtgacagtccatgcagctggccagttctatgcagtgtccccgcccctccccccacccatacacacacacacacacacacacacacacacacacacacacacacacacaggcacatggaccaagattgattttggaggaacatctttaaatgaaacactatatatgacactcactattttatttttgtttttaaaaaaattatacacatttatttctgcgtagaaaaaaatctgagaagatgcaaattattatcaatgactatttctgggaaaggataagtgaaaggagatagttttctggtttctatgaactttataacaagcagatatgccttttctaattttttacacaatacatgagtacagtctcataaagcgttttcaaataacagatgtatcttgagcagtatcgagtaacaagtaaaagttcctctttccccctcaggacacaggacccttctaattaaccactttcagttaactgcctctggttaaccactgtcactagtttggtatatatccttccagacactttcctaggcagttatgaacatatgtaaacgtatttacagatattctgatgtacatacatagaatcatactctttgtattattgtgtgttattttatttttataagatttaaaagtcagacgatttttcatgtttatggtccataaatatatgaaaaacctattgtactag

SEQ ID NO: 3860 - DNA, 4001 bp, Homo sapiens
tgagcaaccacaaggagttgaatgccgggcctgagctctgactgtgtaagttctgctctctcactgggtttatcttgggcttttgggcattctccttggtgcgttgtaagtggggtgttttcctccagggccttctgtgggctgctgggaaggtccctcagcggcagttcccacgccccaggcttcaggagtcatcgctgctgctcactcagtgcacctgggaacgttggcctgcccttggcctctggacagcccctgaggacccaaactctgggggcccagatgcccgcccaggctgcccctcagggctctgtgctgggaaaggccatcttcacaccaagaacaggagaaggaccctgtgtttcttcttattgcctggccagtttaatttgctgtgtgtaggaacaagccttttctctgtgattggggtctttgcctcaaccactgggtacttccttgtgtgccagggcccgggtcctgcgcccctctatccctgggtttgcctctccgtgcactgtcagtgtctccatcagttggcaggtgcccttgttgcgggcagagagtttgcgggagctgcaggagttcttgaggcactgagagagtgcagggggaagggcctgcagaagggtaaagaagggaggagggaaggcatgaggggagggagggactcaagggttcttgcctgagcttggggtatggcaggagaccagctgcccccaccccacatctttcacgaatgtctacaggcctgtagtggttctcagggaggccccaggctctgagaggtcagagaattctccagagccagcatctgggccaggactgagttactctctcaccctgtggggctgccccacagacaagctggggtggattgggaagttataggggacatggaggagaggggacctgtgggtgcagatctttgtgtccccggctctgtataggatgaatgggagcagtggctcccagcccaccccaccttacctgtccacacctgcagtgctggcccagacctgggtttccaccttgggagcaactgtcccagcgagggagggtctctggggaggtgccttgtggcttagcccagggagcccagggtcaggatgactgtgccaggactcaaagggattagaggaggagaggagaaacagctgcttggaagtcaggggtcttctggggcaaagctgcctcctgtcactaaggggccagatttcgggactcaggggtctcacgtgcagagggctgggctcccgcgtgcttgcagcagccacgtggcttgtccacatgaactgcgggggggggggctcctcctctctgcgcccacaaatcccggccacccaagggtgctggcaccttcagcagctccgtttccacatggtcgcgcacgaggttggggtgctcgcggcgctcacggcactgcaggttgtcagtggtgatggagaagggcacctctgtggcgtccagggcgcgctccagccgttgcttctgggccaggagcaagttggtctccgcagccagcgcctccatctcacgctgcagctccgacttccagctgtgcgtgtcctgcagtcgctcgcccactgtgcgcgtggagtcttgctgcgtgcgctgcgccagcgcctgggtctctgtggccagctgctggctctcgtgccgctgccgctccgactggtcgcggtcggcgaaggcctggtggtagcgagcatagcagttctggaaccactcctccagcaggtacttggaggtgcggaagctggcggtggccaggccggaggacgtgtaggcgcccgtgttacgggccacgtcgtactctttgcagggcagctcgcagggcggcactgtctgcgccatggtgcctgccgcccaccagggccaggggagtgaggactgtgtgtggtcagccggttgcggtcagcctagtgcggtcagcggggcagctccaacggctcagtcccagagcaggacgcggctcccagtcgcttgggtgacactgtgtaaaccaagagcttcctgttgccaagaaacgggatctcttctccagtagctaggggaggggcattcagggtggtgggcagaactgccctcttaaagggccaggcagccccagccccaccatccctgtccccgcctcggggcaatcaacagtggccaagggttcctgtcacttagaggatcctggggccagcccgtctccagcctctgagtcccacccttagggttcagggtgtgggtggggacctactgccctggccccttccttggttcatccatttgttcctggtttgcgctctgatcctgtcctgtgcggagctccgcgctcagggtgaacaagacaggagactctgctcagttgcagccacctcagggcagagggctgtggctgtcgtgtgggtgttgggtgtgctgactgatagtgttacttgatgccgtacaggtggctgctctccctgccctcctggccccaacagcagcctggtagcacagggagggttccaggccaggtcccctcgggggcagtctgaggcagttcctgcaggaactctgctccattttctcctgcacctagtgcctgagagccaggccctggcctctggccttctcctcccaagtccaagccagggtcccctcaggctgggcacagcggggagggagtctgagtgtgctcttcgctggggagttgaattcagcctctgggtaagtgtccagagtcagacgcccaaatctgccccacagggcggaggcaggtcctgtgctgcggaggctgccctcaaagccattcagggccaggctgcctggcggaggctggatgggcaggaagcgccccaggacacatcggagtccccctaacctggggccaggggagccccagcctaggcgcgattccccacacggccagcggagggcgacgttggtctggcactgagaagcctgcggctcctggctcggcctcccctccgtctgcctggcgcatgcagtcctggggacccccagcccctccggcctcctcttctctgagagccccccaccagaaagtcctcactaggaagtccatacccttcctacagcacagacctctgggcccctgttctctccaccttcaccccctctcccaccacagcccacaccctcactccagccacaggagccggagctcctcctgggccattcccaccaccccgcccagggtctctccagccccaccatgtgccggccagtgccctcctcctggacctgacctccccccgtcctggcctctcccgcggccagaaccctcagtccatgctgctgtcaccacggtgcgcctggcctgacacagcctcctgatggggcttttgaggacagcagcccggagacttaccctaacccaggccgagtcagaacctgtggcaggcggcctgggaacctcttcttactgtccatcaaaattgggaggtcaggggaccttcagggactggtgtggtctgagaaacatcctcgagcctcgccatgactcagtttccccagatggcagcaggctggagcccacacgcagggcaggatgccaggctccaccttttgtctggaacctgcattcactgggcacctctctttaggcagagcagagcagagctgcccgtgtttgtcccctgatctgtggccccaggagcccgagagaccacctgagccaacgagaaggcctctgggccagagcccagctctgcgaagtgggagacttctcagcctccacttccaggtgccctgaagtcgttggcagggggtgctgcctgcttggggctcccagactaagggaacacattcatgtggtgaccacgataggccctgcaggctgaggcacaggatttgaccaaggacgcatcagagataggagactgggccctcactcctgccagctgcaaactcccaaagcccccagccctctcatggggtgaagatgccctgaaggacactccagtgtgctcccacctctgggttctgccagccagagagtgggaccctca

SEQ ID NO: 3861 - DNA, 4001 bp, Homo sapiens
agcccaggaagctcagcatcctcattcctcccgtttaattatgggaggaaccgagtaagataatgggggctggggaagaaaaggaatgctagaaggaaaggcgcaaaggaatcaagctttgcaaagtagactcagcagctcctccctacaccaaagcaccagctcttacatccagaagtaaagcctcccccgcttcataacaccctgctttcagtagcgacccatggggcactgggccagcaggacgataactacccccaacaccagcaacagagaagtctcccaggctggggctgggggctgcatatgtgatccagatgtctgctttaaccagaaacaagggaaacagggccccgagtctgcagtccctgggtcaggacatacagcttccacaaggcacggacaagacaaggtgagaaggggcagaaatatccagcaaccccatgtccctgtcctcaacacttgaatctttcttcctagccacgggaccagccccaccagctcgctgtgaggctctgcactcagcggtcagggaaacccagagcacgggctgccagcccaacgccagccacagggacccgagtcctcagaagcaagcagctcccagcccagctggaagaggctttgaaagccatcaagtacaactcttccacttcccccaaggaaaagacaggcccagagagggggcccgagttgtctgggcccttggacaaatgaatggcagagccagggggagctcgaagacagcgcaggcctccgtctctgtccagcgccagttctactgcctggagcgacctcagcggctacaccgctcctcctaagctgctcaacttcgctcagccctacttctgccaactctctgctgtcgcggctgtcaccaacctcaagccggcagtccgccactataatgggagggaaagacggccaatgcaaggtcatggtctctcccattccttcccaccctgcctgctctcaccccaaatctccttccctcctccaccctactaccccaaataaagggagtacacctccctggggttgacagtgtctcaaaagcatgtcatccattcatgcaattagtatctgagtgcctactacctgccaaggaattgtgccaggtcccgagaacacagaaataaagtttttgaccgcaagaagaactaagataggggaacccaaaacatcagttcgtcactagattccccaacagtttcaactggctctctggccatctgagaaaaacgatgaaagaaacatcccactccatcagggcatcataaaaccaccctgtcaatccaaaactttgtctccaaatccatcagcctccatctcttatcttacaccctcactgaccaagtcatccaagcattagcatgagcttgaaatacaacatctgaggcttcaagcagcaggacaagaaacttctagaggtaaaggtagacatcacagtcccgcctcaaatgcaaacatcagagatgagggtgctagctcagatcccccttctacccagttactcatacaaattgtcagccctgcaaaggagtccaaacatgtcagttacactcctacttaaagttggaccaagaggatcagaaatgagagaatggactcaactggacgagccttgcttgaacaagacccccgtgatcaccgtgccctcgaggaaggaacagggtagcccagcaagggccggcttacctccttgagaagccctacttttttcttcagcacctcacattttcgcagtttgcagatctggtgcgtgcggcggttggtacagctagtgcaagcgccacagttttccagccgccggcagggctcacaagtaccacaccgtttccgtttctttcgaccatctccaccccctcggagttgggactcactcccagccatggagagcccagaccccgggaagctccctaccatcacctggcgctgagggaagtcataaaggcctggcaggtccggctggacggccaggggcacctgaaactggctcatgatgctgccagaggtggggtcataggtgctggggcagaaccacagtcgtttcctgccacctccaaaggccaccaacaggtccttctcgcctagaacagtcaagagtctacaagggtgaaggcaagtggcttcagtctcgtggatggatgcctcttctcaacccctcttcacctcctctgcagcagtctgatcggactccgtagggggccactctcccacctgctggggcccaggatctgggggaggacaccagcagcagccctcagaaaagggatcatcttggcccggtgggttcttcaccctcacccaccctggacccaggcatgagttgagcaggtaggggtgtggtgggggcagagctgagtgagcagtttctcctggtatttttcctccagggtctggacgctggagaaggcagtgctgcctgaaaaagacagaaaggggaagcgcatcactcggggctcagggacaactttcacgtgtcacttcttcctgtttctgggaagagaaaatgggggaagagatggggcttgctcaattgaggtcctgcccagaacctcaggcaggacgcacccagcacccgctccctgtctgagggaggcggcctcgggcctgagggctgctgggggccctggattcaagggggtgatcaaggtgagatttctaagaaagttgccctcttccccacccccacgggctggtgagagtttcaccaaaattcccccacacgccctggctggaggccgccgggccctccctagggagctgagctttcaaaataaagtttgctgagagcctcgctcggcgggactgccccggcgcccccggcacggaagccgcctggaggtgggggcgcgccctgggcagcccgcgcccgccgcgcccgccgccggagcgcagcccgccagcccgactggggagggcggcccgcgccgccgaggggcgcggggaggggggcgcgctcgagccgcgggccgggccgcgcgcgcgccgccgctcgggctcctttgttctggggcctccgccactccgctccggcggcttcgcagcccccgcccccgccccgccacccccgcccggctcagccgcacagcgccccgcagcaccccagtccggccccccgcaccggaggagcggccccccgccggatccgggccgtcccctccccctcccccgggccgggccccccgcgcctcccgccgcccctcccccactccggagccggaaaggcaccgactgcaccgacctgcccgccgcctccggggcggagcgcacaaaggggcaaagtttcccggcccgcgccgccgccgccaccaccgtcgcggccgccgccgccgccgcctggggctcccgcctcccggagcgcccggcccgaccgagctcagcgcgcggagccccccgcccgggccgaggaggggacggcgcaggaggaaggaagaggcagcggcggccgcggcggcagcagcagcagcaatgaaggcgtccgcgggactccccgccccccgcgcaccgcggcacgtgctcgcccggggactcccccgcccgggagggcgcacacgtgcggccccgccgagccccgccggcccggccgggccccgggccgggcgagaggggggtggttcccgcggaggggaggggtcgggtgggcggcctgcgagcggcttggggcaggctccggcccggccgccgcttctctgcacctgcagtggctcccacccacgcggtcggccctcccgggaggcggccgcccccttcgggttggccaccctcgccctccggcggggctgcagccggggccggcgaggcggggtggggcacgcggaccttccagcctaggccctcggccgagcctcgctcggtgtccccacttcctgccactccctgcgggccagatctgtccgggacagccccggcgcccccgggaggcctgagcgccgggcccgactgacccccctgtcccagctgccgctggctcattccgaggcaggacaatgggggac

SEQ ID NO: 3862 - DNA, 4001 bp, Homo sapiens
ataatgaatcatgcctacagtttgaaaaacactactgataagtacctacagttgtcagtgcttagcaaatgacagttggctgaatgaagggctaattactgtgccaacacccacaagctgggcctctggaccagagctgagggctatagtcttgcctccactgtgaactcccaacctcagccatgcccagagtgcacatggctgctgacaccaggcgacttgaggggctgtggacgctttctctccaatggcacccctacccccagcctttcctgcagctgaaggaagtctgtccaccagcagtcacccctatggctttgatatcagtggcaaggactgtgtcttcagtaagagaagcctcccatgagaccagggaagggcgagggcagcgaagctgtgccgatcttaggacaaatcacttgatccgattagaaagatggcaatgaacatatatgcaaaactgtcttatggctcctctaagttttaaatgctgtgagcagagcaaagggctaaagacagcgggagagagctaagcaaagtcaaatctacggtcttgtcaacagagaagtacacttcgctgtcaccttaaggactagagcacaaggcctgcagtgaaacaatgccacttggggaaggcggccagggaagatctgggcccaggagtgcagacccaaaagacagcgttcagggcaaggaggtaagagtgtatgctcaggaaacagcagagacacaggcctcatcatccatgccaaactctccccacttcctgcttttgaggcagggcaaaagagtgaggaggactcctggagaaagatgccacttacccagatcatgtattttatgatcctgctggtggccactgtgtattcttctatcagttctgccaggtaatagagtccagccgctgcagggtgggaggcagggagactatcagccagggtcactcccaccatcctggtcacccctctctctgcagcccagtccccatccacccttcatggaccccagaaggtcaagaacaaaccaaacatcccatgtgttgcccttccaagtctggagaagtaaaactttcttagggcaactaaggacaaatctcataaaaatcaacgaaagtctgcatttgatgccacagtacaatgataacctctggctcagaaaacggaatttcacgtattcaataaacacctgctgggcacttggcatgagccaggtccctgggctgagaatacagctgaaaaagacagacaagggtccttccctgacccagcttgggaaagggaaggggaacagtagggagagacagacgagtttagtgtgagaaatgctactttagggaaaggacagggcactgctggaccatcaacccctgtggacttcccggaaaagatgacatctcaactgaggccgaatgggaaccagccagaggagaagtgtcaaaggtggagagagcagggagcatgaagggccagaggcgcaaaggcggcggtaggcgttggggaaaagttccgcgcggcaggcccgcgaagagtgggagccgcagcggttagcggtccgcagacgcgggggcggcactcgagtcaccctttctcgggcagtgccggagcggactctgtgacacctggaaggagccacggtcaggccgggctgccaggctcgacaggaggggcaggatcaggcgggaaggggttggggcggcgaaggccgggagcgccgggcagtggtcccccgagtggctccgaaacccccgcgatgcgacccccaacgagcaccgatgccggggcgggagcccgcgcgggccggggtcgtgcagtctcaccgacagccagcgtgatgaaggccacctggatgaagagcgacagccagctcagcaggtacatgaaccacatggcgcccccacccgcccgctccccggccaccgggacgggcctgcgcgcttcggctccggcgacacacagccgccaccgccgccgccgccgccgcgtccccgccccgcggacgacaggacgacggtgcgccgccgccgagaggagcccggccctagcgctgcccggggccaggctcgcgctagcgccgcccgccggagaggagggccaaccgccgctgccccgccaggatcccccgctccactgaggggaatgaatgcagaccgctgcagccagagggaggcgggacggtgcccaggggcggagacgaccaagcgcccatactggggctcggagtgcagcctccagtccctccctgtgcactcccgtaccagcctggaggtggtccagggccggacagggccgcccgaccgcgccccagcaacctccccagaacctgcctcccggcaggttgcggacaagtctgtctcttgctatcgcaggtgatagggacaaaattattgaattcctaatatgtgccacgctctgtgataaaggcgaggtgtgttcttgtcggaaatttgagcagataatgtaaatcattttatagacggggaagccggggccaaaggaagttgccctgggtcatgcacctaggaagcggcacaatcaggagttggggtgattttaatcggtcatcctccggcctaattcccctctaggctgttcttttggggtacattctgcacctttgtatcgcctgcacctcaccccttgccgggcacgcagggcgtccgctaggcgctggatgcatttactacacctctgggagggttcctgaggggcacctggaaccggttagtccttgtcaacaagtctcccatctagtggcggagacaggcatgcaaaataaagtatgtagaacaagagtctagtaggcttatttcagaatcatatttttcctgcataaaaatacgtattcctaaaaaaaacaattaccgtatgatttagcaattctacttctgggtatatacccaaaagaactgagaaagcagagacatttgtataccaatattcatagcattattcacaatggtcagaagagggaagcaacccaaatgtccatcggttgacgaaaagatagacataaagtgctataaacatacaatggaatattatctagccttaaaatgaagtgaaattctgacacatgctacaacatcaatgaaccttgaaggcatgatgctaagtgaaataagccaaatagggaaggacacacattgtatgattcccctcatatgaggtacccagagtagtcaaaatcatgggcagaaagttaaatggtgcttgccagggtctgggggacaaagaatggggagttactttttaatggatacagggtttcagtttgggaagatggatggtgctgatggcatcacaacagtgtgaatgtgcttaatgtcactgaattgtatacagtgttacagaattgtaaaatggttaaaacggtcaattttatgttatgcatagcttccccctccccccaacaaaatacataagattacaaagcccatcctggctaacacggtgaaacccagtctctactaaaaatacaaaaaattagccgggcttggtggcgggcgcctgtagtcccagctactcaagaaactgaggcaggagaagagcgtgaacccgggaggcagaagttgcagtgagccgagattgcgccactgcactccagcctgggcgacagagcgagactccgtctcaagaaaaaaaaaaaaaaaaagattacaaagcaggctgggcacagtggctcatgcctgtaatcccagtactttgggaggctgaggtaggaggatcacttgaggccaggagttcaagaccagcctgggcaaagaaaaattttaaaatggccaggcatggtggtgcgtacctgtagtcgcagttactctgggctgaggcaggaggattacttgagtccaggagatggcggctgcagtgagctatgattgggccactgcattccagctgggatgacagaatgaaaacttgtctcaaaaaaaaaaaaaattgcagttgccgggcgcggtggctcacgcctgtaatcccagcactttgggaggccgaggcgggagg

SEQ ID NO: 3863 - DNA, 4001 bp, Homo sapiens
gcacatgcacagaaaagatctctaagtcatatctcctggcattggatattgttctaacaagggcccaaatgtccacatttgtaatacaaatgaagcaacagagaggatttcagtaggcagttgattgaatgacaggacttgcgtgccttcctacctcttgcggcgtgaccctggagtatttgtgcttcctgtagggctgatagtcgaccatgtgggagctttggtatatgtctaaatccacagggtcctaaagcacaaggagaatataaaacaagagattccctcgtcactcctccacttaaagccattcaatggcttcttgctgtttgtaggacaaaggccgactttggggcctgacattcagagcccaaatgatctggctgtgacccatttttaccatcccgccaccttcctgccttctctactccagccttacttcctcccacttgcatgggcctggcatgtgctctttcctatctcctgatggaaatgcaagttgccctcctcacagactagcaaactcctacctatcctccaagacccagactaaatgtcacttccccaaaacatctctcccacccttttattctccacctcccaagagttaaaccctttccttgttccttacaaccctccacaacagcacttgcagggtgtactgtgatggatttaatgaagtacactagagcaggtttagtgtacttagacatctctgcagtcccaaagcccaggacagggcctggcacactgtgggtgcctaataagtgcatgctgagtaaataactgaacccccagaaaattataaagaagaaaactcagttctcttcttcttcttgtaccaaaaaaaaaaaaaacccacaaaacccaaaactatcattacagaaagatgagcttctagaaagagcctggcccttccagggccttgctgaggctacccaaccctgagaccgtcacaggggacagaaacccacatcactcacctgtcccgggtatttcacacctgccatggcaaacgacctagacacagacaagttgtttagccctgctctgccacagacaaggaaagtagccactatcttcaagctgtgccaaccaagcatggctgccccagctttcttagcccactcctccccatcttccctgggctcctaccctgcatgtcactccatcatcaaggggttggtggtgataccagggtccctgggacaaaggggctggagcaggactcaggaggaatgagggctgtttagaagatcacatttactgatcaggtttactgtttgagaggtatagctgatcctagggcaagtgaagtgctggtaaatgtttaacaaccatgttttcagggaaaataggccctgggtttatagcatctgccaatttctgtggtgtaaatgctcctatcatggctcatttcaggctatcaacataatgtcattggcactgagttgcacagatatgcacaggatgggctcttgtgagccagtatgaactggctccagctcacatgttcctctgaaccaggcctcagcacttcccctggatagaggaaggcccaggcctaggactcagagccaccttgattcacaggggagtatccaaggtgaagaaagttgcaagactctgcattcccagttgaacaacagtagtttgtaggcctaacactgacccctcccttccagccctgaagtcctagcgagggcctcgctgcacagactccttgtgtgcgtggcccctagatccttaaggggtactccactgcattcccagggaaccctcccctaagccccactctcttcagcagactgtggcccagcagggtggtgcccagacctcaaccaacacctgtatcccctcccttttgctcacagacagcttctctcctagggctggggaccagctgccacgcagacagagcctaccgcttcttctgccagggcaagacgacgctcctgccctcccacctccaggtgcccttgccacatggagagtcctgttgctgtgtcccactgccacgcctgtctttgagttgagccctgacctgtatgatgagggtccctgtcattgtgaggtgagtaggtggctgcttgggctgcctgcaggtcagttccctgtccctggctcaccagagccaacatgaatcctggcagcacatgaaccaatgctttccgatactctacagaatcttcctagtcctaggagaggaaggtaaatagagcccatgtggtttacaacatcagactgtgtgtgactaaatccacttcacaccacagactgccacccaggcctctgctgcctgaaagcctggctcaaaattgtcaaaatgtcactttttgacattcatagtgtgtggctacaataaaaaaaaaatacagaaacaagcgttgatgaggatgtggagaaattccacttctagttataaataaaaaagaattgaaagcaagggctcaaatggatacctgtacaccaacgttcacaacagcatggttcacaatagtcaaaaggtagaaacaacttacatgtccttcagagatgaatggatttggtatctacgtacaatggaatattattcagccttaaaagggaggccaggcacggtggctcacgctggtaatcccagcaacttgggaggccgaggcaggcagtttgcctgaggtcagaagttccagaccagcctgactaacatggtgaaaccccgtctctactaaaaatacaaaaattagccgggtgtggtggtgcacgcctgtagtcccagctactcgggaggctgaggcagaagaattgcttcaactcgggaggcagaggttgcagtgagccgagatcacaccactgcactccagcctgtgtaacagagcgacactctgtctcaaaacaaaattaaaaaaaaaaaaaaaaagggaaggcaattctgacacgtgctacagcatggataaaccttgaggacattatgctaagcaaaataaagcaaaataagccggtcacaaaaagaaaaatgctgcatgattccacttctgcgaggtacctagagaagtacaattcatagagacagaaagtagaatgatagttgccagagactgaggagaggaatggggagttactgtttaatggatatgaagtttctgtttcagaatattaaaaaaagttctgggaatggatggtggtgatggttgcccattgtgaatgtacttaatgccactgaattattcacttaaaagtgactaaaatgataaactttgttatatatatgaaattgtatatatatttgtattttatatattttatgtaattatatacaaatatgtatatttaattttatatataatattaaacatatatgttacatatattatatatataattttaataatccaccttctttaagggacacctcctctataaagctttcctttatctcactaggtgccaccatagactcatttatccaaccaatatttactgagcacttcttttgtgtttgggcattgttctgaactttatagattcaagaacaaaaatagatggaaatctctgcttacattctggtgagatgaaaacacagagcaaacacaataataagcaggtcaccctcccttagatagagcaaataagccaggcgatgcacaagaggatgactagtgggcacttcagatgggaggtccaaggaggtctctctgagagggtgatgttatagtagagatctgaagcatgggaaagaaccagccatgcaaagatctgagaataaggggttctagacacagcaatcagctagtgcaaagcctaaaggcaggaaccactgagaacaagaatcaccagccatgtgcctagaaaggagtgaatgatgggcaaggtcaagagattgagttggctgggaatctctggcattcctcttctttaatggaatgccaacttcccctcagataattatttcctgcctttctttgagtgtgtccacagaattaatgtgttagaaatttggtccccagcatggcagtgttgggagg

SEQ ID NO: 3864 - DNA, 4001 bp, Homo sapiens
aataaaagtcacgagaacatcaaacagaaagggggaagggagtaaaggcctctaccctggtgaggtcagacagcttgcagaagttctgccaagtgaggagacgaccaaaaataaaatacaaaaaacgcaaggaaaaggaccagaccctccctctagagtcaggggaccaggggcatatgcacaaaccgccaccttggccctcactgagggcaaaactcccagcttccaagaagtgaaataaaaaagggcaaggacttctttatccatggtcccccgatgaccccagaagccaatatggctttacagcaccacccactcccaacgctcaccctcctcctttcaccaaatcctaaaaggtacctgagctactccagacaaacttccatctcggtagcagatgtcagaactgtacctcccaggcaagggagaattgttccctaacggggtgaggacattgtaggtatctaggaagtttcaagtacactcaccttcaactcagggtcaccttcaaactcattgttaagatatggcaacatacttaatggcagcaaactaaaacttagccaaagctacaactaaaacttcagtacagtaaaaatgtattccattgtagcatttcttgcaagtgaatggacacttaatctctgggtgattaacatctcctcctgggcttccctctggtgacatcaccgtggtctgccgggtggctgtcagcctttaaggctctagacctttgccatctccgactactttggcccatgaataaaaacagcagatacatccactaaacccaatcattcccccgcctccaggaaaaggggatgtcttcagggaggacaaatacctaccagcagccaggaattacaaataacgttttaagatctaagtgggaacttcttggggccaaaactagcacttaaaggtagctctagtatgggggctgtcaatgcctgtgactccttcggcctcatcattcattttccttgagcccatatcaaatgccctttgggttaaattaggcacatttcataaactgtgactaagatggaaataaggacaggctaaagctggttcaggcgagttcacaaagtgaaatgactgcccattagtcccggccagcagcagaacagggaaaaacaatcctccgggagcgagagcacacggggtcctactgctaagaggggcctgtggggaactgtgcaaaacacgcaggacttactttcccctctgaagggcactactcaaatccctccagcagaagaaagatttccatcaagggcaataaccacgcgggcctcgggcgaacacgcgcaagaccatcgcgggaagtggggcggcctgcccctccgagcccgccgcccgcccctcgtccaaggaagggcactgcagagggcgcgaggctgggagaggggccccggcggagacgggcaaagagcaggggacgaacttccccgggccgggcaccaggctgctggcaggaagtttcctctgcttctccgatacgcgggggagaggagggccgcagggggcggacgggccaggggaggcggcgggccggcaggtgcgcgccctgcaccctctctgccgcctgggaggagccctcgcagacatagggctctgcgcgctcgcctccccagcgggcccccaactccgcacgtcgggtcccgccggcgtccatctgtcagtccctaggcgggacgctgggcgggtctctcagtccccagagggcggacagcggggaggccagggcccagcaggggcgccccctctccgcccctggacgtccaacggcgcccggcccgccggcccggcccgagacccgcggggaccgcgcgcggcccttaccgcaggtagctgccggagttgtgctggttgtagtgctcgggctgcgtgtgccagaagagcatggctggaactcccagcgcgccgaccggggcgcggcagcaagcgcagacgcggggcgcgccgaggacccagcggcggcttcgcgctccgaacccgcggtgccggccggctcggcgcatttatcggcggcccaggggcgggacagcggtgagacccgccccccaggaagcgcggcccggagggcggctccccgcggcagccgcacctggctgactcccgcgcgtgcctttccggcgagcgagcgcgcctccggggcggccagaccagagggctctagggccggccgggtgctctccccaaactccgatgtggggctcaggtgacccttgccgcccccaacccgctccacacggcccctctggcctctgctccccactctacgcccagggccggtctccagagcggctccgagatttccagcctaggccctctctgtcgcctttcctcgctcttgttttttcatagcacttcagacgctctgaaatcatgggggtttttttgttggtttttttttttttgagacggggtctcgctctgccacccaggctggagtgcagtggcgcgatctcggggctcactgcaacctctcctcccaggttcaagcaattctcctacctcagcctcctgagtagctgggattacaagcgccccccatcacgcctgactgatttttttattgttagtagagacggggtttcgccatgttggccaggctggtctcgaactcctgacctcaggtgatccgcccaccttggcctcccaaagtgctggcattacaggcgtgagcccccgagtcaggccgacatttttttattttttatttttacttgtgtactgattgtctttcccattagactgtaagctccaagaggacagggcctggctcgcttaacaccccgttacctgcactgcctagaacagtgcatgggacatagttaagataaatgtttgttgagtaaacataaaaaaagaaaaaaggaatgcaccaaaagagtaatcagagaagccttcctggaggaggtgacattgagctgagacctgatggatgcaaaggaagcatctctgtgaacatcacctagggaaaaatagttccaggcatagttccctacccccttggcaacagtgactgccaaagccttgaggaagacctacttggcatggctggtcttgaggagagcttaggagatgaggtgaggagggcggggaagatcagagggcctggcaggccaggacaaggagctaggattttattctgtgttttaagcagaggagtcacatgtatgatttgccttttggaaagatcagtctggcagcagtgtagacagtgggtcatggggtggaggggagggccattaggagggagtggagttccctggagccctgacccctatccaggtgctatccggttctccagtacatggcacagcacctggcacagaggagatggggattctgtccctgagtattaatccagtcaaatgacatcccttggggacctggtccagaactccccactcccccacgcatggatgtgggtaaaaccctccctcactctgctgttcctgccctcctccctccagccataggtcacaactggcaaaccacttcctctgtgcagccctcaaggactgccccccactgttctgccctgttaggagaatgggaatatttccccggcttcaggtggtgctgtcagcagacagtcccccagccatcggcttctccaggaactgcccctgctcagagagcagccttgccctctgtcatgtccctcctgggatagcccacatcccaatgactatcccagcagaagtataaaagcttggccatctctgcctgactggggacagtgctgatggggtattttagccccaggactccccatgaagacagtcaaagctgtcacaagacctgtgtcctgctcagggtctccctcctgcttccttccagttccttgcccaggggttactcttaagggaacttccaaagaaacatcctgaacaccgacccccacaaccaacctcaccccatcagggtccatgacaaacccattgtttaaatgggagacactctggggtggtctggaaagaacatgt

SEQ ID NO: 3865 - DNA, 4001 bp, Homo sapiens
gacagaagatttaagtcaaaatagttgtacaatcaacaagcaaatgataatcatttccttaaatgattatctgactgataaatggacaatcagtcagaccatcaaacaccagttgataacataatccatttggacaggaaccacatttccaaaggagttttgatttagtcattggtggtaaaacaaaagatatcagactgtaccttaaaaacaaagaaacaaaacaaaacaaaaacttgtccaattcagtatacctaatagagataggaatcaaatagtagtatatgtcattaaacttttccaacaagattctgtggtcacttgaagtagaaaaacttggttttccaatataactactcaaatcagtaaaaataaatattttaaagttttactcttattttaaaattacttgattagttatctgtatttacattaatatttttcaatctttgttgatccctaattatatttcatataattttattaagctgtaggccacaaattaacatttcaaactcagccaaatttcagggactatccctctttagtttaaggattagatgagatatggacactgtatattgaaataatcatgcactagaatgatagatttaaaataatctttaaaatgtgttagggagattttgcctccctaacacattttattcaaaagttttgcagtatctctcaaaattgtcacaactttccccctttcatgtaaatattatgcttttacacatgaaatatgactctctgggcagtatgtttcctgcttgagttttgccctttgtgtttatattatctcatgttatacaaagtcattttgtgactaatttccagagcactgagtcacagtgtggctgttgcttatcttttcttttttcccacatggtagtactcttggcccttatttttggtaattattttatactaatgagtgctttttcataattaaataattgtttctctcattatatttctgtggttgtttactgctgtattatatgctttcatttttcactagaagcaaacattttataacaggaacataacagtacatcatgtaggcatgttatctattgttttaatttacaaaattgcacaacatagacttgatcgtaagtattctcgtttaagtatctcagaatatgacctttggtctttggagaattgtaaaatatttccttagagagattagttaatgctggcataaaatattccatttagattacgattattttaatggttatacctcattttaaatatcatcaactaatagtattgaaagattatttgaatagaagaataacagtctctattttatatgttatgaaataaaatggaaaggtaaaccgaactttcaagaacttccaattaaccaagcacaattagtaaagaattctactacaatcttcaaattataaaaaagctacatacaccaattagttacaaaaatgtttatggtttaaaatcataaaaattgcacataaatttgcttaagaactaaatgcaaaatgctgagaactcaagtttggattgcagtttgagtttactctgtttacagggaagggctgattttcattttacgcaaataaacagtgatcctcccctatcagttctttgcctctcagcaccctgcttttcccccgagaaaaagaaattaaagttatttcttatgggctagacagtatattgccaggtactcacaagtaaaatctctgatgaaagttcttggaatgtttttttcaaaacggagttgaggttattttgtttttccttccaggtattgaagacaggatttatcttctctacttcttcttttagaagcagatcaagaaactggcgattgaagagtaactgaaagaaacgcaatctgatcttactagcagtgaaagagcgaggtaagaatttgactattatccagcctaaagtcgctgctgtctgttagagcaaagagggagcctcagagtcggcttcagagatcactggcagttgggaatagcccaacttcctgtttaggtcactgcaactctgactctatttagtctaaacctcttttttctttctttctttcttttttttagtggaggaaacagatgaaggaaacagcttacaccaagatttcagatacgatcattttgaatagctatttcctttactttccaggattgtttttgtaatcagttgaaaaagaatgcttttttccccctagagttagggtttaaaaaattacatatttattattacactgttaataagcttttttgcagtttgtttcttcttcaagttatttcatttgtttcacccactgtcaatgtatttattttttttaaaagtctgagggctaccgttggaggtctctcttagtgagacaatgtaatgcattatctattgcaggtgtcaggctttgagccctaccttagctacttgctaacttggctactcagcccagttatttgaattcactatgcctcagttcctttgttcctaaaatgtcgataataaaagtttctgggcttgatgtaagtactaaatggcttaatacataaaaagtacttaaggcaggacccagcatgtagcaaacctccaataattgttggctatcattatcgctgttttctgtatttctattattattattctacaaaatatgtaaatatttacagatgtcaaccagagtctctgctgtatgtccctatcattgaggttcatccgtactgtctctgtattggaattatggtcatatcagactaagatcactagagatctaataaatgggcagaatctactttgccaggaaggctgaagacatttggtcagaaaatgtaggagtttcttgcttctgcatctcagattctttgtgccttcaatttttcttgctttccttagacctctctgtaaaaggtaacctttcatcttgagtgtttttaatacatattgaataattatttggtggtgactggaacataaattatcgatttaattctcacaactagcttataaagaaggtcctctttgtatgcccatttcacatgtctaggaagatcgagttcagtatgtggagctgtgattctaatgtcatgcagtctgcctttagagcaaaaatgcataaatcctcctccatgctgccttctcactcatgttctggatttcatatcatgttaataacttatctcctattacctcatgccctgcccctcaaccacaatcaaagctatcatctcactcagattgtagaggaaagtccttttttcttggtaccaccatggaccttgattaaacttttgaggaatctgtagctcaggtagaggcaagctcagccaatcagattttctttcttgaaagtttcgcctctcctccctctccctctccctctccctctccctctccgtctccctctccctctccctctcacggtctccctctccctctctttccacagtctccctctgatgccgagcagaagctagactgtactgctgccatctcagctcactgcaacctccctgcctgattctcctgcctcagcctgctgagtgcctgcaattgcaggcgcgccgccacgcctgactggttttcgtatttttttggtggagacggggattcgctgtgttggccgggctggtctccagctcctaaccgcgagtgatccaccagcctcggcctcctgaggtgccgggattgcagacggagtctggttcactcagtgctcaatggcgcccagactggagtgcagtggcgtgatctcagctcgctacaacctccacctcccagccgcctcccttggcctcccaaagtgcagagattgcagcctctgcccggccgccaccccgcctgggaagtgaggagcgtctctgcctggccgcccattgtctgggatgtgaggagcccctctgcctggctgcccagtctggaaagtgaggagtgtctctgcctggccgccatcccatctaggaagtgaggagcgcctcttcccggccgccatcccatctaggaagtga

SEQ ID NO: 3866 - DNA, 4001 bp, Homo sapiens
tcaataggaaactcaatttaacaacaagttccagggtattccacataatctctctttaaggcaaagtcccaaaagagagatgggactataatgaccacaagttaggtgacttttcatattcacattccttccacgttcttcgacaatcctggtccagttacttactgtggaccctgtgtgctttactttcctctgctatataatgagaataatattaacaccttctttatccggttggtgtgaaaactgcatgaataaatgtaaagcacttggactgtgtctgacacagagtaaaatgctcgaatagcatcagctgttattactactactacttactactattatttgcaaaaacattacaagggataattatatccaggaagcttcccttgtattggtaatgttttattgctttttctaaaatttaaatcagagcaacagtcaatacatgcacacaaaaaaggcaattcttcaaaaatgtgggggaaaagcctcccatacccatgttacctgctggtgagtttcaggtaagggtgtagctgggagcatccggttccaagactgccttgtatttctcttacaggatgcctccccttctgctgcggtttttaatcagcgtttctagggcaggcttgcaggcggggccgcgaaccccctgtagttgtacacggagctgggtgaggctgcggctctgggcatttctggggaggagttccatggctttccacagactctaaccaccctgcagcgagccgcatgctatacgggttaaactcggggcatatcgaacgaacaattcacttcacggaagactagcaataaccaggacacctgcgctattgatcagctatctcaacaccagagagacccaccagcacaaggggcaagaattggccaggaggcgcgcggcgctgcgccctcaccgcgtccagacagacccttgaacttcaccgccaaaaaacgcaccgctccgcagacccgacccgggagaggggtttaacttcccctcacctttcccatccctccttcatttccaaggacatactcaaaggaaactggcaacactcggtctagggtttcgctcctgccctcggcggacaccgaaaccacttctcccagggaagttaattaaaggaaccattaatccgcccaaaaatccaaaacctacccccaaagctcaagagctctgaaaagagatcgagggcgcctctgccgatcttgaacatctctgctcgtcgctggggcttagaggtgggcagggggtgccaaaggggcgcaggcaagacccggccagagggttagacgccggcccccgttccgaggcggcccagtctacacgccagcgacgccggctgagccgggcttggaggcagccaggtaagcaggtaggtgtaggcatgtgtctgagcagacacacagctgcggcggattaaagttcaagcccgttcacactccgcttccccttcccaggtgttctcacgcacggcccaggcagccactttcccggggaagcctcggcgctcgaccggacagtcccctctttgtcattcttaatgactccccttgcctcccaggcgccaacccattgagactactcgcttctctccactctcccaggcgggcgcagaaacccccggaaaggggaactcggcggggaccgggggaagcagggtgtcgcgcggcgcagggggcgccgcagccggcgtacgtacccagagcgaacagggcgagctgtccagccgaggggaccattttacgggcgggcgggcagcaggctctccagcctcctgccctacctgcggtgcccgagtggcggagcggcgccgcggtgcgggggaaaaagacgcagactaggcagggcctgcccccggcgcgggagggcggagggaggaccgagcgcctctctgctggcactcgccccgcagcgctgcccgccgggcggaaataggaaggcggctaccgtcacctcctcgccactcggcgaccggggcacagctgacccccccctcccgccccgatgggggtgcccccctgagggcacagagggtgggggtttggggtaaggggcggggacgctgagcgcaccgagcagggcgcgggctgctgggcggggcgacctgggatcccagagcctggcggcgcgagccgggcacccgggccgacgaaaaggcaggaagcgcctgacttcagacaccacccccgactgccagcgccgtgcggcagcggactccagcgtgcggggtcggcgccggccgcgtagccggattgtcctgggccgcagtggcggcttccaggctctaggcggcggagcggagccgcccgggcacccgttacctacaccgaggggccgctcctggggcatctctggggcggggaaggctggaggctggggacgcagccaggaaagggacctgtgagtttcgccggccgcttgccaagacttggctcaaggaaagtggtcccctgaatcaatgaagaatttgttaaaccaggtttcccacctgtgccacagttcccatcaattctggcaacgcctgccgccttacctcccaggcaggccacatcgttaagatcagtcttcgtacttctggcctgggactgataaaaaatgggtctctgtgacgaatctggttatatggcaccaccagctgaggccaaaagcctgctagcctgccaccaagtgtaccccgaaagaggggtgtgtgggcccgagtcacctgggtggtcctttcaggatttgtggctctgaggtggcccctggtgctggaatttggggaggtggaggggatagagggaagacattctgggcgaagagtggaagatccataggttcctcggtgaccctcatggggacagtacacccgggagattcatgttctccaggtacccggagctcacggactgaccctcttctcctgcctcctctggcctacgtgctccgggtagatccactttccttgaaggtgggggtgggggctgttgggcctggggaatcttttgctgtttacttggggaggctcaggctctcacggttgacctctgcccagtttgtttcatgtaagtagagcaacctagtttcaagaaggaagcaccaggccattggtctcaacatttgggcaggaagcaccagtgtaaatcattcctttcaatagatttgtcggagcatactttgttcttttagggtaaatcttttccttggtccaccccatgcatgtacaaggcacacatgcacttcctttagtaggttgtccctgactcccacttccttcaggttgatcttgacctgctctggtggtttccctgtctcctccctaaactagtctgctttggctacagaaggggaggaatcaggggttcccccacccttctcctgttccccaggactagagaaggacctgactccttgcttcctactggaacacgcaaatcaagctcactgtggctgagggatggctgcccagccggctgagggtcatgttcagcagtttctgcttatctgtcccctacccccaaagtcagaggtggagggaagtagcagaatcaagtcaatttccttcatgattggaaaatattttaaatcaagaggtaacttgcaggccaggcatggtggctcacacctgtaataccatcactttgggaggctgaggtgggtggattgcttgagctcaggagttcgagaccagcctgggcaacatggtaaaaccccccatttctactaaacatacaaaaaattagccagacatggtggcgtgcgtctgtagtcccagctacttgggaggctgaggcacgagaatcacttgaacctgggaggcagaggttgcagtgagccaagattgtgccactgcactccagcctggatgacagaacaagactctgtctcaaaaaaaaaaaaaaaagaaaaaaagagatggccgggcgcggtggctcacgcctgtaatcccagcactttgggaggccgaggcgggcggatcacgaggtcaggagatcgagaccatcccggc

SEQ ID NO: 3867 - DNA, 4001 bp, Homo sapiens
ggtttaagctgaggttagattggtcctgggattcctgcagtggtgaaaacgctctgcctccaatgctatgacaagaggactgccatgcacaatcatgagtgtagaagaaaaggcagagtgaatgaaggctaacagtggcacctcacctctcacccaattcaattgtgtaatgcaaaccttgatgcacatagcaaattggaattcagaacccacaagtctaactccagagtaaatcatttgttaggttaacaattactcaaaacataaaactacatattttcagagctgagggagacctggctctacatcctcatttatatttgtcagcaataatttattgagcacctactaaatgccagaccctgtgccggatcctttccaggcacaatttcttattagaattcatgtgccttttctaatattatccctattttgatggaggaatttgagactcagaatgtccagcaaattgcccaaaggtcacaggaaatggcagaggcaggatttgaacccacactccacattcattaccaccacagagcatcactcccatttcatagatgacctggggcaggctagttatggacaggttccagcagattccagccagtagactttctagtactccaggcagcgttttgctacacatcacagaagcagctgcaatgactgttgaggctgctcggctggcagaaatggaaggaaaaagaaaaggaagcagctgaccaaatgttccttctgactgaccatggaactgcgagctctcagttgtctgccagcttccggctgaccaacagagagaagcatgtccaccatgagagagtagcagccaccacacagtccctctacattcgttcatcctgactccaaccaagccaacacacacaacgcagtaggatcttccctgcacaccttctcagtgccttaacttgccaccacaatcacacccgcagctgccttccttcctgatagacaaggtgcttgcccatgagcacttcatcagtgattaaactctgctcagacatgttttgaccacagctgcgcgtgcagtccacgtgcagtaaggcctgctgtgtgatctgtgagcccccatttttagcagccaggtaggaggcttcctgagggtcactcaacagtccttgggtagaagccacggcaggtgcagacaaccggacagcttccgtgtttaaggatatcaacacttaacacagggaggcaggcggactaacttgcacctgcacctccagaaggcaatggaaagaaaacaattccacagggatgacagcttccagcccttgacctggtgctaaaaacaggggccaggaagcccagcacagcacttttccctactccccaacacacccctgcctactctccagatcaggacaattcaggcctgagtgtgacccgaatttgagctctcaaatccaaagagctcccagaaacctcaatcacagcgccaaaaccattccataccagggatggaggtgcaagtccttcctggcccttctccccggaaaacccaaatcaaggacgaggtctctcaggtcttcccttgccctaaacacacacgcactcctcacacacaacatacacacttgaccccacacccgtgcacacttcatcccacacacacgtgaacacttatttgctcaccccagcaggctagccggcccccacaagggacagctaccaagtcgcacacccgcacacctgcccccaagtgtatagccacttgctccccccaccccgcgttccagcccccactacacctgccccagcgcacacgcacgggctcgccctccaccccgccccgccgcctaccccccactcctgctccccgccctcctgccccacgcgccccgcgccctgagccccgcaccccgcgccccgccgccctcctcactcaccggcgccggcgcccgccgtcccgcgccgccccgcggcctggggccccgccgccccgctccggcccgcggctcctgggctggcccgaccccgcagccgccgcttcccgtcacgtggggcggccgccaggcgctggcggagggcgggagcgcagccgtctccgcgccgcccgccggcccgcgggccctgccgcctggctccgagcacaggccgagacgggccctgctccgggcctcggcgtccccctccgtgcaccggggccacgacacggcccgcctcgcggggcggccagcgggcggaaggtgttcattcggggggcgctgaggccgccggccccgggcgagagcgtggtccgcgccagctgtgcgagcccgcggggctgaggtctcttctccgcccccgccgctgcggggagcttcagggaagccgggctttgcctggctcgctcgccacccagtttctgtcacctacacaggaggagggcgcccgggaaatacctgctgcgtgaatgaataaatgaatgaaatgcttgggccctgggaaatgcttgggcccgcggccgcctgaccacgcgggctggaggatcggacgtaccgccggtgccccaccaggagacgaaggcatggttgggatgcgcagccctcccacgaggcccatggcgccccagggccctagggattgaccgggacccccgactggcagagtccacctgcttgatacacttatttgagaagggaggcctgggactatcttactccttttaggaaaacccaactgtagctgctattcctttggttcaggccgcaaggaagaattgtaggttaccatgaatccatgaacccctctttagtatacaaagtccactttcatgacggaagaattggaaagctccctccagagttgtcagtactcaattattagcatataaaaagtcaaattttcccagggattttcagactttagaacctgctagtgacctgtggcctcagctttcttccagccactctgagtattgtaaaacaaagatattatcccaaccctgaaggcagataccagattgtacgccatggtcttctgtttcaaagggataaaaaaagaaagaaaagaaactggccaaaaaaaaaaaaaaaaaaaaaaaacccaacaatcttcctgtgacttgccctctacccctaccctagtgtgactcatggccacataaatgccccatccccagtggtgcttcagctgtgacccagtggaaccagtgtcaccggctcagcctccaggtaggggactggcttcccaggagtgtaaagctctgaccagcaattgagcttcaagggcaagcagcagtgaatggaccttcaagtctaaggtggccaacagctagtggagccagggattgggaaggtacaagagcaaatccagtctcttcattttacccaggctcacagagactatgtgacttgtcatcaactaatcactggctcaggtggtcctagaattcacccttgtgcttttgtatcttagtcctctaccagatcacatcacagagagctgcacaagactagttacagaggtgatatctactgactgccagacagtgacttcagaaactgctagtgactgagcaatgaagtagacgctattaatttacttaatagcgtcaaagaataaatttaattctttgaggcaaagaaaggtgaatgacttcctgtgttaattcacttaggaaaatataaataaaaaaatttaaaaaggtgacttgtcccaaaccccatgctagtaagaaagagcaacaataagaatccagaattcagcaacagtaattctttttatataaagttgttttgaatgaatagtttatgaacaatctttgtgttctactttagatgatccaggagtgaaaatgtataacaagagataattcagatatatttattttatgaaaggatttattacaggattcttacaatggcaagctccatattattccatctagaaacatctgttccttctgaaacttgatgagaagtctgtgtcacaaatgacaggcacctccatgtaaatgcctgtaccataaatgtgcaaatatatgcacaggccaaatt

SEQ ID NO: 3868 - DNA, 4001 bp, Homo sapiens
gcagaggacactcagagtaaacaggtgacaggatgaaaacacgattaacaaaacaagagtaaagaggcctaatagggcctgaggaaaaaactgaagtttgttttaaagtccccagtgctcacgggcatctagtgacgggatacccacccacacccaagcttccagggtgctggaaaccccactcccctccggaaggccgctgtcgacttaccttccgcttgttgtgatgagcgatatagaggacagccacaagaatggctgcagtcaccagatatgcaaagaagtggctgctctccgcgctgccatttccagaaccgttcggataaaggtcatccttctcgctacccgtggaatccgaaagtgtcccttcacggttctcactggaggcagaaccggacatcttttctttctcttctttgggcggtgagccctcctcgggtcctgtatcatcatcttcagcctctttgggctccacatcctcagtaggctctgaagacttaacttcctcctgcgggggagaaatgaggtcagtttcctccccagattcggttttgaaagcatgaggagaaagcttccctttgtcagcaagctggtttgtgtcagccttggggagctccttgttatcagaagggttggagatgggcttggaatggtctttccgggaaggctgctctggaaccaccttgttagggctgtcttttgaggtctgctcctccgcacccgacttgctgggcccgtctattgggccctgctcctctgcaccggacttgttagagccgtcttttggagtctgcttctccgcacccgacttgttagggacgtcttttggggtctgatcctccgcacccgacttgctggagccgtcttttggggtctggccgtccgcacccgacttattagggacatcttttgtggtctgcgcctccgaacctgacttgctagggctgtctttttgggtctttgcctccgcacccgacctgttggggctgtcttctggggtctgcgcctccgcacccgatttgccagtgctgtcttttggagtctgcagctccggatgcgacttactagtgctgtcttttgtggtctgcgcctccgaacccgacttgctagtgctgcctttttgggtctttgcctccgcacccgacttgttggagctgtctttttgggtctttgcctccgcacccgacttgttgggggtgtcttctggggtctgcgcctccgcactcgacttgctagggctgtcttttggagtctgcggctccggatgcgacttggtagagcctccaggccgttggctcaagctggggtgggtggagacgtttcctgcagaaggccgtactccagcttcttcttgcttgacgctttcggtggccaagagcggcacggctcctgaaatagaaaaacgagttagcaccggagaagggcaggcgggaagaaggaactcctcagaactggaagagatcgggagcagcgggggaatggggattggggggtggggcgggagacgatggcgagcggagaggtgggtcgggtagggaagaagcgagcctagaggtgacctgcccaggtgagaatgggggatctgggggcaagagtgggatgcgggatggagggtcttacccgccgctgcgacgttcaggaggaccaaggcaaccacgaaccgcatcctgctcggatagcgcttccgccctctaatgctctcgcgagatccgcgcgcggggcccctctccagtcccgcccctgctgcgcgcgtctctcagtctcccgctgccgccaagacgaagggcgggatttagggggcagctgctgatgtcggcgctcgccttcggctgcttcgcttactgtcgccgagtgggaggcgagcctcttcttcctggtttctcgtctccaccacagccacaacagtctggccccccgtttttcgtcccctccgcctcgtacttccgagaccttacaggcagagctggagctccctcgcctctcgcactggccgcggaagtgaggtcactaggggcaggctcctcttggccaccaccatcgtgtgcttgcgtttctatcctctgcttttttcgtggttccctcctggccgtacacaaacgtgctgtgctctggtctctcccatgtgggaataaatccatccgatcacctgcaaagcgttgccttcgcatcctggccctcctccttcccgactccacggagacggtgtccttccaggtcgccaaacatcttttccaaaaagtgcatcctttttctgatacagaagcagaaaacaaagcctgactcctacccttccgggataatcactattaatgttttagtgtattgtctgccctctaaacatttgatgtttttgaatagataatacattataatgtttcagaaatgaaaaccggattttaaagtaaacagactttagaaaagtcttcctactcctccacaggttaccgcttacattagtttattatgtttccatttagttttgttaaaaaaaaaaaaaaaggactctttcccttcttaattagtgtatttctcttttcctctatgcatatttattttctccccatattgggataatcaggtaagtggttttgtatctcaccgtttacagttactgttatgtttatacattaaatgtttgaaatcactttatcaacgattgccaggcttggtgctttggagacagtgatttaagaaatgataggtcttatatgagattacatcaagttaaaaagcttctgcacagcaaaggaaacagtgaagaaacaacctacataatgggagaaactattcgcaaactatccatccgacaagggattaataactagaatatataataaactcaaggaaaaaatataattaaatgggcaccagccggggcaacatggtgaaaccccatgtctaccaaaaatacaaaaaattagccagtcatggtggcctgtgcatgtaatcccagctactcagaaggctgaggatggaaggattacttgagcctgggaggtggaggttgcagtgagttagccaaaatcttatcactgcactccagcctaggcaaccatctcaaaaaaagaaaaagaaaaaagaaaaacatgggcaaaggacctgctgaatagacatatctcaaaagatgacatacaaatggccaacatagaaatggtatatgaaaaaatgctcactatcactaatcatcagggaaatgcaaatccaaaccacaataagagatcatcttagccccagttagaatgactgttatcaaaagaaaaaaaaatacaaaatggtgacaaagataagaagaaaagggaatgctaatagcctgttggtgagaatgtagattagtacagccattatggaaaacagtattggcagggcatggaggctcacacctgtagtcccagcaccttgggaggctgaggcaggcagatggcttgagcccaggagttcgagatcagcctgggcaacgtagcaagactcttgtctctataaaaaaataaaggaaagcagcacagagtttctcaaaaactaaaaatagaactgccatatgatccagtattcccactgctggatatgtacaaaagaaaggaaataagtatatctaagatatctactcctgtaatcccagcactttgggaggctgaggcagggggatcacatgagcccagaagttccagaccagactgggcaacatggcaagatcccatctctctttttttttttttttttttttttgagacagggtcttactctgtcacccaggcttgagtgcagtggcacgatctcagctcactgcaatctccatctcctgggctctagtgatcccccacctcagccttccaagtagctgagactagtggatctcatggaagtagaggtggttaccagaggctgggaagggaagatgggaggaaagatgaagagaagtttgttaatgggtacaaaaatacagatacataaaaagagtaagttctgtagtcagtaatacggtaggaaaatatagttaacagaaa

SEQ ID NO: 3869 - DNA, 4001 bp, Homo sapiens
aagctacagggaaacagattccagatcaatacaaaggaaaagctctatggtcccactaaggactgggctaccttttaaacaaagaaattttccaacaccaggaatattcaaagagaagatgactgaatattttctcttggactcctgaaacagctccctaactggtctcctgacttctacacttacctccaaagagcccattctgtttacaatcatcaaagcaatctctttaaaaaaaactctcatcaaattgaattacttactctcttccttaaaactttccaagggtttctaaatacacttagaataaaattcaaacttgaggccaggagtgggggctcgtgcctgtaatcccagcactttgggaggccgaggcgggtggatctcctgaagtcaggagttcaagaccagcctggccaacatggtgaaaccccgtctgcactaactaaaaatacaaaaattagccgggtgtggtggcaggcgcctataaccccagctactccggaggctgaggcaggagaatggcttgaacccaggaggcagaggttgcagtgagccgagatcgtgccactgcactccagcctgggagacaagagcgaaactccatctcaaataaataaataaataaataaataaataaatacttgagattttgcccttcaaggccctaaataatctgaccctgccttcctccactcttcatctcaaaccaatctcctcttcaccatctcaagagctttgtacttcctgatgctcttattcccacctaagaggctttacacttctcagtatctctgccccttaatgttcattccacatctttgcaagactgactccttctcaccattcatgtttctgctgcaacattaccttctaaaagccttccatgaccactctatctaaaatctcaccaatacaacacacgtagacaccatttccgttaattttcttcatagcacttactagtaccagaaattaccctaacttgtaaatttgtatattgtctgtctcacctagtagcaaactgaatgaaggcagcaactttaatctattttgttcatgtttcaagtctcaatttccaaaccagtgcctggcacatagtaggtgtttaacaaacacttcacgaataaacaaattaattaacaaacatttgtcagagatgttctagaagggatatatgtctttaagggcaggaaggtggactatctggtacctaaaatgcattctacatctaagtgacattctacatcttaagaacctatggtctgtttgggaagtaagaaatccatacagtaatggcaggtgagcaaccacttaaccaaaaatggacgcagctaggaaagtgtcgacaacagaataatttgtaaagggatagtcagatctagaggaatagaggcacgcttcctaagaaagtgaccatcgtacaaagccagaagagactgggaaacctaactagggagactattctctggtgaaaggtaagcaagtttgcaggaggatttgctcttgcaattctgagggctacacaaaagcagactcggtaattatgcctgctcaaatgatgcctaaacgtgtgtcctgaagaaccagggtccccaagggggtaaatcccgtgtctaccgcaaggccagaaggtgcccagtaaattacactcctcctaggtcccacttactgcttccctttagaacgctgcttcactctacaccttcctggctgactcccacaaacattctctgggcgatttctgaaccacgtggagtcgaggaatgacagtgggagaaagtggttaaagtgctgtctccatggagaccttagcgaccggaaatcagtttcacagccgccgaatcctggcgataccaaaggatgggaattggtgtggctcgccaggcagccctagcaaaactggccgagccgagctaccgcgggtctggcaggcaggacacctgggagccaaacctcgtgcacgtcggcgtctgagaagagtcgcaggcgcctggtccagtcccggaagcaggtctccttctacggcgtctccgaggctcgcagcgcggtccacggtcgactaccgggtcagggcaaagggagggagagaggggtaacctggaggagtcatcgcgagaattgaccaaacgcagctcctccaatcaggagttcgaggaggtcgtgacgtcaccggggtggccggtagcaatccggtttagttaaccagccactgtaccgtcagcgccgcgcgttcctcatggcgttagggctgacgggccttgttgctgaggggccttcattcaacggtctcttgttgaatgaaaagacctcattctcttcacatgcttggacgcctgggaagcgcttttctcccaatccagaccttccacctttctcccactctgttggcccagtgcagagtctaggagaaaactacgtctgggactcgggaacgagtccagggagtttagagcctgcgagatggggcaggggtttgggcggcgactgaacggaagccacgagaaggattcggactaaaatgagtagtgctgaaccaacgtgtgccaaagcgcatatattcattcaatagataatgaactctactgtcagagcgtcgccaagcgctagccttgaaagctatcccctactgaggatacatgtattacgcagcacatacaaattgtcagatggttcagtccttgaaaaataaatacaataacggggtgtcactgggagctgcgacagtgggcaagatcaggaaagacctgatgctattatcaggagtattaatttggaaaatagagacatttcagttctctaaacgttaatgacttaagtttttaataattattttctgaattttttatatcagcttgccttggttttctttatagctttaccacataatgtatgtatcactatcttgtttcgttcaattttgaagcttttggaattgcgtatgtattctccagcaatttgcttctttcagcattgcttttcatattcacctacaggtggctgtagtgctcttcgcccaggctggagtgcagtggcgcgatctcggctcactgcaaactctgcctcccgggttcaagtgattctcctgcctcagcctcctaagtaaccgggattacaggcgcgcgccaccacgctcagctaatttttgtattttttagtggagacggggtttcaccatgttgctcatgctggtcttgaactcctgacctcgtgattcgcccgcctcggtctccaaaagtgctgggattacaggcgtgagccatggcgcccggaccgtaattttccattgtttaatatacttcattatgtatccatcctgctgcctcttaacatgtgcattatttccagtttttgttctaaacattgctgctgtgaactatgttgtgcatgtcagctggtgagtgtgtgcagacggttctccaccataattttttctggtatttttgaccctgacatagtaagaaatacattgcagactttgaaactgtggacgtagaagtactcacacataactgaagtaaaaatttcttgaaatgctactttacaggagctgtgagattttatttcctttttttctaaattatggtaaaatacacagcaaaatttaccattttaaccatttttaagttttatgttttttaaaatatgtatattgtttcagacctactaattatataactcagtgggtccgaaccccttttttgttggcagacactgcaactcttcaccctgcacagcgagaggtgggctagggagcaaacataataaacatatgttgaaaggtgaagctactgttaaaacttcagacaaattaaacttaacagggtttaattgagcaaggggaaaaatgattctcaaatcgggcagtctccagaatcatagcagattcagagagactccagggatgcctcgtggtcagagcacatttacagacaaagaaaggaaagtgatgtacaaaaagcaagtgaggtacggaagcagctggatgggttacagcttgg

SEQ ID NO: 3870 - DNA, 4001 bp, Homo sapiens
ttttaaacaaagaaattttccaacaccaggaatattcaaagagaagatgactgaatattttctcttggactcctgaaacagctccctaactggtctcctgacttctacacttacctccaaagagcccattctgtttacaatcatcaaagcaatctctttaaaaaaaactctcatcaaattgaattacttactctcttccttaaaactttccaagggtttctaaatacacttagaataaaattcaaacttgaggccaggagtgggggctcgtgcctgtaatcccagcactttgggaggccgaggcgggtggatctcctgaagtcaggagttcaagaccagcctggccaacatggtgaaaccccgtctgcactaactaaaaatacaaaaattagccgggtgtggtggcaggcgcctataaccccagctactccggaggctgaggcaggagaatggcttgaacccaggaggcagaggttgcagtgagccgagatcgtgccactgcactccagcctgggagacaagagcgaaactccatctcaaataaataaataaataaataaataaataaatacttgagattttgcccttcaaggccctaaataatctgaccctgccttcctccactcttcatctcaaaccaatctcctcttcaccatctcaagagctttgtacttcctgatgctcttattcccacctaagaggctttacacttctcagtatctctgccccttaatgttcattccacatctttgcaagactgactccttctcaccattcatgtttctgctgcaacattaccttctaaaagccttccatgaccactctatctaaaatctcaccaatacaacacacgtagacaccatttccgttaattttcttcatagcacttactagtaccagaaattaccctaacttgtaaatttgtatattgtctgtctcacctagtagcaaactgaatgaaggcagcaactttaatctattttgttcatgtttcaagtctcaatttccaaaccagtgcctggcacatagtaggtgtttaacaaacacttcacgaataaacaaattaattaacaaacatttgtcagagatgttctagaagggatatatgtctttaagggcaggaaggtggactatctggtacctaaaatgcattctacatctaagtgacattctacatcttaagaacctatggtctgtttgggaagtaagaaatccatacagtaatggcaggtgagcaaccacttaaccaaaaatggacgcagctaggaaagtgtcgacaacagaataatttgtaaagggatagtcagatctagaggaatagaggcacgcttcctaagaaagtgaccatcgtacaaagccagaagagactgggaaacctaactagggagactattctctggtgaaaggtaagcaagtttgcaggaggatttgctcttgcaattctgagggctacacaaaagcagactcggtaattatgcctgctcaaatgatgcctaaacgtgtgtcctgaagaaccagggtccccaagggggtaaatcccgtgtctaccgcaaggccagaaggtgcccagtaaattacactcctcctaggtcccacttactgcttccctttagaacgctgcttcactctacaccttcctggctgactcccacaaacattctctgggcgatttctgaaccacgtggagtcgaggaatgacagtgggagaaagtggttaaagtgctgtctccatggagaccttagcgaccggaaatcagtttcacagccgccgaatcctggcgataccaaaggatgggaattggtgtggctcgccaggcagccctagcaaaactggccgagccgagctaccgcgggtctggcaggcaggacacctgggagccaaacctcgtgcacgtcggcgtctgagaagagtcgcaggcgcctggtccagtcccggaagcaggtctccttctacggcgtctccgaggctcgcagcgcggtccacggtcgactaccgggtcagggcaaagggagggagagaggggtaacctggaggagtcatcgcgagaattgaccaaacgcagctcctccaatcaggagttcgaggaggtcgtgacgtcaccggggtggccggtagcaatccggtttagttaaccagccactgtaccgtcagcgccgcgcgttcctcatggcgttagggctgacgggccttgttgctgaggggccttcattcaacggtctcttgttgaatgaaaagacctcattctcttcacatgcttggacgcctgggaagcgcttttctcccaatccagaccttccacctttctcccactctgttggcccagtgcagagtctaggagaaaactacgtctgggactcgggaacgagtccagggagtttagagcctgcgagatggggcaggggtttgggcggcgactgaacggaagccacgagaaggattcggactaaaatgagtagtgctgaaccaacgtgtgccaaagcgcatatattcattcaatagataatgaactctactgtcagagcgtcgccaagcgctagccttgaaagctatcccctactgaggatacatgtattacgcagcacatacaaattgtcagatggttcagtccttgaaaaataaatacaataacggggtgtcactgggagctgcgacagtgggcaagatcaggaaagacctgatgctattatcaggagtattaatttggaaaatagagacatttcagttctctaaacgttaatgacttaagtttttaataattattttctgaattttttatatcagcttgccttggttttctttatagctttaccacataatgtatgtatcactatcttgtttcgttcaattttgaagcttttggaattgcgtatgtattctccagcaatttgcttctttcagcattgcttttcatattcacctacaggtggctgtagtgctcttcgcccaggctggagtgcagtggcgcgatctcggctcactgcaaactctgcctcccgggttcaagtgattctcctgcctcagcctcctaagtaaccgggattacaggcgcgcgccaccacgctcagctaatttttgtattttttagtggagacggggtttcaccatgttgctcatgctggtcttgaactcctgacctcgtgattcgcccgcctcggtctccaaaagtgctgggattacaggcgtgagccatggcgcccggaccgtaattttccattgtttaatatacttcattatgtatccatcctgctgcctcttaacatgtgcattatttccagtttttgttctaaacattgctgctgtgaactatgttgtgcatgtcagctggtgagtgtgtgcagacggttctccaccataattttttctggtatttttgaccctgacatagtaagaaatacattgcagactttgaaactgtggacgtagaagtactcacacataactgaagtaaaaatttcttgaaatgctactttacaggagctgtgagattttatttcctttttttctaaattatggtaaaatacacagcaaaatttaccattttaaccatttttaagttttatgttttttaaaatatgtatattgtttcagacctactaattatataactcagtgggtccgaaccccttttttgttggcagacactgcaactcttcaccctgcacagcgagaggtgggctagggagcaaacataataaacatatgttgaaaggtgaagctactgttaaaacttcagacaaattaaacttaacagggtttaattgagcaaggggaaaaatgattctcaaatcgggcagtctccagaatcatagcagattcagagagactccagggatgcctcgtggtcagagcacatttacagacaaagaaaggaaagtgatgtacaaaaagcaagtgaggtacggaagcagctggatgggttacagcttggcatttgccttacctgaacacagtttgaacagtaagcattgtatgaatagttgaagtatggctgctgggattg

SEQ ID NO: 3871 - DNA, 4001 bp, Homo sapiens
tcacagctcagggccttggctcctggccccagggtctgctgccatccaagctgcagcacctactgcagatctaatatttcgagaaaagccagaagctgattttaggctaaaatatcccaatttctaaacatctgttcaaattaaaacaaatgacaccactgtggtgtgagtcgcataccttggggcaggtgcagagggccagagagggctggagccacacacagcgccctgcccggtgcctctcacctcccacctctcctcttcactcctctcttctcccaggtgggagtgaggacgccactggcagccacccagcacatccccgtgccccaagcccacggttcccgacacatcaggagagctcttcgccgccctcagccgtgtttctgagtaggtttcgcgttcctcaggatgctggggagctggttctagacacaggcccagcccggctggcctggaagcaaggagggcgcccatggggacacactctgccccagtcctgcagctggagcagcccagagcccctgccacaagacgcctgggagaactcagtcagggggctggcaaggacaggtgagcacagctggctcctcagaagaactgggcttatctgaagtctggtcaagttgaactggaccatctattcccccaagtgggcctggatgggccagaaccttttacgtaggagggacgtggcccgggctttctgcctcgacgactagcccaagggagatggaaatgagagtgagataagagggatgggtgggctggagatggccagcagctggcattgctggcagcttggaaggcgacccgtgacatcagtgagaagggcgggtgcaggcgcacgagagctgagggcgagccctggcatcaggaccagagaggcccaccacagagcgggtaagcagtggcacctgagcagggggatggtgtcctggtaagaacaggtagggagaggctgcctcaaaaattctggctaaaagtgagcttttgagtggactttgctatgtgcatgccaggtcagggaagcaagtcccgcgggccctggagagaagctaccctgcaggcggctgctgcttcaggggcacagggcccacaccacacttggggacaggacaggacgcagcacttatgtggcaatttctttttaaaaaactagagaattctaagatagctctgaaattcagaagaaacgcttttgagcagaaaaaataacatcagactggaaaggaaggagcacgcggctaagcaactagatggaggcttacggctgtgagcaactaatggctgtgagaaatacttcccttcctgtcgccctcctggcttgctgttatttgctctgaatcttaatggagtttaatttggacagggacaacaggtcaggcagtaaacaagcagcggcggcgcctccttctgtctacactgcacctcaccaggttaacctgctcctggggccgctccccctgcaccctccaccacttcgggccgcgtggaacgtggcagcagcctagccactgtccctccttgttgtcactgaagcatgggtgggggtgaggacgaccagtaagagaattttagaatccaaacatcaggttacttgagcctagatatatgttaagatccatcaaactgtgacctcaatatctgtgtattttactctctgtaaattatacttcattagaaaaaaataaatttaaacatgaaacaaaaaatactataaaggacctagtctatttgtcactttccacctctttaaataaaccagacaggcttttctaggcatttcttttctgatttcatttttcttttattgaaatctcaaccaaaacacaaaaacaaaaatttaaatttcctgcaagaaatttaaattttcatgttttggcccaagacactgaaagcaggcttacccatccctaagttttctaaactccggacactcgtcaaggttcctcaaggttgttttctgccaattgacgggaaatgtttgcacctggctcttaatggctctgcaggaagtgaatgctaactttaaatggtgcattctgggaattgtagttccactatgaaagatcacgtctcagaagaaagtaaaagacaatgacagcccagatcacagaatttcagagctggaaggagctttggaggttaggtgaattttatgaaagagggactggccagaggtctgggcggagtgacgagtgcggcttctaccctcagcctcctccaccagctacagcagaggaaggcaacaccacagagacaggcacatcctaaatgctttctctctccagagcagtccctctggccacccctggcatgtccttttctgtctcctagagggtggctggagactcatcttcacctggacatggaggctccagagactgtcctgtctcctggcaagcggcccgggaacccaggacaggaagtgagcaaatgcacccactgggacctggggacggctccttcctggagctcccaccctcacatctctttgtgttagtgacacgttgtttcctgccaaggcacacacagaaagggacacttactgcttagtacaacagggtgcatggaagctgagggtgcgcggcccgcaccagctgtcccaaggtggggaggagctgtccaggaacaccgtgatatgtttgggtccactgacaaggcataccagcagggaactgttgttttaaagtgacatcaaggccctcaacttatcaaccatgaaacggaaggagttgcatgcccaggggaaaaacagaaatcatgatggagagaaaatacagcaagtatttctataaaatataaaaaggccataaagtggatacaaataatttgcaaatgttatgtttgatttcctcgttaatctgagtctcaattgaagaactattagaatctacaagtgaatttgataagatggccaattactaaaatgggtagctttcccacacgctagcaataaccgaaaaataatgggtggggagtaagcttccggtttccactctcacatgtaaagagcttaggagtcatataccacagccttaaaacaacagcaaaaaacactgaaagaagtgaaaatcaacaacttttcttggatccataaggaagtgaggtcacagatgtctctcctgccacagagaatagcagtgagatcagctcacgtggagcagaatctacagtctacaggggaaggaactggtgggaacttgatttggacaaaatgctggaggctgaacatggcaggtgtgagaatctcctggggtcctacattttcataggtttcacctccaggaaccccatcaggttctccccacgaaaagccaagaaaaaaaaaaacacctcatgtctctgggatgaggagggggaggtgaccaccttgaaatgagcccagagcgttctccaggcaaaggccaggcctgctctgtagcgaagctgacttcaccaggacctcatctcagctgggaagggcatttcactgctccagccccaccagtcttccgtctcacccaagcggggaggagaaagggaaagacacgtgtgaaggtcacggctcagggacacgggccactgaagggcttaaatcgagtcacaggctggagcctgcttcccctcccagccctgcaggctccagcataacatcctgggtgggagtggaaagggcccaggcgcaggctgtggaaggcatgctcggagaaactccacgacaacagggagacaaaacaaggacactcgaggaattttacagccactgcaggattaaacacagcccgagtgccagccaggttaaggggatggatgccctccaaacaaggcacacttacttcacctttcagtcaagcagcacttactgatgggggatgcgttgacaaacacgtcatgaggcaagttcatcattgtacaaacgtcacagagtgcacttaccgcgtaccacgcacctaggctgtatggcacagcctgtgctcccaggctacacaccccagtgtgttactgaatactgtagg

SEQ ID NO: 3872 - DNA, 4001 bp, Homo sapiens
atgttacatgtattataccataatttaaaaatggtgagaaaaaagcaaccagcgcaggaagatactgaataggatgtttagtcatttctttattacctaataaagatccttcataaccatttcttcattaaggcaaactctgtgtttaagaacataggcctgggccgggcggggtggcttatgcctgtaatcccagcactttgggaggccgaggcgggtggatcacttgaggtcaggactttgaggccagagttcgagaccagcctggccaatatggtgaaaccctgtctctactaaaaatacaaaaaaattagacaggcgtggtggcgcttgcctgtaatcccagctacttgggaggctgaagcaggagaatagcttgaacccaggagcgggggttgcagtgagccgagatcgcaccaatgcactccagcctgggcgacagagggagactccttctcaaaaaaaagagaaaaaaagaaaaaaaaaccaggccctaatgtgcacataagggacagggtggtcagttctaactgctatttgctccacctgaggccagtgtggaccaggacaaatcctaacaggatggactgggccgttctaagcaacaggaccttctaacctcctttctgaacactgtgaggccaactgcaaaggtacccccccacccccaattccgatgtcctttcctcccataccatgttagaccgttgcaacacgttgcctcgttttcaaaaaacaataacaaaacttctaggacacaagctctgaaggaaattgtcaagaaagtgcgctggctgacttgtgaaataatctaatgttactaattcttataatacattgtaatgatttaagacttacagcaaactactgtgaactttcaataaccctataaataacacgtgccattcccgtctttaaaacttaaataacaccatgcaacataaaacagaaacatctccaaagtggtttttaaagtctgttcgcggttctggtgcctcccgcgtgtaatccgcagaaatctcactgaaataggctgaactcacaaggccttagaggggtttgggccctgccgcgggggcccacgtgggaagcggccgagagccccgggccaggctctaagggagcgcaggaggatgccgtccccagccggccgtcccgtagactctccgcgcgtacccgcgtcctgggctcgggggcccagtcccggaaagccctctcgggggctgtcagctacggaggcgcaggtcgcgtctgcccggtcgctcctgctcgcagacatccaggccgacggcccgcgcggtccggagagtcagcagtcgcggccgagcaggacaatcggcccaggacctgcgcttccagagcgtgcggcttctgaagcctaggcgccggccggatcgatcgcgcgcagggcggacccaggcggccggggtgggggcggctgcgctgcccgaggcgcccggcccagagacggcggccgggccaaggtcacacagcgcccacgcccgctcccccgcgccccggccgccgaggcccggcgcccccgccccccgcgttcgggccggccgcggggcctcagtttccccgcagggccgggtcggggcgggggcgtggcggcccggggcccgcgtacctgtggaaggagacggcgcgcttctcgccctttccctgccggttggagcagttcacggccgcacagcagatcaccatcgcgggccttggcccagccgcgcagccaggccccggccctagccgcccgcccgcccgcggaccgccccgagggagggagcgcggcggcgacacggctcgggacgtgggccggcccgcggcgtccgcgccgtacggcaagatggaggcgcaggcgcccgcagcgggcccgcccccgccccagcccccgcccgcgtcctcgccagccgcgggttcgggcgtcttcggaccagcggggcgccgcaggcccctcgcagcgtccgtcggcaggcgggcagacgggcgggggagtcgccccggcggggcaagtccgtaccgcgacatgggcgcgccgagcacgtccgtaccgcaagatggctgctcggacggggacagagctcgcctctgccgcctcgacaactgctcctgggtcctctaagaggaggaagcgccacccatggcacacagtgtcccgtcggacagcagaaccagccgtcgtcccacgacacgaccccatgccgcccgcagggcgccccggggctcgcgtcggcccggccgtacgccaaaatggcggctcccgcgtatttccgctcgcgcgccgtatcgtcttcgccgcctgcgccggcacacctattggcccccgcggcgtcccgtcgccgcgtcgcgttgctggcccgtcggagcgacgccgctcgggtcagtcggcggccggactgggaagatggacgcaggtgaggagttgccgggggtcggtctttccgcaggaggtgctcgccttatcattggcctcccctgctcgggtcgggctgccgcgactcgcctcggggcacgccggtgcgggccaggctgggccggggcggcgggcgctgcgggagcgcggggcggtgttggtgggtggtgggcggtgggagcgggagggggacggcggcgcactgcgccgcggaacccgccgtcggttgcgctggagcttctgcttttccggtcccgtccggagcgctccggaggttgtggctgcacaggcccttgcgccaggtcggccgtggagggcggcggagcctgccgggcggggagaggcgcggcggcgaacggggcggccgcggtccgggccggggacgcgagcggcgggcgaaagcgtagcctttccgcagctgagcgtgaagggatggaagctctttaacttttatgaagttattggtaggttggaggagagaaacgtgacgtgttcatcacagtatacgtatcttttttgtttttgtcttcaatttagtaaccagtagattctccaagctgcttttccgtgacgagaaagagaaacagtgaatttgtatcatcgggtcttagtttcttggggtcctaagagagagagaaagagaaggagtgtgtgtgtgtgtgtatagggagtgttggtttttttcctatcctttcatgcttccgctccatttttgctagcaagattattttaagtcagcgccaaacccatcgctagcccagtagccctagaaatatttttacacagaagttttagctcattcattctttgtgggaactgatttgccttttaccaagtatcccccatctgtaaagaaagattttcatctggtttaattctgtcattctgaatgggattgtttttactttttatttttctggtagctacaacataaatttattaagatctgagttggaaaactgtaatgtgtattgccaatatctattaaaatgatttgtagcagctcaccacttaaatgtggtaggtggctggaggaaacaggagccctgactccctaaggagcatgttgaccaggtgtatatcttgtgaagtttgtcttttagaataaccgtcattcacggttgaactatttgcagctgtgtactatttgttgtttactattttacaactgttgtattatatctttttaggtgttattgtttgtgatgcaggatttttctcagccactctggcagccagagacctccggctggcgaggcccctgcccaggccttgcttgggtccaggctcgccgcaggagataccccatctacttggtccaccggtgggcacctggtttgcactatggcacggataccatggccaccatgactgtatgctcagcccctggcgggagtgggtgtgtgggtgagtgagtgccgggtcccgccagctgtttcaagcgcaggcaccagagtgggctctgcagagcttacagctagacatgtggcaagcaactcccacggcggactccagcgtccagacaaagggacagtggattctggtgtccagacaaggggaaggtagtggcgcccaagcaggggtgctt

SEQ ID NO: 3873 - DNA, 4001 bp, Homo sapiens
gaccccttaggcctaacactggtcacacttccacatcagttactttcccaggagccagatgccatgtcaaggagctgggcttgaactctgaacaccttcttctggatcatgacagtgaatttaggggccctggctttgacgccccacagtaactatggggatgaatttgactagacatagctctcagtattagcttggactttctgtgccagggtgggaggggatcccctgccctctaagggcaaagccacccaaagctctctacctacatgaggcatatgagcactgacctggaggaattctcatttcctagtctgtggctctgacatctgtgggcccccgtgcaagtctcacgtgggctgccacgtgccactctcttaactacaaatattaagtgtatctcacttagagacagagacaaacttgatcatacaaaccatgaatcttttgaaagtgattatgctgggacaatggtataagccagaactctctctctggcaacctaggatacaaggtcactccgtatgggagtccatgtcaaagagatgaaatatgggtaactccaaaagttaactgcagtggataagcaaagcaggcagtatttcacaaaacagaaccagggtcggggggcaggtgctagcggtgccctcaataaagagaggaatttctgcaattctgtggtaagagttagagccaacgcaaactgcccaagaccgtggagtaacagaaaggccttcataggaccagacttaaacgctacgactgagctgccaaagaaaccatcgcaggagtgagggcaggagcgagcaaggcagtaaggtacagcgaaagaaaatatttttcaaatgcccttccctgggtggaaggaatatcacacctggggcactgggaaggaggatatggaacaactgtccaggaacagaggacagaggggctggcacggggctctgagcaggtcatggaaggagctggcctgatgagcacatacccatgcccctcacgcaacaggactgtccctgttctgtccaatgccttccaggggcagcattcccaggccaattcagcaaagctaaagagaaatacacatggttgggttcaatgtaagccagaggcggaaatagcaaccacaggaggtggtgaagttgaggaagaaaatcaagtgctgttgttgggctgctctatgagggctccaagcatgggatggagacccggactacgtgtcccctgggattttatattctaataattttcccttgccactcctctggaccctattccagagtagagaaggtcagaaaaactctgaccaataaccaggataaataaatacggaaaataggagtagcccgaaggctgggaacaagaaggtgggtagacaggcgcccctcagggaggtggaggggttttgtgagaaggggtgggacagggcggagactcggaccccaggagccgacggcacccctaggggtggaggcagaccccgggctctctgaggctaccggtgccagtcatcccgccaaggagggcggcctaaatcctcaagggactcgcaggcgcctgagattccactcccagcccctgaaaacaccacggacttcagtttcggggttctcaaaggactgctcaaatcccgcagaaaacgcaaagcatcagaaaccccccgcaccaccctcccaagttcctcaagtccgagcgccggaaccaaaggttccagaaacgggcggggcgacggacgtgggcctgcgggaatcagggccgaacggagccgcgagagcgtccggagctcagaaatctcgcccgcgacgaccccgggagggcggcgaggttggcgcgcgttaccggtgcggggcgcggggcgcggggcgcggggcgcggggcgcgaggcccggtgcgcagcagggctgcccgggctgcgaatgtgcgcactcccgagtccgcgtccctgacggtgcggtggggcttccggtcggggccggagctagggttctcagcttcgcagtgggaaggacctggggatggggcggggggcgggggacggaggacacaggacagaggagagtgcgtgagcagcggtgcgcgatcccggaagcatcacgagggggaagccctgtgcccctcccgcggccccttttttttttttttgagacggagtctcgctctgtcgcccaggctggagtgcagtggcgcggtctcggctcaccgcaagttccgcctctcaggttcacgctattctcctgcctcggcctcccgagtagctgggactactggcgcccgccaccacgcccggctaattttttgtatttttagtagagacggggtttcatcgtgttagccaggatggtctcgatctcctgacctcgtgatccgccctcctcggcctcccaaagtgttaggattacaggcgtgagccaccgcgcccagccccgcggcccattttttaaggcgctttagtaaacgctttattgacgttcagcctcggagtcttcgctgcagggttgtgagccccacagaacctcacttttcagtttagaaaatggacagcaaggtgtgaagaagaaaggccctgcgttcctttaagattcttgcctcatgtctgcagcatcagagagctggagagcatgagagccttgcttctcaaactgcggttagtatgttaggacttcagaactcaccagataggtgacatcagctccactccaaaaattctttataaaaaattttcagtggttttggggggtatgaaaattcttcatattttttgagaaacactttttattaagcgtaggtctattctaggataaaagcccgtcacccccattcattcttttaagagaaaaaaatggcaagaacttcaaggaaaaacaaaacagcaacaacaaaaactccctctagatatgcccaaatgcccctggattcacattgagctcttgaggcccatcccactgaagcaaaattagaggaggtagaccagagaggttcgggcaaaggtttagtcctgggtaggccaggtcactctggcagtcccagctgggcctccagtggccctctgatgttgcctgttcccccctctttcttcctcctatctctgacatcctcctacatttgcggtttctgcttactcaacttacctgttctccaaaattcagcccatacacggtgcccacttgacatagccacacaggttcatgcagctaccatggactgaccctagtctgggtgggtctcagattctggaaagagagggagagactggtcactgctcagctaatgggattggccttcttgtcccaagctggggctgaggacttgtcacagagttcacacaggggtcagaggggacattccaagagagacgggtataggccaggcagggacccccaaagggttttcatcccttctatcaggtgtacttaatcactcagaggccagggaaactgaggccgatggcaaaaataagattcagcagcgtgttttacagcactcatgtgtgttacagcgtgtgttacagactcaaccagtagagtctgcaaaaggacagatgcaccttccacggacctctcccacaagccctctgccacacttacacgggcctgcaggcctttgtgattctgtgggcaggaggagtggccagaagctcttctgtgaattgtaatttaactccccagaaaagagagaagcaaaacgctcagggaacaacagggttcattaggaatctctgcctggcacataaagaacagtacagccgcagagaacagaaacttctgcaaggaagtttctggcccatgaggaagaaagaattctgaatcgcgaagcaacagtagggttgtggagttctcagagacttctacatggtatcaacatttagtttttgtaggattagcaaccgcttgtttttttcttttcaaccttattgattagagtgcttagctgtctataacgttgaagccaacgatcttccagccaatgctgaagcagagccctggggtccatgcagtgctgtt

SEQ ID NO: 3874 - DNA, 4001 bp, Homo sapiens
acttggatgatatgaacctagcactccacctagggtccatggatccacggataaaattcaggacataagtgaacttgtgaaccacatcatcttaagcattttgtgcacttcaaacattactctgagaaagttccatagcctccatcagcctggcaaaggggtctatggcaccagaaaatgttaggaaccttgctctggaagaaccagtaccacagttcctgagtggctctatgaacagcatcctataggtggacaccctacagtcacagcactcaggtattctgcgtttgtgccccaaaaacacacctacaaccacagtgacgtgcttctccctcttctccaggaagtactgcaggaactgtgttgtgcaggacagggacaggtccttaaatgcatatgtgacgccatgccacagctccaacacgttcagcccattcctcaacctggacagatggaccacttctctgtgacggaatctgctgaaggctcggtcgatcagatctgtgagggtagtggggtggatagccaatgaggggcctggtctctttctcaagttccctctcagtctctgaatataaagtttccaactcctgctactaaaaggccaaaaatcttcatcttaaatgataccatttttgaatacaattgtaaaaacctagaaaaaagtctgggaaaacatgcaccaaactgttcatagattccttatagtgatttcctcagtgaccagaattggtactagaagactttatttttcattttttatacttcttcattgtttgactgtctcgtgagcatgtattccaatcaggggtcaattaaatagctacataacacatcaatgtcgcatcccatctaatgttccttcctaaagataggaagctttttgtttcttacattactaaatctcacacctgtgacgccagagcctttggatggttgatatacagccctccctaaggcaggactggagcagtcctagagcacagcttctcaaactgtcactggcaaaccaagcacctgggatcttgttaaaatgcaggctggttcaatcagtctgaggcaatctcggatttccaacaagtgcccaagcaatgccatcactgctggtcatcagactgcattttaagtggtcctttctcttccccaaccccaaaccaccaccattacattatggattttgttcttgctgtttaaagtgtggctcatggaccagtagtctagtattatctggacatctgacagaaatgcagaattctcattcctaccccagacctactgaatcagaatttggtttttaacaagatcccccagggaatccataggcacagtagagcttaagacaagctggtccaggacagtcttgaagtcctttctggaattaacattcaaaaaataaaatagcaatttgggggtctgggtgctttatgtgaaggaaggaaacaccccaacattcaagtcactcaagatgattctaaaatccctagtgttgaagaggtttttgtttttttttttttaaagaaaaagaaagaaagagagagaaagaaagaattctctgaagaaaatttcaacattcatctccctggagacaggacgaaatctttcagaatattttcaattctgggattctagagtcaggaaaagaaataaaacaaagtttgagaagaaatgtgactagagacttcctagtggtttggtgatggatttacaattctgtagactgagctggcaggggctggaagagtgaaagtacaggtgggagcactcaccatttaattcatcttttggaaggagctcagagccaatgaagagggcacacagctccttcaccaggccaggataggagagtgtgctccactggcacagggtccctctgtccaactgtgggagctcttcaggcataaagaggcccccgtcaggtgcatagccagagaagagggccccctcaaagttgacccgtggggctacgcccctggtgctgacataccacatgatcctggaggcctgcagagaggacagtcccagaagcacctggtctccaagctcccacaccccaccgggcaaagccaaagcacacacagtctcacagttagcctctagaccaccagtctccggggcacatgtcccagacctagagatggcagtcctgtatcaagtctcatgccagcttcatctacaactgtgtaaatcatgattccaccaatcaaaatgaggcaattccactgacctcctgtcttcagggagagggtatcggagcatgccgggaaaagagaaagcttggtcctcaccaatgagaaagaaggcctggcggtggggacagataatagcaatagtaggcaactgccagcttgatatccctcttgctaaggcgaaagaccaacgcacagagtcatacacccctttcagggacgtctcggtccacttctgctcaaaaaccaaacatcttcaatggttattggaaacactgtctacagcctagtagttctcaactgtggtagcttgttggaatcaacctcagagcgttaaaaaaaatacaactacctgaatcaattaaattagactctaaatgagaggctcctcaagagagtctaacgtgcagccagggttgagaagagggtgaccaactcatcccagttcgcccaggagttttctggtcttaaaactgcaagtcccatgtcctaggaaacccctcaatcccaggcaaactaagatggttggtcatcctagtggataaccagtgttctacctcttagcctaatcctaggaccgttataagtgctgatatgcagtctttaaaactaactggccctgcatggactgagttctctggttcctggggaagcccaggaccccttaggcctaacactggtcacacttccacatcagttactttcccaggagccagatgccatgtcaaggagctgggcttgaactctgaacaccttcttctggatcatgacagtgaatttaggggccctggctttgacgccccacagtaactatggggatgaatttgactagacatagctctcagtattagcttggactttctgtgccagggtgggaggggatcccctgccctctaagggcaaagccacccaaagctctctacctacatgaggcatatgagcactgacctggaggaattctcatttcctagtctgtggctctgacatctgtgggcccccgtgcaagtctcacgtgggctgccacgtgccactctcttaactacaaatattaagtgtatctcacttagagacagagacaaacttgatcatacaaaccatgaatcttttgaaagtgattatgctgggacaatggtataagccagaactctctctctggcaacctaggatacaaggtcactccgtatgggagtccatgtcaaagagatgaaatatgggtaactccaaaagttaactgcagtggataagcaaagcaggcagtatttcacaaaacagaaccagggtcggggggcaggtgctagcggtgccctcaataaagagaggaatttctgcaattctgtggtaagagttagagccaacgcaaactgcccaagaccgtggagtaacagaaaggccttcataggaccagacttaaacgctacgactgagctgccaaagaaaccatcgcaggagtgagggcaggagcgagcaaggcagtaaggtacagcgaaagaaaatatttttcaaatgcccttccctgggtggaaggaatatcacacctggggcactgggaaggaggatatggaacaactgtccaggaacagaggacagaggggctggcacggggctctgagcaggtcatggaaggagctggcctgatgagcacatacccatgcccctcacgcaacaggactgtccctgttctgtccaatgccttccaggggcagcattcccaggccaattcagcaaagctaaagagaaatacacatggttgggttcaatgtaagccagaggcggaaatagcaaccacaggaggtggtgaagttgaggaagaaaatc

SEQ ID NO: 3875 - DNA, 4001 bp, Homo sapiens
ctaaagttgggcaaacatgttttaacagacattgcggatgacccatgcgtagtcttgggtccactctatgggctggtatcaggctgacttacaattgctagtagctgtcattttttcctagaatgataaataggtgagttgccaagatgtgctactgtgtggcaagccagaagttccaagttgttaacacccccagggacagggcagttttcaaccaatgtcttgtaactaagtgtgcaattgtcctacctccttcatgccttgagtgtgtgtgttgccttgcttcccagtgtctgccctcagaatcaagtctaggcacccactgtagtgctgccttaatagttctccgtttattggctgttttctttttcctatatcacttctccatcccccataggcttttcctgagctttccaagtagactccttgtactcaagtgtggtcttcaggtcagctactgggagaacccacaataagacatatatacctctggaatagcaagagctaccaagagacaattatctaaattggttcccatggtttccacaaaaccaaaattacactttaagacagaagctctatcaaatcagttacagccttcaatcagtacaagttctgctaagagaacaaattttatctaccacacttgagtcatttaattaaggtcttggtaacttcagaaggaagattattgtgaaacaaagacagtttagtcaggctttttatcttggttgatctgaaatgcatctttattgctatatcaatcaactaaattattttttccaagtctggaataaaattatatattggtgtgttgggcaagagagacaatgaggataaaattttaatttgttttcatgaacgtgactttgtagcttatgtgactgctgaaggggactctgtaatttttattacggtaaagtgactaatggagaaggcagaagccaaataagaaatcccgttttagggccagacaagcttctgaaaattgtgaaaaccaaatagttgcagtttggcattcaaagttaatgaacctgaattacaaaatactcttgacaaatttaatttggccttggggcagtggcaaggaaataggagaatctgaagaaaagaagtgaagcagaagaaaaattaatgggatgaaagaattggctatgaggacagaatgcaaacaataaggccaacaagaatccttaattcctactgccttataaatatacagcatatgaaagagcgtacaaacaaactgatgcactacactcaatttacccaactctccagctactcagatgcactgaaaaccacccagctggcatttagtattctgctactctggaacccaagcaatatagcttcagaagccaggagagaagatgtccccctctccactgcatacccaggtatattcatgacaaaaaaaaggtaatcaaaagagagactctctctcgctctctttttttaattccaaatatatcacttagccaatatacctttctatagaacatggttgactttaatatttttatttaatttcttactctattatcatagaagcatatccttcatgtgaccaaagcatttttttacctccctccacaatagcagttatgttagaatcattttgcatgcgttctctctgactaaatggtgagctctttgagctttgggatcctgacttgctctattttgtatcaccaaaacccagcattgtatatgacacataattactgctgaaaaatctcttgagttttaaaatgctaaattatatgcctagtactttatgatgaggcaaaatgtacagcctttctattgaacttcatttgtccaggtcctttttatttaacacataaccatctttctttctccttttttggggaggacaggtattcacctgtgccagcagagacgatgtgatagttttgatgtctttcccacatctgattcttctgatttacctgctaatttgtgatacaaaaccacctcatctgctgtgttatgcatcgtttcgcctctgaatattttacttcttaaagggaattttaatttgtgaaaatgctcagtactcagaagaaacaccatcggccaggcactgtggcgtgtcctaatcagtatctccatctcaaacaaggtattagagaaggggaagaacaaactacaaatatttccctgattcctcaatctagtgtatttaatgtagaaagctgttgtgaacttgtctgccattacagtaaatgtcctatgaaataaggccattttcccccacattttgcaaagcacctccatcacgagtaattagtgtcaatgacagtgtttcttgccccacattccagcacagcccatctgctgcacgtcctgtaatgccctcagacagtctcaggttcatctgctccctgcctggcatggtcccccccctacagttctgtccatctgctgtcttcatcactctgcccttttaaagtcctgtcaatttcctgactctcggccactcttgctcaggcatcttgatcaccttgggctgacacaacgatctactccaccagcttgttctatcagctcaggtgtctctgtccaaagaccaatctatctgaaaggatatctgcccctcacattactgaagacaaaaatgagtataatgtatgagaacataaactaggcaggacattagtggaaaatgcaatcaatgagagttctaagttctactctgggctccgccgttaactacatgtataaactcagaaatgtcgctgatttcccttttgacctcggttgcctcagttcttaaatgagaaaattgcattatattttctctaagaacatttctaactcaatgatttaaagccatcgtcactttaggttagccaattcaatgaggactatttttaaaacaagaaaagaaagcagaagacaggacagatacacagaataaagaaagaaagcatcaagttaagaattcacatgtgtgaaaccattagaatgctgtatgaccctagtactagccactatcattatcacctccaaatgatctcctagcttcctcccatgacacctagattttaaacccagcacttagaataaaatgaattaaatataaatagatcatatctctacccctctcccagctggctgcccactgcacttggaataaattcaaattcccttccacgggttccagcctctctgagctcatcttgggtcactctctctcttcctgaagtacagccccaccaacagtgctttagtctttggaacatactgtgttagttttgtgcgccatgaaggaatacctgaggctgggtaatttataaagaaattaggtttccttctttggctcatgcttctgcaggctatacaagcatggtgccagcatctgctcaacttctgttgaggcctcaggaagcttacagtcagggcaaaaggcaaaggggcagccagtgtatcacataggaagagagagagaacaagcaagagagaagtcaaaggcaccaggctcttttaaacaaccagatctcacatgaactcagagtgagaattcactcattactgcaaggacagcaccaagccattcatgagggatctgcctccataacccaaatacctcccactaggccctccaccaacactggggatcacatttcaacgtgagatttgaaggggacaaaatatccaaaccgtattgtataccaaactcatacccctctccttctggcttggcatttgctcttccttctactgggaatacccatctaacaaattctcacaaggttgacttccctgtgggacttcagtctcaatgagaatgtccatctgctcctagagattttctcctgaccacccatttatattaaccccatcaaccatccttaccccaataccctgctttcatttcattgtatcattgaccactgtctgaatttactgtatttatctactcattatttctctagccttggtaaaatgtaaacttttggggaacatttgtttttctgattcattgtttttct

SEQ ID NO: 3876 - DNA, 4001 bp, Homo sapiens
aatccactaaaggaatatataagatctgcacacaggtcttttgattctaaagaccatacgtactctaccgtggtgttacagaaataaactacatccaatgttccagggaagattcccatggtaatttagcctagtggtaaagcacatgggctttaaagctagagagactcagagacaagtcccaattttctctttttttggtaaaatatggaggtaaaagtctatcagataggagtcttttgaggattaaatcataacatgcacataacttgtctaacattttaagtgtttaataaatgttagttgtcatcactgttatttcaggattgccttaactttgagagttcactttgtatcagagcaacttgggtggaatttcagagattatttgttcagatcccatttccagacctatctatctttcaaacatacaagagcagaatatggaaattcccaaatctactggcatttaattactcccactgtcaaaaagttttccctgtatttaattgaattttcttcctggtaataaagttttccccatttcatttgtctttagagaagatggagaacaagcagagagtctttcctttttctaataatcctacatattaattgggccaagctctctctctctttcataccaagcactctaagttagcatttaaaaaaacaagccagcgcacccctatgtcatggtcatatagtgggcctggtttgaacatgattatatactcattcttgatttcccagctcgggtttgaatcccatctttgcgattttctagttgcatgacttgaataaattctcggacttacctgtgcttcatttttctcatctgttaaatgtggaacacctaccttatagggctgttgtgaaaagtacgcaaataaatatagggtaaagatctaagaacatgtgcctgacacatattaaatgttcaataaatgtcagtagttattatatattgatgctttttaagattagctacattcaatactctattaaattctgtgacccaaaacacaagtggcaggtagtctaacaaaactgacataattcttcacgactccaacctttcactgcagaaactccttttgtgggcttcccacactgtaggagctgccagggtggaggggttaatttcatttaggaagctctccttttccaagagtacatcactcacagtgtcccatacaccccatcaagataccttttctattataccttcatcccctactttcaagaaaccagttttcaacattctaaaacctaaaccgatgcttaaaaccttgttcatttcacagaaatcaataacagataactatgaggcctgcaagagtatattatttttctggctgctatttactgcgtgtttaaagtgtactttgcatacgctatataatttaattctcacaacaatcctatgtagtcaaatacaatcactgtcaagaaactaacaaaaagtcaggtaactgaacttggagattatgtttgcatttaaagagcgaagggttctaactctgacaggccagattctaattacaggcactacttactactttaaagaatccaggaaataacttgcctcaacacctctcttaaaaacttgagccctgagaagtgaggaactggatttgctatacaaggaaagaaaggaatggtggcttctctcggccggagcggaagcgcctgccagtcaacctcgggggtcggcgaccgtcgcgtggaacagagaggggcgccagcgacgctttcccgcgtccacgactggggtgggcaacagggcagggacagggccgcccacctccccaggcgcgcagcgaggccaactcacctgcgtggccgccagccgcgcccgcacctctcgcattacgaacggctccaggccgcgacccgcagtgcagaagaatcgggcgccagcctcaggcccggaccctggctctccacgcgcctccgacatggcggctcaggcgcgccctcgcgccttcgggtcacgtggcctcgggcgcgagcggctcgctcctggaggcggcgcgcaggggcgtgtgatgccaaaggggagagggagagggagagggagagggggagggggagagggagggggaaggagagggtgagagagacggagagcctgggagggtcgcatcagccctctgtggcccctatgggtcttcctggttgaccatctgtcccctccttgattaggcaccagaatgggttagaatcacaggtggaagggttagaattgataattcagtccagttgccttattttgtagattgaggaaattaatgcccagagaggtcaagagacagcgagttagcagcacagctgaggctggagcctagatttctccctatctaacataatgccttttcctccattcctcccaactccgtcctcttcctgtccttcattcctctcctctactcttctcatagaaggagccctggtctgttttcacaaagaatcgggccaaacgttggaatctccaggacggagagcagaagttcctgttctctaacaaacgtctgcgttctgaaacagctcatatttcttgcactacttagttaaccatccagccatagatgaatcaatgtgccatctagttttgggcacctgatttgaatggttctcctaacggtatttgaaggcatttttctaaactctgaattttaaaatggaaatgaaaatattacttgggaagcatagacagaatccatgttacaagataaacagcgtgaaattagctctgtagctgtatattgagtcagttatacagaaatgataaatgcatgtgtgtctctgacaaggggctgtcctgtgcttcagaatgggatgttaaggtgaagaactgatactccctcacctcccccgacactcccacacacacccccgcccccacccagctcatgctctactgggccgtacagtaaaaattcttcatggagtcacataacatgagcttttccaaggttcagtcctaagactcttctgatgctgctttttattttttattttttgcgacagggtctccctctgtcgcccaggctggagcgcagtgacgtgatcttggctcactgcagcctccacctcctgagctccagtaatcctcccacctcagcctgtccagtagctgggaccacaggcaagccccaccacaccgggctaatttttgtattttttgtagagaaggggtttcaccatgttggccaggctggtctcgaactcctgagatcaagcgatccgcctgcctcggcctcccaaagtgctgggattacaggcacccagccctcacacactaccgttttgatgaattcttttcttgccctcagacacatgttttccttttctgggctactgccgtagttcattttaacttctctatactttggggttctgactgtcaagtctgtctggggaggacaggaaccctctttagttctctctacattctgtgcccaagatgttaagtatgcagataggatgcattccattcagttcaacaaatactgaacacctattctccgccagtcaccaccctgtcttgaggattcaaagatgggtaagcaagggtttggacttcaagggcttagaggatggtgaagttgaatgactcactgaggacatacccgggaagctatgacagcaccgacaaaaaggaggcagggagggcttcctggacaaaatcgctcttgagtccagcatgaaggatgtgtaagagggagaagcagcagatgaaaatgagacggcgtgtggggggtggggaacaggaaagccacgatagcggttaagtgttattagagcataaagtatatgagtggagtagatagagatgcggtagagcggtgggtaggggcccagttatgtcagtacaaccaaaggcagctgaaaaaatgaaatgacctattcagtccagcaccgaccagcagtgtgctggcctgggtgaaaccacagctgagctgaggctgcagttttgcagagccaatcgatcttcc

SEQ ID NO: 3877 - DNA, 4001 bp, Homo sapiens
ggccgaggtgtgcggatcacctgaggtcaggagttcgagaccagcttggccgacatggtgaaaccccatctctactaaaaatacaaaaattagccgggcatggtggtgcccgcatgtagtgccagctacttgggagggtgaggcaggagaatcatttaaacccaggaggtggaggttgcagtgagccgaaatcgcatcactgcactctagccttgcagcctgggtgacaaagtgagactccatctcaaaaaattaaaaagtaaaaacaaaattaaaaagttaaaaagttaagtggtcagatacttctgcagtttctaaaattaaacattttcaaactaatactgagaatattaagtttacattataaaacacgagcagtgccttaacccaaaatgctgatgactgtcatagctaagaggcaagagggaagagattccaccaacaccgtgaggctagtagttttttagggagtattcatctacagatacaatctttcctaaaacaaaggtcatgcactaattgctacgtcctactgaaaagatactttctgagcctcaggaatagagaaaagaaatttcaaggttactaacagattaactgacaatctattaagaaaacaagtgtaaccacatttccaatatagacaagaaatagcaacttaaaagtggaaaaattttggaggtaaaaaaacaattacatcgtacttcagagcaactttattagagagctgcaaagagaaacctaaaattgcatttttaatgcatggagctctcaaactgccagtattccaagaatataaacaaaaagctatgtcatccaagaaaaacaaaaagctatgtcaagaactcattgagcttttcttcttccgagaaatgccaacaaaggcaggatcaactcatccgataatacctcgaaaaacaaagaacgcagttggggaagccacacgacaaagaaaatatccacgctccggtaatttaacgctatctctaaaaattctctgtaaatatgttagggcatttacagcccgctcgttcaacaccatgtcaatcacaacagtagtaaacgactataaaaataatattaaatccatttcccctcaattgatatattccttctgggtgagatttccaaatccttggggtgtctggttaggctttttggtcggtgggtgctacagaaggaaagccagaggttaaagaaaaatgcttggcttttttccaattggcaactgcaagaataaagtttactgcactgaaaatgagtacaagcaccctcgaggaggaaaaaaaatcttatcaccgagaagaaaatgaaaggaagaatttcagtaggaaatcaaaagtaaaattaaagggagacggctgtaaagataagaagaggttaatcaaaaagggggagaagcgggaaaaggaaagaaagcataggacaaaaggaaggttcgacgagttctaaaaagaggtctgaattaaagtcttttctccaggtctaagaccacagagggcccgtggcgagagcaaaggtcatgcaatggtgttgctaaagtgaagggattaattgagagggttgagccccgtctcccttcacctcgtcctcacagattgggtcttggttgtaagcatccaggtgcatgctaaggaaacaaaaaccacgatatcgcggtgtccacggagaacaataggctgggagcggcgcagggccgaggccttccctccgggacgaccaccatcccgcctccctcatcgctgccccagactcacagagtcttgggcatctcgtcctccatggctgctgctgtcgcggcggcgcctccaggtccagctccctgcccttcactacctcccaaatcgtttaagcggttatggctacaggatagtggggtttctcggctgaccagaggttactccgcctcctcctccggcggcaattacactaaaccgcccggcccagcgggaacaatgaaaccccaatacaagatggcggcgagccgggagcctaggagcagccagcaaagttacccgggccgcgcaggcgcagaataatcttgcactctcaacctccgggccgcccggctacaccttaatccataggttcacttgttgcgcagccgctcttccacccgacgcgagggacgcctcagactgcgcaggcgcaagtattaactacttcacgatttgcgtgaacttttttgtcttctggctgcggattcgagtgtttcgaccgcgaattatgagggagtggaaaccttcagggacagtaaaaagcctaaatctttcctcttttggaaagatatataaagactcttcaagctatctggtttttagcgagcgagaagcaaaacgcctatgcgccgcccgggaatcgaacccgggtcgcaagaatgggaatcttgcatgataccactacaccagcggcgctgttgacatgcccagccgccacagtattttaggaggaaatagaagcagacgttctctcatgtgaaaagaattgtcatgtattatttattcatttaaaagtaaaagtttattgacagtctgtaatcttctgttttccaataacataaataatttatcttttctcatcccaaacataggaatggatgtttcaactttctctgtacagaaaaaaaatttcaatttaaaatgtttacttaagaaataagaaaaaagaaaaaaagttttacttaaaaaagtaaggattttattaagaatttgcgtcgttggtgctagccagatttttcagcgcggggaggatatttccagatgccagatttttatttatatttgcatttcttccgtgtattgattgcacattgaaaagcatttaagaaatagctgtttaggccgggggcagtggctcacgcctgttattccagcactttggatggctgaggcgggcggatcacctgagatcaggagttcgagaccagcctgaccaacatggcgaaaccctgtctctactaaaaatacaaaaattagctggatgtggtggtgggggcccgtaatcccaactactcaggaggctgaggcaggagaatccttgaatctgggaggtggagattgcagtgagccgagatcttgccattgcactccagcctgggcaacagaacgaggatccgtctcaaaaaacaaacaaagaaacaaacaaaaaaccccagctatttaatgcaaattggtcacaagaatcttaaaagtaaacaagtcaaaagatacataaacttcagtccaactttaggaggcagagaaattagagctctgaaatgtgattcagtatactctgtatgcatttcacattgcttattatatatatatgtcactaaagtaatcctatgtctaggaatctatcctacagaaataaaacaattaatttataaagatttatgtgccaagatacaactgcagcattgtttacagtagaaaaaaatggagtaacctgaatatccatcaatgccacttatggtaatttattcaatttacaccaaatacatgtggaactttttctttttctttctttcttttttttttttgagacagtctcgctctatctcccaggctggagtgcagtgacacaatcttggctcactgcaacctctgcctcccaggttcaagcgattctcctgcctcagcctccctagtagctgggattacagacgtgcgccaccacctaaattagcctaactaatttttgtattttagtagagacagggttttgccatgttggccaggctggtcttgaactcctgacctcaggtgatctgcctgccttagcctcccaaagtgctgagataacagacgtgagccgctgcccccagatggaacattcattttatggactattttgcagttattgaaaagctattaatcagatctgtagtgttgaactggaaaatatctatgatgtaagtttatttaagttgtagaaatattttttaaacataggagaatttacacatcgaaaaacgtgatgtcggctgagcggggcggctcacgcctgtaatcccagtc

SEQ ID NO: 3878 - DNA, 4001 bp, Homo sapiens
ttaaagttttatcatgagattgcagcaattcagttacatcttcaggctctacttctaattctagttcttttgctatttccaccacatctgcacttacttcctccactgaagtcttgaacccctcatagtcatcaatgagggtgggaatcaacttcttccaaactcctgttaatgttgacaatttgacctcctcccatgaatcacgaatgtttttaatggcatctaaaatggtgaatcctttccagaaggttttcaatttgctttgcccagatccatcagagacatcactatccatggcagctagagccttatgaaatgtatttctcaaataataagacttgaaggtcgaaattaccccttgatccatgggctgcagaatggatgttgtgttagcaggcatgaaaataacattaatctcctcgtatatctccatcagagctcttggatgactaggggcattgtcaatgagcagtaatattttgaaaggaatcttcttttctgagcagtaggtctcaacagtgggtttaaaatattcagtaaaccacgctgtaaacagatgtgctgtcatccgggctttgctgttccatttatatagcacgggtagagtagatttagtataattcttaagggccctaggattttcagaatggtaaataagcattggcttcaacttaaagtcaccagctgcattagcccctaacaagagagtcagcctgtcctttgaagctttgaagccaggcactgacttctcctctctagctatgaaagttctagatggcatcttcttccaatagaaggctgtttcatctacattgaaaatctgttgtttagtgtagccaccttcgtcaatgatcttagctaaagcttctggataacttgctgcagcttctacatcagcacttgctgcttcaccttgtgcttttatgttatggaaatggcttctttccttaaacctcatgaaccaacctctgctagcttcaaacttttcttctgcagcttccacacctctctcagctttcatagagttgaagagagttagggctttgttctggattaggctttggcttaagggaatgttgcggctggtctgatcttctatccagaccactaaaaccttctccatatcagcaataaggctgtttcgctttcttatcattcgtgtgttcattggagtagcacttttaacttccttcaagaacttttcctttgcatttacaacttggctaactgtttgccgcaggaggcctagccttcggcctatctcggcttttgacataccttcctcactcagtttaatcatttctagtttttgatttaaagtgagagatgtgcgactcttcctttcacttgagcacttagaggccattgcagagtcattaattcgcctaatctcaatattgttgtgtctcagggaatagggaggcccaagaagagggagagagatggggaacggtctgtgggtggagcggtcagaacacacacaacattaagttccacgtcttataaaagacgctgtatgtggcaccccaaaacaatgacaatagcaacatcaaagatcactgatcatagatcaccataacagacacagaaatcatgaaaaagttttaaatattttgagaattaccaaaatgtaacacagagacaccaagtgagcacatgctgttggaaaaatggcgctgatacaattgctggactcagggctgccacaaaccctccatttgttttcagaatgccctatctgcgaagcgtaataaaacgaggtatgccatagtacagtggcgccgcgaccgacaaaggaaagcctccgggaggtcaaaagagataccagagagtgcgtcccgcactggaggaagaggaaggtttttaccaagcagcgagtccagagcccgcgccgtcaacgacgcggtgctgccttttttccgagccgctgcgggagggggccaggacacgctcccttaggagagcgggcgggtcacaaggacctggacagaggcagaactgaggccagcagccagctccgccgctgagtccagccctctgcgcagccgccctgagctggcgtcccgagatagccgcttccaaaccgggcctgcgcgccgacgttccgctgcgccccgcgcaaaaccggaagtacccgggcccaaggctgagggacccggtggagcggaagtcactccctgaggcagtggcgacagcggcggcgagaggatgaacaacaagttcgacgcgtgagtggctcgtggccgcccccggggccccttccccgaacagttcccccgcgcccgcccccgctggggctggggcggcgcaaaccctgcggcaccggcttccctgctgggatccggctgcggccggacctggcctggactggcggggaggagggggctggggagcaatggataccggagtcccggagaccccagggccgtccgaaccgagggcgaagagctgggcccgggggaggggtggctgtgccgcccggtagggggagattttcggacgccccgccctggtggatgcggattgcctgcgacgtggaggggtggggacctcggcggtttgggtgtttccgcagtctggcagcgctgcctctgaatccagctttccccacacactccctctcccctctgagcctcagttttctcatctgcagagtggggacggtaacaccctttgtcgtagagtttggaggatgcaatgaggtaatgtggttgctgccctcgacgcggtggaaggctggcttaggaattatcttcctgagactcttcctactttctttctcctccccttcccgttcccgtcttccaacacactcgccaagacctaagtatacttgttgccctctcctgcccgctccggtttctagtttcagcatcaaacagtttggaggtacagagagaaaatgcagaagtatctttacttatccccctccaaggattgtatcttgaggtagaatatgttccttcctctcttctagtagtctagtaaatcgactgtctcttcatccgaaaacctggatttctagtcccagattcaccacttaccatctgtttgactgtagaaaagttacccagcctctaagccattgttgctcaaaccacattagtggctaggaccctgctgccacgccggggtgtgataagggtcagatcacactcagcgatgcttaaagatgcttgtgaacattgctaactattgcgatataaacgtaaagtggaattactattagtttaggttgtgacctggtgcttttgatgggaaattggggtgtttccaatacagagagtactgtgcaaattcagggaatactggatttccaacactccaggcaggtaggtcctcaggaatgttttctggttgctgagaggtctctgctacttgagaaagtctttgcccgacctcttctctatcctgctgtttaactgagcctgtccctctacgaacctctcccccgctgccgccccatttcatctctattgtaaaccctgcaacaactagctccagatccaaatcctgcctcagtggagctttctggaacccttataccccttcctccactgatttgaacaaatcaaatgtcatcctaagaagacatcttatgggtcatctagctcaagcctacccaaatcatttgggagtctgcagtaagaatggtaataatggacttccacagggatcttgctaggtatttttcatatatatatatattttttgagacagggtctcgctgtgtcaccctggctggagtgcagtggtgtcatcacagctcactgcccactcaacctcccgggcaccagcaatcctcccatctcagcctccagagtagccggactacaggcatgtgccaccctaccttgctaatttttttgtattttttgtagagacggggtttcgccatgttgcccaggccgatctcgaactcgggctcaagagatccacccaccttgcctcctaaagtgctgggattacaggcatgagccaccacccccagcctcatatgt

SEQ ID NO: 3879 - DNA, 4001 bp, Homo sapiens
gtgcaggctaatggatatttgcctgtcttcctcagcccagagtctaatgcttggcctccaagatcagaacttttttgacttgcattcacatattcaactcaatgccaggagagctgggcctcagagaatccaactgttgccattttgtgtttagttctagctgccagcttaaactcactcttccctccgggtgccatcccttttggaagctgtggtatcctgttctgccagaggacagaaccactttggttgaccctgatgagctactggacttcaattctaaggaaaaatggacagaatctctgttcttcagtcctaggaagtcctttcctcaagagaaagggtgcaaactttgcatttgcacaactaagtaggagcattcaagagagccctctcataaaaacaaatccttcctcctggcttaggtattgcctccgcctaagaacacagacacctctcaatcaatttttaaaaatcgtacctcactaggcatgctgtgccatcttgggtcattggcatggcgagttagcagaggaagctgattgaaagaaagactttctgattttgcacaaagctccaggttctaccatgcacaaggccttgctgttcttgcccttccttaggttccacccatgtttgtaaggtactacctctgtttagtaggagttcccattgcaagtcaaatttatattccagaaaaatgcaaattacagtaaaaaaaaaagactaataaaaagtgattacttccataattattcatttgaaaagctaatacttatttccagaggcccaccatctaactctttttatccattaactgctacaaaatacattaaatgacacttcattgctttgcacaaataacaaagaaataataaaagactttgcaattgaagccatcctcacagagttaacaagaatcctgggcagaaatatagttataattaagcattagtcagactatactttgacccacttccttgcaaccaaaagctatgtagctccagatactgcccatttgcatccctgctgtccccaaagataagatctgtgacattagagtcataagacttttaagacttgcttaagatgttttccaaattccgaattccagggaaatagctgacaccacccagtttgaaggcccctatagaggaatggaatccgcaagagaatacagtttcttcatccccctgtcccgacaccaccctgcactcttccaccaatcaacaatctccacactttggaccactctaaaacccctaaacaccctagccccagactcctcagggagatagatttgagatttcctcccgtctccttgttcaacagctgtacaattaaactgctttcttttctgcaacctggtgtcttggcgtattgacctgccccaattcatcaggcaacagacctactacagttacataatcattctggaaaatgttgattctgggcttgatgtcagaacttttgaacatgctatagagaacaccaaaagccaagacgctagcaactctttggtaaatggccagagttaggcaaaggagaaaatggaacagagaactgacttcagtttccactatcaagtgtacccgtatatctggagccaaaagcagctgagagacattaaagggcattttactgaaggtttgcacctgcaaacctcttcctcgggtatttaaaatatggagagaaatacagaaaatacacacaaacctcccaggtttgacatatattaacttttgttacagcagctctaggaaagaaatacaatattgcaaattatcccaaatttgatggcttaaaaataacagaaatttattctctcacagttctgatgccagaagtccaaaatcaagatgtcaccgggattggttcttcctggaggctcagagggagcctaggagaagctaggagtctgttctgtgcctctctcctagcttctggtgctgctggcagtccttggcattcctcagtgtgccttctccctctcttctcttctaggacactgatcattgcattgagagcccgccctaacccagtatgatctcatctcaaaacccttaacttgattatatctgcaaagaccctttttccaaatagggtcatattcgcaggcttttggtggacatagcttttggaggaccaccattccacccactacaagtatttactttaaccctcacaaataaacagtgacagatattgaaattccctccttaagcccctcccatctacttcccttcatccccagatatagtaactatcctcagtgtcactgtcatgtatgtttcatacttttactacctctatatccacaaggaacttgtagttatttttatacaaataccacctttataagatgaaaatatttttataaatgatatcaccttgtacattttcttttgcaacttgttttttaactgatctttaatagttaaagatttttcaggctgggtgtggtggctcacgcctgtaatcccagcactttaggaggccaaggtgggcggatcacctgaggtcaggagtttgagaccagcctgacaacagggagaaaccctgtctctagtgaaaatacaaaattagctgggcatggtggtacatacctgtaatcccagctacttgggaggctgaggcaggagaatcacttgaacccgggaggtggaggttgcggtgagccgagatggtgccattgccctccagcctgggcaacaagagcaagactccaaaaaaaaggaaaaaaaaaaaaagaaaaaagatttttctgtgctgatacatatacctctgatttatttattttgactatggtatgaatatcccataatttacttatatgtttctttattgaaagacatttagtgatttatgattttggatattataaactttctgattatgaacatccttggatgttatcttcctatcattatacacatgtgtgagaatttctctaagattgatactttgaaatgaaccaatgatttcttttctctatctttctattctttggaagacaataaggtaggtataaactgttatttcttgaaggtttgctaacactgggttgtaaattgagtgatgctgtttggggaaacttttttttactataattcaatttctttaatgattataagtatattaaagttttaaaatttcctctttggtgaatttttgtcatttatctgaaaaattattcactttatattttcaaatgttaggactatgattgttcatattaacatcaaattgcagttttgcaaagtcaaaaggttgaatatcagcaatttaatgttactcaacataataatttctgtggtttaaatttcccttcatctgtaattatgagcttctttcattcctaatatgattaattgtgcctcctgtatattttggtttgtcaccagacacttctctattttattagtctttcaaaacataagatttatctttattgtttattttttattttattaatttctacttttgtttttctttcttcttcctgctaccatttttgaatgcactctgttgctccttttctaacttccttagatgaatattgatcttacagatttttaatacttttaaatgctgatgtacctacatttaaggctttaactctcctagctgtatccaaattttaataagtagtcattttactgtcatttagttcaacatgtttttatttctaacttattttatttgaaaagtaaattatttaaaagtgtactttttagtttttataaacattaaggttttatttagcatctttttaataattcattttcaattatattacattttttcagagataatataccaatttttggtatttctcttcttttatggcccagtatgtaattcattttttaaaaaattcatgcacgcttaaaaagtgaacataatattgcatattatattattggtggtagggtactatttatatatgaaattgataattgtgtggttcgaattctctagaagtttactgattttttgac

SEQ ID NO: 3880 - DNA, 4001 bp, Homo sapiens
tgattattaatcaaggtttttatatctaatcatgtagcctgctgcttttatcttataataaaatataaaggagtctttcttcaatgtaaataagaccaaacataagaacacatgaatctcaatgctgttacagtatgagggacagaaatcaatatgaattattccatgaaaacagataaccacctgtataagcctcaaactagagagagatttaaaattatggaaataaatgcattacagaaaattttacagtatacaaaaaatattttaatagcaacaaaaaaagagggaatggatattaaagtttgttcttcattgggcctcactgaatagacaacaaaaatcaggtatcatcatctctaataaaatcactatagttaatagacacagaatatttctttttgttaaacaagaaaatactttaaaacagaaacaaaagttactctaatattaaatagtatccttacaaaatattcaatcttcaaacctgacagaatgaatttttttctgacagatccattcagccaaagactggtttcaaaactgcaacttcactggctattctttcttttttttttttttgagacggagtctcgctctgtcgcccaggctggagtgcagcggcgcaatctcagctcactgcaagctctgcctcctgggttcacaccattctcctgcctcagcctcccaagtagctgggactacaggcgcccgccactatgcccggctaatttttttgtatttttagtagaggggggtttcaccgtgttagccaggatggtctcgatctcctgacctagtgatccgcccatcttggcctcccagagtgctgggattacaggcgtgagccactgcgcccagccctctctggctattctaatgattcatacttgggtaccaaattcaagggtactataatttgaacaaatggcatgacaaacctttttgctggcagctggtaaaacaatgttcaatttttatccacatttctaggcaaaacttgttgaactagatgtgagacaggaaaatgtttgctgctttgtatcctatttacatataaacgttaccatgaaatatgcacatccgaattcaaggatgattttgagctggtatgacctgaaattcacatagtctgtctctgcccaagagttaaaactttaatattgataactattatctgtaaatatttacttgaacctttgacctctaaaagaagatctctactataatgctgattttaatatttagtataaaaaatttatgtatgtaaaattttggaatcctatcatcaaataaaagcatttccttgcaattctaagtaaatcaaaatcatcatatcagcaatttggagtgtagtatattttctgctgtactgcctttattgtttaataacgtgtaatataaaagatggtagaacaccagtaagaagaaattgggtaaccacccaactaaaatatgtgctgtcttacaggtatacttaaagtatgccacctcatacatttttgtaaaggctgaaggactctatttacacatgcacagcattcacaaccgtatcagtactccaaagaaatgtaatattaaaacaattattttatgctcaatttttaacaactacctaacttgacatcctcacattgtgacttcttaaactcctatcacttggacccactgcattcacacatgtttaaaggagtatactaagtttttaatattgatgaaaatgattttgtctgttattttcttatcacttacgtagtctatttcctggcactttcccttctctggctatccctttaaggctttatttgttaaacagtatatactataaaattagaataaagttgaactttctcccctactcaaattaccttgccagtagttttcaaatcatacaagaataaaacagccatttagaacaactgctgaagggtgggggttgggaagtaacactttcagataatttattctggaaatgttggcattttgaaagtgcttgtaatagtcaaattcagagctgtggtctcacaacttttgacccattgtgacactcacaatggagtaacatactcctgtatcatacccctacaaacattcctttgaacacgaatccctaggtctgtacaattatttctctggtatacatacttttaaatgtaaatgctgtatcacagaatatgtgcacttaggtttttttttttttttctgagacagagtctcacactgtcacccaggctggagtgcagtgacacgatctcggctcactgcaagctctgtctcctgggttcatgctattctcctgcctcagcctcccgagtagctgggactacaggcacccgccaccacacccagcttgttttttttgtatttttagtagagatggggtttctccatgttggccaggatggtctcgatctcttgaccttgtgatccacccgcctcggcctcccaaagtgctgggactacaggcatgagccaccacgcccggccacacacttagatttttaaagataatgccaaattgcacattcaaagccagtatcaattgacatgtttacattaacactgtataagactactcaccaatcctttgagatgtgatgggtaaaaaagtgttactatttttctctataccaatacaactttttttttattattatactttaagttctgaggtacatgtgcagaacgtacaagtttgttacataggtatacacgtgccaaggtggtttgctataaccatcaacctgtcatctacatcaggtatttctccttatgctatccctccctcagcccccacctcaaaacaggccctgttatgtgaagtccccccaaccgccctgccccgtgtccatgtgttctcactgttcaactcccacttaagagtaagaacatatggtgtttggtcttctgttcttgtgttagtttgctgagaatgatggtttccagcttcatccatgtccctgcaaaggacatgaactcatccttttttatggctgcatagtattccgtggtgccaatacaacacttttaatcagaaaaaaagtgatctttttttcctgagacatgggatcagccgggcatggtggctcaagcctgtaattctagcactttgggaggccaaggtgggtggatcacctgaggtcaggagttcgagaccagcctggccaacatggcgaaaccccacctctactaaaaatacaaaaaaattagccagatctggtggtgagcacctgtagtcccaactactcgggaggttgaggcgggaaaattgcttgtatctgggaggcagaggttgcagtgagccaagatcgcgccattgcactccagcctgggcaacaagagcaaaactccgcctcaaaaacaaaaacaaacaaaaaaaagaaagatggggtctcgcttcattgtccaggctggactgtaactcctaggttcaagtgatcctcctgcctcaggctcccaagtacctgggactacagacatgtgaccatacccagtttctttgttctttttttaaattgctctatcatatctttattagcattgattctcaatgctgactatacatcaatcatttataaagcttttatttaaagcttatgctggaatctccagtccaaatttaaccatctctggaaaaagaccaaaggaatcattaattttaaaaaggtccagaagtgatgttatgtatcatcaggattaggaacagtctgtctgtctatctaggtttatatataaaatagtacgttgtatagttcccacatactccactttacagtatctctaaaattaagaatgttattccttaaagtcttcccatattaaagaccaaaattattacatatagcagaaaactaattaggttataaaaagtcaaatgggttgtcatggttactcagttattttagaaaaatgagaatcttaaagaaaattcactgtgttctactgacataaaaatacatctttctaatattttttaaactaaagaataaaattctgaaaca

SEQ ID NO: 3881 - DNA, 4001 bp, Homo sapiens
tattccgcatgtttaatggatcccataaatcaaagctttccgtgaattttctagagcatattcatgccaatctttaagcctattgtcactttcacacatgctcacaggaacaaaatgacaaagaatgctatgcctgaaccactggattcagggcacaaaacacttgattaacacttgtcaaggctctgactagcaaatatcgacagatattttcaaaataaagtactcgcaccgattcctacataaatcgaagctcttgatttctttaaaacattcactagacggttgaacttccagacatttgaaaatgtgcctatctcctcgtgtgcgacaactaggagtgaacagcccgtctaccaattgcggatgaataccgctaagctttttccagactaaagagcgttaaaagacattccatgcacatttattcattccccataaatgtgttttctcccaaatttcattttatgttgtatacttagatacagcaagttgaaattttagtcaaaagcacgccggtgccttacaagctgtgtaactgctacatctggtggcagcccacttgcttgcaagaagccagaaaacttagaaaacaattgtaaccgatttggtgcgtgtttgcaataacctttacgcagatatttcccacaaaacccacgaccctgtcacagaagaacagtagcctacttgcagcagagaatataacgcacaaacacgcaggaagcaacggcgaaggagagaaagttgcaaccatctggaggggcggttttaaaagcctgcccacgagtcagtctgtcgtttaaattgctctagggggccacacaggggatcaaagtctgcccagataatttcagcgtctctccccaaaggagaaacccagcaagcgaggggcatcctccaggtcccgggcagcaaagctcgcaaagtggggaccgcctctatgggaggagtgcgcgggagaaggggagggggctcgaggacgaaggctccagcgggagggaaaacccaccagagaccggaggccaggaggttaagagtactgagtgtactggcaaatggagcagaaaggggctcgcgtctggggggaggcttcccaccctcgcaggactggctcccaggaaccccaggcgagtctatgcgcctcgccccgtccccaccagcgcgcaccccctcgtccgtctcctccgccacccgcgaaccaccatccacagccagggcactacctccccagagccggggagccgggcggcctcgcgtccacctcgccaccatcccccaccccagggtctggcggagaagccccggggcggggggggcggggggggggcgcgggggtccgcggcgcgggagaggaggcccgcgagcgggcgcgggcgcggcggtgcttaccttccctgggcctcccggatggcggcgtgtgattcagcagggacctggccgccgccgccgagcccggggttggagacgtggagagctgggaccaagatggcggcccctccaaacttccactgctactttggacactcatcaagctactttctgggaacccgactccccccctgcgacggcagcggcggcaacggcaccggcacccgcctccgtcatggcgggggccgcgctgagggcgagcgagagagcgagggctgggaggggagagtcaaggggatgggggaggaaaccgagaagaggggaggtggggaggaaagaggtgagggaaggagaggggacagggaggagggaaagggggagaagcgagggagcgagcgggcgcgccagaggagaggaggaggaaaggagcgcggcggcggaggcgtcgagggggtgccagccgggccggggtcggagcgcgggcggagcgcgggctgcgccggccgaggacacttccgcgggcggaacctgccggcacctctgcagtgcgtcggcccccggcgtcgcccgggaggcggcggcggcgggctgtgggtggcggctgaggcggtggggtaacctctgcatcagttacaggcggcggcggcgtcacgcgccgcctgtgcaaacactatcgcgaggctcctgcgcctccggtagcggcggcggcggcggcggcggcagcggcggccgcgggagcaggcttgggggagggacctgccaggggctggggggtgggggcatggggaaggagcgagcgcgcgagggaagagactagagcgccggggcgcccctgccgcacccgcggatcgccgcgcggcgcgggagcccggggttgccggactcgcgtgcgcgggggcagcgtccccgcgccggccggagggaggcgcgcccccgccgcgccgctcgggctccagcgccgctgccacctgactccccctgtctcccgcggaagcgcgcctctctcctgacccacacccaacacggggagaaatgctgctgctctcgctcagctgccgcttctcgggagttcaatgtgatcgtttctcaaaatggaactgaaaagttgagagttccttctttcttgcccctctgtactgtgcagaaaaacgtatgtgcgcctccccgtctgcagaatgggaataatgaccgaataaaagagctatgaaaataaacatgggtagtgggagagttgggaaataaaactttctcgtgttttctaaaaaagagtgaagaatctttaatgaggaaattgaaaattaccagttttgtagactgtatggtatagcaattctttgttttaaaacagtaagtggaaaatctaaatgaaaaatgtgattactgaatcacatatttaggaaaactatacagcgttcatcttgcagaaggtatggtttctagaaacttataatttgtttctagtgtctccgctgagtcccgactacaaaaatcccaaaataaataacagcatttgctaaaatttatagatagagtgtagctttctacagacccacacaagtatactcacaccagggattgggcttcttgtacataaaagagcactctagttcaggaaaagtacaacaaggttatttctctctttagaaaaccaaattgaatagagcactaaaaagattatgatatagcgctactgcacagacaagaggaaatggcatgattaccagggggacaaaaatgtcgtttctattttttatttttatgacttcgcatttctcatagtaatgttttgttcagataaactatcatactagaaaagaaccttgattgtcagttatctccagaagtaattgtagttgccttgtgctttagatacttcagtgagtttttagtcttgtctgcttttcaaacttaagagggacatctcacaaacaactttattgaggtataattgacaaaataaactgcacatatttaaagtgtacaattattggccaggtgcggtggctcacgcctgtaaccccagcactttgggaggccgaggtgggcggatcacgaggtcaggagtttgagaccagcctggccaacatggtgaaaccccatctctacttaaaatacaaaaattagccgggtgtagcggcacgcgcctgaagtcccagctactcgggaggctgaggcaggagaatcgcttgaacccgggaggcagaagttgcggtaagcctagatcgcaacgttgcactccagcctgggcgacagagcgagactcctagactctgtctcaaaaaaataaaaataaagtgtacaatttgataagttttgatgtgtatacctccctgaaaccacttctacaaggaagatggtgaatgtatctatcaccctccaaagtttcctctttgtggttcctcctccacactacttccattctctccaaccacagatctttctgtcatatgggtagctttccatttcatagaattttagataaatgcaggccatacagtcaatttgtactcttgtctggctttggttttgttttttgttttttgtttttgagacagagtcttactctgttttgcccaggctggagtgccatctcggctcactgcagcctccgcctcccgggttcaaatgattct

SEQ ID NO: 3882 - DNA, 4001 bp, Homo sapiens
attggctactgtcctgcaggtcccgccctctcggcgcctcaggttccagcgagggcgtaacggcagtgaagtgaaaaatggcgggaaaggccgcctctgagctggccgtgcatctgcgcaacgctggcttgggagccggccggtggtggaggagccctcgacgacagcctcaaggcctgccgctcctcacgcgcccggctgccactagaccatggacgcaggcagccgcgcgctccaccgctccgggcccggcgctccacgccgatcggacgggcgtcgctcacaccaccgaggcgagcccggacactgaagccactttgttgtcctcggcccagggctgcaggttctgcagcgcgaagagcgacgagttgtgcaggcagagagggtccgggggcagcggcggccgcagcggccgtggcaacgcgtcctgctgcagatgcaggagcagccggcccgcgcggtgccgctcggcctcgcgctcctccgccgtctggcgcctaagggagggagacgcggggtcagcggggcgcccgccgcgtcgcttctcaccaggccctgctcgggaaccccagtccgccctcgcccgcgccgcgcctcaccgccacttggtgcgtcggttctggaaccacgttttgacctgtgcgtcggtcatgcgcaaggccttggccagcgccgccctctccgcagaggccaggtacttctggcgcaggaagcgccgctccaactccagcacctgtgagcgggagaaggacgtgcgcggcttcttccgcttcggaggggtccggttttggtaggggtggcctatgcggcgcgtcccagagaagggcgagagcgcagctaccgggaggaagaaagaccagggcaggatttgcagggtggcccgaggtgccactgagaaggccgcgcggctgtccaggccgcagaactcccgcgccctgtccttacccgggccctaagcatcagccgagccctatagccaagaaaggcccttcccctgggatgcgagggagacgtcccctgtaacttcaccctcccctccccacgcgtggacagtgggactacagaggagggcgcgggcaccgacggcagctccctccccatcacctctcggaggcaggacccagagatttgagttgggggaggatcccctgggaggatctagtgggaggtgtgaaaggggtccttgagttggagcagaaagctaagaaatgaggagacggggtcagagtcgggcgtgacgctggaggggtcagacaacctcacccgtgagccggtccttggcaaagcggcggccgctgtccatccaggggaaggtgagtcccgctaggcctccggcgccgcccaaacccgagggcccaggcactgcaggcgcccccccagcgggcggcggcacaggcagcgggcggtgcgcagggacgcggatcacgccgcctgggcccactccggagctgccgggcagcggggcaagtgagccggcgggaccgtagcccgaggctccgtggtatccacccgagaacgccccattctccccatgaccctggcccccgcgacccaggcctagaccgccccctggggtttcggggccgctcaggatctgatcgatgccgaagctgattggctcgtggtgtgggaggttgtgtggacccagcatccccggctccatcggtctgggccgaggagaaccgccggaggttcggtggttggggaggatgcctcaggcagcgccagaagcccagcggcggcgcgctccggagagtggcctcaggggcccgcggggctggccaaggcagggcgccggggtccccgaaacagcagcatccctgtgcacccggagcagccgcgcccgtgccagccgctgccgggcgtcagcgcagggacttgcatcccgggggagcacggccagctggggcccctggagcttccttgctggctcttaagcgcaaatagacgctgggctgccggcgccgctgcccaagtcccgggtggagagggttggccagctccggctggggcagtgactgacggatcggcccgggtgggtagtgggggctgggggtagggcaggggcggggcccagcagttaaaggggaagggacgcctgtttgcgccaagcgcagggggaaggctggctggcggagatgtgcggggagggggacagggggccagggtgttaggagccaggctcagcgcgggaggggcccgagcatgggccgctgagtcagcggagatgctcaccgcgcctccatccttgctggcctccgcctttgggcggcctccgcctttgggctgcctccgcctcaccggcttcctccgcaggtgcctcctcccccagcccccactcttcgcctctcgatggatccttctggccaactcccggattcgttgtggtccccgcctaaatgctctcgaagaccaaatctcgttgtggtttcccggctgcgtaagaagcggctggggaacggcgcccggtgagctgcaggcccaggaagagaacaggtgtgggaaggggacggcaggggctaagggcggggaacggccgctttgggctggcgatcgtggtgcgccttctggcctctcctgtaggtccccccagccctgttcatgcgcaccggtaattggtgtcctgtgtttcctagaatttcgattttccaaaatccgtgtaaaacggaccatggctcaacccgggccaaatcaggccggcgggttcttggggctggcacttacccccggaccccaagtgcagggagtcctcaatgcaggactctgcccctccattctgtgcctaggaagtctgttctcacactcttcctcctcaacggcgggagggcgaaatctcgccacgggggacacgtgggacctcactgaggccttggttggatcctggccgccttgtttcccataaacattttaccccacccaaactcaaaaaatggcctggagctgtcagagaagggaggtggggaaagacctaagccgcttggtgaccttgtgacctctggccatgaatccaggagccgggagtgcgtgaactctgcgtccttcccggggatgggacccccgcgggcgggcccctgagccttagacccgcccccgccgccgccctgcccggtgcaggccgcggtaatcgggttagctgggccggaattacattaccttccccggcccgccccggcccccgggggggccctggcgcctctgagccggtgagactgggctcagagaggggggcgcttctaccatcctgcggtggcggtggcgggtgggcaccaacgagcagctcagcctacctctgacacgtggtggccaaaggaccttaccctgctgtgccagccctctaccctcgtcccgagcccaccccgctgttcagctccatcctgctggttcccgtgtgaaccgaaatgctttgtaagtctactagctggatctccctgggagcactgatcttcaaactgattctccaggatcccctgggaaagactctgccccctcctttctccccagcagatgggctggcagcctggcgcctggggcagggtgaaggggtcttttctcccctgggaaccaggaatgatatttgggcatctgggcagaaagataaagaagagaaagaagggtgagctctgtccaccagcccttcagtgttctctgaagccttatatctagaggaggtgaaccataaatgggacagagggcagtgggaggaatagtgggcattaatatgtgtcaacctgccaggcgcggtggctcacgcctgtaataccagcactttgggaggccgaggcgggtggatcacgaggtcaggagattgagaccatcctggctaacacggtgaaacccatctctactaaaaatacaaaaattagctgggcgtggtggcgggtgcctgtagtcccagctacttgggaggctgaggcaggagaatggcatgaacccgggaggtggagcttgcagtgagccgagatcgcgccactgcactccagcctgggcaacacagcaagact

SEQ ID NO: 3883 - DNA, 4001 bp, Homo sapiens
tactcaagcagagagaagccttctacagggaagaaaacagacacacggatgtacagttgcttcatgctgttgagttgcaatgtgttttctgtctctcagcctggaagagagcattcatggcagtgtgaagaaatagcccaaaactttccaaaagctttttctttaattagatctttctacctaaagcagaggaacagattctttgtgatggtaaaggaagagtgtttttgtaaatctggggataataccagcagcagtaactgatcataattcagaatcagtgattcaagtagaaaactatgtcctgaatttctttaaaaatcacctccacagccataaaaaaggaatgagatcatgacctttgcagggacatggatggagctggaggccattatccttaaactaacgcatgaacagaaaaccaaaaaccgcatgttctcacttgtaagcgggaggtaaatgatgagaacacatgagcacataaaagggaacaacacacactggtgcctgttggagggtggagagtggagggtgggaggagggagaggatcaggcaaaataaataatgggtagtaggcttaatatctggatgacgaaataatctgtacaaccagcccccaagatacacgtttacctatgtaacaaacctgcacatgtacctctgaactgaaaacttaaaaaaaaaagttaaaaaaaagtcacctccgtgttttattatctctaaaacactgataatatcagtccttacagcttactctctctctctctctctgtcttacacacacacacacacaggcacacacacacattcatttatttggcactaactaaaccccctagtggcataacaaacaaaaacaagcctcttggatgctgaattatcaacttcaacatccacatccccattttacacatatggaaacaaaaccataggataaatgatttgcttgcagtggtatatgggaggcagaaccatagctgaggtattctgccatatttgaaagccgttttccctatacaaatgcgtcctacccaggcctactgcacccagaattctcaggagaaaatccgtaaatctaactattgcaagtgcctcgggtgattcatgtcagttatatttaggagttccatcctgcactgctctgctgcagatttcaacagaggtagacctagtaacaatcaccaaactattcaacaagctcgatgtcctaggatctatataatagctgagtcaaaaattccttgaggccagagacccaggattttaagtccatgtctcttagcccaactcccttcaggtacaggcaatgcagcattcatgcctcgtaattaccatcacccaggctagtcatcatacatgggaatgtttctactcatccctattaagcaacctgtcactcctattgcattttctgtaaatacttagagactggtatggagcaatggaaagttgaaggaattaattcagaaggtccctaactctaaccacaaagcttgaaagagcagccctacctgtacagaaatgtgagagataataacccagccaacttctactaattaatttatttttttgcccagctctctatcctataccacatagtgtactttatttaaattaccattcttcactgatgaccaatataaattaatgccatactactgctccaaattttatcataagccaagacatagttaactgcaagactggaagacagcttttaggattttggtgaaataggcaggcccttcttcacatcaagtcaaataaatatcactcaccatcagacctgctcctataattcctgggaaccaccactcaaagcaagagatggggttttgagaaaattggtcttcctcaactaagctgacaattagaggtatcgcattgagaactactcctaacagcagtagaaccagcaggctgaatccattgcaggatgtccatccttcgcagcaggtcatggtcacccctggctcagaaacgttgtcaaagtggctatgcttgcatggtactatgttgccttttatcccaatcttctggttaaaatttaacgctaataaaaaatgaatagtggaaaatagttcagagtccaatagggtaggacattattatgatgactatgatgggaaatgagaaaataattccatattatgatgaggtgaaggaaggaaagcagaaaaaaaaatctatgagataaatttatgtaagaagataggcttacgataagctcctttaatatactcctttattagtatggcttctaaaaagtaaaaacaaaaatatccagctaaactatattttcctgttctatcgatattattaccagctatggaagtttcttattttgaaattgttcaacaagaaaatgaacacgtatgagatgtggagaaaggtatttcctctgctgcaaatattagagtttatttcaagccgtatgctcacatacacaaaagaaaatgtttatgtcatattattccagtgttgcagactaacccatttagagatagcccacctaagacatgtgagagctttggctaatgctaccagactgaaagatagcaataggagagagattggatgaggagattatcatattttatttaagcccttgaacacttacttggccatgtgcagtactttacatctctagactgtggttccacattgcctctccactagctggtgagctccttgagaaaagactatcagttggcataagctttaaaatacaaaagttctggccagctgcggtggctcacgcctgtaatctcagtgctttgggaggccaaagcgagaggatcacctgaggtcaggagttcgagatcagtctggccaacatggcaaaaccctcatctgtaccaaaaaaacaaaaagtagccaagcgtggtggcacatacctgtgatcccagctacttgggaggctgaggccagagaatcacttgaacctggggggtggaggttgccatgagctgagattgcaccactgcaccccagcctgggcgacagagggagactccatctcaaaaaacaaaaacaatacaaaagttcttgcttatgctgactgaccatcctgatctaaatggggtcatggtagttactgaaagacctagacttagacctagacctagactggcagaggcagcttcttgatccaggcttccacagtcacagaggcagggtacaaaaatgtggtgagccacatactggatctatatgtttctgcccagaagcgacccacatcacttctgttcacatttcattggccaaaaaagtcactcagttatgcatgagttcaagtgggtggaaatacaaaccaatatgtctaggagaaaagattgggacattaggcagctctaatctctacagcgccttccttctgcttctgtgtaatcccccgctcagcccagagcatagattcagtgagtgctgttgggaatggtgaaataatgtatgcagcggtgcagtcagtgtgggccaaaagctcaggcgtagtaggcttagagagcagcgctccaccctgcagcagtgtggggggcgcacacagcctggtacaaggggcatccctggtaatggacaccaaaacagtagctccagactagggggtccagttactggacctcagtgaaatgtgaaatcctttgtatgaaaggatttgtataaaaggattaaaaataacccacctattggctgggcatggtggctcacccctgtaatcccagcactttgggagggcgaggtgggaggatcacttgagcccaggagttcgagaccagcctggccaatatggcaaaaccctgtctctactaaaaatacaaaaaaattagctgggtgtggtggcaggtgcttgtaatcccagctactcaggagactgaggcaggagaatcacttgaacccagaaggcagtagttgcagtgagccaagatcacaccactgaactccagcctgggcaagagagtgagacgccatcttaaaacaaaaacaaaaaacacccacctatcaa

SEQ ID NO: 3884 - DNA, 4001 bp, Homo sapiens
tgctatcccaccgtgggatttactgccaagggccgggggacatatccagctaccacagaaccaggaaacgggcacccctaacctcacctctgtgcaacggggcaaagcacaaatcattacagacaaaagtgggagctcattaatatctcccttcccaccaatggaggtacctgccactgtagcctgtcgacttctggatatcatttctacttcaaaacaagacccaggttttggcctagaatcccagaatcttagggttggaagattctgtcaaggtcatcccttccactgtgtccccaacagaataggtccagaaggcccatgtcatgatcagacatgttgttagcagaacttcttcccagagaattgtatgagcttccactctctggtcgtcccagttcagccctctgaaaacacacaagtatgtgtgtttcccttctctgtggcttctgctttttctgaaaggcccagggtgaggcctgcggttggaggtgctctgaggtagacagcgtctggctgaggcacccattcccaggggaggaggctgagcccaggtggctattaccccagctcatgacatgaggctctcccaacacttacaggataacccatcattacctctctgaagggctcatttttacaagtgaggccttgaggtcatagcacagaaagacagggcccctgacactgtggtcctgcctcttccatttaagctataaactggttctctggatcctcatgactggagagacagagagaggaggcaggtgagaaggaagtatggctccccctttgcgccaataaagcagccccaggaggcacctggctcccctgccaccactggccagcccaaagtcgccagcttggaaaccaaagctcactaatgagatgaatatttcagagcccagagaactggacacctgagggcccttccatgacatctggctctgacctgcgttcccaggcctacttatcccatgtccagggtgctcaggtagaaccccaaactcctgggtaccacgtagaggccacagaggagggagaggagatggagaccccataggacaagaattggtgccgaccccacaaggccagggcctggcctcccagcagcctccctctgcttcctcccactggtccctggctcctgccccagtctctccacttgctttcccttttcccgtttctctgttttgttttcactctaacccaaagaagtcacgaggaggatgttactcccctgtagttctgtgaacccagccgggaaacagtggctggaagtgggactggcagagggcaaagtcatggtgatagaggtggccacttccccatgccaaacacttgagctgctcattggcttctgccccagctgcaagctaggacccccccttccccaccccttaaatattcacctgtctacaccgagactggcctcagcgcgtgtgggggcaacctggggtccgtgccaggccctggctgtctcccctccctcttccctcttctcaccagctgagggccatgaaagccctcatcccacacagctggccactcgggctggcatggtggataggccctgcgacagagaggccactcgtgcccgaaagagggaacacgaggacacccccagaccctggctccgctcaccagtgcccacaacacgctgctgggctcccaaggctaaccaggtgccacagacccggccgcccacccgcgcgcccagggagagcgaaacgccaagggccaggaggggagatccccatctggaacgggctccttgggcccaggagcgggcaagccgggagcgcgctccgaaaagtttaggcgccccggcgcatggccgccccagccctggaccagtccccaccgcccacagtccccaacggcgccggccccggccccctggcttgcctgcgccgttccagacggagcgttcctggcctcggagtgttgcaagtcctccggggccgggcagggctaggctcggctggggctccgcgccccgccccgtcgcgccggcctcgtggggcggggcctcagggcgccgccagggggcgcaggggtctgtcccgggcgcgcgcgcctctcagagccccgacgacgcctcactaataacacaggggtattttcggatttaaaggcaatacatgatactgataggaagctagaaaagacacagaaatgcagggaagaaagtaatttctctccacccctcctagttcccagggggaagcgttcgctttgggtccttctttggctattacatttctgtatgtattttgtttttctacagtggggtatattgtatggtgttttgtttactgcccttctttttactgttttatgatgaacatttttcttctcactaaatagtcttcaaaagcacaatcttaatgccgtgaagtattccattgcatggctatgcggattaaattaatttcctactggaggccgtttgtttcccatttttacattacaaataaatcagtaattaaaatccttgataattctgtgtttttgagataaatgcacttttcgagtttaaaactgcaaacatgcaaacctagaatctctgtttataattactcaaccaggaaagcaggtgctttcctcaagtcagaattcagaagtcctacattgagatgtagattactactgttaggtaggtcttaaccctcatctcagtgaagaatgcagtagcaaaggaggaaacagttttgaggaagttctgaaatattactggagcctgggcatggtgactcacacctgcgatcctagcacttttgggaggccaaggccagaggatggcttgagcccaggagttggagacccagcctaggcaacatagagagaccttgtctcaatttaaaaagagaaacattaccgagccttgcctgagtttctgtggttccaaagtccaagttctttccatgacaccaaggctgccagtagttgaccaactctgtttaaagtgcttatctcatgttaatagctataggtcagcaccacaccaccactgaatgtccttttttttttttttttttttttccagacagggtctcgctctgtcacccaggctggagtgcagtggcgccatctcggctcactgcatcctcctcctggtttcaagtgattctccggcctcagcctcctgagtagctgggattacaagtgtgtgccactacacccagctaattttgtttgtttgcttgtttgttttgtttggtttgtttgttttgtagagatgggttttcacgttgttgcataggctggtctcaaacccctgagctcaaagcagtcagcccactttggcctcccaaagtgctaggattacagacatgagccaccacgtccagccccaaaacagagatttaaaaaaaaaaaaaaaaaaaaaagacagatttttaaaaactgccccccatacacacactatgtatgtttatttctgtaaatatagtttaagtaggagttacttagggggactagtggccgttatggtgggctagctccccagacaccccaacccttcagtgtacttccagttcctacaggccaagaacctcattttaggaagtccccacccaaggtgtgatctcaccagagcaagtacagttctgctcagtgtctgtctcccccttgctcaaggagtagcgccctaggtgaaatgcatggcccatggaatctgtccagatccctgacattttttcatgctctctacacttgtgctgtcttagtccatctgggctgctacaacaaaaataccttagagtgggtaatttagaaacagcagaaatgtattgctcacagttctggagggtgggaaacgcaacatcaaggcaccagcaggttaggtgtctgatgaaggctccctctgcttcacagatatcgtctgagtcctcatatggccaaggaaggaacaaacagacaccgcccccccaccagccttccttttttttgagatggaatctcactctgtgcaatggcacaattgcagctcactgcag

SEQ ID NO: 3885 - DNA, 4001 bp, Homo sapiens
gttgagttttattaaaatgccaaatttagaaactgccaaaaaagagaacaatctattgacccaaatctaatagggttgcatatctcaacttgtctttgtaaaggataaattagaatgatgcataataattttccttttggcatttacatcagtaataactaggaactatacaggctttcaccctgagttacagttggtcattccctcctctctaaagttacatacacttcagcttatatacatctttgaaagacactttattcagagccagatttaactacagcaaaattatattcacagaagatgaaaaattacatacacacttgctaaaactagaacagaccacacctaggggacaatacccaggcatgttaacggagtttaaaatgccaaggaaattacaccacaattctgcccagtatactacaggctgtcaaaccgaaatgctatgccagctaggagtgcagcaactcccatcctctggccctatttaattaggaagcttcagcagagcgaagcctgccaagcgttcgccgtcagaatctgaaggaacccgagcgagcaagaagagtgcctgacccactccacagaagcctgtccagaaatggaggagtcagcgcccactgaagtcggttccgccctcggctcgcctacatggagcctgaccagcctcagtcatgcccactccggcctgggagacccgcaaagtgttctttttctcaactcccctgtactaccttgaagcttagggaagcaaagagaggggcatatctggactgcaaaaccaatgtcttttgccgcctaggagagaagggaatgagagagagagagagatagatagatagagagagagagagagagagagagagagagagagagagagagagagaaattctattgaaacccagctcctctagaatctgtgtgacctggtcttcaacgggagaccagtgcgacctcatggcacctttgccaggaatcagcgattcccctgcagtcaccatttgatttattgctttctcgctcattctttctcataaagttatttcttcctcatcctagtaagacttttttctttaatgatgacaaagcttctgtttcagtgtttcccctaggattggtgctctttcaaaacagtgaacccagaaaaccatcccgtttaatatttctcaaaatcctcgcagctccaatgtaagcgcaagcatgcaaaggtttcctgctacacctgcactttctgcccatcccagaaccacccctcacccccgggcctgcaacagttccccttgtttctctggatagaggtgggtggtattaggggtctagggcagtaggaggtgaggggctgaggaggcgcgctagggtaggctggtctgtgctggatacgcgtgttcttctgcggagttaaagggtcggggacgggggttctggacttaccagagcaattccagccggtgggcgtttggcagtcacttaaggaggtagggaaagcagcgagcttcaccgggcgggctacgatgagtagcatgacgggcagcagcagcagccagcaaaagccctcgcaaagtgtccagctgctgcactgccgcggggactcccacagcaccatgactagttcgtgcaactctgcagcagcaaacggcttccgaggaacacaggatcgcgggggccgggcagcgggctactgagcatcccgcggacggcggcagcagaggcggcggcggtggcagtggcacccggcggggaagcagcagccaaacccgcgcatgatctcgagagtttcagcaacatccagggactgggctcagccccggagcgagagggtcgtccgctgagaagctgcgccggagacgcgggaagctgctgccataaggagggagctctgggaagccggaggacaggaggagacgggagtccaggggcagacgagtggagcccgaggaggcagggtggagggagagtcaaggcgccccgcagcccggcagccgcctctcgagctctgccgcccgcatccctctggcgtttgggaagcagcaggtcctcagcccgcccggggtcacgtgggaagaggcagtcgggctctgattggtggagcaggatgcaggtcccgggagggaggggtcgacgaggaggtgcaaggatgcaaggaggaggcggccgcggaagccacagatgggctcgctcgccaggcgctggcccgagtggggctaggcggggatggctcaaatgagaagctcgggcttcagggtgggctacccgcacactcatataccattcgcctcactctccgctccaggacgccccctaccgaaggcggggtccggactagcgcccctcttccgcgcgtgaccccgggccgcgagtgcgggccgcggctgggtggcgtctctccgagctggagatggtgggggcggaggtgtcagaggagcagcagcagcagggcagagaggggcgagtcggcgcgggagagggcgtcctgctggcgaccggcgctccagcgtgcgggagcgcgccgcctaggctgtagggggatgcaggctgggaatgtcgcggcggagaggccagggacgtttctctagggatttacaggaaagagggtgagaggcgatggtgttagaaccgctcttgccgacctggaagcaacagcagcatctcccacaagagcgtgcaaccccaaggctgctcgccgaggcagctcagccatcccggcaggcgctctccttccttctctcttctcccctctctcctcccaggccccccgcagctccgacccagcccaagcgttcgcaggtttgaatccctctcctcatcacccgctcctctccagcccgtagcctattagtgtgtccacctgggaggtgcggtcagatgtgtttggaaggtcagattggtcgggacaagtggtctgagagaaagagaaaggctcctctgcatacgccgcgggtgggttgccgggagcatcggccgggcagcggcgtccgggaaggggagagcgggctccatttgttggcccaggcagtgaccctgcgttccttactcgggtctttgccggatggccggtgacctggggcgacgagagaaggtctaactcggcaggagtctctggctctgcgcgtttctttcattctctccagcgggaagggcaaacggcatagcgggacccgccttccgtctgctgcattcttcaggcagttagacacactctttagcctaatggaattttagtcgccagtaacgggaccaagagctttcggggacaagggtggagaggaacatctttcttccatgaccggggtcactattgcagtctcagtgttttggatgccccatagggaagagctttctttttggtgtgtgattattcagtgattcctgtttttgtttttgtttatcttctctccgctctccttctctattcctctctgttatccctcctccttcttctccccccgctttcaaaagcctccggatcctccctttttctatttaaattctccttttgtgcccctctttctgtgtcccctgaatttaggagagcatttgataacatttaacaggcaattagtgtccattcccaatcacttaaaagaggcattcatatactttgaaaacgggactatctatcctttgcagacaccagcagaaaaacaaattgtacccgagtaatccttttaagtactttaacctccaacctcctcccacttccttgctttttaacttctcctttgagagatgtgatcgtgcagcacctcagtgcctcaacgaaatctttttttttttcctgtgtgaaatccatccctttatcttacatctccgcctccgtccgagactgtccctctcccctcccacctccaaagatttctgaatctcagtgtctctcactcctggcaattaagcagcagatcccagcattctagtcggtggcatctcgctcctcaccgacgaagactccattaaaacagatcaattagaccagacgttggaggcatcagaaaatcggcttc

SEQ ID NO: 3886 - DNA, 4001 bp, Homo sapiens
aatctggaaacaaccagttgtccccaaccttctacaaaatcaccctacagcttctaaaactcaagagagatgcaaaacagtaagagaacactcagagaaaggcaacatttggccacaaggatgaggcttttcagcctagacctgcagaagcagagtatggtccgatgcacagcggggaacttggaccttttcaccaaatcccagtgcctgaattcttcaggaggtaacacgcagatatctaacaggaagtgcttctgataggcggtgcagtaaacatctggaatgcatcacagccagggaatagcacagacaggatagcacagagaggatataagaccttcaagatggctcaaaagaccttggggttgatgaactatgctgttactaaggactgtttggggtacattgatcattgttagggtaaaaagcaggtgatacagtccagtcctgtcctcacacttcacaatttttactggagacaagaatgggcaggataaactatggggcccataggaccctcccatcgtctgctgtctatctggccggaaagcatgatgatgaacaaagcaaccttgcctctgtcaggcacacctataatggttccaagagccacattccgactgttgtactgcgggtggcaatggaacggtcttccgattacctaaaatgccacagattcccttcttctctaatacgcatccgattaccatagaactctaagatatcttttaaaacctagtcatattaaaagttcctttttctccattaatcagtctgccccaaagaagcttttccgtatttcacaggatccttagaagaggccagctaactgtgatacctagcacccttatcttttctcgatacacagcgtccttcctccagcagaatcctaaaatagcagcagtccggattaacatggctgtgaggagtaggtgcttagctgaataacatcagaattaatgaggggccggaccccaaacagagccacctggtgggcatgaacaccaggcagttatggggccgtttccttcaaccaagtgtctggtccctggctatctctgcttcagccagaacacattctgtcccccaccgaggctttaagggccagcgcgcagcaccctcacctttcagcaggtccgggtgcacatagcccaacacgtcggagacccccagctcctggcgcgaacaggtgcctccgtggatgtgcaaccaggcgggctcggcgagggcagtgcacagcgccgtgatagacagggcgccaggcagggccgaggccaggctacgctccggctgcttgggcagagcgctgcctcccgggctcctccgccggcgcccgccgggcagccctgcgcctccgggggcgtacatgcccggggccgcccgccgtcgctccgcagtcgctgctggtcgccgccgacctccgcggggcgcgcagagcctgacagtccggtggaggatagcaacgctccgggttcgctgcaggtgaagccgggactgggctgtcagggttgacaccagaggataggggggtgggacccggggctgacggagacggggagggctgcgggaattcggggggcggagacaggagactccggaatgggactgcgggacgacaaccgaagagggccaggggccagatggggtctgggcagactcgagtggggggcggagggatcggggatcggctactgctagagcaaagacccggagtcagggtctcagccagaggatgccgaggggcggaggaccgggctgggccgcggggatcggggacccgtgatctgggaccggcggtttggggtgcgacctgtgcgcagaaaagaccctccccacgccgcccactgttcctcaccagtcagcaggccccagggctgggatggtgctgctcagcccagtcacgggcttctcggctgccgggggccgagcgttcccaggccccaatcccgcaacgcccggacagacccggggccgatgcacttccggcttcctcctcctctgcctccgcctcctccggctccccgccccgtcccccgcgcgcgtcacagcctgggcgcgccgccggctctgcgcagggcctcacgggactggtagttcgaggcggtcccgcgatgctttccctgccgaggtgaggggagcgactacaactcccagagggtatggcggccgcagcagtgggcagttgagtttccggggcgacccaggtcctccggcggaagcgggagcctctgtcggccgcggaagcctggagtgggcggtacgcagacgcgcgcggtgagacccgctgtctgctcagcggactctgcccgcccccacctccccctgcgtcgggccgacatgaaggactcgctggtgctgctgggccgtgtcccggcgcacccggactcccgctgctggttcctggcctggaaccccgcggggaccctgctggcctcgtgcggcggcgaccggagaatccgcatctggggcacggagggtaaggcccagcctggttgcgcggccctcagcgctgagggctcagcctgcgcgtagtgcaggcgctcagcctgcaggggaggctgaacctgttcctggcggagggagagtgggatgttagccacgccgagaagggctttacaggcaaagaagtctgcgactgttgggaggaaaaacgtcagcagacaagctgaaatgtcaagggaattgtgttagctgcagaggcaggaaaatgggaaaagagaggtgttaggaaagtggccttcagagtaacttgcgactggatggtcacattttatcccgagggcattggggaaccaatagcaattttagatcagatttgttttagaaagatgcctccagaggttgggcgcggtggctcacgcctgtaatcctagcagtttgggaagcagaggcgggtagatcacctgaggtcaagaggtcaagaccagcctggccaacatggtgaaaccccgtctctactaaaactacaaaattagctgggcgttgtggcgggcacctgtaatcccagctactcgggaggctgaggcaggagaatcccttgaacccaggaggcgaagattgcagtgagccgagattgtgccattgcaccccagcctgggcatcagagcaaaaactccgtctcaaaaaaaaaaaaaaaaaaaaaaaaaagcttccagacgaagtagattcatttgcatctttgtaaaagctgtgaaatacactccctgagctttcccccactagcttgattccagtgctagcccctgatattgaatggcttcatggtgctgcacccagctccagagcctggcctgcgctccgcctttaggtgacagctggatctgcaagtctgtcctttctgaaggccaccagcgcaccgtgcggaaggtagcctggtccccctgcggtaattacctggcctctgccagctttgatgctaccacttgcatttggaagaagaaccaggatgactttgaggtacccaggctggttgggaccagaattattgcctgtttcctccccagggctggttcaggaacctgagccaacctgcgccagttgggctgtacccatgggaaggggcttaggggtgttagctgctgttaattctcattttctttcccctttcacagtgtgtaaccactctcgagggccatgaaaatgaggtcaagtcagtggcttgggccccatctggcaacctcctggccacttgcagccgagataagagcgtttgggtctgggaaggtgaggccaggtccctccaggtggattgggaaccacctgacagccccctctgtgtccctgacagggtcggctcttgggtcccctttttctctcccacagttgatgaagaggatgagtatgaatgtgtcagtgttctcaactcccacacacaggatgtcaagcatgtggtttggcacccaagtcaggaggtaagagtcaagcagggactcttgtgggaagggctctggtgtgcaggcttgtgcccagccttcctctgcttttcagccttaatctagctt

SEQ ID NO: 3887 - DNA, 4001 bp, Homo sapiens
agcagcagtagaaggaaaatacaaacttaatgctttactagattcaaccattatttcaattccctgtgctaagggcgcatgaagacagtcattcactcaaaggctaagcgccagtgtgtctggcactgtgcaaggtaagcaaaggaacagaaaaacaaggacacaatacccaccaaggtctacttgaagtcccacccaaaaaatgtccattaaattactgcactattttgggttcactgaacacccactacaggccaaaatgctaggtgccacgatcacacataagaaagaacactcaactaactgcagatctgtggccaatgatgtattatgacaaccccaggaccgactagtcctaaagcggcaatattttattctggaaataattttgcttccatcaattaatcctttctatagacgacaattctttgaataatttccaccaatgttaactcagactaaggttgcttagagagttagataagggaatgtaatgtggacaaaaataaaagaaacagtatactgaagcacatttgcactttaatactaatttggtttgtatttgctttcaccttcagcaacaataaaaagcaagtgactttagtcataaagtagaatgttaactctaaaattaccgtggcaagaaattgttttcttgtacaggcagtttcatgtgcaatgctaaactaacaagttttgcgtggtttgttttttttttaaactattcacttagtcaattcttcatgaaggctctgtgaccattcacatgtcccttggctcaaaaagaggtagtgtagatgaaattacactgatttggtcttcaagattacaaaataatttttgaccctgtccaagtacccgttttgcagcagtacaatactaatgagatttttaaaataggggccagcccttaactgtaaattatagataaatgcttgcaagctggcaacttcacgtttatttttaaaggctttcacatcaaagataaaggcaccgaatcacgtattttaaaataagaaatgtaaacaggctttcaacagcttactaaagagttaaatggaattgtatttaggtctaataataaagttatcaataacgcagagacactaaaggaggaagctacaggaccaagatttcccctcgaagaaatgtctgaacaaattcaaagtgaaattttttaagctgtgtctcgctatttttaccacattttaaagtaagctctgtctgcatgcaaccaaccgcaaccaagaaaacagaagtgtcctaaaatgtacctattcgccgcaataaagccaaaaaatatgcccctcctacctagcgggccaagtggcaagaacgtacgagaagtcaggaagttttgaaatggcagtgacaggagacgggggaaggcacgggaaggaatcacggagagcgaaggccactccgtgcggcgggcgccgcgaggtcccggctcgggacggtacccgaccgcccaactttgcgccggagccccggccgcggcccttcctcccggcccagccctcccggcctccgcgagagcggggtgacagccccgccgcagggacgccgccgggggacacccaccttccttctcggcccgcgccgcagccactacgagggtcatcaccaggtgcagcgcgcctaggaggccggcggccgcgctccgcgggcccccgctacgggcggccgcaggttccagcccggccccggcggacgtggagacggcggcggtggtggctccggttgctcctcctcccgcccgcttccccatccctgccggccgggggccgccgcgctcgaggtccggcgcggcccttctcggcgaggcggcggcggcgcggaagccgtggtccgggctctggccgcggcgccgggagcgacaacggttgcgagcccggggctcgatctccgagcgtgggcctgggtccgtgcgtgcgtgtgagcgagagtgtcagtcacggtctttgcctgggcatcgcctacaagcagtcggagcggagaggccgcgggtcaggcgcggcgggcggccatactggaaacgggcacggcccgcgagccctgagcgctggcctgcgaggggcggggcgcggctctgggcaccgcccacgctgtgccgacacctgggctgtccggcggtcagtctgtccgccccggagccccctgggccccacctcctcgtcccgctctcggaggcctgcggcttcacggccagacagaaccaggacagaacaaccccagcccgttaccgctacctggcgcaggagaaggagggaggcaggcccaggtccagctgccaggacttatgatggcggcttctgcttcgcggaggcggtgtcggcaatcacgtggagacggggcggcctcgccgcgcagccgccgcgttgcgtgggcggggcaggggcggagttgcggggcgctaacctcttctccggcgcctgggcaatcctccgtgctctgtcctacagtggtagagccttccaggggtgtgagtgcgcatacagaccgcgagacgagcgcggaaggtccgttccagtgactcttcctggtggcacccccacctctcgaccgctttgacgtcgagaataccccgggcctgactcagttcttgatggtgcttccttgaggatggtggcccgctgaactcatccttgggtcttccaaatcatggtacccaggaggagcttgatggagtcctcttgccttggcttgtgcccacattggcgcggaacacctcgtgtgcagaaagcgtcggtgactctggatggagaaggcaggggcaaacagactgctctttagaatatccagtagccggcttcctctctcgaggaagaattcttttttttcttttctttattttttaattatttatttatttttgagacagggtctggttctgccgcccaggctggagtgcagtggtgcggtctgggactacaggcacccgccaccacgccacgccaatttttctttttcttttaagaaacgctgtctcactatgttggccgagcaggtctcgaactcctgggctcaagcagtccgccttcctcggccttccagagtgctgggatcacaggcgtgagccactgtgctgggcccggaaaaattcttaagacgtctgttaccttcacgagccatctcgcgcctcttagatgcccttttcatcttaggttgagcttcttggtgcgcatggctgttgtctccaagacttaatttaagctcttggagggggtccttctttactcatcttagtaacttcctcccagcttgtagcccagagacattttactttccttagctgtatttgttgagtgagtcgatatatgtgtaaggccaagtctgcccacagtacgtctcagaacaagctagataggaaaataaggtttcagaaagacaaaaggaactccagaatctactctatgaagtagtcccctgtgtcaagcaagcacttaaatttattcataaattaatatatatttaaatatgaccttagcctaatgattttaaaaagcaattttagggcagggcgcagtggctcacgcctgtaatcccagcactttggtaggccaaggtgggcggatcacctgaggtcaggagttcgagaccagcctggccaacatggtgaaaacccgtctctactaaaaaatataaaaattagccgggcgtggtagtgcatgcctgtaatcccagctactccggaggcaggaaaaacgcttgaacccggcaggtggaggttgcagtgagccaagatagcgccactgcactataccctcgacaagagcaaaactccgtctcaaaaaattaatcataagcaattttacttttttgaatattagccttaaaattgagtagtcaaattttattttgatgtaatgaaataggaataattatctcttaagttggcgtttaaaatgtctgaggcaagagatttctggaaggcttttgactcacggaagagatcaaacccaaggatatgtaactgagcgcttttgcttagcctccaa

SEQ ID NO: 3888 - DNA, 4001 bp, Homo sapiens
gctgggcaatctgagggctccagcttaaatccaggtgcctccgcttattagctgtgtgacctggatgaggaagactgagcctgtttcctcacctataaaatggtgaaaacaatacctgcctcactcctgggaggatgaaaagagacaatgcatataaagcactcagcagagtgcctgccccacagtaactgtcaagtagtgttgttattaagtggctcttaggatacttattgttcctgagacccaaggacagctctttgcttgaggggctgtctgggaggcccttagatctccctgaccggcccaatgtccaggccttacctgatgagggggacatcgtccagggtgcagcaggtcttgggacccccttgctcagcagggtcaggagggcaggactcgttgtaggacctggcaggcaggacagggagtagactgggggaagggactgcccccaggcccttggcctatagcctcaggcctcaaagaggactctctcccagacctcccctacagggacagaagatcccactccccagtgcccgcctgaagcagtaaccaaaggggcaaagggatagtgggaagtgggtaggtggcaagaagccatgcctggggaccaatttcagagaagagcagtgaggctcagggttgcagtctggctcgtggcagcctcaggcccaagaggggacagagatgaaggaagctttagagcaaggttgtctgcagagtccttcataccagttctccacagggcatacatggtggttcatcacagccatggcatacctgtgggaacagaactgtcaccctggcagccttcccgagccccactcaacccaccccatgacccttctcttcaaccttgatttctggccccattcagcctcattattgttgctggggactcaagttgaggtccctaaggcttgatgccacaccagcacctgcagcatgcccccagctacaggccctctggaaattgccctggctagaagtatatttgtcagggccaccctgctggacagcagtggtgccagcttgtcccaaggggctgtgtgcccaggcaccaagtcaggcttttgagacacccagagtgaccctgggtaccaccgtggctatgacaggacaagagactttgtgtgcgtcatcaagctcctgttgccccccgggcacccccctttactcacacagtccatatgccagtgatggagaacgctgacaggctgacaggcaggaggatccaggcggtcatgagggaggggagccagggtggtggtggtgttggggggaggacaagaggtagatggggaagtgggggcggaccagctaccttgagatgtttctgccacaaccatcagctgtcctggcctggtggagagagatcaaagtccaggagtgggtaactggccgggaagggggaggggaagggggtcaacaccttatccagcgctcccgttgggtctctgagcgtccaaagtttgggctgagcccacggcagaacgtgaacaccctctggcactgggggcctccgcggtcaacccaaatgccaccggcgtgctgagagacgcaggcggaccgtaacatctggaagggagttaccctccttctgagggaccagggctgggagaagggctggacaaccgaagaggccacgccaaggagaggctgggtgccggcccagtggagcggtggcgagtcggcggcgcgcaggcaaccacctgaccatcggcgccctgggcgaggggcgggttcacgcggaaagcccagcccggcccggcccccgctcgcctgggcgcggggaccccggctggggccggaccctgcggccggcgaccccccaggacccgggacgcgagagtccccaggtgattcctggaagcccggaggaagggaaggagcccagtacgcacctccccggagcgccccgccgccgccgcaccctgctcggccccctcgtggcgccgactctagctgcggccctcggagcagccctgaaaggtttaaagggccgagcggccccgcccctggaggccccaggcctcgccgcgccgcccgccgggacgtggagtccgcgcagccccggcctcggtgcccgcgccctgcccgagactacaactcccgagcccccgcgcccgcgtcacgggggaaacgtgggcggtgtcccaacttcggaggacctgggcgcggagggctgtggcgtgaagaccgctctaaaaccgagatgactagaggttccgtttaaccgattcctgccggggaagcgtcagcaggtggggatctcggggcagcctgcattccagctctacctgggattgtcgccgtgcacatggctggaggagcgtctctccgccactgcgcacattttgcagcctgcaccggccaacggtgagtcctctaggaagctctctcaacgtggcgccccatgcctgcctctggccagggctgcggtgggtccagagaagcagacacaaagacttggctgtttcttaagaaatccaagcgcctgggatttggcttatggttcctgtggctcagcaaactccggaggagggctgctttcattagatactttttgctttcctgcatacaagtacacaatgtactagccagaaatcagtgtccaagacgtgtttcccgactgatcaacacttatttgaaataagacggcagagaccagaggacatccattctaaatagacacatgtaggtgtcagtgtagagtaggtaaggattaacatggccagtgttggtaagcaaagaggggaaggtgagagacccggaggaatctgggaaaaggaaacaggatagtgtgggaaaaattactgaccagcttcaccaaaaacttacaggctatgagtgcattcctggatgtttcttttttttttactttttctttttcttttttttttttttgagacggagtctcgctctgtcgcccaggctggagtgcagtggcgcgatctcggctcactgtaagctccgcctcacgggttcacgccattctcctgcctcagcctcccgagtagctgggaactacaggcgcccgccacctcacccggctaatttttttgtatttttagtagagacggggtttcaccatgttagccaggatggtctcgatctcctgacctcgtgatccgcccgcctcggcctcccaaagtgctgggattacaggcgtgggccactgcgcctggcccggatgtttcttaaattattgcaagggtggaaatactttcacatatcagaagtgtgcctggcattctgtctcaaaggcggtcccagcatctgttggagcccttgtgagatgacagatcatcacctgaatggtgcacaggcgcaggttgcccagcgtggggagctgaagtttggcaacactggtgaggcaaaggctatgtgaaacaacagggtcctgtgctttagagaagtagagcagaataaactgcacaatgacttgaagagggagaaaccttcttggacccagtggaaagcagaaatggaagcagaaaacctgttggagagccctttttcttttgagacagagtttcacttgttgcccaggctggaatgcaatggtgcaatctcggctcactgttacctctgcctcctgtgttcaagtgattcttgtgcctcagcctcccgagtagctgggattacaggtgcctgccaccatgcccagctaatttttttatatttttagtagagacggggtttcaccatgttggtcaggctgctcttgaactcctgacctcaggtgatccgctcgccttggcctctcaaagtgctgggattacagatgtgaaccaccgtgcccagcgggagagccctgtccttaaacacattaggacaagtagttaaaacagggccaagaagtatggctgtgtagtgatcactgtacaagcacacctggctgaataaaccagtgggggataaaatccagctcacctgccgctggctatgctttgtgcctcaggacaagggtgtgcttccttgctaattgacaggaa

SEQ ID NO: 3889 - DNA, 4001 bp, Homo sapiens
gctatcatataatggaaaatgaaattccgttgaccagagaaaaataaccttaagaatgaattcagaagggctttttacacttgaacatgaactacaaaatgatgctaaatatgaactcaccctagcactgtcttccctcctatcattttgtggggtagggagaaacaggccagctcttagagatgacctgcaatgctacaaaaataagctcaacccaggcttctgtctttcttcaatatggaatttttaaatcctacgatattagctggagaggggcaaaggtaatgaacacatcctataataaaagtgagaggttttgttccatgctcgtgatgtcccctgtcctcacctcttaaatggcatctagttatgtgagaacagggggagaaactgcaacagaggtgcagaattcgttgccactggagcagctccagttctcgctgagcatctaggcggattctctgggaactgccgtttccatgtcattttatttcacatgctacagtttagaatttctaaggagaaagagatcgtgcatccgaacactaaaccggaataaaaatgtacaggagatactaagaataggacagaaacctgctaagtctaaaatatataaacccgccatagccaacaaaataaggcttccaagaaaagggggtggaggtgcaaaagagccggcttcccctaaagggcctggctgcaagaatccctctttggccactaaacggttttagcagaaccacagattcgttctgagggggacaatttggattcggattcagcaagaagtagaaaaggtgcagacgcggccaagaacagggctccctctgcaaagaatccaagcccaaaggaaacgcggaagggatggagaagagagacgcgggaacgagcagggagtctctcccgtcctacactggcgactcaagggggcatcggcagtcggtgggaggcagagtgtggtctcccagcagaggcaagtgtgctgacctccaggccagtgtcagtggaggggagctctgaagggtctgcagacgcgccctccggaaacatcaggtttcagtggcatccatccagatgaggttggtggcccaaatccaaatgtcccattcctctgccccatcatgagacgacggggcagggacccactgtgacccgcgtccgcgattagaatcggggactgcccgagaccagaggccgcccgagtcccggctcgctcccctccttgcgcccttcgccggggcgggcagccgggcggccgccgagggacatctcgcggctacacccgcagagggaagttctcccaggcagccggcggagccgcaggggactacggaaaggaggatgcaacgagcctgggtccctccgagctgagtagggcccggagtggcccagaagcgctcgactccgaacgcaaaaaatgcctcccgcaaacttttcccgtgggcgccggagggcctggagctggcggagaggagggcgcgagtccaggcggggtcggcctgaaggcagctggggtctgggcttcgagggaaggaaccgcagccgaggcggtgccggccgcagaaggtggggctgccgctctcggctagcggcgttctcgccgggaagtcggggctccgcgcccccgcgcgctccgagccccgcgcctcgcccagcgcggcccgcgagtggggagaggcgggccccgagcagccaccccggtcgccggccgggtcgggcagctcgcgctcacctcggtcctccagcccgtcgctgaactggccgctctcgctgatccgcacctgccgctcctcctccagctggggcggctcgcgcaccggggagctcagcggggccgggccgggggcggcagccggtggcgcgtggccccggggcggcggcgggacggtgggcccctgggagctgcggcgctggatgcccgcggccggctccatggcgcggggctgcggatcccggcggcggcgacgacaagcgcggcggggactcgagtcagaagtgcgaggcgccgcggctctggcgggggcaggagcggacggactggccgcgtggacagggagggagggcgggcgggcgccgcggagtggaggtgcacgggcgggggcggggacgagcggagagccgctcggctccgcggccggtggcggaggctggggccgcgttgttgccgccgcgctccgcccctgggggcaggtgcgggcggcagggacccgccccaaggcccgggcgcgggagccggcgcaccgaggcggacgagagggaggaaccagcgtgaggacccacaggcggccctggcagagcttggctagggcgtagcggggacccgccccacctgcgccgcgggatggtgcccagaggggacccctcccactggattcctctggggtccgcgaagcccgcggccgcgcgtgggtagcagacagcgcccctaatttggcatctttctcttctggagctgcacaggcttcagaggctgtacagggtcttcgcctgggcctccattctcactgctcatccagggaaaaagggttcatctgtccccaagcccgtcgctctccgtccttctcggagctttaactcccctcccagtttctccctggagcacccatttagccagggatggggtatctttaggacagcgggcgctatagaagatgcttgaactccgaggcttccccatttcgactcttcctgggcctttgtcccatacagttcgctcccctgctcatctaagtcttgtgtgatcttcagaaatccatggaagcctcccttctacgagaagtctcccctactctgacccctgcagctcttaattcattttgtgcggtggggctgatctcaccagtgagagtccaccgcagggcacacgccagctctcttgatgcccagagaggagcaaaagaggacctgctgtttaataaattcagcttggatttgttgaggctcagaaaagtataccccaacgtatggcactttggtatgctaagtttgaactaaaaaactaaacaggcctctgaagccgccttagaaacaaagtctgtctcccccccgactttctccccactaagcagttcacagaaaccagaattcctcttccctacggtggtcatacaacctagaaatagtactccaacctccctggtcctctgcctttctgtgtaggagctggccatgaagaaatactcagacctaccttgtctgatagtagatcctgagaccctcattccagaagaggtcctgctctatacatgctgcacagagaggccaagaagaatctgaacaggcctcgctgggttcaaccctcagtctattaccattagatcacaccctttgtccaatcacatttctataaggctgtccattcttcactgaatctaagcataaaaacaggcagttttccctgagtctttgcatcttcatttctgaaggctcctgtatcacataaaactttgattcaataaatttgttacgcttttctcttattagcctatcttttgttataagcatgtttgccgtgccccttatgatggggaggaaagtatcacaccttttctgcccctaccgtttcaatggtatcaacatccaagctctagagtccggctttcgtctttagattgattcagtctctgaatttaatccgggtactccaaaatgtcaattcctcatttaaaggagtcctcctcgtttcttgaagagtcacccttttcctttttcttgtctgctttgcttgtgattgaaatgagagtaggatttaaatgcctttgtggtgcactggaaatatcaccagaaatggggagaggggtcttactttattttgttgctgctgttattattgttgttgctggattggaatgagaagatctgagttgaccttgaccaacttactttaccttgttgaccactaatttcttcaactacaaattgaaagagttgaactacgtcatttcaaagatcccttcctgctgcaaagaaaaagaaaaatgctatgattacttggataaaga

SEQ ID NO: 3890 - DNA, 4001 bp, Homo sapiens
ttagtggactttcaaaccctgacagaggtcagaggcagaggcaaagagatcatgcctcctaattttaaacaaaagatcgcttgaagagaccccaaagctctcttaattgcaggttctgcctggatcatgaaaaatcgccttctgactgttcatcctgcaacttccttgcagctgaggaatggcaccttgtcatcctcagtaggcataaccggtttgcaggccccagtccctgtttcactggaagacatcagaatcccactctcagtccgctcagcagccacacggaagctgcagcacagccagcttcccactgacccaccctggcacacctctaagaatctataggtccagaccagggcataaatcatgttaagttatatcttcaataaagttatcatttaaaagaatttaaagtgtccccacccacaagaaagaaagtctggacttctcttgaataagatacccctcagaactgaatcaatatttcttttccttaaaaaaaaacaccttgtcattgggatcaaaccaagaggagttatatgtttctgcaacaacactttgagctttcctgtttgaatttactttgttttaaaggaggtgatggcgttgtaattttaaaaatttggtcctaactacagaattgacttaagtagtagagttaagtgattcctggataaactatctagcaaatggtaaccaggagatttattcctttctttaacgagtgtagatttgaatctgtcagcaacaaagatagagggagaagtgattctaaaaagagatcagagaaggacaagaggatggagcaacagggaagtgtagctgtccaacaagaactgcagcctcgctggtgggtgggacctggtggaggaagtgatggtctgattcctctgtcaaccagacccatttccaattggctttgtgaatcctaggtggtaggtccaacaaaaggatgatggcatttatttgcctttatattattttaatacctgtccggggaaaatgcaacactctgacaacagccttagaaatagcatcccatctggattgttaagaccacagcaactggcacattcgaccaagttcttagggtgaagtctcagtaggccagtccaggtgtaatctcactctggtgggttcagagcgggaagcaagatgaaaaataaggagcagatctgaataataaatcactgttactgggcaccataacacagacgagaaattttccccatcctcagcgggctcaccctcctgcacaaggaatgaactacaggacatgatctcaaacacctacagatgcatcttgcaggaagcgtgcacccttcaaggaaagatcctcttctggactcgctatgcagctcagctgaaatggatcaggtctcaaacctggtaaagatgatctttccccttgattcttgggtggggagtgggaggtgagacggaggtgggcctgagtttattttttcaaatcgtttattctcttggttctgtggaaaactgcaaccgcatctcctcttccccttcactctctttcccgggctccctcccgaaggatgaaaggatctgaaagccgcatttctccccctcagctaagcctgccctttctccccttcccagccagcggcacacagcacctggagccacagcatcgccgacgtccgaccccggcaggcgggcgcagcgagggcgccgagcagcagcctttctttttccagctgcactggagatttaattttaattaatcgtgagagcttcagccctgaggattgaatttttgaaatagagcacaccctgcttgtttctttcttcttctttttttttttttgcatttcccttccaccctccccaatggcatcgaaatttaaagaaacgaacgagcagtctcacccacacctgcccagggaccgacgctggcggaggttgcggacagccggcggggagcggttctgctccgggaggatgcggctttgccgcggccggcgggcggggcggggccgggccggggagggtgcggggttctggtggtcacgtgggctcgagcaccgccctgtccgcccgcccgcctcgaatgtccctgagacccagaagggcctgcgctcagctgctctggcaccccgctgcagggatggcctcctgggctaagggcaggagctacctggcgcctggtttgctgcagggccaagtggccatcgtcaccggcggggccacgggcatcggaaaagccatcgtgaaggagctcctggagctgggtacgtgagcgggccgctggtgcagagaggtggctgtggtgacctggggtaacctggagacgggagccaggagctctcggcggggctgagggagtgtggagctgcagagcaaagacggggcaggtgtgggcgaaattacgaccaccagggagacagaagagagcagctcttcctaaggaattgtggagccactcgttaaaaactgaagagaccactcaggccaaagagactgtgccccaggtaggcagtaagaagagcagtgaaacatgctgtgcaattagttttatattcagatttaaaattaatccattctatatgcttaatgtgagtgattaggaaacgtgggaagacttcatttaactggaaaaagttgtgaacatagtgagtctctcatagtatcttctcacatctcttaaccacagcaaggaaatatgctgaatatttaccttaacttgggtgaaggaaggcctttgtaaacacataagtgagggaataaaccacaaaggagaacataaatcaatctacctgtatgaaagtgtaaatcctcattgaattaaaaaaatatataaagtttaaaggcatatgaagaaaaatatttgcaacataagataaattgtttgttggttttgagatagggtctcactctgttgcctacgctggtctcgaacacctgggttcaagggatcctcctgccttgcctctgagtcctaaagttttgggattacaggctgagccactagattcggccaacagccttatacataaagagctcttacaaataaagaaaaaatccaacacactgatagaaaaattagactaatggtatggactaagcgttccaaaagaagaactacagacaggcaagaaacatatgaaaaaataatcaactttattggtaataaaatatgaaacagtaagatttaacttttctaacaaaattttgaaatgttgggaaaaattaaagtgttgatgcaggaatgagaaggcaggaatgtaaattattacaaactttctggaaggcaatttggaaaaaaagatccaaaaaccttcacaatgtttatgctctatgacagtaattcctttttcaggaatttaaggaaacggagtcaagcaaagattttcatgcaaggatgtagtcttgagtagtgaaaaaatggaaattacctaaaaatccaatataaggaaaatagttaaatcaataacaatgaaatataatgcttccgtttaaatatcttgctattggtcctggcgcagtggctcacgcctgtaattccagcactttgagaggccgaggcgggcagataacctgaggtcaggagtttgagaccagcctggccaacatggtgaaactccatttctactaaaaatacaaaccaggcatggtggcgtacacctgtagtcccagctacttgggaggttgaggcgcaagaatcgcttgaacctgggaggcagaggttgcaatgagctgacgtcaagccactgcactccagcctgggcaacagagcgagattccatctcaataaataaataaatatcttgctattgaagacttacttggagaaatgcataccatattattgggaaaagtagaattctaaacctaatagcattccaattttactttttttttttttttgagatggagtttcgctcttgttgcccaggctggagtgcagtggcgccatcttggctcactgcaacctccgcctcctgggttcaagcgattctcctgcctcagcctcccgagtagtt

SEQ ID NO: 3891 - DNA, 4001 bp, Homo sapiens
tcaaattttgcaaagaatggttttcatgttagaagtattgtgtgttaacatcttaaaggttatgctatgtccatatttcagcagatcaaacttataatcatggaaatgaaaatcaaattaatatgtaaatgaaccttaaaagcgtaagacataaacttactaaattttgcaaaagttcaagttgagttctgtaaatggaatttaaattaaaacatacaatataaatcagggataggtaaacaactggccagctgcctgtttttgtacagtcaatgagctaaaaatgttttttcacgtttaaatggttaaaaaagtaatattttttccacacgtgaaatccatatgaaatacaaatttcagtgtccataaagttttattggaacacagccctgcctattcaataactattgtcaatggctgccgtggagaccatatggcctacaaagtctaaaatatttactatctggtccttttcagaaaacgtctttttaccttgtattatcagacgttagtgctcattaagcctcatccttggaaccagaaacgtgaaaacctatttttttcacatttttctctgtacatcctaaatcataaaggcctacatttgggaaataggcaagtgatcaaggtgacaaaatgcagctttgggaactgcctttacttttctctgtcccttttaaaaattctctaaaaccaagcagaggaaaagattgatatttcccagcagagttgaatgatgaaaaccacatgggtttggttgacagtgtgttgtctaccatcatgatgtaggaggaggaaactgttctggaggaaactgtgttatcacttgacatcaagttaaaggacgcagaagcatcatggtattttgttaccttatgataagagttacatataggggaggaggagaaggcagggaaggggtgagttttgttgaacgcccggctagtatggcacatgccagtgggagtggatggtggtttgaaaggactcattaacttttttttttaatgtcttctacgagaaaatggccttgcttaggaacatacttgttctgctaggaaaagggaaaaggcaaatttgttccctggggtgggggtggggacgggggaggtgggattgcttgggctattcctcgtcatcctggacagaaaagccggggcgggcgccgcagaggcaaaacaacttgggccttcgctctcgcggcgcgcgggggaccagcctgtgcagcaagggcggcttttatctttttatttttggggtttctccgggacaatgatgggccttgcgcggcacagagatcggccccacgtcagctgccgcgcttgcaacaagctggccagggagcaccacgcggagaccaggcccggccgggggcgggaggccgccagcgcctcagctccctgtccggcccggcccctcctccaaggcgctctcccgcactgcggagaactggctgaaggcgacatcgccattttaggtacgggcaaattctggacgctccaaaatccacgccaagccctcggcaggccacaccccctgcaccgggcctcggtcactcacccggaccctcattggactctggaccggtccgattggaatcactgaacacggcccggctgaagtttcccagccgctggcgcaccggatccggcagctccatgcctgggcctcagtatccctcaccccctcagacacgggctagtctgcgggcgctccgaggctccgtggttcccacggcaaccgggcggcgcgaggccggcgggacccgggagcgcgcggggctgcccggctgggctgggtctcgtccggagcccgcgcaacctggaagggaccggcgcgctcagagcgcgttccaggcccagggagccgcgcgcctcggccgtgtacaaaacggcagatcccttagttctgctttgagctcgaccatcctaaaaacaaacctatactaagaaatgagctggggttggactgcgatacaaggagccctcacatttgccagtggaactgtaaatcggtacaacctttctggagagaaatagagaacgaatgcagagcttaaagaatgtctagaggtgtaggggtgtgtgtgagagagagagacatcatgtgactgattattttttaataagaaaacagcaatgggcaactgattaaatgtactggagcacatacattcaatggagtatgtttcagctgcttataaaatgcttgcaaaggatattgaatggtatagtttaactttatgtaaaaatacagcagaaataaaactaaatgagaatgaacctaatttagcaaaatttatgtgtatgagtggaggggaggagagagcgtgtgcacactggcttgaaaaaaagaactggaaaaaagtccaaaatgttaacagtcgttttcactggatagtgggattgtaggtgattcaaaaatttttaaacgtcttattttctagctttctctcaagatatattacttaaaaaaaactaagtgtaatacacatacagaaaaattgtacaccttttgtaagtaatatatattacttaagaaataagtgtaatatatatacatagactgaaatctgtatgtgtaatcagcaccctgttcaagaaactttacaatattcccagaaactcccccttcctatttcctttcagtcactaaacccactcctcactcataactgacctttcctgaattctaacagcaaaggagagttttgcctttttttttttaaatcagaacatttattgtgtgactaatctaaaatttttttttttttttttttttttagacagaatcttgctctgtcacccaggctggagtgcaatggcacaatctcggctcactgcaacctccgcctcctgggttcaagtgattctcctgcctcagcctaccgagtggctgggattacaggtgcccgccaccacactcggctaattattgtatttttagtagagacagggtttcgccatgttggccaggctggtctcgaactcctgacctcaagtgatccacccgccttggcctcccaaagtgctgggattacaggtgtgagccaccgtacctggcctgaaattcttaagatgaactggatgctgcagcagctgtcctcttgggtttaggtggcattcctttaaaaaatccatgccttaacctgctgtacacaatttttaagtgcctcattcgaccagtcccactggtatattttttagcctcggcactccaattatactttatcttggcttgggagggtagccgcgtttgccacaggcggacttttgaaggagttagagtcacagggcagcactagctgtgcatcttatcgcaccactttctagatgatgacactccctttgtcatcttgcttctgttttgcatatttatataaaagcaatcatactgtaagtacttttttaaaaaactggctttgtcttcaacattactttcatgaaattccttcatgtcattgagtgtagattcttttgccttgctctttgtgatcataccacaataagcttactcattctactgttgatgagtgtctgtattttctagtttggagctgttgtgtatagtgctgctttggggaaaagatgcctcttggtgaacatatgcatgcatttttgttgagtgtatatcgagagtggaattgccgtgtcataggatacgaaagacccagctttagtagaggctgcctacagttttccaaagtgatcaaaccaatttctgctgcctccagcaatgtgtgaatatttccattactccatatacttcaccaacacttgttatttcttatcctttccttttagcccttctgatgggtgtgtggtaaaagtattatttttacaatcaaaaggaaaattacacatttatataaatgcaagaagaagatatgggtggaaataagttcatgactagaattttaaaataattacacaaacgtttattgcattcctactgcttatttggatatcgtgctaggctaattagggatatggtccctcctc

SEQ ID NO: 3892 - DNA, 4001 bp, Homo sapiens
cccaccacagccccagcagggagtcttgggaagcctgcactcacaggttggaaggtgaaggtggtgaagggcttgtagcaatggcctgaaggaacacctatgtcctgtagcacctcttggaagaggctctgcagctgtggagggagcggagctggctggccctgaggccagtactggtagagccattggaccacgggatccgggaagaggtggtacgagattggaactccaaacaggcctgcacaggaacccaccaagaggcctgtcctgtgtctctgcacaaatgctgcggtccgccacaggggacctgccatgagtgtagtcactgcggacaatctgggccaagaaaaagagaagtcagccagtttccctgggtcagcctgcagactgaacatcctccagggtccacaccacctttttaaaccaaagtaacacagcatagtggtgaagagtgtgggctctagagccagagtgcctgtgttcaaatcccagctccgtctctgtgcgtcaatttccccatgtgccaaacaggtgtgtcgtaatggcccacctctagggtggcggtgatgagcacatgaataaacatacataaaacatttagtgtctggcacagcagcagatattccttataataatggctgtaatgacttttattcccatcgctgggcacggcactccaactgcctcattccactcatcccatggtaaagccctatgattactaatttataaggaaaaacgtgttcaatttattgagtgcttactatatgctagactcagttctgagcactcttaccgattgaaccctcacaaccccatgacctaattactacagctaaccctatttcaaagctgtgaaaacttaaatggccaaaatcctaagctagtgaagtgacagtgttatgggctgcactgtgtctcctcctcctccccagttcatatatttaagtcctaacccccagtacctcagactgtggctgtatttggagacagggtctttaaggagataattaagataaaatgaggccatcagtatggatcctaatccaatttgactggtgtacttataagaagagattaggatgcaaacaggcacagcaggaagatcatgtgaggatccagggaaaaggctaccacctacaagccaagaagggaggtctcagaagacaccaaccctgttaacaccctggtcttgaacttccagcctccataactcccagaggacaaatttctgctggttgggccacccagtctccggtacttcggcatggcagctctagcaagctaacacaggcatagtcaggtgtccacagcaaactttttgttttagaaaacttgttatgccaaattacaagcatataccaaagtagacaaaatagtacatccatcaacttcaatcccatcaactcatggccaatcttgtttgatttctctttccaccacacttccgtccaactggtttattttgaaacatccccgggcatcctatcacttcatccgtgaatacgtcagtaaaaattcacaattatttcactttgattgaaacttactgtattcctgtccgtgaaaagtgcttaatgagcaacgaatgagttgccgcaaacaaaaacgcagggtaccgcttggcctatcttaatcaagaactcctataagaatcattatcattcgggctttttttttttcccaatgcggaaagtgaggctaagaaaggaaaggtctggaccaaagtccaacgtccctagggccatcgcgctgcggggtgggcctagaacacagtaccatgcagcccgccggtggctgggggaggaggggctgcaggagccccgcagaggggtcctcgctacgcttccactctgggcccctaggctactccgcagtctgaacgcgttaccgggtcgcatcaggccggagaagggtccctcccgctcgtccgtgcgctcacctccgccgccgctcggaacgcctacatgtgcgcgcggcagggcggccgcaaagcacgccggccggggatctgggggcggggacttcgggaggcggagctcgccggccccggatcttgggatggggacttcagggggcggagctcgccggccggagatctcggggcgaggatttcagggaggggagctcgctcgacgggtctgggggcgggactcttgggggtgtggctgggggggcctcaaggggatgtccgtggggggctccggccgccgcagaggctccttctctaactgtgcaccttggggtgggtccgctagcacttcctcctctgcgttgaaatgcgtctttgattaatacaaaaattagctgggcgtggtggcgcacgcctgtagtccccagctgctggggaggctgaggcaggagaatcgcttgaacctgggaggcagaggttgcagtgagccgagaatacgccactgcactccaacctgggcgacagagcgagactccgtcacacacacacacacacacacacaccccggtgtctttgatcatgccacacacacacacacacacaccccggtgtctttgatcatgccacacacacacacacacacacacataccctggtgtctttgatcatgacacacacacacacacacacccaccccggtgtctttgatcatcacacacacacacacacacacacacacacatcccggtgtctttgatcatgccgttgaacccccgaaggaacggcagccccgcgtgggtcaccaggcggcctatggcagggcccccatcagaacccatgcccatctgactggccggcccgtgtacttctccgtctggaagcgctcacccttggcggggagctctgagctttatgtttattaccatgttcgctgccccccaagctcctcccaggtgcttcacactgtacagtccacagagcagcgtgccatctgtcatttctcctttccagctgctctgtgaggtagatgagggatcatctaatctgtgcaccaaatccagctctccacctgcttttgtaaataaagttttcttggaacacagccatgcccaatcctttacagagggtgaaaacagactgcctagggttaaagccgggctccaccccttactagctgtgtgataaaatgagttggtgtatatgtaacctgtgcctcacggtttgtgccgcctagccattagctattattattaaagtctgttctgtttctgagcccccccccccaattttggctgctcagttgtttgtatgtaaatagtgcaatgtgacctcagccaaagccagaatgtgggacattctacagggcaaatgacgtggtttatccaacaaatcaatggcataaacagggaaggagggggactcaaaagaaaagagacttgagagtcattgcagttaaatgcaatatgtgacttttattgggatcctgaaccaaataaactaactgtaaaaaagacaccttgggctgggcgcggtggcttacgcctgtaatcctggcactttgggaggccaaggagggcagatcacctgaggtcaggagttcaagaccagcctggccaacatggtgaaactccgtctctactaaaatacaaaaattagccaggcatggtggcacacgcctataatcctagctattcaggaggctgagacgggagaatcgctaaaacctgggagatggtggttgcagtaagccgagattgtgccactgcactccagcctgggtggctaagtgagactctgtctcaaacaaacaaaggaacaaacaaacaaacaaaaggcatcttggagaaatttgaatttggatttgaatattagatgatattaatgaattattgcttatttcatcagatgggatgatgacatggagtttatataaaccaaaaaattcttactagagatgcatactgaagtgtttacaggtgaaatgacacaatgtctactatttgattcaaaatattccaacgaaaccaaatccaaacaacaacaacaacaaaaaaacaggggcacagatgaaacaacattgacaaagtgt

SEQ ID NO: 3893 - DNA, 4001 bp, Homo sapiens
ttttttggcatcatgagtccaagagaagagatgttgatttttttttttaatctcaaaggggaaaaaaatacattgagtcaagttctgaaagttaaaggaagcttcacaagttgtcacactgaatatttttacgtgaatgggattaccaaaaaaaaaaaaaaaatcaaactatctgatagcattcacagaagacaggtgttgcacagatttcagaagaacaaattgatgctctgcaactcagtgccaaacaaaacaaacaacaaaaacaacctgacaaggtaccacgaacagaagacagagtgataagcagagagtgagtgcccaaatctggaaagctctagtttaaagggcgaggacattttctctcctcagtgcctggacagcgaggagggtgggggtatggggtcctcaggaaggttggaaagcaggtgtcctatctgcctcgggcagcctccaccagcctccaccagccaacgattggtctctgaagtctaatccacacacaccctgcacttcaggggtatgaaggaaggttccggggcctccttcgctgcccatcagccctgccaggctgggatgaccacatcagttccgtctgacaccagcatccgcacaatacaggcaaagccccttccctctcttcggaggtcggcaccacttttcttccaaacggtatttccaaaaggagcacaacttgaaggaaggagcccgggtgagaaaagtcgagtctttgacggttagtccccctcacggggagcagcgtcaagaaaagacacacatgtcaggcaggtgtacaaaggcagagaaggacggggagagagagagaaccggggaatgggaggcgaaggcaggaaagaaggagacagaggcgggaggtgcggcacggacttgaaaggacgcgcaggatgtggacgaaagaagagagtcaaggagagggagaagaagggaggcagtggggaaagaaagggaagagataaagactggaggcggcgggaaggatgcaagaatgcccaggcgcggggccgcggctgggagggggctgcggggaccggcgcgcccctgggaagccgcgggctgcgctccacgcgcgggcgccggggacgcggggtgcgcccgccgctcacctttcaggatgagggtgtcgatgtcccggtcgatgcccaggaagtagcacttcctccagaggcccgagtaggtggcgaagaggggccggccgcactcggcgtccagcccgccgagccccaggagcgagcgccaggactcggggtcggcgcgccccgggccgcccgggagcagccggcgccccagcgggggcgagtcccgcagcggcaggtgcgacagcggcatcaggcggttcttctggtccggggggtcggcgcccgcgcggctgcgctcgcagctctccttgtggcgccgggggtcggtctcgtaccagtggtcggtgaagatggccgtgacgagcagccccagggagcacaggctgaggccgaggctgagcgccgtgacgagcgcccgcggctccatggcttcccgccccgccgcagccgccggtgggctcgcgcgccgccgccagacacaatgcacttggccccagctctccgcccgctccctccctcttccccccacctgccccccacctccctcctacggcctcctcgccctgcgagcccggcccggctcgctccctctcccctggcctgatctcgcctcccaccgcccgcccgcccccggcccggcccccgggctcctagccctcccccgcgccgctctcgctttcttgcccccctcctcttccccagccccctctcctcgccccggcgccccccaccccgcgcactcctctcgcccctctccctacctccgatccacagtccgccctcctctccagcgaccccccttccccttttaatctctcctcgccgccctcatcctcctctctccccttaaccctgtccctactttcccccgacttttctccaactcttcctctcacactttcccccactcatttgctcctctgctccccggctcctggtgcatttatatcccggctctggactcggtgcctctctccacctacccctcggcacacccctcccgtcctcttccctccaacgaccttaaaagacatccaccgacataagactcactcttgtcacttgtccaagttgattttgatcagtgtcccgttttgtacccaggagcaaatcccatccaggtcgggctgcgtggtagcgtttaactccttggaatcttgatctggagtccgaaggtccctttgtcctgccgcctgccgcctgcaggatgaagcctctgagacccctaggcagccagctctatctgtcgcggctctttccctctcacttgcccatcgcttagcctctaagcattctctctgctcaagcccctcttctgaaagaaaaagacaccgagtgtcagtggagcgatagaacgatgaccagagatttttctcccacttcatttcaacctgctatgagatggacttcttttttcgttgactacgtccatctcccgccagactgactggcctcctggaatttctagaagagcctggaatcaatgaaccctggcagtggcacctgctccatgaggtgattattgcctttgcatacagcaagcccccagtaataaatcaaagtaatgattttctcctgtgcaggtttccttcttgggctggggggtgggggtcaacagcaaagcaatgctacacaccaaagtcaacacctgagcctggggcagttcttccatcttccagtcacagaggttacttccaagaatggcaggcagattcacattttctaaaatgaggaaacgctaggacccggggtgctaagagttaatcacttgtgcggtatagtcagtctataccacagaggtgcaatacactcgtgccactcaatgcccttgtggtcatgtcagagacagaaaaccatgctgcactggcccagggatgaaaatgcttgtgttcttatgctatgaaatattaatgatgaagaaattatgaggcattcattacatgctaaatgtcattactccatgatttaatgggacttattaattagtgccctacatcaattggtattaatatgctttatatccttcctctaggatgacatctgtaaaggtggtataaggctcttgctgggatttattttcattgctgtttgtgtttagcatcttcagagggtacatttccagtgaagatcgtgtgcctattctgagcggttcagttcatagatagatcacttaagcaaatctttcagttatatcagacccgcattcccatttctgctgacctgacagtgtgaattattgcttggattttctcacagtttcagcaaggtctatggtgagctctagtctaattaaggaagacaaagaattataattttagtgttcctctcacctataagcttttccttcacagcaaacactgagctcatcaaaggagtcttagctggatttacacaaaaatgataagacttagaagctttctttaatttatactctacaatatgtataaaatcctagatcttaatagatgcacagagagaatacctttaactgtgagtccacagttgacatctgaaattcactcaagtcatcatgtgttcttttatttttagaaatgcatcttgagataaagttatcaaaaccttggaagccccaagggttgtcaagcctttagcaagtcctcatccccttttcaagtcttcacctcatgtattacaagaaataaatattcagccacattccagagtcacctaatcatcttcacacaataaccctgtcttcagctggagctagacagaagaaagcctctttttaaggcacttctgtttaaattaaaagaacttaccattctgtctcattttcctagctagaactctttgatcatactctttttagaaaatagcattattcttcaagttcatttatgtctatgtttaagaccattctcagcatataatccaaaggtt

SEQ ID NO: 3894 - DNA, 4001 bp, Homo sapiens
tttacagtttgttcatgtactatgctactatcagaattaattatgcagcatcttcatgaggagaaatcagatttggatgcaagttaggagagaaaagaaaatggtgcacttcccaaaagattttactgtatctggttcccctaaaagtgctggagtccttccacacgcagacagattttggatggcagtccccagctgagttagccatgggaaggaggaagttgacatgtttgagaaatgaagaatccgccaactagcaagactctgaaggccaacacattattaaccccctcttttctatgtcattccattccaggctgtaactcaacacaaatccgtctgtttgttttcctacatggctactaaatattaaaatgtactgattttggactttttcttttttggcatcatgagtccaagagaagagatgttgatttttttttttaatctcaaaggggaaaaaaatacattgagtcaagttctgaaagttaaaggaagcttcacaagttgtcacactgaatatttttacgtgaatgggattaccaaaaaaaaaaaaaaaatcaaactatctgatagcattcacagaagacaggtgttgcacagatttcagaagaacaaattgatgctctgcaactcagtgccaaacaaaacaaacaacaaaaacaacctgacaaggtaccacgaacagaagacagagtgataagcagagagtgagtgcccaaatctggaaagctctagtttaaagggcgaggacattttctctcctcagtgcctggacagcgaggagggtgggggtatggggtcctcaggaaggttggaaagcaggtgtcctatctgcctcgggcagcctccaccagcctccaccagccaacgattggtctctgaagtctaatccacacacaccctgcacttcaggggtatgaaggaaggttccggggcctccttcgctgcccatcagccctgccaggctgggatgaccacatcagttccgtctgacaccagcatccgcacaatacaggcaaagccccttccctctcttcggaggtcggcaccacttttcttccaaacggtatttccaaaaggagcacaacttgaaggaaggagcccgggtgagaaaagtcgagtctttgacggttagtccccctcacggggagcagcgtcaagaaaagacacacatgtcaggcaggtgtacaaaggcagagaaggacggggagagagagagaaccggggaatgggaggcgaaggcaggaaagaaggagacagaggcgggaggtgcggcacggacttgaaaggacgcgcaggatgtggacgaaagaagagagtcaaggagagggagaagaagggaggcagtggggaaagaaagggaagagataaagactggaggcggcgggaaggatgcaagaatgcccaggcgcggggccgcggctgggagggggctgcggggaccggcgcgcccctgggaagccgcgggctgcgctccacgcgcgggcgccggggacgcggggtgcgcccgccgctcacctttcaggatgagggtgtcgatgtcccggtcgatgcccaggaagtagcacttcctccagaggcccgagtaggtggcgaagaggggccggccgcactcggcgtccagcccgccgagccccaggagcgagcgccaggactcggggtcggcgcgccccgggccgcccgggagcagccggcgccccagcgggggcgagtcccgcagcggcaggtgcgacagcggcatcaggcggttcttctggtccggggggtcggcgcccgcgcggctgcgctcgcagctctccttgtggcgccgggggtcggtctcgtaccagtggtcggtgaagatggccgtgacgagcagccccagggagcacaggctgaggccgaggctgagcgccgtgacgagcgcccgcggctccatggcttcccgccccgccgcagccgccggtgggctcgcgcgccgccgccagacacaatgcacttggccccagctctccgcccgctccctccctcttccccccacctgccccccacctccctcctacggcctcctcgccctgcgagcccggcccggctcgctccctctcccctggcctgatctcgcctcccaccgcccgcccgcccccggcccggcccccgggctcctagccctcccccgcgccgctctcgctttcttgcccccctcctcttccccagccccctctcctcgccccggcgccccccaccccgcgcactcctctcgcccctctccctacctccgatccacagtccgccctcctctccagcgaccccccttccccttttaatctctcctcgccgccctcatcctcctctctccccttaaccctgtccctactttcccccgacttttctccaactcttcctctcacactttcccccactcatttgctcctctgctccccggctcctggtgcatttatatcccggctctggactcggtgcctctctccacctacccctcggcacacccctcccgtcctcttccctccaacgaccttaaaagacatccaccgacataagactcactcttgtcacttgtccaagttgattttgatcagtgtcccgttttgtacccaggagcaaatcccatccaggtcgggctgcgtggtagcgtttaactccttggaatcttgatctggagtccgaaggtccctttgtcctgccgcctgccgcctgcaggatgaagcctctgagacccctaggcagccagctctatctgtcgcggctctttccctctcacttgcccatcgcttagcctctaagcattctctctgctcaagcccctcttctgaaagaaaaagacaccgagtgtcagtggagcgatagaacgatgaccagagatttttctcccacttcatttcaacctgctatgagatggacttcttttttcgttgactacgtccatctcccgccagactgactggcctcctggaatttctagaagagcctggaatcaatgaaccctggcagtggcacctgctccatgaggtgattattgcctttgcatacagcaagcccccagtaataaatcaaagtaatgattttctcctgtgcaggtttccttcttgggctggggggtgggggtcaacagcaaagcaatgctacacaccaaagtcaacacctgagcctggggcagttcttccatcttccagtcacagaggttacttccaagaatggcaggcagattcacattttctaaaatgaggaaacgctaggacccggggtgctaagagttaatcacttgtgcggtatagtcagtctataccacagaggtgcaatacactcgtgccactcaatgcccttgtggtcatgtcagagacagaaaaccatgctgcactggcccagggatgaaaatgcttgtgttcttatgctatgaaatattaatgatgaagaaattatgaggcattcattacatgctaaatgtcattactccatgatttaatgggacttattaattagtgccctacatcaattggtattaatatgctttatatccttcctctaggatgacatctgtaaaggtggtataaggctcttgctgggatttattttcattgctgtttgtgtttagcatcttcagagggtacatttccagtgaagatcgtgtgcctattctgagcggttcagttcatagatagatcacttaagcaaatctttcagttatatcagacccgcattcccatttctgctgacctgacagtgtgaattattgcttggattttctcacagtttcagcaaggtctatggtgagctctagtctaattaaggaagacaaagaattataattttagtgttcctctcacctataagcttttccttcacagcaaacactgagctcatcaaaggagtcttagctggatttacacaaaaatgataagacttagaagctttctttaatttatactctacaatatgtataaaatcctagatcttaatagatgcacagagagaatacctttaactgtgagtccacagttgac

SEQ ID NO: 3895 - DNA, 4001 bp, Homo sapiens
acagacagaacatacacagtttcatttcacacagtgatctgagttgtggagtttgtgttgttttactcacctagacacagaaagtgcccgatctgtagtctgtagcttcgggaggacaagcaggtgaggagcacgcagagcgcgtggaaggtggccagccccatgagccagggctcagtccagtccgtctgctgtaggaacacaccagcagacactcactgtcctgccactcaaggccgggttcacggcccacccacagccttctcccagcgcaggaggcaggggcctctcactcctgagtcctcctgggctactcaccaagtatccagagagcattgccaggcctcagagaaacatggggacaggaaagggagaaggaaccaggaggatggaaacaggattctcccctcagtgcaactataattcatggaattcaaagttcaagcacacagaactgaaggcatctctgatgtgctcctttcgtttgtggaacagaatcatgtttttaaggtgggtataattaaaggaattaccatcctttacgatgataattggttatgataattggtgacgacaaggaaattaagacgattgctcaaagagatgcacttggctcagccccaaaggtaaaacatgaatcatcatttcagactccttagtcagcactgaagacctcagggaatcttgagccatcgccacgtgcaagacttgattttctccaacctctctgcaatacactgaactctccagacagtgccgcactccgccgcctcctggactccccgggaccctgctgtacctggggacagtgtctggctcagggacctgaagtagccaggctcagatccactgctgctcagtccccacctgatgctcagatgccaatcccagcagtcctcaaccctccccatcccctccttgagcgccctcctgcagaagacaagccctgccctccaagctgcagccccgccctgccctccaagctgcagccccgccctgccctccaagctgcagcccggcacagccctccagaactcctgtgtcactactctctgctggggaccgcagcggcttctccagagccgcgccatgacataaggacacaagcgcatctactcccatcaatgcacccaccagaagaccagaggcacggaggtgaggggagcacggctttctgcccagaccccatcgagtgcccatgtcaccccttggcggccacgtggggcgtgggctcccctgggatctgtcagacgaacccggcacggcgcacgccccgcccacactgggcagcgttcctccgtgccaccccacacgatcaggctccaccacgcacgccccgccgcactgccagaatccgcccacatggcccaagccccgcccgcaagacgctggactggccggcgtgcacctcccacacgaacaaagccctacccctcgcgctccgcccacacaactcagccacgcccgcacggtgcaggacgccagcccagcccaagcccgggccacagagcgccggagccagctcactgcgcacgctcctccacaaggccccgcccggccccgcccctccccgcccaacggcccaggaccccgcctagcgctcgcgccccgacgcccggccccggccccctcccacagggcccaggaccccgcccacagcgcgcgcccccgacgccggccccgagccactcccacaggtctcaggaccctgcccagcgcgcgcgctccgccacaaggccccgcccacggccggggccttcttggccacaggccgggtgctctgtggggcctaccctacgcctctccgccgtcctcccccgaactggtggttacgcgggccgcgagttaccgtgagcacggctgggatgctgacggggaaagagctgacagagaaggcggacggcatggtgttgggaagcccgctctcacagcaaccgccgaacccggcctggccagaatccacagaggagggcgccaaatcctctctcgtgagatctgcccttctcacgaaacttgcgcttgcttcctctcgcggtaatttcatggcattgctaggtccagatatcgcgatatttcctggtggtcgctgtaatacggaaaacttactacgctgctgtgggacttgtgctcgctccgccaggaggccgagggcgtctttagttcgttaacagaggagcaggcggaggcgggtggaatttaggaggtttgtttcaaaggctcagggcgctgtaccgccacgccagccctgtcccacctgggactccctagaagggtcagagcatcaatgaggacggtgtccgccccgagaccctgcaggagccggggacattgcccactcctcggaccctgcaggacttgggaaggtgtctgctctcgcgaccctaagggcagtgcactcttagtctgggtcagcttagggttatctgtcttcactttggagatttaccagatgttcttacgcttcacttcgttgttcaacgacagatacaaaaatataaagttaattttcttccagcgaattttttccctttattttaacatctataccccaactttgacattttcaaattaaacattctgttattttaacatcatgaattattaagtgtatatactttaattgcatatgttagctcttgaactagtttaatgtttctaaaaatagttctagtggtggacttttttttttttttaatagctttaacccctcccagatctttcttaaaatctttccacagtgtggtcatttctgcttatgctacttaacatgcattctctcatttcagtgtagaaggtcatggtttcttcttatgggaaaacatttctttcattgatatttttctctattcttcctgtattcaactccaggaacatcccgttaggtagatagtgcatcttcctctcttttgtgtttctcaaccttcctctcaaaacatcacgactgttgttgctgagtttgggaaatctcgggcttggctttcctggttttttttttttttttttaagacgatgtctcgctctgtcgcccaggctggagcacaatggtgggacctcggctcactgcaacctccgcctcctgggttcaagctattctcctgcctcagcctcccgagtagctgggattacaggtgttcgccacctcacctggctaattttttttgtatttttagtagagacggggtttcaccatgttggccaggctagttttgaactcctgacctcaagtgatttacccgcctgggcctcccaaagtgctgggattacaggcatgagccaccgcacccagctggtgtgatggttttcatctgtgtccattctcactcccctgtgtttgttcagctattttcaacaggacctttcagttacagggaatagatctgtcctcttcagttcagcctgttactgtgtatctccctgatgatatttcgttactatgtgaaacatcactcttattaatttccatgggttagtttcatcgtcagtcctgtctggtgcctgcctttcttttgtggtgtctgttttcttgtaacttctgtaatttggggtcaaactctttttgctattaatattaaccacagcctatctacggtcactgggattttttctcttcatcttcccctcagccgccctcccagatctttcatatattgtgcgccctggcacccaagtttccaaaattgttaaaactctggccctcagcagcttcactttcagtcccaggacattcatcttccacattcctcccgccctgccgttctgaacaacgctaggctgccggacatttagacgtgaagcttgtgcaatgtcgccagtctgagatgtgctttaatttcaaacatacaccatctttcaaagactttgtaccaaaatgtaaaatacattatcaacaattgtattattttgcttacatgttgaaattatattttggacatactggaccaaataaaatatatcaataaaattaatctctttctctttgctattttaatgtggccagtaga

SEQ ID NO: 3896 - DNA, 4001 bp, Homo sapiens
tttcacatactctccagtacccaacagtgtctagcacacagtagggaataaaaaataattgttttaaaaatctaataaacttaagtttaaccttgattagttcaaattaataaaaaaattcttctatatccattttattttagggaagaatgcaaatgataagttatacaataattcaaataaatttttaatatttgaaaacatcacaagaaggcacttttatgttgtctgagaacttaaaatttttatatgtacactttaaggtggactgaaatattgaaatattctttctttctccaagtctttggcaaaatcttcctcttgcacagtctgacttacttccctttactaaagtctaaaccatttccactggcaagttgtatgcttattctcctgcccccaaatccactgtaagatagtctatcaggtacttgcctcaaaacgctgcttcatcactactttgttccttatatatgccaacttatcaccagcttgcttaagtcttcagggacctcctatttttattaaatattccataatcctgactattatgtaaataccatactttgatttttgataagaagactaataatttcaattctcaataagctttaggctaataaacagccctttcattgttgaatacaatgaaataagcgctagctattttcaataaattgattttcaaagattaattcaatataaagaatagagttgaacaaatgcattatagtttttaaaagttatgctaccttaaaaaagaactttaaagtttcaatgagaacacaaacatcaaaagcaaggcacttcttgatagtgccaacaaacttggttaaagctcaaataatataagctttcatctgccatggctggtaattaagttccatgatttttttaaaaaaaatatactgttaactttgaagttatgaatataaaataatacatctctatttatggatttttacatttgagatttcaagggctgatagcaaaaaaatcttatttatttgcaacatagtattcacacacttgaaaaaatgctatagacaatacctgtcctgtttgttagagttagtgtattctaaacaggagcagtgaaacaatggataattcagttttgccataaatattcagactcctgttttatgctaaaagataaaataattattcctatagccatgtctacttactgaaaaggaatctctacatgatgaaccttttaaagacatctaattgagattttgtaactcacaatccagtccgctagaagtgacatatactatgtaagaaactgttcatttttattttacagacaagagggaaaataaagctaaattgtacttactgtaccagaacttccaaatattggagtcattctcttccacaatcccattaaaccaacacctccagaagaacccttcatggtgaaaagtgacgttctctatctgcacagaacaaaatgaagtaacttgccatcaatacaagaaatataatcaaaatcattacagccagtaaatttttaaggacatgtattttatcccaaataatgaagctcagtagctttctacatatctcttccatgaagaaatagacactccactactattctctgatttcaagagcatacataagggtatcttcataactaccatgtgcatcactattttgaagaagagactcacattcttttcacctgaacatctccccacttcagttgcaagaagccaataatccgatccaaaagccaccaaaaagagtaacacccccaaagcaccaaagagagctccaaagaagatagcgatatttagtctcattttcaattcactggtttccttttaaataaaatatgaaattttaaaatggtaagacacctagtttctcagaaacaacagcaaaaaaaaaaaaaaaagaataatatttttgagttggcagaatcttcttgagaaggctgtcctagctcatgttttggtggcttctcgctcacgccccaccggcagattcatattccctttgctcgcccctggaggaactccagcccagcagctgagaattgctggctattttaagatagtgattgaggagctgtctttctcccatggggatcaaaaaatagctgaccttctcttgactatagagagaagtatcaggaactggctcagattatcattattgctgttgggtaatccacagaagtagaaagaagatggaatggttatgaagtcattgaaagcattggccccaaatcttgtgtctgaacaagctcctcttagtctagaatgcccattacaatcccaaagacacttaagactctctttgaagatatataaatcacagatataaagaaccacaaagaccgatcttgaacacaattgaagttgtaattaacttaattccttttggactttttttgtggtagaaaatacgtttttggtcaaatagtctaacataacacagtacagttcacgtttataatctaaacattcagaggtatacttaaaaggtcaagaatgttcatggtaacataattgttgaaagtataaagaagagcttttatgcagcatacactagtgacataaaaacaacactttctgcagcagcctcatgagtcttatacaagttattccaaataatcatccccaaagtggactgatgaaaaaagtctcaaaaatgtattatttcctgaattaagatgaaataacctgatcgacttctttttccttcattttaaaatatctcacttcctcaaaatatgaatcatacttaatactcacacagaccacctaatagcaatgaatctacactttcttcaaggcttaactctttacagcttatttgtttgttttgtttttctgtctgatatgccagaggagagtatttttctaagtatttgtgtgcatttaaaatcttgcaccgttcctttggttattgtttttatattctcaacaataatctggaatacttaatcttccaagggggcatctcaactctaccagctttcttcacgccttcttttttgtggcatgggatagatccttacaatggattctgtgagaacaaaaagattctcaataaagatgaagggccctgttaggatgtagctatatgcaatcagaggtattcaaaagctatgaataaggccaggcgcggtggctcacacctgtaatcccagcactttgggaggccgaggcgggtggagaccaggagcctagccaacatggtgaaaccccatgtctactaaaaatacaaaaaattagctgggcatggtggcgggcccctgtaatcccagctactcaggaggctgagacagaagaaacgcttgaacccgggaggttgaggttgcagtgagccgagatcgtgccattgcactccagcctgggcaacaagagcaaaactctcaaaaaaaacaaaaaacaaacaaacaaaaaaaaacatgaatagaattctaagccatatagaatgttacacaatcattaaggattagatttaagttaaggggtcatctgagctaatccctcatctaatgcttaaatattttttataagacttcccacaccatcaagctatgacatttccagcctgtggcatttaaggacatcagtaacagccataatagctctgcctgattttctgccaaaagctgcatcctaggagtttccagatatttattctattctgtcctttgagattgtgaagcacaagtttcaatcctctgtctgtgacagaaccttctgatattttaaagatagccatcacccacgcctcatcaatcacactccttccctacccctatatagaggtctaagctatatttttctaagccaaacactctcttcctttaaacgccttgagattggtataactccagacctcctcctctccgttctggttttttcctacaattttcaagtgcttgattgaagtgagacatagtaaaatattctgggtatattctagccgttcttacctggatgctggctaagagtaataatggcctcacaaca

SEQ ID NO: 3897 - DNA, 4001 bp, Homo sapiens
tcagaatattaaagaccagtatcagcaaagcccaaggagagagtattttaacagtaggaacactaaaaatatcaactatgaggtttataaacaagtggtgggaaagagaactttttacatttgctattgttatgacaggcacaatctgaaatacaattttagattagcagtgtataaaaatactttttaaacaatagttttgataggtacagtagcatttaaacaaacagctgtgtggttattccttttgaggacctactaaaacaattcgacttactgcccccagctacacctgaaagtgcgaacctggaaagcaagtctcttacccaggtacacatcacacacacccacatactgaaaccacctccatctatgatgcatactgatgaggcggtgatctcaaacacggcgtgagacgagtgtttgaagcctgtttccatttccaggtttgggatgaatgaacaagaggcgaaggccaagtggagtctgtgtgtgcctgggtcctctctaggagtttaatctggcatatcaatatttaacttgggaggggggggaacgtatttcccagggctctgggttataactactctggccttctttccaaatattggagcaattttcggagcttctggaactgatgtttcttcagcatcttcactatcttcgtgatggagatcatatgaaatgttcccatattctcttaaaaatgggaaaatttcaagcagaaactgacagaagtctctgcgaatgccaaaccaccaatgattgcccccctttcgcctaaatgttgtggccattaaagttagtaaggaaagccaaagggggacaaatatggagacgtaggagaatgtattgtggccatccaatctgtgaaccagcaggacctcaaaagtgagcagaggcacgacaatcgttatccaactgatagccatggtcacgtgtgttctccgctgctcggcaaccacatccagggaccgcaggaacaggagggaccagacgatgtaatagaggacgaccaggcaaaggaacgacatgaggatccacaggggcacaaacaccaccagccacggccagtgaataatcctgtccagctttagggcgatgaagatgaactgcaggatgttgaccgagcacaggatctccagctccagcgacctatcgtgtcgaaagccccagacgcaggcagccacggacacgggggacacgaagaagagaggcatgaagaccagcagccagaagtgggtgcccctctccaccctgtcgcagaccaggacttcgaacatgagcagcagcaggtggatgcccacagcgatcagcatggctttgaactccacacaggcctctccctcggtgcggtagcgagggttgcgggcccaaacgcccgcgcccacggaggcgcctgcgacgactagaagcttccacagccatatgggggcaaagacggcccagtagctccattggatgatgccgtccaggcggaggggcagcagcaccgagaagagcagcaggcaggtgtagatgagaaacttactggggttgaagtcctggaacaggcccctggggttcatggcggaggccgccgcttgcctgcccgggcctgctccctcgcgacgctcggcgctcgcgtctccgcggcttctccggccgccgcctcccgggccccgcccaagccggctccgcgtggacgaatgccgggacgaccaggaggaggttcggagcggcgaagcggagaggccggaacacgtgcacgcgcggtcacgtggcccggccggaagcgcgctggggtgtggcgcgcgcgggcacgggcggcgcggcggttacaaactgggcgctgcctcggtcccgccgccgcccgcgttcactccgtacccatcaagaaggcacctaatgcgtgtggggcccgaaggggcctggcgcgctgctgactccccaagcggcccgcgaccttgggcggacgcttccaggcgactccgggaacatggaggcgggagtgagctcacatcctccctgccggccggggcgggccctgcgggggcggggccgggtggagagggcggggcctgggcgttggcaccctacccatctctgccgggatcctcgcctccccgcgctcgccgcggcttcccgggaacccgcccggggctagagcgcccgcggtgaggctccagcaccccgcgcgcgcgagcagaggcggtggccgggctagtgcgggagtttgcgagcgagggagcgggtgccggtaactgaacggatgcaaggcgatgtgcatgagcgcagacctgtgggggccggcggcgggtgtatccctggctcaaaggaaaaggcccgcgcgtagactcagggcacgaggtgggggggccttacctgggatgaagactcgcggggcagaactccgcctggtggagcaacggacgtttctcaggctgcctgcgaagtggctgtgcagagatcccaggcggcagcggcgctcttgtacctgtccctctcactccagagtggaaggtgctggtgagggtgttagaccccactcgggaggaaactggatccagaccagggttgggggttgctttctgccccaggtcacccggcaggttaacagagaatcgcgtcgcagatacagggctcctaccttcaagtgtctagtcctcattttgacttatttggccctgtctctgtgttattctcgcaaaaccatgttttccttttcctttggaaaagggtactggaccagaggtcaagagatttgggttcttgtccaggccgtgccacccatcagctgagaaacctaggcaaattcacctctttctctctgggcctcagtttcctggtctatgaagttgggggacagacctgggtggtgtctaagggcaaggctgcagcgggtctgtgatttggagcacccctttcgccctctggccatctgggcagaccctggaggatttctgtcttccccgctgtcccactgctcagcagagccctggctgccctcaccagtctctcctagtcctcttttcctgaagtggctgtgggatgttgtcacgcaggtcctgggctctgaagtgggacaggccatcagaggaacgcatggcctgtcagggcctccgcggagtggccctcccgcaccctcacagcactgccccaggcgggcatgagcagggtgtccaggtgtcgggcggacagtcccagcccccgaggcgctctccacaacttcacttcagccacaggcaatctgtggccctggggaagggagtccagctgagtgagcttcaccagtcctcaggctcagcccttaaggctgacttcatagatgtgtcttcagggcctcttgtttctggagagccttatctccctccattcctcccctaaacagagttgctccaatctgtctgttttacacattggtcttttttgtactcttttctcccaagaaggatttgtcaactaaaaatttgtaaaagtggaaaaccccctcaccaatccaacctcttcatctgtgaaatgggcttggaaaagcacacaggattgttttgaggattagatgaatcaatacatggaactttgcactttgcatttagagacctgcaagtaattgatttgaccccactaggaaagcagagcccgtggaggggaggcgctgccaggagcgcccccaccctccgggagctggtggcagagtcaggtcctctggaccctgcgagaacagtcagaagtccttcccaatcacctatgtagtcagatgaactcagggcctctgctgccatctttgtggcaaagacagagctcggagcttattttcccaccttgagctcctcattcagaacaagtgcaccctctccatccaagaagcgggtatcaaggtgtcctgtcacagtgcaacagtggctctgctgcacagctcctgagggagggcagacccagcttccaggcttgtgccacagggtgagggatgctgtctgccatctgtccccagctggcttcctttggcctgcaggccttgaccc

SEQ ID NO: 3898 - DNA, 4001 bp, Homo sapiens
tcctcaagaaaccatagacttttaaagagcagctatggttcttaagcctagtctaatccagggctgccaacagtgtcactggcacactaccagatgctgggcgcttcacagtccgtattggaaagcctaccggaatggcaggcatccctctaaggctacaaaagttgccattcttcttagctgtggactagttttatcaagtcagtgggcatcctgcatgtctcaggcagaacagaagctccaataagtatttatgtgtgtctttgattaacaaagcagagaagcaggctgttactattatactaaatgcggtaacataaaaactttaaaaacaccaggttcactgaggtgaggaaaatactggaaactcttcagtaaaaacatcttcattttactcaagagaaaactacggtccataaagactctgtgcctggaccaaggttataccacaagttgtggctgaaggaatgagtggtctagaacccaaggtgctgggtgctggtctaaggctacttctaattttctcgctgttgccatgcccagaaaccttcctgcttagacagatttgtgttttattttttcaccagcataaaattgttgtatttcttactaccaaaccttcgttttctcatctgtaaaatgggtataaaatggtgctttcccgcatagggcttctatgggtattaaatatgatagatactgcagttaaagcacttataacactgcctagcacatactgaacactcaaaaaatttctcttcaatgaaaactggaatccaacacttccccaacatataactcactgcaagattccctcagttgggagctgtggcagaatctgataatgacctcatcaacatccagtctctcattcatccttagataaaaaaccgcggtataaccggagggagggccatgcccagctaaaagaatacacttggcagcctcccttgaaaccagggtagccaaagcaaggaagggaagttggtagacagtgcacccaggaaatcttttaaaagattttatgaggggaaaaaaaaaaagaaacagaaatgtgaagctcatggtaagttagcggcaggtctggagttggaactctaggtttctgacttccccaggtgtccttcccagatccttccccagtgtgccagcatcttaagcccactccgtggcgagcccctacagctagcagccgctaccagttcttgcttcctgtgtgccaggcattgtgcacacgaacaccacaagaaccttgtgaggcctcattacctgccgctcacgtgggaccgttatgtttactcgctcaaggtcacaacagtcaggggcagaagaattttcgctccgattctgaagctgaagctgttaccttctctagtcttgagaccaaaggaatgcgagatagtgaaataacaaggatttcaacacgcattgatgtactgtacaaaaggccgtgtgctgaaagtctggagactagggtcagctgtgccagtgacaagctgtgtgaccctgggcaaatcaaaacctctctgagtttcggttgcttctgtaaaacgagggaattgggcgactggatcgcgcggttgcttctaattctaaaattacaaaatgtccaactgccaggcgagagactacggaagcccagtaagacaggaagggcgggcggggcctgcccgggagaccccaaagcgagaaaagggagcgcccgccccagtgggcctcgcggtgccgcccgggccaaagagcgcgccctcagggcagccgcgaagccggggagcgagcacgcacgcgcgcgccgccgccgccggtcccgggttacctgataacgctgccgccgccgcctccccgcgcacgggcagtgtggccaggggcggcagccagagcagcagccaccaccgcccttggcgcggccccatttcgttaggggtcagctccgtgcgacccgagccctaggggaccggctccgctgcgaggagcggaagtggcgcgggggctcagagaaggcggagggggcggtgaggcccgaacgcgggaaaggcggagaccccgcctccccggggcggagggagagttgggctcgttgctccagcctccgcccgcggcctcggggcacggcgggcccaggccggaggagctttcggtggcgcgaccccgctggcatgctcccggcctcggcctcggcctcggccttggcctccgggcctccagcgcacgcggggcgtccagggcctcatcttcccctggggaccgcccggccgtgtcccgctgccctcggcgcaggggtgggagttgcagagaggaagagtcgctaacccggagtgtttcttaaaacttggctgacctgtgacctgcggatttggaggctgaattctccgagcacctgtgagtgacagcccgtgaatgggaaggtccttcggcaaacgccctttttgtgaataaaatacataaaagccagtttctttattttacctttctgtttatctttttactttcatttggtaacaagcaataacaaattggaaatttggccgcttaagtaacactgacttgtatgtctaatctcggacacggcatttcagagtacagaggggctcgtaaaatgttccttcaccaacatgacaaggttctcttaaaattaccttatgttaaaaaaaagtttcttaatgtaatagatatatttttaaattaacatataacctgaatgatcttaatactgataattaggagatatacatatattttaaagaacattccctccacaggacctggaacccattaatttgactcaatattccatacttaactaggacagtcttctctaattctggtcttttggtgagatatcttagagaacccaaagtaacagaaattatcctgttaaaaatagataagcctcatttttcctaaaagtctgagtaggatggactaggctttccttgccctcaaagaaaggtttaaccaactgcccttaagcacttggcaccatgtgtacaccatgtatggcttttaaaaagttaagaaatttccttgtaagggactcttcagagggatggtttttaaaaataaaccatcattacttgagtgaagcctgtcttcagagaaacagcagagccctgatccaattctttcctgtattcccaggtgcggtgtgcacttgcttcttgcaagacagcttttgtacctaaccacattcattttgatttggtttaattttggatggcactatggaaagtagctaaaataaacaggtgggttgttgaatgatgaatgtattttctacagatatatctggtggagaaacaaaagggcaggcagcaatgtactaaatatttaaagtgctatttatatcacagatccttagtaaatatctgtaaagaagctatattgaaacaccacatttttctctataagcaataaatatttttccggagataacaagaatgttaggaggtgatagttctgtcactgggggacaatcatgaaattccacttaacctctccaaacttttcttctgtatgaaaaccttatccactgggggaagggcaggaagctttaccaccaacaggatcctggcaaagaccccctgcttctggagaagagatagaagcacaaaccttctgccctttggggagcagcaggagcaggaaacactagggctctgtgtcctgaaccaatagaaaattgaagttggctactgctgggaaaccctctctcactcaagactcaccacagataaaggaaggatttggctgcaatgggaaagtgtcaggaatactgggaaagccccacatctaaggttcaggtgcacagggcctgcctaaaaccaaggcaggaccaggagtgtgaaaaaccccttttccccactacaagccaagcaccagtgacaacaccagtcaactagtgaggaggaaaaagagtggggagagacctctctgtaacacaggcatgcaaacactgctaaaagctgagtgagggacactgagaaaaactccccagcactcta

SEQ ID NO: 3899 - DNA, 4001 bp, Homo sapiens
tgagcaacatgcagagggagtgggtacagatatggagggggtgaggtgatacagaatccttggaggcccagaacgtgtcctgaacccttgcggggggcacttcctcctgcctactcttcagttgttcagcccagagtttgggggaggaatgggagggaccatctggctcccaaccctgtctacccacccattgcagggggaggctgcagaacacaagtcttgcactacctctgctcaacctggaaccccagcccccaagactcatttgcccccactggtcccactcacctacaattctcctggaggctttctttgggcccccagcccatagagctcactctcctctctgaagttctgtaactcttgctgcaaagccactggtcacttactcccattatactgggccactagcccatctggcacctttatgcatattagaaaaaggtgtgcctttctctaggcaaagcagctttgtgccaaggcccagagtttgtcagagcatgagctggactttagcccccacttgcccactcagctgagctcccttatttagtacccgtcctgtacaagtattcacagcagctctgattaccggagcctgccttgtaggctggatggatgtgtgtgaccaccatccagcccactctaatatgtatcccaggtgtaaatgctccagggagtctcctccctgtcagacaatatgccctgtggtaagggaccatgtgtaataaccctgctaagtgttttcagtggctacctagcacagttagccaaacacatcctcacaatagctacaatttattgaatgcttactaattcttacaacactacatgagacaaatattgtgatcattgttcagatgagaaaactgaggctcagacagattaatgtgcccaagacatcacaattagtaactgcaaagctaagtaaattcacactcaggtgtgcctaatccaaaaacctgtttttcctataatctagagtctagacaatctataaatgtgtgggatgaaagaaaaggaagaattattcatgatggtagagggattcagagaagacttgggggcccagaaaaagaactcggggaaacactggggagcccaggtgagggatgagatggggatctcaccgaagaagcagtagacgactccaaacaaacagcacatgatgcagacgagggccggcagtgcctggtacctgcgctccaggggctgttcacaaggtgcaccccagaaggcatcatctggctcagggggcagcagctggaaccgcagtgttgccacagtccccggcatagtgctgggaatagaagggagtcaccctcccaagttaacctgacagagggaaagttggggtcacggaggagtcctgggtccccaccaggatgggggtgggagagggattgggagaactcagcaaggacagtggacaaaggaatagtatccacatttgtgcagctccggaagcatctctggagtggggagcaaagacaaagggaaacaaaagtgcctggctagtggaggctgggatgaagttaaaagagggacgggagtcggggggatgaagggagcgtgctgccagtgagaaggaggcagccaagagattcatctgtgggcggctcaatatgggattgtccaagatttacctgggctggaggcgacctgagcttctgagtgaaagaggctgtgcagaggcccgaggggccggggttgcggggcgccagaggctccaactgactggggtccagggaaagtccgtcgtgcgaggaagggggctgctgggccggagagaatggtgtcggcgcggtggcggcgccgctccacgtccaacaccggctggcactccagtcccgcggcgtccgggaactcgggctgggcctgaggaaggggaaggcgcaggagccggggctcgggccgccccagaaccgcggccccatgccctgagcccgcccgcggcctttggtgctgatggacagctccggcctctgctcctgacgtcactcagggcgcaccatccaggcaggggcgggctgcttctgacgtcacatgggacgcaccaaccacgccgcgggaggcaggggactccgcccccggcgtctccctctcccgcactgaggagggggcacttccgggggtccttcccctttaacctcccccttctcctccctctccggtagcgagagcccgagaccccaccccgggggcggggcccttgcagtgacacgtcggacagctgcggccgcggctgaggctccagtgccgagcgcaagaaccctgcgcagcccagagcagctgctggaggggaatcgaggcgcggctccggggattcggctcgggccgctggctctgctctgcggggagggagcgggcccgcccgcggggcccgagccctccggatccgccccctccccggtcccgccccctcggagactcctctggctgctctgggggttcgccggggccggggacccgcggtccgggcgccatgcgggcatcgctgctgctgtcggtgctgcggcccgcagggcccgtggccgtgggcatctccctgggcttcaccctgagcctgctcagcgtcacctgggtggaggagccgtgcggcccaggcccgccccaacctggagactctgagctgccgccgcgcggcaacaccaacgcggcgcgccggcccaactcggtgcagcccggagcggagcgcgagaagcccggggccggcgaaggcgccggggagaattgggagccgcgcgtcttgccctaccaccctgcacagcccggccaggccgccaaaaaggccgtcaggtagtgatcggctgcgcccgctctaccccctgggcagcggccgggaagcgcgcggggaggtcgcccgggcccgggtcaggctccggaaggaaggggctggcgagccaggaagtctttgggccccgataacttccgatggccctgccttcccgagagccgtggggccagtccgagactttctctgggccctatcccggcctgggctgaacttactggactgtgtcctaaaccggctcgacccgatggcgccccagagatcctactagctccctggctgggctgctggtgttagagaaatgacttatatatagggtgagtgtatagagacaggggaagagaaaggagagaactaggatttacctggatctcttgttcctgagtgggttacaagggccacctcagggtgagatgggggagggaggaatgtacctatctcattaatgtctctgctgatgagttgaaataacttctaagtaacattgggttcaaatgctggttctgcaatttaccttctgccttaccaaaaggtaagttcctagagcccctgagtgcagtttgcccctccccgcaaaaacactcagtacacccctatgccaaacgttcctttatgtcatttatgtgaggcatttgtggcataatggcatatttatatagaaatgagtagatacatggtgtgtccagcgtttggctgggtgctttaaacagatataatcagtcccattttacagatggctcaggttaaataacatgctcaaggacataactactaagtagcgaaccccggagtcagacccacaatatctctctcctatctgggtgggtattgccatctcccaaatgcaaagcactacctgtttaagaccatttcgtttaaatcctcatgacccctgggagagagggtttatttttaacctattcataggtgagagaacagatacagagaagacgtgacctgccagggtctgtgctgaccacctcccccccaccccccgccccgttgtccttttgataagcttgtgccatctcctcccctaggacccgctacatcagcacggagctgggcatcaggcagaggctgctggtggcggtgctgacctctcagaccacgctgcccacgctgggcgtggccgtgaaccgcacgctggggcaccggctggagcgtgtggtgttcctgacgggcgcacggggccgccgggccccac

SEQ ID NO: 3900 - DNA, 4001 bp, Homo sapiens
acatgttcaagaggaaaacagagggccaggcgcggtggctcacgcctgtaatcccagcactttgggaggccaaggtgggcggatcacctgaggtcaggagttcaagaccagcctggccaacgtagtgaaaccccatctctactaaaaatacaaaaattagccaggcgtggtggcagacgcctgtaatcccagctgcttgggaggctgaggcaggagacagaggttgcagtgagctgagatcacaccactgcacaccagcctgggcgacagagggagactctaactcaaaaaaaaaaaaaaaaaaagaggaaaacagaggacaagacagaaaatgaaagatcagtatttccataggacagagaatcataaccagtttctccatctcctccctggtgttcctgggtcttcaaggctttcctcttaccaatccatgtttccctataaattttccatttcctttctattctaagtgcaggcattctgttcccctggggtttccatcttttcctgaactcctctcaacccttaaagtgtttcaaatcccataggatctcagctgcccatccacctccccctcctctcatcttctctaaatctcaagcccccattctttctgcgtctcatgtctaggcacactcacagctttcagtgcttcctccaggctgcggaagcggccctgcttctggttttggttgggaggagttgccaccttctttggctgcttcttgttccctggtttcttaggttccacagcagggggtgggacctgctccttattctgccgcttcatgatattctcaaagccccgctcataaagggtgcttgtggtctggattgcagctggggtgaagataggtagagaaaggcaggccacccttgagtccccaaggcctcacctatcagtggtccctttccccacactgccacctaattcatctccagggaagagcctgtctcaaagccccttcctcttggactgcttaaggagcagggcaggctgttctcctggtagcttctttcattacagctcttgagtctatgggctctttcataaagatggggcagttcttcattagacaaatcagagtatgtaggaacaagcagagaggttggatatagaggtttgccttattcagtgagtggctactagtctgggaagacaagctttttccatcttggtcctaccctaacgcctcttggttccgacatgacaactctataatcaacaagtggcaatctttctccactcctcagtggaagaaccaggtgtcacttataattcctggtgagtgttgagtgtgtggcggtcatttctcccactgctgggcctcctgtcccttcctccatgacctgctggttacttaaagagggggcaccgtgtataatgatccacagtacctcttcaaagctcagacacctgcccagagagaccagctagggccctgggcagctgggagagtgtgtgcagtgaactgagagtctgaggaccggaatcctagcccctctgacacatgaccctggccaaggtatccaacttcactgggcctcagtttactcatctgggaggtgaggaccgcaaccttccctggagctgtctgcctcccgtgaggctccaaagagacaacgcaagcgtggcgctcggggatgtgcctgcgagctcgcgcccaggttctgggagccgctcgctgcgaccctgccggacaggcctggggtaggcggcggggcagggcgggtactcacgggtcaggtcgtatttccacactccgtttgcttccccgagcgccctgcggttcctgccgcctcctcggccgccggcgccggcgccgaccccaggccgccgacccttcttcactacctcccaccgccccacgcccgccgtcttggtcgccatggctcgcagccctccctcctcggccacttccccggctttccggtccggcgcgagcgcgccgcactctgccacgtctcctcgcaggaccgcgcgcccggcgcccggcgcccgccgcaaggcagcctgggacttgtagtccctctcctgggccgggctctcctgagcgaagagcatcgggaagaggcttccgcggcagcctgcggcccccgcccaggcgaagaggccgggaggagaggagattcccttctgagaacgttcattgagcgtcgatgtgaaggccacggcattgagagacttggtagaactgtttctgtttttctttcctttattgatcaattgattgattgattgccagggccgcgctctgtcgcccagactggagtgcagtagcgcgatctcagctcactgtaacttccgccacccaggttcaagcgactctcgtgcctcagcgtcccgagtagcagggactacaggctcccgctgccaagcccagctaatttttgtatttttagtagagacggggtttcgccatgttggctaggctggtctcgaactcctgacctaaagtgacccaccccacccccacccctcagcctcccaaagtgctgggattacaggcgtgagccacggcgcccggccactgtttttctttcctttctcgtagagctggaaggatggaagggaagtagtgctcctcatatctagggagagattgaagattaaatgcttccttccttctaggaaagtgctggctttactgttgctagtgattaaacctcgggtttaatgggctatacaaatctattgccaaagaacaaggaagaggatgggggcttgaggaaagggcagagtgttggggagctggggtaggaggtggagaatggagaataatttttttttttttttttgagacaggatcttgctttgtcgcccaggctggagttcagtggcgcgatcacgactcactgcagcctcaacttctagggctcaggtgatcccccaccacggatcacctgacccaccaccacccccggctaatctttggtattttttgtagagactgggttttgctgtgttgcccaggctgatctcaaactcctgggctcagtgatccaccctcttcagcctcccaaagtgctgggattacaggagtgagccaccgctcctggcctctgagttcttctcatgggaggctgagaaaagtctgggggtctgggacagccagggccgggtttccccttccaggcaatgagaaagaacaggctctgcctcccaccataagagtcaatcccaagttccagatgtgtcagggaagcgatggagagccccagacttgaggcatctgcagacaggttcctgctcagacatccacgtggagggtgttagtatcctgggagccttcagaaccttgaagcatgccagcagaggagaatgagggaagataaaatcaaagtgacttatcacaattaaggaaatgtgctatttcatgtacaactgtgtgtgaggatgagattcctacctgccatactgaggtattatgataagaactaagagagtccaaattcctacaggatgaacagctgagggagcgatgcattccttaggaaggagtttagcttcccgaaggagacggcagctgagataggttctgagaaatagcattttcattggttccccgggcgccgtggctcacgcctgtaatcccagcacttcgggaggccgaggtgggtatcacctgaggtcaggagttcgaaaccagtcaggccaacatggtgaaaccccatctctactaaatacaaaaaagtagccaggtatgatggcgcaggcctataatctcagctacttgggaggctgaggcaggagaatcgcttgaaccttggaggcggaggttgcagtgagccgagattgtgccactgcactccaacctgggcaacaagagctaaactccgtctcaaaaaacccaaaacaacaacaacaacaaaaaacaaaattgaatgttcactggctgagggttagggtgggtggagagaaaatgccagttgtgtggatctgttgatgtaaaacaaaggcctagagggtggtaaactggaagcagttcaatgggacagtg

SEQ ID NO: 3901 - DNA, 4001 bp, Homo sapiens
atgaacacaatggagagaactctgctcttatgaaacttacattctagtggttgagtattagaaacaatgttaaaaatatatatatgataatatatactatatattatatgcagcatgtacgataaaatatatttatatgctatatttaagacatatcttgtatacatatcgtgtgtgcatatatatatatatacacaagatacacacacacaaaacgtaatgaatgaaggagactgagtgctacttttgttagggaaagtttctctgagtttgagctgagacctgaatgagaaagcagcaaccggaacaaatgcaaatatttttaggttaaattgggcttggaatgtttcaggtaaaaggacagcaaggctgccgcacaattaccaaggagaggtaggcaggagccagattagttagggccttgcagaccaagggaagtttggattttgttttaattcaatgggaaacaaatggaggttttaaaccacatactaacacaatttttaaaaaggccagttgcatacactgggaagaatgcgttttagggcagaaagaaaggtggggggaacccttctaaaccctcatttacatgaataagaaaagtgtttgtagttcagacagcattacagttgagaagtattttagaatcatatagtaacagaaatgcctagaagccaatttaatgttccaagtatctcatgctgcttgcataagacatttattcaaaagggttaaattttagacactcttgtagtttgtcccatttagcaatccattcgttcgaacagtagattaatgcaagtactacaagattaggacgaggcaagctgccgtaataccatccagtagtcaaaattacaattggagaagaatgacagtcacaggaacgcgctattgttctaaagatgctacgaagcgcgcgcgatcgatcccagggctctgttcacgtaactgatttcaaaagtcccgcaaaaatgacgttccacccacccagagacccaacctctaatcctcaaaagtaggacggctcaactgaagacaaaaatcctaacaattaaaagtagctaaggctcgcttaccacaggattcttccccattctgcgtttagccggcctcggcggccgccggcccccaagcacctggcgccccacccctcccggctcggtcgcgcgcgcaggcgcaatgcgtcatcgggccgcgccgcctggctagtaccccgcgcgcagcgccctgcggggatgttgcggtgagaggcgtgcagggacctggattggccagtccagactagccctgccaaaaagggggcctcggagttgggggtaatgtgcccaggagcagaaatctggcgaccgtggcgctgcaatcacagctttcccgtggtttcctaagtggtggcggtgatttgtttgcgggaagcggggcgtgacggaagaccttaattaaaggactccgcaggcgaacagatctcttctgggcagctacagacctctcctcggaggagtctaggagaggcctggctggaagccccggcacccgccgggccccgggcctcagatgagtgaggcgtcgtcgtggcaacgcgggctcaggtccccgcaaacttcatgccaggcctctctctcccactccgggagttcggtcccggcctcgcctgcgtctccgtcccattcctgtgaacactggaggggcggatgcgcgcaccccacgagcaaggccctcccttagtgattcccagctcgttggcgcccccccacacacacccacccccactgccaagtgtagctgtttacccgccacctctcgaggccgacgcgcccctcgccgctcaccaggtggccctcctccagccgagcccccgagtcagtcctcatggtgctctccccgcggggctgccccggcgcaaccgccggcggcccgagcccagctccccgcgacgcagcggcctccgggacctgtgggacgccggggcttcgtggcgcctggcgaggcagccgccccctgagccaggtccccgcccgcctctgtcctgccaggcgctgctgggtttgggaggaatgcgtttactctccaggaccaacgagtctgtgcaggcctgggtgtgtggatgtgtattaatataggcaattctcacattttctccgattgcttacccttcatcccacaactgtgtaaatcaaatttggaaaaactttttctcaaccttaaaatcaaatccaacctcacataaatatcactacaaactacctgatttgcatcgtttggtttggttgggtttgtttttttttaaagataactttcactttaagtaacagagaactacaaatattttgaatcatgcattctgttttacagttaagaaagaaatgggaaagatggaagaatggtgtggatatggagaagagaatgatgcagaagatgaacagatacagggacagggaaagcgcctggaaatctcaaatctggggaaagaaagagaaacagcactttgtaatggcatcctaatcttgttaccaaacaaacggggcttgttgccctatacgcacagaagccaatattatggcgctgattttttgagaaaagttttcattgtgagtcagctaacaaggagacaggagtatagctctaatctgtctccctgtgttggctttaagacagtatttttattagaaaacgtttagggggtggattctgggattagtaggtgattggtggaaggaaagaagccatctggaaaatcctctggcgttcgcagttacctcttcatgtcccttcatgggtcgcatgtgcaaattttggagggagtcagtgtgaaacatggggaaagattcaagctgtgacgccagcaagctcattttgtacagactccaggtagccatccgtgttagtactaaccactttcagccagtttgctttgttttgttttgttttgttttttaatctcacaatggaagaagtttaggcgttttatttagcaagttgttttttatctgccgtcctgcatgctcaagaatttctgttagtccctggtttctttaactctgagacacggtttcactcttgtgattttctatatataggtctctgggattaatccattgcctttttctaatttaggcctgcatgtagatattggctgttaaggaaaattagtgtttgtcacacctctcatgagaataattttttccttgtaggccgatttgtaaatagtgaaggcagtgcagtttcttgtaggttttgattttagatgtgaaatgtgtacattaaacctttcttgctgagttagtcaagtaagcactttttgtaaaagatgttttcataaaacacgtttcatagagtacagtttctaaagttaactattgcttattttatttaggaaagctctttatttaaatcttaaaaagatcatgtgaaatctgcgaaaggttctcatactcagtgacttaacattattcatatttctaccacagctgcatatgaggtaaaggaaaaaaaattaagttaaaataggtaaccacataaccatacaataaaaatttttttcaaataagattaattaataaattgctgcacttttaaagttgtacacattaaaatgggtcaaatactgttgttttagattgcaactatggatcgctgtatcaagggtacagtgttaaaactccagcattaaacaagaagtctcattgagactcagtatctgaggaaatccatgttgctggtacccactgaggctcctcctgagccttctgtatggcagacaacaactgggcacatgcatcgtgcaagctgtcattcacaatcacatgatcaaaaaattggccaaactgagtttccattctttgggctaaattttccatctcttgtaggtcttcatcctttaggagaaatagaaaaatatggatagtacagacttaattggacaaatggaaaaaatacagtttgttatgctgtcacattcagttgtgaaactatgtataaaaacagtaaggtccgaaaatttt

SEQ ID NO: 3902 - DNA, 4001 bp, Homo sapiens
ttgcttgtaagtaaaagcctagagcatctttacttcaaataccatcacgctatttttttttttttgagatggtgtattgctgtgtggcccaggctggagtgcaacggcacgatcttggctcactgcagcttccatctcctgggttcaagcaattcccctgcctcagcctcccaagtagctgggattacaggcacccaccaccatgcccggctaatttttgtatttttagtagagacggggtttcaccatgttggccaggctggtcttgaactcctgacctcaggaaatccgcccaccttggcctctgaaagtggtgggattataggagtgagccactacgcccggccaaagcaattctttcaaaagtctgttgttcagacatgacagaaaaatataatggatcagactaggatcttcaaatctcttgataatcttgttcatcagtgaaacctgggaggtactgatgagaaacatgggcaatttaaaatttgttctcccatcctaaatttcatataaaattccttccttcctacattcctttccatctctaggccaggcccttttctaagcattaggaatacactaatgaacacaatggagagaactctgctcttatgaaacttacattctagtggttgagtattagaaacaatgttaaaaatatatatatgataatatatactatatattatatgcagcatgtacgataaaatatatttatatgctatatttaagacatatcttgtatacatatcgtgtgtgcatatatatatatatacacaagatacacacacacaaaacgtaatgaatgaaggagactgagtgctacttttgttagggaaagtttctctgagtttgagctgagacctgaatgagaaagcagcaaccggaacaaatgcaaatatttttaggttaaattgggcttggaatgtttcaggtaaaaggacagcaaggctgccgcacaattaccaaggagaggtaggcaggagccagattagttagggccttgcagaccaagggaagtttggattttgttttaattcaatgggaaacaaatggaggttttaaaccacatactaacacaatttttaaaaaggccagttgcatacactgggaagaatgcgttttagggcagaaagaaaggtggggggaacccttctaaaccctcatttacatgaataagaaaagtgtttgtagttcagacagcattacagttgagaagtattttagaatcatatagtaacagaaatgcctagaagccaatttaatgttccaagtatctcatgctgcttgcataagacatttattcaaaagggttaaattttagacactcttgtagtttgtcccatttagcaatccattcgttcgaacagtagattaatgcaagtactacaagattaggacgaggcaagctgccgtaataccatccagtagtcaaaattacaattggagaagaatgacagtcacaggaacgcgctattgttctaaagatgctacgaagcgcgcgcgatcgatcccagggctctgttcacgtaactgatttcaaaagtcccgcaaaaatgacgttccacccacccagagacccaacctctaatcctcaaaagtaggacggctcaactgaagacaaaaatcctaacaattaaaagtagctaaggctcgcttaccacaggattcttccccattctgcgtttagccggcctcggcggccgccggcccccaagcacctggcgccccacccctcccggctcggtcgcgcgcgcaggcgcaatgcgtcatcgggccgcgccgcctggctagtaccccgcgcgcagcgccctgcggggatgttgcggtgagaggcgtgcagggacctggattggccagtccagactagccctgccaaaaagggggcctcggagttgggggtaatgtgcccaggagcagaaatctggcgaccgtggcgctgcaatcacagctttcccgtggtttcctaagtggtggcggtgatttgtttgcgggaagcggggcgtgacggaagaccttaattaaaggactccgcaggcgaacagatctcttctgggcagctacagacctctcctcggaggagtctaggagaggcctggctggaagccccggcacccgccgggccccgggcctcagatgagtgaggcgtcgtcgtggcaacgcgggctcaggtccccgcaaacttcatgccaggcctctctctcccactccgggagttcggtcccggcctcgcctgcgtctccgtcccattcctgtgaacactggaggggcggatgcgcgcaccccacgagcaaggccctcccttagtgattcccagctcgttggcgcccccccacacacacccacccccactgccaagtgtagctgtttacccgccacctctcgaggccgacgcgcccctcgccgctcaccaggtggccctcctccagccgagcccccgagtcagtcctcatggtgctctccccgcggggctgccccggcgcaaccgccggcggcccgagcccagctccccgcgacgcagcggcctccgggacctgtgggacgccggggcttcgtggcgcctggcgaggcagccgccccctgagccaggtccccgcccgcctctgtcctgccaggcgctgctgggtttgggaggaatgcgtttactctccaggaccaacgagtctgtgcaggcctgggtgtgtggatgtgtattaatataggcaattctcacattttctccgattgcttacccttcatcccacaactgtgtaaatcaaatttggaaaaactttttctcaaccttaaaatcaaatccaacctcacataaatatcactacaaactacctgatttgcatcgtttggtttggttgggtttgtttttttttaaagataactttcactttaagtaacagagaactacaaatattttgaatcatgcattctgttttacagttaagaaagaaatgggaaagatggaagaatggtgtggatatggagaagagaatgatgcagaagatgaacagatacagggacagggaaagcgcctggaaatctcaaatctggggaaagaaagagaaacagcactttgtaatggcatcctaatcttgttaccaaacaaacggggcttgttgccctatacgcacagaagccaatattatggcgctgattttttgagaaaagttttcattgtgagtcagctaacaaggagacaggagtatagctctaatctgtctccctgtgttggctttaagacagtatttttattagaaaacgtttagggggtggattctgggattagtaggtgattggtggaaggaaagaagccatctggaaaatcctctggcgttcgcagttacctcttcatgtcccttcatgggtcgcatgtgcaaattttggagggagtcagtgtgaaacatggggaaagattcaagctgtgacgccagcaagctcattttgtacagactccaggtagccatccgtgttagtactaaccactttcagccagtttgctttgttttgttttgttttgttttttaatctcacaatggaagaagtttaggcgttttatttagcaagttgttttttatctgccgtcctgcatgctcaagaatttctgttagtccctggtttctttaactctgagacacggtttcactcttgtgattttctatatataggtctctgggattaatccattgcctttttctaatttaggcctgcatgtagatattggctgttaaggaaaattagtgtttgtcacacctctcatgagaataattttttccttgtaggccgatttgtaaatagtgaaggcagtgcagtttcttgtaggttttgattttagatgtgaaatgtgtacattaaacctttcttgctgagttagtcaagtaagcactttttgtaaaagatgttttcataaaacacgtttcatagagtacagtttctaaagttaactattgcttattttatttaggaaagctctttatttaaatcttaaaaagatcatgtgaaatctg

SEQ ID NO: 3903 - DNA, 4001 bp, Homo sapiens
atgagcaagccaaagctcaaaggaaattagtaatttgcccaatgtcagggagtttataactggcattttaatccaggactttctgactttaaagtgcaggaaacactgctttaaacaacatcttccactattgaatgcttatgatagcctagccactgtgctaagctcttcacatcccatttaatctcaagtaggcattcttatcccccatttaatacagattagggaacagtggtgtacttcttgtgaaaagatggctgtttcagttgactagaaggcagtatgatccaacagaataaacatagccctgatcggggaggtgatggttctatcaaaatccactggccagggtgcagtggggattctgggtctagtctccaggcatcaaattttaagagatgcagagaggacttgtgagcggtggaagagggaggaaatgttgaagacttttccttgaagctaccaaaaaggctgtcgggtgggcgatgtggttctggggaccctcccggcctcagctctccttagagagtcacatctcagcttcccgtggaagctctgtttaacagagctggccaggtagggtagcgagctttaaggcagtgagcagacatctctggaagtgagccaaggcggagagggctggagaccgcccgagtggatgctcagcccctttcagccgagatccaggatctgcagggtggggtgccgcgcaaagcagggaaggtgggcgcctgctccaggccccatgggacttcagctccaggcctccctcctcccagtgccccgttccttgtcacccaccaggcggggcgccgcctcttgctgcagctgctccatcaccacctcgtgctgccgctcccgctgcagctgctccatcaccacctcgtgctgccgctgccgctggttcttctcatgcaggtacttgagccgcgtgagctcgaactccatgcgcaccttctccagctccatctcgggattgcgctcagtcccaggggtcgggggcagctctgcgggtttgggtccgtcgccagcctggcctttggtagcacggcaggacttgggggacagcgatttaagcggcccttggcagcctccgtcctcacaagcttccatctcttccaagtagtcataggaggagtctggcttctgggactctgcctcctggcgtaggggaagcagggaggggaggtaccttgaagagtcaggatggggctgcccctgaccccatggaactcccgcagccccaggccgcagtggactggggtgtttgaattgtaaagatctaggctgaattcttattagaagtgctcttaccgggagttgtcaggacctgcgggtcaaggagagggcaaactagcacaaagtaatagtgccctaaagttgcaagtggaggcactgggagttgagtagattgatgtccatttttctagtgatttttctgatcaccaaagaggcaacttccgggcccatcctcaactctacctgactttgaggtcagttagatgccaggtcttcaggaagttacagagggagaaagaaacccagggtctgaattgagagaacctaaatatttggggaccaggaagagggctatggtggggagccaggtcctatccacccagcaaggaaaggaccccaagtggggaggtagatagaggagaccaaacccagcttcatatgacttcacaatcttatggagggctacctggtccctggtgacagctggtgccagttacagggctggggtacatgtcacctgatgttcttggcagttgtctggaagctcaaagcatgtgttcctacagtattcttgctccccctgacggaataggcgggggtggtgagacacagcagcccccttaccagataagcccttggcttcccttcagacttggagtcaccaggcaccatcttggggaaggtcgggcaactttctcccgcaccccgggcttccatcatctccctgtcctctgctgccatccagaaaaccagaacgctgccaggtggggtcacaagacatcatttgaggtgctgacatttggcctcaccagattccacagcctggccaccatcacaatcccctgtcgtcatcatagcctacattctacaagttgctagggcccctttggtggagggtgtgacacctttgaggtagtaacatgctaacattaagaactgcaggatgggcctttgctgcccataaggatggctttgaaaactagagttccaactcatgcaactcagaattccaccatttgaaatccatttccttgggttccttttttaaatgaagattgtgttggaaatgagtcacagctccacaaaccctgttatgggctaaaccaggtccccctctcttcccaaaattcatatgttgaagtattaactcccagcccccagtacctcagaatgtgaccttatttggagacagggtctttatagaggtgattaagtgaaagtgagatcattagggtgggatcctaatccagtatgactggtgtccttgtaagaagatgatgatgtgaagacaagggagaaaatggctatctacaaaccaaggagaccggcattgtattagggttctccaaagaaacataaaatgacatttattacacagaattggctcatgcaattatggaggctgagaagttttatgatctcccatctgcaagctggtgtccctggaaagcgggtggtataaattccagtctgagcgcaaaggcctgagaaccaggagcactgatggtggaagtcccagtccaaggtcaggagaagactgacggatcacctcatgtagtcaggcaattgaattgagagcaccagttcaactggcagtctgccttgttccatttaggccctcagtggagtggatgaatcccacccacattgaggagggcagactgctttactcagtccaccaattcaaatgttaatctcttccagaaacacccagaaataacatttaatcagagatctggccatccaatggctcactgacgtcaacatgtaaaattaaccatcgtagacctggaatagatctttctctcctagcactcagaaggaaccaaccctgctggcaccttgatctctgatgctgactctccaggattgcgagaaaataaatttgtgtcatttacgccaaccagtctgtggttcttggttacagcaaacctaggacactaatacaacccatcattcatacttccacgtgggtagaatggagggctggggaatgtattttgtcatcttccattttgtgaaaaaagcagcaaaacatctttggtagttgaaagcaggattgcaatatggaaagacaaagggctgcatttgaattccagcttcgctactctctccggctgtgtgatcaagggaaagtgtattcatttgtaaatgggataaagatttagccacttccctacgttgcagcaccgatgtgaaaattagatagggtaggagggggagttccaagatggctgaataggaatagctgcagtctacagctcccagcgtgagcaacgcagaagacaggtgatttctgcatttccagctgaggtaccaggttcatctcactggggcttgtcggacagtgggtgcagcccacggggcatgagccaaagaagggaggggcatcgcctcacccgggaagtgcaaggggtgggggaattccctttcctagccaagggaagccatgatagacagtacctggaaaatcagaacactcccaccctaatactgtgcttttccaacggtcttagcaaatggcacaccaggagattatagcctgttcctggcttggagggtcccacacccacggagcctcgctcactgctagcacagcagtctgaaatccaactgcaaggcggcagcaaggctgggggaggggcgtctgtcattgctgaggcttgagtaggtaaacaaagcagccaggaagctcgaaatgggtggagcccaccacagctcaaggaggcctgcctgcctgcctctgtggactccacctctgg

SEQ ID NO: 3904 - DNA, 4001 bp, Homo sapiens
ccacccggcatctccaccagctttcagtgatgcagggcctgaaacggctactggagggcagctggacaagtgtgcagtggaaaagaagggagcggggaggtcaagtcctgcccctgacctagaggacccctgcagggtacctttaggcaatcacttaaatctctctggagcttaactgctctgctaaaaatgtaagcattttcctttttcatctgtaaccttgcatgatttctagtgacctatagaatagggtcacttgacactactgggctactgagtccaatgtcatggtcttcctcctataacccagggcctcatgtgttccccttaaccaaagcacccccaggtagacaaattaagctcctcccaactcattccgcacatccccaacatgtctcccatatttgctccccctcatcacccactctgcccctacccaggtgaggccatcaccatcgtcaacatcctggaagttcacagcctcctgatgagccggcctgcctctgctcctctcagctgcagcctggcccaccgctgcctgcatgacccagaacttgcttcctacctgtgtttgccccctggcaagtcatggttgtggggatgaagagttatcatcccgaagcggccggagcacccgcccttcacctggagcctgtggcctccccagctgagctcccaccttgctaccaggcttcctcctcttccccgtctggcaacttttgcacctcttaatttagcattcgctcccccatgccctgtttccaagtctctctccctacatgggctgtaagctcctagaggggagggaccgcacctggtctgtcccaccatgctgcctggccgggattccagacatcccccagaacaaaggggaggaattccctgcgccccatgcccggcttcgcccaggtgcctaggtcctggctatagaagcggttttgggggtgtcctgtgggtggggtttctcccgttaggtaaaggcaggaggagccagtgggatttggagccagaaagccctgggtttgaatcttgattctgttccttggccagccacggagggcaccttacttctgagtctcggttacctcatctatacaatgggcagaacggtgtctactaggtcagtgttgtggctgagcgtttgtacacgaagtcaacgggcctctctaatcctggagacagtccagcggatagactctgcagcgggcgagttgcgcggaaaggaagttcgcccgctgggcagcggtaccgccacccactgacttccctttggggagcagcaggcccgagggagcgggtaggaatgtgtaggttcttagccaacataaacatcgtgcactacgctaaggagaagccaaatcttcggagacacgggcttcttccctcgccagagcctttccctgaggtgtccgcgcgactcagcaagtccacccccagcccagcaccccaaacgcagctttggggagggagacggtcttcctaacctccacccccagaaaggtctaacttcccaagagacgcatcctctgttacataagcctcactttgcaagtcgattctgtccctccaccccagacgcgcctcatttctcacaaagggggacccttatggtaaactgaccagtaagtcactggtgacaccaaagagaagaaaaatctttccaaatgaagtttgggagcctcgggtgcttgcaaggccgcgagcagaagcagccggagtccgcgcctcgggagcagctatgtgaggcaggcaggccccccgaggttgctccccgcccagcctcctccggacccaggtttgcaacagggggcgggcacggggggcgctcgcacccccagcccgacgccggcgctcgcggtgggtacgcccctccctccgtcctcccacccccaacctcccacggcggggcagcaccccgggtcagcgccccgccaggcgccggctacctgcacgccgacggcagtcatgctgcgcccggcggccgcgctgcagcctcgatcgctccagctgctccgctgtggccgccggcgccagcccgggacttctccgcaggggcggggcggctgctggaggcgggcggggcgggagggggcgttcaaagctcggcgattaaccccgggcgggctccgccaaccccgccgccctccgcggctcggattacgctgagtcagcgagggcggccggaggagcccctggggagccgcggggaggacccggcacttggggggagggatccctcgggtcccaggggaaaggatcgggaagtcactccgacgctcccgaacctccgaggacagcttcgcctggggcgcagattcctcgagggctgggacggcgacgagggcctgagggttcgattcctgttccagcttgctgagtccagcctctgggaacgcggcagggtccgaagggaggaggcaggcgcagaggctctgctgccctcactctgcggtgtgaccttgggctgcttgtttagcgtctcggagcctcggttagtaagggaaataatgaatgtgaaaggtggggctcttgccgggccctcgctgagtgtgaacggagtggaactttttggggcaatcctacttgcgtccctaaaaggggatgtaaaaccctgtttcctcctgaactcctcagggactattaaaaatgcaaatatgccaaacaaatgtggttattttttctccacctcgatgggaactgaggtctctctttttttttttctggacgttgtctagcgcttgtggcccaggctggagtgcaatgacgcgatcacggctcactgcaaccttcgcctcctgggttcaaacccgttcaagcgattctcctgcctcagcctcccgagtagctgggattacaagcgcgccccatcaagccctgctaatttttgtattttttagcagagacgggggtttcaccattttggtcaggctggtctcgaactcctgacctcaggtgatccaccgatctcggccttccaaagtgctaggattacaggcatgagccaccgcatccggccggatctgagttcttaaagaggcagcacctaaaagcttttaccgccaaaaagggtggaggtgggaggagtgtccaagggccacaaattccaacagaaaggcttccctccccccatcctcaaatgtggtggtaaaacaaggcccctcactaaatggcacacattaaattgtctggttcactcaggcaggcagctcctggtgactttacccaaagacaaagcaactgcactcatctgttttcccctttagagccatgtgagaaagaggggtagttacaattgtctgtatatcttccacttagatattcatctgattccatccctgcccaacagaccttgtcaaatcctttaccccagtcctggagcttgacaaacggagaaatggcccaggcacaggaaggcttggcccaggccacccacattgagtccactggagagctgggactccacttacccagcaggcctagtccaggtttgagttcttgccaccattctgcaccagagtcacctggaaggtttgttaaaacagattgcgaggccccactgcagagtttctggctgagtggcctcaagtgatgttggtgctgctggcctgggggccaggctttgagaaccactgagctaaggcaaagggcagctgcccaggctcagccagcctggtgcctctctgctctggggccttccctccgtggcccccacctgctttctccccagtcaagggtcccagaagccagactctccgcagctctgggttctggataaagagcccacatgggaaaggaagacctgtcctgttgcgggggtatcctttcactgagccctaagaatgccctgtgggctctcccaggtgagattctggatcatagcatctcacctggccaagagggaagtgcctggaattaaaatcagaagaacagtcaggtcgggtcatctgcacccactgccttctccagtttcgtgtgtggtcaggcatgtttctcacagcctg

SEQ ID NO: 3905 - DNA, 4001 bp, Homo sapiens
ctcctttcctgtttctgacaacctgaaatgtggaaaatataagtccactcttgggagagaagggcttttagacttctggcggcccagggtcacacaggagtaaaattagcctaaaggtcatgcagcactcaaggagcaaacttctcttcctcatgcaggaagaagtacacttggcaaagatctttgcaggtatgttcacagtacacttagcaaagatctatacagatatgttcaagtaatccaacaatatgcatgcaactgattcacttccaatatagttatattgactattcactatcgtagcagcaggaagccatgagagtagttcactgagttctactttttcccgttcaggaaattaaataatggagatgtgcagactataactggcacacaaattaggtcaccaacccagaagaatccaatcctggaggaaatggctgcactaggtcttaaaagatccagaaagatacccagcgtgttcctctgagtagcttttgtgttgtgggaagtatttgtagtctttggaactactttctttttctggttaaggaaatcaaaatataagtctcatctttagaacctggacattatttcatgcatgtggaaaatacccatcccaaacagtgctggatgagtcatctgaccccagagaagccggagataatgcctcttccagacttcctgtctctcttttgcaagactttccataattctgcccctgcatctctcccacatcatctcctctaattaccagacgccaagttttctaatagcctgccttggaaagaagagtttccacccactcatgcctccagattcgcctttcaagcactccctaatcacaagtcccgccccacctacacacacactctctctcccggaactgtgacaggaactgtagagaaattcaggaactcaagaagagagaaatagaggtagggtgactactgcacgtttccccctcatttaaattttttctttcttttttttttttaaggaagcggcagacccgctttctaagtttatgcagaaactgaagcgctggcaagtcctccctgcggcctcaggggtgtggcccactgtggctgcatccggacaggaagagtcgaatcccaaagatgctgctagatgtgccgagagattcctgatccagccaaaacatgtcagagcagaatgagggccacggcgtcgggcatggtgaccctcagtaacagtccgagcgctcggacccgagggccgtcccatgcgcaatcctgacggctcttgcctgcagcccaggtcgggccggaggaggggccgctccccgctccccggctgtaacagacaaaaggctcagggagggtatcaggggacccggtgctgacccggcagaggcagggtgaacaagcccggggtcaagcgaagccgcacgacggccctgacggcccgagacgtgccacgcctgggtcccgacactccacttacgtcgttgactgtctctaaccagagcccgagctcagggaccgcgcgcacagccgccggggtccagcacaggaggcagagggcgacgcgcagcagcggggcccgggcgggaaagcagcggcggcggcgtggcaggagcccggctaccgagcggcaggcggcgaccatcttgaccaggaagctgcacctggcgctccgagacgcctgccacacccgcacctggtgcagcaccgccccaggcaggcgggtccgaatccgggacgcggggctcggactcgggtgtggaggaggggctcgcgcttgggcctgggcggagaggcgccgtgcagttctgggaaacccggccaggaccgggaggcagggcttagggctctgagccgggcccgagcgtgcagctgggagatgcctggaaggcagagataggagccaggatgtggagttggcggcgagacgtggaggctgggctcagggcctagcgtgggcgtgaagatagaagaggagccggaacgtgcaagggagggctggcagcccgagcgcggaggcggggccgggtagggaggcgccgccggagtgtggagacgaggcggggctcgggagtgtgggggcggggtgggaggcgtggctcggggccaagctgggtgtggggacagggcagggttggaggcgggctcgggactgtggaggcggggcggggctcgggaccagggcggagtgcggaggcagggtgccccaggaaggaagagcttggggccaggccgagcgtggaggcggggccgtgtggaggcggggccgtgtggaggcggggccgtgtggaggcggggccgtgtggaggcggggccgtgtggaggcggggccgtgtggaggcggggccgtgtggaggcggggccgtgtggaggcggggccgtgtggaggcggggccgtgtggaggcggggcggggctcgggaccaggccggagtgcggagacagagtgccccaggaaggaagagcttggggccaggccgagcgtggaggcggggccgcgtggaggcggggccgtgtggtggcggggccgtgtggaggcggggcggggctcgggaccaggccggagtgcggagacagagtgccccaggaaggaagagcttggggccaggccgagcgtggaggcggggccgcgtggaggcggggccgcgtggaggcggggccgggatttggaggcaagacccggcggggaggcggagcctgagcgtaaaggcggggctggtcagggagatggggtcggagtggggaggcggagttgaggaccaggcagtagtgtggagacggggctggacgagaagggcttggggttaggccgtagtggggaggccaggttgggcgaggaagcagggcttggagcaagccctagtacggagacgggactgggcggggaggcgtggcctgagtgaggagacgggcctgagtggggaggcggggcctgagtggggaggcggggcctgtctgggagatgaggcgcagtggggaggcggggctcgccgccagcgagcgcgagtgtcaaggtcctggagtcgaatgcctagtaagtgctacggttggagtgcagtctagagttctgttcccagggtgtctccatttcttgcgtcttctacacttacccctgcctcgaccctctcagctgtatggaaaccgttctttaaattcagggaatgtgccaggaaagtgctttgaggccaaggccagttgaacacaaggcattgtgttgtgaaggttaacgttaataggacagttaatacttttcagaacaagtagttacttgactggcttaaagctcagaggggtcagggcttggatccgtcttattgtgtaccttcccttgcattttcggctgtaagctgaatacatgttttgctgtcaaagagaattagttcattcattatcaaatgtaaataatatccagcaagggaatagaatcctgtgctaatattgttattaacgtagaataagatcgatttatagtccaaaggccttggctgctttaccagtcaccagtaattattgaggacctactatacactagagattgcatgtgcatcttcccagtaagcaacgtgatcagttctgtttaggtcagaataactgtaacaggaccacaggggaacatccaccagagatttaggaagtaagtgagggacagaaggagagaacaatacatgaaatttaagttctacaagaagagttaagggcgagttacctgtgggagtgaggggtaagtctgaaatcgttttagttacgagagaactggaggaatggaaagatcttccagatgactggatgttggtgtgagacggagagtggcaaagctgggaatatttaaacagtaccaaaacatacaggcattcctaaattaagttaggcagatggcacctttagttaagaacactggagaggcaatgattttttgttttgttttgtttttgagactgagtcgcgctctgtcgcccaggctggagtgcactggcgcgaactcggctcactgcaagctccgctttcctggttcacg

SEQ ID NO: 3906 - DNA, 4001 bp, Homo sapiens
ctgtggctatctcactcaccagattttaaattcctcgtggacagggaccgtatcttattcgaattaactgtcttcacccagtgcccagcctcttggggccgggcaaaaatgtgggacgaatctctaagcagtgtcctatccaccttccttaaagaaaactccacccctgtctttataagcctgtttcttctgcttctgaatggcctgcagccccaggttcccaactgtcaggcccccttgggctggtcctattccttccctgtgggtttgaggtgtcatcccttggagcttggccgccagcgccagcgccagcccacccttcctccctcccaccacatccccacccttcctgctgagcactgggtggtagcagatcagtctagcacttcctctaatggctaatgtttttgtgggaggttctgaactagggttaaaagacaaaagctcttcccccctcccctcccccagttctagtgttggttcttctagttctgacgttcccgttgctgtatccctagatcccgcctttgttttaagctcccgaagaaaggcttccggagactttgtgacctcacccaatttccaacattccagattgtcttttctttctttaaaatcagtgttcccttctgagtcagctaggaggaggccagagggaaacagtggggctttcgaagcttatcaaaagcaaaccttgctcttttgaaaaagcattttccaacgcaacctggggacaaagtggggttaaattttacacagattgcttacgagcaagagttaagtggctaacaagtcatgaaatcttacggagaagcaggtaaagccaaaattaaaaactccctccgagtcagcccattctgcgacccacctcctcccctttgcggcaggaactctactccatcgaggggctttgctgcagtggcactgcccacgcatactcaactaaaagactcagaccacgccagccatgccacgaggtgtgttttattttcattattcatacaaataattttctataatatcccggggcaaaccggagaatttggcagtccgattgggggggggtcccttcagagacccacaggccggtggcatcggcgcggagtgcccaggttcacagtgcagcttgtggctcgtgtccatcttgcaggtggctcttcctccacatcacgactggggtctcgaagaggacgggggtaggaaatcctccaggatcttaggaaatttcactccgcttctcctgctcaatggctgtggagagcgggaagcgggcgctggaggggagctgcaacccccacccgcaaccgaggtgcttcccggtgtgggcgaggcacccacgaggtgtggggatttagaaggaagcttggggctggggagaaacaaggcgctttgtgaaactgaaagagtggccggggccgcccacaccggggacaacggcggggtggggggtggaggagtgggtttgcaaggaagagcagggtgaggggctgggctggggcgcgggagaccgaggcacactcactctctttggtcggcagggtgttcttctcctgcgtctccgttttcttcagcttggccttatcgaagctggcgatttcccccatgtctggtttgtctgccattttcttaaaacaatcctagtgggcaaaccaaggcgcttgacctgggcctgggggccagcgtccccttccgcgctccccgccgacgcctctcgacgtggcactcgcgccaaggcgtgccgagcagccccaaggccgaggatctgggcgcgtcccgcacccctcttctcggtcccagggcgtggtcgccggcccctgcgtccggtccgagaagggcgcctgtcgcggttgcggcgcgcccgcccggtgcaccggatccgaccacaccctgggtgggccccccgccccggcgccgcactcaccgtgcagtctcgttccgagcccgagatcctggtgctcccactcgcgttgctgcagcaagaaacaaaagagcggcgcccgcccctagccttatatacgccgcgccccgccccgcccctcacccgccgcagcaggggcggtgctggcacccgaggggcgggagcagcgcgggctgctcctcgccctgccgcgccccccgctgggctaccagcccggctgggcgcggcttctcccgcgccgggcacccccagctcgcagtgtgcccagcgtgggggctgtagtcgccgccagagtgggcgccaggcccccggctttgcttttgcggctacatttccccctttccgggaatctgctgctcaccccgcagaaaggatatgggaccggcgtgggagggtgtgtggttttgtgcgtgtgcagatatgatgtgtagccgtgggtgtggatgtgcgggcgtgcacgcgcactctgcagcaatcctcgctctaggagacgccccaccccagtcgcccccaggcctcttgcttttgctcctccagagtccccttccctcccccacttttcctctccttagggaggctgagtcctaaggtggtcctgcactaaaagaattcgagccgagggtcccgtagtggagcggggggcgggggggtgtagggggaggggggaataggtttccagcgctctttgctcaggttgggggcggttgccttctggtcagtcgtcccctgttccctgaactgggcggttccagcaggatcgttggcgtggcgggtgttccttaaatgctgttagacgcattgtgtgaagggctgtggtgggaacagggcgtcccgagaaggctcgcagtttgccttttctcgtcgagctcctagaaacactgtatcagcgggtgcggttttcctccttgaagttaaccttgaggataatagagacccacatgcctacaaacgttcttgtttttcttattaacccattgtaggagtggtatactgcaattattcacatctttcttagaaaagttgtattttcagcctgtgcaacaccgttaggtaataagttccataaattaccagccccggagttaaggctggtcattcttttatttgtcctgacctttccttttttaagtgtgaagtattaccgagctctttaaagtgggatttggtggtgacatcctaaattcggtcctgattttatttatttactttttttgagacagggtctcactctgtcacccaggctggagtgcagtggtgtgatcacggcttatggcagcctggacttccccggttcaagtgattcttccacctcagcctcctgagcagttgggactgcgggcgtgcaccaccactagcggcaaatcttttgtgttctttttgtagagacgagatttcaccatgttgcccaggctggtctcgaacttctgggctcaagccatctgcctgccttaacctcccaaagtgctgggattacaagcctgagcaccactccctgcttctcccctcctgattttacctgcttttctcacgttccttcagtttggaacagtgggaagagagcataggcttgtgtgaccttgggcaaatcttttccttagtttcttcatctataaaatagccttggcataaactgaggtgagataaagaagaggcatagagtggatactttttctttctttttttttttttagcagggtctctgtgcagcggtgggatcacaggtcactgcagcttttttttttttttttttttcttttttgagacggatctcactctgttgccccggctggagtgcagtggtgcaatctcagctcactgcaacctccgcctcccgggttcaagcgattcttgtgcctcagcctcccaagtagctggtattacaggcacgtgccaccatgtccggctaatttttgtatttttagtagagacggggtttcaccatgttggccaggctggtctcaaactcctgacctcaagtgatctgccctccttggcctcccaaagagctgggattacaagtgtgaaccgctgtgcctggcctcaagtggatacttcaaatagcaacctcattagaatatcacac

SEQ ID NO: 3907 - DNA, 4001 bp, Homo sapiens
catggtgaaactctgtctctactaaaaatacaaaaaattagccaggcgtggtggcgggtgcctgtagtcccagctacttgggaggctgaggcaggagaatggcgtgaacctgggaggcggagcttggagtgagccgagatggtgccactgcactccagcgtgggcaacagagcgagactctgcctcaaaaaaaaaaaaaaaaaaaattatgagttgcccaagacaattcttcttccaatgtggcccagggaaggcaaaagatgggacaccctagatttaaagtgtcctgttcttgatagttgctaacagatgtatcccttctaatccaactatctttccttcctaaatggtttctaaaaagattatattgatccaaccaactataaacatctgtgctaggctggctggtcaaaaatttgccccagattgaagcaatttgcaattatcctgaccctcagatttgtagcatacattaatagacgtttgaatttgcttctctctacctctggggcaaaacttctattgtccaggtttatatttttgtaacatatgacaacactttaaaagacaactctaaattacttgattattagagggtttgataatatttcaaagtttatctgcctggatttaattcttactagctttatgacatttaaaaaaaatcctgacaaatatgagtgtatttcctatatttgactgtattcaactaaaataaagagatgggctcattcctctactaaatttcagatcccgtcttggccaaatggatcacagtgaaattagttcactggctcaagctgaaaaaaataggcggcaaggctgtgcattacaaattaggctttttaatgaaatccgcatggttgcagttattaccagagagaaacatgctgaaagggaaaatattctacaactgtgctgtttagaaagcataaaatcaaaatctaggttaatttcgccttctctttatttctttattctatgcaagaatctatgcatttttccccaagaaattcaatttttttttactattaaacacaataatgaacatagagcaatatcaatttgtatcatgagaattaaagcattgtttagcatactgtaatctaaggggtgttttggattttctgcattttccttttttgatctattgtttatcttcactgtttggcctgtctcattccttacatttaacaaaacaaaataacaaaagaaactttccttgtctaacaaaagggtcagaaaagtatttatatggatagtagaaacagaaagaatcaaagtggtaagaatgcattcagaaggagaaacatttttcacttttttctgtactgcaagctggcttggtcaaaatagtcaaaatgtttgaaaaaactaagatatagactatagctcagagtccatgaagcaattattataaaattttcgtagactccaatttacctgttaggattctgaaatctgattgcaaatgcattgacataaaaacagaagactatattggagtttctagttggttaaagaaatactcctcactgtactactacatctgctttgaaaagtttaaaaatatattttcatactgaatataaatattaactgctattttctactgaacaattcactttataaaatgctatttttaaattttagaggacaagaacgcttaaaaaaaaaaaagcgtatgtattccaaaggctatctttcctaagcattttctttgagaacatcagccttgtacagaatagaaaaagttactgctttaaatttccttctccatgatttaaagaattgacattctcaacaagaggctcatgagtgaaggttcttaccaagccatatggagttatgaaaaattccatccttgaatccccatccttgagtgtcttcccatagcaagagaaataagtaaattaagatgatcatatcgtcagttgtagtgaagtaacagcctgttaggggctgctcacaaattctcagagcagtggctgaaatgtgactgaaacatctggtttccacatcttttaaatagtttttttcaactgtgaggtcagcaagtactctccaatggcattttccgctgtagagttacacaattatctcagtgtctgaagcaaatcctctgactcatttgcattggcaaccaaaactaaggagatagaatgatcatctatgttttaaaattaacttactaagaacggagttcatttattgttagtcacaaacacttttctgttagaaagtttgtgtaacttgatgcagatttagcagtgattaaaagaaaatcgaacttcagtaggaatttcaagataaatcctaaatgtcttatttgcagtgtcaattatgggatatggggttaaacactaatcttttattggtaatgttggactggcttttctaaacattgtcaagcctgtgtaaaaaatttaaaacaaaaagtatgcacagcttggagaatcctaatttttctccagtgatatatgacttccttattctctgcctgcttttcttccagggtggggtctgttgcagtctttggtgtgttatggtcagcagctaaataaatgtatcagctcccagaaaagtatttcaatttcagagcgtcaggatgttccagcagctttgggatgtcctattataacacagttttcccaggccacaaattcttgaagtgttgggagaaaggtgggtagactaacaaagttaataaaaacttgtccctagcttccctagaccactctaactttgaagaagacgatcaaggtaatagataataattattacagtaaagtcatcatgtcttcaaatatcccaaactttcctcttcctttgtgtagaatccttgggtaacatatctgataatactcccactaccgctgatgctaatggcatttcctattgttcattgatagccatttattggcaacttttgatttttttacaaaattggtcattttttgctacttagattctctacttttggtctcaaattgcttcccattcactcctattatagcattcatttctcccatgctttcttagtccctccaatgatgttggagttctttgaaaaagccaacttgctagacatgctctggtttgaagttagctttgaatcccttagacatctttgctttgaacatctcaggtgtgttctggtctcatctcttctcaaaagagcagttatggggatgtaggctgagagtacagaatttattggatgctcactgaggtatacataaagttactagcattgaaaatctttattttggactggtggcacatgaaagatgagggaattgtatccaagttcacagatagggttagtgaatttaagtttgttgcaaaagagaaaggtatagtttagaccaggtgggtgtgactatggagaagacaggcatggttactgagagcaagattcataggtagttggaaggaataaaccatgatatttctttggaaagtataattatatgcgtattttaagtttgtggtttaggaagtaaatataactttagttgtgcagtgctacagcaaaaccttcccatagtctttccaattcttttcttgtcacatcctccagctgtgccctttctgcatctctctcaagcacctaatttccccctagttctcatttatcaaaaattactctcaggaaagggtttgcaattaatctttagttaggccagataactaagaacagatacccttctgtgttcatttgcattttaatgaagctccaagtagagcgaagtgtgaatgttcaacttcttttaacacgaaaatttaatgagttgctttgatgaattaacccgatctggggtggaggatttctttctcccctctcccaactctcatgcagaatataaatatttccccttacctctgcatagtgtctgaaaatctcatcctccatatcatcaaggaaatagagaataatgcctaatgatgtaagttctgattttgaggggcattcaataaaggaaagaggaaatggggtt

SEQ ID NO: 3908 - DNA, 4001 bp, Homo sapiens
aaaatatacacaaccatggaggatgagggttatgaagcattttccctatccctatcctccatttaacaaaaagggaaactgacaatggaaaactttgaagtatctgtgtgcctgatggtaaggagagatgtttttcacatgaacttgaaaacagctctgaatcagcatgctcattcttagggttatggaagagtgaggacttgaaatattttaccccaacaagtgaaataacttatctgaaaaatgaacatgcttttttttattgcatttctagattctgacccacaggaacaccccttgccaccccttataggaccaacatcctggtacccacacatttgcatgaggctcagacttaatagtgtcctcttcccatgtctcacacccctgactgctggaaacttcgtgtctaacctcatgccccctcattccttcctgcttataccctttcctggttacttccccagaaaccacgtgggtggttggttcttgagtttaaatatgagtctcatttctaccctggagctacctctgaggcaacaggaaacaagaaaaatacgatccacctctgagtgggtgaatgtcatatccttgaccagagacatcataaattgtgttacaactcagggacaaggtaaagtgagggcttaggaatttcctaaatgagcagaaccagctctatccctaaagtcagttctctctctctctctctgtcaaatgatcaatactcagattgagacaattcctacttctaggcacactggactaaggcttatggcatgctacgaggcaatatcccactcttcagtcttgcccacctcaagcccaacatagctaccaaaataacctaaagaaatctaaactctcatcacttccactgttaccaataggatcctttacaaagaacatgttggtctctgttcagaaggtgttcccatctcttagcctgctaatactgcccatatgatcaatgaattaagagcttctaagagctcctccaggtgatctctatctccgggccaagtctttagatttagtttagctttcaacacctctatgctataagctctgacgaaaacagcttgcatcctttggtttaagctctaacaaaaacagcttgaatcctttggttaatgctaatgaatgcatttctcccttttttatctcttctccctttccatgttgaggagagagacagcacactgggatgaagacaaatacggcaatagtgtgtggccagagtaggaccacctcccacggtggtgggagggaattggaggacaaattacttttgatattttccaagtcacatttaatggtttcatactggccaattcttccccaaacccacctagctcaggaactcaagtctttccaaccaaaagatcaaagtaaacatttctgctttcaaagttttattgagatgttggggaaaaacagccaacatatacattcctcatttcgtcacaactggcatttgatccacattccataggctcctctctggctttgatctaacatcaggtctccttggcagttccccttctgctgttcttgttgctgcttggtgctgtgtgaagcgcaccagggcagagcccgctgggggctcacaagtgggagcggtaattgcgattggctgtgggaaaggacaggtttgcaacagagacacgaattagaacattcccatcaagactcttgttgctcaaatctgcatttagttattggaaataatctcaggccaagatttcagggtcctgtgagagctgcctccaagagggagggcctggcagcaatgtgtgcctaagtttggcaatctcctccccatccctcactcaccgtcatcgccccgtttcctacttttcaggttgcccttacggtattttcttttgctgccacctctcttgactcccttgtgaggagatcggctcttgctcctcctcatgccatgactctttaatttgcggctggtcgacatggtaagttctgccaaaatgaggggctttgcaaggcccgggggccaggagtctgggtatttaaggccttggccattgtgacagggaaggggcatggctcagcaggtgggcggggctctactgtgctgtcactcacctttgctgcactttggtcacatttgtgaaataaggtggtccttttcgtgcagctcaagggctgccctcagttttgaggtcctttttatgttaagtgaggctttcccagagaggtgttattgagaaactgaatcccagccctgtgccaggcattggatgagtacaagagaccattcagatatgcttctcctgcctgtaggaaatgtaacagtcattgagtgtgtgtgtatgcatgactgtttaagtctctcacagcatccagagataataaatttatttctgtaaggacttgactctacagaacccaattcaatatgatcaaaatagaaatattccttctttttcatctaggtcaggatttctcagtcttggcactgttgacacaatgggcagggtaactttcagtgggctgtcttgtgcaccctaggatgtttggcaacatccctggccattacccactggacaccagagaagcctggcagctatgacaacccaaaatattcccaaacattgccacctgtttctttgggaggctggggaagtgagggaaaaaatggctctggttcagaacaattaacctaatcattttttaaaattcagtcacagatattgatcacatagcatatgccatacatttaggtggtagaaaattagtggaggataaacacacgtagatactgtgctcatggaactctcagcccactggggagaaagccattcatcagatgtctacataaatcagtgagtaagtacttacggagtcattttggctggagaagggcagagggaaactccctacatggtacaggatgaggctggagggagagacagagatcaaaccatgatcaagtacattgggaagcctttaaaaatgttaagaggatggcatgtgagattagagggtgccaagtgggtgatgtattgactggaggagctgtgtaaagggagatgctactgtcaacatcaatggttcagcagagagaaagatttgatgatggtttaggtctggccaggaaaggtgttgattgagatctaaagtagacaagagaccaaggcttggtgacggattgaatttgggaggtgaaagcagatggtgtcaagggtgtggcttttgtttctgtataatgcagttatctggatgctggtgccattcatggggataaaggccagacatggggagagtgatgatcatgtacttggtataagacataccagctttgaagtgcctttgacacttacaaatagatatattgaatgattattggtgtataagtcatccagcctttcctttttcctccattacacctcatagtaaatgctttgcttttgaaaatgtttctttctttttttttttttgagaccgagtcttctcttttgctcaggctggagtgcagtggcacaatcttggttcactgcaacatctgcctcctgtgttccagcaattctcctgcctcagccttctgagtagctgggattacaggcgtgtgccaccatgcctagctaatttttgtatttttagtacagacagcgtttcgccatgttggccaggctagtcttgaactcctgatctcaggtgatctgcccaccttggcctcccagagtgctgggattacagacgtgagccactgtgcccgcctcattcggatttctatagaacttgtttgctatttcttccatttgtctctcctctctccattgtcattaccctcattcaagaactgagcatcttgtatgcaggagatccttagcaaaagttggttgaatagaagagcgaaagtagttcaagtcccactccctggttttctgatatctatagatggcaaattgagttttgaaacccagattccttgtatagccaccatatgtgacactttccattttcctgcttctggg

SEQ ID NO: 3909 - DNA, 4001 bp, Homo sapiens
tggacaccaccacctccctgggaaattcttcactggggccttgcgggaagtgaagtgtgaagaagcatgggatgagggatggggaagcagagccagaagggctcaaggccaggcgcctggaagcagagggtcccaggttgcctcctccaccgccaagaaccctcagctcctggttacagtgctggctcccagccctggtgctcggccggactggccgagaccctccccagcctggtccagcccactgctctccaaatccctgccctccatgggcagcagagtccaagccaaccccaagttgggtctccagtgctgatcccattcgggtctctccccccaacctctccatctcaatccacatcctccctcactcccttccacaaccctgggccagaggtttcaggcaaggggtgccccagctatagcaagtactgaggtccaaggagagctgtattcaggcttacaggagtggccaccagctggcaggggcaggtgcaacttgaggtcacatgtgagccaccatggtctccacccaccccaggcagcttcaggaggggaagagagggtgctccccctacaccttccccactgctgccacattgaagaggcagctgggacttccagaagagaagcccttgtctccaaagaccctggcaccctagtttccaggtccccctcctattctcacccccacaaccgcctgcctgcctgccctcctcctccatctcctccccacccagcacccatcctatcccccaaccccatcccctcccctgcagggagcccagcctgggagcacagcaggcttctccgggtcccccctatcacccccacccagtttcctcttctagaacagtagccagcctaaaacatctgggcaggcagtcctggcccaagtcctggattgggggttgggggactgacactgaggtcagctctgtatggattctccagcctgggaacgggtggcaggcagggcatcagagtcagaggacaggaggggtggggggagagggaggagcagggggaaggcagctgcccctgtctgttcattaaccacctggattagccatttctgcccagaggggtgaggaaggagtaagggctagtggttggagagggcagagggggcacttctgccagtctgtgcccatgggcaagggagcagggcccacactgaggagtggagatgggaaaagtgctttgaaccctaaccttgccaggcctgccagcccctccctgcagccaaggtcagacctcagggagctaagtgagcccctagaagaaaggtgccctcacagcagctcaagtgggtggcagggaaagagatgaagaagaaaaaatactcatccccctgcaatgggcaggcaagtagcagaagagactcccaagcttccccctcccttggtccctgtgtccctccctactcctgtagctggcctcagtcccaagcagccactgacaccagcaacttccccagcaaacgaaactccttctgactggttgctctctcagagcagggacaagccgcaccccagacatccctgccagaaccacagaaacatctgaagacaggggactgacaaggttggcctctgaacagcttgcctgacccagagacatgggaacaggcaggctgacctcaccttctcctaatctgatctgtggtcttgacagcatcagtatcaacagcccagcagccctggccggctccatttccctctacacacaaatataacacgcacactcacacacacgtacaccatcacacacgcacattcattcactcacctttcctgcagaggagccactaagtcaggtgggtgtctgggccaagggactcccaggacaggggcggtggccagtggcggaggcagcagctgtggctggcaagaagctggtttcccccagaagaaggcagcgagtgagcctgtgtccaggcagggagcggggtgcaaggagcagagctggtcccagggccactgctgggagcaactgagcagagggctctgctagtcgggttccctcccaggccagcccagggggcgggccaacagtgcaccgcctccttcccggagccagccagcagtgggccccctccgccagccatggcctcctttaacccctgcagtgctctgctggctgcactctagctggctctgggaaggccgtgtcagggcacagacacctggggcaggagatcaccagggaatgtggctgcccctccttcagccactggcccagcagcttccctggggacaggacgggaagggccagaaggcttgggggacaggggtggggaagcgggcagggaggggtcaagactctatagaaaagacgcaggtgcagagaaatggccaaagggcttctgggtggagaagaatgtttgctgagatggtgatgatgataataataataatatagcaactctcagcttttctacagcactctgctttccgctgtttccaactcattttgtgactggaggccaggaatctcacttctgaacctgcttttttcttagctgtcaaatgtgagatagtaatctctgctgttttctctgggctgagttaggacatttgtgactgtacattcaaaagtcatttaagctgagctccagttaatgaaatacatgcttcaactctctttgaaatggatcaaaaaataagatggattggcagaaatgtgataaagcaaatatatcaaagtgttcattgtaggagtttaccatataatcatttcaacttttgtacatgcatgaagttttccatgataaaaataatgggggaagtgatgtgaaaagtttagagcaccatatgaaagataaaagtgaagaagcagataggattatttagaaaggaaggggaaaagttatttgctacacacctatcagatgctggccactaaagactattaactctcacttagtcttctaatcacccggttattatagctgaagatcgtgacctcggagcacagaggtgacttgtggaagtccaagcaggactgtgcggaggacctcacacctgaacctggctggctccacagccaagctccacaccactcagacatccagaggttgaaaggcccttccttctcttccgcatctgggtcagtggcctgcacctccgagcctcagtttcctctgcgacagaaaggtctttaagaacttttccggtcttaacacacactaattttattaattcagccaaacccttccccaggcttcagttttccccagaagtacaatgacaggggagtccctgagaggggatatgattttggagcatgtggggccagagccacagggagatggccagtactttggagggctgcctcgcccccagtcagagacaatgaaacccttggggataggggagagaaggacagcttctcaggaccttatatggggagggcagagatagaagcatcgctccactcatcctctgcctccagagcaagatttcgtcctctcctagctggaaagagggtctgggttctgagtcccaaattccagcatccagaacccaccagcttcaacagcagcctcaatctgtgagagtgtggatgctgtccacaaatggcaaggatggtgaaagcagatggactatggggacacttggcctagtcctccctagccgtcggcccagcctcaaaccaagtctcccactcactggtcccaactctacggcaaaggtgaccccaacaacattatcctccttaacccctacctgccacccccactgcagactaagggctcctctggggcttgggtcagctctgcttagatgagggaagttaggggatcccgggtcagtttcagctctctagaggtggatgtggggattgtgctataaaattagaacccctcccactagcaggtatccggaacagcagaatcctccatcttccccttctcttccttccaacccacatccgtattatcccaacggacatcaaagcgtcccagctccccactgcctgctacttccagtccaagc

SEQ ID NO: 3910 - DNA, 4001 bp, Homo sapiens
ctacccacccttcaaagccttccaaaaagccttctgactacccttgtccacaccatctttactcatctccagcttctatcatagacagggctatccttctaaactctatggtcatctgatcttatgcatatgttgccttctcagttacactgcactgtctaaaggcaaggaccaagtcttcttagattcccttatgtgagttcttgactggcctctgtgggattgaggaggaataaatgagtcaattggtcccttctgttgcactgggaccccagagagaagctcagtatgattctaagaagctgggacttctgctgggcgtccggtgttaacatgtacataggcctcctatctagtgttatccagaccctctatctgctaaccatgattctcagcctcaacattaaacccttctaacatggtttgaggacctgacaatacaggtgatacaggaaggcctgggagtgccctgggggattgctgggattcaagttggctgatttatgaaggtgttgagccacattgtgtggagtgagcatggaggcctcctcacccacaagatgtaacagctggaaggcggtgagccaggcctctgggatggctgcagcctgggtcagggtcaatccctctgggataggcatgaggagcccttcggggacagtgacgtactgagcctggcccccaccggggagcagagccatggctgtgtccccgatcttccagtgtccctggcagccaggccccagctctgccacatgtccagatgcctcaagtcccaaaatgttgctggctcctggaggtgggtcatactggccttgtctctgcagagaaagaagtgcactaagtggtgagcatgatcagaaatctgtatgtcactacccctggccccccttccaagatcccctcttttttttttcaaaaataaatttcagaatgaagtcaggtttttgtaagtaaggagaagaaaaaggagaggccattagttttatgcaaataaactggaggtcacatgatcagtggatgttataactggtagagtccttagctatttacctcatctgaaccccttgctttacagatggagaaactgagtcccagacgggaaataatagtagtgggattaggaaccttgacgatggttcccatgcatcaagcgctaggctctgtgctcactcaccccagtcctcagaagctgtagagcagagggacttaaccaggagtgtgtggcagaaccacctgaggagtatttcaaagtacacgtgcctgggcccccatcacgtttcttttgtgccccgggggattctgatgcacatttctgaatgaccccaaccaatgcagctggcccaggtcagtaaatcagcatcagacagaagaaaattcttaagagtactgcccgctgtcagctccgggactctcagagtggaaagagttaagaggtctttggagccacaaagacctcagcttgaatcccagctcttctgattgctagtgtcacggccttgggcgtactgcttaacctcactgaacttcagtttccttatctgtagaattaagatggcgaacagggtagcctggggagtaagtgtgcccacaccccacaacaatgttagttccgccctcatctggaggcctgagtggctatggattagctcggggtggattctgctttacaagtactcccccttgttttgcatgaacaaagagggcgccctgggtttaggtctgggaagccccagcgcagctgcctgctgggtgtggagcggtgcacgccttcacgtctggtcaatgtccactgagtgctgttgagagggaggctctggagtcccgcccgccccggcgcggctgagccctgggtacctgcattaagtccgcccggttcagggcgctggccgccaccttcaggaggacttcaccctcccccgggctcggcttggccacctccttcacgtagaggttttccggtcctcccggcttgtcaaagtgcacggctaacatattgtctgaggacacagggcagggcagggcaggacaggacagggcagggcagggcaggacaggacagggcagggcaggacaggacagggcaggggccgctgtatcctcgcggagcagcccagcctcaggctggcaccgcagcgccccctgccggccagcgcctcgctgccctggtctgccgcggacccggcctccgccccgagctcctgcctgggaagtcctcggccgcctccagaccgatcccacccggaacacagatgggaacggcgggaagtgggatggcggtacagggctggatgcggcagagcaggacaacgccgaagaggatcaggcaaatcacactccctctgagttggaagcccccagcccgacccgggtccccggcgcccgtatgagttacttactcctggcccggctcccctcccatgcaccaggcggcgccgagtggttctggctcctgcgggtcccggtgacaaagcccgagccccagagccccaggactgcctctgcctccaccggaatggacggctggacctggggtagccggaggggtggggctaagcagaaccaccctccccctctttcctttcctccttccccctttaaaacgcaaagttagaagcaagcaaatcagattttcttgtccttttagcctctggaaaagagtctttctctcagcttgacagaaagtgcgattctagctctcacttcaaggagaggaaacttccttctctctagggaacgagacccaacctcttggcgggcggattggtccattttccaggcatggccaggcttttggcacatttatgtaacaggctggcatcccgcccatcttgagcatgggtgggcaagctgggtgctgctaagagaagagaaaggagccgttgggagtgggggtggggaaggaaggcaaaacgcagtcctgggatccttatcactcgcctcctcctgacagtcctgggggagaggttcagccccaggagaaggatgctggcgattgggtaaaagctgtatccgtaagctacatgaaggtttctcaatctcggcgctattgacattttggactagctagttcgttattgtaggagatcgtcctgtgcatcgtaggatgtttagcagcatccctggcctccccccactacatatccgtagcactccttgtaaattcctgttttagtaagaacctcccatccttgacatctgatcaccctcaatatctcatcctccaccatcccccaagtgatatccgaccaccctggcctgtcttcagtgagaatcctgttaggtcagtttagatagaatcccccttacccctgatgcctcttaccaattttccatccactgaccccctacactgctccttggctatacattcccacttgtccgtgatgcattcagagttgatcccaacctgtctcctccactgcaagaactcattgcagtggtccctaaacctgtagcgatggtgctaaataaagtcttccttaatgtgctttaacaagtatcattgaataattatttctttaacacaacagagcaaaagcctatagagatggaaataataaaatgatgggacttaaggaaaaattcaggagaccctgctatgagaataacaggaattttaggccgggcgcggtggctcacgcctgtaatcccagaactttgggaggccaaggcgggcggatcacgaggtcaggagatcgagaccatcctggctaacacggtgaaaccccgtctctactaaaaatacaaaaaattagccgggcgtggtggcgggcgcctgtagtcccagctattcgggaggctgaggcaggagaatggcgtgaacccgggagggggagcttgcagtgagccgagatcgcaccactgcactccagcctggacgacagagtgagactccgtctcaaaaaaaaaaaaaaaaaaggaattttagaaggaggaagaggaatggatgaagaagattcaatagttaaccaaataaaagaatacagttttcctaaatt

SEQ ID NO: 3911 - DNA, 4001 bp, Homo sapiens
gccccccttccaagatcccctcttttttttttcaaaaataaatttcagaatgaagtcaggtttttgtaagtaaggagaagaaaaaggagaggccattagttttatgcaaataaactggaggtcacatgatcagtggatgttataactggtagagtccttagctatttacctcatctgaaccccttgctttacagatggagaaactgagtcccagacgggaaataatagtagtgggattaggaaccttgacgatggttcccatgcatcaagcgctaggctctgtgctcactcaccccagtcctcagaagctgtagagcagagggacttaaccaggagtgtgtggcagaaccacctgaggagtatttcaaagtacacgtgcctgggcccccatcacgtttcttttgtgccccgggggattctgatgcacatttctgaatgaccccaaccaatgcagctggcccaggtcagtaaatcagcatcagacagaagaaaattcttaagagtactgcccgctgtcagctccgggactctcagagtggaaagagttaagaggtctttggagccacaaagacctcagcttgaatcccagctcttctgattgctagtgtcacggccttgggcgtactgcttaacctcactgaacttcagtttccttatctgtagaattaagatggcgaacagggtagcctggggagtaagtgtgcccacaccccacaacaatgttagttccgccctcatctggaggcctgagtggctatggattagctcggggtggattctgctttacaagtactcccccttgttttgcatgaacaaagagggcgccctgggtttaggtctgggaagccccagcgcagctgcctgctgggtgtggagcggtgcacgccttcacgtctggtcaatgtccactgagtgctgttgagagggaggctctggagtcccgcccgccccggcgcggctgagccctgggtacctgcattaagtccgcccggttcagggcgctggccgccaccttcaggaggacttcaccctcccccgggctcggcttggccacctccttcacgtagaggttttccggtcctcccggcttgtcaaagtgcacggctaacatattgtctgaggacacagggcagggcagggcaggacaggacagggcagggcagggcaggacaggacagggcagggcaggacaggacagggcaggggccgctgtatcctcgcggagcagcccagcctcaggctggcaccgcagcgccccctgccggccagcgcctcgctgccctggtctgccgcggacccggcctccgccccgagctcctgcctgggaagtcctcggccgcctccagaccgatcccacccggaacacagatgggaacggcgggaagtgggatggcggtacagggctggatgcggcagagcaggacaacgccgaagaggatcaggcaaatcacactccctctgagttggaagcccccagcccgacccgggtccccggcgcccgtatgagttacttactcctggcccggctcccctcccatgcaccaggcggcgccgagtggttctggctcctgcgggtcccggtgacaaagcccgagccccagagccccaggactgcctctgcctccaccggaatggacggctggacctggggtagccggaggggtggggctaagcagaaccaccctccccctctttcctttcctccttccccctttaaaacgcaaagttagaagcaagcaaatcagattttcttgtccttttagcctctggaaaagagtctttctctcagcttgacagaaagtgcgattctagctctcacttcaaggagaggaaacttccttctctctagggaacgagacccaacctcttggcgggcggattggtccattttccaggcatggccaggcttttggcacatttatgtaacaggctggcatcccgcccatcttgagcatgggtgggcaagctgggtgctgctaagagaagagaaaggagccgttgggagtgggggtggggaaggaaggcaaaacgcagtcctgggatccttatcactcgcctcctcctgacagtcctgggggagaggttcagccccaggagaaggatgctggcgattgggtaaaagctgtatccgtaagctacatgaaggtttctcaatctcggcgctattgacattttggactagctagttcgttattgtaggagatcgtcctgtgcatcgtaggatgtttagcagcatccctggcctccccccactacatatccgtagcactccttgtaaattcctgttttagtaagaacctcccatccttgacatctgatcaccctcaatatctcatcctccaccatcccccaagtgatatccgaccaccctggcctgtcttcagtgagaatcctgttaggtcagtttagatagaatcccccttacccctgatgcctcttaccaattttccatccactgaccccctacactgctccttggctatacattcccacttgtccgtgatgcattcagagttgatcccaacctgtctcctccactgcaagaactcattgcagtggtccctaaacctgtagcgatggtgctaaataaagtcttccttaatgtgctttaacaagtatcattgaataattatttctttaacacaacagagcaaaagcctatagagatggaaataataaaatgatgggacttaaggaaaaattcaggagaccctgctatgagaataacaggaattttaggccgggcgcggtggctcacgcctgtaatcccagaactttgggaggccaaggcgggcggatcacgaggtcaggagatcgagaccatcctggctaacacggtgaaaccccgtctctactaaaaatacaaaaaattagccgggcgtggtggcgggcgcctgtagtcccagctattcgggaggctgaggcaggagaatggcgtgaacccgggagggggagcttgcagtgagccgagatcgcaccactgcactccagcctggacgacagagtgagactccgtctcaaaaaaaaaaaaaaaaaaggaattttagaaggaggaagaggaatggatgaagaagattcaatagttaaccaaataaaagaatacagttttcctaaattctaccagattatacggattgaaaacattcactaaaggatggattcataagaacaaaaatgcatgcctatattttataaaatttcaggttctaacaagtgtggaaagaataagttactcacaattggttaaaaaaaatggcttccttctctccctccctccctccttccttccttccctccttccccaccccctctttctctctctctcttttttgtagtgtaggggtctcattatgttgcccaggctggtctcaaactcctggactcaagcaatcctcctgcctcagcctcccaaagtgctaggattacaagtatgagccactgtgcccagcaagtttctatctgcaatctggaagctagaagagagtagactagcgtctattgactagaagaaaagcactgtaactcaatataccccattaagatataattcacttgttagggcaaaaaacatgtctgaggatgtataaggattcagagacacatcatccggatacacatctgtccaaaatcgaggaaaggtttgaaccaaataaatatcctagaacagagacagatggaaaggaaatagttgtaaataacaaactttgcaaaaatcgacactaaaactgattggattaagaaaatggaatggattaagatagatgaggaatgtgtaatgtaagtgctaaataagaacttttaagatgcaaggagtaactttaaaaaaaatctaataataccaaccactaagtatactaaagtatcccagtaaaactagtagttgaaagtgcctaagattttatcttagtgagcccttggtcgatgtaatcttgcagtgtgtaataagaaatatatatttttggtctttgtcctgggttcctacaatagcactcctaaaacct

SEQ ID NO: 3912 - DNA, 4001 bp, Homo sapiens
ggccccgggactgtgtgcagaggcccagggacctgcccggtgagctgtcacctgctccaggggccccgagactgtgtccagaggcccagggacctgcccggcgaagtgtcacctgctccaggggccccgggactgtgtgcagaggcccagggacctgcccagtgaggtgtcacctgctccaggggccccgggactgtgtccagaggcccagggacctgcccggtgaggtgtcacctgctccaggggccccgggactgtgtgcagaggcccagggacctgcccggcgaggtgtcacctgctccaggggccctgggactgtgtccagaggcccagggacctgcccggcgaggtgtcacctgctccaggggccccgggactgtgtgcagaggcccagggacctgcccagcgaggtgtcacctgctcccggggccagcggtgtccatggggtaaaatgtccaggcaaatgcccctgcagtattcactccagtgaaacttgttctcagggtttggaactttatttattttattaaaagaaaagcaaagagcttgatctgtgattattttaaccactgcatctcagtagctttcttaacttgttttcacatagtagcacactgattccagaaaatacatcacagaagttatttaataaaaaataattctgtagcaaaggaagaaaaacactcccaaagaatttttttttcagttatatgaataggtaaaagtgaaaattgtctattgtgtcatccaaggaaaatcagctcttttttaaagaaagaaatgtacatatttcaatccttctaaaatcaagaattacaatttttttttcttaagcataacaaagcatacactacaggggcctaaagtgactctcaggagctaccattatgccctctattttagtaagtgtgaaaaataactttataaggccagaagaccgcaatgtgtttgctacttaccccaaaggagttctttccctctcgagatgaaggggaagaaggcttctgtgcaggccataaccagcgtgacagacagcacagcgagcgctctcattctaaaattaacggaaggagacagagtatgtaatcaagcactgacaaggccatgggaaccgctgtgtccttgtctccctgctgaggggctccctccactgactccacgcagcctctaccgcagtgagcgaccctcacaggcctggggtctgcgagaccagagtcgccgtccatgtcaggaggttacagaaactgcagcgctgagcaggcctcccaggcccccattattcaaaaacagagtttttatgttggcagctccagttgccaatatatctcagtaataacctatttaaatttttggtaatgtcaaatagtgtaacagtactgggaataattattgggaatgaaaaaaatctgtttcccctaatgcatctatgtggcaaaaagtgagtactattagaaatttagtctttataaaagtgataaataaaacccctaaatgcctattgaatttcttaaagcattcttatgtccataaaatgattttagaattctagttgttaagacaaaacagaagattcaaaattcatcatttctactttcaaatccttgttttcttctcttaggctttctgtggctatttttgagccactaattttgttaagcaggatagcaccagtgagtccatgctgacaggaatgtgtctcagtagacggtgatctaggaatcgaccctacaggactcacatgttccagcggaggtcattgcaaacagcactcatcagtcagtcagtcagctttgctgagagacgccacccatacctgctataatggcccaaattacagccactcttgggccactttacaagttccaatgatgaatttctcttagaaaatggaaaaataaaaagctttacaacctgaccttttttcctcttctcagccaactgcactgctgagtaattttcacggctgtaactcttctgaaatgggcgccttaattgccttccagggacttggttacccaccttataaactgactccgcgcttggatagcccgtcaagatgctaggaagtcgagtggcgtccgttcttcgtggggacagaatgtctgcgggctttgttgtgtttgcgccgggcctcttgtgtgtcctgactggtcagaaacaaagtgccatgtcatcggggtccacatgcagtccagcctctggccgaatgagttaggaagaagaggggaaaaattatacagggagaaagaataaaccaactaaatccagacttgtgacacttgcattttcctccctcttactttcacagttaaataccctgtgaaaaaggggctgttaatcttccgaggattgggttgggtgcagctcccaggcccaccgatgactcgctctacaactctgagccttttgcttcctgtccccaagcccctagttttcttatcactaagaggtgaataaagtacacttttttccaatttgttgaggtgaaaaatgagcacagttcagtgtgtgttcaccagcatgcattctcccctcaatcctcatcatgcacccatcaaaagagtccccacaaagacagagatgttctgtaggaaggtcaccatgactgcattccgaacactgggagatgacatgttttcatgggtgatctgctttcaggctgtatctcatcatgaaaatgataaaataacacatcttcaatgacctgctcctgagacttggagcctcttcatgcccccggaagtcctatgggtttctagtttgtgaaaatcatcttcatctttctccttttctttcccttctccaaatgtgactgatgcttcctctaggtaatttgaaaccaaatgctaaaacacgatgcaaaggcttcagaacattaatctttgttagaagatgttctgaagcccaagaatgtgatgatttgcctttaacattctcccctcaatcctcatcactcacccctcaaatgggtgaagataacaaatgagttagacaagctctgaagagcagggaggagatcagccaacagtgatataatccccccacgcaccctgagaatggtcactaggagggtggggtttggatagagaggaaggaccagactcggtggctcattaaagaggattccatggctcaatgatgagttactgttgggaacagaagaaaagcacagagcctctgaggattcagccatcctcggtttgatgcctaagcaagtgaaaatctcatgtactggccctaggaaggccagagaagaaaggagactggctgtgacaagcaaaggagcagcagactcaggcttggaattgtgttggaggtgcccgtggcacaggcgggcagtgagctcttgggcatttggaaatgtactttcagctgttgggtgaagtccagcttaaaaagacacatttgggagtcctgaggggggatacagtagtggactgtgagtgaatgggattcttcttgggagaatgtggatggaaaagacctcaagagtagctcagagcaccagcgtctaggggacacagtcccccagcctgtgactgcaacctgcatggcaaaaggggctttgcagatgggattcagttaagattttgaggaggggagattagcctggattatccactggccttagtgttagcacacagctccttacaagacaaaggtgggaaagtctgaggggagaaagggggaagtgatgatggaaactgagactggagggccgtggccatgagcctccagaaactggaggaggccaggagcagggcctctggggtctccaggcacaaccaggcctgtccctggaccttgctgccaaaagtctcatttggatctatgacctccggagctgatggagtaaagccactaagcacgtggccctttgttaaggcattcgcaggaaattcacacagccagaaaggtgggtggtaaaatgagacagcgtggggcaaatactcaaggaagagtttgaagaagaaagcattaaaatgtaaagtaaatactga

SEQ ID NO: 3913 - DNA, 4001 bp, Homo sapiens
catgtatcacaacttgctcagaactagctcttgacttctaacatgttttactctggttttatacaaccaggtcctactaaatatgaaataaaataacaaagtaattaatttacaaaccattggctgaacatctagcatgttccaggtgatagagtgactgatttattctgggaagatgcaaaatcactttttcctgaggttctttatattgtgactccatttttattttttgttttttggtgattgccgaggtactgcattcaccgctttaaatgaagtatctcattcttgctcacaaataatgactgcgatgagtaattttccagtgttctccatttgcaggggagggacaggaattaggggtgagtagcccatccttggggcatggatggaagctggcagggagaggccccacggcttccctgatctcagagcgggcagtgaccaggaagtcctgggggctgtggagggagagtttttttaaggagcctacgagtctgttatggacttcactgccactcctaatatggttgtgaagtcctgagatgcagaaaaattggggtaaaatgtggcccccagcaggaggctgggctgggtgtggctgggaacagcgaggactccagattctgtgaccctgaacgacagacaaggcctccagtcctgggaaaggctggtgagggcagaggtgccagtgctgtgccatggccccaagactgtgtccagagacccagggacctgcccggcaaggtgtcacctgctccaggggctccgggactatgtgcagaggcccagggacctgcccagtgaggtgtcacctgctccaggggccccaagactgtgtccagagacccagggacctgcccggcaaggtgtcacctgctccaggggccccgggactatgtgcagaggcccagggacctgcccagcgaggtgtcacctgctccaggggccccgggactgtgtgcagaggcccagggacctgcccggtgagctgtcacctgctccaggggccccgagactgtgtccagaggcccagggacctgcccggcgaagtgtcacctgctccaggggccccgggactgtgtgcagaggcccagggacctgcccagtgaggtgtcacctgctccaggggccccgggactgtgtccagaggcccagggacctgcccggtgaggtgtcacctgctccaggggccccgggactgtgtgcagaggcccagggacctgcccggcgaggtgtcacctgctccaggggccctgggactgtgtccagaggcccagggacctgcccggcgaggtgtcacctgctccaggggccccgggactgtgtgcagaggcccagggacctgcccagcgaggtgtcacctgctcccggggccagcggtgtccatggggtaaaatgtccaggcaaatgcccctgcagtattcactccagtgaaacttgttctcagggtttggaactttatttattttattaaaagaaaagcaaagagcttgatctgtgattattttaaccactgcatctcagtagctttcttaacttgttttcacatagtagcacactgattccagaaaatacatcacagaagttatttaataaaaaataattctgtagcaaaggaagaaaaacactcccaaagaatttttttttcagttatatgaataggtaaaagtgaaaattgtctattgtgtcatccaaggaaaatcagctcttttttaaagaaagaaatgtacatatttcaatccttctaaaatcaagaattacaatttttttttcttaagcataacaaagcatacactacaggggcctaaagtgactctcaggagctaccattatgccctctattttagtaagtgtgaaaaataactttataaggccagaagaccgcaatgtgtttgctacttaccccaaaggagttctttccctctcgagatgaaggggaagaaggcttctgtgcaggccataaccagcgtgacagacagcacagcgagcgctctcattctaaaattaacggaaggagacagagtatgtaatcaagcactgacaaggccatgggaaccgctgtgtccttgtctccctgctgaggggctccctccactgactccacgcagcctctaccgcagtgagcgaccctcacaggcctggggtctgcgagaccagagtcgccgtccatgtcaggaggttacagaaactgcagcgctgagcaggcctcccaggcccccattattcaaaaacagagtttttatgttggcagctccagttgccaatatatctcagtaataacctatttaaatttttggtaatgtcaaatagtgtaacagtactgggaataattattgggaatgaaaaaaatctgtttcccctaatgcatctatgtggcaaaaagtgagtactattagaaatttagtctttataaaagtgataaataaaacccctaaatgcctattgaatttcttaaagcattcttatgtccataaaatgattttagaattctagttgttaagacaaaacagaagattcaaaattcatcatttctactttcaaatccttgttttcttctcttaggctttctgtggctatttttgagccactaattttgttaagcaggatagcaccagtgagtccatgctgacaggaatgtgtctcagtagacggtgatctaggaatcgaccctacaggactcacatgttccagcggaggtcattgcaaacagcactcatcagtcagtcagtcagctttgctgagagacgccacccatacctgctataatggcccaaattacagccactcttgggccactttacaagttccaatgatgaatttctcttagaaaatggaaaaataaaaagctttacaacctgaccttttttcctcttctcagccaactgcactgctgagtaattttcacggctgtaactcttctgaaatgggcgccttaattgccttccagggacttggttacccaccttataaactgactccgcgcttggatagcccgtcaagatgctaggaagtcgagtggcgtccgttcttcgtggggacagaatgtctgcgggctttgttgtgtttgcgccgggcctcttgtgtgtcctgactggtcagaaacaaagtgccatgtcatcggggtccacatgcagtccagcctctggccgaatgagttaggaagaagaggggaaaaattatacagggagaaagaataaaccaactaaatccagacttgtgacacttgcattttcctccctcttactttcacagttaaataccctgtgaaaaaggggctgttaatcttccgaggattgggttgggtgcagctcccaggcccaccgatgactcgctctacaactctgagccttttgcttcctgtccccaagcccctagttttcttatcactaagaggtgaataaagtacacttttttccaatttgttgaggtgaaaaatgagcacagttcagtgtgtgttcaccagcatgcattctcccctcaatcctcatcatgcacccatcaaaagagtccccacaaagacagagatgttctgtaggaaggtcaccatgactgcattccgaacactgggagatgacatgttttcatgggtgatctgctttcaggctgtatctcatcatgaaaatgataaaataacacatcttcaatgacctgctcctgagacttggagcctcttcatgcccccggaagtcctatgggtttctagtttgtgaaaatcatcttcatctttctccttttctttcccttctccaaatgtgactgatgcttcctctaggtaatttgaaaccaaatgctaaaacacgatgcaaaggcttcagaacattaatctttgttagaagatgttctgaagcccaagaatgtgatgatttgcctttaacattctcccctcaatcctcatcactcacccctcaaatgggtgaagataacaaatgagttagacaagctctgaagagcagggaggagatcagccaacagtgatataatccccccacgcaccctga

SEQ ID NO: 3914 - DNA, 4001 bp, Homo sapiens
atgagttaatgggtgcagcatacaaacatggcacatgtatacagatgtaacaaacctgcacgttgtgcacatgtaccctagaacttaaagtataaaaataaaaaaaaaggataaagtatcccacttgacccaaagatattcattccacgcatggaaattaagcagagagggtacaattattaaataatcaatgtcgctcctttcttggacataagcttaacaagaaaaggataggttattatatataaagacataaaagaaacataaaagacaacttgaataaccagaaagacatgaccatatctttgaatggaaaaactatgtattgcaaaaatttctttaaaacaatttctatcaaattcttaataaaatattttggtggggcaatttgagactcattttatccttttacctggcagattatatttctagaactctttctgatggaagtcattaggaatccaataattatataagatgttcctctcattattttaacagtaaaaagttgcaaataacctatctagctaatgatgggattagttgttatttaacaaccattaaaacatgtggtcttgacggtgtgtaaaaacggcaataaataacattaagtaagtaaaaacatctgaatggaaaacaaaacacaaactggccaaaatgtgggttttttaaaaggcttttaaacaaatattaaaaagaaaatacaccaaaaagttaatgttatctcttatttagaattaatttgactttttctgttacaaacagaaaaaaatatatttgtgaacgatatcctggcacacagttcaatcattagtcatgctaaggtggaaaaaatggatacagaaagacataatcagtaggatcccaattatataaaaagatacacatatttttttaaaatacatgaaagaaacactaaaatatgaccatcttgggtagtgaggttatgaggtgatttttattgtcctttatataaaagaaaatattttgttatgtatgttctgaattttctacagtaagcacacaaaacatgagtacacataataagaaaggaaaaaaacgtgctttttaacactgagtggggggaagaacccttagaaaacttcaaaatagtttgttcttgtttagcgtaatttactcactcaggtcagaaacttggaatcatcgttgagacccaacctgtcactcaaatcctatatctaatccgtaaagtcctgaattttcacctgctaaatatacttttgattcgtccacttctctcccatacgctaggtcacatcgctcatctacagcagtagccttctgagtggtttctcacaattcctgccctcctataatccagtcgtcaccagcagttacagtgatcctttcaaaatgtacatcagatcttgtcattctgctgctcttatgataaagccccaactttgtgtcacggtgttccacactctacgatctggtccctgcctctcctcttctgctaccgccgcaatggccttctctaagctcaagtcaccaacctttctccccgattctgccctatcggacaggtagttccctctctcctttcatctccgcctgacgcactcctccctcccttcaactccatttggagtccatttactacagcgcccagaaccccggcactacggctctttttagtctgaggactagctcctttttgggcccaatcacaactctgaagaatcctgcgcctatccgctgcatgtctcctcactaaactatttcttgaggggacagcctgactctatcattctcgtgctgcattcccaggggctggcctcgttgccgcttgagaaataccaaccgcagccgttgtcccaaagacactactaaaactgcccggaccctcccgctcccgagcctgcccgttagagcgcaaggaaaactcaccatccggcccccagtgcgtctcggaagagctcccgctccgaaacaaagctcacaacttccggaagcgatggccaatccccgtcttcttcgagccagtttccggataggccggctcggggtggccatctgtttccgggtcctggtaggaggggtgcttccgcccatggtcccgcccattcttccgcctccccaacctgggtcccgtcaacggacgcgaaggagaacaggggctgtatatcacttccggcgaaggaaatggaagaatctatgggctgggaccggaagctggggtctggttttgagtctcggctttgtcttaacctgtgttgggcgttgcaccgggcgacctcagtttcttcctgtacaaggaaaagtactgaccaaaatgagttctacatacatttccgctgctggagatttctttggtttttgagacagagtcttgctctgttactcaggctggagtgctgtggtgcaatctcggctcactgcaacctccgcgtcccggttcaagccattctcctgcctcagcctcccgagcagctgggactacaggcacccgccaccacgccccgctaattttttgtatttttagtagagacggggtttcaccgtgttagctaggatggtctggatcacctgacctcgtgatccacccgccttggcctcccaaggagctgggattagttctttttctgggccatgtctcctgtgacactttggacttttgagtttaatgctggaacaagttaaaattttggtaggtgattgggaaggcatgattatgttttgcaatgtcagaaggacatgagatttgggggtccagggatggattgaatatatgtccctgccaaatctcatgttgaattgtccccatttttggaggtgggacctgatgggaggtgtttgggtcatggaagtggatctctcatggcttggtgtctttgcaatagtgagtgagtgccaggaagatgtggttatttagaagtgtgtggcaccctccaacacagtctcttggtccagttctcaccatgtgatgtgcctgctctctcttctccttctgccaatagtaaaagctccctggggcctcctcagaggccaaacagatggtggtactatgcttcctgtacagcctgcagaaacatgagccaatttaacctcgtttctatataaattacccagtctcaggtatttctttgtggcaatgcaacagcctaattgcagggggcaggggcagggggaagaggtggggaggcatgacacactgggctaaaacatgaagaacattcggccaggtgcggtggctcacgcctgtaatcccaacactttgggaggccgaggcaggcagatcacctgaagtcgggagttcgagaccagcttgaccaacgtggagaaaccccgtctctactaaaaaataaaaaattagccaggcatggtggctcatgcctgtaatgccagctactcaagagactgaggcaggagaatcacgtgatctggggaggcagaggttgccatgagctgagatcgcgccattgcactccagcctgggcaacaagagtgaaactccctctcaaaaaaaaataaataaataaaaattaaaattaaaaaaaatatatatatatatatatacatatatatatgaaggacattctatttctgggagacactggaacagggccctggctggtctggttagtctctctctatcacaggatgctacattcccagcacattctacagttatcctagagaaccacaagtgagaaaggagagagaactaaattggtccaaggccacctggagaactgtcctgcagtctatgcccttaacccagattataccctttagcaaagctagtccgtttcatatgcccaccaacctcctagtatctggaggcggaagtttgtcttatcagatcgatgtaacaccttcacagacacaatgtcagtacaacattgttgagccatagccagaatacattttactaggcccaggaggactacatcacaaacaggttgatcaggtctgtctggagcatcaacctagtccaggatccagtgatccaggtaagaacataataggtcaaaggt

SEQ ID NO: 3915 - DNA, 4001 bp, Homo sapiens
caatcacacctcactggcctccactcccaggctcaaggtttccttccacctcagtctctggagtagctgggactgcaggcacatgtccccacgctggtaattttttttatttttttgtagagacaagggtctcgccatgttggccaggctggtctgcaactcctgggctcaagtgatccaccgccttggcctcccaaagtgctgggattacaggagtgagctaccatgccgggcttctttgataattttttgtaacgtaaaggagtcctgagaccaaaaggtaggacgatggaataaaggactcataaagacagattctaaaggagagagatcttatccagactcactcgtcataattaccagtcggtaataggttttgcagaagtgaaaggcaatgtgctttcttgtgaggagatggactcctgccttgtctaacaagcatgaagcggccacaccgcaacagagtttgaaaccatgcctggtgcagactcccctctccagctgccgcgcctcctgccttggtagagggccgtccgcagccccgcgacgccttacagaggcgaacaccgtgcgtcttcccagcccggagctccaggatcggctctatttggccgtcctctgctttgctgcagttgggatgaggaataaaattgcgaatggccaggggtggaggcagaccggggagctgcgcaggtgtcatcaaaggtgggcctctaaattccagcccccactccctcaacccacccccaaccccccccacccccgcgtcgcgggcgcaccagaaggataagcctggcatggccctctccagagccagggacgcacagatatcaaacccaccggaacaaatgcgcgaaattcaacctatgccgcactcagaagagagggactcgagaaccacagaaaattctgagtgtaggaaaactgatcagagaaggaaatattcatctcgaaagaggtccagcctcggagacgcaagacctgtccgctatagagctgtgttgactcgggcaggtcactgagcctcccttgcctgggtttccctcacccacaaaacgttgatgcgaacatctaaagcgcccggctggacacgcaaggctcggacagtggtcactccgcgaacgcactctgtgacctggagcacacaggtcccccgctgagtgtcagtttcccagatcggtaaaaacaagggaaatggcttcaactccctaaagtcccttctaactcaggcactgaacatatgaaggttaagccaagcagcttcagggcgctgttaatattttgataagagcaggtgaaattaaactcttaaggaagagagggaagaagaaacttcaaataaatgtgcccaagttcctggtccggtactccctggcggatccgtcccccgaaagctcgcgaaaatggctggcgagaccccagaggctctctcggacgcccttgggctggcggagggcaaaggccagggcactgagtcgcttggagcctgcgggctgcgcccccgcgggaaaggggaacccgagggcacggagaggagagcgagcaaggagcgccgcggtgctaggtgaaagcccagccgcggaagtcggctcggggtccgaaagcgctgcttcgcggggttcggagggaaaccatcccaaggaggtgcagagaggccggctctccagcacccgacgcgcgccttacttggggcttgagctcgcagttggcggtgccgggcgccccgcgccgcgaagctgcgcccgtgggcaggaggcagagggtctgcagcaggaaccagctccagggactcatcctcctcaaggcggctccgaggcccggaacgcggagggaaggagtagggcagaggtggccgcccgccctggctagccggggccgcggggcgcctccgggcggggctggggtgagcccggcagcagcggccacgtggggccgggcctcgacctccctccccccaccccacccccgcaggtcagccccgcgcctaggcggcagcggagtcccgaaccgcgtttctcccgcccaaaccctgccggggccgccgcccacctcgtgtgaccgcaagaggggtaaagtgaagttccagcgctgtcctaaattcaacctaaaatcgcattggttcctgcgtttacgtctgtgcttatgctgccgattgtgaggggagggtgcctcttgattgaaagaggcagacaaaataaacaaatgaaaggctatctataaaggaaagttcatttaaacaaaggaaatctcacggaagttttgaatgtaaaagagagaggggaatggtcagtgtgtgcatccactgaaaatccaggaccacaaaagctggcactccattaagagccctcttaatggatttttaggaataatattaaggatgttaacaccgaactcagaggattgccgcaaggattaaaagaggaaatttatgagaaacaccttgattggcacacatagcaagcctgcaaactgcagtcgctccctttcggctccaaaaccccactgaggatttttcacagcattggtccatcaggaagaaaaaaaaattatgaaagcaagtagctgtgccccgcctgccgcacctcctacccatgcctgagcgcactttaccaccaccttttaaagtccagacgtctgcgccattaacttcggagtggtgttcgcaggagcatttgtcgcagtggtctttaattgctttaagtcgctgtccattttgagaatctgataactggacgatctcccagggaaaaagaaaagggggggggcagatttgcatacaatgcggggagaggttttctgaagcccatttccaactttcccgtaaagaacccctggctttgaagagccaagtctttcgagatttaactccaccaacatttagagttcagatgtttttgtaaaatcgcttttttctaagtttgagtggggatttgctttctggaattgactgtctcctgtcttcagatgactgccccgtgtcagcccggcggcaatcgttagtctccgggccaacccaggacgatgctttttggcgttttcaggcaccagcgctgccacctgctggcaaaaactttctctttcggttgtgagggggaaaagcaaaaagcatcaagaacgtaagttgccctgagctaagatcgaaccactgcactccagcctgggccacaaagtgagaccctgtctcttatttaaaataaaacaaaacaaaacaaaacaaaaaactcaaaaggatgtaattacctattatttcatgttatctctcccactccaaatgaatcaatccgtgtggccacagagaagcccgcccagcttctctctgagctgggcttctctctggccacacaaaacatggctgaatttgtttattttctcctgttgtttgtctctcttttatttcgttggtttctgctcttatctttgttatttccttctgtttgtttacttttgggtttactttgctttttttctggattcttaaggtggtaccttaagtcattgactttaagtcttcttgcttttgtaatataagcatttaaagttataaatttccctataagcactgctttagctacatcacccaaattttgaaaaactgtatttcattatctttcattatctactttccctggtgattttcttctttgcccgtggattatttagaagtaggttgattgatttccaaactatggaattgtcctaaatattaggttggtgcaaaagtaattgtggtttttgcaatatcaacagatttataatccaattctgttgtaaacagaaaacatactctgtatgattttgattattttgaatttattgggacttgttttatggctcagcatatggtcagatactgagtatgaaatatcatatccatatccaaagtacctagataattttgtttgattctgacagtttttaaatgaagtgttttttttgttgctgttgttgctttgtttcgttttgttttttctcttagccagacccatcatcaagtaggattt

SEQ ID NO: 3916 - DNA, 4001 bp, Homo sapiens
ctaatttttgtattttcagtagagatggagttttaaccatgttggccaggctggtcttgaacatctgggctcaagtgatctgcccgccttggcctcccagagtgctgggattacaggcgtgagccacagcacccagcccatgttcctcctcctctcccattaggattcctctgaccaactatgcggtagtgactggacagccaccgtgagctgagcgccatcactgccccacaaggataaggcacactccctgcacctccctcctggggctctgcatttcagtgggacagacaggcctgggagaataaaggttttggcagccacagctagagtgggctgggctcacactggctcttgttccctctgggtcagaggacgggtacccgcctacttcacgggacggtggtgatgcggcacattgtccccctcccaccgggctatccacacagcaggtcctctccccacacactgtccaggacaggctgtaagtgctgcaccagctgggaggacatgaccagggctggcgaggccctgggatgtgggtggattcgagagcatttttaggcactgttttaacacagaggcacacgctccaggagaccacacgttataagctaaggtaggagggcagaaccagtaaagcaaagtctgtgcaagaataaggcacccaacctgttgaaaagagtgagaaacagagcttgaggaccatcaccaggtgaggtcatgaggccctggaagtctgcaagtccaacctgaatcctaaatcccaaaacacacctctgagttcccacgtgcccttgggtccaccatggaaatgggtgctgcgcccgctgcagtgacgctcctgagagttaccagggagttaccacgagccttgacaggtcccactcaacaggggatgtttgttgtgcaatttctatgtaccttacccagtgcagatcaccagagccatgctaataagcaagccagggtctccgtcacggaggagcacaccatccgcaagtggaaaaagctacagagaccaccaatctcaacgtagggcaggctgtgcagctctgttacagtctttcctgccaagtccccctacagccgcctccactaaatccacccgcaggcatttattaagcacccaaaatgtggtatggagggaaactttggggcagaagggttgtataaaaaatattatttccattctcccaggatttagggagtgccttccacgtgctacatacttcagggcaagcgagaggggttctgcaaggttagacgaggcaggagtcacagaagcagctctgccagcaataatggaagatgcactctaaggaaatacaagggcaggcagggaagaagtaagaatgctcctgagggcccggagcctccttgtaagcggcggcccggagccgggggaggggcaggacctcctcacggagggcgccgcggaattgggcctacaggccgggctcccaggcaggggccgcacagaactctcgccccgaccccggaactgaccccggcccccgacccgcaccctgtgcccggcccacacccggccctgaacaggtccccgacctgcaccccgagcccggcccacacccggttcacacccggcccgggccccgactccggcccagccccggcccccgacccgcacctgagcccgagcccggctcgcacccggcgccacccggcccgggccctgacctcggcgcccaccggaatcccgacccgcacctggccgggcccggtccccggcgcccacctccgtgatgatgtcgtgcaggtagcggaacgggggcttgctcagcagcttctcggtcagcggcggcctccgaatcactttccccagcgcctcctgcgtccgcctcaccaccgccgcgttcatgacggcgtccgccgcccgctggccgcccgcgcccctcagccggcctggccgagcctaagcccgggtccctggccgccgccggccccgccgccgccgccgcccggtcctgccaggacgcgccgctccggtttccatcccacagtgcaccggagcccaccacagcgcctgcgcggccgccgcagggcgttcggtcactagggctgcgcggccttagcaacggacgcgccgcggcgccccgccccctgcccgccttccagcgcccgcgcaggcaggagtgggggttccgcgggagggatttgcgggagtgcggctgtgccagagcaggcggggcgcggcggggcggggaaaggggatctgggatcgggcgcctggcccctcctctgccgagcgacggcctcgggaagccggtgttcgctcgcgttagaggcgactgcctgaggactgattaagaacaaggtaacctccaagatctgtgccgcctgtttcccaaatctcaagggctttcgaaggcactggttcatcggaggggacggcactaagttatcccaaaacacacggaatagaaaatacgctgtcctggctggtaattaataaggcttcttgggcaagtcacctgttttctctgagacttcacttctgctcccacaaagcaggactagtgtgcccgctgcctaacccacctcccaagaaggtaaatggtgactaaatgctgtgtcggtgctctgaaaccgggacaaagccatgcctagttgtcctactaggtgtccgtgattctttaccacctgtcctctgtccatcatgcacaggcctaccgcagaaatccttccggcgatttgagagctctggggtctgtagttcttctaatgagaacaccattataacctttttttttttttgagacgaagtctgactctgtcgcccaggctggagtgcagtggcacgatcttggctcactgcaacctccacctcccaggttcaagtgattctcctgcctcagcctcatgagtagctgcgacttcaggctcccgacaccacaccagcctcgcttttgcattattagtagagacggggtttcaccatgttggccaggcaggtctggaactcctgacttcaggcaatccgtccgcatcggcctcccaaagtgctggtattacaggtgtgcgcgaccgcccccattataacttttaaattgaccttcatttttaccattttcaggcctcctcattttttgtggagatctaaatcgccatctggtgtcatacccctcctgtctgaagaacttcctttaatatttcttctagcacagttcagttggtaatggaaaagttatacagacaaccaatttcaatgccagtcaggctgtatggtttatcaacaaatactaaattgcatttttatagttttccttccatgtccccctataaccacctccagtaaattcagccacaaatatttattaagcatagaagtatagaattctagagttgggaggtcaggagttcgagaccagcctgaccaacatggtgaaaccccgtctctacttaaaatacaaaatattagctgggtgcagaggcgggcgcctgtaatcccagctaccaggaaggctgaggcaagagaatcacctgaacccaggagacagagcttgcagtgagccgaggtcatgccactgcaatccagcctgggtgacagagtgagactccgtctcaaaaaaaaaaaaaaagaattctaggggtacagtggctcacgcctgtaatcccagcactttgggagcctgaggcaggcagatcacttaaggtcaggagtttgagaccagcctggccaaaatggtgaaagcctgtctctactaaaaatataaaaattagctgggcgtagtggtgtgtgcctgtaaccccagctacttggaaggctgaggcacaagaatcgcttgaacccgggggttggagcttgcagtgagccaagatggcaccactgcactcctgcctgggcaacagagcaagactctgtctttaaaaaacaaaaacaaacaaaaagaaaagtgtagcattctagactgactgtttttgtttttcagtactttaaggatgttactccattgacttctggcttgcgtagtttctga

SEQ ID NO: 3917 - DNA, 4001 bp, Homo sapiens
gcctcagcctcctcagtagctgggactgcaggcatgtgccaccatgcctggctaatttttttttttttttgagatggagtctcgctgttgcccaggctggagtgcaggggtgcaatcttggctcactgcaacctctgcctccgggttcaagcaattcttctgccttagcctccgagtagctgggactacaggcgcgtgccaccacgcccggctaatttctgtatttttagtagagacggggtttcaccatattggccaggctggtgtatttcctttcagtagagacgggtttctccatgttggtcaggctgttcttgaactctccacctcaggagatctgtcctccttggcctcccaaagtgctgggattacaggagtgagccacagcgcccggccaaatgttggttctttctaacaaacctcttccatcatatgaataagtgtgtaagataacaaaacactgtctttcacatggtatgtgcttgctaaatgtctgagacttgctggacattacttaattttaaaaatagaaaactggagctgggtgtggcggctcacgtctgtaatcccagcactttgggaggccaaagcgggtggatcatgaggtcaagagatcgagaccatcctggccaacatggtgaaaccccatctctactaaaaacacaaaaattagctgggcgtggtggtgcgcgcctgtagtcccagctactctgcaggctgaggcaggagaatcgcttgaatccgggaggcggaggttgcagtgagccgagatcaccccactgcactccagcctggcgacagagcgagactctgtcttaaaaaaaaaaaagaaaagaaagttggaataactgctaggatgataaaatgtcttcatccctgacctttctcacctccaaatgtccttcacaatttgtttttaagtgtcatgtcaccaccattaacctgctatttggagactactgtacctcagacttccaagtcaacagcaaagatctaaaggtcgggaagatttacggagaccaagaactgaaagtgttccttttgttcctatggtccattccatcaacttgatgaatatcctgtgaagttaccttttttttttttttttctgacgtagaaacagcaggtctaagcaaaaggtgcatgagcaagagcaagtaacatccctattattatgacgcagatttttttttaagttgaaattcaatttttgggctgctactaaaaaggacatgtgcgaatatctattatttacgcttcaaactaaagtcagccgtttttctttttcaagatatgtggcatctggctcaaaatcaattgcaagaaaagcccaactctatttgacccagaaagagctctttccaataccctctcctcccacttacatcacagatggcgactgaagcttaaggtttaatgcccgaccctaaagccactcatcctaaaagacagggctccagatggatgctgtatggcagaggataaggcgctatgagaagctgccaagcctcagatgtgcagctgggctgaataccgacgccagcgcctagcgcccattactttgcacccacacttaggaaacaacccacgcctcaccgcgggacccggacccagccctccagcacccagcctccggctccgacgtccgcgcgtgacctccgggtaccggaggaccttgggacgaggaggtccctccgctttccggggaagttgtcaagggcaagttcgggttctgcgcggacagcttactcactggagtggttcggcatcctctgtcgtccgcccgcgcttcctcaggaagcccctaatgcagcggcagcctgaaagcagcagccgaagctgctgccgctgctcccactgccagcaaccgcccgggcgtggcagggacaggcgggcgacttcacaacatcatcactcggcgacctcggttctgcggcgacaccgggtcaatggcagcccccacacaattggggaagccaaaggagagccactctcccagcggcctccacggccccagcgcaagacctgctgggaattgtagtttcctgcccgccccgcctcaagctcgaaggccccgccttctcgctgcccagccccggggagggaggcggggccgcgaccccggcgcgggtggggcgaatgcgttcccagcgggtagcctgggactggtgcagagttccaagcccacggccccggtcgcggcctcgccgccctcccgcgccccgcgccgggagcgggcctagagcgctcgcctcgcccctccgcgagcagggctctggcgcccgcccctgtccgcaccgctggcagcctgaagagagtcgctggccgtggtcgccgctagggtaaagacgggaggcaggcccgggaagggaaggtgtcggggccggtgggggacgtgtgagggagtgagccttggtccgcgcacgcccgggaagccagaggccagaacgcgctagcccacctccagcccgagcaccggcggctggcgggagccgtggcaagaatgcggcccgaggtggcgagcagccactgcgccagtgcagctcgggctcagcggggcccgggccgcgggttcgcagcccgcccagtggtgcctgccgggttggccgtgccggccgtgccaggtgcgcggggcccaggccgcccgggcgccctctccccgcacccctcacctttggccgcgctctcgggcttggggagttgccatatcgaagacaccctcagaccccagctctatctgccgccttctgcaagttcgctgcaaagtcccccatagcaggactaggaaggaaccttttacaaaattaaatactcgagtgtcgttttgtcttcggtttttcaattcaacgctgtgtttttccctgctgggtctttgtcaagtaccttttccccaaaacttgatacggatgtgtaacacggcgcctgcttagcacggtgcctggcacccagtaggcgctcagtaaagatttgttgaacgcatgagtcactaagcttggaaaattctcctgaactgtgcgtcgctatgatctttgttaagattttatgggttcccaagatcactttgaaaattacagtaattttaaagctcaacaaagagttacatcgggtcatttttgcattccctgtaacagtggcctctgttgaatgcctaaattaactcaaaacccgtgttctagaagatgcgccctttggtttctacagaaagtgttaatctttcagatcaaagtcttcacatgaaccattctattatggaacaaactgaaattacttataaagctttatcgtaattagcgttttggatacaagtgtaagggactgcactgatgtacttgtgaatacgaaatataagtctcttaaatatgacttttttttaagaaagggtttatattcatatctcgtgaaagagcatgccggagaaaattataataacagcaaatcccccacccccacccctttgctgggtgcagctgctgccttgacctcaaaatgtcttgtaaaattatctcttaatagtctggtgtatctaaggcaaaaatctctgagattaaaccaccccatagggacaacccttttattactaacaattcttaccagattgtgtctgtttcttctgagcttttctgaaaaagagaaaaaaatagacaacgtaatggagtttcacattattaagacaaaatcagtaacaacttgctgacattgagtgaaaaaagcaggatacaaaatcatgataaccagaaaatttggttaatcatgacatccataacccttctgcttgtgggaaggtcagctacaagtggccagggtcttgtctgccctgattaccagcgggtgtccacagtgcctgacccatggtaaccactcattaaacacttgtgtaatgattacttggctgttaacagattaacagtgtattgactatgatgtgtagtttcttcatttacttggatatctccttagaatagatcactccggggaattttactgggtcaaaaagtatgaat

SEQ ID NO: 3918 - DNA, 4001 bp, Homo sapiens
tacgggtagtctttatagttcataattaaaaatggaaaaacacaagtatctgttcttgatttgtacgtgatagaaatctttactccctcctatcattggctttatttttattaaactataaataggattttaagcttacataagcttacagaagctttacatcacagtgcagcaaagaaatctgactttctccttgtccagttgagggctttgcacaagaatgtgattaattaattgtttaaaatttttttaaatattaaatttaagtaattctgtatttgagaaataaaaagttcctaacaacatttaaaacttggtttctcaggttcatttcctggacacagacactctgtaaacatatcttttaccaaattgcagtcatgtaaaatttccttccataagggcacgagggtgtgtagtggaaatctaggtggcacgtattaacagaagtctccatgtaatgaacactcactacagatcaagcattttaccttattatttaatactcatcctaaacttttgaagcattattattacctccatcatacagcagagaaggccaagtgatttgcctaacatcacactgacagtacctgatggtgacaggctacccacacagcgctttctgccaatactcttttctttgtgctggtcacctctcagctcctcttgcaaggttgccaggcaggggtgggcagaaagagctctgaaggcagtgtctcaataactgtgttgagtcttagcttcccgaccaagtgaagtaacctctgaaaatcttgatcttttagatggtacatcagaataaagaggattaaatagtggcacccctgcataggcatcttttaaagtgtgaagagctgcacagacacaagcatagtaattatcattttaatgataaagcagagtggcaacacccagtttagtaactgtgaagaagatcccatcagatatcacaaaatgtaagaactgaatgagtaacactgtgtaatatttcatttgcttttcccctgtccctctcccaccccaatcccaagacgggactggctcattatccgccactatcttctgaatttgcgaacagtgactgaatccaaagacaccatatcttcaagtagccattaaaaagtacaaaccgtaggtccaagaaaatttttccttggggctacactgtttcgtagtgaagagtgaaaaaatgacacgttaaaacacatctttgaccctaacgctttctgttgaataaacgctttttcggtcttcacagtaaatatactctacaattagtatgtgtagcaacagcggacgtttacacagtgactcaaatgcttttacactgcattgcagcctcacaatgctgagtttggcagggcaggtcattagtaacctctttccgcgggagggtgaattaagtctaagggaagttaaggggcttgctgggggcctggctggcaccaagcctggaactgggggtctcggggacgcctgggcgcgcgccagcgggtagtttcccacacgcttcgcagcagcttccccttcccgcaaactccgcgggctgcagagacgcttccagccctctgcagacgtggagagcaagggccgcggcgacgtggagcctggcacaaggcccgcggagcacacacgcccttgggtggcaggcgaccccgcgcccggaccccacgcccactctagcatcggtcccagagaaggtccctccgggctgaggccaaagccagtgtgctccctccccgaggtggcgctacacggtcccatcccctctggactgccgaggccctgatcctcacctgccacccgcccactggagctgggctaaggggtcacctgcggccgtgaccaaggtccgtgaggaaggtgacagaagccgggaatcggagaggaactggcacccccggggagctctgtacgcctgcgcgtgccgggccgcggcgcgcctagttctgctcaggcccgatgcaggaacccgaggccctgcccccaggccggaaatggggttcgtttccggttcgtctgctgtgggcggggcctggagccctaggtgtgaacgcgcacaggcaaccaggagccggtagttgaggggagcggaccctgtacttggaaatgggaacggagactccactccacctagcctgattctgtcactcagaggcaataggcaagcctgtggcagatggggcgggtgaaagggagtcgcttaggctatttttattgaccagcatatcctagaaatcagtgtttctatggatttgtctttgtgtttatctgtattttgtaagtttcttaccatgcacctgcagtacttgtataataaaattaatgataaagatatcagtgatagatgggtgggtttaatcccgaagtatgaaggccctcttagctccgcaagttaatatcggcaaacagagtggttgaataggatgattctcatgtctgggccattgcttacttgatttctttctttcttgtttttgcttacttgatttctttcttttcttttctttttttttgaccgactctggctctgtcgcccaggctggagtgcagtggcgcgatctcggttcactgcaacctccgcctcccgggttcaagcgattctcctgcctcagcctcccgagtagctgggattacaggcgcgtgccaccacgctgggctaagtttcgtatttttagtagagacggggtttcactgtgttggccaggcaggtctcgaactgaccttgtgatccaccctcctcagcctcccaaaatgctggggttacaagcgtgagccaccgcgcccggcctgctcatttgatttctcatgtaatctctaaaatttcatacactcaacagatactcatccagccttaactcaataccacgcgccttgcccaactgagcaaaacgagacccaaccatttccgtcacggagatcaataaagggtagaggggaaagctaatcacagaaatggaggaaaggtgcgtggtcctggaagccccggtggaaccaggctagcggcgtggttcagctatgatgtattttggagtccttgcgatgccatttctgctggcccaaggccagggcaggcactttgagcaggatgcgaaagaggggcagtctctccaccacaagtctttagtctttggagacctctaggaaccccagggccttcccttccgactcccattcggaggcatatgcagtccaggaccaccagtggtgcggtgccggctttcataaccccatccttggtagtgctttctttgccacacagtgctgggcacctgcagaaatgcattaggcatggccctgacttagggcaccttgggccgaacctaagggagtcagctcaggtgcccatcctggctacccaatggaccaatgagcgctgcgactgtgttactcaactttgcagcgtctcatcggtaaaatggaagtgtaacagcttattcatagggttggatgaagctccttatggcagtgcgtgtgaagcgctggcccagcgctcaggaacgccaagtacatacaaatgacaatacatggcggcgcccaactacggcgtgagcgattcttagatgcgatggctagctaaggctaatcgccgcttgctcccgacggcctgcgctcggagccggcctccacccacagccggcctccgcggcccgctccgcccaccaacttatttcctctgggccgggttctcacctccaggagtccccgcgctgagagcccggatgtgagcccaagtggccatgcgcacaagccagcgccgctgccattggtcgctggtgaggaacagattgatgacacatccgaaaaataggaagtggccactacggaagctgttctgggccagaaagacttccagtttggagtcgtttgctgcggggagggaatgaatgggcgctgggaacacgcccgcgaggtggggacgcgccggccgtagcgaggtccttagcgtgtgagtggccggggtcgggtcgcttccccgcagcatggaggacgatgca

SEQ ID NO: 3919 - DNA, 4001 bp, Homo sapiens
gcgcagagagctcctggagccttcggtgcacgcgtgtccgtggcccccgcgcagtcccgccgccctctcctccccgggctctccccgaaacgcccccactgccgcccgccccattgtctgaaacggtctaaaaacttcgcaacttaccgaacctgagcaaataaataaataaacccatttaataaggccacggtaattatcccgcgaatctccctctcccagactcgagggcctggcgccctcccgctccctcgggccccttccaaagacaaaaagcaacccactggccctttaccttgcacaccagctcctctccgctgtgcagatgcacggcacgaaaaacgtggtctccctccagaggttccaacaataagtatttcccgatacaagaaacgcaatgcgacaagttcggagtctcgggcgggctcggggagccgaggttcgggctgaaactctggctgggctccgcggaccttatagacgacaactcttcgaaatcctgggttttgttccgcgatctcccatatctcgctattgtgatgggggtagacctgtgtatgttcatgagtgtgaggatcgcacacgacaaacaaaaaaaaacccgctggagagatgagtcgctggcgagtgcggctgcaggcgcctcggtgccactgattttaaaagggagcgagaggggaggggacagaagaggggctgcgtggagaaagagttagaagcccccaaatgggcgccgccggatacctcgtctgctccgagcccggctcccgggggtcctcggtcggcaggcaactcgggtctttttgttaccccaaagcagtcggcgatgtgcagaatcgccgcacttttagttactctgtgtgtgtgtccccggcgtggatctggatgagtacccgggctgctaaggtgcggagctgcagcgccagggctcccgacgcgacccccaggccggcttccgaatcgcagacggggcggaggagcccgcggtagtttgtgcagtcttcggggagctcacggcggcgactcagtcccaacgcgttagaagccaaacaaaaagagaaaggaaacaagcacgggtctaccggctggcgacgcacggcagccagaatccgcgctgcaccccctttttttggtggaaagggtggggggcgtgtaaggggggggtgcgggagagggcagttacctacgttttaactgtagatggcgtctgaggcttttccaagatcgcgagctctccaaaaattaaacaaacaaacaaaaaaaagaaaaattgcaagggagcatttaacttggtgcggtcagcgctgccaacaaaagattgcaaaagctgggcacagagttgcggcgcgggctgggcgcaggtaccgcgacaaagccctgggctcggcccgccgcgcggaggtcagcacaggctcatgctgtcgccgctcgctcgcgccccaggtcttcctccgaatgcagccagacgtgcaggagagaacgaggacagatcggcggtctccgatttcgccggcacgagcttgcgggggtcctgcgggcgctgcaaggggagctgcgtccctggcccttccaacgcgcggcgttcctttgcccctttcccgctggagaactggatctcgtcctggaataatttgcaatcaccccgtctccccctaccccgagaccaaattgcccggtggggtttgttttggagaaaattgacggcttgtctcctccttctttgatttcttgcttgccccccccagagaaaagaggggaccgtgtatttaaaaattaaaggggacggccgacggtgcccgaggccaatccccgcgctcagcacgcccgcatcccccggcgaggcggtattaatagttacttacgtggccggggatctcggagcgagcggggccgtgagtgcgcgtgtgcgcgcgcgcgcctcgctcgcgctcggtctccccattcaatgtcaccgacacatttccacggagcctccgccccccccccgccgcccccgcgactggctcagcccagagccggccccgccccgcccccgcccgggcccccctcattgcgccgggcgcccatcaatcagccccgccgctgccagtcctcgggcggctccccgcgccgctgccattgcagctccgtgccgggggcgccagcaccggcctcgcagctccctcgcccggccggggaggtaaacaaagtgaaatatccttccgcggcccggggccccgggcgcagcaccctgggtgtcggctgcgagccggctgcgagcccagctgcgggcggctgggccggggttaccagcagcgactcccgagccgttccccacacgctgctcccgcagcgcccgctccagctcttcgtagctcgttcatgttcctggcgcttttccccagaaagccaggcacgctctgagcattgggcccccaggctcagatgtggccctgaatgaggagctctgttttggaagaatgcgctttcatcggtattgctgcctggagtttcgagaattcgtttcatggtatctctccgacatcctcctctccatttaaaaggaaatccattgcttccttttagttggtgtcaccgcttgcccccgatccccacatcctgggcttgtatttctagtgttttcagcagaagaggaactgaaggcatcttttgattcaggtcaaatttaatcactaattcttcccttcccagtgcattgcctggagggccttggaggccaagctagacaaaactttgcacccacacctccagggagcgctgttgggtcctatccagggtgctgggcgtcctgagtcctcttctgttagccaggtgaaggctgcagtttcacgccccactccaccccccatttcgccaccccccccgaattattcgtaacttccttgggagattccagtccgcgggcttggacaggaacaccggaagcaaggggcttgaactcaggcagaggcttcaaacgccagccttgatctaagatatcctggtgaatgagaagcgatctagtagaggacaaacttaaaaaaaaaaatcccaaggaactgagaaaggggagttgggacgactcctggagccctctgagcttttgcatgcgtgtagtatattttccactggaggaggggactaaattattgtccactgtaggacactttcagtaaaagaagggagctatttataattatgtccacttgggacaacagtcactctaatgatcaggagtcctgggaatgtggccagagatggagaggacattgactataaagcttccacccagcagcacagagttaaaaggaaggttaagaagtggacccgtgccttccagcacctctcaccatcctactccccacaaacctgcctaggattcagtcccagatcccagcagaatagatctatttccctaggcgatcaccaggaccactgaccgagcagggtcccctaatccagtcttaccccaggaagacacttggcctgtgttaggaacagtctcgaagcaacccctgctgttgagtcagaaagagaggtgcctagcctcctctatgcagtggccaagagagctttgtaataattaggggttgggacacctgtgtgctagccctggctgggtctctgatttcaaatggaaattgggtgaagaccttgttttttctccctagatccctgtttcttcatctgtaagatgagaagcataatacccgccctgctcacctcatgtggttgctttagaattatattttcaattccaggaaatctatgaaggcttactataagccgggctctgtgctgagtgttagggatccaatatgagtaagatctggtctctgccacccaagagcgcagggtctagcccggcagaaagactgggaaacaaataatgtcattgtgtaacaatgtggcaattagaatatcaaggcctcaagggagcatggaggagggaatgacttttcctgaacgtcagggagttttcccagaaaatgtgatttttattaccttgaactaatccagag

SEQ ID NO: 3920 - DNA, 4001 bp, Homo sapiens
taaggaaagaaaaccacaggaatttaatcttctaccctggagagacaaagatccaagcaaagtttgaatcagatcgtgatcgaataatatcctttctttctaaagaagtataggctttaatctgcaatgacagaaataggaaaaacagaaaactaaggcacaaagagacatcaacctctataaaaagtgactgttctccaatcaacacatgaccagctttccaaactctactttcttgcatggaagaatgtcggattttttgaggtgttagtatccaccaaattgcttgggcttcaagggtttcatcaacctgtaaactcaaggtttgagtcttgaatggtctgaaaatcagtaacactcttaattgccagtgattggtttaaagaaggaaagctaactaagctcttctactctcattattttatttaactataacaaccatccataatgacttttccagaaggacattgcttgaaaatgttagagcagaactcatactttgacccaaatcagaaaaagctagcctttactctccaaggaaaaacagtcaaatcaaggtaaggcacctctccaaggtaaagctaagaatcattgtttttctaggctactatgttaatttaatcaacaaaaactttctggcatgtttactgttcctggacagtctgttaatttggggatatactagttaatattacaacatccttaaaagacaattaattcaatttacaaaaagataatgataattgaagcattatcattactctttcacacagtcaggaaaagagtaagtatcatgcaataacaggcactagaggccgggcacggtggctcacgcctgtaatccgagcactttgggaggccgaggtggctgaggcaggcagatcacgatgtcacgagctcaagaccatcctggctaacatggtgaatccctaactctactaaaaaatacaaaaaattagccgggagtggtggaggacgcctgtagtcccagctactctggaggcggaggctggagaatggcgtgaacccggcaggcggagcttgcagtgagccgagatagtgccacagcactccagtctgggtaacagagcaagactctgtctcccctctaaaaaaaaaaaacaaaaactaggcactagacagtaagtcagcgttttaaatgtatgttttgctaaaatacaaataaaaataaaaaccaagccagggaaggtgactcaagcctgtaatcccagcattttgggaggccgtcaggcaggttttttgagctcaggaactctagactggtgacacggcaaagtgtctagatcatcctgtctctaaaaatacttatataaatttaaaaaaaaaaggccgggcgcggtggctcaggcctgtaatcccaacactttcagaggcggaggtgaacggatcacaagatcaagagatggagaccatcctggccaacatagtgaaatcccgtctctactaaaaaaaaatacaaaaattagctgggcgtggtggcaggcggctatatttccagctactctggaggccgaggctgaagaatcgtttgaacctggaaggcggaggttgcagtgagccaagagcgccgctgcactccagcctggcaatagagcgtgattccatctcaaaataaataaataaacaaataaataaatagctgaacatggtggcccatgtttaatccataaacctatggattatgtttaaaataattttaaaaaagaaatggagccgtttttaaaactcagaaaatgagatcatttcatctaaaaataatctaagtttgcagataaattaaagtccccaaattttgttttggtttgtagctcctaatagtagctcctactctggaaattgtgtacttacctcagaaatatatctatgttctcaccaaagcttgccgtcgaatcagatgaattcagctcagggatgagagtctcacagtgcagtgctggtagctttcggaagtccccaaagccagttgcaaagctactctgtgggctctggagaagaatgagcttggctcctgaagtgtcggtttataaatctctgaagaccacacccctttcttccaattgattgcatttcacagggcgtaggtgggtgttaacatagatgattaagtttcttcagaacagaagttttatctttatttatttattttttttgaaaggagtctggctctgtcgctggctagtttttttcttgcatttttagtagagagggggtttgatataattgatataataggaattgcaaatagagaagcccacacaagctaaccaaattaattctagtttattggataaatggtatgatatgtattctagttcaaatttgaaggttggtataaaccttttcagacactggagatgagacatttcaccaagattgggtgtaaggaagaggaaagaaatagaatagtatataaaatagtatatagagtaaaaatacagtaaaaggaaaaatcaatctgcataatatggtgtatggctaaatgttttttaatatttaggcgaatcagacatggaaaaatcctaaaagggagattaatagaggagatagttgactcagtaagaactgtgaagaagcatctcaggaagagaaactagaagtctttatataggttttgatttaaagagggagagagaataggaacattgaaaaagaaggacagaaagaaataacaaatattcaagactccttgcaagagtgaggcagaaagtttatagattgcttgattacacccagcatataattatttgaagttttctgttgagagtgagagtatgtaatccttttaaccaaatgtctccgcagaactatgtgtcattaagtaaggtgataatcaatattcaatatcaaaagatgcatctatttctcgatgaggagaagcaacttcatctgcaggcactggacagcgaagccaaatagcttttccaacaactacaagacagtcaagtgagaatgacccaacatttagaaaggatgaaagacatgtacagagagctgtgggagacgtgcctcatgcctgacgtggagctgctccaggtgaggagggagggtccatccccaaagaaaggaagactttgctggacaatgctgccaggacatgcgaatgtcacctgcatatgtcactgctctcagcttagtgacacatgctgtctgactcccacattacatttgtccagtttttcagaaaaaagctacaaaagaagcttattagaggggaatattccctgtggtcagtgtttgataaaggggaatataaaattacatccactcaaagattccaaaaaagcttgcttgttcatggttaggataagaattacatttcacctatgttatttctatttggaaaagttcctccctcttagaagcaggagatacatatatgatatatatggtacatatatgtatgtatacacacatatacatatatatataccccccacacacacacatatctatggtgttgaataaataatatcacctaagccaggggtgtgcaatcttttggcttccctgggcctcattagaaatagaattgtcttgggccacacatgaaatacactaagattaactatagctgatgagctttaataaaatgacaaacaaaaatctcttcatgtttcaagaaaggttaggaatttgtgttgggccacattcaaagccgtccttggccgcacggaccgtgggttgggcaagcttgttgtaaggtatgaacttcaaatactacaaaatttttttaggcatattattggttctttcctggagcagctccatatctagtttatggcacatttttatcagctccttatagatttttcttaggtgttttttttttctgaaccattttgtctttttgcttttcttaagttgctgtaaaatctttctgtcatcatggttgtaagtttctctaagtgttgttttacttctcatggggaactgaatgcagcttcctctactcagctgtagtcatctctgcccatagctac

SEQ ID NO: 3921 - DNA, 4001 bp, Homo sapiens
accacaggaatttaatcttctaccctggagagacaaagatccaagcaaagtttgaatcagatcgtgatcgaataatatcctttctttctaaagaagtataggttttaatttgcaatgacagaaataggaaaaatagaaaactaaggcacaaagagacatcaatctctataaaaagtgactgttctccaatcaacacatgaccagctttccaaactctactttcttgcatggaagaatgtcggattttttgaggtgttagtatccaccaaattgcttgggcttcaagggtttcatcaacctgtaaactcaaagtttgagtcttgaacggtctgaaaatcagtaacagtcttcattgccagtgattggtttagagaaggaaagctaactaagctcttctactctcattattttatttaactataacaaccatccataatgacttttccagaaggacattgcttgaaaatgttagagcagaactcatactttgacccaaatcagaaaaagccagcctttactctccaaggaaaaacagtcaaatcaaggtaagttacctctccaaggtaaagctaagaatcattgtttttctaggctgctatgttaatttaatcaacaaaaactttctggcatgtttcctgttcctggacagtctgttaatttggggatatactggttaatattacaacatctttaaaagacagacaattaattcaatttacaaaaagataatgataattgaagcattatcattactctttcacacagtcaggaaaagagtaagtatcatgcaataacaggcactagaggccgggcacggtggctgacgcctgtaatccgagcactttgggaggccgaggtggctgaggctggcagatcacgatgtcacgagatcaagaccatcctggctaacatggtgaatccctaactctactaaaaaatacaaaaaattagccgggagtggtggaggacgcctgtagtcccagctactctggaggcggggcctggagaatggcgtgaacccgggaggcggagcttgcagtgagccgagatagtgccacagcactccagtctgggtaacagagcaagactctgtctcccccccaaaacaaaaacaaaaacaaaaacgaggcactagacagttaagtcagcgttttaaatgtatgttttgctaaaatacaaataaaaattaaaaccaagccagggaaggtgactcaagcctgtaatcccagcattttgggaggccaagtcaggcaggtattttgagctcaggaactctagactggtgacacggtaaaatgtctagatcatcctgtctctaaaaatacttatataaatttaaaaaaaaaaaaaaaaaaaaggccgggcgcggtggctcaggcctgtaatcccaacactttcagaggccgaggtgaacggatcacaagatcaagagatggagaccatcctggccaacataatgaaaccccgtctctactaaaaaaaatacaaaatttagatgggcgtggtggcaggcggctatatttccagctactctggaggcggaggctgaagaatcgtttgaacctggaaggcggaggttgcagtgagccaagagcgccgccgcactccagcctggcaatagagcgtgattccatctcaaaataaataaataaacaaataaataaatagctgaacatggtggcccatgtttaatccataaacctatggattatgtttaaaataattttaaaaaagaaatggagcctttttaaaactcggaaaatgagatcattccatctaaaaataatctaagtttgcagataaattaaagtccccaaattttgttttggtttgtaacctaatagtagatccttctctggaaattgtgtacttacctcagaaatatatctatgttctcaccaaagcttgctgtcgaatcagatggattcagctcagggatgagagtctcacagtgcagtgctggtagctttcggaagtccccaaagccagttgcaaagctactctgtgggctctggagaagaatgagcttggctcctgaagtgtcggtttataaatctctgaagaccacacccctttcttccaattgattgcatttcacagggcgtaggtgggtgttaacatagatgattaagtttcttcagaacagaagttttatctttatttatttattttttttgaaaggagtctggctctgtcgctggctagtttttttcttgcatttttagtagagagggggtttgatataattgatataataggaattgcaaatagagaagcccacacaagctaaccaaattaattctagtttattggataaatggcgtgatatgtattctagttcaaatttgaaggttggtataaaccttttcagacactggagatgagacatttcaccaagattgggtgtgaggaagaggaaagaaatagaatagtatataaaatagtatatagagtaaaaatatagtaaaaggaaaaatcaatctgcataatatagtgtatggctaaatgtgttttaacatttaggtgaatcagacatggaaaaatcctaaaagggagattaatagagtagataattgactcagtaagaactgtgaataagcatctcaggaagagaaactagaagtctttatataggttttgatttaaagagggagagagaataggaacattgaaaaagatggacagaaagaaataacaaatattcaagactccttgcaagagtgaggcagaaagtttatagattgcttgattacacccagcatataattatttgaagttttctgttgagagtgagagtatgtaatccttttaaccaaatgtctccgcagaactatgtgtcattaagtaaggtgataatcaatattcaatatcaaaagatgcgtctatttctcgatgaggagaagcaacttcatctgcaggcactggacagagaagcaaaagggcttttccaacaactacaagacagtcaagtgagaatgacccaacatttagaaaggatgaaagacatgtacagagagctgtgggagacgtgccacatgcctgacgtggagctgctccaggtgaggagggagggtccatccccaaagaaaggaagactttgctggacaatgctgccaggacatgcaaatgtcacctgcatatgtcactgctctcagcttagtgacacatgctgtctgactcccacattacatttgtccagtttttcagaaaaaagctacaaaagaagcttattagaggggaatattccctgtggtcagtgtttgataaaggggaatataaaattacatccactcaaagattccaaaaaagcttgcttgatcatggttaggataagaattacatttcacctatgttattactatttggaaaagttcctccctcttagaaggaggagacacatatatgatatatatattatatatatatatgtggtacatatatatgtatacacacatatgcatatatatatacccccacacacacacatatctatggtgttgaataaataatatcacctaagccagtggtgtgcaatcttttggcttccctgggcctcattagaaaaagcgttgtcttgggccacacatgaaatacactaagattaactatagctgatgagctttgataaaatgacaaacaaaaatctcatcatgtttcaagaaaggttaggaatttgtgttgggccacattcaaagccgtccttggccgtatgtggcccacggaccgtgggttgggcaagcttgttctaaggtatgaacttcaaatactacaaaaattttttaggcatgttattggttctttcctggagcagctccacatctagtttatggcacatttttatcagctccttatagattcttcttagattattttttttttctgaaccattttgtctttttgcttttcttaagttgctgtaaaatctttctgtcatcatctgtaagtttctctaaatgttgttttacttctcatggggaactgaatgcagcttcctctactca

SEQ ID NO: 3922 - DNA, 4001 bp, Homo sapiens
agtgctggtcttcagtgaaggtggcacagagcagacacacaaggtgtgggtcacagggtacattgtgggatggcctgacctagccagcccattcctttccaaaacaagctgccccaaggaacttaaaaagggaagtattttcttggttaggttaaaaatcacttgtgtttaacacatttcctcatcatttctgacacagatgaagaatacttgtttgggatgttccatgtcactgacacacatactaaaccagccagctctggtctattcggggtttgtttttgtttttgtttttttgagatggagtcttgctctgtcgcccaggtcagagtgcagtggcatgatctcggctcaaggcaacctccacctcctgggttcaagtgattctcctgcctcagcctcctgagtagctgggactacaggcgcctgcaaccacgcccggctaatttttgtatttttggtagagatggggttttaccatattggccaagctggtcttgaactcctgacctcgtgatctgctggcctcagcttcccaaagtgttgggattacaggcgtgagccactgcacctggccatattcagggcttttacttaacggcaaggccgtgtgtgtgtgtgtgtgtgtgtgtgtgtgtgtgtgtgcgcgcgtgtgtgtgtgtgtgcctttgcccctcactctccctgatctctgttccattttatagcctactagaacctccccagtagcacaggaaaaaaaaaaaaagcccacttataatccattctggtatatgctgcttttatttctaaaccagtggctatactagtatctgtgaatttgattagctctgcttggccccatgaccacagataaaacaaaactggctggacttctgagaagtaaatttctttgccttctccctgcttgtcaagtgacctcagtagcttttaaccagtaggcctctttactgaacaatctggagggtaacaggtatgaactcaagttggggagagttcccagtctcctgcccactatgtctaactctgtcacccacaatggatgccttcaactttccttaaatacaaatagttttactgccattatggagctttctcacagggtcgggttttgtttgtttgttttttaacgtttcattatctcattaatcttttctccgtattttccacaatgctctcgaagtctgaaactccaaactggaatgcagagtctggcacaggctcttataaagcccggtgtgggataccctccctcccagtttccacagggtctactttccttggtagatcccagcactccagctgccgtctatgcacaggctgtacctgccagcctgcagggcagctgctgactcatgcttgctctgggatttgcttggaccccagcccttctgctctccagccacaacagccaccacccacctcagagagcactctatccatcaccttctggggtctcagctctgacctgatcagtcccccacaggtctgcattgctttacctggccctgccccgtccctggcacccacctggaagacgtcgttggcacatttgcggcacaggttgtgttggcagggcaggatcaccactggtttggagaacatctccaggcagatggggcagatgagctgcttctccaggttgtccatgctgtgtgcatcccctagcagcggcttgaaacccactgtgaagttcatcccctcggtggtcgtgcctggcctgggccctgctcctggccttcactcactgcctgtagacccttcctcgcttagatggcctctggattcccttctgtggctcactcttgaaatagctctgctttctctcctgtccctttaacaacttgtctcgtcccagatagcagtcttcggacagtctctactttctgctctgcaccctcgccaggctcacgtagttttagctatccctctctctctgtaaaattctccttttgtttcccaaatgactctctcttgttcactctgtgggtagcactgtttgtcccttactccccagagagcagattaattttactgtgggggttgggagacaaggggcatctgcatgacattccaattcccaatttagctcatgtaaggcgagccacagctgtcatggagtgagtgaccctgactcactcaggaatgggtgactcccttgagcaagggcaggggtgagtgccactgcttacagtgaaaggtgggtcagcaaaggtgctgccctctcactctgaaggctcctctcagcccgggacccctgttctggcttgggcccttcttccaggacagtgacacagaatctaaatctgcctgtgtgagaggcacccatacatagctcagggtgggaggaaagatcttgccagacttagagtcagtagcggttgcctcctccacaggctcagccagtgaccctggtcctcctcctcaagactgtgtgattcagaacagcagctccagggactacatcaagcctcttgtccaacacctctggctcatttttgttcttccctggccttttcttatatcaccctaggaaaagaagctcaagaggctagaaatgactgttgtgccaaggcctggacctacctatgagcatgcccccgaggaaatgtgggattctggtccgtgaacacatccctggagccactccaaggactcaaatttgttaggaaattgggagaaggtgagctgggcagaaaggacctgaatgccagggacctattttgggcacccagggaatcaatctccagggaaattttagagcactgacaaagtcataatcacaaggctccgggaagcctctgacccagctccacagttgtccaggactcctactctccaagccaggcttgccccacttgtgagcactggtcttctttttctcctacaagtcttctccacttgatcttaggcaaaaggccaagaagcaatttctttaggccttttttctctaccccagacacaatttgtcttttttgggcataatatatgccttgggattggatgaaagctcttttatttactgacattctttagcctttctcctagtccagggagagaagtttgaggaattagtaggctgtgaccctgagtgggtgggaaatacacggtgtgaggaggatacgaaacagcagcacaaagaggcaagagtgggaaaagagtccagaaagtacaatcttttccagatcacatatttcatgcccctatttttaagaacaaattatatgtcaattggcctgcataatatgtgaaaaggatggaggcaagctggcactgatgtttgaacttcagttaacctacaggaccaaggctaatgcatgctgtgctggtagctgaagtccaaggataatctaaagatggaatgactacccctaagcctcaaatgcactcgcagttttcctgagttgactcatagtggcatggaatgaggctggcaatgccaatggccgtgggcaccagaagatgaaaccaactccatacaggcgttattggcttaggaatgaggctgatgctaggggttcttggtacacagagttgcaacaagggagaattaatgggtgcagcagctccagggacaggatccaccctgctcagttatcaggctcttggtggtgatatcgcaaggggctcagggatcctaccagctggcattggttccaataacaaggcagacacaggaaaaagactcttcaggaaaaatctgccaccactgcctgagacctcataaggggagggaggggagggctgctttctgacggagtaaaattgggactgcaactgaaaggaagagtagctgggcaaccccatacagagttgtggtaccaagggtagaggtgatgtccttactgggatcaacgtcatcagtgcttctgaagagattcttgagatccttataagaagaggggtcaaatcagggtcaatgtcaggacagggctacttgctcctctcttcaatgtgtccaggggactgggcagcagaaggcaccctcactgggtcagcac

SEQ ID NO: 3923 - DNA, 4001 bp, Homo sapiens
ataaaatcctctacaatttattgtctctaaacctctgctaattccattcctcaacccccccggggtgtaaatgcgacacacacaggcctcatatacaggcctcttgcctttttttctaacacaactaggacctttgttctgagcgtcgttttaccccactcaatagctctttcaactttctaccccgtattttttgttttgtttttaaagaggagactctgagactcaacttgctaggtctttaaaaaatgaaatgccaaaaatacctaatgagactctcgagaggaacataaagttaaacacatcactaaagggcctacaaaacggagtaaagcccggagatcgggtgatctggcagcccaggcaagatcgaggaccgcgactaggaaaggagacagcaggagagcagttagacgtccacttagaacggattcactgcgctattaaccgtacccgcctccccccgcaccggcccaacctttacacacaaacacattccctcccccaattaactaaagaagcaattaaactatgcccaccaccagactcgatgcttaggctaaacctcccccaaagtaaaacagcattatcaaaaaaacacaacatttgtcttaagggtttggaagctgccccttccgttatctcctcaccacgtaaggtaaccaattccctcctgtcccccaccaggagttcaaagtgtgatttccccccgatttacatgtgtttttatgtttttccgcatttttccgtctaggaaatgaaggatttcttattctgaggaagggagagacgccgaggaagacaggatttgaggttttactaccttcgttattcgaactcccctctaacttgttcctgtactagaaacccactcactatggagaaggaaggagaggggctgaactgatggacaaacgttgtaaataataggttttatgtaatccacatataaataaattaatcgcctgactcgctctgaatgctaatacgattggggtgacaattggcccacctccctcccccaagtcctagttaaacccacctaccaccaatttccattctgatctatttaaaaggatactctattcctctcagtcaagtttctcggcttctttaggcctccctgcatgcccccctcgtcatcatcctccctcagcctcaacttcccacggcttaaaaaactgccccgcgcagaccccgtctccgggctcgccctccctcaaccgtccctcgccgtccccctgggcaggaaaccccttactgcggtctaaagtctctctggcctctcccttctctgaccctcgcttcccacaactgttgtcactggagctgcttcctagtttccatttccgggccgtccacggccccggagcctcccctttcccgatttccgggcccctcgtcccatttccggggaacccttgccgtcttcacaccccccacctgcacttccggccccccactttctctcttcccagacaccctccaagctccaaagcccacttccggccccccttggtccccgccgagctccccaacacccgcaagccttaccccggttctgtgaagggccctcctcattgcgggaagccggaggagggacccagcgacccctacctcccgccaggccccggtccctccggccgcggccgccctcgagcgtctctcccgtccacccccggcccggtccttccgcggccccgccgccgccggcgccgggagcaggccaagcgggggccgaatcgcggcgatgacacaaccgggcttcctgggactttctgttccagctcctccccccgcccccccaacccctcagctggccccctcccccaaggcttgcccccgccgcccagagctgcgccccaattacctagttaggccccaaagtctccggtccggactcggtggcgcggcagtaacttccactagctccccccaccccccccagcggcgcggcggcggcggctccgggttccttcaattatcagctgagccgcagcaccgcgcccggcgtgcgcctccgcccgtgccgcctccctccccgcctgctctgacaccctcggggaactactttgtcctcgggctccggttacgggctcgtccgcgggaccggcaccgctgcctactggcggcccatcacatcgcccctccctcccacgcctcccggctcgactctctcagcagcctccgatctccgcccgatcccttcgagggaccaggaaggggactgtggagatctacttggtatccctccgccggggtcaccccctcccctccgtggtagcaggaactaattccccctcgggtcacccgggacctggagctggaaatttcacggatcagggttccctaagacccttggaagaggggacgatcgccccaagttagaaatccttctgccagctcataagcgtggttcaatttaaactagggttttggccccttgaccccaaccaagccccgccccttcctggttgtcttagcgacggcggtggcgtcccaagatggcgtcgtggctgccggagactctctttgaaactgtaggacaaggcccgccgcctagcaaagactattaccagttactggtcacccggtctcaggcaagtgcgagccgcggtttaccctctctcctaactccctacctggcccggttggggcccgggacgcaggctgtgctaggccaagagcaaccgtagcccgccggaagcgcccagtcccggctccgcgccgggagattttcctcgtcacctcggcctcctcggtccgacggcccgcgtgtccctgctctccccgagcccggctagtccctggcaagccttctctgcctccccgcggtgccgcgtgctcctttcccgccaccccggcttcttacccgtagagtttcctccgcgcgaagaggaaaacgggcgtctccggcttgcgtgcggcctcacctcagcgtgagaaggagggaaagaacgactcagccaagtgtcccaaggaggagccggctagggaggggaaaaggagattgcctcttttccaggataggaattaatcatggagaattttataaatctctttgtggcctttacgcgtgccacggccacatcaaaacttagttatttctagtagcaactgacgattgggagctcttaccttttggagtcccttctatcccattgaaagtgtgcgggtggtggtataaaaatgtttcagctgctctgcgcttcagccccacccataatgacatctgctccacaacaataagaccgaggattatattatctccaaagtaaccatcggcctatttttatgcctactttggttattgaaggtgggcttttggatgatttactgtgtccatgaaattctcaacttgagcggggcctccattgggaagacgtttctaatcctggctgagtttacgcctgtcactgagttattcatgcaccctgccctttcaatagatactattcctataaaatgaaatttagaagtttgtatatatttgttttggtgtgcatattgatcattccctcagtttttccaggagcccttaaacaaaataggtaatgagttaatttttttatatttttgaaagcatcttttaaaatataaatgttaatatatattttttaatttaagatttagaaatattacaaatgtaaaatcagcctgtccaaaaaaaattttttttaaaacagtactgctccttgcggagcagggctaattcataggcagtgggcccagggtcagactcaaatttttaattaaactgttcttagggggttttgcacatttagtgatgtatgaaatactgaaaggtatccttttctgtactttttttttggtgttgttttttttttttttttttttttttgagacggagtctcgctctgtcgccaggctggagtgcagtggcgcgatctcggctcactgcgacctcgtttcaccatgttggccaggatggtctcgatctcttgatctcgtgatccgcctgcctcggcctcccaaagtgc

SEQ ID NO: 3924 - DNA, 4001 bp, Homo sapiens
cacatagctatttaatggcagaggcagaaatcacacacaaaggctgggcgcggtggctaacacctataatccgagcactctgaggccaaggccaatggatcacttgaggtcaggagtttgagatcagcctgaccaacatggtgaaacaccatctctactaaaaatacagaaattagccaggtgtgatgatgcgtgcctgaaatcccagctacttgggaggctgaggcaggagaatcgcttgaacccgggaggtggaggttgcagtgagccaagatcatgccgctgcactccagcctgggcgacagcaactgttttaaaaaaaaaaaaaaagaaaacaaaacaaaaagaaatcacacgcaaagctgccctagtccaaagtccctatgcttaaccactaaatagtctgacatcaccatgatgtgcttttattctttacatttgacattaaaaaaaaattttttttttttgagacggagtctcgctctgtctgtcgcccaggctggagtgcagtggcgtgatctcgctcactgcaagctccgcctcccgggttcacgccattctcctgcctcagcctcccgagtagctgggactacaggcgcccaccaccatgcccagctaaatttttttgtatttttggtagagacggggtttcaccatgttagccaggatggtctcgatctcctgacctcgtgatccgcccaccttggcctcccaaagtgctgggattacaggtgtgagccaccgcgcccggcctaaaaaatttttaaatactttactagataatatgcattcatggttatggccgcaaactgctgtatgagataatcctattagaattcagcagctgagcgcagtgactcacacctataatcccagcactttgggaggccgaggcgggtgaatcgcttgaggtcaggagtttgagaccagcttggccaccgtggcaaaatcttgtctctgtgtctcaaaaaacattagctgggtgcggtggtgcacacctgtaatcccagctacttgggggactgaggtggaaggatttttaagcctcagaagcagaggttgcagtgagctgaaatagtgccactgcactccagcctgggtaacagagcgatgagactctcaaaaacaaaaaaatttaacaattatccatcacaagctaaacgtaatcaatgttagtcccaaaattagagaactaggccttgcaagaagagttctgagtattttttacatgaagtgacagtccttggctaaatctgacttggagtattacattcaagaaaacacatctgatctgattcttcacactacttcatatgtaactactccaactaaaaagaaacaccagaccactaaaaacataagacaactcgttcactaacaaagtcagagtgcctcactaccctgttaatatctatgctgtcaaaaggcatgatgaggacaaaagctcaaaagctgagtattaaaactcaagttcttaaaacaaatgaggcctcttttccataaagtatcattaagtcaacacataaggaaaaagaccacgaatggtgaaagatgtgttgtaacatacatttaacgaagtgaagagaaagggcaaacaaaacatgacacaccacatgctaaatgaggtgtctgatcatgtcagtggctatgaactacttctttgagtctagcatatctggggaaaaatttaggaactgctttggattccagtttgcttttaagtacctggctcacaaatcaggaaaaattacccatatgcaatgaaccattcaagttttggacctcgcaaggaggcttaaaaatattttttcttttattcccaattccttttcaaattaccatgaaatacataccttcctcctattgagtcgtcttgtggttgggccccggcagtgttcctctgtgaacgtcgcagtgacccccctggattgttattaggccggttggacattggcacctctctcttgaagggacataccctttctagacactaccattcactaaaagaaaaaaaaataaacaaaatttatcagatgtacaaaatacaatatggaaaagaaatgaggggaacttacggtgacatggaaattttctgcaaactatctgattttacagccttcacccatgctgcaatgtctcactgaactgtgaagtctgactgatcaacgtgttaacaaaatgtcagggtacgtgtaacatattcaagccatgtggtcccggactcagtatataaaattaacttagatttcacggaatagccagaaaattctcaattcaaagaaaacagagcacaggtagaaatatgtcttcgtttccccattctagtattgtgcctaaacaggcactacacctcaagtcaaaagatgatggctcaagtcttgtgacggaataggtgttaaagaagtttgcctttgtacaaatcacagcctctaagcctaggattccttagacacagaattaacaatgtatgtcatgtcttcttcacagtattgttgtgaataacaaatgaaaaaataaatacaaacaaaatcgtggccgggtggagtggctcacacctgtaatcccagtattttgggaggctgaggtgggtggatcatctgaggtcaggagttcaacaccagcctggtcaatatgatgaaaccccgtctctactgaaaatacaaaaattagccaggtgtggtggcgcacatttgtaaacccagcaacttgggaggctgaggcaggagaatcgctcgaacccgggaggcaggggttgcagtgagcctagatcatgccactggattccagcctgggcaacagagtgagactccacctcaaaactaaacaaaacaaacaaaattgtaaaactatagtatcttactgaaaagatgaggagaaaacagctcaaatagagtaaattgagcaatggtctcagatattctggattttcaacagcagctctgctggccgtgaccttggacaaaataatctctacctttaatttactctcctttaaaaccagtacgttacctacctcaacagagttgtcagcaacaagaaattgcgaaagtatttttagctcaaatttagctcaaaacagttcttaatcaaactgaactttctataagaaatgattgtgcagataaaatatcgaaactcagaaaattagtttaactggtaaaacaagccaacataacaatcatagaattacgacatgcacaaataaaatcttgcactattttttgtaagcctgcagtcaaattccaagtggagttctttcattacttctatttactgggaaagagagtgaacatatgacattatagaaactggtgccaaagagaatgcaaattaatcataattaaatctattactgtactggattttgttttagagattccttatactgtaataagaaagtagttttcttttgggttatattgttgatacaattcagtagaaaaagactgtttctatcacatatgtccaaattaatataataaactttaattagaaagttcaaattactaatttaaggatagtcagttttagaaagaaaaaaataaatacaattaaacattaaaagagaggcaggcagagagagaagaaaaggttaaacttatgcgtactgatatggaaagatatgaaactctcatttgtgtgtatgtataccaagaagacttgtatataagtttctgtatactgtccacgttaaaaattcatggaaagatgcatgaaacatacttcgttaataatgactgcctttgagaaaggactgggggatccagagtttagaatggaagaaatcatttttgttgtcattgagactgattgtcaatttataaggaattaaacaggctgctctagcataacagctttaagtacagagctctcaagtcaaactgtctctgcccaagttcaattctggactctaacactaacaagttgtacataatcttgcatatatgagtgtgtgcatacatacttccccctgtgcttcaatctatcaaatgaggataaag

SEQ ID NO: 3925 - DNA, 4001 bp, Homo sapiens
agctcttccttatttaggtttcctatcaagtgtacctccttggagaccatctctcctcacctgacataaagtatgctcataccccaggtcacccaaaacaatgtcattgttaatatatttgtcttcatgacacttaacactactggaaatgaccttattctttcatttacttgtttgttctttgtcaccccttctagaatgtaaggtctatgttgagggtgaggactgcagttcaacactatacttccctaaacagtgccttgagtatggaaggcagtcaatttgctgaataaataacgaatgaatcctgatctggagaaaggaggaggagttgtgttacacaggaacattctactcaaggactgtgactaaggattgaaataatctgctagcaatagatgattagcataagcttcaaactagggctgggcgcggtggctcccgcctgtaatcccagcactgggaggccgaggtgggcggatcacttgaggccacgagttgaagaccagcctgggcaataaggcgaaaccccgtctctacaaaaattagcccggggtggtggtgcatgcctgtagtcccaggtactcaggaggctgtggtgggagaatcgcttgaacccgggaggcagaggttgcagggagccaagatcgcaacactgcactccagcctggatgacagagtgagaacttgtcttaaaaaaaagactgaaactaggctttaggcagttaactttttaataaagaatagtcattttatgtttggtgttgaatgttagctattgtaatataaaactctatttcttccctaaaaggggaaaagcaccgtaatgtacctattgttaatatactcttgtaacatgattattgaatattaaaatatcatcatagtagtactaaaaaattgttccctaagagttcaacattctcttgagtcctgaagttataaacttaagagtaatggggaacaaaattagtacttattatgtacgtagtgagttcacatcaccctaacagaaagttgagctattatccacattttacaaataagggactcgagactcctaagttaaaattaaaatctagccgttccctaatgctaattttcatcatgatatgtaaaagttataaccattggtttattttaaaagcctgagtacaataaaaaatccaaacgttctgagatgtctttgaatacattaatcaggactgagtactgcatctgtctttgcccctcctgaaaccaatacacaccttatctccatcgcattacctttgggaatgttatggcagtccctcttttcatcaatactacatagtcttccaaggctggcctcctcagcatgtactgcttaccgaaggaactcctcagtatctggccggggaacttccccacgatcttgccgaacgggactgccccccagttactatttaagagtccgaagttgttcaacctaaataatttcttaaattttgtttctccctccccagtctcagctaaaatcagttccccagcctgaaagggtctctctctggaagttgaacaagaaggggagacgtgacgctcttcgacctcggtagcggactgggcctgcgagagcatcgaaggatcctcggatccctggtgtgtgggaccgcaccggccctggtctccgctcgagtcctcgagctctcgaggggatgactcttcccgcagcgtcggcagtctgaggttttccagtgacgaaagacatccagtcccaatgtccgagatgctcagagggagagatgggcaagactctgctcctggggctttcctttgtgccgcctcgtgctctctttctccatctcgcaggtctctaggcgaggacctgcaacacagtgaccgagctccctcgaagggctcctgccccaggccgtgcaggaatgaattggttccgagcccctgccgcaggcacagcaagacaggaccgcggcaccatgccattagcatagtgtttcgcgaaggcgccgtcgcagacgagtgacgcaagcctagcgcgaccccttctttcccagtcgcgcgcatggcgcagcagcccgatggctctgcagctgcgtggggctctacagctccgcgactgcgcctgcgtcggggagggggcggtgcgctaggtcaagctagggcgcgggagcagcggagtcctggttgagtgaccatccaaggaatatgtcctcgcgcgcggccgccgttttccttttcggaatgtgggtaaagaatttaccgctaacagacgacctccaggttcgctcttggacagcaagattgagagacaaaacttaacaaagcgctgtgcaaactgaaatcccaggcttagctcgcttgtgtcttgaacacggaagtcacctagtcacccacaagatgtatgagtacagctaacccccagatgcatttgacagacggcgtgggacgcgccacttgctgattggctctcctttcccagttgaccgcgacatcccccagccccaactcccttttgatggggctgtgaccacctgccggtcccctcacccacccctcacgcccggagagtccgaggttgattcgagtactcactatgtgcttatgtaacacatgttttcattattaaaatataactagtttaccctcccaaaacgaaatagaagtgtcttaaaatggaaacaggtatctttggaggccagagttatttagcgttaaatatcactagcctcccagcattttgggaagccgaccgaggcaagcggctcatttgaggtcaggagttcgggaccagcctggcaaatgtggtgaaaccccgtctctactaaaaatacaaaaattagctgggcgtggaggcacgcacctgtaatcccagctactcgggaggctgaggcaggagaagcgcttgaacccgggaggcagacgttgcagtgagctgagatctcggcactgcactccagcctgggcgactgagcaaaactcctctcgggggaaaaaaattagtcgggcgcgatggtgcacgcctgtaataccagctacaagggaggctgaggcatgagaatagcttgaacccaggaggcggaggttgcagcgggccaagatcgagctaccactgcactccagcctgcgcgacacagcaaaactctgtctcaaaaaaaaaagaaaaatcgctagcctctttgctggatattagttgactgggcaaaagtttattgagagtctggcaatacgaggcacgttagacactcatttaagtttccaacaattctgtgttagaaacaaatccattttatgagtaaaagaactggcccagggagattaaataatttggggaaaccaggagtggtggctcacacctgtaaccccaacactttgggagacccaggccagaggattgcttgagcccaggatttcaagacccacgtgcaacataataataataagttggtcaagatgcatagctgacaagtggcattgcagagtttcctatttagtcagtctggttcagcagcccatgctctttgtactgtaacaccgtttggaaagactggtcaacagcacagttgaacttaaagtccaagtatattcaaagggctgtgaagtcaatgtgaattctgtttaaatttgatgaaataaatcttgttattctttttttttttttttatttgagacagagtcttgctcttgttgcccaggctggagtgcaatgacacgatcttggctcactgcaacctctgcctcctgggttcaagcgattctcctgcctcagcctcccgagtagctggggttacaggcacctgccaccatgccaggctaatttttgtatttttagtagagactcggtttcaccatgttggccaggctggtctcgaactcctgacctcatgatccacccgcctcggcctcccaaagtgctgggattacaggcatgagccaccgcgcctggccgttattactttctaagacataaattaatactttctaatcagtactttctaggacatcagccaccataaactccatca

SEQ ID NO: 3926 - DNA, 4001 bp, Homo sapiens
tagattgtcatcttaacaacattagtacactgccaaaatttaaacaaagggttacaaacctcatgttgtttgctgaggggagaggttggccgtggtactatttttattatcaatggtcatgaataattttaaatagtctagaagtcactcatgaacaacagaatattcatgcatcctttgaactcaatacaaaaaaaatattagtgtgctcttattatcctaataaaaaaaggcttctggcatgttttataagttgctttttagctcacctatcaccatggtcaaatcagtcctaaagtgtcattttcaatcaggattgtctagttctaagtctctttctgattaaaaaaaaaatggggtggggggagaaacaagatgttttcctttgcacactgaatgagagaggaaaaacttgttcatactctaaggaaaatgctccaaagggccccacaccaaaccccagccatctccactctttgagccatcaattattcatgaaaatggtgagtataacacttgcagaagcttcaaatataaatgacaccatccagagagatctcctccactcttattttggcaggggcatggcaggggtgcatacaagggttacaatacctgaaaaggtcactaggcatctgtgcctccatgtctcagtcaccaccaggagagagctgagatttattttgttgtaggcattatcctgtttttctaattgcctctatcagccaaatttttttcagtttgaatagatggatgaaaactaggaaaatagcaaaagccagtggaggctcccgaagtcattgaccccaaggtatcctgctccaaaaagtagaagtgagaaacaggaggtagatacaggcagcaggtgatgctccaagatgctatttgctgagaccctcttagaataagaggaaaagcaggggtccctatgcagcctggacccctactgtcttcacaggtgccaagaatgatatcagttcttaggcaaaacaaagatagtgataattattattataaattgtaatgtaattataatttataatgtaattatattatttctataacaattatattatttgtaatataattataaatatcttattaataaataataataaacagcttttttccaaattataaataaatatgcatccaaagtcacaaccttggaagtaagtcctttgcactgtcaagattttgacaagctaaaacttctctcatgatcagtatctttgtattagcacatatagaatagtcttaaggaataaccatttccttatgttcagctcaagaatcctaacactgaaaaagtcagcactggcaataatggattgaaaattaaatggaaataaaacctttaattattcatccagcccttcagtgtttctctcttgcttataaataatacaaatgatgagcctgtttcaacaggctggaagaacggaaggaaacacagtatgtaaaaacaagctaaatatacccgctcctttcattatcaaagaatatttactatttgaatgcattatttcttgatgttaatttacatttcaccatagtcttgattcaagaaaaaacttgttttattatgttcccaataggattgcttcagatagtcagttgcagagttcagatgccagtgaatttttcattaaagctcatttagggagtttctaactccttcaatcagaaacagaaaactgtaattatatttaaagtcattcaaaaattcagcaaataattctacatttctaaataaatctaagtgaggattagatatatctgtgaacccgcatttgcttatgcccacaacactttgaggaatttaaatttttgtcttcctttagtttcaaatcttcatagaaaaactaaatgatgcccctcccagagacacaaactcgtactattctacaagttacagcaatggcaacatttaaggagaagcaaaaagcaaaagttgatgacataccctaagtgacggtttttgtcaagcaggattttctttcacccaaggatcctgctggtctctccccacaggaggaggaaagcttttataactggaatcttcttagccccgccttcttctctgaggttcttttaagcagaggaacaaaaaacttaagccgctgaaattgcaagaagactcctaaagcctccaagcatagcagcaatttagcagtggaatacgagtagggaatggataattagtgaacatggtattttaaatgctaataaagaaatgataccaaattcctgctcttagcttgacaataacaccatagtatgaaatcatactaatacttaatttctgcaattaatggcacattttaaaaaccacaaataaaatgggaaatgctcattatagaaagtgatgacaagattaattaataaattaaaagctcttaattaagattaggaaaaaaattattaaatagaggaaatttaaccaacattgcttttttgcagattttgtgaactttcctcataccaactaaatgcagtattgggccaggcaagagggcatcatggaggtgagcaaatccagcttcattaatttacagctatttcctgtcccctttaaactacactttggaagagctctcctcgaagaaataagtaacaattgtcagtgggcaactttcggtcattttacttaaatcacgtgccacaaacataacagttatattataactaatgttcctctgttttggccattatttctattttattttcatatgaagcatatgtcatagagaaatacaaataggatagtgtatttcaggaactgattgcacaagacatacacttgcaaaaaggttagagatgaaagagaaggagtgtgaaggggttttttgcaaaggcagagagatttgagcaaggtctgaaaggaaggatagggttgtagtgataactcctgcagaaagcatgttcaattcaagaagaaaacccccttaacaaagagagacaaaagactccagacagaggtctcaaactcaaatattccaaggctcagacaggtcataaagatgaagggagcagccaagtgttaggtagtaagtagggaagggtgggggctgtggaaaactggaaatgatagatttgaatgaggacccgtgagagaagagatccagctagaaatagagagagagaatcagagaaatctcagaattactctaaatatgggtcctaggactaaaaactcccatacccagcatggtccccaagcacatatatagcactgcacaggggagcaagtccatctgaggagcggagcagcaaaatgagctttttagctgttagaaatattgagccagctgggtgcagtggctcatgcctgtaatcccagcactttgggaggctgaggcgggccgattgcttgatgtcaggggttcaagaccagcctgggcaacatggcaaaaccctgtctctactaaaaatacaaaaattagccaggtgtggtggcacgtgcctgtaatcccagctactcaggaggctgagacatgagaatcccttgaacctgggaggtggaggttgcagtgagccgagatcatgccactgcactccaacctgggtgacagagtgagattctgtctcaagaaaagagagagagagagagagagagagagagagagagagagagaaatattgagccaattaattaagctcatgtggacttctctcattcattttctggttattaagcaagtcttttgttctatctcaattttcattgtaaatccaaacttgttttatccacagcagataatgtatgatctggcctgaacaagttgtattcaaatatctttagcaagtccttaaaatcatacgtgaatggatccttgctgtaagtaagcatcctcatgaaatgggagcgagagagatggagatagagagatataagtagaggtgtacatatataatgtaaatatttaccatttcatccaagacgcaacaaaatgcccaattcatctagcaagatagatagaaattgttttggttttttt

SEQ ID NO: 3927 - DNA, 4001 bp, Homo sapiens
ggggatagagtccaggtgaagtctgacaggatgtagtcatggtttggaagcggaaagtgaggaagaagaaagggcttctggcaaaaaaggctttagcctttatgcatgcaggatccctggggggaaagagtgagttcaggagcatggcttttagacttaccaggtttacaaggcagttgtatctatggaactaaaaaatataaattttgaagttgtatacagaaatggtacttagagccatagaatgaatgaaattgcttaaggaaaatgtagtgtgagataaagatctgaggaactccaacatttagggctgactagatcagggtagctggcaaaggggactgcggagttggcagtgaggctggaggaaaacctggcaaaagggactgaggagttgacagggtaatgtcaaagttgtccacaggaatctccaggttgaggtagtcaaatgaacacttagatgaatactgaaaagtccagtggatctagcaatatgaatgtcacccgtgaccttagcaaaagcacttttgctggaataatggggaaaagccattttggagtacgttgaaacaatgaatgggaagtgagaaagtagatactggatgtatagcagtttttccaagaagcttggctcagaagggtagcagacaggatgacaagtggaaagagaaatgaggtcactggaggattgttaaagagtacagcatgtttgagtgtcacttgaaaggttccagtggagaagctgaagaagtaggtaaaggtaagaataaccaagggacagaagtcctggagcagggaggagggaatgggattctttaaaacctcttcatcaagaaactaggaaaaaaaaccaaagttgtaccatctcagatttcagagaaagggaatttagaaggaagtaatataagcaaagagcaacaatattctgtgactgtttttaataataactaggaaaattcctagtgcagttaactctgaacaaaattcattcccacctgcataatacaagatagacttactcagagtgaccttggtaaaaggtgtgataataaagaaaggaggtgtcattatgtcttcattgtagctttatatgaagccctggtcatttaccgtatcagcatcagcaaactgaacactgaatgattcttactccaagaggcaagtcttagtggtttctattttaactgaaggagagattaatttctgtgcaaggttgaaaaaggtgaccacaaattctttgggcttctttcatcaagaggtgaagtccattaccccacgccttaactctgggctggctttgttgttgttttggccaatagaatatggctgaggcgctgcttccaagattaggcctgaattgagatgccctagcagccaggcagcacctgccagagcatgaataaggctatcttggaccgcccagcgtagccaacctgtgctgaatgaagccacatgaatatgcccaggagaaactagcagaagaatcacccaccttgcccacgttagagatataaaccactatttgaggcagtttgttatgcagcaaaacttagccgaaactattaccttgctaccttgactgctggtgtaatttcccatctcatggagtcacagagttttcttgccaactgcagtgagttggcaaatgggaatgatcagtagcctcagtgtgttttctgatccactccatcctgtattatcatctgcgaataccgtttttcctttaaatgcaatgtgtctttcaaagctgacttgaatttctcacctttcgagttacctgccatttggactcacttatttggaggagatatgtaaagacccagcgtaatacctgtatgctcaataaaaagtatttgctggtactccttcctgcccgtcgtgtgacctgactgctctgggcttctgggggctccccctaaactcgctccacgaaatgacccctccaacctggcacgcccgctctcctaccttcgcccagggctggccgttatctctgtgctgtcacgcggggaagtcccatctgaactggggccttatgaccttcggtacttttattcgaacgtagcctgcgtccctgcctggaacctggttcccgccctgaaggacccttacttagcactcctgcgggctgccgggaccccacggctccgcaggcggagagactaggcgcgatccctgcgcgcccctccttctcttgcgcttcagggggccggccctcagggggcggggcagcatcgcgcgcaaggcctgccggttgctcggggtcgtatgacgcacttttccagctcgagccctcacgaggccgtgggtacgaccggaagccgcaggtgggtgaagcggaaacgcttcaaaccgggatgttgcgggccgtagcgcgtgggcggccgtggggtcttgggcgcgcgcggtgtttctggcggtgggtcaggacttgcgggtcgcctccgccggtgttgaagcctcttgtgtgcacactttctcctcagcacttgggacgacctaatttcactgttaggaacggttgatcccgaacacaggagggagggtaaatatcgtaaaacatgttggacgctagctgtgtgcacgccccctgggagccaaaagggcgaagtaaaacatgcacacgaccgtaatgagattctgagtaagttgtatatcattagagaggggacaaaataatagggtcttggcgaggtcttatgaagaagctgcgcctgcctagaaagatagatgggattgtgctgttttcgctttcagttcagtgatggggagccgtgtttggcagtgcagaggtagcgaagtgtcccaagaacatggaaggtaaggaagtcttccgaggaaaaacttcaaaaaattagtcattaaagggtgagagtagaaagattcaaagtgattttgaaggaacaaaatttaaccagaacttcaaaggcttgacactatcccaacgactgtgaaatatcctgaaataccgtgcattactcagtcggggtctgatccgctactggagcatagaataaaaaaagaggggcacacctgtgccagatgaatccacgccttctctaggggagagagggtatcccggcttaagagcaggggctctcctgagttaaggaagtgtcttccccagagcccattccgtcagacgttcatatcatgtaactcagtccttttctgattatgtattcaccaagcaaacttaagagttggcttgtcaccagacctacagtgaataattgcacaggctcatctgaatatctgatagatggtctatagttctctttgtaaatcaataagctggcagtcagggatttttggacatccctttgttttcactttttctcactctgtgtgattttttcttatctttcggggttcaactgaaatgtcacatcctcactgaggtctgtttattggtttacgtgttcaggtgcttagaacagcttcttgcatcttttctcacatgatgcctttttaatgaggcttagcctaacaaccctatttaaaattgcaatgtaagttttctcacatacacagttacaatcctccctttatcagctctacatttttttttaatagactgaatctcgctctgttgcccagcccatctcggcccactgaaacctccacctcccgggttcaagcgattctcctgcctcagcctcccgagtagctgagattacaggcgcctgccaccacgcccaggtaatttttgtatttttggtagagacggggtttcaccatgttggccaggctggtctcaaactcctgacctcaggtgatctgtccaccttggcctcccaaagtgctgggattacaggtgtgaaccacctcgcccggccatctactttttttaatagccctccttatcacctttattcatttgactcactgatgattcccaagtgctaagaacaatgtctgtcatgtaattgatgaaaactttgttgaattaatacctttgttgtgttttattcacactgtatatacaatacctggatgaa

SEQ ID NO: 3928 - DNA, 4001 bp, Homo sapiens
aacagaaggatgtggaaaaccatacaagatttatgaataattctgagagagtattttatataataaaaataagtggataaatattttgggaaacaatcagcaaactaaatactgcgagcaacaataaagattaatcttaaaaaaaatgttgagtaaagaagcaagatgtaaatgaatacttagtacaattccattcgaagttcaaaaacaagccaaactgtaatgtgcatgttcacatacaatgatgtgaaacattaaggaaaatcaaggaagtggctatcttagaagtcaggagagtggctatctctggggagggaaagaaatatgtaatctgaaaaggtgataaatagtaatacctctaactgcctctgtgtatggaggacttcaaaaccaaatcgtcctaaacaaactagtctaagcaactcaaaaagaagacagaaaagatctcccagagaatctctacacctgattatattctgggctacaggcagtgatttttcttcagaaggtaaacagtacgcgagatattgtggaagctgccattaaataatgccaaagtttaggatttaaaattaatatttaattaatgtaccgtcctagttatttcccactaattaagactgaagagtttggctcattaatcaattaaaatacaaacaagaatctgtcttatcctggaagcagattcgaatgcgacatcctacttctataactaacctgtttttttctacttacaaacctattgttattctacttatgtccttacacgtaaacaaagtatacttgaaatgctgaacaccagtacagaaaattttaaacaaggaaatctcctaggatataaggtcctggaatggaagaaggaaaacgttgggacactataatctatgcaaactttcccgaagctgcgaaaaaaaaaaagtgaaaaaaaaccatatttctgtgagtttttaggtatcaagtccatgatcacctagttatccaatttaagtctcaaatagtttttcaacaaaagccagctttccctgcctttactgtgtataatttttactaaaattatctgagattttcatgcaaatgcctatgtaatctcagcctttcaccaccccaagtctagaaagaggctcagaaatgagcgatcgggagtcaggctgaactcccaaatctgtgacttccaaattcctcggctccaccagagcttccagagcgtttctaaactgaacagtctccccaacaaccaagcggagagctgcgggaggacgcgaagcagtgaccataggaactgggctcaaacctaacctcccaagaaacaggggcaactcgtgctgccgagcttccggccggcagctgtgcccgccgctgcccctcacagccgctcccgctgctagcgcccaactccgcccgccacggccccgcacccgccactcctgcccgcttgcagccgccttctcagagaccttccagtccagtagcagcactctccccaccccgcgcacctccgcagcttctacctggagctccgggtccctccccgggctcctcggcccgccgtcctgcccagagctcatccccgcgactgtcagctctcggcctcagcgggggatacaagaaccgcccactctccatcctccgcccctttctcctcccttcccacccccaaatcgtcctggccccgccccggcggatcggaggaaggacggagcccgcgggaaggaggagggggcggttagcgccagccagtgccgccgtggccccgccctcacgctctgtaccggagtggggctcgtcttccacctccccggcgccccagctttgcttccgtcccgctcgcccccaggcccggtgcgcacgcgtacctggctcgaccttccttctcgcggggtctacaagccgtgcgcgcgctcctacgcacggagcgacgcgtacgtctacctgcctgccttacagggcacctaggagggaccccttcctggcccatccgcgccgcgcaggcgcacgcccacgcagcgcctagacgcccgagccgagcgtcccgtctcctagtaaccagccgctagcccccttttccacgactcatttcttaatctctgcctgaggctgccgcacctggatggaacgcgcatgcgcaaggctgtctctcgcagccccgccttccctcagcttgaaacacctgctgcttcgcggcggtggctttgtgccacttttcccagggcttgggcatcattctggacccatgttcggtgaaccggttactctcagagctgctttcgggcgcagctcctgctgcagccagggcccgttttaagagaggcttccaggtccagccctcccgctgcagcctgcagggagcgagccggcctgtcccggtgagcgtgggcagcctggagtcaggggagcctggggaccacggccttggtcagctctgcacgatcagggctgaatcaggaagtggcagatctagcaacaaagtccagattcctgaccgatattccttctccacatgccagtccttttccaaatcccctcaccttaaagtgacaaatgagctttttagtgaaaaagaatgagcgctgcattcttctaccaattttttggagcccagaatgggggggaaaaaagtcttcttaatttttcttaatacctaccatgtcccttcttaaataactcaagagcttctggatgataatggtgactttatctccttttcctgcagatgacatagacactaggtttttacagcaattctctgatgaccttgatatggtagaacgctgtgtatttcaagagtaagctctcgtttgaggagactaacaattcctgttttcgccaggtgagtactcatttttccccccacaagatatcattggcagggataaacaacttttgtgtagaacaaatttagtcataaaaatacatttaatataaatgccatgtttttccaatgtcttttcatcgtgttattacatggtctcatattttgtcgcatttattttcagatatcatatactttgtaagtataattagataccaaaaaaaattaagtgtccctgttattttagattaagaggttagaggacacaaggagcacatatcctcggaaatgtaattttttaaatgcacaaaataacaaactgagaagttatgttagagggaataatgtataatctcatttcctcttcagatactaagattattttgaatacattatctagcattattaaaaacaaataggaaagaatgttctaagtttaaaactatcagctggagttgaagacttcgggggtggggagattattaatataggaagtaggaaagtacttcccttatagaaagaataagaaaagtttaagcacttatgtatgccacctagacggtactgaagattatttggaaagaatataaggaaatgatcattttaaggccaaaagagggtgaaaagattttccttttttttcctatcaagaactgttgactttctcccctaacctgagaaagtaaaaatttccttccctctgtggaaacccaaggggtagtgagtgtcccaccctgccccaactaaaccttttttttttttttttttttttttttgagacagagtctcactctgtcgcccaggctggagtgcagtggcacgatctcggctcactgcaacctccgcctcccgggttcatgccattctcctgcctcagcctcccaagtagctaggactacaggcgcccactactacgcccagctttttttttgtttgttttttgttttttgtatttttagtagagacagggtttcactgtgttagccaggatggtcttgatctcctgacctcatgatccacccgcctcagcctcccaaagtgctgggattacaggtgtgagccactgcgcccagactttttttttttttccttttttttaagacagagtctcactctgttgccctgtacccaggctggagtgcgttggcatgatctcagctcactgcaccctccacctttcaggttgaagcag

SEQ ID NO: 3929 - DNA, 4001 bp, Homo sapiens
agtagaatgccctcgcaatagaaaacatctctgtttaaaccatactgtgtggaagtggaagaaaaatcaaccaaaattatcaaatcacctacttcttcaatttttactcaccataaagcatgatagccatttttcattataaaatgtcttctggatagaaactctccctctaaataagagactgataattggatacaaaacaaagaacttactgtcctgaaacccagcaccctgatggaccccttgcagtagagttaaaatctctcgagctgtttgttctaaactctgtacaacttttctgatttcctagagagaattaaaaataaaaatcagatactcaacagaatcattgtcatacactcacacaaaacacattagatagcttatgtgatctatcataaccaagtttgaatcctgacttttccacttatttcctctgtaagacttcaaaaagtcactaaaaagccttagattcctcagataccctttaaagaataatagccacccattaaacccaagtattcaattgggacattataatggatgacgtgtgtgaacgcaacttgcaaaatgaagagttaaatgcaacacaagagtcgggtatttctaattcttttttctttttttttttttttttgagacggagtctcgctctgtcacccaggctggagtgcagtggcgcgatctcagctcaccgcaacctccgcctcccgggttcacgccattctcctgcttcagcctcccgagtagctgggattacaggtgtgcgcaaccatgcccagttaatgttcttttatatttttagtagagacagggtttccccatgttggccaggctggtctcaaactccttacctcaggtgatctggccgcctcggcctcccaaaatgctggaattacaggcatgaggcgccgctccccgcctctaattcatttttaaaatattcactgagcatacttatgtgcgaggcactgtgtaaataccggggaaccaagcacacaatcccttccctctggcggtttaacatacaatgagggagaagatttttttaaaataatcaatattacacacattaaaaaaagttaatgtgctactagaaaacataacaggaaatagatcgcttagactgtgacgccaatgagataaatacgagacaatcaggaaaagaacgggaaagaagcaaattccaggaaaagcaaacaggcaggaagctatttggggcactagaagaggtaaagtgaacatcatacacaaagacagagagcataaacgagattgaagagaaaccatgtgagccacagtagagtctgattttttatcctgtgtggcataggaaatcacaggagagttttaagcagatcacatgtgcttttaagacaccaacaaaaatacacgaaacgctcattcgctgaagaccaggtgctaatcgagccttcgatataaacaagtgctgaaaagaaggaaaactgacacaaacgaggcaagtgatgctgagaagctgagactcgaacacggggaatcaggacagagcagcaaaattttgggcgggggcggggagtgcctaacctaaagctagaggggaagcaacccaccctcggaggcgtccccaccgcccgagactgagcgacagaggagggccgggcgaagtggcccaactaggcatggaaaggcaaagggaatggggaagggagggggctcgcctctcggatgtcctgctcggcagccaaaaagccctgcagctccacgaagatctcgctcacagacatggcgccggctgcacaacaatcagccagtgtagcaagggcggccaaggaagtggacgccgcaggcaaccagcgcaatcaatcgcaacggccgccgctaccgccgcgtccccccggtcttacgccacgaccgtcgctagggtcctccgaggctcgcggcgcgccggaggacgggctgtccgccgcgctgcctgaggcgccgtccgctgcgttcggaaccgaggcgcgcgtccaaagggcagaggagagggagagtgggcggggcctcagtctgaggccttcagacaggcatcgccagaaacaacctgcgaaggcggccctcggagcacgtgggcctgagggagggcggggacgggcgtgtaggtggtgcgggcaagtggggctggttagcttatatgtgtgtatttatttcatacacaacaacagttggagggaaatatttgacaacgaaagagtatgcacaaaaaacaggtgcagaagaatgtagagagagttcagccttcgtgagagagtagggggccagtgcatttccaaaaaaaaggaaaataaaagtaacgtatgtaggactgtgagtagggaatggattgggagcgaaaattttctgtgtagatcttttaatgtcttctctgtatggctgtattacctatttttaaattaaacggcttttttaagcgtgtgcggtgggatgtttctctttccactcacaccttgtcctaattccccttccatgccctataacggtttcccctttcatgccctataacggtttcccctttgttcttgaagagttatttcatacacacatactgtgtgtgtgttcttgaacagttattccatacacaaatacagtgtgtgtgtgtgttgcactcgccagatgaattggaatgattcttatcaactaaatgataatttattgcttgctttgtttctgacattattctaaactctttacatgaaggatcatatttaattctcattatatgagaataatttcatgtccatgaagaagacagtaagaccactagcacctacatttttaaaaaactatcggccgggcgcagtggctcacacctgtaatcccaacactttgggaggccaaggcgggcagatcacaaagtcaggagttcgagaccagcctgaccaacatggtgaaactccgtctctactaaagatacaaaaactagccgggcgtggtggcgcgcgcctgtaatcccggcaactcgggagactgaggcagaagaatcgcttgaacccgggaggcacaggttgcagttagccgagatcacaccactgcactatagcctgggcaacagactccgtctcaaaaaaaataaaaaaccctttcttatctcgtgtttgttctcccaaaacccattcgtctgtcctaaagaatcctatttgttctcatacaaactttcgtcacctctccgttttacctagagttaggcacacaagccactaactggttttttgtttctttcttttcttgtgtggttttcgttattgttgttttgttctgtttcattttttggtctcattacgttgcccagtcgggtcttgaactcctgggctcaagaaatcctcctgcctcagcctttcaaaatgctgggattacaggtatcaaccactgcgcccagacataaacctctaaccatttagtaggctagctacttattttgctagctccagcatccatgcaaataagccttttttgggagtgtcctataaaaagtttaattagaccctattagtcgatggtgttgttgagttcttatatgcccatgctgattttctgttccgttaatctgtcttttgtcagtttaatttgcaggccctggctgggcatggtggctcacacctgtaatcccaccactttaagaggctaacgaggaggatcacttgagcccaagagttcgagaccagcctgggcaacatagtgagaccgccatctctacaaaaaatgttttgaaaattggctgaacatggtagcgcatgcctgtggtcccagctacttcagaggctgaggtgggaggatcacttgagctcaggatgccacggctgcagtgagccatgattgtgccactgcactcaagcctgggtgacagagtgagaccctgcctcaaataaataattttttggaggcccccataaactgaacaaaatataataaagagaaagcttttccttcccaatactagcttcataaagaactggaaagtgttcccttctggtctatta

SEQ ID NO: 3930 - DNA, 4001 bp, Homo sapiens
caccagtgttctggagatccctgtttattagaaaccagagagtggagctggcaatggtctgggatatgttcactcagcagggagctgcccaagtagcagtacttgggaatagccagtagcaggcagcaataggtgaccagtctcaggaaaagtaatggggtcccataattcacacagaccaacttgccccctgctgttctcccttgacttcattaatgcccagcaattgtccacaggccatgcacctgtactgtcagatgcagagcagggtgagctgaataggttcttagacacagctagaaatccaagtaggaggagccagaccagaggtcctgggaacaaaccgagtccaaacaaaggtaaatacagtgtaacctacagcatcattcgcttcgcttagaaggatgtgacccatcggctgggagcatgtgatgttaatgcagaatagcaagacgaccaggtgaaaggggagcagcacagccaccaaggtctcaatcttcaggttgagagaacggaaagtttaaacagagggtacaggaaagtcagaacaaaaaaagtaaagggcatacctaatgctgttgcccaagctcaggtccagctggtggtggcaggcaaccttctgcaggagtaattccaaaggcaaaggttaaccacactggaacccaaagggcctggggatctccactggctcccttaccaggcgacgtctagctctatgggcgtcttcacccaacaggtagtactgcagtggatttgaccagaggtcctctttaataatctgagcaatcctgtcggactctggaaggctgtggtctgaaaaccaggtgaagaagctgcagatgacatgtcggttcctatgaatgaaggactggggtccatggccccggcgccacatgattagagtggaaaaagacaccacttggccgaaggatctgacctcatacacctttacaatcagcttgtttctgaagtaagggtttctttgaaagaagaacttaaacttgcagcctgtcctagggtgtctgagctccttcacttccaaattggttaagtagcttaacatctcggcatcttggcctctaatcatggcagacagctgtgggtggtggcggaaagcagtgacccagaagcccgggatattgcgaatgatgtcattcctctgctccaggtagtattcatgaatctgcccaaacctgcgctccacctgcaggagcgccctgtcagcctctgcattcacggagtccagttccagctggatggactccagggggttcaggtggagacccacgttcaggggcccgggcccgggcccaggccctgcctccctgtttacctcatctattgctctgttttcttccgccacgtccatttcttcgcctcctggcttctcatccactggggctgagaacatggcacactcctcaggcttcacgtcctcggccttcccctctgcaatcacttcagactccgacctccctgccccacaggtttctagagccttctccccacctaggccgtgcgtctcttcacccggaaagccatttttgaggctgccgtcagttgtcagcgaggcagaggccgcttctaggccctccgcgggtggtggagtcacttcctgccccgctttgatggctccatgactgcgacccgcatcgaccaagatgtggaaagtatggccaccatctgcgggatcctggggcgcgaccccctcctctggaagccggggcggtgggaacacgattggctccaagcggccatcaaacatatctgccattacctctgtcgccttgctcttttctcgggacctctggccctggtgcgggtcttccagagcatagtcgagagtagcggggctgtgaggactctccgggaggctcatgttggtagcggccagggcagcagtgggtagaggccaggccagaggtaggtagcgtcaacgttcctcacacaaaatggcgagtaaacacctcgcccatttgcgccgcccactcttcagtctcgcgacacccacccctcagtctcgcgacactcactcctcagtctcgcgagtctgtggtggtgtctttacgtctttgttattttagccatcgtgctggatgagtaatgatattacatggtggttttaatttgcatttagccaaagtctaatgagctgagaaccttctcatgtgtttgttggccactaggatattctctcttgtgcagtatccgaggcttctccctatttctctactgggctgacgttatttttcatatggatttgtaggaagcctttgtacatgctagatactagtcagtcattcttccagtataggtattacaaatatttctcttccagtataggtattacaaatatttcctcccactctgtggggttacttttcttttggactcgtagtttcgctgtcgccgaggctggagtacaatggcatgatctcagctcactgaagctgccgcctcccaagttcaagcgattctcctgcttcagcctcccaagtagccgggattacaggcgcccaccaccatgcccggtttttttgtttgtttgttttgttttgttttgttttgtatttttagtcaagacatggttttgccatgttggccaggctggtctgaactcctggcctcaggtgatccgcccatcttggcctcccaaagtgctgggattacaggcatgagcaaccgtacctggcctactttttcaccatcttaatggtaccttttgaagaacaaaagtttttcatcttaatatgtgccaatttgtcattttcccctttaccttagtgtttttctgctctgtttaagaaatcttacctctcacctgggcacagtgcctcacacctgtaatcctagcactttgagaggcggagacgggaggatcagttgagcctaggagttggagaccagcctgggcaacacagcaagaccccatctctatttttaaaaagaagaaaaaaagaggaatcttatctcaccaagattgttcaaatttatatatgccatccatctggaattgatttttatgagtggggtcacaatttctttttttccatatgaatatctaattgacccagcactgtttattgaaaagacaattctttccccatgcataggtttttaaatgtttctgtcagaagtgacataaatcattggctacagctagtcagttggccttgtctaactttaataggacagggaggtgtaatcttctcttgagcctggaaggaggaaactggaaatattggcaagtgctgtatcactcatcatgaaaaataatttgagaaatatataaaagaccaatagaattaggccaaaggacatagagaaaaggtaataataaacaggagaaatttatgtaagacaatacagagcattaaccaaagattaataataaaaggagagagaaaataagcaatatttggagagaaaattatagtcacattgatggtttaaataaatataagacaggatgttagacagctttatgccaatacattttcaaacttagatgaaatatatggcttcatagaaatgtataacttatcaacacggactgaaatgcaatagaaaatctaaatagacctagagacaataaacaaatggaatcagtagcttaaaaaaatgtttccacaaaaatagcatgaggttcaaatgattttgaggcgactgctaccaaaccttcaaggaacacataatccatttttatatttattaaacattcaacaaatatttattaaacattcaacaaatgtttattgggtacctactgtgtgcctggtactcttataggccctctggatataacggtgaacagaccaaagatttcttccctcttggggtttacattttagcaggggagaaagataataacaagaaaccaatattgcacattagaaagttataagtgctatggaaaaaacaatagagcaaggagattgaaagtcctgggggtagggagtggggaggagattgtagtatgaaatagggtggtcagaggaagc

SEQ ID NO: 3931 - DNA, 4001 bp, Homo sapiens
cagtcttgtgaatgtgatatagccactggtcaaatcctatagcacagtttattatacaggacacttaactgctgccctgtataaaatttatttgtaagaattttgtcttaggcagggtgcggtggctcatgactataatcccagcactttgggaggccaaggagggcagatcacttgagctcaggagtgtgagaccagcctgggcaacatggcgaaaccccatttctacaaaggaaaaaaaaggaattttctctcattataacaattagaacaacaattattgaacacactatgcaccaggcactgttctacgtgattcaattaagtgtattaactcatttaatttcataacagccatgaggtgggggggagggagatgcatattttattggcaaggaaaccgaggcccaaggtcacatagttaataagtgctagaggcaggatttaaaacttaggtgtctgggtggcatatgttattctactaacactgctgcctctctgactgtaacctacttaaaaacagacattggccaggtgcggtggctcacgcctgtaatcccaacactttgggaggctgaggcaggcagatcacaaggtcaggagttcaaaaccagccaggccaagatggtgaaaccccgtatctactaaaaatacaaaaattagtcgggcgtggtggcgggtgcctgtaatcccagctacttgggaggttgaggcaggagaatcacttaaacccgggaggcggaggttgcagtgagccgaggtcacgccactgcactctagcctgggcaacggagcaagactccatctcaaaaaaaaaaaaaaaaagcagacatcatttatatctttaacacatactgctgcacaaaattatgtatcaagtatttcatatggcagtgaactgtgtttctatctctctatctgtccctcagtgctttaggcataacacattctcaaaagctacttgaatagatgaaaaccaggacagggctctaacaggccctacacaatcctcatcttcctcccccgctcatctcatcccctacctcattccccctgacgcatttactctatccacggcagctttcttgctgtcctgaactaccatgtgcattgcttatgctctgggggctcattcggttcatagtcatttgttgaacacctactatgtgacagtcatgaaaaggcactggaaaatacaaggtaaaaaactagtgtgaaaacagttgaatccgaagacagtctgtggtttactgaatattagtgtaccaatgttaatttctaagctgtgataaatgtacgatggttatgtaaagtgttaacattaagggaagctgggtggagggtaaagaagaactttctatgtatttttacaactcttctaaatactttaaattgtttcaaaatcaaacatttttattttaaacaacatacagttcctaccttcaggaactcaaattctagaggaaaaggtgggcgtgtaaataaatgagtccaccaaagtgagtgataacttccaggtcagaagtcatgttcgggacaggatgtgaaggggaaggaggcaggccggctgtggccaaccctgttatccagtacaaccgtttaacctcctaaagcctcagtttacttctctgcaaaatgggaactagggaacagacacgggtccttgcagggctggtgggagatctgcaaaccgaagtcaccatgggaccgcgcatgctatcaacagccaggccgagcagcacctgccgccctcccagtgacccacctggaactccagcccgtagatcactggtgcatcgtcctccatgctgcggggaagcgacccgaccccggccactcacacgctaaggacctcgctacggccggcgcgtccccacctcgcgggcgtgttcccagcgcccattcattccctccccgcagcaaacgactccaaactggaagtctttctggcccagaacagcttccgtagtggccacttcctatttttcggatgtgtcatcaatctgttcctcaccagcgaccaatggcagcggcgctggcttgtgcgcatggccacttgggctcacatccgggctctcagcgcggggactcctggaggtgagaacccggcccagaggaaataagttggtgggcggagcgggccgcggaggccggctgtgggtggaggccggctccgagcgcaggccgtcgggagcaagcggcgattagccttagctagccatcgcatctaagaatcgctcacgccgtagttgggcgccgccatgtattgtcatttgtatgtacttggcgttcctgagcgctgggccagcgcttcacacgcactgccataaggagcttcatccaaccctatgaataagctgttacacttccattttaccgatgagacgctgcaaagttgagtaacacagtcgcagcgctcattggtccattgggtagccaggatgggcacctgagctgactcccttaggttcggcccaaggtgccctaagtcagggccatgcctaatgcatttctgcaggtgcccagcactgtgtggcaaagaaagcactaccaaggatggggttatgaaagccggcaccgcaccactggtggtcctggactgcatatgcctccgaatgggagtcggaagggaaggccctggggttcctagaggtctccaaagactaaagacttgtggtggagagactgcccctctttcgcatcctgctcaaagtgcctgccctggccttgggccagcagaaatggcatcgcaaggactccaaaatacatcatagctgaaccacgccgctagcctggttccaccggggcttccaggaccacgcacctttcctccatttctgtgattagctttcccctctaccctttattgatctccgtgacggaaatggttgggtctcgttttgctcagttgggcaaggcgcgtggtattgagttaaggctggatgagtatctgttgagtgtatgaaattttagagattacatgagaaatcaaatgagcaggccgggcgcggtggctcacgcttgtaaccccagcattttgggaggctgaggagggtggatcacaaggtcagttcgagacctgcctggccaacacagtgaaaccccgtctctactaaaaatacgaaacttagcccagcgtggtggcacgcgcctgtaatcccagctactcgggaggctgaggcaggagaatcgcttgaacccgggaggcggaggttgcagtgaaccgagatcgcgccactgcactccagcctgggcgacagagccagagtcggtcaaaaaaaaagaaaagaaaagaaagaaatcaagtaagcaaaaacaagaaagaaagaaatcaagtaagcaatggcccagacatgagaatcatcctattcaaccactctgtttgccgatattaacttgcggagctaagagggccttcatacttcgggattaaacccacccatctatcactgatatctttatcattaattttattatacaagtactgcaggtgcatggtaagaaacttacaaaatacagataaacacaaagacaaatccatagaaacactgatttctaggatatgctggtcaataaaaatagcctaagcgactccctttcacccgccccatctgccacaggcttgcctattgcctctgagtgacagaatcaggctaggtggagtggagtctccgttcccatttccaagtacagggtccgctcccctcaactaccggctcctggttgcctgtgcgcgttcacacctagggctccaggccccgcccacagcagacgaaccggaaacgaaccccatttccggcctgggggcagggcctcgggttcctgcatcgggcctgagcagaactaggcgcgccgcggcccggcacgcgcaggcgtacagagctccccgggggtgccagttcctctccgattcccggcttctgtcaccttcctcacggaccttggtcacggccgcaggtgaccccttagcccagctccagtgggcgggtggcaggtgagga

SEQ ID NO: 3932 - DNA, 4001 bp, Homo sapiens
ctcctttgggaatgtgggatagcaacattttgacagcattgaaaactgaatgtggtgtgaggggaggatggatgactaaaatcaagggaaagattattggggaggatttcagagctgactcttgaattgcaaacccctcattctccctccacacacgtacacgctcttcctatttccttttcatgattcttgaggaaggtacaggagttaggaagaggaactgcaacaacacagataacaagtcatcaatggtacattgggatggcagtggtgatgaagatgactaaaagccactccatactctagagcagggtttggcaaaccacactctgtgggccatatctggctggctggctgtacagccagtgaactaagaatggtttttatattttccagctgtcaaggaaaaaaaagaaatatttcataacatgaaaattacatgaaagtcaaatttcagtgttcataaataaagttttattgaaacacagccatgctcatttaagtattgtctatggctgttttgaacaagccaattagatgtgatagaccatacggtccataaagtctaaaatgtgtactatctggccctttgttgagaaagtttgctattctctgctctggaggcttaagtgagacagagagtattggatgatgaggttggagacgaaggtggggtgaaaagcctcatattaagtacttggacttgaacctcaagtctaagtaatgaggaggcccatttttacattttacattaaagtgtttttattaaaatgttcatttgggtggcagtgcaaataatacatttaagggaataaaaaaatgtaaggatatagggggatagctagaacagaggataatgtaaaacttcaggcagaaaaacaagacatttcagcattccctaacctcctacatcgccaaattgtcctccatccacttatcaccatctcacaggatacacatttcatttacctacttgttgtctgactcctcctactcaaatgtaagctccaagattggaagagtttttcttggttttattatttcagtgcttagaacagtgctagacacataggaggcattcagtaaatatttgttgagtcaactgaattagggtttttccccagcattaattagcctgtaaaatctgagaaggcagaaactgttcagttttgctcactgctatctccagcttctaatggacatacagtaacccttcataaatatttgctgaacgagtgattcagtgaacaaatgaatagagaagaccaacatccgaaaagttattttattttcaagcctcatgtctttaactgttttatatcagcctttcttaagttgaccgtcattaatatttgctgaatgaatgagtcagtgataaacagagaagaccatcaccctaaaataacgacccctccacttttaagtcttacgtctttaatgggtttcatataatctttctgcgctctttttactgtccagtgtgggagctgacactagtttgccttaagtccttaaaaatcgcacccggaggcgcagtgtcataggtaacccaagctttcctagtaaacatgatacaaaagtaaacacaaccaacagcatggggaccagcaattcagaaacaccgagcgggcgggctgcccagacctgggcttccccagcagggcccgcggagaccggccgtgagcagaggctgcaggcccaccccgcaacccgagcagccggggcaccgcagggaaacagcggcctagcgaagccacccgagctccctccgcgcccccgggccaaaaggccgcaaaggaactccgcccgcccgcccgctcacccgctcacccgctcacccgctcaccttcaattcctgcgagtccatggctgccccgaggccgggccgcggggctctggggattgtctcgccgcagcctaaaggaagacgcagaattcagctcccctagcctcccggagcgctctagcgccccgggccccagcgggaggggcggggtcgcgccgcgattggctgtcggagggagaggcgggcctgtgtggcggggatcgtgctgtaatggagcaggggcggcggggacccggaggtgagggctgcgagggccgcccgggagggtccgggctgggaaaagggcctccgccggagagtgcagctggaaaaggaggtcacactgggaaacggctgtctgaggacagtgggtgggcgggccgaggaaatggaattcaggaataaaggaaacggagtatgaagaaggggaagtctgtttcctgtcactggttgtaaaggaagacaccattttctgcacgtttgtctggaggcggattcccgcagtgcggctctcagcaaggctctgccggcgcgggaaaaagcggtcaactttcacgtgggcaagttgttttacggccacaaggtggcgcagaaaaaaaaaatcacacgttcttaacagaaatacggtgcgcttgggcccgtctttgcaggcgttgctgcaatctttgttagaatgtgtgttcaattagcccttttttaccagccccgataataagagggacaaataaattaaacttccagaaaattagtgtcttgttttcaatgatactactgattttaaactgagaataaaatgaatcccaatgcaaatttttatgtttgcaccccattaggcaactcaatcagtcacacatagatttcttaagtccaggaaattaaatggaaatataatagactaagattttctatttctgcttaaataaatatttaaaatagtgcataaggtctgagatttaagtgatctttgcagaatctttcacgtggattccaaattttgatcctagtgttaattatcttactttagttgacatgatacgtagttgccttttccagattttaagtttcttaaggagtttataaacattgactttttccccatgccaataggttatgtaaggacagtcttgagaaaaacggtagctaccatcctaggctttaaggtgaagcaatatttctcaccggtttctctttaaaggaattcaccacgtattttcacgagcaacttttttttctttccaatatttatagtccagctaaatgtctgtggtgatgaacaactggtgatatctctttgattttcaaagctgcggattaatccgcacttggtatacagcaaagaataccacaggaccagggtgctcaatgaagtgtataatcttgaactgtaaacctttggttataagagaaaagttcatctgtaaggaaatatctcaggatcatggttaacagaacagatgatcaacctaccttttggagatcttgaaagtcatattaatttagcctcgtattctcttcactgaattctgttctaaggttgaattatttagcacaaaacaccaagcctgatgtttcataaatgtttgttggattaaaagtactctgagatttgctttgacactcacggtgacttggtgtgccctgtgcccttactagatctcatgtaagaaatttattttggatctcaggccaggaaaaactcttgtctttcctgaaaaatcgatgtgttccttagcagtaacatttttatcggctcacttttactagctacaaacttttgagtctgatatccatgacccttcacctcatcgtcttttcaagccttatcttctacctccccttcaaggagcctttattccgctcagtgggacaaatattccttcttctggtaatgctttcccctactttgttttgagctctttcttcacctgagaaaatctccttcttctgagttcatttcaaatttcatgaagtctttaaggatcaccataactggatgggtataaaaatatcacagtgtagtggcaagaataccctcttctgcatctgaggtggagctcctattacgctagctacttttgtgacttggggaagtaatttccctaagcctcattttccttatttactaaagaaactaaatgccttacagacatattaaaacttcctgacacataatagg

SEQ ID NO: 3933 - DNA, 4001 bp, Homo sapiens
tcttaccctttaatccaaaatcagctcaagtctaacttcttctaggaaagttttccaggccaccaaagttcaaacttcctgtcactggaagcacctactgtgtcacacaagtgcccacacacacacacatacacacagagtacttacacactacactgttcattattactcttttgggtccagcctaaatcccacaaccagatgtgccagtgcatgtgccttttaactctttatctctctggtaaatattcattgctcacaagaattaatctttgcctcctaggctgggcgcggtggctcatgcctgtaatcccagcactttgggaggccgaggtgggtggatcacgacgtcaggagatcgagaccatcctggctaacacggtgaaaccccgtctctactaaaaatacaaaaaaaaaaattagctggtcgtggtggcaggcgcctttagtcccagctactcgggaggctgaggcaggagaatggcgtgaacccgggaggtggagcttgcagtgagccgagatcgcgccactgcactccagcctaggcgacagagcgagactctgtctcaaaaaaataaaaaaaataaatcattgccgcctaggccgtgcatggtggctcatggctgtaatcccagcactttgggaggccgaggcgggtggatcacctgaggtcaggagttccagaccagcctgaccaacatgatgaaagccgtctctactaaaaacacaaaattagccgggcatggtggtgcatgcctgtagtcccagctactttggaggctgaagcaggagaatcgcttgaaccggggaagcggaggttgcagtgagccgagatggcaccagtgcactccagccagagcaacaagagggagactccatccccccaaaaaaacaactttgctgcctcattttagctcctctgcttaccaacagtgtgaccttaaataaattacttaaccagacccgggcgcggtggctcaggcctgtaatcccagcactttgggaggctgaggcaggcgaatcatctgaggtcaggagttccagaccagctaggccaacatggtgaaacctcgactctactaaaaatacaaaattagccgggcgtggtggcgcatgcctgtaatcccagctaccctggaggctgaggcaggagaatcacttgaacccgggaggcggaggttgcagcgagccgagatcgcgccattgcactccagcctgggcaaaaagcaaaactccgtctcaataaataaataaataaataaataaataaataaataaatagataaaataaaattacttaacccaactgtatttacagatcttcaccgcaaaatgggattaaaaattgaatctaccttaagtatctactataagcattaaatgactgagtacatgttaagggcttagaaaaataactgacattgccattgtcattattactgaacctgggcggtaagaagttttgcgcaaagaaagtgaggaccacgcccaccatgtcaaagactaaacgacccaaagcctcaaggaatcagctagactgtgttagggaaaaatgaagggagggatgagaatcagtcgctgccatcccttttcctcacagttcccacgatagcctaaggcccggtaggtgcgcctctcacctgaaccgacgaccccctcctgtttccattgctgccgctcagcctcagtggggaatcccctcagaattgccagctccggggtccacatcaccccagacaccgctgcagccaaaacaggctcccacgagggccacacgggagtcaacaaaagaaagtgaaaacaggagagtccaaaggcgctgaaatctagtggcgacagttaccgtaaatacacctgcggccctagaattccatgtgcggatactacctcaaggaggcggccataacagcagcgcggggcaccctgggaaaaacacgcacgctctctggtctggcttccgcctaggagaagaacccgagcttgagtaaggagcctgttgggtggttatgccccaccccggggcgggcaatagggggagttgagggcgcggtcgcgctcagccccgcccccagtgggaccgcttccaagaactgtgaacgtggaagtgagtgtgcctcccaccgagggctagggttcaaatgcaactcaaaacggacgtcttggccaaagcagtttgattagaagggctagagttgtgattcttaaagcattttgggttagaacgctctcgacaacccgatgaaaaccacagtccttcgcgcagagtgcaggtgggcccttgctctcagcctaagggtaccctctcagggaatcacagaccctctgacgtggagtcggtgaagcccaggttggaaccccgtcagcatagcatgggtctttcggcgaatgagcgtgtaaggaaaggatctggttttgacactgctctacatgaatcatggccgggtgggaaatctgcccctgccgctggtgcagggaagtttttggaacactgtcggaacgctgtagaagagtgatcccaggggtgatcacaaagaaattgcaaggagacaaaccagcctccgctggtaccttatttgcacttctttgaatcttcctagcagcactccaaagaaacagttagagggcgggcgcggtagctcacgcctgtaatctcagcactttgggaggatgaagcggatggatcacctgaggtcaggagttcgagaccagcctggccaatatggtgaaacccgtctctactaaaaatacaaaaattagccggacgtagtggggcacccctgtaaacccagctactcgggacggtgaggcgggggaattgcttgaacccgggaggcggaggtttcagtgagctgagatggtgccactgcactccagcctgggcaataggaaagagggagggagggagggaagaaggaaggaagggagggagggagggaaggagggaaggaaaacaggactatggctttgtcccattggcttgacacctgtactgagatatgtcatgtaagagccaggagaaaactgcagggtaactctgaccacaagagcaaaagctctctgaaaagaggctgacccggtacccagctccaaggaagaagctaaataaatgttaattcactttcttactcagtaaagagccactccagaatgtgaagggagaggaactcagctcagctcatttcagccattgccatcagataccaaaggaagccggacctgactgtgattggagaagagcggatgccctaaaatgtcctcccactgagaagtaattaaaaactgtttttcaggccgggcgcagtggctcacgcctgtaatctcagcactttgggaggccgaggcgggcggatcatgaggtcaggagatggagaccatcctgcctaacaaggtgaaaccccatctctactaaaaatatttttttaaaaaattagccgggcgtagtggcgggcgcctgtagtcccagctgctcaggaggctgccgcaggagaatggcctgaacccaggaggcggaggtcgcagtgagccaagatcgcgccactgcactccagcctgggcagcagagcgagactccgtctcaaaaaaataaacaaacaaaaaaaaccccactatttttctagaaaatgatacttgaccaggttgtctgttcatttccttaagtataaaagccagcactgtctaaactaatttgataattgttaaagatgaacgtctgtaaaaacacactggccgctctgccaaagttcctcacctgtatgtagcaccccgttaatccacatagtaaacttgcaactttcagttaaattcaaggttggtttgttttaaatgtggtatgctagatgatgatggtgactgaagtctgcctaatctcccttcaagcaaagtgaattccagtaataaagtaggtggggaatatggtctcgattaaaaatatgtacatagtgagtggaaattgagcaggcaatgaaatatctactgtaggattcagtatagaatgccttggc

SEQ ID NO: 3934 - DNA, 4001 bp, Homo sapiens
ccagctttttattataaggctccaagcttttgataactcgagaaataccaaactcatagtttcctttggcacaataaagagttcctatcaccaaattcacaatgcagagatggtacattttccgatttgggtcatcataagagagctgctcttcctccttttcaatcttcctcatcaactcctctgcttcttcattttgacttgtcataatataggaaacacagagattagccagtacaatagcactgacattcaggatgttatcataatgcttcttgactatgggttcatagaaaccaatggcttctttgtatttgttttcctgcatgaacagaacatgagccacattcaacttccacacatcatggtcgttacagaattccacagatttgcggaagaccttttccaccattggataattttcaagattccagtagatttttgcctgagccatcaacacaggaatgtatttctccatggtttcatcatattcattcactgcctttttgatagcttcatcatctctgttgtgtcttgcttcctgtacttgcttggtgagtctccgaagctgctcagtcagcatccctgctagcccatcaagcttaatgaaagcctcttcaggagctgtctggcaagtgatcagggcatctaagaagtcatagagatagggtgtgaggaacttatacgtcaaatgggcattttctgccaggacatctgctgccaggtcaaaatactcatatttacagtagagcagcaacaggttgccaaaagtctctggaggaaagggattctgttggagcaaaaactgtagcttttcaaacccttctgtaggcctggcatccatgttcattagtgcctggttgtgcagggtcacagggtccaactcttcctctgccctgggtggcatgtcggtgagggtttcttgagctacctcatagtttctcagttggtattctatggctgccttaaggttgaaggcttccaccagagcagtctgatggagaactaaggtgttgccaacactgcgaacatcaaagccctcggtggtcatgcccacacctagctcaggatgctggcggatgccacgctcaataatctcagcgatatgcttcagtgctgaggcatactgtcggctgctgtaataggccaaagccaggttgtaggaaaggtcaggctggtagcccgaggcctgcagtgtggcagaaaacttggagcatgcagcttcatactgtccctccttgtagagcaaacaacccaggttgacctggccatcggtctcattgtcgcctccactttcttctcccccttccccactcagcagctgctccaccaggctcctggaccctggcagatcgccctcgctatacttgatggcagcttgcaggcggaggacccggctgtggtaggcggggttatccaggagaaggaaggcgacccgagtggcctccggataaaggcaggccttgtacagggcctgggcctggtacaggcggtactgctccagttccgggtgcagctggcccagctgctcatagcactcggccgccagcgcgaactcctgcaggcggtagtagcagtagcctagcagcgacaggccggcacggctcctggggctccgctgcagttctcggcccagcagctgcaccgcctcggcgtagcgggcatcgcggatgagccggtacactagcgcggtaaactccccgtcggggatctgcgcgccgctcagaccagccataaccaccacggctgttatgcgtgcggttaccacggcaacagggcaaccgggcaaccggaaacggaagacgacgggttactttgccacggaaggaatctgttaggaataaaaagggaccgttctcgttagtctctcaagttcggtttgatcttcaaatattctggactgcagcgtggcggcagtcagaaggggaaagacgactactccgggccgttcagagactgaatcttcccggtcccggcatgcatcgttcctgtggcgccgctgcgcaggcgtggccgcactgcatgctgggaggcgtagtccctgttgcaccgacccgactcgcggcccgtgtggacgcacggtcactcgccttccctgccccctaaagatgaggggcactctctgtgtctgttgtgccacctcggtctctagcgaatcggaggaagatttccggcaccatgttctggcgattttgagccttgtgcattggtgtggtctatactaatgctggcgtttggcttacttttaataaagtagagatcgtcagtacaataaaaggaccttttaataaaaggagcgggatggcaaaagggagttaactccttgaattcccttggaattagagcaggttcttatgctaccccgagggcacagtttgtaagaacagaatacagcagcaaacagaaatccttcttattttggtggtttccagaggttaataaggaaaaagtgctgtgaatcttaattggtactgggagaggatctgtttttgatcgcagtatctctccttttccatgacaaaaaaaaaattactgagtatatgttggcgtttacacttggttgtatccattgctgtggtcctccaactgtctctgccaataagaaatcagtatcttttgtcatctcccatgatatccattggtctctctagcacctaatataaacctaatccaagtaaaagtgtgttgtttgctacataattactgcaaatcctttgtatgcatccataatagtgttactgcccataaatcttttctgtatataaacttcacagctatcatacggttgataacgatgtcaaccatatcatatagcacctctattagagactgtttacatatagtatttctaatttgaataagcagcctgcattctgcatattgtagtttaagaagtctgtgggctagaaaggtttaaagatttaagtattacattaattaaatcaaactattaaattaatagtttgtttaaagccacatctaggtaggtaggggctgaaccatgatatccaataaccaatttcaataggaaatagtgactgatgaataacccaatccatgtatctcatgtacgtgagtttgtaagggcccattgtttggtgctaagtgtgtataaggaatattattgtctttgtttctccattaaaacaatgaactaactttgtgtagttagtaaactttgaacttctaggccttgattccagctgtgagcagatgtgactactggagttgtgtagttcgtatttacccagtatcactggaaggagatttttagtaggtgtgtgattgctcatatcatcatatgactgactttatgtacttactcagtcttctcccttgccaggaattggcagagttgggtctttttggctggaactagacaaggagcttcccagtgcatcaattccaagaaagggaaactgcacccatttcaggattgaatgggactttggctcacctaagaccccacagaaagcaactgtggaatattactataactctattctgaggcttctttcaatctgatctcttggtgcacccttttagagtcttaagcccaaggaggtacatgggtagaggatactgctcagtaataaattgggggaaggggtgcatcgacttctttacagcaggctgcctgatggttctcccttgggaatttaggctcagtattttatttatttattttttagagacagggctttgttctgttgctcaggctgacatgcagtggcatgatcatagttcactgcagccttgaactcctgggcttaagtgatcctcatgcttcagcctcctgagtagctgggactacaggtgcacaaccatgcctggctaatcttttttaaaaaatgttttaatggagatagggtctcaccatgttgcccaggctcatctcgaactcctggcctcaagcaaccctcccactttggccttccaaagtgctgggattacaggtgtgagccactgtgcctcgcaaggctcagtattttaaaattctt

SEQ ID NO: 3935 - DNA, 4001 bp, Homo sapiens
aaagcttttaactgcctagactcatatgtgactgtattctttccaacatgcattctttcttcttccaggggttgttcaataacagcaggtatgtttctgccatgaagttcacagtgttctagaaactggacacattcttgaataacactatcacgaagcatgattgtgtgttttgacatgttttctaacaaggacaggaagcatcttttggcataataccaggtgtctgttcccagctttttgttgtaaggttccaagcttttgataactcgagaaataccaaagtcataatttcctttggcacaataaagagttcctatcaccaaattcacaatgcagagatggtacattttcttatctgggtcatcataagagagctgctcttcctccttttcaatcttcctcatcaactcctctgcttcttcattttgacttgtcataatataggaaacacagagattagccagtacaatagcactgacattcaggatgttatcataatgcttcttgactatgggttcatagaaaccaatggcttctttgtatttgttttcctgcatgaacagaacatgagccacattcaacttccacacatcatggtcgttacagaattccacagatttgcggaagatcttttccaccattggataattttcaagattccagtagatttttgcctgagccatcaacacaggaatgtatttctccatggtttcatcatattcattcactgcctttttgatagcttcatcatctctattgtgtcttgcttcctgtacttgtatggtaagtttccggaggacctcagtcagcatccctgctagcccatcaagcttaatgaaagcctcttcaggagctgtctggcaagtgatcacagcgtccaagaagtcatagagatagggtgtgaggaacttataaatcaaatgggcattttctgccaggacatctgctgccaggtcaaaatactcatatttacagtagagcagcaacaggttgccaaaagtctctggaggaaagggattctgttggagcaaaaactgtagcttttcaaacccttctgtaggcctggcatccatgttcattagtgcctggttgtgtagggtcacagggtccaactcttcctctgccctgggtggcatgtcagtgagggcttcttgagctgcctcatagtttctcagttggtattctatagctgccttaaggttgaaggcttccaccagagcagtctgatggaggactaaggtgttgccaacactgcgaacatcaatgccctcagtggtcatgcccacacctagctcagggtgctggcggatgccacgctcaataatctcagcgatatgcttcagtgctgaagcatactgtcggctgctgtaataggccaaagccaggttgtaggaaaggtcaggctggtagcccgaggcctgcagggcggcaaaaaacttggagcatgcagcttcatactgtccctccttgtagagcaaacaacccaggttgatctggccatcggtctcattctcgcccccactttcctctcccccttccctactcggcagctgctctaccaggctcctggaccctggcagatcgccctcgctgtacttgatagcagcttgcaggcggaggacccggctgtggtaggcggggttatccaggagaaggaaggcgacccgggtggcctccgcataaaggcaggccttgtacagggcctgggcctggtacaggcggtactgctccagttccgggtgcagctggcccagctgctcatagcactcggccgccagcgcgaactcctgcaggcggtagtagcagtagcctagcagcgacaggccggcgcggctcctagggctccgctgcagttctccgcccagcagctgcaccgcctcggcgtagcgtgcattgcggatgaggcggtacacgaccgcggtgaactccccgtcggggatctgcgcgccgctcaggccagccataaccaccacggctgttatgggtgcggttactatggcaacagagcaaccggaagcggaagactgccggtttccttgtcgcaagaaatctgttaggaacaaaaagggaccactctcgtcagtctctcaatttcagcttgatcttcaaatactctggactgcggagtggcggcattcaggaggggaaagactactccgggccgttcagagactgaatctactcgtcccggcatgcaccgttccagtggttccgcggcgcgggtcgtagccgcgctgcatgctgggagacgtagtcccggctgtacctaccgaaccggcggcccgtgggggtgcagggtaactctccttccctgcctcttaaagatgaggggcgctcactgtgtctgttatggcaccgtggtctctggcgcggcggaggaaggtttccggccccatgttcctggcgattttgagcctggtacacggtgtggtcgataataatgctggcttttggtttagtttcagtaaaagaaccgggatggcaaaaggcgagttatctcttggaattaccctggaattagagcacgttcttttttgcactaccccgagggcacagtttgtaagaacggaatagagcggcgagcaggaatccttaatttggtggtttccagaggttaatgaggaaaaaggactgtgaatcttgattggtactgggagagtttcggttttaggtccaagtatctcccgctcttttttcccgtaacaacaaatattactgagtatatattggcgtttacccttggccatccccattgcgctggagttccaactttcactactaggtagaaacgttggagaaatgcatgacttcagttttttccaagaggggaaaatccaagacattaaaatgtgctcctttccctatgcatttttactcttctctcttaactactaaattagtcagccagtgatgtgtgggtgtgtgagagacacacatgctcagtttgtacttttcagccttctagggattttggatattgaactgataaatatggattttcttctgttaaaataagaaaagattgcctacactttaattttttttccagattcttagtttgaagatttctatgcaggtttgctagactgtacaagatatcattctgggttttctttcattctttgttatatatttggaatagatgctgtagattccatgttattatcctggggctatttttgtataattttttttcagtttattagtggccatgatggggctgtgaaaaactaggggcttaattattccataaaattatatttaatcaccaatttaaaaaatacccctagataaactgacctggagaccatagactttaagggagaataaatacaatttttcaatcaagaattagggacatagacaagatagcaaaatatgaatttggcttatcccagtgaggtacttgtaaatagtgtagttttcaaggtaacaataatagttgtaattcattaacatctatcatatggtggcctgggacagagcattgtcttttgtagtcttccatgatgtccattggcctcactaccacccatgataaacagtccaagtcagagcatgtctttgctatataattaaatacttcaatgcaggtaccttactgcctcttcaacagtattgctgttcataaatcttttctacatataaattttggagccaacaccaaccatattgcatcacattctattagaccacctatatatattatttctaatcataataaccaccctgtattctgcatattactgatgaagaacatgtgaatcagaaagattaggcaacttgcctgagatgacacagctagataagaagcagctgaatcatgaaattccaaagctaagttcagtaggtaatagtcactgatgaattaactctatctatcatgtatgggcccagttataggggaatattagtgtcttgctttttttatattgttattttcctgttaaagcaaccagccaccttgggttggccagtggaaatttgaacttcttggc

SEQ ID NO: 3936 - DNA, 4001 bp, Homo sapiens
gcctgggcgacagtgtgagactctgtctcaaaaaaaaaaaaaaaaaaaagtaaattttagtgactaactaaatgtttgaggtaaaagaaagggatataaaatgattatcagatttccagattaaacaactagatgaaagtttgtgttattaaccaaaattgggattagaagaaaagcaaccaatttacaaacatgataaattaatttaacaaaagttaattaaattaacttttgggtttgagtttgagattctagggagtatagcgcctcaatgcttccaaatctgatcctgtccctccttcgaaaaccctgctgtctaccgggcatggtggctcacacctgcaatcccagcactctgggaggccaaggcgggcggatcacgaggtcaagagatcgagaccatgctggccaacatggtgaaacccagtctctactaaaaatacaaaaattagctgggactggtggcatgtgcctgtagtcccagctactcaggaggctgaggcagaagaattgcttgaaccagagaggcggaggttgcagtgagccaagatcacaccactgcactccagcctgggcgacagagtgagactccatcttaaaaaaaaacaaaaaacaaaaaaactctgttgcctacttgagaacatccaaacccctgtgctaagtcaaagcctttcaagccatctgctgccttctctcccaccccatcttttactgttccaaccagattctctactctggtctcactttggtaaagttctctcaacttttccttgttttactgtctttgctcacactgtcccctccatctataaaaagatattttttcattttttttttgaaatggagtctccctctgttgcccaggctggagtgcagtggtgtgatcttggctcactgcaacctctgcctcccgggttcaagcgattctcctgcctcagtaaccccagtgactgggattacaggcgcacaccaccacgcccagctagtttttcgtatttttggtagagatggcgtttcaccatgttggccaggctggtctcgaactcccgacctcaagtgatccgcccccctaggcctcccaaagtgctgagattacaggtgtgagccactgggcccagcttttttttttttttagacagagtctcaccgttccccaggctggagtgcagtggcacgatcatggttcactgaaaccttgacctcccgcgctcaagagatcccccacccaccacgcgggctaaattttttaaaaacatttttgtagagatggggtctcactatgttgcccaggctggtctctaactcctgggctcaagcaatcctcccgtctcagcctcccaaagtgttgagattacaggcacaagccaccgcgcccggcctccatcttttcccaaggaactcgtacccactccctaatcctcaactcagagacccttgtctgctcaattctacccacttcgagcatctgttacatcaggatcatcctcctgatcccctgcccctcacttgcctaagatcctcaagggcatggccggagactacaactccccaaagcctccagagccccgtctggcgcccatccgtcgcgggtttctgcacagctgacttcaaagaggcgtgaccaaaatgagcaggactgggggaaactgagggtcgcttttacctcttcgccgtaatcctctggaccgaattccttgcaaagtttgggtgcagcagcgacctccagtgggcagctgggccgtagagagcagtctacaggaaaggaaggcggagcctcgtcagcgggctcgggacagatgggctagagtcctccccactctaccctcgactctccgccctctgcataaaatcctactcgaaacgttcagaccacaggtggacccaagaggggctgcctctgccctcctagacccccactggtcttgtcataccgctcacctagcttgatccgccccacagtctttggaatcggcgccatcgcatctacagtgacccggaaatgaaaggtagtctagtatttgataccagccaaagggcggggtgggacagagtgggcggccatgtttgttaggggcagaagcctcccattacggagcacgagagagtccatgaaggtccccgcgactcccggactggagaaaacggctcttgcgatggggcgaagtccgagctgcggcgggcgttggtccgtgcagggaagtgggaatcgttaggttcgttctggacccgccgccccatggcccaggcgtctcgctcaggtagcctgcctccactcgttatcgtgcccccgctgagggcgcaacccgggggcactggggaggagcagtgggagagaagtcgaacgggcggtcttcgctgggaggttcactgctggccgagcggaacttctggagggacgccgtggtggccgacgccggcggatgtgagcgaggactacgaggctgatgctgcggcctggaggcgggggcccgcaggtggcggcccgatccctcccgcgctgcagcgtctccgggcggtgttgctgcggctgcatcgcgagcgggagcagctcctccaggcccgagactgcgcctaccacctacagtcggctgtgcgactcatgaagaccctgagtcctggctcgccatccggcggccctagccccttgccccagtggtgccgcgacctgcagctgcacccttcccaaggggcggttctgcgaatcggccctggggagactctcgagccgctgctgctagcgcgccccatcggactagccgcccagtgcctggaggctgtcatcgagatgcagcttcgcgctctcggccgggagcccgccagcccgggcctgtcgtcccaactcgccgagctgctctttgcacttcccgcctaccacacactacagagaaaagccttgagccacgtcccaggggccgcacgtcctttccccacgtcccgtgtgctccgcctcttgacgggggagcggggttgccaggtggcaagtcggctggacgaggcgctccaaggatcggcgttgagggaccagctccgcaggcggtgccaagaggagggggatctgctaccagggctgctgggcctggtcgggggcgtggcgggttcagccagctgtggactagggctcggaggggctggggccttgtggagccaatactggaccctgctgtgggcagcctgtgctcagagtctggacctaaatctgggaccctggagggaccccagggcaacagcgcaacagctgagtcaggcactgggtcagggtgagtgatgggcttgggtgggcgtttgggaaggctggggtctcttccttccccttggccaactcactgacctgccatcctgaaggcaaaagcaggccctttagaaagaacacccctgggttcagactatagcttctgagctttcaaggcaaagtcttgctttccaccccagtcccgagtcttggaggaagcatgccttcttgcctcatcattgagtgggcaggggttgtggaaagtgagaccttgttttcaggccccagagtcatttctcccactagcatccctgcctcaggagtgtgagaaggagctggcatctttgtgtcacagactacttcatcagtcgcttatctggagctgggaccaaggtgagaaggaaggggcactgggggtgacataagtcccaggttaccgcttccccaccacactatactctctcatcctcaggtttctgccaggccttgggatcagctcttgggggtcagagcagccttcccacatcctctggcactgctgaacttttgcagcagctctttcctcctctcttggatgcccttcgagagcccaggttacgacggattttctgccagcctgcaggtgagacgaggggctggggctggggacacagagcagttgaggatatctcttttctttcactctgttctgaaatctgcctcttcccaaaggtactccatgacccctaagatactcactctgctgctcaaatccccagatcctgcgcctgtc

SEQ ID NO: 3937 - DNA, 4001 bp, Homo sapiens
tacagatgaaaaactgaggctgagacattagccatgtggcagtgccaagactggaattcaggcatgatgaactcccttctactgcgctatgacaaactgtctttcctgtgctggtaaggcatagctattatatatgctacagacacttgtgttcttaggctgagaggtgcaaagaaggaagaataacaagactagacagcaacagcatacctgatgctgataaatactttttaaaatctactaggtaagtctactcttagagcttgaaacatgaatagtttcgctttctatgtttacttatcttttttatgggggaggtgcactgaggaaagtagatggtatcatcttattgcctgttcagaaacttctattattattcttgtgtgttattgaaatgagaaggcaattttctttctggtttaattccatgtagcgtaacaaacagggtaagaatcaagtccttagtgtttagttaagcctcatacaaaagacaagctggcatcctgtccagaaaactcaaatccacaacagacaactcacaactattcaaaaagctgttcaaccaacccctctgttcttttctcatcctgatccactccataccatcaacaagcccagtcgaggcaagacttggagtaaaaacaaatgctacacatccaggcacaagccgaaaagatgctttgggcaagcagacagtaacaggtgaagccgctcacatcacaaagagaaagtcagcgaatcgttatgtgcttcctggtgaaagtacacacacccacctaaaaagtattcttgccatgatattgaatctgaattcaattggatcaaacctcaaggtttaaccaccaattcacagcaatatgagacagatgaccacattaaacgacagaagagattcagtcagcaagtccaaaacacggaaattcaaaggacacaagaatcggtttcctcaacaaataaagaggggaaggtggagaagagacttaaaaagacttgatgtgtatcctgacttgaactaactgcgaaaagggaaccaaagaacaaaacaccttattagtcgatcagaatggttccaacactgacgacttgatattaagtaactatgtgatgatgacatggtggttccttctgaaacatccatggatgaatacaataggtaaactgataatgcttaagccaagtgataaacacctagacgttcgttatgctctcttccacatatttaaacgtttttcacaagtgaaaaacaccaccaagagcctgcgccgtgacactgagatgggagtcgcggtactgtggccctacgcagccgtgaccccttcccttcccaggtcgcggatttcccgccagctaaaatcacgagtggaaaattcctatctgtcctaagtctctgggtgcgaatgaggaacgtggaaggagagacggcggggtgagaggcggcggcccgcgcccgaggatcgcgcagagggcttggttcccggaaatctctccgcaccgtcgcggcagctggctcctcacgggtgggcttctccccgcgttctccgccgccctcgtcctaggcctcgcctaggcctttctagaaagacgaacgtccgcccgctcagtcctagtgctgggttatgacaagcgccgaccgtgagctccagaggcaaagataggagcccaaacaaccccaacgtcgcctccacccggggtcgccgcggccccaggtctcgcgatagttacctcccgggactctcgtcgctggaggccgcgcaagcgcaccggcgaatgtaagcggagtacagtgcctcggcctccgcgtactctccattgttgaaatgagcctgggcgagtgttagggttgcgtggctttcttgccgctgtccttccatagcagccaaggcctagttttcggtgtagaatgggggttgacctccgagcggttagaggtggcaccacaaagccacttccacaccctggaatctaccttgacagccaaccttggcgctaggtttgtgccttatggggatccgtcgtctcgcgagataacggttccgctgctggcggggcgtttgcagtggcccttgtgaactatgtttctgccgttaccagtgttggacccgccttcctcttttcctagaaaaggcgcagatgcgtggtcgcaaactgatttccaagtccgttgtctgatgctgcgagacactatccgtttgttacagcgaattgggggccgatgacgctggaggtggaagaagccgcggttctgtttcttaatggcgaattagcctgcggacgtcctgtcattcccttgccttttagcgtcccaacttagcaaaactccgcgtttagggtgttctgagtaggctttgtctaccctgaaacgctttgtgtcgacattccaccaggtctgttccacggtccaaacttctctaccttttttgaccctctagaattgtgttacgattagtagtatattgtgtcgagagtctgggatctttgatgttagttatattccctggctgtttatgccaaagggaaatccaaatagtaatttattacgtacattacgtataattcaaattaaaattttgtaagaacagttgccaaccacgctaccctacatgcctgctgtgtatcttctcggcgtccctcgattctgttttgcttcccaaagtacttgagccctttccgtcataaaaagtaaagatgaaaaatatatttggagcatgatacttacatgcggaagtcttaacaggacataaattgtgtgcttttggctgctttcattagatttttaattttttccttttaccaccactgaaaaaaatacaaatacagtggattaaggttaaattaaaaagcactagtagaaattaaaagattgcaagactacaaaaaaataaactggcatttctggtgtaagcaaatggacagctcaatagaacaaaagcccagaaacatacctcaaataggctgtattttgtaaaagacatgtaacatatatggggaaaggacagattattcaaatgagtgctattgggaggattagttaaccatttggggaaaaatacatttaagcatttaagctcccaattgacataatattcattccaggtgaattaaaagattaaataaataagataaaaagcttttttttttcagttcccatttatttttgcctcttggagcaatgtcatcttttcaatatgaaaaaaacaaaacaaaaaacaaatctgaagtacaggatagaacaaaaccaagtgtgttgggggaagcaacagcaaagggaagacaagatgttgcaaaaaaaaaaatggaggggggattcccctctcctctggggaatgactcaaacactgatgtggcagcgtacactattctacataaagccagggatgttaatccttttgggggataagaaaaagtggagatggccaggctctgtggctcatgcctgtaatcccagcactttgggaggcctaggcgggcagatcacctgaggacaggagtttgataacagcctggccaacatggcaaaaccccgtctctactaaaaatgcaaaaaattagctgggcgtggtggcgggtgcctgtaatcccagctactcatgaggctgaggcacaagaatcccttctgggtggaagtggttggcagtgagctaatttttgtattttttgtggtgatgggtttccccatgttgtccaggctgatctccaactcctgggttcaagacatctgcccacctcagcctcccaaagtgctaggactacaggcatgagccaccgcacctgactagaagttttgctttgttctgttcaaggaataacaggaatatttatgtgtctaaaaaccagtgatctaagaggaaaatagcaggatatgtaatggaaattggggatttgggaagggggtttctaaataggagtaagattcttaaccttttttgtgctatggcacctttacaagtgtggtgaagcctatgtcgtttcaatgttttcaagtgtttttaaaacataggatt

SEQ ID NO: 3938 - DNA, 4001 bp, Homo sapiens
tcccagcactttgggaggcccaggtgggcggaatgcttcagcctagttggagatcagcctgggcaacatggcgaaaccccgtctctactaaaactgcaaaaattagccgggcatggtagccagcacctgtagtcccagctacttgggaggctgaggtggaatgatcgcttgagcccaggaagttgaggctgcagtgagctgagatcgcactattacactccagcctgggtaacagagagagaccctgtctcaaaaacaaacaaacaaacaaacaaacaaaaacaaaaacaaaaagacaaccaaaaaaaccccacaaacaattgccctccgatcactttcttgcctccccattcactgtgggagctcttcaagggcaaggattttgtgctgtacatctttgagaggtaatagtgcaagtgatttaaaggatgtactcagaaacctgggcacaaatcctggttccacaacttattggctagctgatcaagttatttagttgctctgtgcctcagtttccttatctgtaaagtgggacaaacaagagtacctgcttcacggggttgattaaagtgctcaggacagtgtctggcacacaggaagcacgaagtaagcgttgactattactattactatcacgatctgtccctctcagagccttcaacaggctgagcagtctttaaaaattatttatatctgtattcatttattccctgcctccttccacaaagcctcctaagtgattgtgcccacagagaggactcagggagggtaagctgaaggccccaggaacaggatttgaggttagagactggggcggggtgttccccgctgccacatcagggtgctttcccgccccagcacaagagcccggcccagccaaaccagccctactgctaaagccaccgactgctagagctggatgtgtcccgagatcgccacagatgaggaaactgaggctggccaagcctcttccccatttctccaccaccccaccctggagctcgtcaaaccctcgcccctgtctgcttcggacggagctccgttttcaacgtcacttgcgagaactatggacaaagacgacacagacacacttcacctgatggagtttagggacaccccaccctcggaccgcggtggggggcagagtccagccaatgcactgatctcatgatatgcagataccaccatttcacggtagacagagttagccacattatcctaaaggacacagagcaaaagccgtttctcttccctccaagcccccaaaccacatgtgatttttctctcgcggcagaaggaccttcctaactgccctggctgctcttaagactagcacggtgggctggcaggcgcccgctgtcggccgaggactgtctgggcgcgcttcctggaggaggcggtgcgtttcgcgcgctcgctgccggcgagccagcctcttcccttactcaccggtgtccggaaaggtgaacgctgcgctcgggctgcctcgcctgttacctccgccgccgggcatgctcagcgtctgcagctgccggaccagctccggcatgcggtcccagtggccctcggcgcggcagcgctccagctcgctctccaccttcaggtaggagccgtgcgcgcccttcgcagccatcttctcgcgggcgctgtcatggaaggtgcggccaagaagtggagacccggccgggggcggcgtcctggctggggcgcactcgcgggcggggtcgacgggggcgcagacggcagccggggcccgggcggcagcgggggcccgggcggcggagggtgggcagcagcagcagcagcagcaccagcagctcccagcgcaccgcccggcgcctccgggctgcggctccggccgagcggcccgtacgcgtacaggagcaacctccgcctctgctgtagcagctcctggcgctgccgccgccgccgccgctgcagctgctgccacagcctccgccccgggccccggcgccgccagctgcggacccgcccctggccgcggctccacccccgcgggggcgtggggaggcctcggcgagccgggctcgctggctgccagcgcggccacagcagccaggcgcgcgaagggcgctcgcggccgcccgggtacccgccccccgccgccgcccccgccgcggagtcggagctcactttaatcccgcgcggagccccggcgcccgggggcgcctcgcttcccgccccctccccatcccatcggggctcttagcctgggagaccactgcccgacgacctggctttgtgtggtggccccgtcaccgctgctgcccctgacacgtcacaaaaatggggagaggccggccgacaggccccaaccccgacggcgagcctcccgggagctggcctgccgctgtccgccccgccctgttgcgatgcgggccaggcatgctcgcgaggacccaggcccgttcccaggcccgcgactctctggacgcccctctgctgggagcatttgtattttcttattttagcggagttcctctttccaacttgacttccctaacccgttgacctgtcctctgtggaatctctgttgccctggatttcttaaaggctttaggctgtttcaccaccttggtatttatttatttcttcatgctggtctaagactgtgatcaaagctctatggagtgcttagcagggtttagcccagggctgtggggtgcccagaagttcacaggactacggggcggggcctagcgggggcagccgaggtccacccttggggggagacctcttacaggggcccggccccgctgccgccgcagctcacagaccagtgctggagaagccacagcaagacccgaaaccaaaaaccaccggcatttaagtgacacattgtatggtccagactgaagactcaaaagacagcagggtcagggcaaacttttgagcagactcctaagagttagaaggtgctccacgtcctccctctggagtcttcaccactgccctaagtgtttttggacaactgtaaccgagggaaggtttttatgtcaagcagaacccaggctcctagtgcatagtcccgtgtggcctttcacatgaagccacacagggtgattagttgaagacagtcttcctgttcccactgacccccgactcccatgtggaggccctcctctccgggttctaaatgcagctccagtccttgtttggtgggcaggatttcctaacggtgggtgctgctctgagcacctggggactgttctgaacccccagaggccaggaggtagatgaagggaagctgaagctgctctggcagttggaatttagagacagtttagtcaagcagtctgtaaactcctggcttactccagtcaactcctcaagctggctttttgttaccctttggctgcctttgatggtcaccagaaccggatttcacttggagagagcggttggattagggtgacccgagaacacactgtgatttgccccacgcctggcattcctgggagtcagccctggggcagggagtgaacagcagggttgataagagggaggcgaccttggcagaaataagacctcctttcctgcctcttttttcctagtcctttgccagccctgcccccaggttgtagagcacctagtgaactaactgtagagggaatcactgcttgttgctttaagggggtcaccaatactcatgtatgtgtgggcataaaggagtgtggggaggaacagtcttcatggctcacatttttaatgagctcttcctcaacatacgccggaccccttcacagctattttccagtagggacaaaaccccagccctctgatgaccaacatttctcaggggtgtaaaaaaactaggaacaagaacccaccttggcctcccaaagtgctaggattacaggcttgagccactgcgcctggccaattttattccttccttagtgacttgttttagaggctattgtacaattttgggtagaggtttagatgggtcagtctgaaccttgatgggtttagctcct

SEQ ID NO: 3939 - DNA, 4001 bp, Homo sapiens
tctgacattcatatggagacatcaagtaggcagttatttacaggagccaggaattacacagagaggtcattgtcagagagacatattttggagtcatctatttataaatggtatctaaagcacaggactaggtaaactcacatagggagggtggatagagaaggtgactcagaacagaaccctggacactttgataattatagattgagaagccaattaagaagcccaagaaaggataatgagtgaggtagcagaaggacccagagtgtgtggtgtcagaaaacaagagaagaaagtgtttctaagtgagagtggttggctttgataaaacagtgttgagagggcaagtaaaataaaaacaagagatcaaagagaccactagatttgcatggagattgcagtttcagtggtatggtgggggagaaaatacagcaagtttatatgttgatgggaattatctggtagagagggagtgactgtagattcaagagagacataacacaggataacatccataggaaaaaaatgaaagcactggctagaatgaggacactttatccatctaccagacaccagcttcttgacacttcatttgtcttatttgtatctctagtagctcctagtagagcgcctagtacatagaagatattcaagaaatgttattgaatgaataaatgaacaaagggaggggtggatgaatggatgaagagatggatgaatggcagatgcagggtagaaggaggaactagatcaaactaatccaaagttcagagtaaggaaagaagaatgggtcttgaattaatagggtttcctcaaaacttagggattctttgtcccggcgcggtggctcacccctgtaatcccagcactttgggaggcggaggtggtgggaggattgcttgaacccaggagttcgagacgagctgggcaccatggagactcttttctttaaaaaaagaaaaaaaaattagggattatgggatttttctctgggatggggtggcagatttcaatctcagatgaaggtgggaaaaggaatgagaccgtcaatggcagtggcgttaggcaactttcaaggcatctaactacttagccactttctttgtctttcctgtccggacccaggctcatttgaaaaacgattatgtacctttatggacagaaatgggagaagggctttaaaaaaaacgaccgtcctgccgggagtggtggctcacgcctgtaatcccagcactttgggaggctgaggcgggaggatcaagaggtcagcagttagagaccagcctggccaacacggtgaaaccccgtctctactaaaaatacaaaaattagccgggcaaggtggcacgcgcctgtaatcccagctactcgggaggctgaggtaggagaagagcttgaacctgggaggcggaggttgcagtgagccgagatcccaccactgcactccagcctgggacagagcgagactccgtctcaaaacaaaacaaaacaaaacaaaaaaacaaaacgaccgtcctacactcatttatccatcaggtcaatggatacttactgaatgttaatcttgtataggagcacaggtgtaagggcaggattatacagggatgaattcgatacagggatgatgtattcgtttccctatttgttcatgagtctgtttttaagtaatctgtcctctcttgaatgtcaaaagctgctgatttcacgaacggtacatggaagatggtatttgaactgggtcgcatagtcttgctgggactcccgtggaagcgaacggggacagcggctgccgcagcttgtgcagtggagctggcagacgctggaagcaggccaatcttgaaacgtagggtccaaggccggctccagcgtgttgtggtcgtttcatcaagaaggaattagcattcctattatctttcttcccaacttgcagcaggacgaaccaagagacctgaaccaagagccctgtataggagggggtgagcggagttgggagccagctttggggtccgccccatccggatccgccatcctacgtcgcccgtggaactacgttcctgagggcttccggcgttgcctagcaactgccgggcccctagggcgtccagcggcccaactggagtggagccgagtgtcgcccttgggaaagcaggtagaagaactgcgtcagtcccgccagtgctgggcccgggccgattacacgtggactcacgcgagccgtcctcacagcccgccgccgccagcgggaggggcccggcggcgccaatgggcgggcggcagggagcgcgcgtgcgcagggcaggtcggggggggggggggggcggggcgaagccgaggaagagcgttttggggacgggggctggtgaggctcacgttggagggcttcgcgtctgcttcggagaccgtaagggtgagtgaactagcgcactctccgcagcgggcgggatcccggcgcctctcctgtgggctggaggcttgggctcaagatgagaggcaggagtagtctgggggcgcgggctgggcccccaggccgtctcgggacgcttaaccggctaggagcacggcctgtctcccggggcggaagcctgtgccccaccgggggctctggagccagacggggccgactgggcagatctccgcccccttccctggtccctaggggcccgaggatcggcctgtgggaccagctgtgtcgggtggacactgctcctggcccggcccaaaagcagcgggccggaagccttactctccctctgctccttgttccctctctcggggagaccacaggtcctgtcgggcccggcgggggaagctgatctcctgttgtattccctctctgggcatggccatccacccgggtgcccaagccagaattgggcatcattctcacttgcttcactcctttacccacccacatcgaatcccttgcaaagttgtcttggatacgttcattctccagtcccatccccctgccctacctagttcaggccaccttttcttctctggactacctcggtgtcttcctgatgatccctgcatctcttcttcatcctctgtagtttgttctatacagagaggctacagccatggtcttaaaacagaaatctgatcatgtgaccagaagcgtccccccattcccttatcaccctttggtggattctcattgctcttccaagctcttgaacggggcttgcaaagcccttcatgacctgtcttcctttaactttagattcatttgtctcgactgtactgtgtcttcaaccatactgaatcttttttggttcttagatcagaacaagttccttctgggcttacatgttccttcagtatgttcgctatgtctgaggcactgtcctttggttgaaataatccttcttatcctttatgtgttatttcaggtgtcagttggggatttcgtggtaccccatgggtgtctgcctgccggtctctcttttctaccaggttgtaatctgtgtgagaggagtttgtcgaggtcatagtactatcttcagtaccttgtgctgttagtacggtcattaaatgtataaatgcagcatgggtgctccttgggctccctagatgaacaaatagatcaagttattaatattaaatgcctgctttttcagaaccaattctcaaccctcagtccgtgtagaggtttctttagcttaggaagttggttattttcttgccttcattccaggaccatgacaggggtaagtgacaaagtactggtcagtttttctttggcattggctgtgggtacaggatgtctggatgttggtgagtttggctgctttgggtttgaattcttaaccaagggccccttgagggagaagctgctactagctgctggcaggaaggctggccccaaacttagtgctgataggactgatgacacaccaggaagaaagggttgggccaggtcaaaccactggaagcctccaaaggaagttccagcttaggctagatccgctgtgggatagggaacaatacacctaggt

SEQ ID NO: 3940 - DNA, 4001 bp, Homo sapiens
aaattctggaggcttctgcttctcactcctaggcttaagcaccagggtaatgccagtcactcctacctctgcctgggcggagccatgtttgttgtttttaatgttatgattccacctaagctttcacagctaggcactgccaagaatatagagggaagtcaggaagtctggaaggggaagtggacaatgcaaggaacaaataattgttctcaactataagcaattcttcctctcctttcagatcatgaattctctttgctagggtcttcctgacaccggttaaccaaagggagcctccaggcacagtctccatattctaagatttctgggtgttcaaatgggtccttccatggagtcaccattctacatcataaacttgtataccaatgaaaagttgtcccaggtactattcaaaagaagaaaatccagcaactttacactgcagctcttcattcctccaacgatttgagttttacacagccccctcccaaaggctctgtctatggaagctcataaatgaccagtcaattccaaatggcccgtattcagtttttacccatttgaattctgaccacacctatttctaaaaactgttttctctcctggacatagaacattgctctctctgggttgccctccaaggtagaggtgactcttcctccgtatcgattctccccttgtctttggaatacaattggcccccacctctggtgaattctggcaaggaacatggctccccggagagaagatgcaattcccagatgactgtgcagagagggaggccatgagactatgctcaggtcaataggatgtgagttgaaccgatctgggcaacttctggatgacatcacttacaaaggagccgctagtcccctcctatctcctgcgctttcctacccgtggacatgtgggtatggtggtgcccagccagcttcaaccatgtggatgaaggtaattccctcggggagagcagggaagacagggagggcgaacgcagcctcgtgtaagatcttaatccaatgcagaactgcgaaaacacattatttggtgaaactaaggaaaggtttataatcagacatccctccacacttccctgggctagggtctcttctgcagctcctgcttttggaatccgggggtcttttccaaatcctctgatcgctcctccgcgccttcggggggcagaagcctcaggggtttcaacacctacggctcccccgcccgcgcccacgccaagcagggagaaatcctcagtgcagacgagctgcaaaagatgactccagccgcccgctctgcggagccgcgcccagcgcggcggacccgccaaatctgggggcttcggcccgggggagccgctagactcgcgcctcaggtcccagccccggcggccagcgtctcccgggctgcagggaccggtcaccgtcgggaggtagctgcggccccgagtggccgcaccgcgactccgactctaaatccaagttaggagacaagaaagcattaaaaacgacaggtttcgatctttccgaatccgtttctgatgtgcccgacaagcgacagaggagaaaatgtatgacctttaaaaacaaaagcgccggttctaacgggccgcgggaggcgcgcagggccgctccgaggagggcagacgggaatcggggaggggctcacccagtctcccgaagggcagccgattcctctctcccagcatcaggttgaatctggggttgtctcgccgcagcctcttccagtggccggtggcgaggagcagccgggagacctcggcgtagacgctgctgttctcatcgcgtaccacgaaggtgtacatggcgaagcgccgcgcgcccgggccgccgggcagccgccgcagggaccaggcggccgagaaggcggctcagcgcggaccccgcccgggcgcccgccgcggcccggcccccgccgcccgcgccggctaccgcgcctctcgggtgccggcggcgccgcgcccgggcgcccgccgggtgccggagaggaaagcgccgctcgcacgcccgcccccgccggcgcggccccgcctctgtcccgtgattccgcgcggcccggccccgccgcgctctggaggagcccgtgggcggcggcgccgcgccctttccgtaccctcccccgggggcggcggcggcgcagggttggagacccgcggcggtgggcgcggctttaccgcagcgggcggactgtgcggtggaaccggagcccgggcctggggtggttctttccgagccccgggtcgcagccggggggcggtgccggcggaagatcccagtttgcagggctcgatctgggtttttcttctattgccaaaggacctttaatggataaaacccaaaagttctaaggcccggtcctgtggcctaatgaagaagcgcttcctcttcctctttgcttaacgactacggagacccggagcgtcggttttgtttgtgtcgagtgctccttccttcggctgagcccagggtggcgcacggccaaggggatgaccttagactctgctggtggaagcaggtcccaaaccgaccccctggagccctgggctccgctcttttcctgccttttaccggcattcagccacttgctttcccttctccggacctcgatttccccttatgagcggcggagagtggctcttaaaagtcccttcggttctgatagcccactctgaagactgtgctgctgcatttgagatacaaagagaaggcaatgatcatcagagctcccccaaacttcctacagtccctcataaattacccacatcagccctgcgccttgcatcttttactctcctgtagataaagaacaccctggggcctctccccttcctgtcccccgatgctcacggtatctacccgagcacattgtaaaagcgcccttctccttcccatcgttgcccagattccacggggccgccaggcgctcactcgcctgtcttgcgcaccggctccacctgcaggcaaccgctggctgtggagagcccgctcagagcagaaatggggcagacttagaggtgctgggtgcttgcactccttcccagctgctctccctccacgagggatagagttggtcgagaatgccctggccctctcgccctccgcacgtgccctgcggggaggcgtgtgtcctaggcgtattgcggtggtcctctgtaggccacggctgcggttgtccacagctgcaacttgctcatcagggcatcttctgttggcttccttcctttccctgactaccgatgtttcctgggatcacctcccaaaaaaactactgtactcgtgctcaaattcttgttccagggggcaccgtttgggggaactcgagccaagacgctgtgtttgccgctcttcacggctgatcaccttgaaagtgacgtccactcccaccatgctgcatcaattcctcctgcgactcctactgacgactcctgtgccacaggtggcttctctctgccactccacaaccgtggatctcattaggaacaccagtgacctttgaatttccaaatccagaagctacctttttcctttttctcactttttgtagcgagcaccatttttgtttcttttagctgtaggttctgtacggtactacttattccccaccccacttttttttgagacagggtctcaccatattgcccaggctggtctcgaactcctcaactcaagccatcctcccacctcagcctcccaaactgttgggattacaggcgtgagccaccacacccagcttattcccttttctttgtaaggtaactcatctttcctccttggaacgtgtgtgtgtgtgtgtgtgtgtgtgtgtgtgtgtgtctgttagggagtcttgcactgtcgcccaggctggagtgcaatggcgtgatctcagctcacggcaacttccacctccgggtttcaagagattctcctgcctcaccctcctgagtagctgggactacaggcacaggccactatgcctggctactttttatatttttggtagag

SEQ ID NO: 3941 - DNA, 4001 bp, Homo sapiens
gaaaataaatatttccaaagtagtccttatttgtatctgaggacatttttacactcaggccaatacaccatattaaaatttgggaagtgtgagggatttgccacacacagcctcctaccctttttttgtaagggaagttttagaaaaagagttcattggggccgggcgcggtggctcacacctgtaatcccaacattttgggaggccgaggcgggtgaatcacgaggtcaggagtttgagaccagcctggccaagatggtgaaaccccgtctctactaaaaaatacaaaaaattaaccgagcgtggcagcatgcgcctctaatcccagctactccggagaatgaggtaggagaatcgcttgaacccaggaggtggaagttgcagtgagccaagatcgtgccattgcactccagcctgggtgacggagcaagactctgtctcaaaaaaaaaaaaaaaagttcactgggaagctgaggatctggaaatgtattcatgttaagctagacgtgcaagtgtatcccttggaagtctacaaccctgattactccagcttgaaaaccactgctccagggatatagttctaactcagcaaaacatccaaggccctttgtgatctaacccctattaacttcactctttctatttgttactggatggctccctccaaatctagcccaggtctgtcaaactgtttccagttctcttttcaggacttgctgtccctttcctaaagccactgtgtatctggaatgtcctcccacctctctattcgcagaaaacacttgataatttttcaaggattgattcagtccaatataagtagctgctaactttctgagcacaaagtgggtggtttaaatgcaaacagtgtctcagtattcagtgcaagaaacagaaggatgggatggaacactgtcccaaagggtcccccaaatgctaaatcaacaggtgctgcagttaaagaataggtgatttgtagtatctgagaaagcaaagaagatttcatcaaggaaggattaaaatatttccgagatccagaatgggaatgtgaagaccaggaggaatggcaataatgtcgttttctaagtaagtccggattaagtatttcctgttctatcacagcacacaccacagtatggcaaatgctcgtttacttgattaataatctcctagactgtaaattccgtgaaaacatgcttgtcctattagccactctatcccctcaatccctcccattgtacccaggctcattaaatatttgtcaatgtttactaaaaattgtttagtgaatgattaaataaaggaattgatgaatgaagaattaaattccacaggatctcagatcctgtttgaatctgtggagtttaggaacgtattcttctacagatactgaggatggagaagtgaaaaagcagatatccatgttaaattcggccctggagcctgcgaggagcttgggctcacacccagagggaatttaaacctcagcgcggcaggacagaggaagctcggaggccataactaggggatgaggcagtgttcgggcacccggaggcgaggccgactaagttcgcggggcgtggcggagaggagaagggctccgaggaggcgcgaagtcccggccgggtaggaggccgcggctccctggcctcccgggggatgagaggtggcgggaggaagcggggctagggtgagagtggccggagggctggggacccgcgcgaaaggactcaggtagagggaggtcgggagcgtgggaccggcggagtgtctggggtcggctcccctggctccgcagccgcactcacctaggggatccagcttcgccccggctcggcaccggctccacgctacttcctccctcggcctgctgggctacccggcagcctcaggcgcccctagcaaccacgcaccgccacgcgtgacaagcgcactcggccgccagcgccgctgccgcctgccacacaccgcgcgcgcccccagcggacagaccgagagtctggaagaagagggcgggaggcaagcgcggggaatctcgggggttctggggcctgtaggggcgggtcgtcacctgactcgcgcacgcgcagtcccttcagtgcggtgggatccggcgagcggaattctgggagatgtagtcccgtggttaaagctctgaaaggctccattcggagcatccaggactctctctttctactctaattccacctactccctatggactgttttcttttttagagacagaatctcgctctgtcgcccaggctggagtgcagcgacgtgatcatagctcactgcgaacttgaactcctgctcaagcgatccgcccgcccccagccttccgagtagctgggactacaggcacgccaccatgctgggctatttttaaattttttttctcaggacagggtctcactatgttacccagactggtcttaaactcttggcctcaagtgatcctcctgcatcagcctcctggtcgctgggattacaacgggagcccccacgcctggcctggactctttggccttgcctcaattgaaaatcaaagggcccaggctcagttgaaggatttctagaaaaagcctttgagtttgaccgcaggaaaggggagattgcccgattcactctgcctccctctaacccatccttccctaaccccaacccacccagcggggcaaaattaaaaccacctgcctgctttatgggcttcaagtgtgaacgttaggaaatactgactcaattccttatctcgttagctccccaggcaagccagatcgcgctcctgcctcagatgtccgtagacctgagagatttggagatctaagaaagctggaagatgaaaggatctttcctaggcaattggctacagaaataaaggggacaaagataaaactaatctgatgaaaacagtctggaccagaggaaggatctcaataaataacttatttagtcaacagtcgttgatggatgctaaaagtattagataatttatgggagaattttacactgaaggatgtacactgaagataacctacatgtactaatcaatcttagatcacgaaacatgggacagctgagcattgtttcttgatgtgatgcaattgaacagaaatatttatgaagtatagcgtatttttgtaaaaaaaaaagttgagtgactctaatcaagttttggctgtaatttccagttaacaagaaataaagagaaacaactgtataacactacaagaaagcaatcaaacaaatccagaatgtgagccaatgtacagaataaatgacctcttcttccttcaacaattttagggtataaaaatgaggagagatgttttagattataagagatttaagaaatatattcaaatgttggccaggtacagtggctcacacttgtaatcccaacactctgaggatcacttgaggtcaggagttcaagaccagcctgggcaacatggtgaaaccccgtctccaacaaaaaatacaaaaattagccaggcatggtggtgcacacctgtagcccccagctactcaggaggctgagacaggagaatcgcttgaacccaggagacagaagttgcagtgagccaagattgtgccactgcattccaccctgggcaacagagcaagactccctcttgagaaaaaaaaaagaaatatattcaaatgcaatgagtgcagcttgtttggatcctgattcaaacaaactgtaaaatgacatttttgagactgagaaataaaaattttaagtaccaccccaaccaacttaatggaccccatcgtggctaaggggacactagagcaaccttaaaaactgagttcccggccgggcgcagtggcttacgcctgtaatcccagcactttgagaggccaaggcgggcggatcacgaggtcaggagatcgagaccatcctggctaacacggtgaaaccccacctgtactaaaaatacaaaaaattagctaggcgtggtgacgggcgcctgtagtcccagctactagggagg

SEQ ID NO: 3942 - DNA, 4001 bp, Homo sapiens
ttctccccaatatttttcgttcactctatatttataaagttgacattgattcagacattatctgattacttaaaatagttgccagaagtaaaaatctgaactttgtaatctctttcctgactggagaagctttggcaagccttatcaaatatgcaagctttttgtagacggcatacggtgctttctatttcttaacatttcttcatactgtaactgtgcagtaaatgttgttactgctgaagtaaatattcagaaaaatttaaattttagtgaacaggccaaagtttattatagttctgaaagaaaaatgctggcttgagttcttaatatggaacaatttgcaaactttgaataatggaaggctggtgtaaaatgtagatgaagtgaaaaggcctatgctttcataaagtaaaatattcaacatcaaagaaacgaatataaaatttgcagttaagtcattttgttaagtgcaagaaagtactttgcctatcagtttcagagacattatgtgaagaattttctgatgcataaatacctaattattcaacatgactattctgttctgaaatagaacatttctgaattgtcaatcacttcattactatttttcattaaattctttgtttactaaaacttcatggagcaataatcttcttagtgataattctgttccttactgtaaccttctacttagttaaaaaaatgaaaccagcattctctgagacaataaaatttatatttggaaaaatcagataatatccaaaagctttcataaattttttttgtcagaaactcctttttgtagcatattatctttgggatgaacaactttctgtgtctaactttgtctgtttataagttagtatatctaaaaatagctgtcctcttagacatagaatacctaattatatatctatgtatttacaggcattgacaattagtaatcaaattctaggaagatgagaaatcaaagtgtatttagaagtaagaaacctttcctttaaacattatttcttacccttcttagtgtcaacatttatctcaaaatatataattggactgtgtgctgagttaaaatgcatgaagagattctgaatattttagaaaacaattatatcattttattccaaatctccaactatgttgcaattaaccagcttaaattgatcttacattcctattgtctaggtaaattttattgccttagcacttgctcttcacaggcctttgtctaactggggctgaaggtatgcgtctaaaatgtcatgctcttaaaataaactctcctaaactctccaaggttgactgacagcaggcaagtgttctgtcactgtcctgcaactgatacctcagcagttgattcccttaaaaagtcatcagggtgtagctgataccacatgcattttatcagagctattcttggtgtgcttaactttatcattgagtaatataaccttgaacattctcaacaggcaaagagagtctagaaaagaagtaaacatttctctcaacatttcagacctcaacttttagaatattaagtgaacttaaacaatttgaatcatggaatcatttagctgatataataaagctttcaactttttaaggaaaaatgttcagacattttaaaatagaatttaacaagcagatttaaataatgggtcagcactggcaagaaatagtcatacaaacacttgtacataggcatttagcacacacaaataatccagagccagagatcaataagaaagtgactctactattaaaataagaaaagttgctgctcacctgatttctcaagagtgcctaaaaagggtgggactaagcccaaggttgcttctgaaacgacgtcctatggagagttggtttttctgaccatctccgacatgaatcggtgagcctctaatcctaaaaacaaaactacacagtcaagactgtgtagttttgcttttctatgcaatccctacacccgaggcgaggctgggaatgcacgactgctcaagagccagggtctggcctgcccttatattcaccagatctgctgacagccccacatccttaggcagggccctgggtgattggctgtcttaggaaagcatgatgggagaggacctatttggtagtgtcacataccacctgttcttctgattgacagtgctaaatttagtacctcaaaggagacttcaccaaggaaatagaactgtatttaaagaataactgtgttgaggctcagagaagagcattggttgctgatgttaaaatccgaaaatgcaggtttaaagaggtgtgacagtagatagcacttgtgggcagtcatacaaaagagccccaaacctgaggactgtgccctgagtcaggccccagtcctgttcccttcccccataaaacaaaccaaatggacctgtcaatcatgacagcagatgaggaaatttatctcaagcataaggcttcatgttctctgaagaatcagttgctataaaccttaacgttgaagagagctcatttgtactacctacattctccagaatccacttgtatttcggggacagttacactgatgttaatgagcttattgcttatacaaccctgcaagatataatgttgaaaggcaaaattggaactctgcttaggttagtctgtacagtacaatgatttcacctttgtcagatttcatttttgtctggcattaatatttacaaatatgtgtgtactgctccttagtaagtagccaggtcttatgcttaaatcatccataaggttccttttccagacacatgaatgctgttctgctaatctctggagtttgctgttactaatgggaagtggataggaggtgatatagttgctattttaggactgaatttaatttcaagcaagagatatttcaaataaaaaagagcacaccaaaagatctttataatgactcagctgagagatttgtgaaactctacttagagggaggaaaattgtcttgttgataatggaaagagacttttatcaataaaagagactaaaatttttaatttaagttaaatttctttatgtctgtaataaaaatattccctgttatggaagaatttggccatgcattaaacttttcaatttcttgagtatttcatatcttgtatttatttatatagtgattaatatgttaatgtttaacagtttaaatttactgacaactaatgtagtatagttatgttaacaagatgacgccatgtacttatttaaacatttttctcctttacttaagtggtggtatctgtattggtggcaccatttccacccccatagatggcatctgctataattctatttgattgctttattcagaaacaactggtttcatattatatactttgaaaattattcccactgagagatttgtgttacaaagaatctgccagtcataaggcaaagaaacactagaaatgtatgatctttctgttttggagtgttcaccaattggctatctatttaagatacgtttgtgcatatttgtgtgtgggtatgtagtgtgcgtgtgtgtatttttagactcatttgacctaatgtgaagcacattaatgttacgttatgtttgttggaactaaagtcaaatcattttaattcttacgggaactagagggaagaagtgactataatctggaagcctgcgtcatcttgacatgatgcaattcaggtaactcaagagccaagaagatggaccatatgttataaacataaagtcaagtgtctgtcctcttaagctgattgtctagtcactgttcttagacttttctagaccctgcctgccagcctacatctttctcccgagctggatgcttcctgccctcgaacatcggactccaagttcttcagttttggggcttggactgtctctccttgctcctcagcttgcagacagcatattgtgggaccttgtgattgtgtgaattaatacttaacaaacttccctttatataaatatatatatgtatgtatatattcttccctatata

SEQ ID NO: 3943 - DNA, 4001 bp, Homo sapiens
tcgctgtgaaaactaattgctgtaaaccatactagctagtaagttctagaggtagccctagaacctgtttgccactacacaaaacttaggttattttaaaacttggaagccatgtaatgtcaataatcaaccccacattatagcccgtcacagtaattctctgaagaatatgtagcagtttttgattatgtcctgatcaaaggataaggtagtcgggttgggtaaggaaatacagagtaggtcccaggtcaccatggtccaagcccaggtgctcagtgtgtgtcctctctctaccccccagttctaccccgtccatcattcaccacctgctctgtgctctcgaaggctgacccttgagaacagcatcagaggccttcctcgccctctggcttcttgctggtttggtcaatggcaggcagcagtgggatactggggggctggagaaagcagtgccagggtactccctccttggccccttcctgctcaactgctgtgggtgacctgaatccctctcaaggccacacttttggcaggctgccctcttcataaaactaccctcccaatttcttgtaaccactccctctctctaccccttgaagcctgtaatggctcccagacgtcattagtgctgggacactgcactgtcctttggtggtttctttaaaccctgccaagctgggtgtggtggctcattcctataatcccagcactttagaaggctgaggtgagaggatcacttgggaccagtttgagaccagcctgggtaacatagtgagtccctgtccctatgaaaaatctacaaattagccaggtgtggtggcacacacctgtagtaccagctactcggaaggctgaggtgggagggctgctggaagccaggggttcaaggctgcagggagccgtgatcctgcaactgtgctccagcctgggcaacacagcatttgttgagtgctgtctcaaaaaaaaaaaagaaagaaaaagaaaggaaaaaaaggataactgacaaaccacagctattcagacttgggacttgggaatctgttatgttaatgggctgctttttttgtttgtgtctttgaggcagggtctctgtggcccaggctggagtgcactggcgccatcacgactcactgcagcctcaaagttccaggctcggctgatcctcccacctcagcctcccgagtagctggaaccacagactcgcatcaccatgcccgggtaatttttgtatttttttgtagagactgggtttcgccatgttggtcgggctgatcttgaactccagacatcaggtgatccgcccgcctccacctccccaagggctgggattccaggcgtgagccgccgcgcctggcctaacggttgcctttaggtgaacaaggcaatgttgcagcagcgtctgagccttaattcctcatctgatcaatgtccacagccccaacccccgtcaccgaaggctcctggggctcctcagttgtttcgagtagcacaaagacgtgtgaagcgggagcagcgccctcccgtcttcaggaggcgacgccactatttgctctctgggggacgggacaccgtcaatggtcccgttcactaaaggccggcagcttcatctaaaacaaaagccgccgtccctgccctgggacccaaagatccaggaaacgatcccgtgtcctcctgtcccgcactagaccctgcgtccttctctggcctcctctcagcgcccaggcccgcaacaacgtccctctgtccacccgaggccaacttcgtctgcctgggcatctgcggggcgggagtgacccgggccttaccatggcgaactccgctgcttcagcccaacgctactgccagacctcaaccggctgccacagctgctgagcgcccaactgcaacctcctgcctgtgcgcgccgcacgggattggcccgccggtgccaggccgccattggctcggagttcctgggaggcgggctgagggccggatcccagttctgattggccattgctcaacatgtgtactggggacgctctctgattggatgtaggattggcgggaaggcagcgggggtcatcaaaggctgcgcggttgctgaggcatttccggggtgtcttctgaccagggttggaacagctactgcgctgcctctgtgggtcgcggaacattgccttgctcccagtgtgccactgcccctccctgattgccccaggcctgcccctctccctgcctaattcagatctttgcaaacaaggccacctctgagaggccttgccgccatctacccaagtcacagcagcaccgcaattatccccctcttccctgttcccacccagcacctgggaagtggcaggattcaatcacttttgtgacccaaaaggagaaaacgggccgggcgcgatggctaacgcccgcaatcccagcactttgggaggccgaggcgggtggatcacctgaggtcaagagttcccaagaccagcctggccaatatggtgaaaacccgtctctactaaaaatacaaaaattaccctggctggtggtaggcacctgtaatcccagctacacgggaggctgaggtaggagaatcgcttgaaactgggaggcagttgttgcagtgagccgagattgggccactgcacactccagcctgggcaacagagccatactccgtttcaaaaaaaaaaaaaaaaaaaaaaaaaaggaagaaaggaggcaaaattaacgtaagtggagacgttgggtcaggcacaccagctcatgcctgtaattccaatgctttgggaggccatggcaggaggactgcttcaggtcaggagttcaagaccagcctgggcaacgtggtgagacccaccttgcccgtttttacaaaaaatacaaaaaaataaaataaaattagcaaggcacggtggcgcatgcctgtaatcccagctactcaggaggctgaggcaggagaatcccttgaacctgggaggcagaggttgcagtgagctgagatcacgccactgcactcaagcctgggcgacagagcgaaactccatcttgaaaaaaaaatagagtttatttgggccaagtttgagaagtgcaaccctggagatgcaagttgtcttaatatattggcagcagttataagtgggttttataaaggaaaagaagaggcagttcctaagttgtttaccaagaatttgaaattagagaagaagtcttgctgtgttgtccaggctagtcttgaactcctgacctgaagggatcctcccaccttggctggcctagcctgaggaatttatatgaaaataacgtaagctatttattgggtcaggcgtggtggctcacacctgtaatcccagcactttgggaggccaaggtgggaggatcacttgaggtcaggagttcaagaccagtctggccaacatgatgaaacccttcctctactaaaaatacaaaaattagccaggcatggtggtgagcacctatagtcccagctacttgggaggctgaggtaggataatcacttgaacccgggaggcggagtttgcagtgagtcaagatcacaccattgcactccagcctgggcaatagagtgaaactccatctcaaaaaaaaaaaaaaaaaaaaaagaagaagaagactgggcgcggtggctcatgcctgtaatcccagcacttagggaggccaaggcaggcggatcacgaggtcaggagatcgagaccatcctggctaacacggtaaaaccccgtctctactaaaaatacaaaaaattagccgggcgtggcggcgggtgcctgcagtcccagctactctggatgccgaggcaggaggatggcatgaacccgggaggtggagcttgcagtgagccgagatagcaccactgcactccagcctgggcaacacagcgagactctgtctcaaaaaaaaaaaaagctatttattgtctctacattgtctacattgtctttggtatcacaaattccaggaacaggaagataatgggttgagctagtcaggaacaaaatgcc

SEQ ID NO: 3944 - DNA, 4001 bp, Homo sapiens
agtgcttcagtatctggcgctttcacaatcgatatttcctaggagggttagtgactgatccctttatcgctgtgaaaactaattgctgtaaaccatactagctagtaagttctagaagtagccctagaacctgtttgccactacacaaaacttaggttattttaaaacttggaagccatttaatgtcaataatcaaccccacattatagcccgtcacagtaattctctgaagaataagtagcagtttttgattatgtcctgatcaaaggataaggtagtcgggttgggtaaggaaatacagagtaggtcccaggtcaccatggtccaagcccaggtgctcagtgtgtgtcctctctctgccccccagttctaccccgtccatcattcaccacctgctctgtgctctcgaaggctgacccttgagaacagcatcagaggccttcctcgccctctggcttcttgctggtttggtcaatggcaggcagcagtgggatactggggggctggaggaaagcagtgccagggtactccctccttggccccttcctgctcaactgctgtgggtgacctgaatccctctcaaggctacacttttggcaggctgccctcttcataaaactaccctcctaatttcttgtaaccacgccctctctctaccccttgaagcctacgggtgtaatggctcccagacatcatcagtgctgggacactgcactgtcctttggtggtttctttaaactctgccaagctgggtgtggtggctcattcctgtaatcccagcactttggaaggctgaggtgagaggatcacttgggaccagtttgagaccagcctgggtaacatagtgagtccctgtccctatgaaaaatttacaaattagccaggtgtggtggcacacacctgtagtaccagctactcggaaggctgaggcgggaggactgctggaagccaggggttcaaggctgcagggagccgtgatcttgcaactgtgttccagcctgggcaacagagcatttattgagtgctgtctcaaaaaaaaaaaaaaaagaaaagaaaagaaaaaagaaaaagaaaggaaaaaaaggataactgacaaatcacagctattcagacttgggacttgggaatctgttatgttaatgggctgctttttttgtttggttttttgaggcagggtctctgtggcccaggctggagtgcactggcgccatcacgactcactgcagcctcaaagttccaggctcggctgatcctcccacctcagcctcccgagtagctggaaccacagactcgcatcaccatgcccgggtaattttagtatttttttgtagagactgggtttcgccatgttggtcgggctgatcttgaactccagacatcaggggatccgcccgcctccacctccccaagggctgggattccaggcgtgagccgccgcgcctggcctaacggttgcctttaggtgaacaaggcaatgttgcagcagcgtctgagccttaattcctcatctgaccaatgtccacagccccaacccccgtcaccgaaggctcctgcagctcctcagctgtttccagtagcacaaagacgtgtgaagcgggagcagcgccctcctgtcttcaggaggcgacgccactatttgctctctgggggacgggataccgtcaatggtccccgtccactaaaggccggcagcttcatctaaaacaaaagccgccgtccctgccctgggacctgcagatccaggaaacgatcccgtgtcctcctgtcccgcactagaccctgcgtccttctctggcctcctctcagcgcccaggcccgcaacaacgtccctctgtccacccgaggccaacttcgtctgcctgggcatctgcggggcgggagtgacccgggtcttaccatggcgaactccgctgcttcagcccaacgctacttccagacctcaaccggctgccacagctgctgagcgcccaactgcaatgacctgcccacgcgcgccgcacaggattggcctgccggtgccaggccgccattggctcggagttcctgggaggcaggccgagggccggatcccagttctgattggccgttgctcaacacgtgtagtggggatgctctctgattggatgcaggattggcgggaaggcagcggggtcatcaaaggctgcgcggttgctgaggcatttccggggtgtcttccgaccaggattggaacagctactgcgctgcctctgtgggtcgcggaacattgccttgctcccagtgtgccactgcccctccctgattgccccaggcctgctcctctccctgcctaattcagatctttgcaaacaaggccacctctgagaggccttgccgccatctacccaagtcacagcagcaccgcaattatccccctcttccctgttcccacccagcacccgggaagtggcaggattcaatcacttttctgacccaaagggagaaaacgggccgggcgcgatggctaacgcctgcaatcccagcacttcgggaggccgaggcgggtggatcacttgaggtcaagagttcccgagaccagcctggccaatatggtgaaaacccatctctactaaaaacacaaaaattaccctggctggtggtaggcacctgtaatcccagctacacgggaggctgaggtaggagaatcgcttgaaactgggaggcagttgttgcagtgagccgagattgggccacagcacactccagcctgggcaacagagccagactctgtctcaaaaaaaaaaggaagaaaggaggcaaaattaacgtaagtggagaggttgggccaggcacaccagctcatgcctgtaattccagtgctttgggaggccacggcaggaggattgcttcaggtcaggagttcgagaccagcctgggcaacgtggtgagtcccaccttgcccgtttctacaaaaaataaaattagcaaggcatggtggcatgcgcctgtaatcccagctactcaggaggctgaggcaggagaatcccttgaacccgggaggcagaggttacagtgagctgagatcacgccactgcactcaagcctgggtgacagagcaaaactccatcttgaaaaaaaaaatagtttatttgggccaagtttgagaagtgcaaccctggagatgcaagttgtcttaaaatattagcagcagttataagtgggtttttaaaggaaaagaagaggcagttcctaagttgtttaccaagaatttgaaattagagaagtcttgctgtgttgtccaggctagtcttgaactcctgacctgaagggatcctcctacctcggctggcctagcctgaggaatttatattaaaataacgtaagctatttattgggccaggcgtggtggctcacacctgtaatcccaacactttgggaggccaaggtaggaggatcacttgaggtcaggagttcgagaccagcctggccaacatgatgaaaccctgtttctactaaaaatacaaaaattagccaggtatggtggtgagcacctatagtcccagctacttgggaggctgaggtaggataatcacttgaacccaggaggcagagtttgcagtgagccaagatcatgccattgcactccagcctgggcaacagagtaaaactccatctcaaaaaaaaaaagaaggcagggcgtggtggctcacgcctgtaatcgcagcactttgggaggccaagtcaggcggatcgcgaggtcaggagatcgagaccatcctggctaacacggtgaaaccccgtctctactaaaaatacaaaaaattagccgggcatggctgcaggtgcctgtagtcccagctactctggatgctgaggcaggaggatggcatgaacccgggaggtggagcttgcagtgagccgagataacaccactgcactccagcctgggcaacacagcgagactctgtctcaaaaaaaaaaaaaaagctatttattgtctctacattgtctacattgtctttggtatcacaaattccaggaac

SEQ ID NO: 3945 - DNA, 4001 bp, Homo sapiens
ctttctttcctgtaagctgcagaggtgtctcagccatccaatctggcatcaactgaccacacgccatcaggatgccctcctccctcacctttaaatcccatctggctctggggatcaatcccatctggctcctctccccacctccacccccgcaccctgggtgtcttcaccactttcatctcccgtgtcagcccgcacggaaatagcggcggtaatgcttgtaagctcagacagcaggggccagcaataaggtttgagggtactggggcgctcactgccttaggctccgtccctgtcagcccgaaattaacccctaaagcactaaagtccggcagggcccgcgcgctcttcccacaccgaaatggcggggtgacggtttccaaatacccagaaaggaagtggaacctgcggtgaggccccagaggtgacccgccttgtcccgggcaggatgggcgccatcctgcagcccagccctacatccgctctccctctggagtctttacagttatttcccagcccaaagcggggattgggtttcggcccccgctcctgggctataaataccaccccctacatgcacctctctcccctccccccaacctggcctcggcccgcgcagtgctcagcgccagctgtctctgcccatccgcgcacccgggcttcggctggagagggccagctcgcttcaggaggccgaaccccgttcccaccaaccctctcagctcagacgcggggtgctgagtcacggggggggggtggttctgtggatagttggaatgcatacacagaggaaagggggatgcggcaccaggtaacctgaccccttccaccttctagcgccaagcacgtgctcggtcagtgctgaggaccagggactggggatgtaagagggcagccaaacccgtcttcttttgcccgcggaaaggacggggcgcgggcccgcgtgactctcatacagagtcgggacacaaatgctcgtaaggcaggagcagagtgccaggaagggttcctctctgttactgaagagtcgcactccaccccaagccccaaccccagccaccgaaggtgaactatacggctcggccaaagtcaccaggagggggttggggagggaggatgcaaaaccctcgcacctcctggagacccggaacgcccggtggaggtccccgagcatgcctggaagaagtgtcccccaaaggagaggggcaattaggggacaggcgcgaccccggccgggccgcactcaccatggtgagtccgggcggtgcgtctcacgttgagtcggggtgacaggtctcagtgagaactgcgctagctgcagtgccgcaccgcccttataggcggggggggggcggggcccgcgttccccgctcgcccactagaggctgggcggcccgcaggccacgcctcccgggagggtaagcggcccccccgaggggcggagcctggcctggtaccctccccaagctgcgcgggggtccctcacctgtcccgctgggattaagagtcgcgattcgggctttaaccattctttcctcgttttgagcagacacgctgggctcccgagggcctccgcggagatgcagggtgctgtggcagggcgagtctcacctgcacctgcgtcctggaggcaccggtcatccaggtgttctgacttaggtcgggagcaggcgaggcggtccttcccaagcggccacagctggccttcacccctgcccttccagccctgcctcccaggagactcgggccggctgtgaggctgtggcgcgtccccggggagcccttgccagctgcctgacgcttcctggtccccggccggggcggcagcctttcgccgacgcctgtgggcggccgaggacccagaactgcacagcctgagccccagattgccaatgccttaggcgctcccgcagagtcgagccccgcagcctgtctgccggggccgaccccggaatctgccgcggctcgccggccgcccgcgggtcagtggcgctgtcatcagcgcagtcactatgatgccctcgctgagggcacctgcccactcccctgctgccagaactgcgggagcgctgaccgggggacctcaggacctggattctcctccaggctaccctgtgtgaccttgagcaagtgacttaacctcactgagtccttgacattttcgtgggtgaaaaggagacagtgatgtcatagtggaaacattgttgtaagctatcaaaatgtctgttgcctctgaagagaaaagaagaaaatcgagattctcatatcttggatgattctgactcttggtctcttctgtctctaacccaagagcaggatctgcaacccgcaccttaatggtctcagcactcagcccctggtctccgcagaagcccttctttctacatttcattccgttctctccaccccatcttttcaagctacttctgctttctctttctctctctctctctctcttttgagtcagtgtcttgctgtgtcacccaggctagagtgcagtggtgcaatctcagctcattgcaacctccatctcccggctcaaggccatccttctacctcatccttccacctcagcctcctcagtagctgagaccacaggcgtgcaccaacaccatgcccagcttattttatttatttatctatttttgagatggagtttcgctcttgttgcccaggctggagtgcaatggcacgatttcggctcacctcaacacctgcctcgcgggttctagcgattctcctgcctcagcctctggagtagctgggattacaggcatggatgcctggatgatttttgtatttttagtagagacggggtttcaccatgttggtcaggctggtctccaactcctgaccttagatgatccacctgcttcagcctcccaaagtgctgggattacaggtgtgagcccccacacccggccttattttttgtatttttagtagagacaaggtctcgccatattgtccagatttgtcttgaactcctgagctcaagcgatccacccgcctcaacctcccaaagtgctgggattacaggcctgagcaaccaccccagcctgccttgcattttctaattgtctcccttcactggggaaagtcatctggcagtgccccaggtgctgctggtttgcagatcttaagaaacctgtcttcctggctctacatcacttggaaaggattcacccctccctcccccatcacctgacaacacaacataataccatgaaagaactagtgatggcaactctctatcaacaaaataggcaaggcatggaaaggaatatagtgaaatatgacaaggtctttcttcccagtagacttgccatctgattgggagaacaagactcattcataaaaagaaaactgacaggggcgtataatgaggcttctttggggaataaggtcatggtccctacaaagaaaggagccgtggtgactataggacacatggcagtaggttgcagaccctccctgaacctctttttccttgtgctctcctatcctagcagaatgaacatagtaagagacttgagctatcttaggaaaaactctaaacctctttgaccttcaggtgcagattcttcatttgtaaaaccgggataacaacttcagattgtgaatatcagatgaatttagagatgtacatattcacatcaaggcactgtgtaagtagctgtgacatttattttagtgcatatagcacatcatgctatagttatttgtgtacatgtccatcttaatattatagatagcaaactattggaggtaaggactgtgtcttattcatctttgtttctagctcctagcatagtgcttagcacacctggtaagcatttgctaagtgtgtgtcagaagaattgtttcacttcagagatggtaggcagaagaatgctaccccataaagatgtccacatcctcatctccaggacctgtgactgttaccttacatggcaaaatactttgaagatgttattaaggtaaagatcttgagataggga

SEQ ID NO: 3946 - DNA, 4001 bp, Homo sapiens
tccagggagaagctttgagtcatgctccacccccttcaattttgtccccacttcctctcaccaatgaccgtaggctccagatccacaaaaactgcccggggtacgtgttttccagcaccagtttcacagaagaaggtggtgaaggagtcgtcccctccaccaatggtcttgtcactgggcatctgcccatcaggctgaatcccatgttccaagcaatagagctcccagcaggcattgcccatctggacacctgcctgccccacgtggactgagatgcattcacgctgagggatagagagaggggacacagcatgagccccacatccacaagtcctcaccttgcgagtctctcttccaccctatcatctaccagctaggatgactcagttggcaagagtggagggttggggctgggcagaggtgagaagagagtagcagcctgcccgggctcccaggtacaggactccccacctggaggcacccagcaatgcaggccaacctcttagcccacttctcagtggggaatctgtcaagtgagcactgtggctccacatgacaaaaggtttcctagaggtatgggtttacagctagaggccccccccccacttgattaattatttgctttgagtatgaacagctagaattcatagaaccctttccctctttctttcctgtaagctgcagaggtgtctcagccatccaatctggcatcaactgaccacacgccatcaggatgccctcctccctcacctttaaatcccatctggctctggggatcaatcccatctggctcctctccccacctccacccccgcaccctgggtgtcttcaccactttcatctcccgtgtcagcccgcacggaaatagcggcggtaatgcttgtaagctcagacagcaggggccagcaataaggtttgagggtactggggcgctcactgccttaggctccgtccctgtcagcccgaaattaacccctaaagcactaaagtccggcagggcccgcgcgctcttcccacaccgaaatggcggggtgacggtttccaaatacccagaaaggaagtggaacctgcggtgaggccccagaggtgacccgccttgtcccgggcaggatgggcgccatcctgcagcccagccctacatccgctctccctctggagtctttacagttatttcccagcccaaagcggggattgggtttcggcccccgctcctgggctataaataccaccccctacatgcacctctctcccctccccccaacctggcctcggcccgcgcagtgctcagcgccagctgtctctgcccatccgcgcacccgggcttcggctggagagggccagctcgcttcaggaggccgaaccccgttcccaccaaccctctcagctcagacgcggggtgctgagtcacggggggggggtggttctgtggatagttggaatgcatacacagaggaaagggggatgcggcaccaggtaacctgaccccttccaccttctagcgccaagcacgtgctcggtcagtgctgaggaccagggactggggatgtaagagggcagccaaacccgtcttcttttgcccgcggaaaggacggggcgcgggcccgcgtgactctcatacagagtcgggacacaaatgctcgtaaggcaggagcagagtgccaggaagggttcctctctgttactgaagagtcgcactccaccccaagccccaaccccagccaccgaaggtgaactatacggctcggccaaagtcaccaggagggggttggggagggaggatgcaaaaccctcgcacctcctggagacccggaacgcccggtggaggtccccgagcatgcctggaagaagtgtcccccaaaggagaggggcaattaggggacaggcgcgaccccggccgggccgcactcaccatggtgagtccgggcggtgcgtctcacgttgagtcggggtgacaggtctcagtgagaactgcgctagctgcagtgccgcaccgcccttataggcggggggggggcggggcccgcgttccccgctcgcccactagaggctgggcggcccgcaggccacgcctcccgggagggtaagcggcccccccgaggggcggagcctggcctggtaccctccccaagctgcgcgggggtccctcacctgtcccgctgggattaagagtcgcgattcgggctttaaccattctttcctcgttttgagcagacacgctgggctcccgagggcctccgcggagatgcagggtgctgtggcagggcgagtctcacctgcacctgcgtcctggaggcaccggtcatccaggtgttctgacttaggtcgggagcaggcgaggcggtccttcccaagcggccacagctggccttcacccctgcccttccagccctgcctcccaggagactcgggccggctgtgaggctgtggcgcgtccccggggagcccttgccagctgcctgacgcttcctggtccccggccggggcggcagcctttcgccgacgcctgtgggcggccgaggacccagaactgcacagcctgagccccagattgccaatgccttaggcgctcccgcagagtcgagccccgcagcctgtctgccggggccgaccccggaatctgccgcggctcgccggccgcccgcgggtcagtggcgctgtcatcagcgcagtcactatgatgccctcgctgagggcacctgcccactcccctgctgccagaactgcgggagcgctgaccgggggacctcaggacctggattctcctccaggctaccctgtgtgaccttgagcaagtgacttaacctcactgagtccttgacattttcgtgggtgaaaaggagacagtgatgtcatagtggaaacattgttgtaagctatcaaaatgtctgttgcctctgaagagaaaagaagaaaatcgagattctcatatcttggatgattctgactcttggtctcttctgtctctaacccaagagcaggatctgcaacccgcaccttaatggtctcagcactcagcccctggtctccgcagaagcccttctttctacatttcattccgttctctccaccccatcttttcaagctacttctgctttctctttctctctctctctctctcttttgagtcagtgtcttgctgtgtcacccaggctagagtgcagtggtgcaatctcagctcattgcaacctccatctcccggctcaaggccatccttctacctcatccttccacctcagcctcctcagtagctgagaccacaggcgtgcaccaacaccatgcccagcttattttatttatttatctatttttgagatggagtttcgctcttgttgcccaggctggagtgcaatggcacgatttcggctcacctcaacacctgcctcgcgggttctagcgattctcctgcctcagcctctggagtagctgggattacaggcatggatgcctggatgatttttgtatttttagtagagacggggtttcaccatgttggtcaggctggtctccaactcctgaccttagatgatccacctgcttcagcctcccaaagtgctgggattacaggtgtgagcccccacacccggccttattttttgtatttttagtagagacaaggtctcgccatattgtccagatttgtcttgaactcctgagctcaagcgatccacccgcctcaacctcccaaagtgctgggattacaggcctgagcaaccaccccagcctgccttgcattttctaattgtctcccttcactggggaaagtcatctggcagtgccccaggtgctgctggtttgcagatcttaagaaacctgtcttcctggctctacatcacttggaaaggattcacccctccctcccccatcacctgacaacacaacataataccatgaaagaactagtgatggcaactctctatcaacaaaataggcaaggcatggaaaggaatatagtgaaatatgacaaggtctttcttcccagtagacttgccatctgattggga

SEQ ID NO: 3947 - DNA, 4001 bp, Homo sapiens
aaaagaaatagatatgtttgggagaataggcggccgggtgctcttgattaatctaaattccttctgtgtgaagtagagtcttttataaaaacatcgcaagatgtgcgaggaactaaaacatactaagggggaaggatttttaactcggccccagcaaaaagaactctgtgcccctccatggccctggatggcggatgagagaggggctcgcctgctcacagagcctaaggacggcgcctccgtggctcgagcttgtctaaagggacttggaaggtgtctggtgaaaaggacccggtgcaggacgccctaatcgctcttccagaggaaaccagaacttggagtgctcctggcagctgtgtcccccgagccttctcctcgcgcagggcccggcgcgcacagcctccctgtcccccagacccgtttcccagcctggacccctcgcccatccctgcggggctggatgggcggggcccctcccgggtactccagggtcaaggttgggactcagggctcccagttcctaggtcagctccacctgcctgcgggcgccctggggctccgcgcggctgcgtcggacccgcctgcctcagcgctccaggctctgcgctctcggcccagggcccttctcgggcacacccggccctgtggctgctctggccccgaagcgcagggcagtttcctcccgtcctccccaggcaaaccctggagccgcaggcccgcacctctacgcccactgggcaggccagggcgccgacggccggggaccccaggcgcgagcagctgggtagatctgagtgtccgcccgacggacgcgctctacccttgcccaggaagaaagcgaagccattcgcccggcaacacccggctcgggcagcttcgcgggcggcctgcgctgcggcggacgcaaagggcagctggtcctcatatcccagtccccagccggccccaggaggtttttctgatgctcgctccttccaccgccaaccacggacacccacacaccaccgagaatgaaaactgcgaccatctgtctaagtatcttcagaacccgccgggggagtcaccggtccgccggttcccaactgacaccctcgcgtggaagtctgcactcaggggtgtccctgggactgtgagcgtcccgcccgcccgccttccttgctaagaggaaaagcgcacggcatccaagcccccgcggcccgcggggcctcgccgaggagacacgagcaggccccaatgcccctgcgcccctgccgcccgccccccgcagcggagggcgcccgtcgcgcgcgcagcacctaccctggcgcgccggtccggaggtgggtggcgcggcgctagtgggaggcggacatggaccacgcgccctccatgcgccacacggagaaggcgtagctgaggcgctcgtgggccacgtagctgcagctggtcatcttattgtccatctcgtcgctctgcaggacctggtagaggaagtctatgtacctggcggccagcttgagcgtctggatcttgctcagcttgtcagagggcagcgtggggatgatcttgcgcagcgccgcgaaggcctcgttgagcgactgggtgcgctggcgctcgcgcacgttggccaggatgcgctggctctgcagctcctcgaaggactgcgcgctggggctgcccttcttgccgcgcttgcccggggtcgggctgccatcttcgctcgacttcttgctgtagcgccgcttccggccgaagcgcttgggctgcctctcgagctcctcctcgctggtgcccaggctgtccacgggggacacgggcgagctggagccctcctccatggcgcccgcccggcgcgcgtggggctgggggcgccggggcgccgagcgcgcgccgctggccaagcccgcggtcgccgagcacacgctctcggagttgctggaaaggctctgatttcaaggccggcttgtgcaaaaccgaggtctccgggagaggaagttattctaacttttttggaaactctagctgggctgggttgctaaatagttgtcaggagctagggcggcgcgctgattggccgcggtggccgggggcaggacaagttctggggccttcgccggccgcccccgccccccggcgcggcactttcagttttgcctcccccttcggccccggcgcggagggcatcccgggggccgggtcctcgcccgccgcccgcgcccccaccccgaacgcagggcactctcaggccgccccgagccctaggcccggccaagcctggctttgtctacgcctcaacgtagagatcggcccccactgggctttggggggttctctctctgggcgtgaggggctagagaggcgagtccagtcccagatgcgctcccagaagatgaggacgcagccaggagcctcctcgacctgtgtgggtcttggccgcccccgggcgcacagctagtctgcaccgcggcccgcaagcttaggcctggggtctggggagctgcgcgggcaggggtctcggtgtccggaccgccagtgtaaggacagtcggggccccctggagacgcccgtgcccaaggacatgccgccaagatccgtggagatgccacccttcggccagcgtgcgtgtcggggaccatttcttaccctggcttgctggggagccccggccccgacgcccttcccgaaccttccttctaacagctttaaaacaacgccacagcgagcctctgcgggagcgcccggtacccgccgcgcccgcctgcctggccctacccgggttgctgggcgcgggttggggcgcctgccggcccgccttgtacggccccagcctctgcgctccgccttcgcttcgcgggtcagcagaggacggagggcgctccgggagctgcacgaggctgccccgggcccagcctccgctgcgctggcagcccgcgggcagctccgagcaggaggctcagggtggctggagtgtggggcccggcctcggtgagcgacaccacggaccccggccccgggccatctggacggcgagcgcgagcgcgtttgaagtggttggggggctctttgttcgccaggccgctctggctctgggcctggaggtggtttttacggctttgatgcctttgaacctattcccaggtgacccgggctcaattaggcccgggcctgagccgggctgtcaggcaagccgcgtgatcaagggcgggctgggcccttttattgaagttgaacccgagaccggggagtgctcggcctccgctgctcctccggccggccaggcgggccgcgaggtggggcccgcgggccacgaccaccgcgttgggaaacccgaggacggcaaagagcgggcccttcgcgcccctgtccgagggccctggctccggccgttctaggggacgttttaccaacaatccgtccaggaaggcagaacgcctaggagcgggccctcgcatgcatgtgagtcggtagcagcgccctgcgcagtgtccgcgcaccggacccgcggcttcagttcggtgcctaaaggttctgcagagccaccgcacccagccccacccggcctgaccgccctccttcctccgcgctgggaaggcccacggcccctctagcccaacaaaatagctttccaggtccctttctttaaaattctcaaataaaaatttaaggaacgagagagagagagagagagaagccaggtccccagccgtcctgccggtgctgggctgcagcccttcctggggcttcacgtcagatggaaagggcctgtttttcccgaactggcctttccctggtttctttgctcagagcagtgacagtagcgatttgctgcccttttaccaaccctgtgtgggtccaaggacccagatccagggacatcttccctttcccagatgcggagggcttttactgaggagaggacctgcctggtagcctgcttcgccatcctcgtctccctgtctgcgtgcccctgtgtcactctggctctgtcggcgtgtctctttctctgtcctttctgtctcttt

SEQ ID NO: 3948 - DNA, 4001 bp, Homo sapiens
ctgagaaatgcatcattaggtgattttgatattgtttcaaacattatagactatttacacaaacccagatggtacagcctgctacacacctaggctatgccatacagcctattactcctaggctacaaatctgtacagcatgttactgtactgaatactgcagacaactgtaacataatggcatttgtgtatctaaacatagaaaaggtacgataaatacagtattacaatctcataaaactgaaatgtccttatgtggcacatgactatatattttaaaagaaatggagtattttgtactagcaattagtacaaaattttacttttttttttgagacggagtctcgctctgtcgcccaggctggagtgcagtggcgcatctccgctcactgctagctccgcctcctgggttcacgccattctcctgcctcagcctcccgagtagccgggactacaggcgcccgccaccacgcccggctaatttctttttgtatttttagtacagacggggtttcaccgtgttagccaggatggctacgatctcctgacctcgtgatccgcccgcctcggcctcccaaagtgctgagattacaggcgtgagccagccgcgcccggccaaaattttacttcttttaaaagaaatggagtattttgtacgagaaattttataccaacaattagagggcaagtttatgtgtatctcagggttattactgcagaaatgatttataatttgcctatcaaagcaggaggctgttgcatatcaatgaactatgatacatttgcaaataatactgaagcaccccaaacttcacaacaaactgtgaattcattcactcagcttctgacacagattctgacccacacaggccctctataaacgttgagctgaagagaaatattcttgcaaacttcaattctgattcctttttctttacaggaaaaggatttgaaaagcatacttgatttcatctttgtatctccatagaacacagcaggtactcaataaacatgtatttaacgttgaatgaacacgtgcctgacttctgttcaaattactacactgttaagtttcaaaagtatttgagtctaaaaaaccaaattgtaagctcctcgtgagtgctataaaattggaaaggtgctgtatttcaaacacagcaaagatttccacgctccctatcgcccaagaaaaatgtcagtaggactgtgaccctcagtgagggggctggaaggagaagataataagatactgaattgaacgttggaagctgtgctccagggataagcacagagaatgcctaccctggaactttatagaatgagcccagaatttaattatgggataactggaaaaagacgagattaagaagagctattctgggtgtaggtgttggtggtcagagcattgagaatggggtaaagagacgatgcaacccctcgttagcttttcatttttcaaaccacagcctctgattcttcctttttacagctccgctggaagggtgggacgggacacagcgcgtcctcaaattccctagtcatttcctggacacccttacaggtatccgccaaaacaatcaaggggcctggtccttaactgaaccccaggtacctccccaatggcaagccggccactccctgcgcccggggaaacagaggaaagcacagtcccggtggccccaacttcgacgcctcctggtgcgcttgcgcaagagcctctgccaggacaccgacaccggtgctggggccgcgcccctcctccgctccggatgtggagcagcagaatgttcaccagcacccggacgtggtggtcggattcttctcactaccctctgcctcacctgagctctcggtgacgcctgagaagtgaaagagcagcagtttcaaaagacacgtccactccggcttttgccttgcagtagctgccggcggctgcaaacgggccgtcacatccgcctccttattggctgcgaacctcgcgcgatatcaccttggacgccagaggaaggggcgggcggtcgggtggcgaacagttctgcgcgtgcgcctcccgcccagcagcccggaacccaaggtgtccgacccttgctttcctccgggtacacggccgaactggaaggccgcaaagcattgtgggagttgcagtttcttagtgcgcaggctgtcgtggccggactttctcaggagcgtgcttcagtattcacggtccagtgcgccagactggaaatgagacagctgtgctctcgctcagccgtgacgcttgaactgcgtttccattctgttagtgttgaatgaacatttttcttttttttgttttcttttgttaacatttttcctaaagtcgaggcataaacatatacagcacaattaacttttgcatagttaaaacccaaaatatcaccggccagatccagatatagaacattttccaccacccctgtaggtcccctcttgactcttcgaaacacaggaatttttagaactcgccctcgctttgagggtgaagctgaagacctatgttagggaattgatcggctgtgtcctgttctgttttattcagtgactgtacataatgcataatgcatggatgttactgagaggtccctattttgtcctgaatttatctctctcgcaaacccccagaggactctattggttcgttgtggttctttactgaacttcgtgcggctgagaatacaaagatataaagggaagcccaaagcccactcctgaaccgaagcgtgcgttccccgttgggagaggggtgaggtggcgaaattgacagcttcattgtccacctccgggttctagaacgtggaaaacccgcgggtgtcggctcgtggcggacgcttgagggcagggggcgctcgggctgctgcctggtcggccggtcaaccggagacgctctacccgaagcgcagctctcgatgagccgcgccctgcgtcctcacgccgaggcggctgggcgatgcgcttgcgcactgagaactcacaccatatgtgtcctgttccagtgcgcgggtctgtggagagccgggtgcgagcggcggcagcacgaggggaaaagagctgagcggagaccaaagtcagccgggagacagtgggtctgtgagagaccgaatagaggggctggggccacgagcgccattgacaagcaatggggaagaaacagaaaaacaagagcgaagacaggtagataggggttgggtccgtacggcggcggccgccgtggctcagtggagtgtgcgggtctcgccgggcgcggcgtcggaccggggtctgggctcgcgatgagcttcgcggggtaccaggcctgggcccagagtgtgcggagcgggcccaagcccccgggccgggtgggcacgtagggcctcgacggcgggcgggtcctcccagtcgagcctcgctcccccggcaccccttccccggcctgaggagcggggtagtcatttgagggttcctggtcgcgcggggagggtcaggcggcttcgccagcgtggcccaggccagtgtgagtttttttccgcgctactcttggcgagggtggggaagttctttttatgcctcttatacctgtgagtactttgggagggaagggagcttgaatgtgatgtacggccgggtttctctactcgcggtttcaggtacgttagagttatggggaggtgtttagcagttcgctgtctctcaacttaatctgatttggatacagttttcgtttatttaagggctgattgtccagccctcatgcttttcgctttccttcttccggcctgtttttttttgtcgtttctttgctctctagccttcccctaagaaaggaagggaagaagaagaaaccaaccaaccgaggtcgctcctttctaaccacctgcaatgctttggggagggaggataagggtatatgcgagttacttacctagagatttttgagacatttctgtgtgtcacattcgattgagttctgttactcatgatggaaagagttgacttcctgggag

SEQ ID NO: 3949 - DNA, 4001 bp, Homo sapiens
aaaggtctttttttccaattttgttattaatttctagttttactgcccatggccagagaaagttgtttgtaattttcgactttttaaaatgtaatgatgctttgtgctgtatgtcttgtctgaagagattaaattacaaaataccttttgctatgactcttacaaagcacttccacataccctaatcttcacaacactgccctttaggcaacttacgtctagcacattctgagatagggggtgtctaaggacagggagagcaagaacaacccatctagtacaagtctccaaactaataaaggcttgaatcctctcccgtaggttgctatcaaaagaaaaacttcattcctcccgcatccccccaaccccgccttttttttttttaagctagggtctcaccctctcgcccatgctggagcagtggcaggatcatggatcactgcagcctcgacctcccgggctcaagcagatcctccgacctcagcctccagagtagctgggaatacaggcgtgcgccaccacgcccggctaatttttgtattttttgtacagacggggattcaccatattggccaggctggtcttgaactcctgacctcaagtgatccaccgacctgggcctcccaaaatgttaggattactggcatgaaccacggcgcccagcccatccgacttttgtaacactcagaattgtagttttgtttgtttgtttgagaccgagtttagctcttgttgcccaggctggagtgcagtggcgcgatctcggctcactgcaacctccgcctcccgggttcaagcgattctcctgcctcagcctcccgagtagctgggattacaggtatgggccaccaccatgcccggctaattttgtatttttagtagagatgggatttctactggctggtcttgaactcctgacctccggtgatccgtccgcctcggcctcgcaaagtgctgggattacaggcgtgagccaccgcgcccggccccagaactgtaattctatgaccacccttataaatgtaaatatcaggtaagaaaattgctgggtatttttcctaccataaactgacttactgtaatcctgtggatttttccttttaataccttgtttttcttaggtctggactcccttgaaaagcactgcaagtaaaagcactttttgtttccctaatatttctctatgagttttcttttaaagacctaaggttctaactacaggtataaaagactccaatgtcggaactagaacctaagtaagttagaattcaagacgagtaggagttttccgggggaatcccattgctttcctttttggctcagtggagtgaaaagttgtgccttcaaatccattaattcggagcagactgacagatgcggagtaaagagtttaggcaaaatacctctcgcactcagctctccgccatcatcttgctccccagaaacatgggactttctccggaaatttcaatagaggagccagtcggcgtcccccgtgcacctttcccttggtctaagggccaaccagtgatctgctgccgtcctgcgcctctttcccacaccctgggtctctaaaaaccagttcccagctgtccgaaaggtaaagacgtgtctctcgctggtttctcgaggttctgccccgcgcgagggcctcacctgtgggtagaggtgctgcatgaactgctcccgagaaacgccctccagccggggtaccgggaggtgctgcccggccatggttgctcacgcctgccctcttccaggtcttcggaacttcggctctaaagcgttcctcagcgccatccgcccggaaacacgagcgacagagaaaaggtccgcgaggccggcagactccagagtggctgggtccgagcgcggggcgggttgccgaagggcctcggcctgggctgcgtgctggagagcggggacggggccgactcaccagaggctgcagcaacaggtccactttgctctccagtctctttctccgacaccgctgaggcggtttcccaccgacttcctttccatacagcaccggcaggcaccggtgtgaagggtcataaaaatggcgctggccgctcgtttgctaccccagttcctgcactctcggtcgctgccctgcggggccgtccgactccggactcctgctgtggccgaggtgaggctgccgtcggccacactttgctacttctgccgctgtcgcctcggcttgggagcggcgttatttccacgaagcgctagggccttggcagcctcggcgctacctgcccagggctcccggtggccagtgctcagcagcccgggactccccgcagccttcgcttctttccctgcctgccctcagcgcagctacagcacggaggagaagccccagcagcaccagaaaaccaagatgatcgtcctgggattctccaaccccatcaactgggttaggactcgaattaaggccttccttatctgggcctatttcgacaaagagttcagcatcacagagttctccgagggagcgaagcaggtttgtttatttccctgattgacctatccgtctctaatgagttcaactattgctcgcagaagtgcttagcagtgagttttcttcactgggatacaagtgatcaaacgtgattagtggcccagacatagagccttccagccattgcttgacttaaagtaagcttctgggccgggaatggtggtacacgcctgtagtctcagctacttgggaggctgaaggggaggatcgcttgaacccaggagttggacgttgtagtgagctgtgatcgtgccattgcactccagcctgggatacagagccaggccctgtctcagaaagaaaaagctatatggctcatcttgtctgaacataattttcaaatttacaaagtgggcaagacaatgcctggcacatagtaggcactccatgaatgtttgctgaatacattaataaatgggtaagattgaagaataattgagataacatttccaaagtgctgtaatgtcaccttgggtagaagagcagaacttcctgccagctattagacagagccgaccaatacaccaccccatactccgtaaagattaaactggagatgagcaattttaccctttcaaaggatttgctgagactgcctggtggctaagtgcacagcaccctgcacacagaaaatatttagcctttagagattcttatccctgactttgttagttacgtacctgtttctgaatggctgattataccttgccttacccttgtgacatatggtcacttgggtcctgagattatttgtagattttgtgggtacatgctttttttttttttttttggactcctttacagattgtatcgttcccaaacattgcagaactgctgataacaatagaagtcggccaggcatggcggctcacgcctgtaatcccagtactttgggaggccgaggcaggtggatcacaaggtcaggagttcgagaccagcctggccaatatggtgaaacagtgtctcttctaaaaatacaaaaattaggcgtggcgagcccctgtagtcccacctactctggaggctgaggcaggagaattgcatgaacccgggaggtggaggttgcagtgaaccaagattgcgccactgcactccagcctgggtgacagagcgagactccgtctcaaaaaacaaaaacaaacaaaaaaaccacaatagaagtcagaaagtttatttcccgcttcatacctccatatgccttaaaaccatgctattggtgtaatcattttacagtattggttgtatactggtattgatattttactccaaatttatttcagattctttccataatcatggccatttgtatttataagaccaatcagttgtaaatcaaatgttttcaactttgtttaataagtgtcagtattaactcctgctgcctgcttctctgagtcaactcttgactactatatatatttatataaaaaaagtcaaagaacaaacttgattaagatgcttaactcagcat

SEQ ID NO: 3950 - DNA, 4001 bp, Homo sapiens
tggttaatgctgtaaacattatacattttatgtataattactagagtttgtggatattccactactactaccactgataagagtctcattgacagaatctttttttctccatcagaaaacatcaatcaataggaaacaaatgatctttcacttacatccaattaaatatgtttctcctgctgttgagtattaacttgtcaagcacatccacaagtttcagagtgaagaggcccaaggacaatgcaagttttctatcactagtgacacctcaaattgtaaagggctacttttcagtttgatttgccctcacaagcacaggaagggataatcataatttaaccaggaaagttacctgtgatatacgattgaaagtcatgttttgtaaaactgtaagcagatttgcagcacaattttaaatctgctttcaaatatagcaaaggcctgaatttgcaaattttctagcaaatatgatcatttctgatcattaagtttcatgaagagaggcactgctaatctctggaagtgtcaatttcattaaagaagattatgactcataaaaggaacatccccaaagtaccatctaatttgggttcaccaaattttccttgccaactccttaaacaatctgtcagaatgttagtctaatctctactcaaggacactcttaactgaagttaccgaagtacagaattaagtttgcttaaaagtataattctagtaatgttgcttacataccacctaaagaatgacaactcattcaagtacaattaaactgataatgaagtaaatatttctgaactactgctattgaggtaaaaccaacaaaagcgtccaaccacctggaagacaacctgacaaagtgtgctggatccttcttttacacattaccttttagcactagtggataacttagcagtggttttgctagagagtttggtgtttttcttctgctgggtggcagaaggttttctttcctcttgttcttcaggctctggagcggctgggtctcgctggtccgcatctgaactgccactgctggtgctggggctctcatcatcggacctttgcctatcactggacatcttggtgaagttatctcttggaaaacttttaaagagaacaggggaggaggaggagaaaatgttaaatctaggaaataaaccaacagcattttcttctagtcatctaaaatcgtcttgtaatgaaaaagcttcaaaagtgttcacacttatttcatcgtacaacaggggtacgtacaagggaggtgatgtgtcacacaacgccagcgttaagggatttgccgaactcaagttagaaaacccactcacatttttttccgtctcttggacaatctatcaattgtctactttctcagaaggcatgaaacagatttgccaaggaacttaggcaacaagcattaataacatatgacacactgtaaataacagatctcgctgaaaaatgtttaaaagtcactaataacgtctaaatatttacacactgacattggtcaaagctaccaaattccctttccgagaggaaaacacaccctgttaatcgcccatatgcttatttaaggtggcgattcctcctcagtgcacgtaaagcctttaaacacaacacttggaaatttaaaaatcaactaacgagctgctctagctgtttccacggccagcagcgaagattcatccggccaagaccgagctgccaccctgggaaaagcagaattcaaactgcaccttctgcaaagctcccaatgccaccaaggttcctcgctcaatttttatatcacggaccgacattttgtccaaaataacgaaaaaaataagaaacccagagaaaaaacaaacaaataaacaaagccccaagaagtgcaacaaatttccgcgcccgcggaggcgagccacggccggcggcggcggccacgcagctccgcggccctttgtggggagggccgcgcgggggccgcgggtagcgctcgccgcgccgggcgccaagtgatgcgagcagcccagccggccccgccgcggctcgcggacaccggcgacgcgggcgcccggcgcgaacaaagctgcccgcccccgccccctcccccaccgccgccgccgccccggccgccccccacgcggccccccggccccgccgccttacctcggccgcccgcccggcccgctcgcgcgccgctacggtgtgggggagggagagagaaaaaaacccttccttaaggaaatggaggcagctgtgggggggggaaggggggggagggaaaaaaagaagccgaggaggctctggccggggagtgtggaacattgaaagtcggagggggttgtgcagtgccgggctccggccggagggtggcgccgcccagcgccttcggaaaaaagcgggggtgggagctcggctgggcgagggcgcgagctcccggcgaggcggaggggacgcgggagacccccgcgcgctgtagcctcccgccgccgccgcccggctcggctcctcccggccgcgcagtcagcaagttccgaggcgagcgcgggggggaggggcgggcgcggcggcgacgcgcgtgctcgctgcttgcctggcggaggggcgcgcgccgccgacgcccggcgggcgcgagctgttcccgcgcgctcccgtgcgcgctctccacacctcccctcaccctgggggtgcacgcgtccgcccgcgcgcggccaggacaaagagcgcggcggggacccggcgggctggcccctgccgcccttggccgcggagcctgtgccagagaaggcgggggcgcgggcaccgtatcgcggggccgctgtgccgcggggtggcttccggcctgggcccgcctccggggcgaggctgcccattgggctacccgcgtccccagggctggttccatcccatccgcctgcgcgggggccgtcgtggctcccggggccccagtacctgggcaagggccctgggcgcgtggttgggagtcccccgccgccccgggagacgggagactaatgggtgttgttgacgaggccaggcacgcaggcggagaagagctgccacttgcccctcgcgtaagctggaggaagggacaagttggggtcctgggaattgaagagggtagaatgtatttggagattaggggaacaacctctatttctttttggctcatagcttgcaactgtcgctgccaaagggaagtgtccttcggattatttgaaaccttaaaaatccaaaacagtgtttaaaatgtcccgctcaacattcttaaaagtgaaggagaagagtttggggttggggggtggcgatgagagctaaaacatgacacttttctgcgggactcttctgtcttgcacatgaggagccagttctggaaagaaaagttctgagtgatgttgagtcagaatgtccacccagaaaagctttaggtggagatagtgacagttttgtttgttctaccattctttttgcagtctccaggtggactctgcggtttttaccccacggcacaaagtagccagaatacaaaaacttcctgtttgccacccaggccttctccagctactgagaacttgttccggtgatggagcctcaaaggaatttgtggattcctctcccacaagtgtccaggggcaggggtgctgtgagaatgtgcagttcacaaagggagtgagaatggcagtcaaaagatgtatagagttaagggaaagaagaaaagactgagtgagccaacgtatttgcttactatttctcctaatagaaaacttttggtaaaggcttgatagcaactctaaagagtaagttacatttccataattttccaaagacacagtcattcagttaactttattgagggctatatgttgctaggtgctggacatacactcattcaattgctgtgtgactaaagccaggtctctactctgtgctaagagctcctagtccagaaggggaacagttcattaaagttcgctaggttcataagtagtaaggatattccactcagaatgaacaga

SEQ ID NO: 3951 - DNA, 4001 bp, Homo sapiens
taaagaatgacaactcattcaagtacaattaaactgataatgaagtaaatatttctgaactactgctattgaggtaaaaccaacaaaagcgtccaaccacctggaagacaacctgacaaagtgtgctggatccttcttttacacattaccttttagcactagtggataacttagcagtggttttgctagagagtttggtgtttttcttctgctgggtggcagaaggttttctttcctcttgttcttcaggctctggagcggctgggtctcgctggtccgcatctgaactgccactgctggtgctggggctctcatcatcggacctttgcctatcactggacatcttggtgaagttatctcttggaaaacttttaaagagaacaggggaggaggaggagaaaatgttaaatctaggaaataaaccaacagcattttcttctagtcatctaaaatcgtcttgtaatgaaaaagcttcaaaagtgttcacacttatttcatcgtacaacaggggtacgtacaagggaggtgatgtgtcacacaacgccagcgttaagggatttgccgaactcaagttagaaaacccactcacatttttttccgtctcttggacaatctatcaattgtctactttctcagaaggcatgaaacagatttgccaaggaacttaggcaacaagcattaataacatatgacacactgtaaataacagatctcgctgaaaaatgtttaaaagtcactaataacgtctaaatatttacacactgacattggtcaaagctaccaaattccctttccgagaggaaaacacaccctgttaatcgcccatatgcttatttaaggtggcgattcctcctcagtgcacgtaaagcctttaaacacaacacttggaaatttaaaaatcaactaacgagctgctctagctgtttccacggccagcagcgaagattcatccggccaagaccgagctgccaccctgggaaaagcagaattcaaactgcaccttctgcaaagctcccaatgccaccaaggttcctcgctcaatttttatatcacggaccgacattttgtccaaaataacgaaaaaaataagaaacccagagaaaaaacaaacaaataaacaaagccccaagaagtgcaacaaatttccgcgcccgcggaggcgagccacggccggcggcggcggccacgcagctccgcggccctttgtggggagggccgcgcgggggccgcgggtagcgctcgccgcgccgggcgccaagtgatgcgagcagcccagccggccccgccgcggctcgcggacaccggcgacgcgggcgcccggcgcgaacaaagctgcccgcccccgccccctcccccaccgccgccgccgccccggccgccccccacgcggccccccggccccgccgccttacctcggccgcccgcccggcccgctcgcgcgccgctacggtgtgggggagggagagagaaaaaaacccttccttaaggaaatggaggcagctgtgggggggggaaggggggggagggaaaaaaagaagccgaggaggctctggccggggagtgtggaacattgaaagtcggagggggttgtgcagtgccgggctccggccggagggtggcgccgcccagcgccttcggaaaaaagcgggggtgggagctcggctgggcgagggcgcgagctcccggcgaggcggaggggacgcgggagacccccgcgcgctgtagcctcccgccgccgccgcccggctcggctcctcccggccgcgcagtcagcaagttccgaggcgagcgcgggggggaggggcgggcgcggcggcgacgcgcgtgctcgctgcttgcctggcggaggggcgcgcgccgccgacgcccggcgggcgcgagctgttcccgcgcgctcccgtgcgcgctctccacacctcccctcaccctgggggtgcacgcgtccgcccgcgcgcggccaggacaaagagcgcggcggggacccggcgggctggcccctgccgcccttggccgcggagcctgtgccagagaaggcgggggcgcgggcaccgtatcgcggggccgctgtgccgcggggtggcttccggcctgggcccgcctccggggcgaggctgcccattgggctacccgcgtccccagggctggttccatcccatccgcctgcgcgggggccgtcgtggctcccggggccccagtacctgggcaagggccctgggcgcgtggttgggagtcccccgccgccccgggagacgggagactaatgggtgttgttgacgaggccaggcacgcaggcggagaagagctgccacttgcccctcgcgtaagctggaggaagggacaagttggggtcctgggaattgaagagggtagaatgtatttggagattaggggaacaacctctatttctttttggctcatagcttgcaactgtcgctgccaaagggaagtgtccttcggattatttgaaaccttaaaaatccaaaacagtgtttaaaatgtcccgctcaacattcttaaaagtgaaggagaagagtttggggttggggggtggcgatgagagctaaaacatgacacttttctgcgggactcttctgtcttgcacatgaggagccagttctggaaagaaaagttctgagtgatgttgagtcagaatgtccacccagaaaagctttaggtggagatagtgacagttttgtttgttctaccattctttttgcagtctccaggtggactctgcggtttttaccccacggcacaaagtagccagaatacaaaaacttcctgtttgccacccaggccttctccagctactgagaacttgttccggtgatggagcctcaaaggaatttgtggattcctctcccacaagtgtccaggggcaggggtgctgtgagaatgtgcagttcacaaagggagtgagaatggcagtcaaaagatgtatagagttaagggaaagaagaaaagactgagtgagccaacgtatttgcttactatttctcctaatagaaaacttttggtaaaggcttgatagcaactctaaagagtaagttacatttccataattttccaaagacacagtcattcagttaactttattgagggctatatgttgctaggtgctggacatacactcattcaattgctgtgtgactaaagccaggtctctactctgtgctaagagctcctagtccagaaggggaacagttcattaaagttcgctaggttcataagtagtaaggatattccactcagaatgaacagatagaatatctcatgcctcaaaaaagatcatggtctgtgtgtggacaagcattttgatttggctgggtcaaagagtgcttgtgggaaaagcttgttagtgaaaataaaagcagaattttcccccagctttacacgatgtgatgttacagcaaaagccagccaatttggagttgaagctttgctttgtttggaatggggagacagaaaaggaaagctgtacgttaaacatgggttcttttaggaaatttaagaacagaaatagcctgaaggcccaaaggccaattgctgataggatttagtggggtaaggagcttaggggagaaagatatttagttgtttggtaacatcttctacagaagaaatagtattgggttgaaaagccagggaagtgtattctaatcctcattctacgaagttcatatgacctcaggcaagttaagttatttcaattacttttatgtaaaaggagattgtatcaaaggttctaagtcctctcctgctcaaaaattccatgattccgtgattctttggcgaacttgaagtcatggagtttaacttaacattcacccaacagaatatttaggatctactaactgcttgggaaactggagtgaaacatgggtcatgctcttaaccaagctcaattgtgcagtggggcagccagaaacgtagcctgcagaatgagaagtgctgtattaaagaagtaaagagaatgagaaaagagcattactaatcatcaa

SEQ ID NO: 3952 - DNA, 4001 bp, Homo sapiens
attatgactcataaaaggaacatccccaaagtaccatctaatttgggttcaccaaattttccttgccaactccttaaacaatctgtcagaatgttagtctaatctctactcaaggacactcttaactgaagttaccgaagtacagaattaagtttgcttaaaagtataattctagtaatgttgcttacataccacctaaagaatgacaactcattcaagtacaattaaactgataatgaagtaaatatttctgaactactgctattgaggtaaaaccaacaaaagcgtccaaccacctggaagacaacctgacaaagtgtgctggatccttcttttacacattaccttttagcactagtggataacttagcagtggttttgctagagagtttggtgtttttcttctgctgggtggcagaaggttttctttcctcttgttcttcaggctctggagcggctgggtctcgctggtccgcatctgaactgccactgctggtgctggggctctcatcatcggacctttgcctatcactggacatcttggtgaagttatctcttggaaaacttttaaagagaacaggggaggaggaggagaaaatgttaaatctaggaaataaaccaacagcattttcttctagtcatctaaaatcgtcttgtaatgaaaaagcttcaaaagtgttcacacttatttcatcgtacaacaggggtacgtacaagggaggtgatgtgtcacacaacgccagcgttaagggatttgccgaactcaagttagaaaacccactcacatttttttccgtctcttggacaatctatcaattgtctactttctcagaaggcatgaaacagatttgccaaggaacttaggcaacaagcattaataacatatgacacactgtaaataacagatctcgctgaaaaatgtttaaaagtcactaataacgtctaaatatttacacactgacattggtcaaagctaccaaattccctttccgagaggaaaacacaccctgttaatcgcccatatgcttatttaaggtggcgattcctcctcagtgcacgtaaagcctttaaacacaacacttggaaatttaaaaatcaactaacgagctgctctagctgtttccacggccagcagcgaagattcatccggccaagaccgagctgccaccctgggaaaagcagaattcaaactgcaccttctgcaaagctcccaatgccaccaaggttcctcgctcaatttttatatcacggaccgacattttgtccaaaataacgaaaaaaataagaaacccagagaaaaaacaaacaaataaacaaagccccaagaagtgcaacaaatttccgcgcccgcggaggcgagccacggccggcggcggcggccacgcagctccgcggccctttgtggggagggccgcgcgggggccgcgggtagcgctcgccgcgccgggcgccaagtgatgcgagcagcccagccggccccgccgcggctcgcggacaccggcgacgcgggcgcccggcgcgaacaaagctgcccgcccccgccccctcccccaccgccgccgccgccccggccgccccccacgcggccccccggccccgccgccttacctcggccgcccgcccggcccgctcgcgcgccgctacggtgtgggggagggagagagaaaaaaacccttccttaaggaaatggaggcagctgtgggggggggaaggggggggagggaaaaaaagaagccgaggaggctctggccggggagtgtggaacattgaaagtcggagggggttgtgcagtgccgggctccggccggagggtggcgccgcccagcgccttcggaaaaaagcgggggtgggagctcggctgggcgagggcgcgagctcccggcgaggcggaggggacgcgggagacccccgcgcgctgtagcctcccgccgccgccgcccggctcggctcctcccggccgcgcagtcagcaagttccgaggcgagcgcgggggggaggggcgggcgcggcggcgacgcgcgtgctcgctgcttgcctggcggaggggcgcgcgccgccgacgcccggcgggcgcgagctgttcccgcgcgctcccgtgcgcgctctccacacctcccctcaccctgggggtgcacgcgtccgcccgcgcgcggccaggacaaagagcgcggcggggacccggcgggctggcccctgccgcccttggccgcggagcctgtgccagagaaggcgggggcgcgggcaccgtatcgcggggccgctgtgccgcggggtggcttccggcctgggcccgcctccggggcgaggctgcccattgggctacccgcgtccccagggctggttccatcccatccgcctgcgcgggggccgtcgtggctcccggggccccagtacctgggcaagggccctgggcgcgtggttgggagtcccccgccgccccgggagacgggagactaatgggtgttgttgacgaggccaggcacgcaggcggagaagagctgccacttgcccctcgcgtaagctggaggaagggacaagttggggtcctgggaattgaagagggtagaatgtatttggagattaggggaacaacctctatttctttttggctcatagcttgcaactgtcgctgccaaagggaagtgtccttcggattatttgaaaccttaaaaatccaaaacagtgtttaaaatgtcccgctcaacattcttaaaagtgaaggagaagagtttggggttggggggtggcgatgagagctaaaacatgacacttttctgcgggactcttctgtcttgcacatgaggagccagttctggaaagaaaagttctgagtgatgttgagtcagaatgtccacccagaaaagctttaggtggagatagtgacagttttgtttgttctaccattctttttgcagtctccaggtggactctgcggtttttaccccacggcacaaagtagccagaatacaaaaacttcctgtttgccacccaggccttctccagctactgagaacttgttccggtgatggagcctcaaaggaatttgtggattcctctcccacaagtgtccaggggcaggggtgctgtgagaatgtgcagttcacaaagggagtgagaatggcagtcaaaagatgtatagagttaagggaaagaagaaaagactgagtgagccaacgtatttgcttactatttctcctaatagaaaacttttggtaaaggcttgatagcaactctaaagagtaagttacatttccataattttccaaagacacagtcattcagttaactttattgagggctatatgttgctaggtgctggacatacactcattcaattgctgtgtgactaaagccaggtctctactctgtgctaagagctcctagtccagaaggggaacagttcattaaagttcgctaggttcataagtagtaaggatattccactcagaatgaacagatagaatatctcatgcctcaaaaaagatcatggtctgtgtgtggacaagcattttgatttggctgggtcaaagagtgcttgtgggaaaagcttgttagtgaaaataaaagcagaattttcccccagctttacacgatgtgatgttacagcaaaagccagccaatttggagttgaagctttgctttgtttggaatggggagacagaaaaggaaagctgtacgttaaacatgggttcttttaggaaatttaagaacagaaatagcctgaaggcccaaaggccaattgctgataggatttagtggggtaaggagcttaggggagaaagatatttagttgtttggtaacatcttctacagaagaaatagtattgggttgaaaagccagggaagtgtattctaatcctcattctacgaagttcatatgacctcaggcaagttaagttatttcaattacttttatgtaaaaggagattgtatcaaaggttctaagtcctctcctgctcaaaaattccatgattccgtgattctttggcgaacttgaagtc

SEQ ID NO: 3953 - DNA, 4001 bp, Homo sapiens
ggaggttgcagtgattgtgccattgcactccagcctgggcaacaagagtgaaaccgcatctcaaaagataaaaaaatttaaagaattttttcaaaacgaaaacaatacatagaatacgatcttctgaactgcacagtcttttccactagaggacacggacatacacataccctaaaccccttaagaagcactggtctaaaggtttcaaagacagctctgcactttcacggtcataagctctcagaattgcaaagttggaatggacttctctcactcccattccattttaacatgtggaccccaggacaacagaggcccagaaggtaggctgcccaaagccactcagctgctagaagctgtcaccacagacacactagtttccctcttgtggatgacaaaaatgttttttgtttgttttttgagacaggtcttgctctgtagcccaggctggagtgcagtggcgtgacttgagctcagtgcaggctcaaactcccaggttcaagagatcctcccacctcagcaccctccacctcctaaagcagctaggactacaggcaggcaccatcatgtccagctaattttaattttttttgtagagacagggtttcaccatgttacccgggctggtcttgaattcctgagcggaagcaatccacctgcctcagcctcccaaagtgctgggactacagacgtgagccaccatgccgggcaggaaatgtttttatctcgagtgtggtcatggtttcagactgatcaattacacaatttaaatatgggcaatttagtgtatttcaattacgcctcaataaagttgacaaaaatgtgaaaataaaccaacattagtttcttcattgttacgctactgtgccatctcctcaggtggccctccataagagcacatcttcacagcttcgcccagagcaaagcagctgggttcagctgatgaagttacttcacaggcaaatagtcacaaacacctgtaggggctttagctaccacagacagcagcaccatctagagccaagctctcctgcttcagcccctacctggaatgatcttgtcaaaaatccctcacaaggattccttgtcatggaacagtgtctcccttcccagccaagtctgctgccccgtgtgcagactcgagcacatcagtcctgccacatcgtcagagtcacccaataatggaccaagacgtgcatccatccatcacctgggggtcagctggacgcaccagatgccctacacaaggactaccaggtctctggctgaccttgggaatgcaaatgaagcaaagagtgaaaaataaaagcacaactgcttgaacatgagttcagcaggcagtaacctaggaaagtcagaatgaagagtcccacagaacagcaagcaccagggccacatgcagctccctgaaggaggctcagggaagcctggggagagagatccttcatgcactcaaaggccaaccaccaagaaactcttctgcaccactacagcccgcaggctacgcttaacgcttttatacccccaatcacgccacgatgaagtcttctctgtgggcagaagacgctccaacattcaattccactgaagagtcagattgctggtttactatcttcaagtctgtgacttgcaagatataaaagaatgtaacactggtgctttgttttccatagaaagtaataaaaaatgtacttctctaacattctaagaaatctaatatagtgaccatctatttttctatcgtgtgtatcattttcacacgccactttaagaataaacccaaggcctaatttgggaatgttgccatagctgtaaaattaaatttaaaccaaaggattctatcaaaaagtaagtcttcaaactgtcaagaggctagctgaatacctgcagttgcttcagaattcttttccttcttcaatatgcttcaactcttgaagatctggtttaaaacaaaacttcctctttcctgcaaattacgctctaaggcagcatttcggtaacagatcagctgttctgaacagcattctcagtttctaaattccacaagttgtaattggcccagttaggttcctcctctgggtgggacctgctttcagacagcccggagaagagcatctggtgtgcaacttactagtgccatcaagtgatatttactcagcatccctgcaagcaatggcaaaaccaggccatgtcacttgtgcagggacaccaggggccagtcagctcaaggtgagggggctacttatttacaattccttccgaatggagacgtctcaatccaagcataaaggatgggactgcgggtcactaggggacactcaacttccccagccaaaggggccccgatcagggcacaacaaagtccacatcccactcttctacagaatgccagtgcccaggaacctcctgctcggcacaggagtacgctggttgaccgaccatctttggagcccagccccttttacgttcagcagtaaacctgccccttcctgcactgcctactacctgaaaggcaggtatgtccaggtggggggtcctcaagccccacagcactaagcttggtgtgattctgtctctcaatctctctctctctcccacctctatgctcccccttgccttcatctcactcctcagccaggattcctctgcaccaggcaggccagtttcctctttgttccttcacaacaccctgttcatttccagaagcttctattcagtctgatacccaggtctagaatgccctccttcccttcacaaacgaatcctaccccttccttaaggggaagattcctacctacatcccaacatctcctcctccaagaagctttctctggctattccaacccatcctgcccccacttccaggcggtcgggaatgcagagtggggggacccaattctctcctgtgacagatgaggaaactgagcccagggaggggaaggccacacccaagatgacacaccagcagaactaggtctggaaccaagactctgctgcactaattgttccaagatgcccttccttcctcgtctcctttgctgtggtaaaaattttccaaactagcctggccgcccccagttgtaggtaagcgtccatacttactcttcccgctgcaggtacgaggaccgggcgcgagttgtcactcccctcacctcccccgctcctcacggcctagcgcgactcctgccccgatcgggagtccagtcccggtttctgcggccacgtcgggccggtgaccttggccaggcgctggacgccccgcttcctccgtacaaggcaggcagccgatcccgcgagtggggcgtgagcgcggccaggtctgtgccacgctcggcccagggcctggttcacaccaggtgctcggcgcgggccgtcccccgccgccgccgccgcggtcactcactgccgggcgaggccagcgccccggccgccgacgccgcctccgacccccggctcgcggcccgcggcccgcggccccttcccattcacgccgctcggcctcgcgtccgggtgcccgcgcccgccaggcccccggcgtgaggaacccggcgggcccgaggcggccccgccaccgcccgcgccctccgcccggcccgcaggccagcccgtgcaccggcggccgcacctcgccccgccgcagagccgcacggtcgctcctcacctgggctccccgagacaggcgaggcgggcccggcgcccaacaccatgcccggtccgggcggctgctgcgagacgcggcccctcacagccgcaccggctcccggcggcgggaccggaagtggcggggcggggactcggccgctctcgcccgcggcagccgagacagcagcgggcgctttaaaaaaaaaattcaaagtcgcgaaaaactttatttggaaccagacacgcgaacagcggcgtgcgccgatcgggactgggctgggcgacgggcctctcggacctcgctcattggcagagggcgcggccagggggcgggcacggatttcgcaaccgccgctgat

SEQ ID NO: 3954 - DNA, 4001 bp, Homo sapiens
gtaagtcttcaaactgtcaagaggctagctgaatacctgcagttgcttcagaattcttttccttcttcaatatgcttcaactcttgaagatctggtttaaaacaaaacttcctctttcctgcaaattacgctctaaggcagcatttcggtaacagatcagctgttctgaacagcattctcagtttctaaattccacaagttgtaattggcccagttaggttcctcctctgggtgggacctgctttcagacagcccggagaagagcatctggtgtgcaacttactagtgccatcaagtgatatttactcagcatccctgcaagcaatggcaaaaccaggccatgtcacttgtgcagggacaccaggggccagtcagctcaaggtgagggggctacttatttacaattccttccgaatggagacgtctcaatccaagcataaaggatgggactgcgggtcactaggggacactcaacttccccagccaaaggggccccgatcagggcacaacaaagtccacatcccactcttctacagaatgccagtgcccaggaacctcctgctcggcacaggagtacgctggttgaccgaccatctttggagcccagccccttttacgttcagcagtaaacctgccccttcctgcactgcctactacctgaaaggcaggtatgtccaggtggggggtcctcaagccccacagcactaagcttggtgtgattctgtctctcaatctctctctctctcccacctctatgctcccccttgccttcatctcactcctcagccaggattcctctgcaccaggcaggccagtttcctctttgttccttcacaacaccctgttcatttccagaagcttctattcagtctgatacccaggtctagaatgccctccttcccttcacaaacgaatcctaccccttccttaaggggaagattcctacctacatcccaacatctcctcctccaagaagctttctctggctattccaacccatcctgcccccacttccaggcggtcgggaatgcagagtggggggacccaattctctcctgtgacagatgaggaaactgagcccagggaggggaaggccacacccaagatgacacaccagcagaactaggtctggaaccaagactctgctgcactaattgttccaagatgcccttccttcctcgtctcctttgctgtggtaaaaattttccaaactagcctggccgcccccagttgtaggtaagcgtccatacttactcttcccgctgcaggtacgaggaccgggcgcgagttgtcactcccctcacctcccccgctcctcacggcctagcgcgactcctgccccgatcgggagtccagtcccggtttctgcggccacgtcgggccggtgaccttggccaggcgctggacgccccgcttcctccgtacaaggcaggcagccgatcccgcgagtggggcgtgagcgcggccaggtctgtgccacgctcggcccagggcctggttcacaccaggtgctcggcgcgggccgtcccccgccgccgccgccgcggtcactcactgccgggcgaggccagcgccccggccgccgacgccgcctccgacccccggctcgcggcccgcggcccgcggccccttcccattcacgccgctcggcctcgcgtccgggtgcccgcgcccgccaggcccccggcgtgaggaacccggcgggcccgaggcggccccgccaccgcccgcgccctccgcccggcccgcaggccagcccgtgcaccggcggccgcacctcgccccgccgcagagccgcacggtcgctcctcacctgggctccccgagacaggcgaggcgggcccggcgcccaacaccatgcccggtccgggcggctgctgcgagacgcggcccctcacagccgcaccggctcccggcggcgggaccggaagtggcggggcggggactcggccgctctcgcccgcggcagccgagacagcagcgggcgctttaaaaaaaaaattcaaagtcgcgaaaaactttatttggaaccagacacgcgaacagcggcgtgcgccgatcgggactgggctgggcgacgggcctctcggacctcgctcattggcagagggcgcggccagggggcgggcacggatttcgcaaccgccgctgattggcgagtagcgttaggggcggggattccgagttggctctggagcccgagcgccggagggctgggggttttgcacctggttccaacacgggttcacttcgtggtctgcagggtttaggggcacggaggagcccgggctatccttccctgaaggagcggcctccgtggctggagctcccgctgtccagcgccgcacctggagtgcaaaggactggacaggcccccgcagcctgcagtgcaggcggtgagggagaccgggcggtcagacacgcaagccacgaccaaccccaaaccgtgtgctgcgcccacaggccccactgttcttgtcatgtcccttttattccttcttttctctcttaaatgtgtttaaagtaccttaaaaatccatttcaacttgtcctcttttgggcgcccagattcatcccgcgcccattagcgtcctgtgtgattgacgaggggccgtcctgggcgtcaggcaggcccctggaggagtgggccattagaaagatgaggttcagcatggaaacggtcagaaagagacaaggagttagactttcatttcgaaaaaccccactgagaggtttctaacagtggagtgactatcaggttttcttcctaaaggaggctggcgggcccggtggctcacgcctgtaatcctagcactttgggaggccaaagtgggaggatcccatgagcccaagagtttaagaccagcctcctgatggtggcaagaccccatcgctacaaaaaaagaaaaaaaaaattagccgcgtggtggcgcgcgcctgtagtcccagctactcaggaggctgggatgggaggatcacctgagcccaggaggttgaggctgcagtgagccgtgatcgcaccactgcactccagcttgggtgacagggcagaccctgtccccataataataataaaggctttggctctaagtgagtcggtgggaatggagtcaggaaaactggtcaagaacacaactcagccgggcgcagtggctcaggcctgtaatcccagcactttgggaggccgaggcagacagatcacctgaggtcaggagttcaagaccagcctggccaacatggcaaaaccccatctctactaaaaatacaaaaaagccgggcgtggtggtgcgcccttgtaatcccagctatttggaacgctgaggcaggagaattgcttgaacccaggaggcggaggttgcagtgagctgacactgcactccagtctgggtgacacagcaagactgtttccagaaaaaaaagaaaaaagaaagaacacaacttgtgttatttcttgtgtttgggaccatgtctctcccttttttgcccggctaactctcaagttttcctaagctaagacaccaacttctgataggcctcaaagcctgggggtggggtggggcagtgcaggtgccctctgtgtcttccttggagccctgcacttccctcttccttattgtcatggcctgtttccctgactaagctcagctcctcagccctcctcttccttcttcctccagcgtcacctcctgccaccccctttcccatcctggaacatgcaggtgattaaaacacatctgctggatagagattgcatgcgctggcggcatgagtcctggtgagaggagataagggcttgaagattgcagtgtgtgaaggtgcagccggaatggcgtgagcacttgtcttactcataagcgtcactgtctgcagaatggattgcaccacacattggcccacgtaggcccaaattccaccgctgtggatgaatgaagtcatttctagctccatttcatgaggctgcctaattctttcactaagacttatttaggacttcctagttt

SEQ ID NO: 3955 - DNA, 4001 bp, Homo sapiens
gaggtttcagtgagccgaggtcgcgccattgcactccagcttgggcaacaagagagaaactccgtctcaaaaaaaaaaaaaaaaaactcaaatgttagctgcaattatgttgttattattattagcaaattcaaaatacctcctttctgaagactttttcttactccctctgcacagaaacctcatctccctcctctagctaccaagttattgtttaaggaatttattactttctactccagtgcaagtagagtaaggggttggtcaatgtttcattcatttttaatatccaagaagccttgcttgcacatagtaggtacaaacattttggagtaacagtaaccttacaagtactccgaagaaaaaggtgaccatttataaaaagattgtactctgtcattaatcctaagacctgaaaattgaagaagtttaataactgatagcaacctgtagttgctaatattctttcaactactgcccatccaaaatcgcccctttcactttttccttttttctcagactgtccctgacattgacatcatgttccaagccacgaccctacatgtaccaactctctgtaactcactgcaaactctgaaatgtcttttctcataagtcccaacatctgatgcatcgcttctgtcaaaagggcatttgttgtctccttttagacagaggttcacgtatcagtgagtgaacaaagtgcccttaactggagaagacctaacacttgattcctggttcgctcagtattttgtttgttctcctggtatggagggtattctgtaactgactgctcagtagcccaattctaaatgtcattccagcataccaaataatccactgacagctcaacagtcacttttcatgcaggcccctccccttccctcctccctcaaccctcaagagctccttctctcacagtgacagacacactggcagttcagaagaccttttcctcaagcgtccttccctgcacgtacaagaccacctccccagctctcatcatcccgcgagccaatacggtccccaataacatcccctcccagccaatccaaatcacaacctaagtctcttcccaagaaccaggctttacagcctttcccaacaagtacacacttgacagctcgacacgagcttccccaaaaatcatttcccctcactcccctcctaccccatacactggctcttttctcgctatcatttacccaccctggcttccccaaaattcacagcccggtttcctaaacatgctctccgctctcctctcccctccttctcctccccaccccctttccaccgctgacagctcagtcacctccatccccctgtggctgcaccctcccccgcaccctccccttgacagctcagagtgggctcccagtgctccgctccaggccctcccgcgacgtccccggcccagggtcgcctcgcccgcggggagggctccactcacccgctctcccgcatcacgttgctgtccccgcagtcgcaggcgcccccggcctggctgcggaacatgttgaagtcgtgtccggtgtggtcgccctggtggaagcactcggcgcacagcgacatgcagggcgagatgccgcacgtccggcagcggtaggccacgaagttggctgtccagaccaggccgcagagcgccgcgggatcgtaggcccgcaccgccgcgcagaactcgtcgtagccgccgccgcccgccagaaggcacttacaccactccagggcctcctcctcggccgcccccggaccgcccccgcctccggccgccgccgcgtcctcgccgccggcagccgcggccagcggccgctcggcgctcagcacccgctccagcagcgcctgcagctcctcagcacctgcgcggttgtccggccggctgagggccgccttgaggtgcgcggcggtggccgccttgtctagggccagccccggcgcgggcagctcgggctgtgacggctgctggcccccgacggccgccgcggccgccgccgccatgatgagagctcagaatttggagagtccagggccagcggctcctccagggagagtgagggaatagactgctgcgattgctcggcccgcccaactctcgcgatacccggagcgtccgcgctcctccgcccgcagccccgcccctacacacgccccctcgggctgcagagccttcctcccgcccctctctcctgggcgcctgtggaccaagctaggctcccaactttctaagttaagagctactgaaataaagtactcaccttataggaaatctttaataagggcaattatttctttatttgcatagactacaggaattattcacatcatctttcagatgtactttaggcatctgcattttgtctgagatgtacattcctactgttatcaaagtccagcgggcgacagaatgaaaccccaacttaaggaaaacaaaaactgtaggaaaagcaatccaaagaagaacagaaggccaggcgcggtggctcacgcctgtaatcccagcactttgggaggccgaggcaggcggattacttgaggtgaggagtttgagatcagcctggctgacatggtgaaaccctgtctctactaaaaatacaaaaattagccgggcatggtggcgcacgcctgtaatcccagctactccggaggctgaggcaggagaatcacttgaacccaggaggcgggggttgtagtgagccgagatcgcgccactgcactccagcctgggtgacaaagcgagactccgtctctaaaaacaacaacaacaacaacaacaacaaagaagaacaggagtgtttccaatccataaccttgtgtttgaaatgaatgaaacataattaaaacaggttattcctggtcttctacatgagttaagtatgtcacgatcatcatataacagtgataagttaaatttgctcaataattttacgaatcactaaattataaactaaataaaactttatgtattaactttacatgctaaaactttgtatgttttaactcatttgattctcataacagataactttgaattctgctattcctagaagtagcagcctcagacacttctctacttcgtcatcgtccattcactctttttcttcttcctataataatgcaaagaggtgtccatccacaggcttaaacgcaatcctgcaatccttttacttaaccactggatcctgccttctcaggatcccaactccatccaatatcctcttgcatttttaacccctctctttctattagctcaattcttgtcagaatttgtctcctcctgtcttaaaaataattgaaaaaataataaagcttcccccattactaagcatccaaccattcttttcgtaggccacctttctctttctctttcttttcttctttcttttttttttttttttttttgagacagggtctcactgtcgaccagactggagtgcagtggcgcaatttcagatcactggaagctttgcctcccgggctcaagcgattttcccaccccagccacccgagcagctgggaccacaggctcgcgtcatcagacccagctaatttttgtatttttagtagagacagggtctccttatgttgcccaggctggtctcaaactcccgtctcaagcaatccgcccatctcggcctcccaaaatgttgggatcacaggggtgagccaccgcttccggggccacgtttaattgttcacatttactctttcttcttcctaaatttccattcgctccacaatctgctacaacttaatttctgctcctactttatgaagcccgacctctttccagtatttgacaccactacctattcttttattttcatttccactgtctttttttttttgagacggagtctcgctctgtctcccaggctggagtgcagtagcttgatctcggctcactacaagctccgccttccgggttcacgccattctcctgcctcagcctcccgagtaactgggactacaggcgcccgccaccaagcccggctaatttt

SEQ ID NO: 3956 - DNA, 4001 bp, Homo sapiens
gattgcagtgagccaagatcgtgccgctgcactccagcctgggtgacagagcgagactctgtaacaaaaaaaaaaaaaaaaaaaaaagccctgcatcatctctttggccctaacctactttatcacagcacccttttgctttccacacaacaactgctgaagttcctgaaatgaccatcttccctagcctccgcgccatctatttcctttgcctgagcctttcttctctcctttgggagtcatcttcccctaattcctatttatccctaatatctaagctcaaagattactttcctaggaaaactttcccagcttggataagtccccctgttaccttctctcacaaacaacttacattctttattttagcctctgtctttgcttattggcatttatttgtgtgattatttattttattttactttttgagatggagtcccgctctgtcacccaggctggagtgcagtggcaccatcttggctcactgcaacctctacctctcgccggctcaagctattctcctgcctcagtttttctgagtagctgggattacagacgccccccatcacgcccagctaatttctgtatttttagtagagagagacggggtttcaccatgttagccaggctggtctagaactgctgacctcaggtgatctgcccacctcagcctttcaaagtgctgggattacaggcgtgagccatcgctccgggccctgattatttgcttaatatctgttttgcccaatgacactgtagagtctaaaggcagagtctgtaattgtcactattgtatccttagcattcagtacacagtaggtactaaaatttttttgaatgaaaaaaattaaatcaagtgtatgctaattattatacattattaaattaaaatgcaagtaaagtaccctccacagtgcccagctgaaaacaactgctcagtaagtgtgagcttccattaacactggactgcagtcagcctcatatcattagtgtgcttaaccactccctcctgcacacattttttacacatttttggactccgccagtgcctagcactaacattagtgttataaaaagatactctgtattcactgaatttaattgccttttaaataaatccgactttcagcatatttagaaagaagacacaacatgaacttttaaagtttcccccctaaaaacaaactgcaaccggccagacttcatactaccacattattttctgcattcgcatcaaaacaaatcagcagtttcctatctttacttatctcaaattacgtacataggaactcaacgctggatgccacacgaacattcatcattgctgacaagtaataaactcttttattactggcagcgaaaaggaaaaaaaaaaggcacaaagaagaaattaaggaaacgtgaaatcagcgaacaccaggccttcaaaacatcagagaaagtgagtggtgggagtcgggtgaagtcactaataggcatactttgtatcactggactgcgatcgtgcagcgttcgcctttgaaaatagaaacattgtgttgcgcataactgtaagtttcggaacgccctgcgagagaaccaggagctgtgccttcagctagctcgcaagtcaagccgcaggcgagtcaggggctcggggtcgccgctcacctgggctgggcgggaccctggctcgggctccgccgccggcgccccttcccgagtcgcaaacacgcggccctccggagcgagactccccccgacaccgacgatccgcggcggccaagccacaggccgcgacccctcggccccagccggcaggcgaccgccccgccccgccctcaccccgccggacgcggcgcggccccgggacgctcacctccgggcacggcctcccggcctcggcctcactcagctcaggcaccgcaggcaccgtttggccgcgggctccgtttggctggagcccttcagagccggagcgccgccgccccagaccgcctcaggttccgcggccgcgccgctgagatcccgccagcctctctcggtcttcgccaggcgcccaagcgcgcgccgacgccggctccgcgcagacccgaggagcgcgcgcggacgcgggggcgcgccgagggcggggcttgccgcggccgggcgcttcaagtcccggcgggaacggcgctaatggccgcctccccttcccaccactggcccggcggctagctgccttcatgggtaggggagatgcaggcagctcggtgtgtgctcaccagagaacccagagtgtgcttacctgggtacctcctcagcctcagaaaccatggagagacatccctgcattctgacaatgttgaacttgacctgagccctgtggacaacgaagttgaagaaacccccacccacctttttttttttttttttttgagactaaatctcgctcttgtcccccaggttggaatacaatggcgcgatcttggctcaccgcaacctccgcctcccggattcgagcgattctcctgcctcagcctccggagtagctgggattacaggcgcctgccagcacgcccggctaatttttgtatttttagtagagacggggtttcaccatgttggccaggctggtcttgaactcctgacctcaggtgatccgcccgccttggtctcccaatgtgctgggattacaggcgtgagccaccgcgcccggcccctttgtgttcctaaaaggacttactacacgcaaccgcccttccgcatgtgactttgtcaggactcaaggatgcccccgtcgttagctgtgacaaggtcaggcccagaccctctaaattccagttcttcgcctcgcaaatagttagctgacctgcctgtactcacgatgtggacaaatcccggctgccttgacttgacaggacttgagtgaagcagctctccctgggcctctctacacggtgaccgagcctcagccgcagccagcgagcagccctcctcatccaccgcctgaaaatagacggaccccagggaaacagtctctgtatagtctcatcgctgccacctccagtcttctccccacttccccacacccgggtctttctagccctgttcactcatctctgtaaaaggaaagcccttttctgcctgacccaggagatcgctgcagatctcatggttggagagttctcccggttgctgtagcctcccccaatccccactctcagttgcaatagtttctttcccttttcttggatctcttccactgaactctctccttacgtatatccagatttgttttttattttatagtccagcattctcccaattgcaacagtccttcttcctattgcaatagttctccacccttattgcaatagtccttttcccccctgttgcaataatcctttccgaataaagtctcggtttgcctaaatcgggatttatttgtaagtctttagtgcggggactcagattgagattgatcctcacctacaggcccatgccgttccccccaccaccacctccctcatctcctgttcagtgattttgggagcctgtggtgagttcaaatctcactgctcatgagaccgtgtctgttgaagcacaataaggagttaaattgatcccattaggcaaagagacttttctttgaccattctgtgagagctcttccgattttttggtcccagcaccatttaatgaagagaggattcttcccttgtcaaaaatcaattgaccatggatgtataaatttatttctgtactctcaattctattccattgattatgtatcttatctttatgctagtaccatactattttgattactgtagctgtatagtagctgtatacagctgtatagtagctgtatagaaatcaggaagtttgagtcctccaactttgctcctctttttcaagattgttttgtcgcttgcagttctgtatgaattttagctcagcttttccattgctgttaaaaaaaaaaaaaaagggaggggggggccactgggattttgacagggattgctttgaattggtag

SEQ ID NO: 3957 - DNA, 4001 bp, Homo sapiens
ccttaagaaacaaaaaagccagtttttttgaagctactaaaaaatttgactgttaagacatgtaaatcctttttgtggccctagtgcaagtcactttatgactgctgacctaagtgcctcatctataaaatggggataattaaacctgttctatttactgcaaggatcaactgagatattaggagaaaaacaatttaaaatgtcaaaaacctactaatgtacacaataagcatagtgtcatttacttttcctttcattttcaatccatttttttccttacgggattacagaattaatttatgtaaagtataatataacccccagacagcatcacagaatctaaactattcaagctcttctaataaacagcattgagctaaaaacttggcgtaacaaaacaattataaattccaaatttaatgctaaatgacattcacatttcagtaattcgttcttcactgcagtgcataaagttatagagctattaaaagacgagttaattatgaataaaccgttattaaacacaaatagttgaagaaatacacctcaaattaacaacagccacaaacattgatttggtccatgtaatgagtatgagcagaaccgtagaggcagggagttcactgtaaatctacaagatttcagtaataaaacaggagaatatggagcaaaatagcctagagcaacagagaatatatgagttaataaacgttctcaaagtcgtgtagattttagcctaagaagacaacaaagggaagaaaccaaggactgaacgtctattttctttgaaactaatggattttttttaaacttacattatttcacactagatcccctaccaagactgccataaagaaaaattaaacctctattcagctcaaaagtttacgtttcaggaacgtactaacaccagtaaccgtgaacatcaggtggtttctctttgttgcttatcgatgacacagctttcttcccgacagtccacaactaattacaacccaactgcttgcctaatggcccgttcctacctccatctaaacagcagtaacgaaacgggcgttcaagcagcacaaagagggtccttggtgacagagagggacgtcagggagagggtcgcgggggtctggctgcgcaggggagaggctcggggcgacgagcggggctgggcggctggggcctgctggccgcgtccgtcgccccgagcggggagatttcggcgggcctcggggcgctttggagaccagggccagacggtgcctccggcccggctgccgggagacgcagcggtggggccaggcccactgtatctcaaacgaaccggggaggcgctgaacagccacgggccggcagcccgggcctcgcagacactgaggaaaggctgggggcgcccggggcctgaaggagcagggcgctgagggtctgcatggcccctctgggggatctggcggcggagtcgcagccgtccctggggcgcggggtagtagtggcaattgtgcgagccgacaggagcccgcgtctcggggagggcgggccggcggctgaggtatacaagaggatgaaggtaggccggaggggtgtcccggccgcctctcgaacccctgcctccttcacctgccacgaacaccacgaagaccgcgccgctccttttggccgtcgcgatggcggccggaatggcgccctggaaccacagcatcgctcccttcgggcccaggcgctcgctcggtgtgtagtctccgcagtcccgaagccggctccgccctccgtcttcgtccggctctgcggcccccgcaaccttggctggttcggcccccacctccggctccgcacaagcgcgcacgcccgtcagcggcacccggagacgcgcgctagcgcgcgcgagaacacctcacgtcacagtcgcaacccgtcggtgtccgtgccccaggaccttctctcgttggcgagtcgatggtgcgggcgcgcgcccgctaggcctccggtcgcgcagtccaggaagtggaggaaagcggtaagagggatgactaaccgctaagacacgtcggcggcgcctgcagtgaggcatgatgggaattgtagtccacttaggcttattcgcctccatattgtggagcatgtaactgtgggttctgaggcacagctaaagggggcagtagtgagggccactacacattctataaaggggagagggagaaataagtgtcactccaactggcatatgctattctcggcctcgttgagactctcagtgtggaggaaatagtcctcgcatggaactaaatgggctttgtcgggattaactccgaggctttgatttcttctgaacgtagcccaaccttgcagaaaaacgggataaaaaccgcaagtcaccttctttaataacctgtagtccatgtgcctaagcggaggaattggtagaacgcaggccttcagcaatttcctagacactggatagagatcatttcaaaacttcaaaacgcgttaggctattgccacagctactttttaaagtaacacaaagcagagaatagattatttcttttccagctactttccatggtaatacaaaagagactagatagtgatttattttccaattttctgggagaatgtcctataatcaagatgtggcgctttgtgattggctgccattaaatgaaaactgatccatatttaatactttcatgaaatcacatggtctgtaataactattagctaaaggcttgcatggtttatttaaagttgcatatactattatgttaaattctacatcaattaaatttatcctccagcagtacatctatctgacaatctttgcaagataaaggaagtgatacatctgaatataccacctttcctacagatattttccctaaaaatagctaattatttgcactccgatttttgtactttttttcccaatcaggcctctcgtatatagtgttattataaactgagacataatgctgattagggacagttgcttctataggacaacaatcctacagaaaaattagaattgacctttaacatcaactttaatggacttctggaaatttgatcaatctagaaattattccaatagagctatgtctttaattatctctaattttagaattaaataagaatccttcatagttttatattcatttgtcaagtgtttatcactcatcttttatgagctaggcattgtgcctggcactgataaggaggtgaggcagtcagaagaaggccctgtctttgtgactgtacagtctagtcaggaagacagacattgaataagtaattatgagtgatgataaatgtcacagaagggtaattcagagtgctacagaagtgtatgaggatgggaccgaacatgggctagtggagtcagaaagggccttcatgaggaaatgacgtgtcggggaactctaggtaggtgaaggagaaggctattccacatgaggctctgaagcaagcaaacacagtgcacttgcagaactaaaaaatgcccagtgtggctataacatagaaagaggagtgtggtacaagtgaggctggaaagctaggcaaggatcagatgatacagagtcttgaaaatcatgttaaaaattttaagacatttttctaaggattacagggagccattgaaaaattttaaacagaagagttggccaggcacaatggctcatgcctgtaatcccagcactttgggaggccgaggcgggcagatcatgaggtcagcagttcaagaccagcctgaccaacgtggtgaaaccccatctctactaaaaatacaaaaattagctgggcgtgattgcacatgcctgtaatcccagctactcaggaggctgaggcaggagaatcgcttgaacctaggaggtggaggttgtagtgagccaagatggcaccactgcccaccagcctgggcgaaagagcaagactatatctcaaaaaataaataaataaacagatacatataagacttccatttttaaattgtatgatagcaattgaatagattg

SEQ ID NO: 3958 - DNA, 4001 bp, Homo sapiens
atgagagcatggagcaattcaccgtaagggtggagcacgtggccgaaatgctgcggaccatcgacttccagccaggtgaaggaggtggccgagggccgctgagacgggttcggaccctctgtgtggggggtgcggcgggcacgatggccgtaaaggcagggactccacctcaccaggccttccttgggctcaggcgcttccggggaggaagaggaggtggccccagacggagaggagggcagcgcggggccggaggaagagcggccggatgggccttaaggtgagagccgcccgatgggccttaaggtgagagcggcctgaggggcttggggtggggcctggctggtgtgctcgcgtcccctcccccagtgattgccctccctgcgggtagcgtggagcccccactcctcggtgcaacccaaccccggagccacaaaggcgcgccccctagggcggaaaagtacactttcctcctcacccgctgttcctctggggtgctgggagggcaggcaaggcaggctgagtagaggagaaacccacgtggcgggggacggagtgagcggggctcgagctgcctcgtgccttcgcagcacccgcccaccgagccttctttcccgggcacaggcctgcgccgacccgaccctgctcgagagcccgcgctagagtcggggaggatctgcgcagagaccgcagcatcacccaaatcggcgccggccccgggaggatctcaataaagaactcgagcgtcccagacccgtatctcctttcgctgcccaaccccgcagcctgggcttcgaaggcgacccgcccaccatcctgcccttcccagaacctgagaccgtctggggggcggaagccaaatgaacccctattgggcacctctgtgatgccaggagcgaactggtgagcccagcgccctgggaagagggccgagggcggggcggtggtgccgggacctctgaggtcctggggatttggggacccttggggtccacatgcacctggctgacctggctgaaagccgctgtctcggagccccccacagcattttgttcccctcccgctggcccgggggccccaccttcccacgggttcccacgctgctgtgactgccctgcctctacgacaaaagccaacgggtcttcagtacttttattaaaaaatagtcacgcagacagtgccctggtggctctgccccgcatcccaactctggggtgggggaaaggggtcaacgttttcgcagccccaaaccgggccatcacttgcccaccgagtcgaatatgatgcggttctgctcggcgcgctcccgctggctctgcgtccgcgccagctccagcagggtccgcagcaggtgaaaggtgaggtcaatggacagagaagggttgtcccgccgcggccgctcgcctgccgtcccgagtcccaatcggccgggccccgcgcggcgcgggaagcgctccgccagcagcaagaggagcgcgcgggccccgccaccctggttccgtgccccggggctccagcgcagactcgggtcctggaccccggccgcctcggggctcctctggctgctcccagggcacagctgtaccaggagcagcagcgcggccagcagcgctgcgcgtcccgcctgcctcatggtgccgccggccctggacacacaggggcagcgcagggtgaggtgcgcctgggacagctgcaggccgccgctcccctccccgcgctcgcccggcgacccctccggccgccgcccaatgcccgcagcctgccctccagccccagccactgcgccagtgctgttccatcccttccacccagcctccctccccggaggagcgtggtggctgagctgagcggagtcctggtgcagggggaggctgggcggacgctctgagccactcacaggttgtcggcgagcgtctgtacggtccaagattgagctccagtctctgtccctcggggcaggctgaagacgccttggggaacacagggtctgtcccggggctgtcgccagccttatatagtgccaggacagctccgactgacgtcagcgaagaacatgcactgattgtagaagcaatgacagccacagcttcgagtctgacggctggcgggcccccggaggggcgcacctccctacaccagccttcgtgcccctggggctagcgctggaagcagcactggacgcaggaaagcgagaagccggctggggcgtaaagactgctctgggacccacgggagtccctcgccccgcttagaacagccagcaatgactagggccgtccccagaccagactagtccgggtcgcgtgttctgacacacgaaagggaggcgggaccgtgaggctgtccatggtgctgaccccgtcctctgcctctagaagtggccagaaatgtgagaacgctgtgccgctggaacccactgcctccctgcagctatcagttctgcaaatgcaggcatcaggagtccaccgctggcactcagccaacacagtgggacccactgagaggcagtctgccacaaccaaagtctcccagcattcttatctttttccagccccaggatccaaattgtagggctgtctgacaggcaccatgtaacagagggtctctagcatccgagtgctttcagaccacaaatggctggcccatctgcttttgagtttgccaaagtagtttagcaaagttcagtttctctcctgggaatcatagcagcagtgtaactctgcccatgagcagcaaagaaatatgggttcaagtttctgctaactcctggtgtggacaggtcacctccctcctaccaacctcagggtcctcatttgtaagactgggcttggccaggcgcggtggctcacgcctgtaatcccaacactttgggaggccgaggcaggcggatcacgaggtcagtagtttgaaaccagcctggccaatatggcgaaaccccatctctactaaaaatacaaaaattagccgggcgtggcggtatgcgcctgtggtcccagctactcaggaggctgaggcaggagaactgcttgaacccaggaggcggaagctgcagtgaggcaagatcgcgccactgcactccagcctgggagacagagcaagaccctgtctcaaaaaaaaaaaaaaaaaaaaaaaaaaaaattgggcttggtggtctcttggcttctttccagctctagaaatgactccccaatagttttctgcttaaaaacttactcattaccactgcagattccggattacatatttaataacatatttactgaggcaccatataaagggttccgggagtctctaaagagctggagctacaagaagcctaggcagggttagagtaacaaatgtgtctatgaagagtggggatgagtggcatttgctgggatatgggtgtaaagttgataaggtcatgaaggttcaacagatatttatggagtgcctagtatgtggtgggaataagactattatcaagggctctaaagcagtcagtgtacattttagagtgaagaggggcattgcagggtgctagtcctcttaagctctgaccggcaacccaaccccgtggaaactggtatgcccactttgaggaggttgtctgaccgttccagggtcaagctgcatcactgcaaggtggaaacgatggagtgaggcaggcttagagccgatgtgccttccaggacaggtaggagttccagataacagcaacacattggacaacggccaacctaaggaacaggaataacacaatgaagaggaggaaggctaagcagtgagcaagggctggagatgggagcatgaaatggcaaaggagggatcatgacaaaggattggcaggtttaggtctctttccttcagcaccttttttttgagatggagtctcctctgttgcccaggctggagtgcagtagcacaatcttggctcactgcctcccgggttcaatcaattctcgtgcctcagcctcccaagtagctgggactacaggtgtgctccaccacacctggctaat

SEQ ID NO: 3959 - DNA, 4001 bp, Homo sapiens
agagatgcagcaccatttgagatgaaaaaaggaggaaagctatacattaaaaaagagctttgccactctgaccccacattcttaactctacaggtaaaaccagaggaaaagactgtccagagaagcagacgtaagaatctcactgaagtggtctctgctttgagtatgtcttcattttataggatcccttatcattctgaccctaggggttcttaaatgttgcttataaagacaaacagtctgagataatggccaacagaatgtgccatgtggctttgcatgataagcattatacttgcggcatgatgaataaacagaaaacactctttaacaagttctaggcccaactatcaacaaccatccgtaggaggctgaggtaggaggaccacctgagcccaggaggtggaggctgcagctagcaagatcatgtcactattctctaacctgggcaacagagcaagactctgcctcaccaacaaaaaataaaaaaataaattaaaacactatctcttgcaccattgcactccagcctgggtaacaagagtgaaactccatctcaaaaaaaaaaaaaaaaagaaagaaagaaagaaaattatcacatcatcttgtattgttacagggaaacttagataaaaaaagaaaatgctcacagacagctgcaggaaagttctaagcaaattttcttcttactttcatatattcccctgaagttcaatgtgcattataaatgtgctatgctactgtacaaagtattatggtcacttcctttaataagtttcatgtggccaggagttcaagatcagactggtaggtaacaagacctcatctctacaaaataaataaataaataaataaataagaatttttttaaaataagcttcagctaagtttatcaaaagcaagtcaagtgttgctaaattcgactggcttaaaaaaaaaaaaagcaaagtgaaaaggctacaattattccaagttttgtggtgctgttaaatagctatttaaaatgtcttcaaacgcctgcaagtgtaagattcttgaaggaaagagggcactttacactaaaattggctggcaagtacatcaatgaatgtttccaaaacagttagtgtagcacaataaggcaaaagaccccaggacttcaaacgaacaaaattgctccttctcaaatctggcaagaaatgcaaaacaactgcagattctggccaaggaacaaaaacagttcacatctataagttattggcgacggacgcagatctcattctggcaggtcccacgctaaaagtgaaaccatatcatccaatttccagccaacagatcacagtgttaaaagaaaacagtaaccaatacgcatcaacccgaattcattttaggaaaaattgaaatctattttaaaaagcacgtcgttctgcaatcagggtcctgcaaagtgctgcttctcaactcactgaggatcaagcttggtctaaatccatggtaggatacctcccccatttccttctgcacttggcacaaggatctaaagctcttcaaagaaggttcaagaccgctgaacagagcccgccgccacccccgcggaagcgataccttgccaagaagaccactgagggcaactcggggcgctcgcgaataggggaagggataggacaccagagggtaaactgagtcacggtagaggcggaagctcaatgtgacaggggcacagggtcgccttgtgccccaaaccctctctttgtccacgaggcctcctcacgccacccctgggtacctgtcaccggcagcgcacccgcggcacacgcaccgctcgcgtctcccttgcagcccatgcccgggccgtggtcagtccgccacagtgccagagacaacgccagggcagggcggggcgaggcggcagcggcagtgcaggctgcgccagtgagaggccgacacgcgcctttcccgcggctcgactcaacacccagcctcgcaaagcaattgcccagctgccggccgcccttttacttccgcttcctgcaggcgaacgctggaggacttccggataccgagtcgagacctagcagcccagagcgtcgcgcggtcgccctctcatctccgagggttggggaggggggagtcctgcctctctcctcacttccgcctttcagggtggcgggtaggctgccggtcttcaaggtcttgggaaggttcgttgggccaacagctgagacccgaaagcttcaacagtcagtcggtgaaatccagtttggactctgggacttactcccttaaacctttgttaaaagcttactccctttagcctttcggtggcacagtaaggacaattgtcttaatgtttctgagcatcttagactttatactaaaccctaaaattttgatagctaccttccaggaggcatgatgaaaggaagactttttaaattttatgagccgcttgagctttcttattcggacagcggcagcttagtctacagggactactttgtccttttagtattttttttttaactaatataaaccagtttaaaattgttttggaataggtagcatttaacccacccaaaaatgaatacctctttggagggtatatttttaagtatattaagtcaaagtgaatgaaaagccaaaaatatttttttggagttggagtctcgctctgtctcccaggctggaatgcagtggcgcgatctcggctcactgcaacctccgcgcccccgcccgcgccccccaccccccaaccccccgacccgcattcaagcgattctcccacctcagcctccccagtagctgggattacaggcgtgcgccaccgcgcctggctaatttttgtatttttagtagagacagggtttcaccctgttggccaggctggtctcgaactgctgacctcagatgatccacccgcctcggcctcccaagtgctgggattacaggcgtgacccactgcgcccggcccaaaataattttaataaataaacatgagccaacatgatgaaggggaggaaggagaggaggatgaaggagatgactaatggaacactgatggaggccgggcgcggtggctcacgctgaggatggaggctgaggcaggagaatggcgtgaacccgggaggcggaggttgcttgcagtgagcagagatcgcatcactgcactccagcctgggcgagagagggagactccatctcaaaaaaaaaaaaaacagcaacaacaacagcaaaaaaacactgatggattccaaccttcctttttttacattttctccagtccctgggagcaagttgcagtttttttgtttttttgttttttgttttttctctcttgtgctcagtcgccctgttcttgaggtttcttttctctacactatagttctcaacttattttgggggaaataacttcagcagaatacaatgggaaaagagtctctacccctttctgttcgaaattcatttttatcccttcctgtctgagcaaaaactgtatagaatcaacatcaccccagctctgtgggaaaaaagaaaaacctgctcccttcgccctgctggaagctggagggctctaggcccatgtgtagcagagcattcaattctagctttcttcctgctttctctgtatattgggctcggagagtacactgggtctctatgtgaatatggacagttagcatttaccaacatctttctgtctactttctcttgtttaaaaaaagaaaaaaactttaaaaaatgggattctagaagtcagcaaagggtgggtctgagatgtttgggtgggttaagcggacattttgacaacatggcttctcctttggcatgtttaattgcgatgtttgacacacatccttgcagtttaagatgacgcttttaaaataaattctctcctaatgatgacttgagccctgccactcagtgggagaatcagcagaacctctaggatcttatttggaattgacattctctattgtaattttgttcctgtttatttttaaattttgtttcactggaaagga

SEQ ID NO: 3960 - DNA, 4001 bp, Homo sapiens
aaactggtgtcaaaggtttatgccagcaccaatttcagtgagtacaccgtacacacatgcattcatatacacgttactgataatctcagttgaggcattccctaaccctttttaaatacacatgtggaatttagagagcagttttcaaacttcaaaggaaccttaatcatcttttcatagttcaaaaaaggaaaaaataaacacagcaatgcagcaaagtcatttctccagctgaaatgacctccagcttcttcgggctactcccagtttcgcaataagtgaatctgagacgcaaaccacgtacacacaaacgaagtagaagcggagaacactaaagcttccccaacagtcccggcaaaacccacccggcttttctcagtcctcccgcttccccagcccttcccgtctgcgtgcacgcacaggtaccttgacacagaccaggaaaagagaacaaggattaattagcagccaaaaatcctgttttatcacttacagccactatccaggaaagcgacggtactactaacctgatttcagggaggcaaaactaaacccagcagggtacaggagcataaattatacgcgtctggaacgtcaacccagcagctcaaggcagctcagatgacaattcaacgaaaagggtttcgcaaatgttatctcaaatgaacatttccacttccaaaccacccaccaacctctccactgtcagtacccaaatttgcctgaagcaactcgggatataagcagcagcatttcttaccttgtacaaatctcgacattttaggggcttagtaaaatactccggctttttttttttttttctagaggagtcacgctacagggcaggtctctcttcctctcctgctttaacaaccgatgtattctttctcctcctatatttaactacttaagggagtatttattcaaagcgattaaaactggctcaagaaaaaagaaaagaaagaaagaaactccttccccaattccaaaagacggaaacttggtgcgactgagtcggtttgggaactcctgagctccggacacaaatgagggccagctggagactcccggaaaaggtaaaaccacacgaacttaaatttcttcaatgaaagaggcggacctacagcggctatttcaccgcccccaagtccccacgccctccagggctgtactgcaggaggcactggcaggccgcgcccctagctgccccctccccgcgccgccgtccaggccccaaacgcctcccccgaaaaccccggttaacagcggctcccgcccaagcaggggtcggggaggcgggcgaggccggccagcgggggcagtgcaaccattttcaccagccataaacatcctgggactaggaggcgctaccaattccacgctctggctggccgaccggtcggggcctcagctccccgccttcccgcctcgagcagtgaaacccggccgcagctttttctcggtaggggccgaaggctacgctgcccctcccccgcagcggacactaaggggtcaccggctagaggcagacccgtgcaccggcgcgggagtcccaagggagggcaccgacccttcccgtacatattctcgccccgcctgccctgcgctcctcagaagcccaaattccgcctccgagaccacacagcgggccagcgagagcgggaaacacactcatccagggggtcgccggaagcccaaccccgcccctcctcaagccgccagcgagacccaccttcctcttcctttagcagctgggaaattgggggcgtttatggcgccccgggaagaaggctcgcaggctgaaagtcacctctgaggcgcccttctctctctctctcttccctcacacatgcacaccttgagcccctccctaacggtcgcagcccagctgctaacccccccttgtccacccgtcagccggctcccgacacccacagcccctactttctcctaaacacctcccctccccctccattcggagcagccccttcaatgcggaaatgtccctgccgcacggaccgacaggcgcagccgccagtcaggagccgaggcggacgcaggctctggccaatgagacgtgtggaggtggcaaggggcggggcgttgcggcacttgagagcccgtcggagttgggcactgagcagtacgcggggataccgcgcgtgggagcagcacttacggcggcgttgcggccagggaagcctcgccagtatatctcagtgagggagagcacctgagcacgactggttatttttccaatcagtaaaaatattcccgctgactagggactaaagaaagccctgcggatagagccggagctccccaccgcagctgccccgagggagcccagacgcttctcaggggacgcttgctcccctcatcacatctggttgggggagggtgaggatgcgttagggagtaggcattggcctgtgtgggccagctaacaaaaggagggtttaggcattgaagaaagtgacaagtgaaggctccctcaccggaaccaccaccatccccattgccccggttcctaatcctgtagagctgctgtgataggcgtttacttttctcttcaacgtggaactggcctaagttactcctcaagagatgcttttcttttggtagattcttgaagtcctcaaggaaagaggatgttacacggaacttgacactagcctggggactgttacagggccagcccacggcttgtcaaatcacacctggtaccgtcaaccccacctgcatctaagactcagtgtgcctggcagcgagtgcatttcagactttgcatttccactttaagactcaaatagcccgcaccagggcagatgatttgccagcgccttctcttaagtgccttcaataaacaagtacggtaattacagaagagtttgaggctttgggcagcactaatcaaccaaggtaaagtgagaattttttaatgactcattgtctaaacaaaggaactttgattttttggttctacgtctttatatggaaatgttattagaacaaacaacacagaaaaggctagtgaaaaattgttatactagagaatgacaaccattggtactgtgtttcttacatgaaatccaaaaagattacactcaaaaacctctcggccgtaaaacgaattttccccagacaaaacaagtgtctaaaatccagatgtctacagtttaataacagcatttggagactgaagatcttaacaaaatctctacatcctttgtatacagtacaaaaattgttccagcactgaaaaagcagtctttaccaatgagcattagtaccaaaataaaatactaccgaaagatttgggccacgtagggttacttagcctgcaaaagatgaaggacaatgaagagatttatttgttgttgttgttttgtttttgtttttgttttgagacggagtcttgctctgtcgcccaggctggagtgcaatggcacagtctaggctcactgcaacctccgcctcccgggttcaagcgattctcctgccttagcctctcgagtagctggggccgcaggctcgtgccaccgcacctggctaatgtttgtatttttagtagaggcggggtttcgccatgttggccaggctggtctcaaacccctgaccttgtgatccgcctgcctcagcctcccaaagtgctgggattacaggcgtgagccaccgcgcctggcgagtttttaattatacaaggtttattataagaaacgatgatcagttactgtattttctgccttcatggaagattaaaaaggaaatgggttttaattgcagcaagagcatttgttaatatctaagaatggcatcttgatttatgagtgattgaatattgagatatagtaccaaaggttgttgtacacttgctgcctcaagaactctccaaaaagtaactaactacccatcttcaggggctacatctgtaactactcagtcactagttcttagagaagtagcactctagaagcttagtttccaaatatttccaaaca

SEQ ID NO: 3961 - DNA, 4001 bp, Homo sapiens
aaagaaaaaaagtggctggcaactaagtgcaatctggtatcttagagtgaatcatgggaactgtaatctgaacaaagcctttagttaacagtaatgtacctatgttaatttcttagttttgacaaatgtgcaacttttctataaatcctgaagtattccaaaatataaaaagtttttttaaaaaaagtggatgacaaagtaatgacaaacatacacagcaactcttaccacttgattttgaatcttctgaggacaagttggcattacagcaaaggctgtgaaatcagtcaatgcttgccaattctgcaacctattctaaagcataactctacatggaacaccttgggtttattaatatttctaacttttaaagagaagtaacttgtccacttttacctagcatattcttgcaaaataccgcctttatggtaactgaatattgttattacaaaaccagtacgtttctaacagttctgcctttctattcttgaataagacatttactcaatcagaacataagcatctcttaccacatataaggtataacatgaatttgaaagtctaataacaagtgacatttctgagcttagcgctaaaggcaagcatagcgttcgatctgtttcgataataacacaggcagtcgaattctcttactttaatctactacacaaaatttaaagaagagttaataaagcgatgtagaactcagtagggcatttttattcccagggtcaaatgatggccattactgacacaactttttttttccaaaagtacacctacatttatcaggaagcataataagtgtttgtgaactttactagctgtgtgttcatcaagatggctgaagctttcacacactggagtctacaaggaaagagtttacttgcataccagaaggcaaatctcatgctacaaactggtgtcaaaggtttatgccagcaccaatttcagtgagtacaccgtacacacatgcattcatatacacgttactgataatctcagttgaggcattccctaaccctttttaaatacacatgtggaatttagagagcagttttcaaacttcaaaggaaccttaatcatcttttcatagttcaaaaaaggaaaaaataaacacagcaatgcagcaaagtcatttctccagctgaaatgacctccagcttcttcgggctactcccagtttcgcaataagtgaatctgagacgcaaaccacgtacacacaaacgaagtagaagcggagaacactaaagcttccccaacagtcccggcaaaacccacccggcttttctcagtcctcccgcttccccagcccttcccgtctgcgtgcacgcacaggtaccttgacacagaccaggaaaagagaacaaggattaattagcagccaaaaatcctgttttatcacttacagccactatccaggaaagcgacggtactactaacctgatttcagggaggcaaaactaaacccagcagggtacaggagcataaattatacgcgtctggaacgtcaacccagcagctcaaggcagctcagatgacaattcaacgaaaagggtttcgcaaatgttatctcaaatgaacatttccacttccaaaccacccaccaacctctccactgtcagtacccaaatttgcctgaagcaactcgggatataagcagcagcatttcttaccttgtacaaatctcgacattttaggggcttagtaaaatactccggctttttttttttttttctagaggagtcacgctacagggcaggtctctcttcctctcctgctttaacaaccgatgtattctttctcctcctatatttaactacttaagggagtatttattcaaagcgattaaaactggctcaagaaaaaagaaaagaaagaaagaaactccttccccaattccaaaagacggaaacttggtgcgactgagtcggtttgggaactcctgagctccggacacaaatgagggccagctggagactcccggaaaaggtaaaaccacacgaacttaaatttcttcaatgaaagaggcggacctacagcggctatttcaccgcccccaagtccccacgccctccagggctgtactgcaggaggcactggcaggccgcgcccctagctgccccctccccgcgccgccgtccaggccccaaacgcctcccccgaaaaccccggttaacagcggctcccgcccaagcaggggtcggggaggcgggcgaggccggccagcgggggcagtgcaaccattttcaccagccataaacatcctgggactaggaggcgctaccaattccacgctctggctggccgaccggtcggggcctcagctccccgccttcccgcctcgagcagtgaaacccggccgcagctttttctcggtaggggccgaaggctacgctgcccctcccccgcagcggacactaaggggtcaccggctagaggcagacccgtgcaccggcgcgggagtcccaagggagggcaccgacccttcccgtacatattctcgccccgcctgccctgcgctcctcagaagcccaaattccgcctccgagaccacacagcgggccagcgagagcgggaaacacactcatccagggggtcgccggaagcccaaccccgcccctcctcaagccgccagcgagacccaccttcctcttcctttagcagctgggaaattgggggcgtttatggcgccccgggaagaaggctcgcaggctgaaagtcacctctgaggcgcccttctctctctctctcttccctcacacatgcacaccttgagcccctccctaacggtcgcagcccagctgctaacccccccttgtccacccgtcagccggctcccgacacccacagcccctactttctcctaaacacctcccctccccctccattcggagcagccccttcaatgcggaaatgtccctgccgcacggaccgacaggcgcagccgccagtcaggagccgaggcggacgcaggctctggccaatgagacgtgtggaggtggcaaggggcggggcgttgcggcacttgagagcccgtcggagttgggcactgagcagtacgcggggataccgcgcgtgggagcagcacttacggcggcgttgcggccagggaagcctcgccagtatatctcagtgagggagagcacctgagcacgactggttatttttccaatcagtaaaaatattcccgctgactagggactaaagaaagccctgcggatagagccggagctccccaccgcagctgccccgagggagcccagacgcttctcaggggacgcttgctcccctcatcacatctggttgggggagggtgaggatgcgttagggagtaggcattggcctgtgtgggccagctaacaaaaggagggtttaggcattgaagaaagtgacaagtgaaggctccctcaccggaaccaccaccatccccattgccccggttcctaatcctgtagagctgctgtgataggcgtttacttttctcttcaacgtggaactggcctaagttactcctcaagagatgcttttcttttggtagattcttgaagtcctcaaggaaagaggatgttacacggaacttgacactagcctggggactgttacagggccagcccacggcttgtcaaatcacacctggtaccgtcaaccccacctgcatctaagactcagtgtgcctggcagcgagtgcatttcagactttgcatttccactttaagactcaaatagcccgcaccagggcagatgatttgccagcgccttctcttaagtgccttcaataaacaagtacggtaattacagaagagtttgaggctttgggcagcactaatcaaccaaggtaaagtgagaattttttaatgactcattgtctaaacaaaggaactttgattttttggttctacgtctttatatggaaatgttattagaacaaacaacacagaaaaggctagtgaaaaattgttatactagagaatgacaaccattggtactgtgtttcttac

SEQ ID NO: 3962 - DNA, 4001 bp, Homo sapiens
cattaatgtaacacatattcggtgggtgcctattctgtgccttaggtgctgagatttatggggcgccaaatacatgcagacccattggcaggtgttgaggacgccgcatacagtggatgtgattaatgcaaagtcacacaggtccccacatggctcatgatgtgaagcggacaatcaacaactatctaagtgaaatggctgccatatttgatgtgctatgaaggaaaatgcacagaaaattaaaaaaaataaaatacaaatcacattggaggtatagtggaaataaggtcacctccgaaggtgatatcagtccccttaatgggagccagacgcagcacctgggaagtgcctgggctgccagtagatcctcagccaatctttgcaggataagtgaatgaacgctctctgaaatgtcacctcctcaaagagtaattccctaacgctccatctgaaggagcctctcctgttcttttctatcctctgctgagatttcgatgaggatgtgaatgctactttttgcatacttcaaactctgtaggggaaaaataaacctaatagcttgagaatgaaacctacaacctttctgtatcatgtcagaacctgactgtctggtgattcactcattagaagagaacggactgcaggatttagcttcttatcagaatatttagaaactggagctttaaccagggtcacaaaggcaactttcatttccaggatctatcatcatcaaagaatgatttcatcagtcctgaacattgcctgcctgactgaatccagggcaaggtgcaggcttcaactgagttttctgcagggtgccccaaacccagcattctgtgcctatggcatttaacagcttgttgtttctaattgattactatccactggagcacacagagtaaaatgtccaaggaatgctttcccgaaatctcagataccaagaaatcatccagaagatgatgccaaagacagactcaaacctaggagtcaaaaattaacaaaagagggcattttaaattatctcagaatgcttgctcagcatatatctggggctagttaatcgatccaaagtaatacatctgaaagaatatacgcatgtaaaagtcccactccaatacacacctgggatagtggattttggtgaaggcagttgattccaccaacaaaaaccatattgggcatgatgggcctagggtaatccttcacaaagtcacttctaaacagccagacagatgcagagctcaataggtcctggacagtcacctctctctgaaggaattctgaggcaagggttgcatacggggaataaaccacgtcgcacagaaagttctgtgaaaaggcaatgagcatgttcttcacccgctgcaggaaggtcatgtgatctgaatgagaggagagaggcctgggcacgtaggagaatgggttggggcactgggtagcctcaaattccaggctgcatggcagtgcatgcaagaagaatacagtgggcagagacaggtactgggccacgatggggctgcaaggaaggaaagggtccgtcagcatgacatcaaagctgctttctgccagggaggccatgagctccttgttgtgcagtaagtgggaacagccagacaaaagcatagcagagtccttttttattttcttgtatgttttgatcacacgctgcaggaaagaatcattctcaaaaacattatgcccgagactaacaaaagactctttcacatcctccctttggaatggcacagggtacgtcttcaaggtgtaaaatgctccgtctctgatgtacaacgaggcgtcaggtgctaggacaactatttcatgtcccctctgctgcagctgctggatggccccaagcatgctcagccagtggctgccatccactgggatcaacagtatcttcccagcatgggacaccactgggcccagcacacacagcagcaggcccaggacaagtgggcgtccgccctgggactccacagccatggcgcctttgctcctgccagaggttcgccctctcctacttatatatatatatatggcaaaaaccaatcgatacaccaagttaatgtttgactgtgtcacgtgactataaaaagctgtcagtccacaaaggtagcagggagttcactttcagagataaagaaggtggagctttattaggtttcttaataggcaacaacagttgaactggctggaatttcatactcaaatcacattcttgagtgaacacagcaaagtacttccagaacctcaggatccattaaattagtatttccacagaccaacaagtgttaccagagaggaagaaggacgactatgtagtgaacaagttaggcttcttttccagaaattaaacagaaggctttttagaaagccttttagaaagaaaagaacacaactgtacccccgctttcgccatggaaacctgtaagagtgcccactccacagctcccccggtactgcctgctcacttgtatcatgtgtttcattccttcgtccaacaatatttattgagtccagcacagtgtggggtcttgaggctgcagcagagcccaccacacgagcacgcgccatgaggtgagccagactcacaatttaaacacatgagcaggaacttagaaatcgtgaagcatgctaagaaggaaatgaacaggtgggtgggtggggcgggtcgggggtggggggcgtgctggggtagagaatgaccagaaagggaaattcactggagcgcatgtgaacagaagtcttccccaaggacaggcctttattagtgtgaacctgaaagagccagtcctgtaagatagatcttgagtggctaactgggcctggatttaaaatagagccaactggccctttgcttactacaggtcacacggttactctgagtatcctgaaaacctgtacctttttatagttgagattttcagcgctcacctgaaccaaccaattaaagctcacccacctcagccactcagggctcagcttcatcaaccaatcagaatgcagctgcagtgaccaataagaactaagcaagtttccatccttcatttgcataaatggacctgattgggaacctgggaaggaactttttgccgtgaaacctgcctgccttgtgttctgtggaactcaccttcattgcgtaccagaggctgtaactccctggtttgcaaactgttcactagaacaaagtctctttcttccaaattccttttcagagaacttttgttcacaacaggaaaccaaatagataagcaaattcaattaagttaaattgtactcattccactggcccaagatccaggggaaaggcatttggggaaattctgatgactgatttgaagtcaaaagggaaagatgagcaaaaacaactcaaatttgtatttattgaccatggactatggggcaagtattgtgcagccagaattggaagtattacactctttttgggggggatatactgctgtactatacaattccaagataactgcacagatcccaacatttgaaccatacacatcactggccagccatacttggggatgtgcttagaggatcatagagaaacagctaactagagttttggtgtcctatgggacatattaacaggtaattagggtaccctctcattcttctccttagagtaggtactttgcatgcacatgcacactgaagctcctccccacacccaaacactcttcattttttaggaccaagattctgggcaagcagaatagacatagcaatgctttcactctttgttgtgtccttattagaaattctgaaattcacagtttaatttaaaccttaagggtgataattcttccaaagtcccaatgctgtgtgagttcatttgcagattatagacagtaaaggggctataaacacataagtcaccactgtaatgattttatgactttcctgcatcatgcagagcttccaagctttttgaggctgcttctgctgtgtacctggatggtttgtggccacagctctgccct

SEQ ID NO: 3963 - DNA, 4001 bp, Homo sapiens
gcagtacaaatatcagacaagggaattacttgcagatggtattgtatattgtacatctaatgcatactacaaaataataagaaaagttagtgatgtggctggatacaagatacatatgcaaaaaccaaaattttaattaccagtaatcagttaaatgtagaaatggaaacattgccctgtacaaaatagtttctaaagtaataaaatgccaaggaataaatgttaaaaacaaacataaaatgcttatatagtgaaaatttttatttatgtatataaaacaagatctgaataaatagtgagacatatatgttcctgaacaggaagacttaatagcaaaaagatgccagtcttctcaattcaggaaaaccctgtaaccctacgtgtaggactctagtctactaagataaaagcaagaatatagaaatatattcacgcaaggaaagtattgaagagtgtttacacagccttattcacaaaaggaaagagtggaaaatggctatatatatatcaatattaattggttaaaaaactacattgtatccaaagtaaagaattttatgcaattattaaaagaacttgtcaaatctgtctgtattgctctataaaggtacccataatttattggcaagtgaaaaatgcaagataaagaagaatatgttcagcccaatactagattttatttttactaaataggtatgggaacttacatgagatattgcatatgcctaaaatactttttttcaatgaaaagaatgtacacaaaacttaagagcatttcaactacggggtcacatagaattaacaaaaaacggaagtttcatttcttgctgtggtttttggtacttttctaaacatcgtattttaaaatgtagcctgaatatgatctataatttttaaattattacatatactttcaagaagggcagttttataaaatttgataattgatgagtacatgaattcgcacaaaataatttgttaaactggaaagaaatttgaaatgcaacaaacgaaaatgtcaaatcacagttcagtaaggaatccttttttaatttccaaagccagattattcttaatgtgctaaaggagaggtgacttaccataggcaatggctttccctgatgacagttgataccaccaatgaagatcatgttgggcatcacgggtttgggatagtccaaaacaaagtccgttcgcaacaaccaaattgatgtgtgactgtagagatcatatgccgtgacaggggtttggagaatttcagaggctatttctagggcatttctaaaaagatactggcaaaataaatggtcctccaagtgcacgatgtggttccatactctctccttgaaagtcatggcatctgagaaccctaagagatcattggggacataggaaagaggagcagggcactgtgcaccttcttcaagatggtggcaaaatattcccctggtgaagaccacagaggggagggagaaatatttagcaacaattaagccacaggtatcaaaaggatccagaaacactgcatcaaaagaactctcctttaagtattctactaattttcggtcattaaacaaactcctgcaatgcgaaaaaaataagtcaagaaaaccactggatgaactcattaatagagaaaatatactttgtgcctgtgctttccattgagcatgggcgaaaaccatgaattcccggttctgatcttccagagtgtacgaggttgagtaagtcttcactgtgcaattcagtgatctttccagttgccaactcacctctggcatgactacaaccacctcatgccccctgaggataagtttctccaccaccgactgcatggtgaaccagtgactcccatccatgggcactaccagcagcttccctgcctcggcaaagccacaggtcagcagtagacacacacataaaggaacggggctggtccaccctgcgcgagccatgagagaactgcagcccgagccagcagctgggattctaagctgctatgatacagtaggcggaagaagtacaggcacaaaacctgaccccaatagagggcgtgtatttatcctttcataaaaaaaaaaaaatcacactcactgccaatgatttactcataagaacgataacacacgagtatcatttgctgagatacctacttgtatgatttccagacaagagtagattatggtcttcgccttggagggagagcacgctgcaagtgagtttagaaacagaattattcagcaatgcttttggaccttgaagattcggaaagataaagtgaaagtaaatttgaataatgctaatatttttggaatttatcccaaagcaaaatttagattttgactttagccaaccaaatactctctgtccagaaagaaattggcatctcatgttccagggaaagacagcaaggctcttagcactgacctcccaactggcaagaaactggggctcacctgcatctctgcaatgcataatcattgctggttgtcttcttccatatccaaaccctgagaggcctctgaaatgccaaaatgagattgacaaccctgcctccatggaccataccagggacttgatggaaagtgaccatcacctattttaatgactttcctcagatacgttgcatgcagtggggagttgctggcccagtccttgtgcgaacactctgctgggctgcctctctgtgactgctctacttctatattctaaacacaccatcactccagtgacctctttcaggaaaatatgtacttgtctccctcagtctgctgaggactcctggaagtcagaggtgatgccatctctgtgtttttacccttctttcacagtagccatgctttgcctttgacgtagtttgtatgtttgtcccctccatatatcatggtcaaatataatccccagtgttggagatgaagcatggtgggaggtgtttgggtcatgggcatggatccctcatgaatggcttggcactgccctcccaattgtgagtgatttctcatgagatttgattgtttaaaagtatacgacagtacatgtatcccagatctcttaaagtataattttttaaaaaatgccaaaaaccctcttcaggatattattcaggagaacttccccagcctagcaagacaggccaacattcaaattcaggaaacacagagaacaccataaagatactcctcgagaaaagcaactccaagacacataatcatcagattcaccaacgttgaaatgaaggaaaaatgttaagggcagccagagagaaaggtcctgttacacacgaaaagaagttcatcagactaacagcagacctctctttagagacccaacaaaccagaagacagtggggaccaaaactcaacattcctaaaggaaagaattttcaatccagaatttcatatccagccaaactaagcttcataagtgaaagagaaataaaatcctttacagacaagcaaatgctgagagattttgtcaccaccaggcctgccttacaagagctcctgaaggaagcactaaatatggaaagaaaaaaccggtaccagccactgcacaaacatacccaattgtcaggacaattgacactataaagaaactgcatcaactagtaggcaaaataaacagctagcatcataatgacaggatcaagttcacacataacaatattaatcttaaatgtaaatgggctaaatgccccaattaaaagacacagactggcaaattggataaacagtcaagacccatcagtgtgctgcattcagaagacccatttcacgtgtaaagacatataggctcaaaataaagggatagaggaatatttaccaagcatatggaaagcaaaaaaaatcaggggttgcaatctagtctctgataaaaacagactttaaatcaacagagatcaaaaaagacaaagaagggcattatataatggtaaagggatcaatgtaacaagaagagctaaccatcctaaatatatatgcgcccaatacaggagcacccat

SEQ ID NO: 3964 - DNA, 4001 bp, Homo sapiens
ttttgcaataatacctacatttataaaaaaggcacagaaataagaatacaaaaggatctaaatcatggaagttcatacacattcggtgaatatgacataaaaaggctgattctctcacgatgtacatggcacagcaaggaataagaaacaatattcaggtcccagagtaccatttcaacgaaacccaaatattctggattaatgaaagctgcctctgaaatttttggtaaaggagtagatcccactatagaaacctggagtgcagtagggtgggtttggtgatgtgatgagcctctcctgagaaatgcttcccttcttggacgcatgtccattcatcactgtccccagcttcactgggcttatagattcacagtcttatctcctccctagccccttccgccatttcttgataatttcagcattccaagtagaagaatcatttgagatgcaaccattactttgccttccgaactctgagatgtccccacatcatgcaccagaccccaaatcctgaccagaaaatctcttgacagcacagatccctgtctggaaactgaacttcgtgtgtcattctctaatcacagacatccatcccaacttcattgccccacttccactgagtcaacctctctgacacttctatttcatgtgagtgcctaggtctcctgtggtcacctgtctatcatttgcaagatgggacaactaaaaattatcatgtcaacaattgtaatttactgttgcatcatctttcccctgaaaatcatgctagcaaaaaatccaggatggatcagttccaaacgtagtgtccctgttcctgccaagctgaaggacatgcacaaccatgaagatggtgcctttacaaaccaacagtctctatgagtcacaccagtccttgtccatccttttacaaacattcgtgtctacttcctcttcctctcagtgaccatttaaaacctgaaatacgctactagagaccccttaacagtttatctcactgaaggctattatgacaaggagaagcagaaatgaaatatttggaaagataagtaaatatggaagcaattttaaataaatacatttttttaaaaagtgttttgcctggaacattgattggatgaaggcaccaatacagacctgagatagtggcttcctgttggcacagttgatgcccccaatgaagaccatgttgggcatgattggcctggggtagtccatcacaaagtcccctcggaacagccacacagatgcatgactgagaatatccaccactgacacctctctctgaaaaagctcagaggcaaggcttgcataaggagcagaaaaagcatggcaaatgtaggacagggccagagggtagagcatgttcttgaccctttgcatgaatgtcatgtggtctgaattggttgttagtaatctaggaatataggaggaagggtttggacactgtgtgcccttaaagtctaaatcacatggaatgttcctcaaaaaaaacacagtaggaatcgacaggtacttagccagcactgccgcgcagaggttaacggggtctgttaaaaccacatcaaaggaagtagcattcaggtgcctgatcagggcctcattatgtagtagctccacacaagacctatgatagaccaaagacatattgttcaacattgccatacttctgaaaaatttcttcagaaaatgttctgtttcaaagtacagttgagtgtggcccagcacatggcgatcaaattcatcctgggtccacgaaatggcataggttgtcagggtgaaaaagttctcttctttgatgtgcatattcacctctggggtgaggaccactgcctggtggcctctggcatggagctcccgcaagacctcccgcatgctgagccagtggctgccatcaatgggcaccaccaacacctttccactctcagcccagggctggacactgaggagaagcagcagtcctgtggccagccacggcaggggaacctggagtcctgtggccatctcagcagaagacacggacagctgactgtccaccccacgctgtgcctgctacatttgctttcttcatcttaattaccttgtcactgagccacttagcaaatcaacgtgtaattggaagacagagtgccctcctctagttaattattaaccattaatctatcactgtttttcactgtgggccccaccctggaaaagaccgatcatgactatcttgaaaaacacgtctgaccctgtgctcactctggggaacatccaagttcaagctcttgtttctcatccaattcccaacacaaggctgtgaacacccatttcatgtcactgtctcctacttctctgttaaccatgtttatcaggcagcagctgaggtctgaggagtcaccattgccctagcccccagtcatatgctctctgctggatgtgaccctatttgctaacccttgaaactttcttctcatgtatgagtaacgcagcgcatccaaaaaccatacaacattgctaagccagctttctctgaacagcgtggaggctggctatgtggttttggtcgtttttcgcaccaggatatttcttgtaaggatcagagaggactctctctgaagtggctgtcaatatagaaaaagctgcagggaggctgagctcaagatgtgatgatcagattcttgggaagactttgttgaggattctccatatacaccatggaagaagaggtgctgctatctaaagcacacatgggcaagacaaccctagcaaagacccatggtgggttcagggagctcctgctcaccaagggactgggggagctggagcctggcctcagatcttgcacagtctgaattcctcttctgaatgccgaaggctccagtctttatttcagtcatccaggcctttatttcatcctgaagattatggtcaggctcttctccaagtcaatccagcaccaagttctgataagaatggttcctccagaacagaatgggctgcacaatttgtgggggccctagtccaaatttcaagatggagaattaaatatgtgcctttctaaaggagagaccctgagcactcacaagggcctcaagcccaatgaggcttatcctactccagaaagtcactcccacatgtgctgtgctcacaagattgctgatgccaccttgtcctggtcacctcaggatgatgtgggcaggctgtctggggtgtgcactttctatctcactgcccctgtgtcttcttgcctggccgtgtctgccattgctggtgaggctgaggcttcccttagggaggaaattactccacattgataacagattccacctttggacagaacccatgggacaggcagtgaatggaagcgtctactgggggacacccagctcaagggcagcacacgcaggatggcacagaaaaggaaggtctgcaagggctttgggaactgtccagtagaggatgattcctgggaatttgtaaggacatagagcactagaaagggattctcagctgtgggtgcaacctctcagcctctgaactattcctccaacccccttaaaactatatgcttcctaagcaccctcatgatgagcccaggtgacgggtggaacacgcctggtagtgtgctcttcccacattcatgggctcccatgttctacctccaagtagtagtgttttatttagacagtgaagtcatctgatttcttgtcacatgtctgggactcccagaccctgaggaggcccatgtatcttggaagacggtggtactccagagacctaggggccctaaggatagcagaactatggggagggaggagctcctggtgcctgggaaacagaaggagctgcccaagtcatcagcttccagggtctggagatgaggaggggtctgggctgcacagatagacttggagccatccgcatatgtggaagccatgggtgtcagtgaggtcaccccagcaaagtccagagacagaaaaaagcatcctgaaagactgacctgtgtggtcttgttcccc

SEQ ID NO: 3965 - DNA, 4001 bp, Homo sapiens
tgaaggttgcagtgagcggagatccggccactgccctccagcctgggcgacagaacgaggctcagtctcaagaaaaaaaaaaaaaaaaggatggctcccttaatggatttagaaaccaaattcattggtgtgtgaatttggtttttcacatcccagagtactatttcaatgaaacccaaatattctgtattaatgaaagtcacctctgaaatttttggaaaaagaatagatcccactatagaaacttggagtgggatagggtgagtttggtgatatgatcagcttcacctgagaaacacttcccttcttggacacatgtccattcatcactggtcccagcttcactgggcttatagattcacggtcttatctcctccctagtcccttccacccactcttgataatttcagcattccaagtagaagacccttttgacatgcaaccatcaccataccttccaaactctacgatgtccccacatcatacaccagacccccaactcctggtcagaaaaacttttctcaggacagatccctctctggaaactgaactccatgtttcattctctgatcacatgcatccatcccaccttcacagccccacttccactcaactgagtcaacctctttgacacttctacttcctgtgagtgcctaggtctcctgtggtcacctctgtatctttcgcaagatgggaccactaaaaattatcatgtccacaattctaatttactgttgcatcaccgttcagctgaaaatcaggcaagcaaaaaccccaggatggatcagttctgaatgtagtgtccctgatcctgccgagctgaaggacatgcacaaccatgaagatggtgcctttacaaacactgtccgtgagtcacagcagtccttgtccatcctctgacagaccctcatccgtgcctcttcttcctctcagtgaccactgaaaacttgaaatacactaggcccctcaacagtttatctgttataaagaagccaaaataaaatctttggaaagataagtagatatggaagcacttgtaagtaaatacattttttaaaaagtgttttgcctggaacattgattggatgaaggcaccaatacagacctgagatagtggcttcccgttggcacagttgatgcccccaatgaagaccatgttgggcatgatcggcctggggtagtccatcacaaagtcccctcggaacagccacacggatgcatagctgacaagatccaccactgacacctctctctgaaaaagctcagaggcaagacttgcataaggggcagaaaaagtatggcaaatgtaggacagggccagagggtagagcatgttcttgaccctttgcaggaatgtcatgtggtctgaattggtcgttagtaacttaggaatataggaggaaggatttggacactgtgtgcccttaaagtctaagtcacatggaatgtacctccaaaaaaacacagcaggaatcgacaggtacttagccagcaccgccccacagaggttaacggggtctgttaaaaccacatcaaaggaagtagcattcaggtgcctgatcagggcctcattatgcagtagctccacacaacacctatgaagggccaaagatacattgttcataattgccatacttctagaatatctcttcagaagatgttctgtttcaaagaacccttgagtgtagcccagcgtaacgcgatcaaattccttctgggtccatggaacagcataggctgtcagggtgaaaaatttctcttctttgatgtgcatattcacctctggggtgaggaccaccgcctggtggcctctggcatggagctcccgcaaggcctcccgcatgctgagccaggggctgccatcagtgggcaccaccaacacctttccactctcagcccagggctggacactgaggaggagcagcagtcctgtggccagccgcggcaggggaacctggagtcctctggccatctcagcagaagccaccgacagctgactgtccaccccacgctgtgcctgctacatttgtttccttcgccttaattaccttgtcattgagccacctagcaaatcagcatgtaattggaagacaaagtgccctcctccagttacttattacccattaatctataactgcctttcgttatgggcccaaccctgggaaagaccaatcacgcctatcttgaaaagctcatctgaccctgtgctgcctctggggaacatccaagttcaagctcttctttctcattcaattcccaacacaaggctgtggacacccatttcatgtcactgccttctactctgttaaccatatttatcaggctgcagctgaggtctgaggagtcaccattgccctagtccccaaccacatgttctctgctgaatgtgacgctatttgctaacccttgaaactctttcttctcatatgtgaataacacagcacatccaaaagacatacaacattgctaagccagctttctctaaacagagagtgttcaggctggctatctggttttggtcttttttcacaccaggatatttcttgtaaagctcaaagaggactctctctgaagtggctgtcaatataaaaaaaagctccggggaggctgagctcaagatgtgatgatcatattcttgggaaggctttattgaggattctccatctacaccatggaataagaggtgctgctgtctaaagcacacatgggcaagacaaccctagcaaggacccacggtgggttcagggagctcctgctcaccaaaggacctggggagctggagcctggcctcagatcttgcacagtctgaattcctcttctgaatgccaaaggctccagtcttctgcaagtctgcatagagactgaagtatccattcatccaggcctttatttcatcctgaagattatggccaggcttttctccaagtcaatccagcaccaagttctgataagaatggttcctccagaacagaacgggctgcataatttgtgggggcactacttcaaatttcaaaatggagaattaaatgtgtgcctttctagggggagaccctgagcactcacaatggtctcatgcccatgaggctcgtcctgctccagaaagtcactcctacatgtgctcgcaagattgctgatgcttccttgtcctggtcgccccaggatgaggtgggcaggctctctgggctgtgcccactttccatctcactacctctgtgtctacatgcctggccatgtctgccattgctggtgaggctgaggcttcccttatggaggaagttactcccattagaaatccacattgataacagattccacctttggacacaacccatgggacaggcagtgaatggatgcgtccatcagagggacacccagctcaagggaggcatatgcaggatggcacagagagggcaggtctgtaagggcttgagaactccccaggggaggacgatttctggggatttgtgaggacacagagtgctagaaagggattctcagctgtgggtgcaacatctcagcttctcaactattcctccaacccccttaaaactgtctgcatcttaagaaccctcctgatgagcccggggtgagggtggaacatgcctgggagggtgctcttgccacattcaaggggctcccatgttctatttccatgtagtggtgttctatttccatgtagtggtgttttatttagatagtgatgtcatctgatttctggttacgtgtctggcactcctagaccctgcggaggcccatgtatcttggaagatggtggtgccttcagagacataggggccctgaggacagcaggactgtggggagggagaagctcacattcctggtgcctgggaaataggaggagctgcccaaggcatcagcttccagggtctggagatgaggaggggtctgggctgcacagatagacttggagccatcagcatatgtggtagctgaagccatgggtgtcagtgaggtcaccccagcaacgtccagagacagaa

SEQ ID NO: 3966 - DNA, 4001 bp, Homo sapiens
aggcaggagaatcagttgaacctgggaggtggaggttgcaatgagccaagatcccaccactgcactccagactgggtgacagagcaagactccatctcaaaagatagaaaaatttaaaagatagaattttagttttatccatggaatatttataaacattcaccatattgttgtcactaactacatatgaatattgagcacttgaaatgtggctattccaaattgagatatactgtaagtgtcaaatatatgctagattttgaagacttaacaacaaaaaaagctacgttaaacagttcacatgttgaaaggataatatttgggatacatctggttaaataaaatgcattattcacattaattttagtggtttctttttgctggtgtttaacatgcccactagaaaagtttaaattatgtatgtggtttacatgatatttctattggacacttcggtattagaccatgaagttaacctagtaagaattttttttaagtagtgtcttcacaagaaacattctcctattacaatccaacactccctctctggaaactgaactctgtgtttcattctctgatcacagacatccattgcacctacattggcccaattccactgaactgagtcaacttctttgaaacctctacttcctctgagtgcttaggtctcctgtggtcacctctctatcttttgcaagatgggaccactaaaaattgtcacgtcaacaattgtaaatttctattccttcctcctttctactgaaaatcttgccagcaagattggatggatcagttctcagtgtagtgtccctgctcctgcccagctgaagcacatccacagccatgaagatggtgcttttacaaacgaacagtctccgtgagtcacaccactcttgcccatcctttgacagatcctcgtccctgcctctccttcctctcagtggccattgaaaccctgaactgcactaccattgaccctttaaaagtttatctcactgaagactattacaacaatgagaagcagaaatgaaatctttggaaagataagtagatatggaagcacttgtaagtaaatacattttttaaaaagtgttttgcctggaacattgattggataaaggcaccaatacagacctgagatagtggcttcccgttggcacagttgatgcccccaatgaagaccatgttgggcatgatcggcctggggtaatccatcacaaagtcccctcggaacagccacacagatgcatggctgacaagatccaccactgacacctctctctgaaaaagctcagaggcaaggcttgcataaggagcagaaacagcatggcaaaggtaggacagggccagagggtagagcatgttcttgaccctttgcaggaatgtcatgtggtctgaattggtcgttagtaatctaggaatataggaggaagggtttggacactgtgtgcccttaaagtctaaatcacatggaatgttcctcaagaaaaacacagcaggaatcgacaggtacttagccagcaccgccgcgcagaggtgaaaggggtctgttagaaccacatcaaaggaagtagcatgcaggtgcctgatcagggcctcattatgcagtagctccacacaagacctatgtatgatcaaagacatattgttcataattgccattcttctagaaaatttcatcagaagatgttctgtttcaaagaacgattgagtgtgacccagcaaaaggcgatcaaattcgtcctgggtccatgaaatggcatacgttgtcagggtgaaaaagttctcttctttgatgtacatattcacctccagggtgaggaccaccacctggtggcctctcgcatggaggtcccgcaaggcctcccgcatgctgagccagtggctgccatcagtgggcaccaccagcaccttcccactctcagcccagggctggacactgaggagaagcagcagtcctgtggccagctgcggcaggggaacctggagtcctgtggccatctcagcagaagccaccgacagctgactgtccaccccacgttgtgcctcctagaattgtttccttcgtcttaattaccttgtcactgagacacctagcaaatcaacatgtaattgaagacagagtgccctcctccagttacttattacccgttaatctataattgtcttgcattatgggccccaccctgggaaagaccgatcactcctatcttgaaaaactcatctgaccttgcgctcgctctggggaacatccaagttcaagctcttgtttctcattcaattcccaacacaaggctgtgaacccccatttcatgtcactgtctcctacttctctcttaaccacgtttatcaggctgcagctgaggtctgaggagtcaccattgccctagtccccaaccatatggtctctgctggatgtgaccctatttgctaactcttaatactctttcttcccacatatgggtaacacagcacatccaaaatgcagacaacattgctaagccagctttctttaaacagggagtggggaggctggctatctggttttggtcgtttttcacaccaggatatttcttgtaaagctcaaagaggactctctctgaagtggctgtcaatataaaaaaagctgcagggaggctgagctcaagatgtgatgatcagattcttggaaaggctttgttgaggattctccatctacaccatggaagaagaggtgctgctgtctaaagcacacatgtgcaagacaaccctagcaaagacccatggtgggttcagggagctcctgctcaccaagggaccgggggagctggagcctggcctcagatcttgcacagtctgaattcctcttctgaatgctgaaggctccagtcttctgcaagtctgcttagagactgaagtgtccattcatccaggcctttatttcatcctgaagattatggtcaggcttttttccaagtcaatccagcaccaagttctgataagaatggttcctccagaacagaataatttgtgggggctctagttcaaatttcaaaatggagaattaaacgtgtgcctttctaatggagagaccctgagcactcacaatggtctcacgcccatgagactcgtcctgctccagaaagtcactcatacttgtgcttggcaagattgctgacgcctccttgtcctggtcgccccaggatgatgtgggcaggctctctgggctgtgcacactttctatctcacttcctctgtgtctacatgcctggccgtgtctgccattgctggtgaagctgaggcttcccttagggaggaagttacccccattagaaatccacattgataatagattccacctttggacagaacccatgggacaggcagcgaatggagctgtccaccagagggcgcaggcaggaaggcacagagaaggcaggcctgcaagggctttgggaactctccaggggaggatgattcccggggagttgtgaggacacagagcgctagaaagggattctcagctgtgggtgcaacatctcagcctctgaactattcctccaacccccttaaaactgtatgcatcctaagcaccctcctgatgagcccggggtgagggtggaacacacctgggagggtgctctcaccacattcagggggctcccctgttctatctccatgcagtggtgttttgtttagacaccaatgtcatctaatttctactcccacgtctaggactcctagaccctggggaggcccatgtatcttggaagatggtggtgccttcagcgacatgggagcactggggagagcaggactgtggggagggagtagctcatattcctggtgcccaggaaataggaggagcagcccaaggcatcagcttccagggtctggagatgaggaggggtctgggctgcacagatagacttggagccatcagcataagtggtgattgaagccatgggtgtcagtgaggtcaccccagaaaaattcagagatagaaaaaggcatccaatagc

SEQ ID NO: 3967 - DNA, 4001 bp, Homo sapiens
ctatattatgtcccaattaaaagaatcctgacattctatgtttttatttcatgccccagaatccctggaaccatttcagttatccccatcccctcacccttgccttttcacagtggctactgccaactgttcaaattgttaacagagaaatcagcaggtgtaaagaagagaggtaagggtctttgggacctgtttgaggctttctctctgataaaaaaggaactggaaaagaaaattgaggcataaaagatagagggagttgcctgaagcccttcaaagttgtaaatatttacattgaaatttaaaactcacagatttttattttccaaagtaactctgggcccttttcctacatgtcaggagggcatctgtaaacacttgtcttaggtcagaggccataccccttttgctgaaaaggccagtcagtaaatgtgtaggctttgcagaccaaatacttctgtggcacatattcttcattgttaaattgttttaaaactacaaaaaccattcttagctctgggccatataaaaacaggtctcaacataaaaggaaaaaaaaaaacaaaaaacaggcctttgggcagattgggctcacaggctgtagttcgctggtccctggctcaaggtccagagacaaagcatgggacagagttgggaaaatggattttaacctggacctgttcccttagtcaagccttcacctctgtttgaactgggacatttctaaggctcattcaatgagtatgtgactgtcccagattatccaactaagcaaatctcctactcttgccaagcatgagccctgtcttcatccgaatgcctctgtatcacttcagcctcaggtctcctatgtgttcccgctgctccgagccgggtatcacttccccccaccgtttctccaggaaatcctccaagggacagtcggctcaaggagccaaatgagtgagggaggacagagcctggaagaaacaaggcagtccaaaagaaataaacccaccaacctgagacaagtctttcctcttcttacagttgatacctccaatgaagaccatgttgggcatgaccggcctaggatattcaagcacaaagtcatatcttaacagccaaacagagaccttctgatataaggtgattatatccacatctctcttgaggacagctgatgcgagttcttcatactttgaaaacagacaataaaatagatagggctccaacaaattaacaaggaagttggccactcgttgggaaaaagtcatgtggtctgaaaactttgtgtagcacctgggaatgtaggacacagggtctgggcttctgctgaatgtatgctccagggaacacggaaaacccctgaagaggtacacagatggtaggcccaaatactcagccaggatcaccccacagggtaaggctgggtctgtgaaaagagcatcaaacttgctctccttaaagaagttcagggtgtccctgtcctgcaggaggctctggcagttgatgaagtacaggccaataacaatcatgttattcctgtactctgtctgaggagcagttaggaatgatcgctcagcaaagtgattgtttccaaatgattggtaacggttcttcagctcttcttggtcatacggcactggatagatttttcttgtgtagtatttggattctttcaaaagcaaattaacttcaggcaccaccactacaatctcatgaccccggtcactgagaacctcaactatatccttcatactaagccagtggcttccgtcctgagggaccaccagcagcttgtcacctacaaccatgccccaaagtgctaagaagaaaacccctgcagaaattctctgaaatgagcgaaggaggcaggccatcctggaaagagttaaagtaacaacggtaataaagagttttcactctccaaatcacagggctcctaggtattttccctaaactaaccactgcttttcacaggtcctgtctacctctcccttgctctgaattttaccctttgatatgtaagaacccaaattaatatttaaccattttaatcacatggttaatatgaaccaactatggccgtgtcagctttcacctgagcttctgggtgtttctcttcagctccacaagtctgcttctccctctctgaaaagttatagcaacactttgaagatgacttggagagacccctgaggaccccctgccaattctctatcccgaacttgctggattcctcatcattgacgttgtctgttatgtccatgatgtgcgggaatttttcttgcacacggacctattctctaacaccagctgggtatcctacaattcaattccattctgaactgaattctgagttagcacggaccccacaggttaagggctcagtcctacaagactgccctcacttcagacaccaattgcaagtagtaggtccccaggttacccacaacttctgtctgacttggcaaaaatcagaggttcacacaccctctttcttggagtcaatcatttgctagaatggctcacagaactgaagaaaacagtttatttactaggtttggtttattacaaaggatattgcaaacaatacggatgaatagccagaggaaaaagtacaaagaacaagatatgggggtatggccatggagccccatctgccatctctgggtgccccaccctccacaccttcagcaacctgaaagctctctgaaccctgcccttctgagtttttatgtaggcttccatacatagtaggcatgattgattagattgttgcccatcggtgatcaaatcaatcttcaatctctctctcctttcttccctctaatcgcaagggttttgttccctggcaactagccctcatccttagagactttacatctcctttacataaacttaggtgtgatcgaaagggatctgttttgaataacaaaagattctttgttcacgtttatcgctcccaccacttatggtttcaggagctgtgtccaggaaacaaagacaaacatatatttcttattatacatcacaatataacaacattcaaactgttacttgcctttaggaaattaagatttgagaagtataagtctagccagtacgtggtgagaatcctagagcaggagtcagaaagcctggtatctgcttctggcccagccacccatctgccaggggagtgactcctctcctgagcttcaggtttctcaactgaggcccagaaagggagggtcacactggccctgcctgctaaccacactgctgagggcggtcccagagcaagacctgtgtagaaactaggctgtcccagtgagaggtggtaccttgaattactagaacagacttgcccagagctagtcatgcacacctggctggcacgcgagttcctgttcccacccacaagtttggcaccggaggtgttctggggcccaggaagggagaagaagcctgagcaacatgattagaggggccactccaaggacagggctggcccccatggggaacataaccaggatgcaaattcattgttcaaggcatgcgaagactcagctcagtccaagctgggagcagcctcccaagaggattggcagcttacaatgatcaaagtcatgggggcggcagcatcttgctttgagttcatctagatagcaataagactccaggaaggttgcaaagggaacagagctcaggtccaccttcttgagcaggcagacattaggcaggtttccttcaaagaacagttcatctagaggaagaatggcttaagcaagcatgtaggaatagcgggatcaagagatgctacaaacttcacattctttatactagacctccactctgctgtggacgttggtctgagcccttccaaccacagccttgctctgaaaatcctgttgctcatatgtgggtcctgttcttagtcccagaagtccctacagaacatgagttggaggaaggagctgaagaaatgaaactaacatcactatgcataccatcccttgaattcctaacaccttctt

SEQ ID NO: 3968 - DNA, 4001 bp, Homo sapiens
caataaaatagatagggctccaacaaattaacaaggaagttggccactcgttgggaaaaagtcatgtggtctgaaaactttgtgtagcacctgggaatgtaggacacagggtctgggcttctgctgaatgtatgctccagggaacacggaaaacccctgaagaggtacacagatggtaggcccaaatactcagccaggatcaccccacagggtaaggctgggtctgtgaaaagagcatcaaacttgctctccttaaagaagttcagggtgtccctgtcctgcaggaggctctggcagttgatgaagtacaggccaataacaatcatgttattcctgtactctgtctgaggagcagttaggaatgatcgctcagcaaagtgattgtttccaaatgattggtaacggttcttcagctcttcttggtcatacggcactggatagatttttcttgtgtagtatttggattctttcaaaagcaaattaacttcaggcaccaccactacaatctcatgaccccggtcactgagaacctcaactatatccttcatactaagccagtggcttccgtcctgagggaccaccagcagcttgtcacctacaaccatgccccaaagtgctaagaagaaaacccctgcagaaattctctgaaatgagcgaaggaggcaggccatcctggaaagagttaaagtaacaacggtaataaagagttttcactctccaaatcacagggctcctaggtattttccctaaactaaccactgcttttcacaggtcctgtctacctctcccttgctctgaattttaccctttgatatgtaagaacccaaattaatatttaaccattttaatcacatggttaatatgaaccaactatggccgtgtcagctttcacctgagcttctgggtgtttctcttcagctccacaagtctgcttctccctctctgaaaagttatagcaacactttgaagatgacttggagagacccctgaggaccccctgccaattctctatcccgaacttgctggattcctcatcattgacgttgtctgttatgtccatgatgtgcgggaatttttcttgcacacggacctattctctaacaccagctgggtatcctacaattcaattccattctgaactgaattctgagttagcacggaccccacaggttaagggctcagtcctacaagactgccctcacttcagacaccaattgcaagtagtaggtccccaggttacccacaacttctgtctgacttggcaaaaatcagaggttcacacaccctctttcttggagtcaatcatttgctagaatggctcacagaactgaagaaaacagtttatttactaggtttggtttattacaaaggatattgcaaacaatacggatgaatagccagaggaaaaagtacaaagaacaagatatgggggtatggccatggagccccatctgccatctctgggtgccccaccctccacaccttcagcaacctgaaagctctctgaaccctgcccttctgagtttttatgtaggcttccatacatagtaggcatgattgattagattgttgcccatcggtgatcaaatcaatcttcaatctctctctcctttcttccctctaatcgcaagggttttgttccctggcaactagccctcatccttagagactttacatctcctttacataaacttaggtgtgatcgaaagggatctgttttgaataacaaaagattctttgttcacgtttatcgctcccaccacttatggtttcaggagctgtgtccaggaaacaaagacaaacatatatttcttattatacatcacaatataacaacattcaaactgttacttgcctttaggaaattaagatttgagaagtataagtctagccagtacgtggtgagaatcctagagcaggagtcagaaagcctggtatctgcttctggcccagccacccatctgccaggggagtgactcctctcctgagcttcaggtttctcaactgaggcccagaaagggagggtcacactggccctgcctgctaaccacactgctgagggcggtcccagagcaagacctgtgtagaaactaggctgtcccagtgagaggtggtaccttgaattactagaacagacttgcccagagctagtcatgcacacctggctggcacgcgagttcctgttcccacccacaagtttggcaccggaggtgttctggggcccaggaagggagaagaagcctgagcaacatgattagaggggccactccaaggacagggctggcccccatggggaacataaccaggatgcaaattcattgttcaaggcatgcgaagactcagctcagtccaagctgggagcagcctcccaagaggattggcagcttacaatgatcaaagtcatgggggcggcagcatcttgctttgagttcatctagatagcaataagactccaggaaggttgcaaagggaacagagctcaggtccaccttcttgagcaggcagacattaggcaggtttccttcaaagaacagttcatctagaggaagaatggcttaagcaagcatgtaggaatagcgggatcaagagatgctacaaacttcacattctttatactagacctccactctgctgtggacgttggtctgagcccttccaaccacagccttgctctgaaaatcctgttgctcatatgtgggtcctgttcttagtcccagaagtccctacagaacatgagttggaggaaggagctgaagaaatgaaactaacatcactatgcataccatcccttgaattcctaacaccttcttgcaaattaagaaggtattagaaaacatttttctttctcctgtgagctttgactgtactaagaatggtgtgtgtgtgtgtgtgtgtgtgtatgtgtgtgtgtgtgtatgtctgcactggacactagccagaggaatctggcatgtctgttcgtcataatgacgatccctaaagagtagctccgctggagacccaggcctgccctggttggtgctgtaggagtcaaggtgtcctcaggtatcacttgagtgtccaggcaaaggccgattttttttttttctcagggattgctgcaggctgaatgactcaggcttgggacatattccagtggggtgaaagaagtagatcctaagataaaacaaatctctgttggcaagagcagatttcccaaaaagtaaatggaggatagctggcattttgaatagaggagagacccaaagatgtgcatgaaggtaatttcatgttgggaataggaaggtctggaaacgtggaccctatggagaggtttgcttctaaggtgctaactctttcagacccttgtatgacctacgacccataagtaatggagccaggacccacctgcaagatttcaaaggacctgcaaaatgtttgagacttaaaataagaaatttgctgaatctagaatactaaaatggcaaacattgaatttatgaatattttatgaaatggctataaaaacataactacatgtcaatgaatccactacagattagctcaccaagttacaaagacatatgtgacataagatgcaggagcaatttaatctatttgataggctgtgaggtggggctgcagaagtcagaatgctctgggcccagatcttgaggaaggtccaaaatggtgagatgaagtgagaatcccttttaggggcctgtgggttcctccaagcatggaaataaaggaaaatcttgggttctttcgaaggaaattccaggcacctacctggccctgagaaataaataaggcacttgataagcaagaaggtaatagtagcctaaaacaatatccaagaaagttagagtccagagatgtttggtttcctatagaaactacagatcacatcataacatatgtccccgagttgtttttcagaaacctggactcccaccaaatggattctttggcaggcagacctcagataaggggaaataacgactgaactctgacagcca

SEQ ID NO: 3969 - DNA, 4001 bp, Homo sapiens
acaatattaataatattttggaactatatgctccgccaaaataagaggtataaataccaggggagggaataatttgcagatgatattgcatacttaatacaccttacatactaatacgagagtttagtaatatgactacatacaagataaatgtgtaaaactcaaagcagtacattaattatgcatagtgaattcaaaagagaaatgggaaaattgccttgcacataatggtttcaaaaataatgaaatgcagaggaataaaggttaataagaaagatgaaatacttttataaagtgcaaaattttatttatggaaataaaacagaatccgaataaataatgagggattcatattcttgagtaggaagatgtaatagcaaaagaaggccaatctcactcatttagtgaaaaccaagcaaccatactcataggatgataccctactgagataaaagcaaaaatatgaaaatatatataatgtaaagaaagtatacaagaattcttattattgctcataaaccccaaaagtggaaaacacttaaatctctatcaatcttaattggttggaaaactacattgcatccaaagtaaagactaccatgcaattattaaaagaacatgtcaaatctgtatgcattgacctgtaaagatatctttaacttattgacaagagaaaaatctaacataaaaaaacatagccagcatgatagtagattttatattgataaaatagaagtgacaatttaccctaaatatatgcatatacatagtataatttcaaaaaaattgaaaacaattcacacaaaactgctaagaatattttcctctgggggtagtgtagaattagcaaaaaaagggaagtttcatttcttactgtggtttttttgtatttttccaaaaatagcatttagattgcagcctagatatgatctacaattatatcaattgtatacacttacatatcaacaagagctgctttatacaatttgctacccaacaattaagtgaattggtacaaaagaattccttaaaccagaaagaaattccaaatgggacaaatgtaaatgataaattatgattctgtaagaaatcttttaatttccaaagccagattattcttaatgtgctaaaggggagataacttaccataggcactggctttccctgatgacagttgataccaccaatgaagatcatattgggcatcacgggtttgggatactccaaaacaaagtcagttcgcaacaaccaaattgatgtgtggctgtagagatcatatgccgtgacaggggtttggagaatttcagaggctatttctaagacatttttgaaaaaataggggcaaaataaatgttcctccaagtgcatgatgtggttccatactctctccttgaaagtcatggcgtctgagaaccctaagagaagtctggggacataggaaagaggagcagggcactgtgcaccttcttcaagatagtggcaaaatattcccctggcgaagaccacagaggggagggagaaatatttggcaacaattaagccacaggcatcaaaaggatcgagaaacactgcatcaaaacaactctcctttaagtattctactaattttcggtcattaaacaaactcctgcaatttgaaaaaaataagtcaaaaataccattggatgaacttgttaatagagaaaatgcacttcgcaatggtgccgtccagcgagcatcggcaaaaaccatgaactcccggtcctgatcctccagagtgtatgaggttgagtaagtcttcactgtgcaattcagtgatcttcccagttgccaactcacctctggcatgactacgaccacctcatgccccctgaggatgagtttctccaccaccgactgcatggtgaaccagtggctcccatccatgggcactaccagcagcttccctgccttggcaaagccacaggtcagcagtagacacacatataggggaaggaggccagtccaccctgcacgagccatcagagaacttcagcccagagccagcagctgggattctaagctcctataatatagtaagtggaagaagtacagatagaacctgccctcaaaagaaggcgtgtacttattcattcatttaaaaaaaaattcacattcactgccaatgatttactcataataatacatgagtagcctttgctgagatacctgcttatatgttttcaagaaaagagtaactcatcatctttgccttggggacagatcatgccctgtgctgcaatatgagtttagaaacaaaattattaagcaatgcttttggccttgacgacattgaaagataaaaaggaaagtaaatttgaacgaagctaataattttggaatttgtcacaaagaaaaatttgcaattttttttttttttttttttttttgagatggagtctcactgtgtcatccaggctggagtgcagtggtaagatctaggctcactgcaacctccacttcctgggttcaaacgattctcctgcctcagcctcagtagctgggattacaggcgcacgctgccatgcccagctaactttttgtattttagtggagacggggtttcaccatgttgcccaggctggtctcgaactcctgagctcaggcaatctgcccatctcggcctcccaaaatgctgggattacaggcgtgagccactacacctggccaaagtttatagacaatttttattttgtcctctgcccagaaagaaattggcatctcatgttcgacggaaagagagcaagggtcttagcgttgacctcctaactgggaggaaattgcggctcacctgtgtctctgcaatacacagctcacttgcgcattgcagagacacaggtgagccacaattgtgacacaggtgagccacaagtgctgcttgtcttttttcatttccaaatcttctgaggcctctgaaatgctgtaatgagattgacaaccctgcctccatggacccttccagaaatttgatggaatgtgactgtcacctattttaaatggctttcctcagatacattgtctgcagtggtgagtcgccgtccctatgcttgcccaagcactctaatgagctgtctctctctgcccactctgcttctgcattctgaacagagctgcaggcctttgctatgggcccaccccaatcactttggtgctcatcttcaggaatctatgtattgtttcctccattctaccgagcaccccttgaggatgagattacatcttctacctgttttcatcctccttccacagcacccatgctttgccttgcacagaggaagtccatgggaattctcattgcattgggctgaattccatcatgcagattttaatgggtgagctcagcagtgtgtgttaggcaacacactgaggagcatttcgtgagggattcaacagccaacctcagggcataattcttgtagaagcacaagatggttccttccaggacaccctaactggtactagacatttgcttagtcactttcctctagtacatactacactactataataattttgttgctacctcctgttgctattgcagggagctaaagtgtggcctaaatgcatgtgatatgacgtttataccctctgcgcgtttcttctctctagtaaattgcatgtcagagtaaaaaatgatctcttatggttctactgtatttttcatcatgtttagtgtaattttttaaaccttgaataccaccatgggactataaagtgcaactaatgatgctgcaagtactcccaagaagcaaagaaaaatcatgacattaccaaaaaaacttgaattacttgataggtaccgtagattgagctctgccgctatgattgcctgccatttcaaaatcaatgaagatagataaggaccattgcaaaagaaagaaagagaaaaagaaaaaagagagagagagaaagaaagaaaagagaagaaaagattcatgaagacattgctgcagctatgccagcaggagccaaacctcgcatct

SEQ ID NO: 3970 - DNA, 4001 bp, Homo sapiens
aaatgccaaggaataaatgttaataacaaacataaatgcttatatagtgaaaatttttatttatgtatataaaacaagacctgaataaatagtgagacacacatattcctgaacaggaagatataatagcaaaaagatgccaatcttctcaattcaggaaaaccctctaaccctacatgtaggactctagtctactaagataaaagcaagaatatagaaatatattcacacaaggaaattattaaagaatgtttacacagccttattcataaaagcaaaaatggaaaatgcctaaacatatatcaatattaattggtttaaaaaactacatagcatccaaagtaaagacttttatgcaattatgaaaagaacttgtcaaatctgtctgtattggtgtataaaggaatctacaatttattggcaaataaaaaatgcaaggtaaagaagaatatgtccagcacagcataaaagtttattttaacaaaataggtatgagaatttacattagatattgcatataaatgaaactttttttatactgaaaagaatatacacaaaactgataagagcatttcctctaggggtcagaaaacttaggaaaaaggggagtttcatttcttgctgtggtttttggtacttttctaaacacggtactcaaaaacgtgggctaaatatgatctataatttttaaattaaatatatacacctaaaatactttttttaatgaaaagaatgtatgcaaaactgctaagagcatttgctctagggggtcacatagaattagcaaaaaaggaaagttcaatttcttactgtggtttttggtacttttctaaacatggtactcaaaaatgtaagctgaatacgatctacaatttttaaattatatacacacaccttcaagaagggcagttttataaaatttgataactgatgagtacataaattggcacaaaataatctgttaaactggaaagaaatttgaaatgcaacaaatgaaaatgtcaaatcacaattcagtaaggaatctttttttaatttccaaagccagattattcctaatgtgctaaaggagaggtgacttaccataggcaatggctttccctgatggcagttgataccaccaatgaagatcatattgggcatcacgggtttgggatagtccaaaacaaagtctgttcgcaacaaccaaattgatgtgtggctgtagagatcatatgctgtgacaggtgtttggagaatttcagaggctatttctagggcatttttggaaaaatactggcaaaataaatgttcctccaagtgcatgatgtggttccgtactctctccttgaaagtcatggcatctgagaaccctaagagaattctggggacataggaaagaggagcagggcactgtgcaccttcttcaagatagtggcaagctattcccctggcgaagaccacagaggggagggagaaatatttggcaacaattaagccacaggcatcaaaaggatcaagaaacaccgcatcaaaagaactctcctttaagtattctactaattttcggtcattaaacaaactcctgcaatgcgaaaaaaataagttaaaaaaaccattggatgaactcagaaatagagaaaacaaacttcgtacttgtgctttccattgagcatcggcgaaatccatgaattcccggtccagatcctccagagtgtatgaggttgagtaagtcttcactgtgcaattcagtgattttcccagttgccaactcacctctggcatgactacaaccacctcatgccccctgaggataagtttctccaccaccgactgcatggtgaaccagtgactcccatccatgggcactaccagcagcttccctgcctcagcaaagccacaggtcagcagcagagaaacacataggggaatggggctggtccaccctgtgcgagccatgagagaactgcagcccgagccagcagctgggattctaagctgctatgatacagtaggcggaagaactacaggcacaaaacctgaccccaatagagggcgtgtatttatcctgtcataaaaaaaaaaaaaatcacactcactgccaatgatttactcataagaacaggaatacatgagtatcattttttgagatacctacttgtatgtatctcataagagtactataagagtagcttatagtctctgccttggacagatcatgcccagtgctgtaacgtgagtttagaaacaaaattactaagcaatgctttaggaccttgaagattcagaaagataaagtgaaagtaaatttgaataaagctaatatttttggaattcatcccaaagcaaaatttagattttaactttagccaaccaaatactctctgtccagaaagaaattggtatcctatgttccaaggaaagacagcaaggccccttagcaccgacttcccagctggcaagaaattggggctcacctgcatctctgcaatgcataatcattgctggttgtcttctgccatatccaaaccctgagaggcctctgaaatgccgaaatgacattgacaaccctgcctccatggaccataccagggacttgatggaaagtgaccatcacctattttaatgactttcctcagatacatcacatgcagtggggagtctctagcccagtctttgtgcgagcactctgccgggctgcctttctgtggccgctctacttccacattctaaacatgccatcaatccagtgccctccttcaggaaaatatgtacttgtctccctcagtctactgggcactccctgaggtcagtggtgatgtcatctttgtgtttttaccctcctttcacagtagccatgctatgcctttgatataatttgtatgtttgtcccctccatatatcatggtcaaatataatccccagagttgaaggtgaagcatggtgggagatgtttggatcatgggcatggttccctcatgaatggcttggcactgtcctcccaatagtgagtgatttctcaggagatctggttgtttaaacgtatgtaccaaaaacactctttaggatattatccaggagaacttctccaggctagcaagacaggccaacattcaaattcaggaaaaacagagaacaccacaaagacactcctcgagaaaagcaaccccaagacacagaatcatcagattcattaaggttaaaatgaaggaaaaaatgttaagggcaaccagagagaaaggtctggttacccacaaaggtaacccatcagactaaaagcagatatctctgcagaaaccccacaagccagaagacagtgggggccaatattcaacattcttaaagaaaagaattttcaacccagaatttcatatccagccaaactaagcttcataagtgaaggagaaataaaatcctttacagaccagcaaatgctgagagattttgtcaccaccaggcctgccttaaacaagagctcctgaaggaagcactaaatatggaaaggaaaaatgagtaccagccactgcaaaaacatacccagttgtaaggacaattgacactataaagaaactgcatcaactagtgggcaatataaccagctagcatcataatgacaggatcaaattcacacataacaatattaaccctaaatgtaaatgggctaaatgccccaattaaaagacacagactggcaaattggataaacagtcaagacccatcggtgtgctgcactcaggagacccatctcacgtgcaagacacacataggctcaaaataaagggagggaggaatatttaccaagcaaatggaaagaaaaaaaaagcaggggttgcaatcctagtctctgataaaatagactttaaatgaacaaagatcaaaaaagacaaagaagggcattacataatggtaaagagatcaatgcaacaagaagtgctacccatcctaagtacatatgcacccaatacaggagcacccagattcataaagcaagttcttacagacctacaaagagacttagactc

SEQ ID NO: 3971 - DNA, 4001 bp, Homo sapiens
aataagtggtataaatatcagagaagggaattctttgcagttgacattgtatattgtacatctactgtatactacaaaataataagataagttagtaatgtggctggatacaagatacatatgcaaaaaacaaaaccttaattacccatagtcagttacatgtagaaatggaaaaattgtcctgtacccaatagtttcaaaaataatgaaatgctgaggaataaatgttaataagaaacagaaaatgcttatatagtgaaaaattttatttatgtatataaaacaagatctgaataaatagtgagacatacatattcctgaacaggaagacacaatagcaaaaaaatgccaatccttctcaattcatggaaatcctgtaaccctacatgtagggctctagtcaactaagataaaagcaagaatatggaaatatattcatgtaaggaaagtattaaagagtgtttacacggccctattcataaagacaaaaaatgcaaaatgcctaaatctatatcaatattaattggttaaaaactacattgcatccaaagtaaagtattttatgcaattattaatagaacttgtcaaatctgtctgtattggtctataaaggtatttataatttattggcaagtgaaaaatgcaaagaaaagaagaatatgtccagcccaatactagattttattttaacaaaataggtgtgagaatttacattagatattgtatatacctaaagtacttttttaaaaacattaaaagaatgttcacaaaactaagaccatttcctctggggcgggcatatagaattaacaaaaaagggaagtttcatttcttactgtggtttttggtacttttctaaacatggtacttaaaaatgtaggctgaatatgttccacaattttataagttataaatacatatcttcaagaagggcagttttataaaatttgctactgacgagtacacgcattggcacaaaataatttgttaaactggaaagaaatttgaaatgaaacaaatgaaaatgtcaaatcacagttcagtaaagaatccttttttaatttccaaaggtgaagtattcttaaggtgctaaaggagagataacttaccataggcaacggctttccctgatggcagttgataccaccaatgaagatcatgttgggcatcacgggtttgggatagtccaaaacaaagtccgttcgcaacaaccaaattgatgtgtggctgtagagatcatactccgtaacaggtgtttggagaatttcagaggctatttctagggcatttttgaaaaaacggtggcataataaatgttcctccaagtgcatgatgtggttccgtactctctccttgaaagtcatggcatctgagaaccctaagagaattctggggacataggaaagaggagcagggcactgtgcaccttcttcaagatagtggcaaagtattcccctggcgaagaccacggaggggagggagaaatatttggcaacaattaagccacagttatcaaaaggatcgagaaacactgcatcaaaagaactctcctttaagtattctactaattttttgtctttaaacaaactcctgcaatttgaaaaaaataagtcaaaaatgtcattgtatgaacccattaatagagaatatatacttcgtacttgtgctttccattgagcatgggcaaaagccttgaactcccggtccagatcctccagggtatatgaagttgaataagtcttcactgtgcaattcagtgatcttcccagttgccaactcacctctggcatgactacaaccacctcatgccccctgagaatgagtttctccaccaccgacctcatggtgaaccagtggctcccatccatgggcactaccagtagcttccctgcctcggcaaagccacaggtcagcagcagacacacacatagaggaagggggctggtccaccctgtgcaagccatcagagaactgcagctgagagcaagcagctgggaatctaagctcctatgatacagtaggtgggagaaataccagcacaaaacctgaccccaatagagggcgtgtttttatcctttcataaaaaaaaaatcagtcactgacaatgatttacccaaaagaacaagaatatatgagtagcttttgctgagatatctatttgtatgttttccagacaacagtagcttatggtctttgccttgggggcagaacatgccctgtgctgcaatgttaagtttagaagcagaattattaaccaatgcttttggaccttgaaggttcagaaagataaagtaaaagtaaatttgattaaagctaattttttttggaatttgtcccagagcaaaatttagattttacctttaggcaaccaaatactctctgtccagagaagatggcaactcatgctctaagcaaagaaaacaaggcccttagcactgacctcctaacctcctaaattggggctcgcctgtgtctctgcaatgcatacatattgctgcttctcttcttccatttccaaaccctgagaagcctctaaaatgctgaaatgagactgacaaccctgcttccatggaccataccagggacttgatggaaagtaaccgtctcctattttaaatggctttcctaagatacatcgcacgcagtgggaagttgcccgcccaatccttgcgagagcactctgctgagctgcctctcagtgaccgctcaacttgcacattctaaacacgccatcactccagtgccctccttcaggaaaatatgtacttgtctctctcagtctgctgagcactccttgaggtcagaggtgatgtcaactttgtgttttcaccctcctttcacagtacccatgctatgcctttgacatagtttgtatgtttgtatgtttgggtttacaaataggactgcccccatccataagcctgctagcctccaagccttaaagggaaaagatcaatacccactgccagtttttttgttgtacaagaaggcctcggcaagaacactttttctggattggttctatcattactttgtccctgaagtcaggtaatatcttgccagtaagagacggtctttcaaagttcttttgatttttggacaatgcccctagccacccagaacccatgagttcaacactgaaggtgtcaaagtggtctacttgcctgcaaacccaacatctctaattcagcaacaaaaggtgggggatatggtctttcaagatatgaatctgtgagaaattcaagaatgaatagacaccacaccagaggaatcaacagaagatgacttgatggagatgagtgcttttgaatcagtaccagatactaaagaagacatagaagaagccatgccagaaaacaaattcctattaaacagtttggcaaaggcttccaattattaagactacttttgacttattttacaacacaaacccttccatgaatgggcactgaaactaaagcaaatggggaagaaggactagtactgtaaaaaagcattttcaaagaattgcaaaggcaaaaaagtcaaataataattatgatgtaattctgtaaagttacaccaagtgtacctgtctctcctccttcttcctccacttcttccccctctgccacccctgaaacagcaaaaccaacccacctcttcctccttctcagcctactcaatggaggacaatcaagaggaagacctttatcatgatccacttccacttaatgaatacttaattttctcttccttaagattttcttaataacattttcttttctctagctgacttcattatgataatacagtatataacacatataacatgccaaatatgtgttaagcaactgtttctgttattggtaaggcttctagtgcacagtaggctattaatagttaaatttttagggagtcaaaaattctatgtgtgctgggcgtggtggctcacacctgtagtcccagcactttgggaggtcaaggtgggcgtatcacgggaggccaggagttggagacca

SEQ ID NO: 3972 - DNA, 4001 bp, Homo sapiens
ccaggctgattcaccacggtggcctcagtatttagaacgccagtgtagagaaggcactaacatagtttaagtccagttaaggtgcaaaacaccctataaacttcaatatcttacccacttcaacaccctacaggtaaatgagacccttgcattatggaattggagaacttcagtttctcaggttcccatcaatacctttacaattctcactgtggatttgcctgtgaaatgcaatttccagtttcatattcctattcacagtcagctgacatttgggtaccgattcaagtacttaaaaagatatggagtgaatcttgtcccctgcttttcaatgtcctagggtaacagtttactctggcatctgcttgggacctgtagaaccaagactacaactttctttcctgtgagattttttgaggcttcagtaaaaaggagaaatagtttccaatatttccagattctgacccacaacacatttataacaaaaaatctaatcagaaacactcagcgttcaattctatctcagataaacacacttaccacagagccagatacttaacaggaccaagaaagcagggtcatctctggcccactggtccttcgtctgttttcgataatgaaaatttctgtaaactctctgtggggatgtgaacaggtagagcatctgccaggcagcaaattcaaagtccatttgccgaaagcggaaaagccttctcagatatttgtagcgtttcgctccggctgtgtgtcttgccgcatccctggaattcaagactccgttcccctgcactaaggaattcactgaagtactcggtaacatcttcctagatggaagaaaaacatttcttttacacgtattctgaagaaacatttggctaccgacactcctcttctgagttatttggcagggaggtcactttccatgttcttcccaaccctagagaaaggccaggagtcaaaagcaaatgcagttagttctgaggcgggtcttggggcttgggaaccgcagactgcaacctcaggcaagggcaacagcccacccttctgaatcacctaataacacttatccaggggcagctaccattacagagacagggatgatgtgactgccccatgactccgaggatagtgatagagccaagattggaaatctgactcgaaattccgtgctcttaaccaccaagcttttaagaaaatgcctaagaaagcagtttcagccggttagaacagtgttactgaagaggtcaaataaatggcctattcacacagatccatcagcgcactgccagcaagcttctcggtcactagaatgagattaaaaaaccaagaaaaactccgatccctagtgttttacatccggaatagttcagcagagggagcggtagcgtcggagtccaatccaaccggtccgagctccggggaacgccggccactgcccggctgcccgtctcccctccacttcgcaggccccccagacgccggcagggtctggccgagcccagctgctccctccctgcccggggccgcgggtacggctgccagatttagcaaataaaaacacagaatacccagctccatttggatttcagacaggccacgaataaggttttagtatgcctacatcccacgcaacatttcggacatgcttatactaaatgctctttctttatctacgatgcaaatgtaactgggcgtcctttcattttagccgcaactctatcgccggccgaggggccggacgccgacatggtcactgccaggccgcagcgacgtcaggccgcaagctgtcgggattaaatggcccccggcgcgagcccgggccgcgggagggcagagtggtcctcaggcctcacctggagtcctgctacagcctcgacccacgtccgaaccagcccaccacctcctcccagcagccgaccccagccgccaccgggcgggcttcccttccctcaacggagccggcccttggggcgcgccgcgtcacgggaaccgacttccgccgcggacgcgccacctctcggcccccgtagtcctcggccctaccgccgcggcccgccggaagttgttgccgctggcttccggtcccctgagactggggcctcgctcgctcccgacccggttgcaagtgttgcggtgggagaaagtcgcgtccgcatcggaggggaagcgccgtcatgcctaagtattatgaggacaagccgcagggcggcgcgtgcgcgggcctgaaggaggacctgggcgcgtgtctgctgcagtcggactgtgtggtccaggtagcgcggccgggcgctcccggtggtgacgacccctgtcccaggcaggcctggctcggcggagggcagcgggtcgcccgcggcggcggttggagttaaccatcccgggcgtaggtcacagctcgggctcactgaacgtgcgcagatccactgagctgtcggagccccagttccctgtggggttaaatcggagataacgataaacgcaccctgtcgggtttttgtaaaggttaacccatttcagttcacgaagcctttattgaatgctagcactctactaggctttggagacataaaggagaataagccaggtttcttgcctgcctagaaatgataatctgtagaattaatgattccagagagttgcgtaaacctggtacactgccctggccagtagtgtctcctgcctgttcagttgtgacaatgtgtgctcagtttgacttgtgttgatgtgaatttgtttctgagttacagttctctgcattcttggatgttaagttgtaaaaataaggcaactccatattttcacgatttcgtatcttgcttcccctacactcttccttcactccccggctacagacacaggtctcctcagcaccctcttggaatgcactgaaacatgtagtgaggttcacagtggacctgagttctggattagagctcaagtaaagcacaagtgccttttccaattgcagaggcccgacgagagggcattcaattgtgtgcaattgtctttgcattgggggatgtagtttcagaaagttgctgttatttcagagaaaagattacccccaaatggacatccactgtaagactgtaccagtgtttctaccgagtcacaatttgtttggttcactgattttagcagtcagccattctcgcctcccaatgtctagtaaaacttgagttattataaatttaagagattatctcgcccaacttccttatataaatgaggaaactgaagtaccgttgttttcaggctcccctgtccagggctgtgtcccttctgccccttactcactggtgctgccgttcagccagctcctggtaaatgcctcttaagtggcaggcatggtacctgacactggtgataacgaagatgaatcagtaacagtcactacccatgtaagcttggtgtcatgggagaaatagacatctaagggtctaaattcctgccataagactgtaagcatttattaaacatgtgtttaatgactagatcttgaggagaaaaatgcgttagcccaagggagagcgtctgattttgcttcagaatttggaatcttctgagatgacatttgagctgagtcttaaaagttgagtagtagtttatcaagtaaaggagtgggaactgttgtggttgtggggaaaatctgaaagaacagcaagtgcagaggcagggagatgtgggagggcgcagaggagctagtgtcctgccataggggaatgcgacagaaggcctgaggggaaggttgcagccaggtgtgaaggcctgtatgtgtgtcagagtgaggagactggattttatccagacgttcagcatcggaaggccatgttgatgagtagtcaagggaagaaagtacactgagtaggactgaggaaagaaactccaagtggaggacaatagcagcagcacagagaattccaagctggctttctgcagcggttgatacagcaaacatgtacggagcgccaggctccagttcagggaacaaatactgatga

SEQ ID NO: 3973 - DNA, 4001 bp, Homo sapiens
tgaaaagtccatttcaattttgcttcatgatttcatgtcttattttctcaatttgtgaaacaagaatttgtagggatataagattcccttagaatctcaggacaaatgcattttattttgtataaatattaacagtattattttcacaattattttatattattcatttttagaattggagaacatatgcaagacataaaagtgcagaaatgcatatattttgttcaagtagttctttcacaggcactccatcatatgaacttccactataagtctcagttttgttgattaaggattcgacttcacacttgcaggtggcaaaaacaccctacaccacctggttccctgttatctctctgccttctcttctaccactcgatcccgccccaccctttcacttattccccagtaggtgctaatttcctttaacatgtttcctctgctcttccctcagctgtccttccctcccttccccttgtgtctttggccaaggttcacattaatgggtagataagccttatctatccattcttataaaactcccctccctagtgcttcctagtatttctttttgcttaatttttctccatagtgcttaccaccatctggcttactatgtatttacttatttgtttgtggcttgtcccctttctactaggatgtaaacactgtatttgtttttatcattgttctattccagcacagagaattgtgcctggcacagagtgggtgatcaataatatttgccaagtgaattaatatatatagtccgtttgatttaaaatctgtctttgggttcaaaccaccacacagaatagggaaataattattaaatggtgaaaatcacataccacacaagaagcttcatattgcttccccagtttgggcctcaaaaatgcactgaaaaattaatagagatatttgttaataaacataagtaaaattattattaaagcatccttgtgacgtatttttcaatgaataagacaggatgctatgaaattcaaatttcatgcttccttatagctttttaatgagcaggtgttgaacagctgatgacattttcttttacacgtgtaattgcatatatgaaagagaagtggatctcgatggttttcggtatccactcttaatctgaagacttctaagattttaaatcgccagtggtcagaagtggtgcattacttacgtgtacagtcataataaaaactgaaaattgaacacggcttatgggtcataatttccagaatctaatatcttatctgataaatctctaaaataacaataataaagaaaaccttttctgtttattggaataggtgtcaggcctttccggggttgtgggggaaggtcccttatcacaaatcctcaggagatttaactggggagattaatctgagcaaaacggttaacaagtgggcatagcagatattcgccaaacaggagctggaaaaacaacaggtcactgggctagaattacagcaggagatggagggggaattggacgcaggagcacaaccagtcataattatctagctccccgccccctcttcccaggctctctgccctcccaccccctaaaataatgtatacatttatgcgacaactgccaatctgcttgtcgtcaaacttcactgaaatatatacatatatatacatattttaatgcgtgtttttaagctggtgcagagggcttgttttccagccccagagagggagctgcaggctgtggcgcggcctcagcggcggcggcggcagcggcgacccgggcggccccaggagcgcccccagcccagggcggcccgcggtgcgccctctgcgcccctcacctggtttgccgccacaggaaggtctggatgggcagggggatgccgcggccgccgtcctgctcctggccctcggagctcttcctcttcaccataatggtggctcccgggagtcctactgcaggacccagctctgtctcctcgctagccgccgccgccgcctcctcccgctgctcccaactctcatcccctccttccccgaggcagagccggctctctccgccctgatcccccgtgcctctcccctccccccacccctccccgcgcgtggaacatggctgcgggaggaggggagggctggaggagccgcggagcgaggaggggggcgctcggagcagcggtccgcctcgccgcccccgcacccgctccctgctttcagcacctcccactgtggacagcggcccgcgccgggctgcacggccggagaagcgaatccggggcagcttgagccgcaggggtacggcccaagaagtccacgctccgcatcgcaggcgctcgtcccctgcgcggcctcttcagcccccggaattcggctttccccgctccgagctgcactcaggagtgtcccctgtcctgctttccaacctcagcatccaaactgtcgccgtctgggtaggaggagctttggggaaccgcagagcagtcgctaaccctggcatcattctcacctccagcaaggagatcaggagtccaggggttagccggaggaacacatgaaaattattagaagtgtaaaccaggaaggtgaggcaaggttggcaagtgagaggaagcttgaaagatcttagatatgagaagttatttttatatgataaccacaagaaataaaccttgtttgttttcctaaagcaggaatacaaagttcccaaagtaaccagttgtggatatcagttaattgcaaattgaggaagaacatttgaatcatgctgtgaggaaatgtggtttattacagtccattaaatgcacttgggtgatcctgttcgcccccagtgatagctaccattttccttcagttgtaatagtcaaatgcttatatgttacatatattaatattttatagttggattgctgttagatatattatctaggagtaaaacaagtaggccggggaggggggtgaggtggggtgaagcaatcggaatagtaactacctgcaattcctcctcctccccctcctccttctccttcttcctcctcctcctcccccttctcctcctcctcctcttctcctccttctccttctttcttctttcttgttctttgacggaatctcgctcttcaaccaggctggagtgcagacgtgtgatcacgactcactgcagccttgacctcccaggctcaagagatcctctcagctcagtctccccaacagttgggactacaggtgtgcaccactactcccagctaattttttatttttgtagagatgggggtcacactatgtttcccaggctagtctcaaactcctgggctcaagcaatcctttcaccttggcttctcaaagttctgggattacaggcatgagccaccatgcctggcctcatcttttagagcaaagatattggtgtaatccatgaaatgaagaatcagactccaggtcctaatctcaacagatgtaatatttcatatataattaacagcatagtatatatcaatattttttgccatagaaataaattcttcatttactttcttgaagttatcttttattatgaatctcaaaaatatggatcttatgatctcaaatatggatcttgaaacaaagaaagattctaagtacagtttactcaaggcatatttattgagtgtattttatatactcatagctctatggagctatatggactcttgctcacaaggaagtctgaatattaagagaagacagacatgaaaagagaaaagaatcatgggagatacgaatgcagattcagttatgaacaaaaggtcaaggcagaaattatgtgtaggaatcagatggagactttgtatgacaggctagaaagttttcctagaaggcctttaagcagagaagtagaaacttcatatccatttaagtgtgaatgacatgacaggaatgtagggattatttgaaacaggcaaaagttgtattaggaaccccagtatgaagattagagaaatgttttatgagatcctgaaccctgatcataatagcag

SEQ ID NO: 3974 - DNA, 4001 bp, Homo sapiens
cctagttcatcctcttatttgatctaataatcagacaagcagttccctgatgttacaggcaaatgaattaccctcagagtttccaaagaaacgtttgagaaaacaatagggaagaactgcagcaatctgctactgcagtgatgtgaagacacactgttgaggttaaaagtcaaaggtcaagttggtgttattctcttggtccttctgcagttgattaaacaatattacttgagatgaaagcaatcagtgaaaagaattatgattactttattagcattactgaataaatgtcttttcagaatccaagttatcactcaaaaacatgtcatgttgccctaaaattacttattcaatttctggccagagaggatttctttataagaaagactttcctattaaacttctcattgaagtttaatcaatatgcttcatcgatatgtgtcccctaaagcaatcctaggatttagaaaaggatctaagtatgtgggcttctatgagtaatatctgagtctgagcttactcaaaaggttggttttcaggctgtttcttctctaattctagaaagctctagaaggccatagtaaatcctcacagaatacaactaaagcataaaaataactttcaaagatttataattagccggaataattttctttgggatctaattcttatttacaagtcattttagagaccccaaattaggcaacaacattgcaacatgactaacactgacttcagattggaaaaaagccatacatttattcaatagggagtaaacaagttctagggaaatatgtgagagaataaattaataatatcatttagcaagaaaaaagagctcaataaatattatagcctagcttaaaaaagaaaaaaaagtatgtttaggcaatagttgtatctcctcactaaaggtatggtaagctaagatatagccaaagctatagtaaaccaagaaaagctcttctctccagtggagagaggcaatgttgcctctacaatcatgtggtcacagtgtgtatggtagagtggcaaggcatcttctgttccccttagtccaaagtatgcaccttggttgataagcagctagaaggagaaaaccaaatagatttagatctgaacttttaaaaacaggtttatgcaaacaggcattcccacattgagctgggactatatactggtaaaaccaatcttgaagacaatttagcaatatatatcaagggtcttatgagtgtatatgtcctttgaataggatatttcactttagcttaagaaaataatcagatttttttacaacaatggacttcatagaaaaaaaaacacaggaaatcatttaaatgaccaaaaaaactattatagctttttttcaaaaccattaatgctcagtataagtaggaaaaaatccagattacaaaaaattatgcccaccattttctattttgtaagtctgtgtatgtgtgtgtatgtgcctgtgaaaaaaatgcagaaagacttagaataatttttctggggtctttctttttgtattttcaatttttttctatttttttttaaaaattatgtattaaagggatcgttagagtggtcaactaccttaaagagtattatgaattcatggtttaaaaaggtgattgaaaataaggcaccagtgtagggctgttcacatagcatgtttttctaaaataacctcttccatcgtctgtagtagctacctgaatttcagtgggcctagctctaaaaaagttgagaaattgtaccaatatgtgttgcatcatcccttaattatttgtgccagttgatggaagctgaaatgtggaaaacatcaaccacataattcaaaattaatttgtactgagacttggaatatgaccagacacatgtgcttagacatgaatgtatttctcctcttccctcactaaccttcaggccttgtcctcaccacttcttggtctgggtccaactcacagcctggggccagcatggcagcactggtgaagtccctaggaataaaaaaaatgtttgagaaaagagtggtgacaatgactgggctctgaattgtgaacatttacacgtgtaaatgcagaaacacccatatacgatcatccacatattaattttccacctagactcattacttttccataactctgatgaaaaggggagttttatttgtgtagaatctttccgatttggtgatagtggtgactggaataatagtaagaaaagatatcttggcaggactggctacatcatttaagggacccaatgcaaaatgaaaatgcaggctccttgttctaaaatgattaagaattttaatactgagacagcagagcatgaaaccaagctcagagcccttctaaattcaggtctctgtgtgactgtactggtcacgggcccatgaagccagtcctgagttttagagtcaggtagatatgggatcaaattctcgattttttcatttataagctgagtatcttggctaaattatttaaactttcaaagtttcagttatgcaatcttaaaatgggagtgatgtgagtgtggcattattctcaagattgctgtgaggattaaaagagagagcattctattaggtgcataccatagtgcctggctcagggagactgttcatcttctctatgttgtatactgcagttagagtttgatatagtttgaatatttgtcccctccaaatctcatactgaaatttgatccccaatgttggaggtggggcctagagagaggtgttggggtcatgaggatgaatccctcacaaatggcttggtgccattcttgcgggattgagtgagttctcactcttagttcctgttagatctgttaaagagtctgacacctccctccccacccctcttcctctctctctcattctctctctctgttctttccctttaccatgtgatgcctgctctcctctgccttccaccatgagtggaagctccatgaagccctcaccagaagcagacgctggtgtcatggtcatacagcctgcagagccatgagccagataaacctcttacttttacaaattacccagactcaggtattcttttatagcaacatgaaacagtctaagaaagagttcatattctaaagtgcaaacttgaaagtttgatatggtttggctctgtgtccccatccaaatctcatgttgaattgtgaccctatgtgttggaggtagggcctggtgggaggtgattggatcataggggtggtttctgatggtttggcaccatccccctagtactgtctcatgatagagttctcaaaagatctggttgtttgaaagtgtgtagcacttccccctttgctctctctccatctcctgctccgccatgatgaatatatgcttggttctgcttcatcttccgccataattttaagtttcctgaggccccgcagccatgctgcctatacagcctgcagaactatgagtatattaaatctcttttcttcataaattagccagtctcaggtagttctttataacagtgtaagaacagacttaatagagggtttctccctgatttaagattatttttggttatccattatctacgaaacaaaatgaaaatgcacattatgacatataaggaccttaactattcaggttttatcaatctctctaaaacttgccacctaccactctcacatatgttcaaagtataatttgtatttattttcacttttccttaagaaccagtaaatataataggcatagatgacaaataataaattagcatgtgccaggcactgtgctaatcattctgtgggagggaatactcattctccactcctgctgtttcctcccatgagagagagctgcatgagctgtaacattcctggatacttccacctcctcatttatcctcccctggcaaggataagttgagagaatctgggtatttgtattccagcctctttctcttttggtagcaactctcacagggagcatgattttaggcaagctgtaagcatagtgg

SEQ ID NO: 3975 - DNA, 4001 bp, Homo sapiens
ttgtgaggcaagaatttatccctagtcccttgttatacagtgtgtggtcagtgaaccagcagcatcaggaacatctggggagctcattaggaatgcaaagtcttagattctaccccatacctgctgaatcaaaatctgcattttaacaaactctgtgtgattcacatgcacattaaagtttgacaaacactgccataaactttttcttccaaattctattacactttctgtttcactctgccaagactactttcacgacctggaaatattcctttggattcctaactgaatctatgaatcattactctataaaagagtctcattgctctaccctagtgattccaaactccagctacatatcagaaccaccaggggcactttaaagagtacttatccctagaccctatctctagaaatttggattgacttggtcaaggagacctgggctttggtgtttttaaaatcactcatctatacacacacttcctatcttcaaggagaaattctccaaccagcagagccattaattattttcacttatattaattataatactattaattcattaggattagttttccttgatgccctgtcccaacgtctaatgatttctccgtcagaaaatttgggggactgtctatagaagtttcttgtttcattgggctcatccagaagcacttctaagatgatcactttatcagtaccaaagaaaaaacttgtttgggatttcatgccaaatttctacccaatatgaatgtagtttttggaatatttgatttttccaaaatatataatttttactaaataggtttatatgtgttgttgaatcttcaaactcttcttccttttcctaacacatagaatagtctttttagtaaatcgtgacaaattacactacatgatgagtattaaatattggtaaccaaaagaaagtgctggctgagcagaagtctttccatttgccattaccttcatcttcataatttttccttttctttttctcctgggcttccctgaagaagggaacatgcaggaggctacctctgtttgggatgggcaaatggagtgttttctgaaatgctgacataatggaggctctaagcaagacatttcacacaactctcaggaaatcagagggaaccagcaaaatctccttatgcctcatgatgattaatgctctgttgtgttctgttaacctggggcaggaactggagctaaatttgtagacagcttcagcaattttatatctacccatgagatgaatcacatagacggtatttcagaagtaaattctatgtaaggtccatcatgaagcatatgaaatcactccacaatatcctgcaatacaattaaacctccctcaggcactgggaggcccttttaattatttctcatttgcagcccatggtcttagaattaagggctgaactctatagtgagtcccaggctgaaccttgaatttgtttactactgaaggttggctaaacttttgcatgttttttataatttattttgccccattttcttagatgagccaaaccctaacccccaaaaccaaggagtaaaaatgtcattgaaaatacattttccactgtttttattgctttatgagctgcatccagtgatataatctctacatttaagaaatttgcttaactgtagaggcccattatctaatcatttaatacaaaatccaaggagcaaccatctgatcaaaacaaatttacaaaatcaaaattactcacccaacatatgtattcctgtcagatctcatggacctattggaggcaggtataactgaagccattctctctactatgtgaaaagtcaccttaaattgatgtcaagaaagagagatattgtgacttgttattaaattatagacctagtcataatagttcagttcccagtcagaatgataacctctcttaaaacttaggttttcctgtgaaattgctaagaaaatttttcctttagcattttaaattttcctatcaaataaaagatgtcctccctgacatgacttttataccacagcccagctctcagagcagcacttcctcaagaagataggccccctttgaaggtgtggcatcctagctctttgaccaggttggttagcttgttaactattggtgagaactttcccttacatctgtccttgatcccaacacaggtttgatgttgcaaacaggcttatttgctttgagacaactgtatatggatacgagtcctcttttggtttctataacacacctaccaggtcttctcaaaactgtgtccagtacatacgagaactttcagttctcaaacatttcagttccccatctccatccagcccctcgccaacttgttttcattctttgtcatcacaagttagggaagcatccaaagtctggacctcagaatgtccctttatctgaactttgctcattccagttcacacagaagaactgataattaaacaaaacttatttcccagggcctctttctttagttaaactgtaggccattggtaaaatttattgaaccaggggttaatccacatggaataataatacagcatagtattttcagaaaacggagtctctgccaagaaaggcatgaattcactactttcactaatgcttctcacttttcacttttgggacagaaaaatctagaaaactagacaacttcatcctgatcttttttctcttcactcccatagcaatcagctgaagttctatgctggtgagagcttcaagaacgtagtctcatggctttcaggcaaatcagaacctaaaatgtctataaatgccaaacagcagcaaatacaagacacctcctaatatgcttggatttctttccaagaatgtgcatcacagtcaagaatcaagtgctcatatcctaactgagttctccatgttagaagatgctcctcttcctggtgacagtcattcttggcaaattctttgaatgccccactggcctcctttggtccatcttggtcagacagcaaagtttacagaataggaaggaaaaagaataggggactctatattggggaatccatgtagcctaaatcttgccactgttaccaccaactagacgtttgcaactgtgcccagatagcaaaaaattcctgaggacacttatcctggaaaaggtaatgatgactatgaggcaaaatagtctttaacatgtgtgttgcctttgtaacttagaacagtagttcttgttgatagcttgtatacatctgtctcttacctcctgactcatctcaggctggtctacctgctgctccttcccaggaaccactggcaattttgagactcaacatactcactcactactgctggcaccagcacacctttatttgatattccatgccatatctctcaattttatttttaaggtataatgaggagaaccaccaatttcaatctggcatttacctctggctttgagaggtaaaaatgttagctaattagataagtgttcagtaattaattaccacagtgaattaactaggttgattaacatgtctgtttccggtgcagattcagtcaaccagtgatcttgatcactaacagtgccaggtaatgccatctaagatttatggaccccatgtaacaactcggtcagacatttaggcaagtaattgtcatttggatgaagttcagaataatcttgtggaatctataaaagttgatgaaagtagaatactagttaatgccttctgggcagtcttaaattattctccccacctttcaatcttctcaagactcgatcctgctcttatggtaggttgtttctcagcaatgctttttgattgactgtattgcaaaaggccagtcacctgaagagcaggggaaaaggtttcgtttttaaaaattatgcacacaggagtgcacaaggcaaactcagacctggccactgggtaatttgcaaacaaaggctgtgtgccaggcacagcccatgactcagtccagccttgtgatcaggagggtcttgcatca

SEQ ID NO: 3976 - DNA, 4001 bp, Homo sapiens
taaattctatttcaattctccacatttctaacactccataaatgcactgcatttttcagtgcttctaaccaaagttctaggggtttcccagataatcttaaataagacctttcattatgatcaagatgccacctcttttcaaaagataaaccaactttactttctttagatgttttgtttaaaattttccaagtttaagatattttaaaatcagccaggcgcagtggctcacgcctgtaatcccagcactttgggaggccgaggcaggcggatcacaaggtcaggagctcaagaccagcctgaccaacatggtgaaaccccgtctctaccaaaaatacaaaaatcagccgggcatggtgtggggaacctacatttccagctacttgggaggctgaggcaggagaatcgcttgaacctgggaggcagagtttgcagtgagccgagatcatgccattgccctccagcttgggcaacaagagcaaaactctgtctcaagaaaaaaaaaagatatttaaaatcaccaacaaaattaagtacttgttcctcatattacattgcaaaacgattaactttccaagttgagcgtaacaatcataatcacacgacttgtatgtgagatataaaacacagtaagtattgaggatttaagtttatcatatcgtaaaccgcctgcgccagaaataaaagtatctcaaaatacacacaaataatcttaaaattctaggataatttagggtgacacaaatactggaacctctagttggaatatgtgcaaaagcctattccacctatcaggaagtaaatacggagttgaaattaagttagaacccttccacttttattattgtctttggtcattaaagtgacagtcaaacacaaataccatggtacattttataaatcaactgttttagcgaattgtattacaaaattagatagtctgaaagtctgtggaaatatcacaaacagaatacaaatccaaaacccacataaactgttcataagtgagcattttttcaacaatcaactttttgtaaattgatcccttcatctaattcacctctgccaactaggcctttacgcccagaagtagttgatttgcaatatatcttctataagctgaaataccatcttgcaagggtcgagaataaaataaaaaggccagaaaagatcaacgtaccctttttaataataaaaagtaaagtaccaggtaaaaggcctttccttccaagagagataggccataactatcccgggatggtatgtgtagtacagtgctctgcttaacagaatgtaccattaaagcggtgaatgctacactaagaaacatcattaacaaatttattttaaaaataggtatgaaggttccaatcatcactatcacagttcgttttcagctatttaaggtctggctgaagtgtttaagacacccacaaacccgcaagggagggaaaaaccaccaccctgctcccgggagtttaatgaaaattagcaggtaagagaggcctcggcagcacgctggaaatcaaagagggcggccggaggatttggactgcggaggaaagcctcgtcctccgaccccacctccccgcaccttcccggcagggcgaaggaggcgaaggcggcgaggggttcattactgccttcattaattgacacctgtaatgaggaaactttccgagagcccagagcgcccgggccaggccgagccggagctccgcggcggccgcctctcgggcgcccaggtaacccggccgggctgggcccgaggcgccgcggcggccgcgccaccgcgcaccttcccggggcgctaggcccgcacgccgcccggcccggccgtcgcctcccgcaggccgcggcagcccggggaggccagagagctgcgcgaggaccccaaaccgtgcaccccgacaggccgctaccgcggctacttactttcatttaacacctccaccaggtctgcgcagttctcgcacatcgttcggccgccgccccccccctcccccgcttcggatcacactgactgatcccgaccggcgggggggaggggagagaggcggaggagggggccggccggccggcggggcggggaggcgactagggcgggcggcggcggggacggggcggggagcaagagaatgggggagggggccggcggtccccgcagcgggagggggagaggaggggagcgaggggaggtgcgcaggccggaggggcgccgaggcgccggcggcggggaagggggggaaggacggggggaggggagagggggggagggggcgggtggggagagaagcagcagagtcacttcaccgaccagacgccgcggccaccgccgacgccgccgccattttaacagagcgctcgggctgcgctcggctctttccgcccgggcttaggagcggacgagaggcgcctcgcgctctcattcctccgcctccctccctttctcgcctctcctccgccccccacctctccctccgcacacacgccgcacgctccacaccccgccgtggccggctcgccgccctccctttcctcttccgtccggcctccccgccctcggtccaccccctccgcgcgctcgcccaccccgcccagcccggatctctgtcagcggccggaagggaaacgcgaagccagcgcggccgcggggggagtccgggtgagtaggagaagatggcggaggcaacggacgggtcgcggttgcgtggcgtcgcccaccacgacccactccacgggctctgaggcccggggagcgccaggtcactcgctccgtcctgtcccccgcccctgggcttcgccatttttccccagggcctgggtcggggagttggtgcgggtttctttggtgtccccggcctcttccgcgcttaggcttttggggtacgggaagcaaggagtcaacttgggtgccgggccgggtctacgccgtagccctctttcgggcgcaagggccactccccccggggtctgagagtgaatcagcccagggcccggcttaactgcatcggtgattatcgctaccctgcagttccttgaaggtcctccgtcctggagcagtaagatccttgacgtaactagaaatggcagggtaaggagtgtttgcctgacatcgtctcgtttttacggaagagggcccctcacgatgtgcccatcagccccacctgaaatagcaagaaatcttcttcagcagagagcgaataacaaggatattaagataaagaacaggtgaagggggcagtcagctgaagcttgtaagggaattttcctcacgccggcacttaccccttgcttgctaatttttgtgttcaacgtgtttacatagacatgtgactgcaaagtccgaaagatcgtgtacagaatctctgaacggtaaccagagtgtctgtcaaggctctgtagtcattctctcgatagcttttgtggaggttatggcacgcccatctctccatgccagaaccacctggttccaaatgctttgcctttctgctgcttgaagttgatactataaacagtctgcccaacccgttttgtttcccactagcaggtgatccttaggattgtagttctattctaccatcatcttcccttcttccttgtctttctcacagaattgggtttttgcagacttactttggatcctgaggcagacattcgttgtccactcaacatacattcccacgtatcccttttttccctgccaacacaaccccaattatttttatttgaattttttttttttgagacaaagtctcactctgtcgccaaggttagagtgcagtggtgcgatcacagttcactacagcctccactttatgggctcaagggatcctcccacttccctagtagctggggctacaggcgctctccaccacacgtaactaattgttttttatttttagtagggacagggtcttgctatgttacccaggctggtctcaaactcctggcctcaactgatcctccggcccaaaatgttaggattacaggtatgagcc

SEQ ID NO: 3977 - DNA, 4001 bp, Homo sapiens
aaccaggttatgcagtcttgtgaaccacagtaaagattccgaattttatcctaaatgtaacaagcacttaccaggaggaaatccaccaaaaggttttaagcaaagaaatatgttactactgaatgaggaagtcatatatggttggtttgggttttgggagagtgactaagagcaagaacagaagaaaataatgtaaccagatagaagagtattgagttgatcagcttataacaataacaattaatgcttactggccatttactctgtgccaagtgcttatcatggttatctcacttaatcctcataacaatccaataggctgaaaattactatttccattttacagatgataatacaggaagccaaggcaatcaagtccaggttttttaaggactgtggcttaaactagaaaagtgacagtgaaaatgtacagaaaaagatgcaagacacgtattggaagtaggatagaacttggagagagtagaagtcaagaatgcctcccaagtgtgtagcctgtgtcatgtgccacttaataaactgggacactggagaagaaagaatttcgatatggagagaaagatcaaggctttggatttggctgtgttgcatctgaaactcctaagaaaaaaatcaagttgagatgtcaagcagacagctggctatctagatgtggagctgaaaacaaagggaataggctggaaataacaatttttaagtcatcaatatatagatcaaatttaaagcttagggaggaatataagagtaaaagaagaggacctaggactgaacccaaatactcattttacttcatcaaacatctttaagacaagtgagtacttttatatcactgggtttttcagtcctccttccattttacctttcagcagaatgcaacactactgatgacttttttcatggcttgcaagacgcatcctcctctattggttattaaacagcaggaattcgtcaatgctccatcctaggtgcctttattttacagcactatactctttttcggcaatttcatccacatccatggcttcaattactatcaatatggcagatgacaaacacatacacacaccgcgcacatttacgtacgcagcccagaactctcctaagatctccaaacccactatatccaactgcctacttgacattccctctcaggtatctcttccagttagacacttgtcaggaattgccacctcaataaaggaatttatacagagctgaaattttgagaggaataccccaaaaccactttaggacaactcttcaggacacaggattttatcatcaatcatcatttcctttcatggatcatgacttaaaatagttacatctaacaacctgatctggcggctagaaatgggcgcaaggaaatgcacaacaaaaatacaattcatgttttgcagtgaggactggtcaagaggaaggtgaagatggtcaagagagtgaatgagtatcatgtccaaggcctggtggatgtgccgtaacgaaagtcacctgaagagacagcaggccctgttagaaggtaagaggcgaacgacaacagccccagagaaaaggggccaggtttgagtttcggagggagcgagtggcagtggagaccaagtcaaaggagaggtggaagccggggcagtgcacccaaaggtagtacctgtgaggctgggggtgcatcgaggggttgtgggcgggctgagtagcagcagggcgaactccagaggagtgaacgccgagtgggcggatcgcacagaaggaggaggaggtagggaaaacggctcaattgagaagctaccccggcccgccttacctgcgccgagggtccggagcccccggacagacccgcggaaagcacggagcccgcgaggagtgggaggagccgagggtaatggaagtagggataccgaacccaaaggagggaggccgctagctacccctagtcagggagagcggctgatggcgggaactgtgaccacacgcaaacacgcacgcacgcacgcacactcgacgcgaccagacaggcgcgtgcgcgtcagtcgaaaactccgcccctcacacgccctcgccccgccccgccagtacctagagcggcctagcccgggcagccccgcccctgccgtgactgtagtaggcacgcgcactttccacctcacccgatttcgacgcccccccaccatttccctcctacgcaacccagtcgggcatgcgcaatagttgtcttgccgggactgtccatcttttcccgccgttcactggcttttggaggagggtcagagttcacgccgctctctggaaataactgctcaaagccagaagttgcggggactagtggtcgcggacgtccttccggtcctaaatcttaaggggcaaaggacatactctgggactgttaactaggccctggaggcgggaagaggatgtgtgggtggggtcaggggtgagaggtcagagggccgcgaagtgggcggagcgagccggagtcggatggcggctacggcggctcattgttttccgctgcaggggtgctgaaggggggacgcgggtcggacgcgtccggctgtggaagagagcggcggccgctcacaacatgcacagcctggcgacggctgcggtgagtggctgggcccccaggcttggaaccagaatcctttctcagacccacgtttcggccttctctcctaattcccggtgtcgggtccctagtctgatttttttctgccctcaatctccaaggccccggttcccctcctcggcacgctttggttgtggtggagccggcccctatttccttgccggacgcctctcgcggccttcagcgcgacccatcgcgttctttgcgggcgccggggcctggtcccacgcccgtagcaggccattcattgatttattgcgctgaccaacagtttcagggcgccagttgtgttctgggcgccggcgtcgatgaggggaattccatggtcaatctgacgcggcccctgctcttagaactcaccacgtcgcagcgggaaggaaatggcttctagttcaaaccacttgctttatttatggaaaacctgaggcccggaaaagtgcataatttttgcatctgacttaggttctctgcatttaaaacttttcctcgacacatctcgttttacccgcgtgatcttttaacaaaaaagaaagatagtgtaattcagctatccgaagtaatcctacttctcttggcatttaaataaaatctagactccttgccatagcctgcacggccctgtatgatgtggtacttaacccacgtttataatctcgttttatgtctcttgctcctaaagcttcagctactctggccacctaaccctctgcaacgcgcttatttttctccaagatgcactttgtggtctctatgcctggagtgaatgttcttcttatccctcctcctttacatacacagcatgagtgtaattggtacctcttccttgaactctccttcctctccttaaactgtttatccaaatccatctttcttcaggtctctgcctaaatcggtctcagagtggccttccctgactatcctcttcaaattagttccgcagcctctaactttagtagagtaccctttacagccctgatccccgtgtaattattgtattcgtttatttgttgtctgtctccttgagggcagggacagggatcatgtgagccctgttgacgtggtttccccggtgccaggacagttcctagtacaagattaaagactcagatactttgctgcatgaaagaatattgaagggaaggtgaccactgaaagaacattgccatgatggggaaaggagatcatttgatttgagcatacctgcctgaagaccaattctgctttttctgtttaaccaaagggaaatgatttaaggaaagtaatgtactgaaattgtattatcaggcaaaatgacgtaattactaaataaagcaccaaaaattgccatacgtttaagtacaaaaagtgaaaaattgagccaagt

SEQ ID NO: 3978 - DNA, 4001 bp, Homo sapiens
atcccagcctacttgggaggctgagacaggagaattgcttgaacctgggaggcagaggttgcagtgagctgagatcgtgccattgcactccagcctggacaacaagagtgaaactgtctcaaaaaaaaaaaaaagaatgtacatgtgtatctataaatctaccacttgtcaaaaacttgagtgggtctcagatcttaccctactcgcaagctaacaagttagcctgtcacagttttatgaatgctgatggaaagcatgtgactacctggcctgaaataaaggacagtttattagagcaatgacagtagccggaatatagcattggtgtcagttttccaagtgaattcccacaaggcaaagtgaggagaacccatgcacacagtgagctgccttacaggagacgaaccccgtgcttagagaatctgaaccattaaccattttttcaaacgaggtctcgctctgttgcctatcctagtcttgaactctacctcatcctatagagtagctgcgattacaggtgtgagccaccacaccctgccccaaatcttttataagggattgtgcccttgtctcctcgttttgtagggagacaccatttctatcttccaaggctgctcactacacgaacatccttaacgagagtccaggagaaaaggcagtcaggcaatggtcgcagtacgtgcacaaactcaagagactaatggaaaattgtctccagactttattcagcttaaaaagtgctacataatccatactttagtagaggtgcctattgctcaagcattctgaatatcttgattacagaaattacaagaccttagatgtaaaaactgaaggaaagccgtgcacggtggctcacgcctgtaaacccagcactttgggaggccgaggtgagtggaacacttgagtccaggagttcgagaccagcctaggcaacatagcgagacttgcttctcttaaaacgcaaaaaaaaaaaaaaaaattcttttttaaaatggaaggaagtaacacttgtaaaatcagcactgagcccccacatcgggcattcgataaagggaagctgctgttgttacgatttttgcagttagaaataccatacgtttggccgggcacggtggttcacgcctgtaatcccagcactttgggaggccgaggcgggcggatcacgaagtcaggagatcgagaccatcctggctaacacgatgaaacccccttctctactaaaaacacaaaaaattagccgggcgtggtggcgggagcggtggtgggcgcctgtaatcccagctacctgggaggcggaggtaggagaatcgtttgaaccggggaggcagaggttgcagtgagccgagatcgcgccactgcactccatcctgggtgacagaatgagactccatctcaaaaaaaaaaaaaaaaagaaaaaagaaatactatacgattattgagaagggtactgtcttcatcagaacaagtcgaacagcagaatcgtcgagtctggatccctcctcttctccaccccaaccccacccctcccccaactccggcgcagtgacctagcggaagattagagacaagaaaaaaggacgcgaaaaaaacaggctctcgcgcctagcccggcccggccccgcgcacctcgcacctcccgctcaggctccgagtcctcatcgacctcgcgctcccgcttcacccgcacaaacgggacaacagaagccggggcctcgcgcgcgctcgccggctcgaactcccgcttcacgcgcacagggctgccccgggagctcgccgcctcaggctcccgctcccgatctcgctcccgcttgacgcgaccggagctgccccgcgactcagactctcgcttcccgcgagtggaaccgcgagactcccgcttagaccggccggacatctccactaccggccgagtcgtccagcgcaggcgccaagcacgctcgagcgcgcggcacaaggccaatcaggagaggggctggtagcgagccccgaactctctacgagtcgccactggggacaaatcacgctgcagaaaatttgtgggcggtgctgttcctgcactggcttcctctccccttagaaccttctgtgggcctactgtcgtttacagtttactgagacgggaacctttactggcgacagttttctggataaaagctgtcaggccgggcgcggtggcttacgcctgtaatcccagcactttgggaggccgaggcgggtggatcacctgaggtcgggagttcgagaccaacctgaccaacatggagaaaccccgtctctactaaaaatacaaaattagcccggcattgtggcgcatgcctgtaatcccagctactcgggaggctaaggcaggagaatcgcttgaacccaggaggcggaggttgcggtgagccgagatcgcgccattgcactccagcctgggcaacgagcgaaactccgtctcaaaaacaaagaagctgtcattcggccccagatttgtgcctcgaaaccaccaccgtgaggtcgtttcccacagtctccgcggcttgggggctgacaatcctgcacaggaaaactaggcgacattcccaaatcatccccttgacagccctaattctacttttagaaggttcttggtaccatgaaaacgcaaatgcccggtaaaggcagatttaccatgaagctaataaagctctaacctcaggacctgccttgaacttgtttgcttgtttgaaccgttccattgaggtataattgacatacaacaaactacatgtttaaagtgtgcaatttaggccaggcgctgtggctcatgcctataataccagcactttgggaggccaaggcgggcggatcacctgaggtcaggactggagaccagcctggccaatatggtgaaaccccatctctactaaaaatacaaaaattagccgggcgtggtggcacgagcctgttaacccagctacttaggaggctgaggcaggagaatcgcttgaacccgggaggcggaggttgcaatgagccgagatcgccccattgcactccagcctgggcaaccagagtgaaactctgtcatacccacaccacaccacaccacaccacaccacaccacaccacaccacaccacaccacactgtgtgcaatttactgaattctgacttgcggtatatgtcagaggcgtttcaaccagaccaactccatcttgagtgagggttaggaaaatgaggctgggccttgacaggctgcattcccaggaagttaggtattcctagcctagagatgtctacagttaagggaacagagagataatgtttactaaacagatccagacttgggagtgtcctaatatcccaatatctggagaataaaggcattcctaattttgctttaaagataatatttcttcttgcaaaatataataataaaattaatcctttatcacaaacccttgtagcagagcacatctccccatgatctttttatcctatatataaacaagcattgtagccatggtggatgcgttcctccttttactttcaggaacgccctattctgtcaatggagtagctgtactttcactactttacattttatttttttgatacagagtcttgctctgtcacccaggttggagtgcattggtgagatctcggctcactgcaacttctgcctcctgggttcaagtgattatcctgcctcagactcctgagtagctgggattacatgcacctgccaccatgcccggctaatttttgtatttttagtaggcacagagtttcaccatgttggccaggctggtatggaagtgctgacctcaagtgatccgcccgcctccccttccaaagtgcagggattacaggcataagccgcgacacctggctactttactttcttaataaacttgcttttactttgcactgtggactcaccctgaattctttcttgcacaagatccaagaaccctctgctggggtctgaatagggatccctttcctgtaacatatacacccatgaagccatca

SEQ ID NO: 3979 - DNA, 4001 bp, Homo sapiens
atgaagccatcaccacaatcaagagacgggatctgggcccagtacggtggctcacacttataatcccagcactttgggaggcctgaggcaggaggatcacttgaggtcaggagttcaagactagccttggcaacatagagagaccccccccatctccacaaaaaaattttaaaattagctgggcatggtggcatgctattcaggaggctgaggcaggaggatcgtttgggcctgagaggtggaggctgcagtgagcagtgattgcaccactacaatccaacctatgcgacagtgagatcctgcctcaaaaaaataaaaaaataaaaaaaaatttaaagaatctacccagccccaaagatatcctcttcctcccagagaacccccacaaaaatcaactgatctctcggtcactatagattagtttgcacttcctagagtctcatataaatggaatcatacagagtccctggcctctttcactgggcatatttattttatgatccatccatgttgttgagctacagatcttcctttggattgctcagtaatattccatcgtgtggctggaccaccattggtccctgttttttgtttttgttttttgttttttgatttggaggttggactgcagtggctcgatctcggctgactgcaacctccgcctcccgggttcaagcgattctcctgcctcagcctcccaagtagctgggattacaagcaccggccatcaagcccagctaattttttgtatttttttttagtagagacggggtttcaccattttggccaggctagtctcgaactcctgacctcttgatctgcccgcctgggcctcccaaagtgctgggattacaggcgtgagccaccacgcccggctctttctttcttttttaatgtatttttttcttgtagagacgatgtctcgctgtgttgcccaggctggtctcaaattcctccctccagcgatactcccacttcggcatcccaaagttttggaattacagacatgagccactgcatccagccgtttgtccctgtcctaatcatgaattcctgattttgacttttgtaaaaggacttgagaattttacacgctgtgacgtgaacccagtggtcagaaaaaatagaaaaaaaaaaaaaaggggccgggcacggtggctcatgcctgcaatcccaacactttgggaggccgaggcaggcggatcacctgaggtcaggagttcgagaccagcctggccaacgtggtgaaaccttatctctaccaaaaatacaaaacttagccgggcgtggtggcacgcgcatgtagtcccagctactcgggaggctgaggcaggagaatcgcttgaacccgggaggcggaggttgcagtgagccgaaatcacgccaatgcactccagcctgagcgacagagtgagactccttctcaaaaagaaaaaaaaaaggaaaaataaataaaaaagaaaataatacacccgtaggtccctcaaaaaccctgggtcctcccgcggggacagttaagccatcggcgccgtgagcaggaggcaagccgggccaggagagccttcgcggcgcctgcggcctgggcgccgctgttgccctgcctgagcacttcaaggcctcacaatccatttgaggtaggtgctctaggtgttcccatttactaatgaggaaactgagaagtggcagcgttacacagtcagccaaagtcacgcagatggcgatggattgcacagcatcctattaccagaaaaaagatgggaaggcaccgccgtaagcatcgagttgtgttatagatgatttgcatttttctgaaggttctggtatcagctgtaagccgaagtccttgtttcctattgatatgttacgaaaaaacaaacaaaaaaaaacaaaaacaaaagccctccgtccggggggtggaagtcaagcataccctactccacccgacccgaccagacccgaaaactccgtgcgctgcatcgcttggccaggccggggcctcccagaccggaagtcaggatgcggggccggaagctgagcaaggggcggcgcggagctctgtgggcgggtggctgttgttggggccgtcgaggcggcggcgactctgcgtccccggctcctgatggaggcggggccgcatccccggccggggcactgctgcaagcctggggggcggctggacatgaaccacggcttcgtgcaccatatccgacggaaccagatcgctcggtaccgccccgccctgcgccgccgccgccaccactcctggcctggcctggcccggcccgacagtccctgactcccgctcggctccccgcagggacgactatgacaagaaggtgaagcaggcggccaaggagaaggtgaggaggcggcacacgcccgcgccgacgcggccccgcaagccagacctgcaggtgtacctgccgcgacaccgaggtgaggccgcccgccccgcctgcctccagcccgcgcgctcttcctgcaacgcactccccttctctatagggaaaaaccacttcttactcctaaggttcagctcatctcgtctctttccggaacctccacctcagcgctcccaaatctccgctgaatgattctcaccaagaactgggacgactcataagcccccagttaagcatcgctgtcagagtatcggggagccagcaagaagtttatctgccggtttgccccaccgtgctgtattttagtaaggtgctccgctacctagcaaagagaaagtctggcacagcgatgagcgaccagcacataattgcggaatgaacccagtaaatggcctttccccagcttctctgctacctagagatcacactggttaatatatgacggtcaatttttgttaagcattattactttttttaaaatgtttttattttatttttgagactaggtctctgtcgcccaggctggagtgcaatggtgcgatctgggcttactgcagccttagcctcccgagtacctgggaccacaggcgtgtgccaccacaccggttaattttggtatttcttgtagagaaggggtttccccggctgggcgcggtggctctcgcctgtaatcccagcactttgggaggccgaggcgggcggatcacgaggtcaggagatcgagaccatcctggctaacatggtgaaacccccgtctctactaaaaatacaaaaaattagccgggcgtggtggtgggcgcctgtagtcccagctactcgggaggctgaggcaggagaatggcgtgaacccgggaggcggagcttgcagtgagccgagatcgcgccactgcactccagcctgggcaacacagcaagactcggtctcaaaaaaaaaaaaaaaagagagagagagaaggggtttctccacgttgtccaggctgatctcgaactcctgagctcaggtgatctgcccgcatcggcctcccaaagtgctgggattataggtgtgtgccactacctttgttaggcattagtgaaagtgcttttagatcttacgtatattaattcattgagtctttatacaacctcataagaaagcttctgtctgtttcacagtcaggaaacaggcacagagaggttaaacaacttgcccaagatctcagctagtaaatggcagagcctggatttgaacccaggcagagctctatccacccttctgctttccagtactttttgctagacaaatgtgcattgtgtacctactgtgtgacaggattgtgctggcctcagagcagggatgcaaaggtaaataagtccttgattggcagcacaccaaatgcttacactggtccgggcgcggtgattcatgcctgtgatcctagcagtttgggaggccgaggtgggcggatcccttgaggccaggagttcgaaattaacctggacaacatggtgaaaccccatctctactaaaaatacaaaaattagccaggcatgatggcaggcggctgtaatcccagctacttgggaggctgaggaaggagaattgcttgaacctgggag

SEQ ID NO: 3980 - DNA, 4001 bp, Homo sapiens
atacaaaaacttttataataatctcccagtactctcagctacattgtaatggagtacaatggaacccaatgtagccctattatttaaaatactattccaaaatttcccccgccagttctctgacagtccttattctttccaaattatacctccctgtcagtcaccatcaggattcaggctaagctatacaagcagtgcacattgtgcactaagatgtcaaatcatatgcttggccagcaatcccctctgctggagaggaagttggcctgggactctcagtactactcttgcctaatggtacgctccatgacccgccctacacttcaccatcttcctcagtccctttgaggctacgtttctacttcgagttgtcctttaacttcaactatattaaaacctggaaaagtgttatccctattagaaatgtacttattagtgctggcaatttttactggtggaattactgattgcatcagggagatatttttatggaggggatcgagtcaaggctaagaggtaccacttaaatcccacatgcaatccaacccattaaattgctcctaggaaggtaacagcggtaaatatttactaaatctctggaggcagcaagtctttctaagcttagaagcaacagaagaaccacaaagatttgataaatgtggtggcagtagggaagaggaacatggcaaaccagataggatgagtcaggctgtctgtcctcctaatatggagacactgtggagagctgagctacaaagccatgtagtgctggggaccccagtcagggccaggtgaaggcaaagtaatgttcacactgagctcacgggaacacagctcctaggacccttgtggaggaagctggtttgcagagatggggtatgggagaaatatatagagagaaacaggggcaagaaatcaagggtccagtaaggtcaggctggcttcctgcagttgatttctgagatcccctatattcttacaataaccccccttttaaatttagctaatttgggtggtgggtctgtttcttgcacacaatcccttacctaaaatctctgggtctttggaattcagaatttccagagtttataaagataatatgaaaaaagtgttttttatatatatataaaatgttacattcccagcagggtctgggccagcttccattaatcaagcagattaatattcctgtaatgaatgtatgaacattcacccacatgagataactaaaaactgtaaatagcctcacaccaggtctggttctgaagccaaacaagctcaggtgagatcagatgagggtgtgagctttccagatttcagaaatgcgtatgaacaactgtgcacccatataaataatatgacacccttccccactccaaaaggtagatataattggttggataactctggcttaagtgtttgttattctagagaaatcttaaaactcaaacagtgtaacaataatgaagactgatacttatgacaattgtctttacgttgtactttaaattacaggaattaaaaaagaaatatattgctttatttttttactaaacattattgtcatcacccaggatatatttaagattaagcttcacatttctctgcagagggaattaccaatttatatcttatatgtgcaacaataaacacatactgtagaatatatctttaagataattggtctatttgtgattttgcataattaattacatgtaaagaagatggtacatattgctagttaaatgtacgtaacatagcatacctctgaattcaggtgtgaaatgaagagtctgaagaagggaattgaggtaacaggttccaccctgatttctgattccgcttaaattggtgaattctctaggagcaggtggctccaaagctttagtctttaatttcttcccttttccatactgattattagacacagtggaatactcctcttcaaacaggtccccaaacattgtgaaactaaatactacccttaaaaaaagtgacatataaatgcttttatttttaaaataaattttccccaaatccccctaccttacacttgggagtcgattctgttgtttcttagaacacaggactactgtttctatgtacagtagttgggttttggaggcagcaagatctagatttttttcatccctatcaggaccctaactacctgtgtgaccctggatatgttaatctgttttcttatgtgtaaaataggataccatctgtctcttcgggtcatttaaactatccaatgacataacgaaagaagggcagttagtgtacagggtttggcccacaataagtaacagctgtttttaaaaaggcacgttcacatcactaatttttttaaaaaagaaaacctgttgccacaactaatccactgctgggacggcaaagccaaccctaaattctgagaatcaactctctaaaatctctgcttgtcacacccttcagtactatataccagattatgacatttaaattaaacagatcaagttaactttttttagagcactttagtacagtcccgaagctgttgggccggaagtcagttcactggggagggaggggggaaggggagcggagggcggggaagactgccactaaaattatcaagcctaaaggccttccagtatgtatccactaatcccatcgttagccctgggggcctaggtgacttccccaaggtttcacatcgagtgtggcggagggtcacttggagatgagaaacgtaaagcgcctagcataggtaccaaatgacaggaagcgctgaaatgcaattatttttcttttcctcagaagaaaactaaaaaaacacaactcgagagtctagcctcgagctcgttgtctgcattcctgaattcccaactcctacggccggccgaggccctccaagccaccacaggcccaggggcgcaaaaaggcagaggtccccgtggcccgaaaccactgccccgactccaggagagcgccgcgtcctcaggcaggcctgggcagcctctcgcctcgccctcctcagactgggccaccaacactgtccctacgcttcccacgtccctcccaggatccccgggcgccagccgcacttactgcctaaagcccagacccccgccctggccaaaacgcgaagcgaacgaacccgccccaactgggcgccgccatgttggcgagggcgggtctccagaaagtgatttatggatcgtggactatgcttcccaggatgccccgctggagcgccggcccctcgcacggggccttatgggaaatgtaactcttctgctccaagagtttgggaactggagcgggagcgggagcgggcaaggtgagctcgcttacaagtccgctggtgagttcgcgggtccactcggccagcggaccactcattcgttcacatttataagattatagctatatgatcttatataagattatagctatatgatcttatataagattatagctatatgatcttatataagattatagctatatgatccttatataagattatagctatatgatcttatataagattatagctatatgatcttatataagattatagctatatgatcttatataagattatagctatatgatcttatataagattatagctatatgatcttatataagattatagctatatgatcttatataagagtatagctatatgatcttatataagagtatagctatatgatcttatataagagtatagctatattatagctatataaccttatataagattatagctatataaccttatataagattatagctatataaccttatataagattatagctatataaccttatataagattatagctatataaccttatataagattatagctatataaccttatataagattatagctatataaccttatataagattatagctatataaccttatataagattatagctatataaccttatataagattatagctatataaccttatataagattatagctatat

SEQ ID NO: 3981 - DNA, 4001 bp, Homo sapiens
gtcaggagatcgagaccatcctggctaacatggtgaaaccccgtctctactaaaaatacaaaaaattagccgggcgtggtggcgggtgcctgtagtcccagttacttgggaggctgaggcaggagaatggcgtgaacccgggaggtggagcgtgcagtgagccgagatcgcgcccctgcactccagcctgggctgaacagagcgagactccgtctcaaaaaaaaaaaaaaaacttcccatggctccataaatcccctactttattaattctaaacccttgcagcgactatagaatacccccaaaataaacattgaaactgctgttcgaagacctgggttctagctcctgctcccaggcctttctgggttcaaattttggccctccttctcttactatctgtgtgatcatccataaatttcctaatctctcttggccttaacttcctcacctctaaaataggaatcattatagtaccgatttcccagggttgctcaatgattgagacaatggcactaagaatcatgactcacacagttaagcactcaacaaatgtaggtagtattactgccataataatagttattcaactttaaatggtctttcctcttgggtctcagctttcttactcaagattgaccacacacacactttagactagttcttcctcccttgcaaaactacacacatctaacacccatccgacgcctgaaacctcccctagcaacccggagtcctgctggggttttccagctccacctcctgaacagctgggctgtagcacacaggctggatctactcatacttgccttcctagagctcaactgaagtcacttcagacaagtgaagtacccactcacctctggaatcagatcttggtaacgccaacaggttagcaggtgatttcatttcagtgtgtgtctgggtggctagcattcaaacgcagctcacactgggagctatttctagtccaattttgctacttggtaacgtattaatagcatcaattaaaacattcccaacgaatagatctttaaaaggacggtttctgacttccctaacaagcagagggccgaccacctgcctgcgaagtgcccctcctgccctgtctccaggcagcatgctgtgagcgatgacagaaactggacccgcgcacagagaagctgcaggcacgccctgcccggccacccagctgcctgcctgcttcgcccggccgccgagccccgggggaaaacctagaatggggatgccggtgcgccccgacacctgggcacggccgcgggccggggagccgcccacacttggctccccaagagttaaacgctgagtaattttcctgaggagcaaacagtcggagcgggggctctgccaatggccacagtatttttatccgacttaaccgacaccgcggcgcgacctcggctgtccccaagggtatccccacgcggcacgctccggagtccccgaccgggaccctcgccggctcccagcgcgacatggacgacagcgccgccgccgagtcccccgcgcccgggcaggaggcagagacctggggccgcccgaggactgctaggggcccctccgcccggggtccgcgcccgggcctaagcggtagggggtgtgcgcccaagttggcccgctttgctgcaagagtggaaaggggtgggagcagaaagcgccggccccgcccggggcggggagcaacgcggggctgcagggccgcctcggggccccgaaccaccgccgcccggcccaccgcggcgccggggaatgaatggggctccccagctggcagcgggcgcgcactcacaggcgacgtaggccagcaaggcgatgcccagcagcagcttcatcctcctgcggttgacggcagacacgaggcgcagcagcgccttgctcaccatccccgggagccgcgcgggtccagggccctaccgcgcgggggcccgcctgctgcacaatgcgcggcggcggcggcggcagcggccccgagagccccgcctcctgccgccgcgcgcccccgcccccgcgcgcctgcttcctgctggcgggatcaccgcgcaggcgcgcctccacccccttcctccggctccgcccccgcccctccggcttctctacccgcaggcgcagttgccgcctttcttgccttggttttcgaagaatgtgacctggagggctggtgggcggtgcggcgcgccgcggcgcatgcgcgttccggtctgttttccctgagttaaagcgcgcgggtgccagccgggaggtgcggctggattcgtttcgctgaggtgcgtccccaacccaagggcacgactgcagtggccagtttccgagccccgcccggaggggggcacgcggtgggcattccggtgttgcagtgaaacgaaacttatttgctaaacttggccgagccttagaagttgaatgcctgcctcagaaagttgcctcgttctctgggctgtttagttggctttttttagttagaatatcggcagcgaaaatgataaatcccctaaaccttgccgaagtaaaaactggctgcgttttttttccttggctatgatcaactggggtgcctttgttttaataatagtcttttattattattttaaaaagcagtgctaagtatattaatttaggatagacttggaaaagaaaagatgaaattgcgctgtctctgcctagagaaaaaccctgaccatgttgtcgtgtgtgtttcattcaatctttttgttgagtatatctgttttatgagtgctgtactgattgcataggaggtacctgtgtttaaaaagcatttactgaatgatgattacaagcaaggagatgtatcagaagatccacagataatcggaagcttgtcattggatctggagagagctggtcccatggaggaaaaaaagacaggtacacacagatgtgtgtgatgccacattaagagagatcccggatttgggatctgcaggcttcaagaggtcatcttcagctatacggagaagttgaagtcagcagcggctctcctacctcttggaacctcaggccattttgcaaaacttaatagatcaccctcctttagatttattagaaacctccaagaaaaggaaatatggcagctggtactaaagcagcagctttatgttacatctttcaaactatagtgcaaatgatgtgattctgataaaacctacctccatcctacccctcccctaaacctgttgagaatccctgactaggaggaaacactgagcggtttgctaaggcggattgcccctgctatgcatgctgcccatagatggagtggacttctttcgagaagcccagctccctgactctgacgtgtccaaggaggctgccaagtgacaaaacacctggcatgggagcctgagtcctgggttcccagaggggccaggcccccagagcacaccagtttggaacaaatcgattttgtttgtaagtctgcatttcctcgtggctttctggctatggtttttgaaaagagaactagagcaagtggagctctaggcctttcccattccatgactccgtggtttttagattaaagatgaggagcagaaatggaagaaaataatagttcattaacatttgacctatgggcaaaatcagactgaagcttctaggcggatttcaagcattttaggttttaggtagggtttagttgataggtatcctattagacgacaaaggtcagaaattgtggggtatttgccatttctgtactaaactccttaagcccagcattcccagttagcatttttttctgctgctggacactactgccaacttctgccctgtgggattaagtatatggaaataccgttagcagctgcagttgaaatagctgctgctgtcattattgccacccagaaggcggttggtgtcccaggacactggtgtcttgctcagccgcagccagaattaaaaagtaagcaatagtaagtgtgcacccagtggaggtaagaaggcctgagggagggagatgccaaag

SEQ ID NO: 3982 - DNA, 4001 bp, Homo sapiens
tgcacatgtaccctaaaacttaaagtataataataataataaaaaaagaaaaaaaaaaagaatggagaagtcaagaacacacacaaaaaaaaaaaaaaaaaaaaagaaagccaagtctgaaaaccagtgagttaatttagaaatagaaccaatgcttatgggaagaataatctttttgtaaagagaactaacaaaacacaaaatctttaaaattattgatggtctgtcaaaatgcaagttcgctgagaggatctgtccaagtaaaaggaaatcctgcgactgctgttcccacccccacaagttattctgagctgaaaaacagctaaaaataaaagacaaactaatattgtattatacaaattgtaatttaacaagataccttttaaaaatcagttctcacaaagtcccataattctaaggccaagctatcttttgcagtttccagctaggatcagcacagaccgggtcagttcctgctacacctacttccaagctccagggctgcaggtagaagcagcagaccattagccccagaaacaggcactgtgctgcctcctctgaagattcctcctcatacccactgccactttggagcaggactgtgccaagttgaaaaccaaatgagggccaggcacaatggctcacacctgtaatcctagcactttgggaggccgaggtgggtggatcacctgaggtcaggagttcgaatccagcctggccaacatggtgaaacccgtctctactaaaaatataaaaaaaaaaaaatagctaggtgtggtggcaggcacctgtaatcccagctacttgggaaggtgaggcaggagaatcacttgaacctgggaggcagaggttgcagtgaaccaagatggcaccattgcaccgcagcatggacaacaagagcaaaactccgtctcaaaaaaataaataaaatttaaaaattaaaattaaaattttaaaaaatgaacctggccagaccttcagagccgagtacgacaccacagagcccgctcaggtgtgctagacctggagcctgctgccacctgacttatactcacgggcatttctgcttacacagacagggtcaccctacattcctcaaagagagtataaacaactctgtatgggctgtgatcttacacaacaaattattcatcattatctttactcttgaggtgacaaggtatgcagggaaagacaggaaactgcattaaaggctaagagggaagaagtgtgccttgagagtacaggaagcctctccgacatcaaacagaaagccactatcattaacctcacactcttccctcctcgtcgtctgctccagtcctggctttcttcttcaaagctcaatccagacgtcagtctgtatgggaaaccttctcaccatccttggtcagaaataatcccttgcctgcaccactagtccacaacagctcagcgctgccttgtccagagattcacacatgccttcctcactagacgatgagctcactgagcacaagatgcaggcctttcccttcctgatgctctccacagtgtggactctagagggaggggaggccccctcggtcacccacaaatgcagactcctgagcccactgcaggtctcacccttcaggatttccaggcgggcctggaaaccttccatttacaacaaatacccctccacggtgctctggcccaggccagtttgggaacagggctccacaaaagttagctgagagaagagatgagcgtaaactggggtttttccatccccaaaggccattccatctggttcagtgtttcttcctcactggacaggtcagtcccactgctgctccggaaggctgagggccgccccatcagactgtcgagacgttcagttaagtagcggcactgctgcatcctcccatttgagaggaaactgaaaaccctatgaaaatcaaagtttcccaccacccccctctcctttgagaatgtgttcttcctgtaacattaacaataactccagttcctatcctaaaaagggcactgcagcagagtctgttggttaaataatctggtgagaaattctgaaggggagagaagaggggaaattcagagcagggacaaataaccagcaatgagaggtgctaggtaaacagtaagtaacattaataacaaccggcttcggaatataaataaagcagcaaggttaaccctcacagcccaggacaaaggccctgggaacatgtcaactgcacagttcagagtacaccaagcatgagcctgacgttccaaaatccaagctgaggtggggagaggaagtcaaagggggacagaaaggcagcccattcatgggtgcccacagttgctccagagaccgctagagaccctgccacgacctttcacatttacaaggccacgtgctgggagctcagctagaaaaatagaagtctcaagaaatgagcctaaaagagctccaattaatgatcagcagcattcctaccagagagcatgcagggtaatcttatgttgggaagtggctgggtgagggcacagctgcgacttactcggcccttctatgaatcctgactggggaaactcaaccagtcaaaccacaaatgaactccctaaagggtcttaggttgaatttcactgtgcccaaaacccacataaatgacacatacatagggaagaaaaaaatcaccataggaggagaacaactcgggataacctgaaaccactgttcagaacacatcggagaaatcgacattttcttctaccaaaggggaaatccacataaaaactgactgtagcttccactcctttgttgattttcttttttaattttgtcttaagttagtgacatagtctgtgtcaagcctcattctgtgccacacccatgctgtatgaaactgccaaggaccagttcaggatttgtaccatgaaactaaagactatagaaacactaaaacgcaaaacagtgggttagttctttctgtgataactcacgcgattatttagcacatactaaattcccatcataaaagatacttacagtagaattctctttttctacacttgagtcagaggtcttacagaaatactccccaacgagatgtccctctctgcaatgtgaagtctcacagcatggccctagtctttgtctctagaaccagtatttaggatggaaaacaggaatgaagaagatacagaacttctcaaagtataaagaccaaatttctctcggcacaaagaagcagaacagcaagattttcccttcatttcatgtcaaatgtatttacttagggcaaaggctgcacacactagagactggctcagcccccgggagctggggttgcccgccagtgctgtcgactgttctgagcgaggggctcaccttccctgtgaagccaccgcaggggaaagaattttcagtgtcctaggctgctccataggaagcctccaacagctccaaattaaacagagggcgatctctaagagccaccactgcagttttatttacatttgcaatataaactgaaagctgagaaaaaaatttctaaatgatacttcaacaaaaatattctaatcagagctgcatgctttaaatgtctacataaacatggactcaatccccttggcaaacactgtttccacccctcctctttagggtgggtgcccagggttgatggcttggctctcccatcttccctctcctggtgcccccacccccggccctccatagcaactgagcatccaggtaaaaggcaggtaatggaaagggctccatgccttggtttcctcacctataaaatgaagaaaatagctgcctacttcgcacgggtattgacataattaaacttgccaaccataaacagcgattagaatagcatttggaatatagttaagtgttagctatggtcactttcttcttttattttcctggacctcttcaacagagatactacaagttcccggtactggtcttcccacgacacaatgcacatttctgccttttcctgttccccatggaaaag

SEQ ID NO: 3983 - DNA, 4001 bp, Homo sapiens
gagacgggatttcaccatgtttgccaggctggtcttgaactgttgaactcgtgatctgcccgcctcggcctcccaaagtgctgggattacaggtgtgagccactgcgcctggccttttcccagttttataggaaactttggctcagaggtgttaaatcacctgtccaagatcacagagccagtgagtagaagatctgggagttgaaccaacacagactccaggcaccacatttgtaacccgtgtgctaaattagatgcaggtacaaggaggtcagacactttagctgattggctaaagaatctggttgatgctaccaacctaatttgtgtgcatatgagggaggcctgtggctcaacacacacattctttggagagaggatcatctacaagattaatgaattcaagtaattattcattccatttccatctttcccatcactgctttgttcctgctctgtcccctatacttgtcaccatgctggcatgaaggacatttccaagaaatccttgttggttgaatgagtcatagagaagaaaagaaaagtgaaaggaagaaggaccagggagggaaaggggatgggtggaaggaaggaaagcgctaaaggggcaagagtgaaagaagaaacaggaagaggctaggagatggatgggtggaggagcgacctccccagcctctcctccacagactgcctcaaatgtacccgtgagaatccccaggtttcccagtatcctcctcccccaataaaatatcctgccttcagccttcacttcaggagcttctcccaaagagctaagggccggctgaagcccacccctacccctgcctgaccccttgccctgcacacccttaagtgggctctgggctctgccctattctcagagccttcctcagcttcctggcctggcctcagagctcagtgctaccttcctgccccacttcctcttcctgcctccaagttccctggagataaggccatccaggcattgacccctagccaggccacatccatcacacctctgtcagtttctccaaggcaaaatcttaaagcaccaagcctacttcctgcccagtccattttcccaggagccctagggaaagggagaaactggcaccagctgttcctgacatctttgccttggagatggcaagtgaggacaaaggccaggatctgcagcaggagtggggatgactcaactcaggaatgtgtcactaggtagaggttagcagggagtcaggcctgtgccatacactgataacttcagtggaactttcagagtaaacatctccctttctctttctctaggggaggagttcgccctccaacaccctgccatggggctggaatggcctctgccaccccatctgctcaagtttccaactcctgagccaggcttggctcctcacagctgcggaaagggctgacgaggtcgttacatttcctaccacttcttagcagtgggttctgagtgccaggcgggtctctgccactgtggctcctttaacctcgcaaggacccaacaaggcaggtattactgaccccacttcacagacgcggaaaaggaggctcagggaggttaagtgacttgtcccgggtcacagagctgggatcccagcccggagtccgactccaaagtcggtgctcttaaccgctttgcttcaggagaatggggagcccgagtcccgctcgctctgcgcggtgcagccaggacggggctcacgcatttctctcccatgcggcgcgcagggagtggagggtccgccccgtcctgctccagcagtggtcaccgcctcaggtctggccctcgtgggccccaggggaggccccagcccgcggactttggactcctctctcccaccctcgccactcgccctctgcccgtcgcagggctggccggccccgcctgggccctcaccatcgctgctgccgccgccgcctcgcccgctcccggcttctctgcctgcggagcggccgcagtgccagcggccccggaggaagagcaggggcggggcggggcgggccgccgagcgagggcggggggcgcgccttccgcgagtggcgacagaaaccaagtcaaatcgaaagcgatgggccacagcgacctgggtccgtagagtcggaccctcccgggccccaggagcctgaattcggatgacacctctgcctggtgaacgggcacacctcggggccggatctgtggaatgggcacagtggagtgagccctggagtcttctagctcgagttcagctgaaaaggcatcattcattcactcaacaaacaccctatgagtgccacggtcaggcaccatactaggtcctggagacgccatgaacaagccaggcagggtctttatcaccctggtgagtgcatctcacccagaaccaaaaacaggcacccaaaaagttttgaaactaaagacaagtggtggttgcacaacattctgaatacatgtcactgatctgtacactttaaaataacaaactgtacattgtgtgactttcacctctattcaaaaagaaagcagccccacatgggcaaagtactagctctagcctttctgtatgtctttcctcaccatgagggcaagtgcagctctgtgctgtcatgcacccgccatgcacttgctcctcagtcagaggatgggggaggctggtgtatctactaccacttcagagccttcctgagccgaatctacccatcctgtcctctcactgctacagagaaaccaccagctacctgttctccactactccaagctgcctcggacatcttaaaataaggtccctcgtttttttttttttgtttgtttgttttttttttttgagagagacagggtctcactatgttgaccaggctggtctcgaactcctggcctcaagcagttcttctgcctcaggtttccaaagtgttgggattacaggtgtgagccactgggcctggtccctcaagtgaggcctctcttgaccaacagaattgaaagtttccctctctggggctgagcctctgtgaatacagaagtcccagaccaagagggtttcacagacactcacccccaccttggacagcctgggtcccaaggcagaagcttcacttcagttccttacaccttgaatccaggagagagaggattaacatgttgtagcaaagactaccccaagcctgggcacagtggctcacacttgtaatcccagcactttgggaggccaaggtggtaggattgcttgagcccaggagtttgagaccagcctgggcaacacagtgagaccatgtctctacaaaaaatacaaaaattagccaggtgtggtagcacacacctgtggtcccagctacaggggaggctgaagcaggaagatctcttaagcccaggagatggaggttgcagtgagccatgatcacaccactgcactccagtctgggcaacaaagtgggatcctatctctgaaaaaataaaaataaaaatatcacaagggtcttttctgacctttcctcctccctccccaaatttcagagcatgattcttccagagcctgacttgccaatctggtcccaaaccctgactctcaacccttccccttcttcctgacaacaggttgtttccaattctggaaagcctgtggaggaaacaggaacagagatagcaagaaccctccctgcaaaccaaggcggactgggcactggaaaaagtgacagtgatggtggaacctggtagggaggaggggggcctgaagacagaaaggcttattgtgcacagaggggaagaagagccattggccctgtcctgtgacactgactgactgactgtgcccagccatgggatgccaaggagagatgcttgccccctcaggacaactgagacccagaggccttgctaagtcccagaagacaaggacagagaaaagacaaataaaacatgcagaagcacaaggaaaggaatagcagtccatttcctccacccctcggctctagactacagggtcgttgaagagagatggctctggtgg

SEQ ID NO: 3984 - DNA, 4001 bp, Homo sapiens
tgggcaggcttcaaagggaaaacaagtttcccgggagagaagcctgagaatgcatgggctgactgagctttcggtctcagaacatgcctctatgggcgagctgccacctcaagccccagtcatgggatccattccctgggatccataacaatctgtggagcagagcagattcagaagtggagactcagctcacatcagctcccaaaccaggtgaaaggcaacagaaatgtcaaacttctggccctcctgtccattttgccccaccaaaaagaaattccctccctccctgttttcctccagcccccagtgggctccctgtctcactgtggcttccagatcctctgtcttgttgcggagatgttccaagttttccccccgggccaggatccgctccacattctgggtcataatattcttaactccctccacctcactttgcaggttccgcacacgatcatttcctccaccttcactggcttcctcctgtgcggcaacacggggttaattagaccaagtggtgggggaactggagacttgggctcagagatctggggagggtaaggcctcaggcagacttaagctttttgtaaaatgcttgaaatgtttacaaagagaatgttttcatgtattacttctgtaatcaaaaataaatgcatttgtaagccccagaaggtgagatgtgatgctgaacagactagatcaaacttcttttggggttattagggcccctgacaaggaaaagcagcacatcactaaatccctccccactgcttccttgctccctagagagggccgtagaatacagcagggccagcatctcacaatgttcccttccagagcagagcccgccactatttacaattcccagagccacccccctttcctgatttcttgggaccctggttgaaagtgtctgtgctggccagcagaacaccctcacccagccccacccatctgtccctctaagccagctgccggagcacggccctggccgcaatgccattgctgtgacccagaacaacaggcaaccaagtatcccagaaggcgcctggagccgttgagccacacacttctgctttccccaccactgggcgacacgtgcaggcaccaagcaaccgcctgcttatgcagatattaaataaaaatacccgcctgggtgttgggggaaatggaggactagtcctccctggctgatgtctcatctcggaggcttcatgacaaggtttttgaacaaggagagaaaaatagtatttagctcctccccgcttgacctccaaaaataggccagtggcatgggtcagaactacattatcacagagaaccaacttctggttctcttataaacctttagttctcttctccatgttaatggagaaaggacacccaaaggactcagtggacacacaaatcctttgtgtttctgtgtggggataaagtgaaaggccggagaggagagcttctgccgctgggctggaatctgaactgggaactgcccaggcgctgcctggtgtggtgtcacaacacccgcctcgggctccctggaggaggaaggcacaacaactctttgcctggaattcggagcccccatcggcgctggcacggaagcccagctccccaccagcacagaggtcaggggagggagggagaaggagtagaaacacctgccaggacagctcagagctatttgcagccaagttgtcaaagaagagaggccatagcagcactggcccagccctctaactttgccaccaactctcctcccccgacacagccaacccccagtcccaagccccctctggctcctctttaaaccagccctttcctagttcccagttggctcaccatgtctcagagcagcccaggccggtcagtaagtgaattcgcctagtcggcttcctcccagggtggccctcagttcacttcctgcttgctccaactttcagcctgcccccgcccacctcgcatctcgagtcgctccagccacacctaactcaggtttccccaggtaggcgggcattcttcactgtcctcccagtggcttcccaaacaagagcttaaacttaaagtaatagggttctcagaagccaaaggtcttctaacttgtcaggaattagaaaagaaagatcaagcagccctccgaggtttccagaggctggacctcctgatctagaaagggcagcctttttttttttttttttttttttaaatagagacgagttctcaccatgttgcccaggctggtctcaaactcctgggctcaggcgatcctcccacctcaacctcccaaagtcctaggagccatgatgccccaccagccatctccttgtaatgtcttgaatatctgactccagtttctagagactgagatcaaccatgccaggcctagctcacagggaaacaaaatgcagttatgaaaatgtattgctggataacacttgttcccaggtccctgggtggcagaaagcactaaaatccctgaagtctggaatactgtgatcctgggctctgattcagaaagttctgggttactagttacaggcccctcagggaaacttttcacctctgtggagtttgcaggtgctgatgcttagctcagatggtgctggtaagaagcaaaaagaggccgggcgtggtggctcacgcctgtaatcccagcactttgggaggccgaggcgggcagatcacaaggtcaggagttaaagaccagcctggccaacatggcgaaaccctgtctctactaaaaatacaaaataataaacaggcgtggtggcagttgcctataatcccagctactcaggaggctgaggcaggagaattgcttgaacccgggagacagagattgcagtgagctgagatcatgccattgcactccagcctgggtgacaagagcaagactctgcctcaaaaaaaaaaaaaaaaaaagaagcaaaaagatagcatgtgcagtgcaatgccactagcacagtgtctataatgatggctcaccaaacctctccttcccttccagagttcagcaattctgcatttccctttaggggctaccgcagaggtaattgatcccagtcagtgatcagaggactgccccagtgaaccagagcagggggcccaaggcaaaggatttttccactaacctggctccaggccagagaaaatctgatcttccttgacagtgtttatcaagacagaagaacaataacagggacattcagaagggaacgaacattcttgacccattccagaagaaatcagttccaaggaggaaatgtcagcttctccaacaaacactttttttgtttgtttattttgttttgttttcttgagatagtctccctctgtcacccaggctagagtccagtggcatgatcgtagcaccctgcagccttgaactcctgggctacagcgatcgtcctgcctcagcctccccagtaactgaaactacaggtgcgaaccgccatgtctggctaatttattttaaaactttttgtagagatgggggtcttaccatgttgcccaggctggtctcaaactcctgttctcaagtaatcctccctcctcagcttcccaaagtgttgggatcataggtgtgagccaccacatccagacacaaataattttttttttttttgagatgtttctctcttgttgcccaggttggagtgcaatggcgctatctcggctcactgcagcctctgcctcccaggttcaagcgattttcctgcttcagcctccctagtagctgggactacaggtgcatgccaccaggcacggctaatttttttgtatttttagtagagacagggtcttaccatgttagtcagggtggtctcgaactcctgacctctcaggtgatccgcccgccttggcctcccaaagtgctgggattacaggcgtgagccaccgcgcccggccacaaatgcctttttaaaagctttaaacaaacttcggacccctgtagctttttttttttttttttagaggcagggtcccactctgtcatccag

SEQ ID NO: 3985 - DNA, 4001 bp, Homo sapiens
tgtccacccataggtggggttcaaggtgatgagtgtcacaggcagtgactttagatcctcccctgggaatgtgtgggattggaggactgatttctctggcagtcctacagatatttttaatggaaccaaaaggtctgcttatgccttcactcaagacatcccacagtctaaagaataaaatcggatttaatccctggtgcccaacaggtccacacacctgctggaattcctgatggtataactgccttgactcaagcagtcaactatgagtagcagtgagcacctactgtcccagtgacatctggcaccaggaatgtttcccagagctaaggcccctgtctctgtattcaaggcagtcatcagtcaccctcacactgggctgcatgcatgctctaccctccagtccccagtgccacccacacccagcagccgcagagaggtagtgcccaactggcccagggtgtcccagtcagcttgagggtagccgagctcagatcaaacataatcccctcgctggaacgacccagggccagcttccagcctgttcgccttccccaggcggaggccaaagaaatccgctcgggccggtagcctccagaggcccagtggctctcccgagcggcgcgtgtgaagaggctggaaagaggcagcaggaggaagccgggaggagggagcccaggaaggagcctgggggagccattaccgccagtggcctcttctggcgctgggtctcccggtcccagggcttagggatggaggaggcagcggacttcaggctctggccgcggcctggggtcgggctgagggcaagaccccggagtcccctttctcctctcatctcgccgggcgaggcccagatcgagggaaagcggagcccttggcattgcgaaaggctggcgctggggacctggggagcctcggcctcgcggagaggaggccgggaagagctgggtaatcggtcgcagtccagatggaggagcttgcaggaagaaggtgctgggaaggcgcgttcggctgagaggaatggccgggaaagacgagaggaggacgagggccgagggagaaagagaaggacgtgaaaggccaggccgcgggaaggcggcgccgagagccggctgggcccaggcgccgcgaggaagtgggaaccgagagagtgaagcacagcgggctagcgccgcgcacgccaccctccgcgtcccgcgccgtctcccctgggcaatccgtgcgggtcccgattgccggggacgggaaacgcggctaggcaggaggcgaggaagcaccccggccgccctgcagagccggggccttttcctcccgcggttgccgacgctgctccctccacgtcctgtccccgcggagcgcgcaagacgcttttctccgcacttgccttgagggtcacgggacggagtccaggctctcagcatcccgcactccatttctgcccccgccacagtagccgttccgaatgggcctagaactaggggactggcccgagaggcggagaaacggggaccgcttcggtcccattcgctgctttgtcccttgcactcagcttaatgtccagcacacaatagacgctcaaaataatatttgctgaatgaatgactggatgacgaatgaatgaatatatgaattgagaggtgtcagctgcagctaggtcgggggccccagtatgggtagggtgagggtccagtggagcagggccgcgggctgtccccttacctcgcaccagtatgcggcggcagtggtctgcctcgccgggcccgggctgcccgtcgctgtcggctccactctccctggagcctgcgggactggaggctgaggtcccggccacctccgttgggctgtggccaccgccatcagctcgcaagtcccccgctccgctgcggtctccgcagcgcccaccgccgccaccagactccgcccggcgcgcggggccccggtcgcgctcggcgcccccatcgcccatgctgaccgccactgccaacccctctacggcggagccagcctacgctggccgggagcgccgctccccgcccctcgcgcccccgctcgactcctcctcctcaggccccgctcctggccgctgctcctcccctccctgctgattgggcgggagtcaggtttccaagactcccagctgcgccggggctccgcgccagggggagagggggaggggagcggtggtcccgctccacccctagtctagccctgctccaagcccggcagagggagactggggcggccctgaggaacgccctacaccccctcctaaagttgatcaacctctcctcccctccaccgttcccctagcctactcacctccccactccgttctttcccagagaagcgcagccgctgcgctccggccggttcagcaggatcaataaccaaagtgcgcaaagaaggcgacctcggagagacctagcagagaacaggaggttggccttgctcgggcgcttggcggggtggggtcggtgggggtgctggaggcgggggcgcaggcctaggctcagtgcgccaacccctagatttatacccacacccacactcatgaacccagaccggaggaccccctcccccggccctcctggaagagcaaggcaagagtgggcgaataaggctagcaaagtgaggcaagaagaccgactcacccgcatccccgggggagagtgaacaggcacacagacagacagccggttgcaggcgcccagaggctcgagaataaggctgagaccgtggtaggcggcaaagtcctgggttccccgcaggtctgaggccgtcacaggggaccgcaccacgagacagggatagaaggtggggatttccttgtttcccccgcggagctttctccgtgctctgtcgctgtcccgggtcccgccttctccgaggctgaggagaggtaaagggcggaggtgagcacggctggaagtgaagcagggtcaggctgtgaggagcggagcagctggggtcccggggcgcagccctttgaggcgtgcggatccccaccatttactggagaggccagcgctctcccgagcctagtgtctctctcaacgcaccagaaggggccttctttgactcagaagggggcctggacgaaagattgagaacgaaggtgtgtgtgcaaatgtgtgcacgagcaacaaggcctgtgacccttcccctaaagcactacaatctcagactttccttcgtttttctgacctgctggcgtgagcagggtgctttggtctgtccaataatctggttaagggtgtctgtgagagctggcgtggatatgcccgtgaaagtggctgtagcatggctgagtgtgtccctggtgcagcctccattatccctgtgagtgggaaagcaggtgtatgagtgtgtgcgtgtttcagtggcatagtgtgtgtccaatgtgcatgtgaatggttgtgtgtttccgatgccagatgttcccggcagaaggtgaggttgggggggacacacaccaattatttaattgagtgattaacaactactccacttagggtatggaacctaggaaaaggggagggtaaaaagggcaggtcgggaggtcttgctggtaatactaacggaaagaagggaagggaggaaagaagaggggaagaaaggaaggaaagaaggagggaaggaaggaaggaaggaaagaaaaaaaggaaggaaggaaggaagggaaatgcagccacaaagtgatttgggcgggggggcaggaaaggtgggattgagcccaaggcttaagttacggttcagagggagagcagcgtggactacctgtaggtgctgagagtttgtgggcctggggcacggggctgtaggaatgtatatgtatgtaggagggaggagtgagaaagaggtttcaggagggtcctggggaaagtgtgatccagtggaaccgagctcgagctcggctgaaggaatccatgttgcatgatgtgcggtgagctctgcactctgttcctcccggccaggccctgggagtggcagtgaactcc

SEQ ID NO: 3986 - DNA, 4001 bp, Homo sapiens
tcttctagactcaatttagatctcatttcttccaggagaccttcctagaatcctcagctggacaaggggcccctctgcatcctggactgtcccttctcttggccccctgaccacatggtgatgaaataacctgtttgtaagttggaggtccctgagctccaagacctagatatgtttgtctttgcagcccccagctcctagcacatagtaggtgctcaacaaatactcatgggctgggcgtggtggctcacgcgtgtaatcccagcactttgggaggccgaggcaggcggatcacgaggtcaggagatcaagaccatcctggctaacacggtgaaaccctgtctctactaaaaatacaaaaaattagccgggcgagatggtgggcgcctgtagtcccagctacgcgggaggctgaggcaggagaatggcgtgaacccagggggtggagcctgcagtgagctgagatcacgccactgcactccagcctggatgaaagagtgagactccttctcaaaaaaaaaacaaaaaaaaaaaaaacaaatactcatgatgctgaaaggctgaactgtgggatggaaggaggaccctcccagggcactggaggggtttgggctcccactgtctgcaggtccatcttgcctttctttcttttttctttttttcttttctttttttttttttttttttgagacagagtctcactctgtcacccaggctggagtgcaatggtgcaattctggctcactgtcatctccgcctcctgggttcaagcgattctcgtgcctcagcctcccgagtagctgggactataggcgtgcgcgagcacacccagctaattatgtatttttagtagaaacggggtttcactatgttggtcaggctggtcttgaagtcctgacctcaagtgatccaccccacttggcctcccaaagtgctgggattccaagcatgaggctctgcacctggcccaccatgcctttcttatctgagccctgttgtacttgagttgcggctctgttgtaagtggggtgctgccacggctcctagttcccagtcgtgcagctctgagctggacaggaatgtggtggggcagtgggggtgaagtcccacccctcagacaaaggacatcctcctgcttcccaggctcatgatagaagagggaatggacacccgccaagaccctccagcccaaaggctctgccccagcagatgatgtcccgagaagacagcagccagtgtgtcctcagagcctggtctgcagctagctcccattcctagttctgctgaatgggcccacagtggctggggaggccaatggggcagctccgggtagaggggagatggggcagaggtgcatgctagggtggcccggcatggcccaggacctaaggccctgccacctccagccccttgcctctgcccttgcctctgtgtgtgcccattcaattgctggtggctgttgctcatatgctaggagccaggaggcaggacccggaggtcccaggagtgtcagaggaatggtgacacaaagaaaaaaacacttcagatgaagaacgcacgggcaaagagatgagctggtggggagggggctcggggagtgaggtcagggagaccaactagtcccggtctgcccagcactgtcctggttttaactctagaagttccagggcaattgggatggtgacacccaaagtgggatggggctagccacaggtaggagactgagagagccattgtctggggcagggcctgcaaaagtctctccctggaggcccagggcagacacactgggctcccagcacttctcacgctatccagagtgtcaagcctccccttcgagcccgtaccaaggtgctccaggaggccccaagttgcccgagaaaagcagaggaccccgtcccctcgcaccacctaaggtctccatgtgttcccaccaggttgccttacctgtcttggggaggcagctgccacctgggagatctcagggaattgtggcaagctggctgcagaagagcgacctttgtccccaccccccctcctctaggaactgccttcaccatataagggaagatagggccccagagaggtgagggggtggggaggcaggtgctgccaggtccctgggagcccagagccctccacagcctgacaatgagagctgatgtgccccacccttggcttttttttttttttgagcctcactctgtcattcaggctggagtgcagtggtatgaattcgactcactgcaacctccgcctcccaagttcaagtgattctcctgcctcagcttcccaagtaactgggactacagacatgtgccaccatgcctggctaatttttgtatatttagcagagacagggtttcaccatgttggccaggctggacttgaactcctgacctcaaatgatccacctgcctcgacctcccaaagtgctgggattacaggtgtgaggcccggcgcccagcccctcccttggcttctgagtgagcaagggatggggtgcttttctgcccagggcccaggccctcaccacaggcagacagcactgtccaggtagggtcagcggcgcctgaacctttcctcctaccaaccaagagaaggaggctcagctgtcctcccacctgccctggggtgaatggttcatggagaaagagaggcaggactctagggttgcagaagccccaaacccaggaatgcagggacttatactcagggcccctccagaacagatgggaggtctcttagaggtctcctagaggtctcttctcagcatgaccctcacttagcaagggccccagtgagcacaactgctcctcctctccacccttaggggcactggctccacctggagtgttttttttgttttcgttttttttgctgagatggagtctgtctctgtcgcccaggctggagtgcagtggcgtgatctcatctcactgcatcctccgcctcctgggttcaagtgattctcctgcctcagcctcccgagtagctgggattacagccgcacaccaccacgcccagctaatttttgtatttttagtagagacggggtttcaccatgtcggccaggctggtcttgaactcttgacctcgtgatccgcccacctcggcctcccaaagtgctgggattacaggcgtgagccactgcacccggcccacctggagtttttatgagatgccataaaccagtgcctttgaactctgttctgctaccctctcccagaagccaaggtttccatgtctgacccctgaccctaggggatccatctcactcaggcaggaaagttgtgcagccaactccagcgtggatctcgctgagaaaccagcttcacacgcaaactcagcaccttgggcagctgcctcccagactgcagaaattctcctatcacctgtgaagcctggtccttaggagggtgacgtgaagtgggctgggtgagggcagtacgtccttctcatcacagcctcccaagagttctggagaccaaatgtacagtagtcccccccttatccaacgggggatacattccaggacccgcagtggatgccttaaaacctcggatcgtaccgaacctggctgccatcagctggagcatgtttctgttcgtgtcttccacccacaaattgaagccccttctattttcattagcacttatcctgcactgtggctgcattttgcagtttgaggtacaccagcaaaattaacacaaatttctgtttccttcttcacaatttcatgaacagaagatgcattcttatcatagatcttagcaacctcagtatatgatgttttttgttctttccttattgagaactattaccttttcatttaaaggaaacattttatggcttctttttggcacttccaaattgccagcatcgctactcttgcattatttagtaaaataagtgttactttgggtggggggttgtctttatttttgttttttggagatgaagtctcgctctgtcaccgaggctggagtgcaatggcatga

SEQ ID NO: 3987 - DNA, 4001 bp, Homo sapiens
attacaggtgtgagccactgcgccaggccaagattacattgctatagaagttttgacatttcaaaactcctttggagctgagaaccactattgacccttgtggccgccctgggagggagggtgtacaggcattgctatttctgttttccaaagagagaaacaaaagtcaagaaatgttatatatgttttccaaggtaataggtagtggcagagctgttactataatttaggactcctggcttggcgcatgcattgaaccatactgctttcctgtattcaatgtgtcttataggaatcatagctgagaaccattctcaaacctcatgtattttctctgaaagaaactattcttcatgtgatcagtaacttggtggaaaagacagatcttcttaacaatattcatgaattaaacagttttaggatagatattaagcatttccaatcttcctaaggtatttttattttttttagtggtgaggcataagatatatttaaatgaagcttagtctgggaaaccagcatattgcaataaaaaaatgcaagtctttgcaatcttgtaattctttgtctaaagctttttgtacaaaagagggtattttaattcaataaataaaagatgggcacttccagctctcctaccagcactagctaccacttgcagctaacacacatagagagaaaatacacaaacaaacagtgtttgatcctgctttgctgcagggtgttttcatctttcaagagaccaagggaaaaacaacctcagaactttaccaccaaaacttccaaatttattgcaacacaacgtaacggcaaaatactattttcttagcacacgcaattttgagcaaccaccacggccaagaatgcttgtttttatttttacaataagtccaaagaaaatttttaattccactcttgatttaggaatggcaaagatgctgtgggttgtttggagaaaactgtcatgtctaattattcagtcttatcctctctctttaacctgtgcttgaggcgtttatttcatgtttatactagttggacacaaatcatacttaaaagagatttcatatcctgtcttcctgtgaaaagctgagctacgatggcagacttaacaatgccagccccttgttgggcttatcagtaacagaagcattcagcctaagaaaacactttaagtgtaaacaagacacagaatcgcacatctagccacattccactgaaatctgtctgaatagagagaagtagagatccacacgaaatagtttctcttttaagttagcaccaatgtgcccatttctcatactgccattcacaatctttataagcaatttgctatattgctattacattccacatattccaagcaaagtttttaaaaaagcaagataatagagacttaaattactttaaaattctacacaaatgtcatacttttcaacttatttgtaaccataattaaattggtttaaaggaacagtaaaaatcttgttataatattaatatcaatgcagtttatttataattgataaatatatatgtatattactagttgtttacaaggatgccaagtaccatccactttcatctcaactctcttgaaactgaaatttgcttactcggtcaagctttgtattgtagtttcttaaagacaaatacgtttcaatgataatgaatggaaagtaactatatacacagcttagaaattcatcagacataccttgtttgaagaaggcaatttttttttcaaaaaattttcaccacacagaatgaatattctttttcccttaggctttcctgcatcacaaatcccatccaaattattctaaggaagaaacagggagaggtccaagaaccttttctcttcttctcagaggagctaatcgaacagtcccatcaacctctcagtactttgaaaaacacattttacacccccccccacacacatacacacacacacatgctcacacatactgcttctcacactggttttagtgctgaattaggcggtcctctttcaaatttccactcccactgcttttttttttttttttttttgtaaggatttctaaatattcttttgtagcccaaagcacaaactttcagtaagcaaattctacaatttgacattctaaaaagtagaggaggaccacttagataaaaatggaaagtaaaagatatgttttaaaaattacttcagcaggggcaattcaattttttctttctttttcaaaagctagtgaacagctggactgaactgcacaaagaaggaaaactgtgcaaacactctcaaacttattctactggactcccacttttgaattgaaaatatgtactttttcctacatattaatgctatttttttgttttgttttgcttcagtcctttctgcgttttggcaagttttatgaaatgactcaattatatgctggtagttacaggacacaagataatcatagtgggaagcaaaacctgactcatgtttcaaaaaaaatactgatgaataatctcacatgaaatctgccagttttagttatttatatattagtgtcatcaatgaaatctaagagattcagattcaaaatgtgtattaacgtatcacatcattaaaaaaaaatcagaccaaaaaaaagtacatctggcagatcttgagattccagtgtccatcagtgtggcagagcatctgttttcaagcacaggagaaggtagcaaagagtcattcctcctcctgctggggagtgtgcactcacgcagctagggaggagaaccttcttccattcgagaagcctcctgtcctcatctgttggccctggaactgctccttatttaagataattgtttgacagatcttgtgctctaatgccaagttatacatgggatgattgctggcacgtcttcattggctatataaaatgtggccgagaagataggctctcacggtaagaagtctgtgttgattaggagtaactttggcccagctctctggtctaaagctctcaaatgtgactatgtgaatctgggtgggattcatctgctcaatgccattgtgcagagatgcataagctttttaatgctataaaacatggtagctgaaattaaatgccactttttcagaggtgaattaatgaagagcctgatgaaattcaaagctttttgatgtataaaacttgataaatggaatgattccatcaataggcgaagtgtagcaagctatctagatggatagtatgtaatttctgcacaggtcactgttaaataaatacatcactgtacactgatcaggaatcttcctccattaaaggaacatgaagactaaaaaaagggagataatgatttgaatgttatttaatcatttttacccttacttcttttggttctgcaatgaaattatttctcaatcctctttattcctccactaaattctgagcccaggttctttggtggtaaggatgataatgctgtaacactgaggatcccctgtcctaccacttgaattagggcaggttcagaatggcagcctaagcataattcataatcacattattcctaatactactactactaatgctgctggactcggtggctcaagcctgtaatcccagcactttgggaggccgaggcaggcagatcacctaaggtcaggagttcaagaccagcctggccaacatggtgaaaccccatctctaccaaaaatacaaaaattagccaggcgtgtgatggcgggtgcctgtaatcccagctactcgggaggctgaggcaggagaatcacttgaacctgggaggtggaggttgcagtgagccgagatcgcaccactgcactccagcctggttgacagagcaagacttggtctcaaaaaataataataataataataataatgctagttgctgtttatcaaatacttacttttactaaggacagcaaccctgtacatatatcattacatttaatatttagaagaatgtagaaggattagtagtataatctccattctatagataag

SEQ ID NO: 3988 - DNA, 4001 bp, Homo sapiens
cctctaatcccagcactctgggaggccgaggccggtggatcacaaggtcaggagttcaagaccagcctggctaatatggtgaaacccccgtctctactaaaaatacaaaaatcagccaggcgtgggggcgcctgtagtcccagctactcaggagactgaggcagaagaatcacttgaagccggtaggcggaggttgcggtgagccaagatagcgccactgcactccagcctgggcaacagagcaagaccccgtctcaaaaaaaaaaaaagaaaagaaacaaaaaaaaagagtgtgatgaagaaattctgcaaaatttgccgtttcatgggctatataggaattgactttaattctgacacaaaaaattatcttatccagaaatcaattttaactttccagaaaatataagcatatgcaaaagtaatcaccttttcctagtaaacttttagtattaaattctaatttcaaaaacacttcagaaagccaaatgctgtagtaacaatacttctacaagaacaaaatatacgaatatcaacaacaaaacagtctttacgatttggttgtgatgcattctttattttaaaaacccattaaaacatttttcatttatttaaaaaagtgatcctcagactgcctcttagattggtagtgtaataattcttaagttatcagaacataatttaaaaatagccaaattacaataaaatcgcaaacatctactgtcgtcccaaacaactatcaattacagctactggtaacctatcataagcaatgatgagcactacgaaccatcaacatccatttctaggaaatccgattctgactacactacaaatacagtcaaacaaatcccatcattccctctgttccatcatttaactgcttagaaatcatttaggctctgaaggtgctttttccaattagaactccccttcggatttataaaagtgaatgtacatcaaaatctgcagtttaggttatcgcagtaatatttctcggtatactacaagtaatttatcacggtattacttaaaggcgtttagtattaagaccgcccttgatttgacaaatcagaaatacagccaattaaaaacaaaaacagtccaaacaatttaattcttcgaaagagcctcaataaagaccaaaaaataaagctggttagaagaaaaaaatttttttttgaaacgcctgtcagtcaaaatgctaaaaataccatcttgaactcaacacatgaacagaccaaacggctaattataattggcaagccaaagttcccaagtcaacgacgggagagcagaaacggcagagagggcctgccctttctgtctatgcagagatggaaggaggcagaactgaagaaaattattgcacaaattatttcaagctacattgccaaaatgcaaaatactgagtaactctttgggttagccttccccggagagaaaaacaaacaaatgttttaacgattccagtagaatccaataggactaagggcctggctggaaaaagaaaaggaaagtttgggggcagcgtctaagggggtgatggaagttccagagctgggatcccggaaagataagagaggggcaagagcggcgtttgcggtcgctgacaggaggcagggaacacagctgccagccccgatcccggagggagagtgaaaaggaaaaaaaaaaaaaaaaaaggaagtggcggagaggagcatggaagcttcagtgccggtcagctgtgaccgaaactcggtccgtttggggctggggaggagagccgagggggtggggtctcggtccctctctccgctgtaggtcggggtgagagtgggctgagacgcgcggggggccgcggggcacacctacctgcgggtcccggggcagccgccctgagcgaggcctagtgcatcgccgccgcctccagccctccacgtcgcaccgaggctgctgctccacggccgccgccgcccggcgcccggccgggcccgagcccgggttcccgcccccgccccgcgcccgctggccagtcggcccggggagcacagggccgccctctcgagcccagcttcactcaggggtgagaggtggcagcggcggctccctcacgtctctcccgggtgtcctgtcagccagcagtttcccccgggtccgcagcgccgcctccgccgctgctgccaccgcctctcccacatccccggcctccaggggagccgccgccgccgcgccacgaccactgcctctagcgcttctgctcccgactccactgctttccctcaccccgccggcccagccggctcggcccggtcgggtgcggggagacagcgccggaggccgccgcagcccccagcccacaatccaccgcgcggctccgccggggcgggagggccgcggcccgggccggggggagcgcccgccgcctggggaaagcggccttggcgcaggccggcgtgcccgtcgcaggcgcagccagagttctctcggggcggggaatacaccgcgtggctcccctgcgcctcctctaatagtcctacacgcagacaaatccacgctgaattccactttccccaccacccttccccccaactcccagttttcaggaacacccagaaaacctcctgccgccttccccgggactgggacgcgacccctccagcgtagccctcgccacccccaagaccaaccgactcgaaacatccctaaatcacccgggacctattaaagcaaatacttccacgagattcctcctctcccccaccccctcgaagtaaatgcttttcagctgttccctagtaaatgcccttccaaaggttaaaggtcacccctccgcaacaacccagttctctctattgaggccttttccccatccagtcctcccctccaagtcttccccaagttccaggccttcctcccagacactgtaatcagttattcctgttacttgactgagatacttggagtgtgtatgataattaataccttctaattctgacttcagcctggtttcacaggacttgcaactttaaaccaataaaacacagtccacaagaaagggaaggtcttagtatataaatataaagacacacacacacacacacacacacatatattttaggaagaaaaagatcctcaatcctttgagtgcttgtgacttaattttgggaagattttattcaatgttgaaattcttgcctaaaaataaatttcaagcatttataagacatagtatgttttaacaaatcaaaagtgaaaatgtaactcttatagttggggggttgaaaaaaatgttgatccaagtttcacttctaagaagtcactttgaaaactgcaaacataacttttatgaaataatattttccccaccaaagagctaaagttggggaaagaggacaaaaagtaaggaagcatcaaaaatagttgagagaaaactcttacattatatttttctaagttcaatcctctaaaattatgtaagaaacaaagtgagaaaatcattccccaatatgaaataaatttaactgtaaaagagtgaagtcctcttaaatccctgatcacttataaaaccagatgagtttacatagaagcagagtagaatggtggttaccaaagactggggggtaaagggtgatgaggaaaggggaaatgtgagtcaaagggtataaagtttcaggtaggaggaataaattttagtgatctattgcacagcacgatgaccacagttaataacaatgtatttaatattccagaatagctaaaagagtactttctttgttttgttttgttgagactgtgtctggctctgttgcccaggccagagtgcagtggcatgatcttggctcactgcaacctctgcctcccaggttgaagcaattctcctgcctcagcctcccgagccgctgggactacaggcgcgcaccaccacgcccagctaatttttgtatttttagtagagacggggtttcaccatatttgccaggctggtctccaaactcttgacctcgtgatccacctgc

SEQ ID NO: 3989 - DNA, 4001 bp, Homo sapiens
acaatactgagatctaagaggtatagatattttaaaaaaacagaagcaaactaaccaaatttcatccaaaattcatttcggggttctatagcacatattaacagtgcaggacacaccttaagaaacacgaaattaacaatttccaatgaagaaagaaaataaatttcatgtacatggaaatattgctgtcactgagaatgtaaaatgttaaaagtgagaaggtcttcagtcactagaaaagaacacaggattggattgggaagacacagacaatggcaatggacatctcaccaccgtgatactaggtactcagtaaacatttgttaaatgagccagggattttcacggatatgtaacttagcagaatactaggccatcagttctcgggctgccaaaatattctcagcattttgtcttcttaccctctttctcagtttatcacagtgaaaacagtcctgccttagagattacaactgtgccaccaacaacaaaagcataatctccacagcacagccatgcaactttaatcaactaattataattgtacataggttagcaaatttctcaatgggaaattctgagttaaaagagaaaatttcttaggggaaaatacatatgccagcatacatgcctgaaaataatttaaatgtgaaggtaaccatgatcctctaagtatttaaaactattaagagtttctgacatgaaagttaattaaaaacgtatatacgtaaatgtaaagttttcttaatataatcttcctagcttccataaaagaaagtatctgtttttcctttaacgggtttttcctccttcacttaactgcttttttacttagcagtattgtcccaggtagagtcgctgcgtgtatctttaacaatattcaccttcctcctgataggcacacaagggctgggaatttggatggtgaactatgcctagagcattgattgtatcataaagcaggaaaagtttttgtggaggtttcccttgaccagtacattatataggctggtgcctattacagatttactgatttaaaacttaaagtctccaaagtgtaaactactgattaaggaataaattctaaataattataaaaaagataaatacactttggggcaaggcagcggcctcagggcttgaggcggtaagggagactctacgaaatgtacatcctgggggcgagtcccgagttcatctgccaagggaaacgacagcctctcagggcccgtccctgtcaggggtgtcccttcggcttctgggtaccttcccagggctaagatgagtcctcaacacgagtttccgagcaaactggtacccaggggttaacatgtgcctgggctgacctccaaccccgccgcggcccctgaccctgcggaaggtaacgagaagcagcgcggcccagccgcctggtccgtccgcccttagcacgccggggacctacggccaaccccgcgccccaacttcccgccacaagttctctctgcaccggcaaaaagagaaactccacccacttttccgctaacacgtcggacccgcttttggcaaacgtgagtagaaggggacgccttgttctcactcccagcggggaaaaaagaaccaaacgcggaagcagcgactctgcccgggccggagctgaggcccgggggctgggacggcccggagtccccggcatctaactccgacggcagcccttttccgagcggggccgcggctccggcactgcaagcggaggtgccgcccgccacccaagaccccagagcaagagactgaccgggcctcaggatcccccgtcgccgggccgcgcgcaccgcctcctacctgccgctgcgacgaggcggagcccccgggcctacagtcccgcggggaggcgggcccagcactcgagcctgccctccctaggacctgcctaacttctctccagctgcgtcggcctcgcagtgcagcggcccgcggagcctcacacaggccgcagccggttcctttcagcggcctgtccacgccccggagacgcccaggggaaggagagggcgcggctacatggggaatgggagctgtgttactacctccaccctggcccgccagcgtctggacgaagaaccgccgccagaccagtttggtacgaaataagcacgacatgcatttgtgtaggagtgttagatctcctgtaccacaacctgagtactacgagcttccaaatggctagtccttaccgagctctcgccgagcaactaactattggtactagcgaagactccagttaggagggcctgtatgtaactcaccgcgtttaagttctcaaaggcatattggttcaggacctatttctgccattaatcgtaggataatttaacaccgtaattaacaaacttcaggtttttttgtctgtgaaatggaaataacccttgttgttagattataaggttattggttataagattatgacaataaggtgaggactttattaagcagttttctaatacataaagactcatagtggccaggtgcggtggctcacgcctgtactcccagcacgttgggaggccgaggcgggtggatcatctgaggtcaggagtttgagaccagcctggccaacatggtgaaaccctatctctactaaaaatacaaaaaattagccaggcgtggtggcggacgcctgtaatcccagctactcggcaggctgaggtaggagaagcgcttgaacccaggaagcagagattgcagtgagcagagagcgcgccactgcaccccagcctgggcagcaagagggaaactcagtctcgaaggaaagaaaaaaaagactcatagtaagcttatattttagactaaaccaaacaaatgcttagacaaagattattaatacgtcagcattctacatagtaaccaccaataattggttgggatacaaatactgaaaggaaaattagagccctttaatgactttgatagaataaggaattggggctccctacatctttcagactgtcaccaaaatgaaagatggcatgagaagacgtttctaaaaacaaacaaaaaagtatttttaaagaaacagtccatagaataattgtgcccttagtcattcactggtccaacagtgtcctttcttattttcttaagatatttatataacagatgcataattacagatatttatgtaacagatgcataataatcctaatatccatattgggtactctttcctcctttccaaatttgtttagctttccaccacttccccggctcccttttgagaagaaacaactccagtagcaaccacagcagattacttgtaggtggttcctctccctacaggcatgtatccagtgttagtaaatcctgttggctcaaccttcaaaatacatccagcatctatcacttagcacccttacctgcattctggcccaaaccatattttttctctaggtaattgtattaccctcctaaatgttttataccctcttatccctttagtctgttcacagcaagcagccacatgatccttaacgcttaaataattactgagcttaaaacaattcagtgttattccaatttactcacaattagccagtcttcgctatgactttaaacagcatttctcaacctgggcactattgacagtcagcctggataattctttgttgggggtttgggagaaggaggaggattgagagataggctgtcctgtgcattgtaggatatttagcagtatccctggtctcctcagcactccctcccacacaagttaacaaccaaaatatcccccaacatgacgaaattttgccaaaattgccagtcgttgaaaagaacactgatctacctattatgcactcccactccccaatgtcctattactctcttcaaccacagtggcctgctgttctcaagaacttttcgcatttactgccacctggaccactctccaacctggtatccgtatagactgctccatcacttccttcaggtctttatttaaaagtcagttcagtgagacctttcct

SEQ ID NO: 3990 - DNA, 4001 bp, Homo sapiens
taggattctaaagttaattcagtttggaaaagcccacacattatattcaaattagaaattcacatacattacaatactgagatctaagaggtatagatattttaaaaaaacagaagcaaactaaccaaatttcatccaaaattcatttcggggttctatagcacatattaacagtgcaggacacaccttaagaaacacgaaattaacaatttccaatgaagaaagaaaataaatttcatgtacatggaaatattgctgtcactgagaatgtaaaatgttaaaagtgagaaggtcttcagtcactagaaaagaacacaggattggattgggaagacacagacaatggcaatggacatctcaccaccgtgatactaggtactcagtaaacatttgttaaatgagccagggattttcacggatatgtaacttagcagaatactaggccatcagttctcgggctgccaaaatattctcagcattttgtcttcttaccctctttctcagtttatcacagtgaaaacagtcctgccttagagattacaactgtgccaccaacaacaaaagcataatctccacagcacagccatgcaactttaatcaactaattataattgtacataggttagcaaatttctcaatgggaaattctgagttaaaagagaaaatttcttaggggaaaatacatatgccagcatacatgcctgaaaataatttaaatgtgaaggtaaccatgatcctctaagtatttaaaactattaagagtttctgacatgaaagttaattaaaaacgtatatacgtaaatgtaaagttttcttaatataatcttcctagcttccataaaagaaagtatctgtttttcctttaacgggtttttcctccttcacttaactgcttttttacttagcagtattgtcccaggtagagtcgctgcgtgtatctttaacaatattcaccttcctcctgataggcacacaagggctgggaatttggatggtgaactatgcctagagcattgattgtatcataaagcaggaaaagtttttgtggaggtttcccttgaccagtacattatataggctggtgcctattacagatttactgatttaaaacttaaagtctccaaagtgtaaactactgattaaggaataaattctaaataattataaaaaagataaatacactttggggcaaggcagcggcctcagggcttgaggcggtaagggagactctacgaaatgtacatcctgggggcgagtcccgagttcatctgccaagggaaacgacagcctctcagggcccgtccctgtcaggggtgtcccttcggcttctgggtaccttcccagggctaagatgagtcctcaacacgagtttccgagcaaactggtacccaggggttaacatgtgcctgggctgacctccaaccccgccgcggcccctgaccctgcggaaggtaacgagaagcagcgcggcccagccgcctggtccgtccgcccttagcacgccggggacctacggccaaccccgcgccccaacttcccgccacaagttctctctgcaccggcaaaaagagaaactccacccacttttccgctaacacgtcggacccgcttttggcaaacgtgagtagaaggggacgccttgttctcactcccagcggggaaaaaagaaccaaacgcggaagcagcgactctgcccgggccggagctgaggcccgggggctgggacggcccggagtccccggcatctaactccgacggcagcccttttccgagcggggccgcggctccggcactgcaagcggaggtgccgcccgccacccaagaccccagagcaagagactgaccgggcctcaggatcccccgtcgccgggccgcgcgcaccgcctcctacctgccgctgcgacgaggcggagcccccgggcctacagtcccgcggggaggcgggcccagcactcgagcctgccctccctaggacctgcctaacttctctccagctgcgtcggcctcgcagtgcagcggcccgcggagcctcacacaggccgcagccggttcctttcagcggcctgtccacgccccggagacgcccaggggaaggagagggcgcggctacatggggaatgggagctgtgttactacctccaccctggcccgccagcgtctggacgaagaaccgccgccagaccagtttggtacgaaataagcacgacatgcatttgtgtaggagtgttagatctcctgtaccacaacctgagtactacgagcttccaaatggctagtccttaccgagctctcgccgagcaactaactattggtactagcgaagactccagttaggagggcctgtatgtaactcaccgcgtttaagttctcaaaggcatattggttcaggacctatttctgccattaatcgtaggataatttaacaccgtaattaacaaacttcaggtttttttgtctgtgaaatggaaataacccttgttgttagattataaggttattggttataagattatgacaataaggtgaggactttattaagcagttttctaatacataaagactcatagtggccaggtgcggtggctcacgcctgtactcccagcacgttgggaggccgaggcgggtggatcatctgaggtcaggagtttgagaccagcctggccaacatggtgaaaccctatctctactaaaaatacaaaaaattagccaggcgtggtggcggacgcctgtaatcccagctactcggcaggctgaggtaggagaagcgcttgaacccaggaagcagagattgcagtgagcagagagcgcgccactgcaccccagcctgggcagcaagagggaaactcagtctcgaaggaaagaaaaaaaagactcatagtaagcttatattttagactaaaccaaacaaatgcttagacaaagattattaatacgtcagcattctacatagtaaccaccaataattggttgggatacaaatactgaaaggaaaattagagccctttaatgactttgatagaataaggaattggggctccctacatctttcagactgtcaccaaaatgaaagatggcatgagaagacgtttctaaaaacaaacaaaaaagtatttttaaagaaacagtccatagaataattgtgcccttagtcattcactggtccaacagtgtcctttcttattttcttaagatatttatataacagatgcataattacagatatttatgtaacagatgcataataatcctaatatccatattgggtactctttcctcctttccaaatttgtttagctttccaccacttccccggctcccttttgagaagaaacaactccagtagcaaccacagcagattacttgtaggtggttcctctccctacaggcatgtatccagtgttagtaaatcctgttggctcaaccttcaaaatacatccagcatctatcacttagcacccttacctgcattctggcccaaaccatattttttctctaggtaattgtattaccctcctaaatgttttataccctcttatccctttagtctgttcacagcaagcagccacatgatccttaacgcttaaataattactgagcttaaaacaattcagtgttattccaatttactcacaattagccagtcttcgctatgactttaaacagcatttctcaacctgggcactattgacagtcagcctggataattctttgttgggggtttgggagaaggaggaggattgagagataggctgtcctgtgcattgtaggatatttagcagtatccctggtctcctcagcactccctcccacacaagttaacaaccaaaatatcccccaacatgacgaaattttgccaaaattgccagtcgttgaaaagaacactgatctacctattatgcactcccactccccaatgtcctattactctcttcaaccacagtggcctgctgttctcaagaacttttcgcatttactgccacctggaccactctccaacctgg

SEQ ID NO: 3991 - DNA, 4001 bp, Homo sapiens
aaatgaatttcttcttgacagcgagttttaccaaaggataattatttctcaaatatttcagtttggaattttaatctttgtttgtttttgcatcctgagctacctagtagtctgtggttttatccagtactatatcagtttatatgttttctccttttgagaactaaaaaaaaaacacacacacacacatacactcaggctgaatatttctcctggatctttttctttacaagtgtaaatcatcacttatgatagtgaaagagtgcagtacttaatctccatagtgatgctatgaccctgatgatcttcagtttactcttggtatttcagtttataataataggtgggtggtttatatttgtaactaataaaatgcttcctaaaatattggactggtgatagttttaaggtttatgatatttttactttatacaaagtcaaatgagttcagttatgttagaaggtaaactgaggcataataaaatgttagagagcttatttgagcactcacttgagaatcaggaagctccaaaccaaaagcagttcatgagctccactgagggaatgcaaaggggaggcttttacagaacagacacagaaataaagcaagcacaatatttgattggttatagttatacagttgccttatttggtatatcctattggaacgtccctaattatattaataattttctaaggttttggctacttttgattggttgagcttaagttttgttttctttctaatataggcatttacaagaaatcaccccaagttaagtttcacttctgtttgcaaacccagcaacccttaggtcactaatgaggtctactcgttttagctgctcagggattcttcaggcctggtcttcattttaatttaacaggtaacaaacttcaagatatggcctcattaaaaactactttgaaaaactattcttcaaatctggtcaaatatttggttcaattaactaaaaacctgtcacacacagtttagaaaacacttagtaattagtaaaatatggtagtgtggatgcctcaaaaaggtttattaagagccagtcatttaacttcagacattttggaggattggttatacattcagaaatgatggagctcaagttttttttttaatgttttcatccatctatatatgcatgcatacactcatcaaatacttcttcatcatgttttatgttaaaacactgcaagattcttagagagacacagacaaaattgtgactatccttaaaagatttatagataagtccagagcataagtagtcacagctgccaatttcagaattttgtcagatgtataattataatatatcatagaaaataatgggtggcaaaagctgtgcaaattgtaagaggcaaagcaacatctttaaatcatacgtgatgtgtggtcatcctaatgaaaactagaagaatcaacccaagataaaaccacatacgatgtacaactttgtgctctgctcctctaagttctttaactcctgactatgctttttggtttctgattttggattcttccttagatttgccttccagaagttccttgaaaatctcttgatcccctcttgtgaatccttttggccttcattctcatattctcataaacagtctagcagtcacccactgctagactgtttcttagagcctgtattgatgaaatgatcttctgtacttggattatcatgttctgactttgttagatcatctttggccctgactccctgtcacaccaggcatagcacagaaaaagaaatcgagacattcgccaggagatggagagattacatttacctgagtgtagcaaggaaggcttattggaagcagagagatttgacttggctcttgaaggatgagaagaatatggatagagtcagtgagaagcatcttgtaggatgaaggaaatagcatactttccccatgaggacaatcagagaagtaggattctggatggaagttgtgaactgaagcgtgtgaatagccagggttggagggagtttaggatgtttgaagtggttgtagttgctctgtttggaaatgctagttgtttatttgagctgagggagattatgacaaaaagctttttgaaaacaatgaatctggcagagcatagggtgagttggagttgagagatagaagactattgtgacagtcattggagatgttccaacataggctagtgacaactttgcaaatgttaagggagaatgaagcattaaacatggagtagatggaattttaaagtcccttccagccataagttacagaagtagagtagaatactaggctatgaagtcacattgtctaatttgcatgctggttccaccactactgactatcaccttgggtgaattacttagttctaaaagtcctcagctgggtgcagtggctcacgcctataatcccagcactttgggaggcagaggcgggaggatcacgaggtcaggagttcaagaccagcctggtcaacatagtgaaatcccgtctctactaaaaatacaaaaaaaaattagccgcacgtggtggtgggcacctgtagtcccagctacttgggaggctgaggcaggataatcgcttgaacctgggaggtggaggttgcagtgagccgagatcgcgccactgcactccagcctgggtgacacagcaagactctgtctcaaaaaaataaaaataataataaaaaaagtcctccatggcttttctcatctgtaaaacaggaaaacttttagaatttatttcatcatatttgtgtaagatttaaacagtgtacatatgtgaagcccttagcataagacatcacacagataagacctcaatacatgtttgcctgcactgtgcagtttatagacattgaggttttaaactgtgttaatacaaaggggagaaaatgggctaggtggaaaaaacagcgctgaggtaaaattcacaggatttgtaactcattaaatgcagatcaaagtgaggcagaggaccaggagaaattaacaaaaactcaacattgtaagtaagagtgcttaactatgacgattagattccttcttttcaaaattagaaagggaggccccacccccataatattttccttttctaattgacatagttaaaacatataacttaaatttatgaattcagaatacattttttcgtgaacagaattgtttataaattgcctgcttctattttggggaaaaaataaggcatttgactttttcccatctgagtaacaaatcttagacaaaagtgatcttccccacattcctatggacactgaacaagcattcagtacttagtgcaacagcatagactagtggtaggaaggaagattgtaatgaggacgcccagacactactttttatcttatccagggcacattttagttttaagctacacttagaacaaaattatctatagctgtagtaacagactatttgacaaaataaaactggtttaaggtaattttaagtacctcgtggcttgtttactaattactagaatctttgagaagtacttatttctttctcttttgactgctgtaaggaataatcacatattcaaatgttttttaaaaagtatttcctttccttcagttgaagacttcagctattttaaataaattatgtctcaagaatattagtttaatttgtatcatgggggctaatggtattaattttcctgcatcaattttttttatccagataggtgctatatatcaacacttacgtacactaggaacactatagaggcaaataaaattaattcagaatcagatcctgaatttagaattgtataatcaaacatgtatacaacttatagaatatggaaaaatatgctgtattaccaatatggaccaaagaataaatgctgtattaccaatatggacaaaataaataaatgctatattaccaatctaaagagccatggaagcagagaggatagagggattaaactcctttgagaaaaaaaaatccttgcaggattttgta

SEQ ID NO: 3992 - DNA, 4001 bp, Homo sapiens
tccatttaaataaattataaattcctttgaggggttccaaatggttggactgatcaaagggccaaagagccctatttgatggcccccacacccgatttgagggaaaatttatttcatttcatccccaaaattggatttgcttatttcgtggaaatccagcacgcactagccatgcttttttctcatctttctgcctcatgcccattctgccaacctgcttcagtgcagcattttctggggttattaaatacccaaggcttaatgagagtgcattcaaaagtaagttgttcaatgatgtaggatcaccccctactcccccccaccacacacacacaaacacacgtaggcagtttaaatgatagtgggggtaaaatgtgttttcacaagagtttcattttaaatttgtctcaacctgaaattcctttagaaattaaaataaatattaatatgtagaaataaaactccccagcttttcttgccttcaactggaaagtgatacacaaatagtatgtacttagtgttctccacaaccaccaacaattctattttattttagtttccaaaatacggacaggagggcaactctagaaaaatggattcccactctggcatctcacagggcactgatcaggcaatgcggagcactcatcatttccaccatgcagggagcatcagcctctcctcgctccttccacgtacacattcttgtacccctgagggtattcatcattctgatttccacccggggtttgaccttgcaaagacccttcttccagtttctgggcaaggaacaacccattttaactcaaaacacaaaacgaccttttatcctttaaagaaatactaccaaatgtaacacaccttgatttacattttttaaccccagattccggatggcgaacacggaatgcaaaggcaggtaactagtttgggtctgacagtccccattcagcgaccgagcctgtgactccgttcaaaatcgacagtgcagtagagcatctttcccttttctgcccattcaccattgtgacaaaaatcaaagacgaaaaaaattatctactcatttctgaatactgagagaaatgtgctcattttgcgcctgactccgtggatcttaaacactaacatcccgctcagagatcaaccatgatttccataccaatctcatccactcagttttacttagcaaacacctttgctgcccttccacagtgagaaaaatggtgcaccaatcccacggatgacaggttgctactcgactgtacccgctcaatagttttatcagcaaccggaaaacttcacaatcggtcaattagctacttaaatctgtctaagacaaactaagaaagcatctcagtttcacctgtcttaaatctagtctaagacaatcccccaaacacgccgcatataaacactcccccttcccccacccccaatattccaaaagatcccccatggactaagagcacattcagatcgccagcattaagcaaggaaattgtccccatgcatttagacgcatctatgcaaagcaaagtatgtgacaatagccaaagcatttctctgacagttggttgcactacacatgcagaaatgcaacgaagattgtattttccacttacagttacagcgctgcgcacggtcacttaacgaaaatgataaaactcaacagttctttttaaaaatatatatttaattcgggtaaacgcttaagccgtctctgtgtgtggttctctctcgctctctttttctctggagctctgggctgcttaaatccctcttggatcgcgccttgcaagcccagccgctgccgcaacacgctcgggtaaatctctgctgcagattgggaatcccatagaaaacctagggtccctggagctggatgcgcaggcgcgcgagcctccgcctctccaggcaccccctcccctttcctctcttccctccccccagctccgcagccccagctaggagaactcgggagcctgtgaccaaaagccgcctggcgatggcgcatgctcagtcggaggggctcggagtttccgcgggtggattccacgtctccagattttagcaaaagctcaaaaggaaagtatataggaaaagggagtccggctaccggagcaacccgcacctggacgggcgcgagggactgcgggttacccggactcgccacgcccagtggttaccgaacctgggggctgaaggccgaggccagagatggaacacgtggagccgcttttcccgctgctttctgtcctagccgacccccggcccaccctttgttaggctgtaaggtgaaggagaaaactgcagaaatctccgaaagaagacttcccagcaagctgtgagcacgtctacctggcttactgaaggaacggttatggtggtcattttgtcatgggccatttcatcagagggtcttctgctaggagtactgggagccgggtcctgcagcacccagtgccccggacagtctcggtccagaacggcgttgaaaaaatgtgtgttaaagggagctgggatccgaggcttcttgccctgtgtaccctgagccaagcgccttctgtatgcacttaagtgtttttaacatatgctttgcgtctggggtgggagggggtgggtgaaagggcgggaatgaaccattttgcgaacccacgtttaagggctctgattaggccatcttataaagccccctttgtgtccttgaacaactaacaggtttgccagccctccccccggctccccattggcctgccaaagcctagaaggcttggcaaggagtagtgcccaataaatgtttggtcggtcgcttccctaccagaaaagcaaggagaattcccagatgttcccaaccagaccagttttcctcaagtgtgtatgttgtacatgaactcattcaacaattattcatggaagcatttgcaaaactattagacattcctttatgctttgggaataagtgcggttaacaaaaccccctcctgggctttacattcaggtgggagttttattttcaagggagggaagttctgggggcgagatgaagatcgaggttctccttaagcagagcgctgtacaatttgcacagcgtcttcacacaccttatcatgttcaggaaaactgtagagttgacctacccttcggtgctggggacaccaagagcgtctcccgtggcaaatgagctctaaattgacaaatctccagctgctcctggttccaagtcgaggagtccagctttgaacaaacttgagactacttaagtgggcaccaggagaaactccgccagacaagtctgtggctgtcgacatgctaagtgagggcctcaggcagtgatgcctaagcctcattcgctgccaacctagccagcccagaacccaggaactggcttcccgggcaggacgcctcgggaaggttgcgcaaagggggagcgcgctctcgggactcccgggacaccgcccgcggctgtcccctctcggcagggctcttccgccagtgctggtgaccgcggaaacccggagcgcggagtcgcgcggaccacggcgcgcggccccggcgggctgcggcagccgagcacgtttagaatctggcgggcgccagcccttcgctctggagccgcagtgcgcactgcgctgcggggctcccgggcgcgccgggctgctcctgtttcctgggactggcagggggagtcagtcctgaataagtcactttttctttttagctagaaaaacgactttcaaaaggctttcaaaatctcgtctttggtcgatttcccctactacagcattttacgctgagttctagtttctctctcgagaacagcctccgcactgtaatctgcatcaacccaaagggtcatgatgccatttctccacttcaacgagatatacctatttattgcaccctggaggtctctttcgtggcggtgttcgattttagataacttacttgcaacttgtgtttaggaaaaaatgtacactgatactttaaaccatgctctgttg

SEQ ID NO: 3993 - DNA, 4001 bp, Homo sapiens
agtgttaataaggctaatatcaggaaacagctcttttaaaaaagggatatattggccgggcacggtggctcactcctgtaatgcccccttaaagtgccaaagtgctctcttggcactttgggaggccaaggcgggcggatcacctgaggtcaggagcttgagaccagcctggccaacatggtgaaacctcgtctctactaaaaatacaaaaattagccgggcatggtaacacacacgtgtaatcccagctactagggaggctgaggcaggagaattgcttgaacccagggggcagaggttgcagtaagccaagattgcaccactgcactccagcctgggggacagagcgagaccctgtctcaaaaaaaaataaagggggatatattattttctgataaaactatgctatttatttatttatttactattattcagagtttcctcagctgaggttattataaattggggaaccaagtaacccagaagtcggaaacaacaacataccggagttgagcattgccctaagttttagaggccatcccaagaaccatacatagagtttggataggaaagtatttccttagaagaaggaggaagtgtaaaaggaaaaacaaggaagtgaaagtctgagctgaaaatgtgggcaggcaaagctttggggaaaatagaaaggttaagctggcaactgtacaagggccccgtctactggaagcagatgctcctgggctgccctgggcgacagtcttgtgaagtcagcatgccctcagagaaaaggtcctatgtgctcggaggttcagggacagtgcagggttgagagtccattaatccagtttagacattcaataagcttctagctactttattatcaacaccccaaacttcctatacccctgttagtttctgaaaaagaagtctgggctaggtggatatatatcttgtgatttaggtgaatttgtgaacgatgatttttccaggaagaaaggaaactgggacgaagcttcatgatggatcctgatgcaactcttccccagaaacccttaaacctcctcccattttttctgcccttaagggacaaggcttggctgtgatcattggctcaaataatgtggacagagacaaggatattgaaacggactgtcccaccgttgagaaaatagtcaagaaggcaatatctgagaataattggagtgctttaggaggaaggtcattgctgagaagaaacagagcttccaagaaaatgaaaggaaaagctctaccaaatggaaactaaatctacttattaagtcttatttccatataaggagggtgaaagaaactgatatgattgtgaaaccatgtaagtgttgctttggcttttagactatacatatttatccttatgttcaggaaatgtgtttcttctggttcccatgttccctccaaagcccaggtggacttcatcaccttgaactgctggcctatggcatagacagaaactaggaaaaccgcttttccaccagagcggctgggcgtgggctcgggtgaggtgtgatggaaagagctctagagtaggaggggtcggtaccttgaccctcggcttgccctgggtagcggacgattaagtgggccagggcaagtcaccgagctttcctggtactgtttccgcatctgtaaagtgggcgtgtagtccacctcagaaatggcatttttccaagacctccctaggccgcttgttggaaggctcggcacctcggcggctctcgtgcggcaggcatcgctcccacacttactaggcaatatgtcgggtggaagacgtggcggctcccgctcagcagccaccctcccatcctcccgggcccgcctgacccgagagggcgggcgaggtaagcatcccgctggtggataaggcagcgattccggcgggcgaaggctgcgcgccgggggcgaaggattccagctgttctaggtctctgtgacccgcgcctctggttccgagcgcggtctgttgacgacggcgtctccgcggttgcctggacacggccaatcacagcgcggctcctggagccggccccgcccacagaccgcgccctcactggggcgatggctgcggaccgtggccaagagggcggggcgccgaggccgtcaccgagccaggtgcggaaagccggcgtccggaaccacccgggccgggacgacctccaccccagacccccaaacagaggccacgctagagggacagggcgagtggcgttgccccttgcgcctactgtcaatgggaaaattaacaacagcggagaatatgaatgaaagaatgaatgaattaacaaacaaatacactgatgagctggggtagaaatatagggtgcgagcagacaggggaggaaggcgccagaggccgaggagaggcgaggagactgcgggaaacgctacaaacgaacttcttttcatacttttcagcagagcattgacccctgtgtagttttaattttcacctcaccactgtcaggcgatgctctcttccttgcacagttcagagaaagacgctttaaaagaggtggggcagttcgttgtagctcagccactggacgtgggcggagctgagacagacagaagggacagggagctgcaattttgcaattgtggaggcaggggctgcagttgccaagaatattcttacctgtttgacatgaatatttctataggcattattttctccattcagctttgtttttaacctttgtttcagtgttaccttatcaattaagcaaaaggctctaaatattttcctatttttccagtcaccaggaaataaaattgtgcttatgaaaagtatctttaaagtcttaataaaagaccccacagtaagtattgtttttagggtattgggatagtaaacgattttagattttaaaattatagaactgaccagatcatttgcaggtttttcaaagaactaataaaacatagttaatgttagaactgagtaattctgtccccccaaaaaaagtctgcttcatccacaggaatttatttctcctgcattcttttaatgcctctatcatttaaaaagtactgaaagatttcattccatatcacaaatcattcctggcagttattagtttatatatatttggccctgcaaatgaaacctgccatccacaccaccaaaaaacaagcaaaagcttgatagtactgaagactgttcagaagggagtaaaacaccagcctcgcccatgtttgccaatgacccattaatccttgctgtccacaccctgccacactaatattcttgggtcacgggggtgagacagagcacacagcaacacatagccaaatgccctgcctcacatggtcacgccaggcactcttgttcccaccttcaccccatgcctgctcctttccctaggacacttgccacatacgtgcaagtcaccaagatgatctgtccctatctttcgtgtttatgtgtctataagcatacattctgttgaaaatgtgaaacattacttacttaaattgtagaatgataagtgagtagaagtttaaggttattttgaagcattaaatagttggtatggacttcagtttagctagttacagaatggtttgcctcatttttattgagttatttgaaataagaaaacctttagcacagtggtgatacactactatactgaacttttgacaaatttgttttgagtttacatttttacagataatttgtatctttccttaaacctcagtaagcgacattgatcaaatcactgccatctttgatgtcaaacttctggactttaccattaagggctcaaattatactttcagacttttgctcattgcctccaacacaaacccccatcccagagagacccacctggtccctgcctctgagcacagatgactttactcaggccacccagattaccacagtttgggaatcaccgtcccttcagggtcagctctagctcttctctctctccccaaagccctcccatggatgctgcggccctaataacttctct

SEQ ID NO: 3994 - DNA, 4001 bp, Homo sapiens
gactagtcagtgatggaacatatgttataattatctgtgtcaactcaagagattagtgagaaaaaaatctaattctaaaggaaagggaataaaccaacagttgaatataaattatatttaggaaggagctactataaaggatttcctacttatttatgcccataattaaagaacaacaatggcgtcaacatcagttacctgtttaagtgaatgtgagtctggatttttgaaataaagttgataacaaaaacaacataactattccatagtgattaagagaaagaaaatttgaaataataaataatacaagagaattccatgtgcttaaaagagtttgttaaaaacaaatttatttgtattattgtccacattattttacataggaaggaagctcctagtgggcaggaaagatctatctataaatttacttcacagtaacttgaatctagtatatatgtaatattatttaaattaaaatttgcaatataatataaatacaatttatgagatcttgaaaacataactcttgaaatgtcaaaaatatttacatgtacaaaatctgcacaaagatgccagcataaaattctttatggaagttgcttaaaactgtaattaagtgttaaccattcatagaaaatatgccttattaattttgtgacactgactcttgtaaactccacttagtattggtgcttgatgtgaagtgttgggagtgggctcttatttaaatatttagaataactaaatcacacagaggctctggggagactgtgactttagggagtaataaataagaaaaagtattgtcaaatagctcatttttttatttaaatgctattggcttcatgccaataacactaagatggtatacaggacattttcaggtcagttataaatgttatacattggtttattttcagattatattaagagcaatgataaaccatctcttttcagtctaacatatacagacgataacaagataaagatgacattaggaaacttcataaactattatatttgcattttaaggtagatatacaagttctagtaatagtaaaatggaaggtagtatgccctctttctggagaaagctgatatcagaattactctgatatcctctgatattagaattccctttgggtaggtaataaagccgatgatttcttataaaatatgtcaaaaataataagtcatgacagaacaagaaaatgcaaacctataattctacttgagaatctggaagctccctttgacaaagcatttttttctctcaaattactacagagataacaaacataacagaagcttctgaaaaagcataaatataatttactaattaaagcaagcatttatacatcacatatttagaaagtttatcttggaggaaaagaaagctactgtgcttccttataatattccagcaatatctgtcaatgcatgcaagataagccatataaaatacacatatgattctgcttcaaagggacataggcagaaaatgatctctttgtaagccacaggtaggcattaatgtgttaggttatggtaaatgtaaacttagaggtaaaaataggaatgtaatatctactttatataaacattaaatatgtttttattatatgaaatatatcttaaaatctgcatggtaaaaaacaagattttattttcaatataacaaagttcttaggctattttttttttaaaaaaaagccttcataattgagctgccctagtacaatttaagatactatttaagagaagaaacatgggataaatcaaatgtaatgtttatctgaagatttttaaaaagaaagcaaacactgctaaactgaggatcacttcccagcttaattttccccccctccccatattgctacagatgatttaaaatgactgcatctatttctttgagaaaacaaacataattcatgtcataagatacacttacctaatcactctggaggttaatggtggtggtaggggtcacagcccaaaatgaactaaaaggtcaggtatgttttaagaaagcagttcctctttaattacccaaagaatacattttttaggcatgaattaaaggcaatccattctctctacctcccatttcaaaacacagtaaagaagcagtctcccgcccttccagaaagaaacacagcagacacatataagaaatttgctttggacctgtcttcagaattcaaagcaagaagcaaagctggtcctgtagaaatccagaccccagtagcagaatcatgttgaacttatttttagcattttcttagatccttctatgaaatttcccggctgattacgcctcctccacacatgagttcacttacacagtgtttgctacggcagtagaggtgatttggctaggctctgaggatcacaaacagcaacagcatgctgtagcttaaagcccactccgctggcaataccatcaccatcgtccacagtgtgttgcttgaatcccctcttacacaccggaaaatactaactgtggatgtgaaggaaaggagcaactttagctgggtttctgcatcagtaagagcagtttgcagattgctgatttggagctcattctgccggcagccgggaattcctcagcaccacggacagcgccaacaactggcttctgagcccagctctgtcgaaatcccagagctgctttagacgaggctagagtgctctccaagcagtcgcactttatacagcggatgcgcgcattaggaggggtaaagacattctacgtgcgagatatttatttgcattgaaattgcaattaattttttttgtataaaattgtatacctaacgcgttcttggatgggctgcagagatgaaagttccagaagaggcttgcatttagatttaagccatctgcagtccccaattattattaatagataaagcataatcattgtcaaacaatctgtgaaaacgtatgcttgtcgattctatttgaccctttggtggcagaaagacttccctggtgctgcatgattaaacttcaggtcttcctgcagcttggatctgattttttttttttttttttaaagtagccaggttttcctgcagtttgttctctaacattaaaaatcaatctcctgtaattcatctagtctgtcattaggcgtcattgtaaagctgtttctttcaaaacccctagcaaagatgccgtgtctctaaattcttatcaaaatgagagagaaaaaagaccctgacacaaatgggtgagcataaagttatttttttattagtaacagtatgagcactaaaatatatgtccaaagcatgttttaaagcagactgtaaatgttacctgctggcacatttaaccagttctttgctggtttgggactacaggaggcattttcaagccttaaagggaatgccctctgcagcgggatgtgctgacggtcaagaccacgttcgaactgtgccgtcagagcctccagaaaagagaatctccccgtcgtgagaaaacacaaccgtgtgtgcctcgttttcgtggcccatcaatttgtgaatctccccagatttaagatctagcaaatggataacaccattgccacttgcctgagctaaaactcgacctgagggagacagagaggagagagagagagaatgaatcaaagttttatttcaagtgttcacagtttataagcaatgaagcattctatttttttcaattatcattctgtgttaggggtcagttattaaatatgcagtagctcctgtaggtataagaaataagttgagtcaaaattaagacacatcaataattaggttataaaattttctaattgggacatagagcctaatggtctacctcctttatatgcagatttcatcaaacatcctactattcttttatatttgtgattaataaagcatttcgaggagatgagattgaaagcaactatgcaaggcaactttctttttcaaataaattatatgttagaaagttttaaaaggcatagctttcaaaatttatgg

SEQ ID NO: 3995 - DNA, 4001 bp, Homo sapiens
aaacaccttccacatttgttccttcaaagtgggcagggcagctggatgaggaggaacagcaggtttgttcactggaagcagtcaaggggcggcctggggccacagtataaggggggggtggtgtgcctgggcggtgaaccacatcctcgtaggctgggggcttgaaggtgctgaggaagcctgcaggggagaaaattggcatgattggttgaagacaaccaggtatagggtgctagtttttatattagggaaaaatactttgaaatgtgtggaaaagggaatgtgagacgatttggggttctggtttggggagggccactggtagctgacccagggcatcaagtcactcacgaaggtcaagcagtgaaccggtagggaaaggaccagccccatggcatgccccatgataggccaacaagttgatttcacgctgccgctgctgttgttgcagcctgagtttagctcgtcggtggcggaaggcgcaacagcagctaaagaggatgaggacagtccagagcagccagaaccctgcaagaggcaaggagggagcaactcaggcatctttcatgcagagaaggggccctgaaggccgaaattctgaggtccaagggagggtggacacagggacctggaaatagccctcttggagacttacaccagagctcatagtagtaggtgcagcagccagtctccccgcagcagtgaccactctcacagaggtagggctggttgttcactcctgggcacagctctcgaagctgcgggcaaggaggcacttagaactaagggggattccagcccagggcactgtccacccccacctcctgcatgcacatacacaatcccaccctgtgaaccaagttcagcttggagagatgggggaagtggaggatgctgagaggagtgttgaaatatctgaagggctgtcaacgtggaagaggatttggaatagcaagaatcagtctagagaacaagacaaaagtgtggacatacaaagagggagatttcagctctgcatatatgagacttccttcacactcaagcctcactctccccaacccccctacccccatcccctcggtgctttctgttaagggagtgttttggcagaagccagaagacagtctgagataatctcagtctcagacaacgggtagcggtaggtcatttccaaagcaagttgctttcattatcctgcgcggttcactaccccccacccgcaactggatctttccacccctgggcctcaggctccctaggatagaggaggggcagtgtgagacccagagcagtgctcccaaccagatgggattgctgtggatgataaaggatggcatccagggcgcgagtctgggttccagctcttctccaaattgctccctcaagagaagacgctgccggactctgttgtgacaataggcacatagaaaaagatcacaaataactgttgcaagacagagggagcctccctgggacctcactatgcctctggtcactggagagccaccgcaagcttccactgcagccatgggatgggttctatgaggctacaggcaaagtcagctgcatctacgttacaaagtttagacaaagagtggaagagacatgtttaggaacttcacagtacctttggctccgtgagttcctcccccacccccaaaaggaagggacaaggaaaggggaaagagacaaatggctgtcgtgataggttttggagctattgggatacctgctgttgcggcgcccgaagtgccccccaggcctcctcgctgccgttcccgctgctggcccgagccatacctccacctacagccccctgaggaccacagcctcctctaccgccagccgccccgcccctgccacctctgctgccaccgccatggtccctgcccggcccatcttcgctgaggccaccatcactccgcggccggagcttccatccgggcagaactccaccaactaggactcagattgctctgccctaccaatcatcatcgtcccttgacggacgggccaataggaacagatcagaggtttctccctgtgaccaatccacagcagcgcctccgccgctcacccagacaacaagagcttgtacagacaaagagtaggtgaaggttcgacccacggccctgactgacagcggcaatagccaatacagacaacagaacaggctctggcatatcaaccaacgaacagccgccccgaagagcaaggttgccgctgattggcttgcggtatgttttcggaatgacgccaaaggccgaagcacgccaggtaatcccggctggaagaggcggagtcccaaaagtcggtccgctggtttgcagcctggttttttgcggtggtttccaagccccaggcatcgacgcaagctccgacaggggcaaaatacgtgtataccggagactggtctgcccacaacatcccactcccccagttctgtacaagccgaagcaccggatgtaatttaatagggtggggaagatactcaagagcgggcatgggacggggcgcagagtccgggttaagggccttacgtagccaaaaggggggatccaggaccctcgggcccccccagccgcatctgcaggttgatgcggtagcactgaagactacagagtgcctggcctgtgcgggagcaagcgtagcggcgcggatggggacagccggggacagagcagcgcggcggcgggcctgagggggatggccgctgagacactgccgtgggggcggggacgccaggtgggaaggaaagggtggaaccctgtgctccgctgcagtagcgcaccatgggggccggagccgcagcccgccctccccgccgctcgccccgtgcgcccccccggcctccccgcccactggtcgccgcagtcttggtgaggcgctcgatagtctggttcttgtgctcttctgcccgccgcgccgcctggagccgccgcttccgcgcccgctcctcgcgcttcagcagcatctcctctgtgagggcgggaggtgggcagccctcagctacaggcagcggcagcataggggaaggttgactccgcgccttctggagcagagctcgctagggagagacagagacggggtgctgtctgaaaatggaggaagatggagaggcgaggtcggccagatcgggggaggggaaagaagggacatggaaggcagggtcttgagcagtgcaggccttcggaggcgggatattaattaatgagcaccctctccaggacaccttccataggttcctcttcataaatactgcctcctcccagatctcctgacatttagctttaggtccttatctctcaaggggagaagcatcagtaatgttacctgcctgacctgtgcaccaaaactgtaccagctttcccagaggtctgttgttatttttaatcttatctcaatagagagtatcaggtggataactgctcaagccaaaatcccaggcttagccttgatatattttctctccattcccctccccacaagtatctacttccaaaatatagccataattcatctgattttctccatctccaccactttcgtcttggttaaagcaaccactgcctctcagctgattacttcaacagcttcctagttgttctccatacttctatctcttgtctccacgaagattcattctctacaaagatgccaaagtaatctattgaaatgtaaaccaagtatgtcacttctctgcgtacagcccttcagtggcttgtccactttttcttctcctttgctagacatgttccagtctcaaggtctgtgcgcctgctggtctctgctcaaaagctcttctggtattgcaaatgttatctcttcaaagaagccttctctaactaccctaatgtctctcttccatcatttctatctgtttgtttacgccactttctatttcatcacccttttctttttgtcataaaccatatagctttttgaaattatttacttatttacttcccagccccccaacacacacactagaatactagctc

SEQ ID NO: 3996 - DNA, 4001 bp, Homo sapiens
cagctacaggtgaaccagcagggagaggccactgcctgctcacaatcagctcattatctaattgaggaaaaaggcacaagctcactcaaaagcaaaatccaaaggaccaacaggagttgggggcttcaggctttttcttcccattcaggatagggtcaatgtcacttcaaaaggtataattacaaaaggctagagaccacgccttcagctttaagagaatagcagtaccttccatcctccagaaagcttttggacttgtggactatccctatttaagacggctcattgcatcaaggaaacacagtttcattcaataaacatcagtcatttccttcaaattcccaccggaaagctactgacattgtaaacctttaggatttgaaagacgctaaagtttaaagtcgaatcataaatactgttccaatccaatcactcaggcccagagctggtgggagttctggattgcatttccggcttcaccagtatctctgtaacttagcagcaagctacacctccaccagcctcggcttcctcttaggagaaatgagaaaactggacccaatcagtgtttcccaaaagcatggtgggcgtccaatgcaagatgtcacagtgcaagagaggactctgtgtgcatgccaattaacatgttttagttattagtttactctgtctggtgagtaatgttagttttcctaataaataagatttccttttaaaataaatgcatccaaatatttttaaaaatgagtcactttcacaaaaacctatttagtaaataagagttcaggtgattctagcagccgtggcaaaaataactgatctagaggcctggcgtggcgtgaaatccctgagtacagggggaggaagagagcgaaggcggctggagttcctcgcaaagaagcaagccccgggcaccagggtccgcagtgaccagccgccggtcctccacgcttccagaggagacgatttggaactgacccgggagggccaagaaacaccttccgagtaccaggctaaaccccgccagggagagagaccgggacgaaggtcccaggctagtgcgacaccgcaggtcggggttccctggttggaggagcgcggtgggctgggaggggcgcgttggtgcgcactggaacaggggtccccggcttgagcagcgcggtgagacagagttcccgcgctggaggggcgcggtgagacagaggtcctgggctggagaggtgcgttggggcgcactggaaccggggtcccgggcttgagtggcgcggtgggacagagttcccgggctggaggggcgcagtgggacagaagatccgggctagaggggcgcggtgggacggagctcccgggatggacgggcgcagtgggacaagggtcccggactggaggggcgcgttggggagcattggaacaggggtcctgagcaggaggggcgaggtgggctgggaggggcgcggtagggcgcactggaacaggggtcctgggctggaaagacacgttggaacaagggtcccgggcttgggcggcgcggtgagacggagttcccgggctggaggggcgcggtgggacaggggatccgggctggaggggcgcggcgagaccggggtcccaggctggaaaggtgcaagtcgaggctggaggaccggcgggagggaaccgggaacccggcggagctaaggggcgcagagtgggggtggggccgtgctgccgggggagccccctcacgcaggaaggaccggggccgcggaccccaccgcccccacaccccgtcgtcgcggagttcgggccgccccggctgcgcccgggccctacctgtcctcgctggccgtgatcacgccgtcctccttggggatgagcagcgcggccgtgacggcgtcctggtgcccctcgatcttgctcagcagcaccgggcggctgctctgcggcctggagtggatttcggccgccatgttcgcgcggcgactgctgcggcctcctcggcaggcagcccatcagctgacgcctgggcgggcgggggacgcgccggtttcccttcggctgctggggcctcttgggcgccgcgccgccgtaagcccccgagtgctgccgccgcaccgcccgtattgcctggggatgccgcgcaagctgaaagtctgtggctgggagaggatgccacggggcgcctgcggagaaatggggaaagtaaggaaggtttaaaagtaaagccattcacccaggaataaattgagcacctggaggggacaaggaattgtcccccaaaccagagatttcagaaattacaatactacatttcatccatttgaagaagccattgtttgaaaggcacacactttcagaaatgttaaaatgtgaaaaaatatagtgcatcttagaatctttgaactacaatagatagcactgagtggtgaccatataccaggcattaactcagtgtctttgcatctcatttaatactgataattttaagagatgaaatagatgctcttgtattcccattttagagatgagaaaacaaccagagaagtttgatcactaccttaaggttgcacagctatgagagggagaaaagcagcccttgatctccaggagctgcctggtactatcagctgagctttggtgttgctaggaagtgtttgcttcctgtggaacataaacatcagacgaggccactccataatcacatctaaacacggccaaaatatgagcgatgtacaagccacagaaattaccaaacatccccctatcctggctaatatgagtgactcttatttctttattaattataatgttaaccgctatctagtcttcctccatttagataagatttattaagatatgcaaccttagaattatacgcatttcctgacaacatccagtccacaggagagcctctcttccttaagctctcccaggtcacctaacacaaacacaaatcctataataaaactgtccgaacatccctttacccagacacctcaccattcccaatggtgtgtcttctccctccaacaagcaatcaaccccatttgttcctggtggtttttggctagaggtcattgacaaccagtaagttcaagagccaaaatttggactcaggaagtcaatgactccaaacttctgccccactatattattctgacacctgaattgcagaattgcattagaaccgtactatccacatgactatagagcacttgaaatgtggcttgtccaaactgagatgtagtacaagtgcaaaatactacaagattttatagacttagcacaaaacaaaaaagatgtaatatagttcatcaataattgttacaatgattacatgttgaaatgatactattttggatatattgagttagatactattaaaattaatatgacctgcttatttttttaaggtagctaataaaaactttaaattatggatgtgaatcagatggtacttctatgtacagtgatttactagaactttctttttgtttttgttttgttttgttttagttttttgagacgaactcactccgtcacccaggctggagtgcagtggtgcgatctcggtttacggcaacctccgcctcccaggttaaagggattcacctgtctcagcttcccgagtagctgggattacaagcacctaccaccatgcctggctaattttgtatttttactagagacagggtttcaccatgttgaccaggctggtctcaaacttctgccctcaaatcatctgcccacctcagcctcccaaaatgctgggattacgggcaggagccaccattgtactaatactttctcatgatgaagttattaacaaacattcatgaatttatttattcctatattcaacagacatatatcgcacacttactatatgctgttgctgatgagattaataagacatggtttttgtgaggctgtacagtgtaatgactagacacgctactgaacaactttgtttaatcaaccaacatctcccaagtgcctgctgtgagccaggtgccattcta

SEQ ID NO: 3997 - DNA, 4001 bp, Homo sapiens
tcaggtagctactactcttcagttgagaagattttatcaagctatcacacctaagataaagaaactactcatccagaattttatatatacttactttaaatggtttgagttaatgcacactggtgcattttaaagaccgatcaattttagtaaataaacagtatttcaagtaaatctgaagttagccattctagaactaacatccctttaagaatgctaataccatttttgttttggctaaccaaatataataagtagcactaatttccagttttaaaaaatctatattaaggttttatagaagtttcacaaagctggcaaacgaaactagatggtagtttatcaccacaatgaaaaactcatttattttattccacattaaaaatctttttttaagaataaatgttcctactaaataaaactaaatcctcccatgctaccaccacctcattcataagtaataatcccaaagggcaaaaggttaggttaaatactactttgccaaaaacacacacacatttcaagctacagagctagcttctcaaactctttgctcttgctacagatgctctaggtatggcataagtgtgcatcttttttaaggaagctgtatatcagctctgttcccagtgaacagtgaactgtctcaaatccacatcatagaggttggatcaatcttgcaaacacaagtcactgttgaaaagaggccttgaactgaaacagcctggaaaatgtattactcatcctagcagagaatatgccttcccagcagttaaaatgtaatgtggcaaaactcaaattaaacacatcacttaaaataaaaattctgccttaatagatgtaaagctcctgatacaggaaggaaacaaattacctggaattagtgaagggtgagatactaacacatgaagatttctttttgcattttgtccagttatagctggagggggagggttcttccccctccttgtttattacacttttctattaacctttcaaagtgccttcatctttcttttcttgtgaagtggaaagtatcctaccctagaaagctatcctaccctagaaagatgatatggggtcttaggggaaaatgagaatggtatatatactaccactggcacgaaaaccattttcaaaagtgtaacttgcctctattatctgtctttgatgtctataaatactatataaattgctccaaacgtgccattgttagacaaccccccatagtgagagtataaaagaaaacttaggatggccactgtttacagttaattaagcttaatcctgtaatatttccagtttttctgaaatccagaaatgttgaagaataatgagcagaataccaacttatgtgatactctcatataccttaataattaataatatgactatataaatcaaaatctctaccttataatccaaggctgagagtttttccagtcttttgtttacatcagaagactccatcttcttggtaaactgaataaaacatagtttgttttgtgccaaaaatgataagatgataaaactgtctgtgagaagagctaaaaaacataattagatattaccaagttagaataaaataatgaatagatttttccactgatatgttacaaaaagctattttcaaacatacatattaactgaaatcactaaagtctcttgaatatcattatagcattttataaaaatattaaagatattaggaataaacaataattgtcaatctaatcatatgtgattttttttcctgtgactatttcaatatacactgatatttggggaccaccaatggatgagatgtatttagaaacagggctataaaggtatttttaaaaaactatttcgcacctgaatgtagagacgaaaacattccattttatttgtgctaagagtttaatcctatgtttacatgatagaaaccatccgaggataaagtggatttattaggggatactgatcagtgttctctaccagtctatttatttaaaaaattttcatcagtgaatcttcttttaggggtatacaagctggatgaaataaagcatattatgaccaatatgtacattacataaattaatatctaataatgaaaattagcacaatatttctacagctttgtcaccaaagcacacaagtaggtaaataactaatatttgtggattatataaagggctattaatgttacataaaattattgataaaaacatgttacaggaatttgagaaatgttttgcattgttcctagcataaagaaattattaaatgttttatacattttcctttactttcacacccctgaccatacaaacagtgaccaacagtggatctacacaattacaagagaatctggagaactgccaagaaatcacattgttaccatgttcccatgagagtgtattattttgggtacaaataaaagaaatacatgaaaaaggataactcagagacacgaattgtgctgaaagtttccttttaattctcattgaggagcatcaatataacaaaatcatcacagccagtattttatttgcagtaccaatgaaggggtcaattattagacatatgaaaatggaacctcttctacagggaagcttcctcagcaccttactcctgtaaggaagggaaaatggcatgcttacaatcctacccccagcttattactatcagtaatgttgctaattatggccatcctgcagagttcttttcttcaagatgatgtgattgtgtctgatttattcagaggtagctagtgagagaacacagcagacggaagatttctttattctcacctctgtcctttccactaggacatacttcctttgattactaaatttaagatactgaccattttcaatctttcatgataatacaatgtttctcaacctttttaccttgaataaaagaatataatctttaaaaattcaggagtcagaacagtatagtgaaaggaaaatgggcttcacagcccgaacctgtattcaaatcttagctcagtcactttctagctatatgactctggacatgttccttagtagctcagcttcgtttccttatgtgtaaaaatggaaataactataccttatacaattgttttcttgtattaaataggtaggttaggaacccagcatatagagccttttggttcaataaatgtcagtatccttcctattcaataactggcttaatatctttttcttatgtgctttgtaccaattacagactgattgagatgtcacttaataggacctgactgtccagtatattaggcattggtctttactatttagaaaatatagcccaaaatctctctaagactttaggaacaaagaatcttcctatgagagccaaagcatcaattgtgtactggtggttgtgttgatatatttgtgttatttattcaaaattcatttggaaataaaatatatatttgaagtgccagttatagagaaataattttgaaagaatgaaaacaaaaccctattttgaaaaaatgttcacttcttttaaggaaaaagtaaaaaacaactcagaatataagcttaacagttgacaagaaaaaaactttgatattaaatattagtcgaaacttgtattggtcccagggggtgtaagtacgctattacaagcaattacttgttgtgtttgcaagtccccagtggtaataattagtctacctgttgacacactatttctcctgccccactgttaatgtaggcaattgatttgcacatgggggtaattaccatcactgatggtgtctgagatgagcttccccaccaggcttctgtcaatcaccactttctccagctgcggcccagaaaggcttagagacaccagcacacctgaaccaaaaaggagctaaaaccaggtaagtgggggagagagggaggaagacatgctgtgatttagaatctttaaaaaacctctctccaaatatacaacttatacagatattttacacatgcatctacactacaaaattataaagattttct

SEQ ID NO: 3998 - DNA, 4001 bp, Homo sapiens
ctggatgggaatacgggggcttacatgtttgtggccttcttggagtatgggaatgtcctgtcctgctataggactgcagtgagaattctggttataaaaagtctcccttgtaaaattcactgtaaatcgaggacaaaaatcatgagattgttttgttatactttaagttctagggtacatgtgcacaacgtgcaagtttgttacatatgtacgtatacatgccatgttggtgtactgcacccattaactcgtcatttacattaggtaaaatcatgatatttttaaggacaacaacatggaaaaatctttctgttagcagctagtagaagaattcatttaggaggataatggaagaaatttttcgtaactgctcagagtaaaaagtaaaactcagagaacctaggtttgagaataatgcacacctactaattcaggactagacacataaatttgagagtttttgacattaaaagtagcatttgaagtgatgcaacttatgaattagctcactgagggatttagtatagacagagaatacaggcaccccaatgttaagagatcacaactaaaaaaaatttagaaactccgcagaactgagaaccagtaacaaaagaggaaaaccaggaaagtatgttgtctgagagccaaatgaataaagagatacaaggagagtcattcaggtatgatattaataaatgctaaaagtaaagcattacatttctttccaaaaatagcaaatcctccaaactgaaatagagaaaaattgaaagatattacttggcattcatttatcagtgacagagaaaaaacggaagttctaacaatgttatctaatagagatgttttattcattttcattacgtatatgctgtgtatgctactcccgagcatcatatcttccttttaacatccacaagaaacaagctttcaaaaagcacagcaattctcttggcagcattaattttaaagagaacctcttaagttgttttaccagctgagactgactgactaaacaaccagtgtctccccttcagtcgccagtctttccttagaaatgcctgtttggcataactttaagactcaagatggtttaaggcgcatcctgtttcttccaaaagggaatggacaaaactcaacattcacggagggcttagagcaaattagaaccgtatactgtgacctcctggaagggagaggctcacctcctacaaagtaaatgctcaataaatatttttgatataactctggaagagctccatttggggtcgggggtgcacctactccagggcaccaccccctccaaaatagctgcattcccacagccctcatactccgctcagaaaagggaccggcgagcttgcaggcatccgcacagcggataaaagcaaagcgggacggcgcaccaaccgcattccggatcctaaggttaaaagaaaaccccttgccctcgggccagggctcacctgtctcgggagtggggaagaagcgcgactcccggccgctttggagtaggcgtcccagcaaaactctcgcctcatcaccagacactaccccgggcagaaggttcctaggctaggtcctcggacccgagagggagcgacacgctcgcttggtctcttgggtctccaggacgccgccgccgccgccacagtttcctcaggtgctacaaagcagccagggtgtgcgtgcgctcccgcctcgtcgcttagcaacctgagaagctgtccggtcgtcccaacttatcaattcccccgcccctccagagtgtcaatcgttttttaaaagattttgtttccgggtcgatccagctttacgcagcggaaggtctctttacctcccacgtttaccctcatgggaggatgcagtctcagtcacgcgcgtgggggtgatgtcgctaaggggtgattctcccctccctagagttacacacgctatctctcccgccaattgccgggctccatcaggcaggtcctttcctcctgagcccaaaccatccgtttgttgtcgtcctccaatcacaggggctcatcctcagggactactttgcaatcggcgcagagcgcagtgagaagagcttgaaaaaaacctctggtatcgggaagtgtagttcaacacttgaaggaaatgctttggagattgcgccacaaccagggcagcgtaaactacagttcccagagagcgccgcgtcgggagcggagccttttctcgctaacaccgctcgccctctccgagtcagttccgcggtagaggtgacctgactctctgaggctcattttgcagttgttgaaattgtccccgcagttttcaatcatggtgagtgtgggccccgggttcctgcccacctctggccctcgcgcccttgagtggggtttcttgcactttagggacttttgggaggcagctgtgcaaggcactgtccttcgcgccctttggcaagctcggactcatcttctggggattgccgcagtgacccagtaatgggaagggattgatttccaccttgcggggtatggggcgctcttaggaggactctggagaagtagttgtcctgggagaggagcgatcttaatcctgctgcatgacgggaggacaaaatgcgacgctgcagctattttccaaaggacgttacggtgtttgataaggacgataaggtttgcgatgggagggaaaggttgggtcctaacccctttttctcctcatttgcccacagtgtttataacggcttttgtcacagggaccttgaaagcaaaaagctggaaaggtagtatttaccaggtgctccagattacgatctgcgtttgcagcagacgtgtttccgccatatctaatttctcaaaatgttatttggaacccgttcattgaccttttttgtaatgccaggatatattgaagtgacagcatcactaactaaataactactgcaaatattctttattgaactgtatattgtgaattccagaagcacctctcttaaatgtaacagagtaaccattttgtcatggaagacctgggtaacctgcatctccatcgcttgtctctgctgaaagagagggggagggggagagttggtgaaggaactctggcgtaggaataatctgcgtactgcttgaaggtgacatttgtcatcaaactcagagaaatcgcttcatactatcaatacaatggcttgtatttatagttgcgactgtttttcctactttatctgcaaaatactaaaacggctggagaatgtggagaaatgtttgaatgaattggaaatttcccagaacctgaaaagacacgttttcaaggcaagggcattactctctctgcctgtctaacggggccagtggagacagctactaatttccagtaggtgttaaacctaggtttcctaaatgttttgtcacataattagtcatttaaattatggtttcggtagtttctgtcctaataaccttagctagaaagcagaggtacttattatctgataaccttggactttttgcttttagaactgaatgggatcttttaaaggtcatcttgacgaatctccccacttcagatcttaaaatggagtttatcgagacccaaagagaatgtgatttgctccaagagtctcacactcttgccatttttctatattgtgtcttacacttaccaagtctttctgaatttttatttttatagggaccaccgcagtgaggtctcgcagcgggggagagacagtgtactcaactccctgaaaacttatttttactagctgagattccggatgaagttaccagttcatactgcatatacaaactcaaatatgttatcagcatgtagattacttgatagctttattccttgccattcaaaatactggaattgtagaattaaaagggaatttggagattatattatctactcttataatgtagtctggtgaggtcagataattttcccaaggtcacagagattttgggccccagattcttagctagtttccctagcaaggccccaccgttggaaggtca

SEQ ID NO: 3999 - DNA, 4001 bp, Homo sapiens
aacaattatctcaaggctggacgcagtgggtcatgcctgtaattccaggactttgggagaccgaggtgggcggatcacttgaggccaggagttcgagaccagcatggccaccaagacaaattcctgtctctactaaaaatacaaaaattagccaggcttggtggcacatgcctgtaattccagctactctggaggctgaggcgggaagattgtttgaacccgggagacagaggttacagtgagccaagatcccaccactgcagtccagcctgggcaacagagtgagactctgtctccaaaaaaaccaaaccaaacaaacaaaaaaaagccccacatatttcaaaaaattttattttaagaaaaacaaaaaaacctactttcaattaaaaaacacagtggttatgttaatgcatcaccacattcctagagaagtattaaggcaatgtatgtaagtaagtacatatactcaggtgcattgataatacgatttatgtatactttcagcaacaacacaaggggagagaagatgatttactagctctcctcataaagctacaaacaaaaccacagatgtaactcaggtgggagtttcctagtttatggctaactttagcttattaacacgacaaatattatcattttcactgaaaaatttgacattttttgttgactcagccaatccaagaagcttaattaatatatagtccctgccctcaagagacttccaatatagttggaagagaccaggcaaacacaaagaaagctaacaatgcaatatataccacaaggcagcatataattagttttcgaatgagtgctaacagaccttgagaccactggttaaaatgtttatatatctatatagatatacataaatggtaaatatgttttttcattttcaaaaactttttttccgttttcaaaaactgtgaaccaccactagcagacaccctataacaaggcccactgttcatttttaaattacacatataaaatgtttcattcagaaagcaaacctgaagcccttcagcctcctccacactcacaattcaaattatatagaacctacgaagctggttagaaagcaggtaatctcagaaaaaagggtgggggtgacagcagaaacaaccagggatccacaaggtcataccaaaggggtggtcggaaaggaacctggggaagggagagaaggctggaacgcttacttacttcttgttatcagtgtagaagcgtgtttggagctgagccatggcgaggagtacacacgacttgcccacggaaacgtacgggttagcagacccacaacacgaagctcctgccttttaagactacaaagaggcagctcaaaattagactgcacaggtaagcgaggaactgcagtctaagcctggactctgccttctgccctccggtctcctctgcagaaagcacgaggttgcccttctacagacgcccagaccacaaacatcgactacctactcctagatttaggagtcatcgattagaaaaggatagtcgtaaaggtagcatgtccctttaatcattgttagaattcttcccatacgtgtgggcccgtaatcgattaggaaaaagatcccactcaaatccgctttattaataaaaaattttttttcaagaggctgtcctgagcctggatagttcaaacacagctcctagttactacaagtctcagaaagcatcgcttctcaaacgctgtgaccaccgggaattgtagtctttttttgccacgctgccctcagagtatcttatttgcattaaatcctctagactccagccagatatcaaatttcctctgccttcagctttgcttgactaacgccttgccagtttttttttctcatacatattcccaaccagaggctcactcggcagaggtttttcctaaatctcgcctctaactgcggcttttagagagaggcgagaggcggaaatacaaagaaaagaacggatgagagaggaaacggtcgacggtggccgatagtggtcctactgtcgtgggactgctctgcgcgctcccggtggggcgcgcctgcgcattatgctggtctccatggcggggcctcggagccaagacgaggttgagtagactcgttttgaattttctcccctctgctccggcggacttcccatgtcgccttgtggggctatcggcggcggcaggactgggggagtcagaggtctggcagcgctgtctgcgcagacctaccggacgctacctcccaaccccccgtcttcctcctgcctcctcctcctcccgtcacctcctgacccgccggagctccgagcaactgccggcctccgcccccagccgcagccggtcactggcggcgccttccgcgccaagcttgggggccttttcggggtcccacatggcacggcttccgacccccggcccgggacggggctcgcaggccccagaggggcaggctggagaaggaggaggttaggtgtcttcaggagggttgctgagcccaaggacgcgccatcgccgcggagaaggagccggaccccttgggcggagcgcccaatgtgtggtccctcacgccgtcccgcaccttgctttttagggttctttttccgctttctgagcccttttataccttacgtttagaaggggaaaatcatcctcccacaccttctccccgactttttgccttttttgtcttgaagttacccaaaggcctgtgtattgttctcaatggtcccaagaattactctaatatagttgtttttctgagggaggatggatggagataactatcctgatcccaatgtcactttttaaggcattcgcttcaagagacaagcagtttagaatcaggcagaactggattgcaaaatttatgggcagaccggtatgtgtgcaggtgaagacaaagctttccttttttacgttgtttaaagatgtcctactgtaaggtagacgcctaatgtttaaatgaacgcctaatatttaaatagagaatgagaagagatttaaacaattggaagaaaaaataatttttattagagagcaatgacaataaaagtaggactcttttcagtttactcacctttgtagctccgaatccgggccctggaaccagaattcctgggttcaaatcctgcctctgctacttgattaacctttttgtgccacacttttatcaactataagaattaactgcggcatcggaagcactcagtatatgttaattattatcatcaaatagttactaattccagtttaactagaagctttgccagcgtgaatagataagggagaatagccacattgagtggaggaataaaattagaaaacctctgtgctgaagtcccaggagatcacttattaggcttgagcttgctaatggaagtggtgatcgtttaaccatgtggttattgtagtggtgaggatttacacattaaataagtcttgggcatctgaagcttgaaacactttcttaatgaaatcttgccgttgaatctgtacttactggtaatatgtcattggttaaaatatatttataaaatgtataattgaccagcaggttaatacatttttatcattaatttgaaatttatcaaaatgagaatatacagtacctgacagtagagtttgatcttaatttgatttgaaaattatgatcaggaaaataacctgaatatatgcttaataatataagactttcagtttgcaaaacagaaatcctgacttgactaaaatacacttttcatttgacggagacctttagttaaggaaagattagttttagcattcaacataactaaatacccagcattatgttttacggtttttttcaacaatgatttatgtgtcgtgtttggtgttgcctccaaacagtacctaggatagctgatgcttttactttgagtctttttctttagttggaacattaattgcaagcttttggttggtaatcattttttatgggatgtatttactatatggtcctcatggagacacattgttatctgga

SEQ ID NO: 4000 - DNA, 4001 bp, Homo sapiens
tccaccgcaaagtaatgggaaaagtatatgaacttattacttagcaaagagagctctgaataaataccttaagtgcttagtaaaaatataattaaagccttacgtcaatataaaaccgtgatggcaaaatctgtttagtatttttcaccaaccaaagaaaattatccaagttaagccatcagcttcacagataaacatttatttttgtctaaaccattgtaatatatgtaagccaaattcctttttttttttttttttttttttttgagacggagtctcgctctgttgcccaggctagagtgcaatggcgcgatcttggctcactgcaacctctgcctccggggttcaagtgattctcttgcctcagcctcccgagtagctgggattacaggcgcccaccaccacacccagctaatttttgtatttttagtagagacggggttccgccatgttggtcaggctggtctcgaactcctgacctcaggtgatccgcccaccctggcgtcccaaagtgctgggattacaggcgtgagccaccgcgcccggccataagccaactttctaccaaaattcttcctaggagtacaggaaagacaagttaaaatttctccccaagtttcaagaagatagtctaaatatggaacttcaagtctcagcaaaaactcaaatctatacaatattttatcttctcccggtcaaggagacaaaaaaagcaaaagtatcttacagtaataaaaaatgggtaaaatgcaattaaggcgaggaaatgaaaaatgccacaagaggtacaactagcataactgtcactaaaaggtttgaattaagtaggtttaccactgcaccatattcacaggctatatatacatacacacacacatatatacacatatatatgtatatatagcatgcattagctctccagagtgtactaaaaaagtaaagtctacgctccccagagttgttcctttcagtgcaggctttttgttcatattctaatgtcttccaaagttcctgaacagtcaacttaagatcatgtgtgtagaaactactttaaaacattcttgacaggctttctacaagtagcccgtatttttctgatttgatttaaatagatccaattacggaattccctaccgacctgccgccgccgcctcctccttactccggaaggggccactaatcccaagggttacaaccaagtacaaacattcattgtcatttcttttaagaaggcatgctaagatcctcactacttagttgccagaagacaacttaaaatcagaaacagggatctagcacaaaccaaatagaaatacaactattccaaaaaagcagggctttgcctgtcaagctgtagcctcatccttataataagcaccgatttcaagccacgataacatcacggctaagtcttcagctgttttgcagatttcacgttaacttcccttgaccctttcaaccaactacttcaactcggcccacttctttccactcccgccccaaacctcagttaaaatgcatttccctccaaacttcacgtcttaactgtggcctgacttacgtcttctcgtcgccaccgctcccagtcagggccttagttctaaccatggccgcttttcccggttggcctccagcctccagccccctcccataagtctcgaacctgcctcgaacagccgccccgaggtcgattctcccagttcctccaacctgtgcccaggcgcccgtccaggcccccaaagcacgcaacggccgagcccgaaaatggcggagagtgccgctgcctgctgcaggcgagcagtcccgtgtcgccgccgcactcaccgtctggctttgagcagagctcctaaatggccagcgaagcgttcgccttcagagccagaaatgtctctcttgtttggtctccccaccccgatcctctcaatcccgctcctccaaaggagcagccgccatcttcccctatgggccaccgaacgcacgctctggggtcatcacgcactggcgggacggcgctacgtcacgcgcgcctggaccgcgggcctctgtgaggttcgatctgcgcatgtgcctaggtgaggtgccgagccgcgagaccctgcagagcgcttcctttgttccggagcgagtaggacgcgctacctcctggaggaaagaagcgactgcgtttcgcagtgctgacttttttttacagtgtgagctaacgtgtatgctctgaaaaacaccccgttttccagtatgtgaatgagtatatttgtacggggccagtacggcagacatagcgggtcgttggaccgagcccaccgagagtggatctgtgggaagccactgtggcaccttgctgagtctgttcacccgtgcagctagctggtggcagccctggcagatcccggcacacagtcaggctccacgccttacccgagccagttgtgcctctagattacgcctcgcttaaagtccagcgaccaagatagaaaaacagccccacgatgcaaccattttggaaaaccgctgcagtttctgccaaagctaaatgtacgcttaccttgtgaccccagaaatttcacttcaagaggaatgagtgcatacgtccaccaaaggcatgtgcaagaatgtccatagcacgtttattcgtagtagtaaaaaactggtaacctaaatgtccatcagcagttgagtggctaaattgtggtgtatcatacagtggatttctacagagaaataggaagttacggataaacgcaacagcctgaacgaatagcagctactgttaacttaggcacaaagaagaggacgctgtatgattccattttgatgaggttcaaaatataactgcacagcaagttgttctccagtatgaatcaggaatcgtaccagcctggggaacatggcgagatcccatctttgcgcgtcggggtgcgttcctgtgaccgccttcctgtgatcgttcctgtgatgggtacttgggagactggggtgggaggatcacttgagcccaggagttggagggcgcagtgagccaagatcgtgccagtgcacttaagtcttggaagcagagtaagaccctgtctcaaagaagtcttacttttgactccataatccccttccaaaaatctattctaaggatagcctcagagatgtgagtaagatttgtgtactaatctttgaggtattaatgatagcaaaaaaaaaaggaaacagtagcagacagtgattaaataatggcacatccatacgtagactatcatgcagacattacacagtatctaaagtttttatgataacatcagaaatgtttataaacttctatattttttctttttttagagacaaggtctctcacccagggtgatcataactcactgcagcctcaacctcccgggctcaagtgatcctctcacctcagcctccctagtagctcagactaatgacctgtaccaggacacccatacccagctaattttagtagagactgtcaggcctcagagcccaagctaagccatcatatccccagtgacttgcacgtatacatccagatggcctgaagcaactgaagatccacaaaagtgaaaatagccttaactgatgacattccaccattgtaatttgtttctgccccaccctaactgatcaatgtactttgtaatttccccgacccttaagaaggttctttataattctcccacccttgagaatgtactttgtgagatccaccccctgcccacaaaacattgctccaaactccaatgcctatcccaaaacctgtaagaactaatgataatcccaccaccctttgctgactctcttttcggactcagcccacctgcacccaggtgaaataaacagccttgttgctcacacaaagcctgtttggtggtctcttcacacggacacgtgagacagagacaagatctgattatgttgcccagggcggtctcaaactcctgggttcaagcaatcctcctgcctcagcctcccaaagtgctgggattacaggccatgcg

SEQ ID NO: 4001 - DNA, 4001 bp, Homo sapiens
cgccacttactggctgcgtgacctagggcagttaacagctcagagcctcaattttctcacctagaatacctactgcccaagattattgtgaagtcaaataagattgtgaaggttaaacatccactacatggaaaatcgtcaataagtatttattattcataccgcattcaaagttgtaaggtaatgctattcaaagtgcggtctgaggaccagcaactcagcttcactagaaatggaaattctcaggccccatcccgggtctattgtgtgggggtagagcatgaaatccatcttaacaacctcttccagtgattcttatacctaatacagtttgagaagctatgttgtaaggaatccaaaaatgtaatgcagtttaaccccctacattttcattttatggaagactaaactaaagtagtaagatcctcagctaacttgttgaaagtcattcagtagtcttgtggaagagctgagatttaactccaattaccttatctaggtcttcaatctaggggggctaagaagtgggaagctgtttgctgtgattccagagaactagataaagaaagaaatcaagcagcaaagacaagagacctactaatagaaatgtaaaacgtatcccattttctgttcttggacactaggtgaataaccattaatgcatctgataagcagaaaggatgacacagacctgtaaacaatctgccagattttcttagtgaaatgttgactcacaggatttcttttagactcctaataatatagtacaataattagacatagcataacacagtgacttattttcattcttcattatttttcattttccattaataactcagcaaaaaccatccgatgtttacattcaacattctctgaactttattgcaaatatactccagaaaaacaccataaaatgttttggtagttttccctttaaaataatcagaactgcatattgacagataacatgagtagaccgcactgaacaaataacattagccaatttactaccaaacatgtgggcttgcattcatttacctgtctgcgtctctaatttcaaaactttcagtaatccatcttcaccaccgcatgctatgaacccttgttccttgttccaggatacacactgcagcttcacgttattgggaatggaaatctgaaaaagcaaccacagccgcactagcaacttttcacgaaggagctgggaagtaagtctgcaggagatgaaagctgaagaaaatcttccaagaagaaaaacgaacggccttgcagaaaaaaaatgagctgttgtgaaaatgggcatggtcccctgaactgacccgggctctagcatttgggaaagagggaaagaagtgcacaaaagagaaggatagtgactgcggaggaagccaacgccagagtctcaccggatggattttttaaagggaggacggggagagggtataaatccataccaccagtccctcttcctttttacctacaacttaggctatcctattgttatttcttttctcttgcccaatggctcgtggtgatccaaagagtttaaatcacgtggatcagcaacaagtggaggaggaaacatagggtagcacgtggcgacttatcctcaagccacccaaaaggacctagccaggggcaggaatgggagagtgctgcgagagggcagcaagctcggccaaagactgaggctctgggaaccgcaggaagaggtcggaggctggacccggcgggaaggatggctgcggaatggcgaagccacgaccaggaccgggtgaaggagcctggcttctcgggaaggcagcgggaatcgccgcaggctgcgggaatggcggagaaacgaggacgccccccaggaaactcactttcttgctcaggtagaagaacatcgtgggatccccgagagggtcacggcggccgctaaggccctcgacaagtaacggttctacgtctccaatcgggagtaccagcagctccggaaagctcccgtcgccctggcaaccgctgttgcccggtcgcatccggggcgccgcgggacacttccggtgacgccctcgcaccgggcaccggcgtagtgcgcctgcgcggacgtcgatgggtttgtgggcgcagggcgcgaggcgcgaggcggtagctgggctagtcctgttccctggcgtctgggcctttctgctctccgcaaggagctgggtcgcgacctgtcactgccagccgtgcgctcgccctctgcgccccgtctcgtggtcactgccgccctccctcccgccacacctgtgatgatcgctatggagccgcgcctcaggtggcattactataaacctaagaggagaggcgcccgttcgaataagggcaaattatttagtattttgtaagttccaaagttccaacattcttgaaagggaaaagccatttactgtatttgataggctggcgccactggccagatgaaagtgcaaatgtgcgtactgagatcttacaacccttctctgtgtctttggggattggagaacctctagagcaatttaggaatagaagattttgtttattccgcttgttttgatattttttaacagtttaattattaccgcaaccccgagggtccttttaaaggaatttctgtaaacgttgggtaattacagcgtacaattgctattggggcatggcctcccattttacaaatatttgagcgtttggtgttttctcgtctagagtcgactgttacatattctcttctttttcttaccttctttcttcattctcctttgtccttttggaatgcttgagagttacaaagcctcaaagtctaaggcatagggcagaaatccaagtagaaccactcatgaaattatttggtctcacctatgtttttatttctggttttcccttttaccataatctagcatgtaatttatgcatcagtagttaatttccccacttggagtcttttcccatctcagacaaaaataaaataaaaatcctccaatcctttgacctgggtgatttgtctcacccagcacaatctattatagaattgacaatagtccctagtgcctttcctagcaaatctaaactccatccaaaatcagatcttccctcaatcctaaatgtttttactagggagcccccacctcaagtaagccaatatgctttctgcagggcaacattccatccggctctgcttcccaagccactttatatatggtcctaccctcttaacaggccagttgtgcctagccaaaccagcacaaatcagtctccatgaggaattctttccaaacttaacccaatcccattcagataatgtttgctttccattgtttgtgtgtctgtttaagatacattggcccctgtccataggctccctatactggacgcatgagacaaattagtattatctaacccaggagtttccaataaactggtcaagacataattagttgaagctagttactgatggtgacacctgaaaactcacctctctttatctttcccttcttgcacatgaactctcatttattccttctataccaccatttctctgtggtatattaatatgtattactgattttgggctcaaaaaagtctggaaaatactactgtagctctatgtcataccctttcaaaatttttgaaaagtaagagatgctttatatatttccttggtatatttagtttttgttccttccttaaagtttatattttatatttacatctgtaggatatatttgcttctcaggagcttatattaatgtaaagctcatcattattttatccaaatttagataattttatattgaagcctttcttttgaacctgaacttacacttttagcctcaggagtgtgagattaaactataggaggagaatcaaacttctgtcttttgataagaaactgttgaatatcaaaataactgttaattcagtataatttaaagaaatatctttaatagacaaaattgatgagtcatcaaaaatagacatgataatatgtaaaggta

SEQ ID NO: 4002 - DNA, 4001 bp, Homo sapiens
attttttccaacctaatattaactatctgttgcagataaccaagaaccgagctcttaaggacctgagttctaatcctggttccattttttactttattcaagttgcttagtttcccagagtttctgtttctttccccgaaacaaggcagaaagttccttatcaacacttcaggactaaccacacaaatatcagatattaataatacttaacacttaaagcacttacctgtcaagaactattctaagtgttctctgcattattaaatatattaaccttcacaaccactctatgaagaagatattattatcctcatttcataaatgaggaaccagaggggcaattaccactatgaagcagaggctagaatcaaatatagacaatatagccagcttgggtccacgcacctacctaaccactgctccgtatttctctcagcattagtattactatcactttacaggactgttaaaatacaaccacagaaaactttgaaaataaaagataagcagagcgctgtaattttaacaataaaaactgattttttttttagttttatgtttgacttataagccctgataggtttattttatgaatcaacaggataaactatgaaaatgtagcttaaaatttgaaaaatatctaaacatgcccaaagtatagcaacttatatgtatcccttttcccaacccaaaaatttagcaggcttcccaggtcgtcagagagagtaagatcctaaatagcttttacagttctccacattgaaacagctcacatcacacacctcaggatacctgatgtttccaaatcactttgcagtgattcggtttggctactctgtaaacgcaataaccacgtgcatgctgagttagagagatgtagctgagtgactcaacagtgaaaggcatttacctgacacgggtccctaacaatgaaaagctctgcctaactcggcagttttccatctaagggtaatttcatctgcactcataaaacattcactaaatcaagctactacttcacttaacctccacatcctaatacagacttcagattggggtgggtggggagcagtgtgatcggcttgaaagcggggcgggaggggcgagcagatgttaaaatcaaaaagcagtgagttcaaaaagctgagaatgtagaggtgcctgggaaaggcaaaagttaagagttgagagtcccacaacctggacggggacgagaacacgtggtgagccggcacccaaagggggggcaggagggggaaggtccggaagcaagtacagactagtccataccaactgcccagtgcaaaactgatgagccggatcacagacagaggaaagttagatagtcccaagatggggctctgtcaaaaaccagaactctgatgagccaaggcccggcagaaggaagccgccccagggggaccaggggacttggcgaacatggctgcccgtcaacagtggggcccaggcctcattgggccagccggcagggctcggatacgaggccggccgggtcgagctgcgccctccctcactgccctcgcggcaggccgcacgcggggctggcggcttgggccctgaacgcgccgacgccgcctccaagccttctggcccgggccgctgagagccacgcgcgatgccggaccacgcgccacccggcccggaggcccgaagccgagcccgggaaggcgcccgccccgcgcagtcccgctcgctttaccttggcctgcagccgcgctggcgcccaggccagacaggtgcaggtaccactgaggtgcgcggaaggcacgtactcctggtgcagccggttgttggccgtctcccatactcgtaagtgaccgtcggtagaggccaaagcgaagtaggcctggctgtgcggggagaaggcgcaagggaccccagcaggggccagggggtcgcagctaccgccgccgcccgccgccattgctgctctggccccgctgcagccacgtgttcgtccgtgcgcaggcgcaccggcgcggggcggagcctggaggaggaagtgaggcggagggagcgccgggggctcagggagtggatcttcgcgtcgcaggagagcttctggcggatccgccctgtggacggtggcccgctagggcctgtcgctatcttgttctgggcgggagtgggagtatgggagaaagtaattgtagaattaagatcaagtcctgttcctttaaaaaaaaaaaaaaagggggggggccgggcgcggtggctcacgcctgtaatcacagcactttgggaggccgaagtgggcggatcccctgaggtcggagttcgagaccagcctgaccaacatgtagaaacccccgtctctactaaaaataaaaaaattagccgtgggctgggcgcggtggctcacgcctgtaatcctagcactttgggaggccgaggcgggtggatcataaggtcaggagttcaagaccagcctggccaagatgatgaaacctcgtctctactaaaaatacaaaaaaattagccgggcttggtggttggcacctgtatgtaatcccagccactcgggaggctgaggcagagaattggttgaacccgggaggcggagattgcagtgagccgagatcgcgcccctgcactccagcctgggcgacagagcgagactcgtctcaaaaaaaaaaaaaaaaaaaaaaaaaaaaaaaaaatagccaggcgtgtggcgcacgcctgtaatcccagctactcgagaggctgaggcaggagaatcgcttgaactcgggagatggaggttgctgtgagccgagatcgcgccattatactccgggcaacaagagtgaaactccgtcttaaaaaaataaataataaataaataacaattttttaaaactttaaagaaaatgataaggtagaacgaaaggtttgaaggaaatcttcagccgagcgcggtggcttacacctataatcccactttgggaggccgaggcgggcagatcgcccgaggtcagagttcgagaccaagctaggcaaaatggcgaaaccttgtctctactaaaaatactaaaattagccgggtgtggtggtgtgtgcctgtagtcccagctactcgggagactgaggcaggagactccttgaacccgggaggtggaggttgcagtgagccgaaatcgccacgccactgcactccagtctaggtgacagagcgagactgtctcaaaaaaaaagagagagaaaagaagtcttcactttcaaattgataatgattgtaacaactgcttccgtttccccctattcaattccaggctgtaatcatttacaaaataacaatgtattcagttataataatgtaaaagtaatgatcggaacaactattccctcctgtttctccagatttatctcatgttgctacatcaaatagacatttttaggcacacgcccatagtctggaggctgagggaggaggatggcttgagcccacgaggtcgaggctacagtgagctatgactgctccactgcactctaccctgggtgacatagtgagatcctgtatccaaaaaataaagggtagatttttatatttctcctaaatattcaccaaatcaatgcattctaattcaaggaatgctaggtactgttcagcccacacagagcctattgcctgccaggaaagataaaaaccactctcatggccatgggaaggctcaagcttttacagctacggagcagcatggtaagatttgcattttattgttttcttgtttgtttttgtgttttgagacagagtctcactctgcccagactggagtgcagtggcacaatctcagctcactgcaacctccaccttccggttcaagtgattctcctgcctcagcctcccaagtagctgggattacaggcgtgtgccaccacgcctggctagtttttgtatttttattagagatggggtttcaccatgttggccaggcttgtctggaactcctgaccttaagtaatctgcccgcctcagcttcccaaagttctgggattat

SEQ ID NO: 4003 - DNA, 4001 bp, Homo sapiens
acaaaaccccctctcactgctccaacggccatgccccttcattcactagccttgtcttatcccaccctgaccctctgaacccttccatggtttactggagtctctgattccactccacttccacccttccctctaactttccacaatttcctcaggccctcattattctcctggccacagcccacatgccccagcacccctccatgccctgcacttggctccctcacccacacagatgaagtggccactggcagcaattccccgggcaaacacagcctgtactgaatatgaaaggggagaatgatcagaaatatcccctcctgcagccctagcaaacactccctgcccccaccccacttggtcctgcaggtacctggggaggcatctccagagtccagtgcatgccagtagaccatggtgtagccattggactcgtacatctggaagaccggggcaagaaccagggggcataacccaactgacctctgctgagtacttcacatatccgtgttagccttagcccatttaatcctcaaaacaaatctgggatgtaggtactatttttatcctaattttttcagaggacaacagtgagagtgagaagttaatagtgtaaggacatacagctagtaaaggggcagatactggaggtggcacttggaaactggaaaagatggaaagattgaagataagaaatagaaaaagagtgagtgggccaagcatgtgaaaagtctggaagtgtttagaggcaagtgggaaagtctggaagcctggcagggaagctgagaaggctctggtggggcaagcaggagagtcctcttcttacctgtattcctcgatgtgaggtgagtaccagcagcactcggaaggggaggacacaccagtggacctggagggaggtgcatcagtgtagggagaaaatcaaagcagggaagatgagtttgtttgttttttttttttttttgggggacggagtcttgctctgtggcccaggctggagtgcagtggcgccatctcggctcactgcaacctcagcctcctgggttcaagcgattctcctgcctcagccacccaagtagctgggattacaggtgcacgccaccacacccggttaattttttttgtattcttagtagagaagaggtttcaccatgttggccaggctggtctcgaactcctggcctcaagtgcccgtctcagcctcccaaagtgttgggattacaggcgtgagccaccgcgcccggcaggagaggggagattctgaggttaggacatgcctggggagattctgaggttaggacatgcctgctcctgaaggtttggagagaaaaggctgggggtaggactgggttcagcaacatcactcccagctccatgcctcacctgagtgataagtgggggactcactccagcaccctccttagcgtggagctggcgctgggccaagggcacaccctcaggagcagcgctgagaagctgggcgcttggtccatgaaccacgccaaaatacgtgaggttgcgagccggcagctgcagcacactgaggttgttgcacagggcggcggccgagcctcgcaggggaatggagcgctcccagcggaacatcctgtgtgggggtgcagccgaatcaccaggcgcgctacaaacagacgcagcggagatgcccgagggcggctatcatcgagcatttcggaagatgcctgagactgggtcataggatggggtgcccagaggacggtgatgggggagggtctcgaggagcaagacaggggagtcccagggctgttttggggcgacgggggaatcgcagaggaggaatggggatgacacaggaccacccgatggccccaagcccgcgagccaaataagtgtgatgaagcccccaaggctttctccctcggctcggatccctgaagcccccggcctagatcagaggtaacacctgcagccccagatcggctcgcctgactcctggttcgtagggtccctccaaatccgccgccaccatagagacgacgcacgtacgcacggcccttgggcggggtgagcggccggaacgtgccgcgggcggcgcggttgccggggcaactgtgggcggggcgagcgaccccgagcccgtggttgcccaggcgactgttaggtggcttacgcggcccggatgcagcagaaacaccagcgttgctgcgaccgcgttggcgatggcgcacgaaggctcggtgagcttcagttcagctggggatgcgccagagccagggtcggccgttaaggtcggtgtcgggaacagtgggctggctctgggccgcccagtgcccctacttgctcccgcccaccgcgcgggagtttagatgaccaaggaagccacgtcggtactcgggcagaaaacctacacctgcacggtgcccactcaaacgctttgttacactcaagccatgagggaaagggtcagtgggtggtgtagagcccgagaacaggaagtggattttgaaacagctaatgaatgtagtaagtctcttacatggtggtgcgtatttaaatggatgagcatttagagagggaagataacagaaaaaatctatttcgagaatttcaagaggaagaaatatattaaataattcagagactgcacttgaaagtcaaattgtttaagagccaatcaattttaaaataaagaaaacggggccggtctcaatggctcatgcctgtaatcccagcactttgagaggctgaggcgggaggattgcctgagctcaggagttcaagaccagccaggccaacatggcgagaccccgtctcgactaaaatacaaaaaattagctggatgtggtggcgcggtgcctgtaatcccagctactcgggaggcagaggcaggagaattgcttgaactcgggaggcggaggttgcagtgagccgagatcgcgccactgcgctctagcctgggtgacagagagagactgtctcaaaaaaaaaaaaaaaaaaaaaaaaaaaagaagaagaagaaagaaaacggatttgaagagcctttgtgcaaaaatatctctgtcccttctggtcaccatcacgggtgtcagatgcgaggctgggaggggaggtctaaggaaacaactctctttactcagtccagtcagccctgctctagtcaagcttggcctgggctatgggccactcctggtgcttgctacagggctgttctcactggtggatagggttaatgagacttcagggattttgagttctgcaagacttaggaaacagcagatttggggggataatgaattttaggaaacagatatgagacaaggttttagcggggcaataggcaaaggtttgggaagatcacatttggaagtacattttggaaggaaccaggttcagggagactgttgtggggaattgagggagctcccaagagattgtttgtaaactttttatgtctctaaagtgagttttggggactagtctttttttttttttaagtgattacaaaaggaaacaaactcattgtagagaacttacaaaatagaaaagagcataggaaggaaacgtatcctctgttatcattttgaagttttccttttgttgaacacatagtggtttacatatatgagatcataattgatgtgtaagtttgtatcctgcttctttcaattaacgttacatcataaacatttgctttatgccattgcaaattctttctaaagattacctttaatggctgggttggtggctcatgcctgcaaggtgggcagatcacttgaggccagttcaagaccagtctggccaacatggcgaaaccccatctctactaaaaatagaaaaaaaattagccaggcctggtggcaggcgcctgtaatcccagctactccggaggctgaggcaggagaattgcttgaacctgggaggcagaggttgcagtgagccgagatcttgccactgcactccagcctgggtgacagagcgagattccgtctcaaaaacaaaaacaaacaaacaaaaaaagatta

SEQ ID NO: 4004 - DNA, 4001 bp, Homo sapiens
gcacgtgtcctttccaacctcatttcccactacctcccttaatatataccattcttactagctaactgtaccagcctgttcaacagaaatcacttctgtctttcttgcttacactgtcctccccacctgaaatgtcttctgtccatattccccacttaaaatatcatctaggcctagcacaaatgtcatttgctcagcaatcttctccgtccttcttagtttgggaagtaatctcttcttatgagctccttcctacaggaccacagtaagaaaaatctgttactgagtattccttttcctcactagactgtaagctcctcgaaggcaggatcaatattaaaattatcttagtttttgtcactgcagcatgttatacataatatatagttgacaagtacttaaaaaatgaattgttgggcttagcaaatcaaacacacaatggacctcattataatgaataaggtataagaacagtactggttacatggatatgagtccgaagcgtcacagtgtgacagcctcttaaagcctgtttcttcctttgattcataagatcaatgtcaacaaagccacaggactcatttttttttggcttctaaggcaatttataaaagctctttcagtcatgcttgcattaccttcaacaactacctgtcgtacactcatatgcagaatattgtgggggtgggccgggcacagttgctcactgtaatcgctgcactttgggaggttcaggtgggcagatcacttgaggccaggagttccagggcagcctggccaacatggcgaaaccctctctctactaaaaatacaaaaattagcgggcgtggtggcccgcgcttataatacttgctactcaggaggccgaggcaccagaattgcttgaaccagggaggcggaggttgcaatgagcctagattgagccactgcactccagcctgggtgacagagtgagattctgcatcaaaaaaaaaaaaaaaaaaaaaaaaaagaatattgtggaggctacaaactttcataaaatactatctctactcttctaaggcagaaagggttttttgattttattaagtgccaccctacctaaagttatttgaaaacctgacaatacagtaataatgattacagctacatacattgagccattatgtgccgggcattgttgtctgtagttttaacatattgaggcatttaatcctcccaataaccacgtgagatgaactaaatattgtccccctttacagatgatggcaactgaggcaaagattaagaaacttacaaaggtttcataatgtaagaagtggattttgaagccagggagtggtttggtttccagctacactgagaaaagagaccaagtcttagcgtatttttatctcataaagaatctaacatctgttttcatgtaaagttccgaaaagactgcactatgcttcatgcactatgcttcaggagtgaggagtgggtagaaaaagcggaatagttttaggttttagtcactccaaaacatgattctgtacgaaagagtaggtactgcaaaggtagtggcatacacatccacccctggaccattttccagccgcccgaacaccttccagatcctcgacacggagaccggctccagggcctttatctacctgcaggtaaactgtccaggaatcgggggacgcaacccaatctgcagtggtaacgggacctcccaggtaccctggggatcccccacaggcgcgtgctctacccaaagccgatatccgccaggcgggcgagtccgaacgcgactgacaattccttctccccgaccctcgagaaactcacgccccgcccctcagccgacaaagcgcggtgcccctcatacttagaatctgcagagaacacagctctcctaaagttcaactcgctgccgccacaacgaaccacgcggatgttctcctcctccaccatctttgcgcagtagcggaatggccaatctctggtcccgccctgaacttccttcgttgagccgggtaataaggctgttcccagcccacagaacccacccccgggcccttctaggcctgagactcggtggtaggactccgcttccgtgcaggcaccttttgtgtgggcaatgtcaaactaagacacttgtaagaaaaggtgaaagcaaaacagagatttagagacaatcagtttttattatatacctatacacaattatttaatacagacatatttctctcaggccttgtcaacctgactctatggctttttccgccagaagggaaaggtggcgtatagtgtaccacgtgacctccagtcgtcccaccggaggcgtcgctttctagtgtctgtggtgtcggcgctgcaggatgacgcgagcctctcgcgtccctggttttctcggtcgcagcgttgagttattgggtggaaaggtagctttctcttccttgtacagctttttgttcctctcattagccgttcttctgttcttgtgaacatcgcttaggttactacagaatctccacagtcctagggcctagctttcttcctttggaaatctggctcctactccgggattctggtgcatcttccgcagcgttcagtgtagctgctcgggctaatctgacattcggccagtcccgccaggtttcagggcgctggtctctggtttcctgagttttaccttttcccattagtgaatagaatctgtgggttaggaacccctaaaatctcaacatgtttatttttgccagtttatctccagttttcctttgtaaacttacacgtatcatattcttggaccctgtatattatgttgcctattttgatttcgcttcttgatttgtggatttaccacaaaattaccaaggtctcaaatatagtcacatgtcacataaggatctttcaatcaatgcatataacatggtgattccgtaagattataatactgtgtttttactgtaccttttatgtgtttaaatacacaaatactattctgttacaattgcctgcaatattgagtacagtaacatgttgttcagatttgtagcctaggagcaatcagctataacgtacagcctaggtgtgtagtaggctgtaccatctaggtttgtgtaggtacactctgtgatattcacacaatgatgaaatcacctaaaatgcatttcttagaacatatccccatcattaagccacacatgattatacctataagtttatttatggtggagaaatacaatattcacaaaggtcaagacatatcctgggacagcaccactgtaaaaatcagggataaatttactttttactgaggagtctagcttattaaagtgctcaaaactttattatttggggagccagaactagaaagggagatatttaataattttggtttatctcaagctgtaaccagctttctctttcatgactgtgataccctttgtcacagtggatggagtgtaaaatatcacttttgattctgcagccttaacctctttttgtttagtctcttgatgtatgcacaataaatcttttaaagactttgttgggtactttgtaacctgatacaggcttttccttagggcctgagccaagaaacaaaataaatattttcactcaaattagtgtgactttagttgtatgttactgtatggtaactttagatttttcagaaaagaatcagaaatcctgatatggacaaaaactagctggattgataaatgtataggaggattattttacacagagttttaatttactgaagtgcccagaaagataagtcatttgtattttgatttctttttacataatttttaaggaaccaatcccacctacagctgtttaattaatagtgcgttgtctttatcatgtaacaagaaggctgaggtaggcagaatagggctagtgcagtggatcattcatgccaccagggacctgtgctttctctactttgttctttgtgttattgtccttaaccatattggttttgtccttatgctcacagttcatgttcctttcagtta

SEQ ID NO: 4005 - DNA, 4001 bp, Homo sapiens
tggctcacacctgatccagcactttgggagggagaggcgggaggatggtttgagcccaggagttccaggctgcgatgagctatgacagtagcactgcactccggactgggacagagctacgccatccctaaacaacaacaacaaaaaacaaaaacaacccaaaatgcaatgtaaagaaattttactttgtgtagaaatcaggaagggcatcatacattagataatctgaactgaacattggaatagcaacaggtagccaggcttggtggctcacgcctgtaatcccagtattacgggaggccgatgtaggcagactgcttgagcccaggagttggagaccagcctaggcaacacggtgaaaccccatctctaccaaaataaaaaataaaaaaataaaaagtacaaaaaaattagttaggtgtggtggcacacacctgtagtcccagctacttgggaggctgaggtggggaggcggaggttgcagtgagctgtgtttgcaccacagcactccgggctgggtgacagattgagaccctgtctcaaaaaaaaaaaaaaaaaaaaaaaagccactggttaccagaagctaagtgatgaacaatacaaggaacgaaggaaaggtagaaaaaaataagccatgtttcatgtttgtcattcagggaaacttaaagcgggatggggtcttacatactttctattctaggcttaacagtccaaattgtattcatcctttatctaccagtttaatccctacctcctccaagcagattctctccataggttttgatccccagagttaacctaccctgcacttgtagtctattacaaccctgatctgataatgactgatcattttttcaggtaacaaaatcaacactttttaaaaactataaacagctataaaatgctagttactatcattattctctaattctttcactagtaatcttcaaaaaaaccttgcaaacctaatctttccacaccctgcttaaatcctttcagttgtgtccgttttttcttagaaaaaaggcataaatcctttgaatgtcctacagatcttgcaatgtctggttcctgcttatccctctagtttcttaaggagataaacttcttcccatcactgagcttctgcatgtgcagaagccctggaaaccttgtcctttactcctagtttgacctagttagcttctgcacataccaaaatctgttttcattcatcccaaatctgttttcactctcattgaaccgtaaccgtgttcctttgtgtgagacaactcatctcggtttgtatttatgtatcgttgctttgattattgaactgagtatctctcccactagaaaataaactccatgagatgggggacattaccattcacatccctgggaataccaggcactcagctgatgcctgtcgaatgtgttaggttgcctcttccaaccacactgcaggcatcctggtgcccgctttggctggactgcactgggggtggcaggacggttgggcgcggaggaactaccccgcggatgagaagaaaggttttaaataggaaacattcctcagtcggcggtcagcttctctggtctcgcgcggctcaagccatgctttgggggacgctgggcgaaggctctggcaaagaggaatgcagaccccaggatccgcactcgcccccaacggcagtccggatcctcgacccggcacccacctcccgaagcagcttcaggtccccgtgctggatctcgtacagctgaatgacgccggtgccccgtgcgaagttgcccatggtcacaaatttggcgctgcagggcacccacttacagtcaaacaccgtgtagttgaagcccttctggatatgggcgatgatctgaggcttctcgaaggccgacatggtgcagccaatttcagctacggcaaccgccacacccagagcccccaaaaacggcaacctggaaaccagactccaaacattggcaatttgtccctcccgctttccgtattctgccccagatgccctggcatgttggctgtagttatccccggataatgccagatgcgctcctgcgatcgcacagaatgttccttcacaacagcacgaatttgtttatcgcctttacccactgcctttcgcacacatacatactagagattacaaaatacttgggctgggagttgcgcggctggagtgagcccaagaccatcaggcatatcttaggacagcctaaccccgttttcccccccaccggccccaaatcctgcaggtccccggcctgtgacgttttaggaaaggggcggagctgcaggggtggttggctgaggctggcttctgcgtggtgcagctgcgcacgtgtttcagccggcagcgctttaagatttccggggatggaatccgaaatggaaacgcagagcgccagggcagaggagggctttacccaggtcacccgcaagggtggccgacgggcgaagaaacgacaggctgaacagctgtccgcagcaggagagggcggggatgcgggccgcatggacacagaggaggccaggccggcgaagaggcccgtcttcccacccctctgtggggacgggctcctggtatgtggctgggaccctaggacagcaacgaggcaagggccagacgcggatcaagccgatggcctctggagaatgttgaagctgcggtggggctgttctgccgtgatgctcagagagaagtgattctttgaagtgtaactagttcagttaaaggaggccctttgtggatcagatgtcattttaaactccatcaccgtccctccatagccttctgagttgtgtgttcttttatttacagagtgggaaagaagaaacaaggaaaattccagtcccagctaacagatacacaccattgaaagaaaactggatgaagatatttactcctattgtggaacatttgggacttcagatacgctttaacttgaaatcaaggaatgtagaaatcagggtaaggaaaatctcaatcatttcccaatacaccaggctttctctcctacagagatgaaaaggcatgaataggctttacttaatgggacttttctgttgtatggtttttgtccagtttaaaaatttaccatattgagtttgaacttcccaaatgccttaaaaatctgcattcgatacaaatattaattgaatttgtaaattagttctgagatcacaccaaaatactggctcttcttctgtgtatcttttataatgttctatgtcaaattgagaaaaggtcgagtaaagagattgccataaacagaagcaggtaaataatgaatataagcacttgctgctttacaagaagtatatacagtcagcgtcgggaatatgttctgggatatgttttgtcagatgacttagtccttgtgcgaatattatagagtgtacttacacaaacctagatggtatgtgtatatttgtttatatatttttttcatatggaaaaccaaatgtcccagcaccattactgaatatcagtcatttcatctacttgatctgcattgccggtatccagtgccatatatcaggtttctgtatattctccattatactgttatgagaccaccatggtatgagcggttggtcactgatcaaaatgtcattatgcagtgcatgactgtgttttaatggtgctcttttgattaaaaaatgtattattttgataagaaacatgcatatatatgtgtgtgtgtgtgtgtgtgtgtgtatatatatctttttattttgctctttcacccaggctggagtgagtggcatgatcttggctcactgttaacaggtgcctgccaccaaacctggctaatttttgtatttttagtagagactgggttttagcatgttggccaggctagtctcgaactcctgacctcaggtgatcacatctcggcctcccaaagtgctgggattacaggcgtgagctgccccaccgagcctatgtatatattttaaattctgtgctatcaatccgggaattagacatttaaattta

SEQ ID NO: 4006 - DNA, 4001 bp, Homo sapiens
atcaaactcatcatggcaaacaaaatcctatacagtcttatgtaatcaaaatcctatataattcccgcctgcccacttctcagatctcaactctggccactgtccctctcttctttccagcctccttggcctaacagtcttccgtctccataaagcggttttctcaagctgaaatgttcttgcctctgctcttgggatcctatttgtcatttagatctcaatttcagtgtctctcctcagagacggtttccctatttaaagtagccactccctaggctagcacatcactctatattctcagcaattaccaccagcatcggatatttgttaaattgtctcctccgactaggatgtaaatcccaaaggagtaggtactttgccatcttgctcatttctgtatccacaccatgtaaaactgtcaggcacctaatgtacttaaataaatataagttgaatatttattttgttcgagcccaactgagttccagcctttaaataatccatatgtaatatgaaattagaaaatctaccaagactaaatatatatacacacacagaaacataactgacggtggaaaactggtgtcaagtgaggcagaatcagctctgaaaggggcaggtataaccttgacttgtaaaattgataatcctttgtcctagtcttatttacggaaacacctctaccaaagaaaaaaaaagtctgggcgcgatggtgcacacctgtagtcccagcattttgggaggccgagatgggtggaacacttgagcccaagagtttaagaccagtctgggcaacaaggcaagaccccatctctctaaaaataaaaataattagctgggtgtggtggcgagcacctgtagtcccagctactcgagaagctgaggcgggagcatcacttgagccccggaggtgacgccggcggtgagctgtgattgcaccactgcactctagcctgggcaacagagcaggaccccatcaatcaatcaaacaaatattaaggcataaggagcatgcctttccctatcttcatcttatccttttaggataagttcagcttcttttcttcgaacataaactccaataaagcctaaaaaccaaacacgaaaatttctggtagactatccctgtactgctgtcttgaaaacaatcaagaccaggtggtgctttctggagagctcgcaaatcccagctgtgcaagtgcgcacaggtgattttccaaacaaactccggctcccagccctctgccgcactcagctccctttgcaagttccagggcattcagtgggaagtaccgaggccaccgtcagctgaacagtttgttttgaaaaagctctcaggcctacccaggacctgccttggggtagggggggcggtgtgggcgttccctcgggcctcggctgtcacgcgaacagtaaattcccgggcacaccaggtcagttggccagcgtaaacacatgaatcccatctcattcaaagcaaacccgaaaggtgtccagcgctcccaaaataaagtccgccacttacaccccccatgcacgaaagaccaggaatgtgcccccctctatgagcggccgggcctctgtggactgagcgaccccaggcaagagggaggcctgggaggcagggagctcacccgcaaggggcttccttccacccgacgccgacacgcccgccctagccccgggccaagggtgcacgaaccacgcctcgccgcactcaaggtcccggttgggccctgctgcgcggttagaaccgggaaatggagggctcagacgccccgcgcgagcaggcccagccgcgcttccccacctgccgccaccgccgctgagccggcccgtgggcgcggccgctctcacctgcaggagcgggggcgcgcgggatccgccttcaaggtgcccacgggcggtgcgggtcacgtgccgcgcaggtgaggctggcggggcgggcgccggcggagacccagagcagagggaacaggccccgcccccgaacgcccgcggggacccagagcggagggaacaggccccgccccccgaacgcccgctgtgacccagagcggagggagtaggccccgccccgcgaaagcctgtggagacccagggcggagggaacaggccccgcccccgggaccggcccctgaggcggcgcatgcgcgctcttccgcccggactgcgagttcctccccagcttctggctcctagggtcaaggcgatttcaggcttggaaagggacttccgtcgcaaatctttctgtttttgctaaagctgcggtcgcaaggcctagtgatcgcctgaaacgtcgttttaaaggggcgttgcatggaatgttcggccatccctgctgaaagtttttacctctttctccagttctccaccctgcactgtgtactccgaggccggtctcccagattggccttctctatttcggccaccctgggcggtccgtgacttggcgtcttctgccctcgcctcctcattcgggttcccctaggggtctctcccgggcaggctgcctgccccgggccccagccctgccgttgggtgggtatcctgagctcactggaaccccgggcgccttttcttcagcctttcccagtgcgtcccactggctcacggtagactggtttccacgtgtcattgactacaaagtggccctgccagtgctttttgagataaaaattatccagaaaaaaaaaagttcctgagcaaattaccacttgttaactaaatgcacaacatagtgtgggactatgttcagatgaaaatcaaagatacagagagcttttatttttaatccatgaggaaacattaaaaatatatcagcctgtggagaccgaagttacatttgaagagtaatgacctaaaatgctcacatttaaagatgaaattgagaccgtgggaaactatttgcaatgaaaaagattaaggggaaagggaagattaaaaattaggattttgtgaagttcttgttaattttttaaaattagcggagtgcatcatgattgagactttgaacaccaaattccattccaaagtattgccaaaacagtatttttctaaaaacaagtttttgattgtataaataatagagctctctgtaggaaacacagaatatataacaggaaaataaatagtcaataattacacccctcagagatcacccactcagagataacattttctctcagtctttcagaaaaactaattttacaaaaagtcctggaaactgcctttttaaacaaacttgtgtcatgagctgttcccatgtctaaaatttcattagcttttttttctacataatggtctacatataaacataccataaattatttaacattttccctgttgctggatggtttcaacaattttgatcttagtgtagataatgctggattaaatatctttgtacctaaatctttttcttttagcctcaatatattaccacgttatgtacataaatctttttccatatttatgaatatgtacttaggataaaaattgaaatggaggccaggtgcggtggctcacgcctgtaatcccagcactttgggaggccaagctgggtggatcacctgaggtcaggagttcaagaccagcctggccaacgtggtgaaaccccatctctactaaaaatagaaaaaaattagccaggcatggtggcacgcacctgtaatcccagctactcaggaggctgagacaggagaatctcttgaacccaggaggctgaggttgcagtgggcagagatctccccattccacttccagtctgggggatagagtgagactttgtctcacaaaagaaaaaaaaggaaatggaatcactgggcataaaggtgtagacagttttaataagtattaccatactgctcttcagagaggttgtacagtttacactctcagcaatatgtagttgtgtttgtctctccactttcttgtcaaacttgagggataccttttttatctacactaatttgtgtgtgggtttttttgtttgtttgtga

SEQ ID NO: 4007 - DNA, 4001 bp, Homo sapiens
tatacaaaagacttgaggtgaggaaccacctctgaatgaatcaaggaaaccaagaaaagaaaacctaagaaagtgtcaaaaaatgaacttagccagaccacgctcaagaacaaatttacaaatttagaataaaatcaaactcatcatggcaaacaaaatcctatacagtcttatgtaatcaaaatcctatataattcccgcctgcccacttctcagatctcaactctggccactgtccctctcttctttccagcctccttggcctaacagtcttccgtctccataaagcggttttctcaagctgaaatgttcttgcctctgctcttgggatcctatttgtcatttagatctcaatttcagtgtctctcctcagagacggtttccctatttaaagtagccactccctaggctagcacatcactctatattctcagcaattaccaccagcatcggatatttgttaaattgtctcctccgactaggatgtaaatcccaaaggagtaggtactttgccatcttgctcatttctgtatccacaccatgtaaaactgtcaggcacctaatgtacttaaataaatataagttgaatatttattttgttcgagcccaactgagttccagcctttaaataatccatatgtaatatgaaattagaaaatctaccaagactaaatatatatacacacacagaaacataactgacggtggaaaactggtgtcaagtgaggcagaatcagctctgaaaggggcaggtataaccttgacttgtaaaattgataatcctttgtcctagtcttatttacggaaacacctctaccaaagaaaaaaaaagtctgggcgcgatggtgcacacctgtagtcccagcattttgggaggccgagatgggtggaacacttgagcccaagagtttaagaccagtctgggcaacaaggcaagaccccatctctctaaaaataaaaataattagctgggtgtggtggcgagcacctgtagtcccagctactcgagaagctgaggcgggagcatcacttgagccccggaggtgacgccggcggtgagctgtgattgcaccactgcactctagcctgggcaacagagcaggaccccatcaatcaatcaaacaaatattaaggcataaggagcatgcctttccctatcttcatcttatccttttaggataagttcagcttcttttcttcgaacataaactccaataaagcctaaaaaccaaacacgaaaatttctggtagactatccctgtactgctgtcttgaaaacaatcaagaccaggtggtgctttctggagagctcgcaaatcccagctgtgcaagtgcgcacaggtgattttccaaacaaactccggctcccagccctctgccgcactcagctccctttgcaagttccagggcattcagtgggaagtaccgaggccaccgtcagctgaacagtttgttttgaaaaagctctcaggcctacccaggacctgccttggggtagggggggcggtgtgggcgttccctcgggcctcggctgtcacgcgaacagtaaattcccgggcacaccaggtcagttggccagcgtaaacacatgaatcccatctcattcaaagcaaacccgaaaggtgtccagcgctcccaaaataaagtccgccacttacaccccccatgcacgaaagaccaggaatgtgcccccctctatgagcggccgggcctctgtggactgagcgaccccaggcaagagggaggcctgggaggcagggagctcacccgcaaggggcttccttccacccgacgccgacacgcccgccctagccccgggccaagggtgcacgaaccacgcctcgccgcactcaaggtcccggttgggccctgctgcgcggttagaaccgggaaatggagggctcagacgccccgcgcgagcaggcccagccgcgcttccccacctgccgccaccgccgctgagccggcccgtgggcgcggccgctctcacctgcaggagcgggggcgcgcgggatccgccttcaaggtgcccacgggcggtgcgggtcacgtgccgcgcaggtgaggctggcggggcgggcgccggcggagacccagagcagagggaacaggccccgcccccgaacgcccgcggggacccagagcggagggaacaggccccgccccccgaacgcccgctgtgacccagagcggagggagtaggccccgccccgcgaaagcctgtggagacccagggcggagggaacaggccccgcccccgggaccggcccctgaggcggcgcatgcgcgctcttccgcccggactgcgagttcctccccagcttctggctcctagggtcaaggcgatttcaggcttggaaagggacttccgtcgcaaatctttctgtttttgctaaagctgcggtcgcaaggcctagtgatcgcctgaaacgtcgttttaaaggggcgttgcatggaatgttcggccatccctgctgaaagtttttacctctttctccagttctccaccctgcactgtgtactccgaggccggtctcccagattggccttctctatttcggccaccctgggcggtccgtgacttggcgtcttctgccctcgcctcctcattcgggttcccctaggggtctctcccgggcaggctgcctgccccgggccccagccctgccgttgggtgggtatcctgagctcactggaaccccgggcgccttttcttcagcctttcccagtgcgtcccactggctcacggtagactggtttccacgtgtcattgactacaaagtggccctgccagtgctttttgagataaaaattatccagaaaaaaaaaagttcctgagcaaattaccacttgttaactaaatgcacaacatagtgtgggactatgttcagatgaaaatcaaagatacagagagcttttatttttaatccatgaggaaacattaaaaatatatcagcctgtggagaccgaagttacatttgaagagtaatgacctaaaatgctcacatttaaagatgaaattgagaccgtgggaaactatttgcaatgaaaaagattaaggggaaagggaagattaaaaattaggattttgtgaagttcttgttaattttttaaaattagcggagtgcatcatgattgagactttgaacaccaaattccattccaaagtattgccaaaacagtatttttctaaaaacaagtttttgattgtataaataatagagctctctgtaggaaacacagaatatataacaggaaaataaatagtcaataattacacccctcagagatcacccactcagagataacattttctctcagtctttcagaaaaactaattttacaaaaagtcctggaaactgcctttttaaacaaacttgtgtcatgagctgttcccatgtctaaaatttcattagcttttttttctacataatggtctacatataaacataccataaattatttaacattttccctgttgctggatggtttcaacaattttgatcttagtgtagataatgctggattaaatatctttgtacctaaatctttttcttttagcctcaatatattaccacgttatgtacataaatctttttccatatttatgaatatgtacttaggataaaaattgaaatggaggccaggtgcggtggctcacgcctgtaatcccagcactttgggaggccaagctgggtggatcacctgaggtcaggagttcaagaccagcctggccaacgtggtgaaaccccatctctactaaaaatagaaaaaaattagccaggcatggtggcacgcacctgtaatcccagctactcaggaggctgagacaggagaatctcttgaacccaggaggctgaggttgcagtgggcagagatctccccattccacttccagtctgggggatagagtgagactttgtctcacaaaagaaaaaaaaggaaatggaatcactgggcataaaggtgtagacagttttaataagtattaccatactgct

SEQ ID NO: 4008 - DNA, 4001 bp, Homo sapiens
cctatcatggtttgtcatcctgtctgataaatagtaaaattatacaaaagacttgaggtgaggaaccacctctgaatgaatcaaggaaaccaagaaaagaaaacctaagaaagtgtcaaaaaatgaacttagccagaccacgctcaagaacaaatttacaaatttagaataaaatcaaactcatcatggcaaacaaaatcctatacagtcttatgtaatcaaaatcctatataattcccgcctgcccacttctcagatctcaactctggccactgtccctctcttctttccagcctccttggcctaacagtcttccgtctccataaagcggttttctcaagctgaaatgttcttgcctctgctcttgggatcctatttgtcatttagatctcaatttcagtgtctctcctcagagacggtttccctatttaaagtagccactccctaggctagcacatcactctatattctcagcaattaccaccagcatcggatatttgttaaattgtctcctccgactaggatgtaaatcccaaaggagtaggtactttgccatcttgctcatttctgtatccacaccatgtaaaactgtcaggcacctaatgtacttaaataaatataagttgaatatttattttgttcgagcccaactgagttccagcctttaaataatccatatgtaatatgaaattagaaaatctaccaagactaaatatatatacacacacagaaacataactgacggtggaaaactggtgtcaagtgaggcagaatcagctctgaaaggggcaggtataaccttgacttgtaaaattgataatcctttgtcctagtcttatttacggaaacacctctaccaaagaaaaaaaaagtctgggcgcgatggtgcacacctgtagtcccagcattttgggaggccgagatgggtggaacacttgagcccaagagtttaagaccagtctgggcaacaaggcaagaccccatctctctaaaaataaaaataattagctgggtgtggtggcgagcacctgtagtcccagctactcgagaagctgaggcgggagcatcacttgagccccggaggtgacgccggcggtgagctgtgattgcaccactgcactctagcctgggcaacagagcaggaccccatcaatcaatcaaacaaatattaaggcataaggagcatgcctttccctatcttcatcttatccttttaggataagttcagcttcttttcttcgaacataaactccaataaagcctaaaaaccaaacacgaaaatttctggtagactatccctgtactgctgtcttgaaaacaatcaagaccaggtggtgctttctggagagctcgcaaatcccagctgtgcaagtgcgcacaggtgattttccaaacaaactccggctcccagccctctgccgcactcagctccctttgcaagttccagggcattcagtgggaagtaccgaggccaccgtcagctgaacagtttgttttgaaaaagctctcaggcctacccaggacctgccttggggtagggggggcggtgtgggcgttccctcgggcctcggctgtcacgcgaacagtaaattcccgggcacaccaggtcagttggccagcgtaaacacatgaatcccatctcattcaaagcaaacccgaaaggtgtccagcgctcccaaaataaagtccgccacttacaccccccatgcacgaaagaccaggaatgtgcccccctctatgagcggccgggcctctgtggactgagcgaccccaggcaagagggaggcctgggaggcagggagctcacccgcaaggggcttccttccacccgacgccgacacgcccgccctagccccgggccaagggtgcacgaaccacgcctcgccgcactcaaggtcccggttgggccctgctgcgcggttagaaccgggaaatggagggctcagacgccccgcgcgagcaggcccagccgcgcttccccacctgccgccaccgccgctgagccggcccgtgggcgcggccgctctcacctgcaggagcgggggcgcgcgggatccgccttcaaggtgcccacgggcggtgcgggtcacgtgccgcgcaggtgaggctggcggggcgggcgccggcggagacccagagcagagggaacaggccccgcccccgaacgcccgcggggacccagagcggagggaacaggccccgccccccgaacgcccgctgtgacccagagcggagggagtaggccccgccccgcgaaagcctgtggagacccagggcggagggaacaggccccgcccccgggaccggcccctgaggcggcgcatgcgcgctcttccgcccggactgcgagttcctccccagcttctggctcctagggtcaaggcgatttcaggcttggaaagggacttccgtcgcaaatctttctgtttttgctaaagctgcggtcgcaaggcctagtgatcgcctgaaacgtcgttttaaaggggcgttgcatggaatgttcggccatccctgctgaaagtttttacctctttctccagttctccaccctgcactgtgtactccgaggccggtctcccagattggccttctctatttcggccaccctgggcggtccgtgacttggcgtcttctgccctcgcctcctcattcgggttcccctaggggtctctcccgggcaggctgcctgccccgggccccagccctgccgttgggtgggtatcctgagctcactggaaccccgggcgccttttcttcagcctttcccagtgcgtcccactggctcacggtagactggtttccacgtgtcattgactacaaagtggccctgccagtgctttttgagataaaaattatccagaaaaaaaaaagttcctgagcaaattaccacttgttaactaaatgcacaacatagtgtgggactatgttcagatgaaaatcaaagatacagagagcttttatttttaatccatgaggaaacattaaaaatatatcagcctgtggagaccgaagttacatttgaagagtaatgacctaaaatgctcacatttaaagatgaaattgagaccgtgggaaactatttgcaatgaaaaagattaaggggaaagggaagattaaaaattaggattttgtgaagttcttgttaattttttaaaattagcggagtgcatcatgattgagactttgaacaccaaattccattccaaagtattgccaaaacagtatttttctaaaaacaagtttttgattgtataaataatagagctctctgtaggaaacacagaatatataacaggaaaataaatagtcaataattacacccctcagagatcacccactcagagataacattttctctcagtctttcagaaaaactaattttacaaaaagtcctggaaactgcctttttaaacaaacttgtgtcatgagctgttcccatgtctaaaatttcattagcttttttttctacataatggtctacatataaacataccataaattatttaacattttccctgttgctggatggtttcaacaattttgatcttagtgtagataatgctggattaaatatctttgtacctaaatctttttcttttagcctcaatatattaccacgttatgtacataaatctttttccatatttatgaatatgtacttaggataaaaattgaaatggaggccaggtgcggtggctcacgcctgtaatcccagcactttgggaggccaagctgggtggatcacctgaggtcaggagttcaagaccagcctggccaacgtggtgaaaccccatctctactaaaaatagaaaaaaattagccaggcatggtggcacgcacctgtaatcccagctactcaggaggctgagacaggagaatctcttgaacccaggaggctgaggttgcagtgggcagagatctccccattccacttccagtctgggggatagagtgagactttgtctcacaaaagaaaaaaaaggaaatggaatcactgggca

SEQ ID NO: 4009 - DNA, 4001 bp, Homo sapiens
aagattatcaagcccatttcttggatgagataagtgaggctcaaattgtaatgatatgcctaagggcaccagaaagtggttgaacacattacagacaatttttaaaatgaacaaatagaaggaggcatgaatccccccaggaggaaagtctcattctcttgaaatatcccagaatttgatcttaccttgcttacaaatctctttgcactacgtcacacaacctcaaagagttgatgtgttttcatggagccaaagttatggcaggggttgggtaagtcccagggaggaagacaatattacggaactggtttcataacatctgcagagtttagtctgaacatttccattcaacaggtaatgggctctcacaggtggctgggatttgcagactatagcacctccaggtccccgagaaactcagccttgtgcggctgataggcaggtagacacacacagtcacagtagaaggcagtgttgtgtgcactgcaaagggattaataggcagagtgctgatagcctatcaagggttttctcacctcaagaacctaaaaggtgatttacaaactgaagtagaacatttcttggagttattttatccattacaaaaataagcatttttgaagatggaaaaatctaccaacgactcaaaatgaagctacagtattgttttgaaattgctttgggaagctggcaaaagaaaacccacccagcgtggaatctgttcacgggctctgcggctgcatccgacgggagtctggggctacacgcagccagggatgggggaatgggagtggggtggggtccagagacgatccagggggcaggacggacacacgcttttcagtaaaagggaccaagtccacttggtcactgagccaacttgagaggcttcccagagaactcaataaggccaggagcccgtggctgaagaaggaatactccatcgggatttaagcaggaccagaagacctcaccaggctcagttcctcacacagccacaccctttgttaatcccaaagagctcaaagtctaaccaaccaccagtggtctgatttagagctctttgcgattaacaaaggctcacagcgactgggtcagctgctttcccttacactcacaacgctaacagttctttctttaaaaagaaaagtatgtatagtagaaaaaggtaggggacgcgagactgaagtgaagctgtctctggagagttcgggggatcaccccccctcaacccccgtccccactccgggcgaaaagcactgaccgggactggagatgtctctaaggtcgacgcagacccctaacgcgcgcgtctacgccgacctggggcgagcgggccgcccgggagggccgggagggaggcgggctggagcgcgggaggggcacggttcccatagacaggcaggcgggcggtgccagaacttgagccggccccaggggatgcccgaacgtccccctctgtcctagctggggtgtaggtgcagccccagggcatcgccgcgaagcccctgctcgagacctacggagatagtgggtcccgagccccacggggcggccccgggtccgcggagtccagcggtgagctcagcccgaggcgcgggacccaggctgtccacggccccttcctccccgggccatcagcgggcagcagaacgcgcgggccgctggcctggaattgcgcccctcccgaggccgcgcgcccgcgcccaccgctcgcaggggacgcggcctcgacgtccccagccgccccacccgcgtcaccggtgccaggcggcacttccgtgccccgccgtcgagcccagcccctcccggcgtctcccccggcccccgggagcccggaacccgggtcgcgccagaggcgacgcgtcccttaccgcgcagcggctccggacgactccgcagccccgcgccgcgctgggcattttttctgggaaacttctcccggggtccgcagggctgagccgggcgggcaggaaaagcgctcagcgccgggaggctgcgaccatccgggaacttcgccgagatgtgggccctcccctccggcgccgccgcccccccgccgccccgccacatgtggacgcgccgcgaggccccgccggcccgcgccctgccctccgcgcgcccgcctgccccgccagcaatggggctctgcgcctgcagcttcggcccgcagaggatcgcggcggggcgggatggtcggggctggagtccgcagtttcctcagtcccgctcccctgcgcggcgaggggaccgaggcaagaggacaggagtttgcagaggggcgggaactggaaggggagtctagcccagggcctttccccccaactcttgaatcttctccaccttcttgcggctgctggcggggggatcgggtgggggtgttccctctgttcgagccggaaggaacgccttttcccacgctttcccgtctgctctcaaaaaaagagtgtccaactttcagatatctgaaattcaaattaatttttaaaaatggatttaaaatcggggtgaaccccacagagggccaaggtccacacgcatctgactcctgcccactatgtggggacaacgtgctgctcttccctcggaaagatgctgcctctcctcacaagtcggttggaattgagtcgttttgctgccagtggggatggatttatcatcagccacccacttccttaaatacggtaggatccacagcaaacatgtggagaaaaccgaagctctactccattgccctagctaactcctgctcatcagggggttctgaccagctctgagagctgccacctccaggccccaaagaaaagttaacattcactcgctaagacgctatagctactgagtgtgcatttgaaaggaataacaacaaaaagttcttgctcagtgtaataaccatcggatcatattgttaaaatatcaaggctgtgtatccctttgaattaaagcagaaaggtgagaatataaaaccacctttgcagaattataactgaggaaattgtgacagtgaaagaaatcagacctactctgaaacaaaattgataatagcactttcctgaaaagatccccttctttcctggggaccagtctgcctttgcaggactaacaaattagctgtaagactagaaattacagtttaggggtcatgcagcctctgtctccaagagtccgaacctccccaaattgctcccggggataacatcactattgtaaaacctaagatctgtgcttgagatactttgcagaccctgaactcagtggatcagctgacaccacccagaatgataatctggcttaaccagttctcccatcccacccaggaacagaaaagagcaagaaaaactcacttcgaccccctgtgattccatctccaacctggtcaatcagcactccccacttctcaagcccctgcctgccaaattatctttaaaaagtcatccctgaatgctcagggagactgattttagtaataataaaactctggtctcccgcacagctggctctgcgtgaatccgtctttctccattgcaattccccagtcttggtaaatcggctctgtctaggcagcgggcaaggtgaacccattgggcggttacaaatagatgcacttcggaattgttacaccatgctgagggaccttaactcccggctttctctgcttctgtaccactccagtgtgcacacgtgtatcttgatatgcttttaacagatacaatgacctctctgggaaagacatttagtaacatgggaaactcttcccattggcaaatttttgtctaaatgtacccatctttttaaggtccattaactatttgcctttcttttaaaaccatttctatggtaatacacatatattatgttttatataaaatgaagacaagcagtttaatatataaatatattactccagacttgaaaacatatcagtagcactaactgtggttagcaaggaaattaaacccaggagctgcctggtccccttactagttctccaagcctcaatt

SEQ ID NO: 4010 - DNA, 4001 bp, Homo sapiens
atgcctgtaatcccagctgcttgggaggctgaggcaggagaattgcttgaactcagaaggcaggggttgcagtgagccgagacggtgccactgcacttcaacctaggcgacaagagcaaaactccatctcaaaaaaaaaaaaaaaaaaaaaaaaaaagacatcaggcccatctggaaagtattctaacaaaataaaaagataaaaagtccctttctactgtgagcagcagatttgcagaatataaaacttctgaaacagcaaggctgtatagccaactaacaaagcaaaacaaaactgaaagaagagctccttcgagggatgtccagccactgctaagttgtaagcctcttcctggggctcaagggcagtaccaggtacaagaggccttcctactgcagttcccaagtgcgtgtctcctacaggcatttgtgcaaagggctccaaccagtgataaatccaatcttccctccatccctccaaacctgataacaatgtgggctggctctgtcagagctagcacggggtttctgaaaccactagggctgatatgtccagcttagaatcttctcttattctctgtcagctttgtctccattttcttgtacaacttggtggtaaaatatgaaaaaaatgtggcaattggaggacagaatcaaccatgatttttctctttcatcactgttctagttatttggcattactaggatataaacaagttgagtccacgagcccctcaccccttcgttgtttatcatacagacacattttacaacactttgggctagaatgaagacatgaaacaggaagttcctgatcttgctctcctctcctccttatcctccctgtctcagttaacacaataacacagtcaaagatgccgtctagtatgtttcccaaaaacacccagaaagagttcagcagcctctctggctaacctgtcctagagctgcacagcagtccaataatgtaggaacttccttctcttaacttggatttgagacgttttctttttccacatacaggtctgaaagcagcaggccactgcgtaattaaactgtccctcattggcctcaggaagaataatcttgggccctttctatgtttctggacggctgcttcccaaccctctagccgtctttctggctcttttgcagactcttctctaggaagcacaaggctgaagacataaagctctggcaaccgtcacacctcacggcctcttcacggcctgctgggctttgctctgggctgtgcctgctccttaaactctggtgccgggaaaaggatttcctcgtctcatattcaagctgtccctactgctgcttctctactcctgttttgtgttagtaaaagaaggaaggaaagaaaagggggaaggaggacagtagaaaaaataaaaaaaggaaacttaagaatttataatgacatactattttaacatgaaatacaagccaaaagatgagttttatgagatgaaaaccccacaaaacaacaaacttttgcatataacctcgcaagcacgtttttatgcacagtatttctgtattttctaacaccctttgaatgccccacagatgtctgcaaacacaggctgatctgtcccgtttcacatttacattaacaggtaaaaatgacaagaggcctagctgaattccacgaaataagttatttaaagaacatccgaagttttgttctttcagaagcagagaagttctaaacagggaagcaagagattctgagaatttcattttcaccataatggctcagcgtttgttcctctaacaacgtgcagttaacagctgtgcgctggctcttacattcaaagccaaaaagcaagttcttcacattaaagaaatcgttaaagacagttcaaggaaagagaattaggtattttagagtggctacgaaaagttttccagggggcaaaaagcactaacctgtattgttttaatctgctgaaaacaaccaacttctcgagttcccctgctgtcttctagccagtttcctgtaaatgttgcatgtgacattatacttcctcactgcaccttctttgactcgcctccctaaccggtcagaggcatgtgataagatcaatttgctgcttgcttcacatgggggtaaccctgtgtctgcagaaatgattgtctcccccagcttctttcaggtgttcccaggacacaggtaaagaggagataagccagggggaagtcatgcctggactccaggcactcctgactccaaaggaacctgaagggggaagggagagacagtcttgagccccagggtcacctatcttgagactggagttcagcagctgagaaggggcagagcgctcacagaggagcctggggcttgggtgctctgctgtcattaggacagcccctgggactgccaccctcagggcagctgaggaagggccctcgacagtgctgcacccaggatgtccccacactcctctctggagggcaccaacatcaagggaacacactcaggccttggttcatatttctggatcctgcagcaaccatggctacacaccctgaatttcctgggactctctcaagttcacatgtggtcatgctgtcagacagtgtgccccaattgttggttcggaaaacaaaaccactgtattctcagccttccagggctaaataactgggagacatttccctcctgctgacctccaaaatatgccagcattttggtttcccttgaaagggctgggcatcatcttcctccaggatggtgctgggttcctggcagcgtgtgagtcctggccatgggggctctgatggtggcctgacaagagcaccagaagagtgccggctgtgaccctctctgccctgtacagctagagaggctggaggagagctggagcagggactaagcaacaagcccaagggcaccatatctagctttcttgttctactcactggtgccttctgtttgtttttttttttttttttttttttttgtgattctctcagccatcaggagggtccaaacatactggaatttgtggatataggaagtggtggtgtgtgggagtcaaatgatctcctggaccaaggggaatattccacaatttataagacttgactctgcaaaaaccccaaagttgcttctatttggctaccctggcatgattatttttaaaaaaatgcttttaaatggatttttttgtttgttttttagaaaggtaactgtagacatattccaagtcttgaaaatattaccctataattccccgatgaagttttccatgggagaataccgagtaaggaaaccagtcctgggactcagaactgtggacaacagtaaaaccctgaagtctcaccacatgattgcacttctggctttgaaaacacacataactgtttttaccattttgacagttgatggctggttttctgattgaaatgacatttagattagacagttgagtcaaaatggctgtccaagctatagtagacatggcattaactttaacataggaataatggtacaattttgccatcttggagtcagaaattgtaagaactttggaaaaacaaaatactacatagatgaaaaatgatgatgactcaatttgaatgtatttagaagtctcacattctgggttaagctgccagttccatttttcaactaagcagctgcatatgttctgcttaagccgtgttctgtgtggaatttttaaaggccttaataaaatgctttataattttccatgaaaatccctaacctggctttctgtccatgattttttttttctggttaggcatttaaaaattttaatatactttatatttcagaacagttacagatttacagaaaaactgagaagacagtacagagttcccataaatcctacgcccagtctcccctattattaacttcttaaatttagtatgatacataagtaccaattaataaaccaatagtgatacataattattaactaaagtccacagtttattcagatgtccttagttcttacctg

SEQ ID NO: 4011 - DNA, 4001 bp, Homo sapiens
ggggatgggaggatgccagcttgaggcagtgggttagaaatggctgggaatagattctgaggtggagatgctggatggggcaggcaggggcaggggtgaggggcagctacctctgctgaagatgggactctcataggggatcttgttgcgagtctccaggcttgagcagttccagcgctggtccctgaattggtgttggcattcgtggatggcgatctggatgccctgtatggctgaggcagccacatcagggtgacgcacacacacctccatctgccgccggctcaggcctggcaatgttaggcacactgtgttggcattgagcacgggctccggggggaggcggaggtccagaatgtcattgggtgctgacctgcagacatatggggtggagtgggtacgtgttttggggggaccaggagagccccatctaacaacacacactctgtcccaacggccataatcactccctcttccaacctctgcttctgaaggttgggcccatcagtacactcctacacattcctctctccttgacctcctcacaatcatcctgcccagtgcaactcactcagctagctgcacacccacacaggtaagcgtgcaaatgcacacacatccaccatgcttgtggccacagtatttcctatgcacatccccaggaatagatgcccatacacacagggttccccacaagcccactcccacagatatgtttcagtcacattcacatagacacacttctgcacacattgtggtggacacacaaacccaaccccagcacacttacgcacatgcacacttcatcagacatagttacagacacacacacaaagacactcccatttacacatgtgttcatcttaacatacattgacccatgagctctcacatgcacacatgggcacacatacaaactactgtttaccaacacagtttgctgggatcctgggctcgattgaaaacacacacacacacacacacacacacacagctcttgcagctgcagtctctcactgaccccacctgggctacccccttccagcctcccaacccctgcccctacctggggctgagctgcaggaaggagtgaggcagcttgtgcttactcctgaggtgggggtgcattcccccaacagggcaggaactccagactggcacttgctccccccccacacacacctcccctcctagttgccatcatgctcctgggcactgccttgtctccctggactgcccatatcctgtcaccagtccaaccccctcctatgagggagctcactgcctttggttgggcaccagcactttcctatgaccctgtccctcccttcttccagggtcctctaccccagcaagagcatcagaggcccctgcaggccggggtcccaactctctaggagggcggagcatgaggtgagggctcacctgggcatggcagcagccagcagcagtaggaagaacaggagcacccagagcgctggccgcggctggggctggggtcggagccgcagccaggggcgagggtgggcgctgcccatggcgcgcaggccctgacgggctgggagtggggggctcacagcccagtgggactggagagccaggggcgccggcgcatgatcggcggggggtcggggcggctgcgacacacagctccgactcgggtcagggctcccggagcagacggcgcccgcctccccgctccatggggcagcacccccgggcaccgccctcggggggggcggggggtgaagagcgggcgaaccgggcacctcctggcacaggggtccggggaatttcccgaggcccccccgcgacaactcccggtgcctctcaagggtaaggggggcccggaggtgcagcgggctggggacgggaggctggggtgccggggaaccctccagcgcagcgccgggagcctgcgcttccgagggcgtgcgaggctggctggcgggggcggcgctgtctgtgtcgggccccactgcctgtagagtaagtgactgtcccggctcggggagctctgccgccttccctttcctccccccacccccccgccatttagtgtctcagggctctaccccacgtgacgtcacgcggcggggcgtggaggcgtgtacgagtcccgaggccactgcgtccgctggggactgggggtgggagcgtccctgctgagggcaacagagggaaaggtgttggggtctgtgcgcgcgtgcacaggaagatgcctgtgtgtggagcgcgctgggttgtgtgggggatatgtgttaccgcgaggtgtgtgtgcctggcagagacgcagctgctggggagcgcccccatcccaccccaacacacacacctgcaggggctggaggggaggggctggcctctgtgtttcgcctcctccgccagaggagggacttcccccaggcctgcctggtgtgaggcaggtgtgggctcctgcagaggagtttggcagcctctggtttcttctcccctttgctgtgtgaccttaaacaggtgcctcctgctcctgctcacggagacctcctctgcccctttgcggaatgcggctcatggggaccaccttgtctcctcagtgagcccggggaggcagcagtgtcaggcccccagaaaatgcttgcgtaggagcgcccggggtggcacgtcctgggaggaggcgttagagagacttttaaccctagaagtggccgttgagatagtttatttagctcccctttatttcacaagaaaatatcgaggctcaaagaggtcacacagcaaattagcggaagagcgagaaccgaacgcagctctcctgactcccagcgcagcagctgcctccccaacactgagtgttgcctgcctgtgcccgcagatactctcagtcttgtcctggccctccctggccccacctgcacatggtcctctaggaggtccctaataccagcctcctggctcaggtctacttctcgctgagatcttcctgtccctccaccccaactgaacactgggcccctcctcgatatagtgcaagtgtgctgggcccaagcaagggcctgagagccagagggcaggggaaaggcagctctgccgtctgtttctggtgctagcctgggccctgatagtggatcgtgctcctgccctgtgccctcggcatcctcctctgtaaaatgggcacaagcctttacacaaacatgcccctctctctgaagagagcccctgctggcttaggaacaaaactatgggagcctctgggctcagagacaaaaaaggcccattcctggaattgcccatccctggggaactgaaggagggggtggggccctccttgtccccagactgtcaggtggtgggggcggcctgagcaacagcaggctgacggcatactcccccctcctttccccctcatctctgccggcagccaccgcagctgtcaggaattaagggcttgaggctgctgggggtgggggtggggcagtggggggggagcagtctggctggactgcaggaaaacagccaggggcagcaagcagactgcgtcagctagagccttatttgaccccaactgccccctgccctccccactctccctaccatgctgcagaaacggggacagcttgggactagcatttgggaagggtaagcggtaagggtaagggtgggaccagactcaagacaggagacaggcaccagcccaggatgagagaggacaccagcaagctggagagtcatattcttattggctgttggggaaactgaggcccagaaagaattaggaacgtgacacagggaagggactcataatcagcttacagatgtccttattccccatcacgcgctcacactagcatttcccacgcttgatgcagcacaagtgtcccctggggtgggccattgtgggaatgcggattccaggccccatgaagttgaatcagcctttccagggaaaggcctgggtgtctgtctttctagctagcatccccagtgattctggtggggactccttttgggaaacgctgctg

SEQ ID NO: 4012 - DNA, 4001 bp, Homo sapiens
gcagagaaggcaatggaaggaggacaagggggcagcttcagggaggaaatggtattttaaccgtaaggataagaatgatttagacagagggggagggaggggaaggaagacaatggccatcagggagggaccccatccccacaccttgaaaaagggcaaagttaggcgtttatggggaaaagagattcctttacaacattttccttggaactctggattttaaatgtaaatgaatcccctttttcactcctggggaccctggccaggagaagctgggttgtgaggggggcgctgtacatactgagtacctcctaaggtcctattattctacacgtcctcccacctaaccttcccagcaagcctgccaggtagggagactgttatcctatttccagttaagactgagaggtagggaaaggaagtgactagcccaagatcacaaacataatgtttagatcttagatctatctgcttcaaagctgccactgcattatactaagccggatcaaagggcatatgttccctagataggacctgggtcgtcctcggttcgccctttccgtgacactagcgtcggacggctctccgcatcacggagtagggattgctgcccgccactccctgtgtgggcatcctactccctatctctccagagcacggggatctgcctctcttccaaatctggggggcgagggaggagcggagggtcggcatccagccaatcacatggcaatatgcaaatagacacgaccctgccttcttaggattggctaacccgtcagcgttattgtccaagtctctcctctctaaacactgagctattccgggcgagggtttgcggctctggagacctagggggaaaaaagtcctttggatctggatctctgagccgtcccggtcgggcaccctccttccccgccccggccccacccccacccccaaggctcgaagctcccgcaaccttcgctgcctaggtgtcccttctagctagggccaagcctgggaagacgcccccttcccttggctggccaggcccctctcccttcccgcaggacccctcccggtcccgtatctcccgggctgcacatattttttcattcatgacccccaggtctggaagggccgggcgcctgggtccggttccttccgctcctccttttccttgcttggggaggacgaggtagagaaaaccagggtcctgactcactttcccctttatattccctctgtcgtcactaaggcccactcctcaggagcccagagagaagccggtgggttggtaggcaaagcagggcggggaaggggcagctgtgtggccctctctgccttgtggcttcccaccttgttcctgtcttctccaaatccagccccataccctgaatccagggccctcctcacacattcttttcctcggatatgtgtcttcccgaaagatctttcctacccactcgcctgttccttggtgagctgggtgagcgcataacttggcggggggtgggagagaacccgggaggaggaaacacaatagaatgttcccgagggttaggaacgtcgaagtggagttcagaaacgcccccggccgaggccagaaagctgggctcggagagcaggtagagccgggaggctgcggaacaccccagtctgtcctgggtcccggggtccccaccctccagggtccagagccgcgccaggacagccggactcaccaccacagtccgccgacgtgcgccgggcacaggagcagcagcagcagcagcccgaggcgggagggtaagggcggcagcatcgtgaccgccctacggccgcccgggtgggcagggggcgaggctgcggggcgaaccgcggcgcgcgagggcccgggcttcagtgcgagcgcggcgagcgcaacggcggcggccgggaggcgagggatccggcggcggcgggggggcccatcccgggcgaggagggcgcggcggaggcggagagcggacggggcagccagcgcctgtgtctcctgcggagctcgctcgggagaagaaatcagagccgggggcggaggtgggaggggagcggggccgaggcgggggcggggggcagggggccggagggaggtggcagttgcgacagtcaggcagcgggactctcgggagcgagccgtgcgccccggggcggctggcgcggagcgcagcggagggcgggagcggggtgccggggcggggccccagcgcgcttcgggctgtgggacccgcccgcttcgccccctcgcctcgcctctctcggacttggagccccccgccgctcgcggccgcctggagtcgggggcaaggaagggctgggaagaagagtagagaggggtgaggggggagaaagaggagctgaggaatgggggacgggctggaagggagacgtttgacaggtttgttgactgtaaagagagaaaacttcccaggaatgagggagtttggggcggggggcggtgcggagggagatgctggcgcggaggcaagagaggaagttggcctggggcgcggggtgcttcggcgagggttgtcaaactggaccgcccgacaggcggatgctggaggggtcatctctttccgtgtccctgttcgatgcctcatgccccttcgtcagcctctccttgaagaagggaggaagccctgggcctccgctctcgctcccccagccatcccacctctcaagcccgcgttctagggcggggaggtgggggaaatgagagggcaagagtagccgctccagggcgtgcgcgcaagcgctggcacttgtaagcgagcgggagaatggaggtcgcagactttcaagagatcgaggggtcagaattcgctttagcccggcctcgcgtgtccaagagtccctgcctcgagttcctcccccaacctggcccgggtagaaggggtgggagagccagctgcaggtgagatggcgtttatcagattttctaatgccacaaaaatgtctttgatgcccctggccccctccccacgagggggagatcaaaggctccgtggggaagagggacagctccattcatcatgccattcggctggcagtgggcagcagcccctgcccctcccgtccccgacgtgccccggggtgccaagggacaggtggtgtgggacattctccctgccataccatcaagagcaaccatcaacctttaaagctgtcctggagtggggaggacagatcgagtccctatggcagaaacgtcaggcgcccagaagaaagctcctggttgttggtagagagggggacctgaatgtggggactgaggtcgcttccaagagagtgatgactgaggtcacttccaaacaaccttggtgagcagagagagaagacaagatcctgagtcacccagagaggggggacaagtagatcaagatgaggccaaggggccaagggatgtgaccccaggggaggaggctgatgggggaaggaatgagcagacagaggtgagagaactggagaagtgtggacttgccggcaagcaagctccatgtcagggccctggtgtccaggctgcatcagctcaatcccttgcactggatacagagagttctggtgaaagggctaggacacactaaagaaggggaagggggcagggggcagtggcaagagtcatagagagagggtctggtctaagcactgccctctcccattttagcctttaacagtatccaaaggccacgcacagcccctgcacctagtaactttgcacacagttgctgtttctacggggcaatgccaatctggacagttcctaaaggtcaatgccaactctggacactacacattcaaagacatacccagtttgggtgcacactccagccatgtggtaccaaataggcagctagagggctctgggggtccctggaggctacaggtggccagtggccagcctcctgggagccactgtctgggttccgaaccccctgcccagccctgctcccaccctgctactgttattgcagattatgaaatgctctccctatcctgca

SEQ ID NO: 4013 - DNA, 4001 bp, Homo sapiens
aaagaaaacccaagcaaaatctattgcttaaagaggtttcttattttttaaacaaacagaataactcttgacaattttaaaaccttgggagaaatagttcattagaacgtcattatcttaccatgaagaattaaatactaaaaacctgttctgaagcacttggttaattttctctcccagagtctaataaagcacatgtgaaaggaccatttgttttagtcagaaatacattttatgttctgctacttataagtactcagtatgttctttaggactcattttgaagatgcaccaggaggcttttctcattcaagcactgcctaccgtgatcgctgaattctgacctcaaagaggatctaagtaatttatatcagtgctcaagaataattctggacatcttggtccacagcctacagcaagtggtatctgtaaaattaaaggataattccagtgggcttggtcggactgctgctttgccatctcttgtttgttttgaggaagtggggggaggctaggtaagaacacggaaatagggaacggggtaagggagaggtgagaagagcaaggagagataaagcaggctgtgaacatactgctcgttaaccaagccatactcatactgttgagatttccatcattttgaagtacattatcataacattaaaaaagaaaaaaaatgttaagaaaatgtatctaatttttaaagttatcactggaatacgctgaaatagtttggctttttgtaaaatataaataatgaagacgctgactttttttgtgcttgtcaagctaatagatcatctccacgagacaggcagcaatgatgaattgcaaaacgttattaatgaagggaaaaggttcaagccaatattcacactgcagtcaatgaaagagtaagggggcttctgaggaagggttgaagatgacatgggagagtagcaggaacaacccccttcgctgactgtttgctcctgaggcttttccagttttatgtcactcatgtcttctctgcttccgtcctgtgtgctttccattcccggcaaagctgctgctacacgtcgaaagagctgctttacattgtatccagcttttgccctagtttcaataaacgtaacattcagccctttggctttcctctctccctcctcaattgacacttgcctcttgtcagcaagatctgttttatttcctactagcgtgatgataacatcacttcctccttctgttctgacatcatcaatccactttgtagtttgctggaatgagttaacatttgtgatatcgtaaactactacagctgcagcagaatcacggatgtacctgggaatgaggctacggagacgttcctgacccgccgtatcccacagccgaagcccgattgttccatcctccaagtacatagtttttgataaaaagtcaatgccaattattgcctgataggtgttgtcaaaactgtcatacctgaatctggtgatcaaagatgtctttgcaacgctttgctcccccaggaacaccagcttgaatttcctcagcggattcccgaagtctccgcccgcggacatggtggaactagaggagctgtcgccgcctcagcccagagacctcccggaccgatgctgctccagccggctgacgaaaaaggcgagcggaagggcgggcgccgagctctctgcgcccctgcaagggccggtggaggagcccggctggagggcagcaggactctccacagactggcagccgccgccgcctcccggcagagtagccgagcaccgagcgaggcccgcggctgggaagggaaggagggcggtgtcggcaggagccaggggtgtgctttggcttcccaaggctagggccgttcccttcttcctcacccggctccaagacctgcgggagaaaggcggagggtggcggagccggaaccgcagacgtatctgggatctctcacgcgcggcgcttcggcttccccagccgccgccgccgcagcccaacctgctgagtgcgcgagcctctggcgcggggcgagccagggcgcctccacacatttttttaaatacacaaaacatatgtactaaaaacaatggggcggtgaaaacaaaatattgcaaactagaaaaaagacaaaattgacattttaaagactttattatgtattattaaatatatattaaacagaaatgttataaaatttagcgtccctatctcccagtttctgtgagaggtcagaaacttaactttcctaagccacaattaagcaaacacatctggcctaatcacatggaccaacctgtctcctaacatcatgcaggaagtttcaggagctcctgcaaaactctcccgccttgcatttgaacagatatgtcaactgatacaattacacaagaattgtatcaagatattagactgaatctcacaatcacactcagcctgattattaacccttctcctgcatcttgctcacctaaatgtatctgcattttctatgaagtgaatagcttagaaatgtatgtcgtccatgtattatagtgtaagttattgtagtatagaaatatggactttctttaactcccattttctgcctaggaaataccaatttttttagtatggcaagtgtttccaagcattgagaagtggagagtgtaggatatccactgcagaatgaggtctgcttgtcatcctcttagtctccactgctatccctccctcatctctctctgtttcattgatgagtatagaagatcagtcacttttatatgaaatgaaaattgatgaaactaaggtgttgatttgattatccaaccaaccatttattgagtgttcattataagtcaaattgtgttctggagaacagctcaggaaatgaatgtttgacatcaatgtacataacagaaatacgaacataccattaaaaactcagacctcttatgacaatccagattctcatgtaagttttgtgaagctctttcaagatgacaatgtaacaattcaaaaaaaattatttaaacaagtcattcttgagacagaaaaatggaattacaagatcatatatggctatttcactagctgaaatcttaagtactgtttttagtcaattgacagccatataattcttagttttatatactgatattcaccagaaattaaaaacttttaaaaatatttctgtctcattctactaattttaaaatttcatttatttggttatatttcttcattttacctggccttgaatacttctttcctgcccagcattaagtttaattaatgtctaatttgtttacttggtttagttacttttgaccatgcttggtacacttgttgtggagcaggcatgtagaaatgtttacaggtttatggtcctcactcttccaaatccctaacggcggcacccaacagacacataccacaatgtaaacacatacacacacacacacctgcacacccatactcacccacctacacacacacccgcacacacccatactcacccacctacacacagacacacaccgatactcacccacctacacctagacacacctgcactcacccacccacacccagactcacccacacatacctgtagtccccagctactcccaaggctgaggcgagagatgcttgaatctgggagacagaagttgcagtgagccaagatcatgtctctacactccagcctgcgtgacagagcaaaaccctgtctccaaaaaaaaaataaataaataaataaaaaattagacagttgtggtagcccatgcctgtattctcagctacttgggggagctgagttggggggatcacttgagcccgggaagtcgaggctacagtgagctgtggtcatgccactgcactccagcctgggtgacaaagtgagatcccttctctacaaagaaaaaaataaataaagaagtcatccaccatgggcactgagtctgataaccacatactttcctcagcataaatctcccagtagagttgcttttagaaaatagaagtcatcccag

SEQ ID NO: 4014 - DNA, 4001 bp, Homo sapiens
cagctgccattgtttacccaggaattcccttgcttggtcttgtttttacagcattgctttcacataattactttctgcattgcccctctacctttcttgcagtttctgaagatgctacatcattataaattacaaacatggatattcatcacagaaactggcagtagtagaagcttctagaaataataggatttgatgtgatggtaccatcgaaaaatttaaaattactctcctaaagtgaaagtaaaatgcaagggaaaataattttccccaagccagatttaccttgaaattcttctttctagatttagtgcataacagcaagccatccctgaagaagagcagaaacttatacttttacaggttaaccaatggtttggtttaataaataataaaacctcagagtaagacatgaccttggacgtcattgaatctagctgtttacccaatgtaaaaattactaataaaaattccagagatggctttgtgtaagtagctctcctagaaagccaattgcacaatggtttcctagatttctacaatgtaattgctgaaggaaagaagttgtttgaaatgctggatgcaaaatcttacacttgaaagctttgccctacttcttgggttggtaccaggtgccaaccctgaaaaggatgcagctcagagaggaaactctgaacccagaagaacatggctgtccccattccccagcacttcccaaaggcaccactcaaagagagtccatcaatctttggagcactgacgttgaaacagttcatgaaatttcttttacagtcacccaaacacatcctggaaatttaagacctaggagtccagtgaagcacattattgttcttgaaaattataccaaaagtcactcaaaattacatcaaaagtttctcaactcaatgcaaaaatgccaatatagaaagacaaataaaattgcccttctttgggggacactttgggcacattcatcacgcacagtccacacagtaagttacaatgtgcaactatgggactcttttactatccttttcattcctaagtgggaagttgaacaggtatgagcatctcagcagtgttgtaggagggcaaatggaggctagtgaccatgtaatatgcttgccccctctctctctgcaccacattaaaatttgcaaagattctcactcttgtccaagggctggtacccatgtcaccttccctaagtccctgtgtaccaataaggtaaattcaagtaggtaacagatttgcagcttacatgtagaactcactgtgtgtgggtggggagtggggggaatgcaggagatgccctttatgaaaaaaaaattgtggtttgccacaaggtgtcagtatatgtcacctcacagtgaatcaggactggctgttaaacctatatatataatatattagaatcaaaggctgcgtacatcttatatcctgataaaagcaggaaaacacattcctgttccttctctctgtaaagagagcaacgtaaattttaggatatatttgattaaagacagaaatagaagtgtggtgatgacctcaaatctcacctagaactcaactcccctttctcattctgtgccaatctccactactgcagagagttggcagctagctcacagatgcctctctgcttgcctctctctccctcattctttggcctctgagtatcttgtctgtgctctagccccgagaaggtcttcttccctaatgttaccaaaatgcagcgacacctttaaagcgagagagagaaagacagaacaagtaagaggggacaggaaagacagagaacaagatatggctctgccagaggacacatttcccctcccagggagaagggacacaaaaccaaaggtcagctcctacttacctttctgccattcacaaagaaaaccaatttgtctgctgtcattgtcacaggttggggtccccgaactccaggtacctcactcctaagagacactggcaggtagttatcactgctctgtgacctgaaagttacgcctcccaataaaatgaaataaggtccaccaatgggagggaaccagctcagagcttcagggcatgaagagttcttggcaaaagccactggtttacataatcaaggaagtgcaaacaatcacacacagcaaattacaatctccacacctgtgtcaaagagcacaggaaactacatccagatatcagtaaggttgttgacttggcactaggcgactgtgggtcttgggcgctgctcttatgaaacctgcttcgtcctcccacttgctgcaagacagagaaggggaagacagaggagggaaaggactattctcagagtcactgctaatagagctgattcacaccctctgtgtctacatttgtcattttaccattcaggtttacagcaacacagactgactgcatgaatgcaagagtcattctttcacagcctggtggagcagagaggtcacaggacatggagccccatgaacctgactcaaatcctggcatttgacctcagcatgttacttactaccttcagaactcagttgctttcatcctgtacaggatcatagaatgatatcaagaatagaagaatgagggacaaatgacattttgggagtgccttgtaaatttgcaaagaaccaaaacatgtatcactgttgaaaagacatcttcaacatctcaacaaataaaatcctaatagcaaactatttttgagatttgtcttttatttgtttctctcaggaaaatatccttgacaagttgtcagagtaactcataaaagtatttcaaaacaccaaataaattaaaatgctcataccacatagtcataggctacagtaacacatagctgaaaacctttccccatccaatatccattaactctcagtggaaacacagatgtgcacgtccactggagcagcactaaagggctctctgcagtccagcaccctcccaactgcccctaccagttctttagttcaacacacacacacacgcaaaaaaaaaaaaaaaaaaaaaaaaaaaaacacacagagaccagcattcactctggtcttcttctgtcctgtaatgacccatacagtggctcagccagccttccttaagtaagacacctcccctacaaccctagcaggctacctgagggggaagaaaggagtattaggcagatgtacttgatatagcaacagcttagagaaactgaagactgacaggacaaccacacaatcaacacaatgccccctctcaccacagccttaatttaaccaggagatgaaactttacttgttggttgaccaaatatcccagtttgccctggactatcctagttttagccttgaatccctgacaaatgcctcagagatcctagtaaatccttcagtccagggcaaactgggatggttggtcactataaaactggttgttggctgggcatggaggctcacacctataatcccagcactttcggaggccaaggtgggtggatcacctgaggtcaggaattcatgaccagcctggccaacatggtaaaacctcatctctactaaaaatacagaaattatctgggagcagtgggccacctgtaatcccagctactctggagactgaggcaggagaatcacttgaacctaggaggcggaggttgcagtgagctgaaatcatgccactgcactccagcctgggcgacagagtgagactccatctcaaaaacaaaaccgaaaccaaaaccggttgttaaatctgagagattccctaccccagaagccacttggcaatgtctggggatatattttattgtcacaactggggagggatgctactggcatttaatggatggaggccagtaatgccactaaacatcctacaaaccacaagacagtcccaccccaataaaatgaacaacaatgaatgtcaatagagccaagctggagaaattctgccctgaaagaaagaaggaaggagctggggagagagagagactgagcctagggcatgttttgtaattagtc

SEQ ID NO: 4015 - DNA, 4001 bp, Homo sapiens
ggttctcaccttttctgtgcaccaacatcatctgagatgtccttagcactgcagattcttaagggcccactcggggagtttcagctagtttcaaggtctggaatttgaactgggaactggccttcttagaaagcaccaagaggtgattctgatgcccgaagcctatgaacccacagttaaaaaataaaacttaggggccaggcacggtggctcatgcctgtaatcccagcagtttgggaggctgaggtgggaggatcatgaggtcagaagattgagaccatcctggctaacacggtgaaaccccatctctactaaaaaacaaaaaaatagccagcatggtggcacgtgcctgtaataccagctactcaggaggctgaggcaggagaatcgcttgaacctgggaggtggacgttgcagtgagccgagatcacaccactatgctccagtctgggtgacagagcaagactctgtctcaaataaaataaaataaaataaaactaaaaagtaaataaaacttagctacatcaacagaaatattaatgaactggagaagacacaacaccattcattaattcaatacctgcttgaggattgcttgctatggagaagaataacaaggagaagaaggtggagatggggcttaccccaaaaaggggaagaaatctagacttatgagagaatgaaaatgaagaaaatgactaccagcaaaagcacaaaggcatggaaggactcatcaacatcaagaaccccaagcaggtaggatagacaaccagaaaggtcaaacaagtggatctggacaggctaaaggagcttttaaggagaaaatgcactagcaggagagacagagcaagccaaggtgggccttgcctggctggtgatcatctggaaacagtgggagaaggctgcaaggaagaaggaagtggagaggaaagcaaaatatggtgccacattgttgggaaaatgaacatggttgctccccttgaataaataaacgccacctgcaggaggagaggccagggacctgggccagaacctctgctgtgtctcacctaccctgtgccctggctccactgcagcagcccttcaaggccagaagccccatggcctgggacatcctcttcatcttggcacagaaattgtttagggaggtgtctgggggcgagtggggagagagtggaggagggacagctgtcatctctgagatagaaaggtgcaggaaagcatttcatatgtaacaatttgaatgttttttgctgtttttagaattcagaacccttgttggagtgcctaagaagtggggtaagaagagcttccatttgtctgctagatcacatgttagtgggtggttgtgccaggaggcagctgctgaggggtttgcaacaaccaccctggtctgtgtgcctgaatgcttattcagaatggggctgtcagctgcaggctcatgcccttgggtccctgagggtcatggctttgtccctggcgagtcctctctgacctgactcaatggaacgaaggaagaaaggagaattgcccagatgctttctttgggtgatgctgtttttgttaaatttcttccccagaagtccctgactatctttcagtgtccaaaaatataatatatagccaaacttacgtgttttgagtctgagagattaactattttttctctgggcacattgctgccccagattaaattgtttcttagttagaaaaacaaatgaataactagagattctagcagcagtgtctgtcactaagcgctagcctgaatttgttgatgatgctgtgattctatgctaatttaatgtatattacttaaaagaaatagggagagagaggcaaaatagtgtcctgtcagaaactatcaaagagaagcatgtatgtgtagaaaaaattatgaaagaagtggtttttcttaggaaaatcttaccttttttctacatgtcccagtccctaccagatgttcccttttgtctgcctagagacctgccagatttctccaaataatcctgacttcctggatacacccacatagaaacaggtcgggttctagaagaatttgtctgctccatgttccatcagaatcagattatctcattattttggaacaagttaatctgctgcagatgaattaatgaatgctgctgagttagctattatcatttttttcctacatattcttaaaggtatgttttaacccaaagacccatagtgaccaatggctcactctatggctgagctacactttaattatcactgtgcgtcaggttccatacatataaaaataaacctaatatttaattcaaagtcatttgtgaggggttgggacacctgagaattttggataatgatcatgaacatagagtccagattcaaaccaaatggcttcaaattcctactcaaacactagtatatgacattagatgcattatttaatatatccaaacattagtttcctcacttgaaaattgggatgataatagtatgttctaactatactgttgtgagatgaacaaaataaatgaaatcacgctcataaagaacttaggatagtgcttggtatgaagcaagtgatcagcggatgtcagcttttattagcagtatttaagtatagttatttgcaaccaaaaagtgcttagcgatatcagttatcatcttctacaaattataggagaccacagcttctgagataattttattttattttacatatagtaagctatatactatttcaaataagtaaagtctttctcttcgcagactctaattgcagagtctaatttgattcttatttggtcatctaatagctctttgttccaaactggggtttttatatataaggggttcagtgatatactactaaagacaatgttgatttttttgcataaaggaattcaatagcagaaatgcattttaatataataaattaaatcttacaactttaatcaatgaattttcatatataaaaatgaccataaattatataaataactgcagtgcttagccagtattcaaactgtaggtttcagaaatcttgtttgaaagcttaaaatatagggcagttatgatatggtatttggagacgatacagggtgtgatataaaggttcgactacaaggctaatgttataaactggtcacattttgaactgcaaattctggtgacttaattatttttccaagagtttgccaaagtcaataaagaacaattagctcaacatctatgaacttaaaaaggacttagacattctgctatattaaaaagactaaatgcagtacttatcttggtgtgtttcttgtttctactctgggaagattaaaaaacagataactttagaaattacagacctgtcagcatcagtatttagttgaaaacttactgaaacatatcatcaaaaaatcaattttcaagcacctagaaaatcatgagttactgggtaaaatctccttggcactgtgaaaaataaatcctgtcaaatcaacttaatttccttccacgacagagtgacaaaaacagtagacacagagaactggatagacaaaatatatcctgaccaaagtcaggcaaattccacataacacagagagaaaatacagtttgggtgacattttgtctttattaagtactcctattgaataactatgctgaacatatctggaagtgatactcagctggaatattgaacatgtaaggtgactggttagatataaagatgagagcattcaagaccaagttgtggcagggctgattctcactattttaaacaaaatattatcggtaattatgagaaaccaagtaagaatcagcatcattttgctacttctgtttttttaaaaaagcaagatccccaacagaaaaggatgtgtagaactgtaatgcccacataatgttgcgatgggactactgttggcacatttggggtttggaggcccaggagagtgaagatgaatggcatgaaatgaggcatgcctttgagtcaatgcttctgaccagtgagggat

SEQ ID NO: 4016 - DNA, 4001 bp, Homo sapiens
gtatgtgtgtgtgtgagagagagagcacaagagagagaaagagagagacagaaatatatcggttcccagtattgaagttaccaggagtgcccaactccacattgcctaatcataagtagtattttaccaagtaagtaaaaagaatactaaggtggagaagtttttcaaacatggtaaaggtaaagggagaggctggaactgagaatagtgggaagctatcaactgtgaacaacagtacattatcaatgaaccttgtgggcttttaacctcaaattaaagctgaagaaaggcaacactctcctcttcctctgtaatcacagaagaaatgatgcccaaactgacatttttccatgaacattttcccaagtgaagcctctgagatcattaaagaatgtctcattttatttttcaggtggttgagggaagctgtatcttaaagatgcccaacaccagatgaaagcaaaaacatttagtccaaactccagactgcatttttcccaaacagttggcactttgccatagtgcaggcatctgaaatgcggactgacttttagaaatggacctagttgttagtttatatgttgctagcaagaagaaaaaatactcaaagattaggcagaggagcagagaaatacttaagcatagaattcagttttctcatttctgacccaatagttttgccactcaataattttatcttctaaaactcaaaacaggtgctctttcatattaaaattcatggctctgaatgtcgccaaggtaaatattttgcctgtcctttggtgcactgtacataaaattttaaaataattcaaacaaactacagcttgtcagtgaccaaatagagcactggtaaaaataaaatatcttttggttcagcaccagctggctaaatttaaaccctgtattatgtaatcttaaagtgtccttgcttttagttggtgtcttaagagattctgttatcacgtctcttccaaatcacttcagtctctaacatctaaacatttaaggcccgacaggaccaaattaaggtgttcacaggcaatcgaagacagaagaaaaatccatttgaaacagtatatagggcatgatatctttaaagtaaaatctcagtcttctctgtttaaggttgtagttactataattaggactggcagatccaactggcagtgcttttcttaattctgcaaaacatgtaagaacctgattctttagtcttattccagtaatactcccagaggagatgagactctggctggagcaagaactacaaaagcaaagtaaggctgaaaaagaataattttcatgcatttctttgagcaagctgtaacagttgaaaatgttgtaaactcttcctttccctcaacaaattccaagaaatacaatttatagttttaaatatattcattacatttctgctcataaatgacaaactaatttttttctgtgctttccctcttatttgtaagttgaagtataattttaactcatgactgtttatcaagtttggctcattattcttcaatattaaatatgaaaaatgctattctgcaaagacactaacatatgaagctctaaattttatcctattaaatcaatgctaaatattatcatagaagcaaaatccaactggatattttcttttacaatgattacaatttgacctatggtcttcattgaccttaagtaaccagtgagaacattttacaatccaggaagcagacatatagtcaatgactatattacacttaccttttatgatatttaggtttaaccccaagtttgtggaaatatcatatatctttatagttcttcacagactagcttcctcccttgtttcatgtacagccaatttcccagtcccctgaaagcaatgggtgcagtggaggcccgctccactgaagggtctatcaagcaagtagatgggacggctgaatttattttagcagagcgtctaaaggatgcaacttggcacctatttttaggaactgagctctgtataggtggggcctgagtcaaccactcttttaagaagagtgtctctgaggccactctgcctcatagtgccctcagtaatgtatgcatggctctaacacatgtgcagtcaatcaaactcccttccacagccacgaccaccagccaactctgaatttctgtataaaggctacaaatgaaccagtgccgatgaggaaaaggatggattaaagttccggaattacttgcatttgttttaatactttcaatcttttaagagtcaagaatatgaaaataaagcaggtggaaaaagtttccatttattctggtgcaataattaacatgaattcttgggaagaggagacattgcttttctttgacaaaatgttcttagatatgtaaaacattagtttgttttttaaggcttcacatataaagcaaaacactactctagtgttggcttaagtaaaggctgtgctggtttagttaaaaaaaaaaaaaaaacaaggaagaatggtggaaaggaattctagagagaatagagagcacccttgctgtgtgagtcctgctcattaatattggctttaaatcattcagcatgaggaagagcaagcagggaaaaggagtcacctcacgtgctcctgagagaatcatattaaatgtcctttgctgccaggacttaccaaacacatgctgccaatctgacccagaacccaatgagcattgccatttagctcaaaaatgacaacatctcatacattctcagtaaatagaaaataaccagcttcctttatctttcctcccttctgtgattttcctaatgtggtgtggcctaacgacaaactcaaataaagaaaggaaattgccctttggcttaaagaaacacctgacctatatactctatttcatataaaatgcctatttgtaagctgtttactataatacttactaataaaatcagtaggtatattacatttttccatatacaatattggtttctgttaaaagtaggtcaaggagtgatattccagcatattaactctaagaacaactttctgagatagtgttctatatactccacaagagtgttcagggccaggagccagtatagactaattatttagagttgtgcttctgagtatgatagctattaagcacatgtagacatttaaattttaattgatcaaaattaggtaaaattaaaaattcagttctttggctacatttcaagtaaatcagtctccacatgtggatagtagctatgtattagtgcagatataaaacatttccaacattgcagaaaggtctcttggacaatactgatttaaatcacagaatttcaacatagctttgacagtaatatactctgtgacctgggcaagtttcataagttgtctaagcttcactttattcatctgtgactaaatgggactaagctgaccaaccttccattggtgttatgaagatgaaatgagataatatagataaattaattattatacttacattgttattactccaacataacatttacatagaaaataattattactttagtttgctatatgcaaaagaaaatggtactggatctgaaatcacaatagttcaatttaaattatgaggagatagatcctacaatgtaaacatagtcaattttattcttatatttgcatatagttgctaatgatgcttatggtgattttactctttttaaaggttgttaattactcaaagatctgacttctagcttccccaccttctctctccttattaaaaactcactgcttactctttccattttattgatatgtttctttaagtttcactcatgataacttttcttcaaacttgctgtttttgatttttcaggaaaaaagtgtatttgataaaaatacatatacattaaatattattttttcacttttttctcataataaattttctaatgtatatattagtacaaaaacccaatgattatacattaagaccaacaaaaaatggtcaggaaaagaaaccttggtggaaca

SEQ ID NO: 4017 - DNA, 4001 bp, Homo sapiens
tccaaaacattctttccactaacagcagtgtcccacacttaagatatacaatcagacagcaaacaagccatagtgcgagaggtgtaaccacgaacgctcattcccattgggctcttcaatcctaaaatccactcactggataacatacactagggattatccagcttaatggataatgtgactctacaagtgacacccaatgccaattcctaaacaaaacccagaaaatcataaccgttgcttaataacttcacactaggtgaaaaacaagtcgctacaaggcgaaagactgctccttaggttgtgtgggcaatcgcccgcttcattcaggaaaaacacacctcattagggcccgccctcccctcgcttcccacccgaaccgatttgcagcccttctaactatagcacacaggagcacgcactcaccccgcccttactcggaggaggcatttagaccaggcgccttaagttcaccgcccctttctctatgcagcatggcctcggcgtgatcagaggaggtccgggctgagccagtactgaatgcttcctctactacaccacttcctcccacccaacccaaactcacagacatcggaatgaaggagaatcagggcatcctccactgtacaaggccaacagtaaatggtttaaccaacttatcacattcaaacccctgaaaaggaactacaagacggaatcccatgtgcaggcccctgaaaaactgatctttcctacttcacatgccactctgcaaaaccggagagctttcgagtttccttgctggaggaacagggagtcggcagcccctccctcccccatcccaagctctccaccgagggggccacgtgatgcaggcggacgtttcaatgctgctgcactaaatatttctggaaacttccactcctaataatttacagagatgttcctgaaatcaccccaacttctccccagccccaggggctggggaacccctcccaccccgcgcggggccccgcttcactatcacactcctcgccttcctccaccgccacccgcacacgcgaatgacccagcaagcgctcccctcccgaggccgcctccccgcctccatcccccagcggcaaaagcggctccattcaatcgcaggctccgctgtgggcccgccgcgcccccggcccgcccgccgcctcccgggctcgcttcccgcggccgccgccgccgcgccccacgccggcctcctcccgcccgcccggccgcgccgccgcccgaccctcggccccgaagacacagtcgacttacccagagattgaaccaactgctccttccttcctcgttgggggattagggcgagggaaggtggggaggggggagaggggacgaatcaaggtgggtttcagttttcccacctcaaaaaaggaaattaaaaaaacggacaggaaaagggcaaaaagagctcaataatatttactatttcagggacgcttcccccaacacacacacacacacacacacacacacacacccgcccccccccaaaaggggaattaatctggggaataaatgctcccgcccggctggggagtgagggaagggggagggaacggggtcaagtcccaaagattcagccccagggggaccctccagccacaggcagcagcagaagcggcaggagtagggggtgtagagtccacacggccggggagacgctctgctgccagttgcagtccgactcccccctaccaaaacacggctccctctctcacgcggctccggcgctggcccccccccccccaaggctcgcctaaactttccccccttctcttgttcctcagcgactggtggttcccccctccccctctgggtggttgcacggactgcagcagcaaagactggaacaggcaccgccgccggggctgtagctactgttgctcttgctgatgctgtagctcccgctgctcctgccgcggccgctgcagccgcttctccccctcctcctagtgcctcaaactcggaaccggttgaaaccggttcagactgggagattccatctcggttgagttttcagcccatggcgccgcggagcgtttggaacctgggcctccgcccccagcccgccctcctattggtcagttccagctacagccgcgccatgagcctatctctcattggcccgagcgccagtcaatcccgcctcacggctccacacgagcccgccgcttcggcccctacctcttttcagcagcgatttgcccgcagagtgggggaggggaagtggggagggtcgaaaggcaagaggagaggggtggaggaggaggaggtgggacgaagagcagggatgagtagaaaagagagcgaaggaaagccgcgtggaggattcgttcgaacgagctgtcaatcaagagcagcccgccctcgagctctcgacttcccttccccctgcggccctctccctcccggtgcctagttcgcaggcccggcctttctcgcccgctcattggctgggcctcttcggtgacggagagggtggggcgcagctcgtgagctggtggcggcgcgagtttgatcggggcgcgcggcagcgttctctttgcttcccccggactcggccggcccgcccccaccggctcccgccaacctgcgggggcctgagcccgcgggaatcaggatccgcccttcggatgggggctgcgttcggaaaagggagggcacacccagttttgaactctggaaggggtggagaaaagagggaaaaagaacgcttccgaggccaattttaggccccagacctctctaatccattttagaggcctggttttggggccaggtagctgagagaggggttggggtgaggcgcagggcgtgcattcttggcgcctcgtgatcttctcagggtgtcggaaaagatatcgaaatacttcttgggaaagtctccttaaaatttcaactctgtctctccaggctggaatttggctgcttcaacaagcaacctttcctgaaaaccaaaacattgtaatcccaagtgattggtttgacagcgcatgttttggctggctgagcttgcatgccaactgcgtcccacctggtgcccttgatctgcaacactcagattttccttttaccctagctgcacttcacgtactaaatcatcatcaaatagtattttctgtgaaagtcacatgcacgttgcctttcacgtggttgcctctcgtttgttcccaagcgtcctccaaatcagctttacagattgttctttgcttaagagcaaatagcccaccaaaatttactaggccctttgtgccaccaagaggtagataaatgatttattgaattaataacaattttctttagcaaatgttcatccacgatggactatggctaacctcaaagcaccacttattctaactccccctccaataaagaaaaacgcaacaactcaatgtttagatgtaccagaattattttggatgattttcagacctaagtttttattcattacataaatgaataatatcaagccattttatatacatatataatacatatataatgtactatgtatgatatatgatgtgcagtgggccctctgtatcctgggttccccatcctcagtttcaaccagccctgggtggaaaacattaaaaaacaacaacaacaataaaaataatacaaaataaaacgcaatgcagtatatttacatagcatttacattgtataaggcattataagcaatgtagagatgatttaaagtttacatcgtataaggtattataagcaatctagagatgaaagtaacgggaagtttacaaatacagtatatgcaaatacagtaaatcctcacttaacatggtcatggagaggatcttggaaactgcgactttaaacacaaggataggccaggcatggtggttcatgcctttaatcccagcactttgggaggccgaggcaggcagatcacttgaggtcaggagttcgagaccagcctggccacatggtgaaacccctctctactgaagatacaaaaa

SEQ ID NO: 4018 - DNA, 4001 bp, Homo sapiens
ctcccacctccgcctcccaaagtgctaggattacaggtataggccaccgtgtctggcctccccccagatatttgacaactgttgtataaaaggattggtctgccaagaaagacaacgggatcaacagatggaagttacagggagactgatgcgactccatacgagggataaaaaataacatttagaagtgatcaataaagaaactactcttttttaagtgatctcttgaccctagaaatgttttaaaaacctgaatgaattcctatcagggaagttatagatgatttctaaatgtggttatatctcaggcaacacatgaaaagaaaagattatttttcactagtttacaaacaacacaatgcactaagagatttctgaagtaaaattagattatttgaaaaaaaaaacgtgctaataaaccacaaaattcctttgagaacagtaaaatgcacatcccagtttcaatgcctggggcatgataacctaaaaaaacttaagagtcacaaaatatgctgctgcacttatttgatacacacccacaaaagctacttttaaaccagaaaactctagaggactaaagcacttttgtcatgaattaggtatccagtaagtgccatcaaagggtttcaaatatggaacttattgtctggaagcagaatggtctatatttctgagttcctatctggcagcagtaagaaaactgagaaagagaaaccgggtagcatagcaactcttcatttctataccgaagcaatacaggctgttagaattttacttccagttcatctgcaacaaacagctcctccactagagctacaaagttttcagcagctgaaagaggacgaaaaaaggaggtgagtggcattattaaaagttcatgatcgttttaatcaacatttctcaatgaggagttgagggaactagggatcagttgctcaaactcgtatcttgtttatctgtattgaataaattcattaatccctggaaccacatctccctctagtgacccttcagagacaactaccactcttttatgttgaaaaaaaaaaatcactttaaaattcattgtaatttctgttactgatctgggacaccaatggtcatagatttctagcaacacaggggttctccagggccctgaaaccagacagcttggattcaaatccggatttcaccaggaaaagcccacagttctttattcctcggttttcccacttgcaaaatggggataaatagttttcacttcaaggggttgtgaagattaaatgagataagaataaaaggtttagatccgtccctcacagagtgggctttcaataaatgcgggatactacgttattataaagctaataatacgacgctttacagtttaagttattttagtcacagatagtccctctcttaagttttacaacaagccctgtgggatagttgctttatcacagctaattttcattctcatagagatcttaagaacccaggctcggaagtaatagaggaagtggggctagggagtggaatgggataaagagagagagaggggaggcgggtggggaggcaggtgagacaaagagcaggtagagagggagaagagggatgggatgggtgggtaatggaagaggtggagtcagcgaggctcaaattcaggtcttggagccccaaatctccagcttttctcatagcgcatccctcggtcccggccctcctgactgagcccaccaccatgatcttctcttgccccattctttgtcttgaccgcgatcccacgattcctgcttccgaaccaccctctccggatccccagtccgggtaaagcccaagtccatggctttctttataccttattccccgaccgcaccatgttgccggtcctcaggcgctttggtcgcttcttccgggcgggaacctgccgtgtcgcaactcgcttccggtggacaagcggcagatagcggaaagagccgcttcgtttcctgctaggcctgaaaggggcggggaaaccgtgccccggaactctgagcatgcgcagattcccgccgagcttgcgcagattcccgccgagctcgcgcagattccggccgagcatgcgcagattctctccgagcatgcgcagattcccgccgagcatgcgcagattcccgccgagcatgcgcacattctctccattccgccgtagtcgggagcgtgtggtgtttgagccgcctgaaacgctagtacgacagatttacttaaagattcacttaatcacttaaagattcacgtcccttttctctcattgagaataacacctaaggcattttgtgtcagagctctggagttagatttcttttcttttttttacttttttaaaaaatcttttttcctttaatttcattttttcatttattttttataacttttgatttttttttttctcatcacttgtgggtttttttctactttttatttttggttattgtggagttagattttcttgagtatgagtatgaatgcagaaagtcacttaacttctctaaaagactcagtttcttctaaaaagtgataatgaaacacttcaccgatgtgataaccttagagccaactggggaagaagagtaggacgtccccaggagcacaaaagtagaagggagattctactctgcagagaaaatgggatgcacaaacgcctggaggcatgagactttatctgctaaggctctcccagtagttagcagtggctccagcttggaagggaggagtcaaggtttaatttagaagacaagtctagggagatatagaaatagcagctgtcatcacagtgctttacttgatcacgagccctttgtccagcccgcatcccctacccctttgagggaggcaggcccaagcagtaccttgcatagaaatgactgctttctataccatatgacccccagctgacaggtggctggacgaagggtctggcaacctgcaaagtgtctgcaaacctctgcccaaactgagaaaatcaagtccaatcaatattctctcctgcttgaaaattgtttctgggaaaagcaagaattgaagctgaaaagatgtggagaatctatgagccaaaattataaatacattgaagcctctagaatgtagagtcagacatattcagaggtgctcatagagcccaggaggttcttccagcttttgattcaaactcaaggagttacttaaaagctgaaatattatttttaataatactttaaaggaacagcagcgccctggccgctcagctttgcgcgggctgcagcaggcaggcaggcaggcacggacactcgcccttccctgcgggtaagatttccaagagaaagatcagctcggcagaaggggcggggaagatctgtgaggttgtcagctaaatctcctccagcaaaggtggaaacgaagcccagcggaggcagcaggacagcataaattttcagacaaagaagcaaacaaggaaaaatgggagcaaagggcaaacaggccaagtggctatccgggaaacaaaagatttatctgtggaaagcggagaaactgaaacaaggagagtccagcctctggtgaagcaggacagaaagaagccaaatctgattagtatcacataccatatcttgtcagtggtccttgtctcccttcttgtacgatccagagctagagagagagagaaaaggaaagaaacagacagggtgtcgctcggccgaggctggagtccagtagcacaatcatagctctctgcaccctggaacccctgggctcaagcgattcacttacctcagcctcccaggtagctgggaccacaggtgtgtgccaccaagcccagctaatttttgtggggtttctgtgtgtgtgtggaggcggggtcttcctatgttgcccagcctggtcttgaactcctgggatcaagcgatcctcccgcttcagcctcccaaagtgctgggatgacaggtgtgagcaactgcacttggcctcagaggaatatttttatcaactattttgataaggaatat

SEQ ID NO: 4019 - DNA, 4001 bp, Homo sapiens
aaaaaaaaataaatgtctcagctatgttccctttgatagacaaaaattttattgtacattttaaattatgaccagtactatttttaaaaaacaatgccaaacagcacaacaagaaaaacaaaagggaaaacaagctatactgatacaccataaaatttcttaggaaaatctaggttctttcggccgggcgcggtggctcacgcctgtaatcccagcactttgggaggccgaggcggacggatcacgaggtcaggagatcgagaccatcctggctaacactatgaaaccccgtctctactaaaaaaaaatacaaaaaaaaaaaaaattagccgggcgtggtggcgggcgcctgtagtcccagctacacgggaggctgaggccagagaatggcgtgaacccgggaggcagagctcgcagtgagccgagatggcatcactgcactccagcctgggcgacagagcgagactcagtctcaaaaaaaaaaaaaaaaaaaaaggaaaatctaggttctttctcagactgaaatttctgtaaacataatttatgatttcatagcagccagtaagtctggtcactggaaaataactggtgcacgaagtgtaataaaaatttgaaaatggccggggcgcggtggctcacgccggtaatcccagcactttgggaggccgaggcgggcggatcacgaggtcaggagatcgagagaccatcatggctaacacggtgaaacctcatctctactaaaaatacaaaaaaaattagtcgggggtggtggcgggtgcctgtagccccagctactcgggaggctgaggcaggagaatggcgtgaacccgggaggcggagcttgcagtgagccgagatcgcgccactgcactccagcctgggcgacagagctcaagaaaaaaaaaaaaattgaaaatgactagcagaataatatccaggttatgagttggatagggaactgagaataggagggaaacattctcctgtgctgtaggaaaatatctccagcacaatcgcttcctcagaataatacaaggaaatctgtagaggctactggaaacacattgttggtttacactaaacttccaatatacctgcgtcaatttctctgaatactgaggtgaaacattacaaaatgcgaggaaaacggggactcgggcaagacatcaaattcaataaaaaccatttagtttgtatttgcagtgccgaatctgatcccagaccccccccaaaaaattatctgttgatacataacagaagaaaacagccctccttcctttttctcattctttgagatctcccttggccaatctgtcctttttctgagtaagggcgagtaattccagaactaaaagcttaggattttgtgggtccaattgaagagactaagccacccagaaaaaccagccaccagacggtatggggaaaaccaagggctgaccgagtaacttgatgctttaaaaagcagctccctacacccctccctccgtccttcggggcctctcggaaggcccggcaggcgtggtgggctgcagtcaccagtcagcttcctgcctgtccccacccggccacgaccacctcggcaccagaaagaccctacggcgtcgggccctggcttcctccgggtgatagcccttccaggggctcagcctcaccttccgcgtctgctgaggagacaaaggtgaagtccccgttagtgggggcataggccgggggcgggcccggaggctgcatctcgcggcgactcccaaccggccgcggtagaagaggctgcggctgggcccagaccccgaggcggccgcggcggcgacccgcacgctcgccctacggtgcggcctacgagtctcgacgtgcaagctgcgagcgaggccagaaacgggcacagcgggccgctgagctgccccgagactaccccaccaaagtcttcttggtggcgaccacccaagcaccacgacgccggcaccctgacaggaccataacagtgacagcggcgctgggattggctctttgtaatgtgctctcccattggctcccggaggaagattctgattgggtcttcctgttgttgattccggaagtttacccaggacaggaagttcacttgtaattcgtggaaatctcaggcctctttttcctccttgggtgcttttgttcctttaagtgcgatctttcctggcgttttgtttacctattacctccgtttttgttaagtgggtgggttaaagaattttagaactaggtagattttatgggtcagccgccgtacaggatctcaagattcccttgccattagccattaattaatagtgtaggatcttgactaagttatatgtaatgtctggatggcagtttcctcacctgtaagatgaagagggatggatcggagaatgaagataaaaggcagagaagccgtaaatcgccacccagagactagggctgtagatacattcctttatgagggagaaaactgaggccagagaaagtaaggtagaaacagatttaggacagtacctaaatctcctaatttctagtcaagtgctcttttcactggaaggccctgtctactgataagcttgccgaagttaacaaactcacctgcttttaaatgtttacatacgtaactttaatattcaagctacataaatgtggcttccaacttgaagaaagaggggttggggtatattaggaggccaacttggagaaatacacaattgatcagcaatagagcaatcgagagacatgtctattagtgtgttaaatggtatttctggaaaattttctcacaggaggtaacatgttggtacttaaaggatgagtaaatgtagtggttttgtttgttttagagacaaggtcgctccgttacccaggctggagtgcagtggtgcagtaatagctccttgtaacctcacactcctgggctcaggcagtcctcccaactcagctatctaagtagctgggactacaagccccctgccaccatgtttggctaatatttatttatttatttatttatttttgagacggagtctcattctgtcgacaggatggagtgcagtggcgcgatctcggctcactgcaacctccgcctccagggttcaagcgattctcctgcctcagcctcccgagtagctgggactacaggtgcctgccaccacgcctgggtaattttttgtatttttagcagagacggggtttcaccatgttagtcaggatggtctcgatctcctgaccttgtggtctgcctgccttggcctcccaaaatgctgagattaccggcgtgagccactgcacccagcccgaatataaccattttttaaaacatgccaatttgatgggtgattgtggggaaaagaaagagagatcagattgttactgtgtctgtgtaggaagaagtagacataggagactccattttgttctgtactaagacaaattcttctgccttgagatgctgttaatctataaccttagccccaaacccgaactctctgaaacatgtgctgtgtcaactcacggttaaatggattaagggctgtgctagatgtgctttgttaaacagatgctggaaggcggcatgctccttaagagtcatcaccactccctaatctcaagtacccagggacacaaacactgcggaaggccgcaggtacctctgcctaggaaagccaggtgttgtccaaggtttctccccatgtgatagtctgaaatatggcctcgtaggaagggaaagacctgaccgtcctccaacccgacacccgtaaagggtctgtgctgaggaggattagtataagaggaaggcatgcctctttgcagttgagacaagaggaaggcatctgtctcctgcccatccctgggcaatggaatgtcttggtataaaacccgattgtatgttccatctactgagataggggaaaactgccttagggctggaggtgggccatgcgggcaacaatactgctctgtaaggcattgagatatttatgtgtatgcatatctaaagc

SEQ ID NO: 4020 - DNA, 4001 bp, Homo sapiens
aggcacacatatacctaggactaccttcatgtctcgtggactgtttttcagagggtagtagctgctttaattacttcttttcataatttttggccttatttcctttcacttttttctaaacctgtttatttttctcattacttaaatagaaaacagaaaagggaaattagtctagagaaaagttcgcaatgatccaaccaggtaacattattttccaagctacatatattttactaacgtctcataacttgctaaaattattgctcgactttgtccacgacttttgattaagttataagcttctagagaaactattctaaattctttgtactttacttcttacctaacccagtacaagtatgcgataaactttcaggaaacgaattcaccaaagcacttcacttctggcatgaatatgtaccctgggaacaccacaggccttttggttcctctttggtggaatgcagctgcgacgctctatatgtggctatgcaaagttagctaatatcctactcctcccagtttcttcaccaccaagtctactaattttccaaaaacacaaggttagcccgaagttacttcaggttttccatctgtcaagacgacgtagaataaaaatcctcagattaccaacagatctctgtaaacagaaaaagtttaaaaataaatgagctgtacagcttcccagactctcccttgaaagggagattagttggtatcaggattaaacagatctttgtagtatttcaatttcccactcccgctgatccggacactcatttgtcccatctacctgcagagaaggtacaggaaaggggttgcaagggcacgcccaccctcccgactgcaagcggagggaaggccgcagcccgaagctggcggagctgggccggcccgggcgacccccgggtgggctcacccggcagccgcagtggggcccgcgagcgcccccgccggcccagctgatggaggccacgtgacgccagccggccaatcgggagggaccggggcggcagagcgcggcggcggcggtggcggcggggcctccctcggcacaacaaacacgagcaggaaacagctgagcgggtggccggggggctctcttggtcccgacacccggcgggctgcccaaccgtcaccctgcgctgtcagtcccgggtcctctgggcaggagggcgggggaggcggacgttcatgggggggagggggcaaagggagacaccgccccagcccggtggctgggccgcttgggccgggcgtgggccctgctcaggacggttcacgccgtgcggtcatcgcggcccaaacaactcggtcaagttccgacttggattcggggcggagaccgggcgcgcccccgactatgcgacgggtgggggcggggcagccgcggcgcggcgcggcgggttgggggtcgcggccagaccgtccgcccagggggcgccgtgggcctcggcggcgggcctcggaggacgcgacggggaaacggggcggaggcgcgggcgccgcgcggaggggttgcggctgttgtcgcaccggtcgcccggctgcgcggcgggggcgggccgacggcggccgccgcgccaggcctcacaaagagcaaacagccccgcgcgtccgcccgcggtcccagcgccggggcccaccctgaaggatctggggcggccgctctgggaccccgggaagagcgcggcgaggaagaggcacttcctgcctgggccccccaccctgggccgattcccgagtgcctcgaagccgcccgacccgaacgggcgcctcagtccccaccggccccgagtccagcccctcccgcgggactcaccctgagcggcggtgagatccgcggctgccagcggcttgtcgctcttcagctggtatgaagcccctcggccacccgagtctccaggtttagtcaggccctggccttggccccgcctctccctggttgggcctcaacgtcagtcacccggcgtggctccgcccccccgcagtcagctctcccggttggcccagaacgccctttatttctaggccccgcccctgtcctcggcctcctgcctttttcgcggggccccgccccttctctggctcaccctcccccactcccgcacccctccgcttcgcggcccacccctctcagaagccgcagacccagggcaggcttgcgacagctcgccccgcccctgacccagcacctcggactcgtacagccaatcaaagaggctaactctgccccttctctcgaggcggccaatgtagtcagtctggggacccacctccccctttcagctgagcgcacacaacacagcatccacgtgagtcagcttcttaaaggcgaaggcttggcctgtctaattgcggcagctgcgagacatcgcacgtcattagcgtcaccaggtagcggctggagccgagcttcctgatacctagtgagccgcggtgatgacaaatgaaaacaataagctgtttcctagacaaacagctgcctaggtaactaaagtgcaccgtgtaattcgtttcttggaggccgtttccccgaccacccctggtagagggctgccttttgctttcaaacccctagccctcgagtctaagcgcataggcactcctaagaaacatctgtggatacaggatttttcaactgcgcttgactttatttacaactcatttgaatgttttttctgggtagtggaaatgattctcaaaaagatgaagaaattcagtcttctatatggcgaatttctgcctcagagagtgagatttgttcattgcaaagagcagctgttcccttaacccttatcaatgcttaagatggaagatgttgcttctcattccattagagttgcccaggtacttacatctctgttagctgactttcgggataaaaccaaaatatttgatgacgcatacctctcagattaaaaatgtaggttagcatttggggctagtttgcaacatgtttaaagtcattattggtggaagagaagctgctaagcaaattctagcacttgactcccgctcatccccaaatccacaagtattttcatttagttcgtctgaagtttacctgagcatcaaaggcaaaaggactagttatcttttaataagtgagttttccaggagataagtttttttgtttgtttgtttcagacggagtcttgctctgtcgcccaggctcgagtgcagtggcatgatcttggctcactgcaacctccgcctcccgggttcaagcaattctcctgcctctgcctcctgagtagctggaattacaggcgcacaccaccacgcccggctaatttttgtatttttagtagagacggggtttcaccatattggccaggttggtctcgaactcctgacctcgtgatccgcccgcctcggcctcctgaagtgctgggattacaggcatgagccactgtgcctggccagaagttttaaacatacagtattttagtttattttcctttctatttctttattttcaattaacaatatttaatataaaagttacacgtttattgtaggaagatcatactgcctcatttgataagagacttctgtcttctaacagcttcatatgtatcctattcttcccaaattgaatgtattatacatagaagcatattgtacttcctgtttttcaacctgcttttttttttcactcaacaatgtgctatagccatcctttcatgtcagatgtgtcttttatctacaaatttacctttgtctccatagttttccgtagtatgacttcaccatcttttttttttgaggtggagtcttgctctgtgccccaggctggagtgcagtgttgtgatcttggctcactgcaacctccacctcccaggttcaaggaattctcctgcctcagcctccccagtagctgggactacaggtgcccaccaccacgcccggctaatttttgtatttttagtagagatagggtttcaccatattggccaggctggtctcaaactcctgacctcaggtgatctgcccac

SEQ ID NO: 4021 - DNA, 4001 bp, Homo sapiens
cttggggggtgggggtgggggaggaggccagggagaaattatttcttccattcccttttgaaaaatccccagtctagtatgcttgtctatcaaagcccacctaaaatatgatgtgcacaaacacatcaaaaataagtaggcctcttgtaaaagtgacacttaaaaggcaaaccatatgagattatttcccattttattcatagaaatgactcttggcagcactgaaacatttaaaaacactcctggatataatgctggtatttcagttttaaaaacttatcctacggatcaaaagatccatggaatgacaaagctaaaaatgttctctctcactaataagggtgaatcacagcagccacctactccacccaacaatcgtccttgctaagactggacagttcaaaacctggaaagctttccttgtctgctccacactggaaacgaattcacttcaacactagtgtttaagcacaggtgtgcaacagcaaggaaatgttattaaatgttgaaatttaccaggacattgtgttcttcagatacagctgtgtccttttcacatttcccgaactcccctcctctcctgtttatggggggtgggggggagcacaacagatactcttacttgaaaaataaagtatctgttcagattttctaagtaaatttccattactgggtttgggaaaaaatccctactacattgtctgtaacaaaaaggtgcctgcgccttctttcaactgcctgaagcttgtgaaccgactgaatacatttaaagggctcacagatctcaggacgcagtctccccgcacaagaaacttaaaaacgcctttcagtctcgcagagacctacttggatgtttccaagttccatcgtttggtagctacccagcatctggggcgaaaaaaaaggacttatccttggaaaagcggcttcttgagtctcaacaaccggagggacacagtagggaagtcagggctcacctaaaaccctccaccccagcagacagtccggcaagccccggctcacgtttgtttccgtgcccgcgaaactctcaatgaaaagcatctcacaaaaggcctcccctgctccccgcgccgaggactcaccagcaccgtggtgcagatggatctcagctcggactccactttctcccgatagtccttaatcagctgcaacttcttgtcggaggtgtcggtcttctgctcgatgctagagatgaccctccaggcggacctgcggcccccgaccacgttcttgtaggccacggagagcaggttgcgctcctcgttggacagctcggcgccctgctcggtcactgccttcatgcaggtggccatgtcgtcgtagcgctcggcctgctcggccagcttggccttctggatcagctcagtcttctccatggcgggcgcggggccggggccggggcggagggcgaggagagcgagggcgagcgccgacccgcagcgggaggagcctcgagagctgcggaggggcggggcggcgaggcgagaacaaaaagcagagagggagcgccgtcagacaatgcggcccgccgcccgcttttgtctcccgcacacgcggccgcttgaatttccctctcccccgccccctcccccgctgggcacccggggaggccgcggcccgcggctggaggaggcgggggcggcgcggaggccccgcgcgcagggagcccgagccgcggccgctcccgccacccccgcccggccggcccaagatggaagcgaccgttggccccgcaccttcccgcccggagccgtccctgaggggagcggcatcgacaaccggctgctctcaagggcggcacctccgcccggccctcaatccgagcgcggccggaggaagcccgcgggccgacccaggcgctcaccttcacgtctccgcggccgcgacgcgagtcccaccactttgatctgcttttggctttagctgaggaccctcccgtgtcagcctaccccggggccgaggggcggtccaccgcccaatgatgcgccgagcttctcccgagagtcccgcccccagcgcgccgctggccaatgaggaccgagcgcgcggaagggggcgaggggggcggagcgggagggaacgcggaggctaggagggtgggtcggtacggggaagttcggttggccggcaggctgcggcttcggccacggggtttcctccaattagatccagggtaaaaggacgtcactgttgccatggcgatgccgttaccaactcccctcagcctccccgccaccccggcacttctgggtgcggcacgagacccagaggcgcgcacgacctcctaggcggcggctgcgtctcccgctgcggatggtgcattgcatctcacgggctctggccgaggctggacttcggagggtgacatattcagctgttttagagcacgggggcctttctttcctccacctttctatccgtgacaaaggtttggatcccaagacactaaacccagaccttaatgacgttgccattagggctccgaattaagcaaaccgcatccccattaaagaagaattgattctggagacggtgtcttcagtatggcatttacatgataaattcaagttttcagatgggcatcctaaaacaaaaaattcccttgtgaaaaggtaggtcccagaagatccaggggagtttctgtgacaatgccaagtattgtggttttctttaaaatgagaaatgacattaagcacaatttgcaggaaaacacctattactaccccttcccacccccgcaaaaaaaaaccctgcccataacatctctccccgcaaaaaaaaagcaatttttatgtatcttttaggctttccaggttatgcacctaaatacatcatttttcacatcgttgtcacatgtgcacacgcttttgtttctggtattatttgtgagaggtcacttgaaaagctgaaatcctctccctggatgttgatttctgattttctcctcctggggaacaccctgctgaagcgagaaagattcccccaggcccctcccattcagggtcatccctggcagctccctttcctcttaaaccactcctgtctctccttgcacttccccagttccctaactccatccaggtagggtggctgccctgcccgtctggcgcgtggtccctgtgccatcttaagatgagaattgccctctgggttcacgctgctatgatcccgattccagcaggtctaaggagaatggatcataaagaatttcccattctgagtggagactggagcaaatccggagaatctctagaatgggagatttgagagtgcagacagatgggaggagaaggtgccgactttccagaaattcagactccctcttgactgcccctccctgtcctgacttgtgaaggttgctttgtgctttgacagacaggagcggcctggattggaaagggcctgtgtcttaatgcagaaatgccttactatgttccagccttctaatggagggccctgctgttatttctggaatccctggggccccgctacagacacatgagtgtttatggccctgtgggctggggtggagctggacaccgagaaatcccaatggaaagaatttgcatgtggaaggtcagataaaatgccttctgtatgaccagtgaatttcaagctcaccaaaattagaggcaacccgggcaaggggagaagccagtggaggtggatgggggatagagacccaggagaggaaattgtcaggggatggaacctctgtggtagagagggactaccagaaggagcaagcacactaaattctttgtcagaaagtctaggctgtgctgtggtctcccccagtgaccttgggcaagtttttgctgctttctgtaccttagtctctgaaatttctgctttcattcaatcaaatatttattgaacaccaactcatctagttgcaatcatctggaatcatgggtaaaaactgcttccaaccaataacacagtataaaattgcattttaggaagattcagaggaccct

SEQ ID NO: 4022 - DNA, 4001 bp, Homo sapiens
catttttagatccaagtccgagtgtttaatatttggatttttttttctctctttactgtgtccttatatattccctaaaagattaagaaaaacggatcaatcatctatttgcttttttagacaacggagaaagtccttgcaattgcatcatggtcatttactctggaattattatcactaaatttttttatttaaacaatattttgtagttaaaaaactccccaaataatctcaaaaagttatagtaggaattaaattgtgatagattaaaataaacagtgcagtggtccaaaagaccatttttctttatcttaattctgttttcccaaactaaattcgtattcatttacaatctcctaaatctctcactatagtagcaggaatttaaaacaaagactctacaaatgaccataaccataattaaaatgcagccatcacttttttttttttttttttttggaaaattgaaaaacaagtgaaatttcactgtggagataggcctactacaaagaggacattaactagccttgaatcacttgtttatttttgtctttaaacgtgtttggaggtttggatccactaaatcctagctgttcatttcaacgaaggtcgaggaagcaagaaggctcttccaaaacagcttcggggttaaagaaggagtacagttttcaacaatcttaagtcaaacatcctcaaattcactctgtaagacgattctcacacaccagtatcgagagctgcttactgtaccatacttggaatgggcccctaaattgtgttgctttcattattacagaaactaacaaaaatagtaattaagttccccataaacagtacttatgcgcgatctcaaagcgcatcagaaacataacattttcagcgatctaacagagataactttttaaaaaaattttttaggcaatcggatgtcatctagccagtcctgaattaaagttttctgaaagctgtcatgggcaagcgaggccagacgaggcgacggcctgggtaagcacttctgggcctggtgcaggtctgggagcccacaaaaagccgctgcctgagggtcgccaaaggagacatccccggctccggtgggaggaaagggggaagcccgagagggcgggcgcttcatgctgcccaagcccggggcaggaagggcggggagcggtggctctggatacatttacgcatgtttttaaaactaatctttagtgttcattgttcctgctggttattcgcatggcctaattgtgtgaggaaaacagaatgaaggaaaatggatgggaagcaacaccgctcgcggtcgagttcttagaaaagcagaagttcgtcgtccctcctcgcacgcacagcgagtgctgggaagtggcctgcaccctaccctgatttgggggcctcgcggttcgcctcccgacagtgccccagtcacccgctgcttggccggctctgctgctcgcggagcccctgcccgtgccgcacgcccgggaccgcgaaagccggggccgctccggcctgcgcccgcgcctccaggcgccaacttctccatgggaccggcccgaactctcccgaaccgcacttggcggcgccgcggccaaggtcccgcgaggacttcccgggcgccgcgaacgctcgctcgctcgcccgcccgctcgctccggccgccgccgccgggcgggccctgggtcggggaggggagccccgaggagcctcccgaggccgcctagactcccgggctccggcggagcctcggccccgagacgcagggacgactcgcgagcgcggcgggcctcgccccctccctccccgccctccgcgggctccagcctgacccctacctggctcccgggcggggcgtgagcagcagccgggggcgcggaggccccgcgcgcgacgagggcggcgggggttgggacgacagcggcccgcgcggctcccacgtttccgctgcagttaggagttgaacattccgcctctctgcacggcgccaatgaggaagacagtcacggcaacagcaccacctacctcccggcgcgaaacggctgggccgccctcccctcacacgcgcgggcgagcggggcgtggggaaggcgctcgggcctccctggcctgcgcccggggggcaccatccgccccgcgccccggcacccgccgaggcccccagacacacctgccttgctgtggggggagggccgtgggggtgttccccctcgcccccagcaccttaactcatctttttgacaaattaacaccacctgctactccttcaactcagtcttcaacaaacaggcgctggggacgcaaagaaatagaggctgttttgtgccccgcaagagttaattctctagttgggaaaggcacaaacgtagagatttctgggaacataggtctgaaggctgcctctctagaaagatcagtaggtacctctggaattttgaggaggggccgtggtctgctgctctagttgctaattttaacagagcagaattcagaagaggagccagagtccgttacaggcctaagccaaaggtggaggtgggcgttgggaagaaaagaaatttctgattggggaggatggttctgtgaaggaaaagtgagaggaggttgcaagggcatgggcaacattattcaggattttgaatttgaattttattatccatggacactgggagctgtgaaaaattagaatcaaaggggtgaaatgggggtttgtgattctgtttaaatggtaattttgagagagtagtccacagtagttgtaggttgggttgctaggatggaaccaggatgagtagtagatattgtcaccacccggttgtgggatcatgaggacctgagttaggatgtaggaaatggaattaaaaagaagaaatgggctgggcatggtacctgtaatcccagcactttgggaggccaagctgagaggattgcttgagacctggctgggtaacacagtgagacctcatctccaaaaaaatcagaaaattagcctgatgtggtggcatacatctatagtcccagctactcgggaggctgaggtgggagaatcgcttgagctggggaagtcgaggctaaagtgaaccacagtcgcgccactgcactccagcctggatgaaagtgagactctgtctcaaaaaaaaaaaaaaaaaaaaaaaaaaaaaaaaaagaagaaatggaattgagagaaatattaaacgtttcagcaagaggccacagaaattggtaacccacaagatttagaagagaagaagaagagagatgatgccaagatctcagacctggatgactggaagaatgatggtgtcattgacaaaaataggaatacgtgaaagggaagctggcttcatgttgagtttgaggtcataggagtaaaaacaggtagagatgcagcaactgaaatatgaaactgaaattcaggaaagaggtcaagagtgaaatagaaaatttgtaagtcattcaataggttaaagatatgaaagttgagggatgaatgagtagaggttaaaaaacaatttattagtctgattaatttgccctttgataaggactggagattttagcattaataaattttattttggtaactgagaaattagaattgatgaaaattgccatgctaaaaaaatgtataatgcaggtctaataaaataattcaaataattccatcctatccattcaaggaaaaactaaggctctttagcatagaccccaggcataggaagactccagtcattttaccttaccttcagaggcacttgtttgttttggaaaggaccctagactgagagtcagagaacctgacttctggtcttagagctaccagttatcagctagagtgctttgcaggataggccacagtttcctcctctgtaaaataagagggactaattagaagttagttgcaggttccagctttaaaaccatgaatgtattgctttaaatttggaacacatggcttaagagcatcaatatttttagccacattgcccttgcttcccatccct

SEQ ID NO: 4023 - DNA, 4001 bp, Homo sapiens
acactctccaagtgtctgttgattgaacaatgcccttccaccgcccctccagtgaggcccccaactccggcctccactgcctgtgtgacctcagcaagcagcggtccctctctgggcctcaggctctgtgactgtaaaagggagatgggaaaaggcggtgtgagtcaggaggataggggctgatagagacaatggaacagggtgggactgtcctgggccttgtaggctgttcacaggattcctgtcctggacatgctggatgccagtaacacccgctgggtcacaacccaaactgtctccaggcactatcaactgtcccagggagacgggaggaggtaaaattggctctgatgagaatggctgccttaaccctgtaccttggggtggggcagggagtggtcagcacggggtggtctgggtgctgcagccccggagagcatacaggaactgtggagtccagagcccgaggccacccagagctagtgaggataatgagggttttagtgagacctttctgcagcacctgtatgtgccgggcagtgtggatacagtcactctctttatcctcccgagagccctgggagggaagcacagagagatgcggtgactggtccagtcacacagctggtgagtggcagagccagaatgtgaagccaggcccccaggctccagagtgtgcacatcaacaccacccccgcaacactgccagggcagtggggctgaggatggagggcaggtgtgaagaggaaaaggaagctctggattcagcaggaggcagcttcacaggtggcaccttaggagtccctgaccctgatctctcagcaaggcattattaaacacctcctgtctgcctactgttccaaccaagacgagagtaatgaatcatctcgagctgctcacctcatgaactcctgttccttcctgtcggggatgcttcctacctgggacacatttcccagcctctcgccaacagtcaggaaccaggcgcctgccaggtgcccatatctgcatgtgcatttaacagatgcacaaactgaggtcagagaggccaagcaacttgccgagaacacacagcagttgaggagaactcggtgttttgctctttctctctccaggtcttcctctaacctgagctcgcctacaagtggctcaagcctgccctggactcctcacaggaatcacagcattctgctgatggagctcacggccctggtgagcagccccctcatcttcacagagtgcacatgcgctttctctggaggtttctctgcctccgagagccaaggatgcagccaaacagggcccagcaggagcccagggactgagcaggcctcaccgtgtcccctgaacagccccgctcggccaagcctctggagggggagctgcttccctcagcgtggccacaagccccgtctgcctccatctccagccagtcaccacccagcccagtcctccagctctcctggtcctcccagcaacctcctgactcccagttaatattctgtcttcctcctccagacacagcccaccatggagacggtggccaggtgccactccacccaggcaccacttacctggggacgtacaggtggatgtccaggcaaacaggccacttgcggggtctctggtcccaatgccaatggagagccggttctgggtgaggaatcggggcttacaaagccggtttggatttccctgcagcccaagcccccagcctgagagggaggccctgccgctcacactctccgcacacaccccgggggaggatgtcacaccccgccagggtttctcactcatggatggggggggttcatcctctgccaggtctcccagagccccctggggtggccctggtggcaggacacaggcagaaggcccgaggacagccgcttacctgaatgccccagcagcagctctgaggcccacggtgggccaggcctgcccggaaggcctggtgtctgctgagctccggcaagcaggcttgtctgaaactaacctatttcctggatgcgaagacaggaaagggggctgtgtttgatgtttacatcaaagtcacaaagtgctgtgctcaaggaaaatcacaggccacgtgctccagggaggcagagggcatttccggggcccagcactgcctgcccagctgcaggatgggactgagagatgggaatgaggctaagcaaaggcagggtttcaggaaggacgactccagcagcaggaaccgtcagaagggaggaagcctgcatacctggaaccggagggtaggcagcagtggtgggaaggaggggagtcccagggctcatggaaactggaatgcccccattttcccctcaaaggggcgtcgccctggggcctgcaccagctagacaacccagaggagtgatttgtttattccacaggcaggttagagctggagggaggagaaacccactgagtcagcccataccccgaaggtgagaaccccttctgtgccaggcatctggatggcaaggacagcctgcccttgctctccagtggctcgcaggcttgttgggggcagctgagtccacagggagccagggctgggaggccggaagcctgggcactgtgtgtccccagagtatccccaagccagcctggaggatgtcagggatgcgttccaggaggagtcagccacccaaccgagacacagagccagggcatccccagtgctagcccggcccacctgggacctttcccacgaagctgaacctggctgagtgccatcccgctgtggccaccacctcctcctcctcttcctctcctcccttccctcaccctgtgcaccccctacccttgggcctggggccacacctcatgcactctctcagagaggggcctgcagagccactccctcggctccatctcccctctagtgccccaaggcctctgggagccccttgcccaccacctccttgctttcttgggcactaagggagtcgtcacagctctcctgtctgtggggcctcagagacctgtgtggaactgccctgggcccactgtggagactcctaaagcttttcttcttggggtcctgctgcccttgttaagtgggcttgtgataccctaccttgttttaacctgaattgactctcccttagctaagagagccagacagactccatcttggctctttcatttgcagccccttacccaccccgcttcctcaaggacttaatttgtgcaagctgactcccagcacatccaagaatgcaattaactgataagatactgtggcaagctatatccgcagttcccaggaattcgcccggttaatagcacccagagccccggcgtttgtgtccggttgataacgcccaaagccccgtgtctatcaccttgtgatagattttaagcccctgcacctggaactgtttgctttcccgtaaccatttatccttttaactttttgcctgctttacttctgtaagattgttttagacccccacctgtcctttctaaaccaaagtataaaagaaaatcaagccccttctttggggctgagagaattttgagcactagctgtctctcagtcgccagctaataaaggacccctgaattcgtctcaaagtgcggcgtttctctgtaactcgctcggttacaacaggctcagctccccagtctgcctgaggatcccctcacaccctaccccgaagcctccttggggacctcctttctggccctctactatcctctggccgcctgaatcccctttagaaaatctgagttccggctctaggctacttttctccttcatacagccccctccaaaatggtgtttgctagcagcctcccttttccccagcggcatcttgaaactccaggtgcagcaagcatcccttcacatccatgctggacgctcatttcttggagtattgagagaaaaagacaccggcaccctgaagagaggagaaattacagcatcaaatcacattcatactacaataatgagagtcgcactgattatgtgccagacattgctgtac

SEQ ID NO: 4024 - DNA, 4001 bp, Homo sapiens
ggggcacactgggaaggtgtgtgcaccagccagagggcacagatcagcaaaaacgtgccttggggagtgcagaacttgtgtctgtgagggtaagagtttggggatgaggaaccacaaatgaaactgcaaaacttttcagtaaagggccggatagtaaggattttagcctttacaggccacaagtgatctctgtcacatcttcgtttttgtttctttaaaaaaaaaaaaattaaaaatagaaaaccacgcagcacgtaaacaaagggcaggttccagataactggcaatgggcactttcccaggggccatgaatttggcccagggagtctggggagcagctgatgtgtacaaagctcttactagcagtgccctttatttatttttatttatttatttttttgagatggagtttcgctctgtccccaggctggagtgcagtggcacaatctcggctcactgcaagctccgcctcgtgggttcaagcgattctcctgcctcagcctcctgagtagctgggaggcgcccaccaccacgcccagctaatcttttgtatttttagtaaggacggggtttcaccatgttggccaggatggtctggatctcttgacctcatgatccacccgccttggcctcccaaagtgctggaattacaggcatgagccaccgcacccggccctagcagtgccctttataggtgccgactcattcgatcctcgcaaaggccctggaggtagacactgttattaccgcactggtgcaatggtggactgagggttagctctgctttgcaggcatgggtatgggtgtgggtgtgcaggctgagagtgtgtccacgatggtgtggaagtgccccggcttcccacacacgcatgcacgcgggtgcatgtccaccatgcccaggatgggccccggccccacccacccgatggccgggcccacccggtgctcacctcttgccgaccaggaacttgtgcagcggcccgcccccagccatctccatgaccagcatgagggcctcggcctggcagacgccaatgagccgcacgatgtaggggttgtccagctggtgcatgatctgcgcctcgcgcatcatctcttccgtgtctgccttctccgtgccctgcttcagcaccttgatggccacgtcgatctgcttcctgcccgacccggccacgggaggcacgtgggcgaggggcaccggccctgctcggccccacacccccacccacccatctctcttctcccttgagttgtgtggtagacaactgtagtcgccacccaggctgggaccaaggcgctcaatgtccctgcagcctggagcgtctgctgaggacggctcacagccggatcgctcaccgggaacagcccatcgccaaaaagaatccaaagtgacaccctccccaggggcagcctgtcaggggccagtggactcagggatcggggaccccactgcagctcccctgggttgggaacttcagctccacagcctccccctgcccaggccccatcccacccccgtcaggtgtcccgagctctctcagggaatcctccagcgtgcaacgtcctgccccagagtctgtttcccaggcaaactgctgtgagacagacatcccggctcccgtcccacagcccggtgaagccactcccctctgccccaggcggcggtgctcccaccacggcaggggcggccatacttgcgcatgcggtacacgccctggcgcactgagccaaagttgccgcagccaagttcaatgtcagctatgaggaggttatcgcgcttcaggaagagcttcttgtccttgagctcctctgggtcgctgtaggggctctcatacacgctcgtgtccatgggcatcggccgcggtttgtctggggacgttatgcgtgctgggcacacacagcggtacactcccaggtcaggggcaggggtgtggggagcaaggcagcctcagcccccacaagcacctgccccagacaagggtgccgtccctggagcatgcacaagcaggtgggtgcccatgcgtgttcctgcacatccacacgcacacactggcatacactcctggccacagctgtgggtgccccatgaagccacatgagggtggactctaggggcgtgtgcattggtatccacgtggcaccgttactgtgccagctggggtgtgcatgtgtgtgcattcgtacgtgtacgcctatggccgggcccgtccctgtctgcgtatgcagcacacagccacatttacgaggcctccaaaagcgagcctctaggtgcacatgtaactatgtgtcttctctgtgcatacacatgttcaggtctgggcccacccatgagaaacaggagcacccgcagcagaccattttaggaatgtgagctctggggcccatcgtgggttcacatcccgcctctaccactgcctcacatccccatagacagacccctccctctctcatctgtaaagtgaggttaatcaccatagccacttcataaggcatgtcaggagggttcggtggctcatacacacagtgacctcggaacgtgactgacacatagtaggtactcaacaaacgtgtgtctggggagcctcaggcaaggccaagtgtgctccctgcacgtcagtacacactgggacgtacatgtgcacaggcaggtgtgatgggtgtgggcacatgtgtgcacaggtgttaaccaagccaactgccacagcctggcccggcccacagcgccccccgtgaaaccccacagccctgacagcgaccctgatctcggctcagcatgagccccaacccgcgtccccacctctgcccgctcacctggctcaggggtgtatccatctgagttgagggtgtcgattcgtctctgaggctaaaggccacagggtcagcaaggcctgagctggggacgtccagcccctctcatgagacctatatccactgaggactcccagagacagtggagagagagcttcttccgctccacaggcaccccagcctccatcccagcctcccccacagccactccccagctccatccccaaggccacactccaggtgcccccaactcacatgagtcaacgtggatgggtgggctgggagtgtgggagcagcagcccctgggggagcagaagggacagtgagggctgggggccaggtctcctgccgcccccgcccaccgcccgcccgcctgctgccgtcacctgaggcgttgctggcactgctgttggggcaggcctccttcaggcagtagatgagcccgtccgccttcagcttcagatactccaccagctgcagggagcaggcagctagcagagaggctcctctcctccccagagcccggcaccccatctgagcacggcatctcccagaacaagttgcacgggcagcctacctgccagagcgtgtcaaacttggtgccctcgggaatgcagtacttgcccgccttgtcttggctgatgaggtagtggtacaccgtcttcccatagatgagggacagggcgtatgtgccctgctccttccgcggcctcagcctggcaggggaagggaggggatgtaacccctagagccacctgggggcctcctgctgtgccccggttcccccgcaacacaccctatgggctccacacctcagagccttgcagagaagctgcagggactggggaagccaggccaggcccccatcacctccagatctgctgatgatgggccaagtggcagagggcggtggaggggccatggctgtgttcccaggaaaatgcactgttctccaagagccaacagatggccattcacggggaatacctgaccccccacggtggacacccagccacggaggaggggacacccatccactggggaacacctggtcccccatggctgaacagttggccatccacggccagacacttgccatccacagagagatagtcatccacaggcactcattgggggtacactcggccatacagtcagccaaccatggggggcacttggccttctacaacaga

SEQ ID NO: 4025 - DNA, 4001 bp, Homo sapiens
atatatattaaatgtagaaaacacaaaatcgggcttaatttcaccactttgttgttgttaatatttttagttaaaaagtgcagttgtcttattttgcatttttctttggagataccttcattattgaaactaaaattgctttctctttagctaaaaaataatttcgtcacaagatgactagaatcataacatatgcatcattttaaaagttgatggatactataaacaactttcacacataattccttaaaataagaatactagtcctactaattaaaaataaaacaattagatatagagaaagctctacaatgcatgaagtataatttaaattgtctaaattattacataacatttaatttcaatgggagttttacttcgtatcagggtccaatctcgaggaaaacgacatccctaaaatgtccttggttttcataaaagtgaatgccatccgatcagcaacccctgaaatttacctaagtgccacgaatccagattgttcaaataaggtaatagaaaacacagatgtgaaggtaatattttgtttttaagtgtctggctatagtacttcatgacagttttaaactgtacaaattggcaataagaataccagttctcctccaaagttggaacctggccaagtatagcaaaattcttaagcattttcttaaatccaatgagcagactttacaccttatgcggtaaaatggtcatggctttttctaattatatccaaagtacaagaggtcctatttaattatgaggaggattaatagcagaaatcgagggaagaaatacctcgttggggtctgtatggtatgtttacgtaatgtcaaatatggttcatcttttaaggaaactcaattcagttgttggaaaacaagtgcacaacatgtaagaacgtcaatagcgttccttggccattaaagggctacaggctcaatgtgttaaacgaatatatatacacacacatatatacacatatacacacacatagatgtatacatatatacacgcgcacacacacacatatatctcaaactgggttacgggacttcacacaattagtgacactgaaacctaatctcttttaaggcgttatcctatttaatccacttcagaatgtaagtaccaagctctgcgttcaagaccctgggttgtgacggaaagtccttccattctttatgggactttaaacatttcagaggtggatcgaaaaagccaccaagtcgtaatttgttggttcaaaagaactaacagtaccatccctgggtgacgggtaaagaaataacgaacacaaagactcgtcatgagtcggtcttccagaaagacgctggcccgagaccgttcagcgtatttcttcacacataaccttggaaaatctcctcaattctgagaggactagcgaaggataaaaccctgtgccagtcccgaggggtcatttcgcacccgggtgcatgggtgggtgaacacgggcgtgtgggcggagaggcaaagcccaggtgcgggggcgccagcagcgtcactatagtaatgagagagctagcgtcatcaggggctggagaaggggcagtgggccacacaggcctaagggaggaacacgtggcccgaggaagcgagccggctcccagggaagcccggagcggggaagtggctttccggagggctcgcggcgtgagtgggggaggggtgggtactcacttcgataatcttctccttctttttttgctccgcctttttgctgcccccggcctgagcctgtttcttggggggcattgcggagacagatggcaccggccagacttacgcgcagctgaataccgtcaggggttctggccctgcggcaggacgaggaggaagaccggggcctcactcgccgcaccgcacggaaagcgagtcgctcattggccccgcaaacgcggcctttgcgacaggtcgatgtcgcagagcatagtgggtagcgaggagcggctcccggaagcggagctgcgcgtgcgcgcccactgcgtcccactaggagggggcagggacgggacgtgggaaaatgactacgcgtcactcgtgatgtcgcgcatccgataggcccttttcagatggcaaaaggcctgagggtgaatctgggcgagctggttgagtccatgcgtttgtgcttcctctcagtccactttcgcttacgatggggcgactcttgtccatcgtcacctcaccgggaaacttttcctgccgggccagttaatggtcccctgtaccatccccatcctgagtgactactaagcagccgcagcgactcggggttgctccgtgaccacgttactcagttaaccttcttgttccctggagaggcggagctgaatggcccgtgagtgtcgcgtgcttcagattcctgcgaaggattatttaaaaaatggaaaaagttaactttcatttgcagggtccctttcatttgaagagcatctgagatggcgtcccagataaggaggcacttgaactccttagaagtactgtattaagttattttgagactttaggagagtgcctaggtgattcctaaaaattcctttataacgtgaaagtaaccaaacttagttagaacttagtttaagtgcttggtagctccagaaattccttggcacattacacacactatttcatttagttatcacaacgacacttaggtgggagttgttactgttttcgttttatagatgaagcagagaaaggaagaaagatgcccaaagttatattaaggacagagccagcaattgtaatcttggcagtccggcttcagcctatatgcctattacctaacattacaaacttagatcctgtttgaaaaggtacttgaatgatgaatgggacccattgatatttgtacaaacgaaaatactattttttaaaaatgtacaatgcttagctgttattttttaaaatgattattgtttaaactatttctgttaagaagcattgtggaaccaagaatcatctttatagataaaagtttttttatctttttcattaatttgaatagggagaaaacgataagcccccctacttagtcaaattgattatttgcttagtaattttctacgtaagataatgtcaaggaaccccaagtatgttttgtgtgtgtatgtgtgtgtgtagaagaaatgtgatagctactaaaaagaattgtgtcgagaatggcaggtgtatgttgacacactttttttcatttgggctcatattggcaggttaatgggctcccccccttttacatattttcatctttattttttgtaattgtcatagttcttgtcagaggatggagggatgcagccagccccctctttactcagtattattatccatttgattatttggggatcgtctcctttgagactttgtttgcatatggaatgtagttgtcttaacttcctacttttagtgccccaaagatgccctttgggcctttgattttgagtaattttactgattattattatgaggcaaatgaattataagtaacaaatatggggaagttacaaagaatctagagtctcataatgttatgataatggctccagtttcatggttcataacttcttctgtctcctgacctttgctttcggttttttcctctgaagtgtagcccaggtagagaacaaagatcctttcttgcctcaagtggaaaatacacatttctgaatatagtacatgctcttatagcactctccctcgtacactatttcttcatacattttagaaataaggaagtccaactcattgaattcactactttttgaaataaggtacatggtttttcctggtctcaaatagcaaatggtagcagggctgggacttttatgtcttctactgctatttttattgaccttacaattcaaacgaaactttcacaaaacagtgcttagaaggcatagtccaagggttacaattcatatacccaagaaagcagggctataaacttgagcgtcaggatgagtgaaatacattaggaagtt

SEQ ID NO: 4026 - DNA, 4001 bp, Homo sapiens
tttaaagttttctaacctctaaaccagtattttaaaatttcaaattctttaaaaggtctgtcatcacagttccttaccagcaaaattattttgatacttgaatttgatggcattgttttttcatgatgtacaatacataactccatatatagaagttactttgtgcactaagagaggggaacagatattcttccatattaaaaaaaaaaaggattttaggctccattagcaaaaccccatcattggtttgtccatacctcaagagcaaggtattagtcaacccattctaagaatttcctttttaatacaaaagataacgttaaaaaaatcattaaaaatgtgccaagtgcaagcttatcatttttaaaagtgcattttactttccaaaaatttttacactttgattgacgtgccctctgggaatctacttttattattacaatactgaagttgttgaaataccatttttatccctctcaagattgctaggtatttagatatttcaaatttcagcagtgtttgtgatttttgcttctgggttttaaaaaacgtgtttaggatgctttaccaagccgatcacattactacagataaaacttcagcaatgtatatagtctatagtaaaacgtatattttttcttacttctattcacaaaggagtaattgtgaggttctagattttcaaattaatattctaagtaagaatcagatgcaatggattttgtttcagtaagtttaatgaatgaaagcccccctttcgcattattaaagatatatacgaatgaaaatttgaattataaccaaaatttaagtatgctacagtatactttgtaaatgtccccaaactcgaatggaaacaagaatgtgcctcttaaggcacagagcaaaaaataaaaaatcagaatctcaatattcaagtgatacacaccatctagaaaattgggctagccggaataatccatggagtttttacgttagggtaaaactgtgctaaactaagtttctgcaaagcctaagtattttgtgttaacatattaaacttgaaacttgccatctcaaattccaagggataagactgtatacaacagatggccttttggtgctgcttaaaacttccctgaaaaccaaatgtttatttttttagaggtgttctcggttctcgggaagcagtcaaatatcaaaacacccattcctgaaaattcctggctggtcctatctggccgggagcaccgacacctggacgggcagaagcaggacctcagcaccgagccgggacgctgagagccgcccggcgcacacggagcccgcccggggggcggggggctcgcacgtgcccggccgggggcggggccggcgctggcgagcagcgaccccggctcggggaggcgggcgcggccgggccgacctcccccgcggccgcgatccagcagtttacataagagtgcgcgtcatggaactgacggagccacacagagacgtctaggtcatgcaggaggcgcccggccccggcccgctcccgccgccccagacccctcctctcatccgacagaaagacagacaagaagggttcccgacctgtcgtgccctgcatgttcagagtctgtcatgtttggtcaagaacggggcggggctggagggcaggtctgcgaggccggcggcggcggggcgcggggaagaccccccgcgccgcctgcgggaacctgctcccggccgccgccgacaggtgacgaagtggtaaaaactcacggttactagtgagcgacacagacacagactttccagtctattaacaaccacgccagagagatggggctctaactgcaaacactgggcaacggccccgcgctgccggcgctgccgctctagtctctattcgccgccggtggctgtggcgtgggagcgggcgggcggcgtgcagcgacgcggggatttggacagtggccgtaacggtgatttctcctcaccaacatggcggcacccgaaacaggcggctcgagaaaatggcgccggccgcaacaccttgcccgggactaaagggcaagagagattcctccgcgagccgcggcccttgcccagcccgccggggccgagcgcgttgaccattggaggagagtgcccgtcaatcacctgcaggggcgggtcttcgcccttctctgtgcagcggcggaggcggcagcctagtggcggggccgggcggcgagagacgcggccggatggctcctcgagtgtctgcaggagggggaggcagcccacgggacctacgagggccaccagcgcttctgctcccggcgcagtacgggccgcggtttttcctgcgagacgcccgccgcccgaggagttccagacgcaccaagcaaacgggccccaaaaccgttagccgaggcgggcaggggtgggataacaaagaacaaggcggctgtagagtccttaaatttttttgtgaaaacctttgttcttgtaataatagggaaatgcagtttctccttcacagttgtagcaagtatctgtttttgtaacgtttagtgttcagaatcatgttttaaggaaaatagcttgccatgcagttttttcttgtatttgctgttaaatttacccaattattacttaaataggaatagctattgaaataattatataaacgttactttatttcgtaataatattaacatgtaaaatgtatgcgagtattttataaatactattaggcatgccttttttttttttttttttttttttttttttttttttttctgagatggagtctcctctgtcgcccaggctggagtgcagtgtcgcgctctcggctcactgcaacctctgcctcctgggttcaagcaattttcctgcctcagcctcccgagtagctgggactgcaggcacgcgccaccacgcctggctaatttttgtatttttagtagagatggggtttccccattttggccaggctggtctcgaactcctgacttcaggtgatccgccctcctgggtctcccaaagtgctggggttacagccgtgagccaccgcgcccgaccatgcatgagttttttatacttatgaagtgaccttaaaaaatttttaaatgacaagtcagtgttttggcctatttaatatattagtcctgaaggaaagttccttgctttttactaaaatgatagactcaatgattaatccaaatatctgacttaatttgtctttccttaataatacattttactaatacataaatggaatgcattcaaaaacaattgcaatgagtggattaaattggaaatgtaaagtttttgatattaacatatacattgaaaataaaggccgggcgtaatggctcacgcctgtaatcccagcactttgggaggctgaggcgggcagatcaccagaggtcgggagttcgatacccgcctgaccaacatggagaaacccagtctctactaaaaataaaaataagccaggcgtggtagcccatgcctgtaatcccagctaatcgggaagctgaggcaagagaatcgcttgaacccgggaggcggaggttgcggtgagccgaggtcgagtcattgcgctccagcctgggcaacaaaagcgaaactccgtcttaaaaaaaaaaaaaagtcgcccctttttttttttttaaagttgaatacagccagtgacaggagctgtggtcgcactatttttttttttttttcagttgaatgcagccagtgacaggacctgtacttatagccacactttaccataataaatttgtagggagctttcaaaaggtactatgaaggtactatgaagaaactatgttaacatttggagttacattaaaatctcaggacttcggttttatcgtaactgttttagttaatttaggcctttctgtagctaatttgggtaactgctttcttgaagttatccagaggcccttgtggtaaacagttgctgttctttcttgcacttctgttttcccctgtctcctgtatctggaggtctgagaatttctttcaagccttcg

SEQ ID NO: 4027 - DNA, 4001 bp, Homo sapiens
cgcgccactgcaccccagcctgggcgacagagccagactctgctcaaaaaaataaaaaaaaaacccacaaaactactccctccctaccatcccaccagtgcttattttccccttacccttcattcattttctcagggcatttagtaccacctaaaatatgatatatttatgtatgtctcccccttcccctaataatgtaaattcattagtacagaaattttcatctcttcttcatttactactatatccccaaggccgtagcaggtgctcaatacgattttttgaatgaatgagaagtattcccatcacaaattactcggaaaaaaaaccagaaaccatatgagaaaagactgattcatctgactgcataaaaccaaaccacaacatccccattcctttttacattgaaaaataatgccataggcaaagacaaatgacaattgggagtaaagtattcgcagataagagatcctagaatgtgaaaaagaccaaaaaggagaaaaatgggcaaataatatggacagctcaccatacttccataccatccttcacccatcattttggcaaaattccaagtgtcttttatgtattgcagtcaagttttggggaatggagcttgtgtccaacacactttgaaactgatagctgctgttcggatttttaaatgttgctattatcttttttttgtgtgatgaattcttatgtattttataacatatcaattagtaccagttatttttcttagtaaattatatcatctgcaagtaattagtgtatctgtctctttccaatatttatagggcttattttaaaattttagtcattttgcatgagaagcttggtgataaaatcatggatcctggacatagctcttccacttacactgtgcaatctcggcaggttatttagcctctccgtgcctcagttttcccatctgtaaaacgaggacggcatcatcttctctttaagtttgttttgaggattaagtgatttatttcatgtaaagcacaaggtaaagctctggatgatcagttaaggtaaaatttgagatagagtgaacagctgaccaatatcgaatggtaaaatcaatcacaactggaaatatatctcagttgagggaaataaaagacgtaggtttaagaacaaagatggtggtttttagcatttcaaatcactagacactgctccaaaaatataatctacaaattagggccatctgaccaagagtctcacttgcttttccaacctaatggaaatattaagtccaaatgacgtctgttgctttattgtggtctttagggtctttccatgcaaatcagtggactaatggcagagtattgcctattctttacctttcaataaacttgtggtttcatcctttctacagaaaagaacctaggaggtgtcagtgaaaaaggtcacatcagtgtcctctgggagtttacggtctcgtggaaacaggcaacaacggtaaagacagacgctacgggaccacagaggcgggctcctcacccgctgctgtgcagagaaaggggcgcatcccggagccttctcgcctccaccccgctcccccgcccaggctctcgacagccccggccctgacggcctaagcctgagccccgcgttcagcttctgctcccacccggaccccgcacgacctctataggtcagacggtggcgcccggccggcccacgtgctccccacgggccctcgcgacgcggcccggacgtggccccggactgcctccaatccagaagaaactaagaggcggagtcccgctgagcccctgcattcaaaagatgaaaagatatgggatcacctttcgtcagagtccgtggccgttttgccgagggccgggttggggggttttgagaaaagattctcaaaatccatgacccagacaggtcctccctttcgcgagccgggaagctacagagtaacaacccgagagagtgacaacccggacgcgacgagacggacccagagccgcgccagggccacaggctccgccccgcgcagcctcacctgccccgcgcatgcgctgcaccgccctccgcgactctgggcaggccgggtctctccctgcctccttcgcctcggctctgcgcaggcgccgccgtggttgcccttctgtaagctttttcgtcctttacctcagatagtagaattttgtttattttatttatttatttgtttgtttgtttgtttatttaaagacagagtcaagctctgtcgtccaggctggactgcagtggcgtgatctcggctcactgcaacctccgcctcccgggttcaagcaagtctcctgcttcagcctcctgagtagctgggactacaggtgtctgccaccacgcccagctaatttttgtatttttagtagagacgggatttcaccatgttggccaggatggtctcgatctcttgatctcgtgatccgcccgccccagccttccaaagtgctgggattacaggcgtgagccaccgcgcccggccccagcccagaatttttaaaattagttgttaggattctgctttcaccttggtgaaaactcttccatcaaaatcacagtatttctaagggatggtagtaacagctaacatttatctgagcactccactactattccttagaaatagcgtttcacatgttagctaacttaatcctcacaacagccctgtaaaagatgttctattaccattcacagttttgaaatgaataaacagatgtgtagtcaggtaatgtaacttgtagggtctctacaattgaatgggaattaaaatgaatacacaagtaacctcaagacagaaaagtccgttaaaaagtaccaaatactaagagaattcagaagagggaaaaaattgcatccagttgggaaggcttcttgagaagggagtatttgagctgggtcttgagatatttccataggaaaagaggaagtgggcattccaagtagagagaattgtatgaaggcaggaaaatagagcatgctgttgcagaacaggaaattgctcagttttgctcaatgtaatgccatttaagggacctgtagaaaggaaggctcaaaccctaggttgggccagtgatagagaacctgacttgcttctgtaagtgaagggagtgtttgattcttggcatgaatcaggatccctttaccgattagtgaagggaactatttgaagccagacatcttccccagggaaattctactttcccatgttgtttatattgtaggccatcacctatggaacatgaatcattactaaaaattcagagaaaaaattgaattaaggagataaaaactagaattaccccctctttagcaggaagcattattatagaacccaaattgttaccatacacacttttttatataaaatatccaacatacagcaaaagataaccagacacaaatgaaaattagattggtaggtaaaaagcagctaaaacatctgacctgcaaaggcatcagacactagcattttcagacaaagactatataaaaggctacatatgtttgtgttagattgatgccaaaaaaggccccaatttctccaacctttcctgtatccatgtcctttgcaatgtgactttgcagctcctcccataaagaggtaggatctatttcacctcctctttaatctgagttgattttgcctgatagaatgacttgtcttagctagtagaatgcagaagtggcctgccaataccaagccaaggccccaagaggctttgtatgtgtctgctgtctcttatatgcctgccttcttcaggacaataaactcaggctaccctgctgacgataagggagaggcatgtagaagataaggctaatggaggacagcgaaaacacccagtcaacagctagcaaaaccctaaaagcaaagcctcctaggcaacatacagctgagcacacacatgatggagtcctgcagagaaccaaagactctcagatgatcccagtccaaattactaacccacataaataaatggtccttgttt

SEQ ID NO: 4028 - DNA, 4001 bp, Homo sapiens
gcagtagggaaacaattgaggagcaatgacaaaacaatggccgaatgcataaaaagaccacactaattcagtgtcagttcctccacacaacactactaattttcaattttccccttttctggattatccacgctatgctggctttcctctggtgacaagcattatcctagacacctctattcagtcttaataaaataataatagctaatacttagtacttaatctgagccaggcgctctgtcaacagcttcctgtgcattatctcatctaaataacaaacagctttataaggtagctgccatgattaattcccatttaacaaatcagggaactgaggttgagagaaaagaggtatcttgttgcaggtctcacaccaataaccagcgtaactgagatgtgatcactggtcaatttgagtagtttatgctttaacctcttaacgacttagacacttcctctctgtatttttaggaatactacttgttttaatattaggtgaaaacaaataattaggactcttatttgctgcaatcaacatcaccactattccaaagaaaaaataaaactaatgtctagtttaattgcatcttgctcatttgagtgctgacagtaccttggattagcgactctcaagattatttaacatgacacacaggaaccaataaatttttaattacaaccgagcacacacgcacaggcacatacgcacacttaaaagatttttcacaaaacaatactctcattacatgtaatgcagtctgatattttctatgcgatcttactttttttaatgctagtcacgacccactaaatttcacaatgcacacgcgcacagttaaaatatttttcacaaaacaatactctcattacatataatgcattctgatttttttatgcgatcttatttttttttaaatgctagtcatgactaaattaatttcaccattcacgaaccggctgaaaaaactcagtttgaaaaaacactgcctccaattattatgcagagtaaaccatattttatagaaaccagttcttaccctgaattcagcttatttctatccaaatcactggccactgcagtgatactttatcaactctctaacgagttgctttcttgccttctaggctttaggttcaaacgatagagaaaaggtcttccacgtattaagtgaaaaaagcaaataaacaccccttatgtaacacacgtatatatgtttgtgtattaattaaaaaggaaggaaagataccccccaaattgttagcagattctctcgaggatgagatcgctacaggctgcctccatcgtccctccccctccccacacgtagcatattgctgtaaaaaagaaaaacaaaaacaagctatttcctttaggtgggggtggggttttggtcccttgagaaccagtatcttgttatgcatttttttcacgagctaccaagaatcatcgcgtgagataatcgcaggagctggtaaggcccttcttaggagcaagtaaaaacgatggcgtaacacgaccacatttacacaactgttgcacggcggtagtaaaagaatcattaacacaaaaatcaaacgttttcaaataaactataatcgcccgaggctgggaaaggcctaggtctggggccagctggacccaacgcagggcactgggggaagggggtgtgtggacaggtggctcgggatctcggccccacaggtgcccaggggcaagactccgcgggttcccggccctcaatccgaccccgcagaccgccccctccccaagcccggacccgaggcctcgtccgccggcccctctgacccagggccccggacagaagcgcaatgcagcctgcgccccacctccttccctcgccccgccacctcgatcccggcccggagccgccgacacctctcacgcagcaggggcagaaagggacgcggggtggggggaagccgaggacctgcgaggcggccgcgggagcccagcgagcggtcctggcgtccctcgggaagaaggcgccccgggcgcccggcgagcaggccccgcccgcgggcgtcgccccggccgcgccccgcccccgccgcggcactcacctccgcggaggctgcccggattccttccgggccgcggtggagaccgaggaccgagccgggcgctctcccttcttattccggttccgcggcggcgcccgaatcccagaccgtccgagcgccacggccccgctgcccgcggagccagaaataggcgacttcggcccctgcggtccggaggcgagaagcggcgcgggagcgcgtctctcaggacgcgggccccgagtcgcgactccactcacgcaggcatccaaggcaacgtggcgttgcaaccctgatggaggtttgacgtcagggaaggtgcgaaaaccagaccccttctgacgcaggagcggcgggaccgccccctgcccgcccacccactcactcactctcccacccgggcggaggagccccttcctcccctccagaagctcttaaagcggacacttcctccctggtcagggccccactccggagcttgggaaatctatcgcgttccaacaaaaatgactagactcataagcacagttgggacgcgaagtagagaccaaggttttagcgtttgagggtccaaataaaaactgcttgccaattcaaagcaacgtatgaatgtagaaaagaaaacggggctaagagagctagtcgtttccgtttccatgcctatttcatagtgaggtgcatctcacaaaagctgctgttcaatgagcgcttgctctgtgctaggcaccgtttaaggtttctatacattattgcatttcatttcagagtaactctgaatgaatcctattattgtccccctttgacaaattgagaaaactgaggcttaaggaagttaggtattcaaagatctatcctgcacattaaagggttacaaatattaacaaacaacattaggtcatgcaattatattcactgcgctaccccattacgaatatagttgtgagcaaaaacagtttaagtgtaacggagatcacaaacctaaatgaatcacactactgaatatgaaattataatctgcgataagaaggttctgaaacacctaaaccaattttactaaaatggagagaggccctgttgcaaagcttatgtctaatgtaaaaataatcttaaaatgagctactttgctctttggctgtagctgtaattgtcgttaccctttttagtaagcttgtgattttgtccctttaaagaacaacaacaaaaaaacttgcctattgcttttgcgtccattgtttttattctttctgtatttctcagctccttcttcccccactacatctttctctcactttaaagttgggctcctgcaactgttcgatttataacctcccttagatttaacataccaaaaagtacggatttcttttaaggcaagttttttccacatcccaactttggaattatagaaaatccactatacattgatcgaagcaccatgacattatgtatttcacagatgctaagccatgtttttccccacattttaacatctgtgaaatcaagatgcatcttataaactctcgttgaccgggtggcagtacagacctggttgtcattacctccacgtattacaacgtggatgttgctgtgcaggttgtcctcatttcaactgagataagtgcattgtttaataaaacccataaccctaggaggaagggaattaacagacaaaagtcactcaaacttggagagagattttcctagggaaagagggaagatttgcctggagaagattttcctaggaccaaaaagagatttccccagcatttagaaaagaaagagatgggactggctaagaactagtagtcttctgggagccctgagttacttaccaagtacattcattcttgatggattttgggaacccatatatgaacagttaaatactaagcctacttgcaccccccaaaaatgaaataacttcgatattattcttgata

SEQ ID NO: 4029 - DNA, 4001 bp, Homo sapiens
aactgagatgtgatcactggtcaatttgagtagtttatgctttaacctcttaacgacttagacacttcctctctgtatttttaggaatactacttgttttaatattaggtgaaaacaaataattaggactcttatttgctgcaatcaacatcaccactattccaaagaaaaaataaaactaatgtctagtttaattgcatcttgctcatttgagtgctgacagtaccttggattagcgactctcaagattatttaacatgacacacaggaaccaataaatttttaattacaaccgagcacacacgcacaggcacatacgcacacttaaaagatttttcacaaaacaatactctcattacatgtaatgcagtctgatattttctatgcgatcttactttttttaatgctagtcacgacccactaaatttcacaatgcacacgcgcacagttaaaatatttttcacaaaacaatactctcattacatataatgcattctgatttttttatgcgatcttatttttttttaaatgctagtcatgactaaattaatttcaccattcacgaaccggctgaaaaaactcagtttgaaaaaacactgcctccaattattatgcagagtaaaccatattttatagaaaccagttcttaccctgaattcagcttatttctatccaaatcactggccactgcagtgatactttatcaactctctaacgagttgctttcttgccttctaggctttaggttcaaacgatagagaaaaggtcttccacgtattaagtgaaaaaagcaaataaacaccccttatgtaacacacgtatatatgtttgtgtattaattaaaaaggaaggaaagataccccccaaattgttagcagattctctcgaggatgagatcgctacaggctgcctccatcgtccctccccctccccacacgtagcatattgctgtaaaaaagaaaaacaaaaacaagctatttcctttaggtgggggtggggttttggtcccttgagaaccagtatcttgttatgcatttttttcacgagctaccaagaatcatcgcgtgagataatcgcaggagctggtaaggcccttcttaggagcaagtaaaaacgatggcgtaacacgaccacatttacacaactgttgcacggcggtagtaaaagaatcattaacacaaaaatcaaacgttttcaaataaactataatcgcccgaggctgggaaaggcctaggtctggggccagctggacccaacgcagggcactgggggaagggggtgtgtggacaggtggctcgggatctcggccccacaggtgcccaggggcaagactccgcgggttcccggccctcaatccgaccccgcagaccgccccctccccaagcccggacccgaggcctcgtccgccggcccctctgacccagggccccggacagaagcgcaatgcagcctgcgccccacctccttccctcgccccgccacctcgatcccggcccggagccgccgacacctctcacgcagcaggggcagaaagggacgcggggtggggggaagccgaggacctgcgaggcggccgcgggagcccagcgagcggtcctggcgtccctcgggaagaaggcgccccgggcgcccggcgagcaggccccgcccgcgggcgtcgccccggccgcgccccgcccccgccgcggcactcacctccgcggaggctgcccggattccttccgggccgcggtggagaccgaggaccgagccgggcgctctcccttcttattccggttccgcggcggcgcccgaatcccagaccgtccgagcgccacggccccgctgcccgcggagccagaaataggcgacttcggcccctgcggtccggaggcgagaagcggcgcgggagcgcgtctctcaggacgcgggccccgagtcgcgactccactcacgcaggcatccaaggcaacgtggcgttgcaaccctgatggaggtttgacgtcagggaaggtgcgaaaaccagaccccttctgacgcaggagcggcgggaccgccccctgcccgcccacccactcactcactctcccacccgggcggaggagccccttcctcccctccagaagctcttaaagcggacacttcctccctggtcagggccccactccggagcttgggaaatctatcgcgttccaacaaaaatgactagactcataagcacagttgggacgcgaagtagagaccaaggttttagcgtttgagggtccaaataaaaactgcttgccaattcaaagcaacgtatgaatgtagaaaagaaaacggggctaagagagctagtcgtttccgtttccatgcctatttcatagtgaggtgcatctcacaaaagctgctgttcaatgagcgcttgctctgtgctaggcaccgtttaaggtttctatacattattgcatttcatttcagagtaactctgaatgaatcctattattgtccccctttgacaaattgagaaaactgaggcttaaggaagttaggtattcaaagatctatcctgcacattaaagggttacaaatattaacaaacaacattaggtcatgcaattatattcactgcgctaccccattacgaatatagttgtgagcaaaaacagtttaagtgtaacggagatcacaaacctaaatgaatcacactactgaatatgaaattataatctgcgataagaaggttctgaaacacctaaaccaattttactaaaatggagagaggccctgttgcaaagcttatgtctaatgtaaaaataatcttaaaatgagctactttgctctttggctgtagctgtaattgtcgttaccctttttagtaagcttgtgattttgtccctttaaagaacaacaacaaaaaaacttgcctattgcttttgcgtccattgtttttattctttctgtatttctcagctccttcttcccccactacatctttctctcactttaaagttgggctcctgcaactgttcgatttataacctcccttagatttaacataccaaaaagtacggatttcttttaaggcaagttttttccacatcccaactttggaattatagaaaatccactatacattgatcgaagcaccatgacattatgtatttcacagatgctaagccatgtttttccccacattttaacatctgtgaaatcaagatgcatcttataaactctcgttgaccgggtggcagtacagacctggttgtcattacctccacgtattacaacgtggatgttgctgtgcaggttgtcctcatttcaactgagataagtgcattgtttaataaaacccataaccctaggaggaagggaattaacagacaaaagtcactcaaacttggagagagattttcctagggaaagagggaagatttgcctggagaagattttcctaggaccaaaaagagatttccccagcatttagaaaagaaagagatgggactggctaagaactagtagtcttctgggagccctgagttacttaccaagtacattcattcttgatggattttgggaacccatatatgaacagttaaatactaagcctacttgcaccccccaaaaatgaaataacttcgatattattcttgatagcctgattagtcagttacaacccctacagcttttattcaataacaccattgaaggaggaaaacaagtcctgaatgttttgcgtgaaaacacaaaattgacatattcaggtgagatcaagaaggtgccagcatcaaaacttgcagaataagatcagctgcttggaagaaaatcctgcatacaatagtgcagcattcttccttcctttctctccctctctgttttttgtttttgtttttgtttttgttttgagacagggtctccttctgtcacccaggctggagttcagtggcgcaaacacggctcactgcagccttgacctcccaagctcaagcgatcttcttgccttagtctccaaagtggctgggaccacaggcgtgtgccaccat

SEQ ID NO: 4030 - DNA, 4001 bp, Homo sapiens
aactcggtggaggttgggaagatgctgtgcctcgaggattagtttaaacagggggctataaaagatgtaacagatgcaaactgtaacacaagggccattaaccctttctctgccgggcacactcagtccccacgccccacacctattgtctcctgtgctagaagctttgcagaaaacctggaaagtgagtatcagtttccacacatttgctgagaggggtgaagggaggggggcagagagaaggggaagtggatattttagaaagcaccttaaatttacctaggcatacatagtaggagacttttaagtttgacatattttatcatttctttccttgtcctattgatttgaaattgttaggggaaatcctgaaataaagaaatggtcacacaagtgtctgggatgaaacagctggcctgtctatattcatcctgagacacacgactgcatataaatacatgtttaataaagtaagttgctagttttatgggcatgtgtgtgtgtgagagagagagacagggcatttgtgctgtaaactttatctttgcctgttactcctaagtctggagttagtaatcttgccttcatcattacagggggagcatgtaaaatatatcagtaggtgggagataaacacattcatgttagccgggctcatcactgttcctgggaactcctgctatctctctctcgacttttcagtgccaaagtatggaatgggatatatgtgtgtatgtgtcttctattaaatccatgtctatattactttgccactaaaaatacaattttaaaagttatcctaatttaaaaccctgatatcctgacagcagttttcttcccagctgtagtgcccccccctccactttggtaaacgactcaagttccatgaggactttcacttctttatttataatcacagaagtgaggtgttacttcacacacatacacacacaaagaatgaaataaagaaatgaaactcgctaagcagacaaaaacagacaactttctgcttagaaaacagccttctcggtgggagaggatgaactgccatgtctaagagaaagacttgcccccgaatttgtaggtctgtaactgaccaagttttgtaattattaacaggtatttgccaagtcctaattgctgaatataatgaattggaactagatgcgaaaatagagcaggacctctccccttgatgagtttttattccagccatataattctcaataaaacttttcctgggctggatagcaaaggacacctttggttacctgaatgaacaggtacaggggaaattatttgggggagggaaaaaggagagaaaagcaaggagagagagtgtgagtgtaagagaaagcgaagaagccactcttgagaaaagcttgccataaaggagctaaacccacctgaaattcctacccacggacaccccttctcacttcagactcacatccccactcaaaatgagaaaattagaaaaggaggatggaggacgagcacaccaaaaagggataaaaagagagaaaaggggaggaaaaaaaacctacctgcgaagtcttgtttgtagttttggccagaaatggtgagaagaaaaagcatgaagaagccgcgaagtgtgggggagaaaaaggtggaagcgaagaaacagctcccggagcaaactgtacaaaaacctcgccaagagtgtcgggaggcaggaccgttattcctgcagagcaggttagaactgatctctttcggccactccaggaaacacaaacctggggacggactgacgtgttacgcctcttctaatgacatttttttctttttcttttctgtaggagagagacgagagaccctgaaacacgcgccacctatctttgtggggagggataattgaagcgccctgagcgtgagcatcatgtgaaaacgtgatcgccaagtttctctctgggaaaggatctgggatagattataccttgaagtctccgcaaacgctttagtggaagaaatgaaattccacctccctcccttcctcctctccctccctttcgccttcgcctccctcccccctccctcccttctccccccctccacccccccctccccgcccgtcaagcctttggcatcattatcctcatcactaaatcctacagagtacagggcggaaaacggtgcacaccattcacagaactggagaactccaaggggcgaaagttaaagggaaagatcccgggtcctcaatccagatagtctcttcttatacagatatctctaatgaccagatttgagatgcacatcaaattgtgtaggtatctcagtacagcttctggaacaaagttctctgccctttctcttattgttatttttttctttttaggtaccagagccagaaaaaaaaatgctgcatgggagctgcatcttagggcatgtgtattagggtgtgtgcatgatgaatttctggactggatcccaatattaaaaagtagtttggcattttaataaagggtctctaagtaaattaaaatagaacactcggttggccgatctctgaatctctctacacctcggggagacctcactacaaagtaagggagagtgtgtagggaggcaggaggagaaacgagaaaggccatagagaaacttagcagggaagggagagcatgatattaaacggcatggggtctaagttttggagtatatattttttgatattacaattaaagtaagattaaaaagaaaagactccacctttgctctgaagggattggttatgcaaatatggaagggatttcctggagaatacagctttctactgtatggttaattaaataatcactcaaaagcttccaacgtgacgcttctgtcgtaatccaatcaggttacataggtcctaaacaagaaagatattttccacatctggaagtcagcaatttagcaagtactgcacattattaaccaattcagagcccacttcccaggggaatttttttgaagtttaagtgttcttaaccaatgctctgctgttttgttaatcaaaaagctggtttacactgcacataattggaactaatatagaagtaaataaagacagccaaatttgaggatgctgagcacaggcatttatcggaaaaggaagaaatctcctatcctcggatggttcaggctcaatttcttaaataactgtgagacttttttttttttcctaaagagtgaaagtgcttgagaacctcagagcacaaataaacttctagcctcacagcatttaggattcttcggaaaggtaaaggtggaggtgttaagaggaccagagagctgcctcacaccaatttttaagctttaatattgttaaatatgttacaccctcctgtttccagtctgatgaaatctgaaacaaataataccctgatccaacactatattaagataaactgctttgaactgtgctttgaatgtgtgcctaaagcaagactttgaatgcaagagtcactggcaattgcactcaaaggagggacaagccaccacatgggttgccacatccacactcccagaggtatacgtctttgtattttgtatttttttttgcggggcgggggagtggggtgggggtggttaatagctacctagcacgaccacagctagatcttgttctaggatgcaagaaagtagattttcacagttggttactcacctctttcctaatttaagtatttattataatgaaaatagctgctggataaattaactctctccccccaccccatcacagataaagtgtctatagaagaaaggcattcaggatcttcagcttaaaaattattaataaataaaatcaaagattttcaacatgggtcaggcacattcttaattttatattttacatttctttcattattatatatctatactaaatatatgtgtgacttatcaagttcctcttctgagatttagcaccactgttcatgtccatttttcttcctcttcctttttttcctcttttttaatttaaaagattggaa

SEQ ID NO: 4031 - DNA, 4001 bp, Homo sapiens
tgtcaaagatcatatagttcatcttaattttgagaccaagttgccagcgattatcttgcattgtgtcagagtggtcccacctacctgcctccagaccaagcccttgcccacagcttgcgctctctttcacaagagggtaaggtaccttggaacctggggtttggtttctgccagggacatttccagggcccgctgcagagcttcatcctcactctacaaagggagaaagaagaccagcgtccttggacttcactctctgtgtgtttgtttctgtccatccaacctctgcccaactcaccaggccattctgcaaagcaatcactggaggggctgtccaggacggagatcgggttgtggctctacgacagacattgaagaggtggaggtcagaggtgtgaaggggaaaaagggggagcagggaaacgggcaggcctacctgctgggagaggtacaggaaggcatggtttgacttgggctggggacagtgcttgtagaagccacagcttgtgctctggagatggcagcaagtctgtagggaagagagatttttggcatgtctccaagaactagccttacccaggaagtcaggaggggagttctggaaaaacatgcacttgaaaaggaagctaaaagactcccctagccgacagggtagggttgaagctccccaatttataacaacagagcttgagtcagttccaaaagaatgcttcccaaaagcaagtggaggacttggctgccattaccctgcccggctggttgggtgcccctccccagagcaatcatggtccagtggatgccggtgcttgatgcagaagtttcggctacagcgttcacaggtcagtttcatcatttctcgctgccggcagccagcgcgttcacacttattggtgaagatctgaggtgaagtgagaaggttgtctctgctgagactctgattagctgtttgggtttccaggcatccgtagtcccagctgggttgtggctgacccctacaatgtttaccttacgtttttgctgtgctggatcagagcgacagtctctgtcaatgtgctctcccacagcacggtcagggggctcccctctggccacaggcacaggcacattacagagagggcacacaggtacctggatatcctgtagtcaaggagcaagggtcagtctgtggcccactccagtccaacaaatctctggtcctgaaagaacttggatatgacccaccacaaacacgcaaaaaaacagtgtttcccagcactgacagcctcagaaggacaaaagggagaagaaacgtgagacacagatttgggggattctgcacgcattctccatctgcctgctttcaccctgaggatcgccccctcaccttttggtaagcagatccacagtgatgctgggcgtaggccacatggtctgcgcagaagatgcctgagcaggcatcacacttaagcggcagaaaatctgcaaagagttggtcggattgcaggtccagcgggacctcgatgtccttctctctcactcaagtcttccactcgggaaggaaaacgccaccctattttcgacacaccgccccttcccaagcccattacctccttggccacgccccctctgccgctgaccacccccccccagcttcaagccccgccccccggcattgccagcctgggagcccacccttccctcccaacctgcggttcaaagtccctgtccgctgggccccgccccccgcgcgctccgcccctcacccaagcgctgacagctcggctccgaacagtgagcgccgaggtccggaaactccatcgccaagccgggcagggtctgctaggagaagcgacgagtgctgagcgtctttagggctcgtgctcgaagtccgcaccgcgaccccgcactctggcgggctccctgccccgccccttcctctcccccgcccagcccgggttaccggagcccccgcgccagccggcccccggcgcccgctcctccctcggcgcgcgcggcgcgctgacgtcatcccgcagggctggcgcgtccggcgcagtctccgggcagccggggagggcctcggttgagccccgccccgcctcgccttgctctagaaggctgagtcggaagactgtcccgaggcgagagggtgttgatgcgcggctccgccaccctgggcgcgggcgtagctccgcagaggaaggccagcgaaggcaaagacggatatcttgggggatggaaggctgggtggtttggggtctttcacaattcggtccttagcccgcttcacacacgatgccctcctcctggccattttgttcacggccacggctgcccttcgcctccacgagctgacagctcctgtatttctctgaagtacagacgtctctagagctgcagatccctcctcagtctgaactaggcgcacctgctatgtgatcttacttcttccattctagcacccatatcactaatgcgaccaacccctatatgagcatactgggaaatcaggaaccacgtctaccttgtttcgtgttaggtcccagcacctaacagtgcctagaacagtgtggtcctcagtctttagtgtgaatccaaatcgcctacggagctagtttaaaatgcggatttccgggccctggagcttctaattcagtaggaagcacctgaaggaattctgacacagattgccatgcaccacactctgaaaaaccctagcctagaatattcttagtaattattgaatgtagccaggactacaggcacaagccaccgtgctcagctaatttttaattttgtagaaatggggttggggaggggtctctctttgttgcccagattggtctcgaactcctggccttaagtgatcctcctgccttggcctcccaaagtgctgggattacagacgtgagccaccacacctgaccaatataatttttttttttttgagacacagtgtcactcttgtcacccaggctggagtgcagtggcatgatctcggctcactgcaacctctgcttcccgggttcaagcgattctcctgcctcagcctcccaagtagttgggactacaggtgcacaccactgcgtccagctaatttttgtatttttagagacggcgtttcaccatgttgcccaggctggtctcgaactcctgacctcgtgatctgcccgcctcggcctcccaaagtgctgggattacaggcatgagccaccactcccagccaatattctttttattttaaattgcatccaggactttataaatgcttttattttgtttcaatatataactgtcagatttcaaataattttttcccagtctcattataatcatttggttctaagaattttgtttattcattttttttcctctctatattcatcagtacaatttagaattgtaggcttccagtcccggcatggtggctgacgcttgtaatttcagcactttgggaggctgacgcaggaggatcgcttgagcctaggagttccagcctgggcaacatagtgagaccctgtctctacaaaaatagaaagaattgtaggctttcagtttggagaaacgtgtatggagcagactaaacaaagataaacactgcctctctccccactcccactttacaaatgctcagataaccaaagccttgtggaactcaaaaaataaaaatcttcggatctcatttttgagcatgagccagaatgcttgaagtgcaaatgtagtcatttgttcttatgttgctatacagaaatacctcgctaggcatggtggctcatgcctgtaatcccatccctcggaggccaaggtgggagggtcactcgagtccaggagtttgagaccagcctgggcaacatagtaagacctccctctctacaaaaaaaatttttaaaaagttagctgggcatggtggcatccacccgttgtcccaaatactcgagaggctttggtgggaggattgcttgagcctaggagctcgaagttgcagtgagctatgattgtaccactgtgcttcagctggataa

SEQ ID NO: 4032 - DNA, 4001 bp, Homo sapiens
ctgctgctgctgctgactgcggtagtaggcggcggcggccacggcggcaaagttgtgggtctggatggcgagcggcgtgatgaggctgctgagctccggaccgaaggcgaaggcgttgttggcgcacgaggccgacgagcaggccgcgcacggggcccccggcgccagcaggtcctcggcgcccccggtgccgtacagcagagcggccgcagccgcggccgccgcggaggcgcagcatgtcggggcgcccgagggcgtggaggccgcggaggccgaggaacaggaggaggcggaggaggagcaggacgaggccgaagagcaggagggcggcggcggcgtgcgcgacgtggggctgtcgagcagcagcggcgactcgaggccgcccgggggctgatggtggcccgacgggaagcccgagaagctgaggctgtggtgcaacttgggccgcggctcccgcgggaagcccaggtgcaacgcatcgcgcgtgccaaaggcacgcaggtccccggaggcgccccccgacggcgcgggccgccgctcgtccgcgttgtggatgaagtggcagcgcggcccataggggcagaagccgatggtatgaaaggtgcggcacagctcggtcttgtacttcggatggcgagtcaggctgcgcagctcgtggaagccatgcgcgaactggcacttttcgccgtacttgcacgtgccgctctcctcgaagggccggcacagctcggtcttgtagcgcgtggagttgatctgggagccgccgccccccttctgctgctgctgcaggtgcaggaggtgctggctgcgatcgccgttctcgctaaacgagcggtcccggaatttgttctccttgttgagcagggctgtgccgccgccccccgacggctccttaagggtgccgtaggaggtcggaccgccggccgccgcgctgccgcagctgctgccgttagcggcgcccgggaacttgggcgagcagctgccggggctgggcgcggggtgggcgagtgcatgcaggttgctggccgagtgccgtcggaggaatcccggcgcgaagcccgagctgggggcggcggccacaggcgtccccaccgccttcttgtccagcatgttgttcaggttgaggttggccagggatttctctgtctgccaaagggaggggagcggggaagggatgaaaaacggaaggggaagacagactcggggcgagccgcagaggaactcccagcctgattcttttcctttttttcccccactcttggcggatcccgactcggcctccaccctccacctatacacgcgcaaaaccagcaagatcttgctggacggagcgggagaggggaggacgcccaccgtgggccgcgctgggtttcgacacgtgatcctccgccccggctgccgaggtgggcggcgcgaagcctgtccgggaagccccgggcagcgtggccgcggtcggcagtggagaaactcaaccgcgacaccggcgccctccttgccgccctccccgcctccagggcgctcggacactcttttgcaaaccccgggactttcccgacctgaaaggcagggcgggaggggcgtcccccagaacctggggacagaggcaaagtccaagaactacaacggctgctgccggccgggcccgctccctggcctaccttgcacaagaagtcgacatcgtagaaggcggacagaagtgtggtcgacatgtttctggatcccgcagtggccggagcggcaggccgggaggtcgggaggagcccttggggcggcgtggccgggcttgagccacgacgaataacgggcgaggggcggggaggggccgaaagtttgccggggggcgagaggagagggcgagtgcagcggcgcgggccggcgggagggtccggcggagtgcggcaggggggaaggagagaagcgaggagcgctcctccgcgccccggggtgcccggcccgccccccccgcggagccgacggcagctcgcggactgctggaactcggcggcctccgagcgcgcgccctatatagagcccgggagtgcggctgcggcggggcgggcgcgccgggggaggggacagaactcggcccccgccggggtctccaggcaacgccgcccgcccgctcgcggacgtcaggcgccttcccggcctcccattggccgccgccaatttttttcctccgggggagggtgctggaggcctccgggcggggccggcggcccgggcggccggtgtggcgtgtagctctcggccccagtggatgccgccgggtggcggcgggaaggcacggctgttctcctccggggctgcgcggtcggagagccccggtacgtttagcgtggccgggattctgcagccctggacgtgtctttccctgccctgttctccgaggcggacctgtggagctttaagctcccaccttcggttttgtactgggcgcgggaattgcaaaatgccagaatatcgcaaccatccccgcggcccggcgggtttgcaaagggtgccccggccaggaggcgggggctcggggcctgcgtccagtcggtggcggctccagcccgactgcacgtggagtcgcggtgggggtgggggtggccacgcgggcggccgccgcggcagtcttgccggtggagcccgggctcgtttctccgccccctccccgcccaggctcagtaaacagggcttgagcgccggggcctgccgggcagggctgagtgtctgaggacaaggcgctggctttgctaatcacatcacaagaccttgagccagggccaaaggcgcggagtggcgcgggacgtcccgggcgggggagctgactctgaggacaggaggaaaggccgggagagccgtgcgggcttgaaggcgacttagcgccacctttccgtctgctggtcgggccggccttccccagccctctggggctgggggtgcagctgcctgccgaggctccccgcccggcacagcctgggcctgttgcgtcctcccagcctcttccctccccggcagtgggggcgccgcgcccagcctttgctcgatgagggctgcaggatccggctgagaccaacccgcggcgcaggtggggctgcacagacgctgatggtgggcgcgccaccctctgttttccctcactcgccagccccgcaccccaacagcttgcgctggaaaatgcgctttgccagcgggcgccccgccttcgtccgggtacggaggggacactcccatctagcgcccagtgaggctaaagccgctgacagccccactaggaacgatctggagtctggtctagggcacttctccctccgcgttcatacaggttgccacaaaaagcttgggcctgaagctcgaaggccccggacccgctggggaaagaactaggcctgccactcagggattcgagtccctggagtgtatcctgcatttcccactactgtactcccctcatggcccagggagccagagtccagggtaaggatcaggaatgctgggctggagttcaggtcctgccccagagaaatcatgtggtcttaggcaaatcacatcatctctttggtacttgggtttccttgttaaacgaagataatattcttgctttattcatctctcacctttggcaaggtgcaaatgatatctgtgaaggtgtttaaaagacaagcaagaactaaaccatctttatgtattaaaccaaattgacaaaagcgtaagggtggagaaagcctggcttctgaactgtggccagatggacagagagccacagaatcatgagtgcagagctgtgggggcacccaagtcctggaccctaggactcacagccaagagcaggtgacctcagagggaccagtttcacttttagcacctaccctacactgaccccttgacatacctgggcaactgtggtctggtttgttctttggtgagatgaccccaaacatctcaccaaactgtgaaacagccacttccctaggcactcctattaggttagtaacaagatttcagatacagaa

SEQ ID NO: 4033 - DNA, 4001 bp, Homo sapiens
gcctcagcctcctgagtagctgggattacaggcatgtaccaccacgcctggctactattttgtatttttagtagagatggggtttctccatgttggttgggctggtcttgaactccagaactcaggtgatccacctgcctcggcctcccaaagtgctgggattacaggcgtgaggcaccgcgccgggcctggcttcccgaaactcttatcttctctcttctggcgtcctaagggcactctgtacacagccctatcagaaacgaggtcacactgcactgttgtttacctgtcagtctctctccctagatgtatagcttttttagtaatttgttgacattatcacttcaatgatattactttgtgatactgacattatcacttcaacgaacacaaatcacccacaatcgaagattccagtgaagaaccacagatatggagctgcattggagtaaagctaggtatcttgtacaaaaccagtggttcctcacctataacgtaacacatttggagaaatttcaaactcattaactgactatggcctcaaactaaatatgggaacataactgaggaatgaatgacaattgaattgcataccctgttatacatggctaaaatgagtttaagctgaataattagtaattaataagaatgatgggaatcacttcatgaaattgagtcacagacaagatgcaaaaagaaaaaaagaagaagaaaccaggccgggcgcggtggctcaggcctgtaatcccagcactttgggaggccaaggcgggccgatcacctgaggtcagaagttcgagaccagcctggcgaacattgtgaaaccctgtttctactaaaaatacaaaaaatcagcagggtgtggtggcacacgcctgtaatcccagctactcgggaggctgaggcaggagaatcgctggaacccgggaggcggaggttgcagtgagccgagatcgcaccattgcaccccagcttgggcaacaagagcgaaactccgtctcaaaaaaaaaacaaacaaaaaccaagatcctgcaatctgatagtccctatttccagaatcccatggactcaaaacaacagatcacagggattcacaaggtggctggaaagtgcactcccgtggtcagagggattctctggaaactgcagcctccacttactgaatattatcgctgttctggggaatcttcaagcttgaccatacatggcctccggggggagccaaggaggacgctgagccgtcaagattaagaaccttcacctgcgggagggcagggtgaggtaggagacaggtgggcaccagagaagaaatacgcttatcttccgggcaggagggctgaggaagagaaaggacagactaaggcagagagaaggcctggagaaacaacgggccccggcctagcgacccaggttcccacctgcctctggctctgactcaccgcgtggtcttggacagacacagtcgcttcgcttctctgggcctcagctttcctatctgtaaaatggaggtgatgacagtgtccacatcgtcgggcaggagctggatcataagagccagcgaactggaaaggcggtttgtaacctggaaggcttgggatggagcatcgtcatgattttgtcctgagagcagcaggtacccgggcggggtccagaaccgtgacgcgactgcagcgccggggcccagctcgtctgggtgctcccttcagtacctccttccgagagttcccagcgcccaggcccaccctgatcccggggctcgaaaaactttgcctccagctcgctccacccgcattcccttcccagttccgccccgcagccgctcactcacctccagacccagagccggcgggagccgcatctctatggtcggccgcggctggaacggcccccggggcccgctttgtgcgaccgcctccggctcagccgcctctaggatattggggatgtggaagccactctctcttcctcttgccggctgccggggtactctatgttttgtctctgtggtttttcccgccctccacccccactccagccctgaagccggagaagcaccatcgagagctctggggtagagtggcgtgggcttctctgtgggtgtggcgggaagtagatgaaaggacccggggcggggccgaacgcagcttccccaaggtgcaggcgcggtgaaaccatcgagacggagggccagagagtcacggcggtgagagggctgagtgacgggttaccccaaaccatgtggctggaggcgcgagctggggtgtgggcgaggttcaggagggggttcctgggtgtcgcggaggggccggggacgggagagctttgtctgtggccttccatgcataggtgttttggaattctggatcccagttctgaggctcagccgaggtcactgctgtcagctcacctccctgcatgccaggcgcagggcaaagtggccggggttcggggttggaggagaggtgtactagaaacaactttgctcttgtccctcaggatcttattgtctacgatgtgacgatccgtggagaaagtagcagatgggcagattttcatttggggagaatgagggagaaaagaacgggcattccgagccaagagcactgcatgagcaaggagttgggaggttgcttacttgttgaacatatttgttgcgtatttgcatatttgctaaacaggtagtgttaggagctaatccatgaaaggtaggtgggcgccgtattgtagagagccttgagtaccaggctgagtttatacccaattcaggggtctgctgggagccagccattgaaggtgctggagcagagagagatatggtattggagctgatccctatgatgaaagatctggacccttgtgtagatgttccgtgaagcaggaggtgaagacctattaaaatgccatttcaagaactacgattttaaagacagtttaggtgggaggtaataaaggtctaaacaagacgttaaatattggggacgtaagggggaggatatttgaaggacattactcataacaagacatagggttactgacaagtcaacggacgcttctcccttgctgactgcagccaatggacccctttttatcatagctggtcccagggaccacaaaaatcctgtccatccattaccctgatgtgaagcctgtttatatagctctttttggtttaaggcatctccagacatggtcctctggtaggaaacaggtatgagtagactaatgaaggacaaaatgggatgagggacctggagcctccacccttgcattccaataccacccttaccccacaaaaggagggtattgacccacacagtaatgctgacctgtggccagggctggggaggtccaatttctaatctgtgctttgtcccatctccactgttccccacccctaggttttcgtaacaccccagggcctgtaaggtttggtgtttccctttcaagatgccactttcagactttattctggctctgaaggacaatccctactttggggctggatttgggctggtgggtgtgggcacagccctggccctggcccggaagggtgtccaactgggcctggtggcattccggcgccattacatgatcacactggaagtccctgctcgagacaggagctatgcctggttgcttagctggctcacccgccacagtacccgtactcagcacctcagtgtcgagacttcgtaccttcagcatgagagtggccgcatttccactaagtttgaatttgtccccagccctggaaaccattttatctggtaaggtggggagctagggagggctgtgagagtagaaaagaatgatgggagctgggtttgacccattcactcactcagttttgatcgttcttattcaggtatcgggggaaatggattcgggtagaacgaagtcgagagatgcagatgatagacttgcagacggggactccttgggaatctgtcaccttcacggccctgggcactgaccgaaaggttttcttcaacatcctggag

SEQ ID NO: 4034 - DNA, 4001 bp, Homo sapiens
tctcctgcctcagcctcccgagtagccgggactacaggcgcccgccaccacgcccggctaattttttgtatttttttagtagagacggggtttcaccgtgttagccaggatggtctcgatctcctgacctcgtgatccgcccgcctcagactcccaaagtgctgggacttacaggcgtgagccactgtgcccggccatattatctatttctctgtagcttttcactgttcggacaagcttctgcttattcaagtggttactgtaactgctatgatactgcactagcttttcttccaaccactaaaattgctgtctttctgtgactctttttccccacttttgccctggaaacatggatgctgcccatagctcagtctttgtactttcttcgtttttgccatccctcagaaagtccatccacattcagggctccattttcaaactctacagatgtccatgtcctgtaattgtattgtaattttacaatacaactgtattgcattcttccagactcatcctgcatttccaaatgactgcaaaccttaaatcaggcgttccaccatcacctcaaaactatcttcctttaggcaattccacacatcaacgcctcttcctggctttacatttgtatcagatgttttattgttctcccaggtgtcccaaattcaaactcttacctcactctctttcctcccaaatctagtcaccaggcccttttgactcttcttttgcagtgtcatctgtatccttccctttcactaccaccaccataattcaagtccacaacatcttactccaaaactaccatacattcctaagtagctctctgctactggtcctttcccctctctagtcctgaatgtgacctctagaataactgtctccaaatagtttcattcgtgtcagtccctggatcacacctatataagccaccttgcctactgagtcttgtcctgattctctgagtcccgggccctggctcccagcgtaccttttcttcaaccttgtctaccactgttcctgcatttctgtaaaaactatctccagctcaaatctgcctaacgcttagctgcttctttcgtggtttttgttttgttgttgttgtttttctttcacgtcaaatcccacctcctccatgaagccctccagcactcgtgcggaggcccagggcagggagctaaatgaggcaatctgaggcgctgtctggcaaagacggagcggcagcatcctagatttggtgtcaattccacccacgttcattaagcacccattatgggaagaagaaacgggagaggcggaggaagactccaaacctccaaccttaaagtccgggaccgacatacaatgggtgcccagaccccacgggacacacgcacacacgggggtggatgcacaactttccgtccgcaccgagacgtcgcgacacacgctctgcaggctggcctcgcccgtgtcaccccgttttgctcccacagcacctccccaaagttctcatgtcccctctctcggctgctgcgctcactccgctccttgaagacacacacccacaaccctcacctccggcacagagtgctcgggacccgggaagacggcgcctcttcaggtcgggaaaccaacgcgcctgcgcacagggtcctggcgactgcgctcccaatcaatgcggggccttcgcaaggacttcatctcccagaagtctcggcgtccggtgcgctttaatatgacgtccgaaaatgtgtgcaaacgccggcttcccgtggctgaacaggatccaaaatggcagcgctgtcgccttagctgggagagcgagccgttgtggctgtttgggagacttatggtcaccctgaagtactgcctgcctctagtgtcgcgtccctccagtatccgatgggagcgccgtccgcagggaatgtgtctctctgatcatggtgcctcgtgtccagctctggggaagaccgagacgaaatcgagtcagctggcgttgggagagggcttatttccgcttccgcttgcccactttcaggaatttgattctgagagcagggctgcggttccaggcagggtttgtacacatatttgcgttggaaggagagaggagcctaggacacatatgtattaactgtgcagctggtccgactcccgacagcttcagcgcacaccagccagccttggagttgctggaacggccctggctgcaagctggaatcacccggagagctttcgacattgatgcctgaggcccagctgtggagcgacagtttgaaaagagctgcaggtgactctaatgtgcagctaaagctaggaaccactgagctacatctcagggaagactgaaaattacaaagaatatgataaaatcttacttcaggaacaaagctacgtttttccaggttaatttattagtggtttgggttttttttaagtttttgtgggtacacagtaggtgtgaacatttatgggccacctgagatattttgacacaggcatgcaataagtaataatctcatcaggacaaatgggatatccatcacctcaagcatttgtcctttgtgttacaaacgatccagttatattcttttagttactttaaaatatacaatattattggctgtaattactctgatgtgctatcaaatactagttatactatttcttattctattttttgtacccattaactatccccacttccccaccccgccaacccttcccagtctgttaaccatccttctactctccatctccataagactacactttcattcaaaaaatccaaattgctcaccataagcaaggcacagttacaaatatgagtaagttactgccccaaatgaactcttggtccaatggaaaaaatcagaatgtaaaatcacaatagaggcagtatgttctataattatgtcacattcaacatactatgagagtacaatggaggaagctattaactatggccgggaaaggtgggaaaggattcctttcactggtatacttaaatacttaagaaaaaaaaagtgtgatctaaacagtgaatagtacatgcaaaggcatagtctagaggataaaagtgaaaataattagtagcaaaatgaatgccttgtggatgaggtttaggggccaataactatcttgaggtaaggccaggttgtggctgcctttgtgttgtactaaggggtttggaccttcctaggagattagagcttgattaaagtcacaacatccataagagaaatacttttttttttttgttcccttctgtgtggtggtttttattatttagccttatactgagggtggaaactggggtcctgaaagtgtttccttctagaatattccccacccactggcaggccctaggctttgtctttaccgcttccaggtagctgccaaagtggaagtttatgtgctctaggatttagcagtctaaaagtcaggtttgttgctcgattctcagaattctagctctcactttatttattttttgagacaggctctggctgtgtcagccaggccagaatgcagtggcatgctctcagctcactgcaacctccacctcctgggctcacgtagtcctcccatctcagcctcaagagtagctgggactacaggcatgcaccaccatgtctggctactttttgtatttttttgtagacatggggttttaccatgttgcccaggctggtttcaaactcgggctcaagcaatccaccctcttcggcctcccagagtgctaggattataggcatgagccactgcacctggcccatttcactttatttttttaaatgtttacaaattcctcactttcatgcctgctcatcagtgtgtttataaagatgtttgcaatttttcagcatttttagtttttttattaagagggctgtttaggccatctaatcggccatgttactgggaagattaagagaattttaactgatattctcaaaagagttaggaggagcatatggaagctaagcagccaagaagtgacatacatccatcttttt

SEQ ID NO: 4035 - DNA, 4001 bp, Homo sapiens
atgaattgcataatatggccaacattaatagagtggttttctacaaatgtattgcaaaaaataaatacttcacatttcagaacataactatttggatgtcacatgttagcaaaggacaaagtggcagatattagcaactttaaatctgtaggtcctggattaaacaatataaaggaacttgagagaaatgacaatgcatctagagcacagatgaggttgaaggtaagagtctattcttgagggtctaattaggttcttcccatctctccatttttttttttttttaaatcatagagacgccttagcagaagctatcggctttgacagtacaccgaaatcctggcagtgaaccataaattgaccattaccataaaaagagctgctaaacgagaaaccatgtgctcagtataaaactaatttcatgctttcaaaagcacacagtggcttctagcaagatagtggccctgggacttgccgagacagattggtgaacacaaatggtttgctcctgatgcgtctgcttagccaagctttacgtgtactggcagtaaaagaggttctcgagccttctatcaaacaaatacacacttagctataactttaaagctgaaagctataaaacagctgcctcaaataaatatagcaggaaaaacacatacacttatatacatacacaccccatgtgccatgctagctgcttccaatcaaagaaaaatagattcccctgccaacctaatatactaaacagacacttaataagcacaatgctatttaatacattataaccctcacactccattcatgcttagaaacaccagaattagagtttagccaagcctaagcaatagcactccatctacttggaggctaactttgtgtctgcccttatctagttggctttcaaataccatatacttacaaggctacatcaaacctttccaagcatgatgatctagtaatttaacctctccaggtgagcacaggtattttatttatatttaaatgatacaatctgctacatttaaagcatctcagctaataagaacacacttcatgaagaaatactgttaatttcctcccattctcattcggcacacagtcgttagaaattaattactgttggttgtccagtacatgaccggtcataacttttaattattaataatgtctagcttcacaagttgtcaactccagtatgtaatccacatcacttactttcttagttatctcgaaacatgacttgtctcctcctatctgtctttcatgtcaaagattctacaaagtacattttgtttatagcctttttaataacatctgaaacacataataacactgctaattacctactttcagtaatggtagcaaattgcataatatcactgacttgttcagaatgtttaaaatgcaaaggaagtcacctactggtaagatgtcctcggcaaacagctagcacagaaagaaagggatggttatcacacccatgtaaggagttacttcgcaacaaaattaaagaatcatatattttgctcttcagctttgctccttcagatgtgtcagcacaatgtgataaacacaattgaggactccacaggattcagcataacatacaaaagaatctgttactgacatcccagaccccagcatccaagttttagaataaaaacgctcacctctgctaggaagtccactccacatcctggcagggctctcaccagcttcaagagcaaccaagttggataaacaaaacttccagtatgtgaccaggataatgcacagcgctaccgagacttggctccagccctgattatctgtgtgacagcaccacgttatatcagtgccgctccaagccttcccagttgctggcttattgcactgctcattgaaaatcctttacatgctggcaacattttagggaaggacaagcacactctgagtcatttgtaaagaaagcagagcaatttcaattctatatctccatgtgtgctgaaaccagaagcactgtcaatgtacaagtctgaggtggatttatgctgagaaacaggcaacctaagccttcattatcaatgcatgaaatcagccactgtgatcaaattcaagcaaaccacaagaaggatgtgattatgaaagtctccacagatttagcaccaaaccttgtggaataaagaatcatctattgaaattgtgtaaatgttaaaaatagctctggcttttcaacaatgagcaggatacagggaagaaatcagtagtctatattacgaggacttataaaggctgcataaatcaaaatagctgtaggttcctgggacttcgctatagacaaatgaaatcactggagactatgacaattataacaaaaataattccatatatttgacatagatgtccattaaagggcaaatcaaacatcctttaactcctaagtgcccatctctaaattaaaataatggtgatagttaaaaatgtgcgatgctatgctagcaccaggacaaaataccatcaattttattctaagataatttcataaacaatagagatttaaatctattctgtgtaacaataaacatgcaagatagatattttaacactataatctttgctcattattttaaaaaatctatagttcattaaacccatgtatttttatcccaactacccccaaatttatacttttgctttttataatcctttctgttttgttactaaaatataagatgcaagagctactggacatcgtctttagaagacacaaggtcagaaagcagtattagatataccccagaaatacatataccccagaaagcagtagcagtgctttgagatcacaaaatatacagatttgacatgtgcatgcaaactgcaaagcaaaaaagaaataaaatgtttattaaaaatcacaaaagtaaactggaagaaattcctaggaggcaacattgacaacacatttaaggttctattcaattttttaaaaagggttttaggttctcattgagactctgaaggccagacaaactagaatccagtaaaggcaattcctgatttgaggatctcctataaatgactgggttcagttctagtaatcctaccagctctgagatgacacatttagaagtgtctacaatatgaaacatctgtgtaaaactaagcagcacacatttacgtaacacagcattctggagcaacattaaacacagcactctcatgggcattctcactatgtccccatatggaaagttgactccttacgggctgctggttagatgcccttgcttggagacagattagacacacgattggatatgcacatgcgtgtgcgtatacatatacctatgccattgaacacaattgcccctcacagtcacttttgccacctgaattctatttgtcacctgaagcccctagggcaacatttgaatgtattatgagaaaaggcattgggcatcattgactttgcaattgttcagtgtcctctctctcttctgtcctctctgcctcacccaacacacacataaactttccttcgaaaatagtcataggaatagttcatgagagattgtatgcctaaaaatctttttattattaccacacatgaagctccctagtaataagataaaagtttaaaattaaaccaggatatttgattatacgccaatcccttatctaaaacccttcgggcttgatgcatttcagaattcaaacgttttcagattttagaaaggtaatactctacgtatgccaggaattatataatgcctccagtggcagatgttatataatgccgcactggggtctggggcaacaactctataatcagacacattaacattctatagcaaaacctgtgcatattcatactcattgggataaataaatgctataatttaagctcacattagttcatgtcacgttttcccatcaatatgaattataaaatcttccagttctcactgcttcttggatttcggaaattgcaagtaagagattgtggactgtataaatgttta

SEQ ID NO: 4036 - DNA, 4001 bp, Homo sapiens
actgtttccatagtctccctctttcccacctgtcttttctgcctctctcatctctcctgtttctctcctgtatgtagcatctctgtctctgtctctctctgtttctgtacatttgcgtacctgtctgtgtgcctctttcatctctttgtctttggctcccaccataatacttccagggaactagaaagcactcataaaatttgtcatttgccttattttgcaactacattgtattagttttctttttaatatttgcttcaggacaagtttgtccctgtgacaagatttaacaaattagaccatatctctagttctgtctccagtagtcatgtcaattgcaacaagtgaggattgtttttattacgtgctcccacgacggtatctgccatacatgtgaaggacagggacaagttagaaacctgagtgcaccatagaattttacagtatatttttacggaaattcatcattgtgtcctgggttatacaaatactataccatttcattggacagcacaaggtgcttttacatatattaagtagctttttacatatattttacacacaccacaataagtagttttctaaactttacatggcttatgatcatcccctgtttttctgatgaagaaaatgatgcttgggataaataattctatgaaaagcaaacatagaaaacaaaggccatgatgaatacagcactacaaaaaattttccctaaatcaggtatgtaataactaaactgagcaatattgtctgccaagaggtcacacatcagtgtctcaaggaccttggaaaaattaatcaatttctggctttaacctattcattttttgcaagtccactgaaccctcagtgtttacacctctaacccatgaataagatagaataaaagaagtcaatgctctttcaatatttttcaagccacctgaaatcccactggagactatgagataaaaatatcttcctggtgccaagagttcttaagtccttttctgataatatatttatccatgttttacaaatggcaaaattgaaaaaaaaaaaggtggggagtaaggtggggtaaataaaaggtgggggaaaataaagtgataacattaaaacagaaatgagaatttcacaagtacctactgtatacatacaaattatacctactcttataacagacaatactccctcttgaggagctaaacttacctggtttccagagagatttctatgcccaagggtctaaacaaacatgaaaccattgagctttgacgtgaactagatggaacattaaaacttgaaatggtgcctatcataaaaatcatgtgacaagagtgcaaatctcccacgtcactcaatttgattacaggctaccagccactattctgtcaatctgaatgtggattcttggacatttataatcaacagcttaaatatactttctgaaaagaagataaaaaggagagagagttctaacatagttgaattgaacatgaatctcatttttacctagtagttattcccacacaaactctgaaagaaaggggaacggtagcttataaagattaaagaaatgtgggaaatcagttacctcgtcattatagttagtaaagtggctcagtagtacaaatgaaatacaaacaggctaggaaagtcaagataccattagacaaaggagttgcaaaattagcaaattctatttgtcttaattctgatacttttctctttttctgaaattcatttgacctgttttatatttttgtcacatatttcataagaaagttccttaagatgtaaatgtgggtcagttagcagtgcttacctttgtttttaaggttacagtccacgttcacgtctgcatttgagcactgtacgagatgttacatttaaaagtaaataattccatcatctcaacctggtgctcccgtgaaatgtggtgctaggaaacagccggcaggcagtgcttctgaacaaatcatacgtcctgtaattgccgcttagctctaattactattgaggatcgtgtttgcaacttgattccagggagagggcagaaaaccttctgatgacacagaaccaaatatatcctaaaagactgacaagtggctttctttcatgtaatttttctgagtatcccccagctactcaaaaactaccactctgtcatagtaaaatggaaataaagcaaactgacacccacatctccctcctaacaaaacaattcaattctctcaaaatatctacttatcacaacagtttggaattttcagtatcacttatatgtcaagggattattccccctcaggtgggcaactaaatcttttaaaattgctttttatttcaaagagaaatgtgttctcacaacaaactttatttatattctgttagactagaataatttatttgcattctattaggcctgaagaatttgtttcctttcccatggatttttaggttttaaataaagattcatatagttcaaaaagactagggcagatgtcaatttgatgttgataaaattaatagggacgtgtatgcatctcaactcaaaaacctaatttcagttatatagggtattatggtaaaattgaagttatacaggcttggaactaaactgatttattattgctctcatatctaattaatttaactttgcatctagtggcatctgaccatgttgtcagaataaagcatctgatatatccatgttacacagtgtggctatgactgaatggttgttttgcttatgctaagctgattgtcattgatactgatgagttagcttagtgggcatttgaatgaataaaagaaacttgaaatgactgatgcttgcaaatgtcaggaaggattttgcacctttggttgggcaacttagcacatttactaaccacagccaacactttagtgacgtacagaaaaaattatatttatccaagttctgagatttagtatatctgcttatgtcagatttgcacagtaactatcagggacaggtaaacctaagtgaataattagatgcagcaaagaaaatggtaattataaaaccagctcttagaaatggtacattttttccagtctcaatcatctaagttatgaataataacaaaataatattctaaatgaaacatagtatgctagctctatacttacttccccccaaataacaactgggcattccttatgattacagtataattatagtcatggctgtggttttcactcaaaaaaaagtcttcatctatgatagctctcccctaagaaacctctgctctgtagagattatgttgatggcctcttcaaaatatttttctttcatgaagaagtgtttcattctttcttacctgctgttgaatcatgactgattcttggagtattttttctagaacatttcccggtctggaatactagtgcatccttgaactcccaagctctttatttgtacgtctcacatatttttagtttagttcagtagtacacaaagtgtggtcctcagaccagcagcatcagcatcacctgagaacttgttagaaaagcaaattctgaggcctcactccagatctacagaatcataaacactggggatggggcccagtaatctgtgttttagccagccccctacatgacctgaaacatgctgatgtttgagaaccactggtccatagtgcaggtatgtaccaagaccagtgggagaatgggataaggaacacttaagcctctacggggaaaactacaggagagacagaggctccacagagaggtgacatttaaatggttatctaaaaaatgagaagagcttggatggatccaaaggaggcaccaggcatctcttacctagctaagtcatcaccttgagttagttaatacagcccgccctctctataagaccttaccctatcaatcaccgtctttctttagtcagtccattcttaaggaaacaaaacttgctccattcttgttagcctcttagtctaccaactatttgctcttaccttttaacttcttttagagtagcc

SEQ ID NO: 4037 - DNA, 4001 bp, Homo sapiens
gggccagaatgaaaaaccattcaaaccatccatcaacatacccactcagttcatacattcatatttaccgagcatctgccatgtgccaaacaacctgctacttgttgtgtacacattgttgaagaagacatagtccctgttttccaaaagcttatagtctactgggagaaacagaaaaataagtaggtaattacattagagcagagtttttcaaccttggcattaatgacattttgaactgaataattcagtgttgtggggtgctatgcactgtagaatattatagggatgtaggcagcatccctggcctctacctactagatgccactagcatcctaaccccttgttataacaaaaaatatctccagacattgtcaaaagtccctggtggggtggggagggcaaaataatcctcctaccacctatcctctcactccctaagccactgagaactgctgcaatgcagtataaaatactataaaatgacaaaagaaagacgggcatcgaacaacatgagtctaggggcaggaaagttttctgaaggaggcaacaccttcacaaaggcctgaaagttccataaaattcagccagatgaagaaaatatatatttcatatgtgtatcaggaaggcctctgagcatgtgcaaagactcagagtttataatgagtacaacatatctggaggactaaaggtggcttagaaggcatggagtggggaagtatgcatgaggtaagtaggaaaacctacatatgcctaccgaggaatgcagaggagaagaaagaaggggttcagttttggatatgttgaatttgagttgcctgagggacaaccaggtgtagatgtccaaaagacagttagatttccatttctgaaacataggggcatgactcaggccagaagaatgaacaccacctatatatagatgccatatgtataaatgaaatgacccagggagagtgtagtgtttgaaagaggagcccatggacctgacagtgacaagggagacagaggtgaaggaaaatcagggcagtcctgatgtcacacacagagagcaaatgaggagagtttcataacatagcataaaggtcaagtaagatgaggagtgacacacatccactggatttggaaattaggaagacattggtgacctttgccagaagtaccttattggtatgttctgggtggcagccagcttacagtgggctggaatcaatggcatgggataaaagagagataccttcaagacatttggcagaaagtaatggaatgatgtaaagacagtgcttatggtaggataagtaacaaatgtgcccagagtaaaaaaggaaaacattagcatgagttctgtcttcaggttatgtggatactgtttagaggctgctcttgtttctggctctcagagtctcctgggtatttatattgacctacctcatggaatttctgaatgtaagcaccaatggattgtttttgccttttaacagagcaccacatgattcagggtgtctttatagtacctatttacttgcctacggtatgtcttctaaatgacaaattaactttaatacctgactcattctgcactatgattatagggctccctttaaaaagagaatgactccaaagttgaaaagcaatgaattcaaaacaatatgccattatatctgtcaagatctaaaaatatatttccattaagtgtgtttatgaaaatccttccttgaattgagaggtttcagtatgtaatctaacagtcttggaataattgactcatgggagatgaaaactgaaaggatgttacagactttcctcctcttccctcaaccctcatttaatcagtgatttgataggaatcactttcctcacatcttatagttctgttccttctactcgatggctacactgtgacctttatcatctcttccatgtacctctgtaatagcctcctgaatggtttccttgctcacctttgccaagcctttgccatactttgcaagaatgatctctctagaacacatatacgaacagttcacaaattctacttagaaccctgtcatagcgtctcacaaattctggaatccttatgtcacagaaagacttttccatttgttccaatgatcctttgcatattttatcttatacttatattccagccataaaggaccactgttaggtcctggggctttatgctgactcacttctatagacgggtgctcttatagtttccatccccatgttcatctgggtagtggcattcaaactcagttcaagcatttcatctgttaagtctttgtgaatttcatctctctcacctaaacccagataggattgacaacttttcttttggtgcccccaatgtacatagtacaaatttatgtaacagtctcgaaaccacttttttgcatgcatttgtttttatagatgtcttttctattaaactgtcacttccttgaagacaggggctgctttttacatttttatgtctcaccaaaacatggcatatcagcagccctgtagtatctgtttaaaggaatttagtctaagcctctattattaccaataaggaaacaaggcccgaaagaagctaaatgactcgcctaaggtcactcatctaatgagtggctaagtgaagaatagaagctgtagctgttgcctgacttacagctcttgtgttatattcggctgccaccccattgacttaaaaggagggcacccagggcccagctctgtaggttgccaacttggttcaagaaggttttaatgtgaaatatttaagtaaatatttaatgaggagctattactcttttttggttgaaagaaacagtgagctagatcattttaaaatgatgtattattggctgggcatggtggctcatgcctgtaatcccagcactctgggaggccgaggcgggcggatcacgaggtcaggagttcgagaccagcctgatcaacatggtgaaaccctgtctctactaaaaatacaaaaaaattagccgggcgtggtggcacgtgcctgtagtcccagctactcaggaggctgaggcagaagaactgcttgaacctgggaggtggaggttgtagtgagccgagatcatgccattgcactccagcctgggcaacagagtgagactccatctcaaaaaaacaaacaaaaaaaattatgtataattttactttatattcaccttcctccctactccccactcccttccacctggttgaccttaccaattagcacttaggtatttttaaaggccttcaaaatctttaaatacataccagctgaagacaaactaatatgttaccacattcttgttggcagaagaaatacttgtctcagattaagaagttactctaaatatttcataaaataacctataataggttaaattgttttaatttatttggcttctaaaacatatgaataaaaatgagagagtaataaactctctaggacttccccagaattatgtgactaagtggctttttatgagaaaactgtctttggaatagattacaattttttaagtgaccatgacgataactagtttgtccttttcgttcatgaccacagtaaaacagagcacttaactgatgaatctgttttatttggaatgttttaatagttcttggtatataacattaatatgtaaagaccttaaagagcccattaaaacactgcacaacaagctgcattttaataatgcagagactatctcagatggaggctaatttctgttgtttaggtaccataaacaaaaataaaaactttcccaaaaagctgaagctctaagtaaaaggtttaaaatgcacatgtcctacagatggcagaacttaaacatcactcccagaagcacaggaaaaaagagaagatttaaaaaattccctccaagcccaggcttgtttcaagtcttctgttcataagaagatcaagggtactatgaacatttaacttctattttctcctaataataagtcccgttctttaatctgtgaaataaaacaaa

SEQ ID NO: 4038 - DNA, 4001 bp, Homo sapiens
cagtaatttttcctttgttaggagaattcaccttccccaaagcattttactacaaatgcatccaagagaggtcaaggagatctacaagaatagctatctgatttgtggtttttatcccaagcttcctcaaatcacttttggaaataggtaagagtgtaaattataaatccacaaatatttaatttatgggaatatagaatctgaaaaacaaccaacactttgatcaaataagcatctttttcatcttaaaaacctcaagtaacagaacttgcaatgctgtattttgcattctaaaggcatttatctgttacagggaaggggcagcacatactcaacgcacacatggcatcaaaataagattaaaggactctgaaaaccagtgaaatttggccttggaacatttaagggagttctttcaagccaaagcctttaacttacctaagatgtagcttattgactttatgaaaagccctctttttaattagataaatgcatttcctaccgtttcatgaattgtgtggacgctgccagtttccacgctttaggctaggccctataacagaaatgttttgttccttctataggaacatcttttgctactacatcttgacaaagtttgcattccccttggtgtgatattcctcagcaaagcaaaaccaaaaggaaatgcaaacctcatctctgtatgaaaatgaaagaagacgtttcccaacccaagaacttttgagagcattccaaaactgcgttattttgtattcatgggcgtggggagaggggggatacttcttggcaatttatttcccctgaagaacagcactccctatccaggttcaccataaaaactgtgtgtcctccagagtctagggaagcatcgtcctgccagctctcccttctccccacaggcccccgcacataacagtggcgaaacagatggtcctccccctccccttctcctcgtcccttccgcagtcccacagtgtcctcccacccttccctgacaccttcaccagcgcttagtggccgaggccgcccgtcagggctcccaacaagtgcaaacttcggggaccttctctctgctcctctgcccccatctcatctgggttctgctgcagaactctcccacgaccccaagcttcgaccgctaccctcctcacacacctcggtcccctaactacccatttcccggtcattgagagaaagacaaaccccaaacttccagcccaggtgacgaggcgctgcggctaaacatagcggggcactctcctcgtcctttcccctctccatccgtccttgggaattggagcctaccctggggaacagaggagtatgctcctgtggcttccacgacctaatcctaactccagggactcgcaggagttaggattaggtcgtggaagccacaggcgcctgggcgccctcctctacaagtgggaccttgagacaaagtgcaaactctaccgggaggggggctcctggccattccctcgggcggcgcgcccaggtgcaggctcgctctgcggaggagggcgggggccgggcaagcagagggcgcccagtccgggggcgccggtctgggctgggcgcccagagcttacctcggcgcgcgggccgcgggcgcgtggggcagtggctcctccagccgggaagctgttgctcacgctccggtggttgctgcggtcccgccagggctgcaccggggcttcgcgcagacgttctcccgcgatctgctgcagcccaggcggtggcggtggcggtagcagcggcggcggtggaggtggcgcgggcgacagctcggcccggcgcggcccctgaactgtccaactcttgcccgcgccgggcttaagcgcccggccgctgcccccgcgctgagcgcctgcgcaccgggcctcgcccaggtgaggggcgtgtgcccggagcccgctgggcgcgcccggcccggcccggccccgccgcacgcccgcccccctggcctggccgaggaccccggggtttggacgtgccaacgccactctcgcgcgccgaagctgtgacggtttactaagcagagacttgcgaggcacacagagagggaatgaggcggaaccgttcgggggctcgttgacactgcagagcctcccgcagcatcgctgccttaaatcccgcctttccaggcgtgcgcgcacagcgagccagaggaggctccgtcccgacctggggtcccccgcggtcctcagcccgggggctcgggtccccgaagagatccttggcaatggcagaggtcccaaagcctagatgccaagccccgcgatggggcggatgcttccaatattagtcaacccagagtgaaactctcttcttggagatcgtcagaccaactatttgtttttcctctttgaccacccctgggctagcagagcacagctagcagcttcggcatatttggcggagccgggaaggcccggagcgcaagaaggcatcgcagcctcgcagcagatctgaaagggttgtgggcggggggctcattttcgccggatttcttttccgtgtttaagttttcaaaactaaaacctgtcatcggttaccctgatgtagagggcatcttctgaaaattagtgcaaacatggccaaggtgcttggttctgaaagggaaagcacttagaacacttaagaaagggaaaataattttaaaagagcagttttctgagattacttctttggggagaagttcaatagtcataaatgacaagagagttgtgttatatagcagggatttttttttaaccagatgatcttaaaatatttttctttggttcttgtctcagatgattgacactacgtaaataatcctgcagctgttaatgtcttggcataatcgtctagaataaatatcttaacgtccagccaaagccaatgttgttctcccagggtgggcttcagatgtgacaaacaatcacaccatcctagagctttctaagggagcaggctgtgtttttaagcaccttggaatgtagagttattgcaagcaccagcacatttgaggtaccagcgtgagaaagggcataaatctgacttacagtttttgtatttttagaatccaaatatcttcacatccaggtcggcagtctcaatactaagaacaaacgtttattggtgtgcttattcttaaaactgtaccttatttgaagttgctacagaaggacagcaccaaaattcaatcattttaacccaaaagaacatgagctatgataattgcttaaattatctttcacaaaattatgatcttaaggtctcttgtcatcaataaaggttatgttgaaaacacgtctttcacaagtccctgaaggtcagtaagatggagctctggcagactgggacaagcaggaaattccagaggcaaaaaccttccatgagaaaaacacccagcttccagtgccatgcacttcagagttgggacagcgtggttgtcgaggttgcctctgagctcaggtaagtattgatatctccaggaatctaagatgcagagaaaggggtgagggccccttaaagtctccagtcaacaccttggattgcacttggaggcaaatgagtaacctctgcagagtggaacacctgtgagaagtgttctccgtggcttgcacagtttagcagcatgtgcattttttatgtcctgcaaactgcaactatatccttccctcctccctgtctatttttaatcacctatagctaagactcacggcagagaataatttgagggttgcatttcctaacagctgaaagaagcataaaatacatgcagacaactcccaattattcacctgtgacataactgactaagaatcctgcccttcacgtccttagccaaggcaggattaaggcctctggagccccaagcacaaaacaattgcagtgcctcctttgtaaacgcacttcaatatggaaacaacattaaatttaaaaacacaatatttaaatatatagagaaaaaacagcttctgtctcgattttctgatgcaaatgtgttt

SEQ ID NO: 4039 - DNA, 4001 bp, Homo sapiens
aatccatccttcataatgctgccagagtggcctaagaccaatatctggctatgtcattccctcattatctcttccaggataaaatccaaacactttagcatgccgtaacaggtcctccatggtctagcccctactaacctctctaaacgctctccctgcaatccctcatcctctatcccagacatacagaactacttactatcccattaactctttccacacgttcacatgctgttctctgttctgaaaaacctttctccttctcactaactgcatgattcctcaactttcaagtttctacttaggagtgacctgctctgataatccttcccttccaaactatcactccccttcctcaaaggctaaattaaattcctacttaaaaatacttacttattacaatgaactgtgttgacctacttgcctatctccccttctagactgctagttgtttttcatgcctgtattcctaacctactacagaactggcgcacagcaaacatgtagtaaatgtcacctgaatgaatgaatccatttaatgtctagttaacaagaatgttttcttttgtattaaccatggaaaaactaagcaccttcagtgtactaaataataaaccagtcttacagacaagtagtttaaaaatacaaggatttcttacggccatttttatcatccatcccaagttcatcagtgtatttatgagcacgaatttcatgtctggagaaatacagaattaccactgagtctttggttccatttttattacaatttgtactttttttttgcaagctaggtttttctcccacacactagacttagacctacactgtccaatccgatagccacgagctacaggtggctatttaacgttagttaaaattaaataaaatttaaaattcaatccctcagtcgcactagccacatttcaagcgctcaaaaggcgtacggggctagtagctatgatactagacagtgcagatacagaacattttcgtcacaagaagttccactggacagcgctggccacaaaatcacaaaagaaccttagaaaaacctcactcacttggcaaataaaatttaaaattcagtccctcagttgcactagccacatttcaactgctcaaaatccacaccgggttagtggctatgatactggacaatgcagatacagaacattttcatcacaggaagaagttctactggtcagcgctggtgacacaatcataaaaggaccttagaaaacctcacttacttcttagctcccacgatcctcgtgctcctctgctgcttaaaggttgtgggtcccgaagtctagcaaatcacaagcacacgagtgagtgctagggacctctgaacctcgaccacaaaaagacgaattcccctatgcccagaagaaatgaagttctcccggggaaaccacctcaaacacaagaaggcaacaccttttaggaaaaatatgctgtcctatcttccagcagtgcaaaggcgggtaacaataccagagccttcgtcttcccccattctcaaagccctgtcccaggctctaaaagggaggccaaaagaaaagacaacggatatgagagacattggggatgtaaaaggaatagaaactaatggtaatgtggcgaggaattaaatccaaggaggtggggaacaggcagcagaacgtgggtaaagaaaaagggacaggtgatctgatctagaagggtggggcctacgatggcctctgataaaaccaactcagcatgggacaaaagcgagggaccgcgtgttccgggctcgacagcgctacctctaaagcataacggtcaaaccaagaaactcacggcgggtacagcaccgagtctggaagacatcactccctctccacgcctaacaatttcacccaagggctccggccagaccaacgccacttccgctctcctctcccggatgtgggctcggctccgcctagccctcttctgaacttctacttccgcctagcagcttccgagggggctgcggccggagcgagtcacgtgatgagtcaccctccgattcctctgagaccccgccccactgggatcgcgacgcgggacccgggaacctatgggtggggtctggagtgaaggggcggagcttggagcctcggctgggcctcaaaacccctggctctcattccgaatctttgcacaactcctcgtgtccctccagcctgccttccccatccacccgcccagtggtctcagtccagatgcacaggaagatcatttactgcccctttattcatcttagagaaattacagacccattctcacccgcctcccccccggtagagagaaatggaagcctttccacgctgggggcgcaggaattggaggcagtggctgagcaggaaagaagcctggaaagggcagcacgatgaagacttaggacaatgaataataggggcggacctcgcctcatcgagtagcttcaggcctccacacttgccctgctttgggatttttatgtgtggtcccgaggagagttgtttgattcttgaaatctctagacaaactatggctgggcctctctccagggaaactgtacttgagtccctccttaaggggactgcgtcggctcctctcagagggactgcaatggttcctcccagagggcctccctggcctcatctcagagggactgtgacgggttctctcacaggaactgcgatggctcctctcagaggtcctcccttgcctcatcccggagggactgcgatggcttctctcagagggactgtgacaggttttcccagaggaactgtgtcctctcctctcagagggactgcaacggcttctttccaagggactgaggtggctcttctctgagggactgtgacttctctcagaaatcctacgatggctcctctcaaaggacctgtgagatctcctctcagagggactgcgatggctcctctccaagagactgtgacggctcctctccaagggactgtgacgtcttctctcagagggactgtgatggcttctctcagagggactgtgatggcttttctctgagggactgtgatgtcttctctcagagggactgcgatgtcttctctcagagggactgcaatggcttctctcagagggactgcaatggcttctctcagagggactgtgatgtcttctctcagagggactgtgatggcttctctcagagggactgtgatggcttctctctgagggactgcgatggctcctccgagcgggactgcgatggcttctcttagagggactgtgatgtcttctctcagagggaccacgatggctcctctgagagggactgcgatgtcttctctcagagggactgcaatggcttctctctgagggaccgcgatggctcctctgggagggactgcgatgtcttctctcagaggaactgcgatggcttctctctgagggactgcgatggcttctctctgagggactgtgatgtcttctctgagagggaccgcgatggctcctctgagagggactgtgaaggcccctttcagagagactgtgacagctcctctcggggggactgcagtgatttctctgagacggactgcgccagcttctctcagaaggactggaatggtttttcctagagggactgcagtggctcctctgagagggactgtgatgtcttctctccaaggaactgcgttggcttctctcagagggactgcgatggtttctccaagaggggttatgacgggttctctcagaaggaccgcgtggggttctctccctatagaagctggggtggttatgctccttgtgtgtgagtttgtctttaagatgtcggtgccaggttctcttcacaggggaaccaggtaggattcttcctcgggcctgaactctggttcctggtgtggacaagttcttagactcctggctggaggtttcatttctatagaagtttttctttgatctgctactactgtccttttgaacagttctcagaggctgccccactgaggcagtttgga

SEQ ID NO: 4040 - DNA, 4001 bp, Homo sapiens
tttggtccctggtgtgtcttaccttcaggtcgccggggcaccgccccctcctgctctgtgggactgggaggccgggctggtcgtggagtacagcagcggaagccacaggtcgggcagggaggagtggggggccctgcgtgggtacgctgatgccgcctcaggttgcccaggctgctgcaggcaaaggggcagtggggacagcggtagggcttctcgccagtgtgggtgcgggtatgtcgtgtcaggttgacgagctgggctgaggcgtaggggcagcggccacagcggaacggcttctctccgctgtgtgtctgcatgtgccgcttcaggtggctcgagtagtgggacacgaaggtgcagaggcggcatgagtacagtagccgtgggggcagcaggggccccccacccggccctcctgccccacaacacggcccctcacctgtcggccccccacacagctggcaggctgggcctggcctctcacccctggcctcccctggacccctggctggctcctcaacttcactctccgcacttagtgcccggccgcccccagactcatcgtcgctcagcccatagggaagcccaggcctggcccccagagagtctcctggtgaaatagacataagaagagacatcagcatagggtaggatcaggctccaaactctccccttttcacttatggtctccccacttgcttggctccacccttagctttgatgatccctttagttccctcctaggaatcaaggtctcccctgcagtaattccagaaaattcaacatgaattgtctacctcttacactggactaatctagtgatggtagaattgacctgtatctagtttccctcaatggtcaaggatcaagggctcacagtggatcacagactgaaatgaatccataatgaaattaattcttgagacaagaaagtaaaaatacgaaagggagagagcccccaagacctttttctaagctctattgctaaggccccttttagtaaggagctgatataaaataaaacctatctctgaggcaaaatttggagggaagtggagacaatgaaagtaatgcatgtaataccacttgcctgcctaaagaacagatatttacatggatcccctcaatgactttcaaaaaacatcttgcataagtggatgggtagtgcagcaaattagggtagggtgatgctaagatcacagggaagagggacatggaaggataaagacagaaactaaaacctctcaatacaaaaggagcttacgctgcaggtgaaagggagttagattagacctaaatactgggttgaatgatttacagagagtttgcttccctgaacctctcttaaaagtaaatacacataaggaatgggctagggagagagacagggcatttacttttaatcagttgctccatgtgattcacccaccctcctattcctatcacctttgaccaggcctcagaacttcacctcaacaaagtgatggaagtgattggaccattaaacaaatgaagtcatctagctcaaatgtaaactaaaccagccctcggttgtggcaggaaatggtgttctgttcacctaacctgcctcctgaagggctggggtctccagcggccgctaatccttaaccaagacccgaaaacccaccttccgagtctctctcgaagcccatgagctggtcactgttgccgtcgccttcctcctcttcctcttcctcctcaaactccagatcctggcctagtagcaaatcactctccaataccagggccccgggtccttcgtcgagggagtcttcagtatccactgaagaggggagggggcttgtggattctccctcaggaaccagccctcgtggaccacacttcccgtactcgctgacccactctgattcccttagtgcctcggtgggaagctaggagtctggatcgcccacttcatccctcaggagtccccctccaccctgacctgagcccactccactgaccccacccccgctcctctcccctcaaggcccctgacccctgacctttgaccccctcgcatttcacgggctgcgggtggctttgcttccttcggggcatcgtgaccggctccagcccgacgcgcctccggcctgcggccgcccgaccccgcccctcctatctcggcccgcctgtctgcccttcctctcagggcccgcgggccgcccccatgcagcggcgcgggccctgggcagcccccggccctggccccggcgcccagctcaggccgctcccgccgccgccgccgcttccattcatggagccccctacccccctacggagaccagctggtacctccgtactcgcttccgcttccgccgccgcagagacgcacgggacgcgtagtccgtgggaagcggccgcggcgggagcctcaatggcgtgaccgggaagtgattgtgacgaggcggggagcaagccaatcagcggcagcggggagccggccagggagcagcgcaggaggcgtcctgcccgactccaggcttcaggccagccagaccggtcccaacctgtccctgggggaactagatcatttctggctgcaggagggggcgaggggcagccgcgacgcccgccaggccggcctaccagcagctcgctctgggctctcctatacacgcgcaggacacacacgagcacacgcacacactcacatgggggctcgccacatgctacagatgggaccaagtcgggggccacggcagcagaaaaaaaaggacacgatgcgtacgattaggttttggcctttagtctgaaaaagtgttgattgaaagtgtacaacagagagcgggtgcaagcggccgagggccatggagccgccaataaaaaagaatgtccttaaataaagttcacagagtaaaaaccagaaccgccagtccttccctccaacacaacagagcacaggcacagaaccggtgatgagcccgaggagcagaggcggctgggaaggacagcagaggctcccggctgcagtgtggagggagagccctctttggaatgggcggagtgaagccacccagctccccctgcacacctcatacccactgctaaggctaaaggaaaaagacaaaactcagtctcaggtccggagggctcagaaaacagtctaggtgggcaggggtctggatgactgctagtctcgcttggccttcttcttcttgtcgctgttgccattttcttcagccccctcagtagagagcacctcctctagttttcgcttgccactctctggctggagctctgctgtgtttcggggcttgaagcaaatgatgatgcaggtcatgttgtcacaccctgtaccatccccagaagtgtctggtgccaggcactgatccagcagctaagaaagggatgggggtagctcagccacagggtttgaacaccttgccaggaatctacagtcccacaagagggctggcttgctgagtcagggtggtaggagaggaatgggcaagaggtatcacacaacggcccacctgctagtccataaggcataaggctaagtcagggaaatgacagaaggtggaactttggagtcggggtttagcgtctgtcagcaattactgataatgctcccagattgccgacttagctcagattaaaagagtgaaccctggctgtgcagaccagacaccctctcttctccaccctggtactcacctcttccacaatggatgacaataaccgaagctccccattttcatcacgctggctgatctttgattgaatgaaatctacaacttcctggctgctcatcacattcctggggtcaagaacaacagtcagaatcttccagtctcactaaggcagcgtagaggagtatggacagaggtggtggcccaggccagtgtaaataactacagaaattctcagctctgccttagtctgggtgctcttcacccaccaagaggcctaggtctgcctaggctctaatcctagaggtgccctgagtcctataagagaagacatgctgcagaaag

SEQ ID NO: 4041 - DNA, 4001 bp, Homo sapiens
ccgctgtgtgtctgcatgtgccgcttcaggtggctcgagtagtgggacacgaaggtgcagaggcggcatgagtacagtagccgtgggggcagcaggggccccccacccggccctcctgccccacaacacggcccctcacctgtcggccccccacacagctggcaggctgggcctggcctctcacccctggcctcccctggacccctggctggctcctcaacttcactctccgcacttagtgcccggccgcccccagactcatcgtcgctcagcccatagggaagcccaggcctggcccccagagagtctcctggtgaaatagacataagaagagacatcagcatagggtaggatcaggctccaaactctccccttttcacttatggtctccccacttgcttggctccacccttagctttgatgatccctttagttccctcctaggaatcaaggtctcccctgcagtaattccagaaaattcaacatgaattgtctacctcttacactggactaatctagtgatggtagaattgacctgtatctagtttccctcaatggtcaaggatcaagggctcacagtggatcacagactgaaatgaatccataatgaaattaattcttgagacaagaaagtaaaaatacgaaagggagagagcccccaagacctttttctaagctctattgctaaggccccttttagtaaggagctgatataaaataaaacctatctctgaggcaaaatttggagggaagtggagacaatgaaagtaatgcatgtaataccacttgcctgcctaaagaacagatatttacatggatcccctcaatgactttcaaaaaacatcttgcataagtggatgggtagtgcagcaaattagggtagggtgatgctaagatcacagggaagagggacatggaaggataaagacagaaactaaaacctctcaatacaaaaggagcttacgctgcaggtgaaagggagttagattagacctaaatactgggttgaatgatttacagagagtttgcttccctgaacctctcttaaaagtaaatacacataaggaatgggctagggagagagacagggcatttacttttaatcagttgctccatgtgattcacccaccctcctattcctatcacctttgaccaggcctcagaacttcacctcaacaaagtgatggaagtgattggaccattaaacaaatgaagtcatctagctcaaatgtaaactaaaccagccctcggttgtggcaggaaatggtgttctgttcacctaacctgcctcctgaagggctggggtctccagcggccgctaatccttaaccaagacccgaaaacccaccttccgagtctctctcgaagcccatgagctggtcactgttgccgtcgccttcctcctcttcctcttcctcctcaaactccagatcctggcctagtagcaaatcactctccaataccagggccccgggtccttcgtcgagggagtcttcagtatccactgaagaggggagggggcttgtggattctccctcaggaaccagccctcgtggaccacacttcccgtactcgctgacccactctgattcccttagtgcctcggtgggaagctaggagtctggatcgcccacttcatccctcaggagtccccctccaccctgacctgagcccactccactgaccccacccccgctcctctcccctcaaggcccctgacccctgacctttgaccccctcgcatttcacgggctgcgggtggctttgcttccttcggggcatcgtgaccggctccagcccgacgcgcctccggcctgcggccgcccgaccccgcccctcctatctcggcccgcctgtctgcccttcctctcagggcccgcgggccgcccccatgcagcggcgcgggccctgggcagcccccggccctggccccggcgcccagctcaggccgctcccgccgccgccgccgcttccattcatggagccccctacccccctacggagaccagctggtacctccgtactcgcttccgcttccgccgccgcagagacgcacgggacgcgtagtccgtgggaagcggccgcggcgggagcctcaatggcgtgaccgggaagtgattgtgacgaggcggggagcaagccaatcagcggcagcggggagccggccagggagcagcgcaggaggcgtcctgcccgactccaggcttcaggccagccagaccggtcccaacctgtccctgggggaactagatcatttctggctgcaggagggggcgaggggcagccgcgacgcccgccaggccggcctaccagcagctcgctctgggctctcctatacacgcgcaggacacacacgagcacacgcacacactcacatgggggctcgccacatgctacagatgggaccaagtcgggggccacggcagcagaaaaaaaaggacacgatgcgtacgattaggttttggcctttagtctgaaaaagtgttgattgaaagtgtacaacagagagcgggtgcaagcggccgagggccatggagccgccaataaaaaagaatgtccttaaataaagttcacagagtaaaaaccagaaccgccagtccttccctccaacacaacagagcacaggcacagaaccggtgatgagcccgaggagcagaggcggctgggaaggacagcagaggctcccggctgcagtgtggagggagagccctctttggaatgggcggagtgaagccacccagctccccctgcacacctcatacccactgctaaggctaaaggaaaaagacaaaactcagtctcaggtccggagggctcagaaaacagtctaggtgggcaggggtctggatgactgctagtctcgcttggccttcttcttcttgtcgctgttgccattttcttcagccccctcagtagagagcacctcctctagttttcgcttgccactctctggctggagctctgctgtgtttcggggcttgaagcaaatgatgatgcaggtcatgttgtcacaccctgtaccatccccagaagtgtctggtgccaggcactgatccagcagctaagaaagggatgggggtagctcagccacagggtttgaacaccttgccaggaatctacagtcccacaagagggctggcttgctgagtcagggtggtaggagaggaatgggcaagaggtatcacacaacggcccacctgctagtccataaggcataaggctaagtcagggaaatgacagaaggtggaactttggagtcggggtttagcgtctgtcagcaattactgataatgctcccagattgccgacttagctcagattaaaagagtgaaccctggctgtgcagaccagacaccctctcttctccaccctggtactcacctcttccacaatggatgacaataaccgaagctccccattttcatcacgctggctgatctttgattgaatgaaatctacaacttcctggctgctcatcacattcctggggtcaagaacaacagtcagaatcttccagtctcactaaggcagcgtagaggagtatggacagaggtggtggcccaggccagtgtaaataactacagaaattctcagctctgccttagtctgggtgctcttcacccaccaagaggcctaggtctgcctaggctctaatcctagaggtgccctgagtcctataagagaagacatgctgcagaaaggggaatttagggcattctgccagtgctcaccagatgccatcacaggcaatgaccatgaattcatggtcgtcagtgagagtcagcaccttgatgtcaggaagggctgaaatcatctgttcctcaggtggcaggttcttgtttctcttatagaagtggtcccctggagtaaaggaatggttgatgagcagtttggatacttcccacagacttgtgtttgtggcaggtcaaaccttgccattcatttcccttctttacaaagttccataatctagtggaatggggaactgagtcctaagtcct

SEQ ID NO: 4042 - DNA, 4001 bp, Homo sapiens
agaacagctctgaatgtcacctccgttgttctgaggacaccagtggatcaaaaggatctgagaggcagcttctagccttcaaacattgagagaagtgcccctgtacacagctgcatgaggctcccacctgtccacagcccacatcagtctacaagtgagtgaagtgtgaccagtctggccataccactgaagttatttactgggcatactgtatgcaggtcatctcctaggacttttggaaatataaatatggaaaagaacttcaaggaactttaaatctagcctacaggttaacaattacacaagacccaaggcaaggccatgcaggattatgaggctttaaggggaggaagttacacctctcccctcatccttgggaacccagctcagaggccacctctttctgagaagctgcccctggtgttcccaagctctgttaggtctctgcaacacacttgagagctccttcattataaagctttgcatcatactgttcataaaagccttaaaacaaacaaaaaaactaacccaaaccatgccagagaagtagttaaggctaacaacatgggtgtaagcatagcacagttaggcattcctcaagcttcatgtgtgtgtggatccctgaggatcttgttaaactctggctcaagacttgctaagacactgtttgaggatgtgtggggccccagagtctgcaattctagagaacttctgggcaatgcctctgctgttcccagagccacactgattaacaagggtataaaggaaaaaagagggggtgggaagcccacggactgggcccagttcttccactggccagttatgtgtccttgagcatgtgcactgaaggatgaacagtcggattaaaatgcccacctggttagagataggacgttctaaacttaggactggcttaaaacctcctgggtcacctggattgccctgcccccaacgctattgggggaaggggctcagaggagatacccaccatgtacactgctgaccttatacaccgctgagctagaacgactggaagaaccttattagtgaggtgattaaggaggtggatgacaaggctccaaatggccctatcgtcctctgatccctggccaagggccactccctcttgggtttgcttgccctctccctgccgcagcaggaagagatcagatcctcttctgctctcctctggccattgggacaattttccatggccatcccctccacctccgccacggtcatctagagacccctgccagacccaggagactgcggcttcagccttctgggtctggaaggttagatgtcgccacacggaaggcagatgaagtacagcctcacccttcagtgggattccccggcctcttcctggggtcctcctgatatcgggctcggtactagctccccaagagggctcctggccctctgcacgctccagagccaaacctgatgctgtggagtccatagctggggctaaggagcggcgtcctttcactaggtccaaatctctgtctttcggccacagccctgtggtcctcccgagggttcagggagcgggacgcaggctggggctgcctgggggacacggggcatccccactaggcgcggcggggccagcggacctgcagggcccagagcagggccggcaaaccccggtgcgcccagcgcggcgcactgctgcccggggtcgtgctcttccctcgccaagtccggcctcctacccccggctcggctcctcctcaggaccaggctctggaacccagctcccacgtggatccacacgcacagtgggctcagactaccaggagacacggccacagccacgcccgcgacgcgagggcccagcgctcttcagctgcccggaaacagcagggattcggtgagagcctcacaggagcagggaccgactctatcagcccggttcgccccgctgtccctgcctagctccggcctgcacagtccctagcggggggcactcggagggacacacccagctctgtaaggggccggggcgcgggcccagtacaggtctgcgcgcccgcagtctccgaacgctcacaggaccaggccccgcccgccaccccgcgccagcccccgcccgccaccccgcgccagcccccgcccgccaccccgcgccagcccccgcccgccaccccgcgccagcccccgcgtccgccccgcgccagcccccgcgtccgccccgcgccagcccccgcgtccgccccgcgccagccccgcctcccgaggccgtcccgagcttgcgcagacgcggccgccgccggggcccttcagagccagcgccggtggcggggtgctggcgcggcgaagctggagaggcggggctcgcgggcgcctgtaggacctccgctgggaggggccgtgctcgccggccacgcgccggttttcactccgctctcccccaagggcagggacctacaagcatttcccttctcgcgcgtgactttggtagctgagcctcatatctctctcgttttttggggggaggggggagacagcctcactctgtcgcccaggtgggagtgcaggggcgcgctctcggctcaccgcaacctgtcttctgggtacaagtaattctcgtgtctcagcctccgtaggagctgggattacaggttcccgccaccacgcccagctaatttgttgtatttttagtggagacggggtttcactatgttagccacgctggtctcgaattctgacctcagatgatcctcccgcctcagcctcccaaagtgctgtgattacaggtgtgagccaccgcccccaacctgcatatctcgatgtaaggctattcaacagaagccgcgttcctaccctggatctgctgagtgaggatttccaggaggctctcctggcgtgcctaggggatactggggactcagtgctagatactgcttctacaggctgccccgtgcctcttgcctttctccatctgcccctgaattcagcgaagggtgctgaagaacaaaagaggactttgaacgccctcctactccagaaacaaatatcatttaggacccaaaagaaatggaaaaacggcctgctatggtctgaatgtatgtgtccccctcaaattcatatgttgaaacctaactcccaaggtgatagtattaagaagtggagcctttggaagactctgccctcatgaatgagattagtgccctttaaaaacagcccttagaccggtcgtggtggctcacatctgtaatcccagcactttgggaggccaaggcgggcggatcacttgaggtcagaagtttgagaccagcctggccaacatggtgaaaccctgtctctaccaaaaatatatttaaaaattagctgggcgtggtggtgcacgcctgtaatcctagctactcaggaggctgagacaggagaattgcttgaacccgggaggcagaggttgtgagccaagatcgtgccactgcactccagcctgggcgacagagcaagactccgtctcaaaaaataaattaaataaataaataaaaataaaaacgggccttaagccccctttgctcctcctgccatgtgaggacacagaaggtgccatctatgagaaacgtaccctcaccagcccctgaactggctggcacgttgatattgcatttcccagcatccagaactgtgaacaacaaatttgtgttgtttacaaattccccagtttaagacactctgttatagcagcgccaatgcctaagacacagtctgagtattaaaacggtggttttctggaggcagtcctcagccagagaagggccacttgtgaggacagagagattggtttatcaaccctatttaggagttcaggacaaaataacttacaaaatcaaggcaaagacaaaataacacgaaatcaaggcaaagagaccattctcctttcctgcttttgcagtctctgtttcacttttctgccagcacttccagtggcacagatggccaggatggcgcagcaagcaagcccttttccacgcagggggaca

SEQ ID NO: 4043 - DNA, 4001 bp, Homo sapiens
aagctcaagaaagactaaaataatttaccaaagtctcacacatactgaggaaaagggagatgtgaatccagatcttccgactgcaaagcctattctctttccactaaactacttgtctcattttcttccacttacataaaaacaaaatttccggagatcacctacttaagagcacccaagaaaaaccctaagatagtcaagtacaaagtgatgacttttttaaactacagtacctaaacctttttaacctagagtacctgccgtatacaccctccaaaacaaaatgcaaaaaaggattacaaaacaaatacaaccaatatacaataaatatgtgaccataaacacattatgaaaactagttaataaaaacgaataagattttgtgatttcttccaactgttatatttaccctttcttggttccaagacaaataaatccccaaggaaggaatggcccagcatattttaatgtataacatgctgggacgccctgtaattatttagaagtacatattacagaatatggagtacaaaataaaatataaaatgctgtcaaacttttttaaaagacagcaacataagtccactaagtctcaaatgtctaatcattaacaaaatttaaagctatttgaatgtcatttacatgtttgtttttctccgaaaacttccttaaattcacctttttttggtcaatccttttctccaggttatcaatttttaattgtaaatctgaaccagcaagcacaacatccctgaaaaaataatcctttacaacaaatgaggggaaaaagcagaaaattttttgtgcaaaattccagagctcgttggaaaaagtacttgaacataaatcgctggatcctggtgacaagtttttcatcgggactcctttaaactactacaatttctggtcctggccccaaacttcgcctaaggacaaattttaagattaagaaaaattagcttcaggtagccttcactctatagctcaatccatgattttgtaatactgaagtatccctcattaacaattacctcaaacaacaaaagatctatttcaaacgttctcaaggattccagtctgtgatatatacattcccccttcctttaagagaacggggcccaagctaagaatcacacaaaaacaattcactaacgttctgttttcacaattcctctgagaaatttggaaatactgttaggtatcacaaccatttatgagtcctcagtctcccacagaggtgatattttctttggtttcatacctgcactacgcagcacagaacaccagcccggaaaagccgctggatcctaacattccctccttcatcccgacaccccctccccaaccccaaacacaaacacgctcttctctccacgcttcttgcacaatgtcgctggtcagagggctcggctcaaactccaccgcctcttcgggcccgacgggaacgcttcctccctgctcggcattccctcaccaccgcttcctcggctgtcaggcccagcgcagcctcggcaggccgggcgctgctggggaaggggccgcctcggcctcgccaaagggctcttcacgatcctcggcccagtgcaacggcgtcaggcagctcttctcgaggcagggtccttcacgagtacccggacgggccctcccgggtagcgaagtgaataaacgacggagcagggcagcacagcacagcttcccttcccatcccgggggtcccccaacctcctcccgcccccgccgtctgcccgccgccattttgtgcggagccgctgcgacacagatacaatagtcggcccggatctcacaggaagggctcaggacccccacgataccggcctccgccttccaaccccctactccccacagggcagcggtcctacctatgcctacccgactaacagctggatcccatccgcgccccacacagtttagcactcagcctccagtctcgacgccgaaaacgctaccgcctccaaagagctgcacgcatgcgcgcctcccagctcctgcgagccctcgtaggctcccggcgcctgcgtaccgctggcaccgcgctcgcccgaagcccgagaagagccgggcggagcgggctcccggaaggggcgctcccgcgtggtggcggcgaaggcgtgcggcaaaaaaaaaaaaaaactccagcgccgtcttcactcttttgctggttctgtgcctgtcctctccaaaccgctcatccttttaagacctatattgtctcacctccttcatgaagtcttccctgatcatttgtgccttcaataataacattatatggccaggcgcggtggttcacgcctgtaatcccagcactttgggagaccgaggtgggtggatcatctgaggtcaggagttcgagaccagcccggccaacagggtgaaaccccgttactaaaaacacaaaaaatagccggtggcgcgcgcctgtagtcccagctactagggggtgctgaggcaggtgaattgcttgaacccgggaggcggaggttgcagtgagggaagattgcaccactgcactccagcctgggcaacagagtgagactccatctcaaataataataacaacattatattataacaggttatattcgcgcctagcacgttaatataatgctttgtatggtcaagattttgcctgcttttatcctgtcaccttgcaccttttgatccctatggcaatgatgtgtgtcatagctactcaaaactgtaaagtagaattcaaccaaagctattcagctaaaactttaacactctgaaaatccttttgtcatttcacaataaaaagccctatctgtgtggtagatatttgtaatctccattttacccatggaaaaccttgggatgacagacgttaaagaactgtgttatgcaatgttttatcttctcgaggtggctgtactacaccaatatgaaaacccagtcattgttcaaaatctggtaaagctacaagccctgccgtatgcataccacacaaatcacaccacccaccctgagtctcacacatcggttttacctagcactcaagcaaatgcatttcttttattcacattaaaacaagcatttgaaagactaaaaagaaaagtcgttttaaaaagatatcttatcggattttcatttcaaaccaaaaatcctgctagggacaacaaatcaaaaacaacaaagaaaaagccaacaagctccccctaaacaccaaataacccatgttaacatttgataagtttccttccatacatttctttatattcatacaaacacattatttgcatgtaacaggaaatgttttcttttttcacacattagctatttgcttttctgattactgacatttctccaagtaaaccatataatccttttttaaataattgtataatattcatagtatagctgcctcagcaattattcagcctgttgttgaacactgaagttgtttccagtctttttgctactgcaaacactgctgtatacaaagacttaccaaattatgctttaatttctaaaggctagaatcatcatagtgggaatgctagattaaatgtatatgtgtgtacatacatttaattttaataggtgttgtagaaaaacttcccaaaaagtttctacaaagtgtcacttccactaaatatgtaagaaaataggcagggcaaggtggctcatgcctgtaatcccagcactttgggaggctgaggcaggtgaatcacaaggttaggagttcaagaccagcctgaccaacatggtgaaacccaatctctactaaaaatataaaaattagctggctgtggtggtgcacgcctgtaatcccagctactcgggaggctgaggcaggagaatcacttgaacccaggaggcagaggttgcagtgagccgagatcacgccactgcactccagcctgggtgacagagtcagactctgtctcaaaaaaaaaaaaaaaaaaaaagaaaataaccatttccctacaaactcacttctttctcaaacctgaaatacttta

SEQ ID NO: 4044 - DNA, 4001 bp, Homo sapiens
cctgcttttgtgagtcttaagtgggctgaaagcaagtagccaagagattcaagtaaaaagaatgaaattaaatgcatcaagaatttacgtaaaactttagatgagaacttttcattcttggaaaacacacatcacagcatattttctttattcataaagaaacatattttaagatacataaagaaaattcgatcaagaacgctatatttatttttggactatttgagtctgtccttaaacttctactctcctcattcaggctaagttaccactgtgtaagaaaggggaagggaggctgcttgctaataaacatggacttcagtgaatcatacattttcatattgccaccctactttgtctttactctttgcagtactaagcctaatgagcctttattctacttccttttttactttatggaggtgtatagttctccaaacataccaatacatgaaagtcagttctgcagggaggttttatagctaaagggggatttggatgagaagtaggagcaatcatcctgcactatctcaatgctcagtacatcttctcccaccaatcaggagtgctcttccgactaggatcctgaaaaatgaagctctgtgatccagtgagaaccttccagcaactgcatgggttctatctgcctcacgttttccctagtggctctaatggtgacatagtgatagtgtttcacacatatccgccaccactttacagtgaatagctgaaagtggacagcataaggttctagagtcactctcttaagcttagcacagacaacttctcactggagaagtttgctatcagtccttcaggaaagagctggaatacaaactctttctgagaccatcactcaatcccgccacttcctccttgtgaccagccacatggttccctgcctccatcagagacagccacatcctcattcaccttcagcctcctaagccaaacaaaagaggttatggggtaacttggggttagagttcttttcttttctctttaaacaggtcctgttgacacatttgcttcaaataaggagagactgtggtaatcttcagcttaatggagtgaggtgagatagtccagagcattgtggaagtgtcaaccaaagccatggatcacagcttccctaagaccccttcctttttctacacccaattctcaccccacgcccaccagataaaaaaatgagtaaattataaaccaaactgaatctcaaaacctccaaaaactcaatcttccaaatgccctcttaaatatgagagagagagagaggaaaacagaagcgattaccagagttttgttcccgttcttgctgagagggccccggaaaactcccttgatgttgcgaaagtgtccgttgctgagatgcgtggagctgatgacaatgtagtaacactccatggggcagccgccgcctcctccgccgcagccgccgcttccacgcaccccgcgcccacagccgcagcgcgccggggccggcgacggtgggctgggaacccgccacgagggcacgcagccacccccggcacgtcctctggagactggctcactgcacccctctgtggtgagcgccgaggctcccccgcctccgcatgctcgccgcgctctcccctcagtctctcgctcctgtttctcctcagattcgcgtcgggacgacgagccccgcgggaggattccagcctaggagggggccgggccggcgaaacggaaccgagcgggagtcagtgcccgcgcggtggccgggcggagcggggctgcgggagccgcccgcgcggcagcagaagcggcggcggcggcagcatcccccgcgctcggcgcctgcactcggagttgctgctgctggcaggcatgagtgttattatagtgagcggcgttgccggtccattgcactgagccaatggcagggagccactgggctgatactgagagctgtcagaggagtacatctgtcacccgctgcctcccccgcccaccccgccgccgggacccgcggccgcgccagcccgagcgcgagtgggagcgccccgcgcggcgccgctgccgcagagggccggggacgcgacggccaccgccaagtgggagactcctggaaggtgggggcggagaggaagcgaagaggccgcgatttcttgcctggcagtcggcgtgggggtgggggcgagggggataaataaattaataattcaataccgaaagccacccgcttccgactgcagcgaatccaggccggtgccagcagcggcttctttctcaagataattgctatccactgggtttggcttatttgattttgttatttaatgtgtgtttggtatggaggctggtaccctgttcagtcttagggaaaggcgaggaaagaaaatatgccccccacccacccctgctcccacacatttgtagataccgtaagtgcttgtgttgatgatagtttcgggggagggtagttgtggcgatgcgagtacaagtgagtagagggtaaaagcagggactcctgatttatatgtccctcctcctggcaatcctctcaccccacctcccctgagaacctcagttcttcctaaattgctaaagctgaggggaaagggatgctttgcggcaaaggcgctgctgcctcaagcttgctttacatgcctctctagttcctctcgcactacagagtggtagcgaacaaaagcgttcgccctagaagcgacctgaatggaaaaatctgcacacgaactaatgggtttgtcacggaaagtagggaaccgggtctgcagcattccctggagacagactttctggttggttttcaagggtccaaggcagccatcagcccggctgtgccctcccaccctgcctcccacccagttgattctctctttgtgtaagtttagcccctctgaggtggtggagtgagagcatcccatcagatatatatacgattcatcagtcggcacttaaaaagatcgataacaggcagtgggaggctgggagatggtaccttcaatggatttactgaaggctttatttttcctttgccttgaaaggcttaattggttaaagcagattccagacattctgatgcccctatgtcagaacaaactgcactttgatataaactgtgtttatttgggaaacttgtttatttgagaatcgagattgcaatacattccactctgtgtgtctcatatgtaggattttatgtagcagtggccctgcaatccataataagctccttaaataaatccgacagtttgatttcactttttgaaagagggaaaaaagagaagaaagagagtcaatagtagtgtgagtaaattataactcatagatggtagaaaggggaagttaccacatttacatagtcattcttcctgtattatgcttcagttcaaacaaaggggaaaaaaaagttggtatggtttgatcaaagctcattatgaagggtcagagttgtttagaggcacttggctaaatttttcagatatccacttgggggagtctgcaagtctcgggagaaagcgagaatttgcaaaacttctgtactctgtggaacagatcacccaataatttgttagaattcagtatgaacacagttctatcagaggaaaaacatgtaattgatctacactaaatattgcatggaaattaaatccatttccagctatcgtaaaaatattgttttatgtttacattttgaaaatgcaggcattctctggacacgtcaactttggaaagaactaataacctgtatgatttctagtatgtctttggaaggtttgtaaactttccaaagttagttattagaaaggagataacattgttagtattaataagctataccaaggaagcttgtagggaagtagaagaagcaccatgtgtgaaaggaccagatgatgtaggttatttttttttaatttataataatgtaatttaggaggttttttgcaatatttttctatcaaaatacgtctaatgaaattctaaaattttcatctacaggataaagctca

SEQ ID NO: 4045 - DNA, 4001 bp, Homo sapiens
aacactttgcctggtagatctacaaaaatgtcttgctgcaaggtatggttacattcctatatctagcaggattacactataaaatttaccatcttactttgtatacaaacatcactcgttagtattggacacagattagtgctttagtaaaaacaatgcaaagaggaaaacgtgcttattttaatccaaaggtagaatgtaaagaagggaccaaataaacatacaaaatgtgactaaagaagacttgacttagagattgaaacagtaagtgacattacaattttgtttagcctctctcttcctcacaacttttggacaaggagcctgtctttttaggcactgctctacccaaagtctggtatagtacccaatacagtgttaagcgctcataccataaatacaacaggatttataagagaaaatctcagtaaaatcatggagtaaactgaattagaatttatctgagaaagtctcagtcaaaataataaagcaaagagtttaagaataaagggcacacgcatagggagggaaaaacccttttctgtaacttgtatcttctttattcaatcagttttcctgggtaccttaaatggaatgtccaaaagtatacatacagtcgcccttgaactctgaaggaggcataaatcagggccttacgtgctaagattattaggctgtgggctccatgtggccgatgaataaaggcatctttttagtgatgcctttattcatcggtgtattatagttggcaccctgtagtcacacgttttttgtttttgtttttgttttgagacggagtctcgctctgtcacccgaggctggagtgcagtggcgcgatctcgggtcactgtaaccacttccgaagttgaagcgattctcctgcctcagcctcccgtgtagctgggactacagatcctacagatctctgccaccacgtccggctaatgtgtgtgtgtgagtttttagcagacacaagatttcaccatgttgcccaggctggtctcgaactcctgacctcaagtaatcctcccgcctcggcctcccaaagtgctaggattacaggtctgagccaccgcgcctgtctgccactcgtttaataaatggtcgttactcaaagagtggtgatggggccactcttgattatcaatccttcaaacagaaaagcccttttctgtgactcttttccttccaagctgactttagaagtgtgtttgtggccgggcgcggtggctcacgcctgtaatcccagcactttgggaggccaaggtgggcggatcacgaggtcaggagatcgagaccatcctggccaacatggtgaaaccccgtctctactaaaaatacaaaaaattagctgggctgagtggcgcgcgcctgtaatcccagctactccggaggctgagacaggagaatggcgtgaatcagtgagccaagatcccaccactgcactccagcctggggacagagcaagactccgtctcaaaaaaaaaaaaaaaaagtgtgtctgtaaatgtagttcagaacttcggagccctgtctttacagttcaaactgaccacgcgaagactaaaggcagtagaggtactttctacaaatttagccgtgcaatctaatagcgagcaggccgagacgcccgcgattgaaggccggggtggagaaagtaataagggccctggaaattacccccatcccatgtcacccactctttcttaaaatgccattaaattccgttcaactttttatctcccatgcaagaaactagcgacttgccagccacgccacttccagccagtcacacctggcgtattcgccgcagaatctccaactcccgccacaggtttgggacgtgtccgcccctaagcggaagtgacgttcaacgggacaacgtgaaagtagatgagtttaaatacgtactaataatttaaaacccctatggtattttgaggaaactcttccggctacccttcttccatcacttctctcccgttagggttgcgaaaagggctctgtacagcctcgcgacaactcgttctccgccctaatttcaagtcattcaaaactctgtcccttttcattggctgaagcggcggcatgggtacctctcaggaactacaattccagccaagcaccgcgacaagtgaacggaggagaagttatgagtaggggaaaagcatgttgggaatcgtagtccgctccaggccgaaaagagcaatcaccccgccctccgccactgaagctggagaaaccaggtgttcgtttcagaacccgttagcgctaaggggaggagccaaccccttaagcagcatgcctcacttcgccccacatggaggataattttcctttacccctaaaaagcactataaatacccactgaggagatctggttgtcttttaaatacctcgagtcagtaaaaactcacgaaactccgcacctcaggctccaactcgtgggaaaaggtagctcttttacaagtgggcaaaatggctgtcctcctagttttaccattggttggcttttgcgtccttcaagggcggttacttaccacggattggttctttttctcttgaggttggaggaagatttggcacggctctccgcggcctgggaggaggtaaaggggtggagagaagacagtttttttcaagcttgattgggcaaaactcatgtcactccggggacgtacaacctatgaatagtcggctgccgctcaaagagaacgaagaggcggggctagtgcgtggtgggaaggggcgggattctgccagccgcggctgccgctggagccggtgtccgggctggtgatggggttaattccctttcgtaagactcttacttgcacccacccagccccgccgtcgccccgccgcgccgcgctccaaccgcctcctcctcctcagtaacgcgggtaagagatgcccttccctcccccgtccagctccccgggaataacgcgccttgctcccctcccccgcccgccaaccggtagcgctaacggagaaggaggcaggcaggggagagatgtggtgtgtggaaaggtggccttccccgccgggtcgtcggcgcttcagccagggccttctgacgtcccgctgctgccagcccgccgttaggtcgggttccgagtgagccaggctcgcctggcccgcggctgcggctccggctgcagctgcagccactgccttgtgcccaccgcccccacccgggggccatgtgaaaagcaaacccctcgaggcctagcggaggaggcaggggaaaggtttccgagtccctgccatggctgctgctgctgcctccgcggctgctcttgcagccccagggactcgggagccagccacagcaggcctgccaagagcgtggtactgctctctcgtgtggctggcgccggtgccccgggctcccccggccgccccacggccgcatcccctggccttgcaccaagagaattttcagcttcgaccggttggtaaaatgtaggtacattttccctgtggtaccagaaaaagcacaatgggaatattaaaaagaaagttgaatgactgtcagtgccacggtcccccgggatcagatttacacacgttttgattcctgagccttaggctgccaacaaatctttgtgggctttgaagttttttggtgttttgttttcttttgttgctgtgactaggtgcaaagggtgactctgttgagcttgtttttataaagaaacttaaattattgggactatcatgctccgtgtgtaattgtcctgggatagttaagtaaaaggtgaagaagaggtgctttccaaattaggattagtgaacagcaaatggtttttctaataaaattttctaaatatatatatatatatcttcatggttatagtttacctaattgtaactgtaagaaaccttttttagcttaaatatcattgatgacaaaaacttttaaatgaaaagatgattaaagtcaaactgaaagtctacccatttataatatgtgaaacaagatcttctaagtaata

SEQ ID NO: 4046 - DNA, 4001 bp, Homo sapiens
aaagggcacacgcatagggagggaaaaacccttttctgtaacttgtatcttctttattcaatcagttttcctgggtaccttaaatggaatgtccaaaagtatacatacagtcgcccttgaactctgaaggaggcataaatcagggccttacgtgctaagattattaggctgtgggctccatgtggccgatgaataaaggcatctttttagtgatgcctttattcatcggtgtattatagttggcaccctgtagtcacacgttttttgtttttgtttttgttttgagacggagtctcgctctgtcacccgaggctggagtgcagtggcgcgatctcgggtcactgtaaccacttccgaagttgaagcgattctcctgcctcagcctcccgtgtagctgggactacagatcctacagatctctgccaccacgtccggctaatgtgtgtgtgtgagtttttagcagacacaagatttcaccatgttgcccaggctggtctcgaactcctgacctcaagtaatcctcccgcctcggcctcccaaagtgctaggattacaggtctgagccaccgcgcctgtctgccactcgtttaataaatggtcgttactcaaagagtggtgatggggccactcttgattatcaatccttcaaacagaaaagcccttttctgtgactcttttccttccaagctgactttagaagtgtgtttgtggccgggcgcggtggctcacgcctgtaatcccagcactttgggaggccaaggtgggcggatcacgaggtcaggagatcgagaccatcctggccaacatggtgaaaccccgtctctactaaaaatacaaaaaattagctgggctgagtggcgcgcgcctgtaatcccagctactccggaggctgagacaggagaatggcgtgaatcagtgagccaagatcccaccactgcactccagcctggggacagagcaagactccgtctcaaaaaaaaaaaaaaaaagtgtgtctgtaaatgtagttcagaacttcggagccctgtctttacagttcaaactgaccacgcgaagactaaaggcagtagaggtactttctacaaatttagccgtgcaatctaatagcgagcaggccgagacgcccgcgattgaaggccggggtggagaaagtaataagggccctggaaattacccccatcccatgtcacccactctttcttaaaatgccattaaattccgttcaactttttatctcccatgcaagaaactagcgacttgccagccacgccacttccagccagtcacacctggcgtattcgccgcagaatctccaactcccgccacaggtttgggacgtgtccgcccctaagcggaagtgacgttcaacgggacaacgtgaaagtagatgagtttaaatacgtactaataatttaaaacccctatggtattttgaggaaactcttccggctacccttcttccatcacttctctcccgttagggttgcgaaaagggctctgtacagcctcgcgacaactcgttctccgccctaatttcaagtcattcaaaactctgtcccttttcattggctgaagcggcggcatgggtacctctcaggaactacaattccagccaagcaccgcgacaagtgaacggaggagaagttatgagtaggggaaaagcatgttgggaatcgtagtccgctccaggccgaaaagagcaatcaccccgccctccgccactgaagctggagaaaccaggtgttcgtttcagaacccgttagcgctaaggggaggagccaaccccttaagcagcatgcctcacttcgccccacatggaggataattttcctttacccctaaaaagcactataaatacccactgaggagatctggttgtcttttaaatacctcgagtcagtaaaaactcacgaaactccgcacctcaggctccaactcgtgggaaaaggtagctcttttacaagtgggcaaaatggctgtcctcctagttttaccattggttggcttttgcgtccttcaagggcggttacttaccacggattggttctttttctcttgaggttggaggaagatttggcacggctctccgcggcctgggaggaggtaaaggggtggagagaagacagtttttttcaagcttgattgggcaaaactcatgtcactccggggacgtacaacctatgaatagtcggctgccgctcaaagagaacgaagaggcggggctagtgcgtggtgggaaggggcgggattctgccagccgcggctgccgctggagccggtgtccgggctggtgatggggttaattccctttcgtaagactcttacttgcacccacccagccccgccgtcgccccgccgcgccgcgctccaaccgcctcctcctcctcagtaacgcgggtaagagatgcccttccctcccccgtccagctccccgggaataacgcgccttgctcccctcccccgcccgccaaccggtagcgctaacggagaaggaggcaggcaggggagagatgtggtgtgtggaaaggtggccttccccgccgggtcgtcggcgcttcagccagggccttctgacgtcccgctgctgccagcccgccgttaggtcgggttccgagtgagccaggctcgcctggcccgcggctgcggctccggctgcagctgcagccactgccttgtgcccaccgcccccacccgggggccatgtgaaaagcaaacccctcgaggcctagcggaggaggcaggggaaaggtttccgagtccctgccatggctgctgctgctgcctccgcggctgctcttgcagccccagggactcgggagccagccacagcaggcctgccaagagcgtggtactgctctctcgtgtggctggcgccggtgccccgggctcccccggccgccccacggccgcatcccctggccttgcaccaagagaattttcagcttcgaccggttggtaaaatgtaggtacattttccctgtggtaccagaaaaagcacaatgggaatattaaaaagaaagttgaatgactgtcagtgccacggtcccccgggatcagatttacacacgttttgattcctgagccttaggctgccaacaaatctttgtgggctttgaagttttttggtgttttgttttcttttgttgctgtgactaggtgcaaagggtgactctgttgagcttgtttttataaagaaacttaaattattgggactatcatgctccgtgtgtaattgtcctgggatagttaagtaaaaggtgaagaagaggtgctttccaaattaggattagtgaacagcaaatggtttttctaataaaattttctaaatatatatatatatatcttcatggttatagtttacctaattgtaactgtaagaaaccttttttagcttaaatatcattgatgacaaaaacttttaaatgaaaagatgattaaagtcaaactgaaagtctacccatttataatatgtgaaacaagatcttctaagtaataggataccagtctgacaggaataattggacacgtctcaatttctaaaaatttggcatatttggctatttttagggcattctgttatgatttcttcatcacattttgatggagtacgctcgtcttttcaaataccactctgcttttatgcctggaagaatatgtctttaaatcatggattctatagtctgtagtagacataactgtgatcagagataaaattctaggcccatttctgaggtttacttgttagcagaataaacttgggttctgaggaaacatctgagttttgatcatttcttcagggtttgagaagactatggtggcttaatgatcttctgtattccataactagtacacctagttacagaattgacatagatacattcaggtcctggaggaaatttgtggtatctattaaaaaaatgaaaattgccagtcatgtagtagtcacctgtagtccctgctactcaggagtgtgaggtgagaggatcacttgagcccaggag

SEQ ID NO: 4047 - DNA, 4001 bp, Homo sapiens
ataacctgaactatttataaaaatacatgaaaatttaaagtgattcatagtcaaatgttaactgaaaaggaaaatattttgaaacttgactgccataggccaatacggaaaaggtgaacactttcaacctatgtatacatgtagaaaatggaacatttgatattcaagaaaacgtgattttggaaacacaatttgtggaagcacagcaatatctcaaatgaaccatataattatcagcagtgatgggatcaggatttttcccccgttttatagttagatttcacatttgtacatgagaatctaaaattgattttttctatttaaaagcattaacattataaaatggttctcaatttaaatgttattcaattttcagaataaaatgaaatactgaaaaatttattggtaagctatgaccattttaactttatattccccaaacaccaaatttctttaattttgttgttattgaaaccatgacaaaggcaaaatatttaacacaccaagatgttccttcatggaagatcttcatttgaaaagtcacttaccagcagatatgcttacaaagttcccctcctttcggaaatgtggaacagttacaaacgtgaggatttcctagaaaaacctttaaaggaaaaatgcatacttaaaaagaccagtaaaatttgagagttagagcaaaactgagttaataaaagagatttgaagaggtaatttagtttaggtgattcaaaaaggttgaatagattctactggagaatcttaattcttgatactagtctctaggcttcattatttatctttgttagcaaattaacaaattaggatggttttaaagtgacctgcccttaggcaggtgaaaataaatctaattcccaaagtcagagaagaaaaaaagcaaatatcaacccataaattcctcacagtaaggaaattctactttggggtggagctaagcaccttttgtaaggtagctcattttggatttttgtttggtgcatttgagtcggtgaatttatttaattttattcaagaggacaaaatttattcaccaagactagtttggctaaaactattaaatacagtaagtattgaagcaacaaagtaaaaaaagatgctttaaataagcacagactagtaaattgcattcaattcttaaacttcacggcactaacgtaaaattttgtaagtcaactcctaggaggtagtgcagtggctaatttttgagtggttaaggatgggatatgcaattatgaaatatctgtggtctttcagtaaacttgaatttttattcattaatatctttccaaggtattgccatttaaaccatcctttaatagggccttcatacagtttcagagtgagcaaagagtaaagggaaacctatttatttatttagaaaatatttacagtatgctagcagattgtagaattttcatttcgtttgatttacaggactaaggaccactaacaacagatccaagaacacatgtaatgccaaccaggtattcatacgcctctgacattttcaagcctaaagatcaagagccatcatcttttacaagagttgcagtttggtcttaacctccaaaaaagaaacttctaataaatactatttccttctgtaatttcacgtattttagagtctggaacactcgtgggaaggcgctttcgggggtgaggcagcaagtatccgcagagattgtgatggtggctacgcacattgggtatgccagtgggggaacctggtgggcggggatgatggccaactgggggcggtaggggcggtagttactcggaaatccatgtattccggctcctcctccctcagcaggaagccagtggggcccatctctcgtaggaggtagatgctgctactcagcgcctggtcttggtgccagctgagcctctcgctcaagtgtcttcgcctttcagaggccttatagcctcggcgaagcatgctgggtgcgggcggaggcggcccctctgctcggctcactgaggcgccagccggtctccaagacgacggcgtgcaggctggttgccttggtgacggtggttgggctcggggtgtcccggtgtgccctgcgccgaagaagagcgggcgacaaaggtgcgggatggcatggattctgcaactctccccagcctccactgcgtttcgaagcgacgcccttgactgaggagtgtttttaataatcatctggccgacttggaagctggaggccgaaggcatagctgtcaattttcttgcgttccttctgcttcctcggggcagagatggtgaaatctacttgttaggacagttgcaaacccgattgcagtctgggctctggatgctgaaattatcctgtgatgattcatcatctttaacagaaagccgaggttacagagcccagagtgatttttgacgttccacaatattccacgaacattttctgattgctcactatatgcatagattgactgagtctctgggggaaagatgtagaagacaggagttctaaaccctaggaagtgcatcaccggtagtggcgccggctgtagtcccagctacttgggaggaaaccagatccttaagtcatttctctctgcctctctctctctctctctctctctctctctctctctctgtgtgtgtgtgtgtgtgtgtgtgtgttggaggggaaatggtcttccaagtgagggaacattttttaattgcatgtttgggtaggggtgggtgttggggatggtacagccagaatggtggatggtggtacgtcctgaatggtggcacagaatccattgactatgggtacatgaaacttacaaatctgtatactaaggaataagagtttcaaggtatgcaatgtttgtacctccaataatttaaattgtctctgaggtttgtttaccacattttagggggaaaactgtaataaagtatgggtcaacattttgagtcataattactgaaaaaagaagccacattactagaatctctataggaaattaaaagcaggagatagcactacttggaggtccagtaacctttgccttggtggccaaagatagagcatatttgtcctattttatcatgggcagaaatcataactagattatgtcaacagcaggagagttctcagaaaatggcaagggcaaaagatgaaagaagatgatggtaatggcagctttcacaggtgagacacctggataaacatcatccaacccttaaagtcttaggtctaaggtctaaggttttaatttactaaattttatttttattctcctattctgactaataacaactcacattcatactaccatactcccaactttagaatcaatttaatggtactagatgttaaagaaatacattataacattagaaaaaaactcacatatcaagagcaaaagaaattataaattggattaaattattttacatattgatatgtataattttaaaaactcaataaattaatgactccatatttgctatataatatgatgagttgggcttcagagtgaggacattttattcaaccatcaattttttttctctctctctttatatacatgtgtgtacatataaaataaagttataaaatttttaaaagcaaacagcaaaaattgttaaagctgttgtgttttagttatagctagtgatacttgtttacttgctccatgtataagtgataaacattttcaaagggtcgcatgtttaagacacaatagtcattatatcaatggaatataggttcataaattccattttgggggatggtaaaaataatggtgtttatgctttcatagaagttaaaaagtgaaagcacagattgctagacagaacttcattctatttgtaagatatttgttttgatatctgtcagttatgactttaaaaacatttttatagtcaggtgactatcccatatgtttgcttcatctcttaagagtgtgtgataggggtaatattttgaaaatattaaattggagaattaaatatcctccttcag

SEQ ID NO: 4048 - RNA, 19 nt, Artificial Sequence
  Description of Artificial Sequence: Synthetic oligonucleotide
  Sense strand starting at position 113 of SEQ ID NO: 1
ugggaucaaucgcugagaa

SEQ ID NO: 4049 - RNA, 19 nt, Artificial Sequence
  Description of Artificial Sequence: Synthetic oligonucleotide
  Antisense strand to SEQ ID NO: 4048
uucucagcgauugauccca

SEQ ID NO: 4050 - RNA, 19 nt, Artificial Sequence
  Description of Artificial Sequence: Synthetic oligonucleotide
  Sense strand starting at position 114 of SEQ ID NO: 1
gggaucaaucgcugagaac

SEQ ID NO: 4051 - RNA, 19 nt, Artificial Sequence
  Description of Artificial Sequence: Synthetic oligonucleotide
  Antisense strand to SEQ ID NO: 4050
guucucagcgauugauccc

SEQ ID NO: 4052 - RNA, 19 nt, Artificial Sequence
  Description of Artificial Sequence: Synthetic oligonucleotide
  Sense strand starting at position 346 of SEQ ID NO: 1
gugugaaucagaugcacca

SEQ ID NO: 4053 - RNA, 19 nt, Artificial Sequence
  Description of Artificial Sequence: Synthetic oligonucleotide
  Antisense strand to SEQ ID NO: 4052
uggugcaucugauucacac

SEQ ID NO: 4054 - RNA, 19 nt, Artificial Sequence
  Description of Artificial Sequence: Synthetic oligonucleotide
  Sense strand starting at position 709 of SEQ ID NO: 1
gggaucaacuaaucagcuu

SEQ ID NO: 4055 - RNA, 19 nt, Artificial Sequence
  Description of Artificial Sequence: Synthetic oligonucleotide
  Antisense strand to SEQ ID NO: 4054
aagcugauuaguugauccc

SEQ ID NO: 4056 - RNA, 19 nt, Artificial Sequence
  Description of Artificial Sequence: Synthetic oligonucleotide
  Sense strand starting at position 921 of SEQ ID NO: 1
gcauuuggguuccauuuga

SEQ ID NO: 4057 - RNA, 19 nt, Artificial Sequence
  Description of Artificial Sequence: Synthetic oligonucleotide
  Antisense strand to SEQ ID NO: 4056
ucaaauggaacccaaaugc

SEQ ID NO: 4058 - RNA, 19 nt, Artificial Sequence
  Description of Artificial Sequence: Synthetic oligonucleotide
  Sense strand starting at position 1084 of SEQ ID NO: 1
uuccuagaagccuggucaa

SEQ ID NO: 4059 - RNA, 19 nt, Artificial Sequence
  Description of Artificial Sequence: Synthetic oligonucleotide
  Antisense strand to SEQ ID NO: 4058
uugaccaggcuucuaggaa

SEQ ID NO: 4060 - RNA, 19 nt, Artificial Sequence
  Description of Artificial Sequence: Synthetic oligonucleotide
  Sense strand starting at position 1551 of SEQ ID NO: 1
gguuaaagaucagccauua

SEQ ID NO: 4061 - RNA, 19 nt, Artificial Sequence
  Description of Artificial Sequence: Synthetic oligonucleotide
  Antisense strand to SEQ ID NO: 4060
uaauggcugaucuuuaacc

SEQ ID NO: 4062 - RNA, 19 nt, Artificial Sequence
  Description of Artificial Sequence: Synthetic oligonucleotide
  Sense strand starting at position 1693 of SEQ ID NO: 1
gguuuagaguuaagggaag

SEQ ID NO: 4063 - RNA, 19 nt, Artificial Sequence
  Description of Artificial Sequence: Synthetic oligonucleotide
  Antisense strand to SEQ ID NO: 4062
cuucccuuaacucuaaacc

SEQ ID NO: 4064 - RNA, 19 nt, Artificial Sequence
  Description of Artificial Sequence: Synthetic oligonucleotide
  Sense strand starting at position 2054 of SEQ ID NO: 1
gaagaaauggccugcuccu

SEQ ID NO: 4065 - RNA, 19 nt, Artificial Sequence
  Description of Artificial Sequence: Synthetic oligonucleotide
  Antisense strand to SEQ ID NO: 4064
aggagcaggccauuucuuc

SEQ ID NO: 4066 - RNA, 19 nt, Artificial Sequence
  Description of Artificial Sequence: Synthetic oligonucleotide
  Sense strand starting at position 2224 of SEQ ID NO: 1
gggccaaucaccuggaaga

SEQ ID NO: 4067 - RNA, 19 nt, Artificial Sequence
  Description of Artificial Sequence: Synthetic oligonucleotide
  Antisense strand to SEQ ID NO: 4066
ucuuccaggugauuggccc

SEQ ID NO: 4068 - RNA, 19 nt, Artificial Sequence
  Description of Artificial Sequence: Synthetic oligonucleotide
  Sense strand starting at position 2273 of SEQ ID NO: 1
gcuggaggcucugucauuu

SEQ ID NO: 4069 - RNA, 19 nt, Artificial Sequence
  Description of Artificial Sequence: Synthetic oligonucleotide
  Antisense strand to SEQ ID NO: 4068
aaaugacagagccuccagc

SEQ ID NO: 4070 - RNA, 19 nt, Artificial Sequence
  Description of Artificial Sequence: Synthetic oligonucleotide
  Sense strand starting at position 2324 of SEQ ID NO: 1
ugucuuugguucuugggaa

SEQ ID NO: 4071 - RNA, 19 nt, Artificial Sequence
  Description of Artificial Sequence: Synthetic oligonucleotide
  Antisense strand to SEQ ID NO: 4070
uucccaagaaccaaagaca

SEQ ID NO: 4072 - RNA, 19 nt, Artificial Sequence
  Description of Artificial Sequence: Synthetic oligonucleotide
  Sense strand starting at position 2463 of SEQ ID NO: 1
uuaccuucucaguagaaug

SEQ ID NO: 4073 - RNA, 19 nt, Artificial Sequence
  Description of Artificial Sequence: Synthetic oligonucleotide
  Antisense strand to SEQ ID NO: 4072
cauucuacugagaagguaa

SEQ ID NO: 4074 - RNA, 19 nt, Artificial Sequence
  Description of Artificial Sequence: Synthetic oligonucleotide
  Sense strand starting at position 2465 of SEQ ID NO: 1
accuucucaguagaaugua

SEQ ID NO: 4075 - RNA, 19 nt, Artificial Sequence
  Description of Artificial Sequence: Synthetic oligonucleotide
  Antisense strand to SEQ ID NO: 4074
uacauucuacugagaaggu

SEQ ID NO: 4076 - RNA, 19 nt, Artificial Sequence
  Description of Artificial Sequence: Synthetic oligonucleotide
  Sense strand starting at position 2519 of SEQ ID NO: 1
ccauguaaauucguggaug

SEQ ID NO: 4077 - RNA, 19 nt, Artificial Sequence
  Description of Artificial Sequence: Synthetic oligonucleotide
  Antisense strand to SEQ ID NO: 4076
cauccacgaauuuacaugg

SEQ ID NO: 4078 - RNA, 19 nt, Artificial Sequence
  Description of Artificial Sequence: Synthetic oligonucleotide
  Sense strand starting at position 2522 of SEQ ID NO: 1
uguaaauucguggauguug

SEQ ID NO: 4079 - RNA, 19 nt, Artificial Sequence
  Description of Artificial Sequence: Synthetic oligonucleotide
  Antisense strand to SEQ ID NO: 4078
caacauccacgaauuuaca

SEQ ID NO: 4080 - RNA, 19 nt, Artificial Sequence
  Description of Artificial Sequence: Synthetic oligonucleotide
  Sense strand starting at position 2524 of SEQ ID NO: 1
uaaauucguggauguugaa

SEQ ID NO: 4081 - RNA, 19 nt, Artificial Sequence
  Description of Artificial Sequence: Synthetic oligonucleotide
  Antisense strand to SEQ ID NO: 4080
uucaacauccacgaauuua

SEQ ID NO: 4082 - RNA, 19 nt, Artificial Sequence
  Description of Artificial Sequence: Synthetic oligonucleotide
  Sense strand starting at position 2618 of SEQ ID NO: 1
gugggucgugaccaagauu

SEQ ID NO: 4083 - RNA, 19 nt, Artificial Sequence
  Description of Artificial Sequence: Synthetic oligonucleotide
  Antisense strand to SEQ ID NO: 4082
aaucuuggucacgacccac

SEQ ID NO: 4084 - RNA, 19 nt, Artificial Sequence
  Description of Artificial Sequence: Synthetic oligonucleotide
  Sense strand starting at position 2672 of SEQ ID NO: 1
cuauauuguacguaagggu

SEQ ID NO: 4085 - RNA, 19 nt, Artificial Sequence
  Description of Artificial Sequence: Synthetic oligonucleotide
  Antisense strand to SEQ ID NO: 4084
acccuuacguacaauauag

SEQ ID NO: 4086 - RNA, 19 nt, Artificial Sequence
  Description of Artificial Sequence: Synthetic oligonucleotide
  Sense strand starting at position 2731 of SEQ ID NO: 1
uugaaauguguauacaagu

SEQ ID NO: 4087 - RNA, 19 nt, Artificial Sequence
  Description of Artificial Sequence: Synthetic oligonucleotide
  Antisense strand to SEQ ID NO: 4086
acuuguauacacauuucaa

SEQ ID NO: 4088 - RNA, 19 nt, Artificial Sequence
  Description of Artificial Sequence: Synthetic oligonucleotide
  Sense strand starting at position 2739 of SEQ ID NO: 1
uguauacaaguuugggaaa

SEQ ID NO: 4089 - RNA, 19 nt, Artificial Sequence
  Description of Artificial Sequence: Synthetic oligonucleotide
  Antisense strand to SEQ ID NO: 4088
uuucccaaacuuguauaca

SEQ ID NO: 4090 - RNA, 19 nt, Artificial Sequence
  Description of Artificial Sequence: Synthetic oligonucleotide
  Sense strand starting at position 2783 of SEQ ID NO: 1
uggaaauaggucugugaaa

SEQ ID NO: 4091 - RNA, 19 nt, Artificial Sequence
  Description of Artificial Sequence: Synthetic oligonucleotide
  Antisense strand to SEQ ID NO: 4090
uuucacagaccuauuucca

SEQ ID NO: 4092 - RNA, 19 nt, Artificial Sequence
  Description of Artificial Sequence: Synthetic oligonucleotide
  Sense strand starting at position 2784 of SEQ ID NO: 1
ggaaauaggucugugaaau

SEQ ID NO: 4093 - RNA, 19 nt, Artificial Sequence
  Description of Artificial Sequence: Synthetic oligonucleotide
  Antisense strand to SEQ ID NO: 4092
auuucacagaccuauuucc

SEQ ID NO: 4094 - RNA, 19 nt, Artificial Sequence
  Description of Artificial Sequence: Synthetic oligonucleotide
  Sense strand starting at position 2785 of SEQ ID NO: 1
gaaauaggucugugaaauu

SEQ ID NO: 4095 - RNA, 19 nt, Artificial Sequence
  Description of Artificial Sequence: Synthetic oligonucleotide
  Antisense strand to SEQ ID NO: 4094
aauuucacagaccuauuuc

SEQ ID NO: 4096 - RNA, 19 nt, Artificial Sequence
  Description of Artificial Sequence: Synthetic oligonucleotide
  Sense strand starting at position 2795 of SEQ ID NO: 1
ugugaaauucagugugaag

SEQ ID NO: 4097 - RNA, 19 nt, Artificial Sequence
  Description of Artificial Sequence: Synthetic oligonucleotide
  Antisense strand to SEQ ID NO: 4096
cuucacacugaauuucaca

SEQ ID NO: 4098 - RNA, 19 nt, Artificial Sequence
  Description of Artificial Sequence: Synthetic oligonucleotide
  Sense strand starting at position 2797 of SEQ ID NO: 1
ugaaauucagugugaagug

SEQ ID NO: 4099 - RNA, 19 nt, Artificial Sequence
  Description of Artificial Sequence: Synthetic oligonucleotide
  Antisense strand to SEQ ID NO: 4098
cacuucacacugaauuuca

SEQ ID NO: 4100 - RNA, 19 nt, Artificial Sequence
  Description of Artificial Sequence: Synthetic oligonucleotide
  Sense strand starting at position 2804 of SEQ ID NO: 1
cagugugaaguguaaacaa

SEQ ID NO: 4101 - RNA, 19 nt, Artificial Sequence
  Description of Artificial Sequence: Synthetic oligonucleotide
  Antisense strand to SEQ ID NO: 4100
uuguuuacacuucacacug

SEQ ID NO: 4102 - RNA, 19 nt, Artificial Sequence
  Description of Artificial Sequence: Synthetic oligonucleotide
  Sense strand starting at position 2895 of SEQ ID NO: 1
gauggauacuuauuggugu

SEQ ID NO: 4103 - RNA, 19 nt, Artificial Sequence
  Description of Artificial Sequence: Synthetic oligonucleotide
  Antisense strand to SEQ ID NO: 4102
acaccaauaaguauccauc

SEQ ID NO: 4104 - RNA, 19 nt, Artificial Sequence
  Description of Artificial Sequence: Synthetic oligonucleotide
  Sense strand starting at position 2897 of SEQ ID NO: 1
uggauacuuauugguguga

SEQ ID NO: 4105 - RNA, 19 nt, Artificial Sequence
  Description of Artificial Sequence: Synthetic oligonucleotide
  Antisense strand to SEQ ID NO: 4104
ucacaccaauaaguaucca

SEQ ID NO: 4106 - RNA, 19 nt, Artificial Sequence
  Description of Artificial Sequence: Synthetic oligonucleotide
  Sense strand starting at position 2898 of SEQ ID NO: 1
ggauacuuauuggugugaa

SEQ ID NO: 4107 - RNA, 19 nt, Artificial Sequence
  Description of Artificial Sequence: Synthetic oligonucleotide
  Antisense strand to SEQ ID NO: 4106
uucacaccaauaaguaucc

SEQ ID NO: 4108 - RNA, 19 nt, Artificial Sequence
  Description of Artificial Sequence: Synthetic oligonucleotide
  Sense strand starting at position 2901 of SEQ ID NO: 1
uacuuauuggugugaauca

SEQ ID NO: 4109 - RNA, 19 nt, Artificial Sequence
  Description of Artificial Sequence: Synthetic oligonucleotide
  Antisense strand to SEQ ID NO: 4108
ugauucacaccaauaagua

SEQ ID NO: 4110 - RNA, 19 nt, Artificial Sequence
  Description of Artificial Sequence: Synthetic oligonucleotide
  Sense strand starting at position 3267 of SEQ ID NO: 1
gggaucaacuaaucagugu

SEQ ID NO: 4111 - RNA, 19 nt, Artificial Sequence
  Description of Artificial Sequence: Synthetic oligonucleotide
  Antisense strand to SEQ ID NO: 4110
acacugauuaguugauccc

SEQ ID NO: 4112 - RNA, 19 nt, Artificial Sequence
  Description of Artificial Sequence: Synthetic oligonucleotide
  Sense strand starting at position 3284 of SEQ ID NO: 1
guguuucuccuccaagaca

SEQ ID NO: 4113 - RNA, 19 nt, Artificial Sequence
  Description of Artificial Sequence: Synthetic oligonucleotide
  Antisense strand to SEQ ID NO: 4112
ugucuuggaggagaaacac

SEQ ID NO: 4114 - RNA, 19 nt, Artificial Sequence
  Description of Artificial Sequence: Synthetic oligonucleotide
  Sense strand starting at position 3318 of SEQ ID NO: 1
gcuuuccaaagaggaguua

SEQ ID NO: 4115 - RNA, 19 nt, Artificial Sequence
  Description of Artificial Sequence: Synthetic oligonucleotide
  Antisense strand to SEQ ID NO: 4114
uaacuccucuuuggaaagc

SEQ ID NO: 4116 - RNA, 19 nt, Artificial Sequence
  Description of Artificial Sequence: Synthetic oligonucleotide
  Sense strand starting at position 3331 of SEQ ID NO: 1
gaguuauuaagaugugagu

SEQ ID NO: 4117 - RNA, 19 nt, Artificial Sequence
  Description of Artificial Sequence: Synthetic oligonucleotide
  Antisense strand to SEQ ID NO: 4116
acucacaucuuaauaacuc

SEQ ID NO: 4118 - RNA, 19 nt, Artificial Sequence
  Description of Artificial Sequence: Synthetic oligonucleotide
  Sense strand starting at position 3346 of SEQ ID NO: 1
gaguguugguucuugaaag

SEQ ID NO: 4119 - RNA, 19 nt, Artificial Sequence
  Description of Artificial Sequence: Synthetic oligonucleotide
  Antisense strand to SEQ ID NO: 4118
cuuucaagaaccaacacuc

SEQ ID NO: 4120 - RNA, 19 nt, Artificial Sequence
  Description of Artificial Sequence: Synthetic oligonucleotide
  Sense strand starting at position 3375 of SEQ ID NO: 1
guaaguaauuguccuuuag

SEQ ID NO: 4121 - RNA, 19 nt, Artificial Sequence
  Description of Artificial Sequence: Synthetic oligonucleotide
  Antisense strand to SEQ ID NO: 4120
cuaaaggacaauuacuuac

SEQ ID NO: 4122 - RNA, 19 nt, Artificial Sequence
  Description of Artificial Sequence: Synthetic oligonucleotide
  Sense strand starting at position 3377 of SEQ ID NO: 1
aaguaauuguccuuuagag

SEQ ID NO: 4123 - RNA, 19 nt, Artificial Sequence
  Description of Artificial Sequence: Synthetic oligonucleotide
  Antisense strand to SEQ ID NO: 4122
cucuaaaggacaauuacuu

SEQ ID NO: 4124 - RNA, 19 nt, Artificial Sequence
  Description of Artificial Sequence: Synthetic oligonucleotide
  Sense strand starting at position 3379 of SEQ ID NO: 1
guaauuguccuuuagagac

SEQ ID NO: 4125 - RNA, 19 nt, Artificial Sequence
  Description of Artificial Sequence: Synthetic oligonucleotide
  Antisense strand to SEQ ID NO: 4124
gucucuaaaggacaauuac

SEQ ID NO: 4126 - RNA, 19 nt, Artificial Sequence
  Description of Artificial Sequence: Synthetic oligonucleotide
  Sense strand starting at position 3920 of SEQ ID NO: 1
gaggcauguggucaacaca

SEQ ID NO: 4127 - RNA, 19 nt, Artificial Sequence
  Description of Artificial Sequence: Synthetic oligonucleotide
  Antisense strand to SEQ ID NO: 4126
uguguugaccacaugccuc

SEQ ID NO: 4128 - RNA, 19 nt, Artificial Sequence
  Description of Artificial Sequence: Synthetic oligonucleotide
  Sense strand starting at position 3325 of SEQ ID NO: 2
uuuccaaguuugucaaaug

SEQ ID NO: 4129 - RNA, 19 nt, Artificial Sequence
  Description of Artificial Sequence: Synthetic oligonucleotide
  Antisense strand to SEQ ID NO: 4128
cauuugacaaacuuggaaa

SEQ ID NO: 4130 - RNA, 19 nt, Artificial Sequence
  Description of Artificial Sequence: Synthetic oligonucleotide
  Sense strand starting at position 3324 of SEQ ID NO: 2
guuuccaaguuugucaaau

SEQ ID NO: 4131 - RNA, 19 nt, Artificial Sequence
  Description of Artificial Sequence: Synthetic oligonucleotide
  Antisense strand to SEQ ID NO: 4130
auuugacaaacuuggaaac

SEQ ID NO: 4132 - RNA, 19 nt, Artificial Sequence
  Description of Artificial Sequence: Synthetic oligonucleotide
  Sense strand starting at position 3323 of SEQ ID NO: 2
aguuuccaaguuugucaaa

SEQ ID NO: 4133 - RNA, 19 nt, Artificial Sequence
  Description of Artificial Sequence: Synthetic oligonucleotide
  Antisense strand to SEQ ID NO: 4132
uuugacaaacuuggaaacu

SEQ ID NO: 4134 - RNA, 19 nt, Artificial Sequence
  Description of Artificial Sequence: Synthetic oligonucleotide
  Sense strand starting at position 3217 of SEQ ID NO: 2
uaguauggugguugagaaa

SEQ ID NO: 4135 - RNA, 19 nt, Artificial Sequence
  Description of Artificial Sequence: Synthetic oligonucleotide
  Antisense strand to SEQ ID NO: 4134
uuucucaaccaccauacua

SEQ ID NO: 4136 - RNA, 19 nt, Artificial Sequence
  Description of Artificial Sequence: Synthetic oligonucleotide
  Sense strand starting at position 3216 of SEQ ID NO: 2
auaguauggugguugagaa

SEQ ID NO: 4137 - RNA, 19 nt, Artificial Sequence
  Description of Artificial Sequence: Synthetic oligonucleotide
  Antisense strand to SEQ ID NO: 4136
uucucaaccaccauacuau

SEQ ID NO: 4138 - RNA, 19 nt, Artificial Sequence
  Description of Artificial Sequence: Synthetic oligonucleotide
  Sense strand starting at position 3130 of SEQ ID NO: 2
cugguucuagagugucaua

SEQ ID NO: 4139 - RNA, 19 nt, Artificial Sequence
  Description of Artificial Sequence: Synthetic oligonucleotide
  Antisense strand to SEQ ID NO: 4138
uaugacacucuagaaccag

SEQ ID NO: 4140 - RNA, 19 nt, Artificial Sequence
  Description of Artificial Sequence: Synthetic oligonucleotide
  Sense strand starting at position 3078 of SEQ ID NO: 2
augggaauaucagaaacau

SEQ ID NO: 4141 - RNA, 19 nt, Artificial Sequence
  Description of Artificial Sequence: Synthetic oligonucleotide
  Antisense strand to SEQ ID NO: 4140
auguuucugauauucccau

SEQ ID NO: 4142 - RNA, 19 nt, Artificial Sequence
  Description of Artificial Sequence: Synthetic oligonucleotide
  Sense strand starting at position 2932 of SEQ ID NO: 2
gguugaugucaccauugga

SEQ ID NO: 4143 - RNA, 19 nt, Artificial Sequence
  Description of Artificial Sequence: Synthetic oligonucleotide
  Antisense strand to SEQ ID NO: 4142
uccaauggugacaucaacc

SEQ ID NO: 4144 - RNA, 19 nt, Artificial Sequence
  Description of Artificial Sequence: Synthetic oligonucleotide
  Sense strand starting at position 2800 of SEQ ID NO: 2
augccuauggagugagaga

SEQ ID NO: 4145 - RNA, 19 nt, Artificial Sequence
  Description of Artificial Sequence: Synthetic oligonucleotide
  Antisense strand to SEQ ID NO: 4144
ucucucacuccauaggcau

SEQ ID NO: 4146 - RNA, 19 nt, Artificial Sequence
  Description of Artificial Sequence: Synthetic oligonucleotide
  Sense strand starting at position 2782 of SEQ ID NO: 2
uuuguaggugcucagcaaa

SEQ ID NO: 4147 - RNA, 19 nt, Artificial Sequence
  Description of Artificial Sequence: Synthetic oligonucleotide
  Antisense strand to SEQ ID NO: 4146
uuugcugagcaccuacaaa

SEQ ID NO: 4148 - RNA, 19 nt, Artificial Sequence
  Description of Artificial Sequence: Synthetic oligonucleotide
  Sense strand starting at position 2708 of SEQ ID NO: 2
guuuauugucugggaggac

SEQ ID NO: 4149 - RNA, 19 nt, Artificial Sequence
  Description of Artificial Sequence: Synthetic oligonucleotide
  Antisense strand to SEQ ID NO: 4148
guccucccagacaauaaac

SEQ ID NO: 4150 - RNA, 19 nt, Artificial Sequence
  Description of Artificial Sequence: Synthetic oligonucleotide
  Sense strand starting at position 2672 of SEQ ID NO: 2
cccugugaccuuuaucauc

SEQ ID NO: 4151 - RNA, 19 nt, Artificial Sequence
  Description of Artificial Sequence: Synthetic oligonucleotide
  Antisense strand to SEQ ID NO: 4150
gaugauaaaggucacaggg

SEQ ID NO: 4152 - RNA, 19 nt, Artificial Sequence
  Description of Artificial Sequence: Synthetic oligonucleotide
  Sense strand starting at position 2225 of SEQ ID NO: 2
aauagucuuggauaagcca

SEQ ID NO: 4153 - RNA, 19 nt, Artificial Sequence
  Description of Artificial Sequence: Synthetic oligonucleotide
  Antisense strand to SEQ ID NO: 4152
uggcuuauccaagacuauu

SEQ ID NO: 4154 - RNA, 19 nt, Artificial Sequence
  Description of Artificial Sequence: Synthetic oligonucleotide
  Sense strand starting at position 2208 of SEQ ID NO: 2
uggcacugcuaacuagaaa

SEQ ID NO: 4155 - RNA, 19 nt, Artificial Sequence
  Description of Artificial Sequence: Synthetic oligonucleotide
  Antisense strand to SEQ ID NO: 4154
uuucuaguuagcagugcca

SEQ ID NO: 4156 - RNA, 19 nt, Artificial Sequence
  Description of Artificial Sequence: Synthetic oligonucleotide
  Sense strand starting at position 1541 of SEQ ID NO: 2
gcagaucauucuuugaauu

SEQ ID NO: 4157 - RNA, 19 nt, Artificial Sequence
  Description of Artificial Sequence: Synthetic oligonucleotide
  Antisense strand to SEQ ID NO: 4156
aauucaaagaaugaucugc

SEQ ID NO: 4158 - RNA, 19 nt, Artificial Sequence
  Description of Artificial Sequence: Synthetic oligonucleotide
  Sense strand starting at position 1540 of SEQ ID NO: 2
agcagaucauucuuugaau

SEQ ID NO: 4159 - RNA, 19 nt, Artificial Sequence
  Description of Artificial Sequence: Synthetic oligonucleotide
  Antisense strand to SEQ ID NO: 4158
auucaaagaaugaucugcu

SEQ ID NO: 4160 - RNA, 19 nt, Artificial Sequence
  Description of Artificial Sequence: Synthetic oligonucleotide
  Sense strand starting at position 1521 of SEQ ID NO: 2
ucuuucuguuaacugagaa

SEQ ID NO: 4161 - RNA, 19 nt, Artificial Sequence
  Description of Artificial Sequence: Synthetic oligonucleotide
  Antisense strand to SEQ ID NO: 4160
uucucaguuaacagaaaga

SEQ ID NO: 4162 - RNA, 19 nt, Artificial Sequence
  Description of Artificial Sequence: Synthetic oligonucleotide
  Sense strand starting at position 1400 of SEQ ID NO: 2
ugcgaaagaugguaaauuu

SEQ ID NO: 4163 - RNA, 19 nt, Artificial Sequence
  Description of Artificial Sequence: Synthetic oligonucleotide
  Antisense strand to SEQ ID NO: 4162
aaauuuaccaucuuucgca

SEQ ID NO: 4164 - RNA, 19 nt, Artificial Sequence
  Description of Artificial Sequence: Synthetic oligonucleotide
  Sense strand starting at position 1378 of SEQ ID NO: 2
acgugaaagguacacuuaa

SEQ ID NO: 4165 - RNA, 19 nt, Artificial Sequence
  Description of Artificial Sequence: Synthetic oligonucleotide
  Antisense strand to SEQ ID NO: 4164
uuaaguguaccuuucacgu

SEQ ID NO: 4166 - RNA, 19 nt, Artificial Sequence
  Description of Artificial Sequence: Synthetic oligonucleotide
  Sense strand starting at position 1344 of SEQ ID NO: 2
gagugcugugaauaauaug

SEQ ID NO: 4167 - RNA, 19 nt, Artificial Sequence
  Description of Artificial Sequence: Synthetic oligonucleotide
  Antisense strand to SEQ ID NO: 4166
cauauuauucacagcacuc

SEQ ID NO: 4168 - RNA, 19 nt, Artificial Sequence
  Description of Artificial Sequence: Synthetic oligonucleotide
  Sense strand starting at position 1340 of SEQ ID NO: 2
uggugagugcugugaauaa

SEQ ID NO: 4169 - RNA, 19 nt, Artificial Sequence
  Description of Artificial Sequence: Synthetic oligonucleotide
  Antisense strand to SEQ ID NO: 4168
uuauucacagcacucacca

SEQ ID NO: 4170 - RNA, 19 nt, Artificial Sequence
  Description of Artificial Sequence: Synthetic oligonucleotide
  Sense strand starting at position 1057 of SEQ ID NO: 2
guacaagaaauccguauug

SEQ ID NO: 4171 - RNA, 19 nt, Artificial Sequence
  Description of Artificial Sequence: Synthetic oligonucleotide
  Antisense strand to SEQ ID NO: 4170
caauacggauuucuuguac

SEQ ID NO: 4172 - RNA, 19 nt, Artificial Sequence
  Description of Artificial Sequence: Synthetic oligonucleotide
  Sense strand starting at position 956 of SEQ ID NO: 2
gggugucucuugagaagag

SEQ ID NO: 4173 - RNA, 19 nt, Artificial Sequence
  Description of Artificial Sequence: Synthetic oligonucleotide
  Antisense strand to SEQ ID NO: 4172
cucuucucaagagacaccc

SEQ ID NO: 4174 - RNA, 19 nt, Artificial Sequence
  Description of Artificial Sequence: Synthetic oligonucleotide
  Sense strand starting at position 891 of SEQ ID NO: 2
agguaauagcuacauucuu

SEQ ID NO: 4175 - RNA, 19 nt, Artificial Sequence
  Description of Artificial Sequence: Synthetic oligonucleotide
  Antisense strand to SEQ ID NO: 4174
aagaauguagcuauuaccu

SEQ ID NO: 4176 - RNA, 19 nt, Artificial Sequence
  Description of Artificial Sequence: Synthetic oligonucleotide
  Sense strand starting at position 864 of SEQ ID NO: 2
ccuagaguucccgggaucu

SEQ ID NO: 4177 - RNA, 19 nt, Artificial Sequence
  Description of Artificial Sequence: Synthetic oligonucleotide
  Antisense strand to SEQ ID NO: 4176
agaucccgggaacucuagg

SEQ ID NO: 4178 - RNA, 19 nt, Artificial Sequence
  Description of Artificial Sequence: Synthetic oligonucleotide
  Sense strand starting at position 753 of SEQ ID NO: 2
gaaaucgagucacuguauu

SEQ ID NO: 4179 - RNA, 19 nt, Artificial Sequence
  Description of Artificial Sequence: Synthetic oligonucleotide
  Antisense strand to SEQ ID NO: 4178
aauacagugacucgauuuc

SEQ ID NO: 4180 - RNA, 19 nt, Artificial Sequence
  Description of Artificial Sequence: Synthetic oligonucleotide
  Sense strand starting at position 751 of SEQ ID NO: 2
aggaaaucgagucacugua

SEQ ID NO: 4181 - RNA, 19 nt, Artificial Sequence
  Description of Artificial Sequence: Synthetic oligonucleotide
  Antisense strand to SEQ ID NO: 4180
uacagugacucgauuuccu

SEQ ID NO: 4182 - RNA, 19 nt, Artificial Sequence
  Description of Artificial Sequence: Synthetic oligonucleotide
  Sense strand starting at position 685 of SEQ ID NO: 2
aggguuauucauggagucu

SEQ ID NO: 4183 - RNA, 19 nt, Artificial Sequence
  Description of Artificial Sequence: Synthetic oligonucleotide
  Antisense strand to SEQ ID NO: 4182
agacuccaugaauaacccu

SEQ ID NO: 4184 - RNA, 19 nt, Artificial Sequence
  Description of Artificial Sequence: Synthetic oligonucleotide
  Sense strand starting at position 674 of SEQ ID NO: 2
gccuucuggagaggguuau

SEQ ID NO: 4185 - RNA, 19 nt, Artificial Sequence
  Description of Artificial Sequence: Synthetic oligonucleotide
  Antisense strand to SEQ ID NO: 4184
auaacccucuccagaaggc

SEQ ID NO: 4186 - RNA, 19 nt, Artificial Sequence
  Description of Artificial Sequence: Synthetic oligonucleotide
  Sense strand starting at position 654 of SEQ ID NO: 2
ugugucaggcauuauaaua

SEQ ID NO: 4187 - RNA, 19 nt, Artificial Sequence
  Description of Artificial Sequence: Synthetic oligonucleotide
  Antisense strand to SEQ ID NO: 4186
uauuauaaugccugacaca

SEQ ID NO: 4188 - RNA, 19 nt, Artificial Sequence
  Description of Artificial Sequence: Synthetic oligonucleotide
  Sense strand starting at position 618 of SEQ ID NO: 2
gaguaacaauggcuacuau

SEQ ID NO: 4189 - RNA, 19 nt, Artificial Sequence
  Description of Artificial Sequence: Synthetic oligonucleotide
  Antisense strand to SEQ ID NO: 4188
auaguagccauuguuacuc

SEQ ID NO: 4190 - RNA, 19 nt, Artificial Sequence
  Description of Artificial Sequence: Synthetic oligonucleotide
  Sense strand starting at position 527 of SEQ ID NO: 2
accugucauuggcccuaga

SEQ ID NO: 4191 - RNA, 19 nt, Artificial Sequence
  Description of Artificial Sequence: Synthetic oligonucleotide
  Antisense strand to SEQ ID NO: 4190
ucuagggccaaugacaggu

SEQ ID NO: 4192 - RNA, 19 nt, Artificial Sequence
  Description of Artificial Sequence: Synthetic oligonucleotide
  Sense strand starting at position 435 of SEQ ID NO: 2
ggguuagcuucuuuauaga

SEQ ID NO: 4193 - RNA, 19 nt, Artificial Sequence
  Description of Artificial Sequence: Synthetic oligonucleotide
  Antisense strand to SEQ ID NO: 4192
ucuauaaagaagcuaaccc

SEQ ID NO: 4194 - RNA, 19 nt, Artificial Sequence
  Description of Artificial Sequence: Synthetic oligonucleotide
  Sense strand starting at position 434 of SEQ ID NO: 2
uggguuagcuucuuuauag

SEQ ID NO: 4195 - RNA, 19 nt, Artificial Sequence
  Description of Artificial Sequence: Synthetic oligonucleotide
  Antisense strand to SEQ ID NO: 4194
cuauaaagaagcuaaccca

SEQ ID NO: 4196 - RNA, 19 nt, Artificial Sequence
  Description of Artificial Sequence: Synthetic oligonucleotide
  Sense strand starting at position 271 of SEQ ID NO: 2
ccuuauguucugugaucca

SEQ ID NO: 4197 - RNA, 19 nt, Artificial Sequence
  Description of Artificial Sequence: Synthetic oligonucleotide
  Antisense strand to SEQ ID NO: 4196
uggaucacagaacauaagg

SEQ ID NO: 4198 - RNA, 19 nt, Artificial Sequence
  Description of Artificial Sequence: Synthetic oligonucleotide
  Sense strand starting at position 243 of SEQ ID NO: 2
uguguucugugacccaaau

SEQ ID NO: 4199 - RNA, 19 nt, Artificial Sequence
  Description of Artificial Sequence: Synthetic oligonucleotide
  Antisense strand to SEQ ID NO: 4198
auuugggucacagaacaca

SEQ ID NO: 4200 - RNA, 19 nt, Artificial Sequence
  Description of Artificial Sequence: Synthetic oligonucleotide
  Sense strand starting at position 185 of SEQ ID NO: 2
uuggaaguuaguugugaac

SEQ ID NO: 4201 - RNA, 19 nt, Artificial Sequence
  Description of Artificial Sequence: Synthetic oligonucleotide
  Antisense strand to SEQ ID NO: 4200
guucacaacuaacuuccaa

SEQ ID NO: 4202 - RNA, 19 nt, Artificial Sequence
  Description of Artificial Sequence: Synthetic oligonucleotide
  Sense strand starting at position 184 of SEQ ID NO: 2
auuggaaguuaguugugaa

SEQ ID NO: 4203 - RNA, 19 nt, Artificial Sequence
  Description of Artificial Sequence: Synthetic oligonucleotide
  Antisense strand to SEQ ID NO: 4202
uucacaacuaacuuccaau

SEQ ID NO: 4204 - RNA, 19 nt, Artificial Sequence
  Description of Artificial Sequence: Synthetic oligonucleotide
  Sense strand starting at position 80 of SEQ ID NO: 2
ucuaauaggcaaugcaaau

SEQ ID NO: 4205 - RNA, 19 nt, Artificial Sequence
  Description of Artificial Sequence: Synthetic oligonucleotide
  Antisense strand to SEQ ID NO: 4204
auuugcauugccuauuaga

SEQ ID NO: 4206 - RNA, 19 nt, Artificial Sequence
  Description of Artificial Sequence: Synthetic oligonucleotide
  Sense strand starting at position 24 of SEQ ID NO: 2
gccugauacuacccuaguu

SEQ ID NO: 4207 - RNA, 19 nt, Artificial Sequence
  Description of Artificial Sequence: Synthetic oligonucleotide
  Antisense strand to SEQ ID NO: 4206
aacuaggguaguaucaggc

SEQ ID NO: 4208 - RNA, 19 nt, Artificial Sequence
  Description of Artificial Sequence: Synthetic oligonucleotide
  Sense strand starting at position 3671 of SEQ ID NO: 3
ucuggcuagguguaauuau

SEQ ID NO: 4209 - RNA, 19 nt, Artificial Sequence
  Description of Artificial Sequence: Synthetic oligonucleotide
  Antisense strand to SEQ ID NO: 4208
auaauuacaccuagccaga

SEQ ID NO: 4210 - RNA, 19 nt, Artificial Sequence
  Description of Artificial Sequence: Synthetic oligonucleotide
  Sense strand starting at position 3668 of SEQ ID NO: 3
uauucuggcuagguguaau

SEQ ID NO: 4211 - RNA, 19 nt, Artificial Sequence
  Description of Artificial Sequence: Synthetic oligonucleotide
  Antisense strand to SEQ ID NO: 4210
auuacaccuagccagaaua

SEQ ID NO: 4212 - RNA, 19 nt, Artificial Sequence
  Description of Artificial Sequence: Synthetic oligonucleotide
  Sense strand starting at position 3667 of SEQ ID NO: 3
cuauucuggcuagguguaa

SEQ ID NO: 4213 - RNA, 19 nt, Artificial Sequence
  Description of Artificial Sequence: Synthetic oligonucleotide
  Antisense strand to SEQ ID NO: 4212
uuacaccuagccagaauag

SEQ ID NO: 4214 - RNA, 19 nt, Artificial Sequence
  Description of Artificial Sequence: Synthetic oligonucleotide
  Sense strand starting at position 3646 of SEQ ID NO: 3
cuuagaggguuauaagauu

SEQ ID NO: 4215 - RNA, 19 nt, Artificial Sequence
  Description of Artificial Sequence: Synthetic oligonucleotide
  Antisense strand to SEQ ID NO: 4214
aaucuuauaacccucuaag

SEQ ID NO: 4216 - RNA, 19 nt, Artificial Sequence
  Description of Artificial Sequence: Synthetic oligonucleotide
  Sense strand starting at position 3641 of SEQ ID NO: 3
uuucucuuagaggguuaua

SEQ ID NO: 4217 - RNA, 19 nt, Artificial Sequence
  Description of Artificial Sequence: Synthetic oligonucleotide
  Antisense strand to SEQ ID NO: 4216
uauaacccucuaagagaaa

SEQ ID NO: 4218 - RNA, 19 nt, Artificial Sequence
  Description of Artificial Sequence: Synthetic oligonucleotide
  Sense strand starting at position 3640 of SEQ ID NO: 3
guuucucuuagaggguuau

SEQ ID NO: 4219 - RNA, 19 nt, Artificial Sequence
  Description of Artificial Sequence: Synthetic oligonucleotide
  Antisense strand to SEQ ID NO: 4218
auaacccucuaagagaaac

SEQ ID NO: 4220 - RNA, 19 nt, Artificial Sequence
  Description of Artificial Sequence: Synthetic oligonucleotide
  Sense strand starting at position 3624 of SEQ ID NO: 3
guaagaguuuacuuagguu

SEQ ID NO: 4221 - RNA, 19 nt, Artificial Sequence
  Description of Artificial Sequence: Synthetic oligonucleotide
  Antisense strand to SEQ ID NO: 4220
aaccuaaguaaacucuuac

SEQ ID NO: 4222 - RNA, 19 nt, Artificial Sequence
  Description of Artificial Sequence: Synthetic oligonucleotide
  Sense strand starting at position 3621 of SEQ ID NO: 3
uuuguaagaguuuacuuag

SEQ ID NO: 4223 - RNA, 19 nt, Artificial Sequence
  Description of Artificial Sequence: Synthetic oligonucleotide
  Antisense strand to SEQ ID NO: 4222
cuaaguaaacucuuacaaa

SEQ ID NO: 4224 - RNA, 19 nt, Artificial Sequence
  Description of Artificial Sequence: Synthetic oligonucleotide
  Sense strand starting at position 3612 of SEQ ID NO: 3
cauuguaucuuuguaagag

SEQ ID NO: 4225 - RNA, 19 nt, Artificial Sequence
  Description of Artificial Sequence: Synthetic oligonucleotide
  Antisense strand to SEQ ID NO: 4224
cucuuacaaagauacaaug

SEQ ID NO: 4226 - RNA, 19 nt, Artificial Sequence
  Description of Artificial Sequence: Synthetic oligonucleotide
  Sense strand starting at position 3610 of SEQ ID NO: 3
gucauuguaucuuuguaag

SEQ ID NO: 4227 - RNA, 19 nt, Artificial Sequence
  Description of Artificial Sequence: Synthetic oligonucleotide
  Antisense strand to SEQ ID NO: 4226
cuuacaaagauacaaugac

SEQ ID NO: 4228 - RNA, 19 nt, Artificial Sequence
  Description of Artificial Sequence: Synthetic oligonucleotide
  Sense strand starting at position 3608 of SEQ ID NO: 3
acgucauuguaucuuugua

SEQ ID NO: 4229 - RNA, 19 nt, Artificial Sequence
  Description of Artificial Sequence: Synthetic oligonucleotide
  Antisense strand to SEQ ID NO: 4228
uacaaagauacaaugacgu

SEQ ID NO: 4230 - RNA, 19 nt, Artificial Sequence
  Description of Artificial Sequence: Synthetic oligonucleotide
  Sense strand starting at position 3579 of SEQ ID NO: 3
guauaugcauggcagauuu

SEQ ID NO: 4231 - RNA, 19 nt, Artificial Sequence
  Description of Artificial Sequence: Synthetic oligonucleotide
  Antisense strand to SEQ ID NO: 4230
aaaucugccaugcauauac

SEQ ID NO: 4232 - RNA, 19 nt, Artificial Sequence
  Description of Artificial Sequence: Synthetic oligonucleotide
  Sense strand starting at position 3577 of SEQ ID NO: 3
gaguauaugcauggcagau

SEQ ID NO: 4233 - RNA, 19 nt, Artificial Sequence
  Description of Artificial Sequence: Synthetic oligonucleotide
  Antisense strand to SEQ ID NO: 4232
aucugccaugcauauacuc

SEQ ID NO: 4234 - RNA, 19 nt, Artificial Sequence
  Description of Artificial Sequence: Synthetic oligonucleotide
  Sense strand starting at position 3576 of SEQ ID NO: 3
ugaguauaugcauggcaga

SEQ ID NO: 4235 - RNA, 19 nt, Artificial Sequence
  Description of Artificial Sequence: Synthetic oligonucleotide
  Antisense strand to SEQ ID NO: 4234
ucugccaugcauauacuca

SEQ ID NO: 4236 - RNA, 19 nt, Artificial Sequence
  Description of Artificial Sequence: Synthetic oligonucleotide
  Sense strand starting at position 3551 of SEQ ID NO: 3
aguuauagaagaggcuuua

SEQ ID NO: 4237 - RNA, 19 nt, Artificial Sequence
  Description of Artificial Sequence: Synthetic oligonucleotide
  Antisense strand to SEQ ID NO: 4236
uaaagccucuucuauaacu

SEQ ID NO: 4238 - RNA, 19 nt, Artificial Sequence
  Description of Artificial Sequence: Synthetic oligonucleotide
  Sense strand starting at position 3422 of SEQ ID NO: 3
gaaaguuauuaaccuccga

SEQ ID NO: 4239 - RNA, 19 nt, Artificial Sequence
  Description of Artificial Sequence: Synthetic oligonucleotide
  Antisense strand to SEQ ID NO: 4238
ucggagguuaauaacuuuc

SEQ ID NO: 4240 - RNA, 19 nt, Artificial Sequence
  Description of Artificial Sequence: Synthetic oligonucleotide
  Sense strand starting at position 2747 of SEQ ID NO: 3
ggaaauaggcuuugagccu

SEQ ID NO: 4241 - RNA, 19 nt, Artificial Sequence
  Description of Artificial Sequence: Synthetic oligonucleotide
  Antisense strand to SEQ ID NO: 4240
aggcucaaagccuauuucc

SEQ ID NO: 4242 - RNA, 19 nt, Artificial Sequence
  Description of Artificial Sequence: Synthetic oligonucleotide
  Sense strand starting at position 2706 of SEQ ID NO: 3
acuuucuucuaagagagaa

SEQ ID NO: 4243 - RNA, 19 nt, Artificial Sequence
  Description of Artificial Sequence: Synthetic oligonucleotide
  Antisense strand to SEQ ID NO: 4242
uucucucuuagaagaaagu

SEQ ID NO: 4244 - RNA, 19 nt, Artificial Sequence
  Description of Artificial Sequence: Synthetic oligonucleotide
  Sense strand starting at position 2701 of SEQ ID NO: 3
acguuacuuucuucuaaga

SEQ ID NO: 4245 - RNA, 19 nt, Artificial Sequence
  Description of Artificial Sequence: Synthetic oligonucleotide
  Antisense strand to SEQ ID NO: 4244
ucuuagaagaaaguaacgu

SEQ ID NO: 4246 - RNA, 19 nt, Artificial Sequence
  Description of Artificial Sequence: Synthetic oligonucleotide
  Sense strand starting at position 2393 of SEQ ID NO: 3
cagcuuuccuugucagagu

SEQ ID NO: 4247 - RNA, 19 nt, Artificial Sequence
  Description of Artificial Sequence: Synthetic oligonucleotide
  Antisense strand to SEQ ID NO: 4246
acucugacaaggaaagcug

SEQ ID NO: 4248 - RNA, 19 nt, Artificial Sequence
  Description of Artificial Sequence: Synthetic oligonucleotide
  Sense strand starting at position 2391 of SEQ ID NO: 3
gccagcuuuccuugucaga

SEQ ID NO: 4249 - RNA, 19 nt, Artificial Sequence
  Description of Artificial Sequence: Synthetic oligonucleotide
  Antisense strand to SEQ ID NO: 4248
ucugacaaggaaagcuggc

SEQ ID NO: 4250 - RNA, 19 nt, Artificial Sequence
  Description of Artificial Sequence: Synthetic oligonucleotide
  Sense strand starting at position 2381 of SEQ ID NO: 3
aagagacuucgccagcuuu

SEQ ID NO: 4251 - RNA, 19 nt, Artificial Sequence
  Description of Artificial Sequence: Synthetic oligonucleotide
  Antisense strand to SEQ ID NO: 4250
aaagcuggcgaagucucuu

SEQ ID NO: 4252 - RNA, 19 nt, Artificial Sequence
  Description of Artificial Sequence: Synthetic oligonucleotide
  Sense strand starting at position 2328 of SEQ ID NO: 3
gaucucauauggguuauau

SEQ ID NO: 4253 - RNA, 19 nt, Artificial Sequence
  Description of Artificial Sequence: Synthetic oligonucleotide
  Antisense strand to SEQ ID NO: 4252
auauaacccauaugagauc

SEQ ID NO: 4254 - RNA, 19 nt, Artificial Sequence
  Description of Artificial Sequence: Synthetic oligonucleotide
  Sense strand starting at position 2325 of SEQ ID NO: 3
agagaucucauauggguua

SEQ ID NO: 4255 - RNA, 19 nt, Artificial Sequence
  Description of Artificial Sequence: Synthetic oligonucleotide
  Antisense strand to SEQ ID NO: 4254
uaacccauaugagaucucu

SEQ ID NO: 4256 - RNA, 19 nt, Artificial Sequence
  Description of Artificial Sequence: Synthetic oligonucleotide
  Sense strand starting at position 2043 of SEQ ID NO: 3
cugauagcuuaugugaaga

SEQ ID NO: 4257 - RNA, 19 nt, Artificial Sequence
  Description of Artificial Sequence: Synthetic oligonucleotide
  Antisense strand to SEQ ID NO: 4256
ucuucacauaagcuaucag

SEQ ID NO: 4258 - RNA, 19 nt, Artificial Sequence
  Description of Artificial Sequence: Synthetic oligonucleotide
  Sense strand starting at position 2031 of SEQ ID NO: 3
ugaggagcuugucugauag

SEQ ID NO: 4259 - RNA, 19 nt, Artificial Sequence
  Description of Artificial Sequence: Synthetic oligonucleotide
  Antisense strand to SEQ ID NO: 4258
cuaucagacaagcuccuca

SEQ ID NO: 4260 - RNA, 19 nt, Artificial Sequence
  Description of Artificial Sequence: Synthetic oligonucleotide
  Sense strand starting at position 1821 of SEQ ID NO: 3
agaguaaacucaccaaagu

SEQ ID NO: 4261 - RNA, 19 nt, Artificial Sequence
  Description of Artificial Sequence: Synthetic oligonucleotide
  Antisense strand to SEQ ID NO: 4260
acuuuggugaguuuacucu

SEQ ID NO: 4262 - RNA, 19 nt, Artificial Sequence
  Description of Artificial Sequence: Synthetic oligonucleotide
  Sense strand starting at position 1809 of SEQ ID NO: 3
cgacguggccugagaguaa

SEQ ID NO: 4263 - RNA, 19 nt, Artificial Sequence
  Description of Artificial Sequence: Synthetic oligonucleotide
  Antisense strand to SEQ ID NO: 4262
uuacucucaggccacgucg

SEQ ID NO: 4264 - RNA, 19 nt, Artificial Sequence
  Description of Artificial Sequence: Synthetic oligonucleotide
  Sense strand starting at position 1158 of SEQ ID NO: 3
ucgguaaauguuugaugcu

SEQ ID NO: 4265 - RNA, 19 nt, Artificial Sequence
  Description of Artificial Sequence: Synthetic oligonucleotide
  Antisense strand to SEQ ID NO: 4264
agcaucaaacauuuaccga

SEQ ID NO: 4266 - RNA, 19 nt, Artificial Sequence
  Description of Artificial Sequence: Synthetic oligonucleotide
  Sense strand starting at position 1150 of SEQ ID NO: 3
auuggcacucgguaaaugu

SEQ ID NO: 4267 - RNA, 19 nt, Artificial Sequence
  Description of Artificial Sequence: Synthetic oligonucleotide
  Antisense strand to SEQ ID NO: 4266
acauuuaccgagugccaau

SEQ ID NO: 4268 - RNA, 19 nt, Artificial Sequence
  Description of Artificial Sequence: Synthetic oligonucleotide
  Sense strand starting at position 1147 of SEQ ID NO: 3
gugauuggcacucgguaaa

SEQ ID NO: 4269 - RNA, 19 nt, Artificial Sequence
  Description of Artificial Sequence: Synthetic oligonucleotide
  Antisense strand to SEQ ID NO: 4268
uuuaccgagugccaaucac

SEQ ID NO: 4270 - RNA, 19 nt, Artificial Sequence
  Description of Artificial Sequence: Synthetic oligonucleotide
  Sense strand starting at position 1102 of SEQ ID NO: 3
ggaacugggucugaaauug

SEQ ID NO: 4271 - RNA, 19 nt, Artificial Sequence
  Description of Artificial Sequence: Synthetic oligonucleotide
  Antisense strand to SEQ ID NO: 4270
caauuucagacccaguucc

SEQ ID NO: 4272 - RNA, 19 nt, Artificial Sequence
  Description of Artificial Sequence: Synthetic oligonucleotide
  Sense strand starting at position 592 of SEQ ID NO: 3
cagaaaugcuggguaaauu

SEQ ID NO: 4273 - RNA, 19 nt, Artificial Sequence
  Description of Artificial Sequence: Synthetic oligonucleotide
  Antisense strand to SEQ ID NO: 4272
aauuuacccagcauuucug

SEQ ID NO: 4274 - RNA, 19 nt, Artificial Sequence
  Description of Artificial Sequence: Synthetic oligonucleotide
  Sense strand starting at position 591 of SEQ ID NO: 3
ucagaaaugcuggguaaau

SEQ ID NO: 4275 - RNA, 19 nt, Artificial Sequence
  Description of Artificial Sequence: Synthetic oligonucleotide
  Antisense strand to SEQ ID NO: 4274
auuuacccagcauuucuga

SEQ ID NO: 4276 - RNA, 19 nt, Artificial Sequence
  Description of Artificial Sequence: Synthetic oligonucleotide
  Sense strand starting at position 590 of SEQ ID NO: 3
cucagaaaugcuggguaaa

SEQ ID NO: 4277 - RNA, 19 nt, Artificial Sequence
  Description of Artificial Sequence: Synthetic oligonucleotide
  Antisense strand to SEQ ID NO: 4276
uuuacccagcauuucugag

SEQ ID NO: 4278 - RNA, 19 nt, Artificial Sequence
  Description of Artificial Sequence: Synthetic oligonucleotide
  Sense strand starting at position 408 of SEQ ID NO: 3
ggagcuguuuggcuucuau

SEQ ID NO: 4279 - RNA, 19 nt, Artificial Sequence
  Description of Artificial Sequence: Synthetic oligonucleotide
  Antisense strand to SEQ ID NO: 4278
auagaagccaaacagcucc

SEQ ID NO: 4280 - RNA, 19 nt, Artificial Sequence
  Description of Artificial Sequence: Synthetic oligonucleotide
  Sense strand starting at position 407 of SEQ ID NO: 3
aggagcuguuuggcuucua

SEQ ID NO: 4281 - RNA, 19 nt, Artificial Sequence
  Description of Artificial Sequence: Synthetic oligonucleotide
  Antisense strand to SEQ ID NO: 4280
uagaagccaaacagcuccu

SEQ ID NO: 4282 - RNA, 19 nt, Artificial Sequence
  Description of Artificial Sequence: Synthetic oligonucleotide
  Sense strand starting at position 323 of SEQ ID NO: 3
gcugucucuguuccuuauu

SEQ ID NO: 4283 - RNA, 19 nt, Artificial Sequence
  Description of Artificial Sequence: Synthetic oligonucleotide
  Antisense strand to SEQ ID NO: 4282
aauaaggaacagagacagc

SEQ ID NO: 4284 - RNA, 19 nt, Artificial Sequence
  Description of Artificial Sequence: Synthetic oligonucleotide
  Sense strand starting at position 100 of SEQ ID NO: 3
acuugucggugucucuaaa

SEQ ID NO: 4285 - RNA, 19 nt, Artificial Sequence
  Description of Artificial Sequence: Synthetic oligonucleotide
  Antisense strand to SEQ ID NO: 4284
uuuagagacaccgacaagu

SEQ ID NO: 4286 - RNA, 19 nt, Artificial Sequence
  Description of Artificial Sequence: Synthetic oligonucleotide
  Sense strand starting at position 13 of SEQ ID NO: 3
gcauucuccaaaugagagg

SEQ ID NO: 4287 - RNA, 19 nt, Artificial Sequence
  Description of Artificial Sequence: Synthetic oligonucleotide
  Antisense strand to SEQ ID NO: 4286
ccucucauuuggagaaugc

SEQ ID NO: 4288 - RNA, 19 nt, Artificial Sequence
  Description of Artificial Sequence: Synthetic oligonucleotide
  Sense strand starting at position 81 of SEQ ID NO: 4
aggacugaguuucugauua

SEQ ID NO: 4289 - RNA, 19 nt, Artificial Sequence
  Description of Artificial Sequence: Synthetic oligonucleotide
  Antisense strand to SEQ ID NO: 4288
uaaucagaaacucaguccu

SEQ ID NO: 4290 - RNA, 19 nt, Artificial Sequence
  Description of Artificial Sequence: Synthetic oligonucleotide
  Sense strand starting at position 86 of SEQ ID NO: 4
ugaguuucugauuacucuu

SEQ ID NO: 4291 - RNA, 19 nt, Artificial Sequence
  Description of Artificial Sequence: Synthetic oligonucleotide
  Antisense strand to SEQ ID NO: 4290
aagaguaaucagaaacuca

SEQ ID NO: 4292 - RNA, 19 nt, Artificial Sequence
  Description of Artificial Sequence: Synthetic oligonucleotide
  Sense strand starting at position 386 of SEQ ID NO: 4
cgaggucagguucagagau

SEQ ID NO: 4293 - RNA, 19 nt, Artificial Sequence
  Description of Artificial Sequence: Synthetic oligonucleotide
  Antisense strand to SEQ ID NO: 4292
aucucugaaccugaccucg

SEQ ID NO: 4294 - RNA, 19 nt, Artificial Sequence
  Description of Artificial Sequence: Synthetic oligonucleotide
  Sense strand starting at position 714 of SEQ ID NO: 4
aaccgagauuuggaacaaa

SEQ ID NO: 4295 - RNA, 19 nt, Artificial Sequence
  Description of Artificial Sequence: Synthetic oligonucleotide
  Antisense strand to SEQ ID NO: 4294
uuuguuccaaaucucgguu

SEQ ID NO: 4296 - RNA, 19 nt, Artificial Sequence
  Description of Artificial Sequence: Synthetic oligonucleotide
  Sense strand starting at position 1131 of SEQ ID NO: 4
guggaaucugugucgugcu

SEQ ID NO: 4297 - RNA, 19 nt, Artificial Sequence
  Description of Artificial Sequence: Synthetic oligonucleotide
  Antisense strand to SEQ ID NO: 4296
agcacgacacagauuccac

SEQ ID NO: 4298 - RNA, 19 nt, Artificial Sequence
  Description of Artificial Sequence: Synthetic oligonucleotide
  Sense strand starting at position 1133 of SEQ ID NO: 4
ggaaucugugucgugcuuu

SEQ ID NO: 4299 - RNA, 19 nt, Artificial Sequence
  Description of Artificial Sequence: Synthetic oligonucleotide
  Antisense strand to SEQ ID NO: 4298
aaagcacgacacagauucc

SEQ ID NO: 4300 - RNA, 19 nt, Artificial Sequence
  Description of Artificial Sequence: Synthetic oligonucleotide
  Sense strand starting at position 1209 of SEQ ID NO: 4
gcgugaugguuaauaacgu

SEQ ID NO: 4301 - RNA, 19 nt, Artificial Sequence
  Description of Artificial Sequence: Synthetic oligonucleotide
  Antisense strand to SEQ ID NO: 4300
acguuauuaaccaucacgc

SEQ ID NO: 4302 - RNA, 19 nt, Artificial Sequence
  Description of Artificial Sequence: Synthetic oligonucleotide
  Sense strand starting at position 1313 of SEQ ID NO: 4
ccaguuaaacugugacuug

SEQ ID NO: 4303 - RNA, 19 nt, Artificial Sequence
  Description of Artificial Sequence: Synthetic oligonucleotide
  Antisense strand to SEQ ID NO: 4302
caagucacaguuuaacugg

SEQ ID NO: 4304 - RNA, 19 nt, Artificial Sequence
  Description of Artificial Sequence: Synthetic oligonucleotide
  Sense strand starting at position 1316 of SEQ ID NO: 4
guuaaacugugacuugauc

SEQ ID NO: 4305 - RNA, 19 nt, Artificial Sequence
  Description of Artificial Sequence: Synthetic oligonucleotide
  Antisense strand to SEQ ID NO: 4304
gaucaagucacaguuuaac

SEQ ID NO: 4306 - RNA, 19 nt, Artificial Sequence
  Description of Artificial Sequence: Synthetic oligonucleotide
  Sense strand starting at position 1779 of SEQ ID NO: 4
ccuguuuauuugcuccaca

SEQ ID NO: 4307 - RNA, 19 nt, Artificial Sequence
  Description of Artificial Sequence: Synthetic oligonucleotide
  Antisense strand to SEQ ID NO: 4306
uguggagcaaauaaacagg

SEQ ID NO: 4308 - RNA, 19 nt, Artificial Sequence
  Description of Artificial Sequence: Synthetic oligonucleotide
  Sense strand starting at position 1852 of SEQ ID NO: 4
ccaguucuuccagagcaaa

SEQ ID NO: 4309 - RNA, 19 nt, Artificial Sequence
  Description of Artificial Sequence: Synthetic oligonucleotide
  Antisense strand to SEQ ID NO: 4308
uuugcucuggaagaacugg

SEQ ID NO: 4310 - RNA, 19 nt, Artificial Sequence
  Description of Artificial Sequence: Synthetic oligonucleotide
  Sense strand starting at position 1998 of SEQ ID NO: 4
ccuucuccuggugauuaaa

SEQ ID NO: 4311 - RNA, 19 nt, Artificial Sequence
  Description of Artificial Sequence: Synthetic oligonucleotide
  Antisense strand to SEQ ID NO: 4310
uuuaaucaccaggagaagg

SEQ ID NO: 4312 - RNA, 19 nt, Artificial Sequence
  Description of Artificial Sequence: Synthetic oligonucleotide
  Sense strand starting at position 2196 of SEQ ID NO: 4
ggcacucuccuccaugaga

SEQ ID NO: 4313 - RNA, 19 nt, Artificial Sequence
  Description of Artificial Sequence: Synthetic oligonucleotide
  Antisense strand to SEQ ID NO: 4312
ucucauggaggagagugcc

SEQ ID NO: 4314 - RNA, 19 nt, Artificial Sequence
  Description of Artificial Sequence: Synthetic oligonucleotide
  Sense strand starting at position 2239 of SEQ ID NO: 4
agguaucuuugaccuuaag

SEQ ID NO: 4315 - RNA, 19 nt, Artificial Sequence
  Description of Artificial Sequence: Synthetic oligonucleotide
  Antisense strand to SEQ ID NO: 4314
cuuaaggucaaagauaccu

SEQ ID NO: 4316 - RNA, 19 nt, Artificial Sequence
  Description of Artificial Sequence: Synthetic oligonucleotide
  Sense strand starting at position 2248 of SEQ ID NO: 4
ugaccuuaaguuuggaaca

SEQ ID NO: 4317 - RNA, 19 nt, Artificial Sequence
  Description of Artificial Sequence: Synthetic oligonucleotide
  Antisense strand to SEQ ID NO: 4316
uguuccaaacuuaagguca

SEQ ID NO: 4318 - RNA, 19 nt, Artificial Sequence
  Description of Artificial Sequence: Synthetic oligonucleotide
  Sense strand starting at position 2280 of SEQ ID NO: 4
uaaauauaggcugggcauu

SEQ ID NO: 4319 - RNA, 19 nt, Artificial Sequence
  Description of Artificial Sequence: Synthetic oligonucleotide
  Antisense strand to SEQ ID NO: 4318
aaugcccagccuauauuua

SEQ ID NO: 4320 - RNA, 19 nt, Artificial Sequence
  Description of Artificial Sequence: Synthetic oligonucleotide
  Sense strand starting at position 2292 of SEQ ID NO: 4
gggcauuuguccucggcaa

SEQ ID NO: 4321 - RNA, 19 nt, Artificial Sequence
  Description of Artificial Sequence: Synthetic oligonucleotide
  Antisense strand to SEQ ID NO: 4320
uugccgaggacaaaugccc

SEQ ID NO: 4322 - RNA, 19 nt, Artificial Sequence
  Description of Artificial Sequence: Synthetic oligonucleotide
  Sense strand starting at position 2293 of SEQ ID NO: 4
ggcauuuguccucggcaag

SEQ ID NO: 4323 - RNA, 19 nt, Artificial Sequence
  Description of Artificial Sequence: Synthetic oligonucleotide
  Antisense strand to SEQ ID NO: 4322
cuugccgaggacaaaugcc

SEQ ID NO: 4324 - RNA, 19 nt, Artificial Sequence
  Description of Artificial Sequence: Synthetic oligonucleotide
  Sense strand starting at position 2294 of SEQ ID NO: 4
gcauuuguccucggcaaga

SEQ ID NO: 4325 - RNA, 19 nt, Artificial Sequence
  Description of Artificial Sequence: Synthetic oligonucleotide
  Antisense strand to SEQ ID NO: 4324
ucuugccgaggacaaaugc

SEQ ID NO: 4326 - RNA, 19 nt, Artificial Sequence
  Description of Artificial Sequence: Synthetic oligonucleotide
  Sense strand starting at position 2417 of SEQ ID NO: 4
uccguaaugacugaaguca

SEQ ID NO: 4327 - RNA, 19 nt, Artificial Sequence
  Description of Artificial Sequence: Synthetic oligonucleotide
  Antisense strand to SEQ ID NO: 4326
ugacuucagucauuacgga

SEQ ID NO: 4328 - RNA, 19 nt, Artificial Sequence
  Description of Artificial Sequence: Synthetic oligonucleotide
  Sense strand starting at position 2425 of SEQ ID NO: 4
gacugaagucauuaugguc

SEQ ID NO: 4329 - RNA, 19 nt, Artificial Sequence
  Description of Artificial Sequence: Synthetic oligonucleotide
  Antisense strand to SEQ ID NO: 4328
gaccauaaugacuucaguc

SEQ ID NO: 4330 - RNA, 19 nt, Artificial Sequence
  Description of Artificial Sequence: Synthetic oligonucleotide
  Sense strand starting at position 2456 of SEQ ID NO: 4
uaucucugagcuuagcaga

SEQ ID NO: 4331 - RNA, 19 nt, Artificial Sequence
  Description of Artificial Sequence: Synthetic oligonucleotide
  Antisense strand to SEQ ID NO: 4330
ucugcuaagcucagagaua

SEQ ID NO: 4332 - RNA, 19 nt, Artificial Sequence
  Description of Artificial Sequence: Synthetic oligonucleotide
  Sense strand starting at position 2476 of SEQ ID NO: 4
gguaaugauguuuaucucu

SEQ ID NO: 4333 - RNA, 19 nt, Artificial Sequence
  Description of Artificial Sequence: Synthetic oligonucleotide
  Antisense strand to SEQ ID NO: 4332
agagauaaacaucauuacc

SEQ ID NO: 4334 - RNA, 19 nt, Artificial Sequence
  Description of Artificial Sequence: Synthetic oligonucleotide
  Sense strand starting at position 2489 of SEQ ID NO: 4
aucucuugugcugaaauug

SEQ ID NO: 4335 - RNA, 19 nt, Artificial Sequence
  Description of Artificial Sequence: Synthetic oligonucleotide
  Antisense strand to SEQ ID NO: 4334
caauuucagcacaagagau

SEQ ID NO: 4336 - RNA, 19 nt, Artificial Sequence
  Description of Artificial Sequence: Synthetic oligonucleotide
  Sense strand starting at position 2497 of SEQ ID NO: 4
ugcugaaauugaucgacua

SEQ ID NO: 4337 - RNA, 19 nt, Artificial Sequence
  Description of Artificial Sequence: Synthetic oligonucleotide
  Antisense strand to SEQ ID NO: 4336
uagucgaucaauuucagca

SEQ ID NO: 4338 - RNA, 19 nt, Artificial Sequence
  Description of Artificial Sequence: Synthetic oligonucleotide
  Sense strand starting at position 2498 of SEQ ID NO: 4
gcugaaauugaucgacuag

SEQ ID NO: 4339 - RNA, 19 nt, Artificial Sequence
  Description of Artificial Sequence: Synthetic oligonucleotide
  Antisense strand to SEQ ID NO: 4338
cuagucgaucaauuucagc

SEQ ID NO: 4340 - RNA, 19 nt, Artificial Sequence
  Description of Artificial Sequence: Synthetic oligonucleotide
  Sense strand starting at position 2499 of SEQ ID NO: 4
cugaaauugaucgacuagu

SEQ ID NO: 4341 - RNA, 19 nt, Artificial Sequence
  Description of Artificial Sequence: Synthetic oligonucleotide
  Antisense strand to SEQ ID NO: 4340
acuagucgaucaauuucag

SEQ ID NO: 4342 - RNA, 19 nt, Artificial Sequence
  Description of Artificial Sequence: Synthetic oligonucleotide
  Sense strand starting at position 2790 of SEQ ID NO: 4
auguguucucuuugaaaga

SEQ ID NO: 4343 - RNA, 19 nt, Artificial Sequence
  Description of Artificial Sequence: Synthetic oligonucleotide
  Antisense strand to SEQ ID NO: 4342
ucuuucaaagagaacacau

SEQ ID NO: 4344 - RNA, 19 nt, Artificial Sequence
  Description of Artificial Sequence: Synthetic oligonucleotide
  Sense strand starting at position 2875 of SEQ ID NO: 4
uagaguuugcggucugguu

SEQ ID NO: 4345 - RNA, 19 nt, Artificial Sequence
  Description of Artificial Sequence: Synthetic oligonucleotide
  Antisense strand to SEQ ID NO: 4344
aaccagaccgcaaacucua

SEQ ID NO: 4346 - RNA, 19 nt, Artificial Sequence
  Description of Artificial Sequence: Synthetic oligonucleotide
  Sense strand starting at position 2879 of SEQ ID NO: 4
guuugcggucugguuguaa

SEQ ID NO: 4347 - RNA, 19 nt, Artificial Sequence
  Description of Artificial Sequence: Synthetic oligonucleotide
  Antisense strand to SEQ ID NO: 4346
uuacaaccagaccgcaaac

SEQ ID NO: 4348 - RNA, 19 nt, Artificial Sequence
  Description of Artificial Sequence: Synthetic oligonucleotide
  Sense strand starting at position 2914 of SEQ ID NO: 4
cgaauaacucaaggagugu

SEQ ID NO: 4349 - RNA, 19 nt, Artificial Sequence
  Description of Artificial Sequence: Synthetic oligonucleotide
  Antisense strand to SEQ ID NO: 4348
acacuccuugaguuauucg

SEQ ID NO: 4350 - RNA, 19 nt, Artificial Sequence
  Description of Artificial Sequence: Synthetic oligonucleotide
  Sense strand starting at position 2976 of SEQ ID NO: 4
gagagauaguuucugcuua

SEQ ID NO: 4351 - RNA, 19 nt, Artificial Sequence
  Description of Artificial Sequence: Synthetic oligonucleotide
  Antisense strand to SEQ ID NO: 4350
uaagcagaaacuaucucuc

SEQ ID NO: 4352 - RNA, 19 nt, Artificial Sequence
  Description of Artificial Sequence: Synthetic oligonucleotide
  Sense strand starting at position 2981 of SEQ ID NO: 4
auaguuucugcuuaugaug

SEQ ID NO: 4353 - RNA, 19 nt, Artificial Sequence
  Description of Artificial Sequence: Synthetic oligonucleotide
  Antisense strand to SEQ ID NO: 4352
caucauaagcagaaacuau

SEQ ID NO: 4354 - RNA, 19 nt, Artificial Sequence
  Description of Artificial Sequence: Synthetic oligonucleotide
  Sense strand starting at position 3176 of SEQ ID NO: 4
uagugagauuaaguacuuu

SEQ ID NO: 4355 - RNA, 19 nt, Artificial Sequence
  Description of Artificial Sequence: Synthetic oligonucleotide
  Antisense strand to SEQ ID NO: 4354
aaaguacuuaaucucacua

SEQ ID NO: 4356 - RNA, 19 nt, Artificial Sequence
  Description of Artificial Sequence: Synthetic oligonucleotide
  Sense strand starting at position 3271 of SEQ ID NO: 4
gcuuaucuugcccaggaaa

SEQ ID NO: 4357 - RNA, 19 nt, Artificial Sequence
  Description of Artificial Sequence: Synthetic oligonucleotide
  Antisense strand to SEQ ID NO: 4356
uuuccugggcaagauaagc

SEQ ID NO: 4358 - RNA, 19 nt, Artificial Sequence
  Description of Artificial Sequence: Synthetic oligonucleotide
  Sense strand starting at position 3317 of SEQ ID NO: 4
aggcuaugaggcuaugaau

SEQ ID NO: 4359 - RNA, 19 nt, Artificial Sequence
  Description of Artificial Sequence: Synthetic oligonucleotide
  Antisense strand to SEQ ID NO: 4358
auucauagccucauagccu

SEQ ID NO: 4360 - RNA, 19 nt, Artificial Sequence
  Description of Artificial Sequence: Synthetic oligonucleotide
  Sense strand starting at position 3497 of SEQ ID NO: 4
cuggcagaaucauuaagac

SEQ ID NO: 4361 - RNA, 19 nt, Artificial Sequence
  Description of Artificial Sequence: Synthetic oligonucleotide
  Antisense strand to SEQ ID NO: 4360
gucuuaaugauucugccag

SEQ ID NO: 4362 - RNA, 19 nt, Artificial Sequence
  Description of Artificial Sequence: Synthetic oligonucleotide
  Sense strand starting at position 3636 of SEQ ID NO: 4
gccagagagccugaaccau

SEQ ID NO: 4363 - RNA, 19 nt, Artificial Sequence
  Description of Artificial Sequence: Synthetic oligonucleotide
  Antisense strand to SEQ ID NO: 4362
augguucaggcucucuggc

SEQ ID NO: 4364 - RNA, 19 nt, Artificial Sequence
  Description of Artificial Sequence: Synthetic oligonucleotide
  Sense strand starting at position 3970 of SEQ ID NO: 4
caagaauaagcuugugaga

SEQ ID NO: 4365 - RNA, 19 nt, Artificial Sequence
  Description of Artificial Sequence: Synthetic oligonucleotide
  Antisense strand to SEQ ID NO: 4364
ucucacaagcuuauucuug

SEQ ID NO: 4366 - RNA, 19 nt, Artificial Sequence
  Description of Artificial Sequence: Synthetic oligonucleotide
  Sense strand starting at position 3979 of SEQ ID NO: 4
gcuugugagauggagacau

SEQ ID NO: 4367 - RNA, 19 nt, Artificial Sequence
  Description of Artificial Sequence: Synthetic oligonucleotide
  Antisense strand to SEQ ID NO: 4366
augucuccaucucacaagc

SEQ ID NO: 4368 - RNA, 19 nt, Artificial Sequence
  Description of Artificial Sequence: Synthetic oligonucleotide
  Sense strand starting at position 35 of SEQ ID NO: 5
uuacacuuacuuugaguca

SEQ ID NO: 4369 - RNA, 19 nt, Artificial Sequence
  Description of Artificial Sequence: Synthetic oligonucleotide
  Antisense strand to SEQ ID NO: 4368
ugacucaaaguaaguguaa

SEQ ID NO: 4370 - RNA, 19 nt, Artificial Sequence
  Description of Artificial Sequence: Synthetic oligonucleotide
  Sense strand starting at position 118 of SEQ ID NO: 5
gugguauggucauuuauuc

SEQ ID NO: 4371 - RNA, 19 nt, Artificial Sequence
  Description of Artificial Sequence: Synthetic oligonucleotide
  Antisense strand to SEQ ID NO: 4370
gaauaaaugaccauaccac

SEQ ID NO: 4372 - RNA, 19 nt, Artificial Sequence
  Description of Artificial Sequence: Synthetic oligonucleotide
  Sense strand starting at position 245 of SEQ ID NO: 5
gagagcuccuagucuccaa

SEQ ID NO: 4373 - RNA, 19 nt, Artificial Sequence
  Description of Artificial Sequence: Synthetic oligonucleotide
  Antisense strand to SEQ ID NO: 4372
uuggagacuaggagcucuc

SEQ ID NO: 4374 - RNA, 19 nt, Artificial Sequence
  Description of Artificial Sequence: Synthetic oligonucleotide
  Sense strand starting at position 249 of SEQ ID NO: 5
gcuccuagucuccaauguu

SEQ ID NO: 4375 - RNA, 19 nt, Artificial Sequence
  Description of Artificial Sequence: Synthetic oligonucleotide
  Antisense strand to SEQ ID NO: 4374
aacauuggagacuaggagc

SEQ ID NO: 4376 - RNA, 19 nt, Artificial Sequence
  Description of Artificial Sequence: Synthetic oligonucleotide
  Sense strand starting at position 341 of SEQ ID NO: 5
cucuuuacacccgagugau

SEQ ID NO: 4377 - RNA, 19 nt, Artificial Sequence
  Description of Artificial Sequence: Synthetic oligonucleotide
  Antisense strand to SEQ ID NO: 4376
aucacucggguguaaagag

SEQ ID NO: 4378 - RNA, 19 nt, Artificial Sequence
  Description of Artificial Sequence: Synthetic oligonucleotide
  Sense strand starting at position 344 of SEQ ID NO: 5
uuuacacccgagugauauc

SEQ ID NO: 4379 - RNA, 19 nt, Artificial Sequence
  Description of Artificial Sequence: Synthetic oligonucleotide
  Antisense strand to SEQ ID NO: 4378
gauaucacucggguguaaa

SEQ ID NO: 4380 - RNA, 19 nt, Artificial Sequence
  Description of Artificial Sequence: Synthetic oligonucleotide
  Sense strand starting at position 463 of SEQ ID NO: 5
ccaggaggguccuuucuaa

SEQ ID NO: 4381 - RNA, 19 nt, Artificial Sequence
  Description of Artificial Sequence: Synthetic oligonucleotide
  Antisense strand to SEQ ID NO: 4380
uuagaaaggacccuccugg

SEQ ID NO: 4382 - RNA, 19 nt, Artificial Sequence
  Description of Artificial Sequence: Synthetic oligonucleotide
  Sense strand starting at position 513 of SEQ ID NO: 5
ugguguugcaccugacaac

SEQ ID NO: 4383 - RNA, 19 nt, Artificial Sequence
  Description of Artificial Sequence: Synthetic oligonucleotide
  Antisense strand to SEQ ID NO: 4382
guugucaggugcaacacca

SEQ ID NO: 4384 - RNA, 19 nt, Artificial Sequence
  Description of Artificial Sequence: Synthetic oligonucleotide
  Sense strand starting at position 574 of SEQ ID NO: 5
gguuuaccucuauacauac

SEQ ID NO: 4385 - RNA, 19 nt, Artificial Sequence
  Description of Artificial Sequence: Synthetic oligonucleotide
  Antisense strand to SEQ ID NO: 4384
guauguauagagguaaacc

SEQ ID NO: 4386 - RNA, 19 nt, Artificial Sequence
  Description of Artificial Sequence: Synthetic oligonucleotide
  Sense strand starting at position 700 of SEQ ID NO: 5
gggcucaacagauguuuau

SEQ ID NO: 4387 - RNA, 19 nt, Artificial Sequence
  Description of Artificial Sequence: Synthetic oligonucleotide
  Antisense strand to SEQ ID NO: 4386
auaaacaucuguugagccc

SEQ ID NO: 4388 - RNA, 19 nt, Artificial Sequence
  Description of Artificial Sequence: Synthetic oligonucleotide
  Sense strand starting at position 703 of SEQ ID NO: 5
cucaacagauguuuauaga

SEQ ID NO: 4389 - RNA, 19 nt, Artificial Sequence
  Description of Artificial Sequence: Synthetic oligonucleotide
  Antisense strand to SEQ ID NO: 4388
ucuauaaacaucuguugag

SEQ ID NO: 4390 - RNA, 19 nt, Artificial Sequence
  Description of Artificial Sequence: Synthetic oligonucleotide
  Sense strand starting at position 711 of SEQ ID NO: 5
auguuuauagaaggaguga

SEQ ID NO: 4391 - RNA, 19 nt, Artificial Sequence
  Description of Artificial Sequence: Synthetic oligonucleotide
  Antisense strand to SEQ ID NO: 4390
ucacuccuucuauaaacau

SEQ ID NO: 4392 - RNA, 19 nt, Artificial Sequence
  Description of Artificial Sequence: Synthetic oligonucleotide
  Sense strand starting at position 930 of SEQ ID NO: 5
uguaacuuccugcacaaga

SEQ ID NO: 4393 - RNA, 19 nt, Artificial Sequence
  Description of Artificial Sequence: Synthetic oligonucleotide
  Antisense strand to SEQ ID NO: 4392
ucuugugcaggaaguuaca

SEQ ID NO: 4394 - RNA, 19 nt, Artificial Sequence
  Description of Artificial Sequence: Synthetic oligonucleotide
  Sense strand starting at position 976 of SEQ ID NO: 5
ugugaaagcauuggugacu

SEQ ID NO: 4395 - RNA, 19 nt, Artificial Sequence
  Description of Artificial Sequence: Synthetic oligonucleotide
  Antisense strand to SEQ ID NO: 4394
agucaccaaugcuuucaca

SEQ ID NO: 4396 - RNA, 19 nt, Artificial Sequence
  Description of Artificial Sequence: Synthetic oligonucleotide
  Sense strand starting at position 999 of SEQ ID NO: 5
gacagacucgcuugaagca

SEQ ID NO: 4397 - RNA, 19 nt, Artificial Sequence
  Description of Artificial Sequence: Synthetic oligonucleotide
  Antisense strand to SEQ ID NO: 4396
ugcuucaagcgagucuguc

SEQ ID NO: 4398 - RNA, 19 nt, Artificial Sequence
  Description of Artificial Sequence: Synthetic oligonucleotide
  Sense strand starting at position 1046 of SEQ ID NO: 5
aguauaaacgccuaauaac

SEQ ID NO: 4399 - RNA, 19 nt, Artificial Sequence
  Description of Artificial Sequence: Synthetic oligonucleotide
  Antisense strand to SEQ ID NO: 4398
guuauuaggcguuuauacu

SEQ ID NO: 4400 - RNA, 19 nt, Artificial Sequence
  Description of Artificial Sequence: Synthetic oligonucleotide
  Sense strand starting at position 1193 of SEQ ID NO: 5
acauauauaacguguguca

SEQ ID NO: 4401 - RNA, 19 nt, Artificial Sequence
  Description of Artificial Sequence: Synthetic oligonucleotide
  Antisense strand to SEQ ID NO: 4400
ugacacacguuauauaugu

SEQ ID NO: 4402 - RNA, 19 nt, Artificial Sequence
  Description of Artificial Sequence: Synthetic oligonucleotide
  Sense strand starting at position 1195 of SEQ ID NO: 5
auauauaacgugugucaac

SEQ ID NO: 4403 - RNA, 19 nt, Artificial Sequence
  Description of Artificial Sequence: Synthetic oligonucleotide
  Antisense strand to SEQ ID NO: 4402
guugacacacguuauauau

SEQ ID NO: 4404 - RNA, 19 nt, Artificial Sequence
  Description of Artificial Sequence: Synthetic oligonucleotide
  Sense strand starting at position 1196 of SEQ ID NO: 5
uauauaacgugugucaaca

SEQ ID NO: 4405 - RNA, 19 nt, Artificial Sequence
  Description of Artificial Sequence: Synthetic oligonucleotide
  Antisense strand to SEQ ID NO: 4404
uguugacacacguuauaua

SEQ ID NO: 4406 - RNA, 19 nt, Artificial Sequence
  Description of Artificial Sequence: Synthetic oligonucleotide
  Sense strand starting at position 2641 of SEQ ID NO: 5
gugguuggcgaauagugaa

SEQ ID NO: 4407 - RNA, 19 nt, Artificial Sequence
  Description of Artificial Sequence: Synthetic oligonucleotide
  Antisense strand to SEQ ID NO: 4406
uucacuauucgccaaccac

SEQ ID NO: 4408 - RNA, 19 nt, Artificial Sequence
  Description of Artificial Sequence: Synthetic oligonucleotide
  Sense strand starting at position 2649 of SEQ ID NO: 5
cgaauagugaaauguauau

SEQ ID NO: 4409 - RNA, 19 nt, Artificial Sequence
  Description of Artificial Sequence: Synthetic oligonucleotide
  Antisense strand to SEQ ID NO: 4408
auauacauuucacuauucg

SEQ ID NO: 4410 - RNA, 19 nt, Artificial Sequence
  Description of Artificial Sequence: Synthetic oligonucleotide
  Sense strand starting at position 2661 of SEQ ID NO: 5
uguauauaacuuugagaag

SEQ ID NO: 4411 - RNA, 19 nt, Artificial Sequence
  Description of Artificial Sequence: Synthetic oligonucleotide
  Antisense strand to SEQ ID NO: 4410
cuucucaaaguuauauaca

SEQ ID NO: 4412 - RNA, 19 nt, Artificial Sequence
  Description of Artificial Sequence: Synthetic oligonucleotide
  Sense strand starting at position 2664 of SEQ ID NO: 5
auauaacuuugagaaggga

SEQ ID NO: 4413 - RNA, 19 nt, Artificial Sequence
  Description of Artificial Sequence: Synthetic oligonucleotide
  Antisense strand to SEQ ID NO: 4412
ucccuucucaaaguuauau

SEQ ID NO: 4414 - RNA, 19 nt, Artificial Sequence
  Description of Artificial Sequence: Synthetic oligonucleotide
  Sense strand starting at position 2961 of SEQ ID NO: 5
cugagaucguuucuuaacu

SEQ ID NO: 4415 - RNA, 19 nt, Artificial Sequence
  Description of Artificial Sequence: Synthetic oligonucleotide
  Antisense strand to SEQ ID NO: 4414
aguuaagaaacgaucucag

SEQ ID NO: 4416 - RNA, 19 nt, Artificial Sequence
  Description of Artificial Sequence: Synthetic oligonucleotide
  Sense strand starting at position 2962 of SEQ ID NO: 5
ugagaucguuucuuaacua

SEQ ID NO: 4417 - RNA, 19 nt, Artificial Sequence
  Description of Artificial Sequence: Synthetic oligonucleotide
  Antisense strand to SEQ ID NO: 4416
uaguuaagaaacgaucuca

SEQ ID NO: 4418 - RNA, 19 nt, Artificial Sequence
  Description of Artificial Sequence: Synthetic oligonucleotide
  Sense strand starting at position 2969 of SEQ ID NO: 5
guuucuuaacuagagcaga

SEQ ID NO: 4419 - RNA, 19 nt, Artificial Sequence
  Description of Artificial Sequence: Synthetic oligonucleotide
  Antisense strand to SEQ ID NO: 4418
ucugcucuaguuaagaaac

SEQ ID NO: 4420 - RNA, 19 nt, Artificial Sequence
  Description of Artificial Sequence: Synthetic oligonucleotide
  Sense strand starting at position 3011 of SEQ ID NO: 5
ggcauucccgcuguucgaa

SEQ ID NO: 4421 - RNA, 19 nt, Artificial Sequence
  Description of Artificial Sequence: Synthetic oligonucleotide
  Antisense strand to SEQ ID NO: 4420
uucgaacagcgggaaugcc

SEQ ID NO: 4422 - RNA, 19 nt, Artificial Sequence
  Description of Artificial Sequence: Synthetic oligonucleotide
  Sense strand starting at position 3017 of SEQ ID NO: 5
cccgcuguucgaaguggaa

SEQ ID NO: 4423 - RNA, 19 nt, Artificial Sequence
  Description of Artificial Sequence: Synthetic oligonucleotide
  Antisense strand to SEQ ID NO: 4422
uuccacuucgaacagcggg

SEQ ID NO: 4424 - RNA, 19 nt, Artificial Sequence
  Description of Artificial Sequence: Synthetic oligonucleotide
  Sense strand starting at position 3141 of SEQ ID NO: 5
gggauauguaccugagguc

SEQ ID NO: 4425 - RNA, 19 nt, Artificial Sequence
  Description of Artificial Sequence: Synthetic oligonucleotide
  Antisense strand to SEQ ID NO: 4424
gaccucagguacauauccc

SEQ ID NO: 4426 - RNA, 19 nt, Artificial Sequence
  Description of Artificial Sequence: Synthetic oligonucleotide
  Sense strand starting at position 3161 of SEQ ID NO: 5
agugagucguggguagauu

SEQ ID NO: 4427 - RNA, 19 nt, Artificial Sequence
  Description of Artificial Sequence: Synthetic oligonucleotide
  Antisense strand to SEQ ID NO: 4426
aaucuacccacgacucacu

SEQ ID NO: 4428 - RNA, 19 nt, Artificial Sequence
  Description of Artificial Sequence: Synthetic oligonucleotide
  Sense strand starting at position 3162 of SEQ ID NO: 5
gugagucguggguagauuu

SEQ ID NO: 4429 - RNA, 19 nt, Artificial Sequence
  Description of Artificial Sequence: Synthetic oligonucleotide
  Antisense strand to SEQ ID NO: 4428
aaaucuacccacgacucac

SEQ ID NO: 4430 - RNA, 19 nt, Artificial Sequence
  Description of Artificial Sequence: Synthetic oligonucleotide
  Sense strand starting at position 3216 of SEQ ID NO: 5
aggguacugucaguugcaa

SEQ ID NO: 4431 - RNA, 19 nt, Artificial Sequence
  Description of Artificial Sequence: Synthetic oligonucleotide
  Antisense strand to SEQ ID NO: 4430
uugcaacugacaguacccu

SEQ ID NO: 4432 - RNA, 19 nt, Artificial Sequence
  Description of Artificial Sequence: Synthetic oligonucleotide
  Sense strand starting at position 3218 of SEQ ID NO: 5
gguacugucaguugcaaau

SEQ ID NO: 4433 - RNA, 19 nt, Artificial Sequence
  Description of Artificial Sequence: Synthetic oligonucleotide
  Antisense strand to SEQ ID NO: 4432
auuugcaacugacaguacc

SEQ ID NO: 4434 - RNA, 19 nt, Artificial Sequence
  Description of Artificial Sequence: Synthetic oligonucleotide
  Sense strand starting at position 3497 of SEQ ID NO: 5
aggugagauuuggguuaaa

SEQ ID NO: 4435 - RNA, 19 nt, Artificial Sequence
  Description of Artificial Sequence: Synthetic oligonucleotide
  Antisense strand to SEQ ID NO: 4434
uuuaacccaaaucucaccu

SEQ ID NO: 4436 - RNA, 19 nt, Artificial Sequence
  Description of Artificial Sequence: Synthetic oligonucleotide
  Sense strand starting at position 3506 of SEQ ID NO: 5
uuggguuaaaguugucacu

SEQ ID NO: 4437 - RNA, 19 nt, Artificial Sequence
  Description of Artificial Sequence: Synthetic oligonucleotide
  Antisense strand to SEQ ID NO: 4436
agugacaacuuuaacccaa

SEQ ID NO: 4438 - RNA, 19 nt, Artificial Sequence
  Description of Artificial Sequence: Synthetic oligonucleotide
  Sense strand starting at position 3508 of SEQ ID NO: 5
ggguuaaaguugucacuuu

SEQ ID NO: 4439 - RNA, 19 nt, Artificial Sequence
  Description of Artificial Sequence: Synthetic oligonucleotide
  Antisense strand to SEQ ID NO: 4438
aaagugacaacuuuaaccc

SEQ ID NO: 4440 - RNA, 19 nt, Artificial Sequence
  Description of Artificial Sequence: Synthetic oligonucleotide
  Sense strand starting at position 3541 of SEQ ID NO: 5
ggguaucaauccuugaugu

SEQ ID NO: 4441 - RNA, 19 nt, Artificial Sequence
  Description of Artificial Sequence: Synthetic oligonucleotide
  Antisense strand to SEQ ID NO: 4440
acaucaaggauugauaccc

SEQ ID NO: 4442 - RNA, 19 nt, Artificial Sequence
  Description of Artificial Sequence: Synthetic oligonucleotide
  Sense strand starting at position 3542 of SEQ ID NO: 5
gguaucaauccuugauguu

SEQ ID NO: 4443 - RNA, 19 nt, Artificial Sequence
  Description of Artificial Sequence: Synthetic oligonucleotide
  Antisense strand to SEQ ID NO: 4442
aacaucaaggauugauacc

SEQ ID NO: 4444 - RNA, 19 nt, Artificial Sequence
  Description of Artificial Sequence: Synthetic oligonucleotide
  Sense strand starting at position 3543 of SEQ ID NO: 5
guaucaauccuugauguuu

SEQ ID NO: 4445 - RNA, 19 nt, Artificial Sequence
  Description of Artificial Sequence: Synthetic oligonucleotide
  Antisense strand to SEQ ID NO: 4444
aaacaucaaggauugauac

SEQ ID NO: 4446 - RNA, 19 nt, Artificial Sequence
  Description of Artificial Sequence: Synthetic oligonucleotide
  Sense strand starting at position 3551 of SEQ ID NO: 5
ccuugauguuucuuuaguu

SEQ ID NO: 4447 - RNA, 19 nt, Artificial Sequence
  Description of Artificial Sequence: Synthetic oligonucleotide
  Antisense strand to SEQ ID NO: 4446
aacuaaagaaacaucaagg

SEQ ID NO: 4448 - RNA, 19 nt, Artificial Sequence
  Description of Artificial Sequence: Synthetic oligonucleotide
  Sense strand starting at position 3876 of SEQ ID NO: 6
guaugccuggcacagauaa

SEQ ID NO: 4449 - RNA, 19 nt, Artificial Sequence
  Description of Artificial Sequence: Synthetic oligonucleotide
  Antisense strand to SEQ ID NO: 4448
uuaucugugccaggcauac

SEQ ID NO: 4450 - RNA, 19 nt, Artificial Sequence
  Description of Artificial Sequence: Synthetic oligonucleotide
  Sense strand starting at position 3742 of SEQ ID NO: 6
auggcuagccuagggaaau

SEQ ID NO: 4451 - RNA, 19 nt, Artificial Sequence
  Description of Artificial Sequence: Synthetic oligonucleotide
  Antisense strand to SEQ ID NO: 4450
auuucccuaggcuagccau

SEQ ID NO: 4452 - RNA, 19 nt, Artificial Sequence
  Description of Artificial Sequence: Synthetic oligonucleotide
  Sense strand starting at position 3271 of SEQ ID NO: 6
gcugacauaaggcagauua

SEQ ID NO: 4453 - RNA, 19 nt, Artificial Sequence
  Description of Artificial Sequence: Synthetic oligonucleotide
  Antisense strand to SEQ ID NO: 4452
uaaucugccuuaugucagc

SEQ ID NO: 4454 - RNA, 19 nt, Artificial Sequence
  Description of Artificial Sequence: Synthetic oligonucleotide
  Sense strand starting at position 3144 of SEQ ID NO: 6
ggugcucaacagugaauuc

SEQ ID NO: 4455 - RNA, 19 nt, Artificial Sequence
  Description of Artificial Sequence: Synthetic oligonucleotide
  Antisense strand to SEQ ID NO: 4454
gaauucacuguugagcacc

SEQ ID NO: 4456 - RNA, 19 nt, Artificial Sequence
  Description of Artificial Sequence: Synthetic oligonucleotide
  Sense strand starting at position 3141 of SEQ ID NO: 6
agaggugcucaacagugaa

SEQ ID NO: 4457 - RNA, 19 nt, Artificial Sequence
  Description of Artificial Sequence: Synthetic oligonucleotide
  Antisense strand to SEQ ID NO: 4456
uucacuguugagcaccucu

SEQ ID NO: 4458 - RNA, 19 nt, Artificial Sequence
  Description of Artificial Sequence: Synthetic oligonucleotide
  Sense strand starting at position 3138 of SEQ ID NO: 6
uauagaggugcucaacagu

SEQ ID NO: 4459 - RNA, 19 nt, Artificial Sequence
  Description of Artificial Sequence: Synthetic oligonucleotide
  Antisense strand to SEQ ID NO: 4458
acuguugagcaccucuaua

SEQ ID NO: 4460 - RNA, 19 nt, Artificial Sequence
  Description of Artificial Sequence: Synthetic oligonucleotide
  Sense strand starting at position 3077 of SEQ ID NO: 6
ugagcuguugccuaauaca

SEQ ID NO: 4461 - RNA, 19 nt, Artificial Sequence
  Description of Artificial Sequence: Synthetic oligonucleotide
  Antisense strand to SEQ ID NO: 4460
uguauuaggcaacagcuca

SEQ ID NO: 4462 - RNA, 19 nt, Artificial Sequence
  Description of Artificial Sequence: Synthetic oligonucleotide
  Sense strand starting at position 3002 of SEQ ID NO: 6
ucgcauaaugcacauacau

SEQ ID NO: 4463 - RNA, 19 nt, Artificial Sequence
  Description of Artificial Sequence: Synthetic oligonucleotide
  Antisense strand to SEQ ID NO: 4462
auguaugugcauuaugcga

SEQ ID NO: 4464 - RNA, 19 nt, Artificial Sequence
  Description of Artificial Sequence: Synthetic oligonucleotide
  Sense strand starting at position 2902 of SEQ ID NO: 6
cagcauugagccuagcaua

SEQ ID NO: 4465 - RNA, 19 nt, Artificial Sequence
  Description of Artificial Sequence: Synthetic oligonucleotide
  Antisense strand to SEQ ID NO: 4464
uaugcuaggcucaaugcug

SEQ ID NO: 4466 - RNA, 19 nt, Artificial Sequence
  Description of Artificial Sequence: Synthetic oligonucleotide
  Sense strand starting at position 2841 of SEQ ID NO: 6
ggcuuugcagauuacaaca

SEQ ID NO: 4467 - RNA, 19 nt, Artificial Sequence
  Description of Artificial Sequence: Synthetic oligonucleotide
  Antisense strand to SEQ ID NO: 4466
uguuguaaucugcaaagcc

SEQ ID NO: 4468 - RNA, 19 nt, Artificial Sequence
  Description of Artificial Sequence: Synthetic oligonucleotide
  Sense strand starting at position 2838 of SEQ ID NO: 6
aagggcuuugcagauuaca

SEQ ID NO: 4469 - RNA, 19 nt, Artificial Sequence
  Description of Artificial Sequence: Synthetic oligonucleotide
  Antisense strand to SEQ ID NO: 4468
uguaaucugcaaagcccuu

SEQ ID NO: 4470 - RNA, 19 nt, Artificial Sequence
  Description of Artificial Sequence: Synthetic oligonucleotide
  Sense strand starting at position 2834 of SEQ ID NO: 6
ucagaagggcuuugcagau

SEQ ID NO: 4471 - RNA, 19 nt, Artificial Sequence
  Description of Artificial Sequence: Synthetic oligonucleotide
  Antisense strand to SEQ ID NO: 4470
aucugcaaagcccuucuga

SEQ ID NO: 4472 - RNA, 19 nt, Artificial Sequence
  Description of Artificial Sequence: Synthetic oligonucleotide
  Sense strand starting at position 2793 of SEQ ID NO: 6
aacaaucgugcguuguauu

SEQ ID NO: 4473 - RNA, 19 nt, Artificial Sequence
  Description of Artificial Sequence: Synthetic oligonucleotide
  Antisense strand to SEQ ID NO: 4472
aauacaacgcacgauuguu

SEQ ID NO: 4474 - RNA, 19 nt, Artificial Sequence
  Description of Artificial Sequence: Synthetic oligonucleotide
  Sense strand starting at position 2766 of SEQ ID NO: 6
guucuuugcaaagggacau

SEQ ID NO: 4475 - RNA, 19 nt, Artificial Sequence
  Description of Artificial Sequence: Synthetic oligonucleotide
  Antisense strand to SEQ ID NO: 4474
augucccuuugcaaagaac

SEQ ID NO: 4476 - RNA, 19 nt, Artificial Sequence
  Description of Artificial Sequence: Synthetic oligonucleotide
  Sense strand starting at position 2654 of SEQ ID NO: 6
uaguaaaggaguuguuuag

SEQ ID NO: 4477 - RNA, 19 nt, Artificial Sequence
  Description of Artificial Sequence: Synthetic oligonucleotide
  Antisense strand to SEQ ID NO: 4476
cuaaacaacuccuuuacua

SEQ ID NO: 4478 - RNA, 19 nt, Artificial Sequence
  Description of Artificial Sequence: Synthetic oligonucleotide
  Sense strand starting at position 2573 of SEQ ID NO: 6
uugguagaucgggaucauc

SEQ ID NO: 4479 - RNA, 19 nt, Artificial Sequence
  Description of Artificial Sequence: Synthetic oligonucleotide
  Antisense strand to SEQ ID NO: 4478
gaugaucccgaucuaccaa

SEQ ID NO: 4480 - RNA, 19 nt, Artificial Sequence
  Description of Artificial Sequence: Synthetic oligonucleotide
  Sense strand starting at position 2564 of SEQ ID NO: 6
gaaauugguuugguagauc

SEQ ID NO: 4481 - RNA, 19 nt, Artificial Sequence
  Description of Artificial Sequence: Synthetic oligonucleotide
  Antisense strand to SEQ ID NO: 4480
gaucuaccaaaccaauuuc

SEQ ID NO: 4482 - RNA, 19 nt, Artificial Sequence
  Description of Artificial Sequence: Synthetic oligonucleotide
  Sense strand starting at position 2560 of SEQ ID NO: 6
uugugaaauugguuuggua

SEQ ID NO: 4483 - RNA, 19 nt, Artificial Sequence
  Description of Artificial Sequence: Synthetic oligonucleotide
  Antisense strand to SEQ ID NO: 4482
uaccaaaccaauuucacaa

SEQ ID NO: 4484 - RNA, 19 nt, Artificial Sequence
  Description of Artificial Sequence: Synthetic oligonucleotide
  Sense strand starting at position 2541 of SEQ ID NO: 6
gguuauaaucucuagcgca

SEQ ID NO: 4485 - RNA, 19 nt, Artificial Sequence
  Description of Artificial Sequence: Synthetic oligonucleotide
  Antisense strand to SEQ ID NO: 4484
ugcgcuagagauuauaacc

SEQ ID NO: 4486 - RNA, 19 nt, Artificial Sequence
  Description of Artificial Sequence: Synthetic oligonucleotide
  Sense strand starting at position 1427 of SEQ ID NO: 6
ccagaaaguugacacagaa

SEQ ID NO: 4487 - RNA, 19 nt, Artificial Sequence
  Description of Artificial Sequence: Synthetic oligonucleotide
  Antisense strand to SEQ ID NO: 4486
uucugugucaacuuucugg

SEQ ID NO: 4488 - RNA, 19 nt, Artificial Sequence
  Description of Artificial Sequence: Synthetic oligonucleotide
  Sense strand starting at position 1274 of SEQ ID NO: 6
gcaguuagucgggaaucga

SEQ ID NO: 4489 - RNA, 19 nt, Artificial Sequence
  Description of Artificial Sequence: Synthetic oligonucleotide
  Antisense strand to SEQ ID NO: 4488
ucgauucccgacuaacugc

SEQ ID NO: 4490 - RNA, 19 nt, Artificial Sequence
  Description of Artificial Sequence: Synthetic oligonucleotide
  Sense strand starting at position 1271 of SEQ ID NO: 6
auagcaguuagucgggaau

SEQ ID NO: 4491 - RNA, 19 nt, Artificial Sequence
  Description of Artificial Sequence: Synthetic oligonucleotide
  Antisense strand to SEQ ID NO: 4490
auucccgacuaacugcuau

SEQ ID NO: 4492 - RNA, 19 nt, Artificial Sequence
  Description of Artificial Sequence: Synthetic oligonucleotide
  Sense strand starting at position 1132 of SEQ ID NO: 6
agccuuuccggaugaaaug

SEQ ID NO: 4493 - RNA, 19 nt, Artificial Sequence
  Description of Artificial Sequence: Synthetic oligonucleotide
  Antisense strand to SEQ ID NO: 4492
cauuucauccggaaaggcu

SEQ ID NO: 4494 - RNA, 19 nt, Artificial Sequence
  Description of Artificial Sequence: Synthetic oligonucleotide
  Sense strand starting at position 1130 of SEQ ID NO: 6
ccagccuuuccggaugaaa

SEQ ID NO: 4495 - RNA, 19 nt, Artificial Sequence
  Description of Artificial Sequence: Synthetic oligonucleotide
  Antisense strand to SEQ ID NO: 4494
uuucauccggaaaggcugg

SEQ ID NO: 4496 - RNA, 19 nt, Artificial Sequence
  Description of Artificial Sequence: Synthetic oligonucleotide
  Sense strand starting at position 1017 of SEQ ID NO: 6
agcaguggcgugucauuaa

SEQ ID NO: 4497 - RNA, 19 nt, Artificial Sequence
  Description of Artificial Sequence: Synthetic oligonucleotide
  Antisense strand to SEQ ID NO: 4496
uuaaugacacgccacugcu

SEQ ID NO: 4498 - RNA, 19 nt, Artificial Sequence
  Description of Artificial Sequence: Synthetic oligonucleotide
  Sense strand starting at position 981 of SEQ ID NO: 6
aguuaaaucuaagcacuga

SEQ ID NO: 4499 - RNA, 19 nt, Artificial Sequence
  Description of Artificial Sequence: Synthetic oligonucleotide
  Antisense strand to SEQ ID NO: 4498
ucagugcuuagauuuaacu

SEQ ID NO: 4500 - RNA, 19 nt, Artificial Sequence
  Description of Artificial Sequence: Synthetic oligonucleotide
  Sense strand starting at position 840 of SEQ ID NO: 6
gcaagaacgcuugggaagu

SEQ ID NO: 4501 - RNA, 19 nt, Artificial Sequence
  Description of Artificial Sequence: Synthetic oligonucleotide
  Antisense strand to SEQ ID NO: 4500
acuucccaagcguucuugc

SEQ ID NO: 4502 - RNA, 19 nt, Artificial Sequence
  Description of Artificial Sequence: Synthetic oligonucleotide
  Sense strand starting at position 795 of SEQ ID NO: 6
augaaaguaguaugucaag

SEQ ID NO: 4503 - RNA, 19 nt, Artificial Sequence
  Description of Artificial Sequence: Synthetic oligonucleotide
  Antisense strand to SEQ ID NO: 4502
cuugacauacuacuuucau

SEQ ID NO: 4504 - RNA, 19 nt, Artificial Sequence
  Description of Artificial Sequence: Synthetic oligonucleotide
  Sense strand starting at position 725 of SEQ ID NO: 6
uagauauuguaggcaaauc

SEQ ID NO: 4505 - RNA, 19 nt, Artificial Sequence
  Description of Artificial Sequence: Synthetic oligonucleotide
  Antisense strand to SEQ ID NO: 4504
gauuugccuacaauaucua

SEQ ID NO: 4506 - RNA, 19 nt, Artificial Sequence
  Description of Artificial Sequence: Synthetic oligonucleotide
  Sense strand starting at position 724 of SEQ ID NO: 6
uuagauauuguaggcaaau

SEQ ID NO: 4507 - RNA, 19 nt, Artificial Sequence
  Description of Artificial Sequence: Synthetic oligonucleotide
  Antisense strand to SEQ ID NO: 4506
auuugccuacaauaucuaa

SEQ ID NO: 4508 - RNA, 19 nt, Artificial Sequence
  Description of Artificial Sequence: Synthetic oligonucleotide
  Sense strand starting at position 683 of SEQ ID NO: 6
cuagaagucuauuuguguu

SEQ ID NO: 4509 - RNA, 19 nt, Artificial Sequence
  Description of Artificial Sequence: Synthetic oligonucleotide
  Antisense strand to SEQ ID NO: 4508
aacacaaauagacuucuag

SEQ ID NO: 4510 - RNA, 19 nt, Artificial Sequence
  Description of Artificial Sequence: Synthetic oligonucleotide
  Sense strand starting at position 653 of SEQ ID NO: 6
gaaagaacuuaauggaaag

SEQ ID NO: 4511 - RNA, 19 nt, Artificial Sequence
  Description of Artificial Sequence: Synthetic oligonucleotide
  Antisense strand to SEQ ID NO: 4510
cuuuccauuaaguucuuuc

SEQ ID NO: 4512 - RNA, 19 nt, Artificial Sequence
  Description of Artificial Sequence: Synthetic oligonucleotide
  Sense strand starting at position 540 of SEQ ID NO: 6
uguuauugcccagacuaug

SEQ ID NO: 4513 - RNA, 19 nt, Artificial Sequence
  Description of Artificial Sequence: Synthetic oligonucleotide
  Antisense strand to SEQ ID NO: 4512
cauagucugggcaauaaca

SEQ ID NO: 4514 - RNA, 19 nt, Artificial Sequence
  Description of Artificial Sequence: Synthetic oligonucleotide
  Sense strand starting at position 538 of SEQ ID NO: 6
gcuguuauugcccagacua

SEQ ID NO: 4515 - RNA, 19 nt, Artificial Sequence
  Description of Artificial Sequence: Synthetic oligonucleotide
  Antisense strand to SEQ ID NO: 4514
uagucugggcaauaacagc

SEQ ID NO: 4516 - RNA, 19 nt, Artificial Sequence
  Description of Artificial Sequence: Synthetic oligonucleotide
  Sense strand starting at position 335 of SEQ ID NO: 6
guucuaugcccugaaacac

SEQ ID NO: 4517 - RNA, 19 nt, Artificial Sequence
  Description of Artificial Sequence: Synthetic oligonucleotide
  Antisense strand to SEQ ID NO: 4516
guguuucagggcauagaac

SEQ ID NO: 4518 - RNA, 19 nt, Artificial Sequence
  Description of Artificial Sequence: Synthetic oligonucleotide
  Sense strand starting at position 334 of SEQ ID NO: 6
uguucuaugcccugaaaca

SEQ ID NO: 4519 - RNA, 19 nt, Artificial Sequence
  Description of Artificial Sequence: Synthetic oligonucleotide
  Antisense strand to SEQ ID NO: 4518
uguuucagggcauagaaca

SEQ ID NO: 4520 - RNA, 19 nt, Artificial Sequence
  Description of Artificial Sequence: Synthetic oligonucleotide
  Sense strand starting at position 332 of SEQ ID NO: 6
ccuguucuaugcccugaaa

SEQ ID NO: 4521 - RNA, 19 nt, Artificial Sequence
  Description of Artificial Sequence: Synthetic oligonucleotide
  Antisense strand to SEQ ID NO: 4520
uuucagggcauagaacagg

SEQ ID NO: 4522 - RNA, 19 nt, Artificial Sequence
  Description of Artificial Sequence: Synthetic oligonucleotide
  Sense strand starting at position 77 of SEQ ID NO: 6
caaacugguuuaguaguua

SEQ ID NO: 4523 - RNA, 19 nt, Artificial Sequence
  Description of Artificial Sequence: Synthetic oligonucleotide
  Antisense strand to SEQ ID NO: 4522
uaacuacuaaaccaguuug

SEQ ID NO: 4524 - RNA, 19 nt, Artificial Sequence
  Description of Artificial Sequence: Synthetic oligonucleotide
  Sense strand starting at position 73 of SEQ ID NO: 6
cuuacaaacugguuuagua

SEQ ID NO: 4525 - RNA, 19 nt, Artificial Sequence
  Description of Artificial Sequence: Synthetic oligonucleotide
  Antisense strand to SEQ ID NO: 4524
uacuaaaccaguuuguaag

SEQ ID NO: 4526 - RNA, 19 nt, Artificial Sequence
  Description of Artificial Sequence: Synthetic oligonucleotide
  Sense strand starting at position 57 of SEQ ID NO: 6
agcaauaaucuauggucuu

SEQ ID NO: 4527 - RNA, 19 nt, Artificial Sequence
  Description of Artificial Sequence: Synthetic oligonucleotide
  Antisense strand to SEQ ID NO: 4526
aagaccauagauuauugcu

SEQ ID NO: 4528 - RNA, 19 nt, Artificial Sequence
  Description of Artificial Sequence: Synthetic oligonucleotide
  Sense strand starting at position 50 of SEQ ID NO: 8
uaaguauuggcugggcaua

SEQ ID NO: 4529 - RNA, 19 nt, Artificial Sequence
  Description of Artificial Sequence: Synthetic oligonucleotide
  Antisense strand to SEQ ID NO: 4528
uaugcccagccaauacuua

SEQ ID NO: 4530 - RNA, 19 nt, Artificial Sequence
  Description of Artificial Sequence: Synthetic oligonucleotide
  Sense strand starting at position 228 of SEQ ID NO: 8
ggaauucugcacugaugac

SEQ ID NO: 4531 - RNA, 19 nt, Artificial Sequence
  Description of Artificial Sequence: Synthetic oligonucleotide
  Antisense strand to SEQ ID NO: 4530
gucaucagugcagaauucc

SEQ ID NO: 4532 - RNA, 19 nt, Artificial Sequence
  Description of Artificial Sequence: Synthetic oligonucleotide
  Sense strand starting at position 330 of SEQ ID NO: 8
agucaacuuccugaaaguu

SEQ ID NO: 4533 - RNA, 19 nt, Artificial Sequence
  Description of Artificial Sequence: Synthetic oligonucleotide
  Antisense strand to SEQ ID NO: 4532
aacuuucaggaaguugacu

SEQ ID NO: 4534 - RNA, 19 nt, Artificial Sequence
  Description of Artificial Sequence: Synthetic oligonucleotide
  Sense strand starting at position 336 of SEQ ID NO: 8
cuuccugaaaguuguguua

SEQ ID NO: 4535 - RNA, 19 nt, Artificial Sequence
  Description of Artificial Sequence: Synthetic oligonucleotide
  Antisense strand to SEQ ID NO: 4534
uaacacaacuuucaggaag

SEQ ID NO: 4536 - RNA, 19 nt, Artificial Sequence
  Description of Artificial Sequence: Synthetic oligonucleotide
  Sense strand starting at position 343 of SEQ ID NO: 8
aaaguuguguuaucugaca

SEQ ID NO: 4537 - RNA, 19 nt, Artificial Sequence
  Description of Artificial Sequence: Synthetic oligonucleotide
  Antisense strand to SEQ ID NO: 4536
ugucagauaacacaacuuu

SEQ ID NO: 4538 - RNA, 19 nt, Artificial Sequence
  Description of Artificial Sequence: Synthetic oligonucleotide
  Sense strand starting at position 345 of SEQ ID NO: 8
aguuguguuaucugacaaa

SEQ ID NO: 4539 - RNA, 19 nt, Artificial Sequence
  Description of Artificial Sequence: Synthetic oligonucleotide
  Antisense strand to SEQ ID NO: 4538
uuugucagauaacacaacu

SEQ ID NO: 4540 - RNA, 19 nt, Artificial Sequence
  Description of Artificial Sequence: Synthetic oligonucleotide
  Sense strand starting at position 378 of SEQ ID NO: 8
ugagaucuacagcacgauu

SEQ ID NO: 4541 - RNA, 19 nt, Artificial Sequence
  Description of Artificial Sequence: Synthetic oligonucleotide
  Antisense strand to SEQ ID NO: 4540
aaucgugcuguagaucuca

SEQ ID NO: 4542 - RNA, 19 nt, Artificial Sequence
  Description of Artificial Sequence: Synthetic oligonucleotide
  Sense strand starting at position 880 of SEQ ID NO: 8
aaguaaaugucaguguuac

SEQ ID NO: 4543 - RNA, 19 nt, Artificial Sequence
  Description of Artificial Sequence: Synthetic oligonucleotide
  Antisense strand to SEQ ID NO: 4542
guaacacugacauuuacuu

SEQ ID NO: 4544 - RNA, 19 nt, Artificial Sequence
  Description of Artificial Sequence: Synthetic oligonucleotide
  Sense strand starting at position 881 of SEQ ID NO: 8
aguaaaugucaguguuacc

SEQ ID NO: 4545 - RNA, 19 nt, Artificial Sequence
  Description of Artificial Sequence: Synthetic oligonucleotide
  Antisense strand to SEQ ID NO: 4544
gguaacacugacauuuacu

SEQ ID NO: 4546 - RNA, 19 nt, Artificial Sequence
  Description of Artificial Sequence: Synthetic oligonucleotide
  Sense strand starting at position 891 of SEQ ID NO: 8
aguguuacccaguagcuau

SEQ ID NO: 4547 - RNA, 19 nt, Artificial Sequence
  Description of Artificial Sequence: Synthetic oligonucleotide
  Antisense strand to SEQ ID NO: 4546
auagcuacuggguaacacu

SEQ ID NO: 4548 - RNA, 19 nt, Artificial Sequence
  Description of Artificial Sequence: Synthetic oligonucleotide
  Sense strand starting at position 902 of SEQ ID NO: 8
guagcuauagucuauguca

SEQ ID NO: 4549 - RNA, 19 nt, Artificial Sequence
  Description of Artificial Sequence: Synthetic oligonucleotide
  Antisense strand to SEQ ID NO: 4548
ugacauagacuauagcuac

SEQ ID NO: 4550 - RNA, 19 nt, Artificial Sequence
  Description of Artificial Sequence: Synthetic oligonucleotide
  Sense strand starting at position 904 of SEQ ID NO: 8
agcuauagucuaugucacu

SEQ ID NO: 4551 - RNA, 19 nt, Artificial Sequence
  Description of Artificial Sequence: Synthetic oligonucleotide
  Antisense strand to SEQ ID NO: 4550
agugacauagacuauagcu

SEQ ID NO: 4552 - RNA, 19 nt, Artificial Sequence
  Description of Artificial Sequence: Synthetic oligonucleotide
  Sense strand starting at position 918 of SEQ ID NO: 8
ucacuuuccucauugguua

SEQ ID NO: 4553 - RNA, 19 nt, Artificial Sequence
  Description of Artificial Sequence: Synthetic oligonucleotide
  Antisense strand to SEQ ID NO: 4552
uaaccaaugaggaaaguga

SEQ ID NO: 4554 - RNA, 19 nt, Artificial Sequence
  Description of Artificial Sequence: Synthetic oligonucleotide
  Sense strand starting at position 921 of SEQ ID NO: 8
cuuuccucauugguuaaga

SEQ ID NO: 4555 - RNA, 19 nt, Artificial Sequence
  Description of Artificial Sequence: Synthetic oligonucleotide
  Antisense strand to SEQ ID NO: 4554
ucuuaaccaaugaggaaag

SEQ ID NO: 4556 - RNA, 19 nt, Artificial Sequence
  Description of Artificial Sequence: Synthetic oligonucleotide
  Sense strand starting at position 923 of SEQ ID NO: 8
uuccucauugguuaagaca

SEQ ID NO: 4557 - RNA, 19 nt, Artificial Sequence
  Description of Artificial Sequence: Synthetic oligonucleotide
  Antisense strand to SEQ ID NO: 4556
ugucuuaaccaaugaggaa

SEQ ID NO: 4558 - RNA, 19 nt, Artificial Sequence
  Description of Artificial Sequence: Synthetic oligonucleotide
  Sense strand starting at position 985 of SEQ ID NO: 8
aagugugugggcugggaau

SEQ ID NO: 4559 - RNA, 19 nt, Artificial Sequence
  Description of Artificial Sequence: Synthetic oligonucleotide
  Antisense strand to SEQ ID NO: 4558
auucccagcccacacacuu

SEQ ID NO: 4560 - RNA, 19 nt, Artificial Sequence
  Description of Artificial Sequence: Synthetic oligonucleotide
  Sense strand starting at position 1084 of SEQ ID NO: 8
cugcuauagagguagauca

SEQ ID NO: 4561 - RNA, 19 nt, Artificial Sequence
  Description of Artificial Sequence: Synthetic oligonucleotide
  Antisense strand to SEQ ID NO: 4560
ugaucuaccucuauagcag

SEQ ID NO: 4562 - RNA, 19 nt, Artificial Sequence
  Description of Artificial Sequence: Synthetic oligonucleotide
  Sense strand starting at position 1091 of SEQ ID NO: 8
agagguagaucagagauuu

SEQ ID NO: 4563 - RNA, 19 nt, Artificial Sequence
  Description of Artificial Sequence: Synthetic oligonucleotide
  Antisense strand to SEQ ID NO: 4562
aaaucucugaucuaccucu

SEQ ID NO: 4564 - RNA, 19 nt, Artificial Sequence
  Description of Artificial Sequence: Synthetic oligonucleotide
  Sense strand starting at position 1399 of SEQ ID NO: 8
uuagaaauuugucagguag

SEQ ID NO: 4565 - RNA, 19 nt, Artificial Sequence
  Description of Artificial Sequence: Synthetic oligonucleotide
  Antisense strand to SEQ ID NO: 4564
cuaccugacaaauuucuaa

SEQ ID NO: 4566 - RNA, 19 nt, Artificial Sequence
  Description of Artificial Sequence: Synthetic oligonucleotide
  Sense strand starting at position 1497 of SEQ ID NO: 8
acuuuaucugacuguauau

SEQ ID NO: 4567 - RNA, 19 nt, Artificial Sequence
  Description of Artificial Sequence: Synthetic oligonucleotide
  Antisense strand to SEQ ID NO: 4566
auauacagucagauaaagu

SEQ ID NO: 4568 - RNA, 19 nt, Artificial Sequence
  Description of Artificial Sequence: Synthetic oligonucleotide
  Sense strand starting at position 1670 of SEQ ID NO: 8
aguauuuauugagauccua

SEQ ID NO: 4569 - RNA, 19 nt, Artificial Sequence
  Description of Artificial Sequence: Synthetic oligonucleotide
  Antisense strand to SEQ ID NO: 4568
uaggaucucaauaaauacu

SEQ ID NO: 4570 - RNA, 19 nt, Artificial Sequence
  Description of Artificial Sequence: Synthetic oligonucleotide
  Sense strand starting at position 1681 of SEQ ID NO: 8
agauccuacuaugagauau

SEQ ID NO: 4571 - RNA, 19 nt, Artificial Sequence
  Description of Artificial Sequence: Synthetic oligonucleotide
  Antisense strand to SEQ ID NO: 4570
auaucucauaguaggaucu

SEQ ID NO: 4572 - RNA, 19 nt, Artificial Sequence
  Description of Artificial Sequence: Synthetic oligonucleotide
  Sense strand starting at position 1793 of SEQ ID NO: 8
ugauuaaugugguuaucaa

SEQ ID NO: 4573 - RNA, 19 nt, Artificial Sequence
  Description of Artificial Sequence: Synthetic oligonucleotide
  Antisense strand to SEQ ID NO: 4572
uugauaaccacauuaauca

SEQ ID NO: 4574 - RNA, 19 nt, Artificial Sequence
  Description of Artificial Sequence: Synthetic oligonucleotide
  Sense strand starting at position 1842 of SEQ ID NO: 8
accuguuaagucggguaga

SEQ ID NO: 4575 - RNA, 19 nt, Artificial Sequence
  Description of Artificial Sequence: Synthetic oligonucleotide
  Antisense strand to SEQ ID NO: 4574
ucuacccgacuuaacaggu

SEQ ID NO: 4576 - RNA, 19 nt, Artificial Sequence
  Description of Artificial Sequence: Synthetic oligonucleotide
  Sense strand starting at position 1845 of SEQ ID NO: 8
uguuaagucggguagagca

SEQ ID NO: 4577 - RNA, 19 nt, Artificial Sequence
  Description of Artificial Sequence: Synthetic oligonucleotide
  Antisense strand to SEQ ID NO: 4576
ugcucuacccgacuuaaca

SEQ ID NO: 4578 - RNA, 19 nt, Artificial Sequence
  Description of Artificial Sequence: Synthetic oligonucleotide
  Sense strand starting at position 1979 of SEQ ID NO: 8
uuaaacuguucuguguaaa

SEQ ID NO: 4579 - RNA, 19 nt, Artificial Sequence
  Description of Artificial Sequence: Synthetic oligonucleotide
  Antisense strand to SEQ ID NO: 4578
uuuacacagaacaguuuaa

SEQ ID NO: 4580 - RNA, 19 nt, Artificial Sequence
  Description of Artificial Sequence: Synthetic oligonucleotide
  Sense strand starting at position 1982 of SEQ ID NO: 8
aacuguucuguguaaagag

SEQ ID NO: 4581 - RNA, 19 nt, Artificial Sequence
  Description of Artificial Sequence: Synthetic oligonucleotide
  Antisense strand to SEQ ID NO: 4580
cucuuuacacagaacaguu

SEQ ID NO: 4582 - RNA, 19 nt, Artificial Sequence
  Description of Artificial Sequence: Synthetic oligonucleotide
  Sense strand starting at position 2158 of SEQ ID NO: 8
aagacugagucagaaugga

SEQ ID NO: 4583 - RNA, 19 nt, Artificial Sequence
  Description of Artificial Sequence: Synthetic oligonucleotide
  Antisense strand to SEQ ID NO: 4582
uccauucugacucagucuu

SEQ ID NO: 4584 - RNA, 19 nt, Artificial Sequence
  Description of Artificial Sequence: Synthetic oligonucleotide
  Sense strand starting at position 2162 of SEQ ID NO: 8
cugagucagaauggaguua

SEQ ID NO: 4585 - RNA, 19 nt, Artificial Sequence
  Description of Artificial Sequence: Synthetic oligonucleotide
  Antisense strand to SEQ ID NO: 4584
uaacuccauucugacucag

SEQ ID NO: 4586 - RNA, 19 nt, Artificial Sequence
  Description of Artificial Sequence: Synthetic oligonucleotide
  Sense strand starting at position 2453 of SEQ ID NO: 8
aagaaauagcugugaucug

SEQ ID NO: 4587 - RNA, 19 nt, Artificial Sequence
  Description of Artificial Sequence: Synthetic oligonucleotide
  Antisense strand to SEQ ID NO: 4586
cagaucacagcuauuucuu

SEQ ID NO: 4588 - RNA, 19 nt, Artificial Sequence
  Description of Artificial Sequence: Synthetic oligonucleotide
  Sense strand starting at position 2517 of SEQ ID NO: 8
cuggcucuauagcuuaaua

SEQ ID NO: 4589 - RNA, 19 nt, Artificial Sequence
  Description of Artificial Sequence: Synthetic oligonucleotide
  Antisense strand to SEQ ID NO: 4588
uauuaagcuauagagccag

SEQ ID NO: 4590 - RNA, 19 nt, Artificial Sequence
  Description of Artificial Sequence: Synthetic oligonucleotide
  Sense strand starting at position 2519 of SEQ ID NO: 8
ggcucuauagcuuaauaaa

SEQ ID NO: 4591 - RNA, 19 nt, Artificial Sequence
  Description of Artificial Sequence: Synthetic oligonucleotide
  Antisense strand to SEQ ID NO: 4590
uuuauuaagcuauagagcc

SEQ ID NO: 4592 - RNA, 19 nt, Artificial Sequence
  Description of Artificial Sequence: Synthetic oligonucleotide
  Sense strand starting at position 3386 of SEQ ID NO: 8
aagaguguuuguuuaacug

SEQ ID NO: 4593 - RNA, 19 nt, Artificial Sequence
  Description of Artificial Sequence: Synthetic oligonucleotide
  Antisense strand to SEQ ID NO: 4592
caguuaaacaaacacucuu

SEQ ID NO: 4594 - RNA, 19 nt, Artificial Sequence
  Description of Artificial Sequence: Synthetic oligonucleotide
  Sense strand starting at position 3395 of SEQ ID NO: 8
uguuuaacuguguaucuga

SEQ ID NO: 4595 - RNA, 19 nt, Artificial Sequence
  Description of Artificial Sequence: Synthetic oligonucleotide
  Antisense strand to SEQ ID NO: 4594
ucagauacacaguuaaaca

SEQ ID NO: 4596 - RNA, 19 nt, Artificial Sequence
  Description of Artificial Sequence: Synthetic oligonucleotide
  Sense strand starting at position 3398 of SEQ ID NO: 8
uuaacuguguaucugagaa

SEQ ID NO: 4597 - RNA, 19 nt, Artificial Sequence
  Description of Artificial Sequence: Synthetic oligonucleotide
  Antisense strand to SEQ ID NO: 4596
uucucagauacacaguuaa

SEQ ID NO: 4598 - RNA, 19 nt, Artificial Sequence
  Description of Artificial Sequence: Synthetic oligonucleotide
  Sense strand starting at position 3466 of SEQ ID NO: 8
ccuguucuaggucaauaua

SEQ ID NO: 4599 - RNA, 19 nt, Artificial Sequence
  Description of Artificial Sequence: Synthetic oligonucleotide
  Antisense strand to SEQ ID NO: 4598
uauauugaccuagaacagg

SEQ ID NO: 4600 - RNA, 19 nt, Artificial Sequence
  Description of Artificial Sequence: Synthetic oligonucleotide
  Sense strand starting at position 3469 of SEQ ID NO: 8
guucuaggucaauauaagu

SEQ ID NO: 4601 - RNA, 19 nt, Artificial Sequence
  Description of Artificial Sequence: Synthetic oligonucleotide
  Antisense strand to SEQ ID NO: 4600
acuuauauugaccuagaac

SEQ ID NO: 4602 - RNA, 19 nt, Artificial Sequence
  Description of Artificial Sequence: Synthetic oligonucleotide
  Sense strand starting at position 3494 of SEQ ID NO: 8
guaagauaauaggaugaca

SEQ ID NO: 4603 - RNA, 19 nt, Artificial Sequence
  Description of Artificial Sequence: Synthetic oligonucleotide
  Antisense strand to SEQ ID NO: 4602
ugucauccuauuaucuuac

SEQ ID NO: 4604 - RNA, 19 nt, Artificial Sequence
  Description of Artificial Sequence: Synthetic oligonucleotide
  Sense strand starting at position 3744 of SEQ ID NO: 8
auaucucauucuccggauu

SEQ ID NO: 4605 - RNA, 19 nt, Artificial Sequence
  Description of Artificial Sequence: Synthetic oligonucleotide
  Antisense strand to SEQ ID NO: 4604
aauccggagaaugagauau

SEQ ID NO: 4606 - RNA, 19 nt, Artificial Sequence
  Description of Artificial Sequence: Synthetic oligonucleotide
  Sense strand starting at position 3747 of SEQ ID NO: 8
ucucauucuccggauuaua

SEQ ID NO: 4607 - RNA, 19 nt, Artificial Sequence
  Description of Artificial Sequence: Synthetic oligonucleotide
  Antisense strand to SEQ ID NO: 4606
uauaauccggagaaugaga

SEQ ID NO: 4608 - RNA, 19 nt, Artificial Sequence
  Description of Artificial Sequence: Synthetic oligonucleotide
  Sense strand starting at position 894 of SEQ ID NO: 7
cucagaauuguguguccua

SEQ ID NO: 4609 - RNA, 19 nt, Artificial Sequence
  Description of Artificial Sequence: Synthetic oligonucleotide
  Antisense strand to SEQ ID NO: 4608
uaggacacacaauucugag

SEQ ID NO: 4610 - RNA, 19 nt, Artificial Sequence
  Description of Artificial Sequence: Synthetic oligonucleotide
  Sense strand starting at position 895 of SEQ ID NO: 7
ucagaauuguguguccuac

SEQ ID NO: 4611 - RNA, 19 nt, Artificial Sequence
  Description of Artificial Sequence: Synthetic oligonucleotide
  Antisense strand to SEQ ID NO: 4610
guaggacacacaauucuga

SEQ ID NO: 4612 - RNA, 19 nt, Artificial Sequence
  Description of Artificial Sequence: Synthetic oligonucleotide
  Sense strand starting at position 897 of SEQ ID NO: 7
agaauuguguguccuacuc

SEQ ID NO: 4613 - RNA, 19 nt, Artificial Sequence
  Description of Artificial Sequence: Synthetic oligonucleotide
  Antisense strand to SEQ ID NO: 4612
gaguaggacacacaauucu

SEQ ID NO: 4614 - RNA, 19 nt, Artificial Sequence
  Description of Artificial Sequence: Synthetic oligonucleotide
  Sense strand starting at position 1177 of SEQ ID NO: 7
ucacuaacgacggguuuau

SEQ ID NO: 4615 - RNA, 19 nt, Artificial Sequence
  Description of Artificial Sequence: Synthetic oligonucleotide
  Antisense strand to SEQ ID NO: 4614
auaaacccgucguuaguga

SEQ ID NO: 4616 - RNA, 19 nt, Artificial Sequence
  Description of Artificial Sequence: Synthetic oligonucleotide
  Sense strand starting at position 1276 of SEQ ID NO: 7
cgcauagucccgucccaga

SEQ ID NO: 4617 - RNA, 19 nt, Artificial Sequence
  Description of Artificial Sequence: Synthetic oligonucleotide
  Antisense strand to SEQ ID NO: 4616
ucugggacgggacuaugcg

SEQ ID NO: 4618 - RNA, 19 nt, Artificial Sequence
  Description of Artificial Sequence: Synthetic oligonucleotide
  Sense strand starting at position 1553 of SEQ ID NO: 7
ucaccaugcugggugaaga

SEQ ID NO: 4619 - RNA, 19 nt, Artificial Sequence
  Description of Artificial Sequence: Synthetic oligonucleotide
  Antisense strand to SEQ ID NO: 4618
ucuucacccagcaugguga

SEQ ID NO: 4620 - RNA, 19 nt, Artificial Sequence
  Description of Artificial Sequence: Synthetic oligonucleotide
  Sense strand starting at position 1554 of SEQ ID NO: 7
caccaugcugggugaagau

SEQ ID NO: 4621 - RNA, 19 nt, Artificial Sequence
  Description of Artificial Sequence: Synthetic oligonucleotide
  Antisense strand to SEQ ID NO: 4620
aucuucacccagcauggug

SEQ ID NO: 4622 - RNA, 19 nt, Artificial Sequence
  Description of Artificial Sequence: Synthetic oligonucleotide
  Sense strand starting at position 2425 of SEQ ID NO: 7
uuuauuugguccuugccau

SEQ ID NO: 4623 - RNA, 19 nt, Artificial Sequence
  Description of Artificial Sequence: Synthetic oligonucleotide
  Antisense strand to SEQ ID NO: 4622
auggcaaggaccaaauaaa

SEQ ID NO: 4624 - RNA, 19 nt, Artificial Sequence
  Description of Artificial Sequence: Synthetic oligonucleotide
  Sense strand starting at position 2498 of SEQ ID NO: 7
gcagcaggccuccaguaaa

SEQ ID NO: 4625 - RNA, 19 nt, Artificial Sequence
  Description of Artificial Sequence: Synthetic oligonucleotide
  Antisense strand to SEQ ID NO: 4624
uuuacuggaggccugcugc

SEQ ID NO: 4626 - RNA, 19 nt, Artificial Sequence
  Description of Artificial Sequence: Synthetic oligonucleotide
  Sense strand starting at position 2724 of SEQ ID NO: 7
aguuucuguuuccuuacaa

SEQ ID NO: 4627 - RNA, 19 nt, Artificial Sequence
  Description of Artificial Sequence: Synthetic oligonucleotide
  Antisense strand to SEQ ID NO: 4626
uuguaaggaaacagaaacu

SEQ ID NO: 4628 - RNA, 19 nt, Artificial Sequence
  Description of Artificial Sequence: Synthetic oligonucleotide
  Sense strand starting at position 2725 of SEQ ID NO: 7
guuucuguuuccuuacaau

SEQ ID NO: 4629 - RNA, 19 nt, Artificial Sequence
  Description of Artificial Sequence: Synthetic oligonucleotide
  Antisense strand to SEQ ID NO: 4628
auuguaaggaaacagaaac

SEQ ID NO: 4630 - RNA, 19 nt, Artificial Sequence
  Description of Artificial Sequence: Synthetic oligonucleotide
  Sense strand starting at position 2735 of SEQ ID NO: 7
ccuuacaaugccugacagu

SEQ ID NO: 4631 - RNA, 19 nt, Artificial Sequence
  Description of Artificial Sequence: Synthetic oligonucleotide
  Antisense strand to SEQ ID NO: 4630
acugucaggcauuguaagg

SEQ ID NO: 4632 - RNA, 19 nt, Artificial Sequence
  Description of Artificial Sequence: Synthetic oligonucleotide
  Sense strand starting at position 2736 of SEQ ID NO: 7
cuuacaaugccugacagua

SEQ ID NO: 4633 - RNA, 19 nt, Artificial Sequence
  Description of Artificial Sequence: Synthetic oligonucleotide
  Antisense strand to SEQ ID NO: 4632
uacugucaggcauuguaag

SEQ ID NO: 4634 - RNA, 19 nt, Artificial Sequence
  Description of Artificial Sequence: Synthetic oligonucleotide
  Sense strand starting at position 2741 of SEQ ID NO: 7
aaugccugacaguaaaguu

SEQ ID NO: 4635 - RNA, 19 nt, Artificial Sequence
  Description of Artificial Sequence: Synthetic oligonucleotide
  Antisense strand to SEQ ID NO: 4634
aacuuuacugucaggcauu

SEQ ID NO: 4636 - RNA, 19 nt, Artificial Sequence
  Description of Artificial Sequence: Synthetic oligonucleotide
  Sense strand starting at position 2845 of SEQ ID NO: 7
cccuguuucugagucagaa

SEQ ID NO: 4637 - RNA, 19 nt, Artificial Sequence
  Description of Artificial Sequence: Synthetic oligonucleotide
  Antisense strand to SEQ ID NO: 4636
uucugacucagaaacaggg

SEQ ID NO: 4638 - RNA, 19 nt, Artificial Sequence
  Description of Artificial Sequence: Synthetic oligonucleotide
  Sense strand starting at position 2877 of SEQ ID NO: 7
gcuuaugcagucuaaagag

SEQ ID NO: 4639 - RNA, 19 nt, Artificial Sequence
  Description of Artificial Sequence: Synthetic oligonucleotide
  Antisense strand to SEQ ID NO: 4638
cucuuuagacugcauaagc

SEQ ID NO: 4640 - RNA, 19 nt, Artificial Sequence
  Description of Artificial Sequence: Synthetic oligonucleotide
  Sense strand starting at position 3017 of SEQ ID NO: 7
ucuugaucauucuccuguu

SEQ ID NO: 4641 - RNA, 19 nt, Artificial Sequence
  Description of Artificial Sequence: Synthetic oligonucleotide
  Antisense strand to SEQ ID NO: 4640
aacaggagaaugaucaaga

SEQ ID NO: 4642 - RNA, 19 nt, Artificial Sequence
  Description of Artificial Sequence: Synthetic oligonucleotide
  Sense strand starting at position 3018 of SEQ ID NO: 7
cuugaucauucuccuguua

SEQ ID NO: 4643 - RNA, 19 nt, Artificial Sequence
  Description of Artificial Sequence: Synthetic oligonucleotide
  Antisense strand to SEQ ID NO: 4642
uaacaggagaaugaucaag

SEQ ID NO: 4644 - RNA, 19 nt, Artificial Sequence
  Description of Artificial Sequence: Synthetic oligonucleotide
  Sense strand starting at position 3069 of SEQ ID NO: 7
guaucaguuaauggaggua

SEQ ID NO: 4645 - RNA, 19 nt, Artificial Sequence
  Description of Artificial Sequence: Synthetic oligonucleotide
  Antisense strand to SEQ ID NO: 4644
uaccuccauuaacugauac

SEQ ID NO: 4646 - RNA, 19 nt, Artificial Sequence
  Description of Artificial Sequence: Synthetic oligonucleotide
  Sense strand starting at position 3082 of SEQ ID NO: 7
gagguacuacacugaaauu

SEQ ID NO: 4647 - RNA, 19 nt, Artificial Sequence
  Description of Artificial Sequence: Synthetic oligonucleotide
  Antisense strand to SEQ ID NO: 4646
aauuucaguguaguaccuc

SEQ ID NO: 4648 - RNA, 19 nt, Artificial Sequence
  Description of Artificial Sequence: Synthetic oligonucleotide
  Sense strand starting at position 3231 of SEQ ID NO: 7
ugaaccauccacugacgua

SEQ ID NO: 4649 - RNA, 19 nt, Artificial Sequence
  Description of Artificial Sequence: Synthetic oligonucleotide
  Antisense strand to SEQ ID NO: 4648
uacgucaguggaugguuca

SEQ ID NO: 4650 - RNA, 19 nt, Artificial Sequence
  Description of Artificial Sequence: Synthetic oligonucleotide
  Sense strand starting at position 3339 of SEQ ID NO: 7
acggaaacacuauguguaa

SEQ ID NO: 4651 - RNA, 19 nt, Artificial Sequence
  Description of Artificial Sequence: Synthetic oligonucleotide
  Antisense strand to SEQ ID NO: 4650
uuacacauaguguuuccgu

SEQ ID NO: 4652 - RNA, 19 nt, Artificial Sequence
  Description of Artificial Sequence: Synthetic oligonucleotide
  Sense strand starting at position 3340 of SEQ ID NO: 7
cggaaacacuauguguaaa

SEQ ID NO: 4653 - RNA, 19 nt, Artificial Sequence
  Description of Artificial Sequence: Synthetic oligonucleotide
  Antisense strand to SEQ ID NO: 4652
uuuacacauaguguuuccg

SEQ ID NO: 4654 - RNA, 19 nt, Artificial Sequence
  Description of Artificial Sequence: Synthetic oligonucleotide
  Sense strand starting at position 3350 of SEQ ID NO: 7
auguguaaacacuggauaa

SEQ ID NO: 4655 - RNA, 19 nt, Artificial Sequence
  Description of Artificial Sequence: Synthetic oligonucleotide
  Antisense strand to SEQ ID NO: 4654
uuauccaguguuuacacau

SEQ ID NO: 4656 - RNA, 19 nt, Artificial Sequence
  Description of Artificial Sequence: Synthetic oligonucleotide
  Sense strand starting at position 3388 of SEQ ID NO: 7
gauuaaaguuucccugugu

SEQ ID NO: 4657 - RNA, 19 nt, Artificial Sequence
  Description of Artificial Sequence: Synthetic oligonucleotide
  Antisense strand to SEQ ID NO: 4656
acacagggaaacuuuaauc

SEQ ID NO: 4658 - RNA, 19 nt, Artificial Sequence
  Description of Artificial Sequence: Synthetic oligonucleotide
  Sense strand starting at position 3473 of SEQ ID NO: 7
ggauaaagaugucacagag

SEQ ID NO: 4659 - RNA, 19 nt, Artificial Sequence
  Description of Artificial Sequence: Synthetic oligonucleotide
  Antisense strand to SEQ ID NO: 4658
cucugugacaucuuuaucc

SEQ ID NO: 4660 - RNA, 19 nt, Artificial Sequence
  Description of Artificial Sequence: Synthetic oligonucleotide
  Sense strand starting at position 3491 of SEQ ID NO: 7
gccggaauuugguuuacug

SEQ ID NO: 4661 - RNA, 19 nt, Artificial Sequence
  Description of Artificial Sequence: Synthetic oligonucleotide
  Antisense strand to SEQ ID NO: 4660
caguaaaccaaauuccggc

SEQ ID NO: 4662 - RNA, 19 nt, Artificial Sequence
  Description of Artificial Sequence: Synthetic oligonucleotide
  Sense strand starting at position 3499 of SEQ ID NO: 7
uugguuuacuguuugauuu

SEQ ID NO: 4663 - RNA, 19 nt, Artificial Sequence
  Description of Artificial Sequence: Synthetic oligonucleotide
  Antisense strand to SEQ ID NO: 4662
aaaucaaacaguaaaccaa

SEQ ID NO: 4664 - RNA, 19 nt, Artificial Sequence
  Description of Artificial Sequence: Synthetic oligonucleotide
  Sense strand starting at position 3544 of SEQ ID NO: 7
gggauaaugguuugguuuc

SEQ ID NO: 4665 - RNA, 19 nt, Artificial Sequence
  Description of Artificial Sequence: Synthetic oligonucleotide
  Antisense strand to SEQ ID NO: 4664
gaaaccaaaccauuauccc

SEQ ID NO: 4666 - RNA, 19 nt, Artificial Sequence
  Description of Artificial Sequence: Synthetic oligonucleotide
  Sense strand starting at position 3681 of SEQ ID NO: 7
gguggaacauuucacguaa

SEQ ID NO: 4667 - RNA, 19 nt, Artificial Sequence
  Description of Artificial Sequence: Synthetic oligonucleotide
  Antisense strand to SEQ ID NO: 4666
uuacgugaaauguuccacc

SEQ ID NO: 4668 - RNA, 19 nt, Artificial Sequence
  Description of Artificial Sequence: Synthetic oligonucleotide
  Sense strand starting at position 3692 of SEQ ID NO: 7
ucacguaaguacuuaacau

SEQ ID NO: 4669 - RNA, 19 nt, Artificial Sequence
  Description of Artificial Sequence: Synthetic oligonucleotide
  Antisense strand to SEQ ID NO: 4668
auguuaaguacuuacguga

SEQ ID NO: 4670 - RNA, 19 nt, Artificial Sequence
  Description of Artificial Sequence: Synthetic oligonucleotide
  Sense strand starting at position 3762 of SEQ ID NO: 7
aagcuauguguauaaaggu

SEQ ID NO: 4671 - RNA, 19 nt, Artificial Sequence
  Description of Artificial Sequence: Synthetic oligonucleotide
  Antisense strand to SEQ ID NO: 4670
accuuuauacacauagcuu

SEQ ID NO: 4672 - RNA, 19 nt, Artificial Sequence
  Description of Artificial Sequence: Synthetic oligonucleotide
  Sense strand starting at position 3768 of SEQ ID NO: 7
uguguauaaagguguauau

SEQ ID NO: 4673 - RNA, 19 nt, Artificial Sequence
  Description of Artificial Sequence: Synthetic oligonucleotide
  Antisense strand to SEQ ID NO: 4672
auauacaccuuuauacaca

SEQ ID NO: 4674 - RNA, 19 nt, Artificial Sequence
  Description of Artificial Sequence: Synthetic oligonucleotide
  Sense strand starting at position 3770 of SEQ ID NO: 7
uguauaaagguguauauga

SEQ ID NO: 4675 - RNA, 19 nt, Artificial Sequence
  Description of Artificial Sequence: Synthetic oligonucleotide
  Antisense strand to SEQ ID NO: 4674
ucauauacaccuuuauaca

SEQ ID NO: 4676 - RNA, 19 nt, Artificial Sequence
  Description of Artificial Sequence: Synthetic oligonucleotide
  Sense strand starting at position 3847 of SEQ ID NO: 7
guguguaaauauucccaaa

SEQ ID NO: 4677 - RNA, 19 nt, Artificial Sequence
  Description of Artificial Sequence: Synthetic oligonucleotide
  Antisense strand to SEQ ID NO: 4676
uuugggaauauuuacacac

SEQ ID NO: 4678 - RNA, 19 nt, Artificial Sequence
  Description of Artificial Sequence: Synthetic oligonucleotide
  Sense strand starting at position 3849 of SEQ ID NO: 7
guguaaauauucccaaauc

SEQ ID NO: 4679 - RNA, 19 nt, Artificial Sequence
  Description of Artificial Sequence: Synthetic oligonucleotide
  Antisense strand to SEQ ID NO: 4678
gauuugggaauauuuacac

SEQ ID NO: 4680 - RNA, 19 nt, Artificial Sequence
  Description of Artificial Sequence: Synthetic oligonucleotide
  Sense strand starting at position 3872 of SEQ ID NO: 7
acacuugugguccgaacau

SEQ ID NO: 4681 - RNA, 19 nt, Artificial Sequence
  Description of Artificial Sequence: Synthetic oligonucleotide
  Antisense strand to SEQ ID NO: 4680
auguucggaccacaagugu

SEQ ID NO: 4682 - RNA, 19 nt, Artificial Sequence
  Description of Artificial Sequence: Synthetic oligonucleotide
  Sense strand starting at position 3882 of SEQ ID NO: 7
uccgaacauuucugauaag

SEQ ID NO: 4683 - RNA, 19 nt, Artificial Sequence
  Description of Artificial Sequence: Synthetic oligonucleotide
  Antisense strand to SEQ ID NO: 4682
cuuaucagaaauguucgga

SEQ ID NO: 4684 - RNA, 19 nt, Artificial Sequence
  Description of Artificial Sequence: Synthetic oligonucleotide
  Sense strand starting at position 3885 of SEQ ID NO: 7
gaacauuucugauaagggc

SEQ ID NO: 4685 - RNA, 19 nt, Artificial Sequence
  Description of Artificial Sequence: Synthetic oligonucleotide
  Antisense strand to SEQ ID NO: 4684
gcccuuaucagaaauguuc

SEQ ID NO: 4686 - RNA, 19 nt, Artificial Sequence
  Description of Artificial Sequence: Synthetic oligonucleotide
  Sense strand starting at position 3969 of SEQ ID NO: 7
auaacuuggcccugauacu

SEQ ID NO: 4687 - RNA, 19 nt, Artificial Sequence
  Description of Artificial Sequence: Synthetic oligonucleotide
  Antisense strand to SEQ ID NO: 4686
aguaucagggccaaguuau

SEQ ID NO: 4688 - RNA, 19 nt, Artificial Sequence
  Description of Artificial Sequence: Synthetic oligonucleotide
  Sense strand starting at position 3974 of SEQ ID NO: 9
uucggccuccaauauguua

SEQ ID NO: 4689 - RNA, 19 nt, Artificial Sequence
  Description of Artificial Sequence: Synthetic oligonucleotide
  Antisense strand to SEQ ID NO: 4688
uaacauauuggaggccgaa

SEQ ID NO: 4690 - RNA, 19 nt, Artificial Sequence
  Description of Artificial Sequence: Synthetic oligonucleotide
  Sense strand starting at position 3887 of SEQ ID NO: 9
gccaacguucugcauuuau

SEQ ID NO: 4691 - RNA, 19 nt, Artificial Sequence
  Description of Artificial Sequence: Synthetic oligonucleotide
  Antisense strand to SEQ ID NO: 4690
auaaaugcagaacguuggc

SEQ ID NO: 4692 - RNA, 19 nt, Artificial Sequence
  Description of Artificial Sequence: Synthetic oligonucleotide
  Sense strand starting at position 3872 of SEQ ID NO: 9
gcaguuugucaguucgcca

SEQ ID NO: 4693 - RNA, 19 nt, Artificial Sequence
  Description of Artificial Sequence: Synthetic oligonucleotide
  Antisense strand to SEQ ID NO: 4692
uggcgaacugacaaacugc

SEQ ID NO: 4694 - RNA, 19 nt, Artificial Sequence
  Description of Artificial Sequence: Synthetic oligonucleotide
  Sense strand starting at position 3554 of SEQ ID NO: 9
ugagaccaucauugugaga

SEQ ID NO: 4695 - RNA, 19 nt, Artificial Sequence
  Description of Artificial Sequence: Synthetic oligonucleotide
  Antisense strand to SEQ ID NO: 4694
ucucacaaugauggucuca

SEQ ID NO: 4696 - RNA, 19 nt, Artificial Sequence
  Description of Artificial Sequence: Synthetic oligonucleotide
  Sense strand starting at position 3514 of SEQ ID NO: 9
acuugagaccaucguuaca

SEQ ID NO: 4697 - RNA, 19 nt, Artificial Sequence
  Description of Artificial Sequence: Synthetic oligonucleotide
  Antisense strand to SEQ ID NO: 4696
uguaacgauggucucaagu

SEQ ID NO: 4698 - RNA, 19 nt, Artificial Sequence
  Description of Artificial Sequence: Synthetic oligonucleotide
  Sense strand starting at position 3473 of SEQ ID NO: 9
gauaucaaagaauguuagu

SEQ ID NO: 4699 - RNA, 19 nt, Artificial Sequence
  Description of Artificial Sequence: Synthetic oligonucleotide
  Antisense strand to SEQ ID NO: 4698
acuaacauucuuugauauc

SEQ ID NO: 4700 - RNA, 19 nt, Artificial Sequence
  Description of Artificial Sequence: Synthetic oligonucleotide
  Sense strand starting at position 3456 of SEQ ID NO: 9
cuuuauuacggccaacaga

SEQ ID NO: 4701 - RNA, 19 nt, Artificial Sequence
  Description of Artificial Sequence: Synthetic oligonucleotide
  Antisense strand to SEQ ID NO: 4700
ucuguuggccguaauaaag

SEQ ID NO: 4702 - RNA, 19 nt, Artificial Sequence
  Description of Artificial Sequence: Synthetic oligonucleotide
  Sense strand starting at position 3121 of SEQ ID NO: 9
uagucuugccacgagagca

SEQ ID NO: 4703 - RNA, 19 nt, Artificial Sequence
  Description of Artificial Sequence: Synthetic oligonucleotide
  Antisense strand to SEQ ID NO: 4702
ugcucucguggcaagacua

SEQ ID NO: 4704 - RNA, 19 nt, Artificial Sequence
  Description of Artificial Sequence: Synthetic oligonucleotide
  Sense strand starting at position 3116 of SEQ ID NO: 9
gcuaguagucuugccacga

SEQ ID NO: 4705 - RNA, 19 nt, Artificial Sequence
  Description of Artificial Sequence: Synthetic oligonucleotide
  Antisense strand to SEQ ID NO: 4704
ucguggcaagacuacuagc

SEQ ID NO: 4706 - RNA, 19 nt, Artificial Sequence
  Description of Artificial Sequence: Synthetic oligonucleotide
  Sense strand starting at position 3031 of SEQ ID NO: 9
gggcgcucaguguugcaaa

SEQ ID NO: 4707 - RNA, 19 nt, Artificial Sequence
  Description of Artificial Sequence: Synthetic oligonucleotide
  Antisense strand to SEQ ID NO: 4706
uuugcaacacugagcgccc

SEQ ID NO: 4708 - RNA, 19 nt, Artificial Sequence
  Description of Artificial Sequence: Synthetic oligonucleotide
  Sense strand starting at position 2624 of SEQ ID NO: 9
gggauaaagagcugaguuu

SEQ ID NO: 4709 - RNA, 19 nt, Artificial Sequence
  Description of Artificial Sequence: Synthetic oligonucleotide
  Antisense strand to SEQ ID NO: 4708
aaacucagcucuuuauccc

SEQ ID NO: 4710 - RNA, 19 nt, Artificial Sequence
  Description of Artificial Sequence: Synthetic oligonucleotide
  Sense strand starting at position 2575 of SEQ ID NO: 9
uuaauuaagcgcuauauuc

SEQ ID NO: 4711 - RNA, 19 nt, Artificial Sequence
  Description of Artificial Sequence: Synthetic oligonucleotide
  Antisense strand to SEQ ID NO: 4710
gaauauagcgcuuaauuaa

SEQ ID NO: 4712 - RNA, 19 nt, Artificial Sequence
  Description of Artificial Sequence: Synthetic oligonucleotide
  Sense strand starting at position 2519 of SEQ ID NO: 9
ccuacuuugucuucuggga

SEQ ID NO: 4713 - RNA, 19 nt, Artificial Sequence
  Description of Artificial Sequence: Synthetic oligonucleotide
  Antisense strand to SEQ ID NO: 4712
ucccagaagacaaaguagg

SEQ ID NO: 4714 - RNA, 19 nt, Artificial Sequence
  Description of Artificial Sequence: Synthetic oligonucleotide
  Sense strand starting at position 2353 of SEQ ID NO: 9
ggaauucuaccuggaguca

SEQ ID NO: 4715 - RNA, 19 nt, Artificial Sequence
  Description of Artificial Sequence: Synthetic oligonucleotide
  Antisense strand to SEQ ID NO: 4714
ugacuccagguagaauucc

SEQ ID NO: 4716 - RNA, 19 nt, Artificial Sequence
  Description of Artificial Sequence: Synthetic oligonucleotide
  Sense strand starting at position 2352 of SEQ ID NO: 9
aggaauucuaccuggaguc

SEQ ID NO: 4717 - RNA, 19 nt, Artificial Sequence
  Description of Artificial Sequence: Synthetic oligonucleotide
  Antisense strand to SEQ ID NO: 4716
gacuccagguagaauuccu

SEQ ID NO: 4718 - RNA, 19 nt, Artificial Sequence
  Description of Artificial Sequence: Synthetic oligonucleotide
  Sense strand starting at position 2351 of SEQ ID NO: 9
gaggaauucuaccuggagu

SEQ ID NO: 4719 - RNA, 19 nt, Artificial Sequence
  Description of Artificial Sequence: Synthetic oligonucleotide
  Antisense strand to SEQ ID NO: 4718
acuccagguagaauuccuc

SEQ ID NO: 4720 - RNA, 19 nt, Artificial Sequence
  Description of Artificial Sequence: Synthetic oligonucleotide
  Sense strand starting at position 2337 of SEQ ID NO: 9
gugaaugucucccugagga

SEQ ID NO: 4721 - RNA, 19 nt, Artificial Sequence
  Description of Artificial Sequence: Synthetic oligonucleotide
  Antisense strand to SEQ ID NO: 4720
uccucagggagacauucac

SEQ ID NO: 4722 - RNA, 19 nt, Artificial Sequence
  Description of Artificial Sequence: Synthetic oligonucleotide
  Sense strand starting at position 2326 of SEQ ID NO: 9
gaaugauggaagugaaugu

SEQ ID NO: 4723 - RNA, 19 nt, Artificial Sequence
  Description of Artificial Sequence: Synthetic oligonucleotide
  Antisense strand to SEQ ID NO: 4722
acauucacuuccaucauuc

SEQ ID NO: 4724 - RNA, 19 nt, Artificial Sequence
  Description of Artificial Sequence: Synthetic oligonucleotide
  Sense strand starting at position 2317 of SEQ ID NO: 9
ugguucagcgaaugaugga

SEQ ID NO: 4725 - RNA, 19 nt, Artificial Sequence
  Description of Artificial Sequence: Synthetic oligonucleotide
  Antisense strand to SEQ ID NO: 4724
uccaucauucgcugaacca

SEQ ID NO: 4726 - RNA, 19 nt, Artificial Sequence
  Description of Artificial Sequence: Synthetic oligonucleotide
  Sense strand starting at position 2170 of SEQ ID NO: 9
auacuuguguuuccuuaaa

SEQ ID NO: 4727 - RNA, 19 nt, Artificial Sequence
  Description of Artificial Sequence: Synthetic oligonucleotide
  Antisense strand to SEQ ID NO: 4726
uuuaaggaaacacaaguau

SEQ ID NO: 4728 - RNA, 19 nt, Artificial Sequence
  Description of Artificial Sequence: Synthetic oligonucleotide
  Sense strand starting at position 2076 of SEQ ID NO: 9
cccggagagaacggucaaa

SEQ ID NO: 4729 - RNA, 19 nt, Artificial Sequence
  Description of Artificial Sequence: Synthetic oligonucleotide
  Antisense strand to SEQ ID NO: 4728
uuugaccguucucuccggg

SEQ ID NO: 4730 - RNA, 19 nt, Artificial Sequence
  Description of Artificial Sequence: Synthetic oligonucleotide
  Sense strand starting at position 2067 of SEQ ID NO: 9
ucaccuuuacccggagaga

SEQ ID NO: 4731 - RNA, 19 nt, Artificial Sequence
  Description of Artificial Sequence: Synthetic oligonucleotide
  Antisense strand to SEQ ID NO: 4730
ucucuccggguaaagguga

SEQ ID NO: 4732 - RNA, 19 nt, Artificial Sequence
  Description of Artificial Sequence: Synthetic oligonucleotide
  Sense strand starting at position 1245 of SEQ ID NO: 9
gguaaauauuuggaggguu

SEQ ID NO: 4733 - RNA, 19 nt, Artificial Sequence
  Description of Artificial Sequence: Synthetic oligonucleotide
  Antisense strand to SEQ ID NO: 4732
aacccuccaaauauuuacc

SEQ ID NO: 4734 - RNA, 19 nt, Artificial Sequence
  Description of Artificial Sequence: Synthetic oligonucleotide
  Sense strand starting at position 1235 of SEQ ID NO: 9
ggauucccgcgguaaauau

SEQ ID NO: 4735 - RNA, 19 nt, Artificial Sequence
  Description of Artificial Sequence: Synthetic oligonucleotide
  Antisense strand to SEQ ID NO: 4734
auauuuaccgcgggaaucc

SEQ ID NO: 4736 - RNA, 19 nt, Artificial Sequence
  Description of Artificial Sequence: Synthetic oligonucleotide
  Sense strand starting at position 948 of SEQ ID NO: 9
gugacaucuaaauggcagu

SEQ ID NO: 4737 - RNA, 19 nt, Artificial Sequence
  Description of Artificial Sequence: Synthetic oligonucleotide
  Antisense strand to SEQ ID NO: 4736
acugccauuuagaugucac

SEQ ID NO: 4738 - RNA, 19 nt, Artificial Sequence
  Description of Artificial Sequence: Synthetic oligonucleotide
  Sense strand starting at position 876 of SEQ ID NO: 9
gcagcaauucuuuaggauu

SEQ ID NO: 4739 - RNA, 19 nt, Artificial Sequence
  Description of Artificial Sequence: Synthetic oligonucleotide
  Antisense strand to SEQ ID NO: 4738
aauccuaaagaauugcugc

SEQ ID NO: 4740 - RNA, 19 nt, Artificial Sequence
  Description of Artificial Sequence: Synthetic oligonucleotide
  Sense strand starting at position 875 of SEQ ID NO: 9
ggcagcaauucuuuaggau

SEQ ID NO: 4741 - RNA, 19 nt, Artificial Sequence
  Description of Artificial Sequence: Synthetic oligonucleotide
  Antisense strand to SEQ ID NO: 4740
auccuaaagaauugcugcc

SEQ ID NO: 4742 - RNA, 19 nt, Artificial Sequence
  Description of Artificial Sequence: Synthetic oligonucleotide
  Sense strand starting at position 764 of SEQ ID NO: 9
uuccuuggagguugagaaa

SEQ ID NO: 4743 - RNA, 19 nt, Artificial Sequence
  Description of Artificial Sequence: Synthetic oligonucleotide
  Antisense strand to SEQ ID NO: 4742
uuucucaaccuccaaggaa

SEQ ID NO: 4744 - RNA, 19 nt, Artificial Sequence
  Description of Artificial Sequence: Synthetic oligonucleotide
  Sense strand starting at position 684 of SEQ ID NO: 9
ggaauauaagagugucagu

SEQ ID NO: 4745 - RNA, 19 nt, Artificial Sequence
  Description of Artificial Sequence: Synthetic oligonucleotide
  Antisense strand to SEQ ID NO: 4744
acugacacucuuauauucc

SEQ ID NO: 4746 - RNA, 19 nt, Artificial Sequence
  Description of Artificial Sequence: Synthetic oligonucleotide
  Sense strand starting at position 673 of SEQ ID NO: 9
ugcauuucuugggaauaua

SEQ ID NO: 4747 - RNA, 19 nt, Artificial Sequence
  Description of Artificial Sequence: Synthetic oligonucleotide
  Antisense strand to SEQ ID NO: 4746
uauauucccaagaaaugca

SEQ ID NO: 4748 - RNA, 19 nt, Artificial Sequence
  Description of Artificial Sequence: Synthetic oligonucleotide
  Sense strand starting at position 608 of SEQ ID NO: 9
gcucucugucuagaacaau

SEQ ID NO: 4749 - RNA, 19 nt, Artificial Sequence
  Description of Artificial Sequence: Synthetic oligonucleotide
  Antisense strand to SEQ ID NO: 4748
auuguucuagacagagagc

SEQ ID NO: 4750 - RNA, 19 nt, Artificial Sequence
  Description of Artificial Sequence: Synthetic oligonucleotide
  Sense strand starting at position 606 of SEQ ID NO: 9
gggcucucugucuagaaca

SEQ ID NO: 4751 - RNA, 19 nt, Artificial Sequence
  Description of Artificial Sequence: Synthetic oligonucleotide
  Antisense strand to SEQ ID NO: 4750
uguucuagacagagagccc

SEQ ID NO: 4752 - RNA, 19 nt, Artificial Sequence
  Description of Artificial Sequence: Synthetic oligonucleotide
  Sense strand starting at position 543 of SEQ ID NO: 9
acgauuaaaguacgauaau

SEQ ID NO: 4753 - RNA, 19 nt, Artificial Sequence
  Description of Artificial Sequence: Synthetic oligonucleotide
  Antisense strand to SEQ ID NO: 4752
auuaucguacuuuaaucgu

SEQ ID NO: 4754 - RNA, 19 nt, Artificial Sequence
  Description of Artificial Sequence: Synthetic oligonucleotide
  Sense strand starting at position 520 of SEQ ID NO: 9
cuaaucucacugcguauuu

SEQ ID NO: 4755 - RNA, 19 nt, Artificial Sequence
  Description of Artificial Sequence: Synthetic oligonucleotide
  Antisense strand to SEQ ID NO: 4754
aaauacgcagugagauuag

SEQ ID NO: 4756 - RNA, 19 nt, Artificial Sequence
  Description of Artificial Sequence: Synthetic oligonucleotide
  Sense strand starting at position 453 of SEQ ID NO: 9
ccauauuuguggccguaga

SEQ ID NO: 4757 - RNA, 19 nt, Artificial Sequence
  Description of Artificial Sequence: Synthetic oligonucleotide
  Antisense strand to SEQ ID NO: 4756
ucuacggccacaaauaugg

SEQ ID NO: 4758 - RNA, 19 nt, Artificial Sequence
  Description of Artificial Sequence: Synthetic oligonucleotide
  Sense strand starting at position 421 of SEQ ID NO: 9
auaauugcugaaugugaau

SEQ ID NO: 4759 - RNA, 19 nt, Artificial Sequence
  Description of Artificial Sequence: Synthetic oligonucleotide
  Antisense strand to SEQ ID NO: 4758
auucacauucagcaauuau

SEQ ID NO: 4760 - RNA, 19 nt, Artificial Sequence
  Description of Artificial Sequence: Synthetic oligonucleotide
  Sense strand starting at position 418 of SEQ ID NO: 9
guuauaauugcugaaugug

SEQ ID NO: 4761 - RNA, 19 nt, Artificial Sequence
  Description of Artificial Sequence: Synthetic oligonucleotide
  Antisense strand to SEQ ID NO: 4760
cacauucagcaauuauaac

SEQ ID NO: 4762 - RNA, 19 nt, Artificial Sequence
  Description of Artificial Sequence: Synthetic oligonucleotide
  Sense strand starting at position 416 of SEQ ID NO: 9
gaguuauaauugcugaaug

SEQ ID NO: 4763 - RNA, 19 nt, Artificial Sequence
  Description of Artificial Sequence: Synthetic oligonucleotide
  Antisense strand to SEQ ID NO: 4762
cauucagcaauuauaacuc

SEQ ID NO: 4764 - RNA, 19 nt, Artificial Sequence
  Description of Artificial Sequence: Synthetic oligonucleotide
  Sense strand starting at position 414 of SEQ ID NO: 9
uggaguuauaauugcugaa

SEQ ID NO: 4765 - RNA, 19 nt, Artificial Sequence
  Description of Artificial Sequence: Synthetic oligonucleotide
  Antisense strand to SEQ ID NO: 4764
uucagcaauuauaacucca

SEQ ID NO: 4766 - RNA, 19 nt, Artificial Sequence
  Description of Artificial Sequence: Synthetic oligonucleotide
  Sense strand starting at position 364 of SEQ ID NO: 9
guuaauuagagaggugguu

SEQ ID NO: 4767 - RNA, 19 nt, Artificial Sequence
  Description of Artificial Sequence: Synthetic oligonucleotide
  Antisense strand to SEQ ID NO: 4766
aaccaccucucuaauuaac

SEQ ID NO: 4768 - RNA, 19 nt, Artificial Sequence
  Description of Artificial Sequence: Synthetic oligonucleotide
  Sense strand starting at position 294 of SEQ ID NO: 10
auaacuggcuccuguaaca

SEQ ID NO: 4769 - RNA, 19 nt, Artificial Sequence
  Description of Artificial Sequence: Synthetic oligonucleotide
  Antisense strand to SEQ ID NO: 4768
uguuacaggagccaguuau

SEQ ID NO: 4770 - RNA, 19 nt, Artificial Sequence
  Description of Artificial Sequence: Synthetic oligonucleotide
  Sense strand starting at position 307 of SEQ ID NO: 10
guaacaggcucccaugaga

SEQ ID NO: 4771 - RNA, 19 nt, Artificial Sequence
  Description of Artificial Sequence: Synthetic oligonucleotide
  Antisense strand to SEQ ID NO: 4770
ucucaugggagccuguuac

SEQ ID NO: 4772 - RNA, 19 nt, Artificial Sequence
  Description of Artificial Sequence: Synthetic oligonucleotide
  Sense strand starting at position 424 of SEQ ID NO: 10
ccauuaggcuucugacgga

SEQ ID NO: 4773 - RNA, 19 nt, Artificial Sequence
  Description of Artificial Sequence: Synthetic oligonucleotide
  Antisense strand to SEQ ID NO: 4772
uccgucagaagccuaaugg

SEQ ID NO: 4774 - RNA, 19 nt, Artificial Sequence
  Description of Artificial Sequence: Synthetic oligonucleotide
  Sense strand starting at position 862 of SEQ ID NO: 10
auguguguucaaggagaca

SEQ ID NO: 4775 - RNA, 19 nt, Artificial Sequence
  Description of Artificial Sequence: Synthetic oligonucleotide
  Antisense strand to SEQ ID NO: 4774
ugucuccuugaacacacau

SEQ ID NO: 4776 - RNA, 19 nt, Artificial Sequence
  Description of Artificial Sequence: Synthetic oligonucleotide
  Sense strand starting at position 893 of SEQ ID NO: 10
gcaucaacauguguaccua

SEQ ID NO: 4777 - RNA, 19 nt, Artificial Sequence
  Description of Artificial Sequence: Synthetic oligonucleotide
  Antisense strand to SEQ ID NO: 4776
uagguacacauguugaugc

SEQ ID NO: 4778 - RNA, 19 nt, Artificial Sequence
  Description of Artificial Sequence: Synthetic oligonucleotide
  Sense strand starting at position 897 of SEQ ID NO: 10
caacauguguaccuaguga

SEQ ID NO: 4779 - RNA, 19 nt, Artificial Sequence
  Description of Artificial Sequence: Synthetic oligonucleotide
  Antisense strand to SEQ ID NO: 4778
ucacuagguacacauguug

SEQ ID NO: 4780 - RNA, 19 nt, Artificial Sequence
  Description of Artificial Sequence: Synthetic oligonucleotide
  Sense strand starting at position 901 of SEQ ID NO: 10
auguguaccuagugaugga

SEQ ID NO: 4781 - RNA, 19 nt, Artificial Sequence
  Description of Artificial Sequence: Synthetic oligonucleotide
  Antisense strand to SEQ ID NO: 4780
uccaucacuagguacacau

SEQ ID NO: 4782 - RNA, 19 nt, Artificial Sequence
  Description of Artificial Sequence: Synthetic oligonucleotide
  Sense strand starting at position 902 of SEQ ID NO: 10
uguguaccuagugauggaa

SEQ ID NO: 4783 - RNA, 19 nt, Artificial Sequence
  Description of Artificial Sequence: Synthetic oligonucleotide
  Antisense strand to SEQ ID NO: 4782
uuccaucacuagguacaca

SEQ ID NO: 4784 - RNA, 19 nt, Artificial Sequence
  Description of Artificial Sequence: Synthetic oligonucleotide
  Sense strand starting at position 904 of SEQ ID NO: 10
uguaccuagugauggaaca

SEQ ID NO: 4785 - RNA, 19 nt, Artificial Sequence
  Description of Artificial Sequence: Synthetic oligonucleotide
  Antisense strand to SEQ ID NO: 4784
uguuccaucacuagguaca

SEQ ID NO: 4786 - RNA, 19 nt, Artificial Sequence
  Description of Artificial Sequence: Synthetic oligonucleotide
  Sense strand starting at position 933 of SEQ ID NO: 10
aggugaugugucuauugcu

SEQ ID NO: 4787 - RNA, 19 nt, Artificial Sequence
  Description of Artificial Sequence: Synthetic oligonucleotide
  Antisense strand to SEQ ID NO: 4786
agcaauagacacaucaccu

SEQ ID NO: 4788 - RNA, 19 nt, Artificial Sequence
  Description of Artificial Sequence: Synthetic oligonucleotide
  Sense strand starting at position 938 of SEQ ID NO: 10
augugucuauugcugacau

SEQ ID NO: 4789 - RNA, 19 nt, Artificial Sequence
  Description of Artificial Sequence: Synthetic oligonucleotide
  Antisense strand to SEQ ID NO: 4788
augucagcaauagacacau

SEQ ID NO: 4790 - RNA, 19 nt, Artificial Sequence
  Description of Artificial Sequence: Synthetic oligonucleotide
  Sense strand starting at position 1192 of SEQ ID NO: 10
cagagagguuucuuugccu

SEQ ID NO: 4791 - RNA, 19 nt, Artificial Sequence
  Description of Artificial Sequence: Synthetic oligonucleotide
  Antisense strand to SEQ ID NO: 4790
aggcaaagaaaccucucug

SEQ ID NO: 4792 - RNA, 19 nt, Artificial Sequence
  Description of Artificial Sequence: Synthetic oligonucleotide
  Sense strand starting at position 1196 of SEQ ID NO: 10
gagguuucuuugccuccau

SEQ ID NO: 4793 - RNA, 19 nt, Artificial Sequence
  Description of Artificial Sequence: Synthetic oligonucleotide
  Antisense strand to SEQ ID NO: 4792
auggaggcaaagaaaccuc

SEQ ID NO: 4794 - RNA, 19 nt, Artificial Sequence
  Description of Artificial Sequence: Synthetic oligonucleotide
  Sense strand starting at position 1210 of SEQ ID NO: 10
uccauugucguuugccaaa

SEQ ID NO: 4795 - RNA, 19 nt, Artificial Sequence
  Description of Artificial Sequence: Synthetic oligonucleotide
  Antisense strand to SEQ ID NO: 4794
uuuggcaaacgacaaugga

SEQ ID NO: 4796 - RNA, 19 nt, Artificial Sequence
  Description of Artificial Sequence: Synthetic oligonucleotide
  Sense strand starting at position 1213 of SEQ ID NO: 10
auugucguuugccaaaugu

SEQ ID NO: 4797 - RNA, 19 nt, Artificial Sequence
  Description of Artificial Sequence: Synthetic oligonucleotide
  Antisense strand to SEQ ID NO: 4796
acauuuggcaaacgacaau

SEQ ID NO: 4798 - RNA, 19 nt, Artificial Sequence
  Description of Artificial Sequence: Synthetic oligonucleotide
  Sense strand starting at position 1258 of SEQ ID NO: 10
gugcacacgucugugaaca

SEQ ID NO: 4799 - RNA, 19 nt, Artificial Sequence
  Description of Artificial Sequence: Synthetic oligonucleotide
  Antisense strand to SEQ ID NO: 4798
uguucacagacgugugcac

SEQ ID NO: 4800 - RNA, 19 nt, Artificial Sequence
  Description of Artificial Sequence: Synthetic oligonucleotide
  Sense strand starting at position 1259 of SEQ ID NO: 10
ugcacacgucugugaacau

SEQ ID NO: 4801 - RNA, 19 nt, Artificial Sequence
  Description of Artificial Sequence: Synthetic oligonucleotide
  Antisense strand to SEQ ID NO: 4800
auguucacagacgugugca

SEQ ID NO: 4802 - RNA, 19 nt, Artificial Sequence
  Description of Artificial Sequence: Synthetic oligonucleotide
  Sense strand starting at position 2703 of SEQ ID NO: 10
gcaggauuccugcgcugga

SEQ ID NO: 4803 - RNA, 19 nt, Artificial Sequence
  Description of Artificial Sequence: Synthetic oligonucleotide
  Antisense strand to SEQ ID NO: 4802
uccagcgcaggaauccugc

SEQ ID NO: 4804 - RNA, 19 nt, Artificial Sequence
  Description of Artificial Sequence: Synthetic oligonucleotide
  Sense strand starting at position 3784 of SEQ ID NO: 10
cccugaagcugccuggaua

SEQ ID NO: 4805 - RNA, 19 nt, Artificial Sequence
  Description of Artificial Sequence: Synthetic oligonucleotide
  Antisense strand to SEQ ID NO: 4804
uauccaggcagcuucaggg

SEQ ID NO: 4806 - RNA, 19 nt, Artificial Sequence
  Description of Artificial Sequence: Synthetic oligonucleotide
  Sense strand starting at position 3785 of SEQ ID NO: 10
ccugaagcugccuggauau

SEQ ID NO: 4807 - RNA, 19 nt, Artificial Sequence
  Description of Artificial Sequence: Synthetic oligonucleotide
  Antisense strand to SEQ ID NO: 4806
auauccaggcagcuucagg

SEQ ID NO: 4808 - RNA, 19 nt, Artificial Sequence
  Description of Artificial Sequence: Synthetic oligonucleotide
  Sense strand starting at position 199 of SEQ ID NO: 11
cccucaguccugcaacaga

SEQ ID NO: 4809 - RNA, 19 nt, Artificial Sequence
  Description of Artificial Sequence: Synthetic oligonucleotide
  Antisense strand to SEQ ID NO: 4808
ucuguugcaggacugaggg

SEQ ID NO: 4810 - RNA, 19 nt, Artificial Sequence
  Description of Artificial Sequence: Synthetic oligonucleotide
  Sense strand starting at position 328 of SEQ ID NO: 11
gauggaauguagcuauaug

SEQ ID NO: 4811 - RNA, 19 nt, Artificial Sequence
  Description of Artificial Sequence: Synthetic oligonucleotide
  Antisense strand to SEQ ID NO: 4810
cauauagcuacauuccauc

SEQ ID NO: 4812 - RNA, 19 nt, Artificial Sequence
  Description of Artificial Sequence: Synthetic oligonucleotide
  Sense strand starting at position 495 of SEQ ID NO: 11
ucaacucauugugcaauga

SEQ ID NO: 4813 - RNA, 19 nt, Artificial Sequence
  Description of Artificial Sequence: Synthetic oligonucleotide
  Antisense strand to SEQ ID NO: 4812
ucauugcacaaugaguuga

SEQ ID NO: 4814 - RNA, 19 nt, Artificial Sequence
  Description of Artificial Sequence: Synthetic oligonucleotide
  Sense strand starting at position 505 of SEQ ID NO: 11
gugcaaugaccacgaauau

SEQ ID NO: 4815 - RNA, 19 nt, Artificial Sequence
  Description of Artificial Sequence: Synthetic oligonucleotide
  Antisense strand to SEQ ID NO: 4814
auauucguggucauugcac

SEQ ID NO: 4816 - RNA, 19 nt, Artificial Sequence
  Description of Artificial Sequence: Synthetic oligonucleotide
  Sense strand starting at position 516 of SEQ ID NO: 11
acgaauaugucauugaaug

SEQ ID NO: 4817 - RNA, 19 nt, Artificial Sequence
  Description of Artificial Sequence: Synthetic oligonucleotide
  Antisense strand to SEQ ID NO: 4816
cauucaaugacauauucgu

SEQ ID NO: 4818 - RNA, 19 nt, Artificial Sequence
  Description of Artificial Sequence: Synthetic oligonucleotide
  Sense strand starting at position 517 of SEQ ID NO: 11
cgaauaugucauugaaugu

SEQ ID NO: 4819 - RNA, 19 nt, Artificial Sequence
  Description of Artificial Sequence: Synthetic oligonucleotide
  Antisense strand to SEQ ID NO: 4818
acauucaaugacauauucg

SEQ ID NO: 4820 - RNA, 19 nt, Artificial Sequence
  Description of Artificial Sequence: Synthetic oligonucleotide
  Sense strand starting at position 521 of SEQ ID NO: 11
uaugucauugaaugugaaa

SEQ ID NO: 4821 - RNA, 19 nt, Artificial Sequence
  Description of Artificial Sequence: Synthetic oligonucleotide
  Antisense strand to SEQ ID NO: 4820
uuucacauucaaugacaua

SEQ ID NO: 4822 - RNA, 19 nt, Artificial Sequence
  Description of Artificial Sequence: Synthetic oligonucleotide
  Sense strand starting at position 523 of SEQ ID NO: 11
ugucauugaaugugaaaug

SEQ ID NO: 4823 - RNA, 19 nt, Artificial Sequence
  Description of Artificial Sequence: Synthetic oligonucleotide
  Antisense strand to SEQ ID NO: 4822
cauuucacauucaaugaca

SEQ ID NO: 4824 - RNA, 19 nt, Artificial Sequence
  Description of Artificial Sequence: Synthetic oligonucleotide
  Sense strand starting at position 539 of SEQ ID NO: 11
augaucaaauguucuggaa

SEQ ID NO: 4825 - RNA, 19 nt, Artificial Sequence
  Description of Artificial Sequence: Synthetic oligonucleotide
  Antisense strand to SEQ ID NO: 4824
uuccagaacauuugaucau

SEQ ID NO: 4826 - RNA, 19 nt, Artificial Sequence
  Description of Artificial Sequence: Synthetic oligonucleotide
  Sense strand starting at position 640 of SEQ ID NO: 11
acucaacuuuggcuaguaa

SEQ ID NO: 4827 - RNA, 19 nt, Artificial Sequence
  Description of Artificial Sequence: Synthetic oligonucleotide
  Antisense strand to SEQ ID NO: 4826
uuacuagccaaaguugagu

SEQ ID NO: 4828 - RNA, 19 nt, Artificial Sequence
  Description of Artificial Sequence: Synthetic oligonucleotide
  Sense strand starting at position 641 of SEQ ID NO: 11
cucaacuuuggcuaguaaa

SEQ ID NO: 4829 - RNA, 19 nt, Artificial Sequence
  Description of Artificial Sequence: Synthetic oligonucleotide
  Antisense strand to SEQ ID NO: 4828
uuuacuagccaaaguugag

SEQ ID NO: 4830 - RNA, 19 nt, Artificial Sequence
  Description of Artificial Sequence: Synthetic oligonucleotide
  Sense strand starting at position 704 of SEQ ID NO: 11
uaugcugcucuggaaugua

SEQ ID NO: 4831 - RNA, 19 nt, Artificial Sequence
  Description of Artificial Sequence: Synthetic oligonucleotide
  Antisense strand to SEQ ID NO: 4830
uacauuccagagcagcaua

SEQ ID NO: 4832 - RNA, 19 nt, Artificial Sequence
  Description of Artificial Sequence: Synthetic oligonucleotide
  Sense strand starting at position 774 of SEQ ID NO: 11
guccauucgcccuacaaga

SEQ ID NO: 4833 - RNA, 19 nt, Artificial Sequence
  Description of Artificial Sequence: Synthetic oligonucleotide
  Antisense strand to SEQ ID NO: 4832
ucuuguagggcgaauggac

SEQ ID NO: 4834 - RNA, 19 nt, Artificial Sequence
  Description of Artificial Sequence: Synthetic oligonucleotide
  Sense strand starting at position 782 of SEQ ID NO: 11
gcccuacaagacuaaguau

SEQ ID NO: 4835 - RNA, 19 nt, Artificial Sequence
  Description of Artificial Sequence: Synthetic oligonucleotide
  Antisense strand to SEQ ID NO: 4834
auacuuagucuuguagggc

SEQ ID NO: 4836 - RNA, 19 nt, Artificial Sequence
  Description of Artificial Sequence: Synthetic oligonucleotide
  Sense strand starting at position 869 of SEQ ID NO: 11
ccaccauucgacuaaguga

SEQ ID NO: 4837 - RNA, 19 nt, Artificial Sequence
  Description of Artificial Sequence: Synthetic oligonucleotide
  Antisense strand to SEQ ID NO: 4836
ucacuuagucgaauggugg

SEQ ID NO: 4838 - RNA, 19 nt, Artificial Sequence
  Description of Artificial Sequence: Synthetic oligonucleotide
  Sense strand starting at position 1077 of SEQ ID NO: 11
uccucaagaguuugacaag

SEQ ID NO: 4839 - RNA, 19 nt, Artificial Sequence
  Description of Artificial Sequence: Synthetic oligonucleotide
  Antisense strand to SEQ ID NO: 4838
cuugucaaacucuugagga

SEQ ID NO: 4840 - RNA, 19 nt, Artificial Sequence
  Description of Artificial Sequence: Synthetic oligonucleotide
  Sense strand starting at position 1171 of SEQ ID NO: 11
uccaguuuaugguucccaa

SEQ ID NO: 4841 - RNA, 19 nt, Artificial Sequence
  Description of Artificial Sequence: Synthetic oligonucleotide
  Antisense strand to SEQ ID NO: 4840
uugggaaccauaaacugga

SEQ ID NO: 4842 - RNA, 19 nt, Artificial Sequence
  Description of Artificial Sequence: Synthetic oligonucleotide
  Sense strand starting at position 1174 of SEQ ID NO: 11
aguuuaugguucccaagaa

SEQ ID NO: 4843 - RNA, 19 nt, Artificial Sequence
  Description of Artificial Sequence: Synthetic oligonucleotide
  Antisense strand to SEQ ID NO: 4842
uucuugggaaccauaaacu

SEQ ID NO: 4844 - RNA, 19 nt, Artificial Sequence
  Description of Artificial Sequence: Synthetic oligonucleotide
  Sense strand starting at position 1184 of SEQ ID NO: 11
ucccaagaauggcuggaaa

SEQ ID NO: 4845 - RNA, 19 nt, Artificial Sequence
  Description of Artificial Sequence: Synthetic oligonucleotide
  Antisense strand to SEQ ID NO: 4844
uuuccagccauucuuggga

SEQ ID NO: 4846 - RNA, 19 nt, Artificial Sequence
  Description of Artificial Sequence: Synthetic oligonucleotide
  Sense strand starting at position 1213 of SEQ ID NO: 11
ggaaccucuugacagauuu

SEQ ID NO: 4847 - RNA, 19 nt, Artificial Sequence
  Description of Artificial Sequence: Synthetic oligonucleotide
  Antisense strand to SEQ ID NO: 4846
aaaucugucaagagguucc

SEQ ID NO: 4848 - RNA, 19 nt, Artificial Sequence
  Description of Artificial Sequence: Synthetic oligonucleotide
  Sense strand starting at position 1255 of SEQ ID NO: 11
cggguucugaugugacaag

SEQ ID NO: 4849 - RNA, 19 nt, Artificial Sequence
  Description of Artificial Sequence: Synthetic oligonucleotide
  Antisense strand to SEQ ID NO: 4848
cuugucacaucagaacccg

SEQ ID NO: 4850 - RNA, 19 nt, Artificial Sequence
  Description of Artificial Sequence: Synthetic oligonucleotide
  Sense strand starting at position 1265 of SEQ ID NO: 11
ugugacaagccaugggaaa

SEQ ID NO: 4851 - RNA, 19 nt, Artificial Sequence
  Description of Artificial Sequence: Synthetic oligonucleotide
  Antisense strand to SEQ ID NO: 4850
uuucccauggcuugucaca

SEQ ID NO: 4852 - RNA, 19 nt, Artificial Sequence
  Description of Artificial Sequence: Synthetic oligonucleotide
  Sense strand starting at position 1266 of SEQ ID NO: 11
gugacaagccaugggaaau

SEQ ID NO: 4853 - RNA, 19 nt, Artificial Sequence
  Description of Artificial Sequence: Synthetic oligonucleotide
  Antisense strand to SEQ ID NO: 4852
auuucccauggcuugucac

SEQ ID NO: 4854 - RNA, 19 nt, Artificial Sequence
  Description of Artificial Sequence: Synthetic oligonucleotide
  Sense strand starting at position 1340 of SEQ ID NO: 11
ugggauccuuuggaagaaa

SEQ ID NO: 4855 - RNA, 19 nt, Artificial Sequence
  Description of Artificial Sequence: Synthetic oligonucleotide
  Antisense strand to SEQ ID NO: 4854
uuucuuccaaaggauccca

SEQ ID NO: 4856 - RNA, 19 nt, Artificial Sequence
  Description of Artificial Sequence: Synthetic oligonucleotide
  Sense strand starting at position 1351 of SEQ ID NO: 11
ggaagaaagugggcucauu

SEQ ID NO: 4857 - RNA, 19 nt, Artificial Sequence
  Description of Artificial Sequence: Synthetic oligonucleotide
  Antisense strand to SEQ ID NO: 4856
aaugagcccacuuucuucc

SEQ ID NO: 4858 - RNA, 19 nt, Artificial Sequence
  Description of Artificial Sequence: Synthetic oligonucleotide
  Sense strand starting at position 1437 of SEQ ID NO: 11
gcgggacaugacugcuaaa

SEQ ID NO: 4859 - RNA, 19 nt, Artificial Sequence
  Description of Artificial Sequence: Synthetic oligonucleotide
  Antisense strand to SEQ ID NO: 4858
uuuagcagucaugucccgc

SEQ ID NO: 4860 - RNA, 19 nt, Artificial Sequence
  Description of Artificial Sequence: Synthetic oligonucleotide
  Sense strand starting at position 1659 of SEQ ID NO: 11
ccggcucaccuuugaagaa

SEQ ID NO: 4861 - RNA, 19 nt, Artificial Sequence
  Description of Artificial Sequence: Synthetic oligonucleotide
  Antisense strand to SEQ ID NO: 4860
uucuucaaaggugagccgg

SEQ ID NO: 4862 - RNA, 19 nt, Artificial Sequence
  Description of Artificial Sequence: Synthetic oligonucleotide
  Sense strand starting at position 2622 of SEQ ID NO: 11
uaggaaagugaauguauau

SEQ ID NO: 4863 - RNA, 19 nt, Artificial Sequence
  Description of Artificial Sequence: Synthetic oligonucleotide
  Antisense strand to SEQ ID NO: 4862
auauacauucacuuuccua

SEQ ID NO: 4864 - RNA, 19 nt, Artificial Sequence
  Description of Artificial Sequence: Synthetic oligonucleotide
  Sense strand starting at position 2730 of SEQ ID NO: 11
gccugauauucuucuacag

SEQ ID NO: 4865 - RNA, 19 nt, Artificial Sequence
  Description of Artificial Sequence: Synthetic oligonucleotide
  Antisense strand to SEQ ID NO: 4864
cuguagaagaauaucaggc

SEQ ID NO: 4866 - RNA, 19 nt, Artificial Sequence
  Description of Artificial Sequence: Synthetic oligonucleotide
  Sense strand starting at position 3102 of SEQ ID NO: 11
uuuguaaacuuaguagagu

SEQ ID NO: 4867 - RNA, 19 nt, Artificial Sequence
  Description of Artificial Sequence: Synthetic oligonucleotide
  Antisense strand to SEQ ID NO: 4866
acucuacuaaguuuacaaa

SEQ ID NO: 4868 - RNA, 19 nt, Artificial Sequence
  Description of Artificial Sequence: Synthetic oligonucleotide
  Sense strand starting at position 3279 of SEQ ID NO: 11
uccagcauggcugauuaaa

SEQ ID NO: 4869 - RNA, 19 nt, Artificial Sequence
  Description of Artificial Sequence: Synthetic oligonucleotide
  Antisense strand to SEQ ID NO: 4868
uuuaaucagccaugcugga

SEQ ID NO: 4870 - RNA, 19 nt, Artificial Sequence
  Description of Artificial Sequence: Synthetic oligonucleotide
  Sense strand starting at position 3390 of SEQ ID NO: 11
ugggaaaccucucucaagu

SEQ ID NO: 4871 - RNA, 19 nt, Artificial Sequence
  Description of Artificial Sequence: Synthetic oligonucleotide
  Antisense strand to SEQ ID NO: 4870
acuugagagagguuuccca

SEQ ID NO: 4872 - RNA, 19 nt, Artificial Sequence
  Description of Artificial Sequence: Synthetic oligonucleotide
  Sense strand starting at position 3412 of SEQ ID NO: 11
auggaugugcuaugagauu

SEQ ID NO: 4873 - RNA, 19 nt, Artificial Sequence
  Description of Artificial Sequence: Synthetic oligonucleotide
  Antisense strand to SEQ ID NO: 4872
aaucucauagcacauccau

SEQ ID NO: 4874 - RNA, 19 nt, Artificial Sequence
  Description of Artificial Sequence: Synthetic oligonucleotide
  Sense strand starting at position 3478 of SEQ ID NO: 11
acugaagcccuagagaguu

SEQ ID NO: 4875 - RNA, 19 nt, Artificial Sequence
  Description of Artificial Sequence: Synthetic oligonucleotide
  Antisense strand to SEQ ID NO: 4874
aacucucuagggcuucagu

SEQ ID NO: 4876 - RNA, 19 nt, Artificial Sequence
  Description of Artificial Sequence: Synthetic oligonucleotide
  Sense strand starting at position 3807 of SEQ ID NO: 11
ggacaagauuuguaugcug

SEQ ID NO: 4877 - RNA, 19 nt, Artificial Sequence
  Description of Artificial Sequence: Synthetic oligonucleotide
  Antisense strand to SEQ ID NO: 4876
cagcauacaaaucuugucc

SEQ ID NO: 4878 - RNA, 19 nt, Artificial Sequence
  Description of Artificial Sequence: Synthetic oligonucleotide
  Sense strand starting at position 3809 of SEQ ID NO: 11
acaagauuuguaugcugca

SEQ ID NO: 4879 - RNA, 19 nt, Artificial Sequence
  Description of Artificial Sequence: Synthetic oligonucleotide
  Antisense strand to SEQ ID NO: 4878
ugcagcauacaaaucuugu

SEQ ID NO: 4880 - RNA, 19 nt, Artificial Sequence
  Description of Artificial Sequence: Synthetic oligonucleotide
  Sense strand starting at position 3810 of SEQ ID NO: 11
caagauuuguaugcugcau

SEQ ID NO: 4881 - RNA, 19 nt, Artificial Sequence
  Description of Artificial Sequence: Synthetic oligonucleotide
  Antisense strand to SEQ ID NO: 4880
augcagcauacaaaucuug

SEQ ID NO: 4882 - RNA, 19 nt, Artificial Sequence
  Description of Artificial Sequence: Synthetic oligonucleotide
  Sense strand starting at position 3843 of SEQ ID NO: 11
auucauuacgguggauaag

SEQ ID NO: 4883 - RNA, 19 nt, Artificial Sequence
  Description of Artificial Sequence: Synthetic oligonucleotide
  Antisense strand to SEQ ID NO: 4882
cuuauccaccguaaugaau

SEQ ID NO: 4884 - RNA, 19 nt, Artificial Sequence
  Description of Artificial Sequence: Synthetic oligonucleotide
  Sense strand starting at position 3893 of SEQ ID NO: 11
guaguacaacuauaaguuu

SEQ ID NO: 4885 - RNA, 19 nt, Artificial Sequence
  Description of Artificial Sequence: Synthetic oligonucleotide
  Antisense strand to SEQ ID NO: 4884
aaacuuauaguuguacuac

SEQ ID NO: 4886 - RNA, 19 nt, Artificial Sequence
  Description of Artificial Sequence: Synthetic oligonucleotide
  Sense strand starting at position 3971 of SEQ ID NO: 11
ugaaguauggugcaguuau

SEQ ID NO: 4887 - RNA, 19 nt, Artificial Sequence
  Description of Artificial Sequence: Synthetic oligonucleotide
  Antisense strand to SEQ ID NO: 4886
auaacugcaccauacuuca

SEQ ID NO: 4888 - RNA, 19 nt, Artificial Sequence
  Description of Artificial Sequence: Synthetic oligonucleotide
  Sense strand starting at position 217 of SEQ ID NO: 12
uccaguucugacugaugua

SEQ ID NO: 4889 - RNA, 19 nt, Artificial Sequence
  Description of Artificial Sequence: Synthetic oligonucleotide
  Antisense strand to SEQ ID NO: 4888
uacaucagucagaacugga

SEQ ID NO: 4890 - RNA, 19 nt, Artificial Sequence
  Description of Artificial Sequence: Synthetic oligonucleotide
  Sense strand starting at position 482 of SEQ ID NO: 12
gaguuucuucgcucuuguu

SEQ ID NO: 4891 - RNA, 19 nt, Artificial Sequence
  Description of Artificial Sequence: Synthetic oligonucleotide
  Antisense strand to SEQ ID NO: 4890
aacaagagcgaagaaacuc

SEQ ID NO: 4892 - RNA, 19 nt, Artificial Sequence
  Description of Artificial Sequence: Synthetic oligonucleotide
  Sense strand starting at position 600 of SEQ ID NO: 12
ucggcuaacuuaguagaga

SEQ ID NO: 4893 - RNA, 19 nt, Artificial Sequence
  Description of Artificial Sequence: Synthetic oligonucleotide
  Antisense strand to SEQ ID NO: 4892
ucucuacuaaguuagccga

SEQ ID NO: 4894 - RNA, 19 nt, Artificial Sequence
  Description of Artificial Sequence: Synthetic oligonucleotide
  Sense strand starting at position 762 of SEQ ID NO: 12
uuuggaucucuauauaguu

SEQ ID NO: 4895 - RNA, 19 nt, Artificial Sequence
  Description of Artificial Sequence: Synthetic oligonucleotide
  Antisense strand to SEQ ID NO: 4894
aacuauauagagauccaaa

SEQ ID NO: 4896 - RNA, 19 nt, Artificial Sequence
  Description of Artificial Sequence: Synthetic oligonucleotide
  Sense strand starting at position 867 of SEQ ID NO: 12
agguucuugggcugguaaa

SEQ ID NO: 4897 - RNA, 19 nt, Artificial Sequence
  Description of Artificial Sequence: Synthetic oligonucleotide
  Antisense strand to SEQ ID NO: 4896
uuuaccagcccaagaaccu

SEQ ID NO: 4898 - RNA, 19 nt, Artificial Sequence
  Description of Artificial Sequence: Synthetic oligonucleotide
  Sense strand starting at position 1880 of SEQ ID NO: 12
aaucguuucgcugaaauua

SEQ ID NO: 4899 - RNA, 19 nt, Artificial Sequence
  Description of Artificial Sequence: Synthetic oligonucleotide
  Antisense strand to SEQ ID NO: 4898
uaauuucagcgaaacgauu

SEQ ID NO: 4900 - RNA, 19 nt, Artificial Sequence
  Description of Artificial Sequence: Synthetic oligonucleotide
  Sense strand starting at position 2095 of SEQ ID NO: 12
gggcucuguguugaauaau

SEQ ID NO: 4901 - RNA, 19 nt, Artificial Sequence
  Description of Artificial Sequence: Synthetic oligonucleotide
  Antisense strand to SEQ ID NO: 4900
auuauucaacacagagccc

SEQ ID NO: 4902 - RNA, 19 nt, Artificial Sequence
  Description of Artificial Sequence: Synthetic oligonucleotide
  Sense strand starting at position 2098 of SEQ ID NO: 12
cucuguguugaauaaugaa

SEQ ID NO: 4903 - RNA, 19 nt, Artificial Sequence
  Description of Artificial Sequence: Synthetic oligonucleotide
  Antisense strand to SEQ ID NO: 4902
uucauuauucaacacagag

SEQ ID NO: 4904 - RNA, 19 nt, Artificial Sequence
  Description of Artificial Sequence: Synthetic oligonucleotide
  Sense strand starting at position 2142 of SEQ ID NO: 12
cuuacugugugacugauga

SEQ ID NO: 4905 - RNA, 19 nt, Artificial Sequence
  Description of Artificial Sequence: Synthetic oligonucleotide
  Antisense strand to SEQ ID NO: 4904
ucaucagucacacaguaag

SEQ ID NO: 4906 - RNA, 19 nt, Artificial Sequence
  Description of Artificial Sequence: Synthetic oligonucleotide
  Sense strand starting at position 2144 of SEQ ID NO: 12
uacugugugacugaugagu

SEQ ID NO: 4907 - RNA, 19 nt, Artificial Sequence
  Description of Artificial Sequence: Synthetic oligonucleotide
  Antisense strand to SEQ ID NO: 4906
acucaucagucacacagua

SEQ ID NO: 4908 - RNA, 19 nt, Artificial Sequence
  Description of Artificial Sequence: Synthetic oligonucleotide
  Sense strand starting at position 2149 of SEQ ID NO: 12
ugugacugaugaguggaau

SEQ ID NO: 4909 - RNA, 19 nt, Artificial Sequence
  Description of Artificial Sequence: Synthetic oligonucleotide
  Antisense strand to SEQ ID NO: 4908
auuccacucaucagucaca

SEQ ID NO: 4910 - RNA, 19 nt, Artificial Sequence
  Description of Artificial Sequence: Synthetic oligonucleotide
  Sense strand starting at position 2177 of SEQ ID NO: 12
gcguguuucgcucuccaca

SEQ ID NO: 4911 - RNA, 19 nt, Artificial Sequence
  Description of Artificial Sequence: Synthetic oligonucleotide
  Antisense strand to SEQ ID NO: 4910
uguggagagcgaaacacgc

SEQ ID NO: 4912 - RNA, 19 nt, Artificial Sequence
  Description of Artificial Sequence: Synthetic oligonucleotide
  Sense strand starting at position 2254 of SEQ ID NO: 12
cgccuuagcccaguucuca

SEQ ID NO: 4913 - RNA, 19 nt, Artificial Sequence
  Description of Artificial Sequence: Synthetic oligonucleotide
  Antisense strand to SEQ ID NO: 4912
ugagaacugggcuaaggcg

SEQ ID NO: 4914 - RNA, 19 nt, Artificial Sequence
  Description of Artificial Sequence: Synthetic oligonucleotide
  Sense strand starting at position 2379 of SEQ ID NO: 12
guaacauuaugagugguua

SEQ ID NO: 4915 - RNA, 19 nt, Artificial Sequence
  Description of Artificial Sequence: Synthetic oligonucleotide
  Antisense strand to SEQ ID NO: 4914
uaaccacucauaauguuac

SEQ ID NO: 4916 - RNA, 19 nt, Artificial Sequence
  Description of Artificial Sequence: Synthetic oligonucleotide
  Sense strand starting at position 2380 of SEQ ID NO: 12
uaacauuaugagugguuau

SEQ ID NO: 4917 - RNA, 19 nt, Artificial Sequence
  Description of Artificial Sequence: Synthetic oligonucleotide
  Antisense strand to SEQ ID NO: 4916
auaaccacucauaauguua

SEQ ID NO: 4918 - RNA, 19 nt, Artificial Sequence
  Description of Artificial Sequence: Synthetic oligonucleotide
  Sense strand starting at position 2387 of SEQ ID NO: 12
augagugguuauguccuaa

SEQ ID NO: 4919 - RNA, 19 nt, Artificial Sequence
  Description of Artificial Sequence: Synthetic oligonucleotide
  Antisense strand to SEQ ID NO: 4918
uuaggacauaaccacucau

SEQ ID NO: 4920 - RNA, 19 nt, Artificial Sequence
  Description of Artificial Sequence: Synthetic oligonucleotide
  Sense strand starting at position 2462 of SEQ ID NO: 12
gcacuauaagaaggguaca

SEQ ID NO: 4921 - RNA, 19 nt, Artificial Sequence
  Description of Artificial Sequence: Synthetic oligonucleotide
  Antisense strand to SEQ ID NO: 4920
uguacccuucuuauagugc

SEQ ID NO: 4922 - RNA, 19 nt, Artificial Sequence
  Description of Artificial Sequence: Synthetic oligonucleotide
  Sense strand starting at position 2476 of SEQ ID NO: 12
guacaaagaaaguguugua

SEQ ID NO: 4923 - RNA, 19 nt, Artificial Sequence
  Description of Artificial Sequence: Synthetic oligonucleotide
  Antisense strand to SEQ ID NO: 4922
uacaacacuuucuuuguac

SEQ ID NO: 4924 - RNA, 19 nt, Artificial Sequence
  Description of Artificial Sequence: Synthetic oligonucleotide
  Sense strand starting at position 2585 of SEQ ID NO: 12
gaaagcuugcaucaggauu

SEQ ID NO: 4925 - RNA, 19 nt, Artificial Sequence
  Description of Artificial Sequence: Synthetic oligonucleotide
  Antisense strand to SEQ ID NO: 4924
aauccugaugcaagcuuuc

SEQ ID NO: 4926 - RNA, 19 nt, Artificial Sequence
  Description of Artificial Sequence: Synthetic oligonucleotide
  Sense strand starting at position 2671 of SEQ ID NO: 12
cagucaaagggauguuuaa

SEQ ID NO: 4927 - RNA, 19 nt, Artificial Sequence
  Description of Artificial Sequence: Synthetic oligonucleotide
  Antisense strand to SEQ ID NO: 4926
uuaaacaucccuuugacug

SEQ ID NO: 4928 - RNA, 19 nt, Artificial Sequence
  Description of Artificial Sequence: Synthetic oligonucleotide
  Sense strand starting at position 2755 of SEQ ID NO: 12
uaagguagguacucuuauu

SEQ ID NO: 4929 - RNA, 19 nt, Artificial Sequence
  Description of Artificial Sequence: Synthetic oligonucleotide
  Antisense strand to SEQ ID NO: 4928
aauaagaguaccuaccuua

SEQ ID NO: 4930 - RNA, 19 nt, Artificial Sequence
  Description of Artificial Sequence: Synthetic oligonucleotide
  Sense strand starting at position 2995 of SEQ ID NO: 12
ggcaucuuuggagauuauc

SEQ ID NO: 4931 - RNA, 19 nt, Artificial Sequence
  Description of Artificial Sequence: Synthetic oligonucleotide
  Antisense strand to SEQ ID NO: 4930
gauaaucuccaaagaugcc

SEQ ID NO: 4932 - RNA, 19 nt, Artificial Sequence
  Description of Artificial Sequence: Synthetic oligonucleotide
  Sense strand starting at position 3001 of SEQ ID NO: 12
uuuggagauuaucugcuuu

SEQ ID NO: 4933 - RNA, 19 nt, Artificial Sequence
  Description of Artificial Sequence: Synthetic oligonucleotide
  Antisense strand to SEQ ID NO: 4932
aaagcagauaaucuccaaa

SEQ ID NO: 4934 - RNA, 19 nt, Artificial Sequence
  Description of Artificial Sequence: Synthetic oligonucleotide
  Sense strand starting at position 3021 of SEQ ID NO: 12
cuccucuagucuucgaaag

SEQ ID NO: 4935 - RNA, 19 nt, Artificial Sequence
  Description of Artificial Sequence: Synthetic oligonucleotide
  Antisense strand to SEQ ID NO: 4934
cuuucgaagacuagaggag

SEQ ID NO: 4936 - RNA, 19 nt, Artificial Sequence
  Description of Artificial Sequence: Synthetic oligonucleotide
  Sense strand starting at position 3169 of SEQ ID NO: 12
uuacuucuguucuuggaau

SEQ ID NO: 4937 - RNA, 19 nt, Artificial Sequence
  Description of Artificial Sequence: Synthetic oligonucleotide
  Antisense strand to SEQ ID NO: 4936
auuccaagaacagaaguaa

SEQ ID NO: 4938 - RNA, 19 nt, Artificial Sequence
  Description of Artificial Sequence: Synthetic oligonucleotide
  Sense strand starting at position 3171 of SEQ ID NO: 12
acuucuguucuuggaauaa

SEQ ID NO: 4939 - RNA, 19 nt, Artificial Sequence
  Description of Artificial Sequence: Synthetic oligonucleotide
  Antisense strand to SEQ ID NO: 4938
uuauuccaagaacagaagu

SEQ ID NO: 4940 - RNA, 19 nt, Artificial Sequence
  Description of Artificial Sequence: Synthetic oligonucleotide
  Sense strand starting at position 3331 of SEQ ID NO: 12
guaauagaauccuuguaga

SEQ ID NO: 4941 - RNA, 19 nt, Artificial Sequence
  Description of Artificial Sequence: Synthetic oligonucleotide
  Antisense strand to SEQ ID NO: 4940
ucuacaaggauucuauuac

SEQ ID NO: 4942 - RNA, 19 nt, Artificial Sequence
  Description of Artificial Sequence: Synthetic oligonucleotide
  Sense strand starting at position 3377 of SEQ ID NO: 12
uguauucuggaagaguuua

SEQ ID NO: 4943 - RNA, 19 nt, Artificial Sequence
  Description of Artificial Sequence: Synthetic oligonucleotide
  Antisense strand to SEQ ID NO: 4942
uaaacucuuccagaauaca

SEQ ID NO: 4944 - RNA, 19 nt, Artificial Sequence
  Description of Artificial Sequence: Synthetic oligonucleotide
  Sense strand starting at position 3665 of SEQ ID NO: 12
gugugcuuacaugauggaa

SEQ ID NO: 4945 - RNA, 19 nt, Artificial Sequence
  Description of Artificial Sequence: Synthetic oligonucleotide
  Antisense strand to SEQ ID NO: 4944
uuccaucauguaagcacac

SEQ ID NO: 4946 - RNA, 19 nt, Artificial Sequence
  Description of Artificial Sequence: Synthetic oligonucleotide
  Sense strand starting at position 3746 of SEQ ID NO: 12
acauaauguugaguauaag

SEQ ID NO: 4947 - RNA, 19 nt, Artificial Sequence
  Description of Artificial Sequence: Synthetic oligonucleotide
  Antisense strand to SEQ ID NO: 4946
cuuauacucaacauuaugu

SEQ ID NO: 4948 - RNA, 19 nt, Artificial Sequence
  Description of Artificial Sequence: Synthetic oligonucleotide
  Sense strand starting at position 3752 of SEQ ID NO: 12
uguugaguauaagccuaua

SEQ ID NO: 4949 - RNA, 19 nt, Artificial Sequence
  Description of Artificial Sequence: Synthetic oligonucleotide
  Antisense strand to SEQ ID NO: 4948
uauaggcuuauacucaaca

SEQ ID NO: 4950 - RNA, 19 nt, Artificial Sequence
  Description of Artificial Sequence: Synthetic oligonucleotide
  Sense strand starting at position 3755 of SEQ ID NO: 12
ugaguauaagccuauacuc

SEQ ID NO: 4951 - RNA, 19 nt, Artificial Sequence
  Description of Artificial Sequence: Synthetic oligonucleotide
  Antisense strand to SEQ ID NO: 4950
gaguauaggcuuauacuca

SEQ ID NO: 4952 - RNA, 19 nt, Artificial Sequence
  Description of Artificial Sequence: Synthetic oligonucleotide
  Sense strand starting at position 3836 of SEQ ID NO: 12
ugguguuagacucaggaua

SEQ ID NO: 4953 - RNA, 19 nt, Artificial Sequence
  Description of Artificial Sequence: Synthetic oligonucleotide
  Antisense strand to SEQ ID NO: 4952
uauccugagucuaacacca

SEQ ID NO: 4954 - RNA, 19 nt, Artificial Sequence
  Description of Artificial Sequence: Synthetic oligonucleotide
  Sense strand starting at position 3857 of SEQ ID NO: 12
ggguaaccucaggguuagu

SEQ ID NO: 4955 - RNA, 19 nt, Artificial Sequence
  Description of Artificial Sequence: Synthetic oligonucleotide
  Antisense strand to SEQ ID NO: 4954
acuaacccugagguuaccc

SEQ ID NO: 4956 - RNA, 19 nt, Artificial Sequence
  Description of Artificial Sequence: Synthetic oligonucleotide
  Sense strand starting at position 3860 of SEQ ID NO: 12
uaaccucaggguuagugau

SEQ ID NO: 4957 - RNA, 19 nt, Artificial Sequence
  Description of Artificial Sequence: Synthetic oligonucleotide
  Antisense strand to SEQ ID NO: 4956
aucacuaacccugagguua

SEQ ID NO: 4958 - RNA, 19 nt, Artificial Sequence
  Description of Artificial Sequence: Synthetic oligonucleotide
  Sense strand starting at position 3866 of SEQ ID NO: 12
caggguuagugaucugaag

SEQ ID NO: 4959 - RNA, 19 nt, Artificial Sequence
  Description of Artificial Sequence: Synthetic oligonucleotide
  Antisense strand to SEQ ID NO: 4958
cuucagaucacuaacccug

SEQ ID NO: 4960 - RNA, 19 nt, Artificial Sequence
  Description of Artificial Sequence: Synthetic oligonucleotide
  Sense strand starting at position 3899 of SEQ ID NO: 12
acuucuggaaguuggauau

SEQ ID NO: 4961 - RNA, 19 nt, Artificial Sequence
  Description of Artificial Sequence: Synthetic oligonucleotide
  Antisense strand to SEQ ID NO: 4960
auauccaacuuccagaagu

SEQ ID NO: 4962 - RNA, 19 nt, Artificial Sequence
  Description of Artificial Sequence: Synthetic oligonucleotide
  Sense strand starting at position 3905 of SEQ ID NO: 12
ggaaguuggauauguuguu

SEQ ID NO: 4963 - RNA, 19 nt, Artificial Sequence
  Description of Artificial Sequence: Synthetic oligonucleotide
  Antisense strand to SEQ ID NO: 4962
aacaacauauccaacuucc

SEQ ID NO: 4964 - RNA, 19 nt, Artificial Sequence
  Description of Artificial Sequence: Synthetic oligonucleotide
  Sense strand starting at position 3921 of SEQ ID NO: 12
guuucuuaagccgaacauu

SEQ ID NO: 4965 - RNA, 19 nt, Artificial Sequence
  Description of Artificial Sequence: Synthetic oligonucleotide
  Antisense strand to SEQ ID NO: 4964
aauguucggcuuaagaaac

SEQ ID NO: 4966 - RNA, 19 nt, Artificial Sequence
  Description of Artificial Sequence: Synthetic oligonucleotide
  Sense strand starting at position 3932 of SEQ ID NO: 12
cgaacauuaguacacugau

SEQ ID NO: 4967 - RNA, 19 nt, Artificial Sequence
  Description of Artificial Sequence: Synthetic oligonucleotide
  Antisense strand to SEQ ID NO: 4966
aucaguguacuaauguucg

SEQ ID NO: 4968 - RNA, 19 nt, Artificial Sequence
  Description of Artificial Sequence: Synthetic oligonucleotide
  Sense strand starting at position 3975 of SEQ ID NO: 13
cauagauauucuugagagu

SEQ ID NO: 4969 - RNA, 19 nt, Artificial Sequence
  Description of Artificial Sequence: Synthetic oligonucleotide
  Antisense strand to SEQ ID NO: 4968
acucucaagaauaucuaug

SEQ ID NO: 4970 - RNA, 19 nt, Artificial Sequence
  Description of Artificial Sequence: Synthetic oligonucleotide
  Sense strand starting at position 3963 of SEQ ID NO: 13
auuguugcuguacauagau

SEQ ID NO: 4971 - RNA, 19 nt, Artificial Sequence
  Description of Artificial Sequence: Synthetic oligonucleotide
  Antisense strand to SEQ ID NO: 4970
aucuauguacagcaacaau

SEQ ID NO: 4972 - RNA, 19 nt, Artificial Sequence
  Description of Artificial Sequence: Synthetic oligonucleotide
  Sense strand starting at position 3959 of SEQ ID NO: 13
uuauauuguugcuguacau

SEQ ID NO: 4973 - RNA, 19 nt, Artificial Sequence
  Description of Artificial Sequence: Synthetic oligonucleotide
  Antisense strand to SEQ ID NO: 4972
auguacagcaacaauauaa

SEQ ID NO: 4974 - RNA, 19 nt, Artificial Sequence
  Description of Artificial Sequence: Synthetic oligonucleotide
  Sense strand starting at position 3958 of SEQ ID NO: 13
guuauauuguugcuguaca

SEQ ID NO: 4975 - RNA, 19 nt, Artificial Sequence
  Description of Artificial Sequence: Synthetic oligonucleotide
  Antisense strand to SEQ ID NO: 4974
uguacagcaacaauauaac

SEQ ID NO: 4976 - RNA, 19 nt, Artificial Sequence
  Description of Artificial Sequence: Synthetic oligonucleotide
  Sense strand starting at position 3956 of SEQ ID NO: 13
gaguuauauuguugcugua

SEQ ID NO: 4977 - RNA, 19 nt, Artificial Sequence
  Description of Artificial Sequence: Synthetic oligonucleotide
  Antisense strand to SEQ ID NO: 4976
uacagcaacaauauaacuc

SEQ ID NO: 4978 - RNA, 19 nt, Artificial Sequence
  Description of Artificial Sequence: Synthetic oligonucleotide
  Sense strand starting at position 3955 of SEQ ID NO: 13
agaguuauauuguugcugu

SEQ ID NO: 4979 - RNA, 19 nt, Artificial Sequence
  Description of Artificial Sequence: Synthetic oligonucleotide
  Antisense strand to SEQ ID NO: 4978
acagcaacaauauaacucu

SEQ ID NO: 4980 - RNA, 19 nt, Artificial Sequence
  Description of Artificial Sequence: Synthetic oligonucleotide
  Sense strand starting at position 3950 of SEQ ID NO: 13
cuuguagaguuauauuguu

SEQ ID NO: 4981 - RNA, 19 nt, Artificial Sequence
  Description of Artificial Sequence: Synthetic oligonucleotide
  Antisense strand to SEQ ID NO: 4980
aacaauauaacucuacaag

SEQ ID NO: 4982 - RNA, 19 nt, Artificial Sequence
  Description of Artificial Sequence: Synthetic oligonucleotide
  Sense strand starting at position 3942 of SEQ ID NO: 13
uucucucccuuguagaguu

SEQ ID NO: 4983 - RNA, 19 nt, Artificial Sequence
  Description of Artificial Sequence: Synthetic oligonucleotide
  Antisense strand to SEQ ID NO: 4982
aacucuacaagggagagaa

SEQ ID NO: 4984 - RNA, 19 nt, Artificial Sequence
  Description of Artificial Sequence: Synthetic oligonucleotide
  Sense strand starting at position 3769 of SEQ ID NO: 13
gugaauuuggucugguggu

SEQ ID NO: 4985 - RNA, 19 nt, Artificial Sequence
  Description of Artificial Sequence: Synthetic oligonucleotide
  Antisense strand to SEQ ID NO: 4984
accaccagaccaaauucac

SEQ ID NO: 4986 - RNA, 19 nt, Artificial Sequence
  Description of Artificial Sequence: Synthetic oligonucleotide
  Sense strand starting at position 3689 of SEQ ID NO: 13
auggguaccucguagagau

SEQ ID NO: 4987 - RNA, 19 nt, Artificial Sequence
  Description of Artificial Sequence: Synthetic oligonucleotide
  Antisense strand to SEQ ID NO: 4986
aucucuacgagguacccau

SEQ ID NO: 4988 - RNA, 19 nt, Artificial Sequence
  Description of Artificial Sequence: Synthetic oligonucleotide
  Sense strand starting at position 3605 of SEQ ID NO: 13
ucuccaguguuguuaagga

SEQ ID NO: 4989 - RNA, 19 nt, Artificial Sequence
  Description of Artificial Sequence: Synthetic oligonucleotide
  Antisense strand to SEQ ID NO: 4988
uccuuaacaacacuggaga

SEQ ID NO: 4990 - RNA, 19 nt, Artificial Sequence
  Description of Artificial Sequence: Synthetic oligonucleotide
  Sense strand starting at position 3532 of SEQ ID NO: 13
ucagaacaaugagauagaa

SEQ ID NO: 4991 - RNA, 19 nt, Artificial Sequence
  Description of Artificial Sequence: Synthetic oligonucleotide
  Antisense strand to SEQ ID NO: 4990
uucuaucucauuguucuga

SEQ ID NO: 4992 - RNA, 19 nt, Artificial Sequence
  Description of Artificial Sequence: Synthetic oligonucleotide
  Sense strand starting at position 3523 of SEQ ID NO: 13
guguccaagucagaacaau

SEQ ID NO: 4993 - RNA, 19 nt, Artificial Sequence
  Description of Artificial Sequence: Synthetic oligonucleotide
  Antisense strand to SEQ ID NO: 4992
auuguucugacuuggacac

SEQ ID NO: 4994 - RNA, 19 nt, Artificial Sequence
  Description of Artificial Sequence: Synthetic oligonucleotide
  Sense strand starting at position 3295 of SEQ ID NO: 13
uguaaaguuucucacugag

SEQ ID NO: 4995 - RNA, 19 nt, Artificial Sequence
  Description of Artificial Sequence: Synthetic oligonucleotide
  Antisense strand to SEQ ID NO: 4994
cucagugagaaacuuuaca

SEQ ID NO: 4996 - RNA, 19 nt, Artificial Sequence
  Description of Artificial Sequence: Synthetic oligonucleotide
  Sense strand starting at position 3294 of SEQ ID NO: 13
auguaaaguuucucacuga

SEQ ID NO: 4997 - RNA, 19 nt, Artificial Sequence
  Description of Artificial Sequence: Synthetic oligonucleotide
  Antisense strand to SEQ ID NO: 4996
ucagugagaaacuuuacau

SEQ ID NO: 4998 - RNA, 19 nt, Artificial Sequence
  Description of Artificial Sequence: Synthetic oligonucleotide
  Sense strand starting at position 3281 of SEQ ID NO: 13
gcaucuuagcaauauguaa

SEQ ID NO: 4999 - RNA, 19 nt, Artificial Sequence
  Description of Artificial Sequence: Synthetic oligonucleotide
  Antisense strand to SEQ ID NO: 4998
uuacauauugcuaagaugc

SEQ ID NO: 5000 - RNA, 19 nt, Artificial Sequence
  Description of Artificial Sequence: Synthetic oligonucleotide
  Sense strand starting at position 3277 of SEQ ID NO: 13
ccaggcaucuuagcaauau

SEQ ID NO: 5001 - RNA, 19 nt, Artificial Sequence
  Description of Artificial Sequence: Synthetic oligonucleotide
  Antisense strand to SEQ ID NO: 5000
auauugcuaagaugccugg

SEQ ID NO: 5002 - RNA, 19 nt, Artificial Sequence
  Description of Artificial Sequence: Synthetic oligonucleotide
  Sense strand starting at position 3248 of SEQ ID NO: 13
acauaaagucucuggaacu

SEQ ID NO: 5003 - RNA, 19 nt, Artificial Sequence
  Description of Artificial Sequence: Synthetic oligonucleotide
  Antisense strand to SEQ ID NO: 5002
aguuccagagacuuuaugu

SEQ ID NO: 5004 - RNA, 19 nt, Artificial Sequence
  Description of Artificial Sequence: Synthetic oligonucleotide
  Sense strand starting at position 3247 of SEQ ID NO: 13
gacauaaagucucuggaac

SEQ ID NO: 5005 - RNA, 19 nt, Artificial Sequence
  Description of Artificial Sequence: Synthetic oligonucleotide
  Antisense strand to SEQ ID NO: 5004
guuccagagacuuuauguc

SEQ ID NO: 5006 - RNA, 19 nt, Artificial Sequence
  Description of Artificial Sequence: Synthetic oligonucleotide
  Sense strand starting at position 684 of SEQ ID NO: 13
gcaagaaagucugacauaa

SEQ ID NO: 5007 - RNA, 19 nt, Artificial Sequence
  Description of Artificial Sequence: Synthetic oligonucleotide
  Antisense strand to SEQ ID NO: 5006
uuaugucagacuuucuugc

SEQ ID NO: 5008 - RNA, 19 nt, Artificial Sequence
  Description of Artificial Sequence: Synthetic oligonucleotide
  Sense strand starting at position 617 of SEQ ID NO: 13
uguguacccugaggguauu

SEQ ID NO: 5009 - RNA, 19 nt, Artificial Sequence
  Description of Artificial Sequence: Synthetic oligonucleotide
  Antisense strand to SEQ ID NO: 5008
aauacccucaggguacaca

SEQ ID NO: 5010 - RNA, 19 nt, Artificial Sequence
  Description of Artificial Sequence: Synthetic oligonucleotide
  Sense strand starting at position 569 of SEQ ID NO: 13
ucucuucucccuugagaug

SEQ ID NO: 5011 - RNA, 19 nt, Artificial Sequence
  Description of Artificial Sequence: Synthetic oligonucleotide
  Antisense strand to SEQ ID NO: 5010
caucucaagggagaagaga

SEQ ID NO: 5012 - RNA, 19 nt, Artificial Sequence
  Description of Artificial Sequence: Synthetic oligonucleotide
  Sense strand starting at position 457 of SEQ ID NO: 13
cucucaguuugaguuccua

SEQ ID NO: 5013 - RNA, 19 nt, Artificial Sequence
  Description of Artificial Sequence: Synthetic oligonucleotide
  Antisense strand to SEQ ID NO: 5012
uaggaacucaaacugagag

SEQ ID NO: 5014 - RNA, 19 nt, Artificial Sequence
  Description of Artificial Sequence: Synthetic oligonucleotide
  Sense strand starting at position 451 of SEQ ID NO: 13
guuuaucucucaguuugag

SEQ ID NO: 5015 - RNA, 19 nt, Artificial Sequence
  Description of Artificial Sequence: Synthetic oligonucleotide
  Antisense strand to SEQ ID NO: 5014
cucaaacugagagauaaac

SEQ ID NO: 5016 - RNA, 19 nt, Artificial Sequence
  Description of Artificial Sequence: Synthetic oligonucleotide
  Sense strand starting at position 428 of SEQ ID NO: 13
gggcuuugucaucacucuu

SEQ ID NO: 5017 - RNA, 19 nt, Artificial Sequence
  Description of Artificial Sequence: Synthetic oligonucleotide
  Antisense strand to SEQ ID NO: 5016
aagagugaugacaaagccc

SEQ ID NO: 5018 - RNA, 19 nt, Artificial Sequence
  Description of Artificial Sequence: Synthetic oligonucleotide
  Sense strand starting at position 427 of SEQ ID NO: 13
ugggcuuugucaucacucu

SEQ ID NO: 5019 - RNA, 19 nt, Artificial Sequence
  Description of Artificial Sequence: Synthetic oligonucleotide
  Antisense strand to SEQ ID NO: 5018
agagugaugacaaagccca

SEQ ID NO: 5020 - RNA, 19 nt, Artificial Sequence
  Description of Artificial Sequence: Synthetic oligonucleotide
  Sense strand starting at position 415 of SEQ ID NO: 13
gugguauugcucugggcuu

SEQ ID NO: 5021 - RNA, 19 nt, Artificial Sequence
  Description of Artificial Sequence: Synthetic oligonucleotide
  Antisense strand to SEQ ID NO: 5020
aagcccagagcaauaccac

SEQ ID NO: 5022 - RNA, 19 nt, Artificial Sequence
  Description of Artificial Sequence: Synthetic oligonucleotide
  Sense strand starting at position 286 of SEQ ID NO: 13
ugauauguucccugaacug

SEQ ID NO: 5023 - RNA, 19 nt, Artificial Sequence
  Description of Artificial Sequence: Synthetic oligonucleotide
  Antisense strand to SEQ ID NO: 5022
caguucagggaacauauca

SEQ ID NO: 5024 - RNA, 19 nt, Artificial Sequence
  Description of Artificial Sequence: Synthetic oligonucleotide
  Sense strand starting at position 285 of SEQ ID NO: 13
uugauauguucccugaacu

SEQ ID NO: 5025 - RNA, 19 nt, Artificial Sequence
  Description of Artificial Sequence: Synthetic oligonucleotide
  Antisense strand to SEQ ID NO: 5024
aguucagggaacauaucaa

SEQ ID NO: 5026 - RNA, 19 nt, Artificial Sequence
  Description of Artificial Sequence: Synthetic oligonucleotide
  Sense strand starting at position 284 of SEQ ID NO: 13
cuugauauguucccugaac

SEQ ID NO: 5027 - RNA, 19 nt, Artificial Sequence
  Description of Artificial Sequence: Synthetic oligonucleotide
  Antisense strand to SEQ ID NO: 5026
guucagggaacauaucaag

SEQ ID NO: 5028 - RNA, 19 nt, Artificial Sequence
  Description of Artificial Sequence: Synthetic oligonucleotide
  Sense strand starting at position 249 of SEQ ID NO: 13
agagaugacucccaggaag

SEQ ID NO: 5029 - RNA, 19 nt, Artificial Sequence
  Description of Artificial Sequence: Synthetic oligonucleotide
  Antisense strand to SEQ ID NO: 5028
cuuccugggagucaucucu

SEQ ID NO: 5030 - RNA, 19 nt, Artificial Sequence
  Description of Artificial Sequence: Synthetic oligonucleotide
  Sense strand starting at position 236 of SEQ ID NO: 13
ugaggaaccugggagagau

SEQ ID NO: 5031 - RNA, 19 nt, Artificial Sequence
  Description of Artificial Sequence: Synthetic oligonucleotide
  Antisense strand to SEQ ID NO: 5030
aucucucccagguuccuca

SEQ ID NO: 5032 - RNA, 19 nt, Artificial Sequence
  Description of Artificial Sequence: Synthetic oligonucleotide
  Sense strand starting at position 176 of SEQ ID NO: 13
ucgagaaacagauguguac

SEQ ID NO: 5033 - RNA, 19 nt, Artificial Sequence
  Description of Artificial Sequence: Synthetic oligonucleotide
  Antisense strand to SEQ ID NO: 5032
guacacaucuguuucucga

SEQ ID NO: 5034 - RNA, 19 nt, Artificial Sequence
  Description of Artificial Sequence: Synthetic oligonucleotide
  Sense strand starting at position 157 of SEQ ID NO: 13
aaagguagauucuaacaga

SEQ ID NO: 5035 - RNA, 19 nt, Artificial Sequence
  Description of Artificial Sequence: Synthetic oligonucleotide
  Antisense strand to SEQ ID NO: 5034
ucuguuagaaucuaccuuu

SEQ ID NO: 5036 - RNA, 19 nt, Artificial Sequence
  Description of Artificial Sequence: Synthetic oligonucleotide
  Sense strand starting at position 113 of SEQ ID NO: 13
agcucauggguggacauau

SEQ ID NO: 5037 - RNA, 19 nt, Artificial Sequence
  Description of Artificial Sequence: Synthetic oligonucleotide
  Antisense strand to SEQ ID NO: 5036
auauguccacccaugagcu

SEQ ID NO: 5038 - RNA, 19 nt, Artificial Sequence
  Description of Artificial Sequence: Synthetic oligonucleotide
  Sense strand starting at position 95 of SEQ ID NO: 13
ggugcugacagagaugcaa

SEQ ID NO: 5039 - RNA, 19 nt, Artificial Sequence
  Description of Artificial Sequence: Synthetic oligonucleotide
  Antisense strand to SEQ ID NO: 5038
uugcaucucugucagcacc

SEQ ID NO: 5040 - RNA, 19 nt, Artificial Sequence
  Description of Artificial Sequence: Synthetic oligonucleotide
  Sense strand starting at position 43 of SEQ ID NO: 13
ggguuuggguccugagaaa

SEQ ID NO: 5041 - RNA, 19 nt, Artificial Sequence
  Description of Artificial Sequence: Synthetic oligonucleotide
  Antisense strand to SEQ ID NO: 5040
uuucucaggacccaaaccc

SEQ ID NO: 5042 - RNA, 19 nt, Artificial Sequence
  Description of Artificial Sequence: Synthetic oligonucleotide
  Sense strand starting at position 2 of SEQ ID NO: 13
uucuauauccugugaacag

SEQ ID NO: 5043 - RNA, 19 nt, Artificial Sequence
  Description of Artificial Sequence: Synthetic oligonucleotide
  Antisense strand to SEQ ID NO: 5042
cuguucacaggauauagaa

SEQ ID NO: 5044 - RNA, 19 nt, Artificial Sequence
  Description of Artificial Sequence: Synthetic oligonucleotide
  Sense strand starting at position 2865 of SEQ ID NO: 14
gcugaaugacacggauaau

SEQ ID NO: 5045 - RNA, 19 nt, Artificial Sequence
  Description of Artificial Sequence: Synthetic oligonucleotide
  Antisense strand to SEQ ID NO: 5044
auuauccgugucauucagc

SEQ ID NO: 5046 - RNA, 19 nt, Artificial Sequence
  Description of Artificial Sequence: Synthetic oligonucleotide
  Sense strand starting at position 2864 of SEQ ID NO: 14
agcugaaugacacggauaa

SEQ ID NO: 5047 - RNA, 19 nt, Artificial Sequence
  Description of Artificial Sequence: Synthetic oligonucleotide
  Antisense strand to SEQ ID NO: 5046
uuauccgugucauucagcu

SEQ ID NO: 5048 - RNA, 19 nt, Artificial Sequence
  Description of Artificial Sequence: Synthetic oligonucleotide
  Sense strand starting at position 2729 of SEQ ID NO: 14
cauagauauucuugagagu

SEQ ID NO: 5049 - RNA, 19 nt, Artificial Sequence
  Description of Artificial Sequence: Synthetic oligonucleotide
  Antisense strand to SEQ ID NO: 5048
acucucaagaauaucuaug

SEQ ID NO: 5050 - RNA, 19 nt, Artificial Sequence
  Description of Artificial Sequence: Synthetic oligonucleotide
  Sense strand starting at position 2717 of SEQ ID NO: 14
auuguugcuguacauagau

SEQ ID NO: 5051 - RNA, 19 nt, Artificial Sequence
  Description of Artificial Sequence: Synthetic oligonucleotide
  Antisense strand to SEQ ID NO: 5050
aucuauguacagcaacaau

SEQ ID NO: 5052 - RNA, 19 nt, Artificial Sequence
  Description of Artificial Sequence: Synthetic oligonucleotide
  Sense strand starting at position 2713 of SEQ ID NO: 14
uuauauuguugcuguacau

SEQ ID NO: 5053 - RNA, 19 nt, Artificial Sequence
  Description of Artificial Sequence: Synthetic oligonucleotide
  Antisense strand to SEQ ID NO: 5052
auguacagcaacaauauaa

SEQ ID NO: 5054 - RNA, 19 nt, Artificial Sequence
  Description of Artificial Sequence: Synthetic oligonucleotide
  Sense strand starting at position 2712 of SEQ ID NO: 14
guuauauuguugcuguaca

SEQ ID NO: 5055 - RNA, 19 nt, Artificial Sequence
  Description of Artificial Sequence: Synthetic oligonucleotide
  Antisense strand to SEQ ID NO: 5054
uguacagcaacaauauaac

SEQ ID NO: 5056 - RNA, 19 nt, Artificial Sequence
  Description of Artificial Sequence: Synthetic oligonucleotide
  Sense strand starting at position 2710 of SEQ ID NO: 14
gaguuauauuguugcugua

SEQ ID NO: 5057 - RNA, 19 nt, Artificial Sequence
  Description of Artificial Sequence: Synthetic oligonucleotide
  Antisense strand to SEQ ID NO: 5056
uacagcaacaauauaacuc

SEQ ID NO: 5058 - RNA, 19 nt, Artificial Sequence
  Description of Artificial Sequence: Synthetic oligonucleotide
  Sense strand starting at position 2709 of SEQ ID NO: 14
agaguuauauuguugcugu

SEQ ID NO: 5059 - RNA, 19 nt, Artificial Sequence
  Description of Artificial Sequence: Synthetic oligonucleotide
  Antisense strand to SEQ ID NO: 5058
acagcaacaauauaacucu

SEQ ID NO: 5060 - RNA, 19 nt, Artificial Sequence
  Description of Artificial Sequence: Synthetic oligonucleotide
  Sense strand starting at position 2704 of SEQ ID NO: 14
cuuguagaguuauauuguu

SEQ ID NO: 5061 - RNA, 19 nt, Artificial Sequence
  Description of Artificial Sequence: Synthetic oligonucleotide
  Antisense strand to SEQ ID NO: 5060
aacaauauaacucuacaag

SEQ ID NO: 5062 - RNA, 19 nt, Artificial Sequence
  Description of Artificial Sequence: Synthetic oligonucleotide
  Sense strand starting at position 2696 of SEQ ID NO: 14
uucucucccuuguagaguu

SEQ ID NO: 5063 - RNA, 19 nt, Artificial Sequence
  Description of Artificial Sequence: Synthetic oligonucleotide
  Antisense strand to SEQ ID NO: 5062
aacucuacaagggagagaa

SEQ ID NO: 5064 - RNA, 19 nt, Artificial Sequence
  Description of Artificial Sequence: Synthetic oligonucleotide
  Sense strand starting at position 2523 of SEQ ID NO: 14
gugaauuuggucugguggu

SEQ ID NO: 5065 - RNA, 19 nt, Artificial Sequence
  Description of Artificial Sequence: Synthetic oligonucleotide
  Antisense strand to SEQ ID NO: 5064
accaccagaccaaauucac

SEQ ID NO: 5066 - RNA, 19 nt, Artificial Sequence
  Description of Artificial Sequence: Synthetic oligonucleotide
  Sense strand starting at position 2443 of SEQ ID NO: 14
auggguaccucguagagau

SEQ ID NO: 5067 - RNA, 19 nt, Artificial Sequence
  Description of Artificial Sequence: Synthetic oligonucleotide
  Antisense strand to SEQ ID NO: 5066
aucucuacgagguacccau

SEQ ID NO: 5068 - RNA, 19 nt, Artificial Sequence
  Description of Artificial Sequence: Synthetic oligonucleotide
  Sense strand starting at position 2359 of SEQ ID NO: 14
ucuccaguguuguuaagga

SEQ ID NO: 5069 - RNA, 19 nt, Artificial Sequence
  Description of Artificial Sequence: Synthetic oligonucleotide
  Antisense strand to SEQ ID NO: 5068
uccuuaacaacacuggaga

SEQ ID NO: 5070 - RNA, 19 nt, Artificial Sequence
  Description of Artificial Sequence: Synthetic oligonucleotide
  Sense strand starting at position 2286 of SEQ ID NO: 14
ucagaacaaugagauagaa

SEQ ID NO: 5071 - RNA, 19 nt, Artificial Sequence
  Description of Artificial Sequence: Synthetic oligonucleotide
  Antisense strand to SEQ ID NO: 5070
uucuaucucauuguucuga

SEQ ID NO: 5072 - RNA, 19 nt, Artificial Sequence
  Description of Artificial Sequence: Synthetic oligonucleotide
  Sense strand starting at position 2277 of SEQ ID NO: 14
guguccaagucagaacaau

SEQ ID NO: 5073 - RNA, 19 nt, Artificial Sequence
  Description of Artificial Sequence: Synthetic oligonucleotide
  Antisense strand to SEQ ID NO: 5072
auuguucugacuuggacac

SEQ ID NO: 5074 - RNA, 19 nt, Artificial Sequence
  Description of Artificial Sequence: Synthetic oligonucleotide
  Sense strand starting at position 2049 of SEQ ID NO: 14
uguaaaguuucucacugag

SEQ ID NO: 5075 - RNA, 19 nt, Artificial Sequence
  Description of Artificial Sequence: Synthetic oligonucleotide
  Antisense strand to SEQ ID NO: 5074
cucagugagaaacuuuaca

SEQ ID NO: 5076 - RNA, 19 nt, Artificial Sequence
  Description of Artificial Sequence: Synthetic oligonucleotide
  Sense strand starting at position 2048 of SEQ ID NO: 14
auguaaaguuucucacuga

SEQ ID NO: 5077 - RNA, 19 nt, Artificial Sequence
  Description of Artificial Sequence: Synthetic oligonucleotide
  Antisense strand to SEQ ID NO: 5076
ucagugagaaacuuuacau

SEQ ID NO: 5078 - RNA, 19 nt, Artificial Sequence
  Description of Artificial Sequence: Synthetic oligonucleotide
  Sense strand starting at position 2035 of SEQ ID NO: 14
gcaucuuagcaauauguaa

SEQ ID NO: 5079 - RNA, 19 nt, Artificial Sequence
  Description of Artificial Sequence: Synthetic oligonucleotide
  Antisense strand to SEQ ID NO: 5078
uuacauauugcuaagaugc

SEQ ID NO: 5080 - RNA, 19 nt, Artificial Sequence
  Description of Artificial Sequence: Synthetic oligonucleotide
  Sense strand starting at position 2031 of SEQ ID NO: 14
ccaggcaucuuagcaauau

SEQ ID NO: 5081 - RNA, 19 nt, Artificial Sequence
  Description of Artificial Sequence: Synthetic oligonucleotide
  Antisense strand to SEQ ID NO: 5080
auauugcuaagaugccugg

SEQ ID NO: 5082 - RNA, 19 nt, Artificial Sequence
  Description of Artificial Sequence: Synthetic oligonucleotide
  Sense strand starting at position 2002 of SEQ ID NO: 14
acauaaagucucuggaacu

SEQ ID NO: 5083 - RNA, 19 nt, Artificial Sequence
  Description of Artificial Sequence: Synthetic oligonucleotide
  Antisense strand to SEQ ID NO: 5082
aguuccagagacuuuaugu

SEQ ID NO: 5084 - RNA, 19 nt, Artificial Sequence
  Description of Artificial Sequence: Synthetic oligonucleotide
  Sense strand starting at position 2001 of SEQ ID NO: 14
gacauaaagucucuggaac

SEQ ID NO: 5085 - RNA, 19 nt, Artificial Sequence
  Description of Artificial Sequence: Synthetic oligonucleotide
  Antisense strand to SEQ ID NO: 5084
guuccagagacuuuauguc

SEQ ID NO: 5086 - RNA, 19 nt, Artificial Sequence
  Description of Artificial Sequence: Synthetic oligonucleotide
  Sense strand starting at position 3978 of SEQ ID NO: 15
agcagagagcuagaucuuu

SEQ ID NO: 5087 - RNA, 19 nt, Artificial Sequence
  Description of Artificial Sequence: Synthetic oligonucleotide
  Antisense strand to SEQ ID NO: 5086
aaagaucuagcucucugcu

SEQ ID NO: 5088 - RNA, 19 nt, Artificial Sequence
  Description of Artificial Sequence: Synthetic oligonucleotide
  Sense strand starting at position 3951 of SEQ ID NO: 15
gaaucaaucuuaguguuag

SEQ ID NO: 5089 - RNA, 19 nt, Artificial Sequence
  Description of Artificial Sequence: Synthetic oligonucleotide
  Antisense strand to SEQ ID NO: 5088
cuaacacuaagauugauuc

SEQ ID NO: 5090 - RNA, 19 nt, Artificial Sequence
  Description of Artificial Sequence: Synthetic oligonucleotide
  Sense strand starting at position 3828 of SEQ ID NO: 15
ugaggaaguuggcuagaau

SEQ ID NO: 5091 - RNA, 19 nt, Artificial Sequence
  Description of Artificial Sequence: Synthetic oligonucleotide
  Antisense strand to SEQ ID NO: 5090
auucuagccaacuuccuca

SEQ ID NO: 5092 - RNA, 19 nt, Artificial Sequence
  Description of Artificial Sequence: Synthetic oligonucleotide
  Sense strand starting at position 3769 of SEQ ID NO: 15
cauguuacagauggcuaaa

SEQ ID NO: 5093 - RNA, 19 nt, Artificial Sequence
  Description of Artificial Sequence: Synthetic oligonucleotide
  Antisense strand to SEQ ID NO: 5092
uuuagccaucuguaacaug

SEQ ID NO: 5094 - RNA, 19 nt, Artificial Sequence
  Description of Artificial Sequence: Synthetic oligonucleotide
  Sense strand starting at position 3768 of SEQ ID NO: 15
gcauguuacagauggcuaa

SEQ ID NO: 5095 - RNA, 19 nt, Artificial Sequence
  Description of Artificial Sequence: Synthetic oligonucleotide
  Antisense strand to SEQ ID NO: 5094
uuagccaucuguaacaugc

SEQ ID NO: 5096 - RNA, 19 nt, Artificial Sequence
  Description of Artificial Sequence: Synthetic oligonucleotide
  Sense strand starting at position 3557 of SEQ ID NO: 15
ugagacuucccuggauggu

SEQ ID NO: 5097 - RNA, 19 nt, Artificial Sequence
  Description of Artificial Sequence: Synthetic oligonucleotide
  Antisense strand to SEQ ID NO: 5096
accauccagggaagucuca

SEQ ID NO: 5098 - RNA, 19 nt, Artificial Sequence
  Description of Artificial Sequence: Synthetic oligonucleotide
  Sense strand starting at position 3554 of SEQ ID NO: 15
ucaugagacuucccuggau

SEQ ID NO: 5099 - RNA, 19 nt, Artificial Sequence
  Description of Artificial Sequence: Synthetic oligonucleotide
  Antisense strand to SEQ ID NO: 5098
auccagggaagucucauga

SEQ ID NO: 5100 - RNA, 19 nt, Artificial Sequence
  Description of Artificial Sequence: Synthetic oligonucleotide
  Sense strand starting at position 3543 of SEQ ID NO: 15
caggacaggugucaugaga

SEQ ID NO: 5101 - RNA, 19 nt, Artificial Sequence
  Description of Artificial Sequence: Synthetic oligonucleotide
  Antisense strand to SEQ ID NO: 5100
ucucaugacaccuguccug

SEQ ID NO: 5102 - RNA, 19 nt, Artificial Sequence
  Description of Artificial Sequence: Synthetic oligonucleotide
  Sense strand starting at position 3508 of SEQ ID NO: 15
gcacgcucgacaugaggaa

SEQ ID NO: 5103 - RNA, 19 nt, Artificial Sequence
  Description of Artificial Sequence: Synthetic oligonucleotide
  Antisense strand to SEQ ID NO: 5102
uuccucaugucgagcgugc

SEQ ID NO: 5104 - RNA, 19 nt, Artificial Sequence
  Description of Artificial Sequence: Synthetic oligonucleotide
  Sense strand starting at position 3446 of SEQ ID NO: 15
gcucgaaugccagacauug

SEQ ID NO: 5105 - RNA, 19 nt, Artificial Sequence
  Description of Artificial Sequence: Synthetic oligonucleotide
  Antisense strand to SEQ ID NO: 5104
caaugucuggcauucgagc

SEQ ID NO: 5106 - RNA, 19 nt, Artificial Sequence
  Description of Artificial Sequence: Synthetic oligonucleotide
  Sense strand starting at position 3304 of SEQ ID NO: 15
uagagcucgccugaagacu

SEQ ID NO: 5107 - RNA, 19 nt, Artificial Sequence
  Description of Artificial Sequence: Synthetic oligonucleotide
  Antisense strand to SEQ ID NO: 5106
agucuucaggcgagcucua

SEQ ID NO: 5108 - RNA, 19 nt, Artificial Sequence
  Description of Artificial Sequence: Synthetic oligonucleotide
  Sense strand starting at position 3300 of SEQ ID NO: 15
gugcuagagcucgccugaa

SEQ ID NO: 5109 - RNA, 19 nt, Artificial Sequence
  Description of Artificial Sequence: Synthetic oligonucleotide
  Antisense strand to SEQ ID NO: 5108
uucaggcgagcucuagcac

SEQ ID NO: 5110 - RNA, 19 nt, Artificial Sequence
  Description of Artificial Sequence: Synthetic oligonucleotide
  Sense strand starting at position 3267 of SEQ ID NO: 15
uggagcaauccuggagacu

SEQ ID NO: 5111 - RNA, 19 nt, Artificial Sequence
  Description of Artificial Sequence: Synthetic oligonucleotide
  Antisense strand to SEQ ID NO: 5110
agucuccaggauugcucca

SEQ ID NO: 5112 - RNA, 19 nt, Artificial Sequence
  Description of Artificial Sequence: Synthetic oligonucleotide
  Sense strand starting at position 3248 of SEQ ID NO: 15
cauggauggcccugaggau

SEQ ID NO: 5113 - RNA, 19 nt, Artificial Sequence
  Description of Artificial Sequence: Synthetic oligonucleotide
  Antisense strand to SEQ ID NO: 5112
auccucagggccauccaug

SEQ ID NO: 5114 - RNA, 19 nt, Artificial Sequence
  Description of Artificial Sequence: Synthetic oligonucleotide
  Sense strand starting at position 3190 of SEQ ID NO: 15
ccauucugugucuacaaau

SEQ ID NO: 5115 - RNA, 19 nt, Artificial Sequence
  Description of Artificial Sequence: Synthetic oligonucleotide
  Antisense strand to SEQ ID NO: 5114
auuuguagacacagaaugg

SEQ ID NO: 5116 - RNA, 19 nt, Artificial Sequence
  Description of Artificial Sequence: Synthetic oligonucleotide
  Sense strand starting at position 3189 of SEQ ID NO: 15
gccauucugugucuacaaa

SEQ ID NO: 5117 - RNA, 19 nt, Artificial Sequence
  Description of Artificial Sequence: Synthetic oligonucleotide
  Antisense strand to SEQ ID NO: 5116
uuuguagacacagaauggc

SEQ ID NO: 5118 - RNA, 19 nt, Artificial Sequence
  Description of Artificial Sequence: Synthetic oligonucleotide
  Sense strand starting at position 3175 of SEQ ID NO: 15
cuuguuaguggucagccau

SEQ ID NO: 5119 - RNA, 19 nt, Artificial Sequence
  Description of Artificial Sequence: Synthetic oligonucleotide
  Antisense strand to SEQ ID NO: 5118
auggcugaccacuaacaag

SEQ ID NO: 5120 - RNA, 19 nt, Artificial Sequence
  Description of Artificial Sequence: Synthetic oligonucleotide
  Sense strand starting at position 3165 of SEQ ID NO: 15
ccucaaacagcuuguuagu

SEQ ID NO: 5121 - RNA, 19 nt, Artificial Sequence
  Description of Artificial Sequence: Synthetic oligonucleotide
  Antisense strand to SEQ ID NO: 5120
acuaacaagcuguuugagg

SEQ ID NO: 5122 - RNA, 19 nt, Artificial Sequence
  Description of Artificial Sequence: Synthetic oligonucleotide
  Sense strand starting at position 3058 of SEQ ID NO: 15
acuaguguaccaugugacu

SEQ ID NO: 5123 - RNA, 19 nt, Artificial Sequence
  Description of Artificial Sequence: Synthetic oligonucleotide
  Antisense strand to SEQ ID NO: 5122
agucacaugguacacuagu

SEQ ID NO: 5124 - RNA, 19 nt, Artificial Sequence
  Description of Artificial Sequence: Synthetic oligonucleotide
  Sense strand starting at position 3029 of SEQ ID NO: 15
gccuaagaagccugaguuc

SEQ ID NO: 5125 - RNA, 19 nt, Artificial Sequence
  Description of Artificial Sequence: Synthetic oligonucleotide
  Antisense strand to SEQ ID NO: 5124
gaacucaggcuucuuaggc

SEQ ID NO: 5126 - RNA, 19 nt, Artificial Sequence
  Description of Artificial Sequence: Synthetic oligonucleotide
  Sense strand starting at position 3020 of SEQ ID NO: 15
gccugucuugccuaagaag

SEQ ID NO: 5127 - RNA, 19 nt, Artificial Sequence
  Description of Artificial Sequence: Synthetic oligonucleotide
  Antisense strand to SEQ ID NO: 5126
cuucuuaggcaagacaggc

SEQ ID NO: 5128 - RNA, 19 nt, Artificial Sequence
  Description of Artificial Sequence: Synthetic oligonucleotide
  Sense strand starting at position 3018 of SEQ ID NO: 15
aggccugucuugccuaaga

SEQ ID NO: 5129 - RNA, 19 nt, Artificial Sequence
  Description of Artificial Sequence: Synthetic oligonucleotide
  Antisense strand to SEQ ID NO: 5128
ucuuaggcaagacaggccu

SEQ ID NO: 5130 - RNA, 19 nt, Artificial Sequence
  Description of Artificial Sequence: Synthetic oligonucleotide
  Sense strand starting at position 2938 of SEQ ID NO: 15
gcuggauuccgagggcaca

SEQ ID NO: 5131 - RNA, 19 nt, Artificial Sequence
  Description of Artificial Sequence: Synthetic oligonucleotide
  Antisense strand to SEQ ID NO: 5130
ugugcccucggaauccagc

SEQ ID NO: 5132 - RNA, 19 nt, Artificial Sequence
  Description of Artificial Sequence: Synthetic oligonucleotide
  Sense strand starting at position 2475 of SEQ ID NO: 15
uuaaauaggcagugugacu

SEQ ID NO: 5133 - RNA, 19 nt, Artificial Sequence
  Description of Artificial Sequence: Synthetic oligonucleotide
  Antisense strand to SEQ ID NO: 5132
agucacacugccuauuuaa

SEQ ID NO: 5134 - RNA, 19 nt, Artificial Sequence
  Description of Artificial Sequence: Synthetic oligonucleotide
  Sense strand starting at position 2201 of SEQ ID NO: 15
ugugaucacucccagggaa

SEQ ID NO: 5135 - RNA, 19 nt, Artificial Sequence
  Description of Artificial Sequence: Synthetic oligonucleotide
  Antisense strand to SEQ ID NO: 5134
uucccugggagugaucaca

SEQ ID NO: 5136 - RNA, 19 nt, Artificial Sequence
  Description of Artificial Sequence: Synthetic oligonucleotide
  Sense strand starting at position 1645 of SEQ ID NO: 15
ugcgauuucuccuuccaaa

SEQ ID NO: 5137 - RNA, 19 nt, Artificial Sequence
  Description of Artificial Sequence: Synthetic oligonucleotide
  Antisense strand to SEQ ID NO: 5136
uuuggaaggagaaaucgca

SEQ ID NO: 5138 - RNA, 19 nt, Artificial Sequence
  Description of Artificial Sequence: Synthetic oligonucleotide
  Sense strand starting at position 1609 of SEQ ID NO: 15
gagauugcugcugauaaua

SEQ ID NO: 5139 - RNA, 19 nt, Artificial Sequence
  Description of Artificial Sequence: Synthetic oligonucleotide
  Antisense strand to SEQ ID NO: 5138
uauuaucagcagcaaucuc

SEQ ID NO: 5140 - RNA, 19 nt, Artificial Sequence
  Description of Artificial Sequence: Synthetic oligonucleotide
  Sense strand starting at position 1450 of SEQ ID NO: 15
ggccauggagcucagacau

SEQ ID NO: 5141 - RNA, 19 nt, Artificial Sequence
  Description of Artificial Sequence: Synthetic oligonucleotide
  Antisense strand to SEQ ID NO: 5140
augucugagcuccauggcc

SEQ ID NO: 5142 - RNA, 19 nt, Artificial Sequence
  Description of Artificial Sequence: Synthetic oligonucleotide
  Sense strand starting at position 1419 of SEQ ID NO: 15
gguccugagcucugagcau

SEQ ID NO: 5143 - RNA, 19 nt, Artificial Sequence
  Description of Artificial Sequence: Synthetic oligonucleotide
  Antisense strand to SEQ ID NO: 5142
augcucagagcucaggacc

SEQ ID NO: 5144 - RNA, 19 nt, Artificial Sequence
  Description of Artificial Sequence: Synthetic oligonucleotide
  Sense strand starting at position 829 of SEQ ID NO: 15
cuucgucucaaguaaggga

SEQ ID NO: 5145 - RNA, 19 nt, Artificial Sequence
  Description of Artificial Sequence: Synthetic oligonucleotide
  Antisense strand to SEQ ID NO: 5144
ucccuuacuugagacgaag

SEQ ID NO: 5146 - RNA, 19 nt, Artificial Sequence
  Description of Artificial Sequence: Synthetic oligonucleotide
  Sense strand starting at position 659 of SEQ ID NO: 15
ggguaacuccggcagaaga

SEQ ID NO: 5147 - RNA, 19 nt, Artificial Sequence
  Description of Artificial Sequence: Synthetic oligonucleotide
  Antisense strand to SEQ ID NO: 5146
ucuucugccggaguuaccc

SEQ ID NO: 5148 - RNA, 19 nt, Artificial Sequence
  Description of Artificial Sequence: Synthetic oligonucleotide
  Sense strand starting at position 551 of SEQ ID NO: 15
ugagaaaucugagaaggac

SEQ ID NO: 5149 - RNA, 19 nt, Artificial Sequence
  Description of Artificial Sequence: Synthetic oligonucleotide
  Antisense strand to SEQ ID NO: 5148
guccuucucagauuucuca

SEQ ID NO: 5150 - RNA, 19 nt, Artificial Sequence
  Description of Artificial Sequence: Synthetic oligonucleotide
  Sense strand starting at position 480 of SEQ ID NO: 15
gagggauguaugugccagu

SEQ ID NO: 5151 - RNA, 19 nt, Artificial Sequence
  Description of Artificial Sequence: Synthetic oligonucleotide
  Antisense strand to SEQ ID NO: 5150
acuggcacauacaucccuc

SEQ ID NO: 5152 - RNA, 19 nt, Artificial Sequence
  Description of Artificial Sequence: Synthetic oligonucleotide
  Sense strand starting at position 175 of SEQ ID NO: 15
gugauaacgauaugccucu

SEQ ID NO: 5153 - RNA, 19 nt, Artificial Sequence
  Description of Artificial Sequence: Synthetic oligonucleotide
  Antisense strand to SEQ ID NO: 5152
agaggcauaucguuaucac

SEQ ID NO: 5154 - RNA, 19 nt, Artificial Sequence
  Description of Artificial Sequence: Synthetic oligonucleotide
  Sense strand starting at position 173 of SEQ ID NO: 15
cagugauaacgauaugccu

SEQ ID NO: 5155 - RNA, 19 nt, Artificial Sequence
  Description of Artificial Sequence: Synthetic oligonucleotide
  Antisense strand to SEQ ID NO: 5154
aggcauaucguuaucacug

SEQ ID NO: 5156 - RNA, 19 nt, Artificial Sequence
  Description of Artificial Sequence: Synthetic oligonucleotide
  Sense strand starting at position 150 of SEQ ID NO: 15
uuacuauuguuaucucugu

SEQ ID NO: 5157 - RNA, 19 nt, Artificial Sequence
  Description of Artificial Sequence: Synthetic oligonucleotide
  Antisense strand to SEQ ID NO: 5156
acagagauaacaauaguaa

SEQ ID NO: 5158 - RNA, 19 nt, Artificial Sequence
  Description of Artificial Sequence: Synthetic oligonucleotide
  Sense strand starting at position 126 of SEQ ID NO: 15
ugcaaagagcuaugugaag

SEQ ID NO: 5159 - RNA, 19 nt, Artificial Sequence
  Description of Artificial Sequence: Synthetic oligonucleotide
  Antisense strand to SEQ ID NO: 5158
cuucacauagcucuuugca

SEQ ID NO: 5160 - RNA, 19 nt, Artificial Sequence
  Description of Artificial Sequence: Synthetic oligonucleotide
  Sense strand starting at position 90 of SEQ ID NO: 15
guaccuaccucauagagaa

SEQ ID NO: 5161 - RNA, 19 nt, Artificial Sequence
  Description of Artificial Sequence: Synthetic oligonucleotide
  Antisense strand to SEQ ID NO: 5160
uucucuaugagguagguac

SEQ ID NO: 5162 - RNA, 19 nt, Artificial Sequence
  Description of Artificial Sequence: Synthetic oligonucleotide
  Sense strand starting at position 57 of SEQ ID NO: 15
aggguccuuaucugggaua

SEQ ID NO: 5163 - RNA, 19 nt, Artificial Sequence
  Description of Artificial Sequence: Synthetic oligonucleotide
  Antisense strand to SEQ ID NO: 5162
uaucccagauaaggacccu

SEQ ID NO: 5164 - RNA, 19 nt, Artificial Sequence
  Description of Artificial Sequence: Synthetic oligonucleotide
  Sense strand starting at position 15 of SEQ ID NO: 15
uuccuaccagugugaucuu

SEQ ID NO: 5165 - RNA, 19 nt, Artificial Sequence
  Description of Artificial Sequence: Synthetic oligonucleotide
  Antisense strand to SEQ ID NO: 5164
aagaucacacugguaggaa

SEQ ID NO: 5166 - RNA, 19 nt, Artificial Sequence
  Description of Artificial Sequence: Synthetic oligonucleotide
  Sense strand starting at position 74 of SEQ ID NO: 19
gguauaagcucuuugcaaa

SEQ ID NO: 5167 - RNA, 19 nt, Artificial Sequence
  Description of Artificial Sequence: Synthetic oligonucleotide
  Antisense strand to SEQ ID NO: 5166
uuugcaaagagcuuauacc

SEQ ID NO: 5168 - RNA, 19 nt, Artificial Sequence
  Description of Artificial Sequence: Synthetic oligonucleotide
  Sense strand starting at position 75 of SEQ ID NO: 19
guauaagcucuuugcaaac

SEQ ID NO: 5169 - RNA, 19 nt, Artificial Sequence
  Description of Artificial Sequence: Synthetic oligonucleotide
  Antisense strand to SEQ ID NO: 5168
guuugcaaagagcuuauac

SEQ ID NO: 5170 - RNA, 19 nt, Artificial Sequence
  Description of Artificial Sequence: Synthetic oligonucleotide
  Sense strand starting at position 152 of SEQ ID NO: 19
ggcugucugucuccaguua

SEQ ID NO: 5171 - RNA, 19 nt, Artificial Sequence
  Description of Artificial Sequence: Synthetic oligonucleotide
  Antisense strand to SEQ ID NO: 5170
uaacuggagacagacagcc

SEQ ID NO: 5172 - RNA, 19 nt, Artificial Sequence
  Description of Artificial Sequence: Synthetic oligonucleotide
  Sense strand starting at position 153 of SEQ ID NO: 19
gcugucugucuccaguuau

SEQ ID NO: 5173 - RNA, 19 nt, Artificial Sequence
  Description of Artificial Sequence: Synthetic oligonucleotide
  Antisense strand to SEQ ID NO: 5172
auaacuggagacagacagc

SEQ ID NO: 5174 - RNA, 19 nt, Artificial Sequence
  Description of Artificial Sequence: Synthetic oligonucleotide
  Sense strand starting at position 334 of SEQ ID NO: 19
agaugagacugagagucaa

SEQ ID NO: 5175 - RNA, 19 nt, Artificial Sequence
  Description of Artificial Sequence: Synthetic oligonucleotide
  Antisense strand to SEQ ID NO: 5174
uugacucucagucucaucu

SEQ ID NO: 5176 - RNA, 19 nt, Artificial Sequence
  Description of Artificial Sequence: Synthetic oligonucleotide
  Sense strand starting at position 345 of SEQ ID NO: 19
agagucaagaaucgccaua

SEQ ID NO: 5177 - RNA, 19 nt, Artificial Sequence
  Description of Artificial Sequence: Synthetic oligonucleotide
  Antisense strand to SEQ ID NO: 5176
uauggcgauucuugacucu

SEQ ID NO: 5178 - RNA, 19 nt, Artificial Sequence
  Description of Artificial Sequence: Synthetic oligonucleotide
  Sense strand starting at position 347 of SEQ ID NO: 19
agucaagaaucgccauaga

SEQ ID NO: 5179 - RNA, 19 nt, Artificial Sequence
  Description of Artificial Sequence: Synthetic oligonucleotide
  Antisense strand to SEQ ID NO: 5178
ucuauggcgauucuugacu

SEQ ID NO: 5180 - RNA, 19 nt, Artificial Sequence
  Description of Artificial Sequence: Synthetic oligonucleotide
  Sense strand starting at position 385 of SEQ ID NO: 19
ccagccuuccuggagaugu

SEQ ID NO: 5181 - RNA, 19 nt, Artificial Sequence
  Description of Artificial Sequence: Synthetic oligonucleotide
  Antisense strand to SEQ ID NO: 5180
acaucuccaggaaggcugg

SEQ ID NO: 5182 - RNA, 19 nt, Artificial Sequence
  Description of Artificial Sequence: Synthetic oligonucleotide
  Sense strand starting at position 387 of SEQ ID NO: 19
agccuuccuggagauguca

SEQ ID NO: 5183 - RNA, 19 nt, Artificial Sequence
  Description of Artificial Sequence: Synthetic oligonucleotide
  Antisense strand to SEQ ID NO: 5182
ugacaucuccaggaaggcu

SEQ ID NO: 5184 - RNA, 19 nt, Artificial Sequence
  Description of Artificial Sequence: Synthetic oligonucleotide
  Sense strand starting at position 420 of SEQ ID NO: 19
guaacuugcuucuauugga

SEQ ID NO: 5185 - RNA, 19 nt, Artificial Sequence
  Description of Artificial Sequence: Synthetic oligonucleotide
  Antisense strand to SEQ ID NO: 5184
uccaauagaagcaaguuac

SEQ ID NO: 5186 - RNA, 19 nt, Artificial Sequence
  Description of Artificial Sequence: Synthetic oligonucleotide
  Sense strand starting at position 514 of SEQ ID NO: 19
gcucucacuccugguaguu

SEQ ID NO: 5187 - RNA, 19 nt, Artificial Sequence
  Description of Artificial Sequence: Synthetic oligonucleotide
  Antisense strand to SEQ ID NO: 5186
aacuaccaggagugagagc

SEQ ID NO: 5188 - RNA, 19 nt, Artificial Sequence
  Description of Artificial Sequence: Synthetic oligonucleotide
  Sense strand starting at position 641 of SEQ ID NO: 19
uccgauucugccgaagaga

SEQ ID NO: 5189 - RNA, 19 nt, Artificial Sequence
  Description of Artificial Sequence: Synthetic oligonucleotide
  Antisense strand to SEQ ID NO: 5188
ucucuucggcagaaucgga

SEQ ID NO: 5190 - RNA, 19 nt, Artificial Sequence
  Description of Artificial Sequence: Synthetic oligonucleotide
  Sense strand starting at position 644 of SEQ ID NO: 19
gauucugccgaagagaacu

SEQ ID NO: 5191 - RNA, 19 nt, Artificial Sequence
  Description of Artificial Sequence: Synthetic oligonucleotide
  Antisense strand to SEQ ID NO: 5190
aguucucuucggcagaauc

SEQ ID NO: 5192 - RNA, 19 nt, Artificial Sequence
  Description of Artificial Sequence: Synthetic oligonucleotide
  Sense strand starting at position 688 of SEQ ID NO: 19
cccaccuccuaugggaaau

SEQ ID NO: 5193 - RNA, 19 nt, Artificial Sequence
  Description of Artificial Sequence: Synthetic oligonucleotide
  Antisense strand to SEQ ID NO: 5192
auuucccauaggagguggg

SEQ ID NO: 5194 - RNA, 19 nt, Artificial Sequence
  Description of Artificial Sequence: Synthetic oligonucleotide
  Sense strand starting at position 700 of SEQ ID NO: 19
gggaaaugagcuuguucau

SEQ ID NO: 5195 - RNA, 19 nt, Artificial Sequence
  Description of Artificial Sequence: Synthetic oligonucleotide
  Antisense strand to SEQ ID NO: 5194
augaacaagcucauuuccc

SEQ ID NO: 5196 - RNA, 19 nt, Artificial Sequence
  Description of Artificial Sequence: Synthetic oligonucleotide
  Sense strand starting at position 751 of SEQ ID NO: 19
gcaucuaucuacucaguac

SEQ ID NO: 5197 - RNA, 19 nt, Artificial Sequence
  Description of Artificial Sequence: Synthetic oligonucleotide
  Antisense strand to SEQ ID NO: 5196
guacugaguagauagaugc

SEQ ID NO: 5198 - RNA, 19 nt, Artificial Sequence
  Description of Artificial Sequence: Synthetic oligonucleotide
  Sense strand starting at position 762 of SEQ ID NO: 19
cucaguaccugguggaaga

SEQ ID NO: 5199 - RNA, 19 nt, Artificial Sequence
  Description of Artificial Sequence: Synthetic oligonucleotide
  Antisense strand to SEQ ID NO: 5198
ucuuccaccagguacugag

SEQ ID NO: 5200 - RNA, 19 nt, Artificial Sequence
  Description of Artificial Sequence: Synthetic oligonucleotide
  Sense strand starting at position 810 of SEQ ID NO: 19
ugccucuauuguguaagau

SEQ ID NO: 5201 - RNA, 19 nt, Artificial Sequence
  Description of Artificial Sequence: Synthetic oligonucleotide
  Antisense strand to SEQ ID NO: 5200
aucuuacacaauagaggca

SEQ ID NO: 5202 - RNA, 19 nt, Artificial Sequence
  Description of Artificial Sequence: Synthetic oligonucleotide
  Sense strand starting at position 811 of SEQ ID NO: 19
gccucuauuguguaagaug

SEQ ID NO: 5203 - RNA, 19 nt, Artificial Sequence
  Description of Artificial Sequence: Synthetic oligonucleotide
  Antisense strand to SEQ ID NO: 5202
caucuuacacaauagaggc

SEQ ID NO: 5204 - RNA, 19 nt, Artificial Sequence
  Description of Artificial Sequence: Synthetic oligonucleotide
  Sense strand starting at position 814 of SEQ ID NO: 19
ucuauuguguaagaugcuu

SEQ ID NO: 5205 - RNA, 19 nt, Artificial Sequence
  Description of Artificial Sequence: Synthetic oligonucleotide
  Antisense strand to SEQ ID NO: 5204
aagcaucuuacacaauaga

SEQ ID NO: 5206 - RNA, 19 nt, Artificial Sequence
  Description of Artificial Sequence: Synthetic oligonucleotide
  Sense strand starting at position 867 of SEQ ID NO: 19
auaguaaacuguuagaggu

SEQ ID NO: 5207 - RNA, 19 nt, Artificial Sequence
  Description of Artificial Sequence: Synthetic oligonucleotide
  Antisense strand to SEQ ID NO: 5206
accucuaacaguuuacuau

SEQ ID NO: 5208 - RNA, 19 nt, Artificial Sequence
  Description of Artificial Sequence: Synthetic oligonucleotide
  Sense strand starting at position 875 of SEQ ID NO: 19
cuguuagagguagacagua

SEQ ID NO: 5209 - RNA, 19 nt, Artificial Sequence
  Description of Artificial Sequence: Synthetic oligonucleotide
  Antisense strand to SEQ ID NO: 5208
uacugucuaccucuaacag

SEQ ID NO: 5210 - RNA, 19 nt, Artificial Sequence
  Description of Artificial Sequence: Synthetic oligonucleotide
  Sense strand starting at position 877 of SEQ ID NO: 19
guuagagguagacaguauu

SEQ ID NO: 5211 - RNA, 19 nt, Artificial Sequence
  Description of Artificial Sequence: Synthetic oligonucleotide
  Antisense strand to SEQ ID NO: 5210
aauacugucuaccucuaac

SEQ ID NO: 5212 - RNA, 19 nt, Artificial Sequence
  Description of Artificial Sequence: Synthetic oligonucleotide
  Sense strand starting at position 883 of SEQ ID NO: 19
gguagacaguauuaucugu

SEQ ID NO: 5213 - RNA, 19 nt, Artificial Sequence
  Description of Artificial Sequence: Synthetic oligonucleotide
  Antisense strand to SEQ ID NO: 5212
acagauaauacugucuacc

SEQ ID NO: 5214 - RNA, 19 nt, Artificial Sequence
  Description of Artificial Sequence: Synthetic oligonucleotide
  Sense strand starting at position 890 of SEQ ID NO: 19
aguauuaucuguucuuccu

SEQ ID NO: 5215 - RNA, 19 nt, Artificial Sequence
  Description of Artificial Sequence: Synthetic oligonucleotide
  Antisense strand to SEQ ID NO: 5214
aggaagaacagauaauacu

SEQ ID NO: 5216 - RNA, 19 nt, Artificial Sequence
  Description of Artificial Sequence: Synthetic oligonucleotide
  Sense strand starting at position 1062 of SEQ ID NO: 19
gguaaugaucccgaauccu

SEQ ID NO: 5217 - RNA, 19 nt, Artificial Sequence
  Description of Artificial Sequence: Synthetic oligonucleotide
  Antisense strand to SEQ ID NO: 5216
aggauucgggaucauuacc

SEQ ID NO: 5218 - RNA, 19 nt, Artificial Sequence
  Description of Artificial Sequence: Synthetic oligonucleotide
  Sense strand starting at position 2196 of SEQ ID NO: 19
gaaggcuguuuccuagaaa

SEQ ID NO: 5219 - RNA, 19 nt, Artificial Sequence
  Description of Artificial Sequence: Synthetic oligonucleotide
  Antisense strand to SEQ ID NO: 5218
uuucuaggaaacagccuuc

SEQ ID NO: 5220 - RNA, 19 nt, Artificial Sequence
  Description of Artificial Sequence: Synthetic oligonucleotide
  Sense strand starting at position 2197 of SEQ ID NO: 19
aaggcuguuuccuagaaag

SEQ ID NO: 5221 - RNA, 19 nt, Artificial Sequence
  Description of Artificial Sequence: Synthetic oligonucleotide
  Antisense strand to SEQ ID NO: 5220
cuuucuaggaaacagccuu

SEQ ID NO: 5222 - RNA, 19 nt, Artificial Sequence
  Description of Artificial Sequence: Synthetic oligonucleotide
  Sense strand starting at position 2199 of SEQ ID NO: 19
ggcuguuuccuagaaagga

SEQ ID NO: 5223 - RNA, 19 nt, Artificial Sequence
  Description of Artificial Sequence: Synthetic oligonucleotide
  Antisense strand to SEQ ID NO: 5222
uccuuucuaggaaacagcc

SEQ ID NO: 5224 - RNA, 19 nt, Artificial Sequence
  Description of Artificial Sequence: Synthetic oligonucleotide
  Sense strand starting at position 2373 of SEQ ID NO: 19
gcacguguugcagugagga

SEQ ID NO: 5225 - RNA, 19 nt, Artificial Sequence
  Description of Artificial Sequence: Synthetic oligonucleotide
  Antisense strand to SEQ ID NO: 5224
uccucacugcaacacgugc

SEQ ID NO: 5226 - RNA, 19 nt, Artificial Sequence
  Description of Artificial Sequence: Synthetic oligonucleotide
  Sense strand starting at position 2393 of SEQ ID NO: 19
cccugaaacaugcguguuu

SEQ ID NO: 5227 - RNA, 19 nt, Artificial Sequence
  Description of Artificial Sequence: Synthetic oligonucleotide
  Antisense strand to SEQ ID NO: 5226
aaacacgcauguuucaggg

SEQ ID NO: 5228 - RNA, 19 nt, Artificial Sequence
  Description of Artificial Sequence: Synthetic oligonucleotide
  Sense strand starting at position 2421 of SEQ ID NO: 19
agaugugcccuugaaugga

SEQ ID NO: 5229 - RNA, 19 nt, Artificial Sequence
  Description of Artificial Sequence: Synthetic oligonucleotide
  Antisense strand to SEQ ID NO: 5228
uccauucaagggcacaucu

SEQ ID NO: 5230 - RNA, 19 nt, Artificial Sequence
  Description of Artificial Sequence: Synthetic oligonucleotide
  Sense strand starting at position 2662 of SEQ ID NO: 19
cuagguagcucugaaggaa

SEQ ID NO: 5231 - RNA, 19 nt, Artificial Sequence
  Description of Artificial Sequence: Synthetic oligonucleotide
  Antisense strand to SEQ ID NO: 5230
uuccuucagagcuaccuag

SEQ ID NO: 5232 - RNA, 19 nt, Artificial Sequence
  Description of Artificial Sequence: Synthetic oligonucleotide
  Sense strand starting at position 2692 of SEQ ID NO: 19
cccggucacccuugaguua

SEQ ID NO: 5233 - RNA, 19 nt, Artificial Sequence
  Description of Artificial Sequence: Synthetic oligonucleotide
  Antisense strand to SEQ ID NO: 5232
uaacucaagggugaccggg

SEQ ID NO: 5234 - RNA, 19 nt, Artificial Sequence
  Description of Artificial Sequence: Synthetic oligonucleotide
  Sense strand starting at position 2769 of SEQ ID NO: 19
aagucagaacucugugauu

SEQ ID NO: 5235 - RNA, 19 nt, Artificial Sequence
  Description of Artificial Sequence: Synthetic oligonucleotide
  Antisense strand to SEQ ID NO: 5234
aaucacagaguucugacuu

SEQ ID NO: 5236 - RNA, 19 nt, Artificial Sequence
  Description of Artificial Sequence: Synthetic oligonucleotide
  Sense strand starting at position 3183 of SEQ ID NO: 19
ugugauagcucacuguaac

SEQ ID NO: 5237 - RNA, 19 nt, Artificial Sequence
  Description of Artificial Sequence: Synthetic oligonucleotide
  Antisense strand to SEQ ID NO: 5236
guuacagugagcuaucaca

SEQ ID NO: 5238 - RNA, 19 nt, Artificial Sequence
  Description of Artificial Sequence: Synthetic oligonucleotide
  Sense strand starting at position 3303 of SEQ ID NO: 19
uacagauguguccagaauu

SEQ ID NO: 5239 - RNA, 19 nt, Artificial Sequence
  Description of Artificial Sequence: Synthetic oligonucleotide
  Antisense strand to SEQ ID NO: 5238
aauucuggacacaucugua

SEQ ID NO: 5240 - RNA, 19 nt, Artificial Sequence
  Description of Artificial Sequence: Synthetic oligonucleotide
  Sense strand starting at position 3471 of SEQ ID NO: 19
gugaauguuaacggcucau

SEQ ID NO: 5241 - RNA, 19 nt, Artificial Sequence
  Description of Artificial Sequence: Synthetic oligonucleotide
  Antisense strand to SEQ ID NO: 5240
augagccguuaacauucac

SEQ ID NO: 5242 - RNA, 19 nt, Artificial Sequence
  Description of Artificial Sequence: Synthetic oligonucleotide
  Sense strand starting at position 3475 of SEQ ID NO: 19
auguuaacggcucauaaag

SEQ ID NO: 5243 - RNA, 19 nt, Artificial Sequence
  Description of Artificial Sequence: Synthetic oligonucleotide
  Antisense strand to SEQ ID NO: 5242
cuuuaugagccguuaacau

SEQ ID NO: 5244 - RNA, 19 nt, Artificial Sequence
  Description of Artificial Sequence: Synthetic oligonucleotide
  Sense strand starting at position 3756 of SEQ ID NO: 19
ccaccagcguaguuagaua

SEQ ID NO: 5245 - RNA, 19 nt, Artificial Sequence
  Description of Artificial Sequence: Synthetic oligonucleotide
  Antisense strand to SEQ ID NO: 5244
uaucuaacuacgcuggugg

SEQ ID NO: 5246 - RNA, 19 nt, Artificial Sequence
  Description of Artificial Sequence: Synthetic oligonucleotide
  Sense strand starting at position 77 of SEQ ID NO: 17
uucccuguguuagcuagaa

SEQ ID NO: 5247 - RNA, 19 nt, Artificial Sequence
  Description of Artificial Sequence: Synthetic oligonucleotide
  Antisense strand to SEQ ID NO: 5246
uucuagcuaacacagggaa

SEQ ID NO: 5248 - RNA, 19 nt, Artificial Sequence
  Description of Artificial Sequence: Synthetic oligonucleotide
  Sense strand starting at position 79 of SEQ ID NO: 17
cccuguguuagcuagaaug

SEQ ID NO: 5249 - RNA, 19 nt, Artificial Sequence
  Description of Artificial Sequence: Synthetic oligonucleotide
  Antisense strand to SEQ ID NO: 5248
cauucuagcuaacacaggg

SEQ ID NO: 5250 - RNA, 19 nt, Artificial Sequence
  Description of Artificial Sequence: Synthetic oligonucleotide
  Sense strand starting at position 426 of SEQ ID NO: 17
agaagaugcucaguaucau

SEQ ID NO: 5251 - RNA, 19 nt, Artificial Sequence
  Description of Artificial Sequence: Synthetic oligonucleotide
  Antisense strand to SEQ ID NO: 5250
augauacugagcaucuucu

SEQ ID NO: 5252 - RNA, 19 nt, Artificial Sequence
  Description of Artificial Sequence: Synthetic oligonucleotide
  Sense strand starting at position 499 of SEQ ID NO: 17
cuacuagcauggcuagaau

SEQ ID NO: 5253 - RNA, 19 nt, Artificial Sequence
  Description of Artificial Sequence: Synthetic oligonucleotide
  Antisense strand to SEQ ID NO: 5252
auucuagccaugcuaguag

SEQ ID NO: 5254 - RNA, 19 nt, Artificial Sequence
  Description of Artificial Sequence: Synthetic oligonucleotide
  Sense strand starting at position 611 of SEQ ID NO: 17
uuggaaacagucugguaau

SEQ ID NO: 5255 - RNA, 19 nt, Artificial Sequence
  Description of Artificial Sequence: Synthetic oligonucleotide
  Antisense strand to SEQ ID NO: 5254
auuaccagacuguuuccaa

SEQ ID NO: 5256 - RNA, 19 nt, Artificial Sequence
  Description of Artificial Sequence: Synthetic oligonucleotide
  Sense strand starting at position 621 of SEQ ID NO: 17
ucugguaauuccucaagag

SEQ ID NO: 5257 - RNA, 19 nt, Artificial Sequence
  Description of Artificial Sequence: Synthetic oligonucleotide
  Antisense strand to SEQ ID NO: 5256
cucuugaggaauuaccaga

SEQ ID NO: 5258 - RNA, 19 nt, Artificial Sequence
  Description of Artificial Sequence: Synthetic oligonucleotide
  Sense strand starting at position 795 of SEQ ID NO: 17
cacuaccuucugcgguaua

SEQ ID NO: 5259 - RNA, 19 nt, Artificial Sequence
  Description of Artificial Sequence: Synthetic oligonucleotide
  Antisense strand to SEQ ID NO: 5258
uauaccgcagaagguagug

SEQ ID NO: 5260 - RNA, 19 nt, Artificial Sequence
  Description of Artificial Sequence: Synthetic oligonucleotide
  Sense strand starting at position 798 of SEQ ID NO: 17
uaccuucugcgguauagga

SEQ ID NO: 5261 - RNA, 19 nt, Artificial Sequence
  Description of Artificial Sequence: Synthetic oligonucleotide
  Antisense strand to SEQ ID NO: 5260
uccuauaccgcagaaggua

SEQ ID NO: 5262 - RNA, 19 nt, Artificial Sequence
  Description of Artificial Sequence: Synthetic oligonucleotide
  Sense strand starting at position 928 of SEQ ID NO: 17
acuagacacucuuaggacu

SEQ ID NO: 5263 - RNA, 19 nt, Artificial Sequence
  Description of Artificial Sequence: Synthetic oligonucleotide
  Antisense strand to SEQ ID NO: 5262
aguccuaagagugucuagu

SEQ ID NO: 5264 - RNA, 19 nt, Artificial Sequence
  Description of Artificial Sequence: Synthetic oligonucleotide
  Sense strand starting at position 971 of SEQ ID NO: 17
gcuccaugucaggagaaca

SEQ ID NO: 5265 - RNA, 19 nt, Artificial Sequence
  Description of Artificial Sequence: Synthetic oligonucleotide
  Antisense strand to SEQ ID NO: 5264
uguucuccugacauggagc

SEQ ID NO: 5266 - RNA, 19 nt, Artificial Sequence
  Description of Artificial Sequence: Synthetic oligonucleotide
  Sense strand starting at position 1035 of SEQ ID NO: 17
cccacagcucugugaacau

SEQ ID NO: 5267 - RNA, 19 nt, Artificial Sequence
  Description of Artificial Sequence: Synthetic oligonucleotide
  Antisense strand to SEQ ID NO: 5266
auguucacagagcuguggg

SEQ ID NO: 5268 - RNA, 19 nt, Artificial Sequence
  Description of Artificial Sequence: Synthetic oligonucleotide
  Sense strand starting at position 1071 of SEQ ID NO: 17
gcuuguacacauuagugaa

SEQ ID NO: 5269 - RNA, 19 nt, Artificial Sequence
  Description of Artificial Sequence: Synthetic oligonucleotide
  Antisense strand to SEQ ID NO: 5268
uucacuaauguguacaagc

SEQ ID NO: 5270 - RNA, 19 nt, Artificial Sequence
  Description of Artificial Sequence: Synthetic oligonucleotide
  Sense strand starting at position 1078 of SEQ ID NO: 17
cacauuagugaaugaauug

SEQ ID NO: 5271 - RNA, 19 nt, Artificial Sequence
  Description of Artificial Sequence: Synthetic oligonucleotide
  Antisense strand to SEQ ID NO: 5270
caauucauucacuaaugug

SEQ ID NO: 5272 - RNA, 19 nt, Artificial Sequence
  Description of Artificial Sequence: Synthetic oligonucleotide
  Sense strand starting at position 1092 of SEQ ID NO: 17
aauuguauggcaugugaac

SEQ ID NO: 5273 - RNA, 19 nt, Artificial Sequence
  Description of Artificial Sequence: Synthetic oligonucleotide
  Antisense strand to SEQ ID NO: 5272
guucacaugccauacaauu

SEQ ID NO: 5274 - RNA, 19 nt, Artificial Sequence
  Description of Artificial Sequence: Synthetic oligonucleotide
  Sense strand starting at position 1094 of SEQ ID NO: 17
uuguauggcaugugaacua

SEQ ID NO: 5275 - RNA, 19 nt, Artificial Sequence
  Description of Artificial Sequence: Synthetic oligonucleotide
  Antisense strand to SEQ ID NO: 5274
uaguucacaugccauacaa

SEQ ID NO: 5276 - RNA, 19 nt, Artificial Sequence
  Description of Artificial Sequence: Synthetic oligonucleotide
  Sense strand starting at position 1101 of SEQ ID NO: 17
gcaugugaacuauaaccca

SEQ ID NO: 5277 - RNA, 19 nt, Artificial Sequence
  Description of Artificial Sequence: Synthetic oligonucleotide
  Antisense strand to SEQ ID NO: 5276
uggguuauaguucacaugc

SEQ ID NO: 5278 - RNA, 19 nt, Artificial Sequence
  Description of Artificial Sequence: Synthetic oligonucleotide
  Sense strand starting at position 1159 of SEQ ID NO: 17
aacagaguuucuguaaagu

SEQ ID NO: 5279 - RNA, 19 nt, Artificial Sequence
  Description of Artificial Sequence: Synthetic oligonucleotide
  Antisense strand to SEQ ID NO: 5278
acuuuacagaaacucuguu

SEQ ID NO: 5280 - RNA, 19 nt, Artificial Sequence
  Description of Artificial Sequence: Synthetic oligonucleotide
  Sense strand starting at position 1170 of SEQ ID NO: 17
uguaaaguuuaggagaaau

SEQ ID NO: 5281 - RNA, 19 nt, Artificial Sequence
  Description of Artificial Sequence: Synthetic oligonucleotide
  Antisense strand to SEQ ID NO: 5280
auuucuccuaaacuuuaca

SEQ ID NO: 5282 - RNA, 19 nt, Artificial Sequence
  Description of Artificial Sequence: Synthetic oligonucleotide
  Sense strand starting at position 1863 of SEQ ID NO: 17
cuguuuacccagugacaag

SEQ ID NO: 5283 - RNA, 19 nt, Artificial Sequence
  Description of Artificial Sequence: Synthetic oligonucleotide
  Antisense strand to SEQ ID NO: 5282
cuugucacuggguaaacag

SEQ ID NO: 5284 - RNA, 19 nt, Artificial Sequence
  Description of Artificial Sequence: Synthetic oligonucleotide
  Sense strand starting at position 1864 of SEQ ID NO: 17
uguuuacccagugacaagu

SEQ ID NO: 5285 - RNA, 19 nt, Artificial Sequence
  Description of Artificial Sequence: Synthetic oligonucleotide
  Antisense strand to SEQ ID NO: 5284
acuugucacuggguaaaca

SEQ ID NO: 5286 - RNA, 19 nt, Artificial Sequence
  Description of Artificial Sequence: Synthetic oligonucleotide
  Sense strand starting at position 1879 of SEQ ID NO: 17
aaguaugaugcccagcaga

SEQ ID NO: 5287 - RNA, 19 nt, Artificial Sequence
  Description of Artificial Sequence: Synthetic oligonucleotide
  Antisense strand to SEQ ID NO: 5286
ucugcugggcaucauacuu

SEQ ID NO: 5288 - RNA, 19 nt, Artificial Sequence
  Description of Artificial Sequence: Synthetic oligonucleotide
  Sense strand starting at position 1927 of SEQ ID NO: 17
agcagugagccggugugau

SEQ ID NO: 5289 - RNA, 19 nt, Artificial Sequence
  Description of Artificial Sequence: Synthetic oligonucleotide
  Antisense strand to SEQ ID NO: 5288
aucacaccggcucacugcu

SEQ ID NO: 5290 - RNA, 19 nt, Artificial Sequence
  Description of Artificial Sequence: Synthetic oligonucleotide
  Sense strand starting at position 1940 of SEQ ID NO: 17
ugugaucccucccugauag

SEQ ID NO: 5291 - RNA, 19 nt, Artificial Sequence
  Description of Artificial Sequence: Synthetic oligonucleotide
  Antisense strand to SEQ ID NO: 5290
cuaucagggagggaucaca

SEQ ID NO: 5292 - RNA, 19 nt, Artificial Sequence
  Description of Artificial Sequence: Synthetic oligonucleotide
  Sense strand starting at position 1941 of SEQ ID NO: 17
gugaucccucccugauaga

SEQ ID NO: 5293 - RNA, 19 nt, Artificial Sequence
  Description of Artificial Sequence: Synthetic oligonucleotide
  Antisense strand to SEQ ID NO: 5292
ucuaucagggagggaucac

SEQ ID NO: 5294 - RNA, 19 nt, Artificial Sequence
  Description of Artificial Sequence: Synthetic oligonucleotide
  Sense strand starting at position 2045 of SEQ ID NO: 17
acaggauguucucuacaaa

SEQ ID NO: 5295 - RNA, 19 nt, Artificial Sequence
  Description of Artificial Sequence: Synthetic oligonucleotide
  Antisense strand to SEQ ID NO: 5294
uuuguagagaacauccugu

SEQ ID NO: 5296 - RNA, 19 nt, Artificial Sequence
  Description of Artificial Sequence: Synthetic oligonucleotide
  Sense strand starting at position 2652 of SEQ ID NO: 17
ccagguuauucugcagcaa

SEQ ID NO: 5297 - RNA, 19 nt, Artificial Sequence
  Description of Artificial Sequence: Synthetic oligonucleotide
  Antisense strand to SEQ ID NO: 5296
uugcugcagaauaaccugg

SEQ ID NO: 5298 - RNA, 19 nt, Artificial Sequence
  Description of Artificial Sequence: Synthetic oligonucleotide
  Sense strand starting at position 2653 of SEQ ID NO: 17
cagguuauucugcagcaaa

SEQ ID NO: 5299 - RNA, 19 nt, Artificial Sequence
  Description of Artificial Sequence: Synthetic oligonucleotide
  Antisense strand to SEQ ID NO: 5298
uuugcugcagaauaaccug

SEQ ID NO: 5300 - RNA, 19 nt, Artificial Sequence
  Description of Artificial Sequence: Synthetic oligonucleotide
  Sense strand starting at position 2683 of SEQ ID NO: 17
ccaguacgacaucguaaau

SEQ ID NO: 5301 - RNA, 19 nt, Artificial Sequence
  Description of Artificial Sequence: Synthetic oligonucleotide
  Antisense strand to SEQ ID NO: 5300
auuuacgaugucguacugg

SEQ ID NO: 5302 - RNA, 19 nt, Artificial Sequence
  Description of Artificial Sequence: Synthetic oligonucleotide
  Sense strand starting at position 2694 of SEQ ID NO: 17
ucguaaauaugucugcauu

SEQ ID NO: 5303 - RNA, 19 nt, Artificial Sequence
  Description of Artificial Sequence: Synthetic oligonucleotide
  Antisense strand to SEQ ID NO: 5302
aaugcagacauauuuacga

SEQ ID NO: 5304 - RNA, 19 nt, Artificial Sequence
  Description of Artificial Sequence: Synthetic oligonucleotide
  Sense strand starting at position 2695 of SEQ ID NO: 17
cguaaauaugucugcauuu

SEQ ID NO: 5305 - RNA, 19 nt, Artificial Sequence
  Description of Artificial Sequence: Synthetic oligonucleotide
  Antisense strand to SEQ ID NO: 5304
aaaugcagacauauuuacg

SEQ ID NO: 5306 - RNA, 19 nt, Artificial Sequence
  Description of Artificial Sequence: Synthetic oligonucleotide
  Sense strand starting at position 2696 of SEQ ID NO: 17
guaaauaugucugcauuuc

SEQ ID NO: 5307 - RNA, 19 nt, Artificial Sequence
  Description of Artificial Sequence: Synthetic oligonucleotide
  Antisense strand to SEQ ID NO: 5306
gaaaugcagacauauuuac

SEQ ID NO: 5308 - RNA, 19 nt, Artificial Sequence
  Description of Artificial Sequence: Synthetic oligonucleotide
  Sense strand starting at position 2762 of SEQ ID NO: 17
gugacucaugcccacaauu

SEQ ID NO: 5309 - RNA, 19 nt, Artificial Sequence
  Description of Artificial Sequence: Synthetic oligonucleotide
  Antisense strand to SEQ ID NO: 5308
aauugugggcaugagucac

SEQ ID NO: 5310 - RNA, 19 nt, Artificial Sequence
  Description of Artificial Sequence: Synthetic oligonucleotide
  Sense strand starting at position 3003 of SEQ ID NO: 17
cacuuaguugccuggccaa

SEQ ID NO: 5311 - RNA, 19 nt, Artificial Sequence
  Description of Artificial Sequence: Synthetic oligonucleotide
  Antisense strand to SEQ ID NO: 5310
uuggccaggcaacuaagug

SEQ ID NO: 5312 - RNA, 19 nt, Artificial Sequence
  Description of Artificial Sequence: Synthetic oligonucleotide
  Sense strand starting at position 3122 of SEQ ID NO: 17
ucacguuucuguccuaaau

SEQ ID NO: 5313 - RNA, 19 nt, Artificial Sequence
  Description of Artificial Sequence: Synthetic oligonucleotide
  Antisense strand to SEQ ID NO: 5312
auuuaggacagaaacguga

SEQ ID NO: 5314 - RNA, 19 nt, Artificial Sequence
  Description of Artificial Sequence: Synthetic oligonucleotide
  Sense strand starting at position 3282 of SEQ ID NO: 17
cgguuccaucgacacgaaa

SEQ ID NO: 5315 - RNA, 19 nt, Artificial Sequence
  Description of Artificial Sequence: Synthetic oligonucleotide
  Antisense strand to SEQ ID NO: 5314
uuucgugucgauggaaccg

SEQ ID NO: 5316 - RNA, 19 nt, Artificial Sequence
  Description of Artificial Sequence: Synthetic oligonucleotide
  Sense strand starting at position 3284 of SEQ ID NO: 17
guuccaucgacacgaaauu

SEQ ID NO: 5317 - RNA, 19 nt, Artificial Sequence
  Description of Artificial Sequence: Synthetic oligonucleotide
  Antisense strand to SEQ ID NO: 5316
aauuucgugucgauggaac

SEQ ID NO: 5318 - RNA, 19 nt, Artificial Sequence
  Description of Artificial Sequence: Synthetic oligonucleotide
  Sense strand starting at position 3735 of SEQ ID NO: 17
ccaggagggcucugagagu

SEQ ID NO: 5319 - RNA, 19 nt, Artificial Sequence
  Description of Artificial Sequence: Synthetic oligonucleotide
  Antisense strand to SEQ ID NO: 5318
acucucagagcccuccugg

SEQ ID NO: 5320 - RNA, 19 nt, Artificial Sequence
  Description of Artificial Sequence: Synthetic oligonucleotide
  Sense strand starting at position 3886 of SEQ ID NO: 17
gugccaauuccagggcaau

SEQ ID NO: 5321 - RNA, 19 nt, Artificial Sequence
  Description of Artificial Sequence: Synthetic oligonucleotide
  Antisense strand to SEQ ID NO: 5320
auugcccuggaauuggcac

SEQ ID NO: 5322 - RNA, 19 nt, Artificial Sequence
  Description of Artificial Sequence: Synthetic oligonucleotide
  Sense strand starting at position 3920 of SEQ ID NO: 17
ccacuuacagcgugagguu

SEQ ID NO: 5323 - RNA, 19 nt, Artificial Sequence
  Description of Artificial Sequence: Synthetic oligonucleotide
  Antisense strand to SEQ ID NO: 5322
aaccucacgcuguaagugg

SEQ ID NO: 5324 - RNA, 19 nt, Artificial Sequence
  Description of Artificial Sequence: Synthetic oligonucleotide
  Sense strand starting at position 3971 of SEQ ID NO: 17
caggcucucuggguuacaa

SEQ ID NO: 5325 - RNA, 19 nt, Artificial Sequence
  Description of Artificial Sequence: Synthetic oligonucleotide
  Antisense strand to SEQ ID NO: 5324
uuguaacccagagagccug

SEQ ID NO: 5326 - RNA, 19 nt, Artificial Sequence
  Description of Artificial Sequence: Synthetic oligonucleotide
  Sense strand starting at position 95 of SEQ ID NO: 16
ccuagacaugcccaugacu

SEQ ID NO: 5327 - RNA, 19 nt, Artificial Sequence
  Description of Artificial Sequence: Synthetic oligonucleotide
  Antisense strand to SEQ ID NO: 5326
agucaugggcaugucuagg

SEQ ID NO: 5328 - RNA, 19 nt, Artificial Sequence
  Description of Artificial Sequence: Synthetic oligonucleotide
  Sense strand starting at position 352 of SEQ ID NO: 16
auggaaaccuugcuuuaua

SEQ ID NO: 5329 - RNA, 19 nt, Artificial Sequence
  Description of Artificial Sequence: Synthetic oligonucleotide
  Antisense strand to SEQ ID NO: 5328
uauaaagcaagguuuccau

SEQ ID NO: 5330 - RNA, 19 nt, Artificial Sequence
  Description of Artificial Sequence: Synthetic oligonucleotide
  Sense strand starting at position 353 of SEQ ID NO: 16
uggaaaccuugcuuuauaa

SEQ ID NO: 5331 - RNA, 19 nt, Artificial Sequence
  Description of Artificial Sequence: Synthetic oligonucleotide
  Antisense strand to SEQ ID NO: 5330
uuauaaagcaagguuucca

SEQ ID NO: 5332 - RNA, 19 nt, Artificial Sequence
  Description of Artificial Sequence: Synthetic oligonucleotide
  Sense strand starting at position 383 of SEQ ID NO: 16
agaaguaauucugugagcu

SEQ ID NO: 5333 - RNA, 19 nt, Artificial Sequence
  Description of Artificial Sequence: Synthetic oligonucleotide
  Antisense strand to SEQ ID NO: 5332
agcucacagaauuacuucu

SEQ ID NO: 5334 - RNA, 19 nt, Artificial Sequence
  Description of Artificial Sequence: Synthetic oligonucleotide
  Sense strand starting at position 384 of SEQ ID NO: 16
gaaguaauucugugagcuc

SEQ ID NO: 5335 - RNA, 19 nt, Artificial Sequence
  Description of Artificial Sequence: Synthetic oligonucleotide
  Antisense strand to SEQ ID NO: 5334
gagcucacagaauuacuuc

SEQ ID NO: 5336 - RNA, 19 nt, Artificial Sequence
  Description of Artificial Sequence: Synthetic oligonucleotide
  Sense strand starting at position 476 of SEQ ID NO: 16
ggcucugccuucucugaca

SEQ ID NO: 5337 - RNA, 19 nt, Artificial Sequence
  Description of Artificial Sequence: Synthetic oligonucleotide
  Antisense strand to SEQ ID NO: 5336
ugucagagaaggcagagcc

SEQ ID NO: 5338 - RNA, 19 nt, Artificial Sequence
  Description of Artificial Sequence: Synthetic oligonucleotide
  Sense strand starting at position 562 of SEQ ID NO: 16
ucuagagcucccugaaaug

SEQ ID NO: 5339 - RNA, 19 nt, Artificial Sequence
  Description of Artificial Sequence: Synthetic oligonucleotide
  Antisense strand to SEQ ID NO: 5338
cauuucagggagcucuaga

SEQ ID NO: 5340 - RNA, 19 nt, Artificial Sequence
  Description of Artificial Sequence: Synthetic oligonucleotide
  Sense strand starting at position 1009 of SEQ ID NO: 16
guguuaucaccacaaccuc

SEQ ID NO: 5341 - RNA, 19 nt, Artificial Sequence
  Description of Artificial Sequence: Synthetic oligonucleotide
  Antisense strand to SEQ ID NO: 5340
gagguuguggugauaacac

SEQ ID NO: 5342 - RNA, 19 nt, Artificial Sequence
  Description of Artificial Sequence: Synthetic oligonucleotide
  Sense strand starting at position 1051 of SEQ ID NO: 16
cugcuuucccaggaauccu

SEQ ID NO: 5343 - RNA, 19 nt, Artificial Sequence
  Description of Artificial Sequence: Synthetic oligonucleotide
  Antisense strand to SEQ ID NO: 5342
aggauuccugggaaagcag

SEQ ID NO: 5344 - RNA, 19 nt, Artificial Sequence
  Description of Artificial Sequence: Synthetic oligonucleotide
  Sense strand starting at position 1059 of SEQ ID NO: 16
ccaggaauccugugaccag

SEQ ID NO: 5345 - RNA, 19 nt, Artificial Sequence
  Description of Artificial Sequence: Synthetic oligonucleotide
  Antisense strand to SEQ ID NO: 5344
cuggucacaggauuccugg

SEQ ID NO: 5346 - RNA, 19 nt, Artificial Sequence
  Description of Artificial Sequence: Synthetic oligonucleotide
  Sense strand starting at position 1159 of SEQ ID NO: 16
ucacauguuuaguugugaa

SEQ ID NO: 5347 - RNA, 19 nt, Artificial Sequence
  Description of Artificial Sequence: Synthetic oligonucleotide
  Antisense strand to SEQ ID NO: 5346
uucacaacuaaacauguga

SEQ ID NO: 5348 - RNA, 19 nt, Artificial Sequence
  Description of Artificial Sequence: Synthetic oligonucleotide
  Sense strand starting at position 1163 of SEQ ID NO: 16
auguuuaguugugaaagag

SEQ ID NO: 5349 - RNA, 19 nt, Artificial Sequence
  Description of Artificial Sequence: Synthetic oligonucleotide
  Antisense strand to SEQ ID NO: 5348
cucuuucacaacuaaacau

SEQ ID NO: 5350 - RNA, 19 nt, Artificial Sequence
  Description of Artificial Sequence: Synthetic oligonucleotide
  Sense strand starting at position 1257 of SEQ ID NO: 16
gccagagccugggcuuauu

SEQ ID NO: 5351 - RNA, 19 nt, Artificial Sequence
  Description of Artificial Sequence: Synthetic oligonucleotide
  Antisense strand to SEQ ID NO: 5350
aauaagcccaggcucuggc

SEQ ID NO: 5352 - RNA, 19 nt, Artificial Sequence
  Description of Artificial Sequence: Synthetic oligonucleotide
  Sense strand starting at position 1265 of SEQ ID NO: 16
cugggcuuauucuaucuaa

SEQ ID NO: 5353 - RNA, 19 nt, Artificial Sequence
  Description of Artificial Sequence: Synthetic oligonucleotide
  Antisense strand to SEQ ID NO: 5352
uuagauagaauaagcccag

SEQ ID NO: 5354 - RNA, 19 nt, Artificial Sequence
  Description of Artificial Sequence: Synthetic oligonucleotide
  Sense strand starting at position 1502 of SEQ ID NO: 16
gaugcuuaaugucuagaag

SEQ ID NO: 5355 - RNA, 19 nt, Artificial Sequence
  Description of Artificial Sequence: Synthetic oligonucleotide
  Antisense strand to SEQ ID NO: 5354
cuucuagacauuaagcauc

SEQ ID NO: 5356 - RNA, 19 nt, Artificial Sequence
  Description of Artificial Sequence: Synthetic oligonucleotide
  Sense strand starting at position 1505 of SEQ ID NO: 16
gcuuaaugucuagaagcca

SEQ ID NO: 5357 - RNA, 19 nt, Artificial Sequence
  Description of Artificial Sequence: Synthetic oligonucleotide
  Antisense strand to SEQ ID NO: 5356
uggcuucuagacauuaagc

SEQ ID NO: 5358 - RNA, 19 nt, Artificial Sequence
  Description of Artificial Sequence: Synthetic oligonucleotide
  Sense strand starting at position 1717 of SEQ ID NO: 16
cggcccaucuuccugagua

SEQ ID NO: 5359 - RNA, 19 nt, Artificial Sequence
  Description of Artificial Sequence: Synthetic oligonucleotide
  Antisense strand to SEQ ID NO: 5358
uacucaggaagaugggccg

SEQ ID NO: 5360 - RNA, 19 nt, Artificial Sequence
  Description of Artificial Sequence: Synthetic oligonucleotide
  Sense strand starting at position 1790 of SEQ ID NO: 16
caggacagguccucccaaa

SEQ ID NO: 5361 - RNA, 19 nt, Artificial Sequence
  Description of Artificial Sequence: Synthetic oligonucleotide
  Antisense strand to SEQ ID NO: 5360
uuugggaggaccuguccug

SEQ ID NO: 5362 - RNA, 19 nt, Artificial Sequence
  Description of Artificial Sequence: Synthetic oligonucleotide
  Sense strand starting at position 1896 of SEQ ID NO: 16
ucgacuuccuuucugagga

SEQ ID NO: 5363 - RNA, 19 nt, Artificial Sequence
  Description of Artificial Sequence: Synthetic oligonucleotide
  Antisense strand to SEQ ID NO: 5362
uccucagaaaggaagucga

SEQ ID NO: 5364 - RNA, 19 nt, Artificial Sequence
  Description of Artificial Sequence: Synthetic oligonucleotide
  Sense strand starting at position 1909 of SEQ ID NO: 16
ugaggacguuuagugacaa

SEQ ID NO: 5365 - RNA, 19 nt, Artificial Sequence
  Description of Artificial Sequence: Synthetic oligonucleotide
  Antisense strand to SEQ ID NO: 5364
uugucacuaaacguccuca

SEQ ID NO: 5366 - RNA, 19 nt, Artificial Sequence
  Description of Artificial Sequence: Synthetic oligonucleotide
  Sense strand starting at position 1921 of SEQ ID NO: 16
gugacaagcuucuccgaag

SEQ ID NO: 5367 - RNA, 19 nt, Artificial Sequence
  Description of Artificial Sequence: Synthetic oligonucleotide
  Antisense strand to SEQ ID NO: 5366
cuucggagaagcuugucac

SEQ ID NO: 5368 - RNA, 19 nt, Artificial Sequence
  Description of Artificial Sequence: Synthetic oligonucleotide
  Sense strand starting at position 2134 of SEQ ID NO: 16
ccaaaucagugaggaccua

SEQ ID NO: 5369 - RNA, 19 nt, Artificial Sequence
  Description of Artificial Sequence: Synthetic oligonucleotide
  Antisense strand to SEQ ID NO: 5368
uagguccucacugauuugg

SEQ ID NO: 5370 - RNA, 19 nt, Artificial Sequence
  Description of Artificial Sequence: Synthetic oligonucleotide
  Sense strand starting at position 2207 of SEQ ID NO: 16
ggaagcacuucucagauag

SEQ ID NO: 5371 - RNA, 19 nt, Artificial Sequence
  Description of Artificial Sequence: Synthetic oligonucleotide
  Antisense strand to SEQ ID NO: 5370
cuaucugagaagugcuucc

SEQ ID NO: 5372 - RNA, 19 nt, Artificial Sequence
  Description of Artificial Sequence: Synthetic oligonucleotide
  Sense strand starting at position 2218 of SEQ ID NO: 16
ucagauagcuuagccuuau

SEQ ID NO: 5373 - RNA, 19 nt, Artificial Sequence
  Description of Artificial Sequence: Synthetic oligonucleotide
  Antisense strand to SEQ ID NO: 5372
auaaggcuaagcuaucuga

SEQ ID NO: 5374 - RNA, 19 nt, Artificial Sequence
  Description of Artificial Sequence: Synthetic oligonucleotide
  Sense strand starting at position 2222 of SEQ ID NO: 16
auagcuuagccuuaugagu

SEQ ID NO: 5375 - RNA, 19 nt, Artificial Sequence
  Description of Artificial Sequence: Synthetic oligonucleotide
  Antisense strand to SEQ ID NO: 5374
acucauaaggcuaagcuau

SEQ ID NO: 5376 - RNA, 19 nt, Artificial Sequence
  Description of Artificial Sequence: Synthetic oligonucleotide
  Sense strand starting at position 2227 of SEQ ID NO: 16
uuagccuuaugaguaaaua

SEQ ID NO: 5377 - RNA, 19 nt, Artificial Sequence
  Description of Artificial Sequence: Synthetic oligonucleotide
  Antisense strand to SEQ ID NO: 5376
uauuuacucauaaggcuaa

SEQ ID NO: 5378 - RNA, 19 nt, Artificial Sequence
  Description of Artificial Sequence: Synthetic oligonucleotide
  Sense strand starting at position 2268 of SEQ ID NO: 16
aggugcuauuucccaucua

SEQ ID NO: 5379 - RNA, 19 nt, Artificial Sequence
  Description of Artificial Sequence: Synthetic oligonucleotide
  Antisense strand to SEQ ID NO: 5378
uagaugggaaauagcaccu

SEQ ID NO: 5380 - RNA, 19 nt, Artificial Sequence
  Description of Artificial Sequence: Synthetic oligonucleotide
  Sense strand starting at position 2269 of SEQ ID NO: 16
ggugcuauuucccaucuag

SEQ ID NO: 5381 - RNA, 19 nt, Artificial Sequence
  Description of Artificial Sequence: Synthetic oligonucleotide
  Antisense strand to SEQ ID NO: 5380
cuagaugggaaauagcacc

SEQ ID NO: 5382 - RNA, 19 nt, Artificial Sequence
  Description of Artificial Sequence: Synthetic oligonucleotide
  Sense strand starting at position 2316 of SEQ ID NO: 16
acgagaugucuagaaaugu

SEQ ID NO: 5383 - RNA, 19 nt, Artificial Sequence
  Description of Artificial Sequence: Synthetic oligonucleotide
  Antisense strand to SEQ ID NO: 5382
acauuucuagacaucucgu

SEQ ID NO: 5384 - RNA, 19 nt, Artificial Sequence
  Description of Artificial Sequence: Synthetic oligonucleotide
  Sense strand starting at position 2642 of SEQ ID NO: 16
ugcuaaugcgugcagguua

SEQ ID NO: 5385 - RNA, 19 nt, Artificial Sequence
  Description of Artificial Sequence: Synthetic oligonucleotide
  Antisense strand to SEQ ID NO: 5384
uaaccugcacgcauuagca

SEQ ID NO: 5386 - RNA, 19 nt, Artificial Sequence
  Description of Artificial Sequence: Synthetic oligonucleotide
  Sense strand starting at position 2717 of SEQ ID NO: 16
uugugaauccauuaagguu

SEQ ID NO: 5387 - RNA, 19 nt, Artificial Sequence
  Description of Artificial Sequence: Synthetic oligonucleotide
  Antisense strand to SEQ ID NO: 5386
aaccuuaauggauucacaa

SEQ ID NO: 5388 - RNA, 19 nt, Artificial Sequence
  Description of Artificial Sequence: Synthetic oligonucleotide
  Sense strand starting at position 2738 of SEQ ID NO: 16
cgcagaauuguacaaucaa

SEQ ID NO: 5389 - RNA, 19 nt, Artificial Sequence
  Description of Artificial Sequence: Synthetic oligonucleotide
  Antisense strand to SEQ ID NO: 5388
uugauuguacaauucugcg

SEQ ID NO: 5390 - RNA, 19 nt, Artificial Sequence
  Description of Artificial Sequence: Synthetic oligonucleotide
  Sense strand starting at position 2768 of SEQ ID NO: 16
ucaauagaguuauagcuca

SEQ ID NO: 5391 - RNA, 19 nt, Artificial Sequence
  Description of Artificial Sequence: Synthetic oligonucleotide
  Antisense strand to SEQ ID NO: 5390
ugagcuauaacucuauuga

SEQ ID NO: 5392 - RNA, 19 nt, Artificial Sequence
  Description of Artificial Sequence: Synthetic oligonucleotide
  Sense strand starting at position 2776 of SEQ ID NO: 16
guuauagcucaggaaagcu

SEQ ID NO: 5393 - RNA, 19 nt, Artificial Sequence
  Description of Artificial Sequence: Synthetic oligonucleotide
  Antisense strand to SEQ ID NO: 5392
agcuuuccugagcuauaac

SEQ ID NO: 5394 - RNA, 19 nt, Artificial Sequence
  Description of Artificial Sequence: Synthetic oligonucleotide
  Sense strand starting at position 2785 of SEQ ID NO: 16
caggaaagcuguuauaaac

SEQ ID NO: 5395 - RNA, 19 nt, Artificial Sequence
  Description of Artificial Sequence: Synthetic oligonucleotide
  Antisense strand to SEQ ID NO: 5394
guuuauaacagcuuuccug

SEQ ID NO: 5396 - RNA, 19 nt, Artificial Sequence
  Description of Artificial Sequence: Synthetic oligonucleotide
  Sense strand starting at position 3205 of SEQ ID NO: 16
cgcucuuaccuuugccaca

SEQ ID NO: 5397 - RNA, 19 nt, Artificial Sequence
  Description of Artificial Sequence: Synthetic oligonucleotide
  Antisense strand to SEQ ID NO: 5396
uguggcaaagguaagagcg

SEQ ID NO: 5398 - RNA, 19 nt, Artificial Sequence
  Description of Artificial Sequence: Synthetic oligonucleotide
  Sense strand starting at position 3210 of SEQ ID NO: 16
uuaccuuugccacagaaag

SEQ ID NO: 5399 - RNA, 19 nt, Artificial Sequence
  Description of Artificial Sequence: Synthetic oligonucleotide
  Antisense strand to SEQ ID NO: 5398
cuuucuguggcaaagguaa

SEQ ID NO: 5400 - RNA, 19 nt, Artificial Sequence
  Description of Artificial Sequence: Synthetic oligonucleotide
  Sense strand starting at position 3263 of SEQ ID NO: 16
uuggcagagaucugcagau

SEQ ID NO: 5401 - RNA, 19 nt, Artificial Sequence
  Description of Artificial Sequence: Synthetic oligonucleotide
  Antisense strand to SEQ ID NO: 5400
aucugcagaucucugccaa

SEQ ID NO: 5402 - RNA, 19 nt, Artificial Sequence
  Description of Artificial Sequence: Synthetic oligonucleotide
  Sense strand starting at position 3265 of SEQ ID NO: 16
ggcagagaucugcagaugu

SEQ ID NO: 5403 - RNA, 19 nt, Artificial Sequence
  Description of Artificial Sequence: Synthetic oligonucleotide
  Antisense strand to SEQ ID NO: 5402
acaucugcagaucucugcc

SEQ ID NO: 5404 - RNA, 19 nt, Artificial Sequence
  Description of Artificial Sequence: Synthetic oligonucleotide
  Sense strand starting at position 3357 of SEQ ID NO: 16
gguugugucugguuucuac

SEQ ID NO: 5405 - RNA, 19 nt, Artificial Sequence
  Description of Artificial Sequence: Synthetic oligonucleotide
  Antisense strand to SEQ ID NO: 5404
guagaaaccagacacaacc

SEQ ID NO: 5406 - RNA, 19 nt, Artificial Sequence
  Description of Artificial Sequence: Synthetic oligonucleotide
  Sense strand starting at position 224 of SEQ ID NO: 18
cgaaguuuguggugagcca

SEQ ID NO: 5407 - RNA, 19 nt, Artificial Sequence
  Description of Artificial Sequence: Synthetic oligonucleotide
  Antisense strand to SEQ ID NO: 5406
uggcucaccacaaacuucg

SEQ ID NO: 5408 - RNA, 19 nt, Artificial Sequence
  Description of Artificial Sequence: Synthetic oligonucleotide
  Sense strand starting at position 373 of SEQ ID NO: 18
uccuuuacuccauggugga

SEQ ID NO: 5409 - RNA, 19 nt, Artificial Sequence
  Description of Artificial Sequence: Synthetic oligonucleotide
  Antisense strand to SEQ ID NO: 5408
uccaccauggaguaaagga

SEQ ID NO: 5410 - RNA, 19 nt, Artificial Sequence
  Description of Artificial Sequence: Synthetic oligonucleotide
  Sense strand starting at position 374 of SEQ ID NO: 18
ccuuuacuccaugguggaa

SEQ ID NO: 5411 - RNA, 19 nt, Artificial Sequence
  Description of Artificial Sequence: Synthetic oligonucleotide
  Antisense strand to SEQ ID NO: 5410
uuccaccauggaguaaagg

SEQ ID NO: 5412 - RNA, 19 nt, Artificial Sequence
  Description of Artificial Sequence: Synthetic oligonucleotide
  Sense strand starting at position 578 of SEQ ID NO: 18
agaggugucugggcagacu

SEQ ID NO: 5413 - RNA, 19 nt, Artificial Sequence
  Description of Artificial Sequence: Synthetic oligonucleotide
  Antisense strand to SEQ ID NO: 5412
agucugcccagacaccucu

SEQ ID NO: 5414 - RNA, 19 nt, Artificial Sequence
  Description of Artificial Sequence: Synthetic oligonucleotide
  Sense strand starting at position 602 of SEQ ID NO: 18
cagucauagggcugcagau

SEQ ID NO: 5415 - RNA, 19 nt, Artificial Sequence
  Description of Artificial Sequence: Synthetic oligonucleotide
  Antisense strand to SEQ ID NO: 5414
aucugcagcccuaugacug

SEQ ID NO: 5416 - RNA, 19 nt, Artificial Sequence
  Description of Artificial Sequence: Synthetic oligonucleotide
  Sense strand starting at position 1329 of SEQ ID NO: 18
ggcugugccaaggaaaguu

SEQ ID NO: 5417 - RNA, 19 nt, Artificial Sequence
  Description of Artificial Sequence: Synthetic oligonucleotide
  Antisense strand to SEQ ID NO: 5416
aacuuuccuuggcacagcc

SEQ ID NO: 5418 - RNA, 19 nt, Artificial Sequence
  Description of Artificial Sequence: Synthetic oligonucleotide
  Sense strand starting at position 1855 of SEQ ID NO: 18
ccuagacaugcccaugacu

SEQ ID NO: 5419 - RNA, 19 nt, Artificial Sequence
  Description of Artificial Sequence: Synthetic oligonucleotide
  Antisense strand to SEQ ID NO: 5418
agucaugggcaugucuagg

SEQ ID NO: 5420 - RNA, 19 nt, Artificial Sequence
  Description of Artificial Sequence: Synthetic oligonucleotide
  Sense strand starting at position 2112 of SEQ ID NO: 18
auggaaaccuugcuuuaua

SEQ ID NO: 5421 - RNA, 19 nt, Artificial Sequence
  Description of Artificial Sequence: Synthetic oligonucleotide
  Antisense strand to SEQ ID NO: 5420
uauaaagcaagguuuccau

SEQ ID NO: 5422 - RNA, 19 nt, Artificial Sequence
  Description of Artificial Sequence: Synthetic oligonucleotide
  Sense strand starting at position 2113 of SEQ ID NO: 18
uggaaaccuugcuuuauaa

SEQ ID NO: 5423 - RNA, 19 nt, Artificial Sequence
  Description of Artificial Sequence: Synthetic oligonucleotide
  Antisense strand to SEQ ID NO: 5422
uuauaaagcaagguuucca

SEQ ID NO: 5424 - RNA, 19 nt, Artificial Sequence
  Description of Artificial Sequence: Synthetic oligonucleotide
  Sense strand starting at position 2143 of SEQ ID NO: 18
agaaguaauucugugagcu

SEQ ID NO: 5425 - RNA, 19 nt, Artificial Sequence
  Description of Artificial Sequence: Synthetic oligonucleotide
  Antisense strand to SEQ ID NO: 5424
agcucacagaauuacuucu

SEQ ID NO: 5426 - RNA, 19 nt, Artificial Sequence
  Description of Artificial Sequence: Synthetic oligonucleotide
  Sense strand starting at position 2144 of SEQ ID NO: 18
gaaguaauucugugagcuc

SEQ ID NO: 5427 - RNA, 19 nt, Artificial Sequence
  Description of Artificial Sequence: Synthetic oligonucleotide
  Antisense strand to SEQ ID NO: 5426
gagcucacagaauuacuuc

SEQ ID NO: 5428 - RNA, 19 nt, Artificial Sequence
  Description of Artificial Sequence: Synthetic oligonucleotide
  Sense strand starting at position 2145 of SEQ ID NO: 18
aaguaauucugugagcucu

SEQ ID NO: 5429 - RNA, 19 nt, Artificial Sequence
  Description of Artificial Sequence: Synthetic oligonucleotide
  Antisense strand to SEQ ID NO: 5428
agagcucacagaauuacuu

SEQ ID NO: 5430 - RNA, 19 nt, Artificial Sequence
  Description of Artificial Sequence: Synthetic oligonucleotide
  Sense strand starting at position 2236 of SEQ ID NO: 18
ggcucugccuucucugaca

SEQ ID NO: 5431 - RNA, 19 nt, Artificial Sequence
  Description of Artificial Sequence: Synthetic oligonucleotide
  Antisense strand to SEQ ID NO: 5430
ugucagagaaggcagagcc

SEQ ID NO: 5432 - RNA, 19 nt, Artificial Sequence
  Description of Artificial Sequence: Synthetic oligonucleotide
  Sense strand starting at position 2322 of SEQ ID NO: 18
ucuagagcucccugaaaug

SEQ ID NO: 5433 - RNA, 19 nt, Artificial Sequence
  Description of Artificial Sequence: Synthetic oligonucleotide
  Antisense strand to SEQ ID NO: 5432
cauuucagggagcucuaga

SEQ ID NO: 5434 - RNA, 19 nt, Artificial Sequence
  Description of Artificial Sequence: Synthetic oligonucleotide
  Sense strand starting at position 2769 of SEQ ID NO: 18
guguuaucaccacaaccuc

SEQ ID NO: 5435 - RNA, 19 nt, Artificial Sequence
  Description of Artificial Sequence: Synthetic oligonucleotide
  Antisense strand to SEQ ID NO: 5434
gagguuguggugauaacac

SEQ ID NO: 5436 - RNA, 19 nt, Artificial Sequence
  Description of Artificial Sequence: Synthetic oligonucleotide
  Sense strand starting at position 2811 of SEQ ID NO: 18
cugcuuucccaggaauccu

SEQ ID NO: 5437 - RNA, 19 nt, Artificial Sequence
  Description of Artificial Sequence: Synthetic oligonucleotide
  Antisense strand to SEQ ID NO: 5436
aggauuccugggaaagcag

SEQ ID NO: 5438 - RNA, 19 nt, Artificial Sequence
  Description of Artificial Sequence: Synthetic oligonucleotide
  Sense strand starting at position 2819 of SEQ ID NO: 18
ccaggaauccugugaccag

SEQ ID NO: 5439 - RNA, 19 nt, Artificial Sequence
  Description of Artificial Sequence: Synthetic oligonucleotide
  Antisense strand to SEQ ID NO: 5438
cuggucacaggauuccugg

SEQ ID NO: 5440 - RNA, 19 nt, Artificial Sequence
  Description of Artificial Sequence: Synthetic oligonucleotide
  Sense strand starting at position 2919 of SEQ ID NO: 18
ucacauguuuaguugugaa

SEQ ID NO: 5441 - RNA, 19 nt, Artificial Sequence
  Description of Artificial Sequence: Synthetic oligonucleotide
  Antisense strand to SEQ ID NO: 5440
uucacaacuaaacauguga

SEQ ID NO: 5442 - RNA, 19 nt, Artificial Sequence
  Description of Artificial Sequence: Synthetic oligonucleotide
  Sense strand starting at position 2922 of SEQ ID NO: 18
cauguuuaguugugaaaga

SEQ ID NO: 5443 - RNA, 19 nt, Artificial Sequence
  Description of Artificial Sequence: Synthetic oligonucleotide
  Antisense strand to SEQ ID NO: 5442
ucuuucacaacuaaacaug

SEQ ID NO: 5444 - RNA, 19 nt, Artificial Sequence
  Description of Artificial Sequence: Synthetic oligonucleotide
  Sense strand starting at position 2923 of SEQ ID NO: 18
auguuuaguugugaaagag

SEQ ID NO: 5445 - RNA, 19 nt, Artificial Sequence
  Description of Artificial Sequence: Synthetic oligonucleotide
  Antisense strand to SEQ ID NO: 5444
cucuuucacaacuaaacau

SEQ ID NO: 5446 - RNA, 19 nt, Artificial Sequence
  Description of Artificial Sequence: Synthetic oligonucleotide
  Sense strand starting at position 3017 of SEQ ID NO: 18
gccagagccugggcuuauu

SEQ ID NO: 5447 - RNA, 19 nt, Artificial Sequence
  Description of Artificial Sequence: Synthetic oligonucleotide
  Antisense strand to SEQ ID NO: 5446
aauaagcccaggcucuggc

SEQ ID NO: 5448 - RNA, 19 nt, Artificial Sequence
  Description of Artificial Sequence: Synthetic oligonucleotide
  Sense strand starting at position 3025 of SEQ ID NO: 18
cugggcuuauucuaucuaa

SEQ ID NO: 5449 - RNA, 19 nt, Artificial Sequence
  Description of Artificial Sequence: Synthetic oligonucleotide
  Antisense strand to SEQ ID NO: 5448
uuagauagaauaagcccag

SEQ ID NO: 5450 - RNA, 19 nt, Artificial Sequence
  Description of Artificial Sequence: Synthetic oligonucleotide
  Sense strand starting at position 3262 of SEQ ID NO: 18
gaugcuuaaugucuagaag

SEQ ID NO: 5451 - RNA, 19 nt, Artificial Sequence
  Description of Artificial Sequence: Synthetic oligonucleotide
  Antisense strand to SEQ ID NO: 5450
cuucuagacauuaagcauc

SEQ ID NO: 5452 - RNA, 19 nt, Artificial Sequence
  Description of Artificial Sequence: Synthetic oligonucleotide
  Sense strand starting at position 3265 of SEQ ID NO: 18
gcuuaaugucuagaagcca

SEQ ID NO: 5453 - RNA, 19 nt, Artificial Sequence
  Description of Artificial Sequence: Synthetic oligonucleotide
  Antisense strand to SEQ ID NO: 5452
uggcuucuagacauuaagc

SEQ ID NO: 5454 - RNA, 19 nt, Artificial Sequence
  Description of Artificial Sequence: Synthetic oligonucleotide
  Sense strand starting at position 3477 of SEQ ID NO: 18
cggcccaucuuccugagua

SEQ ID NO: 5455 - RNA, 19 nt, Artificial Sequence
  Description of Artificial Sequence: Synthetic oligonucleotide
  Antisense strand to SEQ ID NO: 5454
uacucaggaagaugggccg

SEQ ID NO: 5456 - RNA, 19 nt, Artificial Sequence
  Description of Artificial Sequence: Synthetic oligonucleotide
  Sense strand starting at position 3478 of SEQ ID NO: 18
ggcccaucuuccugaguag

SEQ ID NO: 5457 - RNA, 19 nt, Artificial Sequence
  Description of Artificial Sequence: Synthetic oligonucleotide
  Antisense strand to SEQ ID NO: 5456
cuacucaggaagaugggcc

SEQ ID NO: 5458 - RNA, 19 nt, Artificial Sequence
  Description of Artificial Sequence: Synthetic oligonucleotide
  Sense strand starting at position 3550 of SEQ ID NO: 18
caggacagguccucccaaa

SEQ ID NO: 5459 - RNA, 19 nt, Artificial Sequence
  Description of Artificial Sequence: Synthetic oligonucleotide
  Antisense strand to SEQ ID NO: 5458
uuugggaggaccuguccug

SEQ ID NO: 5460 - RNA, 19 nt, Artificial Sequence
  Description of Artificial Sequence: Synthetic oligonucleotide
  Sense strand starting at position 3656 of SEQ ID NO: 18
ucgacuuccuuucugagga

SEQ ID NO: 5461 - RNA, 19 nt, Artificial Sequence
  Description of Artificial Sequence: Synthetic oligonucleotide
  Antisense strand to SEQ ID NO: 5460
uccucagaaaggaagucga

SEQ ID NO: 5462 - RNA, 19 nt, Artificial Sequence
  Description of Artificial Sequence: Synthetic oligonucleotide
  Sense strand starting at position 3669 of SEQ ID NO: 18
ugaggacguuuagugacaa

SEQ ID NO: 5463 - RNA, 19 nt, Artificial Sequence
  Description of Artificial Sequence: Synthetic oligonucleotide
  Antisense strand to SEQ ID NO: 5462
uugucacuaaacguccuca

SEQ ID NO: 5464 - RNA, 19 nt, Artificial Sequence
  Description of Artificial Sequence: Synthetic oligonucleotide
  Sense strand starting at position 3673 of SEQ ID NO: 18
gacguuuagugacaagcuu

SEQ ID NO: 5465 - RNA, 19 nt, Artificial Sequence
  Description of Artificial Sequence: Synthetic oligonucleotide
  Antisense strand to SEQ ID NO: 5464
aagcuugucacuaaacguc

SEQ ID NO: 5466 - RNA, 19 nt, Artificial Sequence
  Description of Artificial Sequence: Synthetic oligonucleotide
  Sense strand starting at position 3681 of SEQ ID NO: 18
gugacaagcuucuccgaag

SEQ ID NO: 5467 - RNA, 19 nt, Artificial Sequence
  Description of Artificial Sequence: Synthetic oligonucleotide
  Antisense strand to SEQ ID NO: 5466
cuucggagaagcuugucac

SEQ ID NO: 5468 - RNA, 19 nt, Artificial Sequence
  Description of Artificial Sequence: Synthetic oligonucleotide
  Sense strand starting at position 3894 of SEQ ID NO: 18
ccaaaucagugaggaccua

SEQ ID NO: 5469 - RNA, 19 nt, Artificial Sequence
  Description of Artificial Sequence: Synthetic oligonucleotide
  Antisense strand to SEQ ID NO: 5468
uagguccucacugauuugg

SEQ ID NO: 5470 - RNA, 19 nt, Artificial Sequence
  Description of Artificial Sequence: Synthetic oligonucleotide
  Sense strand starting at position 3967 of SEQ ID NO: 18
ggaagcacuucucagauag

SEQ ID NO: 5471 - RNA, 19 nt, Artificial Sequence
  Description of Artificial Sequence: Synthetic oligonucleotide
  Antisense strand to SEQ ID NO: 5470
cuaucugagaagugcuucc

SEQ ID NO: 5472 - RNA, 19 nt, Artificial Sequence
  Description of Artificial Sequence: Synthetic oligonucleotide
  Sense strand starting at position 3978 of SEQ ID NO: 18
ucagauagcuuagccuuau

SEQ ID NO: 5473 - RNA, 19 nt, Artificial Sequence
  Description of Artificial Sequence: Synthetic oligonucleotide
  Antisense strand to SEQ ID NO: 5472
auaaggcuaagcuaucuga

SEQ ID NO: 5474 - RNA, 19 nt, Artificial Sequence
  Description of Artificial Sequence: Synthetic oligonucleotide
  Sense strand starting at position 3982 of SEQ ID NO: 18
auagcuuagccuuaugagu

SEQ ID NO: 5475 - RNA, 19 nt, Artificial Sequence
  Description of Artificial Sequence: Synthetic oligonucleotide
  Antisense strand to SEQ ID NO: 5474
acucauaaggcuaagcuau

SEQ ID NO: 5476 - RNA, 19 nt, Artificial Sequence
  Description of Artificial Sequence: Synthetic oligonucleotide
  Sense strand starting at position 183 of SEQ ID NO: 20
agaagaaaucccgguucca

SEQ ID NO: 5477 - RNA, 19 nt, Artificial Sequence
  Description of Artificial Sequence: Synthetic oligonucleotide
  Antisense strand to SEQ ID NO: 5476
uggaaccgggauuucuucu

SEQ ID NO: 5478 - RNA, 19 nt, Artificial Sequence
  Description of Artificial Sequence: Synthetic oligonucleotide
  Sense strand starting at position 210 of SEQ ID NO: 20
gugguaaagccagaguaag

SEQ ID NO: 5479 - RNA, 19 nt, Artificial Sequence
  Description of Artificial Sequence: Synthetic oligonucleotide
  Antisense strand to SEQ ID NO: 5478
cuuacucuggcuuuaccac

SEQ ID NO: 5480 - RNA, 19 nt, Artificial Sequence
  Description of Artificial Sequence: Synthetic oligonucleotide
  Sense strand starting at position 222 of SEQ ID NO: 20
gaguaaggcuaacuagaaa

SEQ ID NO: 5481 - RNA, 19 nt, Artificial Sequence
  Description of Artificial Sequence: Synthetic oligonucleotide
  Antisense strand to SEQ ID NO: 5480
uuucuaguuagccuuacuc

SEQ ID NO: 5482 - RNA, 19 nt, Artificial Sequence
  Description of Artificial Sequence: Synthetic oligonucleotide
  Sense strand starting at position 250 of SEQ ID NO: 20
agaauuaagugccuuccaa

SEQ ID NO: 5483 - RNA, 19 nt, Artificial Sequence
  Description of Artificial Sequence: Synthetic oligonucleotide
  Antisense strand to SEQ ID NO: 5482
uuggaaggcacuuaauucu

SEQ ID NO: 5484 - RNA, 19 nt, Artificial Sequence
  Description of Artificial Sequence: Synthetic oligonucleotide
  Sense strand starting at position 337 of SEQ ID NO: 20
uuuccaguuguacaaugua

SEQ ID NO: 5485 - RNA, 19 nt, Artificial Sequence
  Description of Artificial Sequence: Synthetic oligonucleotide
  Antisense strand to SEQ ID NO: 5484
uacauuguacaacuggaaa

SEQ ID NO: 5486 - RNA, 19 nt, Artificial Sequence
  Description of Artificial Sequence: Synthetic oligonucleotide
  Sense strand starting at position 340 of SEQ ID NO: 20
ccaguuguacaauguaaag

SEQ ID NO: 5487 - RNA, 19 nt, Artificial Sequence
  Description of Artificial Sequence: Synthetic oligonucleotide
  Antisense strand to SEQ ID NO: 5486
cuuuacauuguacaacugg

SEQ ID NO: 5488 - RNA, 19 nt, Artificial Sequence
  Description of Artificial Sequence: Synthetic oligonucleotide
  Sense strand starting at position 365 of SEQ ID NO: 20
uccugaagguuucuagaaa

SEQ ID NO: 5489 - RNA, 19 nt, Artificial Sequence
  Description of Artificial Sequence: Synthetic oligonucleotide
  Antisense strand to SEQ ID NO: 5488
uuucuagaaaccuucagga

SEQ ID NO: 5490 - RNA, 19 nt, Artificial Sequence
  Description of Artificial Sequence: Synthetic oligonucleotide
  Sense strand starting at position 486 of SEQ ID NO: 20
agguguaauaccugggagu

SEQ ID NO: 5491 - RNA, 19 nt, Artificial Sequence
  Description of Artificial Sequence: Synthetic oligonucleotide
  Antisense strand to SEQ ID NO: 5490
acucccagguauuacaccu

SEQ ID NO: 5492 - RNA, 19 nt, Artificial Sequence
  Description of Artificial Sequence: Synthetic oligonucleotide
  Sense strand starting at position 487 of SEQ ID NO: 20
gguguaauaccugggaguu

SEQ ID NO: 5493 - RNA, 19 nt, Artificial Sequence
  Description of Artificial Sequence: Synthetic oligonucleotide
  Antisense strand to SEQ ID NO: 5492
aacucccagguauuacacc

SEQ ID NO: 5494 - RNA, 19 nt, Artificial Sequence
  Description of Artificial Sequence: Synthetic oligonucleotide
  Sense strand starting at position 593 of SEQ ID NO: 20
cuauuugugcuuuagucau

SEQ ID NO: 5495 - RNA, 19 nt, Artificial Sequence
  Description of Artificial Sequence: Synthetic oligonucleotide
  Antisense strand to SEQ ID NO: 5494
augacuaaagcacaaauag

SEQ ID NO: 5496 - RNA, 19 nt, Artificial Sequence
  Description of Artificial Sequence: Synthetic oligonucleotide
  Sense strand starting at position 595 of SEQ ID NO: 20
auuugugcuuuagucauaa

SEQ ID NO: 5497 - RNA, 19 nt, Artificial Sequence
  Description of Artificial Sequence: Synthetic oligonucleotide
  Antisense strand to SEQ ID NO: 5496
uuaugacuaaagcacaaau

SEQ ID NO: 5498 - RNA, 19 nt, Artificial Sequence
  Description of Artificial Sequence: Synthetic oligonucleotide
  Sense strand starting at position 699 of SEQ ID NO: 20
ccacuauagguuuaguaac

SEQ ID NO: 5499 - RNA, 19 nt, Artificial Sequence
  Description of Artificial Sequence: Synthetic oligonucleotide
  Antisense strand to SEQ ID NO: 5498
guuacuaaaccuauagugg

SEQ ID NO: 5500 - RNA, 19 nt, Artificial Sequence
  Description of Artificial Sequence: Synthetic oligonucleotide
  Sense strand starting at position 781 of SEQ ID NO: 20
ucaaauggccuccagcaaa

SEQ ID NO: 5501 - RNA, 19 nt, Artificial Sequence
  Description of Artificial Sequence: Synthetic oligonucleotide
  Antisense strand to SEQ ID NO: 5500
uuugcuggaggccauuuga

SEQ ID NO: 5502 - RNA, 19 nt, Artificial Sequence
  Description of Artificial Sequence: Synthetic oligonucleotide
  Sense strand starting at position 791 of SEQ ID NO: 20
uccagcaaacccugagaaa

SEQ ID NO: 5503 - RNA, 19 nt, Artificial Sequence
  Description of Artificial Sequence: Synthetic oligonucleotide
  Antisense strand to SEQ ID NO: 5502
uuucucaggguuugcugga

SEQ ID NO: 5504 - RNA, 19 nt, Artificial Sequence
  Description of Artificial Sequence: Synthetic oligonucleotide
  Sense strand starting at position 854 of SEQ ID NO: 20
acuguaaucucaguuaaga

SEQ ID NO: 5505 - RNA, 19 nt, Artificial Sequence
  Description of Artificial Sequence: Synthetic oligonucleotide
  Antisense strand to SEQ ID NO: 5504
ucuuaacugagauuacagu

SEQ ID NO: 5506 - RNA, 19 nt, Artificial Sequence
  Description of Artificial Sequence: Synthetic oligonucleotide
  Sense strand starting at position 865 of SEQ ID NO: 20
aguuaagagugguuccuau

SEQ ID NO: 5507 - RNA, 19 nt, Artificial Sequence
  Description of Artificial Sequence: Synthetic oligonucleotide
  Antisense strand to SEQ ID NO: 5506
auaggaaccacucuuaacu

SEQ ID NO: 5508 - RNA, 19 nt, Artificial Sequence
  Description of Artificial Sequence: Synthetic oligonucleotide
  Sense strand starting at position 874 of SEQ ID NO: 20
ugguuccuaucacuaaagu

SEQ ID NO: 5509 - RNA, 19 nt, Artificial Sequence
  Description of Artificial Sequence: Synthetic oligonucleotide
  Antisense strand to SEQ ID NO: 5508
acuuuagugauaggaacca

SEQ ID NO: 5510 - RNA, 19 nt, Artificial Sequence
  Description of Artificial Sequence: Synthetic oligonucleotide
  Sense strand starting at position 1222 of SEQ ID NO: 20
gcgcgaguaaagcucugaa

SEQ ID NO: 5511 - RNA, 19 nt, Artificial Sequence
  Description of Artificial Sequence: Synthetic oligonucleotide
  Antisense strand to SEQ ID NO: 5510
uucagagcuuuacucgcgc

SEQ ID NO: 5512 - RNA, 19 nt, Artificial Sequence
  Description of Artificial Sequence: Synthetic oligonucleotide
  Sense strand starting at position 1225 of SEQ ID NO: 20
cgaguaaagcucugaagau

SEQ ID NO: 5513 - RNA, 19 nt, Artificial Sequence
  Description of Artificial Sequence: Synthetic oligonucleotide
  Antisense strand to SEQ ID NO: 5512
aucuucagagcuuuacucg

SEQ ID NO: 5514 - RNA, 19 nt, Artificial Sequence
  Description of Artificial Sequence: Synthetic oligonucleotide
  Sense strand starting at position 1518 of SEQ ID NO: 20
ugaacacaccagugaucau

SEQ ID NO: 5515 - RNA, 19 nt, Artificial Sequence
  Description of Artificial Sequence: Synthetic oligonucleotide
  Antisense strand to SEQ ID NO: 5514
augaucacugguguguuca

SEQ ID NO: 5516 - RNA, 19 nt, Artificial Sequence
  Description of Artificial Sequence: Synthetic oligonucleotide
  Sense strand starting at position 1525 of SEQ ID NO: 20
accagugaucaugguggua

SEQ ID NO: 5517 - RNA, 19 nt, Artificial Sequence
  Description of Artificial Sequence: Synthetic oligonucleotide
  Antisense strand to SEQ ID NO: 5516
uaccaccaugaucacuggu

SEQ ID NO: 5518 - RNA, 19 nt, Artificial Sequence
  Description of Artificial Sequence: Synthetic oligonucleotide
  Sense strand starting at position 1746 of SEQ ID NO: 20
cgaagagucccugggaguu

SEQ ID NO: 5519 - RNA, 19 nt, Artificial Sequence
  Description of Artificial Sequence: Synthetic oligonucleotide
  Antisense strand to SEQ ID NO: 5518
aacucccagggacucuucg

SEQ ID NO: 5520 - RNA, 19 nt, Artificial Sequence
  Description of Artificial Sequence: Synthetic oligonucleotide
  Sense strand starting at position 1812 of SEQ ID NO: 20
gagaucggauccuuaucuu

SEQ ID NO: 5521 - RNA, 19 nt, Artificial Sequence
  Description of Artificial Sequence: Synthetic oligonucleotide
  Antisense strand to SEQ ID NO: 5520
aagauaaggauccgaucuc

SEQ ID NO: 5522 - RNA, 19 nt, Artificial Sequence
  Description of Artificial Sequence: Synthetic oligonucleotide
  Sense strand starting at position 2387 of SEQ ID NO: 20
gagacaccugccgagugau

SEQ ID NO: 5523 - RNA, 19 nt, Artificial Sequence
  Description of Artificial Sequence: Synthetic oligonucleotide
  Antisense strand to SEQ ID NO: 5522
aucacucggcaggugucuc

SEQ ID NO: 5524 - RNA, 19 nt, Artificial Sequence
  Description of Artificial Sequence: Synthetic oligonucleotide
  Sense strand starting at position 2401 of SEQ ID NO: 20
gugauugccauuugcgaaa

SEQ ID NO: 5525 - RNA, 19 nt, Artificial Sequence
  Description of Artificial Sequence: Synthetic oligonucleotide
  Antisense strand to SEQ ID NO: 5524
uuucgcaaauggcaaucac

SEQ ID NO: 5526 - RNA, 19 nt, Artificial Sequence
  Description of Artificial Sequence: Synthetic oligonucleotide
  Sense strand starting at position 2430 of SEQ ID NO: 20
ggugcuuuauauuuaguca

SEQ ID NO: 5527 - RNA, 19 nt, Artificial Sequence
  Description of Artificial Sequence: Synthetic oligonucleotide
  Antisense strand to SEQ ID NO: 5526
ugacuaaauauaaagcacc

SEQ ID NO: 5528 - RNA, 19 nt, Artificial Sequence
  Description of Artificial Sequence: Synthetic oligonucleotide
  Sense strand starting at position 2498 of SEQ ID NO: 20
uguaaucauguagaacuuu

SEQ ID NO: 5529 - RNA, 19 nt, Artificial Sequence
  Description of Artificial Sequence: Synthetic oligonucleotide
  Antisense strand to SEQ ID NO: 5528
aaaguucuacaugauuaca

SEQ ID NO: 5530 - RNA, 19 nt, Artificial Sequence
  Description of Artificial Sequence: Synthetic oligonucleotide
  Sense strand starting at position 2543 of SEQ ID NO: 20
ccagaauacuucuugugga

SEQ ID NO: 5531 - RNA, 19 nt, Artificial Sequence
  Description of Artificial Sequence: Synthetic oligonucleotide
  Antisense strand to SEQ ID NO: 5530
uccacaagaaguauucugg

SEQ ID NO: 5532 - RNA, 19 nt, Artificial Sequence
  Description of Artificial Sequence: Synthetic oligonucleotide
  Sense strand starting at position 2582 of SEQ ID NO: 20
gggugucccagugauuaag

SEQ ID NO: 5533 - RNA, 19 nt, Artificial Sequence
  Description of Artificial Sequence: Synthetic oligonucleotide
  Antisense strand to SEQ ID NO: 5532
cuuaaucacugggacaccc

SEQ ID NO: 5534 - RNA, 19 nt, Artificial Sequence
  Description of Artificial Sequence: Synthetic oligonucleotide
  Sense strand starting at position 2584 of SEQ ID NO: 20
gugucccagugauuaagaa

SEQ ID NO: 5535 - RNA, 19 nt, Artificial Sequence
  Description of Artificial Sequence: Synthetic oligonucleotide
  Antisense strand to SEQ ID NO: 5534
uucuuaaucacugggacac

SEQ ID NO: 5536 - RNA, 19 nt, Artificial Sequence
  Description of Artificial Sequence: Synthetic oligonucleotide
  Sense strand starting at position 2963 of SEQ ID NO: 20
cugguuucuguugauauac

SEQ ID NO: 5537 - RNA, 19 nt, Artificial Sequence
  Description of Artificial Sequence: Synthetic oligonucleotide
  Antisense strand to SEQ ID NO: 5536
guauaucaacagaaaccag

SEQ ID NO: 5538 - RNA, 19 nt, Artificial Sequence
  Description of Artificial Sequence: Synthetic oligonucleotide
  Sense strand starting at position 3038 of SEQ ID NO: 20
cuaugugucuaucuccaaa

SEQ ID NO: 5539 - RNA, 19 nt, Artificial Sequence
  Description of Artificial Sequence: Synthetic oligonucleotide
  Antisense strand to SEQ ID NO: 5538
uuuggagauagacacauag

SEQ ID NO: 5540 - RNA, 19 nt, Artificial Sequence
  Description of Artificial Sequence: Synthetic oligonucleotide
  Sense strand starting at position 3040 of SEQ ID NO: 20
augugucuaucuccaaaga

SEQ ID NO: 5541 - RNA, 19 nt, Artificial Sequence
  Description of Artificial Sequence: Synthetic oligonucleotide
  Antisense strand to SEQ ID NO: 5540
ucuuuggagauagacacau

SEQ ID NO: 5542 - RNA, 19 nt, Artificial Sequence
  Description of Artificial Sequence: Synthetic oligonucleotide
  Sense strand starting at position 3041 of SEQ ID NO: 20
ugugucuaucuccaaagau

SEQ ID NO: 5543 - RNA, 19 nt, Artificial Sequence
  Description of Artificial Sequence: Synthetic oligonucleotide
  Antisense strand to SEQ ID NO: 5542
aucuuuggagauagacaca

SEQ ID NO: 5544 - RNA, 19 nt, Artificial Sequence
  Description of Artificial Sequence: Synthetic oligonucleotide
  Sense strand starting at position 3280 of SEQ ID NO: 20
gaauacuguuugcuaugga

SEQ ID NO: 5545 - RNA, 19 nt, Artificial Sequence
  Description of Artificial Sequence: Synthetic oligonucleotide
  Antisense strand to SEQ ID NO: 5544
uccauagcaaacaguauuc

SEQ ID NO: 5546 - RNA, 19 nt, Artificial Sequence
  Description of Artificial Sequence: Synthetic oligonucleotide
  Sense strand starting at position 3320 of SEQ ID NO: 20
auucguacccacuaaguga

SEQ ID NO: 5547 - RNA, 19 nt, Artificial Sequence
  Description of Artificial Sequence: Synthetic oligonucleotide
  Antisense strand to SEQ ID NO: 5546
ucacuuaguggguacgaau

SEQ ID NO: 5548 - RNA, 19 nt, Artificial Sequence
  Description of Artificial Sequence: Synthetic oligonucleotide
  Sense strand starting at position 3363 of SEQ ID NO: 20
gaaggugauucugucagag

SEQ ID NO: 5549 - RNA, 19 nt, Artificial Sequence
  Description of Artificial Sequence: Synthetic oligonucleotide
  Antisense strand to SEQ ID NO: 5548
cucugacagaaucaccuuc

SEQ ID NO: 5550 - RNA, 19 nt, Artificial Sequence
  Description of Artificial Sequence: Synthetic oligonucleotide
  Sense strand starting at position 3594 of SEQ ID NO: 20
uguugauggaagugaccua

SEQ ID NO: 5551 - RNA, 19 nt, Artificial Sequence
  Description of Artificial Sequence: Synthetic oligonucleotide
  Antisense strand to SEQ ID NO: 5550
uaggucacuuccaucaaca

SEQ ID NO: 5552 - RNA, 19 nt, Artificial Sequence
  Description of Artificial Sequence: Synthetic oligonucleotide
  Sense strand starting at position 3601 of SEQ ID NO: 20
ggaagugaccuauggucaa

SEQ ID NO: 5553 - RNA, 19 nt, Artificial Sequence
  Description of Artificial Sequence: Synthetic oligonucleotide
  Antisense strand to SEQ ID NO: 5552
uugaccauaggucacuucc

SEQ ID NO: 5554 - RNA, 19 nt, Artificial Sequence
  Description of Artificial Sequence: Synthetic oligonucleotide
  Sense strand starting at position 3800 of SEQ ID NO: 20
ccuuguuuggcauauaauu

SEQ ID NO: 5555 - RNA, 19 nt, Artificial Sequence
  Description of Artificial Sequence: Synthetic oligonucleotide
  Antisense strand to SEQ ID NO: 5554
aauuauaugccaaacaagg

SEQ ID NO: 5556 - RNA, 19 nt, Artificial Sequence
  Description of Artificial Sequence: Synthetic oligonucleotide
  Sense strand starting at position 15 of SEQ ID NO: 21
ucgccaucucguucucgaa

SEQ ID NO: 5557 - RNA, 19 nt, Artificial Sequence
  Description of Artificial Sequence: Synthetic oligonucleotide
  Antisense strand to SEQ ID NO: 5556
uucgagaacgagauggcga

SEQ ID NO: 5558 - RNA, 19 nt, Artificial Sequence
  Description of Artificial Sequence: Synthetic oligonucleotide
  Sense strand starting at position 17 of SEQ ID NO: 21
gccaucucguucucgaagu

SEQ ID NO: 5559 - RNA, 19 nt, Artificial Sequence
  Description of Artificial Sequence: Synthetic oligonucleotide
  Antisense strand to SEQ ID NO: 5558
acuucgagaacgagauggc

SEQ ID NO: 5560 - RNA, 19 nt, Artificial Sequence
  Description of Artificial Sequence: Synthetic oligonucleotide
  Sense strand starting at position 216 of SEQ ID NO: 21
ucagguagucggugagauc

SEQ ID NO: 5561 - RNA, 19 nt, Artificial Sequence
  Description of Artificial Sequence: Synthetic oligonucleotide
  Antisense strand to SEQ ID NO: 5560
gaucucaccgacuaccuga

SEQ ID NO: 5562 - RNA, 19 nt, Artificial Sequence
  Description of Artificial Sequence: Synthetic oligonucleotide
  Sense strand starting at position 273 of SEQ ID NO: 21
gcgcguagcccucauaaau

SEQ ID NO: 5563 - RNA, 19 nt, Artificial Sequence
  Description of Artificial Sequence: Synthetic oligonucleotide
  Antisense strand to SEQ ID NO: 5562
auuuaugagggcuacgcgc

SEQ ID NO: 5564 - RNA, 19 nt, Artificial Sequence
  Description of Artificial Sequence: Synthetic oligonucleotide
  Sense strand starting at position 559 of SEQ ID NO: 21
cgcgguuggccuugggauu

SEQ ID NO: 5565 - RNA, 19 nt, Artificial Sequence
  Description of Artificial Sequence: Synthetic oligonucleotide
  Antisense strand to SEQ ID NO: 5564
aaucccaaggccaaccgcg

SEQ ID NO: 5566 - RNA, 19 nt, Artificial Sequence
  Description of Artificial Sequence: Synthetic oligonucleotide
  Sense strand starting at position 751 of SEQ ID NO: 21
aggaaucuuucugacccau

SEQ ID NO: 5567 - RNA, 19 nt, Artificial Sequence
  Description of Artificial Sequence: Synthetic oligonucleotide
  Antisense strand to SEQ ID NO: 5566
augggucagaaagauuccu

SEQ ID NO: 5568 - RNA, 19 nt, Artificial Sequence
  Description of Artificial Sequence: Synthetic oligonucleotide
  Sense strand starting at position 1013 of SEQ ID NO: 21
cgcacauugugucuaguuu

SEQ ID NO: 5569 - RNA, 19 nt, Artificial Sequence
  Description of Artificial Sequence: Synthetic oligonucleotide
  Antisense strand to SEQ ID NO: 5568
aaacuagacacaaugugcg

SEQ ID NO: 5570 - RNA, 19 nt, Artificial Sequence
  Description of Artificial Sequence: Synthetic oligonucleotide
  Sense strand starting at position 1022 of SEQ ID NO: 21
ugucuaguuucugcaagga

SEQ ID NO: 5571 - RNA, 19 nt, Artificial Sequence
  Description of Artificial Sequence: Synthetic oligonucleotide
  Antisense strand to SEQ ID NO: 5570
uccuugcagaaacuagaca

SEQ ID NO: 5572 - RNA, 19 nt, Artificial Sequence
  Description of Artificial Sequence: Synthetic oligonucleotide
  Sense strand starting at position 1063 of SEQ ID NO: 21
ggugcaucagcgcagaagu

SEQ ID NO: 5573 - RNA, 19 nt, Artificial Sequence
  Description of Artificial Sequence: Synthetic oligonucleotide
  Antisense strand to SEQ ID NO: 5572
acuucugcgcugaugcacc

SEQ ID NO: 5574 - RNA, 19 nt, Artificial Sequence
  Description of Artificial Sequence: Synthetic oligonucleotide
  Sense strand starting at position 1393 of SEQ ID NO: 21
aucugucaccuagggagau

SEQ ID NO: 5575 - RNA, 19 nt, Artificial Sequence
  Description of Artificial Sequence: Synthetic oligonucleotide
  Antisense strand to SEQ ID NO: 5574
aucucccuaggugacagau

SEQ ID NO: 5576 - RNA, 19 nt, Artificial Sequence
  Description of Artificial Sequence: Synthetic oligonucleotide
  Sense strand starting at position 1407 of SEQ ID NO: 21
gagauaaggccucagcacu

SEQ ID NO: 5577 - RNA, 19 nt, Artificial Sequence
  Description of Artificial Sequence: Synthetic oligonucleotide
  Antisense strand to SEQ ID NO: 5576
agugcugaggccuuaucuc

SEQ ID NO: 5578 - RNA, 19 nt, Artificial Sequence
  Description of Artificial Sequence: Synthetic oligonucleotide
  Sense strand starting at position 1493 of SEQ ID NO: 21
agggaagaguggccuguua

SEQ ID NO: 5579 - RNA, 19 nt, Artificial Sequence
  Description of Artificial Sequence: Synthetic oligonucleotide
  Antisense strand to SEQ ID NO: 5578
uaacaggccacucuucccu

SEQ ID NO: 5580 - RNA, 19 nt, Artificial Sequence
  Description of Artificial Sequence: Synthetic oligonucleotide
  Sense strand starting at position 1509 of SEQ ID NO: 21
uuaggaacccugugacauu

SEQ ID NO: 5581 - RNA, 19 nt, Artificial Sequence
  Description of Artificial Sequence: Synthetic oligonucleotide
  Antisense strand to SEQ ID NO: 5580
aaugucacaggguuccuaa

SEQ ID NO: 5582 - RNA, 19 nt, Artificial Sequence
  Description of Artificial Sequence: Synthetic oligonucleotide
  Sense strand starting at position 1510 of SEQ ID NO: 21
uaggaacccugugacauuu

SEQ ID NO: 5583 - RNA, 19 nt, Artificial Sequence
  Description of Artificial Sequence: Synthetic oligonucleotide
  Antisense strand to SEQ ID NO: 5582
aaaugucacaggguuccua

SEQ ID NO: 5584 - RNA, 19 nt, Artificial Sequence
  Description of Artificial Sequence: Synthetic oligonucleotide
  Sense strand starting at position 1603 of SEQ ID NO: 21
gcgcuaguuuggaagggaa

SEQ ID NO: 5585 - RNA, 19 nt, Artificial Sequence
  Description of Artificial Sequence: Synthetic oligonucleotide
  Antisense strand to SEQ ID NO: 5584
uucccuuccaaacuagcgc

SEQ ID NO: 5586 - RNA, 19 nt, Artificial Sequence
  Description of Artificial Sequence: Synthetic oligonucleotide
  Sense strand starting at position 1605 of SEQ ID NO: 21
gcuaguuuggaagggaacu

SEQ ID NO: 5587 - RNA, 19 nt, Artificial Sequence
  Description of Artificial Sequence: Synthetic oligonucleotide
  Antisense strand to SEQ ID NO: 5586
aguucccuuccaaacuagc

SEQ ID NO: 5588 - RNA, 19 nt, Artificial Sequence
  Description of Artificial Sequence: Synthetic oligonucleotide
  Sense strand starting at position 1622 of SEQ ID NO: 21
cugccuuggcgacaacuaa

SEQ ID NO: 5589 - RNA, 19 nt, Artificial Sequence
  Description of Artificial Sequence: Synthetic oligonucleotide
  Antisense strand to SEQ ID NO: 5588
uuaguugucgccaaggcag

SEQ ID NO: 5590 - RNA, 19 nt, Artificial Sequence
  Description of Artificial Sequence: Synthetic oligonucleotide
  Sense strand starting at position 1648 of SEQ ID NO: 21
ccguuuaucucccuaggca

SEQ ID NO: 5591 - RNA, 19 nt, Artificial Sequence
  Description of Artificial Sequence: Synthetic oligonucleotide
  Antisense strand to SEQ ID NO: 5590
ugccuagggagauaaacgg

SEQ ID NO: 5592 - RNA, 19 nt, Artificial Sequence
  Description of Artificial Sequence: Synthetic oligonucleotide
  Sense strand starting at position 2444 of SEQ ID NO: 21
ucggguucuuugcucagau

SEQ ID NO: 5593 - RNA, 19 nt, Artificial Sequence
  Description of Artificial Sequence: Synthetic oligonucleotide
  Antisense strand to SEQ ID NO: 5592
aucugagcaaagaacccga

SEQ ID NO: 5594 - RNA, 19 nt, Artificial Sequence
  Description of Artificial Sequence: Synthetic oligonucleotide
  Sense strand starting at position 2445 of SEQ ID NO: 21
cggguucuuugcucagauc

SEQ ID NO: 5595 - RNA, 19 nt, Artificial Sequence
  Description of Artificial Sequence: Synthetic oligonucleotide
  Antisense strand to SEQ ID NO: 5594
gaucugagcaaagaacccg

SEQ ID NO: 5596 - RNA, 19 nt, Artificial Sequence
  Description of Artificial Sequence: Synthetic oligonucleotide
  Sense strand starting at position 2703 of SEQ ID NO: 21
gcagcugucgcaggauaga

SEQ ID NO: 5597 - RNA, 19 nt, Artificial Sequence
  Description of Artificial Sequence: Synthetic oligonucleotide
  Antisense strand to SEQ ID NO: 5596
ucuauccugcgacagcugc

SEQ ID NO: 5598 - RNA, 19 nt, Artificial Sequence
  Description of Artificial Sequence: Synthetic oligonucleotide
  Sense strand starting at position 3239 of SEQ ID NO: 21
ugcugcagguucuauuuau

SEQ ID NO: 5599 - RNA, 19 nt, Artificial Sequence
  Description of Artificial Sequence: Synthetic oligonucleotide
  Antisense strand to SEQ ID NO: 5598
auaaauagaaccugcagca

SEQ ID NO: 5600 - RNA, 19 nt, Artificial Sequence
  Description of Artificial Sequence: Synthetic oligonucleotide
  Sense strand starting at position 3245 of SEQ ID NO: 21
agguucuauuuauaucacu

SEQ ID NO: 5601 - RNA, 19 nt, Artificial Sequence
  Description of Artificial Sequence: Synthetic oligonucleotide
  Antisense strand to SEQ ID NO: 5600
agugauauaaauagaaccu

SEQ ID NO: 5602 - RNA, 19 nt, Artificial Sequence
  Description of Artificial Sequence: Synthetic oligonucleotide
  Sense strand starting at position 3293 of SEQ ID NO: 21
cuagaaggauuuggagcua

SEQ ID NO: 5603 - RNA, 19 nt, Artificial Sequence
  Description of Artificial Sequence: Synthetic oligonucleotide
  Antisense strand to SEQ ID NO: 5602
uagcuccaaauccuucuag

SEQ ID NO: 5604 - RNA, 19 nt, Artificial Sequence
  Description of Artificial Sequence: Synthetic oligonucleotide
  Sense strand starting at position 3302 of SEQ ID NO: 21
uuuggagcuacuuauggua

SEQ ID NO: 5605 - RNA, 19 nt, Artificial Sequence
  Description of Artificial Sequence: Synthetic oligonucleotide
  Antisense strand to SEQ ID NO: 5604
uaccauaaguagcuccaaa

SEQ ID NO: 5606 - RNA, 19 nt, Artificial Sequence
  Description of Artificial Sequence: Synthetic oligonucleotide
  Sense strand starting at position 3467 of SEQ ID NO: 21
agcagucuucugugaugaa

SEQ ID NO: 5607 - RNA, 19 nt, Artificial Sequence
  Description of Artificial Sequence: Synthetic oligonucleotide
  Antisense strand to SEQ ID NO: 5606
uucaucacagaagacugcu

SEQ ID NO: 5608 - RNA, 19 nt, Artificial Sequence
  Description of Artificial Sequence: Synthetic oligonucleotide
  Sense strand starting at position 3471 of SEQ ID NO: 21
gucuucugugaugaacuca

SEQ ID NO: 5609 - RNA, 19 nt, Artificial Sequence
  Description of Artificial Sequence: Synthetic oligonucleotide
  Antisense strand to SEQ ID NO: 5608
ugaguucaucacagaagac

SEQ ID NO: 5610 - RNA, 19 nt, Artificial Sequence
  Description of Artificial Sequence: Synthetic oligonucleotide
  Sense strand starting at position 3559 of SEQ ID NO: 21
gugcuuaagugcuccuaaa

SEQ ID NO: 5611 - RNA, 19 nt, Artificial Sequence
  Description of Artificial Sequence: Synthetic oligonucleotide
  Antisense strand to SEQ ID NO: 5610
uuuaggagcacuuaagcac

SEQ ID NO: 5612 - RNA, 19 nt, Artificial Sequence
  Description of Artificial Sequence: Synthetic oligonucleotide
  Sense strand starting at position 3772 of SEQ ID NO: 21
uaaggaguuugacuaguau

SEQ ID NO: 5613 - RNA, 19 nt, Artificial Sequence
  Description of Artificial Sequence: Synthetic oligonucleotide
  Antisense strand to SEQ ID NO: 5612
auacuagucaaacuccuua

SEQ ID NO: 5614 - RNA, 19 nt, Artificial Sequence
  Description of Artificial Sequence: Synthetic oligonucleotide
  Sense strand starting at position 3781 of SEQ ID NO: 21
ugacuaguauagggacuau

SEQ ID NO: 5615 - RNA, 19 nt, Artificial Sequence
  Description of Artificial Sequence: Synthetic oligonucleotide
  Antisense strand to SEQ ID NO: 5614
auagucccuauacuaguca

SEQ ID NO: 5616 - RNA, 19 nt, Artificial Sequence
  Description of Artificial Sequence: Synthetic oligonucleotide
  Sense strand starting at position 3792 of SEQ ID NO: 21
gggacuaugcggugaggau

SEQ ID NO: 5617 - RNA, 19 nt, Artificial Sequence
  Description of Artificial Sequence: Synthetic oligonucleotide
  Antisense strand to SEQ ID NO: 5616
auccucaccgcauaguccc

SEQ ID NO: 5618 - RNA, 19 nt, Artificial Sequence
  Description of Artificial Sequence: Synthetic oligonucleotide
  Sense strand starting at position 3793 of SEQ ID NO: 21
ggacuaugcggugaggaua

SEQ ID NO: 5619 - RNA, 19 nt, Artificial Sequence
  Description of Artificial Sequence: Synthetic oligonucleotide
  Antisense strand to SEQ ID NO: 5618
uauccucaccgcauagucc

SEQ ID NO: 5620 - RNA, 19 nt, Artificial Sequence
  Description of Artificial Sequence: Synthetic oligonucleotide
  Sense strand starting at position 3808 of SEQ ID NO: 21
gauaaagucuccuaugguu

SEQ ID NO: 5621 - RNA, 19 nt, Artificial Sequence
  Description of Artificial Sequence: Synthetic oligonucleotide
  Antisense strand to SEQ ID NO: 5620
aaccauaggagacuuuauc

SEQ ID NO: 5622 - RNA, 19 nt, Artificial Sequence
  Description of Artificial Sequence: Synthetic oligonucleotide
  Sense strand starting at position 3813 of SEQ ID NO: 21
agucuccuaugguuccaua

SEQ ID NO: 5623 - RNA, 19 nt, Artificial Sequence
  Description of Artificial Sequence: Synthetic oligonucleotide
  Antisense strand to SEQ ID NO: 5622
uauggaaccauaggagacu

SEQ ID NO: 5624 - RNA, 19 nt, Artificial Sequence
  Description of Artificial Sequence: Synthetic oligonucleotide
  Sense strand starting at position 3850 of SEQ ID NO: 21
uuuggagaguaagugaaua

SEQ ID NO: 5625 - RNA, 19 nt, Artificial Sequence
  Description of Artificial Sequence: Synthetic oligonucleotide
  Antisense strand to SEQ ID NO: 5624
uauucacuuacucuccaaa

SEQ ID NO: 5626 - RNA, 19 nt, Artificial Sequence
  Description of Artificial Sequence: Synthetic oligonucleotide
  Sense strand starting at position 3862 of SEQ ID NO: 21
gugaauaauugacagaacu

SEQ ID NO: 5627 - RNA, 19 nt, Artificial Sequence
  Description of Artificial Sequence: Synthetic oligonucleotide
  Antisense strand to SEQ ID NO: 5626
aguucugucaauuauucac

SEQ ID NO: 5628 - RNA, 19 nt, Artificial Sequence
  Description of Artificial Sequence: Synthetic oligonucleotide
  Sense strand starting at position 3906 of SEQ ID NO: 21
ccuccugugucagcgagua

SEQ ID NO: 5629 - RNA, 19 nt, Artificial Sequence
  Description of Artificial Sequence: Synthetic oligonucleotide
  Antisense strand to SEQ ID NO: 5628
uacucgcugacacaggagg

SEQ ID NO: 5630 - RNA, 19 nt, Artificial Sequence
  Description of Artificial Sequence: Synthetic oligonucleotide
  Sense strand starting at position 3908 of SEQ ID NO: 21
uccugugucagcgaguagu

SEQ ID NO: 5631 - RNA, 19 nt, Artificial Sequence
  Description of Artificial Sequence: Synthetic oligonucleotide
  Antisense strand to SEQ ID NO: 5630
acuacucgcugacacagga

SEQ ID NO: 5632 - RNA, 19 nt, Artificial Sequence
  Description of Artificial Sequence: Synthetic oligonucleotide
  Sense strand starting at position 3918 of SEQ ID NO: 21
gcgaguaguggagauacua

SEQ ID NO: 5633 - RNA, 19 nt, Artificial Sequence
  Description of Artificial Sequence: Synthetic oligonucleotide
  Antisense strand to SEQ ID NO: 5632
uaguaucuccacuacucgc

SEQ ID NO: 5634 - RNA, 19 nt, Artificial Sequence
  Description of Artificial Sequence: Synthetic oligonucleotide
  Sense strand starting at position 3952 of SEQ ID NO: 21
gcaaaugagcugcauguaa

SEQ ID NO: 5635 - RNA, 19 nt, Artificial Sequence
  Description of Artificial Sequence: Synthetic oligonucleotide
  Antisense strand to SEQ ID NO: 5634
uuacaugcagcucauuugc

SEQ ID NO: 5636 - RNA, 19 nt, Artificial Sequence
  Description of Artificial Sequence: Synthetic oligonucleotide
  Sense strand starting at position 3923 of SEQ ID NO: 22
uuaucacuuugucuuggaa

SEQ ID NO: 5637 - RNA, 19 nt, Artificial Sequence
  Description of Artificial Sequence: Synthetic oligonucleotide
  Antisense strand to SEQ ID NO: 5636
uuccaagacaaagugauaa

SEQ ID NO: 5638 - RNA, 19 nt, Artificial Sequence
  Description of Artificial Sequence: Synthetic oligonucleotide
  Sense strand starting at position 3892 of SEQ ID NO: 22
gaaguauaguuuguccuag

SEQ ID NO: 5639 - RNA, 19 nt, Artificial Sequence
  Description of Artificial Sequence: Synthetic oligonucleotide
  Antisense strand to SEQ ID NO: 5638
cuaggacaaacuauacuuc

SEQ ID NO: 5640 - RNA, 19 nt, Artificial Sequence
  Description of Artificial Sequence: Synthetic oligonucleotide
  Sense strand starting at position 3891 of SEQ ID NO: 22
ugaaguauaguuuguccua

SEQ ID NO: 5641 - RNA, 19 nt, Artificial Sequence
  Description of Artificial Sequence: Synthetic oligonucleotide
  Antisense strand to SEQ ID NO: 5640
uaggacaaacuauacuuca

SEQ ID NO: 5642 - RNA, 19 nt, Artificial Sequence
  Description of Artificial Sequence: Synthetic oligonucleotide
  Sense strand starting at position 3835 of SEQ ID NO: 22
gacaauaaucuaugcggua

SEQ ID NO: 5643 - RNA, 19 nt, Artificial Sequence
  Description of Artificial Sequence: Synthetic oligonucleotide
  Antisense strand to SEQ ID NO: 5642
uaccgcauagauuauuguc

SEQ ID NO: 5644 - RNA, 19 nt, Artificial Sequence
  Description of Artificial Sequence: Synthetic oligonucleotide
  Sense strand starting at position 3557 of SEQ ID NO: 22
agacuaauacaguggguaa

SEQ ID NO: 5645 - RNA, 19 nt, Artificial Sequence
  Description of Artificial Sequence: Synthetic oligonucleotide
  Antisense strand to SEQ ID NO: 5644
uuacccacuguauuagucu

SEQ ID NO: 5646 - RNA, 19 nt, Artificial Sequence
  Description of Artificial Sequence: Synthetic oligonucleotide
  Sense strand starting at position 3115 of SEQ ID NO: 22
uguugcauuguagauaaau

SEQ ID NO: 5647 - RNA, 19 nt, Artificial Sequence
  Description of Artificial Sequence: Synthetic oligonucleotide
  Antisense strand to SEQ ID NO: 5646
auuuaucuacaaugcaaca

SEQ ID NO: 5648 - RNA, 19 nt, Artificial Sequence
  Description of Artificial Sequence: Synthetic oligonucleotide
  Sense strand starting at position 3101 of SEQ ID NO: 22
cacuaagaucuguguguug

SEQ ID NO: 5649 - RNA, 19 nt, Artificial Sequence
  Description of Artificial Sequence: Synthetic oligonucleotide
  Antisense strand to SEQ ID NO: 5648
caacacacagaucuuagug

SEQ ID NO: 5650 - RNA, 19 nt, Artificial Sequence
  Description of Artificial Sequence: Synthetic oligonucleotide
  Sense strand starting at position 3100 of SEQ ID NO: 22
acacuaagaucuguguguu

SEQ ID NO: 5651 - RNA, 19 nt, Artificial Sequence
  Description of Artificial Sequence: Synthetic oligonucleotide
  Antisense strand to SEQ ID NO: 5650
aacacacagaucuuagugu

SEQ ID NO: 5652 - RNA, 19 nt, Artificial Sequence
  Description of Artificial Sequence: Synthetic oligonucleotide
  Sense strand starting at position 3040 of SEQ ID NO: 22
ggaaauacucucuauugca

SEQ ID NO: 5653 - RNA, 19 nt, Artificial Sequence
  Description of Artificial Sequence: Synthetic oligonucleotide
  Antisense strand to SEQ ID NO: 5652
ugcaauagagaguauuucc

SEQ ID NO: 5654 - RNA, 19 nt, Artificial Sequence
  Description of Artificial Sequence: Synthetic oligonucleotide
  Sense strand starting at position 3027 of SEQ ID NO: 22
uuucuagggcaauggaaau

SEQ ID NO: 5655 - RNA, 19 nt, Artificial Sequence
  Description of Artificial Sequence: Synthetic oligonucleotide
  Antisense strand to SEQ ID NO: 5654
auuuccauugcccuagaaa

SEQ ID NO: 5656 - RNA, 19 nt, Artificial Sequence
  Description of Artificial Sequence: Synthetic oligonucleotide
  Sense strand starting at position 2649 of SEQ ID NO: 22
guguaaccauagucagcaa

SEQ ID NO: 5657 - RNA, 19 nt, Artificial Sequence
  Description of Artificial Sequence: Synthetic oligonucleotide
  Antisense strand to SEQ ID NO: 5656
uugcugacuaugguuacac

SEQ ID NO: 5658 - RNA, 19 nt, Artificial Sequence
  Description of Artificial Sequence: Synthetic oligonucleotide
  Sense strand starting at position 2640 of SEQ ID NO: 22
aggguaguuguguaaccau

SEQ ID NO: 5659 - RNA, 19 nt, Artificial Sequence
  Description of Artificial Sequence: Synthetic oligonucleotide
  Antisense strand to SEQ ID NO: 5658
augguuacacaacuacccu

SEQ ID NO: 5660 - RNA, 19 nt, Artificial Sequence
  Description of Artificial Sequence: Synthetic oligonucleotide
  Sense strand starting at position 2639 of SEQ ID NO: 22
caggguaguuguguaacca

SEQ ID NO: 5661 - RNA, 19 nt, Artificial Sequence
  Description of Artificial Sequence: Synthetic oligonucleotide
  Antisense strand to SEQ ID NO: 5660
ugguuacacaacuacccug

SEQ ID NO: 5662 - RNA, 19 nt, Artificial Sequence
  Description of Artificial Sequence: Synthetic oligonucleotide
  Sense strand starting at position 2545 of SEQ ID NO: 22
cccugauugguuuauacac

SEQ ID NO: 5663 - RNA, 19 nt, Artificial Sequence
  Description of Artificial Sequence: Synthetic oligonucleotide
  Antisense strand to SEQ ID NO: 5662
guguauaaaccaaucaggg

SEQ ID NO: 5664 - RNA, 19 nt, Artificial Sequence
  Description of Artificial Sequence: Synthetic oligonucleotide
  Sense strand starting at position 2539 of SEQ ID NO: 22
gccaaacccugauugguuu

SEQ ID NO: 5665 - RNA, 19 nt, Artificial Sequence
  Description of Artificial Sequence: Synthetic oligonucleotide
  Antisense strand to SEQ ID NO: 5664
aaaccaaucaggguuuggc

SEQ ID NO: 5666 - RNA, 19 nt, Artificial Sequence
  Description of Artificial Sequence: Synthetic oligonucleotide
  Sense strand starting at position 2520 of SEQ ID NO: 22
gcucucauugguugauaca

SEQ ID NO: 5667 - RNA, 19 nt, Artificial Sequence
  Description of Artificial Sequence: Synthetic oligonucleotide
  Antisense strand to SEQ ID NO: 5666
uguaucaaccaaugagagc

SEQ ID NO: 5668 - RNA, 19 nt, Artificial Sequence
  Description of Artificial Sequence: Synthetic oligonucleotide
  Sense strand starting at position 2518 of SEQ ID NO: 22
gagcucucauugguugaua

SEQ ID NO: 5669 - RNA, 19 nt, Artificial Sequence
  Description of Artificial Sequence: Synthetic oligonucleotide
  Antisense strand to SEQ ID NO: 5668
uaucaaccaaugagagcuc

SEQ ID NO: 5670 - RNA, 19 nt, Artificial Sequence
  Description of Artificial Sequence: Synthetic oligonucleotide
  Sense strand starting at position 2517 of SEQ ID NO: 22
ugagcucucauugguugau

SEQ ID NO: 5671 - RNA, 19 nt, Artificial Sequence
  Description of Artificial Sequence: Synthetic oligonucleotide
  Antisense strand to SEQ ID NO: 5670
aucaaccaaugagagcuca

SEQ ID NO: 5672 - RNA, 19 nt, Artificial Sequence
  Description of Artificial Sequence: Synthetic oligonucleotide
  Sense strand starting at position 2516 of SEQ ID NO: 22
cugagcucucauugguuga

SEQ ID NO: 5673 - RNA, 19 nt, Artificial Sequence
  Description of Artificial Sequence: Synthetic oligonucleotide
  Antisense strand to SEQ ID NO: 5672
ucaaccaaugagagcucag

SEQ ID NO: 5674 - RNA, 19 nt, Artificial Sequence
  Description of Artificial Sequence: Synthetic oligonucleotide
  Sense strand starting at position 2229 of SEQ ID NO: 22
acguauuaugcugaguaaa

SEQ ID NO: 5675 - RNA, 19 nt, Artificial Sequence
  Description of Artificial Sequence: Synthetic oligonucleotide
  Antisense strand to SEQ ID NO: 5674
uuuacucagcauaauacgu

SEQ ID NO: 5676 - RNA, 19 nt, Artificial Sequence
  Description of Artificial Sequence: Synthetic oligonucleotide
  Sense strand starting at position 2164 of SEQ ID NO: 22
aaugaaauaucagcaguga

SEQ ID NO: 5677 - RNA, 19 nt, Artificial Sequence
  Description of Artificial Sequence: Synthetic oligonucleotide
  Antisense strand to SEQ ID NO: 5676
ucacugcugauauuucauu

SEQ ID NO: 5678 - RNA, 19 nt, Artificial Sequence
  Description of Artificial Sequence: Synthetic oligonucleotide
  Sense strand starting at position 2141 of SEQ ID NO: 22
gcaauaauuugacaaccag

SEQ ID NO: 5679 - RNA, 19 nt, Artificial Sequence
  Description of Artificial Sequence: Synthetic oligonucleotide
  Antisense strand to SEQ ID NO: 5678
cugguugucaaauuauugc

SEQ ID NO: 5680 - RNA, 19 nt, Artificial Sequence
  Description of Artificial Sequence: Synthetic oligonucleotide
  Sense strand starting at position 1616 of SEQ ID NO: 22
aagcccuuggucugaggua

SEQ ID NO: 5681 - RNA, 19 nt, Artificial Sequence
  Description of Artificial Sequence: Synthetic oligonucleotide
  Antisense strand to SEQ ID NO: 5680
uaccucagaccaagggcuu

SEQ ID NO: 5682 - RNA, 19 nt, Artificial Sequence
  Description of Artificial Sequence: Synthetic oligonucleotide
  Sense strand starting at position 1572 of SEQ ID NO: 22
auggaagagucuccuccaa

SEQ ID NO: 5683 - RNA, 19 nt, Artificial Sequence
  Description of Artificial Sequence: Synthetic oligonucleotide
  Antisense strand to SEQ ID NO: 5682
uuggaggagacucuuccau

SEQ ID NO: 5684 - RNA, 19 nt, Artificial Sequence
  Description of Artificial Sequence: Synthetic oligonucleotide
  Sense strand starting at position 1545 of SEQ ID NO: 22
cacacauguggcugaggua

SEQ ID NO: 5685 - RNA, 19 nt, Artificial Sequence
  Description of Artificial Sequence: Synthetic oligonucleotide
  Antisense strand to SEQ ID NO: 5684
uaccucagccacaugugug

SEQ ID NO: 5686 - RNA, 19 nt, Artificial Sequence
  Description of Artificial Sequence: Synthetic oligonucleotide
  Sense strand starting at position 1403 of SEQ ID NO: 22
cccauaucaggcugagaua

SEQ ID NO: 5687 - RNA, 19 nt, Artificial Sequence
  Description of Artificial Sequence: Synthetic oligonucleotide
  Antisense strand to SEQ ID NO: 5686
uaucucagccugauauggg

SEQ ID NO: 5688 - RNA, 19 nt, Artificial Sequence
  Description of Artificial Sequence: Synthetic oligonucleotide
  Sense strand starting at position 1261 of SEQ ID NO: 22
cgguagagucccgaagaga

SEQ ID NO: 5689 - RNA, 19 nt, Artificial Sequence
  Description of Artificial Sequence: Synthetic oligonucleotide
  Antisense strand to SEQ ID NO: 5688
ucucuucgggacucuaccg

SEQ ID NO: 5690 - RNA, 19 nt, Artificial Sequence
  Description of Artificial Sequence: Synthetic oligonucleotide
  Sense strand starting at position 1211 of SEQ ID NO: 22
cccuccgaaggcugaaaua

SEQ ID NO: 5691 - RNA, 19 nt, Artificial Sequence
  Description of Artificial Sequence: Synthetic oligonucleotide
  Antisense strand to SEQ ID NO: 5690
uauuucagccuucggaggg

SEQ ID NO: 5692 - RNA, 19 nt, Artificial Sequence
  Description of Artificial Sequence: Synthetic oligonucleotide
  Sense strand starting at position 894 of SEQ ID NO: 22
cauccagagcugugauaaa

SEQ ID NO: 5693 - RNA, 19 nt, Artificial Sequence
  Description of Artificial Sequence: Synthetic oligonucleotide
  Antisense strand to SEQ ID NO: 5692
uuuaucacagcucuggaug

SEQ ID NO: 5694 - RNA, 19 nt, Artificial Sequence
  Description of Artificial Sequence: Synthetic oligonucleotide
  Sense strand starting at position 785 of SEQ ID NO: 22
gaaauugacugauaaggag

SEQ ID NO: 5695 - RNA, 19 nt, Artificial Sequence
  Description of Artificial Sequence: Synthetic oligonucleotide
  Antisense strand to SEQ ID NO: 5694
cuccuuaucagucaauuuc

SEQ ID NO: 5696 - RNA, 19 nt, Artificial Sequence
  Description of Artificial Sequence: Synthetic oligonucleotide
  Sense strand starting at position 683 of SEQ ID NO: 22
ucaguuuggguccagucaa

SEQ ID NO: 5697 - RNA, 19 nt, Artificial Sequence
  Description of Artificial Sequence: Synthetic oligonucleotide
  Antisense strand to SEQ ID NO: 5696
uugacuggacccaaacuga

SEQ ID NO: 5698 - RNA, 19 nt, Artificial Sequence
  Description of Artificial Sequence: Synthetic oligonucleotide
  Sense strand starting at position 669 of SEQ ID NO: 22
acaccaauucuguaucagu

SEQ ID NO: 5699 - RNA, 19 nt, Artificial Sequence
  Description of Artificial Sequence: Synthetic oligonucleotide
  Antisense strand to SEQ ID NO: 5698
acugauacagaauuggugu

SEQ ID NO: 5700 - RNA, 19 nt, Artificial Sequence
  Description of Artificial Sequence: Synthetic oligonucleotide
  Sense strand starting at position 643 of SEQ ID NO: 22
guuccaucuccugauaccu

SEQ ID NO: 5701 - RNA, 19 nt, Artificial Sequence
  Description of Artificial Sequence: Synthetic oligonucleotide
  Antisense strand to SEQ ID NO: 5700
agguaucaggagauggaac

SEQ ID NO: 5702 - RNA, 19 nt, Artificial Sequence
  Description of Artificial Sequence: Synthetic oligonucleotide
  Sense strand starting at position 640 of SEQ ID NO: 22
gugguuccaucuccugaua

SEQ ID NO: 5703 - RNA, 19 nt, Artificial Sequence
  Description of Artificial Sequence: Synthetic oligonucleotide
  Antisense strand to SEQ ID NO: 5702
uaucaggagauggaaccac

SEQ ID NO: 5704 - RNA, 19 nt, Artificial Sequence
  Description of Artificial Sequence: Synthetic oligonucleotide
  Sense strand starting at position 534 of SEQ ID NO: 22
caccacaugccuuggguaa

SEQ ID NO: 5705 - RNA, 19 nt, Artificial Sequence
  Description of Artificial Sequence: Synthetic oligonucleotide
  Antisense strand to SEQ ID NO: 5704
uuacccaaggcauguggug

SEQ ID NO: 5706 - RNA, 19 nt, Artificial Sequence
  Description of Artificial Sequence: Synthetic oligonucleotide
  Sense strand starting at position 514 of SEQ ID NO: 22
augauagacucauauaaug

SEQ ID NO: 5707 - RNA, 19 nt, Artificial Sequence
  Description of Artificial Sequence: Synthetic oligonucleotide
  Antisense strand to SEQ ID NO: 5706
cauuauaugagucuaucau

SEQ ID NO: 5708 - RNA, 19 nt, Artificial Sequence
  Description of Artificial Sequence: Synthetic oligonucleotide
  Sense strand starting at position 499 of SEQ ID NO: 22
uugucuuaaccgcaaauga

SEQ ID NO: 5709 - RNA, 19 nt, Artificial Sequence
  Description of Artificial Sequence: Synthetic oligonucleotide
  Antisense strand to SEQ ID NO: 5708
ucauuugcgguuaagacaa

SEQ ID NO: 5710 - RNA, 19 nt, Artificial Sequence
  Description of Artificial Sequence: Synthetic oligonucleotide
  Sense strand starting at position 366 of SEQ ID NO: 22
guaucugguuccuugaaga

SEQ ID NO: 5711 - RNA, 19 nt, Artificial Sequence
  Description of Artificial Sequence: Synthetic oligonucleotide
  Antisense strand to SEQ ID NO: 5710
ucuucaaggaaccagauac

SEQ ID NO: 5712 - RNA, 19 nt, Artificial Sequence
  Description of Artificial Sequence: Synthetic oligonucleotide
  Sense strand starting at position 113 of SEQ ID NO: 22
uggaccugggcuugucauu

SEQ ID NO: 5713 - RNA, 19 nt, Artificial Sequence
  Description of Artificial Sequence: Synthetic oligonucleotide
  Antisense strand to SEQ ID NO: 5712
aaugacaagcccaggucca

SEQ ID NO: 5714 - RNA, 19 nt, Artificial Sequence
  Description of Artificial Sequence: Synthetic oligonucleotide
  Sense strand starting at position 66 of SEQ ID NO: 22
cauggaagcugucugauuc

SEQ ID NO: 5715 - RNA, 19 nt, Artificial Sequence
  Description of Artificial Sequence: Synthetic oligonucleotide
  Antisense strand to SEQ ID NO: 5714
gaaucagacagcuuccaug

SEQ ID NO: 5716 - RNA, 19 nt, Artificial Sequence
  Description of Artificial Sequence: Synthetic oligonucleotide
  Sense strand starting at position 3927 of SEQ ID NO: 23
aauagugacugagcuaauu

SEQ ID NO: 5717 - RNA, 19 nt, Artificial Sequence
  Description of Artificial Sequence: Synthetic oligonucleotide
  Antisense strand to SEQ ID NO: 5716
aauuagcucagucacuauu

SEQ ID NO: 5718 - RNA, 19 nt, Artificial Sequence
  Description of Artificial Sequence: Synthetic oligonucleotide
  Sense strand starting at position 3924 of SEQ ID NO: 23
ggaaauagugacugagcua

SEQ ID NO: 5719 - RNA, 19 nt, Artificial Sequence
  Description of Artificial Sequence: Synthetic oligonucleotide
  Antisense strand to SEQ ID NO: 5718
uagcucagucacuauuucc

SEQ ID NO: 5720 - RNA, 19 nt, Artificial Sequence
  Description of Artificial Sequence: Synthetic oligonucleotide
  Sense strand starting at position 3912 of SEQ ID NO: 23
aguaguaucccuggaaaua

SEQ ID NO: 5721 - RNA, 19 nt, Artificial Sequence
  Description of Artificial Sequence: Synthetic oligonucleotide
  Antisense strand to SEQ ID NO: 5720
uauuuccagggauacuacu

SEQ ID NO: 5722 - RNA, 19 nt, Artificial Sequence
  Description of Artificial Sequence: Synthetic oligonucleotide
  Sense strand starting at position 3910 of SEQ ID NO: 23
gaaguaguaucccuggaaa

SEQ ID NO: 5723 - RNA, 19 nt, Artificial Sequence
  Description of Artificial Sequence: Synthetic oligonucleotide
  Antisense strand to SEQ ID NO: 5722
uuuccagggauacuacuuc

SEQ ID NO: 5724 - RNA, 19 nt, Artificial Sequence
  Description of Artificial Sequence: Synthetic oligonucleotide
  Sense strand starting at position 3902 of SEQ ID NO: 23
uguugagagaaguaguauc

SEQ ID NO: 5725 - RNA, 19 nt, Artificial Sequence
  Description of Artificial Sequence: Synthetic oligonucleotide
  Antisense strand to SEQ ID NO: 5724
gauacuacuucucucaaca

SEQ ID NO: 5726 - RNA, 19 nt, Artificial Sequence
  Description of Artificial Sequence: Synthetic oligonucleotide
  Sense strand starting at position 3896 of SEQ ID NO: 23
cucauuuguugagagaagu

SEQ ID NO: 5727 - RNA, 19 nt, Artificial Sequence
  Description of Artificial Sequence: Synthetic oligonucleotide
  Antisense strand to SEQ ID NO: 5726
acuucucucaacaaaugag

SEQ ID NO: 5728 - RNA, 19 nt, Artificial Sequence
  Description of Artificial Sequence: Synthetic oligonucleotide
  Sense strand starting at position 3892 of SEQ ID NO: 23
ggugcucauuuguugagag

SEQ ID NO: 5729 - RNA, 19 nt, Artificial Sequence
  Description of Artificial Sequence: Synthetic oligonucleotide
  Antisense strand to SEQ ID NO: 5728
cucucaacaaaugagcacc

SEQ ID NO: 5730 - RNA, 19 nt, Artificial Sequence
  Description of Artificial Sequence: Synthetic oligonucleotide
  Sense strand starting at position 3891 of SEQ ID NO: 23
uggugcucauuuguugaga

SEQ ID NO: 5731 - RNA, 19 nt, Artificial Sequence
  Description of Artificial Sequence: Synthetic oligonucleotide
  Antisense strand to SEQ ID NO: 5730
ucucaacaaaugagcacca

SEQ ID NO: 5732 - RNA, 19 nt, Artificial Sequence
  Description of Artificial Sequence: Synthetic oligonucleotide
  Sense strand starting at position 3810 of SEQ ID NO: 23
gauguaaauuccucaaacg

SEQ ID NO: 5733 - RNA, 19 nt, Artificial Sequence
  Description of Artificial Sequence: Synthetic oligonucleotide
  Antisense strand to SEQ ID NO: 5732
cguuugaggaauuuacauc

SEQ ID NO: 5734 - RNA, 19 nt, Artificial Sequence
  Description of Artificial Sequence: Synthetic oligonucleotide
  Sense strand starting at position 3809 of SEQ ID NO: 23
ggauguaaauuccucaaac

SEQ ID NO: 5735 - RNA, 19 nt, Artificial Sequence
  Description of Artificial Sequence: Synthetic oligonucleotide
  Antisense strand to SEQ ID NO: 5734
guuugaggaauuuacaucc

SEQ ID NO: 5736 - RNA, 19 nt, Artificial Sequence
  Description of Artificial Sequence: Synthetic oligonucleotide
  Sense strand starting at position 3800 of SEQ ID NO: 23
uucucacuaggauguaaau

SEQ ID NO: 5737 - RNA, 19 nt, Artificial Sequence
  Description of Artificial Sequence: Synthetic oligonucleotide
  Antisense strand to SEQ ID NO: 5736
auuuacauccuagugagaa

SEQ ID NO: 5738 - RNA, 19 nt, Artificial Sequence
  Description of Artificial Sequence: Synthetic oligonucleotide
  Sense strand starting at position 3797 of SEQ ID NO: 23
acauucucacuaggaugua

SEQ ID NO: 5739 - RNA, 19 nt, Artificial Sequence
  Description of Artificial Sequence: Synthetic oligonucleotide
  Antisense strand to SEQ ID NO: 5738
uacauccuagugagaaugu

SEQ ID NO: 5740 - RNA, 19 nt, Artificial Sequence
  Description of Artificial Sequence: Synthetic oligonucleotide
  Sense strand starting at position 3430 of SEQ ID NO: 23
gggcuuuaugcagaaagau

SEQ ID NO: 5741 - RNA, 19 nt, Artificial Sequence
  Description of Artificial Sequence: Synthetic oligonucleotide
  Antisense strand to SEQ ID NO: 5740
aucuuucugcauaaagccc

SEQ ID NO: 5742 - RNA, 19 nt, Artificial Sequence
  Description of Artificial Sequence: Synthetic oligonucleotide
  Sense strand starting at position 3171 of SEQ ID NO: 23
ggacaaguaggcugaaauu

SEQ ID NO: 5743 - RNA, 19 nt, Artificial Sequence
  Description of Artificial Sequence: Synthetic oligonucleotide
  Antisense strand to SEQ ID NO: 5742
aauuucagccuacuugucc

SEQ ID NO: 5744 - RNA, 19 nt, Artificial Sequence
  Description of Artificial Sequence: Synthetic oligonucleotide
  Sense strand starting at position 3046 of SEQ ID NO: 23
gccagcuucguguuauauu

SEQ ID NO: 5745 - RNA, 19 nt, Artificial Sequence
  Description of Artificial Sequence: Synthetic oligonucleotide
  Antisense strand to SEQ ID NO: 5744
aauauaacacgaagcuggc

SEQ ID NO: 5746 - RNA, 19 nt, Artificial Sequence
  Description of Artificial Sequence: Synthetic oligonucleotide
  Sense strand starting at position 3009 of SEQ ID NO: 23
gcauaaauuuaagagagcu

SEQ ID NO: 5747 - RNA, 19 nt, Artificial Sequence
  Description of Artificial Sequence: Synthetic oligonucleotide
  Antisense strand to SEQ ID NO: 5746
agcucucuuaaauuuaugc

SEQ ID NO: 5748 - RNA, 19 nt, Artificial Sequence
  Description of Artificial Sequence: Synthetic oligonucleotide
  Sense strand starting at position 2998 of SEQ ID NO: 23
ucaccuaccgggcauaaau

SEQ ID NO: 5749 - RNA, 19 nt, Artificial Sequence
  Description of Artificial Sequence: Synthetic oligonucleotide
  Antisense strand to SEQ ID NO: 5748
auuuaugcccgguagguga

SEQ ID NO: 5750 - RNA, 19 nt, Artificial Sequence
  Description of Artificial Sequence: Synthetic oligonucleotide
  Sense strand starting at position 1397 of SEQ ID NO: 23
gguuggugugaggaacaga

SEQ ID NO: 5751 - RNA, 19 nt, Artificial Sequence
  Description of Artificial Sequence: Synthetic oligonucleotide
  Antisense strand to SEQ ID NO: 5750
ucuguuccucacaccaacc

SEQ ID NO: 5752 - RNA, 19 nt, Artificial Sequence
  Description of Artificial Sequence: Synthetic oligonucleotide
  Sense strand starting at position 1132 of SEQ ID NO: 23
ugucacuaucgguaaaugu

SEQ ID NO: 5753 - RNA, 19 nt, Artificial Sequence
  Description of Artificial Sequence: Synthetic oligonucleotide
  Antisense strand to SEQ ID NO: 5752
acauuuaccgauagugaca

SEQ ID NO: 5754 - RNA, 19 nt, Artificial Sequence
  Description of Artificial Sequence: Synthetic oligonucleotide
  Sense strand starting at position 1131 of SEQ ID NO: 23
uugucacuaucgguaaaug

SEQ ID NO: 5755 - RNA, 19 nt, Artificial Sequence
  Description of Artificial Sequence: Synthetic oligonucleotide
  Antisense strand to SEQ ID NO: 5754
cauuuaccgauagugacaa

SEQ ID NO: 5756 - RNA, 19 nt, Artificial Sequence
  Description of Artificial Sequence: Synthetic oligonucleotide
  Sense strand starting at position 1126 of SEQ ID NO: 23
aauaauugucacuaucggu

SEQ ID NO: 5757 - RNA, 19 nt, Artificial Sequence
  Description of Artificial Sequence: Synthetic oligonucleotide
  Antisense strand to SEQ ID NO: 5756
accgauagugacaauuauu

SEQ ID NO: 5758 - RNA, 19 nt, Artificial Sequence
  Description of Artificial Sequence: Synthetic oligonucleotide
  Sense strand starting at position 1122 of SEQ ID NO: 23
gugaaauaauugucacuau

SEQ ID NO: 5759 - RNA, 19 nt, Artificial Sequence
  Description of Artificial Sequence: Synthetic oligonucleotide
  Antisense strand to SEQ ID NO: 5758
auagugacaauuauuucac

SEQ ID NO: 5760 - RNA, 19 nt, Artificial Sequence
  Description of Artificial Sequence: Synthetic oligonucleotide
  Sense strand starting at position 1090 of SEQ ID NO: 23
gugugcuuaccucaaugaa

SEQ ID NO: 5761 - RNA, 19 nt, Artificial Sequence
  Description of Artificial Sequence: Synthetic oligonucleotide
  Antisense strand to SEQ ID NO: 5760
uucauugagguaagcacac

SEQ ID NO: 5762 - RNA, 19 nt, Artificial Sequence
  Description of Artificial Sequence: Synthetic oligonucleotide
  Sense strand starting at position 951 of SEQ ID NO: 23
uggugagcauucccuauuu

SEQ ID NO: 5763 - RNA, 19 nt, Artificial Sequence
  Description of Artificial Sequence: Synthetic oligonucleotide
  Antisense strand to SEQ ID NO: 5762
aaauagggaaugcucacca

SEQ ID NO: 5764 - RNA, 19 nt, Artificial Sequence
  Description of Artificial Sequence: Synthetic oligonucleotide
  Sense strand starting at position 926 of SEQ ID NO: 23
aaguaagaggcgggauuaa

SEQ ID NO: 5765 - RNA, 19 nt, Artificial Sequence
  Description of Artificial Sequence: Synthetic oligonucleotide
  Antisense strand to SEQ ID NO: 5764
uuaaucccgccucuuacuu

SEQ ID NO: 5766 - RNA, 19 nt, Artificial Sequence
  Description of Artificial Sequence: Synthetic oligonucleotide
  Sense strand starting at position 925 of SEQ ID NO: 23
caaguaagaggcgggauua

SEQ ID NO: 5767 - RNA, 19 nt, Artificial Sequence
  Description of Artificial Sequence: Synthetic oligonucleotide
  Antisense strand to SEQ ID NO: 5766
uaaucccgccucuuacuug

SEQ ID NO: 5768 - RNA, 19 nt, Artificial Sequence
  Description of Artificial Sequence: Synthetic oligonucleotide
  Sense strand starting at position 924 of SEQ ID NO: 23
ucaaguaagaggcgggauu

SEQ ID NO: 5769 - RNA, 19 nt, Artificial Sequence
  Description of Artificial Sequence: Synthetic oligonucleotide
  Antisense strand to SEQ ID NO: 5768
aaucccgccucuuacuuga

SEQ ID NO: 5770 - RNA, 19 nt, Artificial Sequence
  Description of Artificial Sequence: Synthetic oligonucleotide
  Sense strand starting at position 653 of SEQ ID NO: 23
uguguucuccaccaucaua

SEQ ID NO: 5771 - RNA, 19 nt, Artificial Sequence
  Description of Artificial Sequence: Synthetic oligonucleotide
  Antisense strand to SEQ ID NO: 5770
uaugaugguggagaacaca

SEQ ID NO: 5772 - RNA, 19 nt, Artificial Sequence
  Description of Artificial Sequence: Synthetic oligonucleotide
  Sense strand starting at position 650 of SEQ ID NO: 23
auguguguucuccaccauc

SEQ ID NO: 5773 - RNA, 19 nt, Artificial Sequence
  Description of Artificial Sequence: Synthetic oligonucleotide
  Antisense strand to SEQ ID NO: 5772
gaugguggagaacacacau

SEQ ID NO: 5774 - RNA, 19 nt, Artificial Sequence
  Description of Artificial Sequence: Synthetic oligonucleotide
  Sense strand starting at position 627 of SEQ ID NO: 23
guuugcugcgagaggaguu

SEQ ID NO: 5775 - RNA, 19 nt, Artificial Sequence
  Description of Artificial Sequence: Synthetic oligonucleotide
  Antisense strand to SEQ ID NO: 5774
aacuccucucgcagcaaac

SEQ ID NO: 5776 - RNA, 19 nt, Artificial Sequence
  Description of Artificial Sequence: Synthetic oligonucleotide
  Sense strand starting at position 584 of SEQ ID NO: 23
gugcuugguuauuugauaa

SEQ ID NO: 5777 - RNA, 19 nt, Artificial Sequence
  Description of Artificial Sequence: Synthetic oligonucleotide
  Antisense strand to SEQ ID NO: 5776
uuaucaaauaaccaagcac

SEQ ID NO: 5778 - RNA, 19 nt, Artificial Sequence
  Description of Artificial Sequence: Synthetic oligonucleotide
  Sense strand starting at position 583 of SEQ ID NO: 23
agugcuugguuauuugaua

SEQ ID NO: 5779 - RNA, 19 nt, Artificial Sequence
  Description of Artificial Sequence: Synthetic oligonucleotide
  Antisense strand to SEQ ID NO: 5778
uaucaaauaaccaagcacu

SEQ ID NO: 5780 - RNA, 19 nt, Artificial Sequence
  Description of Artificial Sequence: Synthetic oligonucleotide
  Sense strand starting at position 491 of SEQ ID NO: 23
acugaaauguagcuaaauu

SEQ ID NO: 5781 - RNA, 19 nt, Artificial Sequence
  Description of Artificial Sequence: Synthetic oligonucleotide
  Antisense strand to SEQ ID NO: 5780
aauuuagcuacauuucagu

SEQ ID NO: 5782 - RNA, 19 nt, Artificial Sequence
  Description of Artificial Sequence: Synthetic oligonucleotide
  Sense strand starting at position 397 of SEQ ID NO: 23
aguagacggcuugaaguuu

SEQ ID NO: 5783 - RNA, 19 nt, Artificial Sequence
  Description of Artificial Sequence: Synthetic oligonucleotide
  Antisense strand to SEQ ID NO: 5782
aaacuucaagccgucuacu

SEQ ID NO: 5784 - RNA, 19 nt, Artificial Sequence
  Description of Artificial Sequence: Synthetic oligonucleotide
  Sense strand starting at position 325 of SEQ ID NO: 23
ucagcugguccagaugaca

SEQ ID NO: 5785 - RNA, 19 nt, Artificial Sequence
  Description of Artificial Sequence: Synthetic oligonucleotide
  Antisense strand to SEQ ID NO: 5784
ugucaucuggaccagcuga

SEQ ID NO: 5786 - RNA, 19 nt, Artificial Sequence
  Description of Artificial Sequence: Synthetic oligonucleotide
  Sense strand starting at position 300 of SEQ ID NO: 23
uaacuucgugcugauggau

SEQ ID NO: 5787 - RNA, 19 nt, Artificial Sequence
  Description of Artificial Sequence: Synthetic oligonucleotide
  Antisense strand to SEQ ID NO: 5786
auccaucagcacgaaguua

SEQ ID NO: 5788 - RNA, 19 nt, Artificial Sequence
  Description of Artificial Sequence: Synthetic oligonucleotide
  Sense strand starting at position 93 of SEQ ID NO: 23
cugugauuagaccaucacu

SEQ ID NO: 5789 - RNA, 19 nt, Artificial Sequence
  Description of Artificial Sequence: Synthetic oligonucleotide
  Antisense strand to SEQ ID NO: 5788
agugauggucuaaucacag

SEQ ID NO: 5790 - RNA, 19 nt, Artificial Sequence
  Description of Artificial Sequence: Synthetic oligonucleotide
  Sense strand starting at position 82 of SEQ ID NO: 23
aacagaaagcacugugauu

SEQ ID NO: 5791 - RNA, 19 nt, Artificial Sequence
  Description of Artificial Sequence: Synthetic oligonucleotide
  Antisense strand to SEQ ID NO: 5790
aaucacagugcuuucuguu

SEQ ID NO: 5792 - RNA, 19 nt, Artificial Sequence
  Description of Artificial Sequence: Synthetic oligonucleotide
  Sense strand starting at position 50 of SEQ ID NO: 23
gcuacuguacuguacuuaa

SEQ ID NO: 5793 - RNA, 19 nt, Artificial Sequence
  Description of Artificial Sequence: Synthetic oligonucleotide
  Antisense strand to SEQ ID NO: 5792
uuaaguacaguacaguagc

SEQ ID NO: 5794 - RNA, 19 nt, Artificial Sequence
  Description of Artificial Sequence: Synthetic oligonucleotide
  Sense strand starting at position 13 of SEQ ID NO: 23
caauguggccucuggaaac

SEQ ID NO: 5795 - RNA, 19 nt, Artificial Sequence
  Description of Artificial Sequence: Synthetic oligonucleotide
  Antisense strand to SEQ ID NO: 5794
guuuccagaggccacauug

SEQ ID NO: 5796 - RNA, 19 nt, Artificial Sequence
  Description of Artificial Sequence: Synthetic oligonucleotide
  Sense strand starting at position 3956 of SEQ ID NO: 24
gcgccaguccugggaaaua

SEQ ID NO: 5797 - RNA, 19 nt, Artificial Sequence
  Description of Artificial Sequence: Synthetic oligonucleotide
  Antisense strand to SEQ ID NO: 5796
uauuucccaggacuggcgc

SEQ ID NO: 5798 - RNA, 19 nt, Artificial Sequence
  Description of Artificial Sequence: Synthetic oligonucleotide
  Sense strand starting at position 3955 of SEQ ID NO: 24
ggcgccaguccugggaaau

SEQ ID NO: 5799 - RNA, 19 nt, Artificial Sequence
  Description of Artificial Sequence: Synthetic oligonucleotide
  Antisense strand to SEQ ID NO: 5798
auuucccaggacuggcgcc

SEQ ID NO: 5800 - RNA, 19 nt, Artificial Sequence
  Description of Artificial Sequence: Synthetic oligonucleotide
  Sense strand starting at position 3846 of SEQ ID NO: 24
ggugacucauccuccaaug

SEQ ID NO: 5801 - RNA, 19 nt, Artificial Sequence
  Description of Artificial Sequence: Synthetic oligonucleotide
  Antisense strand to SEQ ID NO: 5800
cauuggaggaugagucacc

SEQ ID NO: 5802 - RNA, 19 nt, Artificial Sequence
  Description of Artificial Sequence: Synthetic oligonucleotide
  Sense strand starting at position 3843 of SEQ ID NO: 24
cgaggugacucauccucca

SEQ ID NO: 5803 - RNA, 19 nt, Artificial Sequence
  Description of Artificial Sequence: Synthetic oligonucleotide
  Antisense strand to SEQ ID NO: 5802
uggaggaugagucaccucg

SEQ ID NO: 5804 - RNA, 19 nt, Artificial Sequence
  Description of Artificial Sequence: Synthetic oligonucleotide
  Sense strand starting at position 3304 of SEQ ID NO: 24
cugggugguagucaacaaa

SEQ ID NO: 5805 - RNA, 19 nt, Artificial Sequence
  Description of Artificial Sequence: Synthetic oligonucleotide
  Antisense strand to SEQ ID NO: 5804
uuuguugacuaccacccag

SEQ ID NO: 5806 - RNA, 19 nt, Artificial Sequence
  Description of Artificial Sequence: Synthetic oligonucleotide
  Sense strand starting at position 3295 of SEQ ID NO: 24
cacuaaucccuggguggua

SEQ ID NO: 5807 - RNA, 19 nt, Artificial Sequence
  Description of Artificial Sequence: Synthetic oligonucleotide
  Antisense strand to SEQ ID NO: 5806
uaccacccagggauuagug

SEQ ID NO: 5808 - RNA, 19 nt, Artificial Sequence
  Description of Artificial Sequence: Synthetic oligonucleotide
  Sense strand starting at position 3294 of SEQ ID NO: 24
ccacuaaucccuggguggu

SEQ ID NO: 5809 - RNA, 19 nt, Artificial Sequence
  Description of Artificial Sequence: Synthetic oligonucleotide
  Antisense strand to SEQ ID NO: 5808
accacccagggauuagugg

SEQ ID NO: 5810 - RNA, 19 nt, Artificial Sequence
  Description of Artificial Sequence: Synthetic oligonucleotide
  Sense strand starting at position 3260 of SEQ ID NO: 24
agaugugucuuguugacac

SEQ ID NO: 5811 - RNA, 19 nt, Artificial Sequence
  Description of Artificial Sequence: Synthetic oligonucleotide
  Antisense strand to SEQ ID NO: 5810
gugucaacaagacacaucu

SEQ ID NO: 5812 - RNA, 19 nt, Artificial Sequence
  Description of Artificial Sequence: Synthetic oligonucleotide
  Sense strand starting at position 3247 of SEQ ID NO: 24
ugaugugugguguagaugu

SEQ ID NO: 5813 - RNA, 19 nt, Artificial Sequence
  Description of Artificial Sequence: Synthetic oligonucleotide
  Antisense strand to SEQ ID NO: 5812
acaucuacaccacacauca

SEQ ID NO: 5814 - RNA, 19 nt, Artificial Sequence
  Description of Artificial Sequence: Synthetic oligonucleotide
  Sense strand starting at position 3205 of SEQ ID NO: 24
gggauagauggguggugua

SEQ ID NO: 5815 - RNA, 19 nt, Artificial Sequence
  Description of Artificial Sequence: Synthetic oligonucleotide
  Antisense strand to SEQ ID NO: 5814
uacaccacccaucuauccc

SEQ ID NO: 5816 - RNA, 19 nt, Artificial Sequence
  Description of Artificial Sequence: Synthetic oligonucleotide
  Sense strand starting at position 3194 of SEQ ID NO: 24
uguagaugcaugggauaga

SEQ ID NO: 5817 - RNA, 19 nt, Artificial Sequence
  Description of Artificial Sequence: Synthetic oligonucleotide
  Antisense strand to SEQ ID NO: 5816
ucuaucccaugcaucuaca

SEQ ID NO: 5818 - RNA, 19 nt, Artificial Sequence
  Description of Artificial Sequence: Synthetic oligonucleotide
  Sense strand starting at position 3192 of SEQ ID NO: 24
cguguagaugcaugggaua

SEQ ID NO: 5819 - RNA, 19 nt, Artificial Sequence
  Description of Artificial Sequence: Synthetic oligonucleotide
  Antisense strand to SEQ ID NO: 5818
uaucccaugcaucuacacg

SEQ ID NO: 5820 - RNA, 19 nt, Artificial Sequence
  Description of Artificial Sequence: Synthetic oligonucleotide
  Sense strand starting at position 3182 of SEQ ID NO: 24
auggaugugccguguagau

SEQ ID NO: 5821 - RNA, 19 nt, Artificial Sequence
  Description of Artificial Sequence: Synthetic oligonucleotide
  Antisense strand to SEQ ID NO: 5820
aucuacacggcacauccau

SEQ ID NO: 5822 - RNA, 19 nt, Artificial Sequence
  Description of Artificial Sequence: Synthetic oligonucleotide
  Sense strand starting at position 3169 of SEQ ID NO: 24
gguacagacgcauauggau

SEQ ID NO: 5823 - RNA, 19 nt, Artificial Sequence
  Description of Artificial Sequence: Synthetic oligonucleotide
  Antisense strand to SEQ ID NO: 5822
auccauaugcgucuguacc

SEQ ID NO: 5824 - RNA, 19 nt, Artificial Sequence
  Description of Artificial Sequence: Synthetic oligonucleotide
  Sense strand starting at position 3143 of SEQ ID NO: 24
gguacagacauguggugua

SEQ ID NO: 5825 - RNA, 19 nt, Artificial Sequence
  Description of Artificial Sequence: Synthetic oligonucleotide
  Antisense strand to SEQ ID NO: 5824
uacaccacaugucuguacc

SEQ ID NO: 5826 - RNA, 19 nt, Artificial Sequence
  Description of Artificial Sequence: Synthetic oligonucleotide
  Sense strand starting at position 3130 of SEQ ID NO: 24
agucuagacacgugguaca

SEQ ID NO: 5827 - RNA, 19 nt, Artificial Sequence
  Description of Artificial Sequence: Synthetic oligonucleotide
  Antisense strand to SEQ ID NO: 5826
uguaccacgugucuagacu

SEQ ID NO: 5828 - RNA, 19 nt, Artificial Sequence
  Description of Artificial Sequence: Synthetic oligonucleotide
  Sense strand starting at position 3128 of SEQ ID NO: 24
gcagucuagacacguggua

SEQ ID NO: 5829 - RNA, 19 nt, Artificial Sequence
  Description of Artificial Sequence: Synthetic oligonucleotide
  Antisense strand to SEQ ID NO: 5828
uaccacgugucuagacugc

SEQ ID NO: 5830 - RNA, 19 nt, Artificial Sequence
  Description of Artificial Sequence: Synthetic oligonucleotide
  Sense strand starting at position 3104 of SEQ ID NO: 24
gguguagacacauguugua

SEQ ID NO: 5831 - RNA, 19 nt, Artificial Sequence
  Description of Artificial Sequence: Synthetic oligonucleotide
  Antisense strand to SEQ ID NO: 5830
uacaacaugugucuacacc

SEQ ID NO: 5832 - RNA, 19 nt, Artificial Sequence
  Description of Artificial Sequence: Synthetic oligonucleotide
  Sense strand starting at position 3088 of SEQ ID NO: 24
gcauuaauccgaugguggu

SEQ ID NO: 5833 - RNA, 19 nt, Artificial Sequence
  Description of Artificial Sequence: Synthetic oligonucleotide
  Antisense strand to SEQ ID NO: 5832
accaccaucggauuaaugc

SEQ ID NO: 5834 - RNA, 19 nt, Artificial Sequence
  Description of Artificial Sequence: Synthetic oligonucleotide
  Sense strand starting at position 2912 of SEQ ID NO: 24
gaaugugagguuuauucua

SEQ ID NO: 5835 - RNA, 19 nt, Artificial Sequence
  Description of Artificial Sequence: Synthetic oligonucleotide
  Antisense strand to SEQ ID NO: 5834
uagaauaaaccucacauuc

SEQ ID NO: 5836 - RNA, 19 nt, Artificial Sequence
  Description of Artificial Sequence: Synthetic oligonucleotide
  Sense strand starting at position 2897 of SEQ ID NO: 24
ggagguggccuuggagaau

SEQ ID NO: 5837 - RNA, 19 nt, Artificial Sequence
  Description of Artificial Sequence: Synthetic oligonucleotide
  Antisense strand to SEQ ID NO: 5836
auucuccaaggccaccucc

SEQ ID NO: 5838 - RNA, 19 nt, Artificial Sequence
  Description of Artificial Sequence: Synthetic oligonucleotide
  Sense strand starting at position 2664 of SEQ ID NO: 24
gugucuaugagcugccaca

SEQ ID NO: 5839 - RNA, 19 nt, Artificial Sequence
  Description of Artificial Sequence: Synthetic oligonucleotide
  Antisense strand to SEQ ID NO: 5838
uguggcagcucauagacac

SEQ ID NO: 5840 - RNA, 19 nt, Artificial Sequence
  Description of Artificial Sequence: Synthetic oligonucleotide
  Sense strand starting at position 2638 of SEQ ID NO: 24
uggauugcagccugugaca

SEQ ID NO: 5841 - RNA, 19 nt, Artificial Sequence
  Description of Artificial Sequence: Synthetic oligonucleotide
  Antisense strand to SEQ ID NO: 5840
ugucacaggcugcaaucca

SEQ ID NO: 5842 - RNA, 19 nt, Artificial Sequence
  Description of Artificial Sequence: Synthetic oligonucleotide
  Sense strand starting at position 2604 of SEQ ID NO: 24
gaagauauggccugcuggu

SEQ ID NO: 5843 - RNA, 19 nt, Artificial Sequence
  Description of Artificial Sequence: Synthetic oligonucleotide
  Antisense strand to SEQ ID NO: 5842
accagcaggccauaucuuc

SEQ ID NO: 5844 - RNA, 19 nt, Artificial Sequence
  Description of Artificial Sequence: Synthetic oligonucleotide
  Sense strand starting at position 2478 of SEQ ID NO: 24
cccuuuguccaggaauaca

SEQ ID NO: 5845 - RNA, 19 nt, Artificial Sequence
  Description of Artificial Sequence: Synthetic oligonucleotide
  Antisense strand to SEQ ID NO: 5844
uguauuccuggacaaaggg

SEQ ID NO: 5846 - RNA, 19 nt, Artificial Sequence
  Description of Artificial Sequence: Synthetic oligonucleotide
  Sense strand starting at position 2477 of SEQ ID NO: 24
gcccuuuguccaggaauac

SEQ ID NO: 5847 - RNA, 19 nt, Artificial Sequence
  Description of Artificial Sequence: Synthetic oligonucleotide
  Antisense strand to SEQ ID NO: 5846
guauuccuggacaaagggc

SEQ ID NO: 5848 - RNA, 19 nt, Artificial Sequence
  Description of Artificial Sequence: Synthetic oligonucleotide
  Sense strand starting at position 2475 of SEQ ID NO: 24
uggcccuuuguccaggaau

SEQ ID NO: 5849 - RNA, 19 nt, Artificial Sequence
  Description of Artificial Sequence: Synthetic oligonucleotide
  Antisense strand to SEQ ID NO: 5848
auuccuggacaaagggcca

SEQ ID NO: 5850 - RNA, 19 nt, Artificial Sequence
  Description of Artificial Sequence: Synthetic oligonucleotide
  Sense strand starting at position 2187 of SEQ ID NO: 24
gcuuuagaguggagagaag

SEQ ID NO: 5851 - RNA, 19 nt, Artificial Sequence
  Description of Artificial Sequence: Synthetic oligonucleotide
  Antisense strand to SEQ ID NO: 5850
cuucucuccacucuaaagc

SEQ ID NO: 5852 - RNA, 19 nt, Artificial Sequence
  Description of Artificial Sequence: Synthetic oligonucleotide
  Sense strand starting at position 2185 of SEQ ID NO: 24
uagcuuuagaguggagaga

SEQ ID NO: 5853 - RNA, 19 nt, Artificial Sequence
  Description of Artificial Sequence: Synthetic oligonucleotide
  Antisense strand to SEQ ID NO: 5852
ucucuccacucuaaagcua

SEQ ID NO: 5854 - RNA, 19 nt, Artificial Sequence
  Description of Artificial Sequence: Synthetic oligonucleotide
  Sense strand starting at position 2179 of SEQ ID NO: 24
gagacuuagcuuuagagug

SEQ ID NO: 5855 - RNA, 19 nt, Artificial Sequence
  Description of Artificial Sequence: Synthetic oligonucleotide
  Antisense strand to SEQ ID NO: 5854
cacucuaaagcuaagucuc

SEQ ID NO: 5856 - RNA, 19 nt, Artificial Sequence
  Description of Artificial Sequence: Synthetic oligonucleotide
  Sense strand starting at position 2014 of SEQ ID NO: 24
guugucuccuagguaacaa

SEQ ID NO: 5857 - RNA, 19 nt, Artificial Sequence
  Description of Artificial Sequence: Synthetic oligonucleotide
  Antisense strand to SEQ ID NO: 5856
uuguuaccuaggagacaac

SEQ ID NO: 5858 - RNA, 19 nt, Artificial Sequence
  Description of Artificial Sequence: Synthetic oligonucleotide
  Sense strand starting at position 2013 of SEQ ID NO: 24
gguugucuccuagguaaca

SEQ ID NO: 5859 - RNA, 19 nt, Artificial Sequence
  Description of Artificial Sequence: Synthetic oligonucleotide
  Antisense strand to SEQ ID NO: 5858
uguuaccuaggagacaacc

SEQ ID NO: 5860 - RNA, 19 nt, Artificial Sequence
  Description of Artificial Sequence: Synthetic oligonucleotide
  Sense strand starting at position 516 of SEQ ID NO: 24
cacugucagggccagaaau

SEQ ID NO: 5861 - RNA, 19 nt, Artificial Sequence
  Description of Artificial Sequence: Synthetic oligonucleotide
  Antisense strand to SEQ ID NO: 5860
auuucuggcccugacagug

SEQ ID NO: 5862 - RNA, 19 nt, Artificial Sequence
  Description of Artificial Sequence: Synthetic oligonucleotide
  Sense strand starting at position 456 of SEQ ID NO: 24
ccaggcuuucuugggagga

SEQ ID NO: 5863 - RNA, 19 nt, Artificial Sequence
  Description of Artificial Sequence: Synthetic oligonucleotide
  Antisense strand to SEQ ID NO: 5862
uccucccaagaaagccugg

SEQ ID NO: 5864 - RNA, 19 nt, Artificial Sequence
  Description of Artificial Sequence: Synthetic oligonucleotide
  Sense strand starting at position 355 of SEQ ID NO: 24
cuaagacccuuguuuagaa

SEQ ID NO: 5865 - RNA, 19 nt, Artificial Sequence
  Description of Artificial Sequence: Synthetic oligonucleotide
  Antisense strand to SEQ ID NO: 5864
uucuaaacaagggucuuag

SEQ ID NO: 5866 - RNA, 19 nt, Artificial Sequence
  Description of Artificial Sequence: Synthetic oligonucleotide
  Sense strand starting at position 105 of SEQ ID NO: 24
cuuuguacuuccuuuggga

SEQ ID NO: 5867 - RNA, 19 nt, Artificial Sequence
  Description of Artificial Sequence: Synthetic oligonucleotide
  Antisense strand to SEQ ID NO: 5866
ucccaaaggaaguacaaag

SEQ ID NO: 5868 - RNA, 19 nt, Artificial Sequence
  Description of Artificial Sequence: Synthetic oligonucleotide
  Sense strand starting at position 97 of SEQ ID NO: 24
uguugauucuuuguacuuc

SEQ ID NO: 5869 - RNA, 19 nt, Artificial Sequence
  Description of Artificial Sequence: Synthetic oligonucleotide
  Antisense strand to SEQ ID NO: 5868
gaaguacaaagaaucaaca

SEQ ID NO: 5870 - RNA, 19 nt, Artificial Sequence
  Description of Artificial Sequence: Synthetic oligonucleotide
  Sense strand starting at position 95 of SEQ ID NO: 24
aguguugauucuuuguacu

SEQ ID NO: 5871 - RNA, 19 nt, Artificial Sequence
  Description of Artificial Sequence: Synthetic oligonucleotide
  Antisense strand to SEQ ID NO: 5870
aguacaaagaaucaacacu

SEQ ID NO: 5872 - RNA, 19 nt, Artificial Sequence
  Description of Artificial Sequence: Synthetic oligonucleotide
  Sense strand starting at position 94 of SEQ ID NO: 24
aaguguugauucuuuguac

SEQ ID NO: 5873 - RNA, 19 nt, Artificial Sequence
  Description of Artificial Sequence: Synthetic oligonucleotide
  Antisense strand to SEQ ID NO: 5872
guacaaagaaucaacacuu

SEQ ID NO: 5874 - RNA, 19 nt, Artificial Sequence
  Description of Artificial Sequence: Synthetic oligonucleotide
  Sense strand starting at position 89 of SEQ ID NO: 24
agcagaaguguugauucuu

SEQ ID NO: 5875 - RNA, 19 nt, Artificial Sequence
  Description of Artificial Sequence: Synthetic oligonucleotide
  Antisense strand to SEQ ID NO: 5874
aagaaucaacacuucugcu

SEQ ID NO: 5876 - RNA, 19 nt, Artificial Sequence
  Description of Artificial Sequence: Synthetic oligonucleotide
  Sense strand starting at position 3961 of SEQ ID NO: 25
ugauaacaugcaugcauau

SEQ ID NO: 5877 - RNA, 19 nt, Artificial Sequence
  Description of Artificial Sequence: Synthetic oligonucleotide
  Antisense strand to SEQ ID NO: 5876
auaugcaugcauguuauca

SEQ ID NO: 5878 - RNA, 19 nt, Artificial Sequence
  Description of Artificial Sequence: Synthetic oligonucleotide
  Sense strand starting at position 3923 of SEQ ID NO: 25
gaugcuuggagaugugauc

SEQ ID NO: 5879 - RNA, 19 nt, Artificial Sequence
  Description of Artificial Sequence: Synthetic oligonucleotide
  Antisense strand to SEQ ID NO: 5878
gaucacaucuccaagcauc

SEQ ID NO: 5880 - RNA, 19 nt, Artificial Sequence
  Description of Artificial Sequence: Synthetic oligonucleotide
  Sense strand starting at position 3919 of SEQ ID NO: 25
aacugaugcuuggagaugu

SEQ ID NO: 5881 - RNA, 19 nt, Artificial Sequence
  Description of Artificial Sequence: Synthetic oligonucleotide
  Antisense strand to SEQ ID NO: 5880
acaucuccaagcaucaguu

SEQ ID NO: 5882 - RNA, 19 nt, Artificial Sequence
  Description of Artificial Sequence: Synthetic oligonucleotide
  Sense strand starting at position 3646 of SEQ ID NO: 25
cagguccuguacuaagaua

SEQ ID NO: 5883 - RNA, 19 nt, Artificial Sequence
  Description of Artificial Sequence: Synthetic oligonucleotide
  Antisense strand to SEQ ID NO: 5882
uaucuuaguacaggaccug

SEQ ID NO: 5884 - RNA, 19 nt, Artificial Sequence
  Description of Artificial Sequence: Synthetic oligonucleotide
  Sense strand starting at position 3622 of SEQ ID NO: 25
gcugccacucauuguuuau

SEQ ID NO: 5885 - RNA, 19 nt, Artificial Sequence
  Description of Artificial Sequence: Synthetic oligonucleotide
  Antisense strand to SEQ ID NO: 5884
auaaacaaugaguggcagc

SEQ ID NO: 5886 - RNA, 19 nt, Artificial Sequence
  Description of Artificial Sequence: Synthetic oligonucleotide
  Sense strand starting at position 3621 of SEQ ID NO: 25
ggcugccacucauuguuua

SEQ ID NO: 5887 - RNA, 19 nt, Artificial Sequence
  Description of Artificial Sequence: Synthetic oligonucleotide
  Antisense strand to SEQ ID NO: 5886
uaaacaaugaguggcagcc

SEQ ID NO: 5888 - RNA, 19 nt, Artificial Sequence
  Description of Artificial Sequence: Synthetic oligonucleotide
  Sense strand starting at position 3594 of SEQ ID NO: 25
cuuuguuaggacugauuaa

SEQ ID NO: 5889 - RNA, 19 nt, Artificial Sequence
  Description of Artificial Sequence: Synthetic oligonucleotide
  Antisense strand to SEQ ID NO: 5888
uuaaucaguccuaacaaag

SEQ ID NO: 5890 - RNA, 19 nt, Artificial Sequence
  Description of Artificial Sequence: Synthetic oligonucleotide
  Sense strand starting at position 3591 of SEQ ID NO: 25
gaacuuuguuaggacugau

SEQ ID NO: 5891 - RNA, 19 nt, Artificial Sequence
  Description of Artificial Sequence: Synthetic oligonucleotide
  Antisense strand to SEQ ID NO: 5890
aucaguccuaacaaaguuc

SEQ ID NO: 5892 - RNA, 19 nt, Artificial Sequence
  Description of Artificial Sequence: Synthetic oligonucleotide
  Sense strand starting at position 3590 of SEQ ID NO: 25
ugaacuuuguuaggacuga

SEQ ID NO: 5893 - RNA, 19 nt, Artificial Sequence
  Description of Artificial Sequence: Synthetic oligonucleotide
  Antisense strand to SEQ ID NO: 5892
ucaguccuaacaaaguuca

SEQ ID NO: 5894 - RNA, 19 nt, Artificial Sequence
  Description of Artificial Sequence: Synthetic oligonucleotide
  Sense strand starting at position 3588 of SEQ ID NO: 25
uaugaacuuuguuaggacu

SEQ ID NO: 5895 - RNA, 19 nt, Artificial Sequence
  Description of Artificial Sequence: Synthetic oligonucleotide
  Antisense strand to SEQ ID NO: 5894
aguccuaacaaaguucaua

SEQ ID NO: 5896 - RNA, 19 nt, Artificial Sequence
  Description of Artificial Sequence: Synthetic oligonucleotide
  Sense strand starting at position 3390 of SEQ ID NO: 25
augacugucuggcacauuu

SEQ ID NO: 5897 - RNA, 19 nt, Artificial Sequence
  Description of Artificial Sequence: Synthetic oligonucleotide
  Antisense strand to SEQ ID NO: 5896
aaaugugccagacagucau

SEQ ID NO: 5898 - RNA, 19 nt, Artificial Sequence
  Description of Artificial Sequence: Synthetic oligonucleotide
  Sense strand starting at position 3374 of SEQ ID NO: 25
gcacauucugcuuggaaug

SEQ ID NO: 5899 - RNA, 19 nt, Artificial Sequence
  Description of Artificial Sequence: Synthetic oligonucleotide
  Antisense strand to SEQ ID NO: 5898
cauuccaagcagaaugugc

SEQ ID NO: 5900 - RNA, 19 nt, Artificial Sequence
  Description of Artificial Sequence: Synthetic oligonucleotide
  Sense strand starting at position 3373 of SEQ ID NO: 25
ugcacauucugcuuggaau

SEQ ID NO: 5901 - RNA, 19 nt, Artificial Sequence
  Description of Artificial Sequence: Synthetic oligonucleotide
  Antisense strand to SEQ ID NO: 5900
auuccaagcagaaugugca

SEQ ID NO: 5902 - RNA, 19 nt, Artificial Sequence
  Description of Artificial Sequence: Synthetic oligonucleotide
  Sense strand starting at position 3362 of SEQ ID NO: 25
gacugagucuuugcacauu

SEQ ID NO: 5903 - RNA, 19 nt, Artificial Sequence
  Description of Artificial Sequence: Synthetic oligonucleotide
  Antisense strand to SEQ ID NO: 5902
aaugugcaaagacucaguc

SEQ ID NO: 5904 - RNA, 19 nt, Artificial Sequence
  Description of Artificial Sequence: Synthetic oligonucleotide
  Sense strand starting at position 3360 of SEQ ID NO: 25
uggacugagucuuugcaca

SEQ ID NO: 5905 - RNA, 19 nt, Artificial Sequence
  Description of Artificial Sequence: Synthetic oligonucleotide
  Antisense strand to SEQ ID NO: 5904
ugugcaaagacucagucca

SEQ ID NO: 5906 - RNA, 19 nt, Artificial Sequence
  Description of Artificial Sequence: Synthetic oligonucleotide
  Sense strand starting at position 3318 of SEQ ID NO: 25
ccaguuucuccugagacua

SEQ ID NO: 5907 - RNA, 19 nt, Artificial Sequence
  Description of Artificial Sequence: Synthetic oligonucleotide
  Antisense strand to SEQ ID NO: 5906
uagucucaggagaaacugg

SEQ ID NO: 5908 - RNA, 19 nt, Artificial Sequence
  Description of Artificial Sequence: Synthetic oligonucleotide
  Sense strand starting at position 3315 of SEQ ID NO: 25
gagccaguuucuccugaga

SEQ ID NO: 5909 - RNA, 19 nt, Artificial Sequence
  Description of Artificial Sequence: Synthetic oligonucleotide
  Antisense strand to SEQ ID NO: 5908
ucucaggagaaacuggcuc

SEQ ID NO: 5910 - RNA, 19 nt, Artificial Sequence
  Description of Artificial Sequence: Synthetic oligonucleotide
  Sense strand starting at position 3171 of SEQ ID NO: 25
gccacucuuugcccaagaa

SEQ ID NO: 5911 - RNA, 19 nt, Artificial Sequence
  Description of Artificial Sequence: Synthetic oligonucleotide
  Antisense strand to SEQ ID NO: 5910
uucuugggcaaagaguggc

SEQ ID NO: 5912 - RNA, 19 nt, Artificial Sequence
  Description of Artificial Sequence: Synthetic oligonucleotide
  Sense strand starting at position 3123 of SEQ ID NO: 25
cuacacaguugucagggau

SEQ ID NO: 5913 - RNA, 19 nt, Artificial Sequence
  Description of Artificial Sequence: Synthetic oligonucleotide
  Antisense strand to SEQ ID NO: 5912
aucccugacaacuguguag

SEQ ID NO: 5914 - RNA, 19 nt, Artificial Sequence
  Description of Artificial Sequence: Synthetic oligonucleotide
  Sense strand starting at position 3002 of SEQ ID NO: 25
ugaagugacucucaaaguc

SEQ ID NO: 5915 - RNA, 19 nt, Artificial Sequence
  Description of Artificial Sequence: Synthetic oligonucleotide
  Antisense strand to SEQ ID NO: 5914
gacuuugagagucacuuca

SEQ ID NO: 5916 - RNA, 19 nt, Artificial Sequence
  Description of Artificial Sequence: Synthetic oligonucleotide
  Sense strand starting at position 2915 of SEQ ID NO: 25
cuuauuugguucucacagu

SEQ ID NO: 5917 - RNA, 19 nt, Artificial Sequence
  Description of Artificial Sequence: Synthetic oligonucleotide
  Antisense strand to SEQ ID NO: 5916
acugugagaaccaaauaag

SEQ ID NO: 5918 - RNA, 19 nt, Artificial Sequence
  Description of Artificial Sequence: Synthetic oligonucleotide
  Sense strand starting at position 2872 of SEQ ID NO: 25
ggauaucagccacaacucu

SEQ ID NO: 5919 - RNA, 19 nt, Artificial Sequence
  Description of Artificial Sequence: Synthetic oligonucleotide
  Antisense strand to SEQ ID NO: 5918
agaguuguggcugauaucc

SEQ ID NO: 5920 - RNA, 19 nt, Artificial Sequence
  Description of Artificial Sequence: Synthetic oligonucleotide
  Sense strand starting at position 2870 of SEQ ID NO: 25
gcggauaucagccacaacu

SEQ ID NO: 5921 - RNA, 19 nt, Artificial Sequence
  Description of Artificial Sequence: Synthetic oligonucleotide
  Antisense strand to SEQ ID NO: 5920
aguuguggcugauauccgc

SEQ ID NO: 5922 - RNA, 19 nt, Artificial Sequence
  Description of Artificial Sequence: Synthetic oligonucleotide
  Sense strand starting at position 2821 of SEQ ID NO: 25
caacucugugauggagaau

SEQ ID NO: 5923 - RNA, 19 nt, Artificial Sequence
  Description of Artificial Sequence: Synthetic oligonucleotide
  Antisense strand to SEQ ID NO: 5922
auucuccaucacagaguug

SEQ ID NO: 5924 - RNA, 19 nt, Artificial Sequence
  Description of Artificial Sequence: Synthetic oligonucleotide
  Sense strand starting at position 2820 of SEQ ID NO: 25
ccaacucugugauggagaa

SEQ ID NO: 5925 - RNA, 19 nt, Artificial Sequence
  Description of Artificial Sequence: Synthetic oligonucleotide
  Antisense strand to SEQ ID NO: 5924
uucuccaucacagaguugg

SEQ ID NO: 5926 - RNA, 19 nt, Artificial Sequence
  Description of Artificial Sequence: Synthetic oligonucleotide
  Sense strand starting at position 2749 of SEQ ID NO: 25
acaauucccgcguguugga

SEQ ID NO: 5927 - RNA, 19 nt, Artificial Sequence
  Description of Artificial Sequence: Synthetic oligonucleotide
  Antisense strand to SEQ ID NO: 5926
uccaacacgcgggaauugu

SEQ ID NO: 5928 - RNA, 19 nt, Artificial Sequence
  Description of Artificial Sequence: Synthetic oligonucleotide
  Sense strand starting at position 2747 of SEQ ID NO: 25
ugacaauucccgcguguug

SEQ ID NO: 5929 - RNA, 19 nt, Artificial Sequence
  Description of Artificial Sequence: Synthetic oligonucleotide
  Antisense strand to SEQ ID NO: 5928
caacacgcgggaauuguca

SEQ ID NO: 5930 - RNA, 19 nt, Artificial Sequence
  Description of Artificial Sequence: Synthetic oligonucleotide
  Sense strand starting at position 2746 of SEQ ID NO: 25
cugacaauucccgcguguu

SEQ ID NO: 5931 - RNA, 19 nt, Artificial Sequence
  Description of Artificial Sequence: Synthetic oligonucleotide
  Antisense strand to SEQ ID NO: 5930
aacacgcgggaauugucag

SEQ ID NO: 5932 - RNA, 19 nt, Artificial Sequence
  Description of Artificial Sequence: Synthetic oligonucleotide
  Sense strand starting at position 2720 of SEQ ID NO: 25
gcguuuccugucugaaguc

SEQ ID NO: 5933 - RNA, 19 nt, Artificial Sequence
  Description of Artificial Sequence: Synthetic oligonucleotide
  Antisense strand to SEQ ID NO: 5932
gacuucagacaggaaacgc

SEQ ID NO: 5934 - RNA, 19 nt, Artificial Sequence
  Description of Artificial Sequence: Synthetic oligonucleotide
  Sense strand starting at position 2719 of SEQ ID NO: 25
agcguuuccugucugaagu

SEQ ID NO: 5935 - RNA, 19 nt, Artificial Sequence
  Description of Artificial Sequence: Synthetic oligonucleotide
  Antisense strand to SEQ ID NO: 5934
acuucagacaggaaacgcu

SEQ ID NO: 5936 - RNA, 19 nt, Artificial Sequence
  Description of Artificial Sequence: Synthetic oligonucleotide
  Sense strand starting at position 1544 of SEQ ID NO: 25
gguaccugagccugaaagu

SEQ ID NO: 5937 - RNA, 19 nt, Artificial Sequence
  Description of Artificial Sequence: Synthetic oligonucleotide
  Antisense strand to SEQ ID NO: 5936
acuuucaggcucagguacc

SEQ ID NO: 5938 - RNA, 19 nt, Artificial Sequence
  Description of Artificial Sequence: Synthetic oligonucleotide
  Sense strand starting at position 1027 of SEQ ID NO: 25
gcccauuucugggugagca

SEQ ID NO: 5939 - RNA, 19 nt, Artificial Sequence
  Description of Artificial Sequence: Synthetic oligonucleotide
  Antisense strand to SEQ ID NO: 5938
ugcucacccagaaaugggc

SEQ ID NO: 5940 - RNA, 19 nt, Artificial Sequence
  Description of Artificial Sequence: Synthetic oligonucleotide
  Sense strand starting at position 453 of SEQ ID NO: 25
guguguggauucguuuauu

SEQ ID NO: 5941 - RNA, 19 nt, Artificial Sequence
  Description of Artificial Sequence: Synthetic oligonucleotide
  Antisense strand to SEQ ID NO: 5940
aauaaacgaauccacacac

SEQ ID NO: 5942 - RNA, 19 nt, Artificial Sequence
  Description of Artificial Sequence: Synthetic oligonucleotide
  Sense strand starting at position 451 of SEQ ID NO: 25
gcguguguggauucguuua

SEQ ID NO: 5943 - RNA, 19 nt, Artificial Sequence
  Description of Artificial Sequence: Synthetic oligonucleotide
  Antisense strand to SEQ ID NO: 5942
uaaacgaauccacacacgc

SEQ ID NO: 5944 - RNA, 19 nt, Artificial Sequence
  Description of Artificial Sequence: Synthetic oligonucleotide
  Sense strand starting at position 449 of SEQ ID NO: 25
gggcguguguggauucguu

SEQ ID NO: 5945 - RNA, 19 nt, Artificial Sequence
  Description of Artificial Sequence: Synthetic oligonucleotide
  Antisense strand to SEQ ID NO: 5944
aacgaauccacacacgccc

SEQ ID NO: 5946 - RNA, 19 nt, Artificial Sequence
  Description of Artificial Sequence: Synthetic oligonucleotide
  Sense strand starting at position 417 of SEQ ID NO: 25
aagcuuuggcuuugagaca

SEQ ID NO: 5947 - RNA, 19 nt, Artificial Sequence
  Description of Artificial Sequence: Synthetic oligonucleotide
  Antisense strand to SEQ ID NO: 5946
ugucucaaagccaaagcuu

SEQ ID NO: 5948 - RNA, 19 nt, Artificial Sequence
  Description of Artificial Sequence: Synthetic oligonucleotide
  Sense strand starting at position 174 of SEQ ID NO: 25
gguccugacucuuuccaaa

SEQ ID NO: 5949 - RNA, 19 nt, Artificial Sequence
  Description of Artificial Sequence: Synthetic oligonucleotide
  Antisense strand to SEQ ID NO: 5948
uuuggaaagagucaggacc

SEQ ID NO: 5950 - RNA, 19 nt, Artificial Sequence
  Description of Artificial Sequence: Synthetic oligonucleotide
  Sense strand starting at position 168 of SEQ ID NO: 25
ugguaagguccugacucuu

SEQ ID NO: 5951 - RNA, 19 nt, Artificial Sequence
  Description of Artificial Sequence: Synthetic oligonucleotide
  Antisense strand to SEQ ID NO: 5950
aagagucaggaccuuacca

SEQ ID NO: 5952 - RNA, 19 nt, Artificial Sequence
  Description of Artificial Sequence: Synthetic oligonucleotide
  Sense strand starting at position 69 of SEQ ID NO: 25
ucggcuuccugcccagaga

SEQ ID NO: 5953 - RNA, 19 nt, Artificial Sequence
  Description of Artificial Sequence: Synthetic oligonucleotide
  Antisense strand to SEQ ID NO: 5952
ucucugggcaggaagccga

SEQ ID NO: 5954 - RNA, 19 nt, Artificial Sequence
  Description of Artificial Sequence: Synthetic oligonucleotide
  Sense strand starting at position 26 of SEQ ID NO: 25
gguugugugcggaggucaa

SEQ ID NO: 5955 - RNA, 19 nt, Artificial Sequence
  Description of Artificial Sequence: Synthetic oligonucleotide
  Antisense strand to SEQ ID NO: 5954
uugaccuccgcacacaacc

SEQ ID NO: 5956 - RNA, 19 nt, Artificial Sequence
  Description of Artificial Sequence: Synthetic oligonucleotide
  Sense strand starting at position 106 of SEQ ID NO: 26
uggcaaaucagggaugguu

SEQ ID NO: 5957 - RNA, 19 nt, Artificial Sequence
  Description of Artificial Sequence: Synthetic oligonucleotide
  Antisense strand to SEQ ID NO: 5956
aaccaucccugauuugcca

SEQ ID NO: 5958 - RNA, 19 nt, Artificial Sequence
  Description of Artificial Sequence: Synthetic oligonucleotide
  Sense strand starting at position 389 of SEQ ID NO: 26
cuugaauucccgucgcagu

SEQ ID NO: 5959 - RNA, 19 nt, Artificial Sequence
  Description of Artificial Sequence: Synthetic oligonucleotide
  Antisense strand to SEQ ID NO: 5958
acugcgacgggaauucaag

SEQ ID NO: 5960 - RNA, 19 nt, Artificial Sequence
  Description of Artificial Sequence: Synthetic oligonucleotide
  Sense strand starting at position 623 of SEQ ID NO: 26
uaaccuaguccugggauau

SEQ ID NO: 5961 - RNA, 19 nt, Artificial Sequence
  Description of Artificial Sequence: Synthetic oligonucleotide
  Antisense strand to SEQ ID NO: 5960
auaucccaggacuagguua

SEQ ID NO: 5962 - RNA, 19 nt, Artificial Sequence
  Description of Artificial Sequence: Synthetic oligonucleotide
  Sense strand starting at position 624 of SEQ ID NO: 26
aaccuaguccugggauauu

SEQ ID NO: 5963 - RNA, 19 nt, Artificial Sequence
  Description of Artificial Sequence: Synthetic oligonucleotide
  Antisense strand to SEQ ID NO: 5962
aauaucccaggacuagguu

SEQ ID NO: 5964 - RNA, 19 nt, Artificial Sequence
  Description of Artificial Sequence: Synthetic oligonucleotide
  Sense strand starting at position 627 of SEQ ID NO: 26
cuaguccugggauauuauu

SEQ ID NO: 5965 - RNA, 19 nt, Artificial Sequence
  Description of Artificial Sequence: Synthetic oligonucleotide
  Antisense strand to SEQ ID NO: 5964
aauaauaucccaggacuag

SEQ ID NO: 5966 - RNA, 19 nt, Artificial Sequence
  Description of Artificial Sequence: Synthetic oligonucleotide
  Sense strand starting at position 659 of SEQ ID NO: 26
cccgaagagauauguuuaa

SEQ ID NO: 5967 - RNA, 19 nt, Artificial Sequence
  Description of Artificial Sequence: Synthetic oligonucleotide
  Antisense strand to SEQ ID NO: 5966
uuaaacauaucucuucggg

SEQ ID NO: 5968 - RNA, 19 nt, Artificial Sequence
  Description of Artificial Sequence: Synthetic oligonucleotide
  Sense strand starting at position 771 of SEQ ID NO: 26
gugacauuccuacagcaug

SEQ ID NO: 5969 - RNA, 19 nt, Artificial Sequence
  Description of Artificial Sequence: Synthetic oligonucleotide
  Antisense strand to SEQ ID NO: 5968
caugcuguaggaaugucac

SEQ ID NO: 5970 - RNA, 19 nt, Artificial Sequence
  Description of Artificial Sequence: Synthetic oligonucleotide
  Sense strand starting at position 837 of SEQ ID NO: 26
cuaguaaaguacucacuga

SEQ ID NO: 5971 - RNA, 19 nt, Artificial Sequence
  Description of Artificial Sequence: Synthetic oligonucleotide
  Antisense strand to SEQ ID NO: 5970
ucagugaguacuuuacuag

SEQ ID NO: 5972 - RNA, 19 nt, Artificial Sequence
  Description of Artificial Sequence: Synthetic oligonucleotide
  Sense strand starting at position 894 of SEQ ID NO: 26
augcaagagcaucauuaua

SEQ ID NO: 5973 - RNA, 19 nt, Artificial Sequence
  Description of Artificial Sequence: Synthetic oligonucleotide
  Antisense strand to SEQ ID NO: 5972
uauaaugaugcucuugcau

SEQ ID NO: 5974 - RNA, 19 nt, Artificial Sequence
  Description of Artificial Sequence: Synthetic oligonucleotide
  Sense strand starting at position 923 of SEQ ID NO: 26
agauauaaaugugcccaau

SEQ ID NO: 5975 - RNA, 19 nt, Artificial Sequence
  Description of Artificial Sequence: Synthetic oligonucleotide
  Antisense strand to SEQ ID NO: 5974
auugggcacauuuauaucu

SEQ ID NO: 5976 - RNA, 19 nt, Artificial Sequence
  Description of Artificial Sequence: Synthetic oligonucleotide
  Sense strand starting at position 1004 of SEQ ID NO: 26
gcuaacucuggauauccaa

SEQ ID NO: 5977 - RNA, 19 nt, Artificial Sequence
  Description of Artificial Sequence: Synthetic oligonucleotide
  Antisense strand to SEQ ID NO: 5976
uuggauauccagaguuagc

SEQ ID NO: 5978 - RNA, 19 nt, Artificial Sequence
  Description of Artificial Sequence: Synthetic oligonucleotide
  Sense strand starting at position 1013 of SEQ ID NO: 26
ggauauccaacgcguauuu

SEQ ID NO: 5979 - RNA, 19 nt, Artificial Sequence
  Description of Artificial Sequence: Synthetic oligonucleotide
  Antisense strand to SEQ ID NO: 5978
aaauacgcguuggauaucc

SEQ ID NO: 5980 - RNA, 19 nt, Artificial Sequence
  Description of Artificial Sequence: Synthetic oligonucleotide
  Sense strand starting at position 1090 of SEQ ID NO: 26
aaaguagguguccauaauc

SEQ ID NO: 5981 - RNA, 19 nt, Artificial Sequence
  Description of Artificial Sequence: Synthetic oligonucleotide
  Antisense strand to SEQ ID NO: 5980
gauuauggacaccuacuuu

SEQ ID NO: 5982 - RNA, 19 nt, Artificial Sequence
  Description of Artificial Sequence: Synthetic oligonucleotide
  Sense strand starting at position 1125 of SEQ ID NO: 26
caucauguaugacuugaga

SEQ ID NO: 5983 - RNA, 19 nt, Artificial Sequence
  Description of Artificial Sequence: Synthetic oligonucleotide
  Antisense strand to SEQ ID NO: 5982
ucucaagucauacaugaug

SEQ ID NO: 5984 - RNA, 19 nt, Artificial Sequence
  Description of Artificial Sequence: Synthetic oligonucleotide
  Sense strand starting at position 1487 of SEQ ID NO: 26
uccuuugguauguaaggau

SEQ ID NO: 5985 - RNA, 19 nt, Artificial Sequence
  Description of Artificial Sequence: Synthetic oligonucleotide
  Antisense strand to SEQ ID NO: 5984
auccuuacauaccaaagga

SEQ ID NO: 5986 - RNA, 19 nt, Artificial Sequence
  Description of Artificial Sequence: Synthetic oligonucleotide
  Sense strand starting at position 1525 of SEQ ID NO: 26
auguucugugaaggagaaa

SEQ ID NO: 5987 - RNA, 19 nt, Artificial Sequence
  Description of Artificial Sequence: Synthetic oligonucleotide
  Antisense strand to SEQ ID NO: 5986
uuucuccuucacagaacau

SEQ ID NO: 5988 - RNA, 19 nt, Artificial Sequence
  Description of Artificial Sequence: Synthetic oligonucleotide
  Sense strand starting at position 1568 of SEQ ID NO: 26
agucucuugggccacaaau

SEQ ID NO: 5989 - RNA, 19 nt, Artificial Sequence
  Description of Artificial Sequence: Synthetic oligonucleotide
  Antisense strand to SEQ ID NO: 5988
auuuguggcccaagagacu

SEQ ID NO: 5990 - RNA, 19 nt, Artificial Sequence
  Description of Artificial Sequence: Synthetic oligonucleotide
  Sense strand starting at position 1665 of SEQ ID NO: 26
ucagcuucucaggaauggu

SEQ ID NO: 5991 - RNA, 19 nt, Artificial Sequence
  Description of Artificial Sequence: Synthetic oligonucleotide
  Antisense strand to SEQ ID NO: 5990
accauuccugagaagcuga

SEQ ID NO: 5992 - RNA, 19 nt, Artificial Sequence
  Description of Artificial Sequence: Synthetic oligonucleotide
  Sense strand starting at position 1722 of SEQ ID NO: 26
uuacaucuucgccaagaga

SEQ ID NO: 5993 - RNA, 19 nt, Artificial Sequence
  Description of Artificial Sequence: Synthetic oligonucleotide
  Antisense strand to SEQ ID NO: 5992
ucucuuggcgaagauguaa

SEQ ID NO: 5994 - RNA, 19 nt, Artificial Sequence
  Description of Artificial Sequence: Synthetic oligonucleotide
  Sense strand starting at position 1750 of SEQ ID NO: 26
cauugucggaacuaguaga

SEQ ID NO: 5995 - RNA, 19 nt, Artificial Sequence
  Description of Artificial Sequence: Synthetic oligonucleotide
  Antisense strand to SEQ ID NO: 5994
ucuacuaguuccgacaaug

SEQ ID NO: 5996 - RNA, 19 nt, Artificial Sequence
  Description of Artificial Sequence: Synthetic oligonucleotide
  Sense strand starting at position 1861 of SEQ ID NO: 26
uggccucgcgagucagauu

SEQ ID NO: 5997 - RNA, 19 nt, Artificial Sequence
  Description of Artificial Sequence: Synthetic oligonucleotide
  Antisense strand to SEQ ID NO: 5996
aaucugacucgcgaggcca

SEQ ID NO: 5998 - RNA, 19 nt, Artificial Sequence
  Description of Artificial Sequence: Synthetic oligonucleotide
  Sense strand starting at position 2061 of SEQ ID NO: 26
ggaaacgugggcgagaaua

SEQ ID NO: 5999 - RNA, 19 nt, Artificial Sequence
  Description of Artificial Sequence: Synthetic oligonucleotide
  Antisense strand to SEQ ID NO: 5998
uauucucgcccacguuucc

SEQ ID NO: 6000 - RNA, 19 nt, Artificial Sequence
  Description of Artificial Sequence: Synthetic oligonucleotide
  Sense strand starting at position 2063 of SEQ ID NO: 26
aaacgugggcgagaauaaa

SEQ ID NO: 6001 - RNA, 19 nt, Artificial Sequence
  Description of Artificial Sequence: Synthetic oligonucleotide
  Antisense strand to SEQ ID NO: 6000
uuuauucucgcccacguuu

SEQ ID NO: 6002 - RNA, 19 nt, Artificial Sequence
  Description of Artificial Sequence: Synthetic oligonucleotide
  Sense strand starting at position 2218 of SEQ ID NO: 26
gucuuuacaccuuaggaca

SEQ ID NO: 6003 - RNA, 19 nt, Artificial Sequence
  Description of Artificial Sequence: Synthetic oligonucleotide
  Antisense strand to SEQ ID NO: 6002
uguccuaagguguaaagac

SEQ ID NO: 6004 - RNA, 19 nt, Artificial Sequence
  Description of Artificial Sequence: Synthetic oligonucleotide
  Sense strand starting at position 2477 of SEQ ID NO: 26
cagaaagguccugagcuca

SEQ ID NO: 6005 - RNA, 19 nt, Artificial Sequence
  Description of Artificial Sequence: Synthetic oligonucleotide
  Antisense strand to SEQ ID NO: 6004
ugagcucaggaccuuucug

SEQ ID NO: 6006 - RNA, 19 nt, Artificial Sequence
  Description of Artificial Sequence: Synthetic oligonucleotide
  Sense strand starting at position 2555 of SEQ ID NO: 26
uuguguguccaugugcaau

SEQ ID NO: 6007 - RNA, 19 nt, Artificial Sequence
  Description of Artificial Sequence: Synthetic oligonucleotide
  Antisense strand to SEQ ID NO: 6006
auugcacauggacacacaa

SEQ ID NO: 6008 - RNA, 19 nt, Artificial Sequence
  Description of Artificial Sequence: Synthetic oligonucleotide
  Sense strand starting at position 2623 of SEQ ID NO: 26
cuuucugagaaagguagau

SEQ ID NO: 6009 - RNA, 19 nt, Artificial Sequence
  Description of Artificial Sequence: Synthetic oligonucleotide
  Antisense strand to SEQ ID NO: 6008
aucuaccuuucucagaaag

SEQ ID NO: 6010 - RNA, 19 nt, Artificial Sequence
  Description of Artificial Sequence: Synthetic oligonucleotide
  Sense strand starting at position 2755 of SEQ ID NO: 26
ggugauucugagggauucu

SEQ ID NO: 6011 - RNA, 19 nt, Artificial Sequence
  Description of Artificial Sequence: Synthetic oligonucleotide
  Antisense strand to SEQ ID NO: 6010
agaaucccucagaaucacc

SEQ ID NO: 6012 - RNA, 19 nt, Artificial Sequence
  Description of Artificial Sequence: Synthetic oligonucleotide
  Sense strand starting at position 2807 of SEQ ID NO: 26
ggagauuccaucuggcuga

SEQ ID NO: 6013 - RNA, 19 nt, Artificial Sequence
  Description of Artificial Sequence: Synthetic oligonucleotide
  Antisense strand to SEQ ID NO: 6012
ucagccagauggaaucucc

SEQ ID NO: 6014 - RNA, 19 nt, Artificial Sequence
  Description of Artificial Sequence: Synthetic oligonucleotide
  Sense strand starting at position 2854 of SEQ ID NO: 26
gcuugagucagggagacua

SEQ ID NO: 6015 - RNA, 19 nt, Artificial Sequence
  Description of Artificial Sequence: Synthetic oligonucleotide
  Antisense strand to SEQ ID NO: 6014
uagucucccugacucaagc

SEQ ID NO: 6016 - RNA, 19 nt, Artificial Sequence
  Description of Artificial Sequence: Synthetic oligonucleotide
  Sense strand starting at position 2920 of SEQ ID NO: 26
ggccuuagggcugauaaua

SEQ ID NO: 6017 - RNA, 19 nt, Artificial Sequence
  Description of Artificial Sequence: Synthetic oligonucleotide
  Antisense strand to SEQ ID NO: 6016
uauuaucagcccuaaggcc

SEQ ID NO: 6018 - RNA, 19 nt, Artificial Sequence
  Description of Artificial Sequence: Synthetic oligonucleotide
  Sense strand starting at position 3421 of SEQ ID NO: 26
uguagauuuccaggugcca

SEQ ID NO: 6019 - RNA, 19 nt, Artificial Sequence
  Description of Artificial Sequence: Synthetic oligonucleotide
  Antisense strand to SEQ ID NO: 6018
uggcaccuggaaaucuaca

SEQ ID NO: 6020 - RNA, 19 nt, Artificial Sequence
  Description of Artificial Sequence: Synthetic oligonucleotide
  Sense strand starting at position 3538 of SEQ ID NO: 26
cacaguggugcugauugaa

SEQ ID NO: 6021 - RNA, 19 nt, Artificial Sequence
  Description of Artificial Sequence: Synthetic oligonucleotide
  Antisense strand to SEQ ID NO: 6020
uucaaucagcaccacugug

SEQ ID NO: 6022 - RNA, 19 nt, Artificial Sequence
  Description of Artificial Sequence: Synthetic oligonucleotide
  Sense strand starting at position 3619 of SEQ ID NO: 26
uggaucgcucaggaauagu

SEQ ID NO: 6023 - RNA, 19 nt, Artificial Sequence
  Description of Artificial Sequence: Synthetic oligonucleotide
  Antisense strand to SEQ ID NO: 6022
acuauuccugagcgaucca

SEQ ID NO: 6024 - RNA, 19 nt, Artificial Sequence
  Description of Artificial Sequence: Synthetic oligonucleotide
  Sense strand starting at position 3628 of SEQ ID NO: 26
caggaauaguaggauuuaa

SEQ ID NO: 6025 - RNA, 19 nt, Artificial Sequence
  Description of Artificial Sequence: Synthetic oligonucleotide
  Antisense strand to SEQ ID NO: 6024
uuaaauccuacuauuccug

SEQ ID NO: 6026 - RNA, 19 nt, Artificial Sequence
  Description of Artificial Sequence: Synthetic oligonucleotide
  Sense strand starting at position 3765 of SEQ ID NO: 26
aggugaaaugcugagcaga

SEQ ID NO: 6027 - RNA, 19 nt, Artificial Sequence
  Description of Artificial Sequence: Synthetic oligonucleotide
  Antisense strand to SEQ ID NO: 6026
ucugcucagcauuucaccu

SEQ ID NO: 6028 - RNA, 19 nt, Artificial Sequence
  Description of Artificial Sequence: Synthetic oligonucleotide
  Sense strand starting at position 3768 of SEQ ID NO: 26
ugaaaugcugagcagaguu

SEQ ID NO: 6029 - RNA, 19 nt, Artificial Sequence
  Description of Artificial Sequence: Synthetic oligonucleotide
  Antisense strand to SEQ ID NO: 6028
aacucugcucagcauuuca

SEQ ID NO: 6030 - RNA, 19 nt, Artificial Sequence
  Description of Artificial Sequence: Synthetic oligonucleotide
  Sense strand starting at position 3819 of SEQ ID NO: 26
auagaaacuuuagugcaaa

SEQ ID NO: 6031 - RNA, 19 nt, Artificial Sequence
  Description of Artificial Sequence: Synthetic oligonucleotide
  Antisense strand to SEQ ID NO: 6030
uuugcacuaaaguuucuau

SEQ ID NO: 6032 - RNA, 19 nt, Artificial Sequence
  Description of Artificial Sequence: Synthetic oligonucleotide
  Sense strand starting at position 3887 of SEQ ID NO: 26
acguaaauuggagguuaga

SEQ ID NO: 6033 - RNA, 19 nt, Artificial Sequence
  Description of Artificial Sequence: Synthetic oligonucleotide
  Antisense strand to SEQ ID NO: 6032
ucuaaccuccaauuuacgu

SEQ ID NO: 6034 - RNA, 19 nt, Artificial Sequence
  Description of Artificial Sequence: Synthetic oligonucleotide
  Sense strand starting at position 3979 of SEQ ID NO: 26
uugggaaccaugugguaga

SEQ ID NO: 6035 - RNA, 19 nt, Artificial Sequence
  Description of Artificial Sequence: Synthetic oligonucleotide
  Antisense strand to SEQ ID NO: 6034
ucuaccacaugguucccaa

SEQ ID NO: 6036 - RNA, 19 nt, Artificial Sequence
  Description of Artificial Sequence: Synthetic oligonucleotide
  Sense strand starting at position 210 of SEQ ID NO: 27
cccugugugguuggaggaa

SEQ ID NO: 6037 - RNA, 19 nt, Artificial Sequence
  Description of Artificial Sequence: Synthetic oligonucleotide
  Antisense strand to SEQ ID NO: 6036
uuccuccaaccacacaggg

SEQ ID NO: 6038 - RNA, 19 nt, Artificial Sequence
  Description of Artificial Sequence: Synthetic oligonucleotide
  Sense strand starting at position 284 of SEQ ID NO: 27
gagcgucuggucuggauua

SEQ ID NO: 6039 - RNA, 19 nt, Artificial Sequence
  Description of Artificial Sequence: Synthetic oligonucleotide
  Antisense strand to SEQ ID NO: 6038
uaauccagaccagacgcuc

SEQ ID NO: 6040 - RNA, 19 nt, Artificial Sequence
  Description of Artificial Sequence: Synthetic oligonucleotide
  Sense strand starting at position 286 of SEQ ID NO: 27
gcgucuggucuggauuaaa

SEQ ID NO: 6041 - RNA, 19 nt, Artificial Sequence
  Description of Artificial Sequence: Synthetic oligonucleotide
  Antisense strand to SEQ ID NO: 6040
uuuaauccagaccagacgc

SEQ ID NO: 6042 - RNA, 19 nt, Artificial Sequence
  Description of Artificial Sequence: Synthetic oligonucleotide
  Sense strand starting at position 474 of SEQ ID NO: 27
ugcaguuugccacagugau

SEQ ID NO: 6043 - RNA, 19 nt, Artificial Sequence
  Description of Artificial Sequence: Synthetic oligonucleotide
  Antisense strand to SEQ ID NO: 6042
aucacuguggcaaacugca

SEQ ID NO: 6044 - RNA, 19 nt, Artificial Sequence
  Description of Artificial Sequence: Synthetic oligonucleotide
  Sense strand starting at position 773 of SEQ ID NO: 27
gccugagccuuaccaagaa

SEQ ID NO: 6045 - RNA, 19 nt, Artificial Sequence
  Description of Artificial Sequence: Synthetic oligonucleotide
  Antisense strand to SEQ ID NO: 6044
uucuugguaaggcucaggc

SEQ ID NO: 6046 - RNA, 19 nt, Artificial Sequence
  Description of Artificial Sequence: Synthetic oligonucleotide
  Sense strand starting at position 790 of SEQ ID NO: 27
aaaggaggcucauggagaa

SEQ ID NO: 6047 - RNA, 19 nt, Artificial Sequence
  Description of Artificial Sequence: Synthetic oligonucleotide
  Antisense strand to SEQ ID NO: 6046
uucuccaugagccuccuuu

SEQ ID NO: 6048 - RNA, 19 nt, Artificial Sequence
  Description of Artificial Sequence: Synthetic oligonucleotide
  Sense strand starting at position 843 of SEQ ID NO: 27
gccagaaguguaagugggu

SEQ ID NO: 6049 - RNA, 19 nt, Artificial Sequence
  Description of Artificial Sequence: Synthetic oligonucleotide
  Antisense strand to SEQ ID NO: 6048
acccacuuacacuucuggc

SEQ ID NO: 6050 - RNA, 19 nt, Artificial Sequence
  Description of Artificial Sequence: Synthetic oligonucleotide
  Sense strand starting at position 978 of SEQ ID NO: 27
gagccuugacguugcacau

SEQ ID NO: 6051 - RNA, 19 nt, Artificial Sequence
  Description of Artificial Sequence: Synthetic oligonucleotide
  Antisense strand to SEQ ID NO: 6050
augugcaacgucaaggcuc

SEQ ID NO: 6052 - RNA, 19 nt, Artificial Sequence
  Description of Artificial Sequence: Synthetic oligonucleotide
  Sense strand starting at position 1016 of SEQ ID NO: 27
ggacucuuccggcguagga

SEQ ID NO: 6053 - RNA, 19 nt, Artificial Sequence
  Description of Artificial Sequence: Synthetic oligonucleotide
  Antisense strand to SEQ ID NO: 6052
uccuacgccggaagagucc

SEQ ID NO: 6054 - RNA, 19 nt, Artificial Sequence
  Description of Artificial Sequence: Synthetic oligonucleotide
  Sense strand starting at position 1164 of SEQ ID NO: 27
ccggaucuccauugauggu

SEQ ID NO: 6055 - RNA, 19 nt, Artificial Sequence
  Description of Artificial Sequence: Synthetic oligonucleotide
  Antisense strand to SEQ ID NO: 6054
accaucaauggagauccgg

SEQ ID NO: 6056 - RNA, 19 nt, Artificial Sequence
  Description of Artificial Sequence: Synthetic oligonucleotide
  Sense strand starting at position 1368 of SEQ ID NO: 27
cguugagcuucucuggaaa

SEQ ID NO: 6057 - RNA, 19 nt, Artificial Sequence
  Description of Artificial Sequence: Synthetic oligonucleotide
  Antisense strand to SEQ ID NO: 6056
uuuccagagaagcucaacg

SEQ ID NO: 6058 - RNA, 19 nt, Artificial Sequence
  Description of Artificial Sequence: Synthetic oligonucleotide
  Sense strand starting at position 1639 of SEQ ID NO: 27
uuggaaagcuccucucugu

SEQ ID NO: 6059 - RNA, 19 nt, Artificial Sequence
  Description of Artificial Sequence: Synthetic oligonucleotide
  Antisense strand to SEQ ID NO: 6058
acagagaggagcuuuccaa

SEQ ID NO: 6060 - RNA, 19 nt, Artificial Sequence
  Description of Artificial Sequence: Synthetic oligonucleotide
  Sense strand starting at position 1706 of SEQ ID NO: 27
agggcugaggaccguuaaa

SEQ ID NO: 6061 - RNA, 19 nt, Artificial Sequence
  Description of Artificial Sequence: Synthetic oligonucleotide
  Antisense strand to SEQ ID NO: 6060
uuuaacgguccucagcccu

SEQ ID NO: 6062 - RNA, 19 nt, Artificial Sequence
  Description of Artificial Sequence: Synthetic oligonucleotide
  Sense strand starting at position 1736 of SEQ ID NO: 27
aaacuuaguccuugggcuu

SEQ ID NO: 6063 - RNA, 19 nt, Artificial Sequence
  Description of Artificial Sequence: Synthetic oligonucleotide
  Antisense strand to SEQ ID NO: 6062
aagcccaaggacuaaguuu

SEQ ID NO: 6064 - RNA, 19 nt, Artificial Sequence
  Description of Artificial Sequence: Synthetic oligonucleotide
  Sense strand starting at position 1742 of SEQ ID NO: 27
aguccuugggcuugggaga

SEQ ID NO: 6065 - RNA, 19 nt, Artificial Sequence
  Description of Artificial Sequence: Synthetic oligonucleotide
  Antisense strand to SEQ ID NO: 6064
ucucccaagcccaaggacu

SEQ ID NO: 6066 - RNA, 19 nt, Artificial Sequence
  Description of Artificial Sequence: Synthetic oligonucleotide
  Sense strand starting at position 2041 of SEQ ID NO: 27
cugcgauugauuggcugau

SEQ ID NO: 6067 - RNA, 19 nt, Artificial Sequence
  Description of Artificial Sequence: Synthetic oligonucleotide
  Antisense strand to SEQ ID NO: 6066
aucagccaaucaaucgcag

SEQ ID NO: 6068 - RNA, 19 nt, Artificial Sequence
  Description of Artificial Sequence: Synthetic oligonucleotide
  Sense strand starting at position 2043 of SEQ ID NO: 27
gcgauugauuggcugaucu

SEQ ID NO: 6069 - RNA, 19 nt, Artificial Sequence
  Description of Artificial Sequence: Synthetic oligonucleotide
  Antisense strand to SEQ ID NO: 6068
agaucagccaaucaaucgc

SEQ ID NO: 6070 - RNA, 19 nt, Artificial Sequence
  Description of Artificial Sequence: Synthetic oligonucleotide
  Sense strand starting at position 2045 of SEQ ID NO: 27
gauugauuggcugaucucu

SEQ ID NO: 6071 - RNA, 19 nt, Artificial Sequence
  Description of Artificial Sequence: Synthetic oligonucleotide
  Antisense strand to SEQ ID NO: 6070
agagaucagccaaucaauc

SEQ ID NO: 6072 - RNA, 19 nt, Artificial Sequence
  Description of Artificial Sequence: Synthetic oligonucleotide
  Sense strand starting at position 2047 of SEQ ID NO: 27
uugauuggcugaucucuaa

SEQ ID NO: 6073 - RNA, 19 nt, Artificial Sequence
  Description of Artificial Sequence: Synthetic oligonucleotide
  Antisense strand to SEQ ID NO: 6072
uuagagaucagccaaucaa

SEQ ID NO: 6074 - RNA, 19 nt, Artificial Sequence
  Description of Artificial Sequence: Synthetic oligonucleotide
  Sense strand starting at position 2051 of SEQ ID NO: 27
uuggcugaucucuaagcca

SEQ ID NO: 6075 - RNA, 19 nt, Artificial Sequence
  Description of Artificial Sequence: Synthetic oligonucleotide
  Antisense strand to SEQ ID NO: 6074
uggcuuagagaucagccaa

SEQ ID NO: 6076 - RNA, 19 nt, Artificial Sequence
  Description of Artificial Sequence: Synthetic oligonucleotide
  Sense strand starting at position 2077 of SEQ ID NO: 27
gagcucugucggugggacu

SEQ ID NO: 6077 - RNA, 19 nt, Artificial Sequence
  Description of Artificial Sequence: Synthetic oligonucleotide
  Antisense strand to SEQ ID NO: 6076
agucccaccgacagagcuc

SEQ ID NO: 6078 - RNA, 19 nt, Artificial Sequence
  Description of Artificial Sequence: Synthetic oligonucleotide
  Sense strand starting at position 2090 of SEQ ID NO: 27
gggacucagauggguguau

SEQ ID NO: 6079 - RNA, 19 nt, Artificial Sequence
  Description of Artificial Sequence: Synthetic oligonucleotide
  Antisense strand to SEQ ID NO: 6078
auacacccaucugaguccc

SEQ ID NO: 6080 - RNA, 19 nt, Artificial Sequence
  Description of Artificial Sequence: Synthetic oligonucleotide
  Sense strand starting at position 2092 of SEQ ID NO: 27
gacucagauggguguauca

SEQ ID NO: 6081 - RNA, 19 nt, Artificial Sequence
  Description of Artificial Sequence: Synthetic oligonucleotide
  Antisense strand to SEQ ID NO: 6080
ugauacacccaucugaguc

SEQ ID NO: 6082 - RNA, 19 nt, Artificial Sequence
  Description of Artificial Sequence: Synthetic oligonucleotide
  Sense strand starting at position 2094 of SEQ ID NO: 27
cucagauggguguaucauc

SEQ ID NO: 6083 - RNA, 19 nt, Artificial Sequence
  Description of Artificial Sequence: Synthetic oligonucleotide
  Antisense strand to SEQ ID NO: 6082
gaugauacacccaucugag

SEQ ID NO: 6084 - RNA, 19 nt, Artificial Sequence
  Description of Artificial Sequence: Synthetic oligonucleotide
  Sense strand starting at position 2102 of SEQ ID NO: 27
gguguaucaucgcuuccca

SEQ ID NO: 6085 - RNA, 19 nt, Artificial Sequence
  Description of Artificial Sequence: Synthetic oligonucleotide
  Antisense strand to SEQ ID NO: 6084
ugggaagcgaugauacacc

SEQ ID NO: 6086 - RNA, 19 nt, Artificial Sequence
  Description of Artificial Sequence: Synthetic oligonucleotide
  Sense strand starting at position 2512 of SEQ ID NO: 27
ugacauggcucaggauaga

SEQ ID NO: 6087 - RNA, 19 nt, Artificial Sequence
  Description of Artificial Sequence: Synthetic oligonucleotide
  Antisense strand to SEQ ID NO: 6086
ucuauccugagccauguca

SEQ ID NO: 6088 - RNA, 19 nt, Artificial Sequence
  Description of Artificial Sequence: Synthetic oligonucleotide
  Sense strand starting at position 2615 of SEQ ID NO: 27
ggaugauccugcuuggaau

SEQ ID NO: 6089 - RNA, 19 nt, Artificial Sequence
  Description of Artificial Sequence: Synthetic oligonucleotide
  Antisense strand to SEQ ID NO: 6088
auuccaagcaggaucaucc

SEQ ID NO: 6090 - RNA, 19 nt, Artificial Sequence
  Description of Artificial Sequence: Synthetic oligonucleotide
  Sense strand starting at position 2616 of SEQ ID NO: 27
gaugauccugcuuggaaug

SEQ ID NO: 6091 - RNA, 19 nt, Artificial Sequence
  Description of Artificial Sequence: Synthetic oligonucleotide
  Antisense strand to SEQ ID NO: 6090
cauuccaagcaggaucauc

SEQ ID NO: 6092 - RNA, 19 nt, Artificial Sequence
  Description of Artificial Sequence: Synthetic oligonucleotide
  Sense strand starting at position 2618 of SEQ ID NO: 27
ugauccugcuuggaaugaa

SEQ ID NO: 6093 - RNA, 19 nt, Artificial Sequence
  Description of Artificial Sequence: Synthetic oligonucleotide
  Antisense strand to SEQ ID NO: 6092
uucauuccaagcaggauca

SEQ ID NO: 6094 - RNA, 19 nt, Artificial Sequence
  Description of Artificial Sequence: Synthetic oligonucleotide
  Sense strand starting at position 2621 of SEQ ID NO: 27
uccugcuuggaaugaacau

SEQ ID NO: 6095 - RNA, 19 nt, Artificial Sequence
  Description of Artificial Sequence: Synthetic oligonucleotide
  Antisense strand to SEQ ID NO: 6094
auguucauuccaagcagga

SEQ ID NO: 6096 - RNA, 19 nt, Artificial Sequence
  Description of Artificial Sequence: Synthetic oligonucleotide
  Sense strand starting at position 2997 of SEQ ID NO: 27
ccaguaucaaucugggaga

SEQ ID NO: 6097 - RNA, 19 nt, Artificial Sequence
  Description of Artificial Sequence: Synthetic oligonucleotide
  Antisense strand to SEQ ID NO: 6096
ucucccagauugauacugg

SEQ ID NO: 6098 - RNA, 19 nt, Artificial Sequence
  Description of Artificial Sequence: Synthetic oligonucleotide
  Sense strand starting at position 2998 of SEQ ID NO: 27
caguaucaaucugggagaa

SEQ ID NO: 6099 - RNA, 19 nt, Artificial Sequence
  Description of Artificial Sequence: Synthetic oligonucleotide
  Antisense strand to SEQ ID NO: 6098
uucucccagauugauacug

SEQ ID NO: 6100 - RNA, 19 nt, Artificial Sequence
  Description of Artificial Sequence: Synthetic oligonucleotide
  Sense strand starting at position 3000 of SEQ ID NO: 27
guaucaaucugggagaauc

SEQ ID NO: 6101 - RNA, 19 nt, Artificial Sequence
  Description of Artificial Sequence: Synthetic oligonucleotide
  Antisense strand to SEQ ID NO: 6100
gauucucccagauugauac

SEQ ID NO: 6102 - RNA, 19 nt, Artificial Sequence
  Description of Artificial Sequence: Synthetic oligonucleotide
  Sense strand starting at position 3072 of SEQ ID NO: 27
uggaauaucuagucaucuu

SEQ ID NO: 6103 - RNA, 19 nt, Artificial Sequence
  Description of Artificial Sequence: Synthetic oligonucleotide
  Antisense strand to SEQ ID NO: 6102
aagaugacuagauauucca

SEQ ID NO: 6104 - RNA, 19 nt, Artificial Sequence
  Description of Artificial Sequence: Synthetic oligonucleotide
  Sense strand starting at position 3124 of SEQ ID NO: 27
uggagacagcauugugcau

SEQ ID NO: 6105 - RNA, 19 nt, Artificial Sequence
  Description of Artificial Sequence: Synthetic oligonucleotide
  Antisense strand to SEQ ID NO: 6104
augcacaaugcugucucca

SEQ ID NO: 6106 - RNA, 19 nt, Artificial Sequence
  Description of Artificial Sequence: Synthetic oligonucleotide
  Sense strand starting at position 3200 of SEQ ID NO: 27
ggaggaagaggugguguua

SEQ ID NO: 6107 - RNA, 19 nt, Artificial Sequence
  Description of Artificial Sequence: Synthetic oligonucleotide
  Antisense strand to SEQ ID NO: 6106
uaacaccaccucuuccucc

SEQ ID NO: 6108 - RNA, 19 nt, Artificial Sequence
  Description of Artificial Sequence: Synthetic oligonucleotide
  Sense strand starting at position 3229 of SEQ ID NO: 27
gcaaauuauuccuuuggcu

SEQ ID NO: 6109 - RNA, 19 nt, Artificial Sequence
  Description of Artificial Sequence: Synthetic oligonucleotide
  Antisense strand to SEQ ID NO: 6108
agccaaaggaauaauuugc

SEQ ID NO: 6110 - RNA, 19 nt, Artificial Sequence
  Description of Artificial Sequence: Synthetic oligonucleotide
  Sense strand starting at position 3488 of SEQ ID NO: 27
ccgucagaauacuuccuuu

SEQ ID NO: 6111 - RNA, 19 nt, Artificial Sequence
  Description of Artificial Sequence: Synthetic oligonucleotide
  Antisense strand to SEQ ID NO: 6110
aaaggaaguauucugacgg

SEQ ID NO: 6112 - RNA, 19 nt, Artificial Sequence
  Description of Artificial Sequence: Synthetic oligonucleotide
  Sense strand starting at position 3518 of SEQ ID NO: 27
ccugcucaggucgguaaua

SEQ ID NO: 6113 - RNA, 19 nt, Artificial Sequence
  Description of Artificial Sequence: Synthetic oligonucleotide
  Antisense strand to SEQ ID NO: 6112
uauuaccgaccugagcagg

SEQ ID NO: 6114 - RNA, 19 nt, Artificial Sequence
  Description of Artificial Sequence: Synthetic oligonucleotide
  Sense strand starting at position 3761 of SEQ ID NO: 27
gugacuaagcaaugaaaga

SEQ ID NO: 6115 - RNA, 19 nt, Artificial Sequence
  Description of Artificial Sequence: Synthetic oligonucleotide
  Antisense strand to SEQ ID NO: 6114
ucuuucauugcuuagucac

SEQ ID NO: 6116 - RNA, 19 nt, Artificial Sequence
  Description of Artificial Sequence: Synthetic oligonucleotide
  Sense strand starting at position 3847 of SEQ ID NO: 28
auaaauggucacugcuauu

SEQ ID NO: 6117 - RNA, 19 nt, Artificial Sequence
  Description of Artificial Sequence: Synthetic oligonucleotide
  Antisense strand to SEQ ID NO: 6116
aauagcagugaccauuuau

SEQ ID NO: 6118 - RNA, 19 nt, Artificial Sequence
  Description of Artificial Sequence: Synthetic oligonucleotide
  Sense strand starting at position 3608 of SEQ ID NO: 28
gcgccuggcuauuauuuau

SEQ ID NO: 6119 - RNA, 19 nt, Artificial Sequence
  Description of Artificial Sequence: Synthetic oligonucleotide
  Antisense strand to SEQ ID NO: 6118
auaaauaauagccaggcgc

SEQ ID NO: 6120 - RNA, 19 nt, Artificial Sequence
  Description of Artificial Sequence: Synthetic oligonucleotide
  Sense strand starting at position 2924 of SEQ ID NO: 28
cugcguuauguuuauuauu

SEQ ID NO: 6121 - RNA, 19 nt, Artificial Sequence
  Description of Artificial Sequence: Synthetic oligonucleotide
  Antisense strand to SEQ ID NO: 6120
aauaauaaacauaacgcag

SEQ ID NO: 6122 - RNA, 19 nt, Artificial Sequence
  Description of Artificial Sequence: Synthetic oligonucleotide
  Sense strand starting at position 2918 of SEQ ID NO: 28
uuuacucugcguuauguuu

SEQ ID NO: 6123 - RNA, 19 nt, Artificial Sequence
  Description of Artificial Sequence: Synthetic oligonucleotide
  Antisense strand to SEQ ID NO: 6122
aaacauaacgcagaguaaa

SEQ ID NO: 6124 - RNA, 19 nt, Artificial Sequence
  Description of Artificial Sequence: Synthetic oligonucleotide
  Sense strand starting at position 2853 of SEQ ID NO: 28
aguaguauuggugacaucu

SEQ ID NO: 6125 - RNA, 19 nt, Artificial Sequence
  Description of Artificial Sequence: Synthetic oligonucleotide
  Antisense strand to SEQ ID NO: 6124
agaugucaccaauacuacu

SEQ ID NO: 6126 - RNA, 19 nt, Artificial Sequence
  Description of Artificial Sequence: Synthetic oligonucleotide
  Sense strand starting at position 2851 of SEQ ID NO: 28
ucaguaguauuggugacau

SEQ ID NO: 6127 - RNA, 19 nt, Artificial Sequence
  Description of Artificial Sequence: Synthetic oligonucleotide
  Antisense strand to SEQ ID NO: 6126
augucaccaauacuacuga

SEQ ID NO: 6128 - RNA, 19 nt, Artificial Sequence
  Description of Artificial Sequence: Synthetic oligonucleotide
  Sense strand starting at position 2850 of SEQ ID NO: 28
cucaguaguauuggugaca

SEQ ID NO: 6129 - RNA, 19 nt, Artificial Sequence
  Description of Artificial Sequence: Synthetic oligonucleotide
  Antisense strand to SEQ ID NO: 6128
ugucaccaauacuacugag

SEQ ID NO: 6130 - RNA, 19 nt, Artificial Sequence
  Description of Artificial Sequence: Synthetic oligonucleotide
  Sense strand starting at position 2804 of SEQ ID NO: 28
ggauaugucucuuuaugca

SEQ ID NO: 6131 - RNA, 19 nt, Artificial Sequence
  Description of Artificial Sequence: Synthetic oligonucleotide
  Antisense strand to SEQ ID NO: 6130
ugcauaaagagacauaucc

SEQ ID NO: 6132 - RNA, 19 nt, Artificial Sequence
  Description of Artificial Sequence: Synthetic oligonucleotide
  Sense strand starting at position 2791 of SEQ ID NO: 28
auaugaugggcuuggauau

SEQ ID NO: 6133 - RNA, 19 nt, Artificial Sequence
  Description of Artificial Sequence: Synthetic oligonucleotide
  Antisense strand to SEQ ID NO: 6132
auauccaagcccaucauau

SEQ ID NO: 6134 - RNA, 19 nt, Artificial Sequence
  Description of Artificial Sequence: Synthetic oligonucleotide
  Sense strand starting at position 2753 of SEQ ID NO: 28
gcaguuugcucaucugcaa

SEQ ID NO: 6135 - RNA, 19 nt, Artificial Sequence
  Description of Artificial Sequence: Synthetic oligonucleotide
  Antisense strand to SEQ ID NO: 6134
uugcagaugagcaaacugc

SEQ ID NO: 6136 - RNA, 19 nt, Artificial Sequence
  Description of Artificial Sequence: Synthetic oligonucleotide
  Sense strand starting at position 2718 of SEQ ID NO: 28
guggucuucgacgaauacu

SEQ ID NO: 6137 - RNA, 19 nt, Artificial Sequence
  Description of Artificial Sequence: Synthetic oligonucleotide
  Antisense strand to SEQ ID NO: 6136
aguauucgucgaagaccac

SEQ ID NO: 6138 - RNA, 19 nt, Artificial Sequence
  Description of Artificial Sequence: Synthetic oligonucleotide
  Sense strand starting at position 2717 of SEQ ID NO: 28
uguggucuucgacgaauac

SEQ ID NO: 6139 - RNA, 19 nt, Artificial Sequence
  Description of Artificial Sequence: Synthetic oligonucleotide
  Antisense strand to SEQ ID NO: 6138
guauucgucgaagaccaca

SEQ ID NO: 6140 - RNA, 19 nt, Artificial Sequence
  Description of Artificial Sequence: Synthetic oligonucleotide
  Sense strand starting at position 2714 of SEQ ID NO: 28
cuauguggucuucgacgaa

SEQ ID NO: 6141 - RNA, 19 nt, Artificial Sequence
  Description of Artificial Sequence: Synthetic oligonucleotide
  Antisense strand to SEQ ID NO: 6140
uucgucgaagaccacauag

SEQ ID NO: 6142 - RNA, 19 nt, Artificial Sequence
  Description of Artificial Sequence: Synthetic oligonucleotide
  Sense strand starting at position 2710 of SEQ ID NO: 28
ccagcuauguggucuucga

SEQ ID NO: 6143 - RNA, 19 nt, Artificial Sequence
  Description of Artificial Sequence: Synthetic oligonucleotide
  Antisense strand to SEQ ID NO: 6142
ucgaagaccacauagcugg

SEQ ID NO: 6144 - RNA, 19 nt, Artificial Sequence
  Description of Artificial Sequence: Synthetic oligonucleotide
  Sense strand starting at position 2668 of SEQ ID NO: 28
gagucagacugaucuggau

SEQ ID NO: 6145 - RNA, 19 nt, Artificial Sequence
  Description of Artificial Sequence: Synthetic oligonucleotide
  Antisense strand to SEQ ID NO: 6144
auccagaucagucugacuc

SEQ ID NO: 6146 - RNA, 19 nt, Artificial Sequence
  Description of Artificial Sequence: Synthetic oligonucleotide
  Sense strand starting at position 2662 of SEQ ID NO: 28
acuucugagucagacugau

SEQ ID NO: 6147 - RNA, 19 nt, Artificial Sequence
  Description of Artificial Sequence: Synthetic oligonucleotide
  Antisense strand to SEQ ID NO: 6146
aucagucugacucagaagu

SEQ ID NO: 6148 - RNA, 19 nt, Artificial Sequence
  Description of Artificial Sequence: Synthetic oligonucleotide
  Sense strand starting at position 2658 of SEQ ID NO: 28
gcugacuucugagucagac

SEQ ID NO: 6149 - RNA, 19 nt, Artificial Sequence
  Description of Artificial Sequence: Synthetic oligonucleotide
  Antisense strand to SEQ ID NO: 6148
gucugacucagaagucagc

SEQ ID NO: 6150 - RNA, 19 nt, Artificial Sequence
  Description of Artificial Sequence: Synthetic oligonucleotide
  Sense strand starting at position 2585 of SEQ ID NO: 28
cugggacuucuaugagcuu

SEQ ID NO: 6151 - RNA, 19 nt, Artificial Sequence
  Description of Artificial Sequence: Synthetic oligonucleotide
  Antisense strand to SEQ ID NO: 6150
aagcucauagaagucccag

SEQ ID NO: 6152 - RNA, 19 nt, Artificial Sequence
  Description of Artificial Sequence: Synthetic oligonucleotide
  Sense strand starting at position 2574 of SEQ ID NO: 28
gguucagauugcugggacu

SEQ ID NO: 6153 - RNA, 19 nt, Artificial Sequence
  Description of Artificial Sequence: Synthetic oligonucleotide
  Antisense strand to SEQ ID NO: 6152
agucccagcaaucugaacc

SEQ ID NO: 6154 - RNA, 19 nt, Artificial Sequence
  Description of Artificial Sequence: Synthetic oligonucleotide
  Sense strand starting at position 2309 of SEQ ID NO: 28
ggcugagacuagggacuua

SEQ ID NO: 6155 - RNA, 19 nt, Artificial Sequence
  Description of Artificial Sequence: Synthetic oligonucleotide
  Antisense strand to SEQ ID NO: 6154
uaagucccuagucucagcc

SEQ ID NO: 6156 - RNA, 19 nt, Artificial Sequence
  Description of Artificial Sequence: Synthetic oligonucleotide
  Sense strand starting at position 1713 of SEQ ID NO: 28
ggaagauuguccgaggcca

SEQ ID NO: 6157 - RNA, 19 nt, Artificial Sequence
  Description of Artificial Sequence: Synthetic oligonucleotide
  Antisense strand to SEQ ID NO: 6156
uggccucggacaaucuucc

SEQ ID NO: 6158 - RNA, 19 nt, Artificial Sequence
  Description of Artificial Sequence: Synthetic oligonucleotide
  Sense strand starting at position 1660 of SEQ ID NO: 28
gccagaguuccacgggauc

SEQ ID NO: 6159 - RNA, 19 nt, Artificial Sequence
  Description of Artificial Sequence: Synthetic oligonucleotide
  Antisense strand to SEQ ID NO: 6158
gaucccguggaacucuggc

SEQ ID NO: 6160 - RNA, 19 nt, Artificial Sequence
  Description of Artificial Sequence: Synthetic oligonucleotide
  Sense strand starting at position 1611 of SEQ ID NO: 28
cuaugugacuuaggaggaa

SEQ ID NO: 6161 - RNA, 19 nt, Artificial Sequence
  Description of Artificial Sequence: Synthetic oligonucleotide
  Antisense strand to SEQ ID NO: 6160
uuccuccuaagucacauag

SEQ ID NO: 6162 - RNA, 19 nt, Artificial Sequence
  Description of Artificial Sequence: Synthetic oligonucleotide
  Sense strand starting at position 1607 of SEQ ID NO: 28
uuuacuaugugacuuagga

SEQ ID NO: 6163 - RNA, 19 nt, Artificial Sequence
  Description of Artificial Sequence: Synthetic oligonucleotide
  Antisense strand to SEQ ID NO: 6162
uccuaagucacauaguaaa

SEQ ID NO: 6164 - RNA, 19 nt, Artificial Sequence
  Description of Artificial Sequence: Synthetic oligonucleotide
  Sense strand starting at position 1337 of SEQ ID NO: 28
gagaaucccuguccugagu

SEQ ID NO: 6165 - RNA, 19 nt, Artificial Sequence
  Description of Artificial Sequence: Synthetic oligonucleotide
  Antisense strand to SEQ ID NO: 6164
acucaggacagggauucuc

SEQ ID NO: 6166 - RNA, 19 nt, Artificial Sequence
  Description of Artificial Sequence: Synthetic oligonucleotide
  Sense strand starting at position 1324 of SEQ ID NO: 28
gggccuagccauggagaau

SEQ ID NO: 6167 - RNA, 19 nt, Artificial Sequence
  Description of Artificial Sequence: Synthetic oligonucleotide
  Antisense strand to SEQ ID NO: 6166
auucuccauggcuaggccc

SEQ ID NO: 6168 - RNA, 19 nt, Artificial Sequence
  Description of Artificial Sequence: Synthetic oligonucleotide
  Sense strand starting at position 928 of SEQ ID NO: 28
ggcaguucccuggagaagu

SEQ ID NO: 6169 - RNA, 19 nt, Artificial Sequence
  Description of Artificial Sequence: Synthetic oligonucleotide
  Antisense strand to SEQ ID NO: 6168
acuucuccagggaacugcc

SEQ ID NO: 6170 - RNA, 19 nt, Artificial Sequence
  Description of Artificial Sequence: Synthetic oligonucleotide
  Sense strand starting at position 926 of SEQ ID NO: 28
uuggcaguucccuggagaa

SEQ ID NO: 6171 - RNA, 19 nt, Artificial Sequence
  Description of Artificial Sequence: Synthetic oligonucleotide
  Antisense strand to SEQ ID NO: 6170
uucuccagggaacugccaa

SEQ ID NO: 6172 - RNA, 19 nt, Artificial Sequence
  Description of Artificial Sequence: Synthetic oligonucleotide
  Sense strand starting at position 881 of SEQ ID NO: 28
gggucuacccaguacacau

SEQ ID NO: 6173 - RNA, 19 nt, Artificial Sequence
  Description of Artificial Sequence: Synthetic oligonucleotide
  Antisense strand to SEQ ID NO: 6172
auguguacuggguagaccc

SEQ ID NO: 6174 - RNA, 19 nt, Artificial Sequence
  Description of Artificial Sequence: Synthetic oligonucleotide
  Sense strand starting at position 528 of SEQ ID NO: 28
gaccuaggguucggaauuu

SEQ ID NO: 6175 - RNA, 19 nt, Artificial Sequence
  Description of Artificial Sequence: Synthetic oligonucleotide
  Antisense strand to SEQ ID NO: 6174
aaauuccgaacccuagguc

SEQ ID NO: 6176 - RNA, 19 nt, Artificial Sequence
  Description of Artificial Sequence: Synthetic oligonucleotide
  Sense strand starting at position 527 of SEQ ID NO: 28
agaccuaggguucggaauu

SEQ ID NO: 6177 - RNA, 19 nt, Artificial Sequence
  Description of Artificial Sequence: Synthetic oligonucleotide
  Antisense strand to SEQ ID NO: 6176
aauuccgaacccuaggucu

SEQ ID NO: 6178 - RNA, 19 nt, Artificial Sequence
  Description of Artificial Sequence: Synthetic oligonucleotide
  Sense strand starting at position 377 of SEQ ID NO: 28
aucuguuucuguuggaucu

SEQ ID NO: 6179 - RNA, 19 nt, Artificial Sequence
  Description of Artificial Sequence: Synthetic oligonucleotide
  Antisense strand to SEQ ID NO: 6178
agauccaacagaaacagau

SEQ ID NO: 6180 - RNA, 19 nt, Artificial Sequence
  Description of Artificial Sequence: Synthetic oligonucleotide
  Sense strand starting at position 375 of SEQ ID NO: 28
aaaucuguuucuguuggau

SEQ ID NO: 6181 - RNA, 19 nt, Artificial Sequence
  Description of Artificial Sequence: Synthetic oligonucleotide
  Antisense strand to SEQ ID NO: 6180
auccaacagaaacagauuu

SEQ ID NO: 6182 - RNA, 19 nt, Artificial Sequence
  Description of Artificial Sequence: Synthetic oligonucleotide
  Sense strand starting at position 351 of SEQ ID NO: 28
uaguucugcuuuccaggaa

SEQ ID NO: 6183 - RNA, 19 nt, Artificial Sequence
  Description of Artificial Sequence: Synthetic oligonucleotide
  Antisense strand to SEQ ID NO: 6182
uuccuggaaagcagaacua

SEQ ID NO: 6184 - RNA, 19 nt, Artificial Sequence
  Description of Artificial Sequence: Synthetic oligonucleotide
  Sense strand starting at position 235 of SEQ ID NO: 28
agcuuugaacacuggagaa

SEQ ID NO: 6185 - RNA, 19 nt, Artificial Sequence
  Description of Artificial Sequence: Synthetic oligonucleotide
  Antisense strand to SEQ ID NO: 6184
uucuccaguguucaaagcu

SEQ ID NO: 6186 - RNA, 19 nt, Artificial Sequence
  Description of Artificial Sequence: Synthetic oligonucleotide
  Sense strand starting at position 191 of SEQ ID NO: 28
acaggccucucauucugaa

SEQ ID NO: 6187 - RNA, 19 nt, Artificial Sequence
  Description of Artificial Sequence: Synthetic oligonucleotide
  Antisense strand to SEQ ID NO: 6186
uucagaaugagaggccugu

SEQ ID NO: 6188 - RNA, 19 nt, Artificial Sequence
  Description of Artificial Sequence: Synthetic oligonucleotide
  Sense strand starting at position 114 of SEQ ID NO: 28
gcuuguuuccugugcgucu

SEQ ID NO: 6189 - RNA, 19 nt, Artificial Sequence
  Description of Artificial Sequence: Synthetic oligonucleotide
  Antisense strand to SEQ ID NO: 6188
agacgcacaggaaacaagc

SEQ ID NO: 6190 - RNA, 19 nt, Artificial Sequence
  Description of Artificial Sequence: Synthetic oligonucleotide
  Sense strand starting at position 52 of SEQ ID NO: 28
agaagaagccggcaaugua

SEQ ID NO: 6191 - RNA, 19 nt, Artificial Sequence
  Description of Artificial Sequence: Synthetic oligonucleotide
  Antisense strand to SEQ ID NO: 6190
uacauugccggcuucuucu

SEQ ID NO: 6192 - RNA, 19 nt, Artificial Sequence
  Description of Artificial Sequence: Synthetic oligonucleotide
  Sense strand starting at position 37 of SEQ ID NO: 28
cgguuuaaucucuagagaa

SEQ ID NO: 6193 - RNA, 19 nt, Artificial Sequence
  Description of Artificial Sequence: Synthetic oligonucleotide
  Antisense strand to SEQ ID NO: 6192
uucucuagagauuaaaccg

SEQ ID NO: 6194 - RNA, 19 nt, Artificial Sequence
  Description of Artificial Sequence: Synthetic oligonucleotide
  Sense strand starting at position 36 of SEQ ID NO: 28
acgguuuaaucucuagaga

SEQ ID NO: 6195 - RNA, 19 nt, Artificial Sequence
  Description of Artificial Sequence: Synthetic oligonucleotide
  Antisense strand to SEQ ID NO: 6194
ucucuagagauuaaaccgu

SEQ ID NO: 6196 - RNA, 19 nt, Artificial Sequence
  Description of Artificial Sequence: Synthetic oligonucleotide
  Sense strand starting at position 185 of SEQ ID NO: 30
gggugcaaugguggauauu

SEQ ID NO: 6197 - RNA, 19 nt, Artificial Sequence
  Description of Artificial Sequence: Synthetic oligonucleotide
  Antisense strand to SEQ ID NO: 6196
aauauccaccauugcaccc

SEQ ID NO: 6198 - RNA, 19 nt, Artificial Sequence
  Description of Artificial Sequence: Synthetic oligonucleotide
  Sense strand starting at position 226 of SEQ ID NO: 30
cuggguuugagagauuguc

SEQ ID NO: 6199 - RNA, 19 nt, Artificial Sequence
  Description of Artificial Sequence: Synthetic oligonucleotide
  Antisense strand to SEQ ID NO: 6198
gacaaucucucaaacccag

SEQ ID NO: 6200 - RNA, 19 nt, Artificial Sequence
  Description of Artificial Sequence: Synthetic oligonucleotide
  Sense strand starting at position 463 of SEQ ID NO: 30
ucuagaauuuaaugaagug

SEQ ID NO: 6201 - RNA, 19 nt, Artificial Sequence
  Description of Artificial Sequence: Synthetic oligonucleotide
  Antisense strand to SEQ ID NO: 6200
cacuucauuaaauucuaga

SEQ ID NO: 6202 - RNA, 19 nt, Artificial Sequence
  Description of Artificial Sequence: Synthetic oligonucleotide
  Sense strand starting at position 479 of SEQ ID NO: 30
guguacagcagagagauua

SEQ ID NO: 6203 - RNA, 19 nt, Artificial Sequence
  Description of Artificial Sequence: Synthetic oligonucleotide
  Antisense strand to SEQ ID NO: 6202
uaaucucucugcuguacac

SEQ ID NO: 6204 - RNA, 19 nt, Artificial Sequence
  Description of Artificial Sequence: Synthetic oligonucleotide
  Sense strand starting at position 924 of SEQ ID NO: 30
ggcuucucugguggagaaa

SEQ ID NO: 6205 - RNA, 19 nt, Artificial Sequence
  Description of Artificial Sequence: Synthetic oligonucleotide
  Antisense strand to SEQ ID NO: 6204
uuucuccaccagagaagcc

SEQ ID NO: 6206 - RNA, 19 nt, Artificial Sequence
  Description of Artificial Sequence: Synthetic oligonucleotide
  Sense strand starting at position 942 of SEQ ID NO: 30
agaaguuggcaucacaacu

SEQ ID NO: 6207 - RNA, 19 nt, Artificial Sequence
  Description of Artificial Sequence: Synthetic oligonucleotide
  Antisense strand to SEQ ID NO: 6206
aguugugaugccaacuucu

SEQ ID NO: 6208 - RNA, 19 nt, Artificial Sequence
  Description of Artificial Sequence: Synthetic oligonucleotide
  Sense strand starting at position 1385 of SEQ ID NO: 30
cgauguuaucucugggaua

SEQ ID NO: 6209 - RNA, 19 nt, Artificial Sequence
  Description of Artificial Sequence: Synthetic oligonucleotide
  Antisense strand to SEQ ID NO: 6208
uaucccagagauaacaucg

SEQ ID NO: 6210 - RNA, 19 nt, Artificial Sequence
  Description of Artificial Sequence: Synthetic oligonucleotide
  Sense strand starting at position 1387 of SEQ ID NO: 30
auguuaucucugggauaaa

SEQ ID NO: 6211 - RNA, 19 nt, Artificial Sequence
  Description of Artificial Sequence: Synthetic oligonucleotide
  Antisense strand to SEQ ID NO: 6210
uuuaucccagagauaacau

SEQ ID NO: 6212 - RNA, 19 nt, Artificial Sequence
  Description of Artificial Sequence: Synthetic oligonucleotide
  Sense strand starting at position 2036 of SEQ ID NO: 30
gaggaagaaccacgugauu

SEQ ID NO: 6213 - RNA, 19 nt, Artificial Sequence
  Description of Artificial Sequence: Synthetic oligonucleotide
  Antisense strand to SEQ ID NO: 6212
aaucacgugguucuuccuc

SEQ ID NO: 6214 - RNA, 19 nt, Artificial Sequence
  Description of Artificial Sequence: Synthetic oligonucleotide
  Sense strand starting at position 2072 of SEQ ID NO: 30
gcucuaggaaauuaagguu

SEQ ID NO: 6215 - RNA, 19 nt, Artificial Sequence
  Description of Artificial Sequence: Synthetic oligonucleotide
  Antisense strand to SEQ ID NO: 6214
aaccuuaauuuccuagagc

SEQ ID NO: 6216 - RNA, 19 nt, Artificial Sequence
  Description of Artificial Sequence: Synthetic oligonucleotide
  Sense strand starting at position 2154 of SEQ ID NO: 30
ggaguagguacauggguuu

SEQ ID NO: 6217 - RNA, 19 nt, Artificial Sequence
  Description of Artificial Sequence: Synthetic oligonucleotide
  Antisense strand to SEQ ID NO: 6216
aaacccauguaccuacucc

SEQ ID NO: 6218 - RNA, 19 nt, Artificial Sequence
  Description of Artificial Sequence: Synthetic oligonucleotide
  Sense strand starting at position 2189 of SEQ ID NO: 30
gcccauggccuugauugaa

SEQ ID NO: 6219 - RNA, 19 nt, Artificial Sequence
  Description of Artificial Sequence: Synthetic oligonucleotide
  Antisense strand to SEQ ID NO: 6218
uucaaucaaggccaugggc

SEQ ID NO: 6220 - RNA, 19 nt, Artificial Sequence
  Description of Artificial Sequence: Synthetic oligonucleotide
  Sense strand starting at position 2235 of SEQ ID NO: 30
gccggaaggccugagaaga

SEQ ID NO: 6221 - RNA, 19 nt, Artificial Sequence
  Description of Artificial Sequence: Synthetic oligonucleotide
  Antisense strand to SEQ ID NO: 6220
ucuucucaggccuuccggc

SEQ ID NO: 6222 - RNA, 19 nt, Artificial Sequence
  Description of Artificial Sequence: Synthetic oligonucleotide
  Sense strand starting at position 2245 of SEQ ID NO: 30
cugagaagauacguaggua

SEQ ID NO: 6223 - RNA, 19 nt, Artificial Sequence
  Description of Artificial Sequence: Synthetic oligonucleotide
  Antisense strand to SEQ ID NO: 6222
uaccuacguaucuucucag

SEQ ID NO: 6224 - RNA, 19 nt, Artificial Sequence
  Description of Artificial Sequence: Synthetic oligonucleotide
  Sense strand starting at position 2248 of SEQ ID NO: 30
agaagauacguagguacaa

SEQ ID NO: 6225 - RNA, 19 nt, Artificial Sequence
  Description of Artificial Sequence: Synthetic oligonucleotide
  Antisense strand to SEQ ID NO: 6224
uuguaccuacguaucuucu

SEQ ID NO: 6226 - RNA, 19 nt, Artificial Sequence
  Description of Artificial Sequence: Synthetic oligonucleotide
  Sense strand starting at position 2249 of SEQ ID NO: 30
gaagauacguagguacaau

SEQ ID NO: 6227 - RNA, 19 nt, Artificial Sequence
  Description of Artificial Sequence: Synthetic oligonucleotide
  Antisense strand to SEQ ID NO: 6226
auuguaccuacguaucuuc

SEQ ID NO: 6228 - RNA, 19 nt, Artificial Sequence
  Description of Artificial Sequence: Synthetic oligonucleotide
  Sense strand starting at position 2392 of SEQ ID NO: 30
uugacaugcuaaccaagaa

SEQ ID NO: 6229 - RNA, 19 nt, Artificial Sequence
  Description of Artificial Sequence: Synthetic oligonucleotide
  Antisense strand to SEQ ID NO: 6228
uucuugguuagcaugucaa

SEQ ID NO: 6230 - RNA, 19 nt, Artificial Sequence
  Description of Artificial Sequence: Synthetic oligonucleotide
  Sense strand starting at position 2467 of SEQ ID NO: 30
cugccucuccaucagaagu

SEQ ID NO: 6231 - RNA, 19 nt, Artificial Sequence
  Description of Artificial Sequence: Synthetic oligonucleotide
  Antisense strand to SEQ ID NO: 6230
acuucugauggagaggcag

SEQ ID NO: 6232 - RNA, 19 nt, Artificial Sequence
  Description of Artificial Sequence: Synthetic oligonucleotide
  Sense strand starting at position 2588 of SEQ ID NO: 30
uuguguguauuuccaaacu

SEQ ID NO: 6233 - RNA, 19 nt, Artificial Sequence
  Description of Artificial Sequence: Synthetic oligonucleotide
  Antisense strand to SEQ ID NO: 6232
aguuuggaaauacacacaa

SEQ ID NO: 6234 - RNA, 19 nt, Artificial Sequence
  Description of Artificial Sequence: Synthetic oligonucleotide
  Sense strand starting at position 2646 of SEQ ID NO: 30
caucuuuauugaccgaagu

SEQ ID NO: 6235 - RNA, 19 nt, Artificial Sequence
  Description of Artificial Sequence: Synthetic oligonucleotide
  Antisense strand to SEQ ID NO: 6234
acuucggucaauaaagaug

SEQ ID NO: 6236 - RNA, 19 nt, Artificial Sequence
  Description of Artificial Sequence: Synthetic oligonucleotide
  Sense strand starting at position 2647 of SEQ ID NO: 30
aucuuuauugaccgaaguu

SEQ ID NO: 6237 - RNA, 19 nt, Artificial Sequence
  Description of Artificial Sequence: Synthetic oligonucleotide
  Antisense strand to SEQ ID NO: 6236
aacuucggucaauaaagau

SEQ ID NO: 6238 - RNA, 19 nt, Artificial Sequence
  Description of Artificial Sequence: Synthetic oligonucleotide
  Sense strand starting at position 2734 of SEQ ID NO: 30
ccaagucuuugugcaauuu

SEQ ID NO: 6239 - RNA, 19 nt, Artificial Sequence
  Description of Artificial Sequence: Synthetic oligonucleotide
  Antisense strand to SEQ ID NO: 6238
aaauugcacaaagacuugg

SEQ ID NO: 6240 - RNA, 19 nt, Artificial Sequence
  Description of Artificial Sequence: Synthetic oligonucleotide
  Sense strand starting at position 2775 of SEQ ID NO: 30
aguguuggaaaucagcauu

SEQ ID NO: 6241 - RNA, 19 nt, Artificial Sequence
  Description of Artificial Sequence: Synthetic oligonucleotide
  Antisense strand to SEQ ID NO: 6240
aaugcugauuuccaacacu

SEQ ID NO: 6242 - RNA, 19 nt, Artificial Sequence
  Description of Artificial Sequence: Synthetic oligonucleotide
  Sense strand starting at position 2778 of SEQ ID NO: 30
guuggaaaucagcauugcu

SEQ ID NO: 6243 - RNA, 19 nt, Artificial Sequence
  Description of Artificial Sequence: Synthetic oligonucleotide
  Antisense strand to SEQ ID NO: 6242
agcaaugcugauuuccaac

SEQ ID NO: 6244 - RNA, 19 nt, Artificial Sequence
  Description of Artificial Sequence: Synthetic oligonucleotide
  Sense strand starting at position 2818 of SEQ ID NO: 30
augucucuuggguguauuu

SEQ ID NO: 6245 - RNA, 19 nt, Artificial Sequence
  Description of Artificial Sequence: Synthetic oligonucleotide
  Antisense strand to SEQ ID NO: 6244
aaauacacccaagagacau

SEQ ID NO: 6246 - RNA, 19 nt, Artificial Sequence
  Description of Artificial Sequence: Synthetic oligonucleotide
  Sense strand starting at position 2831 of SEQ ID NO: 30
guauuuaccuaggaauaaa

SEQ ID NO: 6247 - RNA, 19 nt, Artificial Sequence
  Description of Artificial Sequence: Synthetic oligonucleotide
  Antisense strand to SEQ ID NO: 6246
uuuauuccuagguaaauac

SEQ ID NO: 6248 - RNA, 19 nt, Artificial Sequence
  Description of Artificial Sequence: Synthetic oligonucleotide
  Sense strand starting at position 2862 of SEQ ID NO: 30
uuggaaugccaguauucca

SEQ ID NO: 6249 - RNA, 19 nt, Artificial Sequence
  Description of Artificial Sequence: Synthetic oligonucleotide
  Antisense strand to SEQ ID NO: 6248
uggaauacuggcauuccaa

SEQ ID NO: 6250 - RNA, 19 nt, Artificial Sequence
  Description of Artificial Sequence: Synthetic oligonucleotide
  Sense strand starting at position 3005 of SEQ ID NO: 30
ccuuauugagguuaagcau

SEQ ID NO: 6251 - RNA, 19 nt, Artificial Sequence
  Description of Artificial Sequence: Synthetic oligonucleotide
  Antisense strand to SEQ ID NO: 6250
augcuuaaccucaauaagg

SEQ ID NO: 6252 - RNA, 19 nt, Artificial Sequence
  Description of Artificial Sequence: Synthetic oligonucleotide
  Sense strand starting at position 3033 of SEQ ID NO: 30
auauguauuguccaucugu

SEQ ID NO: 6253 - RNA, 19 nt, Artificial Sequence
  Description of Artificial Sequence: Synthetic oligonucleotide
  Antisense strand to SEQ ID NO: 6252
acagauggacaauacauau

SEQ ID NO: 6254 - RNA, 19 nt, Artificial Sequence
  Description of Artificial Sequence: Synthetic oligonucleotide
  Sense strand starting at position 3064 of SEQ ID NO: 30
gugaaaugucaguguaggg

SEQ ID NO: 6255 - RNA, 19 nt, Artificial Sequence
  Description of Artificial Sequence: Synthetic oligonucleotide
  Antisense strand to SEQ ID NO: 6254
cccuacacugacauuucac

SEQ ID NO: 6256 - RNA, 19 nt, Artificial Sequence
  Description of Artificial Sequence: Synthetic oligonucleotide
  Sense strand starting at position 3150 of SEQ ID NO: 30
agcuuuauuugugugagcu

SEQ ID NO: 6257 - RNA, 19 nt, Artificial Sequence
  Description of Artificial Sequence: Synthetic oligonucleotide
  Antisense strand to SEQ ID NO: 6256
agcucacacaaauaaagcu

SEQ ID NO: 6258 - RNA, 19 nt, Artificial Sequence
  Description of Artificial Sequence: Synthetic oligonucleotide
  Sense strand starting at position 3154 of SEQ ID NO: 30
uuauuugugugagcuuuga

SEQ ID NO: 6259 - RNA, 19 nt, Artificial Sequence
  Description of Artificial Sequence: Synthetic oligonucleotide
  Antisense strand to SEQ ID NO: 6258
ucaaagcucacacaaauaa

SEQ ID NO: 6260 - RNA, 19 nt, Artificial Sequence
  Description of Artificial Sequence: Synthetic oligonucleotide
  Sense strand starting at position 3192 of SEQ ID NO: 30
aguccuuggcagcaugaga

SEQ ID NO: 6261 - RNA, 19 nt, Artificial Sequence
  Description of Artificial Sequence: Synthetic oligonucleotide
  Antisense strand to SEQ ID NO: 6260
ucucaugcugccaaggacu

SEQ ID NO: 6262 - RNA, 19 nt, Artificial Sequence
  Description of Artificial Sequence: Synthetic oligonucleotide
  Sense strand starting at position 3259 of SEQ ID NO: 30
gaaggaaacuuccagaaga

SEQ ID NO: 6263 - RNA, 19 nt, Artificial Sequence
  Description of Artificial Sequence: Synthetic oligonucleotide
  Antisense strand to SEQ ID NO: 6262
ucuucuggaaguuuccuuc

SEQ ID NO: 6264 - RNA, 19 nt, Artificial Sequence
  Description of Artificial Sequence: Synthetic oligonucleotide
  Sense strand starting at position 3286 of SEQ ID NO: 30
uuaccauguccaggugaug

SEQ ID NO: 6265 - RNA, 19 nt, Artificial Sequence
  Description of Artificial Sequence: Synthetic oligonucleotide
  Antisense strand to SEQ ID NO: 6264
caucaccuggacaugguaa

SEQ ID NO: 6266 - RNA, 19 nt, Artificial Sequence
  Description of Artificial Sequence: Synthetic oligonucleotide
  Sense strand starting at position 3320 of SEQ ID NO: 30
ugggaagucucuguuucag

SEQ ID NO: 6267 - RNA, 19 nt, Artificial Sequence
  Description of Artificial Sequence: Synthetic oligonucleotide
  Antisense strand to SEQ ID NO: 6266
cugaaacagagacuuccca

SEQ ID NO: 6268 - RNA, 19 nt, Artificial Sequence
  Description of Artificial Sequence: Synthetic oligonucleotide
  Sense strand starting at position 3404 of SEQ ID NO: 30
aacagauguugggcacagu

SEQ ID NO: 6269 - RNA, 19 nt, Artificial Sequence
  Description of Artificial Sequence: Synthetic oligonucleotide
  Antisense strand to SEQ ID NO: 6268
acugugcccaacaucuguu

SEQ ID NO: 6270 - RNA, 19 nt, Artificial Sequence
  Description of Artificial Sequence: Synthetic oligonucleotide
  Sense strand starting at position 3504 of SEQ ID NO: 30
guauaaacauuugaguuag

SEQ ID NO: 6271 - RNA, 19 nt, Artificial Sequence
  Description of Artificial Sequence: Synthetic oligonucleotide
  Antisense strand to SEQ ID NO: 6270
cuaacucaaauguuuauac

SEQ ID NO: 6272 - RNA, 19 nt, Artificial Sequence
  Description of Artificial Sequence: Synthetic oligonucleotide
  Sense strand starting at position 3755 of SEQ ID NO: 30
uuugguagauguucuuaac

SEQ ID NO: 6273 - RNA, 19 nt, Artificial Sequence
  Description of Artificial Sequence: Synthetic oligonucleotide
  Antisense strand to SEQ ID NO: 6272
guuaagaacaucuaccaaa

SEQ ID NO: 6274 - RNA, 19 nt, Artificial Sequence
  Description of Artificial Sequence: Synthetic oligonucleotide
  Sense strand starting at position 3950 of SEQ ID NO: 30
cagguuuguuuauugacua

SEQ ID NO: 6275 - RNA, 19 nt, Artificial Sequence
  Description of Artificial Sequence: Synthetic oligonucleotide
  Antisense strand to SEQ ID NO: 6274
uagucaauaaacaaaccug

SEQ ID NO: 6276 - RNA, 19 nt, Artificial Sequence
  Description of Artificial Sequence: Synthetic oligonucleotide
  Sense strand starting at position 179 of SEQ ID NO: 29
guagaauaguauguacauu

SEQ ID NO: 6277 - RNA, 19 nt, Artificial Sequence
  Description of Artificial Sequence: Synthetic oligonucleotide
  Antisense strand to SEQ ID NO: 6276
aauguacauacuauucuac

SEQ ID NO: 6278 - RNA, 19 nt, Artificial Sequence
  Description of Artificial Sequence: Synthetic oligonucleotide
  Sense strand starting at position 283 of SEQ ID NO: 29
gauguaaguuugcuaagga

SEQ ID NO: 6279 - RNA, 19 nt, Artificial Sequence
  Description of Artificial Sequence: Synthetic oligonucleotide
  Antisense strand to SEQ ID NO: 6278
uccuuagcaaacuuacauc

SEQ ID NO: 6280 - RNA, 19 nt, Artificial Sequence
  Description of Artificial Sequence: Synthetic oligonucleotide
  Sense strand starting at position 290 of SEQ ID NO: 29
guuugcuaaggauaucuua

SEQ ID NO: 6281 - RNA, 19 nt, Artificial Sequence
  Description of Artificial Sequence: Synthetic oligonucleotide
  Antisense strand to SEQ ID NO: 6280
uaagauauccuuagcaaac

SEQ ID NO: 6282 - RNA, 19 nt, Artificial Sequence
  Description of Artificial Sequence: Synthetic oligonucleotide
  Sense strand starting at position 334 of SEQ ID NO: 29
ggagauuauuaaucuuucu

SEQ ID NO: 6283 - RNA, 19 nt, Artificial Sequence
  Description of Artificial Sequence: Synthetic oligonucleotide
  Antisense strand to SEQ ID NO: 6282
agaaagauuaauaaucucc

SEQ ID NO: 6284 - RNA, 19 nt, Artificial Sequence
  Description of Artificial Sequence: Synthetic oligonucleotide
  Sense strand starting at position 404 of SEQ ID NO: 29
uuuggaaagcuacggaaua

SEQ ID NO: 6285 - RNA, 19 nt, Artificial Sequence
  Description of Artificial Sequence: Synthetic oligonucleotide
  Antisense strand to SEQ ID NO: 6284
uauuccguagcuuuccaaa

SEQ ID NO: 6286 - RNA, 19 nt, Artificial Sequence
  Description of Artificial Sequence: Synthetic oligonucleotide
  Sense strand starting at position 601 of SEQ ID NO: 29
cagguuccacagugcaaua

SEQ ID NO: 6287 - RNA, 19 nt, Artificial Sequence
  Description of Artificial Sequence: Synthetic oligonucleotide
  Antisense strand to SEQ ID NO: 6286
uauugcacuguggaaccug

SEQ ID NO: 6288 - RNA, 19 nt, Artificial Sequence
  Description of Artificial Sequence: Synthetic oligonucleotide
  Sense strand starting at position 620 of SEQ ID NO: 29
cacugacaccugugcagaa

SEQ ID NO: 6289 - RNA, 19 nt, Artificial Sequence
  Description of Artificial Sequence: Synthetic oligonucleotide
  Antisense strand to SEQ ID NO: 6288
uucugcacaggugucagug

SEQ ID NO: 6290 - RNA, 19 nt, Artificial Sequence
  Description of Artificial Sequence: Synthetic oligonucleotide
  Sense strand starting at position 622 of SEQ ID NO: 29
cugacaccugugcagaaau

SEQ ID NO: 6291 - RNA, 19 nt, Artificial Sequence
  Description of Artificial Sequence: Synthetic oligonucleotide
  Antisense strand to SEQ ID NO: 6290
auuucugcacaggugucag

SEQ ID NO: 6292 - RNA, 19 nt, Artificial Sequence
  Description of Artificial Sequence: Synthetic oligonucleotide
  Sense strand starting at position 1011 of SEQ ID NO: 29
cgagucacccguguuguua

SEQ ID NO: 6293 - RNA, 19 nt, Artificial Sequence
  Description of Artificial Sequence: Synthetic oligonucleotide
  Antisense strand to SEQ ID NO: 6292
uaacaacacgggugacucg

SEQ ID NO: 6294 - RNA, 19 nt, Artificial Sequence
  Description of Artificial Sequence: Synthetic oligonucleotide
  Sense strand starting at position 1137 of SEQ ID NO: 29
gcuauaaagugguuaacaa

SEQ ID NO: 6295 - RNA, 19 nt, Artificial Sequence
  Description of Artificial Sequence: Synthetic oligonucleotide
  Antisense strand to SEQ ID NO: 6294
uuguuaaccacuuuauagc

SEQ ID NO: 6296 - RNA, 19 nt, Artificial Sequence
  Description of Artificial Sequence: Synthetic oligonucleotide
  Sense strand starting at position 1399 of SEQ ID NO: 29
ugcuccauucugcagaauu

SEQ ID NO: 6297 - RNA, 19 nt, Artificial Sequence
  Description of Artificial Sequence: Synthetic oligonucleotide
  Antisense strand to SEQ ID NO: 6296
aauucugcagaauggagca

SEQ ID NO: 6298 - RNA, 19 nt, Artificial Sequence
  Description of Artificial Sequence: Synthetic oligonucleotide
  Sense strand starting at position 1677 of SEQ ID NO: 29
acacaaagccugugagguu

SEQ ID NO: 6299 - RNA, 19 nt, Artificial Sequence
  Description of Artificial Sequence: Synthetic oligonucleotide
  Antisense strand to SEQ ID NO: 6298
aaccucacaggcuuugugu

SEQ ID NO: 6300 - RNA, 19 nt, Artificial Sequence
  Description of Artificial Sequence: Synthetic oligonucleotide
  Sense strand starting at position 1974 of SEQ ID NO: 29
ccggaaaguuuggccaaga

SEQ ID NO: 6301 - RNA, 19 nt, Artificial Sequence
  Description of Artificial Sequence: Synthetic oligonucleotide
  Antisense strand to SEQ ID NO: 6300
ucuuggccaaacuuuccgg

SEQ ID NO: 6302 - RNA, 19 nt, Artificial Sequence
  Description of Artificial Sequence: Synthetic oligonucleotide
  Sense strand starting at position 2391 of SEQ ID NO: 29
uccgguacuguuuaggaaa

SEQ ID NO: 6303 - RNA, 19 nt, Artificial Sequence
  Description of Artificial Sequence: Synthetic oligonucleotide
  Antisense strand to SEQ ID NO: 6302
uuuccuaaacaguaccgga

SEQ ID NO: 6304 - RNA, 19 nt, Artificial Sequence
  Description of Artificial Sequence: Synthetic oligonucleotide
  Sense strand starting at position 2684 of SEQ ID NO: 29
gcagaugccagccaguaaa

SEQ ID NO: 6305 - RNA, 19 nt, Artificial Sequence
  Description of Artificial Sequence: Synthetic oligonucleotide
  Antisense strand to SEQ ID NO: 6304
uuuacuggcuggcaucugc

SEQ ID NO: 6306 - RNA, 19 nt, Artificial Sequence
  Description of Artificial Sequence: Synthetic oligonucleotide
  Sense strand starting at position 2729 of SEQ ID NO: 29
gugaacaauuuaggaucua

SEQ ID NO: 6307 - RNA, 19 nt, Artificial Sequence
  Description of Artificial Sequence: Synthetic oligonucleotide
  Antisense strand to SEQ ID NO: 6306
uagauccuaaauuguucac

SEQ ID NO: 6308 - RNA, 19 nt, Artificial Sequence
  Description of Artificial Sequence: Synthetic oligonucleotide
  Sense strand starting at position 2767 of SEQ ID NO: 29
ccaggcaaaugguuaagua

SEQ ID NO: 6309 - RNA, 19 nt, Artificial Sequence
  Description of Artificial Sequence: Synthetic oligonucleotide
  Antisense strand to SEQ ID NO: 6308
uacuuaaccauuugccugg

SEQ ID NO: 6310 - RNA, 19 nt, Artificial Sequence
  Description of Artificial Sequence: Synthetic oligonucleotide
  Sense strand starting at position 2775 of SEQ ID NO: 29
augguuaaguacuuuacau

SEQ ID NO: 6311 - RNA, 19 nt, Artificial Sequence
  Description of Artificial Sequence: Synthetic oligonucleotide
  Antisense strand to SEQ ID NO: 6310
auguaaaguacuuaaccau

SEQ ID NO: 6312 - RNA, 19 nt, Artificial Sequence
  Description of Artificial Sequence: Synthetic oligonucleotide
  Sense strand starting at position 2777 of SEQ ID NO: 29
gguuaaguacuuuacaugu

SEQ ID NO: 6313 - RNA, 19 nt, Artificial Sequence
  Description of Artificial Sequence: Synthetic oligonucleotide
  Antisense strand to SEQ ID NO: 6312
acauguaaaguacuuaacc

SEQ ID NO: 6314 - RNA, 19 nt, Artificial Sequence
  Description of Artificial Sequence: Synthetic oligonucleotide
  Sense strand starting at position 2844 of SEQ ID NO: 29
ccacuuugcagguguagaa

SEQ ID NO: 6315 - RNA, 19 nt, Artificial Sequence
  Description of Artificial Sequence: Synthetic oligonucleotide
  Antisense strand to SEQ ID NO: 6314
uucuacaccugcaaagugg

SEQ ID NO: 6316 - RNA, 19 nt, Artificial Sequence
  Description of Artificial Sequence: Synthetic oligonucleotide
  Sense strand starting at position 2889 of SEQ ID NO: 29
cugccaaauccaggucuga

SEQ ID NO: 6317 - RNA, 19 nt, Artificial Sequence
  Description of Artificial Sequence: Synthetic oligonucleotide
  Antisense strand to SEQ ID NO: 6316
ucagaccuggauuuggcag

SEQ ID NO: 6318 - RNA, 19 nt, Artificial Sequence
  Description of Artificial Sequence: Synthetic oligonucleotide
  Sense strand starting at position 2902 of SEQ ID NO: 29
gucugaaggcuuuaguaaa

SEQ ID NO: 6319 - RNA, 19 nt, Artificial Sequence
  Description of Artificial Sequence: Synthetic oligonucleotide
  Antisense strand to SEQ ID NO: 6318
uuuacuaaagccuucagac

SEQ ID NO: 6320 - RNA, 19 nt, Artificial Sequence
  Description of Artificial Sequence: Synthetic oligonucleotide
  Sense strand starting at position 2912 of SEQ ID NO: 29
uuuaguaaagcucagucuu

SEQ ID NO: 6321 - RNA, 19 nt, Artificial Sequence
  Description of Artificial Sequence: Synthetic oligonucleotide
  Antisense strand to SEQ ID NO: 6320
aagacugagcuuuacuaaa

SEQ ID NO: 6322 - RNA, 19 nt, Artificial Sequence
  Description of Artificial Sequence: Synthetic oligonucleotide
  Sense strand starting at position 2985 of SEQ ID NO: 29
uuguuaucuagagggacaa

SEQ ID NO: 6323 - RNA, 19 nt, Artificial Sequence
  Description of Artificial Sequence: Synthetic oligonucleotide
  Antisense strand to SEQ ID NO: 6322
uugucccucuagauaacaa

SEQ ID NO: 6324 - RNA, 19 nt, Artificial Sequence
  Description of Artificial Sequence: Synthetic oligonucleotide
  Sense strand starting at position 3050 of SEQ ID NO: 29
uguucaagguaucugggaa

SEQ ID NO: 6325 - RNA, 19 nt, Artificial Sequence
  Description of Artificial Sequence: Synthetic oligonucleotide
  Antisense strand to SEQ ID NO: 6324
uucccagauaccuugaaca

SEQ ID NO: 6326 - RNA, 19 nt, Artificial Sequence
  Description of Artificial Sequence: Synthetic oligonucleotide
  Sense strand starting at position 3058 of SEQ ID NO: 29
guaucugggaaacgauuau

SEQ ID NO: 6327 - RNA, 19 nt, Artificial Sequence
  Description of Artificial Sequence: Synthetic oligonucleotide
  Antisense strand to SEQ ID NO: 6326
auaaucguuucccagauac

SEQ ID NO: 6328 - RNA, 19 nt, Artificial Sequence
  Description of Artificial Sequence: Synthetic oligonucleotide
  Sense strand starting at position 3103 of SEQ ID NO: 29
gugagaauguucuuucccu

SEQ ID NO: 6329 - RNA, 19 nt, Artificial Sequence
  Description of Artificial Sequence: Synthetic oligonucleotide
  Antisense strand to SEQ ID NO: 6328
agggaaagaacauucucac

SEQ ID NO: 6330 - RNA, 19 nt, Artificial Sequence
  Description of Artificial Sequence: Synthetic oligonucleotide
  Sense strand starting at position 3104 of SEQ ID NO: 29
ugagaauguucuuucccug

SEQ ID NO: 6331 - RNA, 19 nt, Artificial Sequence
  Description of Artificial Sequence: Synthetic oligonucleotide
  Antisense strand to SEQ ID NO: 6330
cagggaaagaacauucuca

SEQ ID NO: 6332 - RNA, 19 nt, Artificial Sequence
  Description of Artificial Sequence: Synthetic oligonucleotide
  Sense strand starting at position 3118 of SEQ ID NO: 29
cccuguguuuaaucuuaau

SEQ ID NO: 6333 - RNA, 19 nt, Artificial Sequence
  Description of Artificial Sequence: Synthetic oligonucleotide
  Antisense strand to SEQ ID NO: 6332
auuaagauuaaacacaggg

SEQ ID NO: 6334 - RNA, 19 nt, Artificial Sequence
  Description of Artificial Sequence: Synthetic oligonucleotide
  Sense strand starting at position 3206 of SEQ ID NO: 29
ugguguuagucacuccaaa

SEQ ID NO: 6335 - RNA, 19 nt, Artificial Sequence
  Description of Artificial Sequence: Synthetic oligonucleotide
  Antisense strand to SEQ ID NO: 6334
uuuggagugacuaacacca

SEQ ID NO: 6336 - RNA, 19 nt, Artificial Sequence
  Description of Artificial Sequence: Synthetic oligonucleotide
  Sense strand starting at position 3308 of SEQ ID NO: 29
acggcuucccgugaaucaa

SEQ ID NO: 6337 - RNA, 19 nt, Artificial Sequence
  Description of Artificial Sequence: Synthetic oligonucleotide
  Antisense strand to SEQ ID NO: 6336
uugauucacgggaagccgu

SEQ ID NO: 6338 - RNA, 19 nt, Artificial Sequence
  Description of Artificial Sequence: Synthetic oligonucleotide
  Sense strand starting at position 3530 of SEQ ID NO: 29
guguuaagcacccaggaua

SEQ ID NO: 6339 - RNA, 19 nt, Artificial Sequence
  Description of Artificial Sequence: Synthetic oligonucleotide
  Antisense strand to SEQ ID NO: 6338
uauccugggugcuuaacac

SEQ ID NO: 6340 - RNA, 19 nt, Artificial Sequence
  Description of Artificial Sequence: Synthetic oligonucleotide
  Sense strand starting at position 3576 of SEQ ID NO: 29
gcuagucugcuagggaaga

SEQ ID NO: 6341 - RNA, 19 nt, Artificial Sequence
  Description of Artificial Sequence: Synthetic oligonucleotide
  Antisense strand to SEQ ID NO: 6340
ucuucccuagcagacuagc

SEQ ID NO: 6342 - RNA, 19 nt, Artificial Sequence
  Description of Artificial Sequence: Synthetic oligonucleotide
  Sense strand starting at position 3590 of SEQ ID NO: 29
gaagauggaugccucagua

SEQ ID NO: 6343 - RNA, 19 nt, Artificial Sequence
  Description of Artificial Sequence: Synthetic oligonucleotide
  Antisense strand to SEQ ID NO: 6342
uacugaggcauccaucuuc

SEQ ID NO: 6344 - RNA, 19 nt, Artificial Sequence
  Description of Artificial Sequence: Synthetic oligonucleotide
  Sense strand starting at position 3594 of SEQ ID NO: 29
auggaugccucaguaauca

SEQ ID NO: 6345 - RNA, 19 nt, Artificial Sequence
  Description of Artificial Sequence: Synthetic oligonucleotide
  Antisense strand to SEQ ID NO: 6344
ugauuacugaggcauccau

SEQ ID NO: 6346 - RNA, 19 nt, Artificial Sequence
  Description of Artificial Sequence: Synthetic oligonucleotide
  Sense strand starting at position 3645 of SEQ ID NO: 29
ccucuagaauugucaaguc

SEQ ID NO: 6347 - RNA, 19 nt, Artificial Sequence
  Description of Artificial Sequence: Synthetic oligonucleotide
  Antisense strand to SEQ ID NO: 6346
gacuugacaauucuagagg

SEQ ID NO: 6348 - RNA, 19 nt, Artificial Sequence
  Description of Artificial Sequence: Synthetic oligonucleotide
  Sense strand starting at position 3713 of SEQ ID NO: 29
gagggcugguuaguugaaa

SEQ ID NO: 6349 - RNA, 19 nt, Artificial Sequence
  Description of Artificial Sequence: Synthetic oligonucleotide
  Antisense strand to SEQ ID NO: 6348
uuucaacuaaccagcccuc

SEQ ID NO: 6350 - RNA, 19 nt, Artificial Sequence
  Description of Artificial Sequence: Synthetic oligonucleotide
  Sense strand starting at position 3751 of SEQ ID NO: 29
agguauaacaaugggcaaa

SEQ ID NO: 6351 - RNA, 19 nt, Artificial Sequence
  Description of Artificial Sequence: Synthetic oligonucleotide
  Antisense strand to SEQ ID NO: 6350
uuugcccauuguuauaccu

SEQ ID NO: 6352 - RNA, 19 nt, Artificial Sequence
  Description of Artificial Sequence: Synthetic oligonucleotide
  Sense strand starting at position 3943 of SEQ ID NO: 29
gcucuuagucacuacagga

SEQ ID NO: 6353 - RNA, 19 nt, Artificial Sequence
  Description of Artificial Sequence: Synthetic oligonucleotide
  Antisense strand to SEQ ID NO: 6352
uccuguagugacuaagagc

SEQ ID NO: 6354 - RNA, 19 nt, Artificial Sequence
  Description of Artificial Sequence: Synthetic oligonucleotide
  Sense strand starting at position 3964 of SEQ ID NO: 29
ccaguuuaccauuaucuag

SEQ ID NO: 6355 - RNA, 19 nt, Artificial Sequence
  Description of Artificial Sequence: Synthetic oligonucleotide
  Antisense strand to SEQ ID NO: 6354
cuagauaaugguaaacugg

SEQ ID NO: 6356 - RNA, 19 nt, Artificial Sequence
  Description of Artificial Sequence: Synthetic oligonucleotide
  Sense strand starting at position 93 of SEQ ID NO: 31
ccuggaucucauggucagu

SEQ ID NO: 6357 - RNA, 19 nt, Artificial Sequence
  Description of Artificial Sequence: Synthetic oligonucleotide
  Antisense strand to SEQ ID NO: 6356
acugaccaugagauccagg

SEQ ID NO: 6358 - RNA, 19 nt, Artificial Sequence
  Description of Artificial Sequence: Synthetic oligonucleotide
  Sense strand starting at position 178 of SEQ ID NO: 31
aggaccuugacuugugcua

SEQ ID NO: 6359 - RNA, 19 nt, Artificial Sequence
  Description of Artificial Sequence: Synthetic oligonucleotide
  Antisense strand to SEQ ID NO: 6358
uagcacaagucaagguccu

SEQ ID NO: 6360 - RNA, 19 nt, Artificial Sequence
  Description of Artificial Sequence: Synthetic oligonucleotide
  Sense strand starting at position 242 of SEQ ID NO: 31
cgcugugugguggucaauu

SEQ ID NO: 6361 - RNA, 19 nt, Artificial Sequence
  Description of Artificial Sequence: Synthetic oligonucleotide
  Antisense strand to SEQ ID NO: 6360
aauugaccaccacacagcg

SEQ ID NO: 6362 - RNA, 19 nt, Artificial Sequence
  Description of Artificial Sequence: Synthetic oligonucleotide
  Sense strand starting at position 253 of SEQ ID NO: 31
ggucaauuguguuuaacaa

SEQ ID NO: 6363 - RNA, 19 nt, Artificial Sequence
  Description of Artificial Sequence: Synthetic oligonucleotide
  Antisense strand to SEQ ID NO: 6362
uuguuaaacacaauugacc

SEQ ID NO: 6364 - RNA, 19 nt, Artificial Sequence
  Description of Artificial Sequence: Synthetic oligonucleotide
  Sense strand starting at position 254 of SEQ ID NO: 31
gucaauuguguuuaacaaa

SEQ ID NO: 6365 - RNA, 19 nt, Artificial Sequence
  Description of Artificial Sequence: Synthetic oligonucleotide
  Antisense strand to SEQ ID NO: 6364
uuuguuaaacacaauugac

SEQ ID NO: 6366 - RNA, 19 nt, Artificial Sequence
  Description of Artificial Sequence: Synthetic oligonucleotide
  Sense strand starting at position 290 of SEQ ID NO: 31
uggauugaguacucuucuu

SEQ ID NO: 6367 - RNA, 19 nt, Artificial Sequence
  Description of Artificial Sequence: Synthetic oligonucleotide
  Antisense strand to SEQ ID NO: 6366
aagaagaguacucaaucca

SEQ ID NO: 6368 - RNA, 19 nt, Artificial Sequence
  Description of Artificial Sequence: Synthetic oligonucleotide
  Sense strand starting at position 437 of SEQ ID NO: 31
auaaucagucuccaagguu

SEQ ID NO: 6369 - RNA, 19 nt, Artificial Sequence
  Description of Artificial Sequence: Synthetic oligonucleotide
  Antisense strand to SEQ ID NO: 6368
aaccuuggagacugauuau

SEQ ID NO: 6370 - RNA, 19 nt, Artificial Sequence
  Description of Artificial Sequence: Synthetic oligonucleotide
  Sense strand starting at position 580 of SEQ ID NO: 31
agcuuaagaucugaauuuc

SEQ ID NO: 6371 - RNA, 19 nt, Artificial Sequence
  Description of Artificial Sequence: Synthetic oligonucleotide
  Antisense strand to SEQ ID NO: 6370
gaaauucagaucuuaagcu

SEQ ID NO: 6372 - RNA, 19 nt, Artificial Sequence
  Description of Artificial Sequence: Synthetic oligonucleotide
  Sense strand starting at position 737 of SEQ ID NO: 31
gccuauuaaggcuagaaac

SEQ ID NO: 6373 - RNA, 19 nt, Artificial Sequence
  Description of Artificial Sequence: Synthetic oligonucleotide
  Antisense strand to SEQ ID NO: 6372
guuucuagccuuaauaggc

SEQ ID NO: 6374 - RNA, 19 nt, Artificial Sequence
  Description of Artificial Sequence: Synthetic oligonucleotide
  Sense strand starting at position 904 of SEQ ID NO: 31
ugcaaaggccuauaaucuu

SEQ ID NO: 6375 - RNA, 19 nt, Artificial Sequence
  Description of Artificial Sequence: Synthetic oligonucleotide
  Antisense strand to SEQ ID NO: 6374
aagauuauaggccuuugca

SEQ ID NO: 6376 - RNA, 19 nt, Artificial Sequence
  Description of Artificial Sequence: Synthetic oligonucleotide
  Sense strand starting at position 1104 of SEQ ID NO: 31
ccauuuacuuucccucgua

SEQ ID NO: 6377 - RNA, 19 nt, Artificial Sequence
  Description of Artificial Sequence: Synthetic oligonucleotide
  Antisense strand to SEQ ID NO: 6376
uacgagggaaaguaaaugg

SEQ ID NO: 6378 - RNA, 19 nt, Artificial Sequence
  Description of Artificial Sequence: Synthetic oligonucleotide
  Sense strand starting at position 1170 of SEQ ID NO: 31
gugucugaaagguaauuaa

SEQ ID NO: 6379 - RNA, 19 nt, Artificial Sequence
  Description of Artificial Sequence: Synthetic oligonucleotide
  Antisense strand to SEQ ID NO: 6378
uuaauuaccuuucagacac

SEQ ID NO: 6380 - RNA, 19 nt, Artificial Sequence
  Description of Artificial Sequence: Synthetic oligonucleotide
  Sense strand starting at position 1180 of SEQ ID NO: 31
gguaauuaacauuaggugu

SEQ ID NO: 6381 - RNA, 19 nt, Artificial Sequence
  Description of Artificial Sequence: Synthetic oligonucleotide
  Antisense strand to SEQ ID NO: 6380
acaccuaauguuaauuacc

SEQ ID NO: 6382 - RNA, 19 nt, Artificial Sequence
  Description of Artificial Sequence: Synthetic oligonucleotide
  Sense strand starting at position 1191 of SEQ ID NO: 31
uuagguguccuauaaguua

SEQ ID NO: 6383 - RNA, 19 nt, Artificial Sequence
  Description of Artificial Sequence: Synthetic oligonucleotide
  Antisense strand to SEQ ID NO: 6382
uaacuuauaggacaccuaa

SEQ ID NO: 6384 - RNA, 19 nt, Artificial Sequence
  Description of Artificial Sequence: Synthetic oligonucleotide
  Sense strand starting at position 1332 of SEQ ID NO: 31
gcacaaagcugauucucaa

SEQ ID NO: 6385 - RNA, 19 nt, Artificial Sequence
  Description of Artificial Sequence: Synthetic oligonucleotide
  Antisense strand to SEQ ID NO: 6384
uugagaaucagcuuugugc

SEQ ID NO: 6386 - RNA, 19 nt, Artificial Sequence
  Description of Artificial Sequence: Synthetic oligonucleotide
  Sense strand starting at position 1362 of SEQ ID NO: 31
ugaauuaaugacugcauga

SEQ ID NO: 6387 - RNA, 19 nt, Artificial Sequence
  Description of Artificial Sequence: Synthetic oligonucleotide
  Antisense strand to SEQ ID NO: 6386
ucaugcagucauuaauuca

SEQ ID NO: 6388 - RNA, 19 nt, Artificial Sequence
  Description of Artificial Sequence: Synthetic oligonucleotide
  Sense strand starting at position 1462 of SEQ ID NO: 31
aggcaaauguguguacaga

SEQ ID NO: 6389 - RNA, 19 nt, Artificial Sequence
  Description of Artificial Sequence: Synthetic oligonucleotide
  Antisense strand to SEQ ID NO: 6388
ucuguacacacauuugccu

SEQ ID NO: 6390 - RNA, 19 nt, Artificial Sequence
  Description of Artificial Sequence: Synthetic oligonucleotide
  Sense strand starting at position 1463 of SEQ ID NO: 31
ggcaaauguguguacagag

SEQ ID NO: 6391 - RNA, 19 nt, Artificial Sequence
  Description of Artificial Sequence: Synthetic oligonucleotide
  Antisense strand to SEQ ID NO: 6390
cucuguacacacauuugcc

SEQ ID NO: 6392 - RNA, 19 nt, Artificial Sequence
  Description of Artificial Sequence: Synthetic oligonucleotide
  Sense strand starting at position 1468 of SEQ ID NO: 31
auguguguacagagugagu

SEQ ID NO: 6393 - RNA, 19 nt, Artificial Sequence
  Description of Artificial Sequence: Synthetic oligonucleotide
  Antisense strand to SEQ ID NO: 6392
acucacucuguacacacau

SEQ ID NO: 6394 - RNA, 19 nt, Artificial Sequence
  Description of Artificial Sequence: Synthetic oligonucleotide
  Sense strand starting at position 1490 of SEQ ID NO: 31
ggcucccagagcugaauua

SEQ ID NO: 6395 - RNA, 19 nt, Artificial Sequence
  Description of Artificial Sequence: Synthetic oligonucleotide
  Antisense strand to SEQ ID NO: 6394
uaauucagcucugggagcc

SEQ ID NO: 6396 - RNA, 19 nt, Artificial Sequence
  Description of Artificial Sequence: Synthetic oligonucleotide
  Sense strand starting at position 1491 of SEQ ID NO: 31
gcucccagagcugaauuau

SEQ ID NO: 6397 - RNA, 19 nt, Artificial Sequence
  Description of Artificial Sequence: Synthetic oligonucleotide
  Antisense strand to SEQ ID NO: 6396
auaauucagcucugggagc

SEQ ID NO: 6398 - RNA, 19 nt, Artificial Sequence
  Description of Artificial Sequence: Synthetic oligonucleotide
  Sense strand starting at position 1499 of SEQ ID NO: 31
agcugaauuaugggacuua

SEQ ID NO: 6399 - RNA, 19 nt, Artificial Sequence
  Description of Artificial Sequence: Synthetic oligonucleotide
  Antisense strand to SEQ ID NO: 6398
uaagucccauaauucagcu

SEQ ID NO: 6400 - RNA, 19 nt, Artificial Sequence
  Description of Artificial Sequence: Synthetic oligonucleotide
  Sense strand starting at position 1526 of SEQ ID NO: 31
ccuauuagcucuuugagug

SEQ ID NO: 6401 - RNA, 19 nt, Artificial Sequence
  Description of Artificial Sequence: Synthetic oligonucleotide
  Antisense strand to SEQ ID NO: 6400
cacucaaagagcuaauagg

SEQ ID NO: 6402 - RNA, 19 nt, Artificial Sequence
  Description of Artificial Sequence: Synthetic oligonucleotide
  Sense strand starting at position 1527 of SEQ ID NO: 31
cuauuagcucuuugaguga

SEQ ID NO: 6403 - RNA, 19 nt, Artificial Sequence
  Description of Artificial Sequence: Synthetic oligonucleotide
  Antisense strand to SEQ ID NO: 6402
ucacucaaagagcuaauag

SEQ ID NO: 6404 - RNA, 19 nt, Artificial Sequence
  Description of Artificial Sequence: Synthetic oligonucleotide
  Sense strand starting at position 1573 of SEQ ID NO: 31
aguggcuagagucaguuaa

SEQ ID NO: 6405 - RNA, 19 nt, Artificial Sequence
  Description of Artificial Sequence: Synthetic oligonucleotide
  Antisense strand to SEQ ID NO: 6404
uuaacugacucuagccacu

SEQ ID NO: 6406 - RNA, 19 nt, Artificial Sequence
  Description of Artificial Sequence: Synthetic oligonucleotide
  Sense strand starting at position 1642 of SEQ ID NO: 31
uuuaaugucugucuauaga

SEQ ID NO: 6407 - RNA, 19 nt, Artificial Sequence
  Description of Artificial Sequence: Synthetic oligonucleotide
  Antisense strand to SEQ ID NO: 6406
ucuauagacagacauuaaa

SEQ ID NO: 6408 - RNA, 19 nt, Artificial Sequence
  Description of Artificial Sequence: Synthetic oligonucleotide
  Sense strand starting at position 2127 of SEQ ID NO: 31
guagaauaguauguacauu

SEQ ID NO: 6409 - RNA, 19 nt, Artificial Sequence
  Description of Artificial Sequence: Synthetic oligonucleotide
  Antisense strand to SEQ ID NO: 6408
aauguacauacuauucuac

SEQ ID NO: 6410 - RNA, 19 nt, Artificial Sequence
  Description of Artificial Sequence: Synthetic oligonucleotide
  Sense strand starting at position 2231 of SEQ ID NO: 31
gauguaaguuugcuaagga

SEQ ID NO: 6411 - RNA, 19 nt, Artificial Sequence
  Description of Artificial Sequence: Synthetic oligonucleotide
  Antisense strand to SEQ ID NO: 6410
uccuuagcaaacuuacauc

SEQ ID NO: 6412 - RNA, 19 nt, Artificial Sequence
  Description of Artificial Sequence: Synthetic oligonucleotide
  Sense strand starting at position 2238 of SEQ ID NO: 31
guuugcuaaggauaucuua

SEQ ID NO: 6413 - RNA, 19 nt, Artificial Sequence
  Description of Artificial Sequence: Synthetic oligonucleotide
  Antisense strand to SEQ ID NO: 6412
uaagauauccuuagcaaac

SEQ ID NO: 6414 - RNA, 19 nt, Artificial Sequence
  Description of Artificial Sequence: Synthetic oligonucleotide
  Sense strand starting at position 2282 of SEQ ID NO: 31
ggagauuauuaaucuuucu

SEQ ID NO: 6415 - RNA, 19 nt, Artificial Sequence
  Description of Artificial Sequence: Synthetic oligonucleotide
  Antisense strand to SEQ ID NO: 6414
agaaagauuaauaaucucc

SEQ ID NO: 6416 - RNA, 19 nt, Artificial Sequence
  Description of Artificial Sequence: Synthetic oligonucleotide
  Sense strand starting at position 2352 of SEQ ID NO: 31
uuuggaaagcuacggaaua

SEQ ID NO: 6417 - RNA, 19 nt, Artificial Sequence
  Description of Artificial Sequence: Synthetic oligonucleotide
  Antisense strand to SEQ ID NO: 6416
uauuccguagcuuuccaaa

SEQ ID NO: 6418 - RNA, 19 nt, Artificial Sequence
  Description of Artificial Sequence: Synthetic oligonucleotide
  Sense strand starting at position 2549 of SEQ ID NO: 31
cagguuccacagugcaaua

SEQ ID NO: 6419 - RNA, 19 nt, Artificial Sequence
  Description of Artificial Sequence: Synthetic oligonucleotide
  Antisense strand to SEQ ID NO: 6418
uauugcacuguggaaccug

SEQ ID NO: 6420 - RNA, 19 nt, Artificial Sequence
  Description of Artificial Sequence: Synthetic oligonucleotide
  Sense strand starting at position 2568 of SEQ ID NO: 31
cacugacaccugugcagaa

SEQ ID NO: 6421 - RNA, 19 nt, Artificial Sequence
  Description of Artificial Sequence: Synthetic oligonucleotide
  Antisense strand to SEQ ID NO: 6420
uucugcacaggugucagug

SEQ ID NO: 6422 - RNA, 19 nt, Artificial Sequence
  Description of Artificial Sequence: Synthetic oligonucleotide
  Sense strand starting at position 2570 of SEQ ID NO: 31
cugacaccugugcagaaau

SEQ ID NO: 6423 - RNA, 19 nt, Artificial Sequence
  Description of Artificial Sequence: Synthetic oligonucleotide
  Antisense strand to SEQ ID NO: 6422
auuucugcacaggugucag

SEQ ID NO: 6424 - RNA, 19 nt, Artificial Sequence
  Description of Artificial Sequence: Synthetic oligonucleotide
  Sense strand starting at position 2720 of SEQ ID NO: 31
aucuaugaauuucgacaau

SEQ ID NO: 6425 - RNA, 19 nt, Artificial Sequence
  Description of Artificial Sequence: Synthetic oligonucleotide
  Antisense strand to SEQ ID NO: 6424
auugucgaaauucauagau

SEQ ID NO: 6426 - RNA, 19 nt, Artificial Sequence
  Description of Artificial Sequence: Synthetic oligonucleotide
  Sense strand starting at position 2959 of SEQ ID NO: 31
cgagucacccguguuguua

SEQ ID NO: 6427 - RNA, 19 nt, Artificial Sequence
  Description of Artificial Sequence: Synthetic oligonucleotide
  Antisense strand to SEQ ID NO: 6426
uaacaacacgggugacucg

SEQ ID NO: 6428 - RNA, 19 nt, Artificial Sequence
  Description of Artificial Sequence: Synthetic oligonucleotide
  Sense strand starting at position 3085 of SEQ ID NO: 31
gcuauaaagugguuaacaa

SEQ ID NO: 6429 - RNA, 19 nt, Artificial Sequence
  Description of Artificial Sequence: Synthetic oligonucleotide
  Antisense strand to SEQ ID NO: 6428
uuguuaaccacuuuauagc

SEQ ID NO: 6430 - RNA, 19 nt, Artificial Sequence
  Description of Artificial Sequence: Synthetic oligonucleotide
  Sense strand starting at position 3347 of SEQ ID NO: 31
ugcuccauucugcagaauu

SEQ ID NO: 6431 - RNA, 19 nt, Artificial Sequence
  Description of Artificial Sequence: Synthetic oligonucleotide
  Antisense strand to SEQ ID NO: 6430
aauucugcagaauggagca

SEQ ID NO: 6432 - RNA, 19 nt, Artificial Sequence
  Description of Artificial Sequence: Synthetic oligonucleotide
  Sense strand starting at position 3625 of SEQ ID NO: 31
acacaaagccugugagguu

SEQ ID NO: 6433 - RNA, 19 nt, Artificial Sequence
  Description of Artificial Sequence: Synthetic oligonucleotide
  Antisense strand to SEQ ID NO: 6432
aaccucacaggcuuugugu

SEQ ID NO: 6434 - RNA, 19 nt, Artificial Sequence
  Description of Artificial Sequence: Synthetic oligonucleotide
  Sense strand starting at position 3922 of SEQ ID NO: 31
ccggaaaguuuggccaaga

SEQ ID NO: 6435 - RNA, 19 nt, Artificial Sequence
  Description of Artificial Sequence: Synthetic oligonucleotide
  Antisense strand to SEQ ID NO: 6434
ucuuggccaaacuuuccgg

SEQ ID NO: 6436 - RNA, 19 nt, Artificial Sequence
  Description of Artificial Sequence: Synthetic oligonucleotide
  Sense strand starting at position 3904 of SEQ ID NO: 32
uugacaacuugccuugauu

SEQ ID NO: 6437 - RNA, 19 nt, Artificial Sequence
  Description of Artificial Sequence: Synthetic oligonucleotide
  Antisense strand to SEQ ID NO: 6436
aaucaaggcaaguugucaa

SEQ ID NO: 6438 - RNA, 19 nt, Artificial Sequence
  Description of Artificial Sequence: Synthetic oligonucleotide
  Sense strand starting at position 3903 of SEQ ID NO: 32
guugacaacuugccuugau

SEQ ID NO: 6439 - RNA, 19 nt, Artificial Sequence
  Description of Artificial Sequence: Synthetic oligonucleotide
  Antisense strand to SEQ ID NO: 6438
aucaaggcaaguugucaac

SEQ ID NO: 6440 - RNA, 19 nt, Artificial Sequence
  Description of Artificial Sequence: Synthetic oligonucleotide
  Sense strand starting at position 3693 of SEQ ID NO: 32
ccuuucuuccaaggagaau

SEQ ID NO: 6441 - RNA, 19 nt, Artificial Sequence
  Description of Artificial Sequence: Synthetic oligonucleotide
  Antisense strand to SEQ ID NO: 6440
auucuccuuggaagaaagg

SEQ ID NO: 6442 - RNA, 19 nt, Artificial Sequence
  Description of Artificial Sequence: Synthetic oligonucleotide
  Sense strand starting at position 3633 of SEQ ID NO: 32
ugugauaugggcgaacaca

SEQ ID NO: 6443 - RNA, 19 nt, Artificial Sequence
  Description of Artificial Sequence: Synthetic oligonucleotide
  Antisense strand to SEQ ID NO: 6442
uguguucgcccauaucaca

SEQ ID NO: 6444 - RNA, 19 nt, Artificial Sequence
  Description of Artificial Sequence: Synthetic oligonucleotide
  Sense strand starting at position 3616 of SEQ ID NO: 32
acagaauucuaagugugug

SEQ ID NO: 6445 - RNA, 19 nt, Artificial Sequence
  Description of Artificial Sequence: Synthetic oligonucleotide
  Antisense strand to SEQ ID NO: 6444
cacacacuuagaauucugu

SEQ ID NO: 6446 - RNA, 19 nt, Artificial Sequence
  Description of Artificial Sequence: Synthetic oligonucleotide
  Sense strand starting at position 3598 of SEQ ID NO: 32
cugccugaguucccaagaa

SEQ ID NO: 6447 - RNA, 19 nt, Artificial Sequence
  Description of Artificial Sequence: Synthetic oligonucleotide
  Antisense strand to SEQ ID NO: 6446
uucuugggaacucaggcag

SEQ ID NO: 6448 - RNA, 19 nt, Artificial Sequence
  Description of Artificial Sequence: Synthetic oligonucleotide
  Sense strand starting at position 3591 of SEQ ID NO: 32
cagagaucugccugaguuc

SEQ ID NO: 6449 - RNA, 19 nt, Artificial Sequence
  Description of Artificial Sequence: Synthetic oligonucleotide
  Antisense strand to SEQ ID NO: 6448
gaacucaggcagaucucug

SEQ ID NO: 6450 - RNA, 19 nt, Artificial Sequence
  Description of Artificial Sequence: Synthetic oligonucleotide
  Sense strand starting at position 3527 of SEQ ID NO: 32
gggccugcuuuauuauaau

SEQ ID NO: 6451 - RNA, 19 nt, Artificial Sequence
  Description of Artificial Sequence: Synthetic oligonucleotide
  Antisense strand to SEQ ID NO: 6450
auuauaauaaagcaggccc

SEQ ID NO: 6452 - RNA, 19 nt, Artificial Sequence
  Description of Artificial Sequence: Synthetic oligonucleotide
  Sense strand starting at position 3486 of SEQ ID NO: 32
aaaguuagcuguucuaugu

SEQ ID NO: 6453 - RNA, 19 nt, Artificial Sequence
  Description of Artificial Sequence: Synthetic oligonucleotide
  Antisense strand to SEQ ID NO: 6452
acauagaacagcuaacuuu

SEQ ID NO: 6454 - RNA, 19 nt, Artificial Sequence
  Description of Artificial Sequence: Synthetic oligonucleotide
  Sense strand starting at position 3444 of SEQ ID NO: 32
aauugaaagucguuuguuu

SEQ ID NO: 6455 - RNA, 19 nt, Artificial Sequence
  Description of Artificial Sequence: Synthetic oligonucleotide
  Antisense strand to SEQ ID NO: 6454
aaacaaacgacuuucaauu

SEQ ID NO: 6456 - RNA, 19 nt, Artificial Sequence
  Description of Artificial Sequence: Synthetic oligonucleotide
  Sense strand starting at position 3189 of SEQ ID NO: 32
cgauuuacugagcgccaaa

SEQ ID NO: 6457 - RNA, 19 nt, Artificial Sequence
  Description of Artificial Sequence: Synthetic oligonucleotide
  Antisense strand to SEQ ID NO: 6456
uuuggcgcucaguaaaucg

SEQ ID NO: 6458 - RNA, 19 nt, Artificial Sequence
  Description of Artificial Sequence: Synthetic oligonucleotide
  Sense strand starting at position 3188 of SEQ ID NO: 32
ccgauuuacugagcgccaa

SEQ ID NO: 6459 - RNA, 19 nt, Artificial Sequence
  Description of Artificial Sequence: Synthetic oligonucleotide
  Antisense strand to SEQ ID NO: 6458
uuggcgcucaguaaaucgg

SEQ ID NO: 6460 - RNA, 19 nt, Artificial Sequence
  Description of Artificial Sequence: Synthetic oligonucleotide
  Sense strand starting at position 3169 of SEQ ID NO: 32
ccuuaucuuguguaaagug

SEQ ID NO: 6461 - RNA, 19 nt, Artificial Sequence
  Description of Artificial Sequence: Synthetic oligonucleotide
  Antisense strand to SEQ ID NO: 6460
cacuuuacacaagauaagg

SEQ ID NO: 6462 - RNA, 19 nt, Artificial Sequence
  Description of Artificial Sequence: Synthetic oligonucleotide
  Sense strand starting at position 3168 of SEQ ID NO: 32
accuuaucuuguguaaagu

SEQ ID NO: 6463 - RNA, 19 nt, Artificial Sequence
  Description of Artificial Sequence: Synthetic oligonucleotide
  Antisense strand to SEQ ID NO: 6462
acuuuacacaagauaaggu

SEQ ID NO: 6464 - RNA, 19 nt, Artificial Sequence
  Description of Artificial Sequence: Synthetic oligonucleotide
  Sense strand starting at position 3143 of SEQ ID NO: 32
ggugaaguaucuccacucu

SEQ ID NO: 6465 - RNA, 19 nt, Artificial Sequence
  Description of Artificial Sequence: Synthetic oligonucleotide
  Antisense strand to SEQ ID NO: 6464
agaguggagauacuucacc

SEQ ID NO: 6466 - RNA, 19 nt, Artificial Sequence
  Description of Artificial Sequence: Synthetic oligonucleotide
  Sense strand starting at position 2982 of SEQ ID NO: 32
gauuguuccuuauucugag

SEQ ID NO: 6467 - RNA, 19 nt, Artificial Sequence
  Description of Artificial Sequence: Synthetic oligonucleotide
  Antisense strand to SEQ ID NO: 6466
cucagaauaaggaacaauc

SEQ ID NO: 6468 - RNA, 19 nt, Artificial Sequence
  Description of Artificial Sequence: Synthetic oligonucleotide
  Sense strand starting at position 2980 of SEQ ID NO: 32
aggauuguuccuuauucug

SEQ ID NO: 6469 - RNA, 19 nt, Artificial Sequence
  Description of Artificial Sequence: Synthetic oligonucleotide
  Antisense strand to SEQ ID NO: 6468
cagaauaaggaacaauccu

SEQ ID NO: 6470 - RNA, 19 nt, Artificial Sequence
  Description of Artificial Sequence: Synthetic oligonucleotide
  Sense strand starting at position 2975 of SEQ ID NO: 32
gccaaaggauuguuccuua

SEQ ID NO: 6471 - RNA, 19 nt, Artificial Sequence
  Description of Artificial Sequence: Synthetic oligonucleotide
  Antisense strand to SEQ ID NO: 6470
uaaggaacaauccuuuggc

SEQ ID NO: 6472 - RNA, 19 nt, Artificial Sequence
  Description of Artificial Sequence: Synthetic oligonucleotide
  Sense strand starting at position 2857 of SEQ ID NO: 32
caaagucggcucgacaauu

SEQ ID NO: 6473 - RNA, 19 nt, Artificial Sequence
  Description of Artificial Sequence: Synthetic oligonucleotide
  Antisense strand to SEQ ID NO: 6472
aauugucgagccgacuuug

SEQ ID NO: 6474 - RNA, 19 nt, Artificial Sequence
  Description of Artificial Sequence: Synthetic oligonucleotide
  Sense strand starting at position 2419 of SEQ ID NO: 32
gggcgaugccuguucuuug

SEQ ID NO: 6475 - RNA, 19 nt, Artificial Sequence
  Description of Artificial Sequence: Synthetic oligonucleotide
  Antisense strand to SEQ ID NO: 6474
caaagaacaggcaucgccc

SEQ ID NO: 6476 - RNA, 19 nt, Artificial Sequence
  Description of Artificial Sequence: Synthetic oligonucleotide
  Sense strand starting at position 2231 of SEQ ID NO: 32
cgcgcaugcgccuugagaa

SEQ ID NO: 6477 - RNA, 19 nt, Artificial Sequence
  Description of Artificial Sequence: Synthetic oligonucleotide
  Antisense strand to SEQ ID NO: 6476
uucucaaggcgcaugcgcg

SEQ ID NO: 6478 - RNA, 19 nt, Artificial Sequence
  Description of Artificial Sequence: Synthetic oligonucleotide
  Sense strand starting at position 1726 of SEQ ID NO: 32
ugcgcugucacaugaagag

SEQ ID NO: 6479 - RNA, 19 nt, Artificial Sequence
  Description of Artificial Sequence: Synthetic oligonucleotide
  Antisense strand to SEQ ID NO: 6478
cucuucaugugacagcgca

SEQ ID NO: 6480 - RNA, 19 nt, Artificial Sequence
  Description of Artificial Sequence: Synthetic oligonucleotide
  Sense strand starting at position 1549 of SEQ ID NO: 32
gcguguuccagggacccaa

SEQ ID NO: 6481 - RNA, 19 nt, Artificial Sequence
  Description of Artificial Sequence: Synthetic oligonucleotide
  Antisense strand to SEQ ID NO: 6480
uugggucccuggaacacgc

SEQ ID NO: 6482 - RNA, 19 nt, Artificial Sequence
  Description of Artificial Sequence: Synthetic oligonucleotide
  Sense strand starting at position 1478 of SEQ ID NO: 32
agcuguauuggcgaccaaa

SEQ ID NO: 6483 - RNA, 19 nt, Artificial Sequence
  Description of Artificial Sequence: Synthetic oligonucleotide
  Antisense strand to SEQ ID NO: 6482
uuuggucgccaauacagcu

SEQ ID NO: 6484 - RNA, 19 nt, Artificial Sequence
  Description of Artificial Sequence: Synthetic oligonucleotide
  Sense strand starting at position 1186 of SEQ ID NO: 32
cucggaaagguucgaguuu

SEQ ID NO: 6485 - RNA, 19 nt, Artificial Sequence
  Description of Artificial Sequence: Synthetic oligonucleotide
  Antisense strand to SEQ ID NO: 6484
aaacucgaaccuuuccgag

SEQ ID NO: 6486 - RNA, 19 nt, Artificial Sequence
  Description of Artificial Sequence: Synthetic oligonucleotide
  Sense strand starting at position 1176 of SEQ ID NO: 32
gagaaugagccucggaaag

SEQ ID NO: 6487 - RNA, 19 nt, Artificial Sequence
  Description of Artificial Sequence: Synthetic oligonucleotide
  Antisense strand to SEQ ID NO: 6486
cuuuccgaggcucauucuc

SEQ ID NO: 6488 - RNA, 19 nt, Artificial Sequence
  Description of Artificial Sequence: Synthetic oligonucleotide
  Sense strand starting at position 1163 of SEQ ID NO: 32
cugugcaaugggugagaau

SEQ ID NO: 6489 - RNA, 19 nt, Artificial Sequence
  Description of Artificial Sequence: Synthetic oligonucleotide
  Antisense strand to SEQ ID NO: 6488
auucucacccauugcacag

SEQ ID NO: 6490 - RNA, 19 nt, Artificial Sequence
  Description of Artificial Sequence: Synthetic oligonucleotide
  Sense strand starting at position 956 of SEQ ID NO: 32
uccugucacguagauccaa

SEQ ID NO: 6491 - RNA, 19 nt, Artificial Sequence
  Description of Artificial Sequence: Synthetic oligonucleotide
  Antisense strand to SEQ ID NO: 6490
uuggaucuacgugacagga

SEQ ID NO: 6492 - RNA, 19 nt, Artificial Sequence
  Description of Artificial Sequence: Synthetic oligonucleotide
  Sense strand starting at position 891 of SEQ ID NO: 32
gcuggcaucaaggaauguu

SEQ ID NO: 6493 - RNA, 19 nt, Artificial Sequence
  Description of Artificial Sequence: Synthetic oligonucleotide
  Antisense strand to SEQ ID NO: 6492
aacauuccuugaugccagc

SEQ ID NO: 6494 - RNA, 19 nt, Artificial Sequence
  Description of Artificial Sequence: Synthetic oligonucleotide
  Sense strand starting at position 792 of SEQ ID NO: 32
uugucucuccucgggagaa

SEQ ID NO: 6495 - RNA, 19 nt, Artificial Sequence
  Description of Artificial Sequence: Synthetic oligonucleotide
  Antisense strand to SEQ ID NO: 6494
uucucccgaggagagacaa

SEQ ID NO: 6496 - RNA, 19 nt, Artificial Sequence
  Description of Artificial Sequence: Synthetic oligonucleotide
  Sense strand starting at position 791 of SEQ ID NO: 32
uuugucucuccucgggaga

SEQ ID NO: 6497 - RNA, 19 nt, Artificial Sequence
  Description of Artificial Sequence: Synthetic oligonucleotide
  Antisense strand to SEQ ID NO: 6496
ucucccgaggagagacaaa

SEQ ID NO: 6498 - RNA, 19 nt, Artificial Sequence
  Description of Artificial Sequence: Synthetic oligonucleotide
  Sense strand starting at position 764 of SEQ ID NO: 32
uacagaugcugcuccugua

SEQ ID NO: 6499 - RNA, 19 nt, Artificial Sequence
  Description of Artificial Sequence: Synthetic oligonucleotide
  Antisense strand to SEQ ID NO: 6498
uacaggagcagcaucugua

SEQ ID NO: 6500 - RNA, 19 nt, Artificial Sequence
  Description of Artificial Sequence: Synthetic oligonucleotide
  Sense strand starting at position 379 of SEQ ID NO: 32
cauuacgauucugcauagu

SEQ ID NO: 6501 - RNA, 19 nt, Artificial Sequence
  Description of Artificial Sequence: Synthetic oligonucleotide
  Antisense strand to SEQ ID NO: 6500
acuaugcagaaucguaaug

SEQ ID NO: 6502 - RNA, 19 nt, Artificial Sequence
  Description of Artificial Sequence: Synthetic oligonucleotide
  Sense strand starting at position 349 of SEQ ID NO: 32
cuuugaguugcucaacauu

SEQ ID NO: 6503 - RNA, 19 nt, Artificial Sequence
  Description of Artificial Sequence: Synthetic oligonucleotide
  Antisense strand to SEQ ID NO: 6502
aauguugagcaacucaaag

SEQ ID NO: 6504 - RNA, 19 nt, Artificial Sequence
  Description of Artificial Sequence: Synthetic oligonucleotide
  Sense strand starting at position 347 of SEQ ID NO: 32
uccuuugaguugcucaaca

SEQ ID NO: 6505 - RNA, 19 nt, Artificial Sequence
  Description of Artificial Sequence: Synthetic oligonucleotide
  Antisense strand to SEQ ID NO: 6504
uguugagcaacucaaagga

SEQ ID NO: 6506 - RNA, 19 nt, Artificial Sequence
  Description of Artificial Sequence: Synthetic oligonucleotide
  Sense strand starting at position 242 of SEQ ID NO: 32
cgaagaauuauggguccaa

SEQ ID NO: 6507 - RNA, 19 nt, Artificial Sequence
  Description of Artificial Sequence: Synthetic oligonucleotide
  Antisense strand to SEQ ID NO: 6506
uuggacccauaauucuucg

SEQ ID NO: 6508 - RNA, 19 nt, Artificial Sequence
  Description of Artificial Sequence: Synthetic oligonucleotide
  Sense strand starting at position 227 of SEQ ID NO: 32
ccaggucucccacaacgaa

SEQ ID NO: 6509 - RNA, 19 nt, Artificial Sequence
  Description of Artificial Sequence: Synthetic oligonucleotide
  Antisense strand to SEQ ID NO: 6508
uucguugugggagaccugg

SEQ ID NO: 6510 - RNA, 19 nt, Artificial Sequence
  Description of Artificial Sequence: Synthetic oligonucleotide
  Sense strand starting at position 172 of SEQ ID NO: 32
gcuagucuaguagacagaa

SEQ ID NO: 6511 - RNA, 19 nt, Artificial Sequence
  Description of Artificial Sequence: Synthetic oligonucleotide
  Antisense strand to SEQ ID NO: 6510
uucugucuacuagacuagc

SEQ ID NO: 6512 - RNA, 19 nt, Artificial Sequence
  Description of Artificial Sequence: Synthetic oligonucleotide
  Sense strand starting at position 75 of SEQ ID NO: 32
guucucaaucaagggagau

SEQ ID NO: 6513 - RNA, 19 nt, Artificial Sequence
  Description of Artificial Sequence: Synthetic oligonucleotide
  Antisense strand to SEQ ID NO: 6512
aucucccuugauugagaac

SEQ ID NO: 6514 - RNA, 19 nt, Artificial Sequence
  Description of Artificial Sequence: Synthetic oligonucleotide
  Sense strand starting at position 64 of SEQ ID NO: 32
uuaccucagugguucucaa

SEQ ID NO: 6515 - RNA, 19 nt, Artificial Sequence
  Description of Artificial Sequence: Synthetic oligonucleotide
  Antisense strand to SEQ ID NO: 6514
uugagaaccacugagguaa

SEQ ID NO: 6516 - RNA, 19 nt, Artificial Sequence
  Description of Artificial Sequence: Synthetic oligonucleotide
  Sense strand starting at position 247 of SEQ ID NO: 33
gggugagagggcuagcuuu

SEQ ID NO: 6517 - RNA, 19 nt, Artificial Sequence
  Description of Artificial Sequence: Synthetic oligonucleotide
  Antisense strand to SEQ ID NO: 6516
aaagcuagcccucucaccc

SEQ ID NO: 6518 - RNA, 19 nt, Artificial Sequence
  Description of Artificial Sequence: Synthetic oligonucleotide
  Sense strand starting at position 535 of SEQ ID NO: 33
gacuaagaaccuugguguu

SEQ ID NO: 6519 - RNA, 19 nt, Artificial Sequence
  Description of Artificial Sequence: Synthetic oligonucleotide
  Antisense strand to SEQ ID NO: 6518
aacaccaagguucuuaguc

SEQ ID NO: 6520 - RNA, 19 nt, Artificial Sequence
  Description of Artificial Sequence: Synthetic oligonucleotide
  Sense strand starting at position 572 of SEQ ID NO: 33
guaucaauucuacauaggu

SEQ ID NO: 6521 - RNA, 19 nt, Artificial Sequence
  Description of Artificial Sequence: Synthetic oligonucleotide
  Antisense strand to SEQ ID NO: 6520
accuauguagaauugauac

SEQ ID NO: 6522 - RNA, 19 nt, Artificial Sequence
  Description of Artificial Sequence: Synthetic oligonucleotide
  Sense strand starting at position 626 of SEQ ID NO: 33
agaccugauuucuauagau

SEQ ID NO: 6523 - RNA, 19 nt, Artificial Sequence
  Description of Artificial Sequence: Synthetic oligonucleotide
  Antisense strand to SEQ ID NO: 6522
aucuauagaaaucaggucu

SEQ ID NO: 6524 - RNA, 19 nt, Artificial Sequence
  Description of Artificial Sequence: Synthetic oligonucleotide
  Sense strand starting at position 672 of SEQ ID NO: 33
cuugcucuggguuauaaag

SEQ ID NO: 6525 - RNA, 19 nt, Artificial Sequence
  Description of Artificial Sequence: Synthetic oligonucleotide
  Antisense strand to SEQ ID NO: 6524
cuuuauaacccagagcaag

SEQ ID NO: 6526 - RNA, 19 nt, Artificial Sequence
  Description of Artificial Sequence: Synthetic oligonucleotide
  Sense strand starting at position 680 of SEQ ID NO: 33
ggguuauaaagcuggaaua

SEQ ID NO: 6527 - RNA, 19 nt, Artificial Sequence
  Description of Artificial Sequence: Synthetic oligonucleotide
  Antisense strand to SEQ ID NO: 6526
uauuccagcuuuauaaccc

SEQ ID NO: 6528 - RNA, 19 nt, Artificial Sequence
  Description of Artificial Sequence: Synthetic oligonucleotide
  Sense strand starting at position 681 of SEQ ID NO: 33
gguuauaaagcuggaauau

SEQ ID NO: 6529 - RNA, 19 nt, Artificial Sequence
  Description of Artificial Sequence: Synthetic oligonucleotide
  Antisense strand to SEQ ID NO: 6528
auauuccagcuuuauaacc

SEQ ID NO: 6530 - RNA, 19 nt, Artificial Sequence
  Description of Artificial Sequence: Synthetic oligonucleotide
  Sense strand starting at position 682 of SEQ ID NO: 33
guuauaaagcuggaauauc

SEQ ID NO: 6531 - RNA, 19 nt, Artificial Sequence
  Description of Artificial Sequence: Synthetic oligonucleotide
  Antisense strand to SEQ ID NO: 6530
gauauuccagcuuuauaac

SEQ ID NO: 6532 - RNA, 19 nt, Artificial Sequence
  Description of Artificial Sequence: Synthetic oligonucleotide
  Sense strand starting at position 728 of SEQ ID NO: 33
uuguuucuacuauaucaug

SEQ ID NO: 6533 - RNA, 19 nt, Artificial Sequence
  Description of Artificial Sequence: Synthetic oligonucleotide
  Antisense strand to SEQ ID NO: 6532
caugauauaguagaaacaa

SEQ ID NO: 6534 - RNA, 19 nt, Artificial Sequence
  Description of Artificial Sequence: Synthetic oligonucleotide
  Sense strand starting at position 754 of SEQ ID NO: 33
ccauuuguauacgcuuuau

SEQ ID NO: 6535 - RNA, 19 nt, Artificial Sequence
  Description of Artificial Sequence: Synthetic oligonucleotide
  Antisense strand to SEQ ID NO: 6534
auaaagcguauacaaaugg

SEQ ID NO: 6536 - RNA, 19 nt, Artificial Sequence
  Description of Artificial Sequence: Synthetic oligonucleotide
  Sense strand starting at position 783 of SEQ ID NO: 33
ggauguauaugaccuagac

SEQ ID NO: 6537 - RNA, 19 nt, Artificial Sequence
  Description of Artificial Sequence: Synthetic oligonucleotide
  Antisense strand to SEQ ID NO: 6536
gucuaggucauauacaucc

SEQ ID NO: 6538 - RNA, 19 nt, Artificial Sequence
  Description of Artificial Sequence: Synthetic oligonucleotide
  Sense strand starting at position 1017 of SEQ ID NO: 33
gcggagugugaguaaagaa

SEQ ID NO: 6539 - RNA, 19 nt, Artificial Sequence
  Description of Artificial Sequence: Synthetic oligonucleotide
  Antisense strand to SEQ ID NO: 6538
uucuuuacucacacuccgc

SEQ ID NO: 6540 - RNA, 19 nt, Artificial Sequence
  Description of Artificial Sequence: Synthetic oligonucleotide
  Sense strand starting at position 1064 of SEQ ID NO: 33
gaaauuaggguucgauuau

SEQ ID NO: 6541 - RNA, 19 nt, Artificial Sequence
  Description of Artificial Sequence: Synthetic oligonucleotide
  Antisense strand to SEQ ID NO: 6540
auaaucgaacccuaauuuc

SEQ ID NO: 6542 - RNA, 19 nt, Artificial Sequence
  Description of Artificial Sequence: Synthetic oligonucleotide
  Sense strand starting at position 1297 of SEQ ID NO: 33
guggcuuauuucccauaca

SEQ ID NO: 6543 - RNA, 19 nt, Artificial Sequence
  Description of Artificial Sequence: Synthetic oligonucleotide
  Antisense strand to SEQ ID NO: 6542
uguaugggaaauaagccac

SEQ ID NO: 6544 - RNA, 19 nt, Artificial Sequence
  Description of Artificial Sequence: Synthetic oligonucleotide
  Sense strand starting at position 1714 of SEQ ID NO: 33
aucaaucuuucugcugaga

SEQ ID NO: 6545 - RNA, 19 nt, Artificial Sequence
  Description of Artificial Sequence: Synthetic oligonucleotide
  Antisense strand to SEQ ID NO: 6544
ucucagcagaaagauugau

SEQ ID NO: 6546 - RNA, 19 nt, Artificial Sequence
  Description of Artificial Sequence: Synthetic oligonucleotide
  Sense strand starting at position 1835 of SEQ ID NO: 33
gggugacauuauucugaag

SEQ ID NO: 6547 - RNA, 19 nt, Artificial Sequence
  Description of Artificial Sequence: Synthetic oligonucleotide
  Antisense strand to SEQ ID NO: 6546
cuucagaauaaugucaccc

SEQ ID NO: 6548 - RNA, 19 nt, Artificial Sequence
  Description of Artificial Sequence: Synthetic oligonucleotide
  Sense strand starting at position 1863 of SEQ ID NO: 33
gcgccaugucugucuauag

SEQ ID NO: 6549 - RNA, 19 nt, Artificial Sequence
  Description of Artificial Sequence: Synthetic oligonucleotide
  Antisense strand to SEQ ID NO: 6548
cuauagacagacauggcgc

SEQ ID NO: 6550 - RNA, 19 nt, Artificial Sequence
  Description of Artificial Sequence: Synthetic oligonucleotide
  Sense strand starting at position 2009 of SEQ ID NO: 33
accugaguggccuacuacu

SEQ ID NO: 6551 - RNA, 19 nt, Artificial Sequence
  Description of Artificial Sequence: Synthetic oligonucleotide
  Antisense strand to SEQ ID NO: 6550
aguaguaggccacucaggu

SEQ ID NO: 6552 - RNA, 19 nt, Artificial Sequence
  Description of Artificial Sequence: Synthetic oligonucleotide
  Sense strand starting at position 2104 of SEQ ID NO: 33
cccagaguaguuuacacaa

SEQ ID NO: 6553 - RNA, 19 nt, Artificial Sequence
  Description of Artificial Sequence: Synthetic oligonucleotide
  Antisense strand to SEQ ID NO: 6552
uuguguaaacuacucuggg

SEQ ID NO: 6554 - RNA, 19 nt, Artificial Sequence
  Description of Artificial Sequence: Synthetic oligonucleotide
  Sense strand starting at position 2138 of SEQ ID NO: 33
uguggaggaugguugaaau

SEQ ID NO: 6555 - RNA, 19 nt, Artificial Sequence
  Description of Artificial Sequence: Synthetic oligonucleotide
  Antisense strand to SEQ ID NO: 6554
auuucaaccauccuccaca

SEQ ID NO: 6556 - RNA, 19 nt, Artificial Sequence
  Description of Artificial Sequence: Synthetic oligonucleotide
  Sense strand starting at position 2148 of SEQ ID NO: 33
gguugaaauuaggcaauag

SEQ ID NO: 6557 - RNA, 19 nt, Artificial Sequence
  Description of Artificial Sequence: Synthetic oligonucleotide
  Antisense strand to SEQ ID NO: 6556
cuauugccuaauuucaacc

SEQ ID NO: 6558 - RNA, 19 nt, Artificial Sequence
  Description of Artificial Sequence: Synthetic oligonucleotide
  Sense strand starting at position 2149 of SEQ ID NO: 33
guugaaauuaggcaauagu

SEQ ID NO: 6559 - RNA, 19 nt, Artificial Sequence
  Description of Artificial Sequence: Synthetic oligonucleotide
  Antisense strand to SEQ ID NO: 6558
acuauugccuaauuucaac

SEQ ID NO: 6560 - RNA, 19 nt, Artificial Sequence
  Description of Artificial Sequence: Synthetic oligonucleotide
  Sense strand starting at position 2162 of SEQ ID NO: 33
aauaguugguaggugauca

SEQ ID NO: 6561 - RNA, 19 nt, Artificial Sequence
  Description of Artificial Sequence: Synthetic oligonucleotide
  Antisense strand to SEQ ID NO: 6560
ugaucaccuaccaacuauu

SEQ ID NO: 6562 - RNA, 19 nt, Artificial Sequence
  Description of Artificial Sequence: Synthetic oligonucleotide
  Sense strand starting at position 2167 of SEQ ID NO: 33
uugguaggugaucaucaga

SEQ ID NO: 6563 - RNA, 19 nt, Artificial Sequence
  Description of Artificial Sequence: Synthetic oligonucleotide
  Antisense strand to SEQ ID NO: 6562
ucugaugaucaccuaccaa

SEQ ID NO: 6564 - RNA, 19 nt, Artificial Sequence
  Description of Artificial Sequence: Synthetic oligonucleotide
  Sense strand starting at position 2170 of SEQ ID NO: 33
guaggugaucaucagaagu

SEQ ID NO: 6565 - RNA, 19 nt, Artificial Sequence
  Description of Artificial Sequence: Synthetic oligonucleotide
  Antisense strand to SEQ ID NO: 6564
acuucugaugaucaccuac

SEQ ID NO: 6566 - RNA, 19 nt, Artificial Sequence
  Description of Artificial Sequence: Synthetic oligonucleotide
  Sense strand starting at position 2239 of SEQ ID NO: 33
guaccaggacuaugaaauu

SEQ ID NO: 6567 - RNA, 19 nt, Artificial Sequence
  Description of Artificial Sequence: Synthetic oligonucleotide
  Antisense strand to SEQ ID NO: 6566
aauuucauaguccugguac

SEQ ID NO: 6568 - RNA, 19 nt, Artificial Sequence
  Description of Artificial Sequence: Synthetic oligonucleotide
  Sense strand starting at position 2290 of SEQ ID NO: 33
agauauauuugugagguaa

SEQ ID NO: 6569 - RNA, 19 nt, Artificial Sequence
  Description of Artificial Sequence: Synthetic oligonucleotide
  Antisense strand to SEQ ID NO: 6568
uuaccucacaaauauaucu

SEQ ID NO: 6570 - RNA, 19 nt, Artificial Sequence
  Description of Artificial Sequence: Synthetic oligonucleotide
  Sense strand starting at position 2724 of SEQ ID NO: 33
gugugaguuguggaaacca

SEQ ID NO: 6571 - RNA, 19 nt, Artificial Sequence
  Description of Artificial Sequence: Synthetic oligonucleotide
  Antisense strand to SEQ ID NO: 6570
ugguuuccacaacucacac

SEQ ID NO: 6572 - RNA, 19 nt, Artificial Sequence
  Description of Artificial Sequence: Synthetic oligonucleotide
  Sense strand starting at position 2891 of SEQ ID NO: 33
ugagguccauccucauuaa

SEQ ID NO: 6573 - RNA, 19 nt, Artificial Sequence
  Description of Artificial Sequence: Synthetic oligonucleotide
  Antisense strand to SEQ ID NO: 6572
uuaaugaggauggaccuca

SEQ ID NO: 6574 - RNA, 19 nt, Artificial Sequence
  Description of Artificial Sequence: Synthetic oligonucleotide
  Sense strand starting at position 2977 of SEQ ID NO: 33
cugacauaccuuggaucaa

SEQ ID NO: 6575 - RNA, 19 nt, Artificial Sequence
  Description of Artificial Sequence: Synthetic oligonucleotide
  Antisense strand to SEQ ID NO: 6574
uugauccaagguaugucag

SEQ ID NO: 6576 - RNA, 19 nt, Artificial Sequence
  Description of Artificial Sequence: Synthetic oligonucleotide
  Sense strand starting at position 2989 of SEQ ID NO: 33
ggaucaaaguuuccuuaaa

SEQ ID NO: 6577 - RNA, 19 nt, Artificial Sequence
  Description of Artificial Sequence: Synthetic oligonucleotide
  Antisense strand to SEQ ID NO: 6576
uuuaaggaaacuuugaucc

SEQ ID NO: 6578 - RNA, 19 nt, Artificial Sequence
  Description of Artificial Sequence: Synthetic oligonucleotide
  Sense strand starting at position 3132 of SEQ ID NO: 33
gugcaaauagguuaacaca

SEQ ID NO: 6579 - RNA, 19 nt, Artificial Sequence
  Description of Artificial Sequence: Synthetic oligonucleotide
  Antisense strand to SEQ ID NO: 6578
uguguuaaccuauuugcac

SEQ ID NO: 6580 - RNA, 19 nt, Artificial Sequence
  Description of Artificial Sequence: Synthetic oligonucleotide
  Sense strand starting at position 3431 of SEQ ID NO: 33
gucagucuugucgcgaacu

SEQ ID NO: 6581 - RNA, 19 nt, Artificial Sequence
  Description of Artificial Sequence: Synthetic oligonucleotide
  Antisense strand to SEQ ID NO: 6580
aguucgcgacaagacugac

SEQ ID NO: 6582 - RNA, 19 nt, Artificial Sequence
  Description of Artificial Sequence: Synthetic oligonucleotide
  Sense strand starting at position 3608 of SEQ ID NO: 33
cuaugaagucaguacuaug

SEQ ID NO: 6583 - RNA, 19 nt, Artificial Sequence
  Description of Artificial Sequence: Synthetic oligonucleotide
  Antisense strand to SEQ ID NO: 6582
cauaguacugacuucauag

SEQ ID NO: 6584 - RNA, 19 nt, Artificial Sequence
  Description of Artificial Sequence: Synthetic oligonucleotide
  Sense strand starting at position 3729 of SEQ ID NO: 33
cagacuuggcauugagaaa

SEQ ID NO: 6585 - RNA, 19 nt, Artificial Sequence
  Description of Artificial Sequence: Synthetic oligonucleotide
  Antisense strand to SEQ ID NO: 6584
uuucucaaugccaagucug

SEQ ID NO: 6586 - RNA, 19 nt, Artificial Sequence
  Description of Artificial Sequence: Synthetic oligonucleotide
  Sense strand starting at position 3899 of SEQ ID NO: 33
cuuacuaagucuuugagaa

SEQ ID NO: 6587 - RNA, 19 nt, Artificial Sequence
  Description of Artificial Sequence: Synthetic oligonucleotide
  Antisense strand to SEQ ID NO: 6586
uucucaaagacuuaguaag

SEQ ID NO: 6588 - RNA, 19 nt, Artificial Sequence
  Description of Artificial Sequence: Synthetic oligonucleotide
  Sense strand starting at position 3900 of SEQ ID NO: 33
uuacuaagucuuugagaau

SEQ ID NO: 6589 - RNA, 19 nt, Artificial Sequence
  Description of Artificial Sequence: Synthetic oligonucleotide
  Antisense strand to SEQ ID NO: 6588
auucucaaagacuuaguaa

SEQ ID NO: 6590 - RNA, 19 nt, Artificial Sequence
  Description of Artificial Sequence: Synthetic oligonucleotide
  Sense strand starting at position 3906 of SEQ ID NO: 33
agucuuugagaauaguugu

SEQ ID NO: 6591 - RNA, 19 nt, Artificial Sequence
  Description of Artificial Sequence: Synthetic oligonucleotide
  Antisense strand to SEQ ID NO: 6590
acaacuauucucaaagacu

SEQ ID NO: 6592 - RNA, 19 nt, Artificial Sequence
  Description of Artificial Sequence: Synthetic oligonucleotide
  Sense strand starting at position 3909 of SEQ ID NO: 33
cuuugagaauaguugugaa

SEQ ID NO: 6593 - RNA, 19 nt, Artificial Sequence
  Description of Artificial Sequence: Synthetic oligonucleotide
  Antisense strand to SEQ ID NO: 6592
uucacaacuauucucaaag

SEQ ID NO: 6594 - RNA, 19 nt, Artificial Sequence
  Description of Artificial Sequence: Synthetic oligonucleotide
  Sense strand starting at position 3950 of SEQ ID NO: 33
ccaaguggcaaugagaguu

SEQ ID NO: 6595 - RNA, 19 nt, Artificial Sequence
  Description of Artificial Sequence: Synthetic oligonucleotide
  Antisense strand to SEQ ID NO: 6594
aacucucauugccacuugg

SEQ ID NO: 6596 - RNA, 19 nt, Artificial Sequence
  Description of Artificial Sequence: Synthetic oligonucleotide
  Sense strand starting at position 277 of SEQ ID NO: 34
gugugauaauaaguagaug

SEQ ID NO: 6597 - RNA, 19 nt, Artificial Sequence
  Description of Artificial Sequence: Synthetic oligonucleotide
  Antisense strand to SEQ ID NO: 6596
caucuacuuauuaucacac

SEQ ID NO: 6598 - RNA, 19 nt, Artificial Sequence
  Description of Artificial Sequence: Synthetic oligonucleotide
  Sense strand starting at position 432 of SEQ ID NO: 34
gagaauaccgauugauuac

SEQ ID NO: 6599 - RNA, 19 nt, Artificial Sequence
  Description of Artificial Sequence: Synthetic oligonucleotide
  Antisense strand to SEQ ID NO: 6598
guaaucaaucgguauucuc

SEQ ID NO: 6600 - RNA, 19 nt, Artificial Sequence
  Description of Artificial Sequence: Synthetic oligonucleotide
  Sense strand starting at position 438 of SEQ ID NO: 34
accgauugauuacuuacaa

SEQ ID NO: 6601 - RNA, 19 nt, Artificial Sequence
  Description of Artificial Sequence: Synthetic oligonucleotide
  Antisense strand to SEQ ID NO: 6600
uuguaaguaaucaaucggu

SEQ ID NO: 6602 - RNA, 19 nt, Artificial Sequence
  Description of Artificial Sequence: Synthetic oligonucleotide
  Sense strand starting at position 439 of SEQ ID NO: 34
ccgauugauuacuuacaau

SEQ ID NO: 6603 - RNA, 19 nt, Artificial Sequence
  Description of Artificial Sequence: Synthetic oligonucleotide
  Antisense strand to SEQ ID NO: 6602
auuguaaguaaucaaucgg

SEQ ID NO: 6604 - RNA, 19 nt, Artificial Sequence
  Description of Artificial Sequence: Synthetic oligonucleotide
  Sense strand starting at position 495 of SEQ ID NO: 34
gagucagaggguugaaaug

SEQ ID NO: 6605 - RNA, 19 nt, Artificial Sequence
  Description of Artificial Sequence: Synthetic oligonucleotide
  Antisense strand to SEQ ID NO: 6604
cauuucaacccucugacuc

SEQ ID NO: 6606 - RNA, 19 nt, Artificial Sequence
  Description of Artificial Sequence: Synthetic oligonucleotide
  Sense strand starting at position 501 of SEQ ID NO: 34
gaggguugaaaugguuguu

SEQ ID NO: 6607 - RNA, 19 nt, Artificial Sequence
  Description of Artificial Sequence: Synthetic oligonucleotide
  Antisense strand to SEQ ID NO: 6606
aacaaccauuucaacccuc

SEQ ID NO: 6608 - RNA, 19 nt, Artificial Sequence
  Description of Artificial Sequence: Synthetic oligonucleotide
  Sense strand starting at position 571 of SEQ ID NO: 34
ccauuaugugcaggaggaa

SEQ ID NO: 6609 - RNA, 19 nt, Artificial Sequence
  Description of Artificial Sequence: Synthetic oligonucleotide
  Antisense strand to SEQ ID NO: 6608
uuccuccugcacauaaugg

SEQ ID NO: 6610 - RNA, 19 nt, Artificial Sequence
  Description of Artificial Sequence: Synthetic oligonucleotide
  Sense strand starting at position 604 of SEQ ID NO: 34
gcaacuuuaguugaaguga

SEQ ID NO: 6611 - RNA, 19 nt, Artificial Sequence
  Description of Artificial Sequence: Synthetic oligonucleotide
  Antisense strand to SEQ ID NO: 6610
ucacuucaacuaaaguugc

SEQ ID NO: 6612 - RNA, 19 nt, Artificial Sequence
  Description of Artificial Sequence: Synthetic oligonucleotide
  Sense strand starting at position 683 of SEQ ID NO: 34
ggcauuccaggaggguaua

SEQ ID NO: 6613 - RNA, 19 nt, Artificial Sequence
  Description of Artificial Sequence: Synthetic oligonucleotide
  Antisense strand to SEQ ID NO: 6612
uauacccuccuggaaugcc

SEQ ID NO: 6614 - RNA, 19 nt, Artificial Sequence
  Description of Artificial Sequence: Synthetic oligonucleotide
  Sense strand starting at position 695 of SEQ ID NO: 34
ggguauauggugugaacau

SEQ ID NO: 6615 - RNA, 19 nt, Artificial Sequence
  Description of Artificial Sequence: Synthetic oligonucleotide
  Antisense strand to SEQ ID NO: 6614
auguucacaccauauaccc

SEQ ID NO: 6616 - RNA, 19 nt, Artificial Sequence
  Description of Artificial Sequence: Synthetic oligonucleotide
  Sense strand starting at position 706 of SEQ ID NO: 34
gugaacaugccaugaaaga

SEQ ID NO: 6617 - RNA, 19 nt, Artificial Sequence
  Description of Artificial Sequence: Synthetic oligonucleotide
  Antisense strand to SEQ ID NO: 6616
ucuuucauggcauguucac

SEQ ID NO: 6618 - RNA, 19 nt, Artificial Sequence
  Description of Artificial Sequence: Synthetic oligonucleotide
  Sense strand starting at position 829 of SEQ ID NO: 34
ggugguguacuuuauaaau

SEQ ID NO: 6619 - RNA, 19 nt, Artificial Sequence
  Description of Artificial Sequence: Synthetic oligonucleotide
  Antisense strand to SEQ ID NO: 6618
auuuauaaaguacaccacc

SEQ ID NO: 6620 - RNA, 19 nt, Artificial Sequence
  Description of Artificial Sequence: Synthetic oligonucleotide
  Sense strand starting at position 857 of SEQ ID NO: 34
ggaucaguggauuaauguu

SEQ ID NO: 6621 - RNA, 19 nt, Artificial Sequence
  Description of Artificial Sequence: Synthetic oligonucleotide
  Antisense strand to SEQ ID NO: 6620
aacauuaauccacugaucc

SEQ ID NO: 6622 - RNA, 19 nt, Artificial Sequence
  Description of Artificial Sequence: Synthetic oligonucleotide
  Sense strand starting at position 913 of SEQ ID NO: 34
aggcaaagucuugaccauu

SEQ ID NO: 6623 - RNA, 19 nt, Artificial Sequence
  Description of Artificial Sequence: Synthetic oligonucleotide
  Antisense strand to SEQ ID NO: 6622
aauggucaagacuuugccu

SEQ ID NO: 6624 - RNA, 19 nt, Artificial Sequence
  Description of Artificial Sequence: Synthetic oligonucleotide
  Sense strand starting at position 919 of SEQ ID NO: 34
agucuugaccauugagaau

SEQ ID NO: 6625 - RNA, 19 nt, Artificial Sequence
  Description of Artificial Sequence: Synthetic oligonucleotide
  Antisense strand to SEQ ID NO: 6624
auucucaauggucaagacu

SEQ ID NO: 6626 - RNA, 19 nt, Artificial Sequence
  Description of Artificial Sequence: Synthetic oligonucleotide
  Sense strand starting at position 1067 of SEQ ID NO: 34
aaaguuauuccuggaguaa

SEQ ID NO: 6627 - RNA, 19 nt, Artificial Sequence
  Description of Artificial Sequence: Synthetic oligonucleotide
  Antisense strand to SEQ ID NO: 6626
uuacuccaggaauaacuuu

SEQ ID NO: 6628 - RNA, 19 nt, Artificial Sequence
  Description of Artificial Sequence: Synthetic oligonucleotide
  Sense strand starting at position 1356 of SEQ ID NO: 34
agggaaguacuaugguuaa

SEQ ID NO: 6629 - RNA, 19 nt, Artificial Sequence
  Description of Artificial Sequence: Synthetic oligonucleotide
  Antisense strand to SEQ ID NO: 6628
uuaaccauaguacuucccu

SEQ ID NO: 6630 - RNA, 19 nt, Artificial Sequence
  Description of Artificial Sequence: Synthetic oligonucleotide
  Sense strand starting at position 1359 of SEQ ID NO: 34
gaaguacuaugguuaaucu

SEQ ID NO: 6631 - RNA, 19 nt, Artificial Sequence
  Description of Artificial Sequence: Synthetic oligonucleotide
  Antisense strand to SEQ ID NO: 6630
agauuaaccauaguacuuc

SEQ ID NO: 6632 - RNA, 19 nt, Artificial Sequence
  Description of Artificial Sequence: Synthetic oligonucleotide
  Sense strand starting at position 1723 of SEQ ID NO: 34
aagauuguugguggaggaa

SEQ ID NO: 6633 - RNA, 19 nt, Artificial Sequence
  Description of Artificial Sequence: Synthetic oligonucleotide
  Antisense strand to SEQ ID NO: 6632
uuccuccaccaacaaucuu

SEQ ID NO: 6634 - RNA, 19 nt, Artificial Sequence
  Description of Artificial Sequence: Synthetic oligonucleotide
  Sense strand starting at position 2561 of SEQ ID NO: 34
cucguuaucgcagccugaa

SEQ ID NO: 6635 - RNA, 19 nt, Artificial Sequence
  Description of Artificial Sequence: Synthetic oligonucleotide
  Antisense strand to SEQ ID NO: 6634
uucaggcugcgauaacgag

SEQ ID NO: 6636 - RNA, 19 nt, Artificial Sequence
  Description of Artificial Sequence: Synthetic oligonucleotide
  Sense strand starting at position 2562 of SEQ ID NO: 34
ucguuaucgcagccugaag

SEQ ID NO: 6637 - RNA, 19 nt, Artificial Sequence
  Description of Artificial Sequence: Synthetic oligonucleotide
  Antisense strand to SEQ ID NO: 6636
cuucaggcugcgauaacga

SEQ ID NO: 6638 - RNA, 19 nt, Artificial Sequence
  Description of Artificial Sequence: Synthetic oligonucleotide
  Sense strand starting at position 2580 of SEQ ID NO: 34
gugcgugauggagaagaaa

SEQ ID NO: 6639 - RNA, 19 nt, Artificial Sequence
  Description of Artificial Sequence: Synthetic oligonucleotide
  Antisense strand to SEQ ID NO: 6638
uuucuucuccaucacgcac

SEQ ID NO: 6640 - RNA, 19 nt, Artificial Sequence
  Description of Artificial Sequence: Synthetic oligonucleotide
  Sense strand starting at position 2827 of SEQ ID NO: 34
agagcagaauuguuucuaa

SEQ ID NO: 6641 - RNA, 19 nt, Artificial Sequence
  Description of Artificial Sequence: Synthetic oligonucleotide
  Antisense strand to SEQ ID NO: 6640
uuagaaacaauucugcucu

SEQ ID NO: 6642 - RNA, 19 nt, Artificial Sequence
  Description of Artificial Sequence: Synthetic oligonucleotide
  Sense strand starting at position 2830 of SEQ ID NO: 34
gcagaauuguuucuaacua

SEQ ID NO: 6643 - RNA, 19 nt, Artificial Sequence
  Description of Artificial Sequence: Synthetic oligonucleotide
  Antisense strand to SEQ ID NO: 6642
uaguuagaaacaauucugc

SEQ ID NO: 6644 - RNA, 19 nt, Artificial Sequence
  Description of Artificial Sequence: Synthetic oligonucleotide
  Sense strand starting at position 2900 of SEQ ID NO: 34
ugcagaucgcgagacaaca

SEQ ID NO: 6645 - RNA, 19 nt, Artificial Sequence
  Description of Artificial Sequence: Synthetic oligonucleotide
  Antisense strand to SEQ ID NO: 6644
uguugucucgcgaucugca

SEQ ID NO: 6646 - RNA, 19 nt, Artificial Sequence
  Description of Artificial Sequence: Synthetic oligonucleotide
  Sense strand starting at position 3059 of SEQ ID NO: 34
ucacuaauaugcucaaggu

SEQ ID NO: 6647 - RNA, 19 nt, Artificial Sequence
  Description of Artificial Sequence: Synthetic oligonucleotide
  Antisense strand to SEQ ID NO: 6646
accuugagcauauuaguga

SEQ ID NO: 6648 - RNA, 19 nt, Artificial Sequence
  Description of Artificial Sequence: Synthetic oligonucleotide
  Sense strand starting at position 3273 of SEQ ID NO: 34
accucaauauggcuguuaa

SEQ ID NO: 6649 - RNA, 19 nt, Artificial Sequence
  Description of Artificial Sequence: Synthetic oligonucleotide
  Antisense strand to SEQ ID NO: 6648
uuaacagccauauugaggu

SEQ ID NO: 6650 - RNA, 19 nt, Artificial Sequence
  Description of Artificial Sequence: Synthetic oligonucleotide
  Sense strand starting at position 3412 of SEQ ID NO: 34
gaaagugacucauuguaau

SEQ ID NO: 6651 - RNA, 19 nt, Artificial Sequence
  Description of Artificial Sequence: Synthetic oligonucleotide
  Antisense strand to SEQ ID NO: 6650
auuacaaugagucacuuuc

SEQ ID NO: 6652 - RNA, 19 nt, Artificial Sequence
  Description of Artificial Sequence: Synthetic oligonucleotide
  Sense strand starting at position 3530 of SEQ ID NO: 34
gucuaugaucuugagcaca

SEQ ID NO: 6653 - RNA, 19 nt, Artificial Sequence
  Description of Artificial Sequence: Synthetic oligonucleotide
  Antisense strand to SEQ ID NO: 6652
ugugcucaagaucauagac

SEQ ID NO: 6654 - RNA, 19 nt, Artificial Sequence
  Description of Artificial Sequence: Synthetic oligonucleotide
  Sense strand starting at position 3532 of SEQ ID NO: 34
cuaugaucuugagcacauu

SEQ ID NO: 6655 - RNA, 19 nt, Artificial Sequence
  Description of Artificial Sequence: Synthetic oligonucleotide
  Antisense strand to SEQ ID NO: 6654
aaugugcucaagaucauag

SEQ ID NO: 6656 - RNA, 19 nt, Artificial Sequence
  Description of Artificial Sequence: Synthetic oligonucleotide
  Sense strand starting at position 3535 of SEQ ID NO: 34
ugaucuugagcacauuacu

SEQ ID NO: 6657 - RNA, 19 nt, Artificial Sequence
  Description of Artificial Sequence: Synthetic oligonucleotide
  Antisense strand to SEQ ID NO: 6656
aguaaugugcucaagauca

SEQ ID NO: 6658 - RNA, 19 nt, Artificial Sequence
  Description of Artificial Sequence: Synthetic oligonucleotide
  Sense strand starting at position 3617 of SEQ ID NO: 34
ggucuuugucaggauugag

SEQ ID NO: 6659 - RNA, 19 nt, Artificial Sequence
  Description of Artificial Sequence: Synthetic oligonucleotide
  Antisense strand to SEQ ID NO: 6658
cucaauccugacaaagacc

SEQ ID NO: 6660 - RNA, 19 nt, Artificial Sequence
  Description of Artificial Sequence: Synthetic oligonucleotide
  Sense strand starting at position 3620 of SEQ ID NO: 34
cuuugucaggauugaguga

SEQ ID NO: 6661 - RNA, 19 nt, Artificial Sequence
  Description of Artificial Sequence: Synthetic oligonucleotide
  Antisense strand to SEQ ID NO: 6660
ucacucaauccugacaaag

SEQ ID NO: 6662 - RNA, 19 nt, Artificial Sequence
  Description of Artificial Sequence: Synthetic oligonucleotide
  Sense strand starting at position 3699 of SEQ ID NO: 34
agcuauuaccguguugcca

SEQ ID NO: 6663 - RNA, 19 nt, Artificial Sequence
  Description of Artificial Sequence: Synthetic oligonucleotide
  Antisense strand to SEQ ID NO: 6662
uggcaacacgguaauagcu

SEQ ID NO: 6664 - RNA, 19 nt, Artificial Sequence
  Description of Artificial Sequence: Synthetic oligonucleotide
  Sense strand starting at position 3700 of SEQ ID NO: 34
gcuauuaccguguugccau

SEQ ID NO: 6665 - RNA, 19 nt, Artificial Sequence
  Description of Artificial Sequence: Synthetic oligonucleotide
  Antisense strand to SEQ ID NO: 6664
auggcaacacgguaauagc

SEQ ID NO: 6666 - RNA, 19 nt, Artificial Sequence
  Description of Artificial Sequence: Synthetic oligonucleotide
  Sense strand starting at position 3753 of SEQ ID NO: 34
caggauugaguccagguuu

SEQ ID NO: 6667 - RNA, 19 nt, Artificial Sequence
  Description of Artificial Sequence: Synthetic oligonucleotide
  Antisense strand to SEQ ID NO: 6666
aaaccuggacucaauccug

SEQ ID NO: 6668 - RNA, 19 nt, Artificial Sequence
  Description of Artificial Sequence: Synthetic oligonucleotide
  Sense strand starting at position 3797 of SEQ ID NO: 34
uugcgagcuggcucuaacu

SEQ ID NO: 6669 - RNA, 19 nt, Artificial Sequence
  Description of Artificial Sequence: Synthetic oligonucleotide
  Antisense strand to SEQ ID NO: 6668
aguuagagccagcucgcaa

SEQ ID NO: 6670 - RNA, 19 nt, Artificial Sequence
  Description of Artificial Sequence: Synthetic oligonucleotide
  Sense strand starting at position 3864 of SEQ ID NO: 34
gugaacuaguucucugaag

SEQ ID NO: 6671 - RNA, 19 nt, Artificial Sequence
  Description of Artificial Sequence: Synthetic oligonucleotide
  Antisense strand to SEQ ID NO: 6670
cuucagagaacuaguucac

SEQ ID NO: 6672 - RNA, 19 nt, Artificial Sequence
  Description of Artificial Sequence: Synthetic oligonucleotide
  Sense strand starting at position 3865 of SEQ ID NO: 34
ugaacuaguucucugaagu

SEQ ID NO: 6673 - RNA, 19 nt, Artificial Sequence
  Description of Artificial Sequence: Synthetic oligonucleotide
  Antisense strand to SEQ ID NO: 6672
acuucagagaacuaguuca

SEQ ID NO: 6674 - RNA, 19 nt, Artificial Sequence
  Description of Artificial Sequence: Synthetic oligonucleotide
  Sense strand starting at position 3866 of SEQ ID NO: 34
gaacuaguucucugaagug

SEQ ID NO: 6675 - RNA, 19 nt, Artificial Sequence
  Description of Artificial Sequence: Synthetic oligonucleotide
  Antisense strand to SEQ ID NO: 6674
cacuucagagaacuaguuc

SEQ ID NO: 6676 - RNA, 19 nt, Artificial Sequence
  Description of Artificial Sequence: Synthetic oligonucleotide
  Sense strand starting at position 20 of SEQ ID NO: 36
gagaauaccgauugauuac

SEQ ID NO: 6677 - RNA, 19 nt, Artificial Sequence
  Description of Artificial Sequence: Synthetic oligonucleotide
  Antisense strand to SEQ ID NO: 6676
guaaucaaucgguauucuc

SEQ ID NO: 6678 - RNA, 19 nt, Artificial Sequence
  Description of Artificial Sequence: Synthetic oligonucleotide
  Sense strand starting at position 26 of SEQ ID NO: 36
accgauugauuacuuacaa

SEQ ID NO: 6679 - RNA, 19 nt, Artificial Sequence
  Description of Artificial Sequence: Synthetic oligonucleotide
  Antisense strand to SEQ ID NO: 6678
uuguaaguaaucaaucggu

SEQ ID NO: 6680 - RNA, 19 nt, Artificial Sequence
  Description of Artificial Sequence: Synthetic oligonucleotide
  Sense strand starting at position 27 of SEQ ID NO: 36
ccgauugauuacuuacaau

SEQ ID NO: 6681 - RNA, 19 nt, Artificial Sequence
  Description of Artificial Sequence: Synthetic oligonucleotide
  Antisense strand to SEQ ID NO: 6680
auuguaaguaaucaaucgg

SEQ ID NO: 6682 - RNA, 19 nt, Artificial Sequence
  Description of Artificial Sequence: Synthetic oligonucleotide
  Sense strand starting at position 83 of SEQ ID NO: 36
gagucagaggguugaaaug

SEQ ID NO: 6683 - RNA, 19 nt, Artificial Sequence
  Description of Artificial Sequence: Synthetic oligonucleotide
  Antisense strand to SEQ ID NO: 6682
cauuucaacccucugacuc

SEQ ID NO: 6684 - RNA, 19 nt, Artificial Sequence
  Description of Artificial Sequence: Synthetic oligonucleotide
  Sense strand starting at position 159 of SEQ ID NO: 36
ccauuaugugcaggaggaa

SEQ ID NO: 6685 - RNA, 19 nt, Artificial Sequence
  Description of Artificial Sequence: Synthetic oligonucleotide
  Antisense strand to SEQ ID NO: 6684
uuccuccugcacauaaugg

SEQ ID NO: 6686 - RNA, 19 nt, Artificial Sequence
  Description of Artificial Sequence: Synthetic oligonucleotide
  Sense strand starting at position 192 of SEQ ID NO: 36
gcaacuuuaguugaaguga

SEQ ID NO: 6687 - RNA, 19 nt, Artificial Sequence
  Description of Artificial Sequence: Synthetic oligonucleotide
  Antisense strand to SEQ ID NO: 6686
ucacuucaacuaaaguugc

SEQ ID NO: 6688 - RNA, 19 nt, Artificial Sequence
  Description of Artificial Sequence: Synthetic oligonucleotide
  Sense strand starting at position 271 of SEQ ID NO: 36
ggcauuccaggaggguaua

SEQ ID NO: 6689 - RNA, 19 nt, Artificial Sequence
  Description of Artificial Sequence: Synthetic oligonucleotide
  Antisense strand to SEQ ID NO: 6688
uauacccuccuggaaugcc

SEQ ID NO: 6690 - RNA, 19 nt, Artificial Sequence
  Description of Artificial Sequence: Synthetic oligonucleotide
  Sense strand starting at position 283 of SEQ ID NO: 36
ggguauauggugugaacau

SEQ ID NO: 6691 - RNA, 19 nt, Artificial Sequence
  Description of Artificial Sequence: Synthetic oligonucleotide
  Antisense strand to SEQ ID NO: 6690
auguucacaccauauaccc

SEQ ID NO: 6692 - RNA, 19 nt, Artificial Sequence
  Description of Artificial Sequence: Synthetic oligonucleotide
  Sense strand starting at position 294 of SEQ ID NO: 36
gugaacaugccaugaaaga

SEQ ID NO: 6693 - RNA, 19 nt, Artificial Sequence
  Description of Artificial Sequence: Synthetic oligonucleotide
  Antisense strand to SEQ ID NO: 6692
ucuuucauggcauguucac

SEQ ID NO: 6694 - RNA, 19 nt, Artificial Sequence
  Description of Artificial Sequence: Synthetic oligonucleotide
  Sense strand starting at position 417 of SEQ ID NO: 36
ggugguguacuuuauaaau

SEQ ID NO: 6695 - RNA, 19 nt, Artificial Sequence
  Description of Artificial Sequence: Synthetic oligonucleotide
  Antisense strand to SEQ ID NO: 6694
auuuauaaaguacaccacc

SEQ ID NO: 6696 - RNA, 19 nt, Artificial Sequence
  Description of Artificial Sequence: Synthetic oligonucleotide
  Sense strand starting at position 445 of SEQ ID NO: 36
ggaucaguggauuaauguu

SEQ ID NO: 6697 - RNA, 19 nt, Artificial Sequence
  Description of Artificial Sequence: Synthetic oligonucleotide
  Antisense strand to SEQ ID NO: 6696
aacauuaauccacugaucc

SEQ ID NO: 6698 - RNA, 19 nt, Artificial Sequence
  Description of Artificial Sequence: Synthetic oligonucleotide
  Sense strand starting at position 501 of SEQ ID NO: 36
aggcaaagucuugaccauu

SEQ ID NO: 6699 - RNA, 19 nt, Artificial Sequence
  Description of Artificial Sequence: Synthetic oligonucleotide
  Antisense strand to SEQ ID NO: 6698
aauggucaagacuuugccu

SEQ ID NO: 6700 - RNA, 19 nt, Artificial Sequence
  Description of Artificial Sequence: Synthetic oligonucleotide
  Sense strand starting at position 507 of SEQ ID NO: 36
agucuugaccauugagaau

SEQ ID NO: 6701 - RNA, 19 nt, Artificial Sequence
  Description of Artificial Sequence: Synthetic oligonucleotide
  Antisense strand to SEQ ID NO: 6700
auucucaauggucaagacu

SEQ ID NO: 6702 - RNA, 19 nt, Artificial Sequence
  Description of Artificial Sequence: Synthetic oligonucleotide
  Sense strand starting at position 655 of SEQ ID NO: 36
aaaguuauuccuggaguaa

SEQ ID NO: 6703 - RNA, 19 nt, Artificial Sequence
  Description of Artificial Sequence: Synthetic oligonucleotide
  Antisense strand to SEQ ID NO: 6702
uuacuccaggaauaacuuu

SEQ ID NO: 6704 - RNA, 19 nt, Artificial Sequence
  Description of Artificial Sequence: Synthetic oligonucleotide
  Sense strand starting at position 944 of SEQ ID NO: 36
agggaaguacuaugguuaa

SEQ ID NO: 6705 - RNA, 19 nt, Artificial Sequence
  Description of Artificial Sequence: Synthetic oligonucleotide
  Antisense strand to SEQ ID NO: 6704
uuaaccauaguacuucccu

SEQ ID NO: 6706 - RNA, 19 nt, Artificial Sequence
  Description of Artificial Sequence: Synthetic oligonucleotide
  Sense strand starting at position 947 of SEQ ID NO: 36
gaaguacuaugguuaaucu

SEQ ID NO: 6707 - RNA, 19 nt, Artificial Sequence
  Description of Artificial Sequence: Synthetic oligonucleotide
  Antisense strand to SEQ ID NO: 6706
agauuaaccauaguacuuc

SEQ ID NO: 6708 - RNA, 19 nt, Artificial Sequence
  Description of Artificial Sequence: Synthetic oligonucleotide
  Sense strand starting at position 1311 of SEQ ID NO: 36
aagauuguugguggaggaa

SEQ ID NO: 6709 - RNA, 19 nt, Artificial Sequence
  Description of Artificial Sequence: Synthetic oligonucleotide
  Antisense strand to SEQ ID NO: 6708
uuccuccaccaacaaucuu

SEQ ID NO: 6710 - RNA, 19 nt, Artificial Sequence
  Description of Artificial Sequence: Synthetic oligonucleotide
  Sense strand starting at position 2149 of SEQ ID NO: 36
cucguuaucgcagccugaa

SEQ ID NO: 6711 - RNA, 19 nt, Artificial Sequence
  Description of Artificial Sequence: Synthetic oligonucleotide
  Antisense strand to SEQ ID NO: 6710
uucaggcugcgauaacgag

SEQ ID NO: 6712 - RNA, 19 nt, Artificial Sequence
  Description of Artificial Sequence: Synthetic oligonucleotide
  Sense strand starting at position 2150 of SEQ ID NO: 36
ucguuaucgcagccugaag

SEQ ID NO: 6713 - RNA, 19 nt, Artificial Sequence
  Description of Artificial Sequence: Synthetic oligonucleotide
  Antisense strand to SEQ ID NO: 6712
cuucaggcugcgauaacga

SEQ ID NO: 6714 - RNA, 19 nt, Artificial Sequence
  Description of Artificial Sequence: Synthetic oligonucleotide
  Sense strand starting at position 2168 of SEQ ID NO: 36
gugcgugauggagaagaaa

SEQ ID NO: 6715 - RNA, 19 nt, Artificial Sequence
  Description of Artificial Sequence: Synthetic oligonucleotide
  Antisense strand to SEQ ID NO: 6714
uuucuucuccaucacgcac

SEQ ID NO: 6716 - RNA, 19 nt, Artificial Sequence
  Description of Artificial Sequence: Synthetic oligonucleotide
  Sense strand starting at position 2415 of SEQ ID NO: 36
agagcagaauuguuucuaa

SEQ ID NO: 6717 - RNA, 19 nt, Artificial Sequence
  Description of Artificial Sequence: Synthetic oligonucleotide
  Antisense strand to SEQ ID NO: 6716
uuagaaacaauucugcucu

SEQ ID NO: 6718 - RNA, 19 nt, Artificial Sequence
  Description of Artificial Sequence: Synthetic oligonucleotide
  Sense strand starting at position 2488 of SEQ ID NO: 36
ugcagaucgcgagacaaca

SEQ ID NO: 6719 - RNA, 19 nt, Artificial Sequence
  Description of Artificial Sequence: Synthetic oligonucleotide
  Antisense strand to SEQ ID NO: 6718
uguugucucgcgaucugca

SEQ ID NO: 6720 - RNA, 19 nt, Artificial Sequence
  Description of Artificial Sequence: Synthetic oligonucleotide
  Sense strand starting at position 3000 of SEQ ID NO: 36
gaaagugacucauuguaau

SEQ ID NO: 6721 - RNA, 19 nt, Artificial Sequence
  Description of Artificial Sequence: Synthetic oligonucleotide
  Antisense strand to SEQ ID NO: 6720
auuacaaugagucacuuuc

SEQ ID NO: 6722 - RNA, 19 nt, Artificial Sequence
  Description of Artificial Sequence: Synthetic oligonucleotide
  Sense strand starting at position 3118 of SEQ ID NO: 36
gucuaugaucuugagcaca

SEQ ID NO: 6723 - RNA, 19 nt, Artificial Sequence
  Description of Artificial Sequence: Synthetic oligonucleotide
  Antisense strand to SEQ ID NO: 6722
ugugcucaagaucauagac

SEQ ID NO: 6724 - RNA, 19 nt, Artificial Sequence
  Description of Artificial Sequence: Synthetic oligonucleotide
  Sense strand starting at position 3120 of SEQ ID NO: 36
cuaugaucuugagcacauu

SEQ ID NO: 6725 - RNA, 19 nt, Artificial Sequence
  Description of Artificial Sequence: Synthetic oligonucleotide
  Antisense strand to SEQ ID NO: 6724
aaugugcucaagaucauag

SEQ ID NO: 6726 - RNA, 19 nt, Artificial Sequence
  Description of Artificial Sequence: Synthetic oligonucleotide
  Sense strand starting at position 3123 of SEQ ID NO: 36
ugaucuugagcacauuacu

SEQ ID NO: 6727 - RNA, 19 nt, Artificial Sequence
  Description of Artificial Sequence: Synthetic oligonucleotide
  Antisense strand to SEQ ID NO: 6726
aguaaugugcucaagauca

SEQ ID NO: 6728 - RNA, 19 nt, Artificial Sequence
  Description of Artificial Sequence: Synthetic oligonucleotide
  Sense strand starting at position 3205 of SEQ ID NO: 36
ggucuuugucaggauugag

SEQ ID NO: 6729 - RNA, 19 nt, Artificial Sequence
  Description of Artificial Sequence: Synthetic oligonucleotide
  Antisense strand to SEQ ID NO: 6728
cucaauccugacaaagacc

SEQ ID NO: 6730 - RNA, 19 nt, Artificial Sequence
  Description of Artificial Sequence: Synthetic oligonucleotide
  Sense strand starting at position 3208 of SEQ ID NO: 36
cuuugucaggauugaguga

SEQ ID NO: 6731 - RNA, 19 nt, Artificial Sequence
  Description of Artificial Sequence: Synthetic oligonucleotide
  Antisense strand to SEQ ID NO: 6730
ucacucaauccugacaaag

SEQ ID NO: 6732 - RNA, 19 nt, Artificial Sequence
  Description of Artificial Sequence: Synthetic oligonucleotide
  Sense strand starting at position 3287 of SEQ ID NO: 36
agcuauuaccguguugcca

SEQ ID NO: 6733 - RNA, 19 nt, Artificial Sequence
  Description of Artificial Sequence: Synthetic oligonucleotide
  Antisense strand to SEQ ID NO: 6732
uggcaacacgguaauagcu

SEQ ID NO: 6734 - RNA, 19 nt, Artificial Sequence
  Description of Artificial Sequence: Synthetic oligonucleotide
  Sense strand starting at position 3288 of SEQ ID NO: 36
gcuauuaccguguugccau

SEQ ID NO: 6735 - RNA, 19 nt, Artificial Sequence
  Description of Artificial Sequence: Synthetic oligonucleotide
  Antisense strand to SEQ ID NO: 6734
auggcaacacgguaauagc

SEQ ID NO: 6736 - RNA, 19 nt, Artificial Sequence
  Description of Artificial Sequence: Synthetic oligonucleotide
  Sense strand starting at position 3341 of SEQ ID NO: 36
caggauugaguccagguuu

SEQ ID NO: 6737 - RNA, 19 nt, Artificial Sequence
  Description of Artificial Sequence: Synthetic oligonucleotide
  Antisense strand to SEQ ID NO: 6736
aaaccuggacucaauccug

SEQ ID NO: 6738 - RNA, 19 nt, Artificial Sequence
  Description of Artificial Sequence: Synthetic oligonucleotide
  Sense strand starting at position 3385 of SEQ ID NO: 36
uugcgagcuggcucuaacu

SEQ ID NO: 6739 - RNA, 19 nt, Artificial Sequence
  Description of Artificial Sequence: Synthetic oligonucleotide
  Antisense strand to SEQ ID NO: 6738
aguuagagccagcucgcaa

SEQ ID NO: 6740 - RNA, 19 nt, Artificial Sequence
  Description of Artificial Sequence: Synthetic oligonucleotide
  Sense strand starting at position 3452 of SEQ ID NO: 36
gugaacuaguucucugaag

SEQ ID NO: 6741 - RNA, 19 nt, Artificial Sequence
  Description of Artificial Sequence: Synthetic oligonucleotide
  Antisense strand to SEQ ID NO: 6740
cuucagagaacuaguucac

SEQ ID NO: 6742 - RNA, 19 nt, Artificial Sequence
  Description of Artificial Sequence: Synthetic oligonucleotide
  Sense strand starting at position 3453 of SEQ ID NO: 36
ugaacuaguucucugaagu

SEQ ID NO: 6743 - RNA, 19 nt, Artificial Sequence
  Description of Artificial Sequence: Synthetic oligonucleotide
  Antisense strand to SEQ ID NO: 6742
acuucagagaacuaguuca

SEQ ID NO: 6744 - RNA, 19 nt, Artificial Sequence
  Description of Artificial Sequence: Synthetic oligonucleotide
  Sense strand starting at position 3454 of SEQ ID NO: 36
gaacuaguucucugaagug

SEQ ID NO: 6745 - RNA, 19 nt, Artificial Sequence
  Description of Artificial Sequence: Synthetic oligonucleotide
  Antisense strand to SEQ ID NO: 6744
cacuucagagaacuaguuc

SEQ ID NO: 6746 - RNA, 19 nt, Artificial Sequence
  Description of Artificial Sequence: Synthetic oligonucleotide
  Sense strand starting at position 3584 of SEQ ID NO: 36
ugacuuuggccucagacaa

SEQ ID NO: 6747 - RNA, 19 nt, Artificial Sequence
  Description of Artificial Sequence: Synthetic oligonucleotide
  Antisense strand to SEQ ID NO: 6746
uugucugaggccaaaguca

SEQ ID NO: 6748 - RNA, 19 nt, Artificial Sequence
  Description of Artificial Sequence: Synthetic oligonucleotide
  Sense strand starting at position 3642 of SEQ ID NO: 36
cuguaugaccuuugguaaa

SEQ ID NO: 6749 - RNA, 19 nt, Artificial Sequence
  Description of Artificial Sequence: Synthetic oligonucleotide
  Antisense strand to SEQ ID NO: 6748
uuuaccaaaggucauacag

SEQ ID NO: 6750 - RNA, 19 nt, Artificial Sequence
  Description of Artificial Sequence: Synthetic oligonucleotide
  Sense strand starting at position 3644 of SEQ ID NO: 36
guaugaccuuugguaaauu

SEQ ID NO: 6751 - RNA, 19 nt, Artificial Sequence
  Description of Artificial Sequence: Synthetic oligonucleotide
  Antisense strand to SEQ ID NO: 6750
aauuuaccaaaggucauac

SEQ ID NO: 6752 - RNA, 19 nt, Artificial Sequence
  Description of Artificial Sequence: Synthetic oligonucleotide
  Sense strand starting at position 3693 of SEQ ID NO: 36
ggauuaaauuaugugaugu

SEQ ID NO: 6753 - RNA, 19 nt, Artificial Sequence
  Description of Artificial Sequence: Synthetic oligonucleotide
  Antisense strand to SEQ ID NO: 6752
acaucacauaauuuaaucc

SEQ ID NO: 6754 - RNA, 19 nt, Artificial Sequence
  Description of Artificial Sequence: Synthetic oligonucleotide
  Sense strand starting at position 3717 of SEQ ID NO: 36
gaguacuuagcacaguacu

SEQ ID NO: 6755 - RNA, 19 nt, Artificial Sequence
  Description of Artificial Sequence: Synthetic oligonucleotide
  Antisense strand to SEQ ID NO: 6754
aguacugugcuaaguacuc

SEQ ID NO: 6756 - RNA, 19 nt, Artificial Sequence
  Description of Artificial Sequence: Synthetic oligonucleotide
  Sense strand starting at position 16 of SEQ ID NO: 35
gcaacuuuaguugaaguga

SEQ ID NO: 6757 - RNA, 19 nt, Artificial Sequence
  Description of Artificial Sequence: Synthetic oligonucleotide
  Antisense strand to SEQ ID NO: 6756
ucacuucaacuaaaguugc

SEQ ID NO: 6758 - RNA, 19 nt, Artificial Sequence
  Description of Artificial Sequence: Synthetic oligonucleotide
  Sense strand starting at position 64 of SEQ ID NO: 35
acaggagauugauagauag

SEQ ID NO: 6759 - RNA, 19 nt, Artificial Sequence
  Description of Artificial Sequence: Synthetic oligonucleotide
  Antisense strand to SEQ ID NO: 6758
cuaucuaucaaucuccugu

SEQ ID NO: 6760 - RNA, 19 nt, Artificial Sequence
  Description of Artificial Sequence: Synthetic oligonucleotide
  Sense strand starting at position 95 of SEQ ID NO: 35
ggcauuccaggaggguaua

SEQ ID NO: 6761 - RNA, 19 nt, Artificial Sequence
  Description of Artificial Sequence: Synthetic oligonucleotide
  Antisense strand to SEQ ID NO: 6760
uauacccuccuggaaugcc

SEQ ID NO: 6762 - RNA, 19 nt, Artificial Sequence
  Description of Artificial Sequence: Synthetic oligonucleotide
  Sense strand starting at position 107 of SEQ ID NO: 35
ggguauauggugugaacau

SEQ ID NO: 6763 - RNA, 19 nt, Artificial Sequence
  Description of Artificial Sequence: Synthetic oligonucleotide
  Antisense strand to SEQ ID NO: 6762
auguucacaccauauaccc

SEQ ID NO: 6764 - RNA, 19 nt, Artificial Sequence
  Description of Artificial Sequence: Synthetic oligonucleotide
  Sense strand starting at position 118 of SEQ ID NO: 35
gugaacaugccaugaaaga

SEQ ID NO: 6765 - RNA, 19 nt, Artificial Sequence
  Description of Artificial Sequence: Synthetic oligonucleotide
  Antisense strand to SEQ ID NO: 6764
ucuuucauggcauguucac

SEQ ID NO: 6766 - RNA, 19 nt, Artificial Sequence
  Description of Artificial Sequence: Synthetic oligonucleotide
  Sense strand starting at position 241 of SEQ ID NO: 35
ggugguguacuuuauaaau

SEQ ID NO: 6767 - RNA, 19 nt, Artificial Sequence
  Description of Artificial Sequence: Synthetic oligonucleotide
  Antisense strand to SEQ ID NO: 6766
auuuauaaaguacaccacc

SEQ ID NO: 6768 - RNA, 19 nt, Artificial Sequence
  Description of Artificial Sequence: Synthetic oligonucleotide
  Sense strand starting at position 269 of SEQ ID NO: 35
ggaucaguggauuaauguu

SEQ ID NO: 6769 - RNA, 19 nt, Artificial Sequence
  Description of Artificial Sequence: Synthetic oligonucleotide
  Antisense strand to SEQ ID NO: 6768
aacauuaauccacugaucc

SEQ ID NO: 6770 - RNA, 19 nt, Artificial Sequence
  Description of Artificial Sequence: Synthetic oligonucleotide
  Sense strand starting at position 325 of SEQ ID NO: 35
aggcaaagucuugaccauu

SEQ ID NO: 6771 - RNA, 19 nt, Artificial Sequence
  Description of Artificial Sequence: Synthetic oligonucleotide
  Antisense strand to SEQ ID NO: 6770
aauggucaagacuuugccu

SEQ ID NO: 6772 - RNA, 19 nt, Artificial Sequence
  Description of Artificial Sequence: Synthetic oligonucleotide
  Sense strand starting at position 331 of SEQ ID NO: 35
agucuugaccauugagaau

SEQ ID NO: 6773 - RNA, 19 nt, Artificial Sequence
  Description of Artificial Sequence: Synthetic oligonucleotide
  Antisense strand to SEQ ID NO: 6772
auucucaauggucaagacu

SEQ ID NO: 6774 - RNA, 19 nt, Artificial Sequence
  Description of Artificial Sequence: Synthetic oligonucleotide
  Sense strand starting at position 479 of SEQ ID NO: 35
aaaguuauuccuggaguaa

SEQ ID NO: 6775 - RNA, 19 nt, Artificial Sequence
  Description of Artificial Sequence: Synthetic oligonucleotide
  Antisense strand to SEQ ID NO: 6774
uuacuccaggaauaacuuu

SEQ ID NO: 6776 - RNA, 19 nt, Artificial Sequence
  Description of Artificial Sequence: Synthetic oligonucleotide
  Sense strand starting at position 768 of SEQ ID NO: 35
agggaaguacuaugguuaa

SEQ ID NO: 6777 - RNA, 19 nt, Artificial Sequence
  Description of Artificial Sequence: Synthetic oligonucleotide
  Antisense strand to SEQ ID NO: 6776
uuaaccauaguacuucccu

SEQ ID NO: 6778 - RNA, 19 nt, Artificial Sequence
  Description of Artificial Sequence: Synthetic oligonucleotide
  Sense strand starting at position 771 of SEQ ID NO: 35
gaaguacuaugguuaaucu

SEQ ID NO: 6779 - RNA, 19 nt, Artificial Sequence
  Description of Artificial Sequence: Synthetic oligonucleotide
  Antisense strand to SEQ ID NO: 6778
agauuaaccauaguacuuc

SEQ ID NO: 6780 - RNA, 19 nt, Artificial Sequence
  Description of Artificial Sequence: Synthetic oligonucleotide
  Sense strand starting at position 821 of SEQ ID NO: 35
ugacaucugaaacggugua

SEQ ID NO: 6781 - RNA, 19 nt, Artificial Sequence
  Description of Artificial Sequence: Synthetic oligonucleotide
  Antisense strand to SEQ ID NO: 6780
uacaccguuucagauguca

SEQ ID NO: 6782 - RNA, 19 nt, Artificial Sequence
  Description of Artificial Sequence: Synthetic oligonucleotide
  Sense strand starting at position 1135 of SEQ ID NO: 35
aagauuguugguggaggaa

SEQ ID NO: 6783 - RNA, 19 nt, Artificial Sequence
  Description of Artificial Sequence: Synthetic oligonucleotide
  Antisense strand to SEQ ID NO: 6782
uuccuccaccaacaaucuu

SEQ ID NO: 6784 - RNA, 19 nt, Artificial Sequence
  Description of Artificial Sequence: Synthetic oligonucleotide
  Sense strand starting at position 1973 of SEQ ID NO: 35
cucguuaucgcagccugaa

SEQ ID NO: 6785 - RNA, 19 nt, Artificial Sequence
  Description of Artificial Sequence: Synthetic oligonucleotide
  Antisense strand to SEQ ID NO: 6784
uucaggcugcgauaacgag

SEQ ID NO: 6786 - RNA, 19 nt, Artificial Sequence
  Description of Artificial Sequence: Synthetic oligonucleotide
  Sense strand starting at position 1974 of SEQ ID NO: 35
ucguuaucgcagccugaag

SEQ ID NO: 6787 - RNA, 19 nt, Artificial Sequence
  Description of Artificial Sequence: Synthetic oligonucleotide
  Antisense strand to SEQ ID NO: 6786
cuucaggcugcgauaacga

SEQ ID NO: 6788 - RNA, 19 nt, Artificial Sequence
  Description of Artificial Sequence: Synthetic oligonucleotide
  Sense strand starting at position 1992 of SEQ ID NO: 35
gugcgugauggagaagaaa

SEQ ID NO: 6789 - RNA, 19 nt, Artificial Sequence
  Description of Artificial Sequence: Synthetic oligonucleotide
  Antisense strand to SEQ ID NO: 6788
uuucuucuccaucacgcac

SEQ ID NO: 6790 - RNA, 19 nt, Artificial Sequence
  Description of Artificial Sequence: Synthetic oligonucleotide
  Sense strand starting at position 2239 of SEQ ID NO: 35
agagcagaauuguuucuaa

SEQ ID NO: 6791 - RNA, 19 nt, Artificial Sequence
  Description of Artificial Sequence: Synthetic oligonucleotide
  Antisense strand to SEQ ID NO: 6790
uuagaaacaauucugcucu

SEQ ID NO: 6792 - RNA, 19 nt, Artificial Sequence
  Description of Artificial Sequence: Synthetic oligonucleotide
  Sense strand starting at position 2242 of SEQ ID NO: 35
gcagaauuguuucuaacua

SEQ ID NO: 6793 - RNA, 19 nt, Artificial Sequence
  Description of Artificial Sequence: Synthetic oligonucleotide
  Antisense strand to SEQ ID NO: 6792
uaguuagaaacaauucugc

SEQ ID NO: 6794 - RNA, 19 nt, Artificial Sequence
  Description of Artificial Sequence: Synthetic oligonucleotide
  Sense strand starting at position 2312 of SEQ ID NO: 35
ugcagaucgcgagacaaca

SEQ ID NO: 6795 - RNA, 19 nt, Artificial Sequence
  Description of Artificial Sequence: Synthetic oligonucleotide
  Antisense strand to SEQ ID NO: 6794
uguugucucgcgaucugca

SEQ ID NO: 6796 - RNA, 19 nt, Artificial Sequence
  Description of Artificial Sequence: Synthetic oligonucleotide
  Sense strand starting at position 2471 of SEQ ID NO: 35
ucacuaauaugcucaaggu

SEQ ID NO: 6797 - RNA, 19 nt, Artificial Sequence
  Description of Artificial Sequence: Synthetic oligonucleotide
  Antisense strand to SEQ ID NO: 6796
accuugagcauauuaguga

SEQ ID NO: 6798 - RNA, 19 nt, Artificial Sequence
  Description of Artificial Sequence: Synthetic oligonucleotide
  Sense strand starting at position 2685 of SEQ ID NO: 35
accucaauauggcuguuaa

SEQ ID NO: 6799 - RNA, 19 nt, Artificial Sequence
  Description of Artificial Sequence: Synthetic oligonucleotide
  Antisense strand to SEQ ID NO: 6798
uuaacagccauauugaggu

SEQ ID NO: 6800 - RNA, 19 nt, Artificial Sequence
  Description of Artificial Sequence: Synthetic oligonucleotide
  Sense strand starting at position 2824 of SEQ ID NO: 35
gaaagugacucauuguaau

SEQ ID NO: 6801 - RNA, 19 nt, Artificial Sequence
  Description of Artificial Sequence: Synthetic oligonucleotide
  Antisense strand to SEQ ID NO: 6800
auuacaaugagucacuuuc

SEQ ID NO: 6802 - RNA, 19 nt, Artificial Sequence
  Description of Artificial Sequence: Synthetic oligonucleotide
  Sense strand starting at position 2942 of SEQ ID NO: 35
gucuaugaucuugagcaca

SEQ ID NO: 6803 - RNA, 19 nt, Artificial Sequence
  Description of Artificial Sequence: Synthetic oligonucleotide
  Antisense strand to SEQ ID NO: 6802
ugugcucaagaucauagac

SEQ ID NO: 6804 - RNA, 19 nt, Artificial Sequence
  Description of Artificial Sequence: Synthetic oligonucleotide
  Sense strand starting at position 2944 of SEQ ID NO: 35
cuaugaucuugagcacauu

SEQ ID NO: 6805 - RNA, 19 nt, Artificial Sequence
  Description of Artificial Sequence: Synthetic oligonucleotide
  Antisense strand to SEQ ID NO: 6804
aaugugcucaagaucauag

SEQ ID NO: 6806 - RNA, 19 nt, Artificial Sequence
  Description of Artificial Sequence: Synthetic oligonucleotide
  Sense strand starting at position 2947 of SEQ ID NO: 35
ugaucuugagcacauuacu

SEQ ID NO: 6807 - RNA, 19 nt, Artificial Sequence
  Description of Artificial Sequence: Synthetic oligonucleotide
  Antisense strand to SEQ ID NO: 6806
aguaaugugcucaagauca

SEQ ID NO: 6808 - RNA, 19 nt, Artificial Sequence
  Description of Artificial Sequence: Synthetic oligonucleotide
  Sense strand starting at position 3029 of SEQ ID NO: 35
ggucuuugucaggauugag

SEQ ID NO: 6809 - RNA, 19 nt, Artificial Sequence
  Description of Artificial Sequence: Synthetic oligonucleotide
  Antisense strand to SEQ ID NO: 6808
cucaauccugacaaagacc

SEQ ID NO: 6810 - RNA, 19 nt, Artificial Sequence
  Description of Artificial Sequence: Synthetic oligonucleotide
  Sense strand starting at position 3032 of SEQ ID NO: 35
cuuugucaggauugaguga

SEQ ID NO: 6811 - RNA, 19 nt, Artificial Sequence
  Description of Artificial Sequence: Synthetic oligonucleotide
  Antisense strand to SEQ ID NO: 6810
ucacucaauccugacaaag

SEQ ID NO: 6812 - RNA, 19 nt, Artificial Sequence
  Description of Artificial Sequence: Synthetic oligonucleotide
  Sense strand starting at position 3111 of SEQ ID NO: 35
agcuauuaccguguugcca

SEQ ID NO: 6813 - RNA, 19 nt, Artificial Sequence
  Description of Artificial Sequence: Synthetic oligonucleotide
  Antisense strand to SEQ ID NO: 6812
uggcaacacgguaauagcu

SEQ ID NO: 6814 - RNA, 19 nt, Artificial Sequence
  Description of Artificial Sequence: Synthetic oligonucleotide
  Sense strand starting at position 3112 of SEQ ID NO: 35
gcuauuaccguguugccau

SEQ ID NO: 6815 - RNA, 19 nt, Artificial Sequence
  Description of Artificial Sequence: Synthetic oligonucleotide
  Antisense strand to SEQ ID NO: 6814
auggcaacacgguaauagc

SEQ ID NO: 6816 - RNA, 19 nt, Artificial Sequence
  Description of Artificial Sequence: Synthetic oligonucleotide
  Sense strand starting at position 3165 of SEQ ID NO: 35
caggauugaguccagguuu

SEQ ID NO: 6817 - RNA, 19 nt, Artificial Sequence
  Description of Artificial Sequence: Synthetic oligonucleotide
  Antisense strand to SEQ ID NO: 6816
aaaccuggacucaauccug

SEQ ID NO: 6818 - RNA, 19 nt, Artificial Sequence
  Description of Artificial Sequence: Synthetic oligonucleotide
  Sense strand starting at position 3209 of SEQ ID NO: 35
uugcgagcuggcucuaacu

SEQ ID NO: 6819 - RNA, 19 nt, Artificial Sequence
  Description of Artificial Sequence: Synthetic oligonucleotide
  Antisense strand to SEQ ID NO: 6818
aguuagagccagcucgcaa

SEQ ID NO: 6820 - RNA, 19 nt, Artificial Sequence
  Description of Artificial Sequence: Synthetic oligonucleotide
  Sense strand starting at position 3276 of SEQ ID NO: 35
gugaacuaguucucugaag

SEQ ID NO: 6821 - RNA, 19 nt, Artificial Sequence
  Description of Artificial Sequence: Synthetic oligonucleotide
  Antisense strand to SEQ ID NO: 6820
cuucagagaacuaguucac

SEQ ID NO: 6822 - RNA, 19 nt, Artificial Sequence
  Description of Artificial Sequence: Synthetic oligonucleotide
  Sense strand starting at position 3277 of SEQ ID NO: 35
ugaacuaguucucugaagu

SEQ ID NO: 6823 - RNA, 19 nt, Artificial Sequence
  Description of Artificial Sequence: Synthetic oligonucleotide
  Antisense strand to SEQ ID NO: 6822
acuucagagaacuaguuca

SEQ ID NO: 6824 - RNA, 19 nt, Artificial Sequence
  Description of Artificial Sequence: Synthetic oligonucleotide
  Sense strand starting at position 3278 of SEQ ID NO: 35
gaacuaguucucugaagug

SEQ ID NO: 6825 - RNA, 19 nt, Artificial Sequence
  Description of Artificial Sequence: Synthetic oligonucleotide
  Antisense strand to SEQ ID NO: 6824
cacuucagagaacuaguuc

SEQ ID NO: 6826 - RNA, 19 nt, Artificial Sequence
  Description of Artificial Sequence: Synthetic oligonucleotide
  Sense strand starting at position 3408 of SEQ ID NO: 35
ugacuuuggccucagacaa

SEQ ID NO: 6827 - RNA, 19 nt, Artificial Sequence
  Description of Artificial Sequence: Synthetic oligonucleotide
  Antisense strand to SEQ ID NO: 6826
uugucugaggccaaaguca

SEQ ID NO: 6828 - RNA, 19 nt, Artificial Sequence
  Description of Artificial Sequence: Synthetic oligonucleotide
  Sense strand starting at position 3466 of SEQ ID NO: 35
cuguaugaccuuugguaaa

SEQ ID NO: 6829 - RNA, 19 nt, Artificial Sequence
  Description of Artificial Sequence: Synthetic oligonucleotide
  Antisense strand to SEQ ID NO: 6828
uuuaccaaaggucauacag

SEQ ID NO: 6830 - RNA, 19 nt, Artificial Sequence
  Description of Artificial Sequence: Synthetic oligonucleotide
  Sense strand starting at position 3468 of SEQ ID NO: 35
guaugaccuuugguaaauu

SEQ ID NO: 6831 - RNA, 19 nt, Artificial Sequence
  Description of Artificial Sequence: Synthetic oligonucleotide
  Antisense strand to SEQ ID NO: 6830
aauuuaccaaaggucauac

SEQ ID NO: 6832 - RNA, 19 nt, Artificial Sequence
  Description of Artificial Sequence: Synthetic oligonucleotide
  Sense strand starting at position 3517 of SEQ ID NO: 35
ggauuaaauuaugugaugu

SEQ ID NO: 6833 - RNA, 19 nt, Artificial Sequence
  Description of Artificial Sequence: Synthetic oligonucleotide
  Antisense strand to SEQ ID NO: 6832
acaucacauaauuuaaucc

SEQ ID NO: 6834 - RNA, 19 nt, Artificial Sequence
  Description of Artificial Sequence: Synthetic oligonucleotide
  Sense strand starting at position 3541 of SEQ ID NO: 35
gaguacuuagcacaguacu

SEQ ID NO: 6835 - RNA, 19 nt, Artificial Sequence
  Description of Artificial Sequence: Synthetic oligonucleotide
  Antisense strand to SEQ ID NO: 6834
aguacugugcuaaguacuc

SEQ ID NO: 6836 - RNA, 19 nt, Artificial Sequence
  Description of Artificial Sequence: Synthetic oligonucleotide
  Sense strand starting at position 3955 of SEQ ID NO: 37
agagcacuugaccgagagu

SEQ ID NO: 6837 - RNA, 19 nt, Artificial Sequence
  Description of Artificial Sequence: Synthetic oligonucleotide
  Antisense strand to SEQ ID NO: 6836
acucucggucaagugcucu

SEQ ID NO: 6838 - RNA, 19 nt, Artificial Sequence
  Description of Artificial Sequence: Synthetic oligonucleotide
  Sense strand starting at position 3936 of SEQ ID NO: 37
gucauuuggugcggugaaa

SEQ ID NO: 6839 - RNA, 19 nt, Artificial Sequence
  Description of Artificial Sequence: Synthetic oligonucleotide
  Antisense strand to SEQ ID NO: 6838
uuucaccgcaccaaaugac

SEQ ID NO: 6840 - RNA, 19 nt, Artificial Sequence
  Description of Artificial Sequence: Synthetic oligonucleotide
  Sense strand starting at position 3935 of SEQ ID NO: 37
ggucauuuggugcggugaa

SEQ ID NO: 6841 - RNA, 19 nt, Artificial Sequence
  Description of Artificial Sequence: Synthetic oligonucleotide
  Antisense strand to SEQ ID NO: 6840
uucaccgcaccaaaugacc

SEQ ID NO: 6842 - RNA, 19 nt, Artificial Sequence
  Description of Artificial Sequence: Synthetic oligonucleotide
  Sense strand starting at position 3875 of SEQ ID NO: 37
ucaguccucuggcuugaca

SEQ ID NO: 6843 - RNA, 19 nt, Artificial Sequence
  Description of Artificial Sequence: Synthetic oligonucleotide
  Antisense strand to SEQ ID NO: 6842
ugucaagccagaggacuga

SEQ ID NO: 6844 - RNA, 19 nt, Artificial Sequence
  Description of Artificial Sequence: Synthetic oligonucleotide
  Sense strand starting at position 3831 of SEQ ID NO: 37
gggucuauuccagaaagcu

SEQ ID NO: 6845 - RNA, 19 nt, Artificial Sequence
  Description of Artificial Sequence: Synthetic oligonucleotide
  Antisense strand to SEQ ID NO: 6844
agcuuucuggaauagaccc

SEQ ID NO: 6846 - RNA, 19 nt, Artificial Sequence
  Description of Artificial Sequence: Synthetic oligonucleotide
  Sense strand starting at position 3829 of SEQ ID NO: 37
cagggucuauuccagaaag

SEQ ID NO: 6847 - RNA, 19 nt, Artificial Sequence
  Description of Artificial Sequence: Synthetic oligonucleotide
  Antisense strand to SEQ ID NO: 6846
cuuucuggaauagacccug

SEQ ID NO: 6848 - RNA, 19 nt, Artificial Sequence
  Description of Artificial Sequence: Synthetic oligonucleotide
  Sense strand starting at position 3699 of SEQ ID NO: 37
guaauuuguuucucaguuc

SEQ ID NO: 6849 - RNA, 19 nt, Artificial Sequence
  Description of Artificial Sequence: Synthetic oligonucleotide
  Antisense strand to SEQ ID NO: 6848
gaacugagaaacaaauuac

SEQ ID NO: 6850 - RNA, 19 nt, Artificial Sequence
  Description of Artificial Sequence: Synthetic oligonucleotide
  Sense strand starting at position 3698 of SEQ ID NO: 37
gguaauuuguuucucaguu

SEQ ID NO: 6851 - RNA, 19 nt, Artificial Sequence
  Description of Artificial Sequence: Synthetic oligonucleotide
  Antisense strand to SEQ ID NO: 6850
aacugagaaacaaauuacc

SEQ ID NO: 6852 - RNA, 19 nt, Artificial Sequence
  Description of Artificial Sequence: Synthetic oligonucleotide
  Sense strand starting at position 3695 of SEQ ID NO: 37
guagguaauuuguuucuca

SEQ ID NO: 6853 - RNA, 19 nt, Artificial Sequence
  Description of Artificial Sequence: Synthetic oligonucleotide
  Antisense strand to SEQ ID NO: 6852
ugagaaacaaauuaccuac

SEQ ID NO: 6854 - RNA, 19 nt, Artificial Sequence
  Description of Artificial Sequence: Synthetic oligonucleotide
  Sense strand starting at position 3684 of SEQ ID NO: 37
gcauaaugccuguagguaa

SEQ ID NO: 6855 - RNA, 19 nt, Artificial Sequence
  Description of Artificial Sequence: Synthetic oligonucleotide
  Antisense strand to SEQ ID NO: 6854
uuaccuacaggcauuaugc

SEQ ID NO: 6856 - RNA, 19 nt, Artificial Sequence
  Description of Artificial Sequence: Synthetic oligonucleotide
  Sense strand starting at position 3682 of SEQ ID NO: 37
uugcauaaugccuguaggu

SEQ ID NO: 6857 - RNA, 19 nt, Artificial Sequence
  Description of Artificial Sequence: Synthetic oligonucleotide
  Antisense strand to SEQ ID NO: 6856
accuacaggcauuaugcaa

SEQ ID NO: 6858 - RNA, 19 nt, Artificial Sequence
  Description of Artificial Sequence: Synthetic oligonucleotide
  Sense strand starting at position 3672 of SEQ ID NO: 37
guggaugcauuugcauaau

SEQ ID NO: 6859 - RNA, 19 nt, Artificial Sequence
  Description of Artificial Sequence: Synthetic oligonucleotide
  Antisense strand to SEQ ID NO: 6858
auuaugcaaaugcauccac

SEQ ID NO: 6860 - RNA, 19 nt, Artificial Sequence
  Description of Artificial Sequence: Synthetic oligonucleotide
  Sense strand starting at position 3549 of SEQ ID NO: 37
ggucacccugucuaacuau

SEQ ID NO: 6861 - RNA, 19 nt, Artificial Sequence
  Description of Artificial Sequence: Synthetic oligonucleotide
  Antisense strand to SEQ ID NO: 6860
auaguuagacagggugacc

SEQ ID NO: 6862 - RNA, 19 nt, Artificial Sequence
  Description of Artificial Sequence: Synthetic oligonucleotide
  Sense strand starting at position 3548 of SEQ ID NO: 37
gggucacccugucuaacua

SEQ ID NO: 6863 - RNA, 19 nt, Artificial Sequence
  Description of Artificial Sequence: Synthetic oligonucleotide
  Antisense strand to SEQ ID NO: 6862
uaguuagacagggugaccc

SEQ ID NO: 6864 - RNA, 19 nt, Artificial Sequence
  Description of Artificial Sequence: Synthetic oligonucleotide
  Sense strand starting at position 3479 of SEQ ID NO: 37
ucaacuagaugucagaaga

SEQ ID NO: 6865 - RNA, 19 nt, Artificial Sequence
  Description of Artificial Sequence: Synthetic oligonucleotide
  Antisense strand to SEQ ID NO: 6864
ucuucugacaucuaguuga

SEQ ID NO: 6866 - RNA, 19 nt, Artificial Sequence
  Description of Artificial Sequence: Synthetic oligonucleotide
  Sense strand starting at position 3305 of SEQ ID NO: 37
ccugcugacuuugucaaca

SEQ ID NO: 6867 - RNA, 19 nt, Artificial Sequence
  Description of Artificial Sequence: Synthetic oligonucleotide
  Antisense strand to SEQ ID NO: 6866
uguugacaaagucagcagg

SEQ ID NO: 6868 - RNA, 19 nt, Artificial Sequence
  Description of Artificial Sequence: Synthetic oligonucleotide
  Sense strand starting at position 3266 of SEQ ID NO: 37
aguguaaacucuccuuccu

SEQ ID NO: 6869 - RNA, 19 nt, Artificial Sequence
  Description of Artificial Sequence: Synthetic oligonucleotide
  Antisense strand to SEQ ID NO: 6868
aggaaggagaguuuacacu

SEQ ID NO: 6870 - RNA, 19 nt, Artificial Sequence
  Description of Artificial Sequence: Synthetic oligonucleotide
  Sense strand starting at position 3252 of SEQ ID NO: 37
uggagaaauuaggaagugu

SEQ ID NO: 6871 - RNA, 19 nt, Artificial Sequence
  Description of Artificial Sequence: Synthetic oligonucleotide
  Antisense strand to SEQ ID NO: 6870
acacuuccuaauuucucca

SEQ ID NO: 6872 - RNA, 19 nt, Artificial Sequence
  Description of Artificial Sequence: Synthetic oligonucleotide
  Sense strand starting at position 3242 of SEQ ID NO: 37
agaagcuaguuggagaaau

SEQ ID NO: 6873 - RNA, 19 nt, Artificial Sequence
  Description of Artificial Sequence: Synthetic oligonucleotide
  Antisense strand to SEQ ID NO: 6872
auuucuccaacuagcuucu

SEQ ID NO: 6874 - RNA, 19 nt, Artificial Sequence
  Description of Artificial Sequence: Synthetic oligonucleotide
  Sense strand starting at position 3240 of SEQ ID NO: 37
cuagaagcuaguuggagaa

SEQ ID NO: 6875 - RNA, 19 nt, Artificial Sequence
  Description of Artificial Sequence: Synthetic oligonucleotide
  Antisense strand to SEQ ID NO: 6874
uucuccaacuagcuucuag

SEQ ID NO: 6876 - RNA, 19 nt, Artificial Sequence
  Description of Artificial Sequence: Synthetic oligonucleotide
  Sense strand starting at position 3239 of SEQ ID NO: 37
ccuagaagcuaguuggaga

SEQ ID NO: 6877 - RNA, 19 nt, Artificial Sequence
  Description of Artificial Sequence: Synthetic oligonucleotide
  Antisense strand to SEQ ID NO: 6876
ucuccaacuagcuucuagg

SEQ ID NO: 6878 - RNA, 19 nt, Artificial Sequence
  Description of Artificial Sequence: Synthetic oligonucleotide
  Sense strand starting at position 3125 of SEQ ID NO: 37
aguugagucuucugaggag

SEQ ID NO: 6879 - RNA, 19 nt, Artificial Sequence
  Description of Artificial Sequence: Synthetic oligonucleotide
  Antisense strand to SEQ ID NO: 6878
cuccucagaagacucaacu

SEQ ID NO: 6880 - RNA, 19 nt, Artificial Sequence
  Description of Artificial Sequence: Synthetic oligonucleotide
  Sense strand starting at position 3008 of SEQ ID NO: 37
aaggguucugcccagagga

SEQ ID NO: 6881 - RNA, 19 nt, Artificial Sequence
  Description of Artificial Sequence: Synthetic oligonucleotide
  Antisense strand to SEQ ID NO: 6880
uccucugggcagaacccuu

SEQ ID NO: 6882 - RNA, 19 nt, Artificial Sequence
  Description of Artificial Sequence: Synthetic oligonucleotide
  Sense strand starting at position 2865 of SEQ ID NO: 37
gagaaauccuuguuugugg

SEQ ID NO: 6883 - RNA, 19 nt, Artificial Sequence
  Description of Artificial Sequence: Synthetic oligonucleotide
  Antisense strand to SEQ ID NO: 6882
ccacaaacaaggauuucuc

SEQ ID NO: 6884 - RNA, 19 nt, Artificial Sequence
  Description of Artificial Sequence: Synthetic oligonucleotide
  Sense strand starting at position 2863 of SEQ ID NO: 37
cugagaaauccuuguuugu

SEQ ID NO: 6885 - RNA, 19 nt, Artificial Sequence
  Description of Artificial Sequence: Synthetic oligonucleotide
  Antisense strand to SEQ ID NO: 6884
acaaacaaggauuucucag

SEQ ID NO: 6886 - RNA, 19 nt, Artificial Sequence
  Description of Artificial Sequence: Synthetic oligonucleotide
  Sense strand starting at position 2796 of SEQ ID NO: 37
gcaguccacugauauuaac

SEQ ID NO: 6887 - RNA, 19 nt, Artificial Sequence
  Description of Artificial Sequence: Synthetic oligonucleotide
  Antisense strand to SEQ ID NO: 6886
guuaauaucaguggacugc

SEQ ID NO: 6888 - RNA, 19 nt, Artificial Sequence
  Description of Artificial Sequence: Synthetic oligonucleotide
  Sense strand starting at position 2793 of SEQ ID NO: 37
uaggcaguccacugauauu

SEQ ID NO: 6889 - RNA, 19 nt, Artificial Sequence
  Description of Artificial Sequence: Synthetic oligonucleotide
  Antisense strand to SEQ ID NO: 6888
aauaucaguggacugccua

SEQ ID NO: 6890 - RNA, 19 nt, Artificial Sequence
  Description of Artificial Sequence: Synthetic oligonucleotide
  Sense strand starting at position 2780 of SEQ ID NO: 37
gccaguuucgguuuaggca

SEQ ID NO: 6891 - RNA, 19 nt, Artificial Sequence
  Description of Artificial Sequence: Synthetic oligonucleotide
  Antisense strand to SEQ ID NO: 6890
ugccuaaaccgaaacuggc

SEQ ID NO: 6892 - RNA, 19 nt, Artificial Sequence
  Description of Artificial Sequence: Synthetic oligonucleotide
  Sense strand starting at position 2416 of SEQ ID NO: 37
gcucuacccugagucauua

SEQ ID NO: 6893 - RNA, 19 nt, Artificial Sequence
  Description of Artificial Sequence: Synthetic oligonucleotide
  Antisense strand to SEQ ID NO: 6892
uaaugacucaggguagagc

SEQ ID NO: 6894 - RNA, 19 nt, Artificial Sequence
  Description of Artificial Sequence: Synthetic oligonucleotide
  Sense strand starting at position 2414 of SEQ ID NO: 37
aggcucuacccugagucau

SEQ ID NO: 6895 - RNA, 19 nt, Artificial Sequence
  Description of Artificial Sequence: Synthetic oligonucleotide
  Antisense strand to SEQ ID NO: 6894
augacucaggguagagccu

SEQ ID NO: 6896 - RNA, 19 nt, Artificial Sequence
  Description of Artificial Sequence: Synthetic oligonucleotide
  Sense strand starting at position 2093 of SEQ ID NO: 37
agugauacugggugagaaa

SEQ ID NO: 6897 - RNA, 19 nt, Artificial Sequence
  Description of Artificial Sequence: Synthetic oligonucleotide
  Antisense strand to SEQ ID NO: 6896
uuucucacccaguaucacu

SEQ ID NO: 6898 - RNA, 19 nt, Artificial Sequence
  Description of Artificial Sequence: Synthetic oligonucleotide
  Sense strand starting at position 1096 of SEQ ID NO: 37
uuaucauucccagagguuc

SEQ ID NO: 6899 - RNA, 19 nt, Artificial Sequence
  Description of Artificial Sequence: Synthetic oligonucleotide
  Antisense strand to SEQ ID NO: 6898
gaaccucugggaaugauaa

SEQ ID NO: 6900 - RNA, 19 nt, Artificial Sequence
  Description of Artificial Sequence: Synthetic oligonucleotide
  Sense strand starting at position 1094 of SEQ ID NO: 37
cuuuaucauucccagaggu

SEQ ID NO: 6901 - RNA, 19 nt, Artificial Sequence
  Description of Artificial Sequence: Synthetic oligonucleotide
  Antisense strand to SEQ ID NO: 6900
accucugggaaugauaaag

SEQ ID NO: 6902 - RNA, 19 nt, Artificial Sequence
  Description of Artificial Sequence: Synthetic oligonucleotide
  Sense strand starting at position 1062 of SEQ ID NO: 37
ggacccuucucugccuaau

SEQ ID NO: 6903 - RNA, 19 nt, Artificial Sequence
  Description of Artificial Sequence: Synthetic oligonucleotide
  Antisense strand to SEQ ID NO: 6902
auuaggcagagaagggucc

SEQ ID NO: 6904 - RNA, 19 nt, Artificial Sequence
  Description of Artificial Sequence: Synthetic oligonucleotide
  Sense strand starting at position 921 of SEQ ID NO: 37
gcaccuguguggucaggga

SEQ ID NO: 6905 - RNA, 19 nt, Artificial Sequence
  Description of Artificial Sequence: Synthetic oligonucleotide
  Antisense strand to SEQ ID NO: 6904
ucccugaccacacaggugc

SEQ ID NO: 6906 - RNA, 19 nt, Artificial Sequence
  Description of Artificial Sequence: Synthetic oligonucleotide
  Sense strand starting at position 487 of SEQ ID NO: 37
ucauguggugcugcgagua

SEQ ID NO: 6907 - RNA, 19 nt, Artificial Sequence
  Description of Artificial Sequence: Synthetic oligonucleotide
  Antisense strand to SEQ ID NO: 6906
uacucgcagcaccacauga

SEQ ID NO: 6908 - RNA, 19 nt, Artificial Sequence
  Description of Artificial Sequence: Synthetic oligonucleotide
  Sense strand starting at position 437 of SEQ ID NO: 37
ggucuuaugcucuaccuuu

SEQ ID NO: 6909 - RNA, 19 nt, Artificial Sequence
  Description of Artificial Sequence: Synthetic oligonucleotide
  Antisense strand to SEQ ID NO: 6908
aaagguagagcauaagacc

SEQ ID NO: 6910 - RNA, 19 nt, Artificial Sequence
  Description of Artificial Sequence: Synthetic oligonucleotide
  Sense strand starting at position 210 of SEQ ID NO: 37
cuuaguggcucuuccaaau

SEQ ID NO: 6911 - RNA, 19 nt, Artificial Sequence
  Description of Artificial Sequence: Synthetic oligonucleotide
  Antisense strand to SEQ ID NO: 6910
auuuggaagagccacuaag

SEQ ID NO: 6912 - RNA, 19 nt, Artificial Sequence
  Description of Artificial Sequence: Synthetic oligonucleotide
  Sense strand starting at position 52 of SEQ ID NO: 37
ccguggucuggcuggagaa

SEQ ID NO: 6913 - RNA, 19 nt, Artificial Sequence
  Description of Artificial Sequence: Synthetic oligonucleotide
  Antisense strand to SEQ ID NO: 6912
uucuccagccagaccacgg

SEQ ID NO: 6914 - RNA, 19 nt, Artificial Sequence
  Description of Artificial Sequence: Synthetic oligonucleotide
  Sense strand starting at position 3 of SEQ ID NO: 37
agagauaccuggugaauga

SEQ ID NO: 6915 - RNA, 19 nt, Artificial Sequence
  Description of Artificial Sequence: Synthetic oligonucleotide
  Antisense strand to SEQ ID NO: 6914
ucauucaccagguaucucu

SEQ ID NO: 6916 - RNA, 19 nt, Artificial Sequence
  Description of Artificial Sequence: Synthetic oligonucleotide
  Sense strand starting at position 610 of SEQ ID NO: 38
uuagccaaggauuaguaau

SEQ ID NO: 6917 - RNA, 19 nt, Artificial Sequence
  Description of Artificial Sequence: Synthetic oligonucleotide
  Antisense strand to SEQ ID NO: 6916
auuacuaauccuuggcuaa

SEQ ID NO: 6918 - RNA, 19 nt, Artificial Sequence
  Description of Artificial Sequence: Synthetic oligonucleotide
  Sense strand starting at position 612 of SEQ ID NO: 38
agccaaggauuaguaauua

SEQ ID NO: 6919 - RNA, 19 nt, Artificial Sequence
  Description of Artificial Sequence: Synthetic oligonucleotide
  Antisense strand to SEQ ID NO: 6918
uaauuacuaauccuuggcu

SEQ ID NO: 6920 - RNA, 19 nt, Artificial Sequence
  Description of Artificial Sequence: Synthetic oligonucleotide
  Sense strand starting at position 675 of SEQ ID NO: 38
auuggagcauuccucugau

SEQ ID NO: 6921 - RNA, 19 nt, Artificial Sequence
  Description of Artificial Sequence: Synthetic oligonucleotide
  Antisense strand to SEQ ID NO: 6920
aucagaggaaugcuccaau

SEQ ID NO: 6922 - RNA, 19 nt, Artificial Sequence
  Description of Artificial Sequence: Synthetic oligonucleotide
  Sense strand starting at position 678 of SEQ ID NO: 38
ggagcauuccucugauucu

SEQ ID NO: 6923 - RNA, 19 nt, Artificial Sequence
  Description of Artificial Sequence: Synthetic oligonucleotide
  Antisense strand to SEQ ID NO: 6922
agaaucagaggaaugcucc

SEQ ID NO: 6924 - RNA, 19 nt, Artificial Sequence
  Description of Artificial Sequence: Synthetic oligonucleotide
  Sense strand starting at position 687 of SEQ ID NO: 38
cucugauucuagcuccuga

SEQ ID NO: 6925 - RNA, 19 nt, Artificial Sequence
  Description of Artificial Sequence: Synthetic oligonucleotide
  Antisense strand to SEQ ID NO: 6924
ucaggagcuagaaucagag

SEQ ID NO: 6926 - RNA, 19 nt, Artificial Sequence
  Description of Artificial Sequence: Synthetic oligonucleotide
  Sense strand starting at position 892 of SEQ ID NO: 38
aagcuugacccgcaaguau

SEQ ID NO: 6927 - RNA, 19 nt, Artificial Sequence
  Description of Artificial Sequence: Synthetic oligonucleotide
  Antisense strand to SEQ ID NO: 6926
auacuugcgggucaagcuu

SEQ ID NO: 6928 - RNA, 19 nt, Artificial Sequence
  Description of Artificial Sequence: Synthetic oligonucleotide
  Sense strand starting at position 991 of SEQ ID NO: 38
guagaaguggauugugaug

SEQ ID NO: 6929 - RNA, 19 nt, Artificial Sequence
  Description of Artificial Sequence: Synthetic oligonucleotide
  Antisense strand to SEQ ID NO: 6928
caucacaauccacuucuac

SEQ ID NO: 6930 - RNA, 19 nt, Artificial Sequence
  Description of Artificial Sequence: Synthetic oligonucleotide
  Sense strand starting at position 1180 of SEQ ID NO: 38
cauggugauguagguaaca

SEQ ID NO: 6931 - RNA, 19 nt, Artificial Sequence
  Description of Artificial Sequence: Synthetic oligonucleotide
  Antisense strand to SEQ ID NO: 6930
uguuaccuacaucaccaug

SEQ ID NO: 6932 - RNA, 19 nt, Artificial Sequence
  Description of Artificial Sequence: Synthetic oligonucleotide
  Sense strand starting at position 1182 of SEQ ID NO: 38
uggugauguagguaacauu

SEQ ID NO: 6933 - RNA, 19 nt, Artificial Sequence
  Description of Artificial Sequence: Synthetic oligonucleotide
  Antisense strand to SEQ ID NO: 6932
aauguuaccuacaucacca

SEQ ID NO: 6934 - RNA, 19 nt, Artificial Sequence
  Description of Artificial Sequence: Synthetic oligonucleotide
  Sense strand starting at position 1189 of SEQ ID NO: 38
guagguaacauuggccaau

SEQ ID NO: 6935 - RNA, 19 nt, Artificial Sequence
  Description of Artificial Sequence: Synthetic oligonucleotide
  Antisense strand to SEQ ID NO: 6934
auuggccaauguuaccuac

SEQ ID NO: 6936 - RNA, 19 nt, Artificial Sequence
  Description of Artificial Sequence: Synthetic oligonucleotide
  Sense strand starting at position 1191 of SEQ ID NO: 38
agguaacauuggccaauga

SEQ ID NO: 6937 - RNA, 19 nt, Artificial Sequence
  Description of Artificial Sequence: Synthetic oligonucleotide
  Antisense strand to SEQ ID NO: 6936
ucauuggccaauguuaccu

SEQ ID NO: 6938 - RNA, 19 nt, Artificial Sequence
  Description of Artificial Sequence: Synthetic oligonucleotide
  Sense strand starting at position 1390 of SEQ ID NO: 38
gggugaucucuuggaaacc

SEQ ID NO: 6939 - RNA, 19 nt, Artificial Sequence
  Description of Artificial Sequence: Synthetic oligonucleotide
  Antisense strand to SEQ ID NO: 6938
gguuuccaagagaucaccc

SEQ ID NO: 6940 - RNA, 19 nt, Artificial Sequence
  Description of Artificial Sequence: Synthetic oligonucleotide
  Sense strand starting at position 1402 of SEQ ID NO: 38
ggaaacccuucuccuuaga

SEQ ID NO: 6941 - RNA, 19 nt, Artificial Sequence
  Description of Artificial Sequence: Synthetic oligonucleotide
  Antisense strand to SEQ ID NO: 6940
ucuaaggagaaggguuucc

SEQ ID NO: 6942 - RNA, 19 nt, Artificial Sequence
  Description of Artificial Sequence: Synthetic oligonucleotide
  Sense strand starting at position 1475 of SEQ ID NO: 38
aaguuuccagaaugcugua

SEQ ID NO: 6943 - RNA, 19 nt, Artificial Sequence
  Description of Artificial Sequence: Synthetic oligonucleotide
  Antisense strand to SEQ ID NO: 6942
uacagcauucuggaaacuu

SEQ ID NO: 6944 - RNA, 19 nt, Artificial Sequence
  Description of Artificial Sequence: Synthetic oligonucleotide
  Sense strand starting at position 1480 of SEQ ID NO: 38
uccagaaugcuguaggaca

SEQ ID NO: 6945 - RNA, 19 nt, Artificial Sequence
  Description of Artificial Sequence: Synthetic oligonucleotide
  Antisense strand to SEQ ID NO: 6944
uguccuacagcauucugga

SEQ ID NO: 6946 - RNA, 19 nt, Artificial Sequence
  Description of Artificial Sequence: Synthetic oligonucleotide
  Sense strand starting at position 1727 of SEQ ID NO: 38
ucgagacaagauuggguau

SEQ ID NO: 6947 - RNA, 19 nt, Artificial Sequence
  Description of Artificial Sequence: Synthetic oligonucleotide
  Antisense strand to SEQ ID NO: 6946
auacccaaucuugucucga

SEQ ID NO: 6948 - RNA, 19 nt, Artificial Sequence
  Description of Artificial Sequence: Synthetic oligonucleotide
  Sense strand starting at position 1938 of SEQ ID NO: 38
aaguucuugcacgaguuga

SEQ ID NO: 6949 - RNA, 19 nt, Artificial Sequence
  Description of Artificial Sequence: Synthetic oligonucleotide
  Antisense strand to SEQ ID NO: 6948
ucaacucgugcaagaacuu

SEQ ID NO: 6950 - RNA, 19 nt, Artificial Sequence
  Description of Artificial Sequence: Synthetic oligonucleotide
  Sense strand starting at position 1949 of SEQ ID NO: 38
cgaguugacgcuuugcuga

SEQ ID NO: 6951 - RNA, 19 nt, Artificial Sequence
  Description of Artificial Sequence: Synthetic oligonucleotide
  Antisense strand to SEQ ID NO: 6950
ucagcaaagcgucaacucg

SEQ ID NO: 6952 - RNA, 19 nt, Artificial Sequence
  Description of Artificial Sequence: Synthetic oligonucleotide
  Sense strand starting at position 1991 of SEQ ID NO: 38
cagcaaagauccuugguca

SEQ ID NO: 6953 - RNA, 19 nt, Artificial Sequence
  Description of Artificial Sequence: Synthetic oligonucleotide
  Antisense strand to SEQ ID NO: 6952
ugaccaaggaucuuugcug

SEQ ID NO: 6954 - RNA, 19 nt, Artificial Sequence
  Description of Artificial Sequence: Synthetic oligonucleotide
  Sense strand starting at position 1992 of SEQ ID NO: 38
agcaaagauccuuggucaa

SEQ ID NO: 6955 - RNA, 19 nt, Artificial Sequence
  Description of Artificial Sequence: Synthetic oligonucleotide
  Antisense strand to SEQ ID NO: 6954
uugaccaaggaucuuugcu

SEQ ID NO: 6956 - RNA, 19 nt, Artificial Sequence
  Description of Artificial Sequence: Synthetic oligonucleotide
  Sense strand starting at position 1994 of SEQ ID NO: 38
caaagauccuuggucaaag

SEQ ID NO: 6957 - RNA, 19 nt, Artificial Sequence
  Description of Artificial Sequence: Synthetic oligonucleotide
  Antisense strand to SEQ ID NO: 6956
cuuugaccaaggaucuuug

SEQ ID NO: 6958 - RNA, 19 nt, Artificial Sequence
  Description of Artificial Sequence: Synthetic oligonucleotide
  Sense strand starting at position 2018 of SEQ ID NO: 38
agcaaagauucccugcuca

SEQ ID NO: 6959 - RNA, 19 nt, Artificial Sequence
  Description of Artificial Sequence: Synthetic oligonucleotide
  Antisense strand to SEQ ID NO: 6958
ugagcagggaaucuuugcu

SEQ ID NO: 6960 - RNA, 19 nt, Artificial Sequence
  Description of Artificial Sequence: Synthetic oligonucleotide
  Sense strand starting at position 2153 of SEQ ID NO: 38
guccaaccuaugugaggaa

SEQ ID NO: 6961 - RNA, 19 nt, Artificial Sequence
  Description of Artificial Sequence: Synthetic oligonucleotide
  Antisense strand to SEQ ID NO: 6960
uuccucacauagguuggac

SEQ ID NO: 6962 - RNA, 19 nt, Artificial Sequence
  Description of Artificial Sequence: Synthetic oligonucleotide
  Sense strand starting at position 2216 of SEQ ID NO: 38
gaacgugugcaacagaauc

SEQ ID NO: 6963 - RNA, 19 nt, Artificial Sequence
  Description of Artificial Sequence: Synthetic oligonucleotide
  Antisense strand to SEQ ID NO: 6962
gauucuguugcacacguuc

SEQ ID NO: 6964 - RNA, 19 nt, Artificial Sequence
  Description of Artificial Sequence: Synthetic oligonucleotide
  Sense strand starting at position 2218 of SEQ ID NO: 38
acgugugcaacagaaucaa

SEQ ID NO: 6965 - RNA, 19 nt, Artificial Sequence
  Description of Artificial Sequence: Synthetic oligonucleotide
  Antisense strand to SEQ ID NO: 6964
uugauucuguugcacacgu

SEQ ID NO: 6966 - RNA, 19 nt, Artificial Sequence
  Description of Artificial Sequence: Synthetic oligonucleotide
  Sense strand starting at position 2293 of SEQ ID NO: 38
ggcgacugucugggaauca

SEQ ID NO: 6967 - RNA, 19 nt, Artificial Sequence
  Description of Artificial Sequence: Synthetic oligonucleotide
  Antisense strand to SEQ ID NO: 6966
ugauucccagacagucgcc

SEQ ID NO: 6968 - RNA, 19 nt, Artificial Sequence
  Description of Artificial Sequence: Synthetic oligonucleotide
  Sense strand starting at position 2495 of SEQ ID NO: 38
gcuugagggcuuuaucauu

SEQ ID NO: 6969 - RNA, 19 nt, Artificial Sequence
  Description of Artificial Sequence: Synthetic oligonucleotide
  Antisense strand to SEQ ID NO: 6968
aaugauaaagcccucaagc

SEQ ID NO: 6970 - RNA, 19 nt, Artificial Sequence
  Description of Artificial Sequence: Synthetic oligonucleotide
  Sense strand starting at position 2572 of SEQ ID NO: 38
ggcguucugguguuuacua

SEQ ID NO: 6971 - RNA, 19 nt, Artificial Sequence
  Description of Artificial Sequence: Synthetic oligonucleotide
  Antisense strand to SEQ ID NO: 6970
uaguaaacaccagaacgcc

SEQ ID NO: 6972 - RNA, 19 nt, Artificial Sequence
  Description of Artificial Sequence: Synthetic oligonucleotide
  Sense strand starting at position 2752 of SEQ ID NO: 38
ccgccagacuugucauuuc

SEQ ID NO: 6973 - RNA, 19 nt, Artificial Sequence
  Description of Artificial Sequence: Synthetic oligonucleotide
  Antisense strand to SEQ ID NO: 6972
gaaaugacaagucuggcgg

SEQ ID NO: 6974 - RNA, 19 nt, Artificial Sequence
  Description of Artificial Sequence: Synthetic oligonucleotide
  Sense strand starting at position 2762 of SEQ ID NO: 38
ugucauuucucccugagca

SEQ ID NO: 6975 - RNA, 19 nt, Artificial Sequence
  Description of Artificial Sequence: Synthetic oligonucleotide
  Antisense strand to SEQ ID NO: 6974
ugcucagggagaaaugaca

SEQ ID NO: 6976 - RNA, 19 nt, Artificial Sequence
  Description of Artificial Sequence: Synthetic oligonucleotide
  Sense strand starting at position 2763 of SEQ ID NO: 38
gucauuucucccugagcag

SEQ ID NO: 6977 - RNA, 19 nt, Artificial Sequence
  Description of Artificial Sequence: Synthetic oligonucleotide
  Antisense strand to SEQ ID NO: 6976
cugcucagggagaaaugac

SEQ ID NO: 6978 - RNA, 19 nt, Artificial Sequence
  Description of Artificial Sequence: Synthetic oligonucleotide
  Sense strand starting at position 2802 of SEQ ID NO: 38
ggcaguccucuccaacuga

SEQ ID NO: 6979 - RNA, 19 nt, Artificial Sequence
  Description of Artificial Sequence: Synthetic oligonucleotide
  Antisense strand to SEQ ID NO: 6978
ucaguuggagaggacugcc

SEQ ID NO: 6980 - RNA, 19 nt, Artificial Sequence
  Description of Artificial Sequence: Synthetic oligonucleotide
  Sense strand starting at position 2901 of SEQ ID NO: 38
uccaaugugucccucauaa

SEQ ID NO: 6981 - RNA, 19 nt, Artificial Sequence
  Description of Artificial Sequence: Synthetic oligonucleotide
  Antisense strand to SEQ ID NO: 6980
uuaugagggacacauugga

SEQ ID NO: 6982 - RNA, 19 nt, Artificial Sequence
  Description of Artificial Sequence: Synthetic oligonucleotide
  Sense strand starting at position 2914 of SEQ ID NO: 38
ucauaaauguuucuacugu

SEQ ID NO: 6983 - RNA, 19 nt, Artificial Sequence
  Description of Artificial Sequence: Synthetic oligonucleotide
  Antisense strand to SEQ ID NO: 6982
acaguagaaacauuuauga

SEQ ID NO: 6984 - RNA, 19 nt, Artificial Sequence
  Description of Artificial Sequence: Synthetic oligonucleotide
  Sense strand starting at position 3102 of SEQ ID NO: 38
guacauaggugaguucuuu

SEQ ID NO: 6985 - RNA, 19 nt, Artificial Sequence
  Description of Artificial Sequence: Synthetic oligonucleotide
  Antisense strand to SEQ ID NO: 6984
aaagaacucaccuauguac

SEQ ID NO: 6986 - RNA, 19 nt, Artificial Sequence
  Description of Artificial Sequence: Synthetic oligonucleotide
  Sense strand starting at position 3183 of SEQ ID NO: 38
gcaugcuguaggcaagaua

SEQ ID NO: 6987 - RNA, 19 nt, Artificial Sequence
  Description of Artificial Sequence: Synthetic oligonucleotide
  Antisense strand to SEQ ID NO: 6986
uaucuugccuacagcaugc

SEQ ID NO: 6988 - RNA, 19 nt, Artificial Sequence
  Description of Artificial Sequence: Synthetic oligonucleotide
  Sense strand starting at position 3283 of SEQ ID NO: 38
ugggaauucuacccucaga

SEQ ID NO: 6989 - RNA, 19 nt, Artificial Sequence
  Description of Artificial Sequence: Synthetic oligonucleotide
  Antisense strand to SEQ ID NO: 6988
ucugaggguagaauuccca

SEQ ID NO: 6990 - RNA, 19 nt, Artificial Sequence
  Description of Artificial Sequence: Synthetic oligonucleotide
  Sense strand starting at position 3698 of SEQ ID NO: 38
accauuuggucugcacauu

SEQ ID NO: 6991 - RNA, 19 nt, Artificial Sequence
  Description of Artificial Sequence: Synthetic oligonucleotide
  Antisense strand to SEQ ID NO: 6990
aaugugcagaccaaauggu

SEQ ID NO: 6992 - RNA, 19 nt, Artificial Sequence
  Description of Artificial Sequence: Synthetic oligonucleotide
  Sense strand starting at position 3729 of SEQ ID NO: 38
aguccagacuccuuagagu

SEQ ID NO: 6993 - RNA, 19 nt, Artificial Sequence
  Description of Artificial Sequence: Synthetic oligonucleotide
  Antisense strand to SEQ ID NO: 6992
acucuaaggagucuggacu

SEQ ID NO: 6994 - RNA, 19 nt, Artificial Sequence
  Description of Artificial Sequence: Synthetic oligonucleotide
  Sense strand starting at position 3735 of SEQ ID NO: 38
gacuccuuagaguggcuua

SEQ ID NO: 6995 - RNA, 19 nt, Artificial Sequence
  Description of Artificial Sequence: Synthetic oligonucleotide
  Antisense strand to SEQ ID NO: 6994
uaagccacucuaaggaguc

SEQ ID NO: 6996 - RNA, 19 nt, Artificial Sequence
  Description of Artificial Sequence: Synthetic oligonucleotide
  Sense strand starting at position 3801 of SEQ ID NO: 39
cugucaccucagcaauagu

SEQ ID NO: 6997 - RNA, 19 nt, Artificial Sequence
  Description of Artificial Sequence: Synthetic oligonucleotide
  Antisense strand to SEQ ID NO: 6996
acuauugcugaggugacag

SEQ ID NO: 6998 - RNA, 19 nt, Artificial Sequence
  Description of Artificial Sequence: Synthetic oligonucleotide
  Sense strand starting at position 3696 of SEQ ID NO: 39
gccugaggauauuacucaa

SEQ ID NO: 6999 - RNA, 19 nt, Artificial Sequence
  Description of Artificial Sequence: Synthetic oligonucleotide
  Antisense strand to SEQ ID NO: 6998
uugaguaauauccucaggc

SEQ ID NO: 7000 - RNA, 19 nt, Artificial Sequence
  Description of Artificial Sequence: Synthetic oligonucleotide
  Sense strand starting at position 3690 of SEQ ID NO: 39
agggcugccugaggauauu

SEQ ID NO: 7001 - RNA, 19 nt, Artificial Sequence
  Description of Artificial Sequence: Synthetic oligonucleotide
  Antisense strand to SEQ ID NO: 7000
aauauccucaggcagcccu

SEQ ID NO: 7002 - RNA, 19 nt, Artificial Sequence
  Description of Artificial Sequence: Synthetic oligonucleotide
  Sense strand starting at position 3637 of SEQ ID NO: 39
gcucguuguuggucugaag

SEQ ID NO: 7003 - RNA, 19 nt, Artificial Sequence
  Description of Artificial Sequence: Synthetic oligonucleotide
  Antisense strand to SEQ ID NO: 7002
cuucagaccaacaacgagc

SEQ ID NO: 7004 - RNA, 19 nt, Artificial Sequence
  Description of Artificial Sequence: Synthetic oligonucleotide
  Sense strand starting at position 3529 of SEQ ID NO: 39
uggagaugcucacauucuu

SEQ ID NO: 7005 - RNA, 19 nt, Artificial Sequence
  Description of Artificial Sequence: Synthetic oligonucleotide
  Antisense strand to SEQ ID NO: 7004
aagaaugugagcaucucca

SEQ ID NO: 7006 - RNA, 19 nt, Artificial Sequence
  Description of Artificial Sequence: Synthetic oligonucleotide
  Sense strand starting at position 3203 of SEQ ID NO: 39
cuugcuccaucaggaauau

SEQ ID NO: 7007 - RNA, 19 nt, Artificial Sequence
  Description of Artificial Sequence: Synthetic oligonucleotide
  Antisense strand to SEQ ID NO: 7006
auauuccugauggagcaag

SEQ ID NO: 7008 - RNA, 19 nt, Artificial Sequence
  Description of Artificial Sequence: Synthetic oligonucleotide
  Sense strand starting at position 2469 of SEQ ID NO: 39
uggaguucggaggaauagu

SEQ ID NO: 7009 - RNA, 19 nt, Artificial Sequence
  Description of Artificial Sequence: Synthetic oligonucleotide
  Antisense strand to SEQ ID NO: 7008
acuauuccuccgaacucca

SEQ ID NO: 7010 - RNA, 19 nt, Artificial Sequence
  Description of Artificial Sequence: Synthetic oligonucleotide
  Sense strand starting at position 1552 of SEQ ID NO: 39
cgucuauaaggccggagau

SEQ ID NO: 7011 - RNA, 19 nt, Artificial Sequence
  Description of Artificial Sequence: Synthetic oligonucleotide
  Antisense strand to SEQ ID NO: 7010
aucuccggccuuauagacg

SEQ ID NO: 7012 - RNA, 19 nt, Artificial Sequence
  Description of Artificial Sequence: Synthetic oligonucleotide
  Sense strand starting at position 1544 of SEQ ID NO: 39
gggcgagacgucuauaagg

SEQ ID NO: 7013 - RNA, 19 nt, Artificial Sequence
  Description of Artificial Sequence: Synthetic oligonucleotide
  Antisense strand to SEQ ID NO: 7012
ccuuauagacgucucgccc

SEQ ID NO: 7014 - RNA, 19 nt, Artificial Sequence
  Description of Artificial Sequence: Synthetic oligonucleotide
  Sense strand starting at position 1424 of SEQ ID NO: 39
acggucgucuaagcugaaa

SEQ ID NO: 7015 - RNA, 19 nt, Artificial Sequence
  Description of Artificial Sequence: Synthetic oligonucleotide
  Antisense strand to SEQ ID NO: 7014
uuucagcuuagacgaccgu

SEQ ID NO: 7016 - RNA, 19 nt, Artificial Sequence
  Description of Artificial Sequence: Synthetic oligonucleotide
  Sense strand starting at position 1354 of SEQ ID NO: 39
ucggcuuucugauaacgcu

SEQ ID NO: 7017 - RNA, 19 nt, Artificial Sequence
  Description of Artificial Sequence: Synthetic oligonucleotide
  Antisense strand to SEQ ID NO: 7016
agcguuaucagaaagccga

SEQ ID NO: 7018 - RNA, 19 nt, Artificial Sequence
  Description of Artificial Sequence: Synthetic oligonucleotide
  Sense strand starting at position 1323 of SEQ ID NO: 39
ccgacuuaggaugguucaa

SEQ ID NO: 7019 - RNA, 19 nt, Artificial Sequence
  Description of Artificial Sequence: Synthetic oligonucleotide
  Antisense strand to SEQ ID NO: 7018
uugaaccauccuaagucgg

SEQ ID NO: 7020 - RNA, 19 nt, Artificial Sequence
  Description of Artificial Sequence: Synthetic oligonucleotide
  Sense strand starting at position 1258 of SEQ ID NO: 39
gugguauacugacucuaga

SEQ ID NO: 7021 - RNA, 19 nt, Artificial Sequence
  Description of Artificial Sequence: Synthetic oligonucleotide
  Antisense strand to SEQ ID NO: 7020
ucuagagucaguauaccac

SEQ ID NO: 7022 - RNA, 19 nt, Artificial Sequence
  Description of Artificial Sequence: Synthetic oligonucleotide
  Sense strand starting at position 1213 of SEQ ID NO: 39
gagucaggcuuccaaagca

SEQ ID NO: 7023 - RNA, 19 nt, Artificial Sequence
  Description of Artificial Sequence: Synthetic oligonucleotide
  Antisense strand to SEQ ID NO: 7022
ugcuuuggaagccugacuc

SEQ ID NO: 7024 - RNA, 19 nt, Artificial Sequence
  Description of Artificial Sequence: Synthetic oligonucleotide
  Sense strand starting at position 1145 of SEQ ID NO: 39
gaauguggcucuguacuaa

SEQ ID NO: 7025 - RNA, 19 nt, Artificial Sequence
  Description of Artificial Sequence: Synthetic oligonucleotide
  Antisense strand to SEQ ID NO: 7024
uuaguacagagccacauuc

SEQ ID NO: 7026 - RNA, 19 nt, Artificial Sequence
  Description of Artificial Sequence: Synthetic oligonucleotide
  Sense strand starting at position 1141 of SEQ ID NO: 39
uaaggaauguggcucugua

SEQ ID NO: 7027 - RNA, 19 nt, Artificial Sequence
  Description of Artificial Sequence: Synthetic oligonucleotide
  Antisense strand to SEQ ID NO: 7026
uacagagccacauuccuua

SEQ ID NO: 7028 - RNA, 19 nt, Artificial Sequence
  Description of Artificial Sequence: Synthetic oligonucleotide
  Sense strand starting at position 1042 of SEQ ID NO: 39
gaaucauggugugaggaac

SEQ ID NO: 7029 - RNA, 19 nt, Artificial Sequence
  Description of Artificial Sequence: Synthetic oligonucleotide
  Antisense strand to SEQ ID NO: 7028
guuccucacaccaugauuc

SEQ ID NO: 7030 - RNA, 19 nt, Artificial Sequence
  Description of Artificial Sequence: Synthetic oligonucleotide
  Sense strand starting at position 1041 of SEQ ID NO: 39
ggaaucauggugugaggaa

SEQ ID NO: 7031 - RNA, 19 nt, Artificial Sequence
  Description of Artificial Sequence: Synthetic oligonucleotide
  Antisense strand to SEQ ID NO: 7030
uuccucacaccaugauucc

SEQ ID NO: 7032 - RNA, 19 nt, Artificial Sequence
  Description of Artificial Sequence: Synthetic oligonucleotide
  Sense strand starting at position 1039 of SEQ ID NO: 39
gaggaaucauggugugagg

SEQ ID NO: 7033 - RNA, 19 nt, Artificial Sequence
  Description of Artificial Sequence: Synthetic oligonucleotide
  Antisense strand to SEQ ID NO: 7032
ccucacaccaugauuccuc

SEQ ID NO: 7034 - RNA, 19 nt, Artificial Sequence
  Description of Artificial Sequence: Synthetic oligonucleotide
  Sense strand starting at position 912 of SEQ ID NO: 39
ccugcucuccaagaagauu

SEQ ID NO: 7035 - RNA, 19 nt, Artificial Sequence
  Description of Artificial Sequence: Synthetic oligonucleotide
  Antisense strand to SEQ ID NO: 7034
aaucuucuuggagagcagg

SEQ ID NO: 7036 - RNA, 19 nt, Artificial Sequence
  Description of Artificial Sequence: Synthetic oligonucleotide
  Sense strand starting at position 908 of SEQ ID NO: 39
gcuaccugcucuccaagaa

SEQ ID NO: 7037 - RNA, 19 nt, Artificial Sequence
  Description of Artificial Sequence: Synthetic oligonucleotide
  Antisense strand to SEQ ID NO: 7036
uucuuggagagcagguagc

SEQ ID NO: 7038 - RNA, 19 nt, Artificial Sequence
  Description of Artificial Sequence: Synthetic oligonucleotide
  Sense strand starting at position 864 of SEQ ID NO: 39
cgguguucuccaggguucu

SEQ ID NO: 7039 - RNA, 19 nt, Artificial Sequence
  Description of Artificial Sequence: Synthetic oligonucleotide
  Antisense strand to SEQ ID NO: 7038
agaacccuggagaacaccg

SEQ ID NO: 7040 - RNA, 19 nt, Artificial Sequence
  Description of Artificial Sequence: Synthetic oligonucleotide
  Sense strand starting at position 770 of SEQ ID NO: 39
uuccuagguuucguugaua

SEQ ID NO: 7041 - RNA, 19 nt, Artificial Sequence
  Description of Artificial Sequence: Synthetic oligonucleotide
  Antisense strand to SEQ ID NO: 7040
uaucaacgaaaccuaggaa

SEQ ID NO: 7042 - RNA, 19 nt, Artificial Sequence
  Description of Artificial Sequence: Synthetic oligonucleotide
  Sense strand starting at position 684 of SEQ ID NO: 39
augauaguuucuggaucca

SEQ ID NO: 7043 - RNA, 19 nt, Artificial Sequence
  Description of Artificial Sequence: Synthetic oligonucleotide
  Antisense strand to SEQ ID NO: 7042
uggauccagaaacuaucau

SEQ ID NO: 7044 - RNA, 19 nt, Artificial Sequence
  Description of Artificial Sequence: Synthetic oligonucleotide
  Sense strand starting at position 682 of SEQ ID NO: 39
aaaugauaguuucuggauc

SEQ ID NO: 7045 - RNA, 19 nt, Artificial Sequence
  Description of Artificial Sequence: Synthetic oligonucleotide
  Antisense strand to SEQ ID NO: 7044
gauccagaaacuaucauuu

SEQ ID NO: 7046 - RNA, 19 nt, Artificial Sequence
  Description of Artificial Sequence: Synthetic oligonucleotide
  Sense strand starting at position 613 of SEQ ID NO: 39
cgaugauccuuccaccuca

SEQ ID NO: 7047 - RNA, 19 nt, Artificial Sequence
  Description of Artificial Sequence: Synthetic oligonucleotide
  Antisense strand to SEQ ID NO: 7046
ugagguggaaggaucaucg

SEQ ID NO: 7048 - RNA, 19 nt, Artificial Sequence
  Description of Artificial Sequence: Synthetic oligonucleotide
  Sense strand starting at position 605 of SEQ ID NO: 39
gacuuaagcgaugauccuu

SEQ ID NO: 7049 - RNA, 19 nt, Artificial Sequence
  Description of Artificial Sequence: Synthetic oligonucleotide
  Antisense strand to SEQ ID NO: 7048
aaggaucaucgcuuaaguc

SEQ ID NO: 7050 - RNA, 19 nt, Artificial Sequence
  Description of Artificial Sequence: Synthetic oligonucleotide
  Sense strand starting at position 604 of SEQ ID NO: 39
ggacuuaagcgaugauccu

SEQ ID NO: 7051 - RNA, 19 nt, Artificial Sequence
  Description of Artificial Sequence: Synthetic oligonucleotide
  Antisense strand to SEQ ID NO: 7050
aggaucaucgcuuaagucc

SEQ ID NO: 7052 - RNA, 19 nt, Artificial Sequence
  Description of Artificial Sequence: Synthetic oligonucleotide
  Sense strand starting at position 601 of SEQ ID NO: 39
ccuggacuuaagcgaugau

SEQ ID NO: 7053 - RNA, 19 nt, Artificial Sequence
  Description of Artificial Sequence: Synthetic oligonucleotide
  Antisense strand to SEQ ID NO: 7052
aucaucgcuuaaguccagg

SEQ ID NO: 7054 - RNA, 19 nt, Artificial Sequence
  Description of Artificial Sequence: Synthetic oligonucleotide
  Sense strand starting at position 468 of SEQ ID NO: 39
ucuucugauuucugaaaga

SEQ ID NO: 7055 - RNA, 19 nt, Artificial Sequence
  Description of Artificial Sequence: Synthetic oligonucleotide
  Antisense strand to SEQ ID NO: 7054
ucuuucagaaaucagaaga

SEQ ID NO: 7056 - RNA, 19 nt, Artificial Sequence
  Description of Artificial Sequence: Synthetic oligonucleotide
  Sense strand starting at position 462 of SEQ ID NO: 39
guuugaucuucugauuucu

SEQ ID NO: 7057 - RNA, 19 nt, Artificial Sequence
  Description of Artificial Sequence: Synthetic oligonucleotide
  Antisense strand to SEQ ID NO: 7056
agaaaucagaagaucaaac

SEQ ID NO: 7058 - RNA, 19 nt, Artificial Sequence
  Description of Artificial Sequence: Synthetic oligonucleotide
  Sense strand starting at position 459 of SEQ ID NO: 39
augguuugaucuucugauu

SEQ ID NO: 7059 - RNA, 19 nt, Artificial Sequence
  Description of Artificial Sequence: Synthetic oligonucleotide
  Antisense strand to SEQ ID NO: 7058
aaucagaagaucaaaccau

SEQ ID NO: 7060 - RNA, 19 nt, Artificial Sequence
  Description of Artificial Sequence: Synthetic oligonucleotide
  Sense strand starting at position 451 of SEQ ID NO: 39
ccuacaucaugguuugauc

SEQ ID NO: 7061 - RNA, 19 nt, Artificial Sequence
  Description of Artificial Sequence: Synthetic oligonucleotide
  Antisense strand to SEQ ID NO: 7060
gaucaaaccaugauguagg

SEQ ID NO: 7062 - RNA, 19 nt, Artificial Sequence
  Description of Artificial Sequence: Synthetic oligonucleotide
  Sense strand starting at position 449 of SEQ ID NO: 39
agccuacaucaugguuuga

SEQ ID NO: 7063 - RNA, 19 nt, Artificial Sequence
  Description of Artificial Sequence: Synthetic oligonucleotide
  Antisense strand to SEQ ID NO: 7062
ucaaaccaugauguaggcu

SEQ ID NO: 7064 - RNA, 19 nt, Artificial Sequence
  Description of Artificial Sequence: Synthetic oligonucleotide
  Sense strand starting at position 367 of SEQ ID NO: 39
ggaucucagcaaugggauu

SEQ ID NO: 7065 - RNA, 19 nt, Artificial Sequence
  Description of Artificial Sequence: Synthetic oligonucleotide
  Antisense strand to SEQ ID NO: 7064
aaucccauugcugagaucc

SEQ ID NO: 7066 - RNA, 19 nt, Artificial Sequence
  Description of Artificial Sequence: Synthetic oligonucleotide
  Sense strand starting at position 361 of SEQ ID NO: 39
gccuuaggaucucagcaau

SEQ ID NO: 7067 - RNA, 19 nt, Artificial Sequence
  Description of Artificial Sequence: Synthetic oligonucleotide
  Antisense strand to SEQ ID NO: 7066
auugcugagauccuaaggc

SEQ ID NO: 7068 - RNA, 19 nt, Artificial Sequence
  Description of Artificial Sequence: Synthetic oligonucleotide
  Sense strand starting at position 76 of SEQ ID NO: 40
uggaguauuuccuaagaaa

SEQ ID NO: 7069 - RNA, 19 nt, Artificial Sequence
  Description of Artificial Sequence: Synthetic oligonucleotide
  Antisense strand to SEQ ID NO: 7068
uuucuuaggaaauacucca

SEQ ID NO: 7070 - RNA, 19 nt, Artificial Sequence
  Description of Artificial Sequence: Synthetic oligonucleotide
  Sense strand starting at position 79 of SEQ ID NO: 40
aguauuuccuaagaaagug

SEQ ID NO: 7071 - RNA, 19 nt, Artificial Sequence
  Description of Artificial Sequence: Synthetic oligonucleotide
  Antisense strand to SEQ ID NO: 7070
cacuuucuuaggaaauacu

SEQ ID NO: 7072 - RNA, 19 nt, Artificial Sequence
  Description of Artificial Sequence: Synthetic oligonucleotide
  Sense strand starting at position 102 of SEQ ID NO: 40
gcaggaauuuaauggcaac

SEQ ID NO: 7073 - RNA, 19 nt, Artificial Sequence
  Description of Artificial Sequence: Synthetic oligonucleotide
  Antisense strand to SEQ ID NO: 7072
guugccauuaaauuccugc

SEQ ID NO: 7074 - RNA, 19 nt, Artificial Sequence
  Description of Artificial Sequence: Synthetic oligonucleotide
  Sense strand starting at position 113 of SEQ ID NO: 40
auggcaacacccugaagau

SEQ ID NO: 7075 - RNA, 19 nt, Artificial Sequence
  Description of Artificial Sequence: Synthetic oligonucleotide
  Antisense strand to SEQ ID NO: 7074
aucuucaggguguugccau

SEQ ID NO: 7076 - RNA, 19 nt, Artificial Sequence
  Description of Artificial Sequence: Synthetic oligonucleotide
  Sense strand starting at position 122 of SEQ ID NO: 40
cccugaagauugcuaaggu

SEQ ID NO: 7077 - RNA, 19 nt, Artificial Sequence
  Description of Artificial Sequence: Synthetic oligonucleotide
  Antisense strand to SEQ ID NO: 7076
accuuagcaaucuucaggg

SEQ ID NO: 7078 - RNA, 19 nt, Artificial Sequence
  Description of Artificial Sequence: Synthetic oligonucleotide
  Sense strand starting at position 203 of SEQ ID NO: 40
uagugacaguuuccuaaga

SEQ ID NO: 7079 - RNA, 19 nt, Artificial Sequence
  Description of Artificial Sequence: Synthetic oligonucleotide
  Antisense strand to SEQ ID NO: 7078
ucuuaggaaacugucacua

SEQ ID NO: 7080 - RNA, 19 nt, Artificial Sequence
  Description of Artificial Sequence: Synthetic oligonucleotide
  Sense strand starting at position 527 of SEQ ID NO: 40
uugcucaucugcuuagaau

SEQ ID NO: 7081 - RNA, 19 nt, Artificial Sequence
  Description of Artificial Sequence: Synthetic oligonucleotide
  Antisense strand to SEQ ID NO: 7080
auucuaagcagaugagcaa

SEQ ID NO: 7082 - RNA, 19 nt, Artificial Sequence
  Description of Artificial Sequence: Synthetic oligonucleotide
  Sense strand starting at position 528 of SEQ ID NO: 40
ugcucaucugcuuagaauu

SEQ ID NO: 7083 - RNA, 19 nt, Artificial Sequence
  Description of Artificial Sequence: Synthetic oligonucleotide
  Antisense strand to SEQ ID NO: 7082
aauucuaagcagaugagca

SEQ ID NO: 7084 - RNA, 19 nt, Artificial Sequence
  Description of Artificial Sequence: Synthetic oligonucleotide
  Sense strand starting at position 556 of SEQ ID NO: 40
gagagaguuaucugagagc

SEQ ID NO: 7085 - RNA, 19 nt, Artificial Sequence
  Description of Artificial Sequence: Synthetic oligonucleotide
  Antisense strand to SEQ ID NO: 7084
gcucucagauaacucucuc

SEQ ID NO: 7086 - RNA, 19 nt, Artificial Sequence
  Description of Artificial Sequence: Synthetic oligonucleotide
  Sense strand starting at position 625 of SEQ ID NO: 40
gaagaaagguuacacugaa

SEQ ID NO: 7087 - RNA, 19 nt, Artificial Sequence
  Description of Artificial Sequence: Synthetic oligonucleotide
  Antisense strand to SEQ ID NO: 7086
uucaguguaaccuuucuuc

SEQ ID NO: 7088 - RNA, 19 nt, Artificial Sequence
  Description of Artificial Sequence: Synthetic oligonucleotide
  Sense strand starting at position 1104 of SEQ ID NO: 40
gcccgcagucggaagaguu

SEQ ID NO: 7089 - RNA, 19 nt, Artificial Sequence
  Description of Artificial Sequence: Synthetic oligonucleotide
  Antisense strand to SEQ ID NO: 7088
aacucuuccgacugcgggc

SEQ ID NO: 7090 - RNA, 19 nt, Artificial Sequence
  Description of Artificial Sequence: Synthetic oligonucleotide
  Sense strand starting at position 2203 of SEQ ID NO: 40
uugucuggauuugucuuua

SEQ ID NO: 7091 - RNA, 19 nt, Artificial Sequence
  Description of Artificial Sequence: Synthetic oligonucleotide
  Antisense strand to SEQ ID NO: 7090
uaaagacaaauccagacaa

SEQ ID NO: 7092 - RNA, 19 nt, Artificial Sequence
  Description of Artificial Sequence: Synthetic oligonucleotide
  Sense strand starting at position 2471 of SEQ ID NO: 40
uggauuaccuaugucgcau

SEQ ID NO: 7093 - RNA, 19 nt, Artificial Sequence
  Description of Artificial Sequence: Synthetic oligonucleotide
  Antisense strand to SEQ ID NO: 7092
augcgacauagguaaucca

SEQ ID NO: 7094 - RNA, 19 nt, Artificial Sequence
  Description of Artificial Sequence: Synthetic oligonucleotide
  Sense strand starting at position 2477 of SEQ ID NO: 40
accuaugucgcauauagua

SEQ ID NO: 7095 - RNA, 19 nt, Artificial Sequence
  Description of Artificial Sequence: Synthetic oligonucleotide
  Antisense strand to SEQ ID NO: 7094
uacuauaugcgacauaggu

SEQ ID NO: 7096 - RNA, 19 nt, Artificial Sequence
  Description of Artificial Sequence: Synthetic oligonucleotide
  Sense strand starting at position 2609 of SEQ ID NO: 40
ccuagugaggcuugaauug

SEQ ID NO: 7097 - RNA, 19 nt, Artificial Sequence
  Description of Artificial Sequence: Synthetic oligonucleotide
  Antisense strand to SEQ ID NO: 7096
caauucaagccucacuagg

SEQ ID NO: 7098 - RNA, 19 nt, Artificial Sequence
  Description of Artificial Sequence: Synthetic oligonucleotide
  Sense strand starting at position 2620 of SEQ ID NO: 40
uugaauugguacuucgaua

SEQ ID NO: 7099 - RNA, 19 nt, Artificial Sequence
  Description of Artificial Sequence: Synthetic oligonucleotide
  Antisense strand to SEQ ID NO: 7098
uaucgaaguaccaauucaa

SEQ ID NO: 7100 - RNA, 19 nt, Artificial Sequence
  Description of Artificial Sequence: Synthetic oligonucleotide
  Sense strand starting at position 2625 of SEQ ID NO: 40
uugguacuucgauaaucua

SEQ ID NO: 7101 - RNA, 19 nt, Artificial Sequence
  Description of Artificial Sequence: Synthetic oligonucleotide
  Antisense strand to SEQ ID NO: 7100
uagauuaucgaaguaccaa

SEQ ID NO: 7102 - RNA, 19 nt, Artificial Sequence
  Description of Artificial Sequence: Synthetic oligonucleotide
  Sense strand starting at position 2628 of SEQ ID NO: 40
guacuucgauaaucuaagu

SEQ ID NO: 7103 - RNA, 19 nt, Artificial Sequence
  Description of Artificial Sequence: Synthetic oligonucleotide
  Antisense strand to SEQ ID NO: 7102
acuuagauuaucgaaguac

SEQ ID NO: 7104 - RNA, 19 nt, Artificial Sequence
  Description of Artificial Sequence: Synthetic oligonucleotide
  Sense strand starting at position 2633 of SEQ ID NO: 40
ucgauaaucuaaguccaga

SEQ ID NO: 7105 - RNA, 19 nt, Artificial Sequence
  Description of Artificial Sequence: Synthetic oligonucleotide
  Antisense strand to SEQ ID NO: 7104
ucuggacuuagauuaucga

SEQ ID NO: 7106 - RNA, 19 nt, Artificial Sequence
  Description of Artificial Sequence: Synthetic oligonucleotide
  Sense strand starting at position 2666 of SEQ ID NO: 40
uguagauuccacugucucu

SEQ ID NO: 7107 - RNA, 19 nt, Artificial Sequence
  Description of Artificial Sequence: Synthetic oligonucleotide
  Antisense strand to SEQ ID NO: 7106
agagacaguggaaucuaca

SEQ ID NO: 7108 - RNA, 19 nt, Artificial Sequence
  Description of Artificial Sequence: Synthetic oligonucleotide
  Sense strand starting at position 2860 of SEQ ID NO: 40
cacuaauggucccuagagu

SEQ ID NO: 7109 - RNA, 19 nt, Artificial Sequence
  Description of Artificial Sequence: Synthetic oligonucleotide
  Antisense strand to SEQ ID NO: 7108
acucuagggaccauuagug

SEQ ID NO: 7110 - RNA, 19 nt, Artificial Sequence
  Description of Artificial Sequence: Synthetic oligonucleotide
  Sense strand starting at position 2861 of SEQ ID NO: 40
acuaauggucccuagagua

SEQ ID NO: 7111 - RNA, 19 nt, Artificial Sequence
  Description of Artificial Sequence: Synthetic oligonucleotide
  Antisense strand to SEQ ID NO: 7110
uacucuagggaccauuagu

SEQ ID NO: 7112 - RNA, 19 nt, Artificial Sequence
  Description of Artificial Sequence: Synthetic oligonucleotide
  Sense strand starting at position 2897 of SEQ ID NO: 40
ucuagucaaugaguuaagu

SEQ ID NO: 7113 - RNA, 19 nt, Artificial Sequence
  Description of Artificial Sequence: Synthetic oligonucleotide
  Antisense strand to SEQ ID NO: 7112
acuuaacucauugacuaga

SEQ ID NO: 7114 - RNA, 19 nt, Artificial Sequence
  Description of Artificial Sequence: Synthetic oligonucleotide
  Sense strand starting at position 2962 of SEQ ID NO: 40
cugauaacauaggagaaau

SEQ ID NO: 7115 - RNA, 19 nt, Artificial Sequence
  Description of Artificial Sequence: Synthetic oligonucleotide
  Antisense strand to SEQ ID NO: 7114
auuucuccuauguuaucag

SEQ ID NO: 7116 - RNA, 19 nt, Artificial Sequence
  Description of Artificial Sequence: Synthetic oligonucleotide
  Sense strand starting at position 3016 of SEQ ID NO: 40
uuggucuauugauuaguaa

SEQ ID NO: 7117 - RNA, 19 nt, Artificial Sequence
  Description of Artificial Sequence: Synthetic oligonucleotide
  Antisense strand to SEQ ID NO: 7116
uuacuaaucaauagaccaa

SEQ ID NO: 7118 - RNA, 19 nt, Artificial Sequence
  Description of Artificial Sequence: Synthetic oligonucleotide
  Sense strand starting at position 3017 of SEQ ID NO: 40
uggucuauugauuaguaaa

SEQ ID NO: 7119 - RNA, 19 nt, Artificial Sequence
  Description of Artificial Sequence: Synthetic oligonucleotide
  Antisense strand to SEQ ID NO: 7118
uuuacuaaucaauagacca

SEQ ID NO: 7120 - RNA, 19 nt, Artificial Sequence
  Description of Artificial Sequence: Synthetic oligonucleotide
  Sense strand starting at position 3019 of SEQ ID NO: 40
gucuauugauuaguaaaca

SEQ ID NO: 7121 - RNA, 19 nt, Artificial Sequence
  Description of Artificial Sequence: Synthetic oligonucleotide
  Antisense strand to SEQ ID NO: 7120
uguuuacuaaucaauagac

SEQ ID NO: 7122 - RNA, 19 nt, Artificial Sequence
  Description of Artificial Sequence: Synthetic oligonucleotide
  Sense strand starting at position 3049 of SEQ ID NO: 40
augugauaauuguugucua

SEQ ID NO: 7123 - RNA, 19 nt, Artificial Sequence
  Description of Artificial Sequence: Synthetic oligonucleotide
  Antisense strand to SEQ ID NO: 7122
uagacaacaauuaucacau

SEQ ID NO: 7124 - RNA, 19 nt, Artificial Sequence
  Description of Artificial Sequence: Synthetic oligonucleotide
  Sense strand starting at position 3052 of SEQ ID NO: 40
ugauaauuguugucuaucu

SEQ ID NO: 7125 - RNA, 19 nt, Artificial Sequence
  Description of Artificial Sequence: Synthetic oligonucleotide
  Antisense strand to SEQ ID NO: 7124
agauagacaacaauuauca

SEQ ID NO: 7126 - RNA, 19 nt, Artificial Sequence
  Description of Artificial Sequence: Synthetic oligonucleotide
  Sense strand starting at position 3128 of SEQ ID NO: 40
uagucaaaugcccgaggua

SEQ ID NO: 7127 - RNA, 19 nt, Artificial Sequence
  Description of Artificial Sequence: Synthetic oligonucleotide
  Antisense strand to SEQ ID NO: 7126
uaccucgggcauuugacua

SEQ ID NO: 7128 - RNA, 19 nt, Artificial Sequence
  Description of Artificial Sequence: Synthetic oligonucleotide
  Sense strand starting at position 3145 of SEQ ID NO: 40
uaguguugggcagauagua

SEQ ID NO: 7129 - RNA, 19 nt, Artificial Sequence
  Description of Artificial Sequence: Synthetic oligonucleotide
  Antisense strand to SEQ ID NO: 7128
uacuaucugcccaacacua

SEQ ID NO: 7130 - RNA, 19 nt, Artificial Sequence
  Description of Artificial Sequence: Synthetic oligonucleotide
  Sense strand starting at position 3302 of SEQ ID NO: 40
uuugccugucuugaugaau

SEQ ID NO: 7131 - RNA, 19 nt, Artificial Sequence
  Description of Artificial Sequence: Synthetic oligonucleotide
  Antisense strand to SEQ ID NO: 7130
auucaucaagacaggcaaa

SEQ ID NO: 7132 - RNA, 19 nt, Artificial Sequence
  Description of Artificial Sequence: Synthetic oligonucleotide
  Sense strand starting at position 3569 of SEQ ID NO: 40
ggagacgucccuuaacugu

SEQ ID NO: 7133 - RNA, 19 nt, Artificial Sequence
  Description of Artificial Sequence: Synthetic oligonucleotide
  Antisense strand to SEQ ID NO: 7132
acaguuaagggacgucucc

SEQ ID NO: 7134 - RNA, 19 nt, Artificial Sequence
  Description of Artificial Sequence: Synthetic oligonucleotide
  Sense strand starting at position 3778 of SEQ ID NO: 40
guaggaagaguccagguuu

SEQ ID NO: 7135 - RNA, 19 nt, Artificial Sequence
  Description of Artificial Sequence: Synthetic oligonucleotide
  Antisense strand to SEQ ID NO: 7134
aaaccuggacucuuccuac

SEQ ID NO: 7136 - RNA, 19 nt, Artificial Sequence
  Description of Artificial Sequence: Synthetic oligonucleotide
  Sense strand starting at position 3795 of SEQ ID NO: 40
uugggagacuucuccugaa

SEQ ID NO: 7137 - RNA, 19 nt, Artificial Sequence
  Description of Artificial Sequence: Synthetic oligonucleotide
  Antisense strand to SEQ ID NO: 7136
uucaggagaagucucccaa

SEQ ID NO: 7138 - RNA, 19 nt, Artificial Sequence
  Description of Artificial Sequence: Synthetic oligonucleotide
  Sense strand starting at position 3829 of SEQ ID NO: 40
ggagguuucucagaaggag

SEQ ID NO: 7139 - RNA, 19 nt, Artificial Sequence
  Description of Artificial Sequence: Synthetic oligonucleotide
  Antisense strand to SEQ ID NO: 7138
cuccuucugagaaaccucc

SEQ ID NO: 7140 - RNA, 19 nt, Artificial Sequence
  Description of Artificial Sequence: Synthetic oligonucleotide
  Sense strand starting at position 3868 of SEQ ID NO: 40
gggauacucccggaguucu

SEQ ID NO: 7141 - RNA, 19 nt, Artificial Sequence
  Description of Artificial Sequence: Synthetic oligonucleotide
  Antisense strand to SEQ ID NO: 7140
agaacuccgggaguauccc

SEQ ID NO: 7142 - RNA, 19 nt, Artificial Sequence
  Description of Artificial Sequence: Synthetic oligonucleotide
  Sense strand starting at position 3927 of SEQ ID NO: 40
cuuugugugcguuuguaua

SEQ ID NO: 7143 - RNA, 19 nt, Artificial Sequence
  Description of Artificial Sequence: Synthetic oligonucleotide
  Antisense strand to SEQ ID NO: 7142
uauacaaacgcacacaaag

SEQ ID NO: 7144 - RNA, 19 nt, Artificial Sequence
  Description of Artificial Sequence: Synthetic oligonucleotide
  Sense strand starting at position 3933 of SEQ ID NO: 40
gugcguuuguauaugugga

SEQ ID NO: 7145 - RNA, 19 nt, Artificial Sequence
  Description of Artificial Sequence: Synthetic oligonucleotide
  Antisense strand to SEQ ID NO: 7144
uccacauauacaaacgcac

SEQ ID NO: 7146 - RNA, 19 nt, Artificial Sequence
  Description of Artificial Sequence: Synthetic oligonucleotide
  Sense strand starting at position 3958 of SEQ ID NO: 40
cucagaagagguugcugau

SEQ ID NO: 7147 - RNA, 19 nt, Artificial Sequence
  Description of Artificial Sequence: Synthetic oligonucleotide
  Antisense strand to SEQ ID NO: 7146
aucagcaaccucuucugag

SEQ ID NO: 7148 - RNA, 19 nt, Artificial Sequence
  Description of Artificial Sequence: Synthetic oligonucleotide
  Sense strand starting at position 222 of SEQ ID NO: 41
guucuagacaugugguauu

SEQ ID NO: 7149 - RNA, 19 nt, Artificial Sequence
  Description of Artificial Sequence: Synthetic oligonucleotide
  Antisense strand to SEQ ID NO: 7148
aauaccacaugucuagaac

SEQ ID NO: 7150 - RNA, 19 nt, Artificial Sequence
  Description of Artificial Sequence: Synthetic oligonucleotide
  Sense strand starting at position 245 of SEQ ID NO: 41
aaacaaugcccuuguagag

SEQ ID NO: 7151 - RNA, 19 nt, Artificial Sequence
  Description of Artificial Sequence: Synthetic oligonucleotide
  Antisense strand to SEQ ID NO: 7150
cucuacaagggcauuguuu

SEQ ID NO: 7152 - RNA, 19 nt, Artificial Sequence
  Description of Artificial Sequence: Synthetic oligonucleotide
  Sense strand starting at position 265 of SEQ ID NO: 41
uuacauuguaguggaagga

SEQ ID NO: 7153 - RNA, 19 nt, Artificial Sequence
  Description of Artificial Sequence: Synthetic oligonucleotide
  Antisense strand to SEQ ID NO: 7152
uccuuccacuacaauguaa

SEQ ID NO: 7154 - RNA, 19 nt, Artificial Sequence
  Description of Artificial Sequence: Synthetic oligonucleotide
  Sense strand starting at position 428 of SEQ ID NO: 41
guuagcacucgauauuugu

SEQ ID NO: 7155 - RNA, 19 nt, Artificial Sequence
  Description of Artificial Sequence: Synthetic oligonucleotide
  Antisense strand to SEQ ID NO: 7154
acaaauaucgagugcuaac

SEQ ID NO: 7156 - RNA, 19 nt, Artificial Sequence
  Description of Artificial Sequence: Synthetic oligonucleotide
  Sense strand starting at position 480 of SEQ ID NO: 41
ucaaguuaugagggagcua

SEQ ID NO: 7157 - RNA, 19 nt, Artificial Sequence
  Description of Artificial Sequence: Synthetic oligonucleotide
  Antisense strand to SEQ ID NO: 7156
uagcucccucauaacuuga

SEQ ID NO: 7158 - RNA, 19 nt, Artificial Sequence
  Description of Artificial Sequence: Synthetic oligonucleotide
  Sense strand starting at position 561 of SEQ ID NO: 41
uaaugaaggccuugagaca

SEQ ID NO: 7159 - RNA, 19 nt, Artificial Sequence
  Description of Artificial Sequence: Synthetic oligonucleotide
  Antisense strand to SEQ ID NO: 7158
ugucucaaggccuucauua

SEQ ID NO: 7160 - RNA, 19 nt, Artificial Sequence
  Description of Artificial Sequence: Synthetic oligonucleotide
  Sense strand starting at position 568 of SEQ ID NO: 41
ggccuugagacauaauggu

SEQ ID NO: 7161 - RNA, 19 nt, Artificial Sequence
  Description of Artificial Sequence: Synthetic oligonucleotide
  Antisense strand to SEQ ID NO: 7160
accauuaugucucaaggcc

SEQ ID NO: 7162 - RNA, 19 nt, Artificial Sequence
  Description of Artificial Sequence: Synthetic oligonucleotide
  Sense strand starting at position 577 of SEQ ID NO: 41
acauaaugguuccucgaac

SEQ ID NO: 7163 - RNA, 19 nt, Artificial Sequence
  Description of Artificial Sequence: Synthetic oligonucleotide
  Antisense strand to SEQ ID NO: 7162
guucgaggaaccauuaugu

SEQ ID NO: 7164 - RNA, 19 nt, Artificial Sequence
  Description of Artificial Sequence: Synthetic oligonucleotide
  Sense strand starting at position 578 of SEQ ID NO: 41
cauaaugguuccucgaacu

SEQ ID NO: 7165 - RNA, 19 nt, Artificial Sequence
  Description of Artificial Sequence: Synthetic oligonucleotide
  Antisense strand to SEQ ID NO: 7164
aguucgaggaaccauuaug

SEQ ID NO: 7166 - RNA, 19 nt, Artificial Sequence
  Description of Artificial Sequence: Synthetic oligonucleotide
  Sense strand starting at position 592 of SEQ ID NO: 41
gaacuuauuucugagggug

SEQ ID NO: 7167 - RNA, 19 nt, Artificial Sequence
  Description of Artificial Sequence: Synthetic oligonucleotide
  Antisense strand to SEQ ID NO: 7166
cacccucagaaauaaguuc

SEQ ID NO: 7168 - RNA, 19 nt, Artificial Sequence
  Description of Artificial Sequence: Synthetic oligonucleotide
  Sense strand starting at position 939 of SEQ ID NO: 41
cuucuaugacccugugaga

SEQ ID NO: 7169 - RNA, 19 nt, Artificial Sequence
  Description of Artificial Sequence: Synthetic oligonucleotide
  Antisense strand to SEQ ID NO: 7168
ucucacagggucauagaag

SEQ ID NO: 7170 - RNA, 19 nt, Artificial Sequence
  Description of Artificial Sequence: Synthetic oligonucleotide
  Sense strand starting at position 959 of SEQ ID NO: 41
acuuaaagucaguaucuca

SEQ ID NO: 7171 - RNA, 19 nt, Artificial Sequence
  Description of Artificial Sequence: Synthetic oligonucleotide
  Antisense strand to SEQ ID NO: 7170
ugagauacugacuuuaagu

SEQ ID NO: 7172 - RNA, 19 nt, Artificial Sequence
  Description of Artificial Sequence: Synthetic oligonucleotide
  Sense strand starting at position 1092 of SEQ ID NO: 41
gcacuccuuugauucugaa

SEQ ID NO: 7173 - RNA, 19 nt, Artificial Sequence
  Description of Artificial Sequence: Synthetic oligonucleotide
  Antisense strand to SEQ ID NO: 7172
uucagaaucaaaggagugc

SEQ ID NO: 7174 - RNA, 19 nt, Artificial Sequence
  Description of Artificial Sequence: Synthetic oligonucleotide
  Sense strand starting at position 1099 of SEQ ID NO: 41
uuugauucugaaugaccuu

SEQ ID NO: 7175 - RNA, 19 nt, Artificial Sequence
  Description of Artificial Sequence: Synthetic oligonucleotide
  Antisense strand to SEQ ID NO: 7174
aaggucauucagaaucaaa

SEQ ID NO: 7176 - RNA, 19 nt, Artificial Sequence
  Description of Artificial Sequence: Synthetic oligonucleotide
  Sense strand starting at position 1325 of SEQ ID NO: 41
cauggcacugucugauauu

SEQ ID NO: 7177 - RNA, 19 nt, Artificial Sequence
  Description of Artificial Sequence: Synthetic oligonucleotide
  Antisense strand to SEQ ID NO: 7176
aauaucagacagugccaug

SEQ ID NO: 7178 - RNA, 19 nt, Artificial Sequence
  Description of Artificial Sequence: Synthetic oligonucleotide
  Sense strand starting at position 1365 of SEQ ID NO: 41
auaccucccucuuuagagu

SEQ ID NO: 7179 - RNA, 19 nt, Artificial Sequence
  Description of Artificial Sequence: Synthetic oligonucleotide
  Antisense strand to SEQ ID NO: 7178
acucuaaagagggagguau

SEQ ID NO: 7180 - RNA, 19 nt, Artificial Sequence
  Description of Artificial Sequence: Synthetic oligonucleotide
  Sense strand starting at position 1573 of SEQ ID NO: 41
gucagaagugugcacacua

SEQ ID NO: 7181 - RNA, 19 nt, Artificial Sequence
  Description of Artificial Sequence: Synthetic oligonucleotide
  Antisense strand to SEQ ID NO: 7180
uagugugcacacuucugac

SEQ ID NO: 7182 - RNA, 19 nt, Artificial Sequence
  Description of Artificial Sequence: Synthetic oligonucleotide
  Sense strand starting at position 2162 of SEQ ID NO: 41
gggccaggucuguagggau

SEQ ID NO: 7183 - RNA, 19 nt, Artificial Sequence
  Description of Artificial Sequence: Synthetic oligonucleotide
  Antisense strand to SEQ ID NO: 7182
aucccuacagaccuggccc

SEQ ID NO: 7184 - RNA, 19 nt, Artificial Sequence
  Description of Artificial Sequence: Synthetic oligonucleotide
  Sense strand starting at position 2273 of SEQ ID NO: 41
ugggacagguuucuugauu

SEQ ID NO: 7185 - RNA, 19 nt, Artificial Sequence
  Description of Artificial Sequence: Synthetic oligonucleotide
  Antisense strand to SEQ ID NO: 7184
aaucaagaaaccuguccca

SEQ ID NO: 7186 - RNA, 19 nt, Artificial Sequence
  Description of Artificial Sequence: Synthetic oligonucleotide
  Sense strand starting at position 2506 of SEQ ID NO: 41
aguagugacacgccguuau

SEQ ID NO: 7187 - RNA, 19 nt, Artificial Sequence
  Description of Artificial Sequence: Synthetic oligonucleotide
  Antisense strand to SEQ ID NO: 7186
auaacggcgugucacuacu

SEQ ID NO: 7188 - RNA, 19 nt, Artificial Sequence
  Description of Artificial Sequence: Synthetic oligonucleotide
  Sense strand starting at position 2514 of SEQ ID NO: 41
cacgccguuaucgucuaaa

SEQ ID NO: 7189 - RNA, 19 nt, Artificial Sequence
  Description of Artificial Sequence: Synthetic oligonucleotide
  Antisense strand to SEQ ID NO: 7188
uuuagacgauaacggcgug

SEQ ID NO: 7190 - RNA, 19 nt, Artificial Sequence
  Description of Artificial Sequence: Synthetic oligonucleotide
  Sense strand starting at position 2614 of SEQ ID NO: 41
ugcauuauuuccuucucga

SEQ ID NO: 7191 - RNA, 19 nt, Artificial Sequence
  Description of Artificial Sequence: Synthetic oligonucleotide
  Antisense strand to SEQ ID NO: 7190
ucgagaaggaaauaaugca

SEQ ID NO: 7192 - RNA, 19 nt, Artificial Sequence
  Description of Artificial Sequence: Synthetic oligonucleotide
  Sense strand starting at position 2633 of SEQ ID NO: 41
ccaugagcucucugauacc

SEQ ID NO: 7193 - RNA, 19 nt, Artificial Sequence
  Description of Artificial Sequence: Synthetic oligonucleotide
  Antisense strand to SEQ ID NO: 7192
gguaucagagagcucaugg

SEQ ID NO: 7194 - RNA, 19 nt, Artificial Sequence
  Description of Artificial Sequence: Synthetic oligonucleotide
  Sense strand starting at position 2671 of SEQ ID NO: 41
uuguauacuccauagugca

SEQ ID NO: 7195 - RNA, 19 nt, Artificial Sequence
  Description of Artificial Sequence: Synthetic oligonucleotide
  Antisense strand to SEQ ID NO: 7194
ugcacuauggaguauacaa

SEQ ID NO: 7196 - RNA, 19 nt, Artificial Sequence
  Description of Artificial Sequence: Synthetic oligonucleotide
  Sense strand starting at position 2822 of SEQ ID NO: 41
agcugauugcuuuaguaga

SEQ ID NO: 7197 - RNA, 19 nt, Artificial Sequence
  Description of Artificial Sequence: Synthetic oligonucleotide
  Antisense strand to SEQ ID NO: 7196
ucuacuaaagcaaucagcu

SEQ ID NO: 7198 - RNA, 19 nt, Artificial Sequence
  Description of Artificial Sequence: Synthetic oligonucleotide
  Sense strand starting at position 2824 of SEQ ID NO: 41
cugauugcuuuaguagaca

SEQ ID NO: 7199 - RNA, 19 nt, Artificial Sequence
  Description of Artificial Sequence: Synthetic oligonucleotide
  Antisense strand to SEQ ID NO: 7198
ugucuacuaaagcaaucag

SEQ ID NO: 7200 - RNA, 19 nt, Artificial Sequence
  Description of Artificial Sequence: Synthetic oligonucleotide
  Sense strand starting at position 2827 of SEQ ID NO: 41
auugcuuuaguagacaacu

SEQ ID NO: 7201 - RNA, 19 nt, Artificial Sequence
  Description of Artificial Sequence: Synthetic oligonucleotide
  Antisense strand to SEQ ID NO: 7200
aguugucuacuaaagcaau

SEQ ID NO: 7202 - RNA, 19 nt, Artificial Sequence
  Description of Artificial Sequence: Synthetic oligonucleotide
  Sense strand starting at position 2926 of SEQ ID NO: 41
gggcauuugucuccuaauu

SEQ ID NO: 7203 - RNA, 19 nt, Artificial Sequence
  Description of Artificial Sequence: Synthetic oligonucleotide
  Antisense strand to SEQ ID NO: 7202
aauuaggagacaaaugccc

SEQ ID NO: 7204 - RNA, 19 nt, Artificial Sequence
  Description of Artificial Sequence: Synthetic oligonucleotide
  Sense strand starting at position 3031 of SEQ ID NO: 41
acuucuagaguuugagaga

SEQ ID NO: 7205 - RNA, 19 nt, Artificial Sequence
  Description of Artificial Sequence: Synthetic oligonucleotide
  Antisense strand to SEQ ID NO: 7204
ucucucaaacucuagaagu

SEQ ID NO: 7206 - RNA, 19 nt, Artificial Sequence
  Description of Artificial Sequence: Synthetic oligonucleotide
  Sense strand starting at position 3044 of SEQ ID NO: 41
gagagaaagccuugaggca

SEQ ID NO: 7207 - RNA, 19 nt, Artificial Sequence
  Description of Artificial Sequence: Synthetic oligonucleotide
  Antisense strand to SEQ ID NO: 7206
ugccucaaggcuuucucuc

SEQ ID NO: 7208 - RNA, 19 nt, Artificial Sequence
  Description of Artificial Sequence: Synthetic oligonucleotide
  Sense strand starting at position 3084 of SEQ ID NO: 41
aggccuucuaaguaagaug

SEQ ID NO: 7209 - RNA, 19 nt, Artificial Sequence
  Description of Artificial Sequence: Synthetic oligonucleotide
  Antisense strand to SEQ ID NO: 7208
caucuuacuuagaaggccu

SEQ ID NO: 7210 - RNA, 19 nt, Artificial Sequence
  Description of Artificial Sequence: Synthetic oligonucleotide
  Sense strand starting at position 3095 of SEQ ID NO: 41
guaagaugcuggccacaug

SEQ ID NO: 7211 - RNA, 19 nt, Artificial Sequence
  Description of Artificial Sequence: Synthetic oligonucleotide
  Antisense strand to SEQ ID NO: 7210
cauguggccagcaucuuac

SEQ ID NO: 7212 - RNA, 19 nt, Artificial Sequence
  Description of Artificial Sequence: Synthetic oligonucleotide
  Sense strand starting at position 3312 of SEQ ID NO: 41
ugggaauuucggugucgga

SEQ ID NO: 7213 - RNA, 19 nt, Artificial Sequence
  Description of Artificial Sequence: Synthetic oligonucleotide
  Antisense strand to SEQ ID NO: 7212
uccgacaccgaaauuccca

SEQ ID NO: 7214 - RNA, 19 nt, Artificial Sequence
  Description of Artificial Sequence: Synthetic oligonucleotide
  Sense strand starting at position 3321 of SEQ ID NO: 41
cggugucggaggagucaau

SEQ ID NO: 7215 - RNA, 19 nt, Artificial Sequence
  Description of Artificial Sequence: Synthetic oligonucleotide
  Antisense strand to SEQ ID NO: 7214
auugacuccuccgacaccg

SEQ ID NO: 7216 - RNA, 19 nt, Artificial Sequence
  Description of Artificial Sequence: Synthetic oligonucleotide
  Sense strand starting at position 3395 of SEQ ID NO: 41
gagaaagauguggguucua

SEQ ID NO: 7217 - RNA, 19 nt, Artificial Sequence
  Description of Artificial Sequence: Synthetic oligonucleotide
  Antisense strand to SEQ ID NO: 7216
uagaacccacaucuuucuc

SEQ ID NO: 7218 - RNA, 19 nt, Artificial Sequence
  Description of Artificial Sequence: Synthetic oligonucleotide
  Sense strand starting at position 3409 of SEQ ID NO: 41
uucuacucagacugauguu

SEQ ID NO: 7219 - RNA, 19 nt, Artificial Sequence
  Description of Artificial Sequence: Synthetic oligonucleotide
  Antisense strand to SEQ ID NO: 7218
aacaucagucugaguagaa

SEQ ID NO: 7220 - RNA, 19 nt, Artificial Sequence
  Description of Artificial Sequence: Synthetic oligonucleotide
  Sense strand starting at position 3432 of SEQ ID NO: 41
cuuuauaaucuugggcaaa

SEQ ID NO: 7221 - RNA, 19 nt, Artificial Sequence
  Description of Artificial Sequence: Synthetic oligonucleotide
  Antisense strand to SEQ ID NO: 7220
uuugcccaagauuauaaag

SEQ ID NO: 7222 - RNA, 19 nt, Artificial Sequence
  Description of Artificial Sequence: Synthetic oligonucleotide
  Sense strand starting at position 3787 of SEQ ID NO: 41
guuagucagaauugauaga

SEQ ID NO: 7223 - RNA, 19 nt, Artificial Sequence
  Description of Artificial Sequence: Synthetic oligonucleotide
  Antisense strand to SEQ ID NO: 7222
ucuaucaauucugacuaac

SEQ ID NO: 7224 - RNA, 19 nt, Artificial Sequence
  Description of Artificial Sequence: Synthetic oligonucleotide
  Sense strand starting at position 3885 of SEQ ID NO: 41
gucagcuauuccucaggaa

SEQ ID NO: 7225 - RNA, 19 nt, Artificial Sequence
  Description of Artificial Sequence: Synthetic oligonucleotide
  Antisense strand to SEQ ID NO: 7224
uuccugaggaauagcugac

SEQ ID NO: 7226 - RNA, 19 nt, Artificial Sequence
  Description of Artificial Sequence: Synthetic oligonucleotide
  Sense strand starting at position 3886 of SEQ ID NO: 41
ucagcuauuccucaggaag

SEQ ID NO: 7227 - RNA, 19 nt, Artificial Sequence
  Description of Artificial Sequence: Synthetic oligonucleotide
  Antisense strand to SEQ ID NO: 7226
cuuccugaggaauagcuga

SEQ ID NO: 7228 - RNA, 19 nt, Artificial Sequence
  Description of Artificial Sequence: Synthetic oligonucleotide
  Sense strand starting at position 3701 of SEQ ID NO: 45
agaagagagugguaagaga

SEQ ID NO: 7229 - RNA, 19 nt, Artificial Sequence
  Description of Artificial Sequence: Synthetic oligonucleotide
  Antisense strand to SEQ ID NO: 7228
ucucuuaccacucucuucu

SEQ ID NO: 7230 - RNA, 19 nt, Artificial Sequence
  Description of Artificial Sequence: Synthetic oligonucleotide
  Sense strand starting at position 3622 of SEQ ID NO: 45
uguagagguauaggaagua

SEQ ID NO: 7231 - RNA, 19 nt, Artificial Sequence
  Description of Artificial Sequence: Synthetic oligonucleotide
  Antisense strand to SEQ ID NO: 7230
uacuuccuauaccucuaca

SEQ ID NO: 7232 - RNA, 19 nt, Artificial Sequence
  Description of Artificial Sequence: Synthetic oligonucleotide
  Sense strand starting at position 3616 of SEQ ID NO: 45
guuacauguagagguauag

SEQ ID NO: 7233 - RNA, 19 nt, Artificial Sequence
  Description of Artificial Sequence: Synthetic oligonucleotide
  Antisense strand to SEQ ID NO: 7232
cuauaccucuacauguaac

SEQ ID NO: 7234 - RNA, 19 nt, Artificial Sequence
  Description of Artificial Sequence: Synthetic oligonucleotide
  Sense strand starting at position 3614 of SEQ ID NO: 45
ggguuacauguagagguau

SEQ ID NO: 7235 - RNA, 19 nt, Artificial Sequence
  Description of Artificial Sequence: Synthetic oligonucleotide
  Antisense strand to SEQ ID NO: 7234
auaccucuacauguaaccc

SEQ ID NO: 7236 - RNA, 19 nt, Artificial Sequence
  Description of Artificial Sequence: Synthetic oligonucleotide
  Sense strand starting at position 3612 of SEQ ID NO: 45
gaggguuacauguagaggu

SEQ ID NO: 7237 - RNA, 19 nt, Artificial Sequence
  Description of Artificial Sequence: Synthetic oligonucleotide
  Antisense strand to SEQ ID NO: 7236
accucuacauguaacccuc

SEQ ID NO: 7238 - RNA, 19 nt, Artificial Sequence
  Description of Artificial Sequence: Synthetic oligonucleotide
  Sense strand starting at position 3468 of SEQ ID NO: 45
ccuauauaauaagaaggau

SEQ ID NO: 7239 - RNA, 19 nt, Artificial Sequence
  Description of Artificial Sequence: Synthetic oligonucleotide
  Antisense strand to SEQ ID NO: 7238
auccuucuuauuauauagg

SEQ ID NO: 7240 - RNA, 19 nt, Artificial Sequence
  Description of Artificial Sequence: Synthetic oligonucleotide
  Sense strand starting at position 3277 of SEQ ID NO: 45
gagaauggcuaguugcaaa

SEQ ID NO: 7241 - RNA, 19 nt, Artificial Sequence
  Description of Artificial Sequence: Synthetic oligonucleotide
  Antisense strand to SEQ ID NO: 7240
uuugcaacuagccauucuc

SEQ ID NO: 7242 - RNA, 19 nt, Artificial Sequence
  Description of Artificial Sequence: Synthetic oligonucleotide
  Sense strand starting at position 3267 of SEQ ID NO: 45
guagauuucugagaauggc

SEQ ID NO: 7243 - RNA, 19 nt, Artificial Sequence
  Description of Artificial Sequence: Synthetic oligonucleotide
  Antisense strand to SEQ ID NO: 7242
gccauucucagaaaucuac

SEQ ID NO: 7244 - RNA, 19 nt, Artificial Sequence
  Description of Artificial Sequence: Synthetic oligonucleotide
  Sense strand starting at position 3196 of SEQ ID NO: 45
gaaugacuguagguccaaa

SEQ ID NO: 7245 - RNA, 19 nt, Artificial Sequence
  Description of Artificial Sequence: Synthetic oligonucleotide
  Antisense strand to SEQ ID NO: 7244
uuuggaccuacagucauuc

SEQ ID NO: 7246 - RNA, 19 nt, Artificial Sequence
  Description of Artificial Sequence: Synthetic oligonucleotide
  Sense strand starting at position 3167 of SEQ ID NO: 45
uggagaagauucuugcauu

SEQ ID NO: 7247 - RNA, 19 nt, Artificial Sequence
  Description of Artificial Sequence: Synthetic oligonucleotide
  Antisense strand to SEQ ID NO: 7246
aaugcaagaaucuucucca

SEQ ID NO: 7248 - RNA, 19 nt, Artificial Sequence
  Description of Artificial Sequence: Synthetic oligonucleotide
  Sense strand starting at position 3159 of SEQ ID NO: 45
guggcguguggagaagauu

SEQ ID NO: 7249 - RNA, 19 nt, Artificial Sequence
  Description of Artificial Sequence: Synthetic oligonucleotide
  Antisense strand to SEQ ID NO: 7248
aaucuucuccacacgccac

SEQ ID NO: 7250 - RNA, 19 nt, Artificial Sequence
  Description of Artificial Sequence: Synthetic oligonucleotide
  Sense strand starting at position 3132 of SEQ ID NO: 45
gacagaagauuugguuaac

SEQ ID NO: 7251 - RNA, 19 nt, Artificial Sequence
  Description of Artificial Sequence: Synthetic oligonucleotide
  Antisense strand to SEQ ID NO: 7250
guuaaccaaaucuucuguc

SEQ ID NO: 7252 - RNA, 19 nt, Artificial Sequence
  Description of Artificial Sequence: Synthetic oligonucleotide
  Sense strand starting at position 3108 of SEQ ID NO: 45
gcuccuaaugguuaugaga

SEQ ID NO: 7253 - RNA, 19 nt, Artificial Sequence
  Description of Artificial Sequence: Synthetic oligonucleotide
  Antisense strand to SEQ ID NO: 7252
ucucauaaccauuaggagc

SEQ ID NO: 7254 - RNA, 19 nt, Artificial Sequence
  Description of Artificial Sequence: Synthetic oligonucleotide
  Sense strand starting at position 3009 of SEQ ID NO: 45
cacuuauguuaggccagua

SEQ ID NO: 7255 - RNA, 19 nt, Artificial Sequence
  Description of Artificial Sequence: Synthetic oligonucleotide
  Antisense strand to SEQ ID NO: 7254
uacuggccuaacauaagug

SEQ ID NO: 7256 - RNA, 19 nt, Artificial Sequence
  Description of Artificial Sequence: Synthetic oligonucleotide
  Sense strand starting at position 2908 of SEQ ID NO: 45
ucugcaaaccaucgagagu

SEQ ID NO: 7257 - RNA, 19 nt, Artificial Sequence
  Description of Artificial Sequence: Synthetic oligonucleotide
  Antisense strand to SEQ ID NO: 7256
acucucgaugguuugcaga

SEQ ID NO: 7258 - RNA, 19 nt, Artificial Sequence
  Description of Artificial Sequence: Synthetic oligonucleotide
  Sense strand starting at position 2864 of SEQ ID NO: 45
acacauguuccugaaugca

SEQ ID NO: 7259 - RNA, 19 nt, Artificial Sequence
  Description of Artificial Sequence: Synthetic oligonucleotide
  Antisense strand to SEQ ID NO: 7258
ugcauucaggaacaugugu

SEQ ID NO: 7260 - RNA, 19 nt, Artificial Sequence
  Description of Artificial Sequence: Synthetic oligonucleotide
  Sense strand starting at position 2862 of SEQ ID NO: 45
ggacacauguuccugaaug

SEQ ID NO: 7261 - RNA, 19 nt, Artificial Sequence
  Description of Artificial Sequence: Synthetic oligonucleotide
  Antisense strand to SEQ ID NO: 7260
cauucaggaacaugugucc

SEQ ID NO: 7262 - RNA, 19 nt, Artificial Sequence
  Description of Artificial Sequence: Synthetic oligonucleotide
  Sense strand starting at position 2067 of SEQ ID NO: 45
gcacuuacgccgagggagu

SEQ ID NO: 7263 - RNA, 19 nt, Artificial Sequence
  Description of Artificial Sequence: Synthetic oligonucleotide
  Antisense strand to SEQ ID NO: 7262
acucccucggcguaagugc

SEQ ID NO: 7264 - RNA, 19 nt, Artificial Sequence
  Description of Artificial Sequence: Synthetic oligonucleotide
  Sense strand starting at position 2014 of SEQ ID NO: 45
gcgagcuauagauagaaag

SEQ ID NO: 7265 - RNA, 19 nt, Artificial Sequence
  Description of Artificial Sequence: Synthetic oligonucleotide
  Antisense strand to SEQ ID NO: 7264
cuuucuaucuauagcucgc

SEQ ID NO: 7266 - RNA, 19 nt, Artificial Sequence
  Description of Artificial Sequence: Synthetic oligonucleotide
  Sense strand starting at position 2012 of SEQ ID NO: 45
gagcgagcuauagauagaa

SEQ ID NO: 7267 - RNA, 19 nt, Artificial Sequence
  Description of Artificial Sequence: Synthetic oligonucleotide
  Antisense strand to SEQ ID NO: 7266
uucuaucuauagcucgcuc

SEQ ID NO: 7268 - RNA, 19 nt, Artificial Sequence
  Description of Artificial Sequence: Synthetic oligonucleotide
  Sense strand starting at position 1158 of SEQ ID NO: 45
uccuaacacgagggauaua

SEQ ID NO: 7269 - RNA, 19 nt, Artificial Sequence
  Description of Artificial Sequence: Synthetic oligonucleotide
  Antisense strand to SEQ ID NO: 7268
uauaucccucguguuagga

SEQ ID NO: 7270 - RNA, 19 nt, Artificial Sequence
  Description of Artificial Sequence: Synthetic oligonucleotide
  Sense strand starting at position 1157 of SEQ ID NO: 45
auccuaacacgagggauau

SEQ ID NO: 7271 - RNA, 19 nt, Artificial Sequence
  Description of Artificial Sequence: Synthetic oligonucleotide
  Antisense strand to SEQ ID NO: 7270
auaucccucguguuaggau

SEQ ID NO: 7272 - RNA, 19 nt, Artificial Sequence
  Description of Artificial Sequence: Synthetic oligonucleotide
  Sense strand starting at position 1117 of SEQ ID NO: 45
gggaauuaguacgcagaga

SEQ ID NO: 7273 - RNA, 19 nt, Artificial Sequence
  Description of Artificial Sequence: Synthetic oligonucleotide
  Antisense strand to SEQ ID NO: 7272
ucucugcguacuaauuccc

SEQ ID NO: 7274 - RNA, 19 nt, Artificial Sequence
  Description of Artificial Sequence: Synthetic oligonucleotide
  Sense strand starting at position 879 of SEQ ID NO: 45
cuccacauuugagaaguuu

SEQ ID NO: 7275 - RNA, 19 nt, Artificial Sequence
  Description of Artificial Sequence: Synthetic oligonucleotide
  Antisense strand to SEQ ID NO: 7274
aaacuucucaaauguggag

SEQ ID NO: 7276 - RNA, 19 nt, Artificial Sequence
  Description of Artificial Sequence: Synthetic oligonucleotide
  Sense strand starting at position 823 of SEQ ID NO: 45
ccagaugaguuauugcacu

SEQ ID NO: 7277 - RNA, 19 nt, Artificial Sequence
  Description of Artificial Sequence: Synthetic oligonucleotide
  Antisense strand to SEQ ID NO: 7276
agugcaauaacucaucugg

SEQ ID NO: 7278 - RNA, 19 nt, Artificial Sequence
  Description of Artificial Sequence: Synthetic oligonucleotide
  Sense strand starting at position 754 of SEQ ID NO: 45
auuaacuagccuuguagaa

SEQ ID NO: 7279 - RNA, 19 nt, Artificial Sequence
  Description of Artificial Sequence: Synthetic oligonucleotide
  Antisense strand to SEQ ID NO: 7278
uucuacaaggcuaguuaau

SEQ ID NO: 7280 - RNA, 19 nt, Artificial Sequence
  Description of Artificial Sequence: Synthetic oligonucleotide
  Sense strand starting at position 657 of SEQ ID NO: 45
acauccauuugguacauua

SEQ ID NO: 7281 - RNA, 19 nt, Artificial Sequence
  Description of Artificial Sequence: Synthetic oligonucleotide
  Antisense strand to SEQ ID NO: 7280
uaauguaccaaauggaugu

SEQ ID NO: 7282 - RNA, 19 nt, Artificial Sequence
  Description of Artificial Sequence: Synthetic oligonucleotide
  Sense strand starting at position 634 of SEQ ID NO: 45
cuuugaaauguuuaugacu

SEQ ID NO: 7283 - RNA, 19 nt, Artificial Sequence
  Description of Artificial Sequence: Synthetic oligonucleotide
  Antisense strand to SEQ ID NO: 7282
agucauaaacauuucaaag

SEQ ID NO: 7284 - RNA, 19 nt, Artificial Sequence
  Description of Artificial Sequence: Synthetic oligonucleotide
  Sense strand starting at position 567 of SEQ ID NO: 45
cacauuguaugugugaaau

SEQ ID NO: 7285 - RNA, 19 nt, Artificial Sequence
  Description of Artificial Sequence: Synthetic oligonucleotide
  Antisense strand to SEQ ID NO: 7284
auuucacacauacaaugug

SEQ ID NO: 7286 - RNA, 19 nt, Artificial Sequence
  Description of Artificial Sequence: Synthetic oligonucleotide
  Sense strand starting at position 566 of SEQ ID NO: 45
ucacauuguaugugugaaa

SEQ ID NO: 7287 - RNA, 19 nt, Artificial Sequence
  Description of Artificial Sequence: Synthetic oligonucleotide
  Antisense strand to SEQ ID NO: 7286
uuucacacauacaauguga

SEQ ID NO: 7288 - RNA, 19 nt, Artificial Sequence
  Description of Artificial Sequence: Synthetic oligonucleotide
  Sense strand starting at position 565 of SEQ ID NO: 45
aucacauuguaugugugaa

SEQ ID NO: 7289 - RNA, 19 nt, Artificial Sequence
  Description of Artificial Sequence: Synthetic oligonucleotide
  Antisense strand to SEQ ID NO: 7288
uucacacauacaaugugau

SEQ ID NO: 7290 - RNA, 19 nt, Artificial Sequence
  Description of Artificial Sequence: Synthetic oligonucleotide
  Sense strand starting at position 564 of SEQ ID NO: 45
uaucacauuguauguguga

SEQ ID NO: 7291 - RNA, 19 nt, Artificial Sequence
  Description of Artificial Sequence: Synthetic oligonucleotide
  Antisense strand to SEQ ID NO: 7290
ucacacauacaaugugaua

SEQ ID NO: 7292 - RNA, 19 nt, Artificial Sequence
  Description of Artificial Sequence: Synthetic oligonucleotide
  Sense strand starting at position 501 of SEQ ID NO: 45
ggaguagguacucagugau

SEQ ID NO: 7293 - RNA, 19 nt, Artificial Sequence
  Description of Artificial Sequence: Synthetic oligonucleotide
  Antisense strand to SEQ ID NO: 7292
aucacugaguaccuacucc

SEQ ID NO: 7294 - RNA, 19 nt, Artificial Sequence
  Description of Artificial Sequence: Synthetic oligonucleotide
  Sense strand starting at position 500 of SEQ ID NO: 45
uggaguagguacucaguga

SEQ ID NO: 7295 - RNA, 19 nt, Artificial Sequence
  Description of Artificial Sequence: Synthetic oligonucleotide
  Antisense strand to SEQ ID NO: 7294
ucacugaguaccuacucca

SEQ ID NO: 7296 - RNA, 19 nt, Artificial Sequence
  Description of Artificial Sequence: Synthetic oligonucleotide
  Sense strand starting at position 317 of SEQ ID NO: 45
gagacuguguaacuaauuc

SEQ ID NO: 7297 - RNA, 19 nt, Artificial Sequence
  Description of Artificial Sequence: Synthetic oligonucleotide
  Antisense strand to SEQ ID NO: 7296
gaauuaguuacacagucuc

SEQ ID NO: 7298 - RNA, 19 nt, Artificial Sequence
  Description of Artificial Sequence: Synthetic oligonucleotide
  Sense strand starting at position 313 of SEQ ID NO: 45
ccaugagacuguguaacua

SEQ ID NO: 7299 - RNA, 19 nt, Artificial Sequence
  Description of Artificial Sequence: Synthetic oligonucleotide
  Antisense strand to SEQ ID NO: 7298
uaguuacacagucucaugg

SEQ ID NO: 7300 - RNA, 19 nt, Artificial Sequence
  Description of Artificial Sequence: Synthetic oligonucleotide
  Sense strand starting at position 310 of SEQ ID NO: 45
aggccaugagacuguguaa

SEQ ID NO: 7301 - RNA, 19 nt, Artificial Sequence
  Description of Artificial Sequence: Synthetic oligonucleotide
  Antisense strand to SEQ ID NO: 7300
uuacacagucucauggccu

SEQ ID NO: 7302 - RNA, 19 nt, Artificial Sequence
  Description of Artificial Sequence: Synthetic oligonucleotide
  Sense strand starting at position 285 of SEQ ID NO: 45
gucauuagcacagaggcaa

SEQ ID NO: 7303 - RNA, 19 nt, Artificial Sequence
  Description of Artificial Sequence: Synthetic oligonucleotide
  Antisense strand to SEQ ID NO: 7302
uugccucugugcuaaugac

SEQ ID NO: 7304 - RNA, 19 nt, Artificial Sequence
  Description of Artificial Sequence: Synthetic oligonucleotide
  Sense strand starting at position 215 of SEQ ID NO: 45
agaucuacccgucaucaaa

SEQ ID NO: 7305 - RNA, 19 nt, Artificial Sequence
  Description of Artificial Sequence: Synthetic oligonucleotide
  Antisense strand to SEQ ID NO: 7304
uuugaugacggguagaucu

SEQ ID NO: 7306 - RNA, 19 nt, Artificial Sequence
  Description of Artificial Sequence: Synthetic oligonucleotide
  Sense strand starting at position 199 of SEQ ID NO: 45
ggagaauucuggcucuaga

SEQ ID NO: 7307 - RNA, 19 nt, Artificial Sequence
  Description of Artificial Sequence: Synthetic oligonucleotide
  Antisense strand to SEQ ID NO: 7306
ucuagagccagaauucucc

SEQ ID NO: 7308 - RNA, 19 nt, Artificial Sequence
  Description of Artificial Sequence: Synthetic oligonucleotide
  Sense strand starting at position 3755 of SEQ ID NO: 44
agcagaaagcacuguccaa

SEQ ID NO: 7309 - RNA, 19 nt, Artificial Sequence
  Description of Artificial Sequence: Synthetic oligonucleotide
  Antisense strand to SEQ ID NO: 7308
uuggacagugcuuucugcu

SEQ ID NO: 7310 - RNA, 19 nt, Artificial Sequence
  Description of Artificial Sequence: Synthetic oligonucleotide
  Sense strand starting at position 3666 of SEQ ID NO: 44
ugcugaauucuggacuauu

SEQ ID NO: 7311 - RNA, 19 nt, Artificial Sequence
  Description of Artificial Sequence: Synthetic oligonucleotide
  Antisense strand to SEQ ID NO: 7310
aauaguccagaauucagca

SEQ ID NO: 7312 - RNA, 19 nt, Artificial Sequence
  Description of Artificial Sequence: Synthetic oligonucleotide
  Sense strand starting at position 3658 of SEQ ID NO: 44
gguguaguugcugaauucu

SEQ ID NO: 7313 - RNA, 19 nt, Artificial Sequence
  Description of Artificial Sequence: Synthetic oligonucleotide
  Antisense strand to SEQ ID NO: 7312
agaauucagcaacuacacc

SEQ ID NO: 7314 - RNA, 19 nt, Artificial Sequence
  Description of Artificial Sequence: Synthetic oligonucleotide
  Sense strand starting at position 3585 of SEQ ID NO: 44
gagaaagugacuugugugu

SEQ ID NO: 7315 - RNA, 19 nt, Artificial Sequence
  Description of Artificial Sequence: Synthetic oligonucleotide
  Antisense strand to SEQ ID NO: 7314
acacacaagucacuuucuc

SEQ ID NO: 7316 - RNA, 19 nt, Artificial Sequence
  Description of Artificial Sequence: Synthetic oligonucleotide
  Sense strand starting at position 3583 of SEQ ID NO: 44
aagagaaagugacuugugu

SEQ ID NO: 7317 - RNA, 19 nt, Artificial Sequence
  Description of Artificial Sequence: Synthetic oligonucleotide
  Antisense strand to SEQ ID NO: 7316
acacaagucacuuucucuu

SEQ ID NO: 7318 - RNA, 19 nt, Artificial Sequence
  Description of Artificial Sequence: Synthetic oligonucleotide
  Sense strand starting at position 3296 of SEQ ID NO: 44
agaagagagugguaagaga

SEQ ID NO: 7319 - RNA, 19 nt, Artificial Sequence
  Description of Artificial Sequence: Synthetic oligonucleotide
  Antisense strand to SEQ ID NO: 7318
ucucuuaccacucucuucu

SEQ ID NO: 7320 - RNA, 19 nt, Artificial Sequence
  Description of Artificial Sequence: Synthetic oligonucleotide
  Sense strand starting at position 3217 of SEQ ID NO: 44
uguagagguauaggaagua

SEQ ID NO: 7321 - RNA, 19 nt, Artificial Sequence
  Description of Artificial Sequence: Synthetic oligonucleotide
  Antisense strand to SEQ ID NO: 7320
uacuuccuauaccucuaca

SEQ ID NO: 7322 - RNA, 19 nt, Artificial Sequence
  Description of Artificial Sequence: Synthetic oligonucleotide
  Sense strand starting at position 3211 of SEQ ID NO: 44
guuacauguagagguauag

SEQ ID NO: 7323 - RNA, 19 nt, Artificial Sequence
  Description of Artificial Sequence: Synthetic oligonucleotide
  Antisense strand to SEQ ID NO: 7322
cuauaccucuacauguaac

SEQ ID NO: 7324 - RNA, 19 nt, Artificial Sequence
  Description of Artificial Sequence: Synthetic oligonucleotide
  Sense strand starting at position 3209 of SEQ ID NO: 44
ggguuacauguagagguau

SEQ ID NO: 7325 - RNA, 19 nt, Artificial Sequence
  Description of Artificial Sequence: Synthetic oligonucleotide
  Antisense strand to SEQ ID NO: 7324
auaccucuacauguaaccc

SEQ ID NO: 7326 - RNA, 19 nt, Artificial Sequence
  Description of Artificial Sequence: Synthetic oligonucleotide
  Sense strand starting at position 3207 of SEQ ID NO: 44
gaggguuacauguagaggu

SEQ ID NO: 7327 - RNA, 19 nt, Artificial Sequence
  Description of Artificial Sequence: Synthetic oligonucleotide
  Antisense strand to SEQ ID NO: 7326
accucuacauguaacccuc

SEQ ID NO: 7328 - RNA, 19 nt, Artificial Sequence
  Description of Artificial Sequence: Synthetic oligonucleotide
  Sense strand starting at position 3063 of SEQ ID NO: 44
ccuauauaauaagaaggau

SEQ ID NO: 7329 - RNA, 19 nt, Artificial Sequence
  Description of Artificial Sequence: Synthetic oligonucleotide
  Antisense strand to SEQ ID NO: 7328
auccuucuuauuauauagg

SEQ ID NO: 7330 - RNA, 19 nt, Artificial Sequence
  Description of Artificial Sequence: Synthetic oligonucleotide
  Sense strand starting at position 2872 of SEQ ID NO: 44
gagaauggcuaguugcaaa

SEQ ID NO: 7331 - RNA, 19 nt, Artificial Sequence
  Description of Artificial Sequence: Synthetic oligonucleotide
  Antisense strand to SEQ ID NO: 7330
uuugcaacuagccauucuc

SEQ ID NO: 7332 - RNA, 19 nt, Artificial Sequence
  Description of Artificial Sequence: Synthetic oligonucleotide
  Sense strand starting at position 2862 of SEQ ID NO: 44
guagauuucugagaauggc

SEQ ID NO: 7333 - RNA, 19 nt, Artificial Sequence
  Description of Artificial Sequence: Synthetic oligonucleotide
  Antisense strand to SEQ ID NO: 7332
gccauucucagaaaucuac

SEQ ID NO: 7334 - RNA, 19 nt, Artificial Sequence
  Description of Artificial Sequence: Synthetic oligonucleotide
  Sense strand starting at position 2791 of SEQ ID NO: 44
gaaugacuguagguccaaa

SEQ ID NO: 7335 - RNA, 19 nt, Artificial Sequence
  Description of Artificial Sequence: Synthetic oligonucleotide
  Antisense strand to SEQ ID NO: 7334
uuuggaccuacagucauuc

SEQ ID NO: 7336 - RNA, 19 nt, Artificial Sequence
  Description of Artificial Sequence: Synthetic oligonucleotide
  Sense strand starting at position 2774 of SEQ ID NO: 44
uugcauucuuuauugugga

SEQ ID NO: 7337 - RNA, 19 nt, Artificial Sequence
  Description of Artificial Sequence: Synthetic oligonucleotide
  Antisense strand to SEQ ID NO: 7336
uccacaauaaagaaugcaa

SEQ ID NO: 7338 - RNA, 19 nt, Artificial Sequence
  Description of Artificial Sequence: Synthetic oligonucleotide
  Sense strand starting at position 2762 of SEQ ID NO: 44
uggagaagauucuugcauu

SEQ ID NO: 7339 - RNA, 19 nt, Artificial Sequence
  Description of Artificial Sequence: Synthetic oligonucleotide
  Antisense strand to SEQ ID NO: 7338
aaugcaagaaucuucucca

SEQ ID NO: 7340 - RNA, 19 nt, Artificial Sequence
  Description of Artificial Sequence: Synthetic oligonucleotide
  Sense strand starting at position 2754 of SEQ ID NO: 44
guggcguguggagaagauu

SEQ ID NO: 7341 - RNA, 19 nt, Artificial Sequence
  Description of Artificial Sequence: Synthetic oligonucleotide
  Antisense strand to SEQ ID NO: 7340
aaucuucuccacacgccac

SEQ ID NO: 7342 - RNA, 19 nt, Artificial Sequence
  Description of Artificial Sequence: Synthetic oligonucleotide
  Sense strand starting at position 2727 of SEQ ID NO: 44
gacagaagauuugguuaac

SEQ ID NO: 7343 - RNA, 19 nt, Artificial Sequence
  Description of Artificial Sequence: Synthetic oligonucleotide
  Antisense strand to SEQ ID NO: 7342
guuaaccaaaucuucuguc

SEQ ID NO: 7344 - RNA, 19 nt, Artificial Sequence
  Description of Artificial Sequence: Synthetic oligonucleotide
  Sense strand starting at position 2703 of SEQ ID NO: 44
gcuccuaaugguuaugaga

SEQ ID NO: 7345 - RNA, 19 nt, Artificial Sequence
  Description of Artificial Sequence: Synthetic oligonucleotide
  Antisense strand to SEQ ID NO: 7344
ucucauaaccauuaggagc

SEQ ID NO: 7346 - RNA, 19 nt, Artificial Sequence
  Description of Artificial Sequence: Synthetic oligonucleotide
  Sense strand starting at position 2604 of SEQ ID NO: 44
cacuuauguuaggccagua

SEQ ID NO: 7347 - RNA, 19 nt, Artificial Sequence
  Description of Artificial Sequence: Synthetic oligonucleotide
  Antisense strand to SEQ ID NO: 7346
uacuggccuaacauaagug

SEQ ID NO: 7348 - RNA, 19 nt, Artificial Sequence
  Description of Artificial Sequence: Synthetic oligonucleotide
  Sense strand starting at position 2503 of SEQ ID NO: 44
ucugcaaaccaucgagagu

SEQ ID NO: 7349 - RNA, 19 nt, Artificial Sequence
  Description of Artificial Sequence: Synthetic oligonucleotide
  Antisense strand to SEQ ID NO: 7348
acucucgaugguuugcaga

SEQ ID NO: 7350 - RNA, 19 nt, Artificial Sequence
  Description of Artificial Sequence: Synthetic oligonucleotide
  Sense strand starting at position 2459 of SEQ ID NO: 44
acacauguuccugaaugca

SEQ ID NO: 7351 - RNA, 19 nt, Artificial Sequence
  Description of Artificial Sequence: Synthetic oligonucleotide
  Antisense strand to SEQ ID NO: 7350
ugcauucaggaacaugugu

SEQ ID NO: 7352 - RNA, 19 nt, Artificial Sequence
  Description of Artificial Sequence: Synthetic oligonucleotide
  Sense strand starting at position 2457 of SEQ ID NO: 44
ggacacauguuccugaaug

SEQ ID NO: 7353 - RNA, 19 nt, Artificial Sequence
  Description of Artificial Sequence: Synthetic oligonucleotide
  Antisense strand to SEQ ID NO: 7352
cauucaggaacaugugucc

SEQ ID NO: 7354 - RNA, 19 nt, Artificial Sequence
  Description of Artificial Sequence: Synthetic oligonucleotide
  Sense strand starting at position 1662 of SEQ ID NO: 44
gcacuuacgccgagggagu

SEQ ID NO: 7355 - RNA, 19 nt, Artificial Sequence
  Description of Artificial Sequence: Synthetic oligonucleotide
  Antisense strand to SEQ ID NO: 7354
acucccucggcguaagugc

SEQ ID NO: 7356 - RNA, 19 nt, Artificial Sequence
  Description of Artificial Sequence: Synthetic oligonucleotide
  Sense strand starting at position 1609 of SEQ ID NO: 44
gcgagcuauagauagaaag

SEQ ID NO: 7357 - RNA, 19 nt, Artificial Sequence
  Description of Artificial Sequence: Synthetic oligonucleotide
  Antisense strand to SEQ ID NO: 7356
cuuucuaucuauagcucgc

SEQ ID NO: 7358 - RNA, 19 nt, Artificial Sequence
  Description of Artificial Sequence: Synthetic oligonucleotide
  Sense strand starting at position 1607 of SEQ ID NO: 44
gagcgagcuauagauagaa

SEQ ID NO: 7359 - RNA, 19 nt, Artificial Sequence
  Description of Artificial Sequence: Synthetic oligonucleotide
  Antisense strand to SEQ ID NO: 7358
uucuaucuauagcucgcuc

SEQ ID NO: 7360 - RNA, 19 nt, Artificial Sequence
  Description of Artificial Sequence: Synthetic oligonucleotide
  Sense strand starting at position 753 of SEQ ID NO: 44
uccuaacacgagggauaua

SEQ ID NO: 7361 - RNA, 19 nt, Artificial Sequence
  Description of Artificial Sequence: Synthetic oligonucleotide
  Antisense strand to SEQ ID NO: 7360
uauaucccucguguuagga

SEQ ID NO: 7362 - RNA, 19 nt, Artificial Sequence
  Description of Artificial Sequence: Synthetic oligonucleotide
  Sense strand starting at position 752 of SEQ ID NO: 44
auccuaacacgagggauau

SEQ ID NO: 7363 - RNA, 19 nt, Artificial Sequence
  Description of Artificial Sequence: Synthetic oligonucleotide
  Antisense strand to SEQ ID NO: 7362
auaucccucguguuaggau

SEQ ID NO: 7364 - RNA, 19 nt, Artificial Sequence
  Description of Artificial Sequence: Synthetic oligonucleotide
  Sense strand starting at position 712 of SEQ ID NO: 44
gggaauuaguacgcagaga

SEQ ID NO: 7365 - RNA, 19 nt, Artificial Sequence
  Description of Artificial Sequence: Synthetic oligonucleotide
  Antisense strand to SEQ ID NO: 7364
ucucugcguacuaauuccc

SEQ ID NO: 7366 - RNA, 19 nt, Artificial Sequence
  Description of Artificial Sequence: Synthetic oligonucleotide
  Sense strand starting at position 474 of SEQ ID NO: 44
cuccacauuugagaaguuu

SEQ ID NO: 7367 - RNA, 19 nt, Artificial Sequence
  Description of Artificial Sequence: Synthetic oligonucleotide
  Antisense strand to SEQ ID NO: 7366
aaacuucucaaauguggag

SEQ ID NO: 7368 - RNA, 19 nt, Artificial Sequence
  Description of Artificial Sequence: Synthetic oligonucleotide
  Sense strand starting at position 418 of SEQ ID NO: 44
ccagaugaguuauugcacu

SEQ ID NO: 7369 - RNA, 19 nt, Artificial Sequence
  Description of Artificial Sequence: Synthetic oligonucleotide
  Antisense strand to SEQ ID NO: 7368
agugcaauaacucaucugg

SEQ ID NO: 7370 - RNA, 19 nt, Artificial Sequence
  Description of Artificial Sequence: Synthetic oligonucleotide
  Sense strand starting at position 349 of SEQ ID NO: 44
auuaacuagccuuguagaa

SEQ ID NO: 7371 - RNA, 19 nt, Artificial Sequence
  Description of Artificial Sequence: Synthetic oligonucleotide
  Antisense strand to SEQ ID NO: 7370
uucuacaaggcuaguuaau

SEQ ID NO: 7372 - RNA, 19 nt, Artificial Sequence
  Description of Artificial Sequence: Synthetic oligonucleotide
  Sense strand starting at position 252 of SEQ ID NO: 44
acauccauuugguacauua

SEQ ID NO: 7373 - RNA, 19 nt, Artificial Sequence
  Description of Artificial Sequence: Synthetic oligonucleotide
  Antisense strand to SEQ ID NO: 7372
uaauguaccaaauggaugu

SEQ ID NO: 7374 - RNA, 19 nt, Artificial Sequence
  Description of Artificial Sequence: Synthetic oligonucleotide
  Sense strand starting at position 229 of SEQ ID NO: 44
cuuugaaauguuuaugacu

SEQ ID NO: 7375 - RNA, 19 nt, Artificial Sequence
  Description of Artificial Sequence: Synthetic oligonucleotide
  Antisense strand to SEQ ID NO: 7374
agucauaaacauuucaaag

SEQ ID NO: 7376 - RNA, 19 nt, Artificial Sequence
  Description of Artificial Sequence: Synthetic oligonucleotide
  Sense strand starting at position 162 of SEQ ID NO: 44
cacauuguaugugugaaau

SEQ ID NO: 7377 - RNA, 19 nt, Artificial Sequence
  Description of Artificial Sequence: Synthetic oligonucleotide
  Antisense strand to SEQ ID NO: 7376
auuucacacauacaaugug

SEQ ID NO: 7378 - RNA, 19 nt, Artificial Sequence
  Description of Artificial Sequence: Synthetic oligonucleotide
  Sense strand starting at position 161 of SEQ ID NO: 44
ucacauuguaugugugaaa

SEQ ID NO: 7379 - RNA, 19 nt, Artificial Sequence
  Description of Artificial Sequence: Synthetic oligonucleotide
  Antisense strand to SEQ ID NO: 7378
uuucacacauacaauguga

SEQ ID NO: 7380 - RNA, 19 nt, Artificial Sequence
  Description of Artificial Sequence: Synthetic oligonucleotide
  Sense strand starting at position 160 of SEQ ID NO: 44
aucacauuguaugugugaa

SEQ ID NO: 7381 - RNA, 19 nt, Artificial Sequence
  Description of Artificial Sequence: Synthetic oligonucleotide
  Antisense strand to SEQ ID NO: 7380
uucacacauacaaugugau

SEQ ID NO: 7382 - RNA, 19 nt, Artificial Sequence
  Description of Artificial Sequence: Synthetic oligonucleotide
  Sense strand starting at position 159 of SEQ ID NO: 44
uaucacauuguauguguga

SEQ ID NO: 7383 - RNA, 19 nt, Artificial Sequence
  Description of Artificial Sequence: Synthetic oligonucleotide
  Antisense strand to SEQ ID NO: 7382
ucacacauacaaugugaua

SEQ ID NO: 7384 - RNA, 19 nt, Artificial Sequence
  Description of Artificial Sequence: Synthetic oligonucleotide
  Sense strand starting at position 96 of SEQ ID NO: 44
ggaguagguacucagugau

SEQ ID NO: 7385 - RNA, 19 nt, Artificial Sequence
  Description of Artificial Sequence: Synthetic oligonucleotide
  Antisense strand to SEQ ID NO: 7384
aucacugaguaccuacucc

SEQ ID NO: 7386 - RNA, 19 nt, Artificial Sequence
  Description of Artificial Sequence: Synthetic oligonucleotide
  Sense strand starting at position 95 of SEQ ID NO: 44
uggaguagguacucaguga

SEQ ID NO: 7387 - RNA, 19 nt, Artificial Sequence
  Description of Artificial Sequence: Synthetic oligonucleotide
  Antisense strand to SEQ ID NO: 7386
ucacugaguaccuacucca

SEQ ID NO: 7388 - RNA, 19 nt, Artificial Sequence
  Description of Artificial Sequence: Synthetic oligonucleotide
  Sense strand starting at position 3937 of SEQ ID NO: 43
gggauagacuaagaaauaa

SEQ ID NO: 7389 - RNA, 19 nt, Artificial Sequence
  Description of Artificial Sequence: Synthetic oligonucleotide
  Antisense strand to SEQ ID NO: 7388
uuauuucuuagucuauccc

SEQ ID NO: 7390 - RNA, 19 nt, Artificial Sequence
  Description of Artificial Sequence: Synthetic oligonucleotide
  Sense strand starting at position 3281 of SEQ ID NO: 43
aaugauuggcagugauuaa

SEQ ID NO: 7391 - RNA, 19 nt, Artificial Sequence
  Description of Artificial Sequence: Synthetic oligonucleotide
  Antisense strand to SEQ ID NO: 7390
uuaaucacugccaaucauu

SEQ ID NO: 7392 - RNA, 19 nt, Artificial Sequence
  Description of Artificial Sequence: Synthetic oligonucleotide
  Sense strand starting at position 3277 of SEQ ID NO: 43
aucuaaugauuggcaguga

SEQ ID NO: 7393 - RNA, 19 nt, Artificial Sequence
  Description of Artificial Sequence: Synthetic oligonucleotide
  Antisense strand to SEQ ID NO: 7392
ucacugccaaucauuagau

SEQ ID NO: 7394 - RNA, 19 nt, Artificial Sequence
  Description of Artificial Sequence: Synthetic oligonucleotide
  Sense strand starting at position 3275 of SEQ ID NO: 43
auaucuaaugauuggcagu

SEQ ID NO: 7395 - RNA, 19 nt, Artificial Sequence
  Description of Artificial Sequence: Synthetic oligonucleotide
  Antisense strand to SEQ ID NO: 7394
acugccaaucauuagauau

SEQ ID NO: 7396 - RNA, 19 nt, Artificial Sequence
  Description of Artificial Sequence: Synthetic oligonucleotide
  Sense strand starting at position 3234 of SEQ ID NO: 43
agccucauuuauugaaaug

SEQ ID NO: 7397 - RNA, 19 nt, Artificial Sequence
  Description of Artificial Sequence: Synthetic oligonucleotide
  Antisense strand to SEQ ID NO: 7396
cauuucaauaaaugaggcu

SEQ ID NO: 7398 - RNA, 19 nt, Artificial Sequence
  Description of Artificial Sequence: Synthetic oligonucleotide
  Sense strand starting at position 3189 of SEQ ID NO: 43
guaucagugauguaaacag

SEQ ID NO: 7399 - RNA, 19 nt, Artificial Sequence
  Description of Artificial Sequence: Synthetic oligonucleotide
  Antisense strand to SEQ ID NO: 7398
cuguuuacaucacugauac

SEQ ID NO: 7400 - RNA, 19 nt, Artificial Sequence
  Description of Artificial Sequence: Synthetic oligonucleotide
  Sense strand starting at position 3046 of SEQ ID NO: 43
cuaagagaaugcucuauag

SEQ ID NO: 7401 - RNA, 19 nt, Artificial Sequence
  Description of Artificial Sequence: Synthetic oligonucleotide
  Antisense strand to SEQ ID NO: 7400
cuauagagcauucucuuag

SEQ ID NO: 7402 - RNA, 19 nt, Artificial Sequence
  Description of Artificial Sequence: Synthetic oligonucleotide
  Sense strand starting at position 3043 of SEQ ID NO: 43
acacuaagagaaugcucua

SEQ ID NO: 7403 - RNA, 19 nt, Artificial Sequence
  Description of Artificial Sequence: Synthetic oligonucleotide
  Antisense strand to SEQ ID NO: 7402
uagagcauucucuuagugu

SEQ ID NO: 7404 - RNA, 19 nt, Artificial Sequence
  Description of Artificial Sequence: Synthetic oligonucleotide
  Sense strand starting at position 2993 of SEQ ID NO: 43
aggauauacuaacagggau

SEQ ID NO: 7405 - RNA, 19 nt, Artificial Sequence
  Description of Artificial Sequence: Synthetic oligonucleotide
  Antisense strand to SEQ ID NO: 7404
aucccuguuaguauauccu

SEQ ID NO: 7406 - RNA, 19 nt, Artificial Sequence
  Description of Artificial Sequence: Synthetic oligonucleotide
  Sense strand starting at position 2849 of SEQ ID NO: 43
aggaaaguuuaguuccacu

SEQ ID NO: 7407 - RNA, 19 nt, Artificial Sequence
  Description of Artificial Sequence: Synthetic oligonucleotide
  Antisense strand to SEQ ID NO: 7406
aguggaacuaaacuuuccu

SEQ ID NO: 7408 - RNA, 19 nt, Artificial Sequence
  Description of Artificial Sequence: Synthetic oligonucleotide
  Sense strand starting at position 2758 of SEQ ID NO: 43
uauggucaagucuauuaga

SEQ ID NO: 7409 - RNA, 19 nt, Artificial Sequence
  Description of Artificial Sequence: Synthetic oligonucleotide
  Antisense strand to SEQ ID NO: 7408
ucuaauagacuugaccaua

SEQ ID NO: 7410 - RNA, 19 nt, Artificial Sequence
  Description of Artificial Sequence: Synthetic oligonucleotide
  Sense strand starting at position 2701 of SEQ ID NO: 43
ugguuuaaagcagacuuua

SEQ ID NO: 7411 - RNA, 19 nt, Artificial Sequence
  Description of Artificial Sequence: Synthetic oligonucleotide
  Antisense strand to SEQ ID NO: 7410
uaaagucugcuuuaaacca

SEQ ID NO: 7412 - RNA, 19 nt, Artificial Sequence
  Description of Artificial Sequence: Synthetic oligonucleotide
  Sense strand starting at position 2699 of SEQ ID NO: 43
guugguuuaaagcagacuu

SEQ ID NO: 7413 - RNA, 19 nt, Artificial Sequence
  Description of Artificial Sequence: Synthetic oligonucleotide
  Antisense strand to SEQ ID NO: 7412
aagucugcuuuaaaccaac

SEQ ID NO: 7414 - RNA, 19 nt, Artificial Sequence
  Description of Artificial Sequence: Synthetic oligonucleotide
  Sense strand starting at position 2608 of SEQ ID NO: 43
agacuugugcaauguguua

SEQ ID NO: 7415 - RNA, 19 nt, Artificial Sequence
  Description of Artificial Sequence: Synthetic oligonucleotide
  Antisense strand to SEQ ID NO: 7414
uaacacauugcacaagucu

SEQ ID NO: 7416 - RNA, 19 nt, Artificial Sequence
  Description of Artificial Sequence: Synthetic oligonucleotide
  Sense strand starting at position 2572 of SEQ ID NO: 43
ugcccaaguuagguuauuu

SEQ ID NO: 7417 - RNA, 19 nt, Artificial Sequence
  Description of Artificial Sequence: Synthetic oligonucleotide
  Antisense strand to SEQ ID NO: 7416
aaauaaccuaacuugggca

SEQ ID NO: 7418 - RNA, 19 nt, Artificial Sequence
  Description of Artificial Sequence: Synthetic oligonucleotide
  Sense strand starting at position 2458 of SEQ ID NO: 43
gcucuugugagccagcaaa

SEQ ID NO: 7419 - RNA, 19 nt, Artificial Sequence
  Description of Artificial Sequence: Synthetic oligonucleotide
  Antisense strand to SEQ ID NO: 7418
uuugcuggcucacaagagc

SEQ ID NO: 7420 - RNA, 19 nt, Artificial Sequence
  Description of Artificial Sequence: Synthetic oligonucleotide
  Sense strand starting at position 2393 of SEQ ID NO: 43
gggcaaucuuaagcuacca

SEQ ID NO: 7421 - RNA, 19 nt, Artificial Sequence
  Description of Artificial Sequence: Synthetic oligonucleotide
  Antisense strand to SEQ ID NO: 7420
ugguagcuuaagauugccc

SEQ ID NO: 7422 - RNA, 19 nt, Artificial Sequence
  Description of Artificial Sequence: Synthetic oligonucleotide
  Sense strand starting at position 2292 of SEQ ID NO: 43
aguccagugaugugcuaau

SEQ ID NO: 7423 - RNA, 19 nt, Artificial Sequence
  Description of Artificial Sequence: Synthetic oligonucleotide
  Antisense strand to SEQ ID NO: 7422
auuagcacaucacuggacu

SEQ ID NO: 7424 - RNA, 19 nt, Artificial Sequence
  Description of Artificial Sequence: Synthetic oligonucleotide
  Sense strand starting at position 2277 of SEQ ID NO: 43
acugauaucugcucaaguc

SEQ ID NO: 7425 - RNA, 19 nt, Artificial Sequence
  Description of Artificial Sequence: Synthetic oligonucleotide
  Antisense strand to SEQ ID NO: 7424
gacuugagcagauaucagu

SEQ ID NO: 7426 - RNA, 19 nt, Artificial Sequence
  Description of Artificial Sequence: Synthetic oligonucleotide
  Sense strand starting at position 2267 of SEQ ID NO: 43
acugaacccgacugauauc

SEQ ID NO: 7427 - RNA, 19 nt, Artificial Sequence
  Description of Artificial Sequence: Synthetic oligonucleotide
  Antisense strand to SEQ ID NO: 7426
gauaucagucggguucagu

SEQ ID NO: 7428 - RNA, 19 nt, Artificial Sequence
  Description of Artificial Sequence: Synthetic oligonucleotide
  Sense strand starting at position 2251 of SEQ ID NO: 43
aggaguucugaaggcaacu

SEQ ID NO: 7429 - RNA, 19 nt, Artificial Sequence
  Description of Artificial Sequence: Synthetic oligonucleotide
  Antisense strand to SEQ ID NO: 7428
aguugccuucagaacuccu

SEQ ID NO: 7430 - RNA, 19 nt, Artificial Sequence
  Description of Artificial Sequence: Synthetic oligonucleotide
  Sense strand starting at position 2156 of SEQ ID NO: 43
ggagcuaccaugggacuau

SEQ ID NO: 7431 - RNA, 19 nt, Artificial Sequence
  Description of Artificial Sequence: Synthetic oligonucleotide
  Antisense strand to SEQ ID NO: 7430
auagucccaugguagcucc

SEQ ID NO: 7432 - RNA, 19 nt, Artificial Sequence
  Description of Artificial Sequence: Synthetic oligonucleotide
  Sense strand starting at position 2125 of SEQ ID NO: 43
ucagaaaguaugugauagu

SEQ ID NO: 7433 - RNA, 19 nt, Artificial Sequence
  Description of Artificial Sequence: Synthetic oligonucleotide
  Antisense strand to SEQ ID NO: 7432
acuaucacauacuuucuga

SEQ ID NO: 7434 - RNA, 19 nt, Artificial Sequence
  Description of Artificial Sequence: Synthetic oligonucleotide
  Sense strand starting at position 2124 of SEQ ID NO: 43
gucagaaaguaugugauag

SEQ ID NO: 7435 - RNA, 19 nt, Artificial Sequence
  Description of Artificial Sequence: Synthetic oligonucleotide
  Antisense strand to SEQ ID NO: 7434
cuaucacauacuuucugac

SEQ ID NO: 7436 - RNA, 19 nt, Artificial Sequence
  Description of Artificial Sequence: Synthetic oligonucleotide
  Sense strand starting at position 2121 of SEQ ID NO: 43
ggugucagaaaguauguga

SEQ ID NO: 7437 - RNA, 19 nt, Artificial Sequence
  Description of Artificial Sequence: Synthetic oligonucleotide
  Antisense strand to SEQ ID NO: 7436
ucacauacuuucugacacc

SEQ ID NO: 7438 - RNA, 19 nt, Artificial Sequence
  Description of Artificial Sequence: Synthetic oligonucleotide
  Sense strand starting at position 2105 of SEQ ID NO: 43
aagcuaguuucucuauggu

SEQ ID NO: 7439 - RNA, 19 nt, Artificial Sequence
  Description of Artificial Sequence: Synthetic oligonucleotide
  Antisense strand to SEQ ID NO: 7438
accauagagaaacuagcuu

SEQ ID NO: 7440 - RNA, 19 nt, Artificial Sequence
  Description of Artificial Sequence: Synthetic oligonucleotide
  Sense strand starting at position 2100 of SEQ ID NO: 43
agagaaagcuaguuucucu

SEQ ID NO: 7441 - RNA, 19 nt, Artificial Sequence
  Description of Artificial Sequence: Synthetic oligonucleotide
  Antisense strand to SEQ ID NO: 7440
agagaaacuagcuuucucu

SEQ ID NO: 7442 - RNA, 19 nt, Artificial Sequence
  Description of Artificial Sequence: Synthetic oligonucleotide
  Sense strand starting at position 2067 of SEQ ID NO: 43
agagaccuucucuaguauu

SEQ ID NO: 7443 - RNA, 19 nt, Artificial Sequence
  Description of Artificial Sequence: Synthetic oligonucleotide
  Antisense strand to SEQ ID NO: 7442
aauacuagagaaggucucu

SEQ ID NO: 7444 - RNA, 19 nt, Artificial Sequence
  Description of Artificial Sequence: Synthetic oligonucleotide
  Sense strand starting at position 2066 of SEQ ID NO: 43
gagagaccuucucuaguau

SEQ ID NO: 7445 - RNA, 19 nt, Artificial Sequence
  Description of Artificial Sequence: Synthetic oligonucleotide
  Antisense strand to SEQ ID NO: 7444
auacuagagaaggucucuc

SEQ ID NO: 7446 - RNA, 19 nt, Artificial Sequence
  Description of Artificial Sequence: Synthetic oligonucleotide
  Sense strand starting at position 1489 of SEQ ID NO: 43
cugacuuacccuugaagga

SEQ ID NO: 7447 - RNA, 19 nt, Artificial Sequence
  Description of Artificial Sequence: Synthetic oligonucleotide
  Antisense strand to SEQ ID NO: 7446
uccuucaaggguaagucag

SEQ ID NO: 7448 - RNA, 19 nt, Artificial Sequence
  Description of Artificial Sequence: Synthetic oligonucleotide
  Sense strand starting at position 1367 of SEQ ID NO: 43
cuauuugcaucucaaggaa

SEQ ID NO: 7449 - RNA, 19 nt, Artificial Sequence
  Description of Artificial Sequence: Synthetic oligonucleotide
  Antisense strand to SEQ ID NO: 7448
uuccuugagaugcaaauag

SEQ ID NO: 7450 - RNA, 19 nt, Artificial Sequence
  Description of Artificial Sequence: Synthetic oligonucleotide
  Sense strand starting at position 1314 of SEQ ID NO: 43
acuuuagcucugcaaugga

SEQ ID NO: 7451 - RNA, 19 nt, Artificial Sequence
  Description of Artificial Sequence: Synthetic oligonucleotide
  Antisense strand to SEQ ID NO: 7450
uccauugcagagcuaaagu

SEQ ID NO: 7452 - RNA, 19 nt, Artificial Sequence
  Description of Artificial Sequence: Synthetic oligonucleotide
  Sense strand starting at position 1312 of SEQ ID NO: 43
auacuuuagcucugcaaug

SEQ ID NO: 7453 - RNA, 19 nt, Artificial Sequence
  Description of Artificial Sequence: Synthetic oligonucleotide
  Antisense strand to SEQ ID NO: 7452
cauugcagagcuaaaguau

SEQ ID NO: 7454 - RNA, 19 nt, Artificial Sequence
  Description of Artificial Sequence: Synthetic oligonucleotide
  Sense strand starting at position 1251 of SEQ ID NO: 43
cuauaaucagguugcauga

SEQ ID NO: 7455 - RNA, 19 nt, Artificial Sequence
  Description of Artificial Sequence: Synthetic oligonucleotide
  Antisense strand to SEQ ID NO: 7454
ucaugcaaccugauuauag

SEQ ID NO: 7456 - RNA, 19 nt, Artificial Sequence
  Description of Artificial Sequence: Synthetic oligonucleotide
  Sense strand starting at position 1174 of SEQ ID NO: 43
caagaauguugguuuaaug

SEQ ID NO: 7457 - RNA, 19 nt, Artificial Sequence
  Description of Artificial Sequence: Synthetic oligonucleotide
  Antisense strand to SEQ ID NO: 7456
cauuaaaccaacauucuug

SEQ ID NO: 7458 - RNA, 19 nt, Artificial Sequence
  Description of Artificial Sequence: Synthetic oligonucleotide
  Sense strand starting at position 676 of SEQ ID NO: 43
ucuuuacugcaaugagaga

SEQ ID NO: 7459 - RNA, 19 nt, Artificial Sequence
  Description of Artificial Sequence: Synthetic oligonucleotide
  Antisense strand to SEQ ID NO: 7458
ucucucauugcaguaaaga

SEQ ID NO: 7460 - RNA, 19 nt, Artificial Sequence
  Description of Artificial Sequence: Synthetic oligonucleotide
  Sense strand starting at position 670 of SEQ ID NO: 43
gguaguucuuuacugcaau

SEQ ID NO: 7461 - RNA, 19 nt, Artificial Sequence
  Description of Artificial Sequence: Synthetic oligonucleotide
  Antisense strand to SEQ ID NO: 7460
auugcaguaaagaacuacc

SEQ ID NO: 7462 - RNA, 19 nt, Artificial Sequence
  Description of Artificial Sequence: Synthetic oligonucleotide
  Sense strand starting at position 407 of SEQ ID NO: 43
gugagagguguuugaucac

SEQ ID NO: 7463 - RNA, 19 nt, Artificial Sequence
  Description of Artificial Sequence: Synthetic oligonucleotide
  Antisense strand to SEQ ID NO: 7462
gugaucaaacaccucucac

SEQ ID NO: 7464 - RNA, 19 nt, Artificial Sequence
  Description of Artificial Sequence: Synthetic oligonucleotide
  Sense strand starting at position 358 of SEQ ID NO: 43
gcccaaaucucauucgaau

SEQ ID NO: 7465 - RNA, 19 nt, Artificial Sequence
  Description of Artificial Sequence: Synthetic oligonucleotide
  Antisense strand to SEQ ID NO: 7464
auucgaaugagauuugggc

SEQ ID NO: 7466 - RNA, 19 nt, Artificial Sequence
  Description of Artificial Sequence: Synthetic oligonucleotide
  Sense strand starting at position 275 of SEQ ID NO: 43
gguucuaucuacuuauauu

SEQ ID NO: 7467 - RNA, 19 nt, Artificial Sequence
  Description of Artificial Sequence: Synthetic oligonucleotide
  Antisense strand to SEQ ID NO: 7466
aauauaaguagauagaacc

SEQ ID NO: 7468 - RNA, 19 nt, Artificial Sequence
  Description of Artificial Sequence: Synthetic oligonucleotide
  Sense strand starting at position 3954 of SEQ ID NO: 42
ccuauauaauaagaaggau

SEQ ID NO: 7469 - RNA, 19 nt, Artificial Sequence
  Description of Artificial Sequence: Synthetic oligonucleotide
  Antisense strand to SEQ ID NO: 7468
auccuucuuauuauauagg

SEQ ID NO: 7470 - RNA, 19 nt, Artificial Sequence
  Description of Artificial Sequence: Synthetic oligonucleotide
  Sense strand starting at position 3763 of SEQ ID NO: 42
gagaauggcuaguugcaaa

SEQ ID NO: 7471 - RNA, 19 nt, Artificial Sequence
  Description of Artificial Sequence: Synthetic oligonucleotide
  Antisense strand to SEQ ID NO: 7470
uuugcaacuagccauucuc

SEQ ID NO: 7472 - RNA, 19 nt, Artificial Sequence
  Description of Artificial Sequence: Synthetic oligonucleotide
  Sense strand starting at position 3753 of SEQ ID NO: 42
guagauuucugagaauggc

SEQ ID NO: 7473 - RNA, 19 nt, Artificial Sequence
  Description of Artificial Sequence: Synthetic oligonucleotide
  Antisense strand to SEQ ID NO: 7472
gccauucucagaaaucuac

SEQ ID NO: 7474 - RNA, 19 nt, Artificial Sequence
  Description of Artificial Sequence: Synthetic oligonucleotide
  Sense strand starting at position 3682 of SEQ ID NO: 42
gaaugacuguagguccaaa

SEQ ID NO: 7475 - RNA, 19 nt, Artificial Sequence
  Description of Artificial Sequence: Synthetic oligonucleotide
  Antisense strand to SEQ ID NO: 7474
uuuggaccuacagucauuc

SEQ ID NO: 7476 - RNA, 19 nt, Artificial Sequence
  Description of Artificial Sequence: Synthetic oligonucleotide
  Sense strand starting at position 3665 of SEQ ID NO: 42
uugcauucuuuauugugga

SEQ ID NO: 7477 - RNA, 19 nt, Artificial Sequence
  Description of Artificial Sequence: Synthetic oligonucleotide
  Antisense strand to SEQ ID NO: 7476
uccacaauaaagaaugcaa

SEQ ID NO: 7478 - RNA, 19 nt, Artificial Sequence
  Description of Artificial Sequence: Synthetic oligonucleotide
  Sense strand starting at position 3653 of SEQ ID NO: 42
uggagaagauucuugcauu

SEQ ID NO: 7479 - RNA, 19 nt, Artificial Sequence
  Description of Artificial Sequence: Synthetic oligonucleotide
  Antisense strand to SEQ ID NO: 7478
aaugcaagaaucuucucca

SEQ ID NO: 7480 - RNA, 19 nt, Artificial Sequence
  Description of Artificial Sequence: Synthetic oligonucleotide
  Sense strand starting at position 3645 of SEQ ID NO: 42
guggcguguggagaagauu

SEQ ID NO: 7481 - RNA, 19 nt, Artificial Sequence
  Description of Artificial Sequence: Synthetic oligonucleotide
  Antisense strand to SEQ ID NO: 7480
aaucuucuccacacgccac

SEQ ID NO: 7482 - RNA, 19 nt, Artificial Sequence
  Description of Artificial Sequence: Synthetic oligonucleotide
  Sense strand starting at position 3618 of SEQ ID NO: 42
gacagaagauuugguuaac

SEQ ID NO: 7483 - RNA, 19 nt, Artificial Sequence
  Description of Artificial Sequence: Synthetic oligonucleotide
  Antisense strand to SEQ ID NO: 7482
guuaaccaaaucuucuguc

SEQ ID NO: 7484 - RNA, 19 nt, Artificial Sequence
  Description of Artificial Sequence: Synthetic oligonucleotide
  Sense strand starting at position 3594 of SEQ ID NO: 42
gcuccuaaugguuaugaga

SEQ ID NO: 7485 - RNA, 19 nt, Artificial Sequence
  Description of Artificial Sequence: Synthetic oligonucleotide
  Antisense strand to SEQ ID NO: 7484
ucucauaaccauuaggagc

SEQ ID NO: 7486 - RNA, 19 nt, Artificial Sequence
  Description of Artificial Sequence: Synthetic oligonucleotide
  Sense strand starting at position 3495 of SEQ ID NO: 42
cacuuauguuaggccagua

SEQ ID NO: 7487 - RNA, 19 nt, Artificial Sequence
  Description of Artificial Sequence: Synthetic oligonucleotide
  Antisense strand to SEQ ID NO: 7486
uacuggccuaacauaagug

SEQ ID NO: 7488 - RNA, 19 nt, Artificial Sequence
  Description of Artificial Sequence: Synthetic oligonucleotide
  Sense strand starting at position 3394 of SEQ ID NO: 42
ucugcaaaccaucgagagu

SEQ ID NO: 7489 - RNA, 19 nt, Artificial Sequence
  Description of Artificial Sequence: Synthetic oligonucleotide
  Antisense strand to SEQ ID NO: 7488
acucucgaugguuugcaga

SEQ ID NO: 7490 - RNA, 19 nt, Artificial Sequence
  Description of Artificial Sequence: Synthetic oligonucleotide
  Sense strand starting at position 3350 of SEQ ID NO: 42
acacauguuccugaaugca

SEQ ID NO: 7491 - RNA, 19 nt, Artificial Sequence
  Description of Artificial Sequence: Synthetic oligonucleotide
  Antisense strand to SEQ ID NO: 7490
ugcauucaggaacaugugu

SEQ ID NO: 7492 - RNA, 19 nt, Artificial Sequence
  Description of Artificial Sequence: Synthetic oligonucleotide
  Sense strand starting at position 3348 of SEQ ID NO: 42
ggacacauguuccugaaug

SEQ ID NO: 7493 - RNA, 19 nt, Artificial Sequence
  Description of Artificial Sequence: Synthetic oligonucleotide
  Antisense strand to SEQ ID NO: 7492
cauucaggaacaugugucc

SEQ ID NO: 7494 - RNA, 19 nt, Artificial Sequence
  Description of Artificial Sequence: Synthetic oligonucleotide
  Sense strand starting at position 3289 of SEQ ID NO: 42
uggcuacagccuugacauu

SEQ ID NO: 7495 - RNA, 19 nt, Artificial Sequence
  Description of Artificial Sequence: Synthetic oligonucleotide
  Antisense strand to SEQ ID NO: 7494
aaugucaaggcuguagcca

SEQ ID NO: 7496 - RNA, 19 nt, Artificial Sequence
  Description of Artificial Sequence: Synthetic oligonucleotide
  Sense strand starting at position 3239 of SEQ ID NO: 42
uggccuaaguucucagagu

SEQ ID NO: 7497 - RNA, 19 nt, Artificial Sequence
  Description of Artificial Sequence: Synthetic oligonucleotide
  Antisense strand to SEQ ID NO: 7496
acucugagaacuuaggcca

SEQ ID NO: 7498 - RNA, 19 nt, Artificial Sequence
  Description of Artificial Sequence: Synthetic oligonucleotide
  Sense strand starting at position 2553 of SEQ ID NO: 42
gcacuuacgccgagggagu

SEQ ID NO: 7499 - RNA, 19 nt, Artificial Sequence
  Description of Artificial Sequence: Synthetic oligonucleotide
  Antisense strand to SEQ ID NO: 7498
acucccucggcguaagugc

SEQ ID NO: 7500 - RNA, 19 nt, Artificial Sequence
  Description of Artificial Sequence: Synthetic oligonucleotide
  Sense strand starting at position 2500 of SEQ ID NO: 42
gcgagcuauagauagaaag

SEQ ID NO: 7501 - RNA, 19 nt, Artificial Sequence
  Description of Artificial Sequence: Synthetic oligonucleotide
  Antisense strand to SEQ ID NO: 7500
cuuucuaucuauagcucgc

SEQ ID NO: 7502 - RNA, 19 nt, Artificial Sequence
  Description of Artificial Sequence: Synthetic oligonucleotide
  Sense strand starting at position 2498 of SEQ ID NO: 42
gagcgagcuauagauagaa

SEQ ID NO: 7503 - RNA, 19 nt, Artificial Sequence
  Description of Artificial Sequence: Synthetic oligonucleotide
  Antisense strand to SEQ ID NO: 7502
uucuaucuauagcucgcuc

SEQ ID NO: 7504 - RNA, 19 nt, Artificial Sequence
  Description of Artificial Sequence: Synthetic oligonucleotide
  Sense strand starting at position 1644 of SEQ ID NO: 42
uccuaacacgagggauaua

SEQ ID NO: 7505 - RNA, 19 nt, Artificial Sequence
  Description of Artificial Sequence: Synthetic oligonucleotide
  Antisense strand to SEQ ID NO: 7504
uauaucccucguguuagga

SEQ ID NO: 7506 - RNA, 19 nt, Artificial Sequence
  Description of Artificial Sequence: Synthetic oligonucleotide
  Sense strand starting at position 1643 of SEQ ID NO: 42
auccuaacacgagggauau

SEQ ID NO: 7507 - RNA, 19 nt, Artificial Sequence
  Description of Artificial Sequence: Synthetic oligonucleotide
  Antisense strand to SEQ ID NO: 7506
auaucccucguguuaggau

SEQ ID NO: 7508 - RNA, 19 nt, Artificial Sequence
  Description of Artificial Sequence: Synthetic oligonucleotide
  Sense strand starting at position 1603 of SEQ ID NO: 42
gggaauuaguacgcagaga

SEQ ID NO: 7509 - RNA, 19 nt, Artificial Sequence
  Description of Artificial Sequence: Synthetic oligonucleotide
  Antisense strand to SEQ ID NO: 7508
ucucugcguacuaauuccc

SEQ ID NO: 7510 - RNA, 19 nt, Artificial Sequence
  Description of Artificial Sequence: Synthetic oligonucleotide
  Sense strand starting at position 1365 of SEQ ID NO: 42
cuccacauuugagaaguuu

SEQ ID NO: 7511 - RNA, 19 nt, Artificial Sequence
  Description of Artificial Sequence: Synthetic oligonucleotide
  Antisense strand to SEQ ID NO: 7510
aaacuucucaaauguggag

SEQ ID NO: 7512 - RNA, 19 nt, Artificial Sequence
  Description of Artificial Sequence: Synthetic oligonucleotide
  Sense strand starting at position 1309 of SEQ ID NO: 42
ccagaugaguuauugcacu

SEQ ID NO: 7513 - RNA, 19 nt, Artificial Sequence
  Description of Artificial Sequence: Synthetic oligonucleotide
  Antisense strand to SEQ ID NO: 7512
agugcaauaacucaucugg

SEQ ID NO: 7514 - RNA, 19 nt, Artificial Sequence
  Description of Artificial Sequence: Synthetic oligonucleotide
  Sense strand starting at position 1240 of SEQ ID NO: 42
auuaacuagccuuguagaa

SEQ ID NO: 7515 - RNA, 19 nt, Artificial Sequence
  Description of Artificial Sequence: Synthetic oligonucleotide
  Antisense strand to SEQ ID NO: 7514
uucuacaaggcuaguuaau

SEQ ID NO: 7516 - RNA, 19 nt, Artificial Sequence
  Description of Artificial Sequence: Synthetic oligonucleotide
  Sense strand starting at position 1143 of SEQ ID NO: 42
acauccauuugguacauua

SEQ ID NO: 7517 - RNA, 19 nt, Artificial Sequence
  Description of Artificial Sequence: Synthetic oligonucleotide
  Antisense strand to SEQ ID NO: 7516
uaauguaccaaauggaugu

SEQ ID NO: 7518 - RNA, 19 nt, Artificial Sequence
  Description of Artificial Sequence: Synthetic oligonucleotide
  Sense strand starting at position 1120 of SEQ ID NO: 42
cuuugaaauguuuaugacu

SEQ ID NO: 7519 - RNA, 19 nt, Artificial Sequence
  Description of Artificial Sequence: Synthetic oligonucleotide
  Antisense strand to SEQ ID NO: 7518
agucauaaacauuucaaag

SEQ ID NO: 7520 - RNA, 19 nt, Artificial Sequence
  Description of Artificial Sequence: Synthetic oligonucleotide
  Sense strand starting at position 1053 of SEQ ID NO: 42
cacauuguaugugugaaau

SEQ ID NO: 7521 - RNA, 19 nt, Artificial Sequence
  Description of Artificial Sequence: Synthetic oligonucleotide
  Antisense strand to SEQ ID NO: 7520
auuucacacauacaaugug

SEQ ID NO: 7522 - RNA, 19 nt, Artificial Sequence
  Description of Artificial Sequence: Synthetic oligonucleotide
  Sense strand starting at position 1052 of SEQ ID NO: 42
ucacauuguaugugugaaa

SEQ ID NO: 7523 - RNA, 19 nt, Artificial Sequence
  Description of Artificial Sequence: Synthetic oligonucleotide
  Antisense strand to SEQ ID NO: 7522
uuucacacauacaauguga

SEQ ID NO: 7524 - RNA, 19 nt, Artificial Sequence
  Description of Artificial Sequence: Synthetic oligonucleotide
  Sense strand starting at position 1051 of SEQ ID NO: 42
aucacauuguaugugugaa

SEQ ID NO: 7525 - RNA, 19 nt, Artificial Sequence
  Description of Artificial Sequence: Synthetic oligonucleotide
  Antisense strand to SEQ ID NO: 7524
uucacacauacaaugugau

SEQ ID NO: 7526 - RNA, 19 nt, Artificial Sequence
  Description of Artificial Sequence: Synthetic oligonucleotide
  Sense strand starting at position 1050 of SEQ ID NO: 42
uaucacauuguauguguga

SEQ ID NO: 7527 - RNA, 19 nt, Artificial Sequence
  Description of Artificial Sequence: Synthetic oligonucleotide
  Antisense strand to SEQ ID NO: 7526
ucacacauacaaugugaua

SEQ ID NO: 7528 - RNA, 19 nt, Artificial Sequence
  Description of Artificial Sequence: Synthetic oligonucleotide
  Sense strand starting at position 987 of SEQ ID NO: 42
ggaguagguacucagugau

SEQ ID NO: 7529 - RNA, 19 nt, Artificial Sequence
  Description of Artificial Sequence: Synthetic oligonucleotide
  Antisense strand to SEQ ID NO: 7528
aucacugaguaccuacucc

SEQ ID NO: 7530 - RNA, 19 nt, Artificial Sequence
  Description of Artificial Sequence: Synthetic oligonucleotide
  Sense strand starting at position 986 of SEQ ID NO: 42
uggaguagguacucaguga

SEQ ID NO: 7531 - RNA, 19 nt, Artificial Sequence
  Description of Artificial Sequence: Synthetic oligonucleotide
  Antisense strand to SEQ ID NO: 7530
ucacugaguaccuacucca

SEQ ID NO: 7532 - RNA, 19 nt, Artificial Sequence
  Description of Artificial Sequence: Synthetic oligonucleotide
  Sense strand starting at position 803 of SEQ ID NO: 42
gagacuguguaacuaauuc

SEQ ID NO: 7533 - RNA, 19 nt, Artificial Sequence
  Description of Artificial Sequence: Synthetic oligonucleotide
  Antisense strand to SEQ ID NO: 7532
gaauuaguuacacagucuc

SEQ ID NO: 7534 - RNA, 19 nt, Artificial Sequence
  Description of Artificial Sequence: Synthetic oligonucleotide
  Sense strand starting at position 799 of SEQ ID NO: 42
ccaugagacuguguaacua

SEQ ID NO: 7535 - RNA, 19 nt, Artificial Sequence
  Description of Artificial Sequence: Synthetic oligonucleotide
  Antisense strand to SEQ ID NO: 7534
uaguuacacagucucaugg

SEQ ID NO: 7536 - RNA, 19 nt, Artificial Sequence
  Description of Artificial Sequence: Synthetic oligonucleotide
  Sense strand starting at position 796 of SEQ ID NO: 42
aggccaugagacuguguaa

SEQ ID NO: 7537 - RNA, 19 nt, Artificial Sequence
  Description of Artificial Sequence: Synthetic oligonucleotide
  Antisense strand to SEQ ID NO: 7536
uuacacagucucauggccu

SEQ ID NO: 7538 - RNA, 19 nt, Artificial Sequence
  Description of Artificial Sequence: Synthetic oligonucleotide
  Sense strand starting at position 771 of SEQ ID NO: 42
gucauuagcacagaggcaa

SEQ ID NO: 7539 - RNA, 19 nt, Artificial Sequence
  Description of Artificial Sequence: Synthetic oligonucleotide
  Antisense strand to SEQ ID NO: 7538
uugccucugugcuaaugac

SEQ ID NO: 7540 - RNA, 19 nt, Artificial Sequence
  Description of Artificial Sequence: Synthetic oligonucleotide
  Sense strand starting at position 701 of SEQ ID NO: 42
agaucuacccgucaucaaa

SEQ ID NO: 7541 - RNA, 19 nt, Artificial Sequence
  Description of Artificial Sequence: Synthetic oligonucleotide
  Antisense strand to SEQ ID NO: 7540
uuugaugacggguagaucu

SEQ ID NO: 7542 - RNA, 19 nt, Artificial Sequence
  Description of Artificial Sequence: Synthetic oligonucleotide
  Sense strand starting at position 685 of SEQ ID NO: 42
ggagaauucuggcucuaga

SEQ ID NO: 7543 - RNA, 19 nt, Artificial Sequence
  Description of Artificial Sequence: Synthetic oligonucleotide
  Antisense strand to SEQ ID NO: 7542
ucuagagccagaauucucc

SEQ ID NO: 7544 - RNA, 19 nt, Artificial Sequence
  Description of Artificial Sequence: Synthetic oligonucleotide
  Sense strand starting at position 137 of SEQ ID NO: 42
gugggaauacauggaguga

SEQ ID NO: 7545 - RNA, 19 nt, Artificial Sequence
  Description of Artificial Sequence: Synthetic oligonucleotide
  Antisense strand to SEQ ID NO: 7544
ucacuccauguauucccac

SEQ ID NO: 7546 - RNA, 19 nt, Artificial Sequence
  Description of Artificial Sequence: Synthetic oligonucleotide
  Sense strand starting at position 4 of SEQ ID NO: 42
cagggaagcugagaaauaa

SEQ ID NO: 7547 - RNA, 19 nt, Artificial Sequence
  Description of Artificial Sequence: Synthetic oligonucleotide
  Antisense strand to SEQ ID NO: 7546
uuauuucucagcuucccug

SEQ ID NO: 7548 - RNA, 19 nt, Artificial Sequence
  Description of Artificial Sequence: Synthetic oligonucleotide
  Sense strand starting at position 30 of SEQ ID NO: 46
uaaguaaacccugagugca

SEQ ID NO: 7549 - RNA, 19 nt, Artificial Sequence
  Description of Artificial Sequence: Synthetic oligonucleotide
  Antisense strand to SEQ ID NO: 7548
ugcacucaggguuuacuua

SEQ ID NO: 7550 - RNA, 19 nt, Artificial Sequence
  Description of Artificial Sequence: Synthetic oligonucleotide
  Sense strand starting at position 75 of SEQ ID NO: 46
gacauuacccaaggucaga

SEQ ID NO: 7551 - RNA, 19 nt, Artificial Sequence
  Description of Artificial Sequence: Synthetic oligonucleotide
  Antisense strand to SEQ ID NO: 7550
ucugaccuuggguaauguc

SEQ ID NO: 7552 - RNA, 19 nt, Artificial Sequence
  Description of Artificial Sequence: Synthetic oligonucleotide
  Sense strand starting at position 80 of SEQ ID NO: 46
uacccaaggucagaggaau

SEQ ID NO: 7553 - RNA, 19 nt, Artificial Sequence
  Description of Artificial Sequence: Synthetic oligonucleotide
  Antisense strand to SEQ ID NO: 7552
auuccucugaccuugggua

SEQ ID NO: 7554 - RNA, 19 nt, Artificial Sequence
  Description of Artificial Sequence: Synthetic oligonucleotide
  Sense strand starting at position 143 of SEQ ID NO: 46
ggcagcuguccugaagguu

SEQ ID NO: 7555 - RNA, 19 nt, Artificial Sequence
  Description of Artificial Sequence: Synthetic oligonucleotide
  Antisense strand to SEQ ID NO: 7554
aaccuucaggacagcugcc

SEQ ID NO: 7556 - RNA, 19 nt, Artificial Sequence
  Description of Artificial Sequence: Synthetic oligonucleotide
  Sense strand starting at position 146 of SEQ ID NO: 46
agcuguccugaagguugua

SEQ ID NO: 7557 - RNA, 19 nt, Artificial Sequence
  Description of Artificial Sequence: Synthetic oligonucleotide
  Antisense strand to SEQ ID NO: 7556
uacaaccuucaggacagcu

SEQ ID NO: 7558 - RNA, 19 nt, Artificial Sequence
  Description of Artificial Sequence: Synthetic oligonucleotide
  Sense strand starting at position 149 of SEQ ID NO: 46
uguccugaagguuguaaag

SEQ ID NO: 7559 - RNA, 19 nt, Artificial Sequence
  Description of Artificial Sequence: Synthetic oligonucleotide
  Antisense strand to SEQ ID NO: 7558
cuuuacaaccuucaggaca

SEQ ID NO: 7560 - RNA, 19 nt, Artificial Sequence
  Description of Artificial Sequence: Synthetic oligonucleotide
  Sense strand starting at position 158 of SEQ ID NO: 46
gguuguaaagauugacauu

SEQ ID NO: 7561 - RNA, 19 nt, Artificial Sequence
  Description of Artificial Sequence: Synthetic oligonucleotide
  Antisense strand to SEQ ID NO: 7560
aaugucaaucuuuacaacc

SEQ ID NO: 7562 - RNA, 19 nt, Artificial Sequence
  Description of Artificial Sequence: Synthetic oligonucleotide
  Sense strand starting at position 182 of SEQ ID NO: 46
cgccuaggucugcaaccau

SEQ ID NO: 7563 - RNA, 19 nt, Artificial Sequence
  Description of Artificial Sequence: Synthetic oligonucleotide
  Antisense strand to SEQ ID NO: 7562
augguugcagaccuaggcg

SEQ ID NO: 7564 - RNA, 19 nt, Artificial Sequence
  Description of Artificial Sequence: Synthetic oligonucleotide
  Sense strand starting at position 252 of SEQ ID NO: 46
cacugauucuucccggaug

SEQ ID NO: 7565 - RNA, 19 nt, Artificial Sequence
  Description of Artificial Sequence: Synthetic oligonucleotide
  Antisense strand to SEQ ID NO: 7564
cauccgggaagaaucagug

SEQ ID NO: 7566 - RNA, 19 nt, Artificial Sequence
  Description of Artificial Sequence: Synthetic oligonucleotide
  Sense strand starting at position 310 of SEQ ID NO: 46
cagccaucaucugcagaga

SEQ ID NO: 7567 - RNA, 19 nt, Artificial Sequence
  Description of Artificial Sequence: Synthetic oligonucleotide
  Antisense strand to SEQ ID NO: 7566
ucucugcagaugauggcug

SEQ ID NO: 7568 - RNA, 19 nt, Artificial Sequence
  Description of Artificial Sequence: Synthetic oligonucleotide
  Sense strand starting at position 311 of SEQ ID NO: 46
agccaucaucugcagagau

SEQ ID NO: 7569 - RNA, 19 nt, Artificial Sequence
  Description of Artificial Sequence: Synthetic oligonucleotide
  Antisense strand to SEQ ID NO: 7568
aucucugcagaugauggcu

SEQ ID NO: 7570 - RNA, 19 nt, Artificial Sequence
  Description of Artificial Sequence: Synthetic oligonucleotide
  Sense strand starting at position 352 of SEQ ID NO: 46
gcuucucagccucagcaau

SEQ ID NO: 7571 - RNA, 19 nt, Artificial Sequence
  Description of Artificial Sequence: Synthetic oligonucleotide
  Antisense strand to SEQ ID NO: 7570
auugcugaggcugagaagc

SEQ ID NO: 7572 - RNA, 19 nt, Artificial Sequence
  Description of Artificial Sequence: Synthetic oligonucleotide
  Sense strand starting at position 531 of SEQ ID NO: 46
acuugagaaucaccgaucu

SEQ ID NO: 7573 - RNA, 19 nt, Artificial Sequence
  Description of Artificial Sequence: Synthetic oligonucleotide
  Antisense strand to SEQ ID NO: 7572
agaucggugauucucaagu

SEQ ID NO: 7574 - RNA, 19 nt, Artificial Sequence
  Description of Artificial Sequence: Synthetic oligonucleotide
  Sense strand starting at position 542 of SEQ ID NO: 46
accgaucuaggcuauguau

SEQ ID NO: 7575 - RNA, 19 nt, Artificial Sequence
  Description of Artificial Sequence: Synthetic oligonucleotide
  Antisense strand to SEQ ID NO: 7574
auacauagccuagaucggu

SEQ ID NO: 7576 - RNA, 19 nt, Artificial Sequence
  Description of Artificial Sequence: Synthetic oligonucleotide
  Sense strand starting at position 550 of SEQ ID NO: 46
aggcuauguaucgaagaga

SEQ ID NO: 7577 - RNA, 19 nt, Artificial Sequence
  Description of Artificial Sequence: Synthetic oligonucleotide
  Antisense strand to SEQ ID NO: 7576
ucucuucgauacauagccu

SEQ ID NO: 7578 - RNA, 19 nt, Artificial Sequence
  Description of Artificial Sequence: Synthetic oligonucleotide
  Sense strand starting at position 640 of SEQ ID NO: 46
auauuuaccuugcacugua

SEQ ID NO: 7579 - RNA, 19 nt, Artificial Sequence
  Description of Artificial Sequence: Synthetic oligonucleotide
  Antisense strand to SEQ ID NO: 7578
uacagugcaagguaaauau

SEQ ID NO: 7580 - RNA, 19 nt, Artificial Sequence
  Description of Artificial Sequence: Synthetic oligonucleotide
  Sense strand starting at position 672 of SEQ ID NO: 46
gagguaaucuaugcaaagc

SEQ ID NO: 7581 - RNA, 19 nt, Artificial Sequence
  Description of Artificial Sequence: Synthetic oligonucleotide
  Antisense strand to SEQ ID NO: 7580
gcuuugcauagauuaccuc

SEQ ID NO: 7582 - RNA, 19 nt, Artificial Sequence
  Description of Artificial Sequence: Synthetic oligonucleotide
  Sense strand starting at position 689 of SEQ ID NO: 46
gcaccuugcacuuaggaga

SEQ ID NO: 7583 - RNA, 19 nt, Artificial Sequence
  Description of Artificial Sequence: Synthetic oligonucleotide
  Antisense strand to SEQ ID NO: 7582
ucuccuaagugcaaggugc

SEQ ID NO: 7584 - RNA, 19 nt, Artificial Sequence
  Description of Artificial Sequence: Synthetic oligonucleotide
  Sense strand starting at position 754 of SEQ ID NO: 46
uauaguguugcugagcuga

SEQ ID NO: 7585 - RNA, 19 nt, Artificial Sequence
  Description of Artificial Sequence: Synthetic oligonucleotide
  Antisense strand to SEQ ID NO: 7584
ucagcucagcaacacuaua

SEQ ID NO: 7586 - RNA, 19 nt, Artificial Sequence
  Description of Artificial Sequence: Synthetic oligonucleotide
  Sense strand starting at position 855 of SEQ ID NO: 46
agcauuucuugagucaggu

SEQ ID NO: 7587 - RNA, 19 nt, Artificial Sequence
  Description of Artificial Sequence: Synthetic oligonucleotide
  Antisense strand to SEQ ID NO: 7586
accugacucaagaaaugcu

SEQ ID NO: 7588 - RNA, 19 nt, Artificial Sequence
  Description of Artificial Sequence: Synthetic oligonucleotide
  Sense strand starting at position 861 of SEQ ID NO: 46
ucuugagucaggugacauc

SEQ ID NO: 7589 - RNA, 19 nt, Artificial Sequence
  Description of Artificial Sequence: Synthetic oligonucleotide
  Antisense strand to SEQ ID NO: 7588
gaugucaccugacucaaga

SEQ ID NO: 7590 - RNA, 19 nt, Artificial Sequence
  Description of Artificial Sequence: Synthetic oligonucleotide
  Sense strand starting at position 1515 of SEQ ID NO: 46
gugcuuuccaugcccgaca

SEQ ID NO: 7591 - RNA, 19 nt, Artificial Sequence
  Description of Artificial Sequence: Synthetic oligonucleotide
  Antisense strand to SEQ ID NO: 7590
ugucgggcauggaaagcac

SEQ ID NO: 7592 - RNA, 19 nt, Artificial Sequence
  Description of Artificial Sequence: Synthetic oligonucleotide
  Sense strand starting at position 2320 of SEQ ID NO: 46
ccagaaagauaugaaggaa

SEQ ID NO: 7593 - RNA, 19 nt, Artificial Sequence
  Description of Artificial Sequence: Synthetic oligonucleotide
  Antisense strand to SEQ ID NO: 7592
uuccuucauaucuuucugg

SEQ ID NO: 7594 - RNA, 19 nt, Artificial Sequence
  Description of Artificial Sequence: Synthetic oligonucleotide
  Sense strand starting at position 2395 of SEQ ID NO: 46
uuuaaauguccagggauag

SEQ ID NO: 7595 - RNA, 19 nt, Artificial Sequence
  Description of Artificial Sequence: Synthetic oligonucleotide
  Antisense strand to SEQ ID NO: 7594
cuaucccuggacauuuaaa

SEQ ID NO: 7596 - RNA, 19 nt, Artificial Sequence
  Description of Artificial Sequence: Synthetic oligonucleotide
  Sense strand starting at position 2427 of SEQ ID NO: 46
caguaaaguuaguuagcua

SEQ ID NO: 7597 - RNA, 19 nt, Artificial Sequence
  Description of Artificial Sequence: Synthetic oligonucleotide
  Antisense strand to SEQ ID NO: 7596
uagcuaacuaacuuuacug

SEQ ID NO: 7598 - RNA, 19 nt, Artificial Sequence
  Description of Artificial Sequence: Synthetic oligonucleotide
  Sense strand starting at position 2435 of SEQ ID NO: 46
uuaguuagcuacuuagcua

SEQ ID NO: 7599 - RNA, 19 nt, Artificial Sequence
  Description of Artificial Sequence: Synthetic oligonucleotide
  Antisense strand to SEQ ID NO: 7598
uagcuaaguagcuaacuaa

SEQ ID NO: 7600 - RNA, 19 nt, Artificial Sequence
  Description of Artificial Sequence: Synthetic oligonucleotide
  Sense strand starting at position 3080 of SEQ ID NO: 46
agaagugauuuguaaugga

SEQ ID NO: 7601 - RNA, 19 nt, Artificial Sequence
  Description of Artificial Sequence: Synthetic oligonucleotide
  Antisense strand to SEQ ID NO: 7600
uccauuacaaaucacuucu

SEQ ID NO: 7602 - RNA, 19 nt, Artificial Sequence
  Description of Artificial Sequence: Synthetic oligonucleotide
  Sense strand starting at position 3582 of SEQ ID NO: 46
gggacagaguuuccuaaug

SEQ ID NO: 7603 - RNA, 19 nt, Artificial Sequence
  Description of Artificial Sequence: Synthetic oligonucleotide
  Antisense strand to SEQ ID NO: 7602
cauuaggaaacucuguccc

SEQ ID NO: 7604 - RNA, 19 nt, Artificial Sequence
  Description of Artificial Sequence: Synthetic oligonucleotide
  Sense strand starting at position 3590 of SEQ ID NO: 46
guuuccuaauggucaauua

SEQ ID NO: 7605 - RNA, 19 nt, Artificial Sequence
  Description of Artificial Sequence: Synthetic oligonucleotide
  Antisense strand to SEQ ID NO: 7604
uaauugaccauuaggaaac

SEQ ID NO: 7606 - RNA, 19 nt, Artificial Sequence
  Description of Artificial Sequence: Synthetic oligonucleotide
  Sense strand starting at position 3600 of SEQ ID NO: 46
ggucaauuaucagugcuua

SEQ ID NO: 7607 - RNA, 19 nt, Artificial Sequence
  Description of Artificial Sequence: Synthetic oligonucleotide
  Antisense strand to SEQ ID NO: 7606
uaagcacugauaauugacc

SEQ ID NO: 7608 - RNA, 19 nt, Artificial Sequence
  Description of Artificial Sequence: Synthetic oligonucleotide
  Sense strand starting at position 3601 of SEQ ID NO: 46
gucaauuaucagugcuuag

SEQ ID NO: 7609 - RNA, 19 nt, Artificial Sequence
  Description of Artificial Sequence: Synthetic oligonucleotide
  Antisense strand to SEQ ID NO: 7608
cuaagcacugauaauugac

SEQ ID NO: 7610 - RNA, 19 nt, Artificial Sequence
  Description of Artificial Sequence: Synthetic oligonucleotide
  Sense strand starting at position 3604 of SEQ ID NO: 46
aauuaucagugcuuagugu

SEQ ID NO: 7611 - RNA, 19 nt, Artificial Sequence
  Description of Artificial Sequence: Synthetic oligonucleotide
  Antisense strand to SEQ ID NO: 7610
acacuaagcacugauaauu

SEQ ID NO: 7612 - RNA, 19 nt, Artificial Sequence
  Description of Artificial Sequence: Synthetic oligonucleotide
  Sense strand starting at position 3714 of SEQ ID NO: 46
gggucucaguuauucucuu

SEQ ID NO: 7613 - RNA, 19 nt, Artificial Sequence
  Description of Artificial Sequence: Synthetic oligonucleotide
  Antisense strand to SEQ ID NO: 7612
aagagaauaacugagaccc

SEQ ID NO: 7614 - RNA, 19 nt, Artificial Sequence
  Description of Artificial Sequence: Synthetic oligonucleotide
  Sense strand starting at position 3718 of SEQ ID NO: 46
cucaguuauucucuugacu

SEQ ID NO: 7615 - RNA, 19 nt, Artificial Sequence
  Description of Artificial Sequence: Synthetic oligonucleotide
  Antisense strand to SEQ ID NO: 7614
agucaagagaauaacugag

SEQ ID NO: 7616 - RNA, 19 nt, Artificial Sequence
  Description of Artificial Sequence: Synthetic oligonucleotide
  Sense strand starting at position 3760 of SEQ ID NO: 46
ucauguugcuuguccugaa

SEQ ID NO: 7617 - RNA, 19 nt, Artificial Sequence
  Description of Artificial Sequence: Synthetic oligonucleotide
  Antisense strand to SEQ ID NO: 7616
uucaggacaagcaacauga

SEQ ID NO: 7618 - RNA, 19 nt, Artificial Sequence
  Description of Artificial Sequence: Synthetic oligonucleotide
  Sense strand starting at position 3761 of SEQ ID NO: 46
cauguugcuuguccugaau

SEQ ID NO: 7619 - RNA, 19 nt, Artificial Sequence
  Description of Artificial Sequence: Synthetic oligonucleotide
  Antisense strand to SEQ ID NO: 7618
auucaggacaagcaacaug

SEQ ID NO: 7620 - RNA, 19 nt, Artificial Sequence
  Description of Artificial Sequence: Synthetic oligonucleotide
  Sense strand starting at position 3764 of SEQ ID NO: 46
guugcuuguccugaaugua

SEQ ID NO: 7621 - RNA, 19 nt, Artificial Sequence
  Description of Artificial Sequence: Synthetic oligonucleotide
  Antisense strand to SEQ ID NO: 7620
uacauucaggacaagcaac

SEQ ID NO: 7622 - RNA, 19 nt, Artificial Sequence
  Description of Artificial Sequence: Synthetic oligonucleotide
  Sense strand starting at position 3767 of SEQ ID NO: 46
gcuuguccugaauguauca

SEQ ID NO: 7623 - RNA, 19 nt, Artificial Sequence
  Description of Artificial Sequence: Synthetic oligonucleotide
  Antisense strand to SEQ ID NO: 7622
ugauacauucaggacaagc

SEQ ID NO: 7624 - RNA, 19 nt, Artificial Sequence
  Description of Artificial Sequence: Synthetic oligonucleotide
  Sense strand starting at position 3823 of SEQ ID NO: 46
aauauugaguguccgcuau

SEQ ID NO: 7625 - RNA, 19 nt, Artificial Sequence
  Description of Artificial Sequence: Synthetic oligonucleotide
  Antisense strand to SEQ ID NO: 7624
auagcggacacucaauauu

SEQ ID NO: 7626 - RNA, 19 nt, Artificial Sequence
  Description of Artificial Sequence: Synthetic oligonucleotide
  Sense strand starting at position 3891 of SEQ ID NO: 46
cccucucuccuugaaacgu

SEQ ID NO: 7627 - RNA, 19 nt, Artificial Sequence
  Description of Artificial Sequence: Synthetic oligonucleotide
  Antisense strand to SEQ ID NO: 7626
acguuucaaggagagaggg

SEQ ID NO: 7628 - RNA, 19 nt, Artificial Sequence
  Description of Artificial Sequence: Synthetic oligonucleotide
  Sense strand starting at position 3689 of SEQ ID NO: 47
agugaagucucgucucuac

SEQ ID NO: 7629 - RNA, 19 nt, Artificial Sequence
  Description of Artificial Sequence: Synthetic oligonucleotide
  Antisense strand to SEQ ID NO: 7628
guagagacgagacuucacu

SEQ ID NO: 7630 - RNA, 19 nt, Artificial Sequence
  Description of Artificial Sequence: Synthetic oligonucleotide
  Sense strand starting at position 3477 of SEQ ID NO: 47
ccuuacucaugaggagauu

SEQ ID NO: 7631 - RNA, 19 nt, Artificial Sequence
  Description of Artificial Sequence: Synthetic oligonucleotide
  Antisense strand to SEQ ID NO: 7630
aaucuccucaugaguaagg

SEQ ID NO: 7632 - RNA, 19 nt, Artificial Sequence
  Description of Artificial Sequence: Synthetic oligonucleotide
  Sense strand starting at position 3301 of SEQ ID NO: 47
gucucaaaguuucugggaa

SEQ ID NO: 7633 - RNA, 19 nt, Artificial Sequence
  Description of Artificial Sequence: Synthetic oligonucleotide
  Antisense strand to SEQ ID NO: 7632
uucccagaaacuuugagac

SEQ ID NO: 7634 - RNA, 19 nt, Artificial Sequence
  Description of Artificial Sequence: Synthetic oligonucleotide
  Sense strand starting at position 3263 of SEQ ID NO: 47
cauaucuugcuagacguau

SEQ ID NO: 7635 - RNA, 19 nt, Artificial Sequence
  Description of Artificial Sequence: Synthetic oligonucleotide
  Antisense strand to SEQ ID NO: 7634
auacgucuagcaagauaug

SEQ ID NO: 7636 - RNA, 19 nt, Artificial Sequence
  Description of Artificial Sequence: Synthetic oligonucleotide
  Sense strand starting at position 3248 of SEQ ID NO: 47
ggugcagacccuuaucaua

SEQ ID NO: 7637 - RNA, 19 nt, Artificial Sequence
  Description of Artificial Sequence: Synthetic oligonucleotide
  Antisense strand to SEQ ID NO: 7636
uaugauaagggucugcacc

SEQ ID NO: 7638 - RNA, 19 nt, Artificial Sequence
  Description of Artificial Sequence: Synthetic oligonucleotide
  Sense strand starting at position 3225 of SEQ ID NO: 47
ccauucugaugguuucuua

SEQ ID NO: 7639 - RNA, 19 nt, Artificial Sequence
  Description of Artificial Sequence: Synthetic oligonucleotide
  Antisense strand to SEQ ID NO: 7638
uaagaaaccaucagaaugg

SEQ ID NO: 7640 - RNA, 19 nt, Artificial Sequence
  Description of Artificial Sequence: Synthetic oligonucleotide
  Sense strand starting at position 3199 of SEQ ID NO: 47
cugaacugcucucacauga

SEQ ID NO: 7641 - RNA, 19 nt, Artificial Sequence
  Description of Artificial Sequence: Synthetic oligonucleotide
  Antisense strand to SEQ ID NO: 7640
ucaugugagagcaguucag

SEQ ID NO: 7642 - RNA, 19 nt, Artificial Sequence
  Description of Artificial Sequence: Synthetic oligonucleotide
  Sense strand starting at position 3184 of SEQ ID NO: 47
ugacauguuuaccuucuga

SEQ ID NO: 7643 - RNA, 19 nt, Artificial Sequence
  Description of Artificial Sequence: Synthetic oligonucleotide
  Antisense strand to SEQ ID NO: 7642
ucagaagguaaacauguca

SEQ ID NO: 7644 - RNA, 19 nt, Artificial Sequence
  Description of Artificial Sequence: Synthetic oligonucleotide
  Sense strand starting at position 3093 of SEQ ID NO: 47
cuuccuaucucagcgaaca

SEQ ID NO: 7645 - RNA, 19 nt, Artificial Sequence
  Description of Artificial Sequence: Synthetic oligonucleotide
  Antisense strand to SEQ ID NO: 7644
uguucgcugagauaggaag

SEQ ID NO: 7646 - RNA, 19 nt, Artificial Sequence
  Description of Artificial Sequence: Synthetic oligonucleotide
  Sense strand starting at position 3012 of SEQ ID NO: 47
uggauauccuaccagcacu

SEQ ID NO: 7647 - RNA, 19 nt, Artificial Sequence
  Description of Artificial Sequence: Synthetic oligonucleotide
  Antisense strand to SEQ ID NO: 7646
agugcugguaggauaucca

SEQ ID NO: 7648 - RNA, 19 nt, Artificial Sequence
  Description of Artificial Sequence: Synthetic oligonucleotide
  Sense strand starting at position 2549 of SEQ ID NO: 47
gaugucacaguuugaacuu

SEQ ID NO: 7649 - RNA, 19 nt, Artificial Sequence
  Description of Artificial Sequence: Synthetic oligonucleotide
  Antisense strand to SEQ ID NO: 7648
aaguucaaacugugacauc

SEQ ID NO: 7650 - RNA, 19 nt, Artificial Sequence
  Description of Artificial Sequence: Synthetic oligonucleotide
  Sense strand starting at position 2542 of SEQ ID NO: 47
ccuggaagaugucacaguu

SEQ ID NO: 7651 - RNA, 19 nt, Artificial Sequence
  Description of Artificial Sequence: Synthetic oligonucleotide
  Antisense strand to SEQ ID NO: 7650
aacugugacaucuuccagg

SEQ ID NO: 7652 - RNA, 19 nt, Artificial Sequence
  Description of Artificial Sequence: Synthetic oligonucleotide
  Sense strand starting at position 1676 of SEQ ID NO: 47
gcgcuuccaucacuuggaa

SEQ ID NO: 7653 - RNA, 19 nt, Artificial Sequence
  Description of Artificial Sequence: Synthetic oligonucleotide
  Antisense strand to SEQ ID NO: 7652
uuccaagugauggaagcgc

SEQ ID NO: 7654 - RNA, 19 nt, Artificial Sequence
  Description of Artificial Sequence: Synthetic oligonucleotide
  Sense strand starting at position 1330 of SEQ ID NO: 47
gccuucucccaagagacau

SEQ ID NO: 7655 - RNA, 19 nt, Artificial Sequence
  Description of Artificial Sequence: Synthetic oligonucleotide
  Antisense strand to SEQ ID NO: 7654
augucucuugggagaaggc

SEQ ID NO: 7656 - RNA, 19 nt, Artificial Sequence
  Description of Artificial Sequence: Synthetic oligonucleotide
  Sense strand starting at position 1048 of SEQ ID NO: 47
agcauaaccuaagagagaa

SEQ ID NO: 7657 - RNA, 19 nt, Artificial Sequence
  Description of Artificial Sequence: Synthetic oligonucleotide
  Antisense strand to SEQ ID NO: 7656
uucucucuuagguuaugcu

SEQ ID NO: 7658 - RNA, 19 nt, Artificial Sequence
  Description of Artificial Sequence: Synthetic oligonucleotide
  Sense strand starting at position 840 of SEQ ID NO: 47
uugauuccuccguaaccaa

SEQ ID NO: 7659 - RNA, 19 nt, Artificial Sequence
  Description of Artificial Sequence: Synthetic oligonucleotide
  Antisense strand to SEQ ID NO: 7658
uugguuacggaggaaucaa

SEQ ID NO: 7660 - RNA, 19 nt, Artificial Sequence
  Description of Artificial Sequence: Synthetic oligonucleotide
  Sense strand starting at position 839 of SEQ ID NO: 47
cuugauuccuccguaacca

SEQ ID NO: 7661 - RNA, 19 nt, Artificial Sequence
  Description of Artificial Sequence: Synthetic oligonucleotide
  Antisense strand to SEQ ID NO: 7660
ugguuacggaggaaucaag

SEQ ID NO: 7662 - RNA, 19 nt, Artificial Sequence
  Description of Artificial Sequence: Synthetic oligonucleotide
  Sense strand starting at position 838 of SEQ ID NO: 47
ccuugauuccuccguaacc

SEQ ID NO: 7663 - RNA, 19 nt, Artificial Sequence
  Description of Artificial Sequence: Synthetic oligonucleotide
  Antisense strand to SEQ ID NO: 7662
gguuacggaggaaucaagg

SEQ ID NO: 7664 - RNA, 19 nt, Artificial Sequence
  Description of Artificial Sequence: Synthetic oligonucleotide
  Sense strand starting at position 836 of SEQ ID NO: 47
guccuugauuccuccguaa

SEQ ID NO: 7665 - RNA, 19 nt, Artificial Sequence
  Description of Artificial Sequence: Synthetic oligonucleotide
  Antisense strand to SEQ ID NO: 7664
uuacggaggaaucaaggac

SEQ ID NO: 7666 - RNA, 19 nt, Artificial Sequence
  Description of Artificial Sequence: Synthetic oligonucleotide
  Sense strand starting at position 715 of SEQ ID NO: 47
guguaaccuuaacagacaa

SEQ ID NO: 7667 - RNA, 19 nt, Artificial Sequence
  Description of Artificial Sequence: Synthetic oligonucleotide
  Antisense strand to SEQ ID NO: 7666
uugucuguuaagguuacac

SEQ ID NO: 7668 - RNA, 19 nt, Artificial Sequence
  Description of Artificial Sequence: Synthetic oligonucleotide
  Sense strand starting at position 701 of SEQ ID NO: 47
guuauaaauguagagugua

SEQ ID NO: 7669 - RNA, 19 nt, Artificial Sequence
  Description of Artificial Sequence: Synthetic oligonucleotide
  Antisense strand to SEQ ID NO: 7668
uacacucuacauuuauaac

SEQ ID NO: 7670 - RNA, 19 nt, Artificial Sequence
  Description of Artificial Sequence: Synthetic oligonucleotide
  Sense strand starting at position 583 of SEQ ID NO: 47
uuuagaucuuggcucuaaa

SEQ ID NO: 7671 - RNA, 19 nt, Artificial Sequence
  Description of Artificial Sequence: Synthetic oligonucleotide
  Antisense strand to SEQ ID NO: 7670
uuuagagccaagaucuaaa

SEQ ID NO: 7672 - RNA, 19 nt, Artificial Sequence
  Description of Artificial Sequence: Synthetic oligonucleotide
  Sense strand starting at position 581 of SEQ ID NO: 47
gguuuagaucuuggcucua

SEQ ID NO: 7673 - RNA, 19 nt, Artificial Sequence
  Description of Artificial Sequence: Synthetic oligonucleotide
  Antisense strand to SEQ ID NO: 7672
uagagccaagaucuaaacc

SEQ ID NO: 7674 - RNA, 19 nt, Artificial Sequence
  Description of Artificial Sequence: Synthetic oligonucleotide
  Sense strand starting at position 573 of SEQ ID NO: 47
guuuguaggguuuagaucu

SEQ ID NO: 7675 - RNA, 19 nt, Artificial Sequence
  Description of Artificial Sequence: Synthetic oligonucleotide
  Antisense strand to SEQ ID NO: 7674
agaucuaaacccuacaaac

SEQ ID NO: 7676 - RNA, 19 nt, Artificial Sequence
  Description of Artificial Sequence: Synthetic oligonucleotide
  Sense strand starting at position 459 of SEQ ID NO: 47
aguuuauccucuguuccua

SEQ ID NO: 7677 - RNA, 19 nt, Artificial Sequence
  Description of Artificial Sequence: Synthetic oligonucleotide
  Antisense strand to SEQ ID NO: 7676
uaggaacagaggauaaacu

SEQ ID NO: 7678 - RNA, 19 nt, Artificial Sequence
  Description of Artificial Sequence: Synthetic oligonucleotide
  Sense strand starting at position 446 of SEQ ID NO: 47
gcaauccugccucaguuua

SEQ ID NO: 7679 - RNA, 19 nt, Artificial Sequence
  Description of Artificial Sequence: Synthetic oligonucleotide
  Antisense strand to SEQ ID NO: 7678
uaaacugaggcaggauugc

SEQ ID NO: 7680 - RNA, 19 nt, Artificial Sequence
  Description of Artificial Sequence: Synthetic oligonucleotide
  Sense strand starting at position 364 of SEQ ID NO: 47
gucccaucacaggguaaga

SEQ ID NO: 7681 - RNA, 19 nt, Artificial Sequence
  Description of Artificial Sequence: Synthetic oligonucleotide
  Antisense strand to SEQ ID NO: 7680
ucuuacccugugaugggac

SEQ ID NO: 7682 - RNA, 19 nt, Artificial Sequence
  Description of Artificial Sequence: Synthetic oligonucleotide
  Sense strand starting at position 338 of SEQ ID NO: 47
gaaggauucccagguccag

SEQ ID NO: 7683 - RNA, 19 nt, Artificial Sequence
  Description of Artificial Sequence: Synthetic oligonucleotide
  Antisense strand to SEQ ID NO: 7682
cuggaccugggaauccuuc

SEQ ID NO: 7684 - RNA, 19 nt, Artificial Sequence
  Description of Artificial Sequence: Synthetic oligonucleotide
  Sense strand starting at position 313 of SEQ ID NO: 47
guaaggaaguggugagaga

SEQ ID NO: 7685 - RNA, 19 nt, Artificial Sequence
  Description of Artificial Sequence: Synthetic oligonucleotide
  Antisense strand to SEQ ID NO: 7684
ucucucaccacuuccuuac

SEQ ID NO: 7686 - RNA, 19 nt, Artificial Sequence
  Description of Artificial Sequence: Synthetic oligonucleotide
  Sense strand starting at position 252 of SEQ ID NO: 47
cuaggaaaguaaugaaguu

SEQ ID NO: 7687 - RNA, 19 nt, Artificial Sequence
  Description of Artificial Sequence: Synthetic oligonucleotide
  Antisense strand to SEQ ID NO: 7686
aacuucauuacuuuccuag

SEQ ID NO: 7688 - RNA, 19 nt, Artificial Sequence
  Description of Artificial Sequence: Synthetic oligonucleotide
  Sense strand starting at position 214 of SEQ ID NO: 47
ggaguuaggucugcuacaa

SEQ ID NO: 7689 - RNA, 19 nt, Artificial Sequence
  Description of Artificial Sequence: Synthetic oligonucleotide
  Antisense strand to SEQ ID NO: 7688
uuguagcagaccuaacucc

SEQ ID NO: 7690 - RNA, 19 nt, Artificial Sequence
  Description of Artificial Sequence: Synthetic oligonucleotide
  Sense strand starting at position 213 of SEQ ID NO: 47
gggaguuaggucugcuaca

SEQ ID NO: 7691 - RNA, 19 nt, Artificial Sequence
  Description of Artificial Sequence: Synthetic oligonucleotide
  Antisense strand to SEQ ID NO: 7690
uguagcagaccuaacuccc

SEQ ID NO: 7692 - RNA, 19 nt, Artificial Sequence
  Description of Artificial Sequence: Synthetic oligonucleotide
  Sense strand starting at position 190 of SEQ ID NO: 47
gcuauuuccuugggagggu

SEQ ID NO: 7693 - RNA, 19 nt, Artificial Sequence
  Description of Artificial Sequence: Synthetic oligonucleotide
  Antisense strand to SEQ ID NO: 7692
acccucccaaggaaauagc

SEQ ID NO: 7694 - RNA, 19 nt, Artificial Sequence
  Description of Artificial Sequence: Synthetic oligonucleotide
  Sense strand starting at position 165 of SEQ ID NO: 47
ggauaacuugagugagguc

SEQ ID NO: 7695 - RNA, 19 nt, Artificial Sequence
  Description of Artificial Sequence: Synthetic oligonucleotide
  Antisense strand to SEQ ID NO: 7694
gaccucacucaaguuaucc

SEQ ID NO: 7696 - RNA, 19 nt, Artificial Sequence
  Description of Artificial Sequence: Synthetic oligonucleotide
  Sense strand starting at position 164 of SEQ ID NO: 47
uggauaacuugagugaggu

SEQ ID NO: 7697 - RNA, 19 nt, Artificial Sequence
  Description of Artificial Sequence: Synthetic oligonucleotide
  Antisense strand to SEQ ID NO: 7696
accucacucaaguuaucca

SEQ ID NO: 7698 - RNA, 19 nt, Artificial Sequence
  Description of Artificial Sequence: Synthetic oligonucleotide
  Sense strand starting at position 137 of SEQ ID NO: 47
gucacuaaguacuuagaga

SEQ ID NO: 7699 - RNA, 19 nt, Artificial Sequence
  Description of Artificial Sequence: Synthetic oligonucleotide
  Antisense strand to SEQ ID NO: 7698
ucucuaaguacuuagugac

SEQ ID NO: 7700 - RNA, 19 nt, Artificial Sequence
  Description of Artificial Sequence: Synthetic oligonucleotide
  Sense strand starting at position 107 of SEQ ID NO: 47
auacaaggcugguuguuaa

SEQ ID NO: 7701 - RNA, 19 nt, Artificial Sequence
  Description of Artificial Sequence: Synthetic oligonucleotide
  Antisense strand to SEQ ID NO: 7700
uuaacaaccagccuuguau

SEQ ID NO: 7702 - RNA, 19 nt, Artificial Sequence
  Description of Artificial Sequence: Synthetic oligonucleotide
  Sense strand starting at position 79 of SEQ ID NO: 47
ugugcuuauccuuacgacu

SEQ ID NO: 7703 - RNA, 19 nt, Artificial Sequence
  Description of Artificial Sequence: Synthetic oligonucleotide
  Antisense strand to SEQ ID NO: 7702
agucguaaggauaagcaca

SEQ ID NO: 7704 - RNA, 19 nt, Artificial Sequence
  Description of Artificial Sequence: Synthetic oligonucleotide
  Sense strand starting at position 33 of SEQ ID NO: 47
gagagaggguccugacaga

SEQ ID NO: 7705 - RNA, 19 nt, Artificial Sequence
  Description of Artificial Sequence: Synthetic oligonucleotide
  Antisense strand to SEQ ID NO: 7704
ucugucaggacccucucuc

SEQ ID NO: 7706 - RNA, 19 nt, Artificial Sequence
  Description of Artificial Sequence: Synthetic oligonucleotide
  Sense strand starting at position 14 of SEQ ID NO: 47
aacagaaguuccugggaug

SEQ ID NO: 7707 - RNA, 19 nt, Artificial Sequence
  Description of Artificial Sequence: Synthetic oligonucleotide
  Antisense strand to SEQ ID NO: 7706
caucccaggaacuucuguu

SEQ ID NO: 7708 - RNA, 19 nt, Artificial Sequence
  Description of Artificial Sequence: Synthetic oligonucleotide
  Sense strand starting at position 3972 of SEQ ID NO: 48
cagggucauuggguauuau

SEQ ID NO: 7709 - RNA, 19 nt, Artificial Sequence
  Description of Artificial Sequence: Synthetic oligonucleotide
  Antisense strand to SEQ ID NO: 7708
auaauacccaaugacccug

SEQ ID NO: 7710 - RNA, 19 nt, Artificial Sequence
  Description of Artificial Sequence: Synthetic oligonucleotide
  Sense strand starting at position 3944 of SEQ ID NO: 48
aacugagucugcucuuaag

SEQ ID NO: 7711 - RNA, 19 nt, Artificial Sequence
  Description of Artificial Sequence: Synthetic oligonucleotide
  Antisense strand to SEQ ID NO: 7710
cuuaagagcagacucaguu

SEQ ID NO: 7712 - RNA, 19 nt, Artificial Sequence
  Description of Artificial Sequence: Synthetic oligonucleotide
  Sense strand starting at position 3942 of SEQ ID NO: 48
ccaacugagucugcucuua

SEQ ID NO: 7713 - RNA, 19 nt, Artificial Sequence
  Description of Artificial Sequence: Synthetic oligonucleotide
  Antisense strand to SEQ ID NO: 7712
uaagagcagacucaguugg

SEQ ID NO: 7714 - RNA, 19 nt, Artificial Sequence
  Description of Artificial Sequence: Synthetic oligonucleotide
  Sense strand starting at position 3820 of SEQ ID NO: 48
gcucaugauuuguaauauc

SEQ ID NO: 7715 - RNA, 19 nt, Artificial Sequence
  Description of Artificial Sequence: Synthetic oligonucleotide
  Antisense strand to SEQ ID NO: 7714
gauauuacaaaucaugagc

SEQ ID NO: 7716 - RNA, 19 nt, Artificial Sequence
  Description of Artificial Sequence: Synthetic oligonucleotide
  Sense strand starting at position 3813 of SEQ ID NO: 48
gugaaaggcucaugauuug

SEQ ID NO: 7717 - RNA, 19 nt, Artificial Sequence
  Description of Artificial Sequence: Synthetic oligonucleotide
  Antisense strand to SEQ ID NO: 7716
caaaucaugagccuuucac

SEQ ID NO: 7718 - RNA, 19 nt, Artificial Sequence
  Description of Artificial Sequence: Synthetic oligonucleotide
  Sense strand starting at position 3811 of SEQ ID NO: 48
augugaaaggcucaugauu

SEQ ID NO: 7719 - RNA, 19 nt, Artificial Sequence
  Description of Artificial Sequence: Synthetic oligonucleotide
  Antisense strand to SEQ ID NO: 7718
aaucaugagccuuucacau

SEQ ID NO: 7720 - RNA, 19 nt, Artificial Sequence
  Description of Artificial Sequence: Synthetic oligonucleotide
  Sense strand starting at position 3749 of SEQ ID NO: 48
ugucaaugaugccuuccua

SEQ ID NO: 7721 - RNA, 19 nt, Artificial Sequence
  Description of Artificial Sequence: Synthetic oligonucleotide
  Antisense strand to SEQ ID NO: 7720
uaggaaggcaucauugaca

SEQ ID NO: 7722 - RNA, 19 nt, Artificial Sequence
  Description of Artificial Sequence: Synthetic oligonucleotide
  Sense strand starting at position 3529 of SEQ ID NO: 48
agcaucugacaggguaaau

SEQ ID NO: 7723 - RNA, 19 nt, Artificial Sequence
  Description of Artificial Sequence: Synthetic oligonucleotide
  Antisense strand to SEQ ID NO: 7722
auuuacccugucagaugcu

SEQ ID NO: 7724 - RNA, 19 nt, Artificial Sequence
  Description of Artificial Sequence: Synthetic oligonucleotide
  Sense strand starting at position 3340 of SEQ ID NO: 48
auaaauguaugggacucaa

SEQ ID NO: 7725 - RNA, 19 nt, Artificial Sequence
  Description of Artificial Sequence: Synthetic oligonucleotide
  Antisense strand to SEQ ID NO: 7724
uugagucccauacauuuau

SEQ ID NO: 7726 - RNA, 19 nt, Artificial Sequence
  Description of Artificial Sequence: Synthetic oligonucleotide
  Sense strand starting at position 3225 of SEQ ID NO: 48
uuguaagguuagguaauau

SEQ ID NO: 7727 - RNA, 19 nt, Artificial Sequence
  Description of Artificial Sequence: Synthetic oligonucleotide
  Antisense strand to SEQ ID NO: 7726
auauuaccuaaccuuacaa

SEQ ID NO: 7728 - RNA, 19 nt, Artificial Sequence
  Description of Artificial Sequence: Synthetic oligonucleotide
  Sense strand starting at position 3146 of SEQ ID NO: 48
uuggaucagucacuugauc

SEQ ID NO: 7729 - RNA, 19 nt, Artificial Sequence
  Description of Artificial Sequence: Synthetic oligonucleotide
  Antisense strand to SEQ ID NO: 7728
gaucaagugacugauccaa

SEQ ID NO: 7730 - RNA, 19 nt, Artificial Sequence
  Description of Artificial Sequence: Synthetic oligonucleotide
  Sense strand starting at position 3142 of SEQ ID NO: 48
gacuuuggaucagucacuu

SEQ ID NO: 7731 - RNA, 19 nt, Artificial Sequence
  Description of Artificial Sequence: Synthetic oligonucleotide
  Antisense strand to SEQ ID NO: 7730
aagugacugauccaaaguc

SEQ ID NO: 7732 - RNA, 19 nt, Artificial Sequence
  Description of Artificial Sequence: Synthetic oligonucleotide
  Sense strand starting at position 2953 of SEQ ID NO: 48
ggcaaauauuagguccuua

SEQ ID NO: 7733 - RNA, 19 nt, Artificial Sequence
  Description of Artificial Sequence: Synthetic oligonucleotide
  Antisense strand to SEQ ID NO: 7732
uaaggaccuaauauuugcc

SEQ ID NO: 7734 - RNA, 19 nt, Artificial Sequence
  Description of Artificial Sequence: Synthetic oligonucleotide
  Sense strand starting at position 2863 of SEQ ID NO: 48
guuagucuacuacaguauu

SEQ ID NO: 7735 - RNA, 19 nt, Artificial Sequence
  Description of Artificial Sequence: Synthetic oligonucleotide
  Antisense strand to SEQ ID NO: 7734
aauacuguaguagacuaac

SEQ ID NO: 7736 - RNA, 19 nt, Artificial Sequence
  Description of Artificial Sequence: Synthetic oligonucleotide
  Sense strand starting at position 2856 of SEQ ID NO: 48
ggcaccuguuagucuacua

SEQ ID NO: 7737 - RNA, 19 nt, Artificial Sequence
  Description of Artificial Sequence: Synthetic oligonucleotide
  Antisense strand to SEQ ID NO: 7736
uaguagacuaacaggugcc

SEQ ID NO: 7738 - RNA, 19 nt, Artificial Sequence
  Description of Artificial Sequence: Synthetic oligonucleotide
  Sense strand starting at position 2532 of SEQ ID NO: 48
caaacaucagaucgaguaa

SEQ ID NO: 7739 - RNA, 19 nt, Artificial Sequence
  Description of Artificial Sequence: Synthetic oligonucleotide
  Antisense strand to SEQ ID NO: 7738
uuacucgaucugauguuug

SEQ ID NO: 7740 - RNA, 19 nt, Artificial Sequence
  Description of Artificial Sequence: Synthetic oligonucleotide
  Sense strand starting at position 2453 of SEQ ID NO: 48
ggcugcuuuaacgaccauu

SEQ ID NO: 7741 - RNA, 19 nt, Artificial Sequence
  Description of Artificial Sequence: Synthetic oligonucleotide
  Antisense strand to SEQ ID NO: 7740
aauggucguuaaagcagcc

SEQ ID NO: 7742 - RNA, 19 nt, Artificial Sequence
  Description of Artificial Sequence: Synthetic oligonucleotide
  Sense strand starting at position 2421 of SEQ ID NO: 48
ucaagugaccaccgcaauu

SEQ ID NO: 7743 - RNA, 19 nt, Artificial Sequence
  Description of Artificial Sequence: Synthetic oligonucleotide
  Antisense strand to SEQ ID NO: 7742
aauugcgguggucacuuga

SEQ ID NO: 7744 - RNA, 19 nt, Artificial Sequence
  Description of Artificial Sequence: Synthetic oligonucleotide
  Sense strand starting at position 1406 of SEQ ID NO: 48
acuuaaauccuccaagcgu

SEQ ID NO: 7745 - RNA, 19 nt, Artificial Sequence
  Description of Artificial Sequence: Synthetic oligonucleotide
  Antisense strand to SEQ ID NO: 7744
acgcuuggaggauuuaagu

SEQ ID NO: 7746 - RNA, 19 nt, Artificial Sequence
  Description of Artificial Sequence: Synthetic oligonucleotide
  Sense strand starting at position 1381 of SEQ ID NO: 48
aguaaugccgccuagauaa

SEQ ID NO: 7747 - RNA, 19 nt, Artificial Sequence
  Description of Artificial Sequence: Synthetic oligonucleotide
  Antisense strand to SEQ ID NO: 7746
uuaucuaggcggcauuacu

SEQ ID NO: 7748 - RNA, 19 nt, Artificial Sequence
  Description of Artificial Sequence: Synthetic oligonucleotide
  Sense strand starting at position 1242 of SEQ ID NO: 48
caacuauccuaagagguag

SEQ ID NO: 7749 - RNA, 19 nt, Artificial Sequence
  Description of Artificial Sequence: Synthetic oligonucleotide
  Antisense strand to SEQ ID NO: 7748
cuaccucuuaggauaguug

SEQ ID NO: 7750 - RNA, 19 nt, Artificial Sequence
  Description of Artificial Sequence: Synthetic oligonucleotide
  Sense strand starting at position 1212 of SEQ ID NO: 48
gaaguuauccguuaucuca

SEQ ID NO: 7751 - RNA, 19 nt, Artificial Sequence
  Description of Artificial Sequence: Synthetic oligonucleotide
  Antisense strand to SEQ ID NO: 7750
ugagauaacggauaacuuc

SEQ ID NO: 7752 - RNA, 19 nt, Artificial Sequence
  Description of Artificial Sequence: Synthetic oligonucleotide
  Sense strand starting at position 1208 of SEQ ID NO: 48
aucugaaguuauccguuau

SEQ ID NO: 7753 - RNA, 19 nt, Artificial Sequence
  Description of Artificial Sequence: Synthetic oligonucleotide
  Antisense strand to SEQ ID NO: 7752
auaacggauaacuucagau

SEQ ID NO: 7754 - RNA, 19 nt, Artificial Sequence
  Description of Artificial Sequence: Synthetic oligonucleotide
  Sense strand starting at position 1171 of SEQ ID NO: 48
ugaauuuaacguugcacca

SEQ ID NO: 7755 - RNA, 19 nt, Artificial Sequence
  Description of Artificial Sequence: Synthetic oligonucleotide
  Antisense strand to SEQ ID NO: 7754
uggugcaacguuaaauuca

SEQ ID NO: 7756 - RNA, 19 nt, Artificial Sequence
  Description of Artificial Sequence: Synthetic oligonucleotide
  Sense strand starting at position 1156 of SEQ ID NO: 48
ggagcaaugccauguugaa

SEQ ID NO: 7757 - RNA, 19 nt, Artificial Sequence
  Description of Artificial Sequence: Synthetic oligonucleotide
  Antisense strand to SEQ ID NO: 7756
uucaacauggcauugcucc

SEQ ID NO: 7758 - RNA, 19 nt, Artificial Sequence
  Description of Artificial Sequence: Synthetic oligonucleotide
  Sense strand starting at position 807 of SEQ ID NO: 48
uaggcaaaccguuaugcaa

SEQ ID NO: 7759 - RNA, 19 nt, Artificial Sequence
  Description of Artificial Sequence: Synthetic oligonucleotide
  Antisense strand to SEQ ID NO: 7758
uugcauaacgguuugccua

SEQ ID NO: 7760 - RNA, 19 nt, Artificial Sequence
  Description of Artificial Sequence: Synthetic oligonucleotide
  Sense strand starting at position 797 of SEQ ID NO: 48
gaucauuuguuaggcaaac

SEQ ID NO: 7761 - RNA, 19 nt, Artificial Sequence
  Description of Artificial Sequence: Synthetic oligonucleotide
  Antisense strand to SEQ ID NO: 7760
guuugccuaacaaaugauc

SEQ ID NO: 7762 - RNA, 19 nt, Artificial Sequence
  Description of Artificial Sequence: Synthetic oligonucleotide
  Sense strand starting at position 795 of SEQ ID NO: 48
augaucauuuguuaggcaa

SEQ ID NO: 7763 - RNA, 19 nt, Artificial Sequence
  Description of Artificial Sequence: Synthetic oligonucleotide
  Antisense strand to SEQ ID NO: 7762
uugccuaacaaaugaucau

SEQ ID NO: 7764 - RNA, 19 nt, Artificial Sequence
  Description of Artificial Sequence: Synthetic oligonucleotide
  Sense strand starting at position 747 of SEQ ID NO: 48
cgaacuugugaucgucuga

SEQ ID NO: 7765 - RNA, 19 nt, Artificial Sequence
  Description of Artificial Sequence: Synthetic oligonucleotide
  Antisense strand to SEQ ID NO: 7764
ucagacgaucacaaguucg

SEQ ID NO: 7766 - RNA, 19 nt, Artificial Sequence
  Description of Artificial Sequence: Synthetic oligonucleotide
  Sense strand starting at position 620 of SEQ ID NO: 48
uuaugucacugguuucuuu

SEQ ID NO: 7767 - RNA, 19 nt, Artificial Sequence
  Description of Artificial Sequence: Synthetic oligonucleotide
  Antisense strand to SEQ ID NO: 7766
aaagaaaccagugacauaa

SEQ ID NO: 7768 - RNA, 19 nt, Artificial Sequence
  Description of Artificial Sequence: Synthetic oligonucleotide
  Sense strand starting at position 609 of SEQ ID NO: 48
cuuagcuaucguuauguca

SEQ ID NO: 7769 - RNA, 19 nt, Artificial Sequence
  Description of Artificial Sequence: Synthetic oligonucleotide
  Antisense strand to SEQ ID NO: 7768
ugacauaacgauagcuaag

SEQ ID NO: 7770 - RNA, 19 nt, Artificial Sequence
  Description of Artificial Sequence: Synthetic oligonucleotide
  Sense strand starting at position 574 of SEQ ID NO: 48
gcaaccauuugacacguaa

SEQ ID NO: 7771 - RNA, 19 nt, Artificial Sequence
  Description of Artificial Sequence: Synthetic oligonucleotide
  Antisense strand to SEQ ID NO: 7770
uuacgugucaaaugguugc

SEQ ID NO: 7772 - RNA, 19 nt, Artificial Sequence
  Description of Artificial Sequence: Synthetic oligonucleotide
  Sense strand starting at position 470 of SEQ ID NO: 48
cuaaauugauuagagaaac

SEQ ID NO: 7773 - RNA, 19 nt, Artificial Sequence
  Description of Artificial Sequence: Synthetic oligonucleotide
  Antisense strand to SEQ ID NO: 7772
guuucucuaaucaauuuag

SEQ ID NO: 7774 - RNA, 19 nt, Artificial Sequence
  Description of Artificial Sequence: Synthetic oligonucleotide
  Sense strand starting at position 375 of SEQ ID NO: 48
cugaauaagagucgaaauc

SEQ ID NO: 7775 - RNA, 19 nt, Artificial Sequence
  Description of Artificial Sequence: Synthetic oligonucleotide
  Antisense strand to SEQ ID NO: 7774
gauuucgacucuuauucag

SEQ ID NO: 7776 - RNA, 19 nt, Artificial Sequence
  Description of Artificial Sequence: Synthetic oligonucleotide
  Sense strand starting at position 296 of SEQ ID NO: 48
acaucuccuguacaguaaa

SEQ ID NO: 7777 - RNA, 19 nt, Artificial Sequence
  Description of Artificial Sequence: Synthetic oligonucleotide
  Antisense strand to SEQ ID NO: 7776
uuuacuguacaggagaugu

SEQ ID NO: 7778 - RNA, 19 nt, Artificial Sequence
  Description of Artificial Sequence: Synthetic oligonucleotide
  Sense strand starting at position 294 of SEQ ID NO: 48
ucacaucuccuguacagua

SEQ ID NO: 7779 - RNA, 19 nt, Artificial Sequence
  Description of Artificial Sequence: Synthetic oligonucleotide
  Antisense strand to SEQ ID NO: 7778
uacuguacaggagauguga

SEQ ID NO: 7780 - RNA, 19 nt, Artificial Sequence
  Description of Artificial Sequence: Synthetic oligonucleotide
  Sense strand starting at position 253 of SEQ ID NO: 48
caggacaguuauguacaaa

SEQ ID NO: 7781 - RNA, 19 nt, Artificial Sequence
  Description of Artificial Sequence: Synthetic oligonucleotide
  Antisense strand to SEQ ID NO: 7780
uuuguacauaacuguccug

SEQ ID NO: 7782 - RNA, 19 nt, Artificial Sequence
  Description of Artificial Sequence: Synthetic oligonucleotide
  Sense strand starting at position 208 of SEQ ID NO: 48
uaauaaagggucugaccuu

SEQ ID NO: 7783 - RNA, 19 nt, Artificial Sequence
  Description of Artificial Sequence: Synthetic oligonucleotide
  Antisense strand to SEQ ID NO: 7782
aaggucagacccuuuauua

SEQ ID NO: 7784 - RNA, 19 nt, Artificial Sequence
  Description of Artificial Sequence: Synthetic oligonucleotide
  Sense strand starting at position 121 of SEQ ID NO: 48
ggcacaauaucauaugaaa

SEQ ID NO: 7785 - RNA, 19 nt, Artificial Sequence
  Description of Artificial Sequence: Synthetic oligonucleotide
  Antisense strand to SEQ ID NO: 7784
uuucauaugauauugugcc

SEQ ID NO: 7786 - RNA, 19 nt, Artificial Sequence
  Description of Artificial Sequence: Synthetic oligonucleotide
  Sense strand starting at position 73 of SEQ ID NO: 48
ggugguuugauguaacaaa

SEQ ID NO: 7787 - RNA, 19 nt, Artificial Sequence
  Description of Artificial Sequence: Synthetic oligonucleotide
  Antisense strand to SEQ ID NO: 7786
uuuguuacaucaaaccacc

SEQ ID NO: 7788 - RNA, 19 nt, Artificial Sequence
  Description of Artificial Sequence: Synthetic oligonucleotide
  Sense strand starting at position 3941 of SEQ ID NO: 49
ccugauuggcuauggaacu

SEQ ID NO: 7789 - RNA, 19 nt, Artificial Sequence
  Description of Artificial Sequence: Synthetic oligonucleotide
  Antisense strand to SEQ ID NO: 7788
aguuccauagccaaucagg

SEQ ID NO: 7790 - RNA, 19 nt, Artificial Sequence
  Description of Artificial Sequence: Synthetic oligonucleotide
  Sense strand starting at position 3928 of SEQ ID NO: 49
ggcuaauucucucccugau

SEQ ID NO: 7791 - RNA, 19 nt, Artificial Sequence
  Description of Artificial Sequence: Synthetic oligonucleotide
  Antisense strand to SEQ ID NO: 7790
aucagggagagaauuagcc

SEQ ID NO: 7792 - RNA, 19 nt, Artificial Sequence
  Description of Artificial Sequence: Synthetic oligonucleotide
  Sense strand starting at position 3867 of SEQ ID NO: 49
uuacaugaugcugaaguga

SEQ ID NO: 7793 - RNA, 19 nt, Artificial Sequence
  Description of Artificial Sequence: Synthetic oligonucleotide
  Antisense strand to SEQ ID NO: 7792
ucacuucagcaucauguaa

SEQ ID NO: 7794 - RNA, 19 nt, Artificial Sequence
  Description of Artificial Sequence: Synthetic oligonucleotide
  Sense strand starting at position 3856 of SEQ ID NO: 49
cgggcuuugcauuacauga

SEQ ID NO: 7795 - RNA, 19 nt, Artificial Sequence
  Description of Artificial Sequence: Synthetic oligonucleotide
  Antisense strand to SEQ ID NO: 7794
ucauguaaugcaaagcccg

SEQ ID NO: 7796 - RNA, 19 nt, Artificial Sequence
  Description of Artificial Sequence: Synthetic oligonucleotide
  Sense strand starting at position 3850 of SEQ ID NO: 49
guaagucgggcuuugcauu

SEQ ID NO: 7797 - RNA, 19 nt, Artificial Sequence
  Description of Artificial Sequence: Synthetic oligonucleotide
  Antisense strand to SEQ ID NO: 7796
aaugcaaagcccgacuuac

SEQ ID NO: 7798 - RNA, 19 nt, Artificial Sequence
  Description of Artificial Sequence: Synthetic oligonucleotide
  Sense strand starting at position 3750 of SEQ ID NO: 49
ggcuucucauugucacuca

SEQ ID NO: 7799 - RNA, 19 nt, Artificial Sequence
  Description of Artificial Sequence: Synthetic oligonucleotide
  Antisense strand to SEQ ID NO: 7798
ugagugacaaugagaagcc

SEQ ID NO: 7800 - RNA, 19 nt, Artificial Sequence
  Description of Artificial Sequence: Synthetic oligonucleotide
  Sense strand starting at position 3570 of SEQ ID NO: 49
gggugcuagaguuaggacu

SEQ ID NO: 7801 - RNA, 19 nt, Artificial Sequence
  Description of Artificial Sequence: Synthetic oligonucleotide
  Antisense strand to SEQ ID NO: 7800
aguccuaacucuagcaccc

SEQ ID NO: 7802 - RNA, 19 nt, Artificial Sequence
  Description of Artificial Sequence: Synthetic oligonucleotide
  Sense strand starting at position 3488 of SEQ ID NO: 49
uagaguagggcucacucua

SEQ ID NO: 7803 - RNA, 19 nt, Artificial Sequence
  Description of Artificial Sequence: Synthetic oligonucleotide
  Antisense strand to SEQ ID NO: 7802
uagagugagcccuacucua

SEQ ID NO: 7804 - RNA, 19 nt, Artificial Sequence
  Description of Artificial Sequence: Synthetic oligonucleotide
  Sense strand starting at position 3441 of SEQ ID NO: 49
cacgucuguguccaaauuu

SEQ ID NO: 7805 - RNA, 19 nt, Artificial Sequence
  Description of Artificial Sequence: Synthetic oligonucleotide
  Antisense strand to SEQ ID NO: 7804
aaauuuggacacagacgug

SEQ ID NO: 7806 - RNA, 19 nt, Artificial Sequence
  Description of Artificial Sequence: Synthetic oligonucleotide
  Sense strand starting at position 3334 of SEQ ID NO: 49
cagucagagauacgaugua

SEQ ID NO: 7807 - RNA, 19 nt, Artificial Sequence
  Description of Artificial Sequence: Synthetic oligonucleotide
  Antisense strand to SEQ ID NO: 7806
uacaucguaucucugacug

SEQ ID NO: 7808 - RNA, 19 nt, Artificial Sequence
  Description of Artificial Sequence: Synthetic oligonucleotide
  Sense strand starting at position 3165 of SEQ ID NO: 49
gcaguuucuagucagcaga

SEQ ID NO: 7809 - RNA, 19 nt, Artificial Sequence
  Description of Artificial Sequence: Synthetic oligonucleotide
  Antisense strand to SEQ ID NO: 7808
ucugcugacuagaaacugc

SEQ ID NO: 7810 - RNA, 19 nt, Artificial Sequence
  Description of Artificial Sequence: Synthetic oligonucleotide
  Sense strand starting at position 3127 of SEQ ID NO: 49
gacuuugagugggagaaca

SEQ ID NO: 7811 - RNA, 19 nt, Artificial Sequence
  Description of Artificial Sequence: Synthetic oligonucleotide
  Antisense strand to SEQ ID NO: 7810
uguucucccacucaaaguc

SEQ ID NO: 7812 - RNA, 19 nt, Artificial Sequence
  Description of Artificial Sequence: Synthetic oligonucleotide
  Sense strand starting at position 2400 of SEQ ID NO: 49
acuucugugaguggaaagu

SEQ ID NO: 7813 - RNA, 19 nt, Artificial Sequence
  Description of Artificial Sequence: Synthetic oligonucleotide
  Antisense strand to SEQ ID NO: 7812
acuuuccacucacagaagu

SEQ ID NO: 7814 - RNA, 19 nt, Artificial Sequence
  Description of Artificial Sequence: Synthetic oligonucleotide
  Sense strand starting at position 2398 of SEQ ID NO: 49
ccacuucugugaguggaaa

SEQ ID NO: 7815 - RNA, 19 nt, Artificial Sequence
  Description of Artificial Sequence: Synthetic oligonucleotide
  Antisense strand to SEQ ID NO: 7814
uuuccacucacagaagugg

SEQ ID NO: 7816 - RNA, 19 nt, Artificial Sequence
  Description of Artificial Sequence: Synthetic oligonucleotide
  Sense strand starting at position 1310 of SEQ ID NO: 49
guucuucuuccucaucuga

SEQ ID NO: 7817 - RNA, 19 nt, Artificial Sequence
  Description of Artificial Sequence: Synthetic oligonucleotide
  Antisense strand to SEQ ID NO: 7816
ucagaugaggaagaagaac

SEQ ID NO: 7818 - RNA, 19 nt, Artificial Sequence
  Description of Artificial Sequence: Synthetic oligonucleotide
  Sense strand starting at position 1303 of SEQ ID NO: 49
ggaugaaguucuucuuccu

SEQ ID NO: 7819 - RNA, 19 nt, Artificial Sequence
  Description of Artificial Sequence: Synthetic oligonucleotide
  Antisense strand to SEQ ID NO: 7818
aggaagaagaacuucaucc

SEQ ID NO: 7820 - RNA, 19 nt, Artificial Sequence
  Description of Artificial Sequence: Synthetic oligonucleotide
  Sense strand starting at position 1290 of SEQ ID NO: 49
augagagguguuuggauga

SEQ ID NO: 7821 - RNA, 19 nt, Artificial Sequence
  Description of Artificial Sequence: Synthetic oligonucleotide
  Antisense strand to SEQ ID NO: 7820
ucauccaaacaccucucau

SEQ ID NO: 7822 - RNA, 19 nt, Artificial Sequence
  Description of Artificial Sequence: Synthetic oligonucleotide
  Sense strand starting at position 1284 of SEQ ID NO: 49
gagaucaugagagguguuu

SEQ ID NO: 7823 - RNA, 19 nt, Artificial Sequence
  Description of Artificial Sequence: Synthetic oligonucleotide
  Antisense strand to SEQ ID NO: 7822
aaacaccucucaugaucuc

SEQ ID NO: 7824 - RNA, 19 nt, Artificial Sequence
  Description of Artificial Sequence: Synthetic oligonucleotide
  Sense strand starting at position 1220 of SEQ ID NO: 49
gaccauguucuuugggaca

SEQ ID NO: 7825 - RNA, 19 nt, Artificial Sequence
  Description of Artificial Sequence: Synthetic oligonucleotide
  Antisense strand to SEQ ID NO: 7824
ugucccaaagaacaugguc

SEQ ID NO: 7826 - RNA, 19 nt, Artificial Sequence
  Description of Artificial Sequence: Synthetic oligonucleotide
  Sense strand starting at position 982 of SEQ ID NO: 49
ugguucuucugguuuggau

SEQ ID NO: 7827 - RNA, 19 nt, Artificial Sequence
  Description of Artificial Sequence: Synthetic oligonucleotide
  Antisense strand to SEQ ID NO: 7826
auccaaaccagaagaacca

SEQ ID NO: 7828 - RNA, 19 nt, Artificial Sequence
  Description of Artificial Sequence: Synthetic oligonucleotide
  Sense strand starting at position 977 of SEQ ID NO: 49
uggaaugguucuucugguu

SEQ ID NO: 7829 - RNA, 19 nt, Artificial Sequence
  Description of Artificial Sequence: Synthetic oligonucleotide
  Antisense strand to SEQ ID NO: 7828
aaccagaagaaccauucca

SEQ ID NO: 7830 - RNA, 19 nt, Artificial Sequence
  Description of Artificial Sequence: Synthetic oligonucleotide
  Sense strand starting at position 895 of SEQ ID NO: 49
cuacuuagccaaggcauua

SEQ ID NO: 7831 - RNA, 19 nt, Artificial Sequence
  Description of Artificial Sequence: Synthetic oligonucleotide
  Antisense strand to SEQ ID NO: 7830
uaaugccuuggcuaaguag

SEQ ID NO: 7832 - RNA, 19 nt, Artificial Sequence
  Description of Artificial Sequence: Synthetic oligonucleotide
  Sense strand starting at position 841 of SEQ ID NO: 49
guagguaaaguuugaauau

SEQ ID NO: 7833 - RNA, 19 nt, Artificial Sequence
  Description of Artificial Sequence: Synthetic oligonucleotide
  Antisense strand to SEQ ID NO: 7832
auauucaaacuuuaccuac

SEQ ID NO: 7834 - RNA, 19 nt, Artificial Sequence
  Description of Artificial Sequence: Synthetic oligonucleotide
  Sense strand starting at position 834 of SEQ ID NO: 49
ucauuauguagguaaaguu

SEQ ID NO: 7835 - RNA, 19 nt, Artificial Sequence
  Description of Artificial Sequence: Synthetic oligonucleotide
  Antisense strand to SEQ ID NO: 7834
aacuuuaccuacauaauga

SEQ ID NO: 7836 - RNA, 19 nt, Artificial Sequence
  Description of Artificial Sequence: Synthetic oligonucleotide
  Sense strand starting at position 813 of SEQ ID NO: 49
ugaaacacucuacgacuaa

SEQ ID NO: 7837 - RNA, 19 nt, Artificial Sequence
  Description of Artificial Sequence: Synthetic oligonucleotide
  Antisense strand to SEQ ID NO: 7836
uuagucguagaguguuuca

SEQ ID NO: 7838 - RNA, 19 nt, Artificial Sequence
  Description of Artificial Sequence: Synthetic oligonucleotide
  Sense strand starting at position 593 of SEQ ID NO: 49
ggcauaauacacugaaguu

SEQ ID NO: 7839 - RNA, 19 nt, Artificial Sequence
  Description of Artificial Sequence: Synthetic oligonucleotide
  Antisense strand to SEQ ID NO: 7838
aacuucaguguauuaugcc

SEQ ID NO: 7840 - RNA, 19 nt, Artificial Sequence
  Description of Artificial Sequence: Synthetic oligonucleotide
  Sense strand starting at position 585 of SEQ ID NO: 49
guuaaccuggcauaauaca

SEQ ID NO: 7841 - RNA, 19 nt, Artificial Sequence
  Description of Artificial Sequence: Synthetic oligonucleotide
  Antisense strand to SEQ ID NO: 7840
uguauuaugccagguuaac

SEQ ID NO: 7842 - RNA, 19 nt, Artificial Sequence
  Description of Artificial Sequence: Synthetic oligonucleotide
  Sense strand starting at position 581 of SEQ ID NO: 49
ugaaguuaaccuggcauaa

SEQ ID NO: 7843 - RNA, 19 nt, Artificial Sequence
  Description of Artificial Sequence: Synthetic oligonucleotide
  Antisense strand to SEQ ID NO: 7842
uuaugccagguuaacuuca

SEQ ID NO: 7844 - RNA, 19 nt, Artificial Sequence
  Description of Artificial Sequence: Synthetic oligonucleotide
  Sense strand starting at position 364 of SEQ ID NO: 49
ggcacuagucucuacaaua

SEQ ID NO: 7845 - RNA, 19 nt, Artificial Sequence
  Description of Artificial Sequence: Synthetic oligonucleotide
  Antisense strand to SEQ ID NO: 7844
uauuguagagacuagugcc

SEQ ID NO: 7846 - RNA, 19 nt, Artificial Sequence
  Description of Artificial Sequence: Synthetic oligonucleotide
  Sense strand starting at position 363 of SEQ ID NO: 49
aggcacuagucucuacaau

SEQ ID NO: 7847 - RNA, 19 nt, Artificial Sequence
  Description of Artificial Sequence: Synthetic oligonucleotide
  Antisense strand to SEQ ID NO: 7846
auuguagagacuagugccu

SEQ ID NO: 7848 - RNA, 19 nt, Artificial Sequence
  Description of Artificial Sequence: Synthetic oligonucleotide
  Sense strand starting at position 341 of SEQ ID NO: 49
gaaacaucuguugagcauc

SEQ ID NO: 7849 - RNA, 19 nt, Artificial Sequence
  Description of Artificial Sequence: Synthetic oligonucleotide
  Antisense strand to SEQ ID NO: 7848
gaugcucaacagauguuuc

SEQ ID NO: 7850 - RNA, 19 nt, Artificial Sequence
  Description of Artificial Sequence: Synthetic oligonucleotide
  Sense strand starting at position 251 of SEQ ID NO: 49
ucaguuuaugcccacaguu

SEQ ID NO: 7851 - RNA, 19 nt, Artificial Sequence
  Description of Artificial Sequence: Synthetic oligonucleotide
  Antisense strand to SEQ ID NO: 7850
aacugugggcauaaacuga

SEQ ID NO: 7852 - RNA, 19 nt, Artificial Sequence
  Description of Artificial Sequence: Synthetic oligonucleotide
  Sense strand starting at position 230 of SEQ ID NO: 49
gguugauccuuuccaugaa

SEQ ID NO: 7853 - RNA, 19 nt, Artificial Sequence
  Description of Artificial Sequence: Synthetic oligonucleotide
  Antisense strand to SEQ ID NO: 7852
uucauggaaaggaucaacc

SEQ ID NO: 7854 - RNA, 19 nt, Artificial Sequence
  Description of Artificial Sequence: Synthetic oligonucleotide
  Sense strand starting at position 227 of SEQ ID NO: 49
ccagguugauccuuuccau

SEQ ID NO: 7855 - RNA, 19 nt, Artificial Sequence
  Description of Artificial Sequence: Synthetic oligonucleotide
  Antisense strand to SEQ ID NO: 7854
auggaaaggaucaaccugg

SEQ ID NO: 7856 - RNA, 19 nt, Artificial Sequence
  Description of Artificial Sequence: Synthetic oligonucleotide
  Sense strand starting at position 218 of SEQ ID NO: 49
cuaauaucaccagguugau

SEQ ID NO: 7857 - RNA, 19 nt, Artificial Sequence
  Description of Artificial Sequence: Synthetic oligonucleotide
  Antisense strand to SEQ ID NO: 7856
aucaaccuggugauauuag

SEQ ID NO: 7858 - RNA, 19 nt, Artificial Sequence
  Description of Artificial Sequence: Synthetic oligonucleotide
  Sense strand starting at position 215 of SEQ ID NO: 49
ugccuaauaucaccagguu

SEQ ID NO: 7859 - RNA, 19 nt, Artificial Sequence
  Description of Artificial Sequence: Synthetic oligonucleotide
  Antisense strand to SEQ ID NO: 7858
aaccuggugauauuaggca

SEQ ID NO: 7860 - RNA, 19 nt, Artificial Sequence
  Description of Artificial Sequence: Synthetic oligonucleotide
  Sense strand starting at position 94 of SEQ ID NO: 49
uuauaaaugugguuaguga

SEQ ID NO: 7861 - RNA, 19 nt, Artificial Sequence
  Description of Artificial Sequence: Synthetic oligonucleotide
  Antisense strand to SEQ ID NO: 7860
ucacuaaccacauuuauaa

SEQ ID NO: 7862 - RNA, 19 nt, Artificial Sequence
  Description of Artificial Sequence: Synthetic oligonucleotide
  Sense strand starting at position 91 of SEQ ID NO: 49
gucuuauaaaugugguuag

SEQ ID NO: 7863 - RNA, 19 nt, Artificial Sequence
  Description of Artificial Sequence: Synthetic oligonucleotide
  Antisense strand to SEQ ID NO: 7862
cuaaccacauuuauaagac

SEQ ID NO: 7864 - RNA, 19 nt, Artificial Sequence
  Description of Artificial Sequence: Synthetic oligonucleotide
  Sense strand starting at position 13 of SEQ ID NO: 49
gaguuugcuagagagcaga

SEQ ID NO: 7865 - RNA, 19 nt, Artificial Sequence
  Description of Artificial Sequence: Synthetic oligonucleotide
  Antisense strand to SEQ ID NO: 7864
ucugcucucuagcaaacuc

SEQ ID NO: 7866 - RNA, 19 nt, Artificial Sequence
  Description of Artificial Sequence: Synthetic oligonucleotide
  Sense strand starting at position 11 of SEQ ID NO: 49
aggaguuugcuagagagca

SEQ ID NO: 7867 - RNA, 19 nt, Artificial Sequence
  Description of Artificial Sequence: Synthetic oligonucleotide
  Antisense strand to SEQ ID NO: 7866
ugcucucuagcaaacuccu

SEQ ID NO: 7868 - RNA, 19 nt, Artificial Sequence
  Description of Artificial Sequence: Synthetic oligonucleotide
  Sense strand starting at position 3977 of SEQ ID NO: 50
cugugaaugcaccaauaga

SEQ ID NO: 7869 - RNA, 19 nt, Artificial Sequence
  Description of Artificial Sequence: Synthetic oligonucleotide
  Antisense strand to SEQ ID NO: 7868
ucuauuggugcauucacag

SEQ ID NO: 7870 - RNA, 19 nt, Artificial Sequence
  Description of Artificial Sequence: Synthetic oligonucleotide
  Sense strand starting at position 3636 of SEQ ID NO: 50
gauuacucgccaggccuua

SEQ ID NO: 7871 - RNA, 19 nt, Artificial Sequence
  Description of Artificial Sequence: Synthetic oligonucleotide
  Antisense strand to SEQ ID NO: 7870
uaaggccuggcgaguaauc

SEQ ID NO: 7872 - RNA, 19 nt, Artificial Sequence
  Description of Artificial Sequence: Synthetic oligonucleotide
  Sense strand starting at position 2916 of SEQ ID NO: 50
gcagcaagaucucuugaca

SEQ ID NO: 7873 - RNA, 19 nt, Artificial Sequence
  Description of Artificial Sequence: Synthetic oligonucleotide
  Antisense strand to SEQ ID NO: 7872
ugucaagagaucuugcugc

SEQ ID NO: 7874 - RNA, 19 nt, Artificial Sequence
  Description of Artificial Sequence: Synthetic oligonucleotide
  Sense strand starting at position 2802 of SEQ ID NO: 50
ggccuagcugaagauugaa

SEQ ID NO: 7875 - RNA, 19 nt, Artificial Sequence
  Description of Artificial Sequence: Synthetic oligonucleotide
  Antisense strand to SEQ ID NO: 7874
uucaaucuucagcuaggcc

SEQ ID NO: 7876 - RNA, 19 nt, Artificial Sequence
  Description of Artificial Sequence: Synthetic oligonucleotide
  Sense strand starting at position 2366 of SEQ ID NO: 50
cgaguuaaugccuaaucug

SEQ ID NO: 7877 - RNA, 19 nt, Artificial Sequence
  Description of Artificial Sequence: Synthetic oligonucleotide
  Antisense strand to SEQ ID NO: 7876
cagauuaggcauuaacucg

SEQ ID NO: 7878 - RNA, 19 nt, Artificial Sequence
  Description of Artificial Sequence: Synthetic oligonucleotide
  Sense strand starting at position 2365 of SEQ ID NO: 50
ccgaguuaaugccuaaucu

SEQ ID NO: 7879 - RNA, 19 nt, Artificial Sequence
  Description of Artificial Sequence: Synthetic oligonucleotide
  Antisense strand to SEQ ID NO: 7878
agauuaggcauuaacucgg

SEQ ID NO: 7880 - RNA, 19 nt, Artificial Sequence
  Description of Artificial Sequence: Synthetic oligonucleotide
  Sense strand starting at position 1510 of SEQ ID NO: 50
gcacuugucuccgcgagga

SEQ ID NO: 7881 - RNA, 19 nt, Artificial Sequence
  Description of Artificial Sequence: Synthetic oligonucleotide
  Antisense strand to SEQ ID NO: 7880
uccucgcggagacaagugc

SEQ ID NO: 7882 - RNA, 19 nt, Artificial Sequence
  Description of Artificial Sequence: Synthetic oligonucleotide
  Sense strand starting at position 1006 of SEQ ID NO: 50
gauuucuggucccaggaga

SEQ ID NO: 7883 - RNA, 19 nt, Artificial Sequence
  Description of Artificial Sequence: Synthetic oligonucleotide
  Antisense strand to SEQ ID NO: 7882
ucuccugggaccagaaauc

SEQ ID NO: 7884 - RNA, 19 nt, Artificial Sequence
  Description of Artificial Sequence: Synthetic oligonucleotide
  Sense strand starting at position 503 of SEQ ID NO: 50
gacgguggccugugguaaa

SEQ ID NO: 7885 - RNA, 19 nt, Artificial Sequence
  Description of Artificial Sequence: Synthetic oligonucleotide
  Antisense strand to SEQ ID NO: 7884
uuuaccacaggccaccguc

SEQ ID NO: 7886 - RNA, 19 nt, Artificial Sequence
  Description of Artificial Sequence: Synthetic oligonucleotide
  Sense strand starting at position 414 of SEQ ID NO: 50
gccugugaaccacgaaauc

SEQ ID NO: 7887 - RNA, 19 nt, Artificial Sequence
  Description of Artificial Sequence: Synthetic oligonucleotide
  Antisense strand to SEQ ID NO: 7886
gauuucgugguucacaggc

SEQ ID NO: 7888 - RNA, 19 nt, Artificial Sequence
  Description of Artificial Sequence: Synthetic oligonucleotide
  Sense strand starting at position 123 of SEQ ID NO: 50
agaugcgucaccugugaac

SEQ ID NO: 7889 - RNA, 19 nt, Artificial Sequence
  Description of Artificial Sequence: Synthetic oligonucleotide
  Antisense strand to SEQ ID NO: 7888
guucacaggugacgcaucu

SEQ ID NO: 7890 - RNA, 19 nt, Artificial Sequence
  Description of Artificial Sequence: Synthetic oligonucleotide
  Sense strand starting at position 9 of SEQ ID NO: 51
ggaaguccugccugacaag

SEQ ID NO: 7891 - RNA, 19 nt, Artificial Sequence
  Description of Artificial Sequence: Synthetic oligonucleotide
  Antisense strand to SEQ ID NO: 7890
cuugucaggcaggacuucc

SEQ ID NO: 7892 - RNA, 19 nt, Artificial Sequence
  Description of Artificial Sequence: Synthetic oligonucleotide
  Sense strand starting at position 207 of SEQ ID NO: 51
ccgcguccugggaguaaug

SEQ ID NO: 7893 - RNA, 19 nt, Artificial Sequence
  Description of Artificial Sequence: Synthetic oligonucleotide
  Antisense strand to SEQ ID NO: 7892
cauuacucccaggacgcgg

SEQ ID NO: 7894 - RNA, 19 nt, Artificial Sequence
  Description of Artificial Sequence: Synthetic oligonucleotide
  Sense strand starting at position 452 of SEQ ID NO: 51
ugagguuucccugaugcag

SEQ ID NO: 7895 - RNA, 19 nt, Artificial Sequence
  Description of Artificial Sequence: Synthetic oligonucleotide
  Antisense strand to SEQ ID NO: 7894
cugcaucagggaaaccuca

SEQ ID NO: 7896 - RNA, 19 nt, Artificial Sequence
  Description of Artificial Sequence: Synthetic oligonucleotide
  Sense strand starting at position 636 of SEQ ID NO: 51
cccgcuguuguguuuacua

SEQ ID NO: 7897 - RNA, 19 nt, Artificial Sequence
  Description of Artificial Sequence: Synthetic oligonucleotide
  Antisense strand to SEQ ID NO: 7896
uaguaaacacaacagcggg

SEQ ID NO: 7898 - RNA, 19 nt, Artificial Sequence
  Description of Artificial Sequence: Synthetic oligonucleotide
  Sense strand starting at position 661 of SEQ ID NO: 51
cccacauuccuaggauagu

SEQ ID NO: 7899 - RNA, 19 nt, Artificial Sequence
  Description of Artificial Sequence: Synthetic oligonucleotide
  Antisense strand to SEQ ID NO: 7898
acuauccuaggaauguggg

SEQ ID NO: 7900 - RNA, 19 nt, Artificial Sequence
  Description of Artificial Sequence: Synthetic oligonucleotide
  Sense strand starting at position 1156 of SEQ ID NO: 51
gcuauuccuccugauggca

SEQ ID NO: 7901 - RNA, 19 nt, Artificial Sequence
  Description of Artificial Sequence: Synthetic oligonucleotide
  Antisense strand to SEQ ID NO: 7900
ugccaucaggaggaauagc

SEQ ID NO: 7902 - RNA, 19 nt, Artificial Sequence
  Description of Artificial Sequence: Synthetic oligonucleotide
  Sense strand starting at position 1185 of SEQ ID NO: 51
guggacucuuggccaugau

SEQ ID NO: 7903 - RNA, 19 nt, Artificial Sequence
  Description of Artificial Sequence: Synthetic oligonucleotide
  Antisense strand to SEQ ID NO: 7902
aucauggccaagaguccac

SEQ ID NO: 7904 - RNA, 19 nt, Artificial Sequence
  Description of Artificial Sequence: Synthetic oligonucleotide
  Sense strand starting at position 1188 of SEQ ID NO: 51
gacucuuggccaugaugac

SEQ ID NO: 7905 - RNA, 19 nt, Artificial Sequence
  Description of Artificial Sequence: Synthetic oligonucleotide
  Antisense strand to SEQ ID NO: 7904
gucaucauggccaagaguc

SEQ ID NO: 7906 - RNA, 19 nt, Artificial Sequence
  Description of Artificial Sequence: Synthetic oligonucleotide
  Sense strand starting at position 1197 of SEQ ID NO: 51
ccaugaugacucuguuccu

SEQ ID NO: 7907 - RNA, 19 nt, Artificial Sequence
  Description of Artificial Sequence: Synthetic oligonucleotide
  Antisense strand to SEQ ID NO: 7906
aggaacagagucaucaugg

SEQ ID NO: 7908 - RNA, 19 nt, Artificial Sequence
  Description of Artificial Sequence: Synthetic oligonucleotide
  Sense strand starting at position 1356 of SEQ ID NO: 51
ccggaugacuggucuuaug

SEQ ID NO: 7909 - RNA, 19 nt, Artificial Sequence
  Description of Artificial Sequence: Synthetic oligonucleotide
  Antisense strand to SEQ ID NO: 7908
cauaagaccagucauccgg

SEQ ID NO: 7910 - RNA, 19 nt, Artificial Sequence
  Description of Artificial Sequence: Synthetic oligonucleotide
  Sense strand starting at position 1621 of SEQ ID NO: 51
guuacaucacuuggccaga

SEQ ID NO: 7911 - RNA, 19 nt, Artificial Sequence
  Description of Artificial Sequence: Synthetic oligonucleotide
  Antisense strand to SEQ ID NO: 7910
ucuggccaagugauguaac

SEQ ID NO: 7912 - RNA, 19 nt, Artificial Sequence
  Description of Artificial Sequence: Synthetic oligonucleotide
  Sense strand starting at position 1699 of SEQ ID NO: 51
ggaagucuuagugaucgau

SEQ ID NO: 7913 - RNA, 19 nt, Artificial Sequence
  Description of Artificial Sequence: Synthetic oligonucleotide
  Antisense strand to SEQ ID NO: 7912
aucgaucacuaagacuucc

SEQ ID NO: 7914 - RNA, 19 nt, Artificial Sequence
  Description of Artificial Sequence: Synthetic oligonucleotide
  Sense strand starting at position 1707 of SEQ ID NO: 51
uagugaucgaugcagaguu

SEQ ID NO: 7915 - RNA, 19 nt, Artificial Sequence
  Description of Artificial Sequence: Synthetic oligonucleotide
  Antisense strand to SEQ ID NO: 7914
aacucugcaucgaucacua

SEQ ID NO: 7916 - RNA, 19 nt, Artificial Sequence
  Description of Artificial Sequence: Synthetic oligonucleotide
  Sense strand starting at position 1792 of SEQ ID NO: 51
gggccaagguucccagaaa

SEQ ID NO: 7917 - RNA, 19 nt, Artificial Sequence
  Description of Artificial Sequence: Synthetic oligonucleotide
  Antisense strand to SEQ ID NO: 7916
uuucugggaaccuuggccc

SEQ ID NO: 7918 - RNA, 19 nt, Artificial Sequence
  Description of Artificial Sequence: Synthetic oligonucleotide
  Sense strand starting at position 1813 of SEQ ID NO: 51
ggagcaucucccuaggugu

SEQ ID NO: 7919 - RNA, 19 nt, Artificial Sequence
  Description of Artificial Sequence: Synthetic oligonucleotide
  Antisense strand to SEQ ID NO: 7918
acaccuagggagaugcucc

SEQ ID NO: 7920 - RNA, 19 nt, Artificial Sequence
  Description of Artificial Sequence: Synthetic oligonucleotide
  Sense strand starting at position 1942 of SEQ ID NO: 51
gagagucuugcuuaggcaa

SEQ ID NO: 7921 - RNA, 19 nt, Artificial Sequence
  Description of Artificial Sequence: Synthetic oligonucleotide
  Antisense strand to SEQ ID NO: 7920
uugccuaagcaagacucuc

SEQ ID NO: 7922 - RNA, 19 nt, Artificial Sequence
  Description of Artificial Sequence: Synthetic oligonucleotide
  Sense strand starting at position 2036 of SEQ ID NO: 51
ugcaaaggccucuaauaga

SEQ ID NO: 7923 - RNA, 19 nt, Artificial Sequence
  Description of Artificial Sequence: Synthetic oligonucleotide
  Antisense strand to SEQ ID NO: 7922
ucuauuagaggccuuugca

SEQ ID NO: 7924 - RNA, 19 nt, Artificial Sequence
  Description of Artificial Sequence: Synthetic oligonucleotide
  Sense strand starting at position 2083 of SEQ ID NO: 51
aagugccuucuggaaguuu

SEQ ID NO: 7925 - RNA, 19 nt, Artificial Sequence
  Description of Artificial Sequence: Synthetic oligonucleotide
  Antisense strand to SEQ ID NO: 7924
aaacuuccagaaggcacuu

SEQ ID NO: 7926 - RNA, 19 nt, Artificial Sequence
  Description of Artificial Sequence: Synthetic oligonucleotide
  Sense strand starting at position 2550 of SEQ ID NO: 51
aagagauggugccuggaua

SEQ ID NO: 7927 - RNA, 19 nt, Artificial Sequence
  Description of Artificial Sequence: Synthetic oligonucleotide
  Antisense strand to SEQ ID NO: 7926
uauccaggcaccaucucuu

SEQ ID NO: 7928 - RNA, 19 nt, Artificial Sequence
  Description of Artificial Sequence: Synthetic oligonucleotide
  Sense strand starting at position 2551 of SEQ ID NO: 51
agagauggugccuggauau

SEQ ID NO: 7929 - RNA, 19 nt, Artificial Sequence
  Description of Artificial Sequence: Synthetic oligonucleotide
  Antisense strand to SEQ ID NO: 7928
auauccaggcaccaucucu

SEQ ID NO: 7930 - RNA, 19 nt, Artificial Sequence
  Description of Artificial Sequence: Synthetic oligonucleotide
  Sense strand starting at position 2668 of SEQ ID NO: 51
cucacaugggccuguaaau

SEQ ID NO: 7931 - RNA, 19 nt, Artificial Sequence
  Description of Artificial Sequence: Synthetic oligonucleotide
  Antisense strand to SEQ ID NO: 7930
auuuacaggcccaugugag

SEQ ID NO: 7932 - RNA, 19 nt, Artificial Sequence
  Description of Artificial Sequence: Synthetic oligonucleotide
  Sense strand starting at position 2706 of SEQ ID NO: 51
auuacuuuguuccuauaga

SEQ ID NO: 7933 - RNA, 19 nt, Artificial Sequence
  Description of Artificial Sequence: Synthetic oligonucleotide
  Antisense strand to SEQ ID NO: 7932
ucuauaggaacaaaguaau

SEQ ID NO: 7934 - RNA, 19 nt, Artificial Sequence
  Description of Artificial Sequence: Synthetic oligonucleotide
  Sense strand starting at position 2810 of SEQ ID NO: 51
agugccucgcaucuguaau

SEQ ID NO: 7935 - RNA, 19 nt, Artificial Sequence
  Description of Artificial Sequence: Synthetic oligonucleotide
  Antisense strand to SEQ ID NO: 7934
auuacagaugcgaggcacu

SEQ ID NO: 7936 - RNA, 19 nt, Artificial Sequence
  Description of Artificial Sequence: Synthetic oligonucleotide
  Sense strand starting at position 3042 of SEQ ID NO: 51
cuaacuaguuguuugagga

SEQ ID NO: 7937 - RNA, 19 nt, Artificial Sequence
  Description of Artificial Sequence: Synthetic oligonucleotide
  Antisense strand to SEQ ID NO: 7936
uccucaaacaacuaguuag

SEQ ID NO: 7938 - RNA, 19 nt, Artificial Sequence
  Description of Artificial Sequence: Synthetic oligonucleotide
  Sense strand starting at position 3043 of SEQ ID NO: 51
uaacuaguuguuugaggau

SEQ ID NO: 7939 - RNA, 19 nt, Artificial Sequence
  Description of Artificial Sequence: Synthetic oligonucleotide
  Antisense strand to SEQ ID NO: 7938
auccucaaacaacuaguua

SEQ ID NO: 7940 - RNA, 19 nt, Artificial Sequence
  Description of Artificial Sequence: Synthetic oligonucleotide
  Sense strand starting at position 3057 of SEQ ID NO: 51
aggaucagcaagugguuua

SEQ ID NO: 7941 - RNA, 19 nt, Artificial Sequence
  Description of Artificial Sequence: Synthetic oligonucleotide
  Antisense strand to SEQ ID NO: 7940
uaaaccacuugcugauccu

SEQ ID NO: 7942 - RNA, 19 nt, Artificial Sequence
  Description of Artificial Sequence: Synthetic oligonucleotide
  Sense strand starting at position 3058 of SEQ ID NO: 51
ggaucagcaagugguuuaa

SEQ ID NO: 7943 - RNA, 19 nt, Artificial Sequence
  Description of Artificial Sequence: Synthetic oligonucleotide
  Antisense strand to SEQ ID NO: 7942
uuaaaccacuugcugaucc

SEQ ID NO: 7944 - RNA, 19 nt, Artificial Sequence
  Description of Artificial Sequence: Synthetic oligonucleotide
  Sense strand starting at position 3115 of SEQ ID NO: 51
aggaucuagcacugauuaa

SEQ ID NO: 7945 - RNA, 19 nt, Artificial Sequence
  Description of Artificial Sequence: Synthetic oligonucleotide
  Antisense strand to SEQ ID NO: 7944
uuaaucagugcuagauccu

SEQ ID NO: 7946 - RNA, 19 nt, Artificial Sequence
  Description of Artificial Sequence: Synthetic oligonucleotide
  Sense strand starting at position 3156 of SEQ ID NO: 51
uuaaauauuucggcucuuu

SEQ ID NO: 7947 - RNA, 19 nt, Artificial Sequence
  Description of Artificial Sequence: Synthetic oligonucleotide
  Antisense strand to SEQ ID NO: 7946
aaagagccgaaauauuuaa

SEQ ID NO: 7948 - RNA, 19 nt, Artificial Sequence
  Description of Artificial Sequence: Synthetic oligonucleotide
  Sense strand starting at position 3298 of SEQ ID NO: 51
uuggaaugaucacuccauu

SEQ ID NO: 7949 - RNA, 19 nt, Artificial Sequence
  Description of Artificial Sequence: Synthetic oligonucleotide
  Antisense strand to SEQ ID NO: 7948
aauggagugaucauuccaa

SEQ ID NO: 7950 - RNA, 19 nt, Artificial Sequence
  Description of Artificial Sequence: Synthetic oligonucleotide
  Sense strand starting at position 3510 of SEQ ID NO: 51
uguugcaagauugguuaaa

SEQ ID NO: 7951 - RNA, 19 nt, Artificial Sequence
  Description of Artificial Sequence: Synthetic oligonucleotide
  Antisense strand to SEQ ID NO: 7950
uuuaaccaaucuugcaaca

SEQ ID NO: 7952 - RNA, 19 nt, Artificial Sequence
  Description of Artificial Sequence: Synthetic oligonucleotide
  Sense strand starting at position 3567 of SEQ ID NO: 51
ggaucuucuacguaaggcu

SEQ ID NO: 7953 - RNA, 19 nt, Artificial Sequence
  Description of Artificial Sequence: Synthetic oligonucleotide
  Antisense strand to SEQ ID NO: 7952
agccuuacguagaagaucc

SEQ ID NO: 7954 - RNA, 19 nt, Artificial Sequence
  Description of Artificial Sequence: Synthetic oligonucleotide
  Sense strand starting at position 3582 of SEQ ID NO: 51
ggcuuuaaagcucauuaaa

SEQ ID NO: 7955 - RNA, 19 nt, Artificial Sequence
  Description of Artificial Sequence: Synthetic oligonucleotide
  Antisense strand to SEQ ID NO: 7954
uuuaaugagcuuuaaagcc

SEQ ID NO: 7956 - RNA, 19 nt, Artificial Sequence
  Description of Artificial Sequence: Synthetic oligonucleotide
  Sense strand starting at position 3738 of SEQ ID NO: 51
ucauuccaucaguggaagu

SEQ ID NO: 7957 - RNA, 19 nt, Artificial Sequence
  Description of Artificial Sequence: Synthetic oligonucleotide
  Antisense strand to SEQ ID NO: 7956
acuuccacugauggaauga

SEQ ID NO: 7958 - RNA, 19 nt, Artificial Sequence
  Description of Artificial Sequence: Synthetic oligonucleotide
  Sense strand starting at position 3740 of SEQ ID NO: 51
auuccaucaguggaaguuu

SEQ ID NO: 7959 - RNA, 19 nt, Artificial Sequence
  Description of Artificial Sequence: Synthetic oligonucleotide
  Antisense strand to SEQ ID NO: 7958
aaacuuccacugauggaau

SEQ ID NO: 7960 - RNA, 19 nt, Artificial Sequence
  Description of Artificial Sequence: Synthetic oligonucleotide
  Sense strand starting at position 3765 of SEQ ID NO: 51
uguacauuccaucagugga

SEQ ID NO: 7961 - RNA, 19 nt, Artificial Sequence
  Description of Artificial Sequence: Synthetic oligonucleotide
  Antisense strand to SEQ ID NO: 7960
uccacugauggaauguaca

SEQ ID NO: 7962 - RNA, 19 nt, Artificial Sequence
  Description of Artificial Sequence: Synthetic oligonucleotide
  Sense strand starting at position 3768 of SEQ ID NO: 51
acauuccaucaguggaagu

SEQ ID NO: 7963 - RNA, 19 nt, Artificial Sequence
  Description of Artificial Sequence: Synthetic oligonucleotide
  Antisense strand to SEQ ID NO: 7962
acuuccacugauggaaugu

SEQ ID NO: 7964 - RNA, 19 nt, Artificial Sequence
  Description of Artificial Sequence: Synthetic oligonucleotide
  Sense strand starting at position 3770 of SEQ ID NO: 51
auuccaucaguggaaguua

SEQ ID NO: 7965 - RNA, 19 nt, Artificial Sequence
  Description of Artificial Sequence: Synthetic oligonucleotide
  Antisense strand to SEQ ID NO: 7964
uaacuuccacugauggaau

SEQ ID NO: 7966 - RNA, 19 nt, Artificial Sequence
  Description of Artificial Sequence: Synthetic oligonucleotide
  Sense strand starting at position 3798 of SEQ ID NO: 51
cuuaucuguggcuaaauga

SEQ ID NO: 7967 - RNA, 19 nt, Artificial Sequence
  Description of Artificial Sequence: Synthetic oligonucleotide
  Antisense strand to SEQ ID NO: 7966
ucauuuagccacagauaag

SEQ ID NO: 7968 - RNA, 19 nt, Artificial Sequence
  Description of Artificial Sequence: Synthetic oligonucleotide
  Sense strand starting at position 3966 of SEQ ID NO: 51
gaggguggaucuuucugau

SEQ ID NO: 7969 - RNA, 19 nt, Artificial Sequence
  Description of Artificial Sequence: Synthetic oligonucleotide
  Antisense strand to SEQ ID NO: 7968
aucagaaagauccacccuc

SEQ ID NO: 7970 - RNA, 19 nt, Artificial Sequence
  Description of Artificial Sequence: Synthetic oligonucleotide
  Sense strand starting at position 3727 of SEQ ID NO: 52
guaagcagucaauauuaga

SEQ ID NO: 7971 - RNA, 19 nt, Artificial Sequence
  Description of Artificial Sequence: Synthetic oligonucleotide
  Antisense strand to SEQ ID NO: 7970
ucuaauauugacugcuuac

SEQ ID NO: 7972 - RNA, 19 nt, Artificial Sequence
  Description of Artificial Sequence: Synthetic oligonucleotide
  Sense strand starting at position 3713 of SEQ ID NO: 52
agaguaauuucucaguaag

SEQ ID NO: 7973 - RNA, 19 nt, Artificial Sequence
  Description of Artificial Sequence: Synthetic oligonucleotide
  Antisense strand to SEQ ID NO: 7972
cuuacugagaaauuacucu

SEQ ID NO: 7974 - RNA, 19 nt, Artificial Sequence
  Description of Artificial Sequence: Synthetic oligonucleotide
  Sense strand starting at position 3694 of SEQ ID NO: 52
uuaguaaaguacuuagaag

SEQ ID NO: 7975 - RNA, 19 nt, Artificial Sequence
  Description of Artificial Sequence: Synthetic oligonucleotide
  Antisense strand to SEQ ID NO: 7974
cuucuaaguacuuuacuaa

SEQ ID NO: 7976 - RNA, 19 nt, Artificial Sequence
  Description of Artificial Sequence: Synthetic oligonucleotide
  Sense strand starting at position 3541 of SEQ ID NO: 52
ggcccauaggccuaacuua

SEQ ID NO: 7977 - RNA, 19 nt, Artificial Sequence
  Description of Artificial Sequence: Synthetic oligonucleotide
  Antisense strand to SEQ ID NO: 7976
uaaguuaggccuaugggcc

SEQ ID NO: 7978 - RNA, 19 nt, Artificial Sequence
  Description of Artificial Sequence: Synthetic oligonucleotide
  Sense strand starting at position 3500 of SEQ ID NO: 52
gguuucucuggauggauga

SEQ ID NO: 7979 - RNA, 19 nt, Artificial Sequence
  Description of Artificial Sequence: Synthetic oligonucleotide
  Antisense strand to SEQ ID NO: 7978
ucauccauccagagaaacc

SEQ ID NO: 7980 - RNA, 19 nt, Artificial Sequence
  Description of Artificial Sequence: Synthetic oligonucleotide
  Sense strand starting at position 3475 of SEQ ID NO: 52
auagucucuccagaugcaa

SEQ ID NO: 7981 - RNA, 19 nt, Artificial Sequence
  Description of Artificial Sequence: Synthetic oligonucleotide
  Antisense strand to SEQ ID NO: 7980
uugcaucuggagagacuau

SEQ ID NO: 7982 - RNA, 19 nt, Artificial Sequence
  Description of Artificial Sequence: Synthetic oligonucleotide
  Sense strand starting at position 3472 of SEQ ID NO: 52
cccauagucucuccagaug

SEQ ID NO: 7983 - RNA, 19 nt, Artificial Sequence
  Description of Artificial Sequence: Synthetic oligonucleotide
  Antisense strand to SEQ ID NO: 7982
caucuggagagacuauggg

SEQ ID NO: 7984 - RNA, 19 nt, Artificial Sequence
  Description of Artificial Sequence: Synthetic oligonucleotide
  Sense strand starting at position 3444 of SEQ ID NO: 52
cugggugaguccuuagaua

SEQ ID NO: 7985 - RNA, 19 nt, Artificial Sequence
  Description of Artificial Sequence: Synthetic oligonucleotide
  Antisense strand to SEQ ID NO: 7984
uaucuaaggacucacccag

SEQ ID NO: 7986 - RNA, 19 nt, Artificial Sequence
  Description of Artificial Sequence: Synthetic oligonucleotide
  Sense strand starting at position 3351 of SEQ ID NO: 52
gugucaccuagguauggaa

SEQ ID NO: 7987 - RNA, 19 nt, Artificial Sequence
  Description of Artificial Sequence: Synthetic oligonucleotide
  Antisense strand to SEQ ID NO: 7986
uuccauaccuaggugacac

SEQ ID NO: 7988 - RNA, 19 nt, Artificial Sequence
  Description of Artificial Sequence: Synthetic oligonucleotide
  Sense strand starting at position 3347 of SEQ ID NO: 52
uuuagugucaccuagguau

SEQ ID NO: 7989 - RNA, 19 nt, Artificial Sequence
  Description of Artificial Sequence: Synthetic oligonucleotide
  Antisense strand to SEQ ID NO: 7988
auaccuaggugacacuaaa

SEQ ID NO: 7990 - RNA, 19 nt, Artificial Sequence
  Description of Artificial Sequence: Synthetic oligonucleotide
  Sense strand starting at position 3236 of SEQ ID NO: 52
ccuuaaagauuguugacca

SEQ ID NO: 7991 - RNA, 19 nt, Artificial Sequence
  Description of Artificial Sequence: Synthetic oligonucleotide
  Antisense strand to SEQ ID NO: 7990
uggucaacaaucuuuaagg

SEQ ID NO: 7992 - RNA, 19 nt, Artificial Sequence
  Description of Artificial Sequence: Synthetic oligonucleotide
  Sense strand starting at position 3227 of SEQ ID NO: 52
uggcaccucccuuaaagau

SEQ ID NO: 7993 - RNA, 19 nt, Artificial Sequence
  Description of Artificial Sequence: Synthetic oligonucleotide
  Antisense strand to SEQ ID NO: 7992
aucuuuaagggaggugcca

SEQ ID NO: 7994 - RNA, 19 nt, Artificial Sequence
  Description of Artificial Sequence: Synthetic oligonucleotide
  Sense strand starting at position 2706 of SEQ ID NO: 52
cgguuuguucuaggagaga

SEQ ID NO: 7995 - RNA, 19 nt, Artificial Sequence
  Description of Artificial Sequence: Synthetic oligonucleotide
  Antisense strand to SEQ ID NO: 7994
ucucuccuagaacaaaccg

SEQ ID NO: 7996 - RNA, 19 nt, Artificial Sequence
  Description of Artificial Sequence: Synthetic oligonucleotide
  Sense strand starting at position 2600 of SEQ ID NO: 52
ugcugaaacugguuuauua

SEQ ID NO: 7997 - RNA, 19 nt, Artificial Sequence
  Description of Artificial Sequence: Synthetic oligonucleotide
  Antisense strand to SEQ ID NO: 7996
uaauaaaccaguuucagca

SEQ ID NO: 7998 - RNA, 19 nt, Artificial Sequence
  Description of Artificial Sequence: Synthetic oligonucleotide
  Sense strand starting at position 2590 of SEQ ID NO: 52
gcaggacucuugcugaaac

SEQ ID NO: 7999 - RNA, 19 nt, Artificial Sequence
  Description of Artificial Sequence: Synthetic oligonucleotide
  Antisense strand to SEQ ID NO: 7998
guuucagcaagaguccugc

SEQ ID NO: 8000 - RNA, 19 nt, Artificial Sequence
  Description of Artificial Sequence: Synthetic oligonucleotide
  Sense strand starting at position 2540 of SEQ ID NO: 52
gaagauuccuaggaggaga

SEQ ID NO: 8001 - RNA, 19 nt, Artificial Sequence
  Description of Artificial Sequence: Synthetic oligonucleotide
  Antisense strand to SEQ ID NO: 8000
ucuccuccuaggaaucuuc

SEQ ID NO: 8002 - RNA, 19 nt, Artificial Sequence
  Description of Artificial Sequence: Synthetic oligonucleotide
  Sense strand starting at position 2410 of SEQ ID NO: 52
uuguuaaaccaguacuguu

SEQ ID NO: 8003 - RNA, 19 nt, Artificial Sequence
  Description of Artificial Sequence: Synthetic oligonucleotide
  Antisense strand to SEQ ID NO: 8002
aacaguacugguuuaacaa

SEQ ID NO: 8004 - RNA, 19 nt, Artificial Sequence
  Description of Artificial Sequence: Synthetic oligonucleotide
  Sense strand starting at position 2343 of SEQ ID NO: 52
cucauaugauccuuaugag

SEQ ID NO: 8005 - RNA, 19 nt, Artificial Sequence
  Description of Artificial Sequence: Synthetic oligonucleotide
  Antisense strand to SEQ ID NO: 8004
cucauaaggaucauaugag

SEQ ID NO: 8006 - RNA, 19 nt, Artificial Sequence
  Description of Artificial Sequence: Synthetic oligonucleotide
  Sense strand starting at position 2000 of SEQ ID NO: 52
agcucaagaccacgugaaa

SEQ ID NO: 8007 - RNA, 19 nt, Artificial Sequence
  Description of Artificial Sequence: Synthetic oligonucleotide
  Antisense strand to SEQ ID NO: 8006
uuucacguggucuugagcu

SEQ ID NO: 8008 - RNA, 19 nt, Artificial Sequence
  Description of Artificial Sequence: Synthetic oligonucleotide
  Sense strand starting at position 1322 of SEQ ID NO: 52
gcgcuucuugauuaugaaa

SEQ ID NO: 8009 - RNA, 19 nt, Artificial Sequence
  Description of Artificial Sequence: Synthetic oligonucleotide
  Antisense strand to SEQ ID NO: 8008
uuucauaaucaagaagcgc

SEQ ID NO: 8010 - RNA, 19 nt, Artificial Sequence
  Description of Artificial Sequence: Synthetic oligonucleotide
  Sense strand starting at position 1316 of SEQ ID NO: 52
gaguucgcgcuucuugauu

SEQ ID NO: 8011 - RNA, 19 nt, Artificial Sequence
  Description of Artificial Sequence: Synthetic oligonucleotide
  Antisense strand to SEQ ID NO: 8010
aaucaagaagcgcgaacuc

SEQ ID NO: 8012 - RNA, 19 nt, Artificial Sequence
  Description of Artificial Sequence: Synthetic oligonucleotide
  Sense strand starting at position 1315 of SEQ ID NO: 52
ggaguucgcgcuucuugau

SEQ ID NO: 8013 - RNA, 19 nt, Artificial Sequence
  Description of Artificial Sequence: Synthetic oligonucleotide
  Antisense strand to SEQ ID NO: 8012
aucaagaagcgcgaacucc

SEQ ID NO: 8014 - RNA, 19 nt, Artificial Sequence
  Description of Artificial Sequence: Synthetic oligonucleotide
  Sense strand starting at position 1314 of SEQ ID NO: 52
uggaguucgcgcuucuuga

SEQ ID NO: 8015 - RNA, 19 nt, Artificial Sequence
  Description of Artificial Sequence: Synthetic oligonucleotide
  Antisense strand to SEQ ID NO: 8014
ucaagaagcgcgaacucca

SEQ ID NO: 8016 - RNA, 19 nt, Artificial Sequence
  Description of Artificial Sequence: Synthetic oligonucleotide
  Sense strand starting at position 1312 of SEQ ID NO: 52
guuggaguucgcgcuucuu

SEQ ID NO: 8017 - RNA, 19 nt, Artificial Sequence
  Description of Artificial Sequence: Synthetic oligonucleotide
  Antisense strand to SEQ ID NO: 8016
aagaagcgcgaacuccaac

SEQ ID NO: 8018 - RNA, 19 nt, Artificial Sequence
  Description of Artificial Sequence: Synthetic oligonucleotide
  Sense strand starting at position 1303 of SEQ ID NO: 52
guaauuucuguuggaguuc

SEQ ID NO: 8019 - RNA, 19 nt, Artificial Sequence
  Description of Artificial Sequence: Synthetic oligonucleotide
  Antisense strand to SEQ ID NO: 8018
gaacuccaacagaaauuac

SEQ ID NO: 8020 - RNA, 19 nt, Artificial Sequence
  Description of Artificial Sequence: Synthetic oligonucleotide
  Sense strand starting at position 1035 of SEQ ID NO: 52
ccuggauauugccucaaag

SEQ ID NO: 8021 - RNA, 19 nt, Artificial Sequence
  Description of Artificial Sequence: Synthetic oligonucleotide
  Antisense strand to SEQ ID NO: 8020
cuuugaggcaauauccagg

SEQ ID NO: 8022 - RNA, 19 nt, Artificial Sequence
  Description of Artificial Sequence: Synthetic oligonucleotide
  Sense strand starting at position 909 of SEQ ID NO: 52
acagauguuguguaauaau

SEQ ID NO: 8023 - RNA, 19 nt, Artificial Sequence
  Description of Artificial Sequence: Synthetic oligonucleotide
  Antisense strand to SEQ ID NO: 8022
auuauuacacaacaucugu

SEQ ID NO: 8024 - RNA, 19 nt, Artificial Sequence
  Description of Artificial Sequence: Synthetic oligonucleotide
  Sense strand starting at position 908 of SEQ ID NO: 52
cacagauguuguguaauaa

SEQ ID NO: 8025 - RNA, 19 nt, Artificial Sequence
  Description of Artificial Sequence: Synthetic oligonucleotide
  Antisense strand to SEQ ID NO: 8024
uuauuacacaacaucugug

SEQ ID NO: 8026 - RNA, 19 nt, Artificial Sequence
  Description of Artificial Sequence: Synthetic oligonucleotide
  Sense strand starting at position 881 of SEQ ID NO: 52
gggaaacaugccuauagca

SEQ ID NO: 8027 - RNA, 19 nt, Artificial Sequence
  Description of Artificial Sequence: Synthetic oligonucleotide
  Antisense strand to SEQ ID NO: 8026
ugcuauaggcauguuuccc

SEQ ID NO: 8028 - RNA, 19 nt, Artificial Sequence
  Description of Artificial Sequence: Synthetic oligonucleotide
  Sense strand starting at position 857 of SEQ ID NO: 52
ugcugaagcaaguaugauu

SEQ ID NO: 8029 - RNA, 19 nt, Artificial Sequence
  Description of Artificial Sequence: Synthetic oligonucleotide
  Antisense strand to SEQ ID NO: 8028
aaucauacuugcuucagca

SEQ ID NO: 8030 - RNA, 19 nt, Artificial Sequence
  Description of Artificial Sequence: Synthetic oligonucleotide
  Sense strand starting at position 751 of SEQ ID NO: 52
gcugcugucacguaaauuu

SEQ ID NO: 8031 - RNA, 19 nt, Artificial Sequence
  Description of Artificial Sequence: Synthetic oligonucleotide
  Antisense strand to SEQ ID NO: 8030
aaauuuacgugacagcagc

SEQ ID NO: 8032 - RNA, 19 nt, Artificial Sequence
  Description of Artificial Sequence: Synthetic oligonucleotide
  Sense strand starting at position 750 of SEQ ID NO: 52
ggcugcugucacguaaauu

SEQ ID NO: 8033 - RNA, 19 nt, Artificial Sequence
  Description of Artificial Sequence: Synthetic oligonucleotide
  Antisense strand to SEQ ID NO: 8032
aauuuacgugacagcagcc

SEQ ID NO: 8034 - RNA, 19 nt, Artificial Sequence
  Description of Artificial Sequence: Synthetic oligonucleotide
  Sense strand starting at position 714 of SEQ ID NO: 52
ccuggaauagagugcauau

SEQ ID NO: 8035 - RNA, 19 nt, Artificial Sequence
  Description of Artificial Sequence: Synthetic oligonucleotide
  Antisense strand to SEQ ID NO: 8034
auaugcacucuauuccagg

SEQ ID NO: 8036 - RNA, 19 nt, Artificial Sequence
  Description of Artificial Sequence: Synthetic oligonucleotide
  Sense strand starting at position 667 of SEQ ID NO: 52
gcaaaucccucaucagaga

SEQ ID NO: 8037 - RNA, 19 nt, Artificial Sequence
  Description of Artificial Sequence: Synthetic oligonucleotide
  Antisense strand to SEQ ID NO: 8036
ucucugaugagggauuugc

SEQ ID NO: 8038 - RNA, 19 nt, Artificial Sequence
  Description of Artificial Sequence: Synthetic oligonucleotide
  Sense strand starting at position 565 of SEQ ID NO: 52
ggcugccuugauuaaauaa

SEQ ID NO: 8039 - RNA, 19 nt, Artificial Sequence
  Description of Artificial Sequence: Synthetic oligonucleotide
  Antisense strand to SEQ ID NO: 8038
uuauuuaaucaaggcagcc

SEQ ID NO: 8040 - RNA, 19 nt, Artificial Sequence
  Description of Artificial Sequence: Synthetic oligonucleotide
  Sense strand starting at position 438 of SEQ ID NO: 52
gagucugaucccuaugggu

SEQ ID NO: 8041 - RNA, 19 nt, Artificial Sequence
  Description of Artificial Sequence: Synthetic oligonucleotide
  Antisense strand to SEQ ID NO: 8040
acccauagggaucagacuc

SEQ ID NO: 8042 - RNA, 19 nt, Artificial Sequence
  Description of Artificial Sequence: Synthetic oligonucleotide
  Sense strand starting at position 434 of SEQ ID NO: 52
ccuggagucugaucccuau

SEQ ID NO: 8043 - RNA, 19 nt, Artificial Sequence
  Description of Artificial Sequence: Synthetic oligonucleotide
  Antisense strand to SEQ ID NO: 8042
auagggaucagacuccagg

SEQ ID NO: 8044 - RNA, 19 nt, Artificial Sequence
  Description of Artificial Sequence: Synthetic oligonucleotide
  Sense strand starting at position 73 of SEQ ID NO: 52
gccugagacuuacucauac

SEQ ID NO: 8045 - RNA, 19 nt, Artificial Sequence
  Description of Artificial Sequence: Synthetic oligonucleotide
  Antisense strand to SEQ ID NO: 8044
guaugaguaagucucaggc

SEQ ID NO: 8046 - RNA, 19 nt, Artificial Sequence
  Description of Artificial Sequence: Synthetic oligonucleotide
  Sense strand starting at position 64 of SEQ ID NO: 52
ccacauauugccugagacu

SEQ ID NO: 8047 - RNA, 19 nt, Artificial Sequence
  Description of Artificial Sequence: Synthetic oligonucleotide
  Antisense strand to SEQ ID NO: 8046
agucucaggcaauaugugg

SEQ ID NO: 8048 - RNA, 19 nt, Artificial Sequence
  Description of Artificial Sequence: Synthetic oligonucleotide
  Sense strand starting at position 51 of SEQ ID NO: 52
uuguuaauaugucccacau

SEQ ID NO: 8049 - RNA, 19 nt, Artificial Sequence
  Description of Artificial Sequence: Synthetic oligonucleotide
  Antisense strand to SEQ ID NO: 8048
augugggacauauuaacaa

SEQ ID NO: 8050 - RNA, 19 nt, Artificial Sequence
  Description of Artificial Sequence: Synthetic oligonucleotide
  Sense strand starting at position 182 of SEQ ID NO: 53
uuguuaacauaugaggaua

SEQ ID NO: 8051 - RNA, 19 nt, Artificial Sequence
  Description of Artificial Sequence: Synthetic oligonucleotide
  Antisense strand to SEQ ID NO: 8050
uauccucauauguuaacaa

SEQ ID NO: 8052 - RNA, 19 nt, Artificial Sequence
  Description of Artificial Sequence: Synthetic oligonucleotide
  Sense strand starting at position 184 of SEQ ID NO: 53
guuaacauaugaggauaga

SEQ ID NO: 8053 - RNA, 19 nt, Artificial Sequence
  Description of Artificial Sequence: Synthetic oligonucleotide
  Antisense strand to SEQ ID NO: 8052
ucuauccucauauguuaac

SEQ ID NO: 8054 - RNA, 19 nt, Artificial Sequence
  Description of Artificial Sequence: Synthetic oligonucleotide
  Sense strand starting at position 207 of SEQ ID NO: 53
agcauauacuuauuguaga

SEQ ID NO: 8055 - RNA, 19 nt, Artificial Sequence
  Description of Artificial Sequence: Synthetic oligonucleotide
  Antisense strand to SEQ ID NO: 8054
ucuacaauaaguauaugcu

SEQ ID NO: 8056 - RNA, 19 nt, Artificial Sequence
  Description of Artificial Sequence: Synthetic oligonucleotide
  Sense strand starting at position 220 of SEQ ID NO: 53
uguagagaccuuugagcua

SEQ ID NO: 8057 - RNA, 19 nt, Artificial Sequence
  Description of Artificial Sequence: Synthetic oligonucleotide
  Antisense strand to SEQ ID NO: 8056
uagcucaaaggucucuaca

SEQ ID NO: 8058 - RNA, 19 nt, Artificial Sequence
  Description of Artificial Sequence: Synthetic oligonucleotide
  Sense strand starting at position 225 of SEQ ID NO: 53
agaccuuugagcuaaccga

SEQ ID NO: 8059 - RNA, 19 nt, Artificial Sequence
  Description of Artificial Sequence: Synthetic oligonucleotide
  Antisense strand to SEQ ID NO: 8058
ucgguuagcucaaaggucu

SEQ ID NO: 8060 - RNA, 19 nt, Artificial Sequence
  Description of Artificial Sequence: Synthetic oligonucleotide
  Sense strand starting at position 233 of SEQ ID NO: 53
gagcuaaccgagggaaguu

SEQ ID NO: 8061 - RNA, 19 nt, Artificial Sequence
  Description of Artificial Sequence: Synthetic oligonucleotide
  Antisense strand to SEQ ID NO: 8060
aacuucccucgguuagcuc

SEQ ID NO: 8062 - RNA, 19 nt, Artificial Sequence
  Description of Artificial Sequence: Synthetic oligonucleotide
  Sense strand starting at position 290 of SEQ ID NO: 53
auuaaagguaggcgugaaa

SEQ ID NO: 8063 - RNA, 19 nt, Artificial Sequence
  Description of Artificial Sequence: Synthetic oligonucleotide
  Antisense strand to SEQ ID NO: 8062
uuucacgccuaccuuuaau

SEQ ID NO: 8064 - RNA, 19 nt, Artificial Sequence
  Description of Artificial Sequence: Synthetic oligonucleotide
  Sense strand starting at position 301 of SEQ ID NO: 53
gcgugaaagacacaacguu

SEQ ID NO: 8065 - RNA, 19 nt, Artificial Sequence
  Description of Artificial Sequence: Synthetic oligonucleotide
  Antisense strand to SEQ ID NO: 8064
aacguugugucuuucacgc

SEQ ID NO: 8066 - RNA, 19 nt, Artificial Sequence
  Description of Artificial Sequence: Synthetic oligonucleotide
  Sense strand starting at position 642 of SEQ ID NO: 53
auguaucuguaccuaugaa

SEQ ID NO: 8067 - RNA, 19 nt, Artificial Sequence
  Description of Artificial Sequence: Synthetic oligonucleotide
  Antisense strand to SEQ ID NO: 8066
uucauagguacagauacau

SEQ ID NO: 8068 - RNA, 19 nt, Artificial Sequence
  Description of Artificial Sequence: Synthetic oligonucleotide
  Sense strand starting at position 876 of SEQ ID NO: 53
ccaauucccgguugacaug

SEQ ID NO: 8069 - RNA, 19 nt, Artificial Sequence
  Description of Artificial Sequence: Synthetic oligonucleotide
  Antisense strand to SEQ ID NO: 8068
caugucaaccgggaauugg

SEQ ID NO: 8070 - RNA, 19 nt, Artificial Sequence
  Description of Artificial Sequence: Synthetic oligonucleotide
  Sense strand starting at position 920 of SEQ ID NO: 53
auuauuguuguuugcaaac

SEQ ID NO: 8071 - RNA, 19 nt, Artificial Sequence
  Description of Artificial Sequence: Synthetic oligonucleotide
  Antisense strand to SEQ ID NO: 8070
guuugcaaacaacaauaau

SEQ ID NO: 8072 - RNA, 19 nt, Artificial Sequence
  Description of Artificial Sequence: Synthetic oligonucleotide
  Sense strand starting at position 1065 of SEQ ID NO: 53
cuugucaucccaggucaaa

SEQ ID NO: 8073 - RNA, 19 nt, Artificial Sequence
  Description of Artificial Sequence: Synthetic oligonucleotide
  Antisense strand to SEQ ID NO: 8072
uuugaccugggaugacaag

SEQ ID NO: 8074 - RNA, 19 nt, Artificial Sequence
  Description of Artificial Sequence: Synthetic oligonucleotide
  Sense strand starting at position 1075 of SEQ ID NO: 53
caggucaaauccuccgaaa

SEQ ID NO: 8075 - RNA, 19 nt, Artificial Sequence
  Description of Artificial Sequence: Synthetic oligonucleotide
  Antisense strand to SEQ ID NO: 8074
uuucggaggauuugaccug

SEQ ID NO: 8076 - RNA, 19 nt, Artificial Sequence
  Description of Artificial Sequence: Synthetic oligonucleotide
  Sense strand starting at position 1077 of SEQ ID NO: 53
ggucaaauccuccgaaaua

SEQ ID NO: 8077 - RNA, 19 nt, Artificial Sequence
  Description of Artificial Sequence: Synthetic oligonucleotide
  Antisense strand to SEQ ID NO: 8076
uauuucggaggauuugacc

SEQ ID NO: 8078 - RNA, 19 nt, Artificial Sequence
  Description of Artificial Sequence: Synthetic oligonucleotide
  Sense strand starting at position 1124 of SEQ ID NO: 53
aagagacucuaucagugaa

SEQ ID NO: 8079 - RNA, 19 nt, Artificial Sequence
  Description of Artificial Sequence: Synthetic oligonucleotide
  Antisense strand to SEQ ID NO: 8078
uucacugauagagucucuu

SEQ ID NO: 8080 - RNA, 19 nt, Artificial Sequence
  Description of Artificial Sequence: Synthetic oligonucleotide
  Sense strand starting at position 1127 of SEQ ID NO: 53
agacucuaucagugaaagc

SEQ ID NO: 8081 - RNA, 19 nt, Artificial Sequence
  Description of Artificial Sequence: Synthetic oligonucleotide
  Antisense strand to SEQ ID NO: 8080
gcuuucacugauagagucu

SEQ ID NO: 8082 - RNA, 19 nt, Artificial Sequence
  Description of Artificial Sequence: Synthetic oligonucleotide
  Sense strand starting at position 1306 of SEQ ID NO: 53
ucuacagguucuuuaggau

SEQ ID NO: 8083 - RNA, 19 nt, Artificial Sequence
  Description of Artificial Sequence: Synthetic oligonucleotide
  Antisense strand to SEQ ID NO: 8082
auccuaaagaaccuguaga

SEQ ID NO: 8084 - RNA, 19 nt, Artificial Sequence
  Description of Artificial Sequence: Synthetic oligonucleotide
  Sense strand starting at position 1315 of SEQ ID NO: 53
ucuuuaggauauucugaga

SEQ ID NO: 8085 - RNA, 19 nt, Artificial Sequence
  Description of Artificial Sequence: Synthetic oligonucleotide
  Antisense strand to SEQ ID NO: 8084
ucucagaauauccuaaaga

SEQ ID NO: 8086 - RNA, 19 nt, Artificial Sequence
  Description of Artificial Sequence: Synthetic oligonucleotide
  Sense strand starting at position 1318 of SEQ ID NO: 53
uuaggauauucugagaaua

SEQ ID NO: 8087 - RNA, 19 nt, Artificial Sequence
  Description of Artificial Sequence: Synthetic oligonucleotide
  Antisense strand to SEQ ID NO: 8086
uauucucagaauauccuaa

SEQ ID NO: 8088 - RNA, 19 nt, Artificial Sequence
  Description of Artificial Sequence: Synthetic oligonucleotide
  Sense strand starting at position 1320 of SEQ ID NO: 53
aggauauucugagaauaaa

SEQ ID NO: 8089 - RNA, 19 nt, Artificial Sequence
  Description of Artificial Sequence: Synthetic oligonucleotide
  Antisense strand to SEQ ID NO: 8088
uuuauucucagaauauccu

SEQ ID NO: 8090 - RNA, 19 nt, Artificial Sequence
  Description of Artificial Sequence: Synthetic oligonucleotide
  Sense strand starting at position 1332 of SEQ ID NO: 53
gaauaaauaucguuuagga

SEQ ID NO: 8091 - RNA, 19 nt, Artificial Sequence
  Description of Artificial Sequence: Synthetic oligonucleotide
  Antisense strand to SEQ ID NO: 8090
uccuaaacgauauuuauuc

SEQ ID NO: 8092 - RNA, 19 nt, Artificial Sequence
  Description of Artificial Sequence: Synthetic oligonucleotide
  Sense strand starting at position 1411 of SEQ ID NO: 53
aacugacgauuuggaaaua

SEQ ID NO: 8093 - RNA, 19 nt, Artificial Sequence
  Description of Artificial Sequence: Synthetic oligonucleotide
  Antisense strand to SEQ ID NO: 8092
uauuuccaaaucgucaguu

SEQ ID NO: 8094 - RNA, 19 nt, Artificial Sequence
  Description of Artificial Sequence: Synthetic oligonucleotide
  Sense strand starting at position 1412 of SEQ ID NO: 53
acugacgauuuggaaauaa

SEQ ID NO: 8095 - RNA, 19 nt, Artificial Sequence
  Description of Artificial Sequence: Synthetic oligonucleotide
  Antisense strand to SEQ ID NO: 8094
uuauuuccaaaucgucagu

SEQ ID NO: 8096 - RNA, 19 nt, Artificial Sequence
  Description of Artificial Sequence: Synthetic oligonucleotide
  Sense strand starting at position 1475 of SEQ ID NO: 53
ccucguaagcuuugagaac

SEQ ID NO: 8097 - RNA, 19 nt, Artificial Sequence
  Description of Artificial Sequence: Synthetic oligonucleotide
  Antisense strand to SEQ ID NO: 8096
guucucaaagcuuacgagg

SEQ ID NO: 8098 - RNA, 19 nt, Artificial Sequence
  Description of Artificial Sequence: Synthetic oligonucleotide
  Sense strand starting at position 1534 of SEQ ID NO: 53
acagucaaccaguggcaaa

SEQ ID NO: 8099 - RNA, 19 nt, Artificial Sequence
  Description of Artificial Sequence: Synthetic oligonucleotide
  Antisense strand to SEQ ID NO: 8098
uuugccacugguugacugu

SEQ ID NO: 8100 - RNA, 19 nt, Artificial Sequence
  Description of Artificial Sequence: Synthetic oligonucleotide
  Sense strand starting at position 1795 of SEQ ID NO: 53
gaguccaucgcgugggaga

SEQ ID NO: 8101 - RNA, 19 nt, Artificial Sequence
  Description of Artificial Sequence: Synthetic oligonucleotide
  Antisense strand to SEQ ID NO: 8100
ucucccacgcgauggacuc

SEQ ID NO: 8102 - RNA, 19 nt, Artificial Sequence
  Description of Artificial Sequence: Synthetic oligonucleotide
  Sense strand starting at position 1796 of SEQ ID NO: 53
aguccaucgcgugggagaa

SEQ ID NO: 8103 - RNA, 19 nt, Artificial Sequence
  Description of Artificial Sequence: Synthetic oligonucleotide
  Antisense strand to SEQ ID NO: 8102
uucucccacgcgauggacu

SEQ ID NO: 8104 - RNA, 19 nt, Artificial Sequence
  Description of Artificial Sequence: Synthetic oligonucleotide
  Sense strand starting at position 2607 of SEQ ID NO: 53
ggaccagaguucucgcgau

SEQ ID NO: 8105 - RNA, 19 nt, Artificial Sequence
  Description of Artificial Sequence: Synthetic oligonucleotide
  Antisense strand to SEQ ID NO: 8104
aucgcgagaacucuggucc

SEQ ID NO: 8106 - RNA, 19 nt, Artificial Sequence
  Description of Artificial Sequence: Synthetic oligonucleotide
  Sense strand starting at position 2611 of SEQ ID NO: 53
cagaguucucgcgaugguu

SEQ ID NO: 8107 - RNA, 19 nt, Artificial Sequence
  Description of Artificial Sequence: Synthetic oligonucleotide
  Antisense strand to SEQ ID NO: 8106
aaccaucgcgagaacucug

SEQ ID NO: 8108 - RNA, 19 nt, Artificial Sequence
  Description of Artificial Sequence: Synthetic oligonucleotide
  Sense strand starting at position 2661 of SEQ ID NO: 53
ucaaacucucggugaaaga

SEQ ID NO: 8109 - RNA, 19 nt, Artificial Sequence
  Description of Artificial Sequence: Synthetic oligonucleotide
  Antisense strand to SEQ ID NO: 8108
ucuuucaccgagaguuuga

SEQ ID NO: 8110 - RNA, 19 nt, Artificial Sequence
  Description of Artificial Sequence: Synthetic oligonucleotide
  Sense strand starting at position 2919 of SEQ ID NO: 53
cggacucucuugucacgua

SEQ ID NO: 8111 - RNA, 19 nt, Artificial Sequence
  Description of Artificial Sequence: Synthetic oligonucleotide
  Antisense strand to SEQ ID NO: 8110
uacgugacaagagaguccg

SEQ ID NO: 8112 - RNA, 19 nt, Artificial Sequence
  Description of Artificial Sequence: Synthetic oligonucleotide
  Sense strand starting at position 2924 of SEQ ID NO: 53
ucucuugucacguaaucgu

SEQ ID NO: 8113 - RNA, 19 nt, Artificial Sequence
  Description of Artificial Sequence: Synthetic oligonucleotide
  Antisense strand to SEQ ID NO: 8112
acgauuacgugacaagaga

SEQ ID NO: 8114 - RNA, 19 nt, Artificial Sequence
  Description of Artificial Sequence: Synthetic oligonucleotide
  Sense strand starting at position 2990 of SEQ ID NO: 53
ggcagcuugcauucuguau

SEQ ID NO: 8115 - RNA, 19 nt, Artificial Sequence
  Description of Artificial Sequence: Synthetic oligonucleotide
  Antisense strand to SEQ ID NO: 8114
auacagaaugcaagcugcc

SEQ ID NO: 8116 - RNA, 19 nt, Artificial Sequence
  Description of Artificial Sequence: Synthetic oligonucleotide
  Sense strand starting at position 3312 of SEQ ID NO: 53
uguggaauuucuuauuucu

SEQ ID NO: 8117 - RNA, 19 nt, Artificial Sequence
  Description of Artificial Sequence: Synthetic oligonucleotide
  Antisense strand to SEQ ID NO: 8116
agaaauaagaaauuccaca

SEQ ID NO: 8118 - RNA, 19 nt, Artificial Sequence
  Description of Artificial Sequence: Synthetic oligonucleotide
  Sense strand starting at position 3322 of SEQ ID NO: 53
cuuauuucuuguuaguauc

SEQ ID NO: 8119 - RNA, 19 nt, Artificial Sequence
  Description of Artificial Sequence: Synthetic oligonucleotide
  Antisense strand to SEQ ID NO: 8118
gauacuaacaagaaauaag

SEQ ID NO: 8120 - RNA, 19 nt, Artificial Sequence
  Description of Artificial Sequence: Synthetic oligonucleotide
  Sense strand starting at position 3332 of SEQ ID NO: 53
guuaguaucuuccuuugaa

SEQ ID NO: 8121 - RNA, 19 nt, Artificial Sequence
  Description of Artificial Sequence: Synthetic oligonucleotide
  Antisense strand to SEQ ID NO: 8120
uucaaaggaagauacuaac

SEQ ID NO: 8122 - RNA, 19 nt, Artificial Sequence
  Description of Artificial Sequence: Synthetic oligonucleotide
  Sense strand starting at position 3333 of SEQ ID NO: 53
uuaguaucuuccuuugaag

SEQ ID NO: 8123 - RNA, 19 nt, Artificial Sequence
  Description of Artificial Sequence: Synthetic oligonucleotide
  Antisense strand to SEQ ID NO: 8122
cuucaaaggaagauacuaa

SEQ ID NO: 8124 - RNA, 19 nt, Artificial Sequence
  Description of Artificial Sequence: Synthetic oligonucleotide
  Sense strand starting at position 3384 of SEQ ID NO: 53
uagggaacguauccuuaau

SEQ ID NO: 8125 - RNA, 19 nt, Artificial Sequence
  Description of Artificial Sequence: Synthetic oligonucleotide
  Antisense strand to SEQ ID NO: 8124
auuaaggauacguucccua

SEQ ID NO: 8126 - RNA, 19 nt, Artificial Sequence
  Description of Artificial Sequence: Synthetic oligonucleotide
  Sense strand starting at position 3386 of SEQ ID NO: 53
gggaacguauccuuaauac

SEQ ID NO: 8127 - RNA, 19 nt, Artificial Sequence
  Description of Artificial Sequence: Synthetic oligonucleotide
  Antisense strand to SEQ ID NO: 8126
guauuaaggauacguuccc

SEQ ID NO: 8128 - RNA, 19 nt, Artificial Sequence
  Description of Artificial Sequence: Synthetic oligonucleotide
  Sense strand starting at position 3469 of SEQ ID NO: 53
ucaggaaaguuucuacuuu

SEQ ID NO: 8129 - RNA, 19 nt, Artificial Sequence
  Description of Artificial Sequence: Synthetic oligonucleotide
  Antisense strand to SEQ ID NO: 8128
aaaguagaaacuuuccuga

SEQ ID NO: 8130 - RNA, 19 nt, Artificial Sequence
  Description of Artificial Sequence: Synthetic oligonucleotide
  Sense strand starting at position 3905 of SEQ ID NO: 54
guagaagugccuggaagaa

SEQ ID NO: 8131 - RNA, 19 nt, Artificial Sequence
  Description of Artificial Sequence: Synthetic oligonucleotide
  Antisense strand to SEQ ID NO: 8130
uucuuccaggcacuucuac

SEQ ID NO: 8132 - RNA, 19 nt, Artificial Sequence
  Description of Artificial Sequence: Synthetic oligonucleotide
  Sense strand starting at position 3904 of SEQ ID NO: 54
uguagaagugccuggaaga

SEQ ID NO: 8133 - RNA, 19 nt, Artificial Sequence
  Description of Artificial Sequence: Synthetic oligonucleotide
  Antisense strand to SEQ ID NO: 8132
ucuuccaggcacuucuaca

SEQ ID NO: 8134 - RNA, 19 nt, Artificial Sequence
  Description of Artificial Sequence: Synthetic oligonucleotide
  Sense strand starting at position 3879 of SEQ ID NO: 54
augagacugucuguuugaa

SEQ ID NO: 8135 - RNA, 19 nt, Artificial Sequence
  Description of Artificial Sequence: Synthetic oligonucleotide
  Antisense strand to SEQ ID NO: 8134
uucaaacagacagucucau

SEQ ID NO: 8136 - RNA, 19 nt, Artificial Sequence
  Description of Artificial Sequence: Synthetic oligonucleotide
  Sense strand starting at position 3866 of SEQ ID NO: 54
gccaccuagccucaugaga

SEQ ID NO: 8137 - RNA, 19 nt, Artificial Sequence
  Description of Artificial Sequence: Synthetic oligonucleotide
  Antisense strand to SEQ ID NO: 8136
ucucaugaggcuagguggc

SEQ ID NO: 8138 - RNA, 19 nt, Artificial Sequence
  Description of Artificial Sequence: Synthetic oligonucleotide
  Sense strand starting at position 3847 of SEQ ID NO: 54
cagggaauccuguguucca

SEQ ID NO: 8139 - RNA, 19 nt, Artificial Sequence
  Description of Artificial Sequence: Synthetic oligonucleotide
  Antisense strand to SEQ ID NO: 8138
uggaacacaggauucccug

SEQ ID NO: 8140 - RNA, 19 nt, Artificial Sequence
  Description of Artificial Sequence: Synthetic oligonucleotide
  Sense strand starting at position 3839 of SEQ ID NO: 54
gucuuagucagggaauccu

SEQ ID NO: 8141 - RNA, 19 nt, Artificial Sequence
  Description of Artificial Sequence: Synthetic oligonucleotide
  Antisense strand to SEQ ID NO: 8140
aggauucccugacuaagac

SEQ ID NO: 8142 - RNA, 19 nt, Artificial Sequence
  Description of Artificial Sequence: Synthetic oligonucleotide
  Sense strand starting at position 3756 of SEQ ID NO: 54
uuugguuugaaauggcauu

SEQ ID NO: 8143 - RNA, 19 nt, Artificial Sequence
  Description of Artificial Sequence: Synthetic oligonucleotide
  Antisense strand to SEQ ID NO: 8142
aaugccauuucaaaccaaa

SEQ ID NO: 8144 - RNA, 19 nt, Artificial Sequence
  Description of Artificial Sequence: Synthetic oligonucleotide
  Sense strand starting at position 3442 of SEQ ID NO: 54
gcuggagugcucucagcuc

SEQ ID NO: 8145 - RNA, 19 nt, Artificial Sequence
  Description of Artificial Sequence: Synthetic oligonucleotide
  Antisense strand to SEQ ID NO: 8144
gagcugagagcacuccagc

SEQ ID NO: 8146 - RNA, 19 nt, Artificial Sequence
  Description of Artificial Sequence: Synthetic oligonucleotide
  Sense strand starting at position 3145 of SEQ ID NO: 54
agaacacauuucugaaaug

SEQ ID NO: 8147 - RNA, 19 nt, Artificial Sequence
  Description of Artificial Sequence: Synthetic oligonucleotide
  Antisense strand to SEQ ID NO: 8146
cauuucagaaauguguucu

SEQ ID NO: 8148 - RNA, 19 nt, Artificial Sequence
  Description of Artificial Sequence: Synthetic oligonucleotide
  Sense strand starting at position 3066 of SEQ ID NO: 54
ggcuguaacauguaguaaa

SEQ ID NO: 8149 - RNA, 19 nt, Artificial Sequence
  Description of Artificial Sequence: Synthetic oligonucleotide
  Antisense strand to SEQ ID NO: 8148
uuuacuacauguuacagcc

SEQ ID NO: 8150 - RNA, 19 nt, Artificial Sequence
  Description of Artificial Sequence: Synthetic oligonucleotide
  Sense strand starting at position 2876 of SEQ ID NO: 54
uaccauguccuguggaaag

SEQ ID NO: 8151 - RNA, 19 nt, Artificial Sequence
  Description of Artificial Sequence: Synthetic oligonucleotide
  Antisense strand to SEQ ID NO: 8150
cuuuccacaggacauggua

SEQ ID NO: 8152 - RNA, 19 nt, Artificial Sequence
  Description of Artificial Sequence: Synthetic oligonucleotide
  Sense strand starting at position 2460 of SEQ ID NO: 54
gacucagaguagucugguu

SEQ ID NO: 8153 - RNA, 19 nt, Artificial Sequence
  Description of Artificial Sequence: Synthetic oligonucleotide
  Antisense strand to SEQ ID NO: 8152
aaccagacuacucugaguc

SEQ ID NO: 8154 - RNA, 19 nt, Artificial Sequence
  Description of Artificial Sequence: Synthetic oligonucleotide
  Sense strand starting at position 2391 of SEQ ID NO: 54
ggcccuuuggauuaaagcu

SEQ ID NO: 8155 - RNA, 19 nt, Artificial Sequence
  Description of Artificial Sequence: Synthetic oligonucleotide
  Antisense strand to SEQ ID NO: 8154
agcuuuaauccaaagggcc

SEQ ID NO: 8156 - RNA, 19 nt, Artificial Sequence
  Description of Artificial Sequence: Synthetic oligonucleotide
  Sense strand starting at position 2329 of SEQ ID NO: 54
cagcgauuccuaggaaaug

SEQ ID NO: 8157 - RNA, 19 nt, Artificial Sequence
  Description of Artificial Sequence: Synthetic oligonucleotide
  Antisense strand to SEQ ID NO: 8156
cauuuccuaggaaucgcug

SEQ ID NO: 8158 - RNA, 19 nt, Artificial Sequence
  Description of Artificial Sequence: Synthetic oligonucleotide
  Sense strand starting at position 1192 of SEQ ID NO: 54
gauggaaguucugccagau

SEQ ID NO: 8159 - RNA, 19 nt, Artificial Sequence
  Description of Artificial Sequence: Synthetic oligonucleotide
  Antisense strand to SEQ ID NO: 8158
aucuggcagaacuuccauc

SEQ ID NO: 8160 - RNA, 19 nt, Artificial Sequence
  Description of Artificial Sequence: Synthetic oligonucleotide
  Sense strand starting at position 1180 of SEQ ID NO: 54
ucccaaagauuugauggaa

SEQ ID NO: 8161 - RNA, 19 nt, Artificial Sequence
  Description of Artificial Sequence: Synthetic oligonucleotide
  Antisense strand to SEQ ID NO: 8160
uuccaucaaaucuuuggga

SEQ ID NO: 8162 - RNA, 19 nt, Artificial Sequence
  Description of Artificial Sequence: Synthetic oligonucleotide
  Sense strand starting at position 1029 of SEQ ID NO: 54
aaguaauuggaaugcugua

SEQ ID NO: 8163 - RNA, 19 nt, Artificial Sequence
  Description of Artificial Sequence: Synthetic oligonucleotide
  Antisense strand to SEQ ID NO: 8162
uacagcauuccaauuacuu

SEQ ID NO: 8164 - RNA, 19 nt, Artificial Sequence
  Description of Artificial Sequence: Synthetic oligonucleotide
  Sense strand starting at position 1016 of SEQ ID NO: 54
cuuacauauuucgaaguaa

SEQ ID NO: 8165 - RNA, 19 nt, Artificial Sequence
  Description of Artificial Sequence: Synthetic oligonucleotide
  Antisense strand to SEQ ID NO: 8164
uuacuucgaaauauguaag

SEQ ID NO: 8166 - RNA, 19 nt, Artificial Sequence
  Description of Artificial Sequence: Synthetic oligonucleotide
  Sense strand starting at position 930 of SEQ ID NO: 54
augccuaagugaucuauuc

SEQ ID NO: 8167 - RNA, 19 nt, Artificial Sequence
  Description of Artificial Sequence: Synthetic oligonucleotide
  Antisense strand to SEQ ID NO: 8166
gaauagaucacuuaggcau

SEQ ID NO: 8168 - RNA, 19 nt, Artificial Sequence
  Description of Artificial Sequence: Synthetic oligonucleotide
  Sense strand starting at position 928 of SEQ ID NO: 54
ggaugccuaagugaucuau

SEQ ID NO: 8169 - RNA, 19 nt, Artificial Sequence
  Description of Artificial Sequence: Synthetic oligonucleotide
  Antisense strand to SEQ ID NO: 8168
auagaucacuuaggcaucc

SEQ ID NO: 8170 - RNA, 19 nt, Artificial Sequence
  Description of Artificial Sequence: Synthetic oligonucleotide
  Sense strand starting at position 801 of SEQ ID NO: 54
aaggguguccuuugaguca

SEQ ID NO: 8171 - RNA, 19 nt, Artificial Sequence
  Description of Artificial Sequence: Synthetic oligonucleotide
  Antisense strand to SEQ ID NO: 8170
ugacucaaaggacacccuu

SEQ ID NO: 8172 - RNA, 19 nt, Artificial Sequence
  Description of Artificial Sequence: Synthetic oligonucleotide
  Sense strand starting at position 791 of SEQ ID NO: 54
agagaauucgaaggguguc

SEQ ID NO: 8173 - RNA, 19 nt, Artificial Sequence
  Description of Artificial Sequence: Synthetic oligonucleotide
  Antisense strand to SEQ ID NO: 8172
gacacccuucgaauucucu

SEQ ID NO: 8174 - RNA, 19 nt, Artificial Sequence
  Description of Artificial Sequence: Synthetic oligonucleotide
  Sense strand starting at position 780 of SEQ ID NO: 54
ugccauuuaugagagaauu

SEQ ID NO: 8175 - RNA, 19 nt, Artificial Sequence
  Description of Artificial Sequence: Synthetic oligonucleotide
  Antisense strand to SEQ ID NO: 8174
aauucucucauaaauggca

SEQ ID NO: 8176 - RNA, 19 nt, Artificial Sequence
  Description of Artificial Sequence: Synthetic oligonucleotide
  Sense strand starting at position 778 of SEQ ID NO: 54
guugccauuuaugagagaa

SEQ ID NO: 8177 - RNA, 19 nt, Artificial Sequence
  Description of Artificial Sequence: Synthetic oligonucleotide
  Antisense strand to SEQ ID NO: 8176
uucucucauaaauggcaac

SEQ ID NO: 8178 - RNA, 19 nt, Artificial Sequence
  Description of Artificial Sequence: Synthetic oligonucleotide
  Sense strand starting at position 747 of SEQ ID NO: 54
cggagagcuagucagacua

SEQ ID NO: 8179 - RNA, 19 nt, Artificial Sequence
  Description of Artificial Sequence: Synthetic oligonucleotide
  Antisense strand to SEQ ID NO: 8178
uagucugacuagcucuccg

SEQ ID NO: 8180 - RNA, 19 nt, Artificial Sequence
  Description of Artificial Sequence: Synthetic oligonucleotide
  Sense strand starting at position 695 of SEQ ID NO: 54
ugugguuggcaguaaauga

SEQ ID NO: 8181 - RNA, 19 nt, Artificial Sequence
  Description of Artificial Sequence: Synthetic oligonucleotide
  Antisense strand to SEQ ID NO: 8180
ucauuuacugccaaccaca

SEQ ID NO: 8182 - RNA, 19 nt, Artificial Sequence
  Description of Artificial Sequence: Synthetic oligonucleotide
  Sense strand starting at position 627 of SEQ ID NO: 54
aggucaccucuuuguaaag

SEQ ID NO: 8183 - RNA, 19 nt, Artificial Sequence
  Description of Artificial Sequence: Synthetic oligonucleotide
  Antisense strand to SEQ ID NO: 8182
cuuuacaaagaggugaccu

SEQ ID NO: 8184 - RNA, 19 nt, Artificial Sequence
  Description of Artificial Sequence: Synthetic oligonucleotide
  Sense strand starting at position 567 of SEQ ID NO: 54
guaagacucugucuuuaua

SEQ ID NO: 8185 - RNA, 19 nt, Artificial Sequence
  Description of Artificial Sequence: Synthetic oligonucleotide
  Antisense strand to SEQ ID NO: 8184
uauaaagacagagucuuac

SEQ ID NO: 8186 - RNA, 19 nt, Artificial Sequence
  Description of Artificial Sequence: Synthetic oligonucleotide
  Sense strand starting at position 565 of SEQ ID NO: 54
uuguaagacucugucuuua

SEQ ID NO: 8187 - RNA, 19 nt, Artificial Sequence
  Description of Artificial Sequence: Synthetic oligonucleotide
  Antisense strand to SEQ ID NO: 8186
uaaagacagagucuuacaa

SEQ ID NO: 8188 - RNA, 19 nt, Artificial Sequence
  Description of Artificial Sequence: Synthetic oligonucleotide
  Sense strand starting at position 554 of SEQ ID NO: 54
cagagacagcuuuguaaga

SEQ ID NO: 8189 - RNA, 19 nt, Artificial Sequence
  Description of Artificial Sequence: Synthetic oligonucleotide
  Antisense strand to SEQ ID NO: 8188
ucuuacaaagcugucucug

SEQ ID NO: 8190 - RNA, 19 nt, Artificial Sequence
  Description of Artificial Sequence: Synthetic oligonucleotide
  Sense strand starting at position 488 of SEQ ID NO: 54
ggacuuaacuauuccugca

SEQ ID NO: 8191 - RNA, 19 nt, Artificial Sequence
  Description of Artificial Sequence: Synthetic oligonucleotide
  Antisense strand to SEQ ID NO: 8190
ugcaggaauaguuaagucc

SEQ ID NO: 8192 - RNA, 19 nt, Artificial Sequence
  Description of Artificial Sequence: Synthetic oligonucleotide
  Sense strand starting at position 393 of SEQ ID NO: 54
gcauuugauuucuggagug

SEQ ID NO: 8193 - RNA, 19 nt, Artificial Sequence
  Description of Artificial Sequence: Synthetic oligonucleotide
  Antisense strand to SEQ ID NO: 8192
cacuccagaaaucaaaugc

SEQ ID NO: 8194 - RNA, 19 nt, Artificial Sequence
  Description of Artificial Sequence: Synthetic oligonucleotide
  Sense strand starting at position 229 of SEQ ID NO: 54
aagggucauugucccaaca

SEQ ID NO: 8195 - RNA, 19 nt, Artificial Sequence
  Description of Artificial Sequence: Synthetic oligonucleotide
  Antisense strand to SEQ ID NO: 8194
uguugggacaaugacccuu

SEQ ID NO: 8196 - RNA, 19 nt, Artificial Sequence
  Description of Artificial Sequence: Synthetic oligonucleotide
  Sense strand starting at position 219 of SEQ ID NO: 54
gcagauugcaaagggucau

SEQ ID NO: 8197 - RNA, 19 nt, Artificial Sequence
  Description of Artificial Sequence: Synthetic oligonucleotide
  Antisense strand to SEQ ID NO: 8196
augacccuuugcaaucugc

SEQ ID NO: 8198 - RNA, 19 nt, Artificial Sequence
  Description of Artificial Sequence: Synthetic oligonucleotide
  Sense strand starting at position 210 of SEQ ID NO: 54
aagaauagugcagauugca

SEQ ID NO: 8199 - RNA, 19 nt, Artificial Sequence
  Description of Artificial Sequence: Synthetic oligonucleotide
  Antisense strand to SEQ ID NO: 8198
ugcaaucugcacuauucuu

SEQ ID NO: 8200 - RNA, 19 nt, Artificial Sequence
  Description of Artificial Sequence: Synthetic oligonucleotide
  Sense strand starting at position 195 of SEQ ID NO: 54
gugacuguuucuccaaaga

SEQ ID NO: 8201 - RNA, 19 nt, Artificial Sequence
  Description of Artificial Sequence: Synthetic oligonucleotide
  Antisense strand to SEQ ID NO: 8200
ucuuuggagaaacagucac

SEQ ID NO: 8202 - RNA, 19 nt, Artificial Sequence
  Description of Artificial Sequence: Synthetic oligonucleotide
  Sense strand starting at position 194 of SEQ ID NO: 54
ugugacuguuucuccaaag

SEQ ID NO: 8203 - RNA, 19 nt, Artificial Sequence
  Description of Artificial Sequence: Synthetic oligonucleotide
  Antisense strand to SEQ ID NO: 8202
cuuuggagaaacagucaca

SEQ ID NO: 8204 - RNA, 19 nt, Artificial Sequence
  Description of Artificial Sequence: Synthetic oligonucleotide
  Sense strand starting at position 193 of SEQ ID NO: 54
cugugacuguuucuccaaa

SEQ ID NO: 8205 - RNA, 19 nt, Artificial Sequence
  Description of Artificial Sequence: Synthetic oligonucleotide
  Antisense strand to SEQ ID NO: 8204
uuuggagaaacagucacag

SEQ ID NO: 8206 - RNA, 19 nt, Artificial Sequence
  Description of Artificial Sequence: Synthetic oligonucleotide
  Sense strand starting at position 182 of SEQ ID NO: 54
gcuuauaaggacugugacu

SEQ ID NO: 8207 - RNA, 19 nt, Artificial Sequence
  Description of Artificial Sequence: Synthetic oligonucleotide
  Antisense strand to SEQ ID NO: 8206
agucacaguccuuauaagc

SEQ ID NO: 8208 - RNA, 19 nt, Artificial Sequence
  Description of Artificial Sequence: Synthetic oligonucleotide
  Sense strand starting at position 21 of SEQ ID NO: 54
cgauauagacuuugucuua

SEQ ID NO: 8209 - RNA, 19 nt, Artificial Sequence
  Description of Artificial Sequence: Synthetic oligonucleotide
  Antisense strand to SEQ ID NO: 8208
uaagacaaagucuauaucg

SEQ ID NO: 8210 - RNA, 19 nt, Artificial Sequence
  Description of Artificial Sequence: Synthetic oligonucleotide
  Sense strand starting at position 3837 of SEQ ID NO: 56
cccaaauucugggcucaag

SEQ ID NO: 8211 - RNA, 19 nt, Artificial Sequence
  Description of Artificial Sequence: Synthetic oligonucleotide
  Antisense strand to SEQ ID NO: 8210
cuugagcccagaauuuggg

SEQ ID NO: 8212 - RNA, 19 nt, Artificial Sequence
  Description of Artificial Sequence: Synthetic oligonucleotide
  Sense strand starting at position 3805 of SEQ ID NO: 56
aguaaaguggcaggaucau

SEQ ID NO: 8213 - RNA, 19 nt, Artificial Sequence
  Description of Artificial Sequence: Synthetic oligonucleotide
  Antisense strand to SEQ ID NO: 8212
augauccugccacuuuacu

SEQ ID NO: 8214 - RNA, 19 nt, Artificial Sequence
  Description of Artificial Sequence: Synthetic oligonucleotide
  Sense strand starting at position 3550 of SEQ ID NO: 56
agaguuagugaauagcaca

SEQ ID NO: 8215 - RNA, 19 nt, Artificial Sequence
  Description of Artificial Sequence: Synthetic oligonucleotide
  Antisense strand to SEQ ID NO: 8214
ugugcuauucacuaacucu

SEQ ID NO: 8216 - RNA, 19 nt, Artificial Sequence
  Description of Artificial Sequence: Synthetic oligonucleotide
  Sense strand starting at position 3545 of SEQ ID NO: 56
ucuggagaguuagugaaua

SEQ ID NO: 8217 - RNA, 19 nt, Artificial Sequence
  Description of Artificial Sequence: Synthetic oligonucleotide
  Antisense strand to SEQ ID NO: 8216
uauucacuaacucuccaga

SEQ ID NO: 8218 - RNA, 19 nt, Artificial Sequence
  Description of Artificial Sequence: Synthetic oligonucleotide
  Sense strand starting at position 3494 of SEQ ID NO: 56
ugaggaaauguugguuaaa

SEQ ID NO: 8219 - RNA, 19 nt, Artificial Sequence
  Description of Artificial Sequence: Synthetic oligonucleotide
  Antisense strand to SEQ ID NO: 8218
uuuaaccaacauuuccuca

SEQ ID NO: 8220 - RNA, 19 nt, Artificial Sequence
  Description of Artificial Sequence: Synthetic oligonucleotide
  Sense strand starting at position 3330 of SEQ ID NO: 56
guaacaugauaucugauua

SEQ ID NO: 8221 - RNA, 19 nt, Artificial Sequence
  Description of Artificial Sequence: Synthetic oligonucleotide
  Antisense strand to SEQ ID NO: 8220
uaaucagauaucauguuac

SEQ ID NO: 8222 - RNA, 19 nt, Artificial Sequence
  Description of Artificial Sequence: Synthetic oligonucleotide
  Sense strand starting at position 3322 of SEQ ID NO: 56
ggauuuaaguaacaugaua

SEQ ID NO: 8223 - RNA, 19 nt, Artificial Sequence
  Description of Artificial Sequence: Synthetic oligonucleotide
  Antisense strand to SEQ ID NO: 8222
uaucauguuacuuaaaucc

SEQ ID NO: 8224 - RNA, 19 nt, Artificial Sequence
  Description of Artificial Sequence: Synthetic oligonucleotide
  Sense strand starting at position 3252 of SEQ ID NO: 56
gguaccaccuuucugacua

SEQ ID NO: 8225 - RNA, 19 nt, Artificial Sequence
  Description of Artificial Sequence: Synthetic oligonucleotide
  Antisense strand to SEQ ID NO: 8224
uagucagaaaggugguacc

SEQ ID NO: 8226 - RNA, 19 nt, Artificial Sequence
  Description of Artificial Sequence: Synthetic oligonucleotide
  Sense strand starting at position 2854 of SEQ ID NO: 56
aauggugcuggaggaauau

SEQ ID NO: 8227 - RNA, 19 nt, Artificial Sequence
  Description of Artificial Sequence: Synthetic oligonucleotide
  Antisense strand to SEQ ID NO: 8226
auauuccuccagcaccauu

SEQ ID NO: 8228 - RNA, 19 nt, Artificial Sequence
  Description of Artificial Sequence: Synthetic oligonucleotide
  Sense strand starting at position 2851 of SEQ ID NO: 56
cugaauggugcuggaggaa

SEQ ID NO: 8229 - RNA, 19 nt, Artificial Sequence
  Description of Artificial Sequence: Synthetic oligonucleotide
  Antisense strand to SEQ ID NO: 8228
uuccuccagcaccauucag

SEQ ID NO: 8230 - RNA, 19 nt, Artificial Sequence
  Description of Artificial Sequence: Synthetic oligonucleotide
  Sense strand starting at position 2755 of SEQ ID NO: 56
gaaauucgcugguuauuuc

SEQ ID NO: 8231 - RNA, 19 nt, Artificial Sequence
  Description of Artificial Sequence: Synthetic oligonucleotide
  Antisense strand to SEQ ID NO: 8230
gaaauaaccagcgaauuuc

SEQ ID NO: 8232 - RNA, 19 nt, Artificial Sequence
  Description of Artificial Sequence: Synthetic oligonucleotide
  Sense strand starting at position 2707 of SEQ ID NO: 56
ggucaaauuggccacugau

SEQ ID NO: 8233 - RNA, 19 nt, Artificial Sequence
  Description of Artificial Sequence: Synthetic oligonucleotide
  Antisense strand to SEQ ID NO: 8232
aucaguggccaauuugacc

SEQ ID NO: 8234 - RNA, 19 nt, Artificial Sequence
  Description of Artificial Sequence: Synthetic oligonucleotide
  Sense strand starting at position 2697 of SEQ ID NO: 56
aguuuaguauggucaaauu

SEQ ID NO: 8235 - RNA, 19 nt, Artificial Sequence
  Description of Artificial Sequence: Synthetic oligonucleotide
  Antisense strand to SEQ ID NO: 8234
aauuugaccauacuaaacu

SEQ ID NO: 8236 - RNA, 19 nt, Artificial Sequence
  Description of Artificial Sequence: Synthetic oligonucleotide
  Sense strand starting at position 2667 of SEQ ID NO: 56
gauuuccaccugcguuuaa

SEQ ID NO: 8237 - RNA, 19 nt, Artificial Sequence
  Description of Artificial Sequence: Synthetic oligonucleotide
  Antisense strand to SEQ ID NO: 8236
uuaaacgcagguggaaauc

SEQ ID NO: 8238 - RNA, 19 nt, Artificial Sequence
  Description of Artificial Sequence: Synthetic oligonucleotide
  Sense strand starting at position 2601 of SEQ ID NO: 56
ugggcaaucuaaucuagac

SEQ ID NO: 8239 - RNA, 19 nt, Artificial Sequence
  Description of Artificial Sequence: Synthetic oligonucleotide
  Antisense strand to SEQ ID NO: 8238
gucuagauuagauugccca

SEQ ID NO: 8240 - RNA, 19 nt, Artificial Sequence
  Description of Artificial Sequence: Synthetic oligonucleotide
  Sense strand starting at position 2592 of SEQ ID NO: 56
gagaauguaugggcaaucu

SEQ ID NO: 8241 - RNA, 19 nt, Artificial Sequence
  Description of Artificial Sequence: Synthetic oligonucleotide
  Antisense strand to SEQ ID NO: 8240
agauugcccauacauucuc

SEQ ID NO: 8242 - RNA, 19 nt, Artificial Sequence
  Description of Artificial Sequence: Synthetic oligonucleotide
  Sense strand starting at position 2591 of SEQ ID NO: 56
ggagaauguaugggcaauc

SEQ ID NO: 8243 - RNA, 19 nt, Artificial Sequence
  Description of Artificial Sequence: Synthetic oligonucleotide
  Antisense strand to SEQ ID NO: 8242
gauugcccauacauucucc

SEQ ID NO: 8244 - RNA, 19 nt, Artificial Sequence
  Description of Artificial Sequence: Synthetic oligonucleotide
  Sense strand starting at position 2473 of SEQ ID NO: 56
gcuccauagaucuggaaag

SEQ ID NO: 8245 - RNA, 19 nt, Artificial Sequence
  Description of Artificial Sequence: Synthetic oligonucleotide
  Antisense strand to SEQ ID NO: 8244
cuuuccagaucuauggagc

SEQ ID NO: 8246 - RNA, 19 nt, Artificial Sequence
  Description of Artificial Sequence: Synthetic oligonucleotide
  Sense strand starting at position 2467 of SEQ ID NO: 56
aguacugcuccauagaucu

SEQ ID NO: 8247 - RNA, 19 nt, Artificial Sequence
  Description of Artificial Sequence: Synthetic oligonucleotide
  Antisense strand to SEQ ID NO: 8246
agaucuauggagcaguacu

SEQ ID NO: 8248 - RNA, 19 nt, Artificial Sequence
  Description of Artificial Sequence: Synthetic oligonucleotide
  Sense strand starting at position 2336 of SEQ ID NO: 56
gauaaagauuuguaagcac

SEQ ID NO: 8249 - RNA, 19 nt, Artificial Sequence
  Description of Artificial Sequence: Synthetic oligonucleotide
  Antisense strand to SEQ ID NO: 8248
gugcuuacaaaucuuuauc

SEQ ID NO: 8250 - RNA, 19 nt, Artificial Sequence
  Description of Artificial Sequence: Synthetic oligonucleotide
  Sense strand starting at position 2314 of SEQ ID NO: 56
gcuuucugagcuuauaaca

SEQ ID NO: 8251 - RNA, 19 nt, Artificial Sequence
  Description of Artificial Sequence: Synthetic oligonucleotide
  Antisense strand to SEQ ID NO: 8250
uguuauaagcucagaaagc

SEQ ID NO: 8252 - RNA, 19 nt, Artificial Sequence
  Description of Artificial Sequence: Synthetic oligonucleotide
  Sense strand starting at position 2286 of SEQ ID NO: 56
cuuggaguggucuacuguu

SEQ ID NO: 8253 - RNA, 19 nt, Artificial Sequence
  Description of Artificial Sequence: Synthetic oligonucleotide
  Antisense strand to SEQ ID NO: 8252
aacaguagaccacuccaag

SEQ ID NO: 8254 - RNA, 19 nt, Artificial Sequence
  Description of Artificial Sequence: Synthetic oligonucleotide
  Sense strand starting at position 1907 of SEQ ID NO: 56
uugauuguacaggaaguuu

SEQ ID NO: 8255 - RNA, 19 nt, Artificial Sequence
  Description of Artificial Sequence: Synthetic oligonucleotide
  Antisense strand to SEQ ID NO: 8254
aaacuuccuguacaaucaa

SEQ ID NO: 8256 - RNA, 19 nt, Artificial Sequence
  Description of Artificial Sequence: Synthetic oligonucleotide
  Sense strand starting at position 1906 of SEQ ID NO: 56
guugauuguacaggaaguu

SEQ ID NO: 8257 - RNA, 19 nt, Artificial Sequence
  Description of Artificial Sequence: Synthetic oligonucleotide
  Antisense strand to SEQ ID NO: 8256
aacuuccuguacaaucaac

SEQ ID NO: 8258 - RNA, 19 nt, Artificial Sequence
  Description of Artificial Sequence: Synthetic oligonucleotide
  Sense strand starting at position 1899 of SEQ ID NO: 56
acuuaaaguugauuguaca

SEQ ID NO: 8259 - RNA, 19 nt, Artificial Sequence
  Description of Artificial Sequence: Synthetic oligonucleotide
  Antisense strand to SEQ ID NO: 8258
uguacaaucaacuuuaagu

SEQ ID NO: 8260 - RNA, 19 nt, Artificial Sequence
  Description of Artificial Sequence: Synthetic oligonucleotide
  Sense strand starting at position 1828 of SEQ ID NO: 56
guugaacucuuggcauaca

SEQ ID NO: 8261 - RNA, 19 nt, Artificial Sequence
  Description of Artificial Sequence: Synthetic oligonucleotide
  Antisense strand to SEQ ID NO: 8260
uguaugccaagaguucaac

SEQ ID NO: 8262 - RNA, 19 nt, Artificial Sequence
  Description of Artificial Sequence: Synthetic oligonucleotide
  Sense strand starting at position 1787 of SEQ ID NO: 56
gcuagaauaucacugaucu

SEQ ID NO: 8263 - RNA, 19 nt, Artificial Sequence
  Description of Artificial Sequence: Synthetic oligonucleotide
  Antisense strand to SEQ ID NO: 8262
agaucagugauauucuagc

SEQ ID NO: 8264 - RNA, 19 nt, Artificial Sequence
  Description of Artificial Sequence: Synthetic oligonucleotide
  Sense strand starting at position 1286 of SEQ ID NO: 56
gugggaagcgaauacauau

SEQ ID NO: 8265 - RNA, 19 nt, Artificial Sequence
  Description of Artificial Sequence: Synthetic oligonucleotide
  Antisense strand to SEQ ID NO: 8264
auauguauucgcuucccac

SEQ ID NO: 8266 - RNA, 19 nt, Artificial Sequence
  Description of Artificial Sequence: Synthetic oligonucleotide
  Sense strand starting at position 1028 of SEQ ID NO: 56
cugugugacugaguaauca

SEQ ID NO: 8267 - RNA, 19 nt, Artificial Sequence
  Description of Artificial Sequence: Synthetic oligonucleotide
  Antisense strand to SEQ ID NO: 8266
ugauuacucagucacacag

SEQ ID NO: 8268 - RNA, 19 nt, Artificial Sequence
  Description of Artificial Sequence: Synthetic oligonucleotide
  Sense strand starting at position 1026 of SEQ ID NO: 56
uucugugugacugaguaau

SEQ ID NO: 8269 - RNA, 19 nt, Artificial Sequence
  Description of Artificial Sequence: Synthetic oligonucleotide
  Antisense strand to SEQ ID NO: 8268
auuacucagucacacagaa

SEQ ID NO: 8270 - RNA, 19 nt, Artificial Sequence
  Description of Artificial Sequence: Synthetic oligonucleotide
  Sense strand starting at position 974 of SEQ ID NO: 56
ucuucucguccucagaaua

SEQ ID NO: 8271 - RNA, 19 nt, Artificial Sequence
  Description of Artificial Sequence: Synthetic oligonucleotide
  Antisense strand to SEQ ID NO: 8270
uauucugaggacgagaaga

SEQ ID NO: 8272 - RNA, 19 nt, Artificial Sequence
  Description of Artificial Sequence: Synthetic oligonucleotide
  Sense strand starting at position 702 of SEQ ID NO: 56
gaguaagaggugugauaau

SEQ ID NO: 8273 - RNA, 19 nt, Artificial Sequence
  Description of Artificial Sequence: Synthetic oligonucleotide
  Antisense strand to SEQ ID NO: 8272
auuaucacaccucuuacuc

SEQ ID NO: 8274 - RNA, 19 nt, Artificial Sequence
  Description of Artificial Sequence: Synthetic oligonucleotide
  Sense strand starting at position 700 of SEQ ID NO: 56
uggaguaagaggugugaua

SEQ ID NO: 8275 - RNA, 19 nt, Artificial Sequence
  Description of Artificial Sequence: Synthetic oligonucleotide
  Antisense strand to SEQ ID NO: 8274
uaucacaccucuuacucca

SEQ ID NO: 8276 - RNA, 19 nt, Artificial Sequence
  Description of Artificial Sequence: Synthetic oligonucleotide
  Sense strand starting at position 544 of SEQ ID NO: 56
guccuuugacaugauucca

SEQ ID NO: 8277 - RNA, 19 nt, Artificial Sequence
  Description of Artificial Sequence: Synthetic oligonucleotide
  Antisense strand to SEQ ID NO: 8276
uggaaucaugucaaaggac

SEQ ID NO: 8278 - RNA, 19 nt, Artificial Sequence
  Description of Artificial Sequence: Synthetic oligonucleotide
  Sense strand starting at position 344 of SEQ ID NO: 56
agguuauagaaucgcaacu

SEQ ID NO: 8279 - RNA, 19 nt, Artificial Sequence
  Description of Artificial Sequence: Synthetic oligonucleotide
  Antisense strand to SEQ ID NO: 8278
aguugcgauucuauaaccu

SEQ ID NO: 8280 - RNA, 19 nt, Artificial Sequence
  Description of Artificial Sequence: Synthetic oligonucleotide
  Sense strand starting at position 333 of SEQ ID NO: 56
uuauauugggaagguuaua

SEQ ID NO: 8281 - RNA, 19 nt, Artificial Sequence
  Description of Artificial Sequence: Synthetic oligonucleotide
  Antisense strand to SEQ ID NO: 8280
uauaaccuucccaauauaa

SEQ ID NO: 8282 - RNA, 19 nt, Artificial Sequence
  Description of Artificial Sequence: Synthetic oligonucleotide
  Sense strand starting at position 199 of SEQ ID NO: 56
agaucucuucuuugaaagg

SEQ ID NO: 8283 - RNA, 19 nt, Artificial Sequence
  Description of Artificial Sequence: Synthetic oligonucleotide
  Antisense strand to SEQ ID NO: 8282
ccuuucaaagaagagaucu

SEQ ID NO: 8284 - RNA, 19 nt, Artificial Sequence
  Description of Artificial Sequence: Synthetic oligonucleotide
  Sense strand starting at position 172 of SEQ ID NO: 56
uugaguccugguuaaagug

SEQ ID NO: 8285 - RNA, 19 nt, Artificial Sequence
  Description of Artificial Sequence: Synthetic oligonucleotide
  Antisense strand to SEQ ID NO: 8284
cacuuuaaccaggacucaa

SEQ ID NO: 8286 - RNA, 19 nt, Artificial Sequence
  Description of Artificial Sequence: Synthetic oligonucleotide
  Sense strand starting at position 121 of SEQ ID NO: 56
ucauuaucaggaggcacau

SEQ ID NO: 8287 - RNA, 19 nt, Artificial Sequence
  Description of Artificial Sequence: Synthetic oligonucleotide
  Antisense strand to SEQ ID NO: 8286
augugccuccugauaauga

SEQ ID NO: 8288 - RNA, 19 nt, Artificial Sequence
  Description of Artificial Sequence: Synthetic oligonucleotide
  Sense strand starting at position 13 of SEQ ID NO: 56
aggguuuccuuccuauaaa

SEQ ID NO: 8289 - RNA, 19 nt, Artificial Sequence
  Description of Artificial Sequence: Synthetic oligonucleotide
  Antisense strand to SEQ ID NO: 8288
uuuauaggaaggaaacccu

SEQ ID NO: 8290 - RNA, 19 nt, Artificial Sequence
  Description of Artificial Sequence: Synthetic oligonucleotide
  Sense strand starting at position 3723 of SEQ ID NO: 55
gaguaagaggugugauaau

SEQ ID NO: 8291 - RNA, 19 nt, Artificial Sequence
  Description of Artificial Sequence: Synthetic oligonucleotide
  Antisense strand to SEQ ID NO: 8290
auuaucacaccucuuacuc

SEQ ID NO: 8292 - RNA, 19 nt, Artificial Sequence
  Description of Artificial Sequence: Synthetic oligonucleotide
  Sense strand starting at position 3721 of SEQ ID NO: 55
uggaguaagaggugugaua

SEQ ID NO: 8293 - RNA, 19 nt, Artificial Sequence
  Description of Artificial Sequence: Synthetic oligonucleotide
  Antisense strand to SEQ ID NO: 8292
uaucacaccucuuacucca

SEQ ID NO: 8294 - RNA, 19 nt, Artificial Sequence
  Description of Artificial Sequence: Synthetic oligonucleotide
  Sense strand starting at position 3565 of SEQ ID NO: 55
guccuuugacaugauucca

SEQ ID NO: 8295 - RNA, 19 nt, Artificial Sequence
  Description of Artificial Sequence: Synthetic oligonucleotide
  Antisense strand to SEQ ID NO: 8294
uggaaucaugucaaaggac

SEQ ID NO: 8296 - RNA, 19 nt, Artificial Sequence
  Description of Artificial Sequence: Synthetic oligonucleotide
  Sense strand starting at position 3365 of SEQ ID NO: 55
agguuauagaaucgcaacu

SEQ ID NO: 8297 - RNA, 19 nt, Artificial Sequence
  Description of Artificial Sequence: Synthetic oligonucleotide
  Antisense strand to SEQ ID NO: 8296
aguugcgauucuauaaccu

SEQ ID NO: 8298 - RNA, 19 nt, Artificial Sequence
  Description of Artificial Sequence: Synthetic oligonucleotide
  Sense strand starting at position 3354 of SEQ ID NO: 55
uuauauugggaagguuaua

SEQ ID NO: 8299 - RNA, 19 nt, Artificial Sequence
  Description of Artificial Sequence: Synthetic oligonucleotide
  Antisense strand to SEQ ID NO: 8298
uauaaccuucccaauauaa

SEQ ID NO: 8300 - RNA, 19 nt, Artificial Sequence
  Description of Artificial Sequence: Synthetic oligonucleotide
  Sense strand starting at position 3220 of SEQ ID NO: 55
agaucucuucuuugaaagg

SEQ ID NO: 8301 - RNA, 19 nt, Artificial Sequence
  Description of Artificial Sequence: Synthetic oligonucleotide
  Antisense strand to SEQ ID NO: 8300
ccuuucaaagaagagaucu

SEQ ID NO: 8302 - RNA, 19 nt, Artificial Sequence
  Description of Artificial Sequence: Synthetic oligonucleotide
  Sense strand starting at position 3193 of SEQ ID NO: 55
uugaguccugguuaaagug

SEQ ID NO: 8303 - RNA, 19 nt, Artificial Sequence
  Description of Artificial Sequence: Synthetic oligonucleotide
  Antisense strand to SEQ ID NO: 8302
cacuuuaaccaggacucaa

SEQ ID NO: 8304 - RNA, 19 nt, Artificial Sequence
  Description of Artificial Sequence: Synthetic oligonucleotide
  Sense strand starting at position 3142 of SEQ ID NO: 55
ucauuaucaggaggcacau

SEQ ID NO: 8305 - RNA, 19 nt, Artificial Sequence
  Description of Artificial Sequence: Synthetic oligonucleotide
  Antisense strand to SEQ ID NO: 8304
augugccuccugauaauga

SEQ ID NO: 8306 - RNA, 19 nt, Artificial Sequence
  Description of Artificial Sequence: Synthetic oligonucleotide
  Sense strand starting at position 3034 of SEQ ID NO: 55
aggguuuccuuccuauaaa

SEQ ID NO: 8307 - RNA, 19 nt, Artificial Sequence
  Description of Artificial Sequence: Synthetic oligonucleotide
  Antisense strand to SEQ ID NO: 8306
uuuauaggaaggaaacccu

SEQ ID NO: 8308 - RNA, 19 nt, Artificial Sequence
  Description of Artificial Sequence: Synthetic oligonucleotide
  Sense strand starting at position 2930 of SEQ ID NO: 55
agaacagucucuccaaugu

SEQ ID NO: 8309 - RNA, 19 nt, Artificial Sequence
  Description of Artificial Sequence: Synthetic oligonucleotide
  Antisense strand to SEQ ID NO: 8308
acauuggagagacuguucu

SEQ ID NO: 8310 - RNA, 19 nt, Artificial Sequence
  Description of Artificial Sequence: Synthetic oligonucleotide
  Sense strand starting at position 2919 of SEQ ID NO: 55
ucugcuaaucuagaacagu

SEQ ID NO: 8311 - RNA, 19 nt, Artificial Sequence
  Description of Artificial Sequence: Synthetic oligonucleotide
  Antisense strand to SEQ ID NO: 8310
acuguucuagauuagcaga

SEQ ID NO: 8312 - RNA, 19 nt, Artificial Sequence
  Description of Artificial Sequence: Synthetic oligonucleotide
  Sense strand starting at position 2652 of SEQ ID NO: 55
gguugcaaacaugaacauu

SEQ ID NO: 8313 - RNA, 19 nt, Artificial Sequence
  Description of Artificial Sequence: Synthetic oligonucleotide
  Antisense strand to SEQ ID NO: 8312
aauguucauguuugcaacc

SEQ ID NO: 8314 - RNA, 19 nt, Artificial Sequence
  Description of Artificial Sequence: Synthetic oligonucleotide
  Sense strand starting at position 2363 of SEQ ID NO: 55
ugaagaaauccugguuccu

SEQ ID NO: 8315 - RNA, 19 nt, Artificial Sequence
  Description of Artificial Sequence: Synthetic oligonucleotide
  Antisense strand to SEQ ID NO: 8314
aggaaccaggauuucuuca

SEQ ID NO: 8316 - RNA, 19 nt, Artificial Sequence
  Description of Artificial Sequence: Synthetic oligonucleotide
  Sense strand starting at position 2299 of SEQ ID NO: 55
uguuucucccgauauugau

SEQ ID NO: 8317 - RNA, 19 nt, Artificial Sequence
  Description of Artificial Sequence: Synthetic oligonucleotide
  Antisense strand to SEQ ID NO: 8316
aucaauaucgggagaaaca

SEQ ID NO: 8318 - RNA, 19 nt, Artificial Sequence
  Description of Artificial Sequence: Synthetic oligonucleotide
  Sense strand starting at position 2046 of SEQ ID NO: 55
ccagucaaugaguaaucga

SEQ ID NO: 8319 - RNA, 19 nt, Artificial Sequence
  Description of Artificial Sequence: Synthetic oligonucleotide
  Antisense strand to SEQ ID NO: 8318
ucgauuacucauugacugg

SEQ ID NO: 8320 - RNA, 19 nt, Artificial Sequence
  Description of Artificial Sequence: Synthetic oligonucleotide
  Sense strand starting at position 2035 of SEQ ID NO: 55
ccuaaagugcuccagucaa

SEQ ID NO: 8321 - RNA, 19 nt, Artificial Sequence
  Description of Artificial Sequence: Synthetic oligonucleotide
  Antisense strand to SEQ ID NO: 8320
uugacuggagcacuuuagg

SEQ ID NO: 8322 - RNA, 19 nt, Artificial Sequence
  Description of Artificial Sequence: Synthetic oligonucleotide
  Sense strand starting at position 914 of SEQ ID NO: 55
uagaaauuauggucagcau

SEQ ID NO: 8323 - RNA, 19 nt, Artificial Sequence
  Description of Artificial Sequence: Synthetic oligonucleotide
  Antisense strand to SEQ ID NO: 8322
augcugaccauaauuucua

SEQ ID NO: 8324 - RNA, 19 nt, Artificial Sequence
  Description of Artificial Sequence: Synthetic oligonucleotide
  Sense strand starting at position 840 of SEQ ID NO: 55
cugggacauuccuaaauuu

SEQ ID NO: 8325 - RNA, 19 nt, Artificial Sequence
  Description of Artificial Sequence: Synthetic oligonucleotide
  Antisense strand to SEQ ID NO: 8324
aaauuuaggaaugucccag

SEQ ID NO: 8326 - RNA, 19 nt, Artificial Sequence
  Description of Artificial Sequence: Synthetic oligonucleotide
  Sense strand starting at position 831 of SEQ ID NO: 55
acugauucucugggacauu

SEQ ID NO: 8327 - RNA, 19 nt, Artificial Sequence
  Description of Artificial Sequence: Synthetic oligonucleotide
  Antisense strand to SEQ ID NO: 8326
aaugucccagagaaucagu

SEQ ID NO: 8328 - RNA, 19 nt, Artificial Sequence
  Description of Artificial Sequence: Synthetic oligonucleotide
  Sense strand starting at position 778 of SEQ ID NO: 55
uuucuuacugcagagaauu

SEQ ID NO: 8329 - RNA, 19 nt, Artificial Sequence
  Description of Artificial Sequence: Synthetic oligonucleotide
  Antisense strand to SEQ ID NO: 8328
aauucucugcaguaagaaa

SEQ ID NO: 8330 - RNA, 19 nt, Artificial Sequence
  Description of Artificial Sequence: Synthetic oligonucleotide
  Sense strand starting at position 776 of SEQ ID NO: 55
ucuuucuuacugcagagaa

SEQ ID NO: 8331 - RNA, 19 nt, Artificial Sequence
  Description of Artificial Sequence: Synthetic oligonucleotide
  Antisense strand to SEQ ID NO: 8330
uucucugcaguaagaaaga

SEQ ID NO: 8332 - RNA, 19 nt, Artificial Sequence
  Description of Artificial Sequence: Synthetic oligonucleotide
  Sense strand starting at position 748 of SEQ ID NO: 55
aaguguaauguagaaguga

SEQ ID NO: 8333 - RNA, 19 nt, Artificial Sequence
  Description of Artificial Sequence: Synthetic oligonucleotide
  Antisense strand to SEQ ID NO: 8332
ucacuucuacauuacacuu

SEQ ID NO: 8334 - RNA, 19 nt, Artificial Sequence
  Description of Artificial Sequence: Synthetic oligonucleotide
  Sense strand starting at position 746 of SEQ ID NO: 55
gaaaguguaauguagaagu

SEQ ID NO: 8335 - RNA, 19 nt, Artificial Sequence
  Description of Artificial Sequence: Synthetic oligonucleotide
  Antisense strand to SEQ ID NO: 8334
acuucuacauuacacuuuc

SEQ ID NO: 8336 - RNA, 19 nt, Artificial Sequence
  Description of Artificial Sequence: Synthetic oligonucleotide
  Sense strand starting at position 674 of SEQ ID NO: 55
aaagguuucuuccuaagug

SEQ ID NO: 8337 - RNA, 19 nt, Artificial Sequence
  Description of Artificial Sequence: Synthetic oligonucleotide
  Antisense strand to SEQ ID NO: 8336
cacuuaggaagaaaccuuu

SEQ ID NO: 8338 - RNA, 19 nt, Artificial Sequence
  Description of Artificial Sequence: Synthetic oligonucleotide
  Sense strand starting at position 622 of SEQ ID NO: 55
uugucaaauucguuauuuc

SEQ ID NO: 8339 - RNA, 19 nt, Artificial Sequence
  Description of Artificial Sequence: Synthetic oligonucleotide
  Antisense strand to SEQ ID NO: 8338
gaaauaacgaauuugacaa

SEQ ID NO: 8340 - RNA, 19 nt, Artificial Sequence
  Description of Artificial Sequence: Synthetic oligonucleotide
  Sense strand starting at position 621 of SEQ ID NO: 55
cuugucaaauucguuauuu

SEQ ID NO: 8341 - RNA, 19 nt, Artificial Sequence
  Description of Artificial Sequence: Synthetic oligonucleotide
  Antisense strand to SEQ ID NO: 8340
aaauaacgaauuugacaag

SEQ ID NO: 8342 - RNA, 19 nt, Artificial Sequence
  Description of Artificial Sequence: Synthetic oligonucleotide
  Sense strand starting at position 589 of SEQ ID NO: 55
gauauuguuuaacuuaggu

SEQ ID NO: 8343 - RNA, 19 nt, Artificial Sequence
  Description of Artificial Sequence: Synthetic oligonucleotide
  Antisense strand to SEQ ID NO: 8342
accuaaguuaaacaauauc

SEQ ID NO: 8344 - RNA, 19 nt, Artificial Sequence
  Description of Artificial Sequence: Synthetic oligonucleotide
  Sense strand starting at position 586 of SEQ ID NO: 55
cuggauauuguuuaacuua

SEQ ID NO: 8345 - RNA, 19 nt, Artificial Sequence
  Description of Artificial Sequence: Synthetic oligonucleotide
  Antisense strand to SEQ ID NO: 8344
uaaguuaaacaauauccag

SEQ ID NO: 8346 - RNA, 19 nt, Artificial Sequence
  Description of Artificial Sequence: Synthetic oligonucleotide
  Sense strand starting at position 579 of SEQ ID NO: 55
gccuuaucuggauauuguu

SEQ ID NO: 8347 - RNA, 19 nt, Artificial Sequence
  Description of Artificial Sequence: Synthetic oligonucleotide
  Antisense strand to SEQ ID NO: 8346
aacaauauccagauaaggc

SEQ ID NO: 8348 - RNA, 19 nt, Artificial Sequence
  Description of Artificial Sequence: Synthetic oligonucleotide
  Sense strand starting at position 577 of SEQ ID NO: 55
cagccuuaucuggauauug

SEQ ID NO: 8349 - RNA, 19 nt, Artificial Sequence
  Description of Artificial Sequence: Synthetic oligonucleotide
  Antisense strand to SEQ ID NO: 8348
caauauccagauaaggcug

SEQ ID NO: 8350 - RNA, 19 nt, Artificial Sequence
  Description of Artificial Sequence: Synthetic oligonucleotide
  Sense strand starting at position 518 of SEQ ID NO: 55
uggcuuuggcauggaauuu

SEQ ID NO: 8351 - RNA, 19 nt, Artificial Sequence
  Description of Artificial Sequence: Synthetic oligonucleotide
  Antisense strand to SEQ ID NO: 8350
aaauuccaugccaaagcca

SEQ ID NO: 8352 - RNA, 19 nt, Artificial Sequence
  Description of Artificial Sequence: Synthetic oligonucleotide
  Sense strand starting at position 447 of SEQ ID NO: 55
aguucuaugcaaggaaaca

SEQ ID NO: 8353 - RNA, 19 nt, Artificial Sequence
  Description of Artificial Sequence: Synthetic oligonucleotide
  Antisense strand to SEQ ID NO: 8352
uguuuccuugcauagaacu

SEQ ID NO: 8354 - RNA, 19 nt, Artificial Sequence
  Description of Artificial Sequence: Synthetic oligonucleotide
  Sense strand starting at position 442 of SEQ ID NO: 55
aggaaaguucuaugcaagg

SEQ ID NO: 8355 - RNA, 19 nt, Artificial Sequence
  Description of Artificial Sequence: Synthetic oligonucleotide
  Antisense strand to SEQ ID NO: 8354
ccuugcauagaacuuuccu

SEQ ID NO: 8356 - RNA, 19 nt, Artificial Sequence
  Description of Artificial Sequence: Synthetic oligonucleotide
  Sense strand starting at position 432 of SEQ ID NO: 55
gugcuacuccaggaaaguu

SEQ ID NO: 8357 - RNA, 19 nt, Artificial Sequence
  Description of Artificial Sequence: Synthetic oligonucleotide
  Antisense strand to SEQ ID NO: 8356
aacuuuccuggaguagcac

SEQ ID NO: 8358 - RNA, 19 nt, Artificial Sequence
  Description of Artificial Sequence: Synthetic oligonucleotide
  Sense strand starting at position 289 of SEQ ID NO: 55
cugcuaucuccugaaugag

SEQ ID NO: 8359 - RNA, 19 nt, Artificial Sequence
  Description of Artificial Sequence: Synthetic oligonucleotide
  Antisense strand to SEQ ID NO: 8358
cucauucaggagauagcag

SEQ ID NO: 8360 - RNA, 19 nt, Artificial Sequence
  Description of Artificial Sequence: Synthetic oligonucleotide
  Sense strand starting at position 193 of SEQ ID NO: 55
auuagaagcugaguuuacu

SEQ ID NO: 8361 - RNA, 19 nt, Artificial Sequence
  Description of Artificial Sequence: Synthetic oligonucleotide
  Antisense strand to SEQ ID NO: 8360
aguaaacucagcuucuaau

SEQ ID NO: 8362 - RNA, 19 nt, Artificial Sequence
  Description of Artificial Sequence: Synthetic oligonucleotide
  Sense strand starting at position 191 of SEQ ID NO: 55
ccauuagaagcugaguuua

SEQ ID NO: 8363 - RNA, 19 nt, Artificial Sequence
  Description of Artificial Sequence: Synthetic oligonucleotide
  Antisense strand to SEQ ID NO: 8362
uaaacucagcuucuaaugg

SEQ ID NO: 8364 - RNA, 19 nt, Artificial Sequence
  Description of Artificial Sequence: Synthetic oligonucleotide
  Sense strand starting at position 147 of SEQ ID NO: 55
augcuauuccuuuaguuga

SEQ ID NO: 8365 - RNA, 19 nt, Artificial Sequence
  Description of Artificial Sequence: Synthetic oligonucleotide
  Antisense strand to SEQ ID NO: 8364
ucaacuaaaggaauagcau

SEQ ID NO: 8366 - RNA, 19 nt, Artificial Sequence
  Description of Artificial Sequence: Synthetic oligonucleotide
  Sense strand starting at position 66 of SEQ ID NO: 55
aagaauugugcagaccuua

SEQ ID NO: 8367 - RNA, 19 nt, Artificial Sequence
  Description of Artificial Sequence: Synthetic oligonucleotide
  Antisense strand to SEQ ID NO: 8366
uaaggucugcacaauucuu

SEQ ID NO: 8368 - RNA, 19 nt, Artificial Sequence
  Description of Artificial Sequence: Synthetic oligonucleotide
  Sense strand starting at position 49 of SEQ ID NO: 55
cugacaaagugagcugaaa

SEQ ID NO: 8369 - RNA, 19 nt, Artificial Sequence
  Description of Artificial Sequence: Synthetic oligonucleotide
  Antisense strand to SEQ ID NO: 8368
uuucagcucacuuugucag

SEQ ID NO: 8370 - RNA, 19 nt, Artificial Sequence
  Description of Artificial Sequence: Synthetic oligonucleotide
  Sense strand starting at position 234 of SEQ ID NO: 57
gggacagacugguaaucuu

SEQ ID NO: 8371 - RNA, 19 nt, Artificial Sequence
  Description of Artificial Sequence: Synthetic oligonucleotide
  Antisense strand to SEQ ID NO: 8370
aagauuaccagucuguccc

SEQ ID NO: 8372 - RNA, 19 nt, Artificial Sequence
  Description of Artificial Sequence: Synthetic oligonucleotide
  Sense strand starting at position 416 of SEQ ID NO: 57
ggcaaagcuuguccucaca

SEQ ID NO: 8373 - RNA, 19 nt, Artificial Sequence
  Description of Artificial Sequence: Synthetic oligonucleotide
  Antisense strand to SEQ ID NO: 8372
ugugaggacaagcuuugcc

SEQ ID NO: 8374 - RNA, 19 nt, Artificial Sequence
  Description of Artificial Sequence: Synthetic oligonucleotide
  Sense strand starting at position 742 of SEQ ID NO: 57
cagggucugcgguagagaa

SEQ ID NO: 8375 - RNA, 19 nt, Artificial Sequence
  Description of Artificial Sequence: Synthetic oligonucleotide
  Antisense strand to SEQ ID NO: 8374
uucucuaccgcagacccug

SEQ ID NO: 8376 - RNA, 19 nt, Artificial Sequence
  Description of Artificial Sequence: Synthetic oligonucleotide
  Sense strand starting at position 744 of SEQ ID NO: 57
gggucugcgguagagaauu

SEQ ID NO: 8377 - RNA, 19 nt, Artificial Sequence
  Description of Artificial Sequence: Synthetic oligonucleotide
  Antisense strand to SEQ ID NO: 8376
aauucucuaccgcagaccc

SEQ ID NO: 8378 - RNA, 19 nt, Artificial Sequence
  Description of Artificial Sequence: Synthetic oligonucleotide
  Sense strand starting at position 1200 of SEQ ID NO: 57
aacgcauugauaggcgauu

SEQ ID NO: 8379 - RNA, 19 nt, Artificial Sequence
  Description of Artificial Sequence: Synthetic oligonucleotide
  Antisense strand to SEQ ID NO: 8378
aaucgccuaucaaugcguu

SEQ ID NO: 8380 - RNA, 19 nt, Artificial Sequence
  Description of Artificial Sequence: Synthetic oligonucleotide
  Sense strand starting at position 1201 of SEQ ID NO: 57
acgcauugauaggcgauua

SEQ ID NO: 8381 - RNA, 19 nt, Artificial Sequence
  Description of Artificial Sequence: Synthetic oligonucleotide
  Antisense strand to SEQ ID NO: 8380
uaaucgccuaucaaugcgu

SEQ ID NO: 8382 - RNA, 19 nt, Artificial Sequence
  Description of Artificial Sequence: Synthetic oligonucleotide
  Sense strand starting at position 1202 of SEQ ID NO: 57
cgcauugauaggcgauuau

SEQ ID NO: 8383 - RNA, 19 nt, Artificial Sequence
  Description of Artificial Sequence: Synthetic oligonucleotide
  Antisense strand to SEQ ID NO: 8382
auaaucgccuaucaaugcg

SEQ ID NO: 8384 - RNA, 19 nt, Artificial Sequence
  Description of Artificial Sequence: Synthetic oligonucleotide
  Sense strand starting at position 1245 of SEQ ID NO: 57
cgacuuuguucgccaggua

SEQ ID NO: 8385 - RNA, 19 nt, Artificial Sequence
  Description of Artificial Sequence: Synthetic oligonucleotide
  Antisense strand to SEQ ID NO: 8384
uaccuggcgaacaaagucg

SEQ ID NO: 8386 - RNA, 19 nt, Artificial Sequence
  Description of Artificial Sequence: Synthetic oligonucleotide
  Sense strand starting at position 1246 of SEQ ID NO: 57
gacuuuguucgccagguaa

SEQ ID NO: 8387 - RNA, 19 nt, Artificial Sequence
  Description of Artificial Sequence: Synthetic oligonucleotide
  Antisense strand to SEQ ID NO: 8386
uuaccuggcgaacaaaguc

SEQ ID NO: 8388 - RNA, 19 nt, Artificial Sequence
  Description of Artificial Sequence: Synthetic oligonucleotide
  Sense strand starting at position 1369 of SEQ ID NO: 57
gccaguggauccuagggau

SEQ ID NO: 8389 - RNA, 19 nt, Artificial Sequence
  Description of Artificial Sequence: Synthetic oligonucleotide
  Antisense strand to SEQ ID NO: 8388
aucccuaggauccacuggc

SEQ ID NO: 8390 - RNA, 19 nt, Artificial Sequence
  Description of Artificial Sequence: Synthetic oligonucleotide
  Sense strand starting at position 2318 of SEQ ID NO: 57
cucucagacugucucuauu

SEQ ID NO: 8391 - RNA, 19 nt, Artificial Sequence
  Description of Artificial Sequence: Synthetic oligonucleotide
  Antisense strand to SEQ ID NO: 8390
aauagagacagucugagag

SEQ ID NO: 8392 - RNA, 19 nt, Artificial Sequence
  Description of Artificial Sequence: Synthetic oligonucleotide
  Sense strand starting at position 2837 of SEQ ID NO: 57
gcgcguccucguuuaccaa

SEQ ID NO: 8393 - RNA, 19 nt, Artificial Sequence
  Description of Artificial Sequence: Synthetic oligonucleotide
  Antisense strand to SEQ ID NO: 8392
uugguaaacgaggacgcgc

SEQ ID NO: 8394 - RNA, 19 nt, Artificial Sequence
  Description of Artificial Sequence: Synthetic oligonucleotide
  Sense strand starting at position 2877 of SEQ ID NO: 57
gguuaagaauggucccugu

SEQ ID NO: 8395 - RNA, 19 nt, Artificial Sequence
  Description of Artificial Sequence: Synthetic oligonucleotide
  Antisense strand to SEQ ID NO: 8394
acagggaccauucuuaacc

SEQ ID NO: 8396 - RNA, 19 nt, Artificial Sequence
  Description of Artificial Sequence: Synthetic oligonucleotide
  Sense strand starting at position 2880 of SEQ ID NO: 57
uaagaauggucccuguguu

SEQ ID NO: 8397 - RNA, 19 nt, Artificial Sequence
  Description of Artificial Sequence: Synthetic oligonucleotide
  Antisense strand to SEQ ID NO: 8396
aacacagggaccauucuua

SEQ ID NO: 8398 - RNA, 19 nt, Artificial Sequence
  Description of Artificial Sequence: Synthetic oligonucleotide
  Sense strand starting at position 2881 of SEQ ID NO: 57
aagaauggucccuguguuc

SEQ ID NO: 8399 - RNA, 19 nt, Artificial Sequence
  Description of Artificial Sequence: Synthetic oligonucleotide
  Antisense strand to SEQ ID NO: 8398
gaacacagggaccauucuu

SEQ ID NO: 8400 - RNA, 19 nt, Artificial Sequence
  Description of Artificial Sequence: Synthetic oligonucleotide
  Sense strand starting at position 3108 of SEQ ID NO: 57
aaagguuucuuauugagua

SEQ ID NO: 8401 - RNA, 19 nt, Artificial Sequence
  Description of Artificial Sequence: Synthetic oligonucleotide
  Antisense strand to SEQ ID NO: 8400
uacucaauaagaaaccuuu

SEQ ID NO: 8402 - RNA, 19 nt, Artificial Sequence
  Description of Artificial Sequence: Synthetic oligonucleotide
  Sense strand starting at position 3109 of SEQ ID NO: 57
aagguuucuuauugaguaa

SEQ ID NO: 8403 - RNA, 19 nt, Artificial Sequence
  Description of Artificial Sequence: Synthetic oligonucleotide
  Antisense strand to SEQ ID NO: 8402
uuacucaauaagaaaccuu

SEQ ID NO: 8404 - RNA, 19 nt, Artificial Sequence
  Description of Artificial Sequence: Synthetic oligonucleotide
  Sense strand starting at position 3112 of SEQ ID NO: 57
guuucuuauugaguaaagc

SEQ ID NO: 8405 - RNA, 19 nt, Artificial Sequence
  Description of Artificial Sequence: Synthetic oligonucleotide
  Antisense strand to SEQ ID NO: 8404
gcuuuacucaauaagaaac

SEQ ID NO: 8406 - RNA, 19 nt, Artificial Sequence
  Description of Artificial Sequence: Synthetic oligonucleotide
  Sense strand starting at position 3113 of SEQ ID NO: 57
uuucuuauugaguaaagcu

SEQ ID NO: 8407 - RNA, 19 nt, Artificial Sequence
  Description of Artificial Sequence: Synthetic oligonucleotide
  Antisense strand to SEQ ID NO: 8406
agcuuuacucaauaagaaa

SEQ ID NO: 8408 - RNA, 19 nt, Artificial Sequence
  Description of Artificial Sequence: Synthetic oligonucleotide
  Sense strand starting at position 3120 of SEQ ID NO: 57
uugaguaaagcucaaguau

SEQ ID NO: 8409 - RNA, 19 nt, Artificial Sequence
  Description of Artificial Sequence: Synthetic oligonucleotide
  Antisense strand to SEQ ID NO: 8408
auacuugagcuuuacucaa

SEQ ID NO: 8410 - RNA, 19 nt, Artificial Sequence
  Description of Artificial Sequence: Synthetic oligonucleotide
  Sense strand starting at position 3230 of SEQ ID NO: 57
cucgguuucgcccuugcaa

SEQ ID NO: 8411 - RNA, 19 nt, Artificial Sequence
  Description of Artificial Sequence: Synthetic oligonucleotide
  Antisense strand to SEQ ID NO: 8410
uugcaagggcgaaaccgag

SEQ ID NO: 8412 - RNA, 19 nt, Artificial Sequence
  Description of Artificial Sequence: Synthetic oligonucleotide
  Sense strand starting at position 3294 of SEQ ID NO: 57
ccuggauaauccgcagaua

SEQ ID NO: 8413 - RNA, 19 nt, Artificial Sequence
  Description of Artificial Sequence: Synthetic oligonucleotide
  Antisense strand to SEQ ID NO: 8412
uaucugcggauuauccagg

SEQ ID NO: 8414 - RNA, 19 nt, Artificial Sequence
  Description of Artificial Sequence: Synthetic oligonucleotide
  Sense strand starting at position 3295 of SEQ ID NO: 57
cuggauaauccgcagauag

SEQ ID NO: 8415 - RNA, 19 nt, Artificial Sequence
  Description of Artificial Sequence: Synthetic oligonucleotide
  Antisense strand to SEQ ID NO: 8414
cuaucugcggauuauccag

SEQ ID NO: 8416 - RNA, 19 nt, Artificial Sequence
  Description of Artificial Sequence: Synthetic oligonucleotide
  Sense strand starting at position 3330 of SEQ ID NO: 57
uccgaauucugcugagcau

SEQ ID NO: 8417 - RNA, 19 nt, Artificial Sequence
  Description of Artificial Sequence: Synthetic oligonucleotide
  Antisense strand to SEQ ID NO: 8416
augcucagcagaauucgga

SEQ ID NO: 8418 - RNA, 19 nt, Artificial Sequence
  Description of Artificial Sequence: Synthetic oligonucleotide
  Sense strand starting at position 3331 of SEQ ID NO: 57
ccgaauucugcugagcauu

SEQ ID NO: 8419 - RNA, 19 nt, Artificial Sequence
  Description of Artificial Sequence: Synthetic oligonucleotide
  Antisense strand to SEQ ID NO: 8418
aaugcucagcagaauucgg

SEQ ID NO: 8420 - RNA, 19 nt, Artificial Sequence
  Description of Artificial Sequence: Synthetic oligonucleotide
  Sense strand starting at position 3343 of SEQ ID NO: 57
gagcauuugcguuguguca

SEQ ID NO: 8421 - RNA, 19 nt, Artificial Sequence
  Description of Artificial Sequence: Synthetic oligonucleotide
  Antisense strand to SEQ ID NO: 8420
ugacacaacgcaaaugcuc

SEQ ID NO: 8422 - RNA, 19 nt, Artificial Sequence
  Description of Artificial Sequence: Synthetic oligonucleotide
  Sense strand starting at position 3350 of SEQ ID NO: 57
ugcguugugucaggaagca

SEQ ID NO: 8423 - RNA, 19 nt, Artificial Sequence
  Description of Artificial Sequence: Synthetic oligonucleotide
  Antisense strand to SEQ ID NO: 8422
ugcuuccugacacaacgca

SEQ ID NO: 8424 - RNA, 19 nt, Artificial Sequence
  Description of Artificial Sequence: Synthetic oligonucleotide
  Sense strand starting at position 3534 of SEQ ID NO: 57
gcugaacugcugcgguaaa

SEQ ID NO: 8425 - RNA, 19 nt, Artificial Sequence
  Description of Artificial Sequence: Synthetic oligonucleotide
  Antisense strand to SEQ ID NO: 8424
uuuaccgcagcaguucagc

SEQ ID NO: 8426 - RNA, 19 nt, Artificial Sequence
  Description of Artificial Sequence: Synthetic oligonucleotide
  Sense strand starting at position 3592 of SEQ ID NO: 57
gguccagguucuccaguua

SEQ ID NO: 8427 - RNA, 19 nt, Artificial Sequence
  Description of Artificial Sequence: Synthetic oligonucleotide
  Antisense strand to SEQ ID NO: 8426
uaacuggagaaccuggacc

SEQ ID NO: 8428 - RNA, 19 nt, Artificial Sequence
  Description of Artificial Sequence: Synthetic oligonucleotide
  Sense strand starting at position 3686 of SEQ ID NO: 57
augacaaggaguugugacu

SEQ ID NO: 8429 - RNA, 19 nt, Artificial Sequence
  Description of Artificial Sequence: Synthetic oligonucleotide
  Antisense strand to SEQ ID NO: 8428
agucacaacuccuugucau

SEQ ID NO: 8430 - RNA, 19 nt, Artificial Sequence
  Description of Artificial Sequence: Synthetic oligonucleotide
  Sense strand starting at position 3695 of SEQ ID NO: 57
aguugugacucccuccauu

SEQ ID NO: 8431 - RNA, 19 nt, Artificial Sequence
  Description of Artificial Sequence: Synthetic oligonucleotide
  Antisense strand to SEQ ID NO: 8430
aauggagggagucacaacu

SEQ ID NO: 8432 - RNA, 19 nt, Artificial Sequence
  Description of Artificial Sequence: Synthetic oligonucleotide
  Sense strand starting at position 3829 of SEQ ID NO: 57
ugucguguccuguguccua

SEQ ID NO: 8433 - RNA, 19 nt, Artificial Sequence
  Description of Artificial Sequence: Synthetic oligonucleotide
  Antisense strand to SEQ ID NO: 8432
uaggacacaggacacgaca

SEQ ID NO: 8434 - RNA, 19 nt, Artificial Sequence
  Description of Artificial Sequence: Synthetic oligonucleotide
  Sense strand starting at position 3841 of SEQ ID NO: 57
uguccuaggugucuaccaa

SEQ ID NO: 8435 - RNA, 19 nt, Artificial Sequence
  Description of Artificial Sequence: Synthetic oligonucleotide
  Antisense strand to SEQ ID NO: 8434
uugguagacaccuaggaca

SEQ ID NO: 8436 - RNA, 19 nt, Artificial Sequence
  Description of Artificial Sequence: Synthetic oligonucleotide
  Sense strand starting at position 3904 of SEQ ID NO: 57
accucaucugugugucuga

SEQ ID NO: 8437 - RNA, 19 nt, Artificial Sequence
  Description of Artificial Sequence: Synthetic oligonucleotide
  Antisense strand to SEQ ID NO: 8436
ucagacacacagaugaggu

SEQ ID NO: 8438 - RNA, 19 nt, Artificial Sequence
  Description of Artificial Sequence: Synthetic oligonucleotide
  Sense strand starting at position 3905 of SEQ ID NO: 57
ccucaucugugugucugau

SEQ ID NO: 8439 - RNA, 19 nt, Artificial Sequence
  Description of Artificial Sequence: Synthetic oligonucleotide
  Antisense strand to SEQ ID NO: 8438
aucagacacacagaugagg

SEQ ID NO: 8440 - RNA, 19 nt, Artificial Sequence
  Description of Artificial Sequence: Synthetic oligonucleotide
  Sense strand starting at position 3911 of SEQ ID NO: 57
cugugugucugauguucca

SEQ ID NO: 8441 - RNA, 19 nt, Artificial Sequence
  Description of Artificial Sequence: Synthetic oligonucleotide
  Antisense strand to SEQ ID NO: 8440
uggaacaucagacacacag

SEQ ID NO: 8442 - RNA, 19 nt, Artificial Sequence
  Description of Artificial Sequence: Synthetic oligonucleotide
  Sense strand starting at position 3938 of SEQ ID NO: 57
gucugcuggccuugucuau

SEQ ID NO: 8443 - RNA, 19 nt, Artificial Sequence
  Description of Artificial Sequence: Synthetic oligonucleotide
  Antisense strand to SEQ ID NO: 8442
auagacaaggccagcagac

SEQ ID NO: 8444 - RNA, 19 nt, Artificial Sequence
  Description of Artificial Sequence: Synthetic oligonucleotide
  Sense strand starting at position 3967 of SEQ ID NO: 57
gucugaaguuccuagagca

SEQ ID NO: 8445 - RNA, 19 nt, Artificial Sequence
  Description of Artificial Sequence: Synthetic oligonucleotide
  Antisense strand to SEQ ID NO: 8444
ugcucuaggaacuucagac

SEQ ID NO: 8446 - RNA, 19 nt, Artificial Sequence
  Description of Artificial Sequence: Synthetic oligonucleotide
  Sense strand starting at position 51 of SEQ ID NO: 58
ggguauacauaggugcuua

SEQ ID NO: 8447 - RNA, 19 nt, Artificial Sequence
  Description of Artificial Sequence: Synthetic oligonucleotide
  Antisense strand to SEQ ID NO: 8446
uaagcaccuauguauaccc

SEQ ID NO: 8448 - RNA, 19 nt, Artificial Sequence
  Description of Artificial Sequence: Synthetic oligonucleotide
  Sense strand starting at position 55 of SEQ ID NO: 58
auacauaggugcuuacuaa

SEQ ID NO: 8449 - RNA, 19 nt, Artificial Sequence
  Description of Artificial Sequence: Synthetic oligonucleotide
  Antisense strand to SEQ ID NO: 8448
uuaguaagcaccuauguau

SEQ ID NO: 8450 - RNA, 19 nt, Artificial Sequence
  Description of Artificial Sequence: Synthetic oligonucleotide
  Sense strand starting at position 67 of SEQ ID NO: 58
uuacuaauuggcuacagua

SEQ ID NO: 8451 - RNA, 19 nt, Artificial Sequence
  Description of Artificial Sequence: Synthetic oligonucleotide
  Antisense strand to SEQ ID NO: 8450
uacuguagccaauuaguaa

SEQ ID NO: 8452 - RNA, 19 nt, Artificial Sequence
  Description of Artificial Sequence: Synthetic oligonucleotide
  Sense strand starting at position 91 of SEQ ID NO: 58
ggguguguucuccaguaau

SEQ ID NO: 8453 - RNA, 19 nt, Artificial Sequence
  Description of Artificial Sequence: Synthetic oligonucleotide
  Antisense strand to SEQ ID NO: 8452
auuacuggagaacacaccc

SEQ ID NO: 8454 - RNA, 19 nt, Artificial Sequence
  Description of Artificial Sequence: Synthetic oligonucleotide
  Sense strand starting at position 94 of SEQ ID NO: 58
uguguucuccaguaauaaa

SEQ ID NO: 8455 - RNA, 19 nt, Artificial Sequence
  Description of Artificial Sequence: Synthetic oligonucleotide
  Antisense strand to SEQ ID NO: 8454
uuuauuacuggagaacaca

SEQ ID NO: 8456 - RNA, 19 nt, Artificial Sequence
  Description of Artificial Sequence: Synthetic oligonucleotide
  Sense strand starting at position 166 of SEQ ID NO: 58
uuaagcacucuguaguaga

SEQ ID NO: 8457 - RNA, 19 nt, Artificial Sequence
  Description of Artificial Sequence: Synthetic oligonucleotide
  Antisense strand to SEQ ID NO: 8456
ucuacuacagagugcuuaa

SEQ ID NO: 8458 - RNA, 19 nt, Artificial Sequence
  Description of Artificial Sequence: Synthetic oligonucleotide
  Sense strand starting at position 238 of SEQ ID NO: 58
ugaccugaguaaucuguuu

SEQ ID NO: 8459 - RNA, 19 nt, Artificial Sequence
  Description of Artificial Sequence: Synthetic oligonucleotide
  Antisense strand to SEQ ID NO: 8458
aaacagauuacucagguca

SEQ ID NO: 8460 - RNA, 19 nt, Artificial Sequence
  Description of Artificial Sequence: Synthetic oligonucleotide
  Sense strand starting at position 244 of SEQ ID NO: 58
gaguaaucuguuuaaccug

SEQ ID NO: 8461 - RNA, 19 nt, Artificial Sequence
  Description of Artificial Sequence: Synthetic oligonucleotide
  Antisense strand to SEQ ID NO: 8460
cagguuaaacagauuacuc

SEQ ID NO: 8462 - RNA, 19 nt, Artificial Sequence
  Description of Artificial Sequence: Synthetic oligonucleotide
  Sense strand starting at position 298 of SEQ ID NO: 58
auuauauucucacuggguu

SEQ ID NO: 8463 - RNA, 19 nt, Artificial Sequence
  Description of Artificial Sequence: Synthetic oligonucleotide
  Antisense strand to SEQ ID NO: 8462
aacccagugagaauauaau

SEQ ID NO: 8464 - RNA, 19 nt, Artificial Sequence
  Description of Artificial Sequence: Synthetic oligonucleotide
  Sense strand starting at position 299 of SEQ ID NO: 58
uuauauucucacuggguua

SEQ ID NO: 8465 - RNA, 19 nt, Artificial Sequence
  Description of Artificial Sequence: Synthetic oligonucleotide
  Antisense strand to SEQ ID NO: 8464
uaacccagugagaauauaa

SEQ ID NO: 8466 - RNA, 19 nt, Artificial Sequence
  Description of Artificial Sequence: Synthetic oligonucleotide
  Sense strand starting at position 312 of SEQ ID NO: 58
ggguuauugcaagagcaaa

SEQ ID NO: 8467 - RNA, 19 nt, Artificial Sequence
  Description of Artificial Sequence: Synthetic oligonucleotide
  Antisense strand to SEQ ID NO: 8466
uuugcucuugcaauaaccc

SEQ ID NO: 8468 - RNA, 19 nt, Artificial Sequence
  Description of Artificial Sequence: Synthetic oligonucleotide
  Sense strand starting at position 506 of SEQ ID NO: 58
gaguuuagaucuuccaagu

SEQ ID NO: 8469 - RNA, 19 nt, Artificial Sequence
  Description of Artificial Sequence: Synthetic oligonucleotide
  Antisense strand to SEQ ID NO: 8468
acuuggaagaucuaaacuc

SEQ ID NO: 8470 - RNA, 19 nt, Artificial Sequence
  Description of Artificial Sequence: Synthetic oligonucleotide
  Sense strand starting at position 534 of SEQ ID NO: 58
auauucuugccagaaaucg

SEQ ID NO: 8471 - RNA, 19 nt, Artificial Sequence
  Description of Artificial Sequence: Synthetic oligonucleotide
  Antisense strand to SEQ ID NO: 8470
cgauuucuggcaagaauau

SEQ ID NO: 8472 - RNA, 19 nt, Artificial Sequence
  Description of Artificial Sequence: Synthetic oligonucleotide
  Sense strand starting at position 591 of SEQ ID NO: 58
ggguauucuacucauacgu

SEQ ID NO: 8473 - RNA, 19 nt, Artificial Sequence
  Description of Artificial Sequence: Synthetic oligonucleotide
  Antisense strand to SEQ ID NO: 8472
acguaugaguagaauaccc

SEQ ID NO: 8474 - RNA, 19 nt, Artificial Sequence
  Description of Artificial Sequence: Synthetic oligonucleotide
  Sense strand starting at position 656 of SEQ ID NO: 58
agaauaauuaauggcgagu

SEQ ID NO: 8475 - RNA, 19 nt, Artificial Sequence
  Description of Artificial Sequence: Synthetic oligonucleotide
  Antisense strand to SEQ ID NO: 8474
acucgccauuaauuauucu

SEQ ID NO: 8476 - RNA, 19 nt, Artificial Sequence
  Description of Artificial Sequence: Synthetic oligonucleotide
  Sense strand starting at position 694 of SEQ ID NO: 58
ggcagacaguucuuaaguu

SEQ ID NO: 8477 - RNA, 19 nt, Artificial Sequence
  Description of Artificial Sequence: Synthetic oligonucleotide
  Antisense strand to SEQ ID NO: 8476
aacuuaagaacugucugcc

SEQ ID NO: 8478 - RNA, 19 nt, Artificial Sequence
  Description of Artificial Sequence: Synthetic oligonucleotide
  Sense strand starting at position 812 of SEQ ID NO: 58
gggcaagaaauuggucuua

SEQ ID NO: 8479 - RNA, 19 nt, Artificial Sequence
  Description of Artificial Sequence: Synthetic oligonucleotide
  Antisense strand to SEQ ID NO: 8478
uaagaccaauuucuugccc

SEQ ID NO: 8480 - RNA, 19 nt, Artificial Sequence
  Description of Artificial Sequence: Synthetic oligonucleotide
  Sense strand starting at position 814 of SEQ ID NO: 58
gcaagaaauuggucuuagg

SEQ ID NO: 8481 - RNA, 19 nt, Artificial Sequence
  Description of Artificial Sequence: Synthetic oligonucleotide
  Antisense strand to SEQ ID NO: 8480
ccuaagaccaauuucuugc

SEQ ID NO: 8482 - RNA, 19 nt, Artificial Sequence
  Description of Artificial Sequence: Synthetic oligonucleotide
  Sense strand starting at position 829 of SEQ ID NO: 58
uagguugcucaaggaaacu

SEQ ID NO: 8483 - RNA, 19 nt, Artificial Sequence
  Description of Artificial Sequence: Synthetic oligonucleotide
  Antisense strand to SEQ ID NO: 8482
aguuuccuugagcaaccua

SEQ ID NO: 8484 - RNA, 19 nt, Artificial Sequence
  Description of Artificial Sequence: Synthetic oligonucleotide
  Sense strand starting at position 925 of SEQ ID NO: 58
gugcgugguccauuaauuc

SEQ ID NO: 8485 - RNA, 19 nt, Artificial Sequence
  Description of Artificial Sequence: Synthetic oligonucleotide
  Antisense strand to SEQ ID NO: 8484
gaauuaauggaccacgcac

SEQ ID NO: 8486 - RNA, 19 nt, Artificial Sequence
  Description of Artificial Sequence: Synthetic oligonucleotide
  Sense strand starting at position 1050 of SEQ ID NO: 58
aaacgaaaucgagguggaa

SEQ ID NO: 8487 - RNA, 19 nt, Artificial Sequence
  Description of Artificial Sequence: Synthetic oligonucleotide
  Antisense strand to SEQ ID NO: 8486
uuccaccucgauuucguuu

SEQ ID NO: 8488 - RNA, 19 nt, Artificial Sequence
  Description of Artificial Sequence: Synthetic oligonucleotide
  Sense strand starting at position 1052 of SEQ ID NO: 58
acgaaaucgagguggaauu

SEQ ID NO: 8489 - RNA, 19 nt, Artificial Sequence
  Description of Artificial Sequence: Synthetic oligonucleotide
  Antisense strand to SEQ ID NO: 8488
aauuccaccucgauuucgu

SEQ ID NO: 8490 - RNA, 19 nt, Artificial Sequence
  Description of Artificial Sequence: Synthetic oligonucleotide
  Sense strand starting at position 1207 of SEQ ID NO: 58
cuuuccuacgcauggaaga

SEQ ID NO: 8491 - RNA, 19 nt, Artificial Sequence
  Description of Artificial Sequence: Synthetic oligonucleotide
  Antisense strand to SEQ ID NO: 8490
ucuuccaugcguaggaaag

SEQ ID NO: 8492 - RNA, 19 nt, Artificial Sequence
  Description of Artificial Sequence: Synthetic oligonucleotide
  Sense strand starting at position 1208 of SEQ ID NO: 58
uuuccuacgcauggaagaa

SEQ ID NO: 8493 - RNA, 19 nt, Artificial Sequence
  Description of Artificial Sequence: Synthetic oligonucleotide
  Antisense strand to SEQ ID NO: 8492
uucuuccaugcguaggaaa

SEQ ID NO: 8494 - RNA, 19 nt, Artificial Sequence
  Description of Artificial Sequence: Synthetic oligonucleotide
  Sense strand starting at position 1595 of SEQ ID NO: 58
ugcagauacggugaugaga

SEQ ID NO: 8495 - RNA, 19 nt, Artificial Sequence
  Description of Artificial Sequence: Synthetic oligonucleotide
  Antisense strand to SEQ ID NO: 8494
ucucaucaccguaucugca

SEQ ID NO: 8496 - RNA, 19 nt, Artificial Sequence
  Description of Artificial Sequence: Synthetic oligonucleotide
  Sense strand starting at position 2410 of SEQ ID NO: 58
ugagaaauuugguaaguau

SEQ ID NO: 8497 - RNA, 19 nt, Artificial Sequence
  Description of Artificial Sequence: Synthetic oligonucleotide
  Antisense strand to SEQ ID NO: 8496
auacuuaccaaauuucuca

SEQ ID NO: 8498 - RNA, 19 nt, Artificial Sequence
  Description of Artificial Sequence: Synthetic oligonucleotide
  Sense strand starting at position 2439 of SEQ ID NO: 58
ggguguuucucaguaauau

SEQ ID NO: 8499 - RNA, 19 nt, Artificial Sequence
  Description of Artificial Sequence: Synthetic oligonucleotide
  Antisense strand to SEQ ID NO: 8498
auauuacugagaaacaccc

SEQ ID NO: 8500 - RNA, 19 nt, Artificial Sequence
  Description of Artificial Sequence: Synthetic oligonucleotide
  Sense strand starting at position 2440 of SEQ ID NO: 58
gguguuucucaguaauauc

SEQ ID NO: 8501 - RNA, 19 nt, Artificial Sequence
  Description of Artificial Sequence: Synthetic oligonucleotide
  Antisense strand to SEQ ID NO: 8500
gauauuacugagaaacacc

SEQ ID NO: 8502 - RNA, 19 nt, Artificial Sequence
  Description of Artificial Sequence: Synthetic oligonucleotide
  Sense strand starting at position 2503 of SEQ ID NO: 58
uuacauuagucuccauaga

SEQ ID NO: 8503 - RNA, 19 nt, Artificial Sequence
  Description of Artificial Sequence: Synthetic oligonucleotide
  Antisense strand to SEQ ID NO: 8502
ucuauggagacuaauguaa

SEQ ID NO: 8504 - RNA, 19 nt, Artificial Sequence
  Description of Artificial Sequence: Synthetic oligonucleotide
  Sense strand starting at position 2548 of SEQ ID NO: 58
cuucuagugccuugaaaca

SEQ ID NO: 8505 - RNA, 19 nt, Artificial Sequence
  Description of Artificial Sequence: Synthetic oligonucleotide
  Antisense strand to SEQ ID NO: 8504
uguuucaaggcacuagaag

SEQ ID NO: 8506 - RNA, 19 nt, Artificial Sequence
  Description of Artificial Sequence: Synthetic oligonucleotide
  Sense strand starting at position 2595 of SEQ ID NO: 58
accacaaaucaguggcauu

SEQ ID NO: 8507 - RNA, 19 nt, Artificial Sequence
  Description of Artificial Sequence: Synthetic oligonucleotide
  Antisense strand to SEQ ID NO: 8506
aaugccacugauuuguggu

SEQ ID NO: 8508 - RNA, 19 nt, Artificial Sequence
  Description of Artificial Sequence: Synthetic oligonucleotide
  Sense strand starting at position 2649 of SEQ ID NO: 58
cuccauuggucauuggaga

SEQ ID NO: 8509 - RNA, 19 nt, Artificial Sequence
  Description of Artificial Sequence: Synthetic oligonucleotide
  Antisense strand to SEQ ID NO: 8508
ucuccaaugaccaauggag

SEQ ID NO: 8510 - RNA, 19 nt, Artificial Sequence
  Description of Artificial Sequence: Synthetic oligonucleotide
  Sense strand starting at position 2654 of SEQ ID NO: 58
uuggucauuggagagcuua

SEQ ID NO: 8511 - RNA, 19 nt, Artificial Sequence
  Description of Artificial Sequence: Synthetic oligonucleotide
  Antisense strand to SEQ ID NO: 8510
uaagcucuccaaugaccaa

SEQ ID NO: 8512 - RNA, 19 nt, Artificial Sequence
  Description of Artificial Sequence: Synthetic oligonucleotide
  Sense strand starting at position 3037 of SEQ ID NO: 58
gggugugucguucuucuau

SEQ ID NO: 8513 - RNA, 19 nt, Artificial Sequence
  Description of Artificial Sequence: Synthetic oligonucleotide
  Antisense strand to SEQ ID NO: 8512
auagaagaacgacacaccc

SEQ ID NO: 8514 - RNA, 19 nt, Artificial Sequence
  Description of Artificial Sequence: Synthetic oligonucleotide
  Sense strand starting at position 3461 of SEQ ID NO: 58
gcacuuaauguaggcauuu

SEQ ID NO: 8515 - RNA, 19 nt, Artificial Sequence
  Description of Artificial Sequence: Synthetic oligonucleotide
  Antisense strand to SEQ ID NO: 8514
aaaugccuacauuaagugc

SEQ ID NO: 8516 - RNA, 19 nt, Artificial Sequence
  Description of Artificial Sequence: Synthetic oligonucleotide
  Sense strand starting at position 3580 of SEQ ID NO: 58
cucaguuacuuccuggaau

SEQ ID NO: 8517 - RNA, 19 nt, Artificial Sequence
  Description of Artificial Sequence: Synthetic oligonucleotide
  Antisense strand to SEQ ID NO: 8516
auuccaggaaguaacugag

SEQ ID NO: 8518 - RNA, 19 nt, Artificial Sequence
  Description of Artificial Sequence: Synthetic oligonucleotide
  Sense strand starting at position 3583 of SEQ ID NO: 58
aguuacuuccuggaaucua

SEQ ID NO: 8519 - RNA, 19 nt, Artificial Sequence
  Description of Artificial Sequence: Synthetic oligonucleotide
  Antisense strand to SEQ ID NO: 8518
uagauuccaggaaguaacu

SEQ ID NO: 8520 - RNA, 19 nt, Artificial Sequence
  Description of Artificial Sequence: Synthetic oligonucleotide
  Sense strand starting at position 3591 of SEQ ID NO: 58
ccuggaaucuaauugccau

SEQ ID NO: 8521 - RNA, 19 nt, Artificial Sequence
  Description of Artificial Sequence: Synthetic oligonucleotide
  Antisense strand to SEQ ID NO: 8520
auggcaauuagauuccagg

SEQ ID NO: 8522 - RNA, 19 nt, Artificial Sequence
  Description of Artificial Sequence: Synthetic oligonucleotide
  Sense strand starting at position 3594 of SEQ ID NO: 58
ggaaucuaauugccauguu

SEQ ID NO: 8523 - RNA, 19 nt, Artificial Sequence
  Description of Artificial Sequence: Synthetic oligonucleotide
  Antisense strand to SEQ ID NO: 8522
aacauggcaauuagauucc

SEQ ID NO: 8524 - RNA, 19 nt, Artificial Sequence
  Description of Artificial Sequence: Synthetic oligonucleotide
  Sense strand starting at position 3597 of SEQ ID NO: 58
aucuaauugccauguuuag

SEQ ID NO: 8525 - RNA, 19 nt, Artificial Sequence
  Description of Artificial Sequence: Synthetic oligonucleotide
  Antisense strand to SEQ ID NO: 8524
cuaaacauggcaauuagau

SEQ ID NO: 8526 - RNA, 19 nt, Artificial Sequence
  Description of Artificial Sequence: Synthetic oligonucleotide
  Sense strand starting at position 484 of SEQ ID NO: 59
ggaugauguuucuggaggu

SEQ ID NO: 8527 - RNA, 19 nt, Artificial Sequence
  Description of Artificial Sequence: Synthetic oligonucleotide
  Antisense strand to SEQ ID NO: 8526
accuccagaaacaucaucc

SEQ ID NO: 8528 - RNA, 19 nt, Artificial Sequence
  Description of Artificial Sequence: Synthetic oligonucleotide
  Sense strand starting at position 537 of SEQ ID NO: 59
ccaccugagucugucauua

SEQ ID NO: 8529 - RNA, 19 nt, Artificial Sequence
  Description of Artificial Sequence: Synthetic oligonucleotide
  Antisense strand to SEQ ID NO: 8528
uaaugacagacucaggugg

SEQ ID NO: 8530 - RNA, 19 nt, Artificial Sequence
  Description of Artificial Sequence: Synthetic oligonucleotide
  Sense strand starting at position 539 of SEQ ID NO: 59
accugagucugucauuauc

SEQ ID NO: 8531 - RNA, 19 nt, Artificial Sequence
  Description of Artificial Sequence: Synthetic oligonucleotide
  Antisense strand to SEQ ID NO: 8530
gauaaugacagacucaggu

SEQ ID NO: 8532 - RNA, 19 nt, Artificial Sequence
  Description of Artificial Sequence: Synthetic oligonucleotide
  Sense strand starting at position 541 of SEQ ID NO: 59
cugagucugucauuaucca

SEQ ID NO: 8533 - RNA, 19 nt, Artificial Sequence
  Description of Artificial Sequence: Synthetic oligonucleotide
  Antisense strand to SEQ ID NO: 8532
uggauaaugacagacucag

SEQ ID NO: 8534 - RNA, 19 nt, Artificial Sequence
  Description of Artificial Sequence: Synthetic oligonucleotide
  Sense strand starting at position 577 of SEQ ID NO: 59
cagguaguggcagauagaa

SEQ ID NO: 8535 - RNA, 19 nt, Artificial Sequence
  Description of Artificial Sequence: Synthetic oligonucleotide
  Antisense strand to SEQ ID NO: 8534
uucuaucugccacuaccug

SEQ ID NO: 8536 - RNA, 19 nt, Artificial Sequence
  Description of Artificial Sequence: Synthetic oligonucleotide
  Sense strand starting at position 927 of SEQ ID NO: 59
agguuucuuccaggcagga

SEQ ID NO: 8537 - RNA, 19 nt, Artificial Sequence
  Description of Artificial Sequence: Synthetic oligonucleotide
  Antisense strand to SEQ ID NO: 8536
uccugccuggaagaaaccu

SEQ ID NO: 8538 - RNA, 19 nt, Artificial Sequence
  Description of Artificial Sequence: Synthetic oligonucleotide
  Sense strand starting at position 1015 of SEQ ID NO: 59
ucuaguugacuuugagcaa

SEQ ID NO: 8539 - RNA, 19 nt, Artificial Sequence
  Description of Artificial Sequence: Synthetic oligonucleotide
  Antisense strand to SEQ ID NO: 8538
uugcucaaagucaacuaga

SEQ ID NO: 8540 - RNA, 19 nt, Artificial Sequence
  Description of Artificial Sequence: Synthetic oligonucleotide
  Sense strand starting at position 1019 of SEQ ID NO: 59
guugacuuugagcaaguga

SEQ ID NO: 8541 - RNA, 19 nt, Artificial Sequence
  Description of Artificial Sequence: Synthetic oligonucleotide
  Antisense strand to SEQ ID NO: 8540
ucacuugcucaaagucaac

SEQ ID NO: 8542 - RNA, 19 nt, Artificial Sequence
  Description of Artificial Sequence: Synthetic oligonucleotide
  Sense strand starting at position 1046 of SEQ ID NO: 59
gccuccuagaauuagguga

SEQ ID NO: 8543 - RNA, 19 nt, Artificial Sequence
  Description of Artificial Sequence: Synthetic oligonucleotide
  Antisense strand to SEQ ID NO: 8542
ucaccuaauucuaggaggc

SEQ ID NO: 8544 - RNA, 19 nt, Artificial Sequence
  Description of Artificial Sequence: Synthetic oligonucleotide
  Sense strand starting at position 1072 of SEQ ID NO: 59
ugggaucagucccuacuca

SEQ ID NO: 8545 - RNA, 19 nt, Artificial Sequence
  Description of Artificial Sequence: Synthetic oligonucleotide
  Antisense strand to SEQ ID NO: 8544
ugaguagggacugauccca

SEQ ID NO: 8546 - RNA, 19 nt, Artificial Sequence
  Description of Artificial Sequence: Synthetic oligonucleotide
  Sense strand starting at position 1073 of SEQ ID NO: 59
gggaucagucccuacucau

SEQ ID NO: 8547 - RNA, 19 nt, Artificial Sequence
  Description of Artificial Sequence: Synthetic oligonucleotide
  Antisense strand to SEQ ID NO: 8546
augaguagggacugauccc

SEQ ID NO: 8548 - RNA, 19 nt, Artificial Sequence
  Description of Artificial Sequence: Synthetic oligonucleotide
  Sense strand starting at position 1090 of SEQ ID NO: 59
augggaugguugggaagau

SEQ ID NO: 8549 - RNA, 19 nt, Artificial Sequence
  Description of Artificial Sequence: Synthetic oligonucleotide
  Antisense strand to SEQ ID NO: 8548
aucuucccaaccaucccau

SEQ ID NO: 8550 - RNA, 19 nt, Artificial Sequence
  Description of Artificial Sequence: Synthetic oligonucleotide
  Sense strand starting at position 1091 of SEQ ID NO: 59
ugggaugguugggaagauu

SEQ ID NO: 8551 - RNA, 19 nt, Artificial Sequence
  Description of Artificial Sequence: Synthetic oligonucleotide
  Antisense strand to SEQ ID NO: 8550
aaucuucccaaccauccca

SEQ ID NO: 8552 - RNA, 19 nt, Artificial Sequence
  Description of Artificial Sequence: Synthetic oligonucleotide
  Sense strand starting at position 1207 of SEQ ID NO: 59
gggucaucccugggagguu

SEQ ID NO: 8553 - RNA, 19 nt, Artificial Sequence
  Description of Artificial Sequence: Synthetic oligonucleotide
  Antisense strand to SEQ ID NO: 8552
aaccucccagggaugaccc

SEQ ID NO: 8554 - RNA, 19 nt, Artificial Sequence
  Description of Artificial Sequence: Synthetic oligonucleotide
  Sense strand starting at position 1320 of SEQ ID NO: 59
aaacuaggcuugggaaacu

SEQ ID NO: 8555 - RNA, 19 nt, Artificial Sequence
  Description of Artificial Sequence: Synthetic oligonucleotide
  Antisense strand to SEQ ID NO: 8554
aguuucccaagccuaguuu

SEQ ID NO: 8556 - RNA, 19 nt, Artificial Sequence
  Description of Artificial Sequence: Synthetic oligonucleotide
  Sense strand starting at position 1378 of SEQ ID NO: 59
ggguaauuauugcugucac

SEQ ID NO: 8557 - RNA, 19 nt, Artificial Sequence
  Description of Artificial Sequence: Synthetic oligonucleotide
  Antisense strand to SEQ ID NO: 8556
gugacagcaauaauuaccc

SEQ ID NO: 8558 - RNA, 19 nt, Artificial Sequence
  Description of Artificial Sequence: Synthetic oligonucleotide
  Sense strand starting at position 1390 of SEQ ID NO: 59
cugucacugagacguaauu

SEQ ID NO: 8559 - RNA, 19 nt, Artificial Sequence
  Description of Artificial Sequence: Synthetic oligonucleotide
  Antisense strand to SEQ ID NO: 8558
aauuacgucucagugacag

SEQ ID NO: 8560 - RNA, 19 nt, Artificial Sequence
  Description of Artificial Sequence: Synthetic oligonucleotide
  Sense strand starting at position 1392 of SEQ ID NO: 59
gucacugagacguaauuaa

SEQ ID NO: 8561 - RNA, 19 nt, Artificial Sequence
  Description of Artificial Sequence: Synthetic oligonucleotide
  Antisense strand to SEQ ID NO: 8560
uuaauuacgucucagugac

SEQ ID NO: 8562 - RNA, 19 nt, Artificial Sequence
  Description of Artificial Sequence: Synthetic oligonucleotide
  Sense strand starting at position 1399 of SEQ ID NO: 59
agacguaauuaauaagcau

SEQ ID NO: 8563 - RNA, 19 nt, Artificial Sequence
  Description of Artificial Sequence: Synthetic oligonucleotide
  Antisense strand to SEQ ID NO: 8562
augcuuauuaauuacgucu

SEQ ID NO: 8564 - RNA, 19 nt, Artificial Sequence
  Description of Artificial Sequence: Synthetic oligonucleotide
  Sense strand starting at position 1455 of SEQ ID NO: 59
aguauauuccuguagccac

SEQ ID NO: 8565 - RNA, 19 nt, Artificial Sequence
  Description of Artificial Sequence: Synthetic oligonucleotide
  Antisense strand to SEQ ID NO: 8564
guggcuacaggaauauacu

SEQ ID NO: 8566 - RNA, 19 nt, Artificial Sequence
  Description of Artificial Sequence: Synthetic oligonucleotide
  Sense strand starting at position 1620 of SEQ ID NO: 59
ugguguaugcugugaagaa

SEQ ID NO: 8567 - RNA, 19 nt, Artificial Sequence
  Description of Artificial Sequence: Synthetic oligonucleotide
  Antisense strand to SEQ ID NO: 8566
uucuucacagcauacacca

SEQ ID NO: 8568 - RNA, 19 nt, Artificial Sequence
  Description of Artificial Sequence: Synthetic oligonucleotide
  Sense strand starting at position 1841 of SEQ ID NO: 59
uaggcaaagucucaagaca

SEQ ID NO: 8569 - RNA, 19 nt, Artificial Sequence
  Description of Artificial Sequence: Synthetic oligonucleotide
  Antisense strand to SEQ ID NO: 8568
ugucuugagacuuugccua

SEQ ID NO: 8570 - RNA, 19 nt, Artificial Sequence
  Description of Artificial Sequence: Synthetic oligonucleotide
  Sense strand starting at position 2572 of SEQ ID NO: 59
cgagauuccuuguugcuuc

SEQ ID NO: 8571 - RNA, 19 nt, Artificial Sequence
  Description of Artificial Sequence: Synthetic oligonucleotide
  Antisense strand to SEQ ID NO: 8570
gaagcaacaaggaaucucg

SEQ ID NO: 8572 - RNA, 19 nt, Artificial Sequence
  Description of Artificial Sequence: Synthetic oligonucleotide
  Sense strand starting at position 2735 of SEQ ID NO: 59
ccugguaucuucccuguca

SEQ ID NO: 8573 - RNA, 19 nt, Artificial Sequence
  Description of Artificial Sequence: Synthetic oligonucleotide
  Antisense strand to SEQ ID NO: 8572
ugacagggaagauaccagg

SEQ ID NO: 8574 - RNA, 19 nt, Artificial Sequence
  Description of Artificial Sequence: Synthetic oligonucleotide
  Sense strand starting at position 2737 of SEQ ID NO: 59
ugguaucuucccugucaca

SEQ ID NO: 8575 - RNA, 19 nt, Artificial Sequence
  Description of Artificial Sequence: Synthetic oligonucleotide
  Antisense strand to SEQ ID NO: 8574
ugugacagggaagauacca

SEQ ID NO: 8576 - RNA, 19 nt, Artificial Sequence
  Description of Artificial Sequence: Synthetic oligonucleotide
  Sense strand starting at position 2875 of SEQ ID NO: 59
cuucccauucuacguaaga

SEQ ID NO: 8577 - RNA, 19 nt, Artificial Sequence
  Description of Artificial Sequence: Synthetic oligonucleotide
  Antisense strand to SEQ ID NO: 8576
ucuuacguagaaugggaag

SEQ ID NO: 8578 - RNA, 19 nt, Artificial Sequence
  Description of Artificial Sequence: Synthetic oligonucleotide
  Sense strand starting at position 2880 of SEQ ID NO: 59
cauucuacguaagaggaaa

SEQ ID NO: 8579 - RNA, 19 nt, Artificial Sequence
  Description of Artificial Sequence: Synthetic oligonucleotide
  Antisense strand to SEQ ID NO: 8578
uuuccucuuacguagaaug

SEQ ID NO: 8580 - RNA, 19 nt, Artificial Sequence
  Description of Artificial Sequence: Synthetic oligonucleotide
  Sense strand starting at position 2919 of SEQ ID NO: 59
cgacaugacugagaucaca

SEQ ID NO: 8581 - RNA, 19 nt, Artificial Sequence
  Description of Artificial Sequence: Synthetic oligonucleotide
  Antisense strand to SEQ ID NO: 8580
ugugaucucagucaugucg

SEQ ID NO: 8582 - RNA, 19 nt, Artificial Sequence
  Description of Artificial Sequence: Synthetic oligonucleotide
  Sense strand starting at position 3198 of SEQ ID NO: 59
gaggauguaccugggauau

SEQ ID NO: 8583 - RNA, 19 nt, Artificial Sequence
  Description of Artificial Sequence: Synthetic oligonucleotide
  Antisense strand to SEQ ID NO: 8582
auaucccagguacauccuc

SEQ ID NO: 8584 - RNA, 19 nt, Artificial Sequence
  Description of Artificial Sequence: Synthetic oligonucleotide
  Sense strand starting at position 3200 of SEQ ID NO: 59
ggauguaccugggauauaa

SEQ ID NO: 8585 - RNA, 19 nt, Artificial Sequence
  Description of Artificial Sequence: Synthetic oligonucleotide
  Antisense strand to SEQ ID NO: 8584
uuauaucccagguacaucc

SEQ ID NO: 8586 - RNA, 19 nt, Artificial Sequence
  Description of Artificial Sequence: Synthetic oligonucleotide
  Sense strand starting at position 3375 of SEQ ID NO: 59
ugggcuguuuccuuggcaa

SEQ ID NO: 8587 - RNA, 19 nt, Artificial Sequence
  Description of Artificial Sequence: Synthetic oligonucleotide
  Antisense strand to SEQ ID NO: 8586
uugccaaggaaacagccca

SEQ ID NO: 8588 - RNA, 19 nt, Artificial Sequence
  Description of Artificial Sequence: Synthetic oligonucleotide
  Sense strand starting at position 3379 of SEQ ID NO: 59
cuguuuccuuggcaacaga

SEQ ID NO: 8589 - RNA, 19 nt, Artificial Sequence
  Description of Artificial Sequence: Synthetic oligonucleotide
  Antisense strand to SEQ ID NO: 8588
ucuguugccaaggaaacag

SEQ ID NO: 8590 - RNA, 19 nt, Artificial Sequence
  Description of Artificial Sequence: Synthetic oligonucleotide
  Sense strand starting at position 3419 of SEQ ID NO: 59
cagggauccuugcugccaa

SEQ ID NO: 8591 - RNA, 19 nt, Artificial Sequence
  Description of Artificial Sequence: Synthetic oligonucleotide
  Antisense strand to SEQ ID NO: 8590
uuggcagcaaggaucccug

SEQ ID NO: 8592 - RNA, 19 nt, Artificial Sequence
  Description of Artificial Sequence: Synthetic oligonucleotide
  Sense strand starting at position 3587 of SEQ ID NO: 59
gcugcaguaccguuuguau

SEQ ID NO: 8593 - RNA, 19 nt, Artificial Sequence
  Description of Artificial Sequence: Synthetic oligonucleotide
  Antisense strand to SEQ ID NO: 8592
auacaaacgguacugcagc

SEQ ID NO: 8594 - RNA, 19 nt, Artificial Sequence
  Description of Artificial Sequence: Synthetic oligonucleotide
  Sense strand starting at position 3589 of SEQ ID NO: 59
ugcaguaccguuuguauuu

SEQ ID NO: 8595 - RNA, 19 nt, Artificial Sequence
  Description of Artificial Sequence: Synthetic oligonucleotide
  Antisense strand to SEQ ID NO: 8594
aaauacaaacgguacugca

SEQ ID NO: 8596 - RNA, 19 nt, Artificial Sequence
  Description of Artificial Sequence: Synthetic oligonucleotide
  Sense strand starting at position 3656 of SEQ ID NO: 59
cugagagugugguacagau

SEQ ID NO: 8597 - RNA, 19 nt, Artificial Sequence
  Description of Artificial Sequence: Synthetic oligonucleotide
  Antisense strand to SEQ ID NO: 8596
aucuguaccacacucucag

SEQ ID NO: 8598 - RNA, 19 nt, Artificial Sequence
  Description of Artificial Sequence: Synthetic oligonucleotide
  Sense strand starting at position 3660 of SEQ ID NO: 59
gagugugguacagauggua

SEQ ID NO: 8599 - RNA, 19 nt, Artificial Sequence
  Description of Artificial Sequence: Synthetic oligonucleotide
  Antisense strand to SEQ ID NO: 8598
uaccaucuguaccacacuc

SEQ ID NO: 8600 - RNA, 19 nt, Artificial Sequence
  Description of Artificial Sequence: Synthetic oligonucleotide
  Sense strand starting at position 3679 of SEQ ID NO: 59
caagauaguccaugcagag

SEQ ID NO: 8601 - RNA, 19 nt, Artificial Sequence
  Description of Artificial Sequence: Synthetic oligonucleotide
  Antisense strand to SEQ ID NO: 8600
cucugcauggacuaucuug

SEQ ID NO: 8602 - RNA, 19 nt, Artificial Sequence
  Description of Artificial Sequence: Synthetic oligonucleotide
  Sense strand starting at position 3719 of SEQ ID NO: 59
gcaauuaaacacuggcaau

SEQ ID NO: 8603 - RNA, 19 nt, Artificial Sequence
  Description of Artificial Sequence: Synthetic oligonucleotide
  Antisense strand to SEQ ID NO: 8602
auugccaguguuuaauugc

SEQ ID NO: 8604 - RNA, 19 nt, Artificial Sequence
  Description of Artificial Sequence: Synthetic oligonucleotide
  Sense strand starting at position 3733 of SEQ ID NO: 59
gcaauuacucaugguauuc

SEQ ID NO: 8605 - RNA, 19 nt, Artificial Sequence
  Description of Artificial Sequence: Synthetic oligonucleotide
  Antisense strand to SEQ ID NO: 8604
gaauaccaugaguaauugc

SEQ ID NO: 8606 - RNA, 19 nt, Artificial Sequence
  Description of Artificial Sequence: Synthetic oligonucleotide
  Sense strand starting at position 147 of SEQ ID NO: 60
aguugaauauguuuaucag

SEQ ID NO: 8607 - RNA, 19 nt, Artificial Sequence
  Description of Artificial Sequence: Synthetic oligonucleotide
  Antisense strand to SEQ ID NO: 8606
cugauaaacauauucaacu

SEQ ID NO: 8608 - RNA, 19 nt, Artificial Sequence
  Description of Artificial Sequence: Synthetic oligonucleotide
  Sense strand starting at position 150 of SEQ ID NO: 60
ugaauauguuuaucaggau

SEQ ID NO: 8609 - RNA, 19 nt, Artificial Sequence
  Description of Artificial Sequence: Synthetic oligonucleotide
  Antisense strand to SEQ ID NO: 8608
auccugauaaacauauuca

SEQ ID NO: 8610 - RNA, 19 nt, Artificial Sequence
  Description of Artificial Sequence: Synthetic oligonucleotide
  Sense strand starting at position 154 of SEQ ID NO: 60
uauguuuaucaggauguac

SEQ ID NO: 8611 - RNA, 19 nt, Artificial Sequence
  Description of Artificial Sequence: Synthetic oligonucleotide
  Antisense strand to SEQ ID NO: 8610
guacauccugauaaacaua

SEQ ID NO: 8612 - RNA, 19 nt, Artificial Sequence
  Description of Artificial Sequence: Synthetic oligonucleotide
  Sense strand starting at position 215 of SEQ ID NO: 60
uuauuaaaucaguauggca

SEQ ID NO: 8613 - RNA, 19 nt, Artificial Sequence
  Description of Artificial Sequence: Synthetic oligonucleotide
  Antisense strand to SEQ ID NO: 8612
ugccauacugauuuaauaa

SEQ ID NO: 8614 - RNA, 19 nt, Artificial Sequence
  Description of Artificial Sequence: Synthetic oligonucleotide
  Sense strand starting at position 297 of SEQ ID NO: 60
cuugguauauaaucaaagu

SEQ ID NO: 8615 - RNA, 19 nt, Artificial Sequence
  Description of Artificial Sequence: Synthetic oligonucleotide
  Antisense strand to SEQ ID NO: 8614
acuuugauuauauaccaag

SEQ ID NO: 8616 - RNA, 19 nt, Artificial Sequence
  Description of Artificial Sequence: Synthetic oligonucleotide
  Sense strand starting at position 425 of SEQ ID NO: 60
auauaucugguuggauuaa

SEQ ID NO: 8617 - RNA, 19 nt, Artificial Sequence
  Description of Artificial Sequence: Synthetic oligonucleotide
  Antisense strand to SEQ ID NO: 8616
uuaauccaaccagauauau

SEQ ID NO: 8618 - RNA, 19 nt, Artificial Sequence
  Description of Artificial Sequence: Synthetic oligonucleotide
  Sense strand starting at position 662 of SEQ ID NO: 60
ggcagauaccugcaauaca

SEQ ID NO: 8619 - RNA, 19 nt, Artificial Sequence
  Description of Artificial Sequence: Synthetic oligonucleotide
  Antisense strand to SEQ ID NO: 8618
uguauugcagguaucugcc

SEQ ID NO: 8620 - RNA, 19 nt, Artificial Sequence
  Description of Artificial Sequence: Synthetic oligonucleotide
  Sense strand starting at position 805 of SEQ ID NO: 60
cauggagaaccauguauca

SEQ ID NO: 8621 - RNA, 19 nt, Artificial Sequence
  Description of Artificial Sequence: Synthetic oligonucleotide
  Antisense strand to SEQ ID NO: 8620
ugauacaugguucuccaug

SEQ ID NO: 8622 - RNA, 19 nt, Artificial Sequence
  Description of Artificial Sequence: Synthetic oligonucleotide
  Sense strand starting at position 986 of SEQ ID NO: 60
agauguuuaugagcugaaa

SEQ ID NO: 8623 - RNA, 19 nt, Artificial Sequence
  Description of Artificial Sequence: Synthetic oligonucleotide
  Antisense strand to SEQ ID NO: 8622
uuucagcucauaaacaucu

SEQ ID NO: 8624 - RNA, 19 nt, Artificial Sequence
  Description of Artificial Sequence: Synthetic oligonucleotide
  Sense strand starting at position 1082 of SEQ ID NO: 60
uguuaauggccuuauaaug

SEQ ID NO: 8625 - RNA, 19 nt, Artificial Sequence
  Description of Artificial Sequence: Synthetic oligonucleotide
  Antisense strand to SEQ ID NO: 8624
cauuauaaggccauuaaca

SEQ ID NO: 8626 - RNA, 19 nt, Artificial Sequence
  Description of Artificial Sequence: Synthetic oligonucleotide
  Sense strand starting at position 1147 of SEQ ID NO: 60
uguagaguucaugagugaa

SEQ ID NO: 8627 - RNA, 19 nt, Artificial Sequence
  Description of Artificial Sequence: Synthetic oligonucleotide
  Antisense strand to SEQ ID NO: 8626
uucacucaugaacucuaca

SEQ ID NO: 8628 - RNA, 19 nt, Artificial Sequence
  Description of Artificial Sequence: Synthetic oligonucleotide
  Sense strand starting at position 1272 of SEQ ID NO: 60
ggacacuaccuuuguugaa

SEQ ID NO: 8629 - RNA, 19 nt, Artificial Sequence
  Description of Artificial Sequence: Synthetic oligonucleotide
  Antisense strand to SEQ ID NO: 8628
uucaacaaagguagugucc

SEQ ID NO: 8630 - RNA, 19 nt, Artificial Sequence
  Description of Artificial Sequence: Synthetic oligonucleotide
  Sense strand starting at position 1300 of SEQ ID NO: 60
ugacaaucagcuuggauga

SEQ ID NO: 8631 - RNA, 19 nt, Artificial Sequence
  Description of Artificial Sequence: Synthetic oligonucleotide
  Antisense strand to SEQ ID NO: 8630
ucauccaagcugauuguca

SEQ ID NO: 8632 - RNA, 19 nt, Artificial Sequence
  Description of Artificial Sequence: Synthetic oligonucleotide
  Sense strand starting at position 1301 of SEQ ID NO: 60
gacaaucagcuuggaugau

SEQ ID NO: 8633 - RNA, 19 nt, Artificial Sequence
  Description of Artificial Sequence: Synthetic oligonucleotide
  Antisense strand to SEQ ID NO: 8632
aucauccaagcugauuguc

SEQ ID NO: 8634 - RNA, 19 nt, Artificial Sequence
  Description of Artificial Sequence: Synthetic oligonucleotide
  Sense strand starting at position 1310 of SEQ ID NO: 60
cuuggaugauuccuacuuu

SEQ ID NO: 8635 - RNA, 19 nt, Artificial Sequence
  Description of Artificial Sequence: Synthetic oligonucleotide
  Antisense strand to SEQ ID NO: 8634
aaaguaggaaucauccaag

SEQ ID NO: 8636 - RNA, 19 nt, Artificial Sequence
  Description of Artificial Sequence: Synthetic oligonucleotide
  Sense strand starting at position 1526 of SEQ ID NO: 60
uuacaaauaggcugauaga

SEQ ID NO: 8637 - RNA, 19 nt, Artificial Sequence
  Description of Artificial Sequence: Synthetic oligonucleotide
  Antisense strand to SEQ ID NO: 8636
ucuaucagccuauuuguaa

SEQ ID NO: 8638 - RNA, 19 nt, Artificial Sequence
  Description of Artificial Sequence: Synthetic oligonucleotide
  Sense strand starting at position 1723 of SEQ ID NO: 60
cagagaaacgguuaagucu

SEQ ID NO: 8639 - RNA, 19 nt, Artificial Sequence
  Description of Artificial Sequence: Synthetic oligonucleotide
  Antisense strand to SEQ ID NO: 8638
agacuuaaccguuucucug

SEQ ID NO: 8640 - RNA, 19 nt, Artificial Sequence
  Description of Artificial Sequence: Synthetic oligonucleotide
  Sense strand starting at position 1850 of SEQ ID NO: 60
aggagagcaugcccaaaua

SEQ ID NO: 8641 - RNA, 19 nt, Artificial Sequence
  Description of Artificial Sequence: Synthetic oligonucleotide
  Antisense strand to SEQ ID NO: 8640
uauuugggcaugcucuccu

SEQ ID NO: 8642 - RNA, 19 nt, Artificial Sequence
  Description of Artificial Sequence: Synthetic oligonucleotide
  Sense strand starting at position 1862 of SEQ ID NO: 60
ccaaauaaccuaggugacu

SEQ ID NO: 8643 - RNA, 19 nt, Artificial Sequence
  Description of Artificial Sequence: Synthetic oligonucleotide
  Antisense strand to SEQ ID NO: 8642
agucaccuagguuauuugg

SEQ ID NO: 8644 - RNA, 19 nt, Artificial Sequence
  Description of Artificial Sequence: Synthetic oligonucleotide
  Sense strand starting at position 2058 of SEQ ID NO: 60
ugagucaugccacauagga

SEQ ID NO: 8645 - RNA, 19 nt, Artificial Sequence
  Description of Artificial Sequence: Synthetic oligonucleotide
  Antisense strand to SEQ ID NO: 8644
uccuauguggcaugacuca

SEQ ID NO: 8646 - RNA, 19 nt, Artificial Sequence
  Description of Artificial Sequence: Synthetic oligonucleotide
  Sense strand starting at position 2127 of SEQ ID NO: 60
gcagaugacuucuugauac

SEQ ID NO: 8647 - RNA, 19 nt, Artificial Sequence
  Description of Artificial Sequence: Synthetic oligonucleotide
  Antisense strand to SEQ ID NO: 8646
guaucaagaagucaucugc

SEQ ID NO: 8648 - RNA, 19 nt, Artificial Sequence
  Description of Artificial Sequence: Synthetic oligonucleotide
  Sense strand starting at position 2139 of SEQ ID NO: 60
uugauacacuuugugacua

SEQ ID NO: 8649 - RNA, 19 nt, Artificial Sequence
  Description of Artificial Sequence: Synthetic oligonucleotide
  Antisense strand to SEQ ID NO: 8648
uagucacaaaguguaucaa

SEQ ID NO: 8650 - RNA, 19 nt, Artificial Sequence
  Description of Artificial Sequence: Synthetic oligonucleotide
  Sense strand starting at position 2344 of SEQ ID NO: 60
agugcaggcacucaaagau

SEQ ID NO: 8651 - RNA, 19 nt, Artificial Sequence
  Description of Artificial Sequence: Synthetic oligonucleotide
  Antisense strand to SEQ ID NO: 8650
aucuuugagugccugcacu

SEQ ID NO: 8652 - RNA, 19 nt, Artificial Sequence
  Description of Artificial Sequence: Synthetic oligonucleotide
  Sense strand starting at position 2388 of SEQ ID NO: 60
guacuauaugaauaagcac

SEQ ID NO: 8653 - RNA, 19 nt, Artificial Sequence
  Description of Artificial Sequence: Synthetic oligonucleotide
  Antisense strand to SEQ ID NO: 8652
gugcuuauucauauaguac

SEQ ID NO: 8654 - RNA, 19 nt, Artificial Sequence
  Description of Artificial Sequence: Synthetic oligonucleotide
  Sense strand starting at position 2417 of SEQ ID NO: 60
uggaguacucuguaaucaa

SEQ ID NO: 8655 - RNA, 19 nt, Artificial Sequence
  Description of Artificial Sequence: Synthetic oligonucleotide
  Antisense strand to SEQ ID NO: 8654
uugauuacagaguacucca

SEQ ID NO: 8656 - RNA, 19 nt, Artificial Sequence
  Description of Artificial Sequence: Synthetic oligonucleotide
  Sense strand starting at position 2496 of SEQ ID NO: 60
uugacuaaagaugguuaau

SEQ ID NO: 8657 - RNA, 19 nt, Artificial Sequence
  Description of Artificial Sequence: Synthetic oligonucleotide
  Antisense strand to SEQ ID NO: 8656
auuaaccaucuuuagucaa

SEQ ID NO: 8658 - RNA, 19 nt, Artificial Sequence
  Description of Artificial Sequence: Synthetic oligonucleotide
  Sense strand starting at position 2502 of SEQ ID NO: 60
aaagaugguuaauccggaa

SEQ ID NO: 8659 - RNA, 19 nt, Artificial Sequence
  Description of Artificial Sequence: Synthetic oligonucleotide
  Antisense strand to SEQ ID NO: 8658
uuccggauuaaccaucuuu

SEQ ID NO: 8660 - RNA, 19 nt, Artificial Sequence
  Description of Artificial Sequence: Synthetic oligonucleotide
  Sense strand starting at position 2506 of SEQ ID NO: 60
augguuaauccggaacugu

SEQ ID NO: 8661 - RNA, 19 nt, Artificial Sequence
  Description of Artificial Sequence: Synthetic oligonucleotide
  Antisense strand to SEQ ID NO: 8660
acaguuccggauuaaccau

SEQ ID NO: 8662 - RNA, 19 nt, Artificial Sequence
  Description of Artificial Sequence: Synthetic oligonucleotide
  Sense strand starting at position 2538 of SEQ ID NO: 60
gcaugaugggagugggaau

SEQ ID NO: 8663 - RNA, 19 nt, Artificial Sequence
  Description of Artificial Sequence: Synthetic oligonucleotide
  Antisense strand to SEQ ID NO: 8662
auucccacucccaucaugc

SEQ ID NO: 8664 - RNA, 19 nt, Artificial Sequence
  Description of Artificial Sequence: Synthetic oligonucleotide
  Sense strand starting at position 3098 of SEQ ID NO: 60
acaugaugauaaguguuau

SEQ ID NO: 8665 - RNA, 19 nt, Artificial Sequence
  Description of Artificial Sequence: Synthetic oligonucleotide
  Antisense strand to SEQ ID NO: 8664
auaacacuuaucaucaugu

SEQ ID NO: 8666 - RNA, 19 nt, Artificial Sequence
  Description of Artificial Sequence: Synthetic oligonucleotide
  Sense strand starting at position 3331 of SEQ ID NO: 60
guuacugaccaucaucuga

SEQ ID NO: 8667 - RNA, 19 nt, Artificial Sequence
  Description of Artificial Sequence: Synthetic oligonucleotide
  Antisense strand to SEQ ID NO: 8666
ucagaugauggucaguaac

SEQ ID NO: 8668 - RNA, 19 nt, Artificial Sequence
  Description of Artificial Sequence: Synthetic oligonucleotide
  Sense strand starting at position 3347 of SEQ ID NO: 60
ugacauacgguauauguca

SEQ ID NO: 8669 - RNA, 19 nt, Artificial Sequence
  Description of Artificial Sequence: Synthetic oligonucleotide
  Antisense strand to SEQ ID NO: 8668
ugacauauaccguauguca

SEQ ID NO: 8670 - RNA, 19 nt, Artificial Sequence
  Description of Artificial Sequence: Synthetic oligonucleotide
  Sense strand starting at position 3362 of SEQ ID NO: 60
gucauuuguuuguuuauuc

SEQ ID NO: 8671 - RNA, 19 nt, Artificial Sequence
  Description of Artificial Sequence: Synthetic oligonucleotide
  Antisense strand to SEQ ID NO: 8670
gaauaaacaaacaaaugac

SEQ ID NO: 8672 - RNA, 19 nt, Artificial Sequence
  Description of Artificial Sequence: Synthetic oligonucleotide
  Sense strand starting at position 3577 of SEQ ID NO: 60
aaagaugugaaguguauga

SEQ ID NO: 8673 - RNA, 19 nt, Artificial Sequence
  Description of Artificial Sequence: Synthetic oligonucleotide
  Antisense strand to SEQ ID NO: 8672
ucauacacuucacaucuuu

SEQ ID NO: 8674 - RNA, 19 nt, Artificial Sequence
  Description of Artificial Sequence: Synthetic oligonucleotide
  Sense strand starting at position 3579 of SEQ ID NO: 60
agaugugaaguguaugaau

SEQ ID NO: 8675 - RNA, 19 nt, Artificial Sequence
  Description of Artificial Sequence: Synthetic oligonucleotide
  Antisense strand to SEQ ID NO: 8674
auucauacacuucacaucu

SEQ ID NO: 8676 - RNA, 19 nt, Artificial Sequence
  Description of Artificial Sequence: Synthetic oligonucleotide
  Sense strand starting at position 3662 of SEQ ID NO: 60
cccagagaggcguacugau

SEQ ID NO: 8677 - RNA, 19 nt, Artificial Sequence
  Description of Artificial Sequence: Synthetic oligonucleotide
  Antisense strand to SEQ ID NO: 8676
aucaguacgccucucuggg

SEQ ID NO: 8678 - RNA, 19 nt, Artificial Sequence
  Description of Artificial Sequence: Synthetic oligonucleotide
  Sense strand starting at position 3703 of SEQ ID NO: 60
aggugaguuaagugauuaa

SEQ ID NO: 8679 - RNA, 19 nt, Artificial Sequence
  Description of Artificial Sequence: Synthetic oligonucleotide
  Antisense strand to SEQ ID NO: 8678
uuaaucacuuaacucaccu

SEQ ID NO: 8680 - RNA, 19 nt, Artificial Sequence
  Description of Artificial Sequence: Synthetic oligonucleotide
  Sense strand starting at position 3707 of SEQ ID NO: 60
gaguuaagugauuaagcug

SEQ ID NO: 8681 - RNA, 19 nt, Artificial Sequence
  Description of Artificial Sequence: Synthetic oligonucleotide
  Antisense strand to SEQ ID NO: 8680
cagcuuaaucacuuaacuc

SEQ ID NO: 8682 - RNA, 19 nt, Artificial Sequence
  Description of Artificial Sequence: Synthetic oligonucleotide
  Sense strand starting at position 3712 of SEQ ID NO: 60
aagugauuaagcugggaag

SEQ ID NO: 8683 - RNA, 19 nt, Artificial Sequence
  Description of Artificial Sequence: Synthetic oligonucleotide
  Antisense strand to SEQ ID NO: 8682
cuucccagcuuaaucacuu

SEQ ID NO: 8684 - RNA, 19 nt, Artificial Sequence
  Description of Artificial Sequence: Synthetic oligonucleotide
  Sense strand starting at position 3937 of SEQ ID NO: 60
cccugacuucuagaguacu

SEQ ID NO: 8685 - RNA, 19 nt, Artificial Sequence
  Description of Artificial Sequence: Synthetic oligonucleotide
  Antisense strand to SEQ ID NO: 8684
aguacucuagaagucaggg

SEQ ID NO: 8686 - RNA, 19 nt, Artificial Sequence
  Description of Artificial Sequence: Synthetic oligonucleotide
  Sense strand starting at position 3359 of SEQ ID NO: 61
ggcggaauccucugcagac

SEQ ID NO: 8687 - RNA, 19 nt, Artificial Sequence
  Description of Artificial Sequence: Synthetic oligonucleotide
  Antisense strand to SEQ ID NO: 8686
gucugcagaggauuccgcc

SEQ ID NO: 8688 - RNA, 19 nt, Artificial Sequence
  Description of Artificial Sequence: Synthetic oligonucleotide
  Sense strand starting at position 3247 of SEQ ID NO: 61
guuagucuguauuugcaaa

SEQ ID NO: 8689 - RNA, 19 nt, Artificial Sequence
  Description of Artificial Sequence: Synthetic oligonucleotide
  Antisense strand to SEQ ID NO: 8688
uuugcaaauacagacuaac

SEQ ID NO: 8690 - RNA, 19 nt, Artificial Sequence
  Description of Artificial Sequence: Synthetic oligonucleotide
  Sense strand starting at position 3146 of SEQ ID NO: 61
ggaggagucacuggaaagu

SEQ ID NO: 8691 - RNA, 19 nt, Artificial Sequence
  Description of Artificial Sequence: Synthetic oligonucleotide
  Antisense strand to SEQ ID NO: 8690
acuuuccagugacuccucc

SEQ ID NO: 8692 - RNA, 19 nt, Artificial Sequence
  Description of Artificial Sequence: Synthetic oligonucleotide
  Sense strand starting at position 3135 of SEQ ID NO: 61
gcccuugcuccggaggagu

SEQ ID NO: 8693 - RNA, 19 nt, Artificial Sequence
  Description of Artificial Sequence: Synthetic oligonucleotide
  Antisense strand to SEQ ID NO: 8692
acuccuccggagcaagggc

SEQ ID NO: 8694 - RNA, 19 nt, Artificial Sequence
  Description of Artificial Sequence: Synthetic oligonucleotide
  Sense strand starting at position 2997 of SEQ ID NO: 61
cgggcuucugcguugauga

SEQ ID NO: 8695 - RNA, 19 nt, Artificial Sequence
  Description of Artificial Sequence: Synthetic oligonucleotide
  Antisense strand to SEQ ID NO: 8694
ucaucaacgcagaagcccg

SEQ ID NO: 8696 - RNA, 19 nt, Artificial Sequence
  Description of Artificial Sequence: Synthetic oligonucleotide
  Sense strand starting at position 2753 of SEQ ID NO: 61
ggaugguguugccagggua

SEQ ID NO: 8697 - RNA, 19 nt, Artificial Sequence
  Description of Artificial Sequence: Synthetic oligonucleotide
  Antisense strand to SEQ ID NO: 8696
uacccuggcaacaccaucc

SEQ ID NO: 8698 - RNA, 19 nt, Artificial Sequence
  Description of Artificial Sequence: Synthetic oligonucleotide
  Sense strand starting at position 2699 of SEQ ID NO: 61
uugcgaaaggcucgagaga

SEQ ID NO: 8699 - RNA, 19 nt, Artificial Sequence
  Description of Artificial Sequence: Synthetic oligonucleotide
  Antisense strand to SEQ ID NO: 8698
ucucucgagccuuucgcaa

SEQ ID NO: 8700 - RNA, 19 nt, Artificial Sequence
  Description of Artificial Sequence: Synthetic oligonucleotide
  Sense strand starting at position 1499 of SEQ ID NO: 61
gucccuugauuugcaacau

SEQ ID NO: 8701 - RNA, 19 nt, Artificial Sequence
  Description of Artificial Sequence: Synthetic oligonucleotide
  Antisense strand to SEQ ID NO: 8700
auguugcaaaucaagggac

SEQ ID NO: 8702 - RNA, 19 nt, Artificial Sequence
  Description of Artificial Sequence: Synthetic oligonucleotide
  Sense strand starting at position 813 of SEQ ID NO: 61
cgagaagggucuuucugga

SEQ ID NO: 8703 - RNA, 19 nt, Artificial Sequence
  Description of Artificial Sequence: Synthetic oligonucleotide
  Antisense strand to SEQ ID NO: 8702
uccagaaagacccuucucg

SEQ ID NO: 8704 - RNA, 19 nt, Artificial Sequence
  Description of Artificial Sequence: Synthetic oligonucleotide
  Sense strand starting at position 804 of SEQ ID NO: 61
aaaguuugccgagaagggu

SEQ ID NO: 8705 - RNA, 19 nt, Artificial Sequence
  Description of Artificial Sequence: Synthetic oligonucleotide
  Antisense strand to SEQ ID NO: 8704
acccuucucggcaaacuuu

SEQ ID NO: 8706 - RNA, 19 nt, Artificial Sequence
  Description of Artificial Sequence: Synthetic oligonucleotide
  Sense strand starting at position 801 of SEQ ID NO: 61
ggcaaaguuugccgagaag

SEQ ID NO: 8707 - RNA, 19 nt, Artificial Sequence
  Description of Artificial Sequence: Synthetic oligonucleotide
  Antisense strand to SEQ ID NO: 8706
cuucucggcaaacuuugcc

SEQ ID NO: 8708 - RNA, 19 nt, Artificial Sequence
  Description of Artificial Sequence: Synthetic oligonucleotide
  Sense strand starting at position 800 of SEQ ID NO: 61
uggcaaaguuugccgagaa

SEQ ID NO: 8709 - RNA, 19 nt, Artificial Sequence
  Description of Artificial Sequence: Synthetic oligonucleotide
  Antisense strand to SEQ ID NO: 8708
uucucggcaaacuuugcca

SEQ ID NO: 8710 - RNA, 19 nt, Artificial Sequence
  Description of Artificial Sequence: Synthetic oligonucleotide
  Sense strand starting at position 572 of SEQ ID NO: 61
gugcaucccaguggacaaa

SEQ ID NO: 8711 - RNA, 19 nt, Artificial Sequence
  Description of Artificial Sequence: Synthetic oligonucleotide
  Antisense strand to SEQ ID NO: 8710
uuuguccacugggaugcac

SEQ ID NO: 8712 - RNA, 19 nt, Artificial Sequence
  Description of Artificial Sequence: Synthetic oligonucleotide
  Sense strand starting at position 571 of SEQ ID NO: 61
agugcaucccaguggacaa

SEQ ID NO: 8713 - RNA, 19 nt, Artificial Sequence
  Description of Artificial Sequence: Synthetic oligonucleotide
  Antisense strand to SEQ ID NO: 8712
uuguccacugggaugcacu

SEQ ID NO: 8714 - RNA, 19 nt, Artificial Sequence
  Description of Artificial Sequence: Synthetic oligonucleotide
  Sense strand starting at position 391 of SEQ ID NO: 61
aaucaagggucgcuagaaa

SEQ ID NO: 8715 - RNA, 19 nt, Artificial Sequence
  Description of Artificial Sequence: Synthetic oligonucleotide
  Antisense strand to SEQ ID NO: 8714
uuucuagcgacccuugauu

SEQ ID NO: 8716 - RNA, 19 nt, Artificial Sequence
  Description of Artificial Sequence: Synthetic oligonucleotide
  Sense strand starting at position 377 of SEQ ID NO: 61
agaaucggcucauaaauca

SEQ ID NO: 8717 - RNA, 19 nt, Artificial Sequence
  Description of Artificial Sequence: Synthetic oligonucleotide
  Antisense strand to SEQ ID NO: 8716
ugauuuaugagccgauucu

SEQ ID NO: 8718 - RNA, 19 nt, Artificial Sequence
  Description of Artificial Sequence: Synthetic oligonucleotide
  Sense strand starting at position 375 of SEQ ID NO: 61
gcagaaucggcucauaaau

SEQ ID NO: 8719 - RNA, 19 nt, Artificial Sequence
  Description of Artificial Sequence: Synthetic oligonucleotide
  Antisense strand to SEQ ID NO: 8718
auuuaugagccgauucugc

SEQ ID NO: 8720 - RNA, 19 nt, Artificial Sequence
  Description of Artificial Sequence: Synthetic oligonucleotide
  Sense strand starting at position 372 of SEQ ID NO: 61
ggagcagaaucggcucaua

SEQ ID NO: 8721 - RNA, 19 nt, Artificial Sequence
  Description of Artificial Sequence: Synthetic oligonucleotide
  Antisense strand to SEQ ID NO: 8720
uaugagccgauucugcucc

SEQ ID NO: 8722 - RNA, 19 nt, Artificial Sequence
  Description of Artificial Sequence: Synthetic oligonucleotide
  Sense strand starting at position 345 of SEQ ID NO: 61
agauguguuacacaguauu

SEQ ID NO: 8723 - RNA, 19 nt, Artificial Sequence
  Description of Artificial Sequence: Synthetic oligonucleotide
  Antisense strand to SEQ ID NO: 8722
aauacuguguaacacaucu

SEQ ID NO: 8724 - RNA, 19 nt, Artificial Sequence
  Description of Artificial Sequence: Synthetic oligonucleotide
  Sense strand starting at position 343 of SEQ ID NO: 61
cuagauguguuacacagua

SEQ ID NO: 8725 - RNA, 19 nt, Artificial Sequence
  Description of Artificial Sequence: Synthetic oligonucleotide
  Antisense strand to SEQ ID NO: 8724
uacuguguaacacaucuag

SEQ ID NO: 8726 - RNA, 19 nt, Artificial Sequence
  Description of Artificial Sequence: Synthetic oligonucleotide
  Sense strand starting at position 131 of SEQ ID NO: 61
gggucauuccugcaaagcu

SEQ ID NO: 8727 - RNA, 19 nt, Artificial Sequence
  Description of Artificial Sequence: Synthetic oligonucleotide
  Antisense strand to SEQ ID NO: 8726
agcuuugcaggaaugaccc

SEQ ID NO: 8728 - RNA, 19 nt, Artificial Sequence
  Description of Artificial Sequence: Synthetic oligonucleotide
  Sense strand starting at position 129 of SEQ ID NO: 61
cagggucauuccugcaaag

SEQ ID NO: 8729 - RNA, 19 nt, Artificial Sequence
  Description of Artificial Sequence: Synthetic oligonucleotide
  Antisense strand to SEQ ID NO: 8728
cuuugcaggaaugacccug

SEQ ID NO: 8730 - RNA, 19 nt, Artificial Sequence
  Description of Artificial Sequence: Synthetic oligonucleotide
  Sense strand starting at position 149 of SEQ ID NO: 62
ugagcuacuguuuauacuu

SEQ ID NO: 8731 - RNA, 19 nt, Artificial Sequence
  Description of Artificial Sequence: Synthetic oligonucleotide
  Antisense strand to SEQ ID NO: 8730
aaguauaaacaguagcuca

SEQ ID NO: 8732 - RNA, 19 nt, Artificial Sequence
  Description of Artificial Sequence: Synthetic oligonucleotide
  Sense strand starting at position 156 of SEQ ID NO: 62
cuguuuauacuugaucacu

SEQ ID NO: 8733 - RNA, 19 nt, Artificial Sequence
  Description of Artificial Sequence: Synthetic oligonucleotide
  Antisense strand to SEQ ID NO: 8732
agugaucaaguauaaacag

SEQ ID NO: 8734 - RNA, 19 nt, Artificial Sequence
  Description of Artificial Sequence: Synthetic oligonucleotide
  Sense strand starting at position 158 of SEQ ID NO: 62
guuuauacuugaucacuca

SEQ ID NO: 8735 - RNA, 19 nt, Artificial Sequence
  Description of Artificial Sequence: Synthetic oligonucleotide
  Antisense strand to SEQ ID NO: 8734
ugagugaucaaguauaaac

SEQ ID NO: 8736 - RNA, 19 nt, Artificial Sequence
  Description of Artificial Sequence: Synthetic oligonucleotide
  Sense strand starting at position 185 of SEQ ID NO: 62
gucugcagagucuaagauu

SEQ ID NO: 8737 - RNA, 19 nt, Artificial Sequence
  Description of Artificial Sequence: Synthetic oligonucleotide
  Antisense strand to SEQ ID NO: 8736
aaucuuagacucugcagac

SEQ ID NO: 8738 - RNA, 19 nt, Artificial Sequence
  Description of Artificial Sequence: Synthetic oligonucleotide
  Sense strand starting at position 208 of SEQ ID NO: 62
uucccuaagcugcagauua

SEQ ID NO: 8739 - RNA, 19 nt, Artificial Sequence
  Description of Artificial Sequence: Synthetic oligonucleotide
  Antisense strand to SEQ ID NO: 8738
uaaucugcagcuuagggaa

SEQ ID NO: 8740 - RNA, 19 nt, Artificial Sequence
  Description of Artificial Sequence: Synthetic oligonucleotide
  Sense strand starting at position 216 of SEQ ID NO: 62
gcugcagauuacccaauaa

SEQ ID NO: 8741 - RNA, 19 nt, Artificial Sequence
  Description of Artificial Sequence: Synthetic oligonucleotide
  Antisense strand to SEQ ID NO: 8740
uuauuggguaaucugcagc

SEQ ID NO: 8742 - RNA, 19 nt, Artificial Sequence
  Description of Artificial Sequence: Synthetic oligonucleotide
  Sense strand starting at position 228 of SEQ ID NO: 62
ccaauaaaugaguguggca

SEQ ID NO: 8743 - RNA, 19 nt, Artificial Sequence
  Description of Artificial Sequence: Synthetic oligonucleotide
  Antisense strand to SEQ ID NO: 8742
ugccacacucauuuauugg

SEQ ID NO: 8744 - RNA, 19 nt, Artificial Sequence
  Description of Artificial Sequence: Synthetic oligonucleotide
  Sense strand starting at position 256 of SEQ ID NO: 62
aagagaugucaacaacgcu

SEQ ID NO: 8745 - RNA, 19 nt, Artificial Sequence
  Description of Artificial Sequence: Synthetic oligonucleotide
  Antisense strand to SEQ ID NO: 8744
agcguuguugacaucucuu

SEQ ID NO: 8746 - RNA, 19 nt, Artificial Sequence
  Description of Artificial Sequence: Synthetic oligonucleotide
  Sense strand starting at position 362 of SEQ ID NO: 62
ugacuuagugcccagguca

SEQ ID NO: 8747 - RNA, 19 nt, Artificial Sequence
  Description of Artificial Sequence: Synthetic oligonucleotide
  Antisense strand to SEQ ID NO: 8746
ugaccugggcacuaaguca

SEQ ID NO: 8748 - RNA, 19 nt, Artificial Sequence
  Description of Artificial Sequence: Synthetic oligonucleotide
  Sense strand starting at position 384 of SEQ ID NO: 62
gaaugaauggaguguucca

SEQ ID NO: 8749 - RNA, 19 nt, Artificial Sequence
  Description of Artificial Sequence: Synthetic oligonucleotide
  Antisense strand to SEQ ID NO: 8748
uggaacacuccauucauuc

SEQ ID NO: 8750 - RNA, 19 nt, Artificial Sequence
  Description of Artificial Sequence: Synthetic oligonucleotide
  Sense strand starting at position 391 of SEQ ID NO: 62
uggaguguuccagaacuuc

SEQ ID NO: 8751 - RNA, 19 nt, Artificial Sequence
  Description of Artificial Sequence: Synthetic oligonucleotide
  Antisense strand to SEQ ID NO: 8750
gaaguucuggaacacucca

SEQ ID NO: 8752 - RNA, 19 nt, Artificial Sequence
  Description of Artificial Sequence: Synthetic oligonucleotide
  Sense strand starting at position 830 of SEQ ID NO: 62
ggcagaugguaacuucaga

SEQ ID NO: 8753 - RNA, 19 nt, Artificial Sequence
  Description of Artificial Sequence: Synthetic oligonucleotide
  Antisense strand to SEQ ID NO: 8752
ucugaaguuaccaucugcc

SEQ ID NO: 8754 - RNA, 19 nt, Artificial Sequence
  Description of Artificial Sequence: Synthetic oligonucleotide
  Sense strand starting at position 869 of SEQ ID NO: 62
aggucucaggcucaugaaa

SEQ ID NO: 8755 - RNA, 19 nt, Artificial Sequence
  Description of Artificial Sequence: Synthetic oligonucleotide
  Antisense strand to SEQ ID NO: 8754
uuucaugagccugagaccu

SEQ ID NO: 8756 - RNA, 19 nt, Artificial Sequence
  Description of Artificial Sequence: Synthetic oligonucleotide
  Sense strand starting at position 937 of SEQ ID NO: 62
uuaaccuguugauugauaa

SEQ ID NO: 8757 - RNA, 19 nt, Artificial Sequence
  Description of Artificial Sequence: Synthetic oligonucleotide
  Antisense strand to SEQ ID NO: 8756
uuaucaaucaacagguuaa

SEQ ID NO: 8758 - RNA, 19 nt, Artificial Sequence
  Description of Artificial Sequence: Synthetic oligonucleotide
  Sense strand starting at position 1177 of SEQ ID NO: 62
acccuuauuguggacacua

SEQ ID NO: 8759 - RNA, 19 nt, Artificial Sequence
  Description of Artificial Sequence: Synthetic oligonucleotide
  Antisense strand to SEQ ID NO: 8758
uaguguccacaauaagggu

SEQ ID NO: 8760 - RNA, 19 nt, Artificial Sequence
  Description of Artificial Sequence: Synthetic oligonucleotide
  Sense strand starting at position 1265 of SEQ ID NO: 62
cagggagagccuuagguuu

SEQ ID NO: 8761 - RNA, 19 nt, Artificial Sequence
  Description of Artificial Sequence: Synthetic oligonucleotide
  Antisense strand to SEQ ID NO: 8760
aaaccuaaggcucucccug

SEQ ID NO: 8762 - RNA, 19 nt, Artificial Sequence
  Description of Artificial Sequence: Synthetic oligonucleotide
  Sense strand starting at position 1551 of SEQ ID NO: 62
ucuagacccuuaguggaau

SEQ ID NO: 8763 - RNA, 19 nt, Artificial Sequence
  Description of Artificial Sequence: Synthetic oligonucleotide
  Antisense strand to SEQ ID NO: 8762
auuccacuaagggucuaga

SEQ ID NO: 8764 - RNA, 19 nt, Artificial Sequence
  Description of Artificial Sequence: Synthetic oligonucleotide
  Sense strand starting at position 1564 of SEQ ID NO: 62
uggaauuaaucagcccuca

SEQ ID NO: 8765 - RNA, 19 nt, Artificial Sequence
  Description of Artificial Sequence: Synthetic oligonucleotide
  Antisense strand to SEQ ID NO: 8764
ugagggcugauuaauucca

SEQ ID NO: 8766 - RNA, 19 nt, Artificial Sequence
  Description of Artificial Sequence: Synthetic oligonucleotide
  Sense strand starting at position 1658 of SEQ ID NO: 62
uuuggacccucuccgaaau

SEQ ID NO: 8767 - RNA, 19 nt, Artificial Sequence
  Description of Artificial Sequence: Synthetic oligonucleotide
  Antisense strand to SEQ ID NO: 8766
auuucggagaggguccaaa

SEQ ID NO: 8768 - RNA, 19 nt, Artificial Sequence
  Description of Artificial Sequence: Synthetic oligonucleotide
  Sense strand starting at position 1866 of SEQ ID NO: 62
cccggaugccuuuaggaua

SEQ ID NO: 8769 - RNA, 19 nt, Artificial Sequence
  Description of Artificial Sequence: Synthetic oligonucleotide
  Antisense strand to SEQ ID NO: 8768
uauccuaaaggcauccggg

SEQ ID NO: 8770 - RNA, 19 nt, Artificial Sequence
  Description of Artificial Sequence: Synthetic oligonucleotide
  Sense strand starting at position 2096 of SEQ ID NO: 62
ggcgauacugaggaacuuu

SEQ ID NO: 8771 - RNA, 19 nt, Artificial Sequence
  Description of Artificial Sequence: Synthetic oligonucleotide
  Antisense strand to SEQ ID NO: 8770
aaaguuccucaguaucgcc

SEQ ID NO: 8772 - RNA, 19 nt, Artificial Sequence
  Description of Artificial Sequence: Synthetic oligonucleotide
  Sense strand starting at position 2127 of SEQ ID NO: 62
acagaauuggugcgggaua

SEQ ID NO: 8773 - RNA, 19 nt, Artificial Sequence
  Description of Artificial Sequence: Synthetic oligonucleotide
  Antisense strand to SEQ ID NO: 8772
uaucccgcaccaauucugu

SEQ ID NO: 8774 - RNA, 19 nt, Artificial Sequence
  Description of Artificial Sequence: Synthetic oligonucleotide
  Sense strand starting at position 2129 of SEQ ID NO: 62
agaauuggugcgggauaag

SEQ ID NO: 8775 - RNA, 19 nt, Artificial Sequence
  Description of Artificial Sequence: Synthetic oligonucleotide
  Antisense strand to SEQ ID NO: 8774
cuuaucccgcaccaauucu

SEQ ID NO: 8776 - RNA, 19 nt, Artificial Sequence
  Description of Artificial Sequence: Synthetic oligonucleotide
  Sense strand starting at position 2294 of SEQ ID NO: 62
ugcgcgugggaguuuaaau

SEQ ID NO: 8777 - RNA, 19 nt, Artificial Sequence
  Description of Artificial Sequence: Synthetic oligonucleotide
  Antisense strand to SEQ ID NO: 8776
auuuaaacucccacgcgca

SEQ ID NO: 8778 - RNA, 19 nt, Artificial Sequence
  Description of Artificial Sequence: Synthetic oligonucleotide
  Sense strand starting at position 2295 of SEQ ID NO: 62
gcgcgugggaguuuaaaug

SEQ ID NO: 8779 - RNA, 19 nt, Artificial Sequence
  Description of Artificial Sequence: Synthetic oligonucleotide
  Antisense strand to SEQ ID NO: 8778
cauuuaaacucccacgcgc

SEQ ID NO: 8780 - RNA, 19 nt, Artificial Sequence
  Description of Artificial Sequence: Synthetic oligonucleotide
  Sense strand starting at position 2301 of SEQ ID NO: 62
gggaguuuaaauggguaaa

SEQ ID NO: 8781 - RNA, 19 nt, Artificial Sequence
  Description of Artificial Sequence: Synthetic oligonucleotide
  Antisense strand to SEQ ID NO: 8780
uuuacccauuuaaacuccc

SEQ ID NO: 8782 - RNA, 19 nt, Artificial Sequence
  Description of Artificial Sequence: Synthetic oligonucleotide
  Sense strand starting at position 2417 of SEQ ID NO: 62
uaaagauucguguaacaaa

SEQ ID NO: 8783 - RNA, 19 nt, Artificial Sequence
  Description of Artificial Sequence: Synthetic oligonucleotide
  Antisense strand to SEQ ID NO: 8782
uuuguuacacgaaucuuua

SEQ ID NO: 8784 - RNA, 19 nt, Artificial Sequence
  Description of Artificial Sequence: Synthetic oligonucleotide
  Sense strand starting at position 2428 of SEQ ID NO: 62
guaacaaaguuguuaauug

SEQ ID NO: 8785 - RNA, 19 nt, Artificial Sequence
  Description of Artificial Sequence: Synthetic oligonucleotide
  Antisense strand to SEQ ID NO: 8784
caauuaacaacuuuguuac

SEQ ID NO: 8786 - RNA, 19 nt, Artificial Sequence
  Description of Artificial Sequence: Synthetic oligonucleotide
  Sense strand starting at position 3167 of SEQ ID NO: 62
ggaaauaauuucuacagcu

SEQ ID NO: 8787 - RNA, 19 nt, Artificial Sequence
  Description of Artificial Sequence: Synthetic oligonucleotide
  Antisense strand to SEQ ID NO: 8786
agcuguagaaauuauuucc

SEQ ID NO: 8788 - RNA, 19 nt, Artificial Sequence
  Description of Artificial Sequence: Synthetic oligonucleotide
  Sense strand starting at position 3225 of SEQ ID NO: 62
uuuggaccuuuaguuaaga

SEQ ID NO: 8789 - RNA, 19 nt, Artificial Sequence
  Description of Artificial Sequence: Synthetic oligonucleotide
  Antisense strand to SEQ ID NO: 8788
ucuuaacuaaagguccaaa

SEQ ID NO: 8790 - RNA, 19 nt, Artificial Sequence
  Description of Artificial Sequence: Synthetic oligonucleotide
  Sense strand starting at position 3227 of SEQ ID NO: 62
uggaccuuuaguuaagagu

SEQ ID NO: 8791 - RNA, 19 nt, Artificial Sequence
  Description of Artificial Sequence: Synthetic oligonucleotide
  Antisense strand to SEQ ID NO: 8790
acucuuaacuaaaggucca

SEQ ID NO: 8792 - RNA, 19 nt, Artificial Sequence
  Description of Artificial Sequence: Synthetic oligonucleotide
  Sense strand starting at position 3236 of SEQ ID NO: 62
aguuaagaguguguaauga

SEQ ID NO: 8793 - RNA, 19 nt, Artificial Sequence
  Description of Artificial Sequence: Synthetic oligonucleotide
  Antisense strand to SEQ ID NO: 8792
ucauuacacacucuuaacu

SEQ ID NO: 8794 - RNA, 19 nt, Artificial Sequence
  Description of Artificial Sequence: Synthetic oligonucleotide
  Sense strand starting at position 3245 of SEQ ID NO: 62
uguguaaugaaacgauuau

SEQ ID NO: 8795 - RNA, 19 nt, Artificial Sequence
  Description of Artificial Sequence: Synthetic oligonucleotide
  Antisense strand to SEQ ID NO: 8794
auaaucguuucauuacaca

SEQ ID NO: 8796 - RNA, 19 nt, Artificial Sequence
  Description of Artificial Sequence: Synthetic oligonucleotide
  Sense strand starting at position 3246 of SEQ ID NO: 62
guguaaugaaacgauuaug

SEQ ID NO: 8797 - RNA, 19 nt, Artificial Sequence
  Description of Artificial Sequence: Synthetic oligonucleotide
  Antisense strand to SEQ ID NO: 8796
cauaaucguuucauuacac

SEQ ID NO: 8798 - RNA, 19 nt, Artificial Sequence
  Description of Artificial Sequence: Synthetic oligonucleotide
  Sense strand starting at position 3297 of SEQ ID NO: 62
acaucuugaugaugaauuu

SEQ ID NO: 8799 - RNA, 19 nt, Artificial Sequence
  Description of Artificial Sequence: Synthetic oligonucleotide
  Antisense strand to SEQ ID NO: 8798
aaauucaucaucaagaugu

SEQ ID NO: 8800 - RNA, 19 nt, Artificial Sequence
  Description of Artificial Sequence: Synthetic oligonucleotide
  Sense strand starting at position 3648 of SEQ ID NO: 62
uggucucuuccuuaccaca

SEQ ID NO: 8801 - RNA, 19 nt, Artificial Sequence
  Description of Artificial Sequence: Synthetic oligonucleotide
  Antisense strand to SEQ ID NO: 8800
ugugguaaggaagagacca

SEQ ID NO: 8802 - RNA, 19 nt, Artificial Sequence
  Description of Artificial Sequence: Synthetic oligonucleotide
  Sense strand starting at position 3720 of SEQ ID NO: 62
cuuaaucuuguuggauacu

SEQ ID NO: 8803 - RNA, 19 nt, Artificial Sequence
  Description of Artificial Sequence: Synthetic oligonucleotide
  Antisense strand to SEQ ID NO: 8802
aguauccaacaagauuaag

SEQ ID NO: 8804 - RNA, 19 nt, Artificial Sequence
  Description of Artificial Sequence: Synthetic oligonucleotide
  Sense strand starting at position 3732 of SEQ ID NO: 62
ggauacucccaaugacauu

SEQ ID NO: 8805 - RNA, 19 nt, Artificial Sequence
  Description of Artificial Sequence: Synthetic oligonucleotide
  Antisense strand to SEQ ID NO: 8804
aaugucauugggaguaucc

SEQ ID NO: 8806 - RNA, 19 nt, Artificial Sequence
  Description of Artificial Sequence: Synthetic oligonucleotide
  Sense strand starting at position 3760 of SEQ ID NO: 62
aaggauuguuaugucuauu

SEQ ID NO: 8807 - RNA, 19 nt, Artificial Sequence
  Description of Artificial Sequence: Synthetic oligonucleotide
  Antisense strand to SEQ ID NO: 8806
aauagacauaacaauccuu

SEQ ID NO: 8808 - RNA, 19 nt, Artificial Sequence
  Description of Artificial Sequence: Synthetic oligonucleotide
  Sense strand starting at position 3789 of SEQ ID NO: 62
gaagcugaggccugaagau

SEQ ID NO: 8809 - RNA, 19 nt, Artificial Sequence
  Description of Artificial Sequence: Synthetic oligonucleotide
  Antisense strand to SEQ ID NO: 8808
aucuucaggccucagcuuc

SEQ ID NO: 8810 - RNA, 19 nt, Artificial Sequence
  Description of Artificial Sequence: Synthetic oligonucleotide
  Sense strand starting at position 3923 of SEQ ID NO: 63
cucagaagugagcaugcau

SEQ ID NO: 8811 - RNA, 19 nt, Artificial Sequence
  Description of Artificial Sequence: Synthetic oligonucleotide
  Antisense strand to SEQ ID NO: 8810
augcaugcucacuucugag

SEQ ID NO: 8812 - RNA, 19 nt, Artificial Sequence
  Description of Artificial Sequence: Synthetic oligonucleotide
  Sense strand starting at position 3919 of SEQ ID NO: 63
ggcucucagaagugagcau

SEQ ID NO: 8813 - RNA, 19 nt, Artificial Sequence
  Description of Artificial Sequence: Synthetic oligonucleotide
  Antisense strand to SEQ ID NO: 8812
augcucacuucugagagcc

SEQ ID NO: 8814 - RNA, 19 nt, Artificial Sequence
  Description of Artificial Sequence: Synthetic oligonucleotide
  Sense strand starting at position 3901 of SEQ ID NO: 63
cagauacuucuuuggagug

SEQ ID NO: 8815 - RNA, 19 nt, Artificial Sequence
  Description of Artificial Sequence: Synthetic oligonucleotide
  Antisense strand to SEQ ID NO: 8814
cacuccaaagaaguaucug

SEQ ID NO: 8816 - RNA, 19 nt, Artificial Sequence
  Description of Artificial Sequence: Synthetic oligonucleotide
  Sense strand starting at position 3900 of SEQ ID NO: 63
gcagauacuucuuuggagu

SEQ ID NO: 8817 - RNA, 19 nt, Artificial Sequence
  Description of Artificial Sequence: Synthetic oligonucleotide
  Antisense strand to SEQ ID NO: 8816
acuccaaagaaguaucugc

SEQ ID NO: 8818 - RNA, 19 nt, Artificial Sequence
  Description of Artificial Sequence: Synthetic oligonucleotide
  Sense strand starting at position 3899 of SEQ ID NO: 63
agcagauacuucuuuggag

SEQ ID NO: 8819 - RNA, 19 nt, Artificial Sequence
  Description of Artificial Sequence: Synthetic oligonucleotide
  Antisense strand to SEQ ID NO: 8818
cuccaaagaaguaucugcu

SEQ ID NO: 8820 - RNA, 19 nt, Artificial Sequence
  Description of Artificial Sequence: Synthetic oligonucleotide
  Sense strand starting at position 3886 of SEQ ID NO: 63
guguauaauauguagcaga

SEQ ID NO: 8821 - RNA, 19 nt, Artificial Sequence
  Description of Artificial Sequence: Synthetic oligonucleotide
  Antisense strand to SEQ ID NO: 8820
ucugcuacauauuauacac

SEQ ID NO: 8822 - RNA, 19 nt, Artificial Sequence
  Description of Artificial Sequence: Synthetic oligonucleotide
  Sense strand starting at position 3884 of SEQ ID NO: 63
auguguauaauauguagca

SEQ ID NO: 8823 - RNA, 19 nt, Artificial Sequence
  Description of Artificial Sequence: Synthetic oligonucleotide
  Antisense strand to SEQ ID NO: 8822
ugcuacauauuauacacau

SEQ ID NO: 8824 - RNA, 19 nt, Artificial Sequence
  Description of Artificial Sequence: Synthetic oligonucleotide
  Sense strand starting at position 3879 of SEQ ID NO: 63
gguauauguguauaauaug

SEQ ID NO: 8825 - RNA, 19 nt, Artificial Sequence
  Description of Artificial Sequence: Synthetic oligonucleotide
  Antisense strand to SEQ ID NO: 8824
cauauuauacacauauacc

SEQ ID NO: 8826 - RNA, 19 nt, Artificial Sequence
  Description of Artificial Sequence: Synthetic oligonucleotide
  Sense strand starting at position 3788 of SEQ ID NO: 63
aauaaaucucagugugcug

SEQ ID NO: 8827 - RNA, 19 nt, Artificial Sequence
  Description of Artificial Sequence: Synthetic oligonucleotide
  Antisense strand to SEQ ID NO: 8826
cagcacacugagauuuauu

SEQ ID NO: 8828 - RNA, 19 nt, Artificial Sequence
  Description of Artificial Sequence: Synthetic oligonucleotide
  Sense strand starting at position 3556 of SEQ ID NO: 63
augagaccagccugucuaa

SEQ ID NO: 8829 - RNA, 19 nt, Artificial Sequence
  Description of Artificial Sequence: Synthetic oligonucleotide
  Antisense strand to SEQ ID NO: 8828
uuagacaggcuggucucau

SEQ ID NO: 8830 - RNA, 19 nt, Artificial Sequence
  Description of Artificial Sequence: Synthetic oligonucleotide
  Sense strand starting at position 3338 of SEQ ID NO: 63
cuggcauaguuuccugaca

SEQ ID NO: 8831 - RNA, 19 nt, Artificial Sequence
  Description of Artificial Sequence: Synthetic oligonucleotide
  Antisense strand to SEQ ID NO: 8830
ugucaggaaacuaugccag

SEQ ID NO: 8832 - RNA, 19 nt, Artificial Sequence
  Description of Artificial Sequence: Synthetic oligonucleotide
  Sense strand starting at position 3132 of SEQ ID NO: 63
cgcagagaugccuuccgua

SEQ ID NO: 8833 - RNA, 19 nt, Artificial Sequence
  Description of Artificial Sequence: Synthetic oligonucleotide
  Antisense strand to SEQ ID NO: 8832
uacggaaggcaucucugcg

SEQ ID NO: 8834 - RNA, 19 nt, Artificial Sequence
  Description of Artificial Sequence: Synthetic oligonucleotide
  Sense strand starting at position 3082 of SEQ ID NO: 63
cucagauauugucuucccu

SEQ ID NO: 8835 - RNA, 19 nt, Artificial Sequence
  Description of Artificial Sequence: Synthetic oligonucleotide
  Antisense strand to SEQ ID NO: 8834
agggaagacaauaucugag

SEQ ID NO: 8836 - RNA, 19 nt, Artificial Sequence
  Description of Artificial Sequence: Synthetic oligonucleotide
  Sense strand starting at position 3067 of SEQ ID NO: 63
uuauuauuucccggccuca

SEQ ID NO: 8837 - RNA, 19 nt, Artificial Sequence
  Description of Artificial Sequence: Synthetic oligonucleotide
  Antisense strand to SEQ ID NO: 8836
ugaggccgggaaauaauaa

SEQ ID NO: 8838 - RNA, 19 nt, Artificial Sequence
  Description of Artificial Sequence: Synthetic oligonucleotide
  Sense strand starting at position 3037 of SEQ ID NO: 63
caggaauacugauaaagug

SEQ ID NO: 8839 - RNA, 19 nt, Artificial Sequence
  Description of Artificial Sequence: Synthetic oligonucleotide
  Antisense strand to SEQ ID NO: 8838
cacuuuaucaguauuccug

SEQ ID NO: 8840 - RNA, 19 nt, Artificial Sequence
  Description of Artificial Sequence: Synthetic oligonucleotide
  Sense strand starting at position 2979 of SEQ ID NO: 63
ugggauaagugcccauaag

SEQ ID NO: 8841 - RNA, 19 nt, Artificial Sequence
  Description of Artificial Sequence: Synthetic oligonucleotide
  Antisense strand to SEQ ID NO: 8840
cuuaugggcacuuauccca

SEQ ID NO: 8842 - RNA, 19 nt, Artificial Sequence
  Description of Artificial Sequence: Synthetic oligonucleotide
  Sense strand starting at position 2794 of SEQ ID NO: 63
caggaccuucuugguaaau

SEQ ID NO: 8843 - RNA, 19 nt, Artificial Sequence
  Description of Artificial Sequence: Synthetic oligonucleotide
  Antisense strand to SEQ ID NO: 8842
auuuaccaagaagguccug

SEQ ID NO: 8844 - RNA, 19 nt, Artificial Sequence
  Description of Artificial Sequence: Synthetic oligonucleotide
  Sense strand starting at position 2681 of SEQ ID NO: 63
uccugcucucaagaaauug

SEQ ID NO: 8845 - RNA, 19 nt, Artificial Sequence
  Description of Artificial Sequence: Synthetic oligonucleotide
  Antisense strand to SEQ ID NO: 8844
caauuucuugagagcagga

SEQ ID NO: 8846 - RNA, 19 nt, Artificial Sequence
  Description of Artificial Sequence: Synthetic oligonucleotide
  Sense strand starting at position 2675 of SEQ ID NO: 63
aucgaauccugcucucaag

SEQ ID NO: 8847 - RNA, 19 nt, Artificial Sequence
  Description of Artificial Sequence: Synthetic oligonucleotide
  Antisense strand to SEQ ID NO: 8846
cuugagagcaggauucgau

SEQ ID NO: 8848 - RNA, 19 nt, Artificial Sequence
  Description of Artificial Sequence: Synthetic oligonucleotide
  Sense strand starting at position 2662 of SEQ ID NO: 63
ccgugaacaacagaucgaa

SEQ ID NO: 8849 - RNA, 19 nt, Artificial Sequence
  Description of Artificial Sequence: Synthetic oligonucleotide
  Antisense strand to SEQ ID NO: 8848
uucgaucuguuguucacgg

SEQ ID NO: 8850 - RNA, 19 nt, Artificial Sequence
  Description of Artificial Sequence: Synthetic oligonucleotide
  Sense strand starting at position 2654 of SEQ ID NO: 63
ggaucuagccgugaacaac

SEQ ID NO: 8851 - RNA, 19 nt, Artificial Sequence
  Description of Artificial Sequence: Synthetic oligonucleotide
  Antisense strand to SEQ ID NO: 8850
guuguucacggcuagaucc

SEQ ID NO: 8852 - RNA, 19 nt, Artificial Sequence
  Description of Artificial Sequence: Synthetic oligonucleotide
  Sense strand starting at position 2653 of SEQ ID NO: 63
aggaucuagccgugaacaa

SEQ ID NO: 8853 - RNA, 19 nt, Artificial Sequence
  Description of Artificial Sequence: Synthetic oligonucleotide
  Antisense strand to SEQ ID NO: 8852
uuguucacggcuagauccu

SEQ ID NO: 8854 - RNA, 19 nt, Artificial Sequence
  Description of Artificial Sequence: Synthetic oligonucleotide
  Sense strand starting at position 2651 of SEQ ID NO: 63
uuaggaucuagccgugaac

SEQ ID NO: 8855 - RNA, 19 nt, Artificial Sequence
  Description of Artificial Sequence: Synthetic oligonucleotide
  Antisense strand to SEQ ID NO: 8854
guucacggcuagauccuaa

SEQ ID NO: 8856 - RNA, 19 nt, Artificial Sequence
  Description of Artificial Sequence: Synthetic oligonucleotide
  Sense strand starting at position 2551 of SEQ ID NO: 63
guguuuacagccgaggaau

SEQ ID NO: 8857 - RNA, 19 nt, Artificial Sequence
  Description of Artificial Sequence: Synthetic oligonucleotide
  Antisense strand to SEQ ID NO: 8856
auuccucggcuguaaacac

SEQ ID NO: 8858 - RNA, 19 nt, Artificial Sequence
  Description of Artificial Sequence: Synthetic oligonucleotide
  Sense strand starting at position 2550 of SEQ ID NO: 63
uguguuuacagccgaggaa

SEQ ID NO: 8859 - RNA, 19 nt, Artificial Sequence
  Description of Artificial Sequence: Synthetic oligonucleotide
  Antisense strand to SEQ ID NO: 8858
uuccucggcuguaaacaca

SEQ ID NO: 8860 - RNA, 19 nt, Artificial Sequence
  Description of Artificial Sequence: Synthetic oligonucleotide
  Sense strand starting at position 2532 of SEQ ID NO: 63
gcggcuaggugauuucauu

SEQ ID NO: 8861 - RNA, 19 nt, Artificial Sequence
  Description of Artificial Sequence: Synthetic oligonucleotide
  Antisense strand to SEQ ID NO: 8860
aaugaaaucaccuagccgc

SEQ ID NO: 8862 - RNA, 19 nt, Artificial Sequence
  Description of Artificial Sequence: Synthetic oligonucleotide
  Sense strand starting at position 1023 of SEQ ID NO: 63
gcuauuccucgcgacagga

SEQ ID NO: 8863 - RNA, 19 nt, Artificial Sequence
  Description of Artificial Sequence: Synthetic oligonucleotide
  Antisense strand to SEQ ID NO: 8862
uccugucgcgaggaauagc

SEQ ID NO: 8864 - RNA, 19 nt, Artificial Sequence
  Description of Artificial Sequence: Synthetic oligonucleotide
  Sense strand starting at position 579 of SEQ ID NO: 63
ccaggaaagcugcauuaca

SEQ ID NO: 8865 - RNA, 19 nt, Artificial Sequence
  Description of Artificial Sequence: Synthetic oligonucleotide
  Antisense strand to SEQ ID NO: 8864
uguaaugcagcuuuccugg

SEQ ID NO: 8866 - RNA, 19 nt, Artificial Sequence
  Description of Artificial Sequence: Synthetic oligonucleotide
  Sense strand starting at position 568 of SEQ ID NO: 63
agaagccauuuccaggaaa

SEQ ID NO: 8867 - RNA, 19 nt, Artificial Sequence
  Description of Artificial Sequence: Synthetic oligonucleotide
  Antisense strand to SEQ ID NO: 8866
uuuccuggaaauggcuucu

SEQ ID NO: 8868 - RNA, 19 nt, Artificial Sequence
  Description of Artificial Sequence: Synthetic oligonucleotide
  Sense strand starting at position 276 of SEQ ID NO: 63
ugagaaguacaucgacagu

SEQ ID NO: 8869 - RNA, 19 nt, Artificial Sequence
  Description of Artificial Sequence: Synthetic oligonucleotide
  Antisense strand to SEQ ID NO: 8868
acugucgauguacuucuca

SEQ ID NO: 8870 - RNA, 19 nt, Artificial Sequence
  Description of Artificial Sequence: Synthetic oligonucleotide
  Sense strand starting at position 265 of SEQ ID NO: 63
ccggacauccuugagaagu

SEQ ID NO: 8871 - RNA, 19 nt, Artificial Sequence
  Description of Artificial Sequence: Synthetic oligonucleotide
  Antisense strand to SEQ ID NO: 8870
acuucucaaggauguccgg

SEQ ID NO: 8872 - RNA, 19 nt, Artificial Sequence
  Description of Artificial Sequence: Synthetic oligonucleotide
  Sense strand starting at position 264 of SEQ ID NO: 63
cccggacauccuugagaag

SEQ ID NO: 8873 - RNA, 19 nt, Artificial Sequence
  Description of Artificial Sequence: Synthetic oligonucleotide
  Antisense strand to SEQ ID NO: 8872
cuucucaaggauguccggg

SEQ ID NO: 8874 - RNA, 19 nt, Artificial Sequence
  Description of Artificial Sequence: Synthetic oligonucleotide
  Sense strand starting at position 241 of SEQ ID NO: 63
aguccaugaugggcaauaa

SEQ ID NO: 8875 - RNA, 19 nt, Artificial Sequence
  Description of Artificial Sequence: Synthetic oligonucleotide
  Antisense strand to SEQ ID NO: 8874
uuauugcccaucauggacu

SEQ ID NO: 8876 - RNA, 19 nt, Artificial Sequence
  Description of Artificial Sequence: Synthetic oligonucleotide
  Sense strand starting at position 231 of SEQ ID NO: 63
ccggauaauuaguccauga

SEQ ID NO: 8877 - RNA, 19 nt, Artificial Sequence
  Description of Artificial Sequence: Synthetic oligonucleotide
  Antisense strand to SEQ ID NO: 8876
ucauggacuaauuauccgg

SEQ ID NO: 8878 - RNA, 19 nt, Artificial Sequence
  Description of Artificial Sequence: Synthetic oligonucleotide
  Sense strand starting at position 222 of SEQ ID NO: 63
ugcagaucuccggauaauu

SEQ ID NO: 8879 - RNA, 19 nt, Artificial Sequence
  Description of Artificial Sequence: Synthetic oligonucleotide
  Antisense strand to SEQ ID NO: 8878
aauuauccggagaucugca

SEQ ID NO: 8880 - RNA, 19 nt, Artificial Sequence
  Description of Artificial Sequence: Synthetic oligonucleotide
  Sense strand starting at position 220 of SEQ ID NO: 63
aaugcagaucuccggauaa

SEQ ID NO: 8881 - RNA, 19 nt, Artificial Sequence
  Description of Artificial Sequence: Synthetic oligonucleotide
  Antisense strand to SEQ ID NO: 8880
uuauccggagaucugcauu

SEQ ID NO: 8882 - RNA, 19 nt, Artificial Sequence
  Description of Artificial Sequence: Synthetic oligonucleotide
  Sense strand starting at position 219 of SEQ ID NO: 63
aaaugcagaucuccggaua

SEQ ID NO: 8883 - RNA, 19 nt, Artificial Sequence
  Description of Artificial Sequence: Synthetic oligonucleotide
  Antisense strand to SEQ ID NO: 8882
uauccggagaucugcauuu

SEQ ID NO: 8884 - RNA, 19 nt, Artificial Sequence
  Description of Artificial Sequence: Synthetic oligonucleotide
  Sense strand starting at position 210 of SEQ ID NO: 63
gugcuucugaaaugcagau

SEQ ID NO: 8885 - RNA, 19 nt, Artificial Sequence
  Description of Artificial Sequence: Synthetic oligonucleotide
  Antisense strand to SEQ ID NO: 8884
aucugcauuucagaagcac

SEQ ID NO: 8886 - RNA, 19 nt, Artificial Sequence
  Description of Artificial Sequence: Synthetic oligonucleotide
  Sense strand starting at position 127 of SEQ ID NO: 63
uggagauacuucuuaauuc

SEQ ID NO: 8887 - RNA, 19 nt, Artificial Sequence
  Description of Artificial Sequence: Synthetic oligonucleotide
  Antisense strand to SEQ ID NO: 8886
gaauuaagaaguaucucca

SEQ ID NO: 8888 - RNA, 19 nt, Artificial Sequence
  Description of Artificial Sequence: Synthetic oligonucleotide
  Sense strand starting at position 20 of SEQ ID NO: 63
ugcaaucugguacacauaa

SEQ ID NO: 8889 - RNA, 19 nt, Artificial Sequence
  Description of Artificial Sequence: Synthetic oligonucleotide
  Antisense strand to SEQ ID NO: 8888
uuauguguaccagauugca

SEQ ID NO: 8890 - RNA, 19 nt, Artificial Sequence
  Description of Artificial Sequence: Synthetic oligonucleotide
  Sense strand starting at position 3893 of SEQ ID NO: 65
augagaccagccugucuaa

SEQ ID NO: 8891 - RNA, 19 nt, Artificial Sequence
  Description of Artificial Sequence: Synthetic oligonucleotide
  Antisense strand to SEQ ID NO: 8890
uuagacaggcuggucucau

SEQ ID NO: 8892 - RNA, 19 nt, Artificial Sequence
  Description of Artificial Sequence: Synthetic oligonucleotide
  Sense strand starting at position 3675 of SEQ ID NO: 65
cuggcauaguuuccugaca

SEQ ID NO: 8893 - RNA, 19 nt, Artificial Sequence
  Description of Artificial Sequence: Synthetic oligonucleotide
  Antisense strand to SEQ ID NO: 8892
ugucaggaaacuaugccag

SEQ ID NO: 8894 - RNA, 19 nt, Artificial Sequence
  Description of Artificial Sequence: Synthetic oligonucleotide
  Sense strand starting at position 3469 of SEQ ID NO: 65
cgcagagaugccuuccgua

SEQ ID NO: 8895 - RNA, 19 nt, Artificial Sequence
  Description of Artificial Sequence: Synthetic oligonucleotide
  Antisense strand to SEQ ID NO: 8894
uacggaaggcaucucugcg

SEQ ID NO: 8896 - RNA, 19 nt, Artificial Sequence
  Description of Artificial Sequence: Synthetic oligonucleotide
  Sense strand starting at position 3419 of SEQ ID NO: 65
cucagauauugucuucccu

SEQ ID NO: 8897 - RNA, 19 nt, Artificial Sequence
  Description of Artificial Sequence: Synthetic oligonucleotide
  Antisense strand to SEQ ID NO: 8896
agggaagacaauaucugag

SEQ ID NO: 8898 - RNA, 19 nt, Artificial Sequence
  Description of Artificial Sequence: Synthetic oligonucleotide
  Sense strand starting at position 3404 of SEQ ID NO: 65
uuauuauuucccggccuca

SEQ ID NO: 8899 - RNA, 19 nt, Artificial Sequence
  Description of Artificial Sequence: Synthetic oligonucleotide
  Antisense strand to SEQ ID NO: 8898
ugaggccgggaaauaauaa

SEQ ID NO: 8900 - RNA, 19 nt, Artificial Sequence
  Description of Artificial Sequence: Synthetic oligonucleotide
  Sense strand starting at position 3374 of SEQ ID NO: 65
caggaauacugauaaagug

SEQ ID NO: 8901 - RNA, 19 nt, Artificial Sequence
  Description of Artificial Sequence: Synthetic oligonucleotide
  Antisense strand to SEQ ID NO: 8900
cacuuuaucaguauuccug

SEQ ID NO: 8902 - RNA, 19 nt, Artificial Sequence
  Description of Artificial Sequence: Synthetic oligonucleotide
  Sense strand starting at position 3316 of SEQ ID NO: 65
ugggauaagugcccauaag

SEQ ID NO: 8903 - RNA, 19 nt, Artificial Sequence
  Description of Artificial Sequence: Synthetic oligonucleotide
  Antisense strand to SEQ ID NO: 8902
cuuaugggcacuuauccca

SEQ ID NO: 8904 - RNA, 19 nt, Artificial Sequence
  Description of Artificial Sequence: Synthetic oligonucleotide
  Sense strand starting at position 3157 of SEQ ID NO: 65
ggacuuccaugcgcauuau

SEQ ID NO: 8905 - RNA, 19 nt, Artificial Sequence
  Description of Artificial Sequence: Synthetic oligonucleotide
  Antisense strand to SEQ ID NO: 8904
auaaugcgcauggaagucc

SEQ ID NO: 8906 - RNA, 19 nt, Artificial Sequence
  Description of Artificial Sequence: Synthetic oligonucleotide
  Sense strand starting at position 3156 of SEQ ID NO: 65
aggacuuccaugcgcauua

SEQ ID NO: 8907 - RNA, 19 nt, Artificial Sequence
  Description of Artificial Sequence: Synthetic oligonucleotide
  Antisense strand to SEQ ID NO: 8906
uaaugcgcauggaaguccu

SEQ ID NO: 8908 - RNA, 19 nt, Artificial Sequence
  Description of Artificial Sequence: Synthetic oligonucleotide
  Sense strand starting at position 3154 of SEQ ID NO: 65
ccaggacuuccaugcgcau

SEQ ID NO: 8909 - RNA, 19 nt, Artificial Sequence
  Description of Artificial Sequence: Synthetic oligonucleotide
  Antisense strand to SEQ ID NO: 8908
augcgcauggaaguccugg

SEQ ID NO: 8910 - RNA, 19 nt, Artificial Sequence
  Description of Artificial Sequence: Synthetic oligonucleotide
  Sense strand starting at position 3131 of SEQ ID NO: 65
caggaccuucuugguaaau

SEQ ID NO: 8911 - RNA, 19 nt, Artificial Sequence
  Description of Artificial Sequence: Synthetic oligonucleotide
  Antisense strand to SEQ ID NO: 8910
auuuaccaagaagguccug

SEQ ID NO: 8912 - RNA, 19 nt, Artificial Sequence
  Description of Artificial Sequence: Synthetic oligonucleotide
  Sense strand starting at position 3018 of SEQ ID NO: 65
uccugcucucaagaaauug

SEQ ID NO: 8913 - RNA, 19 nt, Artificial Sequence
  Description of Artificial Sequence: Synthetic oligonucleotide
  Antisense strand to SEQ ID NO: 8912
caauuucuugagagcagga

SEQ ID NO: 8914 - RNA, 19 nt, Artificial Sequence
  Description of Artificial Sequence: Synthetic oligonucleotide
  Sense strand starting at position 3012 of SEQ ID NO: 65
aucgaauccugcucucaag

SEQ ID NO: 8915 - RNA, 19 nt, Artificial Sequence
  Description of Artificial Sequence: Synthetic oligonucleotide
  Antisense strand to SEQ ID NO: 8914
cuugagagcaggauucgau

SEQ ID NO: 8916 - RNA, 19 nt, Artificial Sequence
  Description of Artificial Sequence: Synthetic oligonucleotide
  Sense strand starting at position 2999 of SEQ ID NO: 65
ccgugaacaacagaucgaa

SEQ ID NO: 8917 - RNA, 19 nt, Artificial Sequence
  Description of Artificial Sequence: Synthetic oligonucleotide
  Antisense strand to SEQ ID NO: 8916
uucgaucuguuguucacgg

SEQ ID NO: 8918 - RNA, 19 nt, Artificial Sequence
  Description of Artificial Sequence: Synthetic oligonucleotide
  Sense strand starting at position 2991 of SEQ ID NO: 65
ggaucuagccgugaacaac

SEQ ID NO: 8919 - RNA, 19 nt, Artificial Sequence
  Description of Artificial Sequence: Synthetic oligonucleotide
  Antisense strand to SEQ ID NO: 8918
guuguucacggcuagaucc

SEQ ID NO: 8920 - RNA, 19 nt, Artificial Sequence
  Description of Artificial Sequence: Synthetic oligonucleotide
  Sense strand starting at position 2990 of SEQ ID NO: 65
aggaucuagccgugaacaa

SEQ ID NO: 8921 - RNA, 19 nt, Artificial Sequence
  Description of Artificial Sequence: Synthetic oligonucleotide
  Antisense strand to SEQ ID NO: 8920
uuguucacggcuagauccu

SEQ ID NO: 8922 - RNA, 19 nt, Artificial Sequence
  Description of Artificial Sequence: Synthetic oligonucleotide
  Sense strand starting at position 2988 of SEQ ID NO: 65
uuaggaucuagccgugaac

SEQ ID NO: 8923 - RNA, 19 nt, Artificial Sequence
  Description of Artificial Sequence: Synthetic oligonucleotide
  Antisense strand to SEQ ID NO: 8922
guucacggcuagauccuaa

SEQ ID NO: 8924 - RNA, 19 nt, Artificial Sequence
  Description of Artificial Sequence: Synthetic oligonucleotide
  Sense strand starting at position 2971 of SEQ ID NO: 65
gaaacuauucuaggcgcuu

SEQ ID NO: 8925 - RNA, 19 nt, Artificial Sequence
  Description of Artificial Sequence: Synthetic oligonucleotide
  Antisense strand to SEQ ID NO: 8924
aagcgccuagaauaguuuc

SEQ ID NO: 8926 - RNA, 19 nt, Artificial Sequence
  Description of Artificial Sequence: Synthetic oligonucleotide
  Sense strand starting at position 2888 of SEQ ID NO: 65
guguuuacagccgaggaau

SEQ ID NO: 8927 - RNA, 19 nt, Artificial Sequence
  Description of Artificial Sequence: Synthetic oligonucleotide
  Antisense strand to SEQ ID NO: 8926
auuccucggcuguaaacac

SEQ ID NO: 8928 - RNA, 19 nt, Artificial Sequence
  Description of Artificial Sequence: Synthetic oligonucleotide
  Sense strand starting at position 2887 of SEQ ID NO: 65
uguguuuacagccgaggaa

SEQ ID NO: 8929 - RNA, 19 nt, Artificial Sequence
  Description of Artificial Sequence: Synthetic oligonucleotide
  Antisense strand to SEQ ID NO: 8928
uuccucggcuguaaacaca

SEQ ID NO: 8930 - RNA, 19 nt, Artificial Sequence
  Description of Artificial Sequence: Synthetic oligonucleotide
  Sense strand starting at position 2869 of SEQ ID NO: 65
gcggcuaggugauuucauu

SEQ ID NO: 8931 - RNA, 19 nt, Artificial Sequence
  Description of Artificial Sequence: Synthetic oligonucleotide
  Antisense strand to SEQ ID NO: 8930
aaugaaaucaccuagccgc

SEQ ID NO: 8932 - RNA, 19 nt, Artificial Sequence
  Description of Artificial Sequence: Synthetic oligonucleotide
  Sense strand starting at position 1360 of SEQ ID NO: 65
gcuauuccucgcgacagga

SEQ ID NO: 8933 - RNA, 19 nt, Artificial Sequence
  Description of Artificial Sequence: Synthetic oligonucleotide
  Antisense strand to SEQ ID NO: 8932
uccugucgcgaggaauagc

SEQ ID NO: 8934 - RNA, 19 nt, Artificial Sequence
  Description of Artificial Sequence: Synthetic oligonucleotide
  Sense strand starting at position 950 of SEQ ID NO: 65
gaacgagucuccuccgagu

SEQ ID NO: 8935 - RNA, 19 nt, Artificial Sequence
  Description of Artificial Sequence: Synthetic oligonucleotide
  Antisense strand to SEQ ID NO: 8934
acucggaggagacucguuc

SEQ ID NO: 8936 - RNA, 19 nt, Artificial Sequence
  Description of Artificial Sequence: Synthetic oligonucleotide
  Sense strand starting at position 916 of SEQ ID NO: 65
ccaggaaagcugcauuaca

SEQ ID NO: 8937 - RNA, 19 nt, Artificial Sequence
  Description of Artificial Sequence: Synthetic oligonucleotide
  Antisense strand to SEQ ID NO: 8936
uguaaugcagcuuuccugg

SEQ ID NO: 8938 - RNA, 19 nt, Artificial Sequence
  Description of Artificial Sequence: Synthetic oligonucleotide
  Sense strand starting at position 905 of SEQ ID NO: 65
agaagccauuuccaggaaa

SEQ ID NO: 8939 - RNA, 19 nt, Artificial Sequence
  Description of Artificial Sequence: Synthetic oligonucleotide
  Antisense strand to SEQ ID NO: 8938
uuuccuggaaauggcuucu

SEQ ID NO: 8940 - RNA, 19 nt, Artificial Sequence
  Description of Artificial Sequence: Synthetic oligonucleotide
  Sense strand starting at position 613 of SEQ ID NO: 65
ugagaaguacaucgacagu

SEQ ID NO: 8941 - RNA, 19 nt, Artificial Sequence
  Description of Artificial Sequence: Synthetic oligonucleotide
  Antisense strand to SEQ ID NO: 8940
acugucgauguacuucuca

SEQ ID NO: 8942 - RNA, 19 nt, Artificial Sequence
  Description of Artificial Sequence: Synthetic oligonucleotide
  Sense strand starting at position 602 of SEQ ID NO: 65
ccggacauccuugagaagu

SEQ ID NO: 8943 - RNA, 19 nt, Artificial Sequence
  Description of Artificial Sequence: Synthetic oligonucleotide
  Antisense strand to SEQ ID NO: 8942
acuucucaaggauguccgg

SEQ ID NO: 8944 - RNA, 19 nt, Artificial Sequence
  Description of Artificial Sequence: Synthetic oligonucleotide
  Sense strand starting at position 601 of SEQ ID NO: 65
cccggacauccuugagaag

SEQ ID NO: 8945 - RNA, 19 nt, Artificial Sequence
  Description of Artificial Sequence: Synthetic oligonucleotide
  Antisense strand to SEQ ID NO: 8944
cuucucaaggauguccggg

SEQ ID NO: 8946 - RNA, 19 nt, Artificial Sequence
  Description of Artificial Sequence: Synthetic oligonucleotide
  Sense strand starting at position 578 of SEQ ID NO: 65
aguccaugaugggcaauaa

SEQ ID NO: 8947 - RNA, 19 nt, Artificial Sequence
  Description of Artificial Sequence: Synthetic oligonucleotide
  Antisense strand to SEQ ID NO: 8946
uuauugcccaucauggacu

SEQ ID NO: 8948 - RNA, 19 nt, Artificial Sequence
  Description of Artificial Sequence: Synthetic oligonucleotide
  Sense strand starting at position 568 of SEQ ID NO: 65
ccggauaauuaguccauga

SEQ ID NO: 8949 - RNA, 19 nt, Artificial Sequence
  Description of Artificial Sequence: Synthetic oligonucleotide
  Antisense strand to SEQ ID NO: 8948
ucauggacuaauuauccgg

SEQ ID NO: 8950 - RNA, 19 nt, Artificial Sequence
  Description of Artificial Sequence: Synthetic oligonucleotide
  Sense strand starting at position 559 of SEQ ID NO: 65
ugcagaucuccggauaauu

SEQ ID NO: 8951 - RNA, 19 nt, Artificial Sequence
  Description of Artificial Sequence: Synthetic oligonucleotide
  Antisense strand to SEQ ID NO: 8950
aauuauccggagaucugca

SEQ ID NO: 8952 - RNA, 19 nt, Artificial Sequence
  Description of Artificial Sequence: Synthetic oligonucleotide
  Sense strand starting at position 557 of SEQ ID NO: 65
aaugcagaucuccggauaa

SEQ ID NO: 8953 - RNA, 19 nt, Artificial Sequence
  Description of Artificial Sequence: Synthetic oligonucleotide
  Antisense strand to SEQ ID NO: 8952
uuauccggagaucugcauu

SEQ ID NO: 8954 - RNA, 19 nt, Artificial Sequence
  Description of Artificial Sequence: Synthetic oligonucleotide
  Sense strand starting at position 556 of SEQ ID NO: 65
aaaugcagaucuccggaua

SEQ ID NO: 8955 - RNA, 19 nt, Artificial Sequence
  Description of Artificial Sequence: Synthetic oligonucleotide
  Antisense strand to SEQ ID NO: 8954
uauccggagaucugcauuu

SEQ ID NO: 8956 - RNA, 19 nt, Artificial Sequence
  Description of Artificial Sequence: Synthetic oligonucleotide
  Sense strand starting at position 547 of SEQ ID NO: 65
gugcuucugaaaugcagau

SEQ ID NO: 8957 - RNA, 19 nt, Artificial Sequence
  Description of Artificial Sequence: Synthetic oligonucleotide
  Antisense strand to SEQ ID NO: 8956
aucugcauuucagaagcac

SEQ ID NO: 8958 - RNA, 19 nt, Artificial Sequence
  Description of Artificial Sequence: Synthetic oligonucleotide
  Sense strand starting at position 464 of SEQ ID NO: 65
uggagauacuucuuaauuc

SEQ ID NO: 8959 - RNA, 19 nt, Artificial Sequence
  Description of Artificial Sequence: Synthetic oligonucleotide
  Antisense strand to SEQ ID NO: 8958
gaauuaagaaguaucucca

SEQ ID NO: 8960 - RNA, 19 nt, Artificial Sequence
  Description of Artificial Sequence: Synthetic oligonucleotide
  Sense strand starting at position 357 of SEQ ID NO: 65
ugcaaucugguacacauaa

SEQ ID NO: 8961 - RNA, 19 nt, Artificial Sequence
  Description of Artificial Sequence: Synthetic oligonucleotide
  Antisense strand to SEQ ID NO: 8960
uuauguguaccagauugca

SEQ ID NO: 8962 - RNA, 19 nt, Artificial Sequence
  Description of Artificial Sequence: Synthetic oligonucleotide
  Sense strand starting at position 317 of SEQ ID NO: 65
gcgcacuugagguaacaau

SEQ ID NO: 8963 - RNA, 19 nt, Artificial Sequence
  Description of Artificial Sequence: Synthetic oligonucleotide
  Antisense strand to SEQ ID NO: 8962
auuguuaccucaagugcgc

SEQ ID NO: 8964 - RNA, 19 nt, Artificial Sequence
  Description of Artificial Sequence: Synthetic oligonucleotide
  Sense strand starting at position 286 of SEQ ID NO: 65
aaugcaugugaauguauua

SEQ ID NO: 8965 - RNA, 19 nt, Artificial Sequence
  Description of Artificial Sequence: Synthetic oligonucleotide
  Antisense strand to SEQ ID NO: 8964
uaauacauucacaugcauu

SEQ ID NO: 8966 - RNA, 19 nt, Artificial Sequence
  Description of Artificial Sequence: Synthetic oligonucleotide
  Sense strand starting at position 123 of SEQ ID NO: 65
uacagagaauuauggaaug

SEQ ID NO: 8967 - RNA, 19 nt, Artificial Sequence
  Description of Artificial Sequence: Synthetic oligonucleotide
  Antisense strand to SEQ ID NO: 8966
cauuccauaauucucugua

SEQ ID NO: 8968 - RNA, 19 nt, Artificial Sequence
  Description of Artificial Sequence: Synthetic oligonucleotide
  Sense strand starting at position 106 of SEQ ID NO: 65
caagucuccuagucaggua

SEQ ID NO: 8969 - RNA, 19 nt, Artificial Sequence
  Description of Artificial Sequence: Synthetic oligonucleotide
  Antisense strand to SEQ ID NO: 8968
uaccugacuaggagacuug

SEQ ID NO: 8970 - RNA, 19 nt, Artificial Sequence
  Description of Artificial Sequence: Synthetic oligonucleotide
  Sense strand starting at position 3642 of SEQ ID NO: 64
cucagaagugagcaugcau

SEQ ID NO: 8971 - RNA, 19 nt, Artificial Sequence
  Description of Artificial Sequence: Synthetic oligonucleotide
  Antisense strand to SEQ ID NO: 8970
augcaugcucacuucugag

SEQ ID NO: 8972 - RNA, 19 nt, Artificial Sequence
  Description of Artificial Sequence: Synthetic oligonucleotide
  Sense strand starting at position 3638 of SEQ ID NO: 64
ggcucucagaagugagcau

SEQ ID NO: 8973 - RNA, 19 nt, Artificial Sequence
  Description of Artificial Sequence: Synthetic oligonucleotide
  Antisense strand to SEQ ID NO: 8972
augcucacuucugagagcc

SEQ ID NO: 8974 - RNA, 19 nt, Artificial Sequence
  Description of Artificial Sequence: Synthetic oligonucleotide
  Sense strand starting at position 3620 of SEQ ID NO: 64
cagauacuucuuuggagug

SEQ ID NO: 8975 - RNA, 19 nt, Artificial Sequence
  Description of Artificial Sequence: Synthetic oligonucleotide
  Antisense strand to SEQ ID NO: 8974
cacuccaaagaaguaucug

SEQ ID NO: 8976 - RNA, 19 nt, Artificial Sequence
  Description of Artificial Sequence: Synthetic oligonucleotide
  Sense strand starting at position 3619 of SEQ ID NO: 64
gcagauacuucuuuggagu

SEQ ID NO: 8977 - RNA, 19 nt, Artificial Sequence
  Description of Artificial Sequence: Synthetic oligonucleotide
  Antisense strand to SEQ ID NO: 8976
acuccaaagaaguaucugc

SEQ ID NO: 8978 - RNA, 19 nt, Artificial Sequence
  Description of Artificial Sequence: Synthetic oligonucleotide
  Sense strand starting at position 3618 of SEQ ID NO: 64
agcagauacuucuuuggag

SEQ ID NO: 8979 - RNA, 19 nt, Artificial Sequence
  Description of Artificial Sequence: Synthetic oligonucleotide
  Antisense strand to SEQ ID NO: 8978
cuccaaagaaguaucugcu

SEQ ID NO: 8980 - RNA, 19 nt, Artificial Sequence
  Description of Artificial Sequence: Synthetic oligonucleotide
  Sense strand starting at position 3605 of SEQ ID NO: 64
guguauaauauguagcaga

SEQ ID NO: 8981 - RNA, 19 nt, Artificial Sequence
  Description of Artificial Sequence: Synthetic oligonucleotide
  Antisense strand to SEQ ID NO: 8980
ucugcuacauauuauacac

SEQ ID NO: 8982 - RNA, 19 nt, Artificial Sequence
  Description of Artificial Sequence: Synthetic oligonucleotide
  Sense strand starting at position 3603 of SEQ ID NO: 64
auguguauaauauguagca

SEQ ID NO: 8983 - RNA, 19 nt, Artificial Sequence
  Description of Artificial Sequence: Synthetic oligonucleotide
  Antisense strand to SEQ ID NO: 8982
ugcuacauauuauacacau

SEQ ID NO: 8984 - RNA, 19 nt, Artificial Sequence
  Description of Artificial Sequence: Synthetic oligonucleotide
  Sense strand starting at position 3598 of SEQ ID NO: 64
gguauauguguauaauaug

SEQ ID NO: 8985 - RNA, 19 nt, Artificial Sequence
  Description of Artificial Sequence: Synthetic oligonucleotide
  Antisense strand to SEQ ID NO: 8984
cauauuauacacauauacc

SEQ ID NO: 8986 - RNA, 19 nt, Artificial Sequence
  Description of Artificial Sequence: Synthetic oligonucleotide
  Sense strand starting at position 3509 of SEQ ID NO: 64
uaaaucucagugugcugua

SEQ ID NO: 8987 - RNA, 19 nt, Artificial Sequence
  Description of Artificial Sequence: Synthetic oligonucleotide
  Antisense strand to SEQ ID NO: 8986
uacagcacacugagauuua

SEQ ID NO: 8988 - RNA, 19 nt, Artificial Sequence
  Description of Artificial Sequence: Synthetic oligonucleotide
  Sense strand starting at position 3507 of SEQ ID NO: 64
aauaaaucucagugugcug

SEQ ID NO: 8989 - RNA, 19 nt, Artificial Sequence
  Description of Artificial Sequence: Synthetic oligonucleotide
  Antisense strand to SEQ ID NO: 8988
cagcacacugagauuuauu

SEQ ID NO: 8990 - RNA, 19 nt, Artificial Sequence
  Description of Artificial Sequence: Synthetic oligonucleotide
  Sense strand starting at position 3275 of SEQ ID NO: 64
augagaccagccugucuaa

SEQ ID NO: 8991 - RNA, 19 nt, Artificial Sequence
  Description of Artificial Sequence: Synthetic oligonucleotide
  Antisense strand to SEQ ID NO: 8990
uuagacaggcuggucucau

SEQ ID NO: 8992 - RNA, 19 nt, Artificial Sequence
  Description of Artificial Sequence: Synthetic oligonucleotide
  Sense strand starting at position 3093 of SEQ ID NO: 64
cugcuuacuccacgcacaa

SEQ ID NO: 8993 - RNA, 19 nt, Artificial Sequence
  Description of Artificial Sequence: Synthetic oligonucleotide
  Antisense strand to SEQ ID NO: 8992
uugugcguggaguaagcag

SEQ ID NO: 8994 - RNA, 19 nt, Artificial Sequence
  Description of Artificial Sequence: Synthetic oligonucleotide
  Sense strand starting at position 3057 of SEQ ID NO: 64
cuggcauaguuuccugaca

SEQ ID NO: 8995 - RNA, 19 nt, Artificial Sequence
  Description of Artificial Sequence: Synthetic oligonucleotide
  Antisense strand to SEQ ID NO: 8994
ugucaggaaacuaugccag

SEQ ID NO: 8996 - RNA, 19 nt, Artificial Sequence
  Description of Artificial Sequence: Synthetic oligonucleotide
  Sense strand starting at position 2851 of SEQ ID NO: 64
cgcagagaugccuuccgua

SEQ ID NO: 8997 - RNA, 19 nt, Artificial Sequence
  Description of Artificial Sequence: Synthetic oligonucleotide
  Antisense strand to SEQ ID NO: 8996
uacggaaggcaucucugcg

SEQ ID NO: 8998 - RNA, 19 nt, Artificial Sequence
  Description of Artificial Sequence: Synthetic oligonucleotide
  Sense strand starting at position 2801 of SEQ ID NO: 64
cucagauauugucuucccu

SEQ ID NO: 8999 - RNA, 19 nt, Artificial Sequence
  Description of Artificial Sequence: Synthetic oligonucleotide
  Antisense strand to SEQ ID NO: 8998
agggaagacaauaucugag

SEQ ID NO: 9000 - RNA, 19 nt, Artificial Sequence
  Description of Artificial Sequence: Synthetic oligonucleotide
  Sense strand starting at position 2786 of SEQ ID NO: 64
uuauuauuucccggccuca

SEQ ID NO: 9001 - RNA, 19 nt, Artificial Sequence
  Description of Artificial Sequence: Synthetic oligonucleotide
  Antisense strand to SEQ ID NO: 9000
ugaggccgggaaauaauaa

SEQ ID NO: 9002 - RNA, 19 nt, Artificial Sequence
  Description of Artificial Sequence: Synthetic oligonucleotide
  Sense strand starting at position 2756 of SEQ ID NO: 64
caggaauacugauaaagug

SEQ ID NO: 9003 - RNA, 19 nt, Artificial Sequence
  Description of Artificial Sequence: Synthetic oligonucleotide
  Antisense strand to SEQ ID NO: 9002
cacuuuaucaguauuccug

SEQ ID NO: 9004 - RNA, 19 nt, Artificial Sequence
  Description of Artificial Sequence: Synthetic oligonucleotide
  Sense strand starting at position 2698 of SEQ ID NO: 64
ugggauaagugcccauaag

SEQ ID NO: 9005 - RNA, 19 nt, Artificial Sequence
  Description of Artificial Sequence: Synthetic oligonucleotide
  Antisense strand to SEQ ID NO: 9004
cuuaugggcacuuauccca

SEQ ID NO: 9006 - RNA, 19 nt, Artificial Sequence
  Description of Artificial Sequence: Synthetic oligonucleotide
  Sense strand starting at position 2689 of SEQ ID NO: 64
cccaacuagugggauaagu

SEQ ID NO: 9007 - RNA, 19 nt, Artificial Sequence
  Description of Artificial Sequence: Synthetic oligonucleotide
  Antisense strand to SEQ ID NO: 9006
acuuaucccacuaguuggg

SEQ ID NO: 9008 - RNA, 19 nt, Artificial Sequence
  Description of Artificial Sequence: Synthetic oligonucleotide
  Sense strand starting at position 2539 of SEQ ID NO: 64
ggacuuccaugcgcauuau

SEQ ID NO: 9009 - RNA, 19 nt, Artificial Sequence
  Description of Artificial Sequence: Synthetic oligonucleotide
  Antisense strand to SEQ ID NO: 9008
auaaugcgcauggaagucc

SEQ ID NO: 9010 - RNA, 19 nt, Artificial Sequence
  Description of Artificial Sequence: Synthetic oligonucleotide
  Sense strand starting at position 2538 of SEQ ID NO: 64
aggacuuccaugcgcauua

SEQ ID NO: 9011 - RNA, 19 nt, Artificial Sequence
  Description of Artificial Sequence: Synthetic oligonucleotide
  Antisense strand to SEQ ID NO: 9010
uaaugcgcauggaaguccu

SEQ ID NO: 9012 - RNA, 19 nt, Artificial Sequence
  Description of Artificial Sequence: Synthetic oligonucleotide
  Sense strand starting at position 2536 of SEQ ID NO: 64
ccaggacuuccaugcgcau

SEQ ID NO: 9013 - RNA, 19 nt, Artificial Sequence
  Description of Artificial Sequence: Synthetic oligonucleotide
  Antisense strand to SEQ ID NO: 9012
augcgcauggaaguccugg

SEQ ID NO: 9014 - RNA, 19 nt, Artificial Sequence
  Description of Artificial Sequence: Synthetic oligonucleotide
  Sense strand starting at position 2525 of SEQ ID NO: 64
gguaaaugauuccaggacu

SEQ ID NO: 9015 - RNA, 19 nt, Artificial Sequence
  Description of Artificial Sequence: Synthetic oligonucleotide
  Antisense strand to SEQ ID NO: 9014
aguccuggaaucauuuacc

SEQ ID NO: 9016 - RNA, 19 nt, Artificial Sequence
  Description of Artificial Sequence: Synthetic oligonucleotide
  Sense strand starting at position 2515 of SEQ ID NO: 64
ggaccuucuugguaaauga

SEQ ID NO: 9017 - RNA, 19 nt, Artificial Sequence
  Description of Artificial Sequence: Synthetic oligonucleotide
  Antisense strand to SEQ ID NO: 9016
ucauuuaccaagaaggucc

SEQ ID NO: 9018 - RNA, 19 nt, Artificial Sequence
  Description of Artificial Sequence: Synthetic oligonucleotide
  Sense strand starting at position 2513 of SEQ ID NO: 64
caggaccuucuugguaaau

SEQ ID NO: 9019 - RNA, 19 nt, Artificial Sequence
  Description of Artificial Sequence: Synthetic oligonucleotide
  Antisense strand to SEQ ID NO: 9018
auuuaccaagaagguccug

SEQ ID NO: 9020 - RNA, 19 nt, Artificial Sequence
  Description of Artificial Sequence: Synthetic oligonucleotide
  Sense strand starting at position 2400 of SEQ ID NO: 64
uccugcucucaagaaauug

SEQ ID NO: 9021 - RNA, 19 nt, Artificial Sequence
  Description of Artificial Sequence: Synthetic oligonucleotide
  Antisense strand to SEQ ID NO: 9020
caauuucuugagagcagga

SEQ ID NO: 9022 - RNA, 19 nt, Artificial Sequence
  Description of Artificial Sequence: Synthetic oligonucleotide
  Sense strand starting at position 2394 of SEQ ID NO: 64
aucgaauccugcucucaag

SEQ ID NO: 9023 - RNA, 19 nt, Artificial Sequence
  Description of Artificial Sequence: Synthetic oligonucleotide
  Antisense strand to SEQ ID NO: 9022
cuugagagcaggauucgau

SEQ ID NO: 9024 - RNA, 19 nt, Artificial Sequence
  Description of Artificial Sequence: Synthetic oligonucleotide
  Sense strand starting at position 2381 of SEQ ID NO: 64
ccgugaacaacagaucgaa

SEQ ID NO: 9025 - RNA, 19 nt, Artificial Sequence
  Description of Artificial Sequence: Synthetic oligonucleotide
  Antisense strand to SEQ ID NO: 9024
uucgaucuguuguucacgg

SEQ ID NO: 9026 - RNA, 19 nt, Artificial Sequence
  Description of Artificial Sequence: Synthetic oligonucleotide
  Sense strand starting at position 2373 of SEQ ID NO: 64
ggaucuagccgugaacaac

SEQ ID NO: 9027 - RNA, 19 nt, Artificial Sequence
  Description of Artificial Sequence: Synthetic oligonucleotide
  Antisense strand to SEQ ID NO: 9026
guuguucacggcuagaucc

SEQ ID NO: 9028 - RNA, 19 nt, Artificial Sequence
  Description of Artificial Sequence: Synthetic oligonucleotide
  Sense strand starting at position 2372 of SEQ ID NO: 64
aggaucuagccgugaacaa

SEQ ID NO: 9029 - RNA, 19 nt, Artificial Sequence
  Description of Artificial Sequence: Synthetic oligonucleotide
  Antisense strand to SEQ ID NO: 9028
uuguucacggcuagauccu

SEQ ID NO: 9030 - RNA, 19 nt, Artificial Sequence
  Description of Artificial Sequence: Synthetic oligonucleotide
  Sense strand starting at position 2370 of SEQ ID NO: 64
uuaggaucuagccgugaac

SEQ ID NO: 9031 - RNA, 19 nt, Artificial Sequence
  Description of Artificial Sequence: Synthetic oligonucleotide
  Antisense strand to SEQ ID NO: 9030
guucacggcuagauccuaa

SEQ ID NO: 9032 - RNA, 19 nt, Artificial Sequence
  Description of Artificial Sequence: Synthetic oligonucleotide
  Sense strand starting at position 2353 of SEQ ID NO: 64
gaaacuauucuaggcgcuu

SEQ ID NO: 9033 - RNA, 19 nt, Artificial Sequence
  Description of Artificial Sequence: Synthetic oligonucleotide
  Antisense strand to SEQ ID NO: 9032
aagcgccuagaauaguuuc

SEQ ID NO: 9034 - RNA, 19 nt, Artificial Sequence
  Description of Artificial Sequence: Synthetic oligonucleotide
  Sense strand starting at position 2270 of SEQ ID NO: 64
guguuuacagccgaggaau

SEQ ID NO: 9035 - RNA, 19 nt, Artificial Sequence
  Description of Artificial Sequence: Synthetic oligonucleotide
  Antisense strand to SEQ ID NO: 9034
auuccucggcuguaaacac

SEQ ID NO: 9036 - RNA, 19 nt, Artificial Sequence
  Description of Artificial Sequence: Synthetic oligonucleotide
  Sense strand starting at position 2269 of SEQ ID NO: 64
uguguuuacagccgaggaa

SEQ ID NO: 9037 - RNA, 19 nt, Artificial Sequence
  Description of Artificial Sequence: Synthetic oligonucleotide
  Antisense strand to SEQ ID NO: 9036
uuccucggcuguaaacaca

SEQ ID NO: 9038 - RNA, 19 nt, Artificial Sequence
  Description of Artificial Sequence: Synthetic oligonucleotide
  Sense strand starting at position 2251 of SEQ ID NO: 64
gcggcuaggugauuucauu

SEQ ID NO: 9039 - RNA, 19 nt, Artificial Sequence
  Description of Artificial Sequence: Synthetic oligonucleotide
  Antisense strand to SEQ ID NO: 9038
aaugaaaucaccuagccgc

SEQ ID NO: 9040 - RNA, 19 nt, Artificial Sequence
  Description of Artificial Sequence: Synthetic oligonucleotide
  Sense strand starting at position 742 of SEQ ID NO: 64
gcuauuccucgcgacagga

SEQ ID NO: 9041 - RNA, 19 nt, Artificial Sequence
  Description of Artificial Sequence: Synthetic oligonucleotide
  Antisense strand to SEQ ID NO: 9040
uccugucgcgaggaauagc

SEQ ID NO: 9042 - RNA, 19 nt, Artificial Sequence
  Description of Artificial Sequence: Synthetic oligonucleotide
  Sense strand starting at position 332 of SEQ ID NO: 64
gaacgagucuccuccgagu

SEQ ID NO: 9043 - RNA, 19 nt, Artificial Sequence
  Description of Artificial Sequence: Synthetic oligonucleotide
  Antisense strand to SEQ ID NO: 9042
acucggaggagacucguuc

SEQ ID NO: 9044 - RNA, 19 nt, Artificial Sequence
  Description of Artificial Sequence: Synthetic oligonucleotide
  Sense strand starting at position 298 of SEQ ID NO: 64
ccaggaaagcugcauuaca

SEQ ID NO: 9045 - RNA, 19 nt, Artificial Sequence
  Description of Artificial Sequence: Synthetic oligonucleotide
  Antisense strand to SEQ ID NO: 9044
uguaaugcagcuuuccugg

SEQ ID NO: 9046 - RNA, 19 nt, Artificial Sequence
  Description of Artificial Sequence: Synthetic oligonucleotide
  Sense strand starting at position 287 of SEQ ID NO: 64
agaagccauuuccaggaaa

SEQ ID NO: 9047 - RNA, 19 nt, Artificial Sequence
  Description of Artificial Sequence: Synthetic oligonucleotide
  Antisense strand to SEQ ID NO: 9046
uuuccuggaaauggcuucu

SEQ ID NO: 9048 - RNA, 19 nt, Artificial Sequence
  Description of Artificial Sequence: Synthetic oligonucleotide
  Sense strand starting at position 198 of SEQ ID NO: 64
ccgucagacuaagaaauca

SEQ ID NO: 9049 - RNA, 19 nt, Artificial Sequence
  Description of Artificial Sequence: Synthetic oligonucleotide
  Antisense strand to SEQ ID NO: 9048
ugauuucuuagucugacgg

SEQ ID NO: 9050 - RNA, 19 nt, Artificial Sequence
  Description of Artificial Sequence: Synthetic oligonucleotide
  Sense strand starting at position 3896 of SEQ ID NO: 67
ucauaugguugccuuaaac

SEQ ID NO: 9051 - RNA, 19 nt, Artificial Sequence
  Description of Artificial Sequence: Synthetic oligonucleotide
  Antisense strand to SEQ ID NO: 9050
guuuaaggcaaccauauga

SEQ ID NO: 9052 - RNA, 19 nt, Artificial Sequence
  Description of Artificial Sequence: Synthetic oligonucleotide
  Sense strand starting at position 3794 of SEQ ID NO: 67
uuucuuguuccggaaacaa

SEQ ID NO: 9053 - RNA, 19 nt, Artificial Sequence
  Description of Artificial Sequence: Synthetic oligonucleotide
  Antisense strand to SEQ ID NO: 9052
uuguuuccggaacaagaaa

SEQ ID NO: 9054 - RNA, 19 nt, Artificial Sequence
  Description of Artificial Sequence: Synthetic oligonucleotide
  Sense strand starting at position 3790 of SEQ ID NO: 67
ucuauuucuuguuccggaa

SEQ ID NO: 9055 - RNA, 19 nt, Artificial Sequence
  Description of Artificial Sequence: Synthetic oligonucleotide
  Antisense strand to SEQ ID NO: 9054
uuccggaacaagaaauaga

SEQ ID NO: 9056 - RNA, 19 nt, Artificial Sequence
  Description of Artificial Sequence: Synthetic oligonucleotide
  Sense strand starting at position 3789 of SEQ ID NO: 67
uucuauuucuuguuccgga

SEQ ID NO: 9057 - RNA, 19 nt, Artificial Sequence
  Description of Artificial Sequence: Synthetic oligonucleotide
  Antisense strand to SEQ ID NO: 9056
uccggaacaagaaauagaa

SEQ ID NO: 9058 - RNA, 19 nt, Artificial Sequence
  Description of Artificial Sequence: Synthetic oligonucleotide
  Sense strand starting at position 3735 of SEQ ID NO: 67
aacuauagagucugaaugu

SEQ ID NO: 9059 - RNA, 19 nt, Artificial Sequence
  Description of Artificial Sequence: Synthetic oligonucleotide
  Antisense strand to SEQ ID NO: 9058
acauucagacucuauaguu

SEQ ID NO: 9060 - RNA, 19 nt, Artificial Sequence
  Description of Artificial Sequence: Synthetic oligonucleotide
  Sense strand starting at position 3692 of SEQ ID NO: 67
gggucuggcuggagaaaga

SEQ ID NO: 9061 - RNA, 19 nt, Artificial Sequence
  Description of Artificial Sequence: Synthetic oligonucleotide
  Antisense strand to SEQ ID NO: 9060
ucuuucuccagccagaccc

SEQ ID NO: 9062 - RNA, 19 nt, Artificial Sequence
  Description of Artificial Sequence: Synthetic oligonucleotide
  Sense strand starting at position 3605 of SEQ ID NO: 67
cggagaauaugaucucuaa

SEQ ID NO: 9063 - RNA, 19 nt, Artificial Sequence
  Description of Artificial Sequence: Synthetic oligonucleotide
  Antisense strand to SEQ ID NO: 9062
uuagagaucauauucuccg

SEQ ID NO: 9064 - RNA, 19 nt, Artificial Sequence
  Description of Artificial Sequence: Synthetic oligonucleotide
  Sense strand starting at position 3365 of SEQ ID NO: 67
gagggugggcaucauuaau

SEQ ID NO: 9065 - RNA, 19 nt, Artificial Sequence
  Description of Artificial Sequence: Synthetic oligonucleotide
  Antisense strand to SEQ ID NO: 9064
auuaaugaugcccacccuc

SEQ ID NO: 9066 - RNA, 19 nt, Artificial Sequence
  Description of Artificial Sequence: Synthetic oligonucleotide
  Sense strand starting at position 3325 of SEQ ID NO: 67
gcuagagaugcuuaaauug

SEQ ID NO: 9067 - RNA, 19 nt, Artificial Sequence
  Description of Artificial Sequence: Synthetic oligonucleotide
  Antisense strand to SEQ ID NO: 9066
caauuuaagcaucucuagc

SEQ ID NO: 9068 - RNA, 19 nt, Artificial Sequence
  Description of Artificial Sequence: Synthetic oligonucleotide
  Sense strand starting at position 3264 of SEQ ID NO: 67
aguuaauuaucuccaugga

SEQ ID NO: 9069 - RNA, 19 nt, Artificial Sequence
  Description of Artificial Sequence: Synthetic oligonucleotide
  Antisense strand to SEQ ID NO: 9068
uccauggagauaauuaacu

SEQ ID NO: 9070 - RNA, 19 nt, Artificial Sequence
  Description of Artificial Sequence: Synthetic oligonucleotide
  Sense strand starting at position 3254 of SEQ ID NO: 67
guagucaacuaguuaauua

SEQ ID NO: 9071 - RNA, 19 nt, Artificial Sequence
  Description of Artificial Sequence: Synthetic oligonucleotide
  Antisense strand to SEQ ID NO: 9070
uaauuaacuaguugacuac

SEQ ID NO: 9072 - RNA, 19 nt, Artificial Sequence
  Description of Artificial Sequence: Synthetic oligonucleotide
  Sense strand starting at position 3115 of SEQ ID NO: 67
ucuugaguaucucuauccu

SEQ ID NO: 9073 - RNA, 19 nt, Artificial Sequence
  Description of Artificial Sequence: Synthetic oligonucleotide
  Antisense strand to SEQ ID NO: 9072
aggauagagauacucaaga

SEQ ID NO: 9074 - RNA, 19 nt, Artificial Sequence
  Description of Artificial Sequence: Synthetic oligonucleotide
  Sense strand starting at position 3110 of SEQ ID NO: 67
uuagaucuugaguaucucu

SEQ ID NO: 9075 - RNA, 19 nt, Artificial Sequence
  Description of Artificial Sequence: Synthetic oligonucleotide
  Antisense strand to SEQ ID NO: 9074
agagauacucaagaucuaa

SEQ ID NO: 9076 - RNA, 19 nt, Artificial Sequence
  Description of Artificial Sequence: Synthetic oligonucleotide
  Sense strand starting at position 3109 of SEQ ID NO: 67
uuuagaucuugaguaucuc

SEQ ID NO: 9077 - RNA, 19 nt, Artificial Sequence
  Description of Artificial Sequence: Synthetic oligonucleotide
  Antisense strand to SEQ ID NO: 9076
gagauacucaagaucuaaa

SEQ ID NO: 9078 - RNA, 19 nt, Artificial Sequence
  Description of Artificial Sequence: Synthetic oligonucleotide
  Sense strand starting at position 3073 of SEQ ID NO: 67
ggauucaugguguggaauc

SEQ ID NO: 9079 - RNA, 19 nt, Artificial Sequence
  Description of Artificial Sequence: Synthetic oligonucleotide
  Antisense strand to SEQ ID NO: 9078
gauuccacaccaugaaucc

SEQ ID NO: 9080 - RNA, 19 nt, Artificial Sequence
  Description of Artificial Sequence: Synthetic oligonucleotide
  Sense strand starting at position 2094 of SEQ ID NO: 67
gggcgagugcgcuucuaca

SEQ ID NO: 9081 - RNA, 19 nt, Artificial Sequence
  Description of Artificial Sequence: Synthetic oligonucleotide
  Antisense strand to SEQ ID NO: 9080
uguagaagcgcacucgccc

SEQ ID NO: 9082 - RNA, 19 nt, Artificial Sequence
  Description of Artificial Sequence: Synthetic oligonucleotide
  Sense strand starting at position 2003 of SEQ ID NO: 67
aaacuugaucugugagaug

SEQ ID NO: 9083 - RNA, 19 nt, Artificial Sequence
  Description of Artificial Sequence: Synthetic oligonucleotide
  Antisense strand to SEQ ID NO: 9082
caucucacagaucaaguuu

SEQ ID NO: 9084 - RNA, 19 nt, Artificial Sequence
  Description of Artificial Sequence: Synthetic oligonucleotide
  Sense strand starting at position 2002 of SEQ ID NO: 67
gaaacuugaucugugagau

SEQ ID NO: 9085 - RNA, 19 nt, Artificial Sequence
  Description of Artificial Sequence: Synthetic oligonucleotide
  Antisense strand to SEQ ID NO: 9084
aucucacagaucaaguuuc

SEQ ID NO: 9086 - RNA, 19 nt, Artificial Sequence
  Description of Artificial Sequence: Synthetic oligonucleotide
  Sense strand starting at position 2001 of SEQ ID NO: 67
ugaaacuugaucugugaga

SEQ ID NO: 9087 - RNA, 19 nt, Artificial Sequence
  Description of Artificial Sequence: Synthetic oligonucleotide
  Antisense strand to SEQ ID NO: 9086
ucucacagaucaaguuuca

SEQ ID NO: 9088 - RNA, 19 nt, Artificial Sequence
  Description of Artificial Sequence: Synthetic oligonucleotide
  Sense strand starting at position 1999 of SEQ ID NO: 67
acugaaacuugaucuguga

SEQ ID NO: 9089 - RNA, 19 nt, Artificial Sequence
  Description of Artificial Sequence: Synthetic oligonucleotide
  Antisense strand to SEQ ID NO: 9088
ucacagaucaaguuucagu

SEQ ID NO: 9090 - RNA, 19 nt, Artificial Sequence
  Description of Artificial Sequence: Synthetic oligonucleotide
  Sense strand starting at position 983 of SEQ ID NO: 67
gugguuuaccuggaaaucu

SEQ ID NO: 9091 - RNA, 19 nt, Artificial Sequence
  Description of Artificial Sequence: Synthetic oligonucleotide
  Antisense strand to SEQ ID NO: 9090
agauuuccagguaaaccac

SEQ ID NO: 9092 - RNA, 19 nt, Artificial Sequence
  Description of Artificial Sequence: Synthetic oligonucleotide
  Sense strand starting at position 982 of SEQ ID NO: 67
agugguuuaccuggaaauc

SEQ ID NO: 9093 - RNA, 19 nt, Artificial Sequence
  Description of Artificial Sequence: Synthetic oligonucleotide
  Antisense strand to SEQ ID NO: 9092
gauuuccagguaaaccacu

SEQ ID NO: 9094 - RNA, 19 nt, Artificial Sequence
  Description of Artificial Sequence: Synthetic oligonucleotide
  Sense strand starting at position 979 of SEQ ID NO: 67
gugagugguuuaccuggaa

SEQ ID NO: 9095 - RNA, 19 nt, Artificial Sequence
  Description of Artificial Sequence: Synthetic oligonucleotide
  Antisense strand to SEQ ID NO: 9094
uuccagguaaaccacucac

SEQ ID NO: 9096 - RNA, 19 nt, Artificial Sequence
  Description of Artificial Sequence: Synthetic oligonucleotide
  Sense strand starting at position 782 of SEQ ID NO: 67
guaguaaucuuugugagaa

SEQ ID NO: 9097 - RNA, 19 nt, Artificial Sequence
  Description of Artificial Sequence: Synthetic oligonucleotide
  Antisense strand to SEQ ID NO: 9096
uucucacaaagauuacuac

SEQ ID NO: 9098 - RNA, 19 nt, Artificial Sequence
  Description of Artificial Sequence: Synthetic oligonucleotide
  Sense strand starting at position 781 of SEQ ID NO: 67
aguaguaaucuuugugaga

SEQ ID NO: 9099 - RNA, 19 nt, Artificial Sequence
  Description of Artificial Sequence: Synthetic oligonucleotide
  Antisense strand to SEQ ID NO: 9098
ucucacaaagauuacuacu

SEQ ID NO: 9100 - RNA, 19 nt, Artificial Sequence
  Description of Artificial Sequence: Synthetic oligonucleotide
  Sense strand starting at position 752 of SEQ ID NO: 67
uuuagaagcguagaaauga

SEQ ID NO: 9101 - RNA, 19 nt, Artificial Sequence
  Description of Artificial Sequence: Synthetic oligonucleotide
  Antisense strand to SEQ ID NO: 9100
ucauuucuacgcuucuaaa

SEQ ID NO: 9102 - RNA, 19 nt, Artificial Sequence
  Description of Artificial Sequence: Synthetic oligonucleotide
  Sense strand starting at position 687 of SEQ ID NO: 67
aaagauguacuauguagga

SEQ ID NO: 9103 - RNA, 19 nt, Artificial Sequence
  Description of Artificial Sequence: Synthetic oligonucleotide
  Antisense strand to SEQ ID NO: 9102
uccuacauaguacaucuuu

SEQ ID NO: 9104 - RNA, 19 nt, Artificial Sequence
  Description of Artificial Sequence: Synthetic oligonucleotide
  Sense strand starting at position 623 of SEQ ID NO: 67
ucaaacuucucugugguua

SEQ ID NO: 9105 - RNA, 19 nt, Artificial Sequence
  Description of Artificial Sequence: Synthetic oligonucleotide
  Antisense strand to SEQ ID NO: 9104
uaaccacagagaaguuuga

SEQ ID NO: 9106 - RNA, 19 nt, Artificial Sequence
  Description of Artificial Sequence: Synthetic oligonucleotide
  Sense strand starting at position 622 of SEQ ID NO: 67
aucaaacuucucugugguu

SEQ ID NO: 9107 - RNA, 19 nt, Artificial Sequence
  Description of Artificial Sequence: Synthetic oligonucleotide
  Antisense strand to SEQ ID NO: 9106
aaccacagagaaguuugau

SEQ ID NO: 9108 - RNA, 19 nt, Artificial Sequence
  Description of Artificial Sequence: Synthetic oligonucleotide
  Sense strand starting at position 512 of SEQ ID NO: 67
gugcauuauuuaucccauu

SEQ ID NO: 9109 - RNA, 19 nt, Artificial Sequence
  Description of Artificial Sequence: Synthetic oligonucleotide
  Antisense strand to SEQ ID NO: 9108
aaugggauaaauaaugcac

SEQ ID NO: 9110 - RNA, 19 nt, Artificial Sequence
  Description of Artificial Sequence: Synthetic oligonucleotide
  Sense strand starting at position 459 of SEQ ID NO: 67
aucuaaguccauuacugua

SEQ ID NO: 9111 - RNA, 19 nt, Artificial Sequence
  Description of Artificial Sequence: Synthetic oligonucleotide
  Antisense strand to SEQ ID NO: 9110
uacaguaauggacuuagau

SEQ ID NO: 9112 - RNA, 19 nt, Artificial Sequence
  Description of Artificial Sequence: Synthetic oligonucleotide
  Sense strand starting at position 440 of SEQ ID NO: 67
ucucauuguccacaaguga

SEQ ID NO: 9113 - RNA, 19 nt, Artificial Sequence
  Description of Artificial Sequence: Synthetic oligonucleotide
  Antisense strand to SEQ ID NO: 9112
ucacuuguggacaaugaga

SEQ ID NO: 9114 - RNA, 19 nt, Artificial Sequence
  Description of Artificial Sequence: Synthetic oligonucleotide
  Sense strand starting at position 388 of SEQ ID NO: 67
cgucuuacugaaggaugua

SEQ ID NO: 9115 - RNA, 19 nt, Artificial Sequence
  Description of Artificial Sequence: Synthetic oligonucleotide
  Antisense strand to SEQ ID NO: 9114
uacauccuucaguaagacg

SEQ ID NO: 9116 - RNA, 19 nt, Artificial Sequence
  Description of Artificial Sequence: Synthetic oligonucleotide
  Sense strand starting at position 385 of SEQ ID NO: 67
auucgucuuacugaaggau

SEQ ID NO: 9117 - RNA, 19 nt, Artificial Sequence
  Description of Artificial Sequence: Synthetic oligonucleotide
  Antisense strand to SEQ ID NO: 9116
auccuucaguaagacgaau

SEQ ID NO: 9118 - RNA, 19 nt, Artificial Sequence
  Description of Artificial Sequence: Synthetic oligonucleotide
  Sense strand starting at position 267 of SEQ ID NO: 67
aaauauuguggugggcaaa

SEQ ID NO: 9119 - RNA, 19 nt, Artificial Sequence
  Description of Artificial Sequence: Synthetic oligonucleotide
  Antisense strand to SEQ ID NO: 9118
uuugcccaccacaauauuu

SEQ ID NO: 9120 - RNA, 19 nt, Artificial Sequence
  Description of Artificial Sequence: Synthetic oligonucleotide
  Sense strand starting at position 234 of SEQ ID NO: 67
guagacagcuaauuguuaa

SEQ ID NO: 9121 - RNA, 19 nt, Artificial Sequence
  Description of Artificial Sequence: Synthetic oligonucleotide
  Antisense strand to SEQ ID NO: 9120
uuaacaauuagcugucuac

SEQ ID NO: 9122 - RNA, 19 nt, Artificial Sequence
  Description of Artificial Sequence: Synthetic oligonucleotide
  Sense strand starting at position 227 of SEQ ID NO: 67
guguuuaguagacagcuaa

SEQ ID NO: 9123 - RNA, 19 nt, Artificial Sequence
  Description of Artificial Sequence: Synthetic oligonucleotide
  Antisense strand to SEQ ID NO: 9122
uuagcugucuacuaaacac

SEQ ID NO: 9124 - RNA, 19 nt, Artificial Sequence
  Description of Artificial Sequence: Synthetic oligonucleotide
  Sense strand starting at position 220 of SEQ ID NO: 67
ugucuugguguuuaguaga

SEQ ID NO: 9125 - RNA, 19 nt, Artificial Sequence
  Description of Artificial Sequence: Synthetic oligonucleotide
  Antisense strand to SEQ ID NO: 9124
ucuacuaaacaccaagaca

SEQ ID NO: 9126 - RNA, 19 nt, Artificial Sequence
  Description of Artificial Sequence: Synthetic oligonucleotide
  Sense strand starting at position 163 of SEQ ID NO: 67
auacaauaaucagucaguu

SEQ ID NO: 9127 - RNA, 19 nt, Artificial Sequence
  Description of Artificial Sequence: Synthetic oligonucleotide
  Antisense strand to SEQ ID NO: 9126
aacugacugauuauuguau

SEQ ID NO: 9128 - RNA, 19 nt, Artificial Sequence
  Description of Artificial Sequence: Synthetic oligonucleotide
  Sense strand starting at position 147 of SEQ ID NO: 67
gucugacaauacgucaaua

SEQ ID NO: 9129 - RNA, 19 nt, Artificial Sequence
  Description of Artificial Sequence: Synthetic oligonucleotide
  Antisense strand to SEQ ID NO: 9128
uauugacguauugucagac

SEQ ID NO: 9130 - RNA, 19 nt, Artificial Sequence
  Description of Artificial Sequence: Synthetic oligonucleotide
  Sense strand starting at position 3952 of SEQ ID NO: 66
acauccuugcugugggaaa

SEQ ID NO: 9131 - RNA, 19 nt, Artificial Sequence
  Description of Artificial Sequence: Synthetic oligonucleotide
  Antisense strand to SEQ ID NO: 9130
uuucccacagcaaggaugu

SEQ ID NO: 9132 - RNA, 19 nt, Artificial Sequence
  Description of Artificial Sequence: Synthetic oligonucleotide
  Sense strand starting at position 3761 of SEQ ID NO: 66
cagagacaauuaguguauu

SEQ ID NO: 9133 - RNA, 19 nt, Artificial Sequence
  Description of Artificial Sequence: Synthetic oligonucleotide
  Antisense strand to SEQ ID NO: 9132
aauacacuaauugucucug

SEQ ID NO: 9134 - RNA, 19 nt, Artificial Sequence
  Description of Artificial Sequence: Synthetic oligonucleotide
  Sense strand starting at position 3759 of SEQ ID NO: 66
ugcagagacaauuagugua

SEQ ID NO: 9135 - RNA, 19 nt, Artificial Sequence
  Description of Artificial Sequence: Synthetic oligonucleotide
  Antisense strand to SEQ ID NO: 9134
uacacuaauugucucugca

SEQ ID NO: 9136 - RNA, 19 nt, Artificial Sequence
  Description of Artificial Sequence: Synthetic oligonucleotide
  Sense strand starting at position 3698 of SEQ ID NO: 66
aauuguagauagccugaaa

SEQ ID NO: 9137 - RNA, 19 nt, Artificial Sequence
  Description of Artificial Sequence: Synthetic oligonucleotide
  Antisense strand to SEQ ID NO: 9136
uuucaggcuaucuacaauu

SEQ ID NO: 9138 - RNA, 19 nt, Artificial Sequence
  Description of Artificial Sequence: Synthetic oligonucleotide
  Sense strand starting at position 3635 of SEQ ID NO: 66
ggacaaguguuggcaacuu

SEQ ID NO: 9139 - RNA, 19 nt, Artificial Sequence
  Description of Artificial Sequence: Synthetic oligonucleotide
  Antisense strand to SEQ ID NO: 9138
aaguugccaacacuugucc

SEQ ID NO: 9140 - RNA, 19 nt, Artificial Sequence
  Description of Artificial Sequence: Synthetic oligonucleotide
  Sense strand starting at position 3626 of SEQ ID NO: 66
aguguuaccggacaagugu

SEQ ID NO: 9141 - RNA, 19 nt, Artificial Sequence
  Description of Artificial Sequence: Synthetic oligonucleotide
  Antisense strand to SEQ ID NO: 9140
acacuuguccgguaacacu

SEQ ID NO: 9142 - RNA, 19 nt, Artificial Sequence
  Description of Artificial Sequence: Synthetic oligonucleotide
  Sense strand starting at position 3623 of SEQ ID NO: 66
uuuaguguuaccggacaag

SEQ ID NO: 9143 - RNA, 19 nt, Artificial Sequence
  Description of Artificial Sequence: Synthetic oligonucleotide
  Antisense strand to SEQ ID NO: 9142
cuuguccgguaacacuaaa

SEQ ID NO: 9144 - RNA, 19 nt, Artificial Sequence
  Description of Artificial Sequence: Synthetic oligonucleotide
  Sense strand starting at position 3621 of SEQ ID NO: 66
acuuuaguguuaccggaca

SEQ ID NO: 9145 - RNA, 19 nt, Artificial Sequence
  Description of Artificial Sequence: Synthetic oligonucleotide
  Antisense strand to SEQ ID NO: 9144
uguccgguaacacuaaagu

SEQ ID NO: 9146 - RNA, 19 nt, Artificial Sequence
  Description of Artificial Sequence: Synthetic oligonucleotide
  Sense strand starting at position 3585 of SEQ ID NO: 66
cugucuucccuugaagaaa

SEQ ID NO: 9147 - RNA, 19 nt, Artificial Sequence
  Description of Artificial Sequence: Synthetic oligonucleotide
  Antisense strand to SEQ ID NO: 9146
uuucuucaagggaagacag

SEQ ID NO: 9148 - RNA, 19 nt, Artificial Sequence
  Description of Artificial Sequence: Synthetic oligonucleotide
  Sense strand starting at position 3584 of SEQ ID NO: 66
ccugucuucccuugaagaa

SEQ ID NO: 9149 - RNA, 19 nt, Artificial Sequence
  Description of Artificial Sequence: Synthetic oligonucleotide
  Antisense strand to SEQ ID NO: 9148
uucuucaagggaagacagg

SEQ ID NO: 9150 - RNA, 19 nt, Artificial Sequence
  Description of Artificial Sequence: Synthetic oligonucleotide
  Sense strand starting at position 3545 of SEQ ID NO: 66
ucauccuuugcagacaaga

SEQ ID NO: 9151 - RNA, 19 nt, Artificial Sequence
  Description of Artificial Sequence: Synthetic oligonucleotide
  Antisense strand to SEQ ID NO: 9150
ucuugucugcaaaggauga

SEQ ID NO: 9152 - RNA, 19 nt, Artificial Sequence
  Description of Artificial Sequence: Synthetic oligonucleotide
  Sense strand starting at position 3542 of SEQ ID NO: 66
aggucauccuuugcagaca

SEQ ID NO: 9153 - RNA, 19 nt, Artificial Sequence
  Description of Artificial Sequence: Synthetic oligonucleotide
  Antisense strand to SEQ ID NO: 9152
ugucugcaaaggaugaccu

SEQ ID NO: 9154 - RNA, 19 nt, Artificial Sequence
  Description of Artificial Sequence: Synthetic oligonucleotide
  Sense strand starting at position 3520 of SEQ ID NO: 66
ccaguuucuccaggacuuu

SEQ ID NO: 9155 - RNA, 19 nt, Artificial Sequence
  Description of Artificial Sequence: Synthetic oligonucleotide
  Antisense strand to SEQ ID NO: 9154
aaaguccuggagaaacugg

SEQ ID NO: 9156 - RNA, 19 nt, Artificial Sequence
  Description of Artificial Sequence: Synthetic oligonucleotide
  Sense strand starting at position 3271 of SEQ ID NO: 66
ucauaugguugccuuaaac

SEQ ID NO: 9157 - RNA, 19 nt, Artificial Sequence
  Description of Artificial Sequence: Synthetic oligonucleotide
  Antisense strand to SEQ ID NO: 9156
guuuaaggcaaccauauga

SEQ ID NO: 9158 - RNA, 19 nt, Artificial Sequence
  Description of Artificial Sequence: Synthetic oligonucleotide
  Sense strand starting at position 3169 of SEQ ID NO: 66
uuucuuguuccggaaacaa

SEQ ID NO: 9159 - RNA, 19 nt, Artificial Sequence
  Description of Artificial Sequence: Synthetic oligonucleotide
  Antisense strand to SEQ ID NO: 9158
uuguuuccggaacaagaaa

SEQ ID NO: 9160 - RNA, 19 nt, Artificial Sequence
  Description of Artificial Sequence: Synthetic oligonucleotide
  Sense strand starting at position 3165 of SEQ ID NO: 66
ucuauuucuuguuccggaa

SEQ ID NO: 9161 - RNA, 19 nt, Artificial Sequence
  Description of Artificial Sequence: Synthetic oligonucleotide
  Antisense strand to SEQ ID NO: 9160
uuccggaacaagaaauaga

SEQ ID NO: 9162 - RNA, 19 nt, Artificial Sequence
  Description of Artificial Sequence: Synthetic oligonucleotide
  Sense strand starting at position 3164 of SEQ ID NO: 66
uucuauuucuuguuccgga

SEQ ID NO: 9163 - RNA, 19 nt, Artificial Sequence
  Description of Artificial Sequence: Synthetic oligonucleotide
  Antisense strand to SEQ ID NO: 9162
uccggaacaagaaauagaa

SEQ ID NO: 9164 - RNA, 19 nt, Artificial Sequence
  Description of Artificial Sequence: Synthetic oligonucleotide
  Sense strand starting at position 3110 of SEQ ID NO: 66
aacuauagagucugaaugu

SEQ ID NO: 9165 - RNA, 19 nt, Artificial Sequence
  Description of Artificial Sequence: Synthetic oligonucleotide
  Antisense strand to SEQ ID NO: 9164
acauucagacucuauaguu

SEQ ID NO: 9166 - RNA, 19 nt, Artificial Sequence
  Description of Artificial Sequence: Synthetic oligonucleotide
  Sense strand starting at position 3067 of SEQ ID NO: 66
gggucuggcuggagaaaga

SEQ ID NO: 9167 - RNA, 19 nt, Artificial Sequence
  Description of Artificial Sequence: Synthetic oligonucleotide
  Antisense strand to SEQ ID NO: 9166
ucuuucuccagccagaccc

SEQ ID NO: 9168 - RNA, 19 nt, Artificial Sequence
  Description of Artificial Sequence: Synthetic oligonucleotide
  Sense strand starting at position 2980 of SEQ ID NO: 66
cggagaauaugaucucuaa

SEQ ID NO: 9169 - RNA, 19 nt, Artificial Sequence
  Description of Artificial Sequence: Synthetic oligonucleotide
  Antisense strand to SEQ ID NO: 9168
uuagagaucauauucuccg

SEQ ID NO: 9170 - RNA, 19 nt, Artificial Sequence
  Description of Artificial Sequence: Synthetic oligonucleotide
  Sense strand starting at position 2740 of SEQ ID NO: 66
gagggugggcaucauuaau

SEQ ID NO: 9171 - RNA, 19 nt, Artificial Sequence
  Description of Artificial Sequence: Synthetic oligonucleotide
  Antisense strand to SEQ ID NO: 9170
auuaaugaugcccacccuc

SEQ ID NO: 9172 - RNA, 19 nt, Artificial Sequence
  Description of Artificial Sequence: Synthetic oligonucleotide
  Sense strand starting at position 2700 of SEQ ID NO: 66
gcuagagaugcuuaaauug

SEQ ID NO: 9173 - RNA, 19 nt, Artificial Sequence
  Description of Artificial Sequence: Synthetic oligonucleotide
  Antisense strand to SEQ ID NO: 9172
caauuuaagcaucucuagc

SEQ ID NO: 9174 - RNA, 19 nt, Artificial Sequence
  Description of Artificial Sequence: Synthetic oligonucleotide
  Sense strand starting at position 2639 of SEQ ID NO: 66
aguuaauuaucuccaugga

SEQ ID NO: 9175 - RNA, 19 nt, Artificial Sequence
  Description of Artificial Sequence: Synthetic oligonucleotide
  Antisense strand to SEQ ID NO: 9174
uccauggagauaauuaacu

SEQ ID NO: 9176 - RNA, 19 nt, Artificial Sequence
  Description of Artificial Sequence: Synthetic oligonucleotide
  Sense strand starting at position 2629 of SEQ ID NO: 66
guagucaacuaguuaauua

SEQ ID NO: 9177 - RNA, 19 nt, Artificial Sequence
  Description of Artificial Sequence: Synthetic oligonucleotide
  Antisense strand to SEQ ID NO: 9176
uaauuaacuaguugacuac

SEQ ID NO: 9178 - RNA, 19 nt, Artificial Sequence
  Description of Artificial Sequence: Synthetic oligonucleotide
  Sense strand starting at position 2490 of SEQ ID NO: 66
ucuugaguaucucuauccu

SEQ ID NO: 9179 - RNA, 19 nt, Artificial Sequence
  Description of Artificial Sequence: Synthetic oligonucleotide
  Antisense strand to SEQ ID NO: 9178
aggauagagauacucaaga

SEQ ID NO: 9180 - RNA, 19 nt, Artificial Sequence
  Description of Artificial Sequence: Synthetic oligonucleotide
  Sense strand starting at position 2485 of SEQ ID NO: 66
uuagaucuugaguaucucu

SEQ ID NO: 9181 - RNA, 19 nt, Artificial Sequence
  Description of Artificial Sequence: Synthetic oligonucleotide
  Antisense strand to SEQ ID NO: 9180
agagauacucaagaucuaa

SEQ ID NO: 9182 - RNA, 19 nt, Artificial Sequence
  Description of Artificial Sequence: Synthetic oligonucleotide
  Sense strand starting at position 2484 of SEQ ID NO: 66
uuuagaucuugaguaucuc

SEQ ID NO: 9183 - RNA, 19 nt, Artificial Sequence
  Description of Artificial Sequence: Synthetic oligonucleotide
  Antisense strand to SEQ ID NO: 9182
gagauacucaagaucuaaa

SEQ ID NO: 9184 - RNA, 19 nt, Artificial Sequence
  Description of Artificial Sequence: Synthetic oligonucleotide
  Sense strand starting at position 2448 of SEQ ID NO: 66
ggauucaugguguggaauc

SEQ ID NO: 9185 - RNA, 19 nt, Artificial Sequence
  Description of Artificial Sequence: Synthetic oligonucleotide
  Antisense strand to SEQ ID NO: 9184
gauuccacaccaugaaucc

SEQ ID NO: 9186 - RNA, 19 nt, Artificial Sequence
  Description of Artificial Sequence: Synthetic oligonucleotide
  Sense strand starting at position 1469 of SEQ ID NO: 66
gggcgagugcgcuucuaca

SEQ ID NO: 9187 - RNA, 19 nt, Artificial Sequence
  Description of Artificial Sequence: Synthetic oligonucleotide
  Antisense strand to SEQ ID NO: 9186
uguagaagcgcacucgccc

SEQ ID NO: 9188 - RNA, 19 nt, Artificial Sequence
  Description of Artificial Sequence: Synthetic oligonucleotide
  Sense strand starting at position 1378 of SEQ ID NO: 66
aaacuugaucugugagaug

SEQ ID NO: 9189 - RNA, 19 nt, Artificial Sequence
  Description of Artificial Sequence: Synthetic oligonucleotide
  Antisense strand to SEQ ID NO: 9188
caucucacagaucaaguuu

SEQ ID NO: 9190 - RNA, 19 nt, Artificial Sequence
  Description of Artificial Sequence: Synthetic oligonucleotide
  Sense strand starting at position 1377 of SEQ ID NO: 66
gaaacuugaucugugagau

SEQ ID NO: 9191 - RNA, 19 nt, Artificial Sequence
  Description of Artificial Sequence: Synthetic oligonucleotide
  Antisense strand to SEQ ID NO: 9190
aucucacagaucaaguuuc

SEQ ID NO: 9192 - RNA, 19 nt, Artificial Sequence
  Description of Artificial Sequence: Synthetic oligonucleotide
  Sense strand starting at position 1376 of SEQ ID NO: 66
ugaaacuugaucugugaga

SEQ ID NO: 9193 - RNA, 19 nt, Artificial Sequence
  Description of Artificial Sequence: Synthetic oligonucleotide
  Antisense strand to SEQ ID NO: 9192
ucucacagaucaaguuuca

SEQ ID NO: 9194 - RNA, 19 nt, Artificial Sequence
  Description of Artificial Sequence: Synthetic oligonucleotide
  Sense strand starting at position 1374 of SEQ ID NO: 66
acugaaacuugaucuguga

SEQ ID NO: 9195 - RNA, 19 nt, Artificial Sequence
  Description of Artificial Sequence: Synthetic oligonucleotide
  Antisense strand to SEQ ID NO: 9194
ucacagaucaaguuucagu

SEQ ID NO: 9196 - RNA, 19 nt, Artificial Sequence
  Description of Artificial Sequence: Synthetic oligonucleotide
  Sense strand starting at position 358 of SEQ ID NO: 66
gugguuuaccuggaaaucu

SEQ ID NO: 9197 - RNA, 19 nt, Artificial Sequence
  Description of Artificial Sequence: Synthetic oligonucleotide
  Antisense strand to SEQ ID NO: 9196
agauuuccagguaaaccac

SEQ ID NO: 9198 - RNA, 19 nt, Artificial Sequence
  Description of Artificial Sequence: Synthetic oligonucleotide
  Sense strand starting at position 357 of SEQ ID NO: 66
agugguuuaccuggaaauc

SEQ ID NO: 9199 - RNA, 19 nt, Artificial Sequence
  Description of Artificial Sequence: Synthetic oligonucleotide
  Antisense strand to SEQ ID NO: 9198
gauuuccagguaaaccacu

SEQ ID NO: 9200 - RNA, 19 nt, Artificial Sequence
  Description of Artificial Sequence: Synthetic oligonucleotide
  Sense strand starting at position 354 of SEQ ID NO: 66
gugagugguuuaccuggaa

SEQ ID NO: 9201 - RNA, 19 nt, Artificial Sequence
  Description of Artificial Sequence: Synthetic oligonucleotide
  Antisense strand to SEQ ID NO: 9200
uuccagguaaaccacucac

SEQ ID NO: 9202 - RNA, 19 nt, Artificial Sequence
  Description of Artificial Sequence: Synthetic oligonucleotide
  Sense strand starting at position 157 of SEQ ID NO: 66
guaguaaucuuugugagaa

SEQ ID NO: 9203 - RNA, 19 nt, Artificial Sequence
  Description of Artificial Sequence: Synthetic oligonucleotide
  Antisense strand to SEQ ID NO: 9202
uucucacaaagauuacuac

SEQ ID NO: 9204 - RNA, 19 nt, Artificial Sequence
  Description of Artificial Sequence: Synthetic oligonucleotide
  Sense strand starting at position 156 of SEQ ID NO: 66
aguaguaaucuuugugaga

SEQ ID NO: 9205 - RNA, 19 nt, Artificial Sequence
  Description of Artificial Sequence: Synthetic oligonucleotide
  Antisense strand to SEQ ID NO: 9204
ucucacaaagauuacuacu

SEQ ID NO: 9206 - RNA, 19 nt, Artificial Sequence
  Description of Artificial Sequence: Synthetic oligonucleotide
  Sense strand starting at position 127 of SEQ ID NO: 66
uuuagaagcguagaaauga

SEQ ID NO: 9207 - RNA, 19 nt, Artificial Sequence
  Description of Artificial Sequence: Synthetic oligonucleotide
  Antisense strand to SEQ ID NO: 9206
ucauuucuacgcuucuaaa

SEQ ID NO: 9208 - RNA, 19 nt, Artificial Sequence
  Description of Artificial Sequence: Synthetic oligonucleotide
  Sense strand starting at position 62 of SEQ ID NO: 66
aaagauguacuauguagga

SEQ ID NO: 9209 - RNA, 19 nt, Artificial Sequence
  Description of Artificial Sequence: Synthetic oligonucleotide
  Antisense strand to SEQ ID NO: 9208
uccuacauaguacaucuuu

SEQ ID NO: 9210 - RNA, 19 nt, Artificial Sequence
  Description of Artificial Sequence: Synthetic oligonucleotide
  Sense strand starting at position 3740 of SEQ ID NO: 68
cugagcuuccuggaugcua

SEQ ID NO: 9211 - RNA, 19 nt, Artificial Sequence
  Description of Artificial Sequence: Synthetic oligonucleotide
  Antisense strand to SEQ ID NO: 9210
uagcauccaggaagcucag

SEQ ID NO: 9212 - RNA, 19 nt, Artificial Sequence
  Description of Artificial Sequence: Synthetic oligonucleotide
  Sense strand starting at position 3726 of SEQ ID NO: 68
aaagaaauguaguucugag

SEQ ID NO: 9213 - RNA, 19 nt, Artificial Sequence
  Description of Artificial Sequence: Synthetic oligonucleotide
  Antisense strand to SEQ ID NO: 9212
cucagaacuacauuucuuu

SEQ ID NO: 9214 - RNA, 19 nt, Artificial Sequence
  Description of Artificial Sequence: Synthetic oligonucleotide
  Sense strand starting at position 3634 of SEQ ID NO: 68
gggagaauugcuuggacuc

SEQ ID NO: 9215 - RNA, 19 nt, Artificial Sequence
  Description of Artificial Sequence: Synthetic oligonucleotide
  Antisense strand to SEQ ID NO: 9214
gaguccaagcaauucuccc

SEQ ID NO: 9216 - RNA, 19 nt, Artificial Sequence
  Description of Artificial Sequence: Synthetic oligonucleotide
  Sense strand starting at position 3421 of SEQ ID NO: 68
guaacugaauuugaaaugu

SEQ ID NO: 9217 - RNA, 19 nt, Artificial Sequence
  Description of Artificial Sequence: Synthetic oligonucleotide
  Antisense strand to SEQ ID NO: 9216
acauuucaaauucaguuac

SEQ ID NO: 9218 - RNA, 19 nt, Artificial Sequence
  Description of Artificial Sequence: Synthetic oligonucleotide
  Sense strand starting at position 3408 of SEQ ID NO: 68
guuaaacaagacuguaacu

SEQ ID NO: 9219 - RNA, 19 nt, Artificial Sequence
  Description of Artificial Sequence: Synthetic oligonucleotide
  Antisense strand to SEQ ID NO: 9218
aguuacagucuuguuuaac

SEQ ID NO: 9220 - RNA, 19 nt, Artificial Sequence
  Description of Artificial Sequence: Synthetic oligonucleotide
  Sense strand starting at position 3332 of SEQ ID NO: 68
gggucuuuacaauaggcua

SEQ ID NO: 9221 - RNA, 19 nt, Artificial Sequence
  Description of Artificial Sequence: Synthetic oligonucleotide
  Antisense strand to SEQ ID NO: 9220
uagccuauuguaaagaccc

SEQ ID NO: 9222 - RNA, 19 nt, Artificial Sequence
  Description of Artificial Sequence: Synthetic oligonucleotide
  Sense strand starting at position 3237 of SEQ ID NO: 68
cuuugcauuuaucuuugua

SEQ ID NO: 9223 - RNA, 19 nt, Artificial Sequence
  Description of Artificial Sequence: Synthetic oligonucleotide
  Antisense strand to SEQ ID NO: 9222
uacaaagauaaaugcaaag

SEQ ID NO: 9224 - RNA, 19 nt, Artificial Sequence
  Description of Artificial Sequence: Synthetic oligonucleotide
  Sense strand starting at position 3227 of SEQ ID NO: 68
ggacauauaucuuugcauu

SEQ ID NO: 9225 - RNA, 19 nt, Artificial Sequence
  Description of Artificial Sequence: Synthetic oligonucleotide
  Antisense strand to SEQ ID NO: 9224
aaugcaaagauauaugucc

SEQ ID NO: 9226 - RNA, 19 nt, Artificial Sequence
  Description of Artificial Sequence: Synthetic oligonucleotide
  Sense strand starting at position 3188 of SEQ ID NO: 68
cggaguaaccucuacaaau

SEQ ID NO: 9227 - RNA, 19 nt, Artificial Sequence
  Description of Artificial Sequence: Synthetic oligonucleotide
  Antisense strand to SEQ ID NO: 9226
auuuguagagguuacuccg

SEQ ID NO: 9228 - RNA, 19 nt, Artificial Sequence
  Description of Artificial Sequence: Synthetic oligonucleotide
  Sense strand starting at position 3043 of SEQ ID NO: 68
uggagaauaugggcauacu

SEQ ID NO: 9229 - RNA, 19 nt, Artificial Sequence
  Description of Artificial Sequence: Synthetic oligonucleotide
  Antisense strand to SEQ ID NO: 9228
aguaugcccauauucucca

SEQ ID NO: 9230 - RNA, 19 nt, Artificial Sequence
  Description of Artificial Sequence: Synthetic oligonucleotide
  Sense strand starting at position 3033 of SEQ ID NO: 68
auauuugaguuggagaaua

SEQ ID NO: 9231 - RNA, 19 nt, Artificial Sequence
  Description of Artificial Sequence: Synthetic oligonucleotide
  Antisense strand to SEQ ID NO: 9230
uauucuccaacucaaauau

SEQ ID NO: 9232 - RNA, 19 nt, Artificial Sequence
  Description of Artificial Sequence: Synthetic oligonucleotide
  Sense strand starting at position 2926 of SEQ ID NO: 68
ccaugacuccugggaucug

SEQ ID NO: 9233 - RNA, 19 nt, Artificial Sequence
  Description of Artificial Sequence: Synthetic oligonucleotide
  Antisense strand to SEQ ID NO: 9232
cagaucccaggagucaugg

SEQ ID NO: 9234 - RNA, 19 nt, Artificial Sequence
  Description of Artificial Sequence: Synthetic oligonucleotide
  Sense strand starting at position 2802 of SEQ ID NO: 68
gaaacucugcgcgucugua

SEQ ID NO: 9235 - RNA, 19 nt, Artificial Sequence
  Description of Artificial Sequence: Synthetic oligonucleotide
  Antisense strand to SEQ ID NO: 9234
uacagacgcgcagaguuuc

SEQ ID NO: 9236 - RNA, 19 nt, Artificial Sequence
  Description of Artificial Sequence: Synthetic oligonucleotide
  Sense strand starting at position 2613 of SEQ ID NO: 68
gcuuaaaccgucuaagaau

SEQ ID NO: 9237 - RNA, 19 nt, Artificial Sequence
  Description of Artificial Sequence: Synthetic oligonucleotide
  Antisense strand to SEQ ID NO: 9236
auucuuagacgguuuaagc

SEQ ID NO: 9238 - RNA, 19 nt, Artificial Sequence
  Description of Artificial Sequence: Synthetic oligonucleotide
  Sense strand starting at position 2564 of SEQ ID NO: 68
agggauauguuacuuuaaa

SEQ ID NO: 9239 - RNA, 19 nt, Artificial Sequence
  Description of Artificial Sequence: Synthetic oligonucleotide
  Antisense strand to SEQ ID NO: 9238
uuuaaaguaacauaucccu

SEQ ID NO: 9240 - RNA, 19 nt, Artificial Sequence
  Description of Artificial Sequence: Synthetic oligonucleotide
  Sense strand starting at position 2555 of SEQ ID NO: 68
gcucaucaaagggauaugu

SEQ ID NO: 9241 - RNA, 19 nt, Artificial Sequence
  Description of Artificial Sequence: Synthetic oligonucleotide
  Antisense strand to SEQ ID NO: 9240
acauaucccuuugaugagc

SEQ ID NO: 9242 - RNA, 19 nt, Artificial Sequence
  Description of Artificial Sequence: Synthetic oligonucleotide
  Sense strand starting at position 2400 of SEQ ID NO: 68
cugggaagucugcacuuaa

SEQ ID NO: 9243 - RNA, 19 nt, Artificial Sequence
  Description of Artificial Sequence: Synthetic oligonucleotide
  Antisense strand to SEQ ID NO: 9242
uuaagugcagacuucccag

SEQ ID NO: 9244 - RNA, 19 nt, Artificial Sequence
  Description of Artificial Sequence: Synthetic oligonucleotide
  Sense strand starting at position 2371 of SEQ ID NO: 68
aaaggucaucaagggcauu

SEQ ID NO: 9245 - RNA, 19 nt, Artificial Sequence
  Description of Artificial Sequence: Synthetic oligonucleotide
  Antisense strand to SEQ ID NO: 9244
aaugcccuugaugaccuuu

SEQ ID NO: 9246 - RNA, 19 nt, Artificial Sequence
  Description of Artificial Sequence: Synthetic oligonucleotide
  Sense strand starting at position 1257 of SEQ ID NO: 68
cagguucgugaguagaauc

SEQ ID NO: 9247 - RNA, 19 nt, Artificial Sequence
  Description of Artificial Sequence: Synthetic oligonucleotide
  Antisense strand to SEQ ID NO: 9246
gauucuacucacgaaccug

SEQ ID NO: 9248 - RNA, 19 nt, Artificial Sequence
  Description of Artificial Sequence: Synthetic oligonucleotide
  Sense strand starting at position 1168 of SEQ ID NO: 68
uggaaaucaugucucccua

SEQ ID NO: 9249 - RNA, 19 nt, Artificial Sequence
  Description of Artificial Sequence: Synthetic oligonucleotide
  Antisense strand to SEQ ID NO: 9248
uagggagacaugauuucca

SEQ ID NO: 9250 - RNA, 19 nt, Artificial Sequence
  Description of Artificial Sequence: Synthetic oligonucleotide
  Sense strand starting at position 1089 of SEQ ID NO: 68
uggccagucccuuagaaau

SEQ ID NO: 9251 - RNA, 19 nt, Artificial Sequence
  Description of Artificial Sequence: Synthetic oligonucleotide
  Antisense strand to SEQ ID NO: 9250
auuucuaagggacuggcca

SEQ ID NO: 9252 - RNA, 19 nt, Artificial Sequence
  Description of Artificial Sequence: Synthetic oligonucleotide
  Sense strand starting at position 996 of SEQ ID NO: 68
uccguaugucguaggauuc

SEQ ID NO: 9253 - RNA, 19 nt, Artificial Sequence
  Description of Artificial Sequence: Synthetic oligonucleotide
  Antisense strand to SEQ ID NO: 9252
gaauccuacgacauacgga

SEQ ID NO: 9254 - RNA, 19 nt, Artificial Sequence
  Description of Artificial Sequence: Synthetic oligonucleotide
  Sense strand starting at position 976 of SEQ ID NO: 68
auucuuaguucuguagaac

SEQ ID NO: 9255 - RNA, 19 nt, Artificial Sequence
  Description of Artificial Sequence: Synthetic oligonucleotide
  Antisense strand to SEQ ID NO: 9254
guucuacagaacuaagaau

SEQ ID NO: 9256 - RNA, 19 nt, Artificial Sequence
  Description of Artificial Sequence: Synthetic oligonucleotide
  Sense strand starting at position 947 of SEQ ID NO: 68
gaaggagagucccuguuaa

SEQ ID NO: 9257 - RNA, 19 nt, Artificial Sequence
  Description of Artificial Sequence: Synthetic oligonucleotide
  Antisense strand to SEQ ID NO: 9256
uuaacagggacucuccuuc

SEQ ID NO: 9258 - RNA, 19 nt, Artificial Sequence
  Description of Artificial Sequence: Synthetic oligonucleotide
  Sense strand starting at position 931 of SEQ ID NO: 68
aguggaacgccuuacugaa

SEQ ID NO: 9259 - RNA, 19 nt, Artificial Sequence
  Description of Artificial Sequence: Synthetic oligonucleotide
  Antisense strand to SEQ ID NO: 9258
uucaguaaggcguuccacu

SEQ ID NO: 9260 - RNA, 19 nt, Artificial Sequence
  Description of Artificial Sequence: Synthetic oligonucleotide
  Sense strand starting at position 888 of SEQ ID NO: 68
cuaugaggugucuacugua

SEQ ID NO: 9261 - RNA, 19 nt, Artificial Sequence
  Description of Artificial Sequence: Synthetic oligonucleotide
  Antisense strand to SEQ ID NO: 9260
uacaguagacaccucauag

SEQ ID NO: 9262 - RNA, 19 nt, Artificial Sequence
  Description of Artificial Sequence: Synthetic oligonucleotide
  Sense strand starting at position 885 of SEQ ID NO: 68
gcgcuaugaggugucuacu

SEQ ID NO: 9263 - RNA, 19 nt, Artificial Sequence
  Description of Artificial Sequence: Synthetic oligonucleotide
  Antisense strand to SEQ ID NO: 9262
aguagacaccucauagcgc

SEQ ID NO: 9264 - RNA, 19 nt, Artificial Sequence
  Description of Artificial Sequence: Synthetic oligonucleotide
  Sense strand starting at position 793 of SEQ ID NO: 68
gcccaaauccauuauugag

SEQ ID NO: 9265 - RNA, 19 nt, Artificial Sequence
  Description of Artificial Sequence: Synthetic oligonucleotide
  Antisense strand to SEQ ID NO: 9264
cucaauaauggauuugggc

SEQ ID NO: 9266 - RNA, 19 nt, Artificial Sequence
  Description of Artificial Sequence: Synthetic oligonucleotide
  Sense strand starting at position 782 of SEQ ID NO: 68
agaaacgacuugcccaaau

SEQ ID NO: 9267 - RNA, 19 nt, Artificial Sequence
  Description of Artificial Sequence: Synthetic oligonucleotide
  Antisense strand to SEQ ID NO: 9266
auuugggcaagucguuucu

SEQ ID NO: 9268 - RNA, 19 nt, Artificial Sequence
  Description of Artificial Sequence: Synthetic oligonucleotide
  Sense strand starting at position 749 of SEQ ID NO: 68
uugcuuaagcuugaggaau

SEQ ID NO: 9269 - RNA, 19 nt, Artificial Sequence
  Description of Artificial Sequence: Synthetic oligonucleotide
  Antisense strand to SEQ ID NO: 9268
auuccucaagcuuaagcaa

SEQ ID NO: 9270 - RNA, 19 nt, Artificial Sequence
  Description of Artificial Sequence: Synthetic oligonucleotide
  Sense strand starting at position 642 of SEQ ID NO: 68
ugcaauuugcauuguggau

SEQ ID NO: 9271 - RNA, 19 nt, Artificial Sequence
  Description of Artificial Sequence: Synthetic oligonucleotide
  Antisense strand to SEQ ID NO: 9270
auccacaaugcaaauugca

SEQ ID NO: 9272 - RNA, 19 nt, Artificial Sequence
  Description of Artificial Sequence: Synthetic oligonucleotide
  Sense strand starting at position 616 of SEQ ID NO: 68
ggaaucuuggugugaggau

SEQ ID NO: 9273 - RNA, 19 nt, Artificial Sequence
  Description of Artificial Sequence: Synthetic oligonucleotide
  Antisense strand to SEQ ID NO: 9272
auccucacaccaagauucc

SEQ ID NO: 9274 - RNA, 19 nt, Artificial Sequence
  Description of Artificial Sequence: Synthetic oligonucleotide
  Sense strand starting at position 613 of SEQ ID NO: 68
guaggaaucuuggugugag

SEQ ID NO: 9275 - RNA, 19 nt, Artificial Sequence
  Description of Artificial Sequence: Synthetic oligonucleotide
  Antisense strand to SEQ ID NO: 9274
cucacaccaagauuccuac

SEQ ID NO: 9276 - RNA, 19 nt, Artificial Sequence
  Description of Artificial Sequence: Synthetic oligonucleotide
  Sense strand starting at position 566 of SEQ ID NO: 68
gugaacucgaguuaaggau

SEQ ID NO: 9277 - RNA, 19 nt, Artificial Sequence
  Description of Artificial Sequence: Synthetic oligonucleotide
  Antisense strand to SEQ ID NO: 9276
auccuuaacucgaguucac

SEQ ID NO: 9278 - RNA, 19 nt, Artificial Sequence
  Description of Artificial Sequence: Synthetic oligonucleotide
  Sense strand starting at position 543 of SEQ ID NO: 68
cuuugaauucuaggauuaa

SEQ ID NO: 9279 - RNA, 19 nt, Artificial Sequence
  Description of Artificial Sequence: Synthetic oligonucleotide
  Antisense strand to SEQ ID NO: 9278
uuaauccuagaauucaaag

SEQ ID NO: 9280 - RNA, 19 nt, Artificial Sequence
  Description of Artificial Sequence: Synthetic oligonucleotide
  Sense strand starting at position 516 of SEQ ID NO: 68
guaagauauggucacaguu

SEQ ID NO: 9281 - RNA, 19 nt, Artificial Sequence
  Description of Artificial Sequence: Synthetic oligonucleotide
  Antisense strand to SEQ ID NO: 9280
aacugugaccauaucuuac

SEQ ID NO: 9282 - RNA, 19 nt, Artificial Sequence
  Description of Artificial Sequence: Synthetic oligonucleotide
  Sense strand starting at position 500 of SEQ ID NO: 68
guaagagacugacuaggua

SEQ ID NO: 9283 - RNA, 19 nt, Artificial Sequence
  Description of Artificial Sequence: Synthetic oligonucleotide
  Antisense strand to SEQ ID NO: 9282
uaccuagucagucucuuac

SEQ ID NO: 9284 - RNA, 19 nt, Artificial Sequence
  Description of Artificial Sequence: Synthetic oligonucleotide
  Sense strand starting at position 368 of SEQ ID NO: 68
agguuagucagcuaaugga

SEQ ID NO: 9285 - RNA, 19 nt, Artificial Sequence
  Description of Artificial Sequence: Synthetic oligonucleotide
  Antisense strand to SEQ ID NO: 9284
uccauuagcugacuaaccu

SEQ ID NO: 9286 - RNA, 19 nt, Artificial Sequence
  Description of Artificial Sequence: Synthetic oligonucleotide
  Sense strand starting at position 180 of SEQ ID NO: 68
uauggacuaucuuuaggua

SEQ ID NO: 9287 - RNA, 19 nt, Artificial Sequence
  Description of Artificial Sequence: Synthetic oligonucleotide
  Antisense strand to SEQ ID NO: 9286
uaccuaaagauaguccaua

SEQ ID NO: 9288 - RNA, 19 nt, Artificial Sequence
  Description of Artificial Sequence: Synthetic oligonucleotide
  Sense strand starting at position 101 of SEQ ID NO: 68
ugcaacuaucuugaggguu

SEQ ID NO: 9289 - RNA, 19 nt, Artificial Sequence
  Description of Artificial Sequence: Synthetic oligonucleotide
  Antisense strand to SEQ ID NO: 9288
aacccucaagauaguugca

SEQ ID NO: 9290 - RNA, 19 nt, Artificial Sequence
  Description of Artificial Sequence: Synthetic oligonucleotide
  Sense strand starting at position 1046 of SEQ ID NO: 69
gccugagaguauguuuaaa

SEQ ID NO: 9291 - RNA, 19 nt, Artificial Sequence
  Description of Artificial Sequence: Synthetic oligonucleotide
  Antisense strand to SEQ ID NO: 9290
uuuaaacauacucucaggc

SEQ ID NO: 9292 - RNA, 19 nt, Artificial Sequence
  Description of Artificial Sequence: Synthetic oligonucleotide
  Sense strand starting at position 1048 of SEQ ID NO: 69
cugagaguauguuuaaaug

SEQ ID NO: 9293 - RNA, 19 nt, Artificial Sequence
  Description of Artificial Sequence: Synthetic oligonucleotide
  Antisense strand to SEQ ID NO: 9292
cauuuaaacauacucucag

SEQ ID NO: 9294 - RNA, 19 nt, Artificial Sequence
  Description of Artificial Sequence: Synthetic oligonucleotide
  Sense strand starting at position 1056 of SEQ ID NO: 69
auguuuaaaugccuacaga

SEQ ID NO: 9295 - RNA, 19 nt, Artificial Sequence
  Description of Artificial Sequence: Synthetic oligonucleotide
  Antisense strand to SEQ ID NO: 9294
ucuguaggcauuuaaacau

SEQ ID NO: 9296 - RNA, 19 nt, Artificial Sequence
  Description of Artificial Sequence: Synthetic oligonucleotide
  Sense strand starting at position 1057 of SEQ ID NO: 69
uguuuaaaugccuacagag

SEQ ID NO: 9297 - RNA, 19 nt, Artificial Sequence
  Description of Artificial Sequence: Synthetic oligonucleotide
  Antisense strand to SEQ ID NO: 9296
cucuguaggcauuuaaaca

SEQ ID NO: 9298 - RNA, 19 nt, Artificial Sequence
  Description of Artificial Sequence: Synthetic oligonucleotide
  Sense strand starting at position 1137 of SEQ ID NO: 69
gucccaaaguuauccucau

SEQ ID NO: 9299 - RNA, 19 nt, Artificial Sequence
  Description of Artificial Sequence: Synthetic oligonucleotide
  Antisense strand to SEQ ID NO: 9298
augaggauaacuuugggac

SEQ ID NO: 9300 - RNA, 19 nt, Artificial Sequence
  Description of Artificial Sequence: Synthetic oligonucleotide
  Sense strand starting at position 1171 of SEQ ID NO: 69
ucaggagcucauugccaaa

SEQ ID NO: 9301 - RNA, 19 nt, Artificial Sequence
  Description of Artificial Sequence: Synthetic oligonucleotide
  Antisense strand to SEQ ID NO: 9300
uuuggcaaugagcuccuga

SEQ ID NO: 9302 - RNA, 19 nt, Artificial Sequence
  Description of Artificial Sequence: Synthetic oligonucleotide
  Sense strand starting at position 1191 of SEQ ID NO: 69
gccauacccuucuuguaua

SEQ ID NO: 9303 - RNA, 19 nt, Artificial Sequence
  Description of Artificial Sequence: Synthetic oligonucleotide
  Antisense strand to SEQ ID NO: 9302
uauacaagaaggguauggc

SEQ ID NO: 9304 - RNA, 19 nt, Artificial Sequence
  Description of Artificial Sequence: Synthetic oligonucleotide
  Sense strand starting at position 1218 of SEQ ID NO: 69
agauacuuuguuggccaaa

SEQ ID NO: 9305 - RNA, 19 nt, Artificial Sequence
  Description of Artificial Sequence: Synthetic oligonucleotide
  Antisense strand to SEQ ID NO: 9304
uuuggccaacaaaguaucu

SEQ ID NO: 9306 - RNA, 19 nt, Artificial Sequence
  Description of Artificial Sequence: Synthetic oligonucleotide
  Sense strand starting at position 1219 of SEQ ID NO: 69
gauacuuuguuggccaaau

SEQ ID NO: 9307 - RNA, 19 nt, Artificial Sequence
  Description of Artificial Sequence: Synthetic oligonucleotide
  Antisense strand to SEQ ID NO: 9306
auuuggccaacaaaguauc

SEQ ID NO: 9308 - RNA, 19 nt, Artificial Sequence
  Description of Artificial Sequence: Synthetic oligonucleotide
  Sense strand starting at position 1220 of SEQ ID NO: 69
auacuuuguuggccaaauu

SEQ ID NO: 9309 - RNA, 19 nt, Artificial Sequence
  Description of Artificial Sequence: Synthetic oligonucleotide
  Antisense strand to SEQ ID NO: 9308
aauuuggccaacaaaguau

SEQ ID NO: 9310 - RNA, 19 nt, Artificial Sequence
  Description of Artificial Sequence: Synthetic oligonucleotide
  Sense strand starting at position 1882 of SEQ ID NO: 69
ugucaacacuuggcucaau

SEQ ID NO: 9311 - RNA, 19 nt, Artificial Sequence
  Description of Artificial Sequence: Synthetic oligonucleotide
  Antisense strand to SEQ ID NO: 9310
auugagccaaguguugaca

SEQ ID NO: 9312 - RNA, 19 nt, Artificial Sequence
  Description of Artificial Sequence: Synthetic oligonucleotide
  Sense strand starting at position 1981 of SEQ ID NO: 69
gaagucaggugacuacauu

SEQ ID NO: 9313 - RNA, 19 nt, Artificial Sequence
  Description of Artificial Sequence: Synthetic oligonucleotide
  Antisense strand to SEQ ID NO: 9312
aauguagucaccugacuuc

SEQ ID NO: 9314 - RNA, 19 nt, Artificial Sequence
  Description of Artificial Sequence: Synthetic oligonucleotide
  Sense strand starting at position 2018 of SEQ ID NO: 69
ugcagcuaucuugaccauu

SEQ ID NO: 9315 - RNA, 19 nt, Artificial Sequence
  Description of Artificial Sequence: Synthetic oligonucleotide
  Antisense strand to SEQ ID NO: 9314
aauggucaagauagcugca

SEQ ID NO: 9316 - RNA, 19 nt, Artificial Sequence
  Description of Artificial Sequence: Synthetic oligonucleotide
  Sense strand starting at position 2031 of SEQ ID NO: 69
accauuaugugcucagcaa

SEQ ID NO: 9317 - RNA, 19 nt, Artificial Sequence
  Description of Artificial Sequence: Synthetic oligonucleotide
  Antisense strand to SEQ ID NO: 9316
uugcugagcacauaauggu

SEQ ID NO: 9318 - RNA, 19 nt, Artificial Sequence
  Description of Artificial Sequence: Synthetic oligonucleotide
  Sense strand starting at position 2032 of SEQ ID NO: 69
ccauuaugugcucagcaau

SEQ ID NO: 9319 - RNA, 19 nt, Artificial Sequence
  Description of Artificial Sequence: Synthetic oligonucleotide
  Antisense strand to SEQ ID NO: 9318
auugcugagcacauaaugg

SEQ ID NO: 9320 - RNA, 19 nt, Artificial Sequence
  Description of Artificial Sequence: Synthetic oligonucleotide
  Sense strand starting at position 2069 of SEQ ID NO: 69
agaugaacacuuugagcaa

SEQ ID NO: 9321 - RNA, 19 nt, Artificial Sequence
  Description of Artificial Sequence: Synthetic oligonucleotide
  Antisense strand to SEQ ID NO: 9320
uugcucaaaguguucaucu

SEQ ID NO: 9322 - RNA, 19 nt, Artificial Sequence
  Description of Artificial Sequence: Synthetic oligonucleotide
  Sense strand starting at position 2505 of SEQ ID NO: 69
gugacaaucucuuugucuc

SEQ ID NO: 9323 - RNA, 19 nt, Artificial Sequence
  Description of Artificial Sequence: Synthetic oligonucleotide
  Antisense strand to SEQ ID NO: 9322
gagacaaagagauugucac

SEQ ID NO: 9324 - RNA, 19 nt, Artificial Sequence
  Description of Artificial Sequence: Synthetic oligonucleotide
  Sense strand starting at position 2604 of SEQ ID NO: 69
ggagaaagcaggcauuguu

SEQ ID NO: 9325 - RNA, 19 nt, Artificial Sequence
  Description of Artificial Sequence: Synthetic oligonucleotide
  Antisense strand to SEQ ID NO: 9324
aacaaugccugcuuucucc

SEQ ID NO: 9326 - RNA, 19 nt, Artificial Sequence
  Description of Artificial Sequence: Synthetic oligonucleotide
  Sense strand starting at position 2713 of SEQ ID NO: 69
ugacuuugucacgguaaga

SEQ ID NO: 9327 - RNA, 19 nt, Artificial Sequence
  Description of Artificial Sequence: Synthetic oligonucleotide
  Antisense strand to SEQ ID NO: 9326
ucuuaccgugacaaaguca

SEQ ID NO: 9328 - RNA, 19 nt, Artificial Sequence
  Description of Artificial Sequence: Synthetic oligonucleotide
  Sense strand starting at position 2726 of SEQ ID NO: 69
guaagaguuggcuguugga

SEQ ID NO: 9329 - RNA, 19 nt, Artificial Sequence
  Description of Artificial Sequence: Synthetic oligonucleotide
  Antisense strand to SEQ ID NO: 9328
uccaacagccaacucuuac

SEQ ID NO: 9330 - RNA, 19 nt, Artificial Sequence
  Description of Artificial Sequence: Synthetic oligonucleotide
  Sense strand starting at position 2735 of SEQ ID NO: 69
ggcuguuggaggcaaugau

SEQ ID NO: 9331 - RNA, 19 nt, Artificial Sequence
  Description of Artificial Sequence: Synthetic oligonucleotide
  Antisense strand to SEQ ID NO: 9330
aucauugccuccaacagcc

SEQ ID NO: 9332 - RNA, 19 nt, Artificial Sequence
  Description of Artificial Sequence: Synthetic oligonucleotide
  Sense strand starting at position 2796 of SEQ ID NO: 69
uuagaaugugaauagugua

SEQ ID NO: 9333 - RNA, 19 nt, Artificial Sequence
  Description of Artificial Sequence: Synthetic oligonucleotide
  Antisense strand to SEQ ID NO: 9332
uacacuauucacauucuaa

SEQ ID NO: 9334 - RNA, 19 nt, Artificial Sequence
  Description of Artificial Sequence: Synthetic oligonucleotide
  Sense strand starting at position 2801 of SEQ ID NO: 69
augugaauaguguacaucu

SEQ ID NO: 9335 - RNA, 19 nt, Artificial Sequence
  Description of Artificial Sequence: Synthetic oligonucleotide
  Antisense strand to SEQ ID NO: 9334
agauguacacuauucacau

SEQ ID NO: 9336 - RNA, 19 nt, Artificial Sequence
  Description of Artificial Sequence: Synthetic oligonucleotide
  Sense strand starting at position 2803 of SEQ ID NO: 69
gugaauaguguacaucuaa

SEQ ID NO: 9337 - RNA, 19 nt, Artificial Sequence
  Description of Artificial Sequence: Synthetic oligonucleotide
  Antisense strand to SEQ ID NO: 9336
uuagauguacacuauucac

SEQ ID NO: 9338 - RNA, 19 nt, Artificial Sequence
  Description of Artificial Sequence: Synthetic oligonucleotide
  Sense strand starting at position 2931 of SEQ ID NO: 69
uggcaauugcaauagaaac

SEQ ID NO: 9339 - RNA, 19 nt, Artificial Sequence
  Description of Artificial Sequence: Synthetic oligonucleotide
  Antisense strand to SEQ ID NO: 9338
guuucuauugcaauugcca

SEQ ID NO: 9340 - RNA, 19 nt, Artificial Sequence
  Description of Artificial Sequence: Synthetic oligonucleotide
  Sense strand starting at position 2970 of SEQ ID NO: 69
cuggauaucacaggugaac

SEQ ID NO: 9341 - RNA, 19 nt, Artificial Sequence
  Description of Artificial Sequence: Synthetic oligonucleotide
  Antisense strand to SEQ ID NO: 9340
guucaccugugauauccag

SEQ ID NO: 9342 - RNA, 19 nt, Artificial Sequence
  Description of Artificial Sequence: Synthetic oligonucleotide
  Sense strand starting at position 3424 of SEQ ID NO: 69
gauauaggcucccucugua

SEQ ID NO: 9343 - RNA, 19 nt, Artificial Sequence
  Description of Artificial Sequence: Synthetic oligonucleotide
  Antisense strand to SEQ ID NO: 9342
uacagagggagccuauauc

SEQ ID NO: 9344 - RNA, 19 nt, Artificial Sequence
  Description of Artificial Sequence: Synthetic oligonucleotide
  Sense strand starting at position 3428 of SEQ ID NO: 69
uaggcucccucuguaauga

SEQ ID NO: 9345 - RNA, 19 nt, Artificial Sequence
  Description of Artificial Sequence: Synthetic oligonucleotide
  Antisense strand to SEQ ID NO: 9344
ucauuacagagggagccua

SEQ ID NO: 9346 - RNA, 19 nt, Artificial Sequence
  Description of Artificial Sequence: Synthetic oligonucleotide
  Sense strand starting at position 3436 of SEQ ID NO: 69
cucuguaaugacugcauuu

SEQ ID NO: 9347 - RNA, 19 nt, Artificial Sequence
  Description of Artificial Sequence: Synthetic oligonucleotide
  Antisense strand to SEQ ID NO: 9346
aaaugcagucauuacagag

SEQ ID NO: 9348 - RNA, 19 nt, Artificial Sequence
  Description of Artificial Sequence: Synthetic oligonucleotide
  Sense strand starting at position 3453 of SEQ ID NO: 69
uugauuaugcucugguaau

SEQ ID NO: 9349 - RNA, 19 nt, Artificial Sequence
  Description of Artificial Sequence: Synthetic oligonucleotide
  Antisense strand to SEQ ID NO: 9348
auuaccagagcauaaucaa

SEQ ID NO: 9350 - RNA, 19 nt, Artificial Sequence
  Description of Artificial Sequence: Synthetic oligonucleotide
  Sense strand starting at position 3518 of SEQ ID NO: 69
gugccucaacuguaaccau

SEQ ID NO: 9351 - RNA, 19 nt, Artificial Sequence
  Description of Artificial Sequence: Synthetic oligonucleotide
  Antisense strand to SEQ ID NO: 9350
augguuacaguugaggcac

SEQ ID NO: 9352 - RNA, 19 nt, Artificial Sequence
  Description of Artificial Sequence: Synthetic oligonucleotide
  Sense strand starting at position 3635 of SEQ ID NO: 69
gagccagauggauguauua

SEQ ID NO: 9353 - RNA, 19 nt, Artificial Sequence
  Description of Artificial Sequence: Synthetic oligonucleotide
  Antisense strand to SEQ ID NO: 9352
uaauacauccaucuggcuc

SEQ ID NO: 9354 - RNA, 19 nt, Artificial Sequence
  Description of Artificial Sequence: Synthetic oligonucleotide
  Sense strand starting at position 3637 of SEQ ID NO: 69
gccagauggauguauuauu

SEQ ID NO: 9355 - RNA, 19 nt, Artificial Sequence
  Description of Artificial Sequence: Synthetic oligonucleotide
  Antisense strand to SEQ ID NO: 9354
aauaauacauccaucuggc

SEQ ID NO: 9356 - RNA, 19 nt, Artificial Sequence
  Description of Artificial Sequence: Synthetic oligonucleotide
  Sense strand starting at position 3694 of SEQ ID NO: 69
gcaugaauuugaugaccag

SEQ ID NO: 9357 - RNA, 19 nt, Artificial Sequence
  Description of Artificial Sequence: Synthetic oligonucleotide
  Antisense strand to SEQ ID NO: 9356
cuggucaucaaauucaugc

SEQ ID NO: 9358 - RNA, 19 nt, Artificial Sequence
  Description of Artificial Sequence: Synthetic oligonucleotide
  Sense strand starting at position 3780 of SEQ ID NO: 69
gugcgaguaaagcaguauu

SEQ ID NO: 9359 - RNA, 19 nt, Artificial Sequence
  Description of Artificial Sequence: Synthetic oligonucleotide
  Antisense strand to SEQ ID NO: 9358
aauacugcuuuacucgcac

SEQ ID NO: 9360 - RNA, 19 nt, Artificial Sequence
  Description of Artificial Sequence: Synthetic oligonucleotide
  Sense strand starting at position 3788 of SEQ ID NO: 69
aaagcaguauuuggagaaa

SEQ ID NO: 9361 - RNA, 19 nt, Artificial Sequence
  Description of Artificial Sequence: Synthetic oligonucleotide
  Antisense strand to SEQ ID NO: 9360
uuucuccaaauacugcuuu

SEQ ID NO: 9362 - RNA, 19 nt, Artificial Sequence
  Description of Artificial Sequence: Synthetic oligonucleotide
  Sense strand starting at position 3803 of SEQ ID NO: 69
gaaacuuccugccuguguu

SEQ ID NO: 9363 - RNA, 19 nt, Artificial Sequence
  Description of Artificial Sequence: Synthetic oligonucleotide
  Antisense strand to SEQ ID NO: 9362
aacacaggcaggaaguuuc

SEQ ID NO: 9364 - RNA, 19 nt, Artificial Sequence
  Description of Artificial Sequence: Synthetic oligonucleotide
  Sense strand starting at position 3848 of SEQ ID NO: 69
uugcucuuuggugagguua

SEQ ID NO: 9365 - RNA, 19 nt, Artificial Sequence
  Description of Artificial Sequence: Synthetic oligonucleotide
  Antisense strand to SEQ ID NO: 9364
uaaccucaccaaagagcaa

SEQ ID NO: 9366 - RNA, 19 nt, Artificial Sequence
  Description of Artificial Sequence: Synthetic oligonucleotide
  Sense strand starting at position 3905 of SEQ ID NO: 69
uagugugugcuguaaacca

SEQ ID NO: 9367 - RNA, 19 nt, Artificial Sequence
  Description of Artificial Sequence: Synthetic oligonucleotide
  Antisense strand to SEQ ID NO: 9366
ugguuuacagcacacacua

SEQ ID NO: 9368 - RNA, 19 nt, Artificial Sequence
  Description of Artificial Sequence: Synthetic oligonucleotide
  Sense strand starting at position 3975 of SEQ ID NO: 69
uucugaaaguaauuccagu

SEQ ID NO: 9369 - RNA, 19 nt, Artificial Sequence
  Description of Artificial Sequence: Synthetic oligonucleotide
  Antisense strand to SEQ ID NO: 9368
acuggaauuacuuucagaa

SEQ ID NO: 9370 - RNA, 19 nt, Artificial Sequence
  Description of Artificial Sequence: Synthetic oligonucleotide
  Sense strand starting at position 3791 of SEQ ID NO: 70
gauguauugaugcgagccu

SEQ ID NO: 9371 - RNA, 19 nt, Artificial Sequence
  Description of Artificial Sequence: Synthetic oligonucleotide
  Antisense strand to SEQ ID NO: 9370
aggcucgcaucaauacauc

SEQ ID NO: 9372 - RNA, 19 nt, Artificial Sequence
  Description of Artificial Sequence: Synthetic oligonucleotide
  Sense strand starting at position 3787 of SEQ ID NO: 70
gcuggauguauugaugcga

SEQ ID NO: 9373 - RNA, 19 nt, Artificial Sequence
  Description of Artificial Sequence: Synthetic oligonucleotide
  Antisense strand to SEQ ID NO: 9372
ucgcaucaauacauccagc

SEQ ID NO: 9374 - RNA, 19 nt, Artificial Sequence
  Description of Artificial Sequence: Synthetic oligonucleotide
  Sense strand starting at position 3235 of SEQ ID NO: 70
aagugauguccugguggac

SEQ ID NO: 9375 - RNA, 19 nt, Artificial Sequence
  Description of Artificial Sequence: Synthetic oligonucleotide
  Antisense strand to SEQ ID NO: 9374
guccaccaggacaucacuu

SEQ ID NO: 9376 - RNA, 19 nt, Artificial Sequence
  Description of Artificial Sequence: Synthetic oligonucleotide
  Sense strand starting at position 3167 of SEQ ID NO: 70
ccuuuacucccugagagca

SEQ ID NO: 9377 - RNA, 19 nt, Artificial Sequence
  Description of Artificial Sequence: Synthetic oligonucleotide
  Antisense strand to SEQ ID NO: 9376
ugcucucagggaguaaagg

SEQ ID NO: 9378 - RNA, 19 nt, Artificial Sequence
  Description of Artificial Sequence: Synthetic oligonucleotide
  Sense strand starting at position 3121 of SEQ ID NO: 70
gggcaagacacaggguuau

SEQ ID NO: 9379 - RNA, 19 nt, Artificial Sequence
  Description of Artificial Sequence: Synthetic oligonucleotide
  Antisense strand to SEQ ID NO: 9378
auaacccugugucuugccc

SEQ ID NO: 9380 - RNA, 19 nt, Artificial Sequence
  Description of Artificial Sequence: Synthetic oligonucleotide
  Sense strand starting at position 3066 of SEQ ID NO: 70
ugugcuguuugaguggaga

SEQ ID NO: 9381 - RNA, 19 nt, Artificial Sequence
  Description of Artificial Sequence: Synthetic oligonucleotide
  Antisense strand to SEQ ID NO: 9380
ucuccacucaaacagcaca

SEQ ID NO: 9382 - RNA, 19 nt, Artificial Sequence
  Description of Artificial Sequence: Synthetic oligonucleotide
  Sense strand starting at position 3061 of SEQ ID NO: 70
uagucugugcuguuugagu

SEQ ID NO: 9383 - RNA, 19 nt, Artificial Sequence
  Description of Artificial Sequence: Synthetic oligonucleotide
  Antisense strand to SEQ ID NO: 9382
acucaaacagcacagacua

SEQ ID NO: 9384 - RNA, 19 nt, Artificial Sequence
  Description of Artificial Sequence: Synthetic oligonucleotide
  Sense strand starting at position 3056 of SEQ ID NO: 70
ugaaauagucugugcuguu

SEQ ID NO: 9385 - RNA, 19 nt, Artificial Sequence
  Description of Artificial Sequence: Synthetic oligonucleotide
  Antisense strand to SEQ ID NO: 9384
aacagcacagacuauuuca

SEQ ID NO: 9386 - RNA, 19 nt, Artificial Sequence
  Description of Artificial Sequence: Synthetic oligonucleotide
  Sense strand starting at position 3055 of SEQ ID NO: 70
uugaaauagucugugcugu

SEQ ID NO: 9387 - RNA, 19 nt, Artificial Sequence
  Description of Artificial Sequence: Synthetic oligonucleotide
  Antisense strand to SEQ ID NO: 9386
acagcacagacuauuucaa

SEQ ID NO: 9388 - RNA, 19 nt, Artificial Sequence
  Description of Artificial Sequence: Synthetic oligonucleotide
  Sense strand starting at position 3040 of SEQ ID NO: 70
ugacacaucugcgauuuga

SEQ ID NO: 9389 - RNA, 19 nt, Artificial Sequence
  Description of Artificial Sequence: Synthetic oligonucleotide
  Antisense strand to SEQ ID NO: 9388
ucaaaucgcagauguguca

SEQ ID NO: 9390 - RNA, 19 nt, Artificial Sequence
  Description of Artificial Sequence: Synthetic oligonucleotide
  Sense strand starting at position 2932 of SEQ ID NO: 70
ccauaagccugugaggaaa

SEQ ID NO: 9391 - RNA, 19 nt, Artificial Sequence
  Description of Artificial Sequence: Synthetic oligonucleotide
  Antisense strand to SEQ ID NO: 9390
uuuccucacaggcuuaugg

SEQ ID NO: 9392 - RNA, 19 nt, Artificial Sequence
  Description of Artificial Sequence: Synthetic oligonucleotide
  Sense strand starting at position 2931 of SEQ ID NO: 70
accauaagccugugaggaa

SEQ ID NO: 9393 - RNA, 19 nt, Artificial Sequence
  Description of Artificial Sequence: Synthetic oligonucleotide
  Antisense strand to SEQ ID NO: 9392
uuccucacaggcuuauggu

SEQ ID NO: 9394 - RNA, 19 nt, Artificial Sequence
  Description of Artificial Sequence: Synthetic oligonucleotide
  Sense strand starting at position 2913 of SEQ ID NO: 70
ggaagauauuaccagcaca

SEQ ID NO: 9395 - RNA, 19 nt, Artificial Sequence
  Description of Artificial Sequence: Synthetic oligonucleotide
  Antisense strand to SEQ ID NO: 9394
ugugcugguaauaucuucc

SEQ ID NO: 9396 - RNA, 19 nt, Artificial Sequence
  Description of Artificial Sequence: Synthetic oligonucleotide
  Sense strand starting at position 2901 of SEQ ID NO: 70
cugccauccagaggaagau

SEQ ID NO: 9397 - RNA, 19 nt, Artificial Sequence
  Description of Artificial Sequence: Synthetic oligonucleotide
  Antisense strand to SEQ ID NO: 9396
aucuuccucuggauggcag

SEQ ID NO: 9398 - RNA, 19 nt, Artificial Sequence
  Description of Artificial Sequence: Synthetic oligonucleotide
  Sense strand starting at position 2757 of SEQ ID NO: 70
cguaguauagcauauauac

SEQ ID NO: 9399 - RNA, 19 nt, Artificial Sequence
  Description of Artificial Sequence: Synthetic oligonucleotide
  Antisense strand to SEQ ID NO: 9398
guauauaugcuauacuacg

SEQ ID NO: 9400 - RNA, 19 nt, Artificial Sequence
  Description of Artificial Sequence: Synthetic oligonucleotide
  Sense strand starting at position 2343 of SEQ ID NO: 70
aggcacugugcuuaacacu

SEQ ID NO: 9401 - RNA, 19 nt, Artificial Sequence
  Description of Artificial Sequence: Synthetic oligonucleotide
  Antisense strand to SEQ ID NO: 9400
aguguuaagcacagugccu

SEQ ID NO: 9402 - RNA, 19 nt, Artificial Sequence
  Description of Artificial Sequence: Synthetic oligonucleotide
  Sense strand starting at position 2329 of SEQ ID NO: 70
gcacguuaugugccaggca

SEQ ID NO: 9403 - RNA, 19 nt, Artificial Sequence
  Description of Artificial Sequence: Synthetic oligonucleotide
  Antisense strand to SEQ ID NO: 9402
ugccuggcacauaacgugc

SEQ ID NO: 9404 - RNA, 19 nt, Artificial Sequence
  Description of Artificial Sequence: Synthetic oligonucleotide
  Sense strand starting at position 1583 of SEQ ID NO: 70
ccaucuccuccgggagaaa

SEQ ID NO: 9405 - RNA, 19 nt, Artificial Sequence
  Description of Artificial Sequence: Synthetic oligonucleotide
  Antisense strand to SEQ ID NO: 9404
uuucucccggaggagaugg

SEQ ID NO: 9406 - RNA, 19 nt, Artificial Sequence
  Description of Artificial Sequence: Synthetic oligonucleotide
  Sense strand starting at position 1581 of SEQ ID NO: 70
ggccaucuccuccgggaga

SEQ ID NO: 9407 - RNA, 19 nt, Artificial Sequence
  Description of Artificial Sequence: Synthetic oligonucleotide
  Antisense strand to SEQ ID NO: 9406
ucucccggaggagauggcc

SEQ ID NO: 9408 - RNA, 19 nt, Artificial Sequence
  Description of Artificial Sequence: Synthetic oligonucleotide
  Sense strand starting at position 1452 of SEQ ID NO: 70
cugggaaguuagcaagaga

SEQ ID NO: 9409 - RNA, 19 nt, Artificial Sequence
  Description of Artificial Sequence: Synthetic oligonucleotide
  Antisense strand to SEQ ID NO: 9408
ucucuugcuaacuucccag

SEQ ID NO: 9410 - RNA, 19 nt, Artificial Sequence
  Description of Artificial Sequence: Synthetic oligonucleotide
  Sense strand starting at position 1444 of SEQ ID NO: 70
cagagaaacugggaaguua

SEQ ID NO: 9411 - RNA, 19 nt, Artificial Sequence
  Description of Artificial Sequence: Synthetic oligonucleotide
  Antisense strand to SEQ ID NO: 9410
uaacuucccaguuucucug

SEQ ID NO: 9412 - RNA, 19 nt, Artificial Sequence
  Description of Artificial Sequence: Synthetic oligonucleotide
  Sense strand starting at position 1360 of SEQ ID NO: 70
ugcgcugugcgccuucaaa

SEQ ID NO: 9413 - RNA, 19 nt, Artificial Sequence
  Description of Artificial Sequence: Synthetic oligonucleotide
  Antisense strand to SEQ ID NO: 9412
uuugaaggcgcacagcgca

SEQ ID NO: 9414 - RNA, 19 nt, Artificial Sequence
  Description of Artificial Sequence: Synthetic oligonucleotide
  Sense strand starting at position 1267 of SEQ ID NO: 70
ccugcaccugcauaagaaa

SEQ ID NO: 9415 - RNA, 19 nt, Artificial Sequence
  Description of Artificial Sequence: Synthetic oligonucleotide
  Antisense strand to SEQ ID NO: 9414
uuucuuaugcaggugcagg

SEQ ID NO: 9416 - RNA, 19 nt, Artificial Sequence
  Description of Artificial Sequence: Synthetic oligonucleotide
  Sense strand starting at position 1212 of SEQ ID NO: 70
gcaggugucuaaguaagag

SEQ ID NO: 9417 - RNA, 19 nt, Artificial Sequence
  Description of Artificial Sequence: Synthetic oligonucleotide
  Antisense strand to SEQ ID NO: 9416
cucuuacuuagacaccugc

SEQ ID NO: 9418 - RNA, 19 nt, Artificial Sequence
  Description of Artificial Sequence: Synthetic oligonucleotide
  Sense strand starting at position 1209 of SEQ ID NO: 70
aaagcaggugucuaaguaa

SEQ ID NO: 9419 - RNA, 19 nt, Artificial Sequence
  Description of Artificial Sequence: Synthetic oligonucleotide
  Antisense strand to SEQ ID NO: 9418
uuacuuagacaccugcuuu

SEQ ID NO: 9420 - RNA, 19 nt, Artificial Sequence
  Description of Artificial Sequence: Synthetic oligonucleotide
  Sense strand starting at position 1208 of SEQ ID NO: 70
caaagcaggugucuaagua

SEQ ID NO: 9421 - RNA, 19 nt, Artificial Sequence
  Description of Artificial Sequence: Synthetic oligonucleotide
  Antisense strand to SEQ ID NO: 9420
uacuuagacaccugcuuug

SEQ ID NO: 9422 - RNA, 19 nt, Artificial Sequence
  Description of Artificial Sequence: Synthetic oligonucleotide
  Sense strand starting at position 1180 of SEQ ID NO: 70
agaauaacaugucagacuu

SEQ ID NO: 9423 - RNA, 19 nt, Artificial Sequence
  Description of Artificial Sequence: Synthetic oligonucleotide
  Antisense strand to SEQ ID NO: 9422
aagucugacauguuauucu

SEQ ID NO: 9424 - RNA, 19 nt, Artificial Sequence
  Description of Artificial Sequence: Synthetic oligonucleotide
  Sense strand starting at position 1145 of SEQ ID NO: 70
aucugugucuuacuuuaac

SEQ ID NO: 9425 - RNA, 19 nt, Artificial Sequence
  Description of Artificial Sequence: Synthetic oligonucleotide
  Antisense strand to SEQ ID NO: 9424
guuaaaguaagacacagau

SEQ ID NO: 9426 - RNA, 19 nt, Artificial Sequence
  Description of Artificial Sequence: Synthetic oligonucleotide
  Sense strand starting at position 1141 of SEQ ID NO: 70
ucagaucugugucuuacuu

SEQ ID NO: 9427 - RNA, 19 nt, Artificial Sequence
  Description of Artificial Sequence: Synthetic oligonucleotide
  Antisense strand to SEQ ID NO: 9426
aaguaagacacagaucuga

SEQ ID NO: 9428 - RNA, 19 nt, Artificial Sequence
  Description of Artificial Sequence: Synthetic oligonucleotide
  Sense strand starting at position 1123 of SEQ ID NO: 70
gccucauccagugaagguu

SEQ ID NO: 9429 - RNA, 19 nt, Artificial Sequence
  Description of Artificial Sequence: Synthetic oligonucleotide
  Antisense strand to SEQ ID NO: 9428
aaccuucacuggaugaggc

SEQ ID NO: 9430 - RNA, 19 nt, Artificial Sequence
  Description of Artificial Sequence: Synthetic oligonucleotide
  Sense strand starting at position 1122 of SEQ ID NO: 70
agccucauccagugaaggu

SEQ ID NO: 9431 - RNA, 19 nt, Artificial Sequence
  Description of Artificial Sequence: Synthetic oligonucleotide
  Antisense strand to SEQ ID NO: 9430
accuucacuggaugaggcu

SEQ ID NO: 9432 - RNA, 19 nt, Artificial Sequence
  Description of Artificial Sequence: Synthetic oligonucleotide
  Sense strand starting at position 1016 of SEQ ID NO: 70
uacugagauugcuccugua

SEQ ID NO: 9433 - RNA, 19 nt, Artificial Sequence
  Description of Artificial Sequence: Synthetic oligonucleotide
  Antisense strand to SEQ ID NO: 9432
uacaggagcaaucucagua

SEQ ID NO: 9434 - RNA, 19 nt, Artificial Sequence
  Description of Artificial Sequence: Synthetic oligonucleotide
  Sense strand starting at position 1007 of SEQ ID NO: 70
auagaaucauacugagauu

SEQ ID NO: 9435 - RNA, 19 nt, Artificial Sequence
  Description of Artificial Sequence: Synthetic oligonucleotide
  Antisense strand to SEQ ID NO: 9434
aaucucaguaugauucuau

SEQ ID NO: 9436 - RNA, 19 nt, Artificial Sequence
  Description of Artificial Sequence: Synthetic oligonucleotide
  Sense strand starting at position 944 of SEQ ID NO: 70
agaauccucuuggagaaua

SEQ ID NO: 9437 - RNA, 19 nt, Artificial Sequence
  Description of Artificial Sequence: Synthetic oligonucleotide
  Antisense strand to SEQ ID NO: 9436
uauucuccaagaggauucu

SEQ ID NO: 9438 - RNA, 19 nt, Artificial Sequence
  Description of Artificial Sequence: Synthetic oligonucleotide
  Sense strand starting at position 846 of SEQ ID NO: 70
gagagaucuugacagguug

SEQ ID NO: 9439 - RNA, 19 nt, Artificial Sequence
  Description of Artificial Sequence: Synthetic oligonucleotide
  Antisense strand to SEQ ID NO: 9438
caaccugucaagaucucuc

SEQ ID NO: 9440 - RNA, 19 nt, Artificial Sequence
  Description of Artificial Sequence: Synthetic oligonucleotide
  Sense strand starting at position 753 of SEQ ID NO: 70
guaccugucccauacauac

SEQ ID NO: 9441 - RNA, 19 nt, Artificial Sequence
  Description of Artificial Sequence: Synthetic oligonucleotide
  Antisense strand to SEQ ID NO: 9440
guauguaugggacagguac

SEQ ID NO: 9442 - RNA, 19 nt, Artificial Sequence
  Description of Artificial Sequence: Synthetic oligonucleotide
  Sense strand starting at position 464 of SEQ ID NO: 70
uguaguuuauaguccaaag

SEQ ID NO: 9443 - RNA, 19 nt, Artificial Sequence
  Description of Artificial Sequence: Synthetic oligonucleotide
  Antisense strand to SEQ ID NO: 9442
cuuuggacuauaaacuaca

SEQ ID NO: 9444 - RNA, 19 nt, Artificial Sequence
  Description of Artificial Sequence: Synthetic oligonucleotide
  Sense strand starting at position 340 of SEQ ID NO: 70
acuugaaaccugggcaaca

SEQ ID NO: 9445 - RNA, 19 nt, Artificial Sequence
  Description of Artificial Sequence: Synthetic oligonucleotide
  Antisense strand to SEQ ID NO: 9444
uguugcccagguuucaagu

SEQ ID NO: 9446 - RNA, 19 nt, Artificial Sequence
  Description of Artificial Sequence: Synthetic oligonucleotide
  Sense strand starting at position 135 of SEQ ID NO: 70
gacuguauuccagacuuug

SEQ ID NO: 9447 - RNA, 19 nt, Artificial Sequence
  Description of Artificial Sequence: Synthetic oligonucleotide
  Antisense strand to SEQ ID NO: 9446
caaagucuggaauacaguc

SEQ ID NO: 9448 - RNA, 19 nt, Artificial Sequence
  Description of Artificial Sequence: Synthetic oligonucleotide
  Sense strand starting at position 70 of SEQ ID NO: 70
ggauaaaguccaggcuucu

SEQ ID NO: 9449 - RNA, 19 nt, Artificial Sequence
  Description of Artificial Sequence: Synthetic oligonucleotide
  Antisense strand to SEQ ID NO: 9448
agaagccuggacuuuaucc

SEQ ID NO: 9450 - RNA, 19 nt, Artificial Sequence
  Description of Artificial Sequence: Synthetic oligonucleotide
  Sense strand starting at position 44 of SEQ ID NO: 71
acgagaucaguugggauau

SEQ ID NO: 9451 - RNA, 19 nt, Artificial Sequence
  Description of Artificial Sequence: Synthetic oligonucleotide
  Antisense strand to SEQ ID NO: 9450
auaucccaacugaucucgu

SEQ ID NO: 9452 - RNA, 19 nt, Artificial Sequence
  Description of Artificial Sequence: Synthetic oligonucleotide
  Sense strand starting at position 45 of SEQ ID NO: 71
cgagaucaguugggauaug

SEQ ID NO: 9453 - RNA, 19 nt, Artificial Sequence
  Description of Artificial Sequence: Synthetic oligonucleotide
  Antisense strand to SEQ ID NO: 9452
cauaucccaacugaucucg

SEQ ID NO: 9454 - RNA, 19 nt, Artificial Sequence
  Description of Artificial Sequence: Synthetic oligonucleotide
  Sense strand starting at position 121 of SEQ ID NO: 71
ccaggcauucuuggcauga

SEQ ID NO: 9455 - RNA, 19 nt, Artificial Sequence
  Description of Artificial Sequence: Synthetic oligonucleotide
  Antisense strand to SEQ ID NO: 9454
ucaugccaagaaugccugg

SEQ ID NO: 9456 - RNA, 19 nt, Artificial Sequence
  Description of Artificial Sequence: Synthetic oligonucleotide
  Sense strand starting at position 122 of SEQ ID NO: 71
caggcauucuuggcaugaa

SEQ ID NO: 9457 - RNA, 19 nt, Artificial Sequence
  Description of Artificial Sequence: Synthetic oligonucleotide
  Antisense strand to SEQ ID NO: 9456
uucaugccaagaaugccug

SEQ ID NO: 9458 - RNA, 19 nt, Artificial Sequence
  Description of Artificial Sequence: Synthetic oligonucleotide
  Sense strand starting at position 123 of SEQ ID NO: 71
aggcauucuuggcaugaac

SEQ ID NO: 9459 - RNA, 19 nt, Artificial Sequence
  Description of Artificial Sequence: Synthetic oligonucleotide
  Antisense strand to SEQ ID NO: 9458
guucaugccaagaaugccu

SEQ ID NO: 9460 - RNA, 19 nt, Artificial Sequence
  Description of Artificial Sequence: Synthetic oligonucleotide
  Sense strand starting at position 125 of SEQ ID NO: 71
gcauucuuggcaugaacug

SEQ ID NO: 9461 - RNA, 19 nt, Artificial Sequence
  Description of Artificial Sequence: Synthetic oligonucleotide
  Antisense strand to SEQ ID NO: 9460
caguucaugccaagaaugc

SEQ ID NO: 9462 - RNA, 19 nt, Artificial Sequence
  Description of Artificial Sequence: Synthetic oligonucleotide
  Sense strand starting at position 157 of SEQ ID NO: 71
gccugaggacuuugguuca

SEQ ID NO: 9463 - RNA, 19 nt, Artificial Sequence
  Description of Artificial Sequence: Synthetic oligonucleotide
  Antisense strand to SEQ ID NO: 9462
ugaaccaaaguccucaggc

SEQ ID NO: 9464 - RNA, 19 nt, Artificial Sequence
  Description of Artificial Sequence: Synthetic oligonucleotide
  Sense strand starting at position 415 of SEQ ID NO: 71
ggccgugugcaccuguaau

SEQ ID NO: 9465 - RNA, 19 nt, Artificial Sequence
  Description of Artificial Sequence: Synthetic oligonucleotide
  Antisense strand to SEQ ID NO: 9464
auuacaggugcacacggcc

SEQ ID NO: 9466 - RNA, 19 nt, Artificial Sequence
  Description of Artificial Sequence: Synthetic oligonucleotide
  Sense strand starting at position 675 of SEQ ID NO: 71
gagcaacagccucaggaua

SEQ ID NO: 9467 - RNA, 19 nt, Artificial Sequence
  Description of Artificial Sequence: Synthetic oligonucleotide
  Antisense strand to SEQ ID NO: 9466
uauccugaggcuguugcuc

SEQ ID NO: 9468 - RNA, 19 nt, Artificial Sequence
  Description of Artificial Sequence: Synthetic oligonucleotide
  Sense strand starting at position 688 of SEQ ID NO: 71
aggauaguccaguggguga

SEQ ID NO: 9469 - RNA, 19 nt, Artificial Sequence
  Description of Artificial Sequence: Synthetic oligonucleotide
  Antisense strand to SEQ ID NO: 9468
ucacccacuggacuauccu

SEQ ID NO: 9470 - RNA, 19 nt, Artificial Sequence
  Description of Artificial Sequence: Synthetic oligonucleotide
  Sense strand starting at position 999 of SEQ ID NO: 71
ccugcagcucccuaaagua

SEQ ID NO: 9471 - RNA, 19 nt, Artificial Sequence
  Description of Artificial Sequence: Synthetic oligonucleotide
  Antisense strand to SEQ ID NO: 9470
uacuuuagggagcugcagg

SEQ ID NO: 9472 - RNA, 19 nt, Artificial Sequence
  Description of Artificial Sequence: Synthetic oligonucleotide
  Sense strand starting at position 1028 of SEQ ID NO: 71
ugggcucuccagcaaucau

SEQ ID NO: 9473 - RNA, 19 nt, Artificial Sequence
  Description of Artificial Sequence: Synthetic oligonucleotide
  Antisense strand to SEQ ID NO: 9472
augauugcuggagagccca

SEQ ID NO: 9474 - RNA, 19 nt, Artificial Sequence
  Description of Artificial Sequence: Synthetic oligonucleotide
  Sense strand starting at position 1117 of SEQ ID NO: 71
caagucaaagccuggcaua

SEQ ID NO: 9475 - RNA, 19 nt, Artificial Sequence
  Description of Artificial Sequence: Synthetic oligonucleotide
  Antisense strand to SEQ ID NO: 9474
uaugccaggcuuugacuug

SEQ ID NO: 9476 - RNA, 19 nt, Artificial Sequence
  Description of Artificial Sequence: Synthetic oligonucleotide
  Sense strand starting at position 1261 of SEQ ID NO: 71
gucaaauucuagugguuaa

SEQ ID NO: 9477 - RNA, 19 nt, Artificial Sequence
  Description of Artificial Sequence: Synthetic oligonucleotide
  Antisense strand to SEQ ID NO: 9476
uuaaccacuagaauuugac

SEQ ID NO: 9478 - RNA, 19 nt, Artificial Sequence
  Description of Artificial Sequence: Synthetic oligonucleotide
  Sense strand starting at position 1264 of SEQ ID NO: 71
aaauucuagugguuaagaa

SEQ ID NO: 9479 - RNA, 19 nt, Artificial Sequence
  Description of Artificial Sequence: Synthetic oligonucleotide
  Antisense strand to SEQ ID NO: 9478
uucuuaaccacuagaauuu

SEQ ID NO: 9480 - RNA, 19 nt, Artificial Sequence
  Description of Artificial Sequence: Synthetic oligonucleotide
  Sense strand starting at position 1311 of SEQ ID NO: 71
ggugugcaugcgugaugau

SEQ ID NO: 9481 - RNA, 19 nt, Artificial Sequence
  Description of Artificial Sequence: Synthetic oligonucleotide
  Antisense strand to SEQ ID NO: 9480
aucaucacgcaugcacacc

SEQ ID NO: 9482 - RNA, 19 nt, Artificial Sequence
  Description of Artificial Sequence: Synthetic oligonucleotide
  Sense strand starting at position 1320 of SEQ ID NO: 71
gcgugaugaugguaacgaa

SEQ ID NO: 9483 - RNA, 19 nt, Artificial Sequence
  Description of Artificial Sequence: Synthetic oligonucleotide
  Antisense strand to SEQ ID NO: 9482
uucguuaccaucaucacgc

SEQ ID NO: 9484 - RNA, 19 nt, Artificial Sequence
  Description of Artificial Sequence: Synthetic oligonucleotide
  Sense strand starting at position 2747 of SEQ ID NO: 71
gguuuccaaacguguaaau

SEQ ID NO: 9485 - RNA, 19 nt, Artificial Sequence
  Description of Artificial Sequence: Synthetic oligonucleotide
  Antisense strand to SEQ ID NO: 9484
auuuacacguuuggaaacc

SEQ ID NO: 9486 - RNA, 19 nt, Artificial Sequence
  Description of Artificial Sequence: Synthetic oligonucleotide
  Sense strand starting at position 2771 of SEQ ID NO: 71
gucugagucuggaagugug

SEQ ID NO: 9487 - RNA, 19 nt, Artificial Sequence
  Description of Artificial Sequence: Synthetic oligonucleotide
  Antisense strand to SEQ ID NO: 9486
cacacuuccagacucagac

SEQ ID NO: 9488 - RNA, 19 nt, Artificial Sequence
  Description of Artificial Sequence: Synthetic oligonucleotide
  Sense strand starting at position 2810 of SEQ ID NO: 71
acaggucaugucuaaucaa

SEQ ID NO: 9489 - RNA, 19 nt, Artificial Sequence
  Description of Artificial Sequence: Synthetic oligonucleotide
  Antisense strand to SEQ ID NO: 9488
uugauuagacaugaccugu

SEQ ID NO: 9490 - RNA, 19 nt, Artificial Sequence
  Description of Artificial Sequence: Synthetic oligonucleotide
  Sense strand starting at position 2821 of SEQ ID NO: 71
cuaaucaacgcuuacugaa

SEQ ID NO: 9491 - RNA, 19 nt, Artificial Sequence
  Description of Artificial Sequence: Synthetic oligonucleotide
  Antisense strand to SEQ ID NO: 9490
uucaguaagcguugauuag

SEQ ID NO: 9492 - RNA, 19 nt, Artificial Sequence
  Description of Artificial Sequence: Synthetic oligonucleotide
  Sense strand starting at position 2866 of SEQ ID NO: 71
gggcuacaaugagaacaaa

SEQ ID NO: 9493 - RNA, 19 nt, Artificial Sequence
  Description of Artificial Sequence: Synthetic oligonucleotide
  Antisense strand to SEQ ID NO: 9492
uuuguucucauuguagccc

SEQ ID NO: 9494 - RNA, 19 nt, Artificial Sequence
  Description of Artificial Sequence: Synthetic oligonucleotide
  Sense strand starting at position 2947 of SEQ ID NO: 71
ccuggauugucucauuuaa

SEQ ID NO: 9495 - RNA, 19 nt, Artificial Sequence
  Description of Artificial Sequence: Synthetic oligonucleotide
  Antisense strand to SEQ ID NO: 9494
uuaaaugagacaauccagg

SEQ ID NO: 9496 - RNA, 19 nt, Artificial Sequence
  Description of Artificial Sequence: Synthetic oligonucleotide
  Sense strand starting at position 3039 of SEQ ID NO: 71
acuugaguuccagacuggu

SEQ ID NO: 9497 - RNA, 19 nt, Artificial Sequence
  Description of Artificial Sequence: Synthetic oligonucleotide
  Antisense strand to SEQ ID NO: 9496
accagucuggaacucaagu

SEQ ID NO: 9498 - RNA, 19 nt, Artificial Sequence
  Description of Artificial Sequence: Synthetic oligonucleotide
  Sense strand starting at position 3045 of SEQ ID NO: 71
guuccagacugguaggcau

SEQ ID NO: 9499 - RNA, 19 nt, Artificial Sequence
  Description of Artificial Sequence: Synthetic oligonucleotide
  Antisense strand to SEQ ID NO: 9498
augccuaccagucuggaac

SEQ ID NO: 9500 - RNA, 19 nt, Artificial Sequence
  Description of Artificial Sequence: Synthetic oligonucleotide
  Sense strand starting at position 3260 of SEQ ID NO: 71
accucuagguguguuuaca

SEQ ID NO: 9501 - RNA, 19 nt, Artificial Sequence
  Description of Artificial Sequence: Synthetic oligonucleotide
  Antisense strand to SEQ ID NO: 9500
uguaaacacaccuagaggu

SEQ ID NO: 9502 - RNA, 19 nt, Artificial Sequence
  Description of Artificial Sequence: Synthetic oligonucleotide
  Sense strand starting at position 3269 of SEQ ID NO: 71
uguguuuacaccuggagaa

SEQ ID NO: 9503 - RNA, 19 nt, Artificial Sequence
  Description of Artificial Sequence: Synthetic oligonucleotide
  Antisense strand to SEQ ID NO: 9502
uucuccagguguaaacaca

SEQ ID NO: 9504 - RNA, 19 nt, Artificial Sequence
  Description of Artificial Sequence: Synthetic oligonucleotide
  Sense strand starting at position 3270 of SEQ ID NO: 71
guguuuacaccuggagaau

SEQ ID NO: 9505 - RNA, 19 nt, Artificial Sequence
  Description of Artificial Sequence: Synthetic oligonucleotide
  Antisense strand to SEQ ID NO: 9504
auucuccagguguaaacac

SEQ ID NO: 9506 - RNA, 19 nt, Artificial Sequence
  Description of Artificial Sequence: Synthetic oligonucleotide
  Sense strand starting at position 3445 of SEQ ID NO: 71
agaagugagucuucuuauc

SEQ ID NO: 9507 - RNA, 19 nt, Artificial Sequence
  Description of Artificial Sequence: Synthetic oligonucleotide
  Antisense strand to SEQ ID NO: 9506
gauaagaagacucacuucu

SEQ ID NO: 9508 - RNA, 19 nt, Artificial Sequence
  Description of Artificial Sequence: Synthetic oligonucleotide
  Sense strand starting at position 3450 of SEQ ID NO: 71
ugagucuucuuaucucaug

SEQ ID NO: 9509 - RNA, 19 nt, Artificial Sequence
  Description of Artificial Sequence: Synthetic oligonucleotide
  Antisense strand to SEQ ID NO: 9508
caugagauaagaagacuca

SEQ ID NO: 9510 - RNA, 19 nt, Artificial Sequence
  Description of Artificial Sequence: Synthetic oligonucleotide
  Sense strand starting at position 3507 of SEQ ID NO: 71
agagauggcacgugcagaa

SEQ ID NO: 9511 - RNA, 19 nt, Artificial Sequence
  Description of Artificial Sequence: Synthetic oligonucleotide
  Antisense strand to SEQ ID NO: 9510
uucugcacgugccaucucu

SEQ ID NO: 9512 - RNA, 19 nt, Artificial Sequence
  Description of Artificial Sequence: Synthetic oligonucleotide
  Sense strand starting at position 3582 of SEQ ID NO: 71
gagggcaguucuuggagua

SEQ ID NO: 9513 - RNA, 19 nt, Artificial Sequence
  Description of Artificial Sequence: Synthetic oligonucleotide
  Antisense strand to SEQ ID NO: 9512
uacuccaagaacugcccuc

SEQ ID NO: 9514 - RNA, 19 nt, Artificial Sequence
  Description of Artificial Sequence: Synthetic oligonucleotide
  Sense strand starting at position 3583 of SEQ ID NO: 71
agggcaguucuuggaguaa

SEQ ID NO: 9515 - RNA, 19 nt, Artificial Sequence
  Description of Artificial Sequence: Synthetic oligonucleotide
  Antisense strand to SEQ ID NO: 9514
uuacuccaagaacugcccu

SEQ ID NO: 9516 - RNA, 19 nt, Artificial Sequence
  Description of Artificial Sequence: Synthetic oligonucleotide
  Sense strand starting at position 3652 of SEQ ID NO: 71
gacacaugauuggcuguga

SEQ ID NO: 9517 - RNA, 19 nt, Artificial Sequence
  Description of Artificial Sequence: Synthetic oligonucleotide
  Antisense strand to SEQ ID NO: 9516
ucacagccaaucauguguc

SEQ ID NO: 9518 - RNA, 19 nt, Artificial Sequence
  Description of Artificial Sequence: Synthetic oligonucleotide
  Sense strand starting at position 3653 of SEQ ID NO: 71
acacaugauuggcugugau

SEQ ID NO: 9519 - RNA, 19 nt, Artificial Sequence
  Description of Artificial Sequence: Synthetic oligonucleotide
  Antisense strand to SEQ ID NO: 9518
aucacagccaaucaugugu

SEQ ID NO: 9520 - RNA, 19 nt, Artificial Sequence
  Description of Artificial Sequence: Synthetic oligonucleotide
  Sense strand starting at position 3656 of SEQ ID NO: 71
caugauuggcugugaucau

SEQ ID NO: 9521 - RNA, 19 nt, Artificial Sequence
  Description of Artificial Sequence: Synthetic oligonucleotide
  Antisense strand to SEQ ID NO: 9520
augaucacagccaaucaug

SEQ ID NO: 9522 - RNA, 19 nt, Artificial Sequence
  Description of Artificial Sequence: Synthetic oligonucleotide
  Sense strand starting at position 3657 of SEQ ID NO: 71
augauuggcugugaucaug

SEQ ID NO: 9523 - RNA, 19 nt, Artificial Sequence
  Description of Artificial Sequence: Synthetic oligonucleotide
  Antisense strand to SEQ ID NO: 9522
caugaucacagccaaucau

SEQ ID NO: 9524 - RNA, 19 nt, Artificial Sequence
  Description of Artificial Sequence: Synthetic oligonucleotide
  Sense strand starting at position 3665 of SEQ ID NO: 71
cugugaucaugugcccgaa

SEQ ID NO: 9525 - RNA, 19 nt, Artificial Sequence
  Description of Artificial Sequence: Synthetic oligonucleotide
  Antisense strand to SEQ ID NO: 9524
uucgggcacaugaucacag

SEQ ID NO: 9526 - RNA, 19 nt, Artificial Sequence
  Description of Artificial Sequence: Synthetic oligonucleotide
  Sense strand starting at position 3668 of SEQ ID NO: 71
ugaucaugugcccgaagca

SEQ ID NO: 9527 - RNA, 19 nt, Artificial Sequence
  Description of Artificial Sequence: Synthetic oligonucleotide
  Antisense strand to SEQ ID NO: 9526
ugcuucgggcacaugauca

SEQ ID NO: 9528 - RNA, 19 nt, Artificial Sequence
  Description of Artificial Sequence: Synthetic oligonucleotide
  Sense strand starting at position 3948 of SEQ ID NO: 71
uuugcucagagcuguuuga

SEQ ID NO: 9529 - RNA, 19 nt, Artificial Sequence
  Description of Artificial Sequence: Synthetic oligonucleotide
  Antisense strand to SEQ ID NO: 9528
ucaaacagcucugagcaaa

SEQ ID NO: 9530 - RNA, 19 nt, Artificial Sequence
  Description of Artificial Sequence: Synthetic oligonucleotide
  Sense strand starting at position 32 of SEQ ID NO: 72
gcccuugaggccuagcaaa

SEQ ID NO: 9531 - RNA, 19 nt, Artificial Sequence
  Description of Artificial Sequence: Synthetic oligonucleotide
  Antisense strand to SEQ ID NO: 9530
uuugcuaggccucaagggc

SEQ ID NO: 9532 - RNA, 19 nt, Artificial Sequence
  Description of Artificial Sequence: Synthetic oligonucleotide
  Sense strand starting at position 141 of SEQ ID NO: 72
gaggacuuucgccagccaa

SEQ ID NO: 9533 - RNA, 19 nt, Artificial Sequence
  Description of Artificial Sequence: Synthetic oligonucleotide
  Antisense strand to SEQ ID NO: 9532
uuggcuggcgaaaguccuc

SEQ ID NO: 9534 - RNA, 19 nt, Artificial Sequence
  Description of Artificial Sequence: Synthetic oligonucleotide
  Sense strand starting at position 540 of SEQ ID NO: 72
gaaauaugguuagagcucu

SEQ ID NO: 9535 - RNA, 19 nt, Artificial Sequence
  Description of Artificial Sequence: Synthetic oligonucleotide
  Antisense strand to SEQ ID NO: 9534
agagcucuaaccauauuuc

SEQ ID NO: 9536 - RNA, 19 nt, Artificial Sequence
  Description of Artificial Sequence: Synthetic oligonucleotide
  Sense strand starting at position 629 of SEQ ID NO: 72
ggaucuaccauguggugaa

SEQ ID NO: 9537 - RNA, 19 nt, Artificial Sequence
  Description of Artificial Sequence: Synthetic oligonucleotide
  Antisense strand to SEQ ID NO: 9536
uucaccacaugguagaucc

SEQ ID NO: 9538 - RNA, 19 nt, Artificial Sequence
  Description of Artificial Sequence: Synthetic oligonucleotide
  Sense strand starting at position 630 of SEQ ID NO: 72
gaucuaccauguggugaau

SEQ ID NO: 9539 - RNA, 19 nt, Artificial Sequence
  Description of Artificial Sequence: Synthetic oligonucleotide
  Antisense strand to SEQ ID NO: 9538
auucaccacaugguagauc

SEQ ID NO: 9540 - RNA, 19 nt, Artificial Sequence
  Description of Artificial Sequence: Synthetic oligonucleotide
  Sense strand starting at position 632 of SEQ ID NO: 72
ucuaccauguggugaauca

SEQ ID NO: 9541 - RNA, 19 nt, Artificial Sequence
  Description of Artificial Sequence: Synthetic oligonucleotide
  Antisense strand to SEQ ID NO: 9540
ugauucaccacaugguaga

SEQ ID NO: 9542 - RNA, 19 nt, Artificial Sequence
  Description of Artificial Sequence: Synthetic oligonucleotide
  Sense strand starting at position 691 of SEQ ID NO: 72
ggcaaauggugcuaauacu

SEQ ID NO: 9543 - RNA, 19 nt, Artificial Sequence
  Description of Artificial Sequence: Synthetic oligonucleotide
  Antisense strand to SEQ ID NO: 9542
aguauuagcaccauuugcc

SEQ ID NO: 9544 - RNA, 19 nt, Artificial Sequence
  Description of Artificial Sequence: Synthetic oligonucleotide
  Sense strand starting at position 1055 of SEQ ID NO: 72
uccaauagccuccgacaga

SEQ ID NO: 9545 - RNA, 19 nt, Artificial Sequence
  Description of Artificial Sequence: Synthetic oligonucleotide
  Antisense strand to SEQ ID NO: 9544
ucugucggaggcuauugga

SEQ ID NO: 9546 - RNA, 19 nt, Artificial Sequence
  Description of Artificial Sequence: Synthetic oligonucleotide
  Sense strand starting at position 1177 of SEQ ID NO: 72
uugugaguaccacaaggua

SEQ ID NO: 9547 - RNA, 19 nt, Artificial Sequence
  Description of Artificial Sequence: Synthetic oligonucleotide
  Antisense strand to SEQ ID NO: 9546
uaccuugugguacucacaa

SEQ ID NO: 9548 - RNA, 19 nt, Artificial Sequence
  Description of Artificial Sequence: Synthetic oligonucleotide
  Sense strand starting at position 1779 of SEQ ID NO: 72
acacgaaggccgugucuau

SEQ ID NO: 9549 - RNA, 19 nt, Artificial Sequence
  Description of Artificial Sequence: Synthetic oligonucleotide
  Antisense strand to SEQ ID NO: 9548
auagacacggccuucgugu

SEQ ID NO: 9550 - RNA, 19 nt, Artificial Sequence
  Description of Artificial Sequence: Synthetic oligonucleotide
  Sense strand starting at position 2378 of SEQ ID NO: 72
ccgugugguccuggagaau

SEQ ID NO: 9551 - RNA, 19 nt, Artificial Sequence
  Description of Artificial Sequence: Synthetic oligonucleotide
  Antisense strand to SEQ ID NO: 9550
auucuccaggaccacacgg

SEQ ID NO: 9552 - RNA, 19 nt, Artificial Sequence
  Description of Artificial Sequence: Synthetic oligonucleotide
  Sense strand starting at position 2379 of SEQ ID NO: 72
cgugugguccuggagaaug

SEQ ID NO: 9553 - RNA, 19 nt, Artificial Sequence
  Description of Artificial Sequence: Synthetic oligonucleotide
  Antisense strand to SEQ ID NO: 9552
cauucuccaggaccacacg

SEQ ID NO: 9554 - RNA, 19 nt, Artificial Sequence
  Description of Artificial Sequence: Synthetic oligonucleotide
  Sense strand starting at position 2428 of SEQ ID NO: 72
cauggagugacaugguuaa

SEQ ID NO: 9555 - RNA, 19 nt, Artificial Sequence
  Description of Artificial Sequence: Synthetic oligonucleotide
  Antisense strand to SEQ ID NO: 9554
uuaaccaugucacuccaug

SEQ ID NO: 9556 - RNA, 19 nt, Artificial Sequence
  Description of Artificial Sequence: Synthetic oligonucleotide
  Sense strand starting at position 2432 of SEQ ID NO: 72
gagugacaugguuaaagug

SEQ ID NO: 9557 - RNA, 19 nt, Artificial Sequence
  Description of Artificial Sequence: Synthetic oligonucleotide
  Antisense strand to SEQ ID NO: 9556
cacuuuaaccaugucacuc

SEQ ID NO: 9558 - RNA, 19 nt, Artificial Sequence
  Description of Artificial Sequence: Synthetic oligonucleotide
  Sense strand starting at position 2516 of SEQ ID NO: 72
ugacuuaacgccuguaaug

SEQ ID NO: 9559 - RNA, 19 nt, Artificial Sequence
  Description of Artificial Sequence: Synthetic oligonucleotide
  Antisense strand to SEQ ID NO: 9558
cauuacaggcguuaaguca

SEQ ID NO: 9560 - RNA, 19 nt, Artificial Sequence
  Description of Artificial Sequence: Synthetic oligonucleotide
  Sense strand starting at position 2710 of SEQ ID NO: 72
gggcaaaucugucuccaaa

SEQ ID NO: 9561 - RNA, 19 nt, Artificial Sequence
  Description of Artificial Sequence: Synthetic oligonucleotide
  Antisense strand to SEQ ID NO: 9560
uuuggagacagauuugccc

SEQ ID NO: 9562 - RNA, 19 nt, Artificial Sequence
  Description of Artificial Sequence: Synthetic oligonucleotide
  Sense strand starting at position 2830 of SEQ ID NO: 72
ugauguaaaugcucacaag

SEQ ID NO: 9563 - RNA, 19 nt, Artificial Sequence
  Description of Artificial Sequence: Synthetic oligonucleotide
  Antisense strand to SEQ ID NO: 9562
cuugugagcauuuacauca

SEQ ID NO: 9564 - RNA, 19 nt, Artificial Sequence
  Description of Artificial Sequence: Synthetic oligonucleotide
  Sense strand starting at position 2831 of SEQ ID NO: 72
gauguaaaugcucacaagu

SEQ ID NO: 9565 - RNA, 19 nt, Artificial Sequence
  Description of Artificial Sequence: Synthetic oligonucleotide
  Antisense strand to SEQ ID NO: 9564
acuugugagcauuuacauc

SEQ ID NO: 9566 - RNA, 19 nt, Artificial Sequence
  Description of Artificial Sequence: Synthetic oligonucleotide
  Sense strand starting at position 2833 of SEQ ID NO: 72
uguaaaugcucacaaguaa

SEQ ID NO: 9567 - RNA, 19 nt, Artificial Sequence
  Description of Artificial Sequence: Synthetic oligonucleotide
  Antisense strand to SEQ ID NO: 9566
uuacuugugagcauuuaca

SEQ ID NO: 9568 - RNA, 19 nt, Artificial Sequence
  Description of Artificial Sequence: Synthetic oligonucleotide
  Sense strand starting at position 2854 of SEQ ID NO: 72
ggcagugauuguuagaaug

SEQ ID NO: 9569 - RNA, 19 nt, Artificial Sequence
  Description of Artificial Sequence: Synthetic oligonucleotide
  Antisense strand to SEQ ID NO: 9568
cauucuaacaaucacugcc

SEQ ID NO: 9570 - RNA, 19 nt, Artificial Sequence
  Description of Artificial Sequence: Synthetic oligonucleotide
  Sense strand starting at position 2856 of SEQ ID NO: 72
cagugauuguuagaaugga

SEQ ID NO: 9571 - RNA, 19 nt, Artificial Sequence
  Description of Artificial Sequence: Synthetic oligonucleotide
  Antisense strand to SEQ ID NO: 9570
uccauucuaacaaucacug

SEQ ID NO: 9572 - RNA, 19 nt, Artificial Sequence
  Description of Artificial Sequence: Synthetic oligonucleotide
  Sense strand starting at position 2934 of SEQ ID NO: 72
gagauaguuuaagagcaaa

SEQ ID NO: 9573 - RNA, 19 nt, Artificial Sequence
  Description of Artificial Sequence: Synthetic oligonucleotide
  Antisense strand to SEQ ID NO: 9572
uuugcucuuaaacuaucuc

SEQ ID NO: 9574 - RNA, 19 nt, Artificial Sequence
  Description of Artificial Sequence: Synthetic oligonucleotide
  Sense strand starting at position 2998 of SEQ ID NO: 72
uggaauggcuaagugaaua

SEQ ID NO: 9575 - RNA, 19 nt, Artificial Sequence
  Description of Artificial Sequence: Synthetic oligonucleotide
  Antisense strand to SEQ ID NO: 9574
uauucacuuagccauucca

SEQ ID NO: 9576 - RNA, 19 nt, Artificial Sequence
  Description of Artificial Sequence: Synthetic oligonucleotide
  Sense strand starting at position 3006 of SEQ ID NO: 72
cuaagugaauaucagacaa

SEQ ID NO: 9577 - RNA, 19 nt, Artificial Sequence
  Description of Artificial Sequence: Synthetic oligonucleotide
  Antisense strand to SEQ ID NO: 9576
uugucugauauucacuuag

SEQ ID NO: 9578 - RNA, 19 nt, Artificial Sequence
  Description of Artificial Sequence: Synthetic oligonucleotide
  Sense strand starting at position 3074 of SEQ ID NO: 72
agcccacaccuguaauguu

SEQ ID NO: 9579 - RNA, 19 nt, Artificial Sequence
  Description of Artificial Sequence: Synthetic oligonucleotide
  Antisense strand to SEQ ID NO: 9578
aacauuacaggugugggcu

SEQ ID NO: 9580 - RNA, 19 nt, Artificial Sequence
  Description of Artificial Sequence: Synthetic oligonucleotide
  Sense strand starting at position 3162 of SEQ ID NO: 72
gggagaucuuaucgcuaca

SEQ ID NO: 9581 - RNA, 19 nt, Artificial Sequence
  Description of Artificial Sequence: Synthetic oligonucleotide
  Antisense strand to SEQ ID NO: 9580
uguagcgauaagaucuccc

SEQ ID NO: 9582 - RNA, 19 nt, Artificial Sequence
  Description of Artificial Sequence: Synthetic oligonucleotide
  Sense strand starting at position 3165 of SEQ ID NO: 72
agaucuuaucgcuacaaca

SEQ ID NO: 9583 - RNA, 19 nt, Artificial Sequence
  Description of Artificial Sequence: Synthetic oligonucleotide
  Antisense strand to SEQ ID NO: 9582
uguuguagcgauaagaucu

SEQ ID NO: 9584 - RNA, 19 nt, Artificial Sequence
  Description of Artificial Sequence: Synthetic oligonucleotide
  Sense strand starting at position 3196 of SEQ ID NO: 72
uuaucaaauugugguagca

SEQ ID NO: 9585 - RNA, 19 nt, Artificial Sequence
  Description of Artificial Sequence: Synthetic oligonucleotide
  Antisense strand to SEQ ID NO: 9584
ugcuaccacaauuugauaa

SEQ ID NO: 9586 - RNA, 19 nt, Artificial Sequence
  Description of Artificial Sequence: Synthetic oligonucleotide
  Sense strand starting at position 3198 of SEQ ID NO: 72
aucaaauugugguagcaug

SEQ ID NO: 9587 - RNA, 19 nt, Artificial Sequence
  Description of Artificial Sequence: Synthetic oligonucleotide
  Antisense strand to SEQ ID NO: 9586
caugcuaccacaauuugau

SEQ ID NO: 9588 - RNA, 19 nt, Artificial Sequence
  Description of Artificial Sequence: Synthetic oligonucleotide
  Sense strand starting at position 3251 of SEQ ID NO: 72
gggagaaucaucuacgccu

SEQ ID NO: 9589 - RNA, 19 nt, Artificial Sequence
  Description of Artificial Sequence: Synthetic oligonucleotide
  Antisense strand to SEQ ID NO: 9588
aggcguagaugauucuccc

SEQ ID NO: 9590 - RNA, 19 nt, Artificial Sequence
  Description of Artificial Sequence: Synthetic oligonucleotide
  Sense strand starting at position 3503 of SEQ ID NO: 72
ucucaauaguuguagaaca

SEQ ID NO: 9591 - RNA, 19 nt, Artificial Sequence
  Description of Artificial Sequence: Synthetic oligonucleotide
  Antisense strand to SEQ ID NO: 9590
uguucuacaacuauugaga

SEQ ID NO: 9592 - RNA, 19 nt, Artificial Sequence
  Description of Artificial Sequence: Synthetic oligonucleotide
  Sense strand starting at position 3505 of SEQ ID NO: 72
ucaauaguuguagaacagu

SEQ ID NO: 9593 - RNA, 19 nt, Artificial Sequence
  Description of Artificial Sequence: Synthetic oligonucleotide
  Antisense strand to SEQ ID NO: 9592
acuguucuacaacuauuga

SEQ ID NO: 9594 - RNA, 19 nt, Artificial Sequence
  Description of Artificial Sequence: Synthetic oligonucleotide
  Sense strand starting at position 3508 of SEQ ID NO: 72
auaguuguagaacaguuau

SEQ ID NO: 9595 - RNA, 19 nt, Artificial Sequence
  Description of Artificial Sequence: Synthetic oligonucleotide
  Antisense strand to SEQ ID NO: 9594
auaacuguucuacaacuau

SEQ ID NO: 9596 - RNA, 19 nt, Artificial Sequence
  Description of Artificial Sequence: Synthetic oligonucleotide
  Sense strand starting at position 3514 of SEQ ID NO: 72
guagaacaguuaucaguca

SEQ ID NO: 9597 - RNA, 19 nt, Artificial Sequence
  Description of Artificial Sequence: Synthetic oligonucleotide
  Antisense strand to SEQ ID NO: 9596
ugacugauaacuguucuac

SEQ ID NO: 9598 - RNA, 19 nt, Artificial Sequence
  Description of Artificial Sequence: Synthetic oligonucleotide
  Sense strand starting at position 3529 of SEQ ID NO: 72
gucauaauuuacggaaacu

SEQ ID NO: 9599 - RNA, 19 nt, Artificial Sequence
  Description of Artificial Sequence: Synthetic oligonucleotide
  Antisense strand to SEQ ID NO: 9598
aguuuccguaaauuaugac

SEQ ID NO: 9600 - RNA, 19 nt, Artificial Sequence
  Description of Artificial Sequence: Synthetic oligonucleotide
  Sense strand starting at position 3539 of SEQ ID NO: 72
acggaaacuccguaaaggu

SEQ ID NO: 9601 - RNA, 19 nt, Artificial Sequence
  Description of Artificial Sequence: Synthetic oligonucleotide
  Antisense strand to SEQ ID NO: 9600
accuuuacggaguuuccgu

SEQ ID NO: 9602 - RNA, 19 nt, Artificial Sequence
  Description of Artificial Sequence: Synthetic oligonucleotide
  Sense strand starting at position 3547 of SEQ ID NO: 72
uccguaaagguauacaaga

SEQ ID NO: 9603 - RNA, 19 nt, Artificial Sequence
  Description of Artificial Sequence: Synthetic oligonucleotide
  Antisense strand to SEQ ID NO: 9602
ucuuguauaccuuuacgga

SEQ ID NO: 9604 - RNA, 19 nt, Artificial Sequence
  Description of Artificial Sequence: Synthetic oligonucleotide
  Sense strand starting at position 3643 of SEQ ID NO: 72
gugcccauccaccaagaua

SEQ ID NO: 9605 - RNA, 19 nt, Artificial Sequence
  Description of Artificial Sequence: Synthetic oligonucleotide
  Antisense strand to SEQ ID NO: 9604
uaucuugguggaugggcac

SEQ ID NO: 9606 - RNA, 19 nt, Artificial Sequence
  Description of Artificial Sequence: Synthetic oligonucleotide
  Sense strand starting at position 3661 of SEQ ID NO: 72
auaccauauuuggaggcau

SEQ ID NO: 9607 - RNA, 19 nt, Artificial Sequence
  Description of Artificial Sequence: Synthetic oligonucleotide
  Antisense strand to SEQ ID NO: 9606
augccuccaaauaugguau

SEQ ID NO: 9608 - RNA, 19 nt, Artificial Sequence
  Description of Artificial Sequence: Synthetic oligonucleotide
  Sense strand starting at position 3761 of SEQ ID NO: 72
uguggauuaacugagguca

SEQ ID NO: 9609 - RNA, 19 nt, Artificial Sequence
  Description of Artificial Sequence: Synthetic oligonucleotide
  Antisense strand to SEQ ID NO: 9608
ugaccucaguuaauccaca

SEQ ID NO: 9610 - RNA, 19 nt, Artificial Sequence
  Description of Artificial Sequence: Synthetic oligonucleotide
  Sense strand starting at position 133 of SEQ ID NO: 73
gcacucuaauguccagacu

SEQ ID NO: 9611 - RNA, 19 nt, Artificial Sequence
  Description of Artificial Sequence: Synthetic oligonucleotide
  Antisense strand to SEQ ID NO: 9610
agucuggacauuagagugc

SEQ ID NO: 9612 - RNA, 19 nt, Artificial Sequence
  Description of Artificial Sequence: Synthetic oligonucleotide
  Sense strand starting at position 449 of SEQ ID NO: 73
aaggaaccucucggguuaa

SEQ ID NO: 9613 - RNA, 19 nt, Artificial Sequence
  Description of Artificial Sequence: Synthetic oligonucleotide
  Antisense strand to SEQ ID NO: 9612
uuaacccgagagguuccuu

SEQ ID NO: 9614 - RNA, 19 nt, Artificial Sequence
  Description of Artificial Sequence: Synthetic oligonucleotide
  Sense strand starting at position 453 of SEQ ID NO: 73
aaccucucggguuaaugaa

SEQ ID NO: 9615 - RNA, 19 nt, Artificial Sequence
  Description of Artificial Sequence: Synthetic oligonucleotide
  Antisense strand to SEQ ID NO: 9614
uucauuaacccgagagguu

SEQ ID NO: 9616 - RNA, 19 nt, Artificial Sequence
  Description of Artificial Sequence: Synthetic oligonucleotide
  Sense strand starting at position 679 of SEQ ID NO: 73
aaucaauauuaggagggaa

SEQ ID NO: 9617 - RNA, 19 nt, Artificial Sequence
  Description of Artificial Sequence: Synthetic oligonucleotide
  Antisense strand to SEQ ID NO: 9616
uucccuccuaauauugauu

SEQ ID NO: 9618 - RNA, 19 nt, Artificial Sequence
  Description of Artificial Sequence: Synthetic oligonucleotide
  Sense strand starting at position 744 of SEQ ID NO: 73
uggaacaguccucauccua

SEQ ID NO: 9619 - RNA, 19 nt, Artificial Sequence
  Description of Artificial Sequence: Synthetic oligonucleotide
  Antisense strand to SEQ ID NO: 9618
uaggaugaggacuguucca

SEQ ID NO: 9620 - RNA, 19 nt, Artificial Sequence
  Description of Artificial Sequence: Synthetic oligonucleotide
  Sense strand starting at position 886 of SEQ ID NO: 73
ggguucuuccuuuaauaau

SEQ ID NO: 9621 - RNA, 19 nt, Artificial Sequence
  Description of Artificial Sequence: Synthetic oligonucleotide
  Antisense strand to SEQ ID NO: 9620
auuauuaaaggaagaaccc

SEQ ID NO: 9622 - RNA, 19 nt, Artificial Sequence
  Description of Artificial Sequence: Synthetic oligonucleotide
  Sense strand starting at position 942 of SEQ ID NO: 73
aggagugaacaagguguau

SEQ ID NO: 9623 - RNA, 19 nt, Artificial Sequence
  Description of Artificial Sequence: Synthetic oligonucleotide
  Antisense strand to SEQ ID NO: 9622
auacaccuuguucacuccu

SEQ ID NO: 9624 - RNA, 19 nt, Artificial Sequence
  Description of Artificial Sequence: Synthetic oligonucleotide
  Sense strand starting at position 1060 of SEQ ID NO: 73
uuaccaaauuuaugggauu

SEQ ID NO: 9625 - RNA, 19 nt, Artificial Sequence
  Description of Artificial Sequence: Synthetic oligonucleotide
  Antisense strand to SEQ ID NO: 9624
aaucccauaaauuugguaa

SEQ ID NO: 9626 - RNA, 19 nt, Artificial Sequence
  Description of Artificial Sequence: Synthetic oligonucleotide
  Sense strand starting at position 1063 of SEQ ID NO: 73
ccaaauuuaugggauuaau

SEQ ID NO: 9627 - RNA, 19 nt, Artificial Sequence
  Description of Artificial Sequence: Synthetic oligonucleotide
  Antisense strand to SEQ ID NO: 9626
auuaaucccauaaauuugg

SEQ ID NO: 9628 - RNA, 19 nt, Artificial Sequence
  Description of Artificial Sequence: Synthetic oligonucleotide
  Sense strand starting at position 1073 of SEQ ID NO: 73
gggauuaauccaugaguuu

SEQ ID NO: 9629 - RNA, 19 nt, Artificial Sequence
  Description of Artificial Sequence: Synthetic oligonucleotide
  Antisense strand to SEQ ID NO: 9628
aaacucauggauuaauccc

SEQ ID NO: 9630 - RNA, 19 nt, Artificial Sequence
  Description of Artificial Sequence: Synthetic oligonucleotide
  Sense strand starting at position 1570 of SEQ ID NO: 73
augguaacaucgcucauga

SEQ ID NO: 9631 - RNA, 19 nt, Artificial Sequence
  Description of Artificial Sequence: Synthetic oligonucleotide
  Antisense strand to SEQ ID NO: 9630
ucaugagcgauguuaccau

SEQ ID NO: 9632 - RNA, 19 nt, Artificial Sequence
  Description of Artificial Sequence: Synthetic oligonucleotide
  Sense strand starting at position 1572 of SEQ ID NO: 73
gguaacaucgcucaugaug

SEQ ID NO: 9633 - RNA, 19 nt, Artificial Sequence
  Description of Artificial Sequence: Synthetic oligonucleotide
  Antisense strand to SEQ ID NO: 9632
caucaugagcgauguuacc

SEQ ID NO: 9634 - RNA, 19 nt, Artificial Sequence
  Description of Artificial Sequence: Synthetic oligonucleotide
  Sense strand starting at position 1615 of SEQ ID NO: 73
gagaaaugguacuuuguga

SEQ ID NO: 9635 - RNA, 19 nt, Artificial Sequence
  Description of Artificial Sequence: Synthetic oligonucleotide
  Antisense strand to SEQ ID NO: 9634
ucacaaaguaccauuucuc

SEQ ID NO: 9636 - RNA, 19 nt, Artificial Sequence
  Description of Artificial Sequence: Synthetic oligonucleotide
  Sense strand starting at position 1631 of SEQ ID NO: 73
ugauaucagcuuuaggguu

SEQ ID NO: 9637 - RNA, 19 nt, Artificial Sequence
  Description of Artificial Sequence: Synthetic oligonucleotide
  Antisense strand to SEQ ID NO: 9636
aacccuaaagcugauauca

SEQ ID NO: 9638 - RNA, 19 nt, Artificial Sequence
  Description of Artificial Sequence: Synthetic oligonucleotide
  Sense strand starting at position 1984 of SEQ ID NO: 73
ggugauguguauuugaggu

SEQ ID NO: 9639 - RNA, 19 nt, Artificial Sequence
  Description of Artificial Sequence: Synthetic oligonucleotide
  Antisense strand to SEQ ID NO: 9638
accucaaauacacaucacc

SEQ ID NO: 9640 - RNA, 19 nt, Artificial Sequence
  Description of Artificial Sequence: Synthetic oligonucleotide
  Sense strand starting at position 2356 of SEQ ID NO: 73
acaaccagucgugaauacu

SEQ ID NO: 9641 - RNA, 19 nt, Artificial Sequence
  Description of Artificial Sequence: Synthetic oligonucleotide
  Antisense strand to SEQ ID NO: 9640
aguauucacgacugguugu

SEQ ID NO: 9642 - RNA, 19 nt, Artificial Sequence
  Description of Artificial Sequence: Synthetic oligonucleotide
  Sense strand starting at position 2359 of SEQ ID NO: 73
accagucgugaauacuuua

SEQ ID NO: 9643 - RNA, 19 nt, Artificial Sequence
  Description of Artificial Sequence: Synthetic oligonucleotide
  Antisense strand to SEQ ID NO: 9642
uaaaguauucacgacuggu

SEQ ID NO: 9644 - RNA, 19 nt, Artificial Sequence
  Description of Artificial Sequence: Synthetic oligonucleotide
  Sense strand starting at position 2364 of SEQ ID NO: 73
ucgugaauacuuuaaguga

SEQ ID NO: 9645 - RNA, 19 nt, Artificial Sequence
  Description of Artificial Sequence: Synthetic oligonucleotide
  Antisense strand to SEQ ID NO: 9644
ucacuuaaaguauucacga

SEQ ID NO: 9646 - RNA, 19 nt, Artificial Sequence
  Description of Artificial Sequence: Synthetic oligonucleotide
  Sense strand starting at position 2410 of SEQ ID NO: 73
ucauuuacguauucuuacu

SEQ ID NO: 9647 - RNA, 19 nt, Artificial Sequence
  Description of Artificial Sequence: Synthetic oligonucleotide
  Antisense strand to SEQ ID NO: 9646
aguaagaauacguaaauga

SEQ ID NO: 9648 - RNA, 19 nt, Artificial Sequence
  Description of Artificial Sequence: Synthetic oligonucleotide
  Sense strand starting at position 2560 of SEQ ID NO: 73
agaacuguuacggguacuu

SEQ ID NO: 9649 - RNA, 19 nt, Artificial Sequence
  Description of Artificial Sequence: Synthetic oligonucleotide
  Antisense strand to SEQ ID NO: 9648
aaguacccguaacaguucu

SEQ ID NO: 9650 - RNA, 19 nt, Artificial Sequence
  Description of Artificial Sequence: Synthetic oligonucleotide
  Sense strand starting at position 2794 of SEQ ID NO: 73
ggcauacauacuugggaaa

SEQ ID NO: 9651 - RNA, 19 nt, Artificial Sequence
  Description of Artificial Sequence: Synthetic oligonucleotide
  Antisense strand to SEQ ID NO: 9650
uuucccaaguauguaugcc

SEQ ID NO: 9652 - RNA, 19 nt, Artificial Sequence
  Description of Artificial Sequence: Synthetic oligonucleotide
  Sense strand starting at position 2805 of SEQ ID NO: 73
uugggaaagauacgucaca

SEQ ID NO: 9653 - RNA, 19 nt, Artificial Sequence
  Description of Artificial Sequence: Synthetic oligonucleotide
  Antisense strand to SEQ ID NO: 9652
ugugacguaucuuucccaa

SEQ ID NO: 9654 - RNA, 19 nt, Artificial Sequence
  Description of Artificial Sequence: Synthetic oligonucleotide
  Sense strand starting at position 2806 of SEQ ID NO: 73
ugggaaagauacgucacaa

SEQ ID NO: 9655 - RNA, 19 nt, Artificial Sequence
  Description of Artificial Sequence: Synthetic oligonucleotide
  Antisense strand to SEQ ID NO: 9654
uugugacguaucuuuccca

SEQ ID NO: 9656 - RNA, 19 nt, Artificial Sequence
  Description of Artificial Sequence: Synthetic oligonucleotide
  Sense strand starting at position 2831 of SEQ ID NO: 73
cauggagcucuugggaaga

SEQ ID NO: 9657 - RNA, 19 nt, Artificial Sequence
  Description of Artificial Sequence: Synthetic oligonucleotide
  Antisense strand to SEQ ID NO: 9656
ucuucccaagagcuccaug

SEQ ID NO: 9658 - RNA, 19 nt, Artificial Sequence
  Description of Artificial Sequence: Synthetic oligonucleotide
  Sense strand starting at position 2873 of SEQ ID NO: 73
aggcuuuccuauuuacagu

SEQ ID NO: 9659 - RNA, 19 nt, Artificial Sequence
  Description of Artificial Sequence: Synthetic oligonucleotide
  Antisense strand to SEQ ID NO: 9658
acuguaaauaggaaagccu

SEQ ID NO: 9660 - RNA, 19 nt, Artificial Sequence
  Description of Artificial Sequence: Synthetic oligonucleotide
  Sense strand starting at position 3201 of SEQ ID NO: 73
auaagauguaugcgggaaa

SEQ ID NO: 9661 - RNA, 19 nt, Artificial Sequence
  Description of Artificial Sequence: Synthetic oligonucleotide
  Antisense strand to SEQ ID NO: 9660
uuucccgcauacaucuuau

SEQ ID NO: 9662 - RNA, 19 nt, Artificial Sequence
  Description of Artificial Sequence: Synthetic oligonucleotide
  Sense strand starting at position 3204 of SEQ ID NO: 73
agauguaugcgggaaaguc

SEQ ID NO: 9663 - RNA, 19 nt, Artificial Sequence
  Description of Artificial Sequence: Synthetic oligonucleotide
  Antisense strand to SEQ ID NO: 9662
gacuuucccgcauacaucu

SEQ ID NO: 9664 - RNA, 19 nt, Artificial Sequence
  Description of Artificial Sequence: Synthetic oligonucleotide
  Sense strand starting at position 3358 of SEQ ID NO: 73
cagguacaccaguguuaug

SEQ ID NO: 9665 - RNA, 19 nt, Artificial Sequence
  Description of Artificial Sequence: Synthetic oligonucleotide
  Antisense strand to SEQ ID NO: 9664
cauaacacugguguaccug

SEQ ID NO: 9666 - RNA, 19 nt, Artificial Sequence
  Description of Artificial Sequence: Synthetic oligonucleotide
  Sense strand starting at position 3368 of SEQ ID NO: 73
aguguuauguggucaagaa

SEQ ID NO: 9667 - RNA, 19 nt, Artificial Sequence
  Description of Artificial Sequence: Synthetic oligonucleotide
  Antisense strand to SEQ ID NO: 9666
uucuugaccacauaacacu

SEQ ID NO: 9668 - RNA, 19 nt, Artificial Sequence
  Description of Artificial Sequence: Synthetic oligonucleotide
  Sense strand starting at position 3369 of SEQ ID NO: 73
guguuauguggucaagaau

SEQ ID NO: 9669 - RNA, 19 nt, Artificial Sequence
  Description of Artificial Sequence: Synthetic oligonucleotide
  Antisense strand to SEQ ID NO: 9668
auucuugaccacauaacac

SEQ ID NO: 9670 - RNA, 19 nt, Artificial Sequence
  Description of Artificial Sequence: Synthetic oligonucleotide
  Sense strand starting at position 3372 of SEQ ID NO: 73
uuauguggucaagaaucau

SEQ ID NO: 9671 - RNA, 19 nt, Artificial Sequence
  Description of Artificial Sequence: Synthetic oligonucleotide
  Antisense strand to SEQ ID NO: 9670
augauucuugaccacauaa

SEQ ID NO: 9672 - RNA, 19 nt, Artificial Sequence
  Description of Artificial Sequence: Synthetic oligonucleotide
  Sense strand starting at position 3447 of SEQ ID NO: 73
cucaacuugguuugugaua

SEQ ID NO: 9673 - RNA, 19 nt, Artificial Sequence
  Description of Artificial Sequence: Synthetic oligonucleotide
  Antisense strand to SEQ ID NO: 9672
uaucacaaaccaaguugag

SEQ ID NO: 9674 - RNA, 19 nt, Artificial Sequence
  Description of Artificial Sequence: Synthetic oligonucleotide
  Sense strand starting at position 3448 of SEQ ID NO: 73
ucaacuugguuugugauaa

SEQ ID NO: 9675 - RNA, 19 nt, Artificial Sequence
  Description of Artificial Sequence: Synthetic oligonucleotide
  Antisense strand to SEQ ID NO: 9674
uuaucacaaaccaaguuga

SEQ ID NO: 9676 - RNA, 19 nt, Artificial Sequence
  Description of Artificial Sequence: Synthetic oligonucleotide
  Sense strand starting at position 3501 of SEQ ID NO: 73
ccaaccuagcgcuaaauua

SEQ ID NO: 9677 - RNA, 19 nt, Artificial Sequence
  Description of Artificial Sequence: Synthetic oligonucleotide
  Antisense strand to SEQ ID NO: 9676
uaauuuagcgcuagguugg

SEQ ID NO: 9678 - RNA, 19 nt, Artificial Sequence
  Description of Artificial Sequence: Synthetic oligonucleotide
  Sense strand starting at position 3511 of SEQ ID NO: 73
gcuaaauuagacuacaggu

SEQ ID NO: 9679 - RNA, 19 nt, Artificial Sequence
  Description of Artificial Sequence: Synthetic oligonucleotide
  Antisense strand to SEQ ID NO: 9678
accuguagucuaauuuagc

SEQ ID NO: 9680 - RNA, 19 nt, Artificial Sequence
  Description of Artificial Sequence: Synthetic oligonucleotide
  Sense strand starting at position 3543 of SEQ ID NO: 73
aaauuaaguguggagcuua

SEQ ID NO: 9681 - RNA, 19 nt, Artificial Sequence
  Description of Artificial Sequence: Synthetic oligonucleotide
  Antisense strand to SEQ ID NO: 9680
uaagcuccacacuuaauuu

SEQ ID NO: 9682 - RNA, 19 nt, Artificial Sequence
  Description of Artificial Sequence: Synthetic oligonucleotide
  Sense strand starting at position 3548 of SEQ ID NO: 73
aaguguggagcuuaaccau

SEQ ID NO: 9683 - RNA, 19 nt, Artificial Sequence
  Description of Artificial Sequence: Synthetic oligonucleotide
  Antisense strand to SEQ ID NO: 9682
augguuaagcuccacacuu

SEQ ID NO: 9684 - RNA, 19 nt, Artificial Sequence
  Description of Artificial Sequence: Synthetic oligonucleotide
  Sense strand starting at position 3565 of SEQ ID NO: 73
auuuaacagucaggaauca

SEQ ID NO: 9685 - RNA, 19 nt, Artificial Sequence
  Description of Artificial Sequence: Synthetic oligonucleotide
  Antisense strand to SEQ ID NO: 9684
ugauuccugacuguuaaau

SEQ ID NO: 9686 - RNA, 19 nt, Artificial Sequence
  Description of Artificial Sequence: Synthetic oligonucleotide
  Sense strand starting at position 3747 of SEQ ID NO: 73
aagggauauuaguuuguaa

SEQ ID NO: 9687 - RNA, 19 nt, Artificial Sequence
  Description of Artificial Sequence: Synthetic oligonucleotide
  Antisense strand to SEQ ID NO: 9686
uuacaaacuaauaucccuu

SEQ ID NO: 9688 - RNA, 19 nt, Artificial Sequence
  Description of Artificial Sequence: Synthetic oligonucleotide
  Sense strand starting at position 3749 of SEQ ID NO: 73
gggauauuaguuuguaauc

SEQ ID NO: 9689 - RNA, 19 nt, Artificial Sequence
  Description of Artificial Sequence: Synthetic oligonucleotide
  Antisense strand to SEQ ID NO: 9688
gauuacaaacuaauauccc

SEQ ID NO: 9690 - RNA, 19 nt, Artificial Sequence
  Description of Artificial Sequence: Synthetic oligonucleotide
  Sense strand starting at position 4 of SEQ ID NO: 74
uggagauagcaacagcuua

SEQ ID NO: 9691 - RNA, 19 nt, Artificial Sequence
  Description of Artificial Sequence: Synthetic oligonucleotide
  Antisense strand to SEQ ID NO: 9690
uaagcuguugcuaucucca

SEQ ID NO: 9692 - RNA, 19 nt, Artificial Sequence
  Description of Artificial Sequence: Synthetic oligonucleotide
  Sense strand starting at position 238 of SEQ ID NO: 74
cguaauuuauaacaggaga

SEQ ID NO: 9693 - RNA, 19 nt, Artificial Sequence
  Description of Artificial Sequence: Synthetic oligonucleotide
  Antisense strand to SEQ ID NO: 9692
ucuccuguuauaaauuacg

SEQ ID NO: 9694 - RNA, 19 nt, Artificial Sequence
  Description of Artificial Sequence: Synthetic oligonucleotide
  Sense strand starting at position 249 of SEQ ID NO: 74
acaggagaaugacauugaa

SEQ ID NO: 9695 - RNA, 19 nt, Artificial Sequence
  Description of Artificial Sequence: Synthetic oligonucleotide
  Antisense strand to SEQ ID NO: 9694
uucaaugucauucuccugu

SEQ ID NO: 9696 - RNA, 19 nt, Artificial Sequence
  Description of Artificial Sequence: Synthetic oligonucleotide
  Sense strand starting at position 435 of SEQ ID NO: 74
gcacucuaauguccagacu

SEQ ID NO: 9697 - RNA, 19 nt, Artificial Sequence
  Description of Artificial Sequence: Synthetic oligonucleotide
  Antisense strand to SEQ ID NO: 9696
agucuggacauuagagugc

SEQ ID NO: 9698 - RNA, 19 nt, Artificial Sequence
  Description of Artificial Sequence: Synthetic oligonucleotide
  Sense strand starting at position 751 of SEQ ID NO: 74
aaggaaccucucggguuaa

SEQ ID NO: 9699 - RNA, 19 nt, Artificial Sequence
  Description of Artificial Sequence: Synthetic oligonucleotide
  Antisense strand to SEQ ID NO: 9698
uuaacccgagagguuccuu

SEQ ID NO: 9700 - RNA, 19 nt, Artificial Sequence
  Description of Artificial Sequence: Synthetic oligonucleotide
  Sense strand starting at position 755 of SEQ ID NO: 74
aaccucucggguuaaugaa

SEQ ID NO: 9701 - RNA, 19 nt, Artificial Sequence
  Description of Artificial Sequence: Synthetic oligonucleotide
  Antisense strand to SEQ ID NO: 9700
uucauuaacccgagagguu

SEQ ID NO: 9702 - RNA, 19 nt, Artificial Sequence
  Description of Artificial Sequence: Synthetic oligonucleotide
  Sense strand starting at position 981 of SEQ ID NO: 74
aaucaauauuaggagggaa

SEQ ID NO: 9703 - RNA, 19 nt, Artificial Sequence
  Description of Artificial Sequence: Synthetic oligonucleotide
  Antisense strand to SEQ ID NO: 9702
uucccuccuaauauugauu

SEQ ID NO: 9704 - RNA, 19 nt, Artificial Sequence
  Description of Artificial Sequence: Synthetic oligonucleotide
  Sense strand starting at position 1046 of SEQ ID NO: 74
uggaacaguccucauccua

SEQ ID NO: 9705 - RNA, 19 nt, Artificial Sequence
  Description of Artificial Sequence: Synthetic oligonucleotide
  Antisense strand to SEQ ID NO: 9704
uaggaugaggacuguucca

SEQ ID NO: 9706 - RNA, 19 nt, Artificial Sequence
  Description of Artificial Sequence: Synthetic oligonucleotide
  Sense strand starting at position 1188 of SEQ ID NO: 74
ggguucuuccuuuaauaau

SEQ ID NO: 9707 - RNA, 19 nt, Artificial Sequence
  Description of Artificial Sequence: Synthetic oligonucleotide
  Antisense strand to SEQ ID NO: 9706
auuauuaaaggaagaaccc

SEQ ID NO: 9708 - RNA, 19 nt, Artificial Sequence
  Description of Artificial Sequence: Synthetic oligonucleotide
  Sense strand starting at position 1244 of SEQ ID NO: 74
aggagugaacaagguguau

SEQ ID NO: 9709 - RNA, 19 nt, Artificial Sequence
  Description of Artificial Sequence: Synthetic oligonucleotide
  Antisense strand to SEQ ID NO: 9708
auacaccuuguucacuccu

SEQ ID NO: 9710 - RNA, 19 nt, Artificial Sequence
  Description of Artificial Sequence: Synthetic oligonucleotide
  Sense strand starting at position 1362 of SEQ ID NO: 74
uuaccaaauuuaugggauu

SEQ ID NO: 9711 - RNA, 19 nt, Artificial Sequence
  Description of Artificial Sequence: Synthetic oligonucleotide
  Antisense strand to SEQ ID NO: 9710
aaucccauaaauuugguaa

SEQ ID NO: 9712 - RNA, 19 nt, Artificial Sequence
  Description of Artificial Sequence: Synthetic oligonucleotide
  Sense strand starting at position 1365 of SEQ ID NO: 74
ccaaauuuaugggauuaau

SEQ ID NO: 9713 - RNA, 19 nt, Artificial Sequence
  Description of Artificial Sequence: Synthetic oligonucleotide
  Antisense strand to SEQ ID NO: 9712
auuaaucccauaaauuugg

SEQ ID NO: 9714 - RNA, 19 nt, Artificial Sequence
  Description of Artificial Sequence: Synthetic oligonucleotide
  Sense strand starting at position 1375 of SEQ ID NO: 74
gggauuaauccaugaguuu

SEQ ID NO: 9715 - RNA, 19 nt, Artificial Sequence
  Description of Artificial Sequence: Synthetic oligonucleotide
  Antisense strand to SEQ ID NO: 9714
aaacucauggauuaauccc

SEQ ID NO: 9716 - RNA, 19 nt, Artificial Sequence
  Description of Artificial Sequence: Synthetic oligonucleotide
  Sense strand starting at position 1874 of SEQ ID NO: 74
gguaacaucgcucaugaug

SEQ ID NO: 9717 - RNA, 19 nt, Artificial Sequence
  Description of Artificial Sequence: Synthetic oligonucleotide
  Antisense strand to SEQ ID NO: 9716
caucaugagcgauguuacc

SEQ ID NO: 9718 - RNA, 19 nt, Artificial Sequence
  Description of Artificial Sequence: Synthetic oligonucleotide
  Sense strand starting at position 1917 of SEQ ID NO: 74
gagaaaugguacuuuguga

SEQ ID NO: 9719 - RNA, 19 nt, Artificial Sequence
  Description of Artificial Sequence: Synthetic oligonucleotide
  Antisense strand to SEQ ID NO: 9718
ucacaaaguaccauuucuc

SEQ ID NO: 9720 - RNA, 19 nt, Artificial Sequence
  Description of Artificial Sequence: Synthetic oligonucleotide
  Sense strand starting at position 1933 of SEQ ID NO: 74
ugauaucagcuuuaggguu

SEQ ID NO: 9721 - RNA, 19 nt, Artificial Sequence
  Description of Artificial Sequence: Synthetic oligonucleotide
  Antisense strand to SEQ ID NO: 9720
aacccuaaagcugauauca

SEQ ID NO: 9722 - RNA, 19 nt, Artificial Sequence
  Description of Artificial Sequence: Synthetic oligonucleotide
  Sense strand starting at position 2286 of SEQ ID NO: 74
ggugauguguauuugaggu

SEQ ID NO: 9723 - RNA, 19 nt, Artificial Sequence
  Description of Artificial Sequence: Synthetic oligonucleotide
  Antisense strand to SEQ ID NO: 9722
accucaaauacacaucacc

SEQ ID NO: 9724 - RNA, 19 nt, Artificial Sequence
  Description of Artificial Sequence: Synthetic oligonucleotide
  Sense strand starting at position 2658 of SEQ ID NO: 74
acaaccagucgugaauacu

SEQ ID NO: 9725 - RNA, 19 nt, Artificial Sequence
  Description of Artificial Sequence: Synthetic oligonucleotide
  Antisense strand to SEQ ID NO: 9724
aguauucacgacugguugu

SEQ ID NO: 9726 - RNA, 19 nt, Artificial Sequence
  Description of Artificial Sequence: Synthetic oligonucleotide
  Sense strand starting at position 2661 of SEQ ID NO: 74
accagucgugaauacuuua

SEQ ID NO: 9727 - RNA, 19 nt, Artificial Sequence
  Description of Artificial Sequence: Synthetic oligonucleotide
  Antisense strand to SEQ ID NO: 9726
uaaaguauucacgacuggu

SEQ ID NO: 9728 - RNA, 19 nt, Artificial Sequence
  Description of Artificial Sequence: Synthetic oligonucleotide
  Sense strand starting at position 2666 of SEQ ID NO: 74
ucgugaauacuuuaaguga

SEQ ID NO: 9729 - RNA, 19 nt, Artificial Sequence
  Description of Artificial Sequence: Synthetic oligonucleotide
  Antisense strand to SEQ ID NO: 9728
ucacuuaaaguauucacga

SEQ ID NO: 9730 - RNA, 19 nt, Artificial Sequence
  Description of Artificial Sequence: Synthetic oligonucleotide
  Sense strand starting at position 2712 of SEQ ID NO: 74
ucauuuacguauucuuacu

SEQ ID NO: 9731 - RNA, 19 nt, Artificial Sequence
  Description of Artificial Sequence: Synthetic oligonucleotide
  Antisense strand to SEQ ID NO: 9730
aguaagaauacguaaauga

SEQ ID NO: 9732 - RNA, 19 nt, Artificial Sequence
  Description of Artificial Sequence: Synthetic oligonucleotide
  Sense strand starting at position 2862 of SEQ ID NO: 74
agaacuguuacggguacuu

SEQ ID NO: 9733 - RNA, 19 nt, Artificial Sequence
  Description of Artificial Sequence: Synthetic oligonucleotide
  Antisense strand to SEQ ID NO: 9732
aaguacccguaacaguucu

SEQ ID NO: 9734 - RNA, 19 nt, Artificial Sequence
  Description of Artificial Sequence: Synthetic oligonucleotide
  Sense strand starting at position 3096 of SEQ ID NO: 74
ggcauacauacuugggaaa

SEQ ID NO: 9735 - RNA, 19 nt, Artificial Sequence
  Description of Artificial Sequence: Synthetic oligonucleotide
  Antisense strand to SEQ ID NO: 9734
uuucccaaguauguaugcc

SEQ ID NO: 9736 - RNA, 19 nt, Artificial Sequence
  Description of Artificial Sequence: Synthetic oligonucleotide
  Sense strand starting at position 3107 of SEQ ID NO: 74
uugggaaagauacgucaca

SEQ ID NO: 9737 - RNA, 19 nt, Artificial Sequence
  Description of Artificial Sequence: Synthetic oligonucleotide
  Antisense strand to SEQ ID NO: 9736
ugugacguaucuuucccaa

SEQ ID NO: 9738 - RNA, 19 nt, Artificial Sequence
  Description of Artificial Sequence: Synthetic oligonucleotide
  Sense strand starting at position 3108 of SEQ ID NO: 74
ugggaaagauacgucacaa

SEQ ID NO: 9739 - RNA, 19 nt, Artificial Sequence
  Description of Artificial Sequence: Synthetic oligonucleotide
  Antisense strand to SEQ ID NO: 9738
uugugacguaucuuuccca

SEQ ID NO: 9740 - RNA, 19 nt, Artificial Sequence
  Description of Artificial Sequence: Synthetic oligonucleotide
  Sense strand starting at position 3133 of SEQ ID NO: 74
cauggagcucuugggaaga

SEQ ID NO: 9741 - RNA, 19 nt, Artificial Sequence
  Description of Artificial Sequence: Synthetic oligonucleotide
  Antisense strand to SEQ ID NO: 9740
ucuucccaagagcuccaug

SEQ ID NO: 9742 - RNA, 19 nt, Artificial Sequence
  Description of Artificial Sequence: Synthetic oligonucleotide
  Sense strand starting at position 3175 of SEQ ID NO: 74
aggcuuuccuauuuacagu

SEQ ID NO: 9743 - RNA, 19 nt, Artificial Sequence
  Description of Artificial Sequence: Synthetic oligonucleotide
  Antisense strand to SEQ ID NO: 9742
acuguaaauaggaaagccu

SEQ ID NO: 9744 - RNA, 19 nt, Artificial Sequence
  Description of Artificial Sequence: Synthetic oligonucleotide
  Sense strand starting at position 3503 of SEQ ID NO: 74
auaagauguaugcgggaaa

SEQ ID NO: 9745 - RNA, 19 nt, Artificial Sequence
  Description of Artificial Sequence: Synthetic oligonucleotide
  Antisense strand to SEQ ID NO: 9744
uuucccgcauacaucuuau

SEQ ID NO: 9746 - RNA, 19 nt, Artificial Sequence
  Description of Artificial Sequence: Synthetic oligonucleotide
  Sense strand starting at position 3506 of SEQ ID NO: 74
agauguaugcgggaaaguc

SEQ ID NO: 9747 - RNA, 19 nt, Artificial Sequence
  Description of Artificial Sequence: Synthetic oligonucleotide
  Antisense strand to SEQ ID NO: 9746
gacuuucccgcauacaucu

SEQ ID NO: 9748 - RNA, 19 nt, Artificial Sequence
  Description of Artificial Sequence: Synthetic oligonucleotide
  Sense strand starting at position 3660 of SEQ ID NO: 74
cagguacaccaguguuaug

SEQ ID NO: 9749 - RNA, 19 nt, Artificial Sequence
  Description of Artificial Sequence: Synthetic oligonucleotide
  Antisense strand to SEQ ID NO: 9748
cauaacacugguguaccug

SEQ ID NO: 9750 - RNA, 19 nt, Artificial Sequence
  Description of Artificial Sequence: Synthetic oligonucleotide
  Sense strand starting at position 3670 of SEQ ID NO: 74
aguguuauguggucaagaa

SEQ ID NO: 9751 - RNA, 19 nt, Artificial Sequence
  Description of Artificial Sequence: Synthetic oligonucleotide
  Antisense strand to SEQ ID NO: 9750
uucuugaccacauaacacu

SEQ ID NO: 9752 - RNA, 19 nt, Artificial Sequence
  Description of Artificial Sequence: Synthetic oligonucleotide
  Sense strand starting at position 3671 of SEQ ID NO: 74
guguuauguggucaagaau

SEQ ID NO: 9753 - RNA, 19 nt, Artificial Sequence
  Description of Artificial Sequence: Synthetic oligonucleotide
  Antisense strand to SEQ ID NO: 9752
auucuugaccacauaacac

SEQ ID NO: 9754 - RNA, 19 nt, Artificial Sequence
  Description of Artificial Sequence: Synthetic oligonucleotide
  Sense strand starting at position 3674 of SEQ ID NO: 74
uuauguggucaagaaucau

SEQ ID NO: 9755 - RNA, 19 nt, Artificial Sequence
  Description of Artificial Sequence: Synthetic oligonucleotide
  Antisense strand to SEQ ID NO: 9754
augauucuugaccacauaa

SEQ ID NO: 9756 - RNA, 19 nt, Artificial Sequence
  Description of Artificial Sequence: Synthetic oligonucleotide
  Sense strand starting at position 3749 of SEQ ID NO: 74
cucaacuugguuugugaua

SEQ ID NO: 9757 - RNA, 19 nt, Artificial Sequence
  Description of Artificial Sequence: Synthetic oligonucleotide
  Antisense strand to SEQ ID NO: 9756
uaucacaaaccaaguugag

SEQ ID NO: 9758 - RNA, 19 nt, Artificial Sequence
  Description of Artificial Sequence: Synthetic oligonucleotide
  Sense strand starting at position 3750 of SEQ ID NO: 74
ucaacuugguuugugauaa

SEQ ID NO: 9759 - RNA, 19 nt, Artificial Sequence
  Description of Artificial Sequence: Synthetic oligonucleotide
  Antisense strand to SEQ ID NO: 9758
uuaucacaaaccaaguuga

SEQ ID NO: 9760 - RNA, 19 nt, Artificial Sequence
  Description of Artificial Sequence: Synthetic oligonucleotide
  Sense strand starting at position 3803 of SEQ ID NO: 74
ccaaccuagcgcuaaauua

SEQ ID NO: 9761 - RNA, 19 nt, Artificial Sequence
  Description of Artificial Sequence: Synthetic oligonucleotide
  Antisense strand to SEQ ID NO: 9760
uaauuuagcgcuagguugg

SEQ ID NO: 9762 - RNA, 19 nt, Artificial Sequence
  Description of Artificial Sequence: Synthetic oligonucleotide
  Sense strand starting at position 3813 of SEQ ID NO: 74
gcuaaauuagacuacaggu

SEQ ID NO: 9763 - RNA, 19 nt, Artificial Sequence
  Description of Artificial Sequence: Synthetic oligonucleotide
  Antisense strand to SEQ ID NO: 9762
accuguagucuaauuuagc

SEQ ID NO: 9764 - RNA, 19 nt, Artificial Sequence
  Description of Artificial Sequence: Synthetic oligonucleotide
  Sense strand starting at position 3845 of SEQ ID NO: 74
aaauuaaguguggagcuua

SEQ ID NO: 9765 - RNA, 19 nt, Artificial Sequence
  Description of Artificial Sequence: Synthetic oligonucleotide
  Antisense strand to SEQ ID NO: 9764
uaagcuccacacuuaauuu

SEQ ID NO: 9766 - RNA, 19 nt, Artificial Sequence
  Description of Artificial Sequence: Synthetic oligonucleotide
  Sense strand starting at position 3850 of SEQ ID NO: 74
aaguguggagcuuaaccau

SEQ ID NO: 9767 - RNA, 19 nt, Artificial Sequence
  Description of Artificial Sequence: Synthetic oligonucleotide
  Antisense strand to SEQ ID NO: 9766
augguuaagcuccacacuu

SEQ ID NO: 9768 - RNA, 19 nt, Artificial Sequence
  Description of Artificial Sequence: Synthetic oligonucleotide
  Sense strand starting at position 3867 of SEQ ID NO: 74
auuuaacagucaggaauca

SEQ ID NO: 9769 - RNA, 19 nt, Artificial Sequence
  Description of Artificial Sequence: Synthetic oligonucleotide
  Antisense strand to SEQ ID NO: 9768
ugauuccugacuguuaaau

SEQ ID NO: 9770 - RNA, 19 nt, Artificial Sequence
  Description of Artificial Sequence: Synthetic oligonucleotide
  Sense strand starting at position 44 of SEQ ID NO: 76
aucacagaccuaugaguuu

SEQ ID NO: 9771 - RNA, 19 nt, Artificial Sequence
  Description of Artificial Sequence: Synthetic oligonucleotide
  Antisense strand to SEQ ID NO: 9770
aaacucauaggucugugau

SEQ ID NO: 9772 - RNA, 19 nt, Artificial Sequence
  Description of Artificial Sequence: Synthetic oligonucleotide
  Sense strand starting at position 85 of SEQ ID NO: 76
ccaguuucuggauggauaa

SEQ ID NO: 9773 - RNA, 19 nt, Artificial Sequence
  Description of Artificial Sequence: Synthetic oligonucleotide
  Antisense strand to SEQ ID NO: 9772
uuauccauccagaaacugg

SEQ ID NO: 9774 - RNA, 19 nt, Artificial Sequence
  Description of Artificial Sequence: Synthetic oligonucleotide
  Sense strand starting at position 86 of SEQ ID NO: 76
caguuucuggauggauaaa

SEQ ID NO: 9775 - RNA, 19 nt, Artificial Sequence
  Description of Artificial Sequence: Synthetic oligonucleotide
  Antisense strand to SEQ ID NO: 9774
uuuauccauccagaaacug

SEQ ID NO: 9776 - RNA, 19 nt, Artificial Sequence
  Description of Artificial Sequence: Synthetic oligonucleotide
  Sense strand starting at position 199 of SEQ ID NO: 76
agaaaucuaugaggaauaa

SEQ ID NO: 9777 - RNA, 19 nt, Artificial Sequence
  Description of Artificial Sequence: Synthetic oligonucleotide
  Antisense strand to SEQ ID NO: 9776
uuauuccucauagauuucu

SEQ ID NO: 9778 - RNA, 19 nt, Artificial Sequence
  Description of Artificial Sequence: Synthetic oligonucleotide
  Sense strand starting at position 244 of SEQ ID NO: 76
ggccuuucuugcccagaca

SEQ ID NO: 9779 - RNA, 19 nt, Artificial Sequence
  Description of Artificial Sequence: Synthetic oligonucleotide
  Antisense strand to SEQ ID NO: 9778
ugucugggcaagaaaggcc

SEQ ID NO: 9780 - RNA, 19 nt, Artificial Sequence
  Description of Artificial Sequence: Synthetic oligonucleotide
  Sense strand starting at position 299 of SEQ ID NO: 76
cguccuuugcuuugggagu

SEQ ID NO: 9781 - RNA, 19 nt, Artificial Sequence
  Description of Artificial Sequence: Synthetic oligonucleotide
  Antisense strand to SEQ ID NO: 9780
acucccaaagcaaaggacg

SEQ ID NO: 9782 - RNA, 19 nt, Artificial Sequence
  Description of Artificial Sequence: Synthetic oligonucleotide
  Sense strand starting at position 318 of SEQ ID NO: 76
uuuacugguccacagaauu

SEQ ID NO: 9783 - RNA, 19 nt, Artificial Sequence
  Description of Artificial Sequence: Synthetic oligonucleotide
  Antisense strand to SEQ ID NO: 9782
aauucuguggaccaguaaa

SEQ ID NO: 9784 - RNA, 19 nt, Artificial Sequence
  Description of Artificial Sequence: Synthetic oligonucleotide
  Sense strand starting at position 361 of SEQ ID NO: 76
cuauaaaggccuugaaguc

SEQ ID NO: 9785 - RNA, 19 nt, Artificial Sequence
  Description of Artificial Sequence: Synthetic oligonucleotide
  Antisense strand to SEQ ID NO: 9784
gacuucaaggccuuuauag

SEQ ID NO: 9786 - RNA, 19 nt, Artificial Sequence
  Description of Artificial Sequence: Synthetic oligonucleotide
  Sense strand starting at position 403 of SEQ ID NO: 76
cgagcugucagagaaagag

SEQ ID NO: 9787 - RNA, 19 nt, Artificial Sequence
  Description of Artificial Sequence: Synthetic oligonucleotide
  Antisense strand to SEQ ID NO: 9786
cucuuucucugacagcucg

SEQ ID NO: 9788 - RNA, 19 nt, Artificial Sequence
  Description of Artificial Sequence: Synthetic oligonucleotide
  Sense strand starting at position 690 of SEQ ID NO: 76
gucgguggccaucagagaa

SEQ ID NO: 9789 - RNA, 19 nt, Artificial Sequence
  Description of Artificial Sequence: Synthetic oligonucleotide
  Antisense strand to SEQ ID NO: 9788
uucucugauggccaccgac

SEQ ID NO: 9790 - RNA, 19 nt, Artificial Sequence
  Description of Artificial Sequence: Synthetic oligonucleotide
  Sense strand starting at position 764 of SEQ ID NO: 76
gaaggugaggucuacccau

SEQ ID NO: 9791 - RNA, 19 nt, Artificial Sequence
  Description of Artificial Sequence: Synthetic oligonucleotide
  Antisense strand to SEQ ID NO: 9790
auggguagaccucaccuuc

SEQ ID NO: 9792 - RNA, 19 nt, Artificial Sequence
  Description of Artificial Sequence: Synthetic oligonucleotide
  Sense strand starting at position 770 of SEQ ID NO: 76
gaggucuacccaugacaca

SEQ ID NO: 9793 - RNA, 19 nt, Artificial Sequence
  Description of Artificial Sequence: Synthetic oligonucleotide
  Antisense strand to SEQ ID NO: 9792
ugugucauggguagaccuc

SEQ ID NO: 9794 - RNA, 19 nt, Artificial Sequence
  Description of Artificial Sequence: Synthetic oligonucleotide
  Sense strand starting at position 882 of SEQ ID NO: 76
cuagguuuaugacaucuga

SEQ ID NO: 9795 - RNA, 19 nt, Artificial Sequence
  Description of Artificial Sequence: Synthetic oligonucleotide
  Antisense strand to SEQ ID NO: 9794
ucagaugucauaaaccuag

SEQ ID NO: 9796 - RNA, 19 nt, Artificial Sequence
  Description of Artificial Sequence: Synthetic oligonucleotide
  Sense strand starting at position 1716 of SEQ ID NO: 76
cacgguuguguguccuuga

SEQ ID NO: 9797 - RNA, 19 nt, Artificial Sequence
  Description of Artificial Sequence: Synthetic oligonucleotide
  Antisense strand to SEQ ID NO: 9796
ucaaggacacacaaccgug

SEQ ID NO: 9798 - RNA, 19 nt, Artificial Sequence
  Description of Artificial Sequence: Synthetic oligonucleotide
  Sense strand starting at position 1726 of SEQ ID NO: 76
uguccuugagccugugagu

SEQ ID NO: 9799 - RNA, 19 nt, Artificial Sequence
  Description of Artificial Sequence: Synthetic oligonucleotide
  Antisense strand to SEQ ID NO: 9798
acucacaggcucaaggaca

SEQ ID NO: 9800 - RNA, 19 nt, Artificial Sequence
  Description of Artificial Sequence: Synthetic oligonucleotide
  Sense strand starting at position 1749 of SEQ ID NO: 76
uccugugaacgugguucua

SEQ ID NO: 9801 - RNA, 19 nt, Artificial Sequence
  Description of Artificial Sequence: Synthetic oligonucleotide
  Antisense strand to SEQ ID NO: 9800
uagaaccacguucacagga

SEQ ID NO: 9802 - RNA, 19 nt, Artificial Sequence
  Description of Artificial Sequence: Synthetic oligonucleotide
  Sense strand starting at position 1758 of SEQ ID NO: 76
cgugguucuacgucuauca

SEQ ID NO: 9803 - RNA, 19 nt, Artificial Sequence
  Description of Artificial Sequence: Synthetic oligonucleotide
  Antisense strand to SEQ ID NO: 9802
ugauagacguagaaccacg

SEQ ID NO: 9804 - RNA, 19 nt, Artificial Sequence
  Description of Artificial Sequence: Synthetic oligonucleotide
  Sense strand starting at position 1760 of SEQ ID NO: 76
ugguucuacgucuaucaag

SEQ ID NO: 9805 - RNA, 19 nt, Artificial Sequence
  Description of Artificial Sequence: Synthetic oligonucleotide
  Antisense strand to SEQ ID NO: 9804
cuugauagacguagaacca

SEQ ID NO: 9806 - RNA, 19 nt, Artificial Sequence
  Description of Artificial Sequence: Synthetic oligonucleotide
  Sense strand starting at position 1782 of SEQ ID NO: 76
gaauaaucgcaccgaacuc

SEQ ID NO: 9807 - RNA, 19 nt, Artificial Sequence
  Description of Artificial Sequence: Synthetic oligonucleotide
  Antisense strand to SEQ ID NO: 9806
gaguucggugcgauuauuc

SEQ ID NO: 9808 - RNA, 19 nt, Artificial Sequence
  Description of Artificial Sequence: Synthetic oligonucleotide
  Sense strand starting at position 1972 of SEQ ID NO: 76
augugaaccagcugagauc

SEQ ID NO: 9809 - RNA, 19 nt, Artificial Sequence
  Description of Artificial Sequence: Synthetic oligonucleotide
  Antisense strand to SEQ ID NO: 9808
gaucucagcugguucacau

SEQ ID NO: 9810 - RNA, 19 nt, Artificial Sequence
  Description of Artificial Sequence: Synthetic oligonucleotide
  Sense strand starting at position 2037 of SEQ ID NO: 76
agauguggaccaugaacuu

SEQ ID NO: 9811 - RNA, 19 nt, Artificial Sequence
  Description of Artificial Sequence: Synthetic oligonucleotide
  Antisense strand to SEQ ID NO: 9810
aaguucaugguccacaucu

SEQ ID NO: 9812 - RNA, 19 nt, Artificial Sequence
  Description of Artificial Sequence: Synthetic oligonucleotide
  Sense strand starting at position 2126 of SEQ ID NO: 76
gacacugagucucaagaac

SEQ ID NO: 9813 - RNA, 19 nt, Artificial Sequence
  Description of Artificial Sequence: Synthetic oligonucleotide
  Antisense strand to SEQ ID NO: 9812
guucuugagacucaguguc

SEQ ID NO: 9814 - RNA, 19 nt, Artificial Sequence
  Description of Artificial Sequence: Synthetic oligonucleotide
  Sense strand starting at position 2317 of SEQ ID NO: 76
cucuguaaaugagaagaau

SEQ ID NO: 9815 - RNA, 19 nt, Artificial Sequence
  Description of Artificial Sequence: Synthetic oligonucleotide
  Antisense strand to SEQ ID NO: 9814
auucuucucauuuacagag

SEQ ID NO: 9816 - RNA, 19 nt, Artificial Sequence
  Description of Artificial Sequence: Synthetic oligonucleotide
  Sense strand starting at position 2329 of SEQ ID NO: 76
gaagaaugaugaugacaaa

SEQ ID NO: 9817 - RNA, 19 nt, Artificial Sequence
  Description of Artificial Sequence: Synthetic oligonucleotide
  Antisense strand to SEQ ID NO: 9816
uuugucaucaucauucuuc

SEQ ID NO: 9818 - RNA, 19 nt, Artificial Sequence
  Description of Artificial Sequence: Synthetic oligonucleotide
  Sense strand starting at position 2387 of SEQ ID NO: 76
ucccaucuaccguggcaua

SEQ ID NO: 9819 - RNA, 19 nt, Artificial Sequence
  Description of Artificial Sequence: Synthetic oligonucleotide
  Antisense strand to SEQ ID NO: 9818
uaugccacgguagauggga

SEQ ID NO: 9820 - RNA, 19 nt, Artificial Sequence
  Description of Artificial Sequence: Synthetic oligonucleotide
  Sense strand starting at position 2634 of SEQ ID NO: 76
cagggcaucucaguaagau

SEQ ID NO: 9821 - RNA, 19 nt, Artificial Sequence
  Description of Artificial Sequence: Synthetic oligonucleotide
  Antisense strand to SEQ ID NO: 9820
aucuuacugagaugcccug

SEQ ID NO: 9822 - RNA, 19 nt, Artificial Sequence
  Description of Artificial Sequence: Synthetic oligonucleotide
  Sense strand starting at position 2779 of SEQ ID NO: 76
ccaagaugugcagagcuuu

SEQ ID NO: 9823 - RNA, 19 nt, Artificial Sequence
  Description of Artificial Sequence: Synthetic oligonucleotide
  Antisense strand to SEQ ID NO: 9822
aaagcucugcacaucuugg

SEQ ID NO: 9824 - RNA, 19 nt, Artificial Sequence
  Description of Artificial Sequence: Synthetic oligonucleotide
  Sense strand starting at position 2791 of SEQ ID NO: 76
gagcuuuguggguggcaca

SEQ ID NO: 9825 - RNA, 19 nt, Artificial Sequence
  Description of Artificial Sequence: Synthetic oligonucleotide
  Antisense strand to SEQ ID NO: 9824
ugugccacccacaaagcuc

SEQ ID NO: 9826 - RNA, 19 nt, Artificial Sequence
  Description of Artificial Sequence: Synthetic oligonucleotide
  Sense strand starting at position 2821 of SEQ ID NO: 76
uuuguccgugcuuagacaa

SEQ ID NO: 9827 - RNA, 19 nt, Artificial Sequence
  Description of Artificial Sequence: Synthetic oligonucleotide
  Antisense strand to SEQ ID NO: 9826
uugucuaagcacggacaaa

SEQ ID NO: 9828 - RNA, 19 nt, Artificial Sequence
  Description of Artificial Sequence: Synthetic oligonucleotide
  Sense strand starting at position 3164 of SEQ ID NO: 76
ggcuuauugugucucaucu

SEQ ID NO: 9829 - RNA, 19 nt, Artificial Sequence
  Description of Artificial Sequence: Synthetic oligonucleotide
  Antisense strand to SEQ ID NO: 9828
agaugagacacaauaagcc

SEQ ID NO: 9830 - RNA, 19 nt, Artificial Sequence
  Description of Artificial Sequence: Synthetic oligonucleotide
  Sense strand starting at position 3179 of SEQ ID NO: 76
aucugaucauggucucaga

SEQ ID NO: 9831 - RNA, 19 nt, Artificial Sequence
  Description of Artificial Sequence: Synthetic oligonucleotide
  Antisense strand to SEQ ID NO: 9830
ucugagaccaugaucagau

SEQ ID NO: 9832 - RNA, 19 nt, Artificial Sequence
  Description of Artificial Sequence: Synthetic oligonucleotide
  Sense strand starting at position 3216 of SEQ ID NO: 76
aguguucugcgggauuguu

SEQ ID NO: 9833 - RNA, 19 nt, Artificial Sequence
  Description of Artificial Sequence: Synthetic oligonucleotide
  Antisense strand to SEQ ID NO: 9832
aacaaucccgcagaacacu

SEQ ID NO: 9834 - RNA, 19 nt, Artificial Sequence
  Description of Artificial Sequence: Synthetic oligonucleotide
  Sense strand starting at position 3416 of SEQ ID NO: 76
cgucucagacccuggagau

SEQ ID NO: 9835 - RNA, 19 nt, Artificial Sequence
  Description of Artificial Sequence: Synthetic oligonucleotide
  Antisense strand to SEQ ID NO: 9834
aucuccagggucugagacg

SEQ ID NO: 9836 - RNA, 19 nt, Artificial Sequence
  Description of Artificial Sequence: Synthetic oligonucleotide
  Sense strand starting at position 3417 of SEQ ID NO: 76
gucucagacccuggagaua

SEQ ID NO: 9837 - RNA, 19 nt, Artificial Sequence
  Description of Artificial Sequence: Synthetic oligonucleotide
  Antisense strand to SEQ ID NO: 9836
uaucuccagggucugagac

SEQ ID NO: 9838 - RNA, 19 nt, Artificial Sequence
  Description of Artificial Sequence: Synthetic oligonucleotide
  Sense strand starting at position 3548 of SEQ ID NO: 76
ggagaauagggcugcuuca

SEQ ID NO: 9839 - RNA, 19 nt, Artificial Sequence
  Description of Artificial Sequence: Synthetic oligonucleotide
  Antisense strand to SEQ ID NO: 9838
ugaagcagcccuauucucc

SEQ ID NO: 9840 - RNA, 19 nt, Artificial Sequence
  Description of Artificial Sequence: Synthetic oligonucleotide
  Sense strand starting at position 3728 of SEQ ID NO: 76
ccaagauccugacagguaa

SEQ ID NO: 9841 - RNA, 19 nt, Artificial Sequence
  Description of Artificial Sequence: Synthetic oligonucleotide
  Antisense strand to SEQ ID NO: 9840
uuaccugucaggaucuugg

SEQ ID NO: 9842 - RNA, 19 nt, Artificial Sequence
  Description of Artificial Sequence: Synthetic oligonucleotide
  Sense strand starting at position 3740 of SEQ ID NO: 76
cagguaaagugagcacaua

SEQ ID NO: 9843 - RNA, 19 nt, Artificial Sequence
  Description of Artificial Sequence: Synthetic oligonucleotide
  Antisense strand to SEQ ID NO: 9842
uaugugcucacuuuaccug

SEQ ID NO: 9844 - RNA, 19 nt, Artificial Sequence
  Description of Artificial Sequence: Synthetic oligonucleotide
  Sense strand starting at position 3862 of SEQ ID NO: 76
gggcaagucacaugucuug

SEQ ID NO: 9845 - RNA, 19 nt, Artificial Sequence
  Description of Artificial Sequence: Synthetic oligonucleotide
  Antisense strand to SEQ ID NO: 9844
caagacaugugacuugccc

SEQ ID NO: 9846 - RNA, 19 nt, Artificial Sequence
  Description of Artificial Sequence: Synthetic oligonucleotide
  Sense strand starting at position 3868 of SEQ ID NO: 76
gucacaugucuugaagcca

SEQ ID NO: 9847 - RNA, 19 nt, Artificial Sequence
  Description of Artificial Sequence: Synthetic oligonucleotide
  Antisense strand to SEQ ID NO: 9846
uggcuucaagacaugugac

SEQ ID NO: 9848 - RNA, 19 nt, Artificial Sequence
  Description of Artificial Sequence: Synthetic oligonucleotide
  Sense strand starting at position 3936 of SEQ ID NO: 76
gagauuugauaacgauaaa

SEQ ID NO: 9849 - RNA, 19 nt, Artificial Sequence
  Description of Artificial Sequence: Synthetic oligonucleotide
  Antisense strand to SEQ ID NO: 9848
uuuaucguuaucaaaucuc

SEQ ID NO: 9850 - RNA, 19 nt, Artificial Sequence
  Description of Artificial Sequence: Synthetic oligonucleotide
  Sense strand starting at position 12 of SEQ ID NO: 75
ucagucauauaucucugau

SEQ ID NO: 9851 - RNA, 19 nt, Artificial Sequence
  Description of Artificial Sequence: Synthetic oligonucleotide
  Antisense strand to SEQ ID NO: 9850
aucagagauauaugacuga

SEQ ID NO: 9852 - RNA, 19 nt, Artificial Sequence
  Description of Artificial Sequence: Synthetic oligonucleotide
  Sense strand starting at position 19 of SEQ ID NO: 75
uauaucucugauggcagau

SEQ ID NO: 9853 - RNA, 19 nt, Artificial Sequence
  Description of Artificial Sequence: Synthetic oligonucleotide
  Antisense strand to SEQ ID NO: 9852
aucugccaucagagauaua

SEQ ID NO: 9854 - RNA, 19 nt, Artificial Sequence
  Description of Artificial Sequence: Synthetic oligonucleotide
  Sense strand starting at position 35 of SEQ ID NO: 75
gaucguuucccaugauaau

SEQ ID NO: 9855 - RNA, 19 nt, Artificial Sequence
  Description of Artificial Sequence: Synthetic oligonucleotide
  Antisense strand to SEQ ID NO: 9854
auuaucaugggaaacgauc

SEQ ID NO: 9856 - RNA, 19 nt, Artificial Sequence
  Description of Artificial Sequence: Synthetic oligonucleotide
  Sense strand starting at position 36 of SEQ ID NO: 75
aucguuucccaugauaaua

SEQ ID NO: 9857 - RNA, 19 nt, Artificial Sequence
  Description of Artificial Sequence: Synthetic oligonucleotide
  Antisense strand to SEQ ID NO: 9856
uauuaucaugggaaacgau

SEQ ID NO: 9858 - RNA, 19 nt, Artificial Sequence
  Description of Artificial Sequence: Synthetic oligonucleotide
  Sense strand starting at position 99 of SEQ ID NO: 75
gcuugauugcuugauaauc

SEQ ID NO: 9859 - RNA, 19 nt, Artificial Sequence
  Description of Artificial Sequence: Synthetic oligonucleotide
  Antisense strand to SEQ ID NO: 9858
gauuaucaagcaaucaagc

SEQ ID NO: 9860 - RNA, 19 nt, Artificial Sequence
  Description of Artificial Sequence: Synthetic oligonucleotide
  Sense strand starting at position 107 of SEQ ID NO: 75
gcuugauaaucauuauugu

SEQ ID NO: 9861 - RNA, 19 nt, Artificial Sequence
  Description of Artificial Sequence: Synthetic oligonucleotide
  Antisense strand to SEQ ID NO: 9860
acaauaaugauuaucaagc

SEQ ID NO: 9862 - RNA, 19 nt, Artificial Sequence
  Description of Artificial Sequence: Synthetic oligonucleotide
  Sense strand starting at position 125 of SEQ ID NO: 75
uuaucaugggcuuaucuuu

SEQ ID NO: 9863 - RNA, 19 nt, Artificial Sequence
  Description of Artificial Sequence: Synthetic oligonucleotide
  Antisense strand to SEQ ID NO: 9862
aaagauaagcccaugauaa

SEQ ID NO: 9864 - RNA, 19 nt, Artificial Sequence
  Description of Artificial Sequence: Synthetic oligonucleotide
  Sense strand starting at position 156 of SEQ ID NO: 75
ugcuuucuacuagauauug

SEQ ID NO: 9865 - RNA, 19 nt, Artificial Sequence
  Description of Artificial Sequence: Synthetic oligonucleotide
  Antisense strand to SEQ ID NO: 9864
caauaucuaguagaaagca

SEQ ID NO: 9866 - RNA, 19 nt, Artificial Sequence
  Description of Artificial Sequence: Synthetic oligonucleotide
  Sense strand starting at position 234 of SEQ ID NO: 75
cauguaaauucccugggua

SEQ ID NO: 9867 - RNA, 19 nt, Artificial Sequence
  Description of Artificial Sequence: Synthetic oligonucleotide
  Antisense strand to SEQ ID NO: 9866
uacccagggaauuuacaug

SEQ ID NO: 9868 - RNA, 19 nt, Artificial Sequence
  Description of Artificial Sequence: Synthetic oligonucleotide
  Sense strand starting at position 235 of SEQ ID NO: 75
auguaaauucccuggguac

SEQ ID NO: 9869 - RNA, 19 nt, Artificial Sequence
  Description of Artificial Sequence: Synthetic oligonucleotide
  Antisense strand to SEQ ID NO: 9868
guacccagggaauuuacau

SEQ ID NO: 9870 - RNA, 19 nt, Artificial Sequence
  Description of Artificial Sequence: Synthetic oligonucleotide
  Sense strand starting at position 400 of SEQ ID NO: 75
ccagucucagccuagaaga

SEQ ID NO: 9871 - RNA, 19 nt, Artificial Sequence
  Description of Artificial Sequence: Synthetic oligonucleotide
  Antisense strand to SEQ ID NO: 9870
ucuucuaggcugagacugg

SEQ ID NO: 9872 - RNA, 19 nt, Artificial Sequence
  Description of Artificial Sequence: Synthetic oligonucleotide
  Sense strand starting at position 552 of SEQ ID NO: 75
gccacugauuaacucagaa

SEQ ID NO: 9873 - RNA, 19 nt, Artificial Sequence
  Description of Artificial Sequence: Synthetic oligonucleotide
  Antisense strand to SEQ ID NO: 9872
uucugaguuaaucaguggc

SEQ ID NO: 9874 - RNA, 19 nt, Artificial Sequence
  Description of Artificial Sequence: Synthetic oligonucleotide
  Sense strand starting at position 573 of SEQ ID NO: 75
ggcacagcucaucaggaaa

SEQ ID NO: 9875 - RNA, 19 nt, Artificial Sequence
  Description of Artificial Sequence: Synthetic oligonucleotide
  Antisense strand to SEQ ID NO: 9874
uuuccugaugagcugugcc

SEQ ID NO: 9876 - RNA, 19 nt, Artificial Sequence
  Description of Artificial Sequence: Synthetic oligonucleotide
  Sense strand starting at position 752 of SEQ ID NO: 75
gagaauauuugucauugag

SEQ ID NO: 9877 - RNA, 19 nt, Artificial Sequence
  Description of Artificial Sequence: Synthetic oligonucleotide
  Antisense strand to SEQ ID NO: 9876
cucaaugacaaauauucuc

SEQ ID NO: 9878 - RNA, 19 nt, Artificial Sequence
  Description of Artificial Sequence: Synthetic oligonucleotide
  Sense strand starting at position 806 of SEQ ID NO: 75
agguuugcaaaucgggauu

SEQ ID NO: 9879 - RNA, 19 nt, Artificial Sequence
  Description of Artificial Sequence: Synthetic oligonucleotide
  Antisense strand to SEQ ID NO: 9878
aaucccgauuugcaaaccu

SEQ ID NO: 9880 - RNA, 19 nt, Artificial Sequence
  Description of Artificial Sequence: Synthetic oligonucleotide
  Sense strand starting at position 924 of SEQ ID NO: 75
gaugaugaucguggcaaua

SEQ ID NO: 9881 - RNA, 19 nt, Artificial Sequence
  Description of Artificial Sequence: Synthetic oligonucleotide
  Antisense strand to SEQ ID NO: 9880
uauugccacgaucaucauc

SEQ ID NO: 9882 - RNA, 19 nt, Artificial Sequence
  Description of Artificial Sequence: Synthetic oligonucleotide
  Sense strand starting at position 1185 of SEQ ID NO: 75
gguagaaauccugguagaa

SEQ ID NO: 9883 - RNA, 19 nt, Artificial Sequence
  Description of Artificial Sequence: Synthetic oligonucleotide
  Antisense strand to SEQ ID NO: 9882
uucuaccaggauuucuacc

SEQ ID NO: 9884 - RNA, 19 nt, Artificial Sequence
  Description of Artificial Sequence: Synthetic oligonucleotide
  Sense strand starting at position 1877 of SEQ ID NO: 75
uuuagcuucggcuaauaaa

SEQ ID NO: 9885 - RNA, 19 nt, Artificial Sequence
  Description of Artificial Sequence: Synthetic oligonucleotide
  Antisense strand to SEQ ID NO: 9884
uuuauuagccgaagcuaaa

SEQ ID NO: 9886 - RNA, 19 nt, Artificial Sequence
  Description of Artificial Sequence: Synthetic oligonucleotide
  Sense strand starting at position 1993 of SEQ ID NO: 75
uaugguaugacccgggaga

SEQ ID NO: 9887 - RNA, 19 nt, Artificial Sequence
  Description of Artificial Sequence: Synthetic oligonucleotide
  Antisense strand to SEQ ID NO: 9886
ucucccgggucauaccaua

SEQ ID NO: 9888 - RNA, 19 nt, Artificial Sequence
  Description of Artificial Sequence: Synthetic oligonucleotide
  Sense strand starting at position 1995 of SEQ ID NO: 75
ugguaugacccgggagaga

SEQ ID NO: 9889 - RNA, 19 nt, Artificial Sequence
  Description of Artificial Sequence: Synthetic oligonucleotide
  Antisense strand to SEQ ID NO: 9888
ucucucccgggucauacca

SEQ ID NO: 9890 - RNA, 19 nt, Artificial Sequence
  Description of Artificial Sequence: Synthetic oligonucleotide
  Sense strand starting at position 2264 of SEQ ID NO: 75
aaaccuguccgcuaccaga

SEQ ID NO: 9891 - RNA, 19 nt, Artificial Sequence
  Description of Artificial Sequence: Synthetic oligonucleotide
  Antisense strand to SEQ ID NO: 9890
ucugguagcggacagguuu

SEQ ID NO: 9892 - RNA, 19 nt, Artificial Sequence
  Description of Artificial Sequence: Synthetic oligonucleotide
  Sense strand starting at position 2440 of SEQ ID NO: 75
gcagauuacgaucaaugca

SEQ ID NO: 9893 - RNA, 19 nt, Artificial Sequence
  Description of Artificial Sequence: Synthetic oligonucleotide
  Antisense strand to SEQ ID NO: 9892
ugcauugaucguaaucugc

SEQ ID NO: 9894 - RNA, 19 nt, Artificial Sequence
  Description of Artificial Sequence: Synthetic oligonucleotide
  Sense strand starting at position 2443 of SEQ ID NO: 75
gauuacgaucaaugcaaga

SEQ ID NO: 9895 - RNA, 19 nt, Artificial Sequence
  Description of Artificial Sequence: Synthetic oligonucleotide
  Antisense strand to SEQ ID NO: 9894
ucuugcauugaucguaauc

SEQ ID NO: 9896 - RNA, 19 nt, Artificial Sequence
  Description of Artificial Sequence: Synthetic oligonucleotide
  Sense strand starting at position 2579 of SEQ ID NO: 75
gugcuugguaaacacuaga

SEQ ID NO: 9897 - RNA, 19 nt, Artificial Sequence
  Description of Artificial Sequence: Synthetic oligonucleotide
  Antisense strand to SEQ ID NO: 9896
ucuaguguuuaccaagcac

SEQ ID NO: 9898 - RNA, 19 nt, Artificial Sequence
  Description of Artificial Sequence: Synthetic oligonucleotide
  Sense strand starting at position 2618 of SEQ ID NO: 75
ucugaagucuucucugaug

SEQ ID NO: 9899 - RNA, 19 nt, Artificial Sequence
  Description of Artificial Sequence: Synthetic oligonucleotide
  Antisense strand to SEQ ID NO: 9898
caucagagaagacuucaga

SEQ ID NO: 9900 - RNA, 19 nt, Artificial Sequence
  Description of Artificial Sequence: Synthetic oligonucleotide
  Sense strand starting at position 2620 of SEQ ID NO: 75
ugaagucuucucugaugac

SEQ ID NO: 9901 - RNA, 19 nt, Artificial Sequence
  Description of Artificial Sequence: Synthetic oligonucleotide
  Antisense strand to SEQ ID NO: 9900
gucaucagagaagacuuca

SEQ ID NO: 9902 - RNA, 19 nt, Artificial Sequence
  Description of Artificial Sequence: Synthetic oligonucleotide
  Sense strand starting at position 2629 of SEQ ID NO: 75
cucugaugacgaggucuca

SEQ ID NO: 9903 - RNA, 19 nt, Artificial Sequence
  Description of Artificial Sequence: Synthetic oligonucleotide
  Antisense strand to SEQ ID NO: 9902
ugagaccucgucaucagag

SEQ ID NO: 9904 - RNA, 19 nt, Artificial Sequence
  Description of Artificial Sequence: Synthetic oligonucleotide
  Sense strand starting at position 2704 of SEQ ID NO: 75
guuuauauuucuuccagca

SEQ ID NO: 9905 - RNA, 19 nt, Artificial Sequence
  Description of Artificial Sequence: Synthetic oligonucleotide
  Antisense strand to SEQ ID NO: 9904
ugcuggaagaaauauaaac

SEQ ID NO: 9906 - RNA, 19 nt, Artificial Sequence
  Description of Artificial Sequence: Synthetic oligonucleotide
  Sense strand starting at position 2975 of SEQ ID NO: 75
aaguauuaggaauggcaaa

SEQ ID NO: 9907 - RNA, 19 nt, Artificial Sequence
  Description of Artificial Sequence: Synthetic oligonucleotide
  Antisense strand to SEQ ID NO: 9906
uuugccauuccuaauacuu

SEQ ID NO: 9908 - RNA, 19 nt, Artificial Sequence
  Description of Artificial Sequence: Synthetic oligonucleotide
  Sense strand starting at position 3075 of SEQ ID NO: 75
caauguugcccugaacaug

SEQ ID NO: 9909 - RNA, 19 nt, Artificial Sequence
  Description of Artificial Sequence: Synthetic oligonucleotide
  Antisense strand to SEQ ID NO: 9908
cauguucagggcaacauug

SEQ ID NO: 9910 - RNA, 19 nt, Artificial Sequence
  Description of Artificial Sequence: Synthetic oligonucleotide
  Sense strand starting at position 3114 of SEQ ID NO: 75
gaacauugguuacugucaa

SEQ ID NO: 9911 - RNA, 19 nt, Artificial Sequence
  Description of Artificial Sequence: Synthetic oligonucleotide
  Antisense strand to SEQ ID NO: 9910
uugacaguaaccaauguuc

SEQ ID NO: 9912 - RNA, 19 nt, Artificial Sequence
  Description of Artificial Sequence: Synthetic oligonucleotide
  Sense strand starting at position 3324 of SEQ ID NO: 75
uauugugagcuacaaaugu

SEQ ID NO: 9913 - RNA, 19 nt, Artificial Sequence
  Description of Artificial Sequence: Synthetic oligonucleotide
  Antisense strand to SEQ ID NO: 9912
acauuuguagcucacaaua

SEQ ID NO: 9914 - RNA, 19 nt, Artificial Sequence
  Description of Artificial Sequence: Synthetic oligonucleotide
  Sense strand starting at position 3380 of SEQ ID NO: 75
aacuaaugaguuugagggu

SEQ ID NO: 9915 - RNA, 19 nt, Artificial Sequence
  Description of Artificial Sequence: Synthetic oligonucleotide
  Antisense strand to SEQ ID NO: 9914
acccucaaacucauuaguu

SEQ ID NO: 9916 - RNA, 19 nt, Artificial Sequence
  Description of Artificial Sequence: Synthetic oligonucleotide
  Sense strand starting at position 3528 of SEQ ID NO: 75
auauaaagggcaugauauu

SEQ ID NO: 9917 - RNA, 19 nt, Artificial Sequence
  Description of Artificial Sequence: Synthetic oligonucleotide
  Antisense strand to SEQ ID NO: 9916
aauaucaugcccuuuauau

SEQ ID NO: 9918 - RNA, 19 nt, Artificial Sequence
  Description of Artificial Sequence: Synthetic oligonucleotide
  Sense strand starting at position 3584 of SEQ ID NO: 75
ucaguagucuuuccaugag

SEQ ID NO: 9919 - RNA, 19 nt, Artificial Sequence
  Description of Artificial Sequence: Synthetic oligonucleotide
  Antisense strand to SEQ ID NO: 9918
cucauggaaagacuacuga

SEQ ID NO: 9920 - RNA, 19 nt, Artificial Sequence
  Description of Artificial Sequence: Synthetic oligonucleotide
  Sense strand starting at position 3590 of SEQ ID NO: 75
gucuuuccaugaguauaaa

SEQ ID NO: 9921 - RNA, 19 nt, Artificial Sequence
  Description of Artificial Sequence: Synthetic oligonucleotide
  Antisense strand to SEQ ID NO: 9920
uuuauacucauggaaagac

SEQ ID NO: 9922 - RNA, 19 nt, Artificial Sequence
  Description of Artificial Sequence: Synthetic oligonucleotide
  Sense strand starting at position 3749 of SEQ ID NO: 75
ggcuuugccucauuucuuu

SEQ ID NO: 9923 - RNA, 19 nt, Artificial Sequence
  Description of Artificial Sequence: Synthetic oligonucleotide
  Antisense strand to SEQ ID NO: 9922
aaagaaaugaggcaaagcc

SEQ ID NO: 9924 - RNA, 19 nt, Artificial Sequence
  Description of Artificial Sequence: Synthetic oligonucleotide
  Sense strand starting at position 3797 of SEQ ID NO: 75
gggauuugcucagaacuaa

SEQ ID NO: 9925 - RNA, 19 nt, Artificial Sequence
  Description of Artificial Sequence: Synthetic oligonucleotide
  Antisense strand to SEQ ID NO: 9924
uuaguucugagcaaauccc

SEQ ID NO: 9926 - RNA, 19 nt, Artificial Sequence
  Description of Artificial Sequence: Synthetic oligonucleotide
  Sense strand starting at position 3824 of SEQ ID NO: 75
ccacccugagccuggaaau

SEQ ID NO: 9927 - RNA, 19 nt, Artificial Sequence
  Description of Artificial Sequence: Synthetic oligonucleotide
  Antisense strand to SEQ ID NO: 9926
auuuccaggcucagggugg

SEQ ID NO: 9928 - RNA, 19 nt, Artificial Sequence
  Description of Artificial Sequence: Synthetic oligonucleotide
  Sense strand starting at position 3870 of SEQ ID NO: 75
gagagaaucuggcuuuacc

SEQ ID NO: 9929 - RNA, 19 nt, Artificial Sequence
  Description of Artificial Sequence: Synthetic oligonucleotide
  Antisense strand to SEQ ID NO: 9928
gguaaagccagauucucuc

SEQ ID NO: 9930 - RNA, 19 nt, Artificial Sequence
  Description of Artificial Sequence: Synthetic oligonucleotide
  Sense strand starting at position 84 of SEQ ID NO: 77
gacucuuuccagggagauu

SEQ ID NO: 9931 - RNA, 19 nt, Artificial Sequence
  Description of Artificial Sequence: Synthetic oligonucleotide
  Antisense strand to SEQ ID NO: 9930
aaucucccuggaaagaguc

SEQ ID NO: 9932 - RNA, 19 nt, Artificial Sequence
  Description of Artificial Sequence: Synthetic oligonucleotide
  Sense strand starting at position 132 of SEQ ID NO: 77
ugaauagccagcugguaaa

SEQ ID NO: 9933 - RNA, 19 nt, Artificial Sequence
  Description of Artificial Sequence: Synthetic oligonucleotide
  Antisense strand to SEQ ID NO: 9932
uuuaccagcuggcuauuca

SEQ ID NO: 9934 - RNA, 19 nt, Artificial Sequence
  Description of Artificial Sequence: Synthetic oligonucleotide
  Sense strand starting at position 311 of SEQ ID NO: 77
uuuaguguggauggucaaa

SEQ ID NO: 9935 - RNA, 19 nt, Artificial Sequence
  Description of Artificial Sequence: Synthetic oligonucleotide
  Antisense strand to SEQ ID NO: 9934
uuugaccauccacacuaaa

SEQ ID NO: 9936 - RNA, 19 nt, Artificial Sequence
  Description of Artificial Sequence: Synthetic oligonucleotide
  Sense strand starting at position 313 of SEQ ID NO: 77
uaguguggauggucaaaua

SEQ ID NO: 9937 - RNA, 19 nt, Artificial Sequence
  Description of Artificial Sequence: Synthetic oligonucleotide
  Antisense strand to SEQ ID NO: 9936
uauuugaccauccacacua

SEQ ID NO: 9938 - RNA, 19 nt, Artificial Sequence
  Description of Artificial Sequence: Synthetic oligonucleotide
  Sense strand starting at position 474 of SEQ ID NO: 77
uccuuaucucugugaccuu

SEQ ID NO: 9939 - RNA, 19 nt, Artificial Sequence
  Description of Artificial Sequence: Synthetic oligonucleotide
  Antisense strand to SEQ ID NO: 9938
aaggucacagagauaagga

SEQ ID NO: 9940 - RNA, 19 nt, Artificial Sequence
  Description of Artificial Sequence: Synthetic oligonucleotide
  Sense strand starting at position 504 of SEQ ID NO: 77
gaguaaauccagugccuag

SEQ ID NO: 9941 - RNA, 19 nt, Artificial Sequence
  Description of Artificial Sequence: Synthetic oligonucleotide
  Antisense strand to SEQ ID NO: 9940
cuaggcacuggauuuacuc

SEQ ID NO: 9942 - RNA, 19 nt, Artificial Sequence
  Description of Artificial Sequence: Synthetic oligonucleotide
  Sense strand starting at position 691 of SEQ ID NO: 77
agccauuaacuaugcagaa

SEQ ID NO: 9943 - RNA, 19 nt, Artificial Sequence
  Description of Artificial Sequence: Synthetic oligonucleotide
  Antisense strand to SEQ ID NO: 9942
uucugcauaguuaauggcu

SEQ ID NO: 9944 - RNA, 19 nt, Artificial Sequence
  Description of Artificial Sequence: Synthetic oligonucleotide
  Sense strand starting at position 692 of SEQ ID NO: 77
gccauuaacuaugcagaag

SEQ ID NO: 9945 - RNA, 19 nt, Artificial Sequence
  Description of Artificial Sequence: Synthetic oligonucleotide
  Antisense strand to SEQ ID NO: 9944
cuucugcauaguuaauggc

SEQ ID NO: 9946 - RNA, 19 nt, Artificial Sequence
  Description of Artificial Sequence: Synthetic oligonucleotide
  Sense strand starting at position 715 of SEQ ID NO: 77
ggauaauuagauugaccgu

SEQ ID NO: 9947 - RNA, 19 nt, Artificial Sequence
  Description of Artificial Sequence: Synthetic oligonucleotide
  Antisense strand to SEQ ID NO: 9946
acggucaaucuaauuaucc

SEQ ID NO: 9948 - RNA, 19 nt, Artificial Sequence
  Description of Artificial Sequence: Synthetic oligonucleotide
  Sense strand starting at position 721 of SEQ ID NO: 77
uuagauugaccgugguaac

SEQ ID NO: 9949 - RNA, 19 nt, Artificial Sequence
  Description of Artificial Sequence: Synthetic oligonucleotide
  Antisense strand to SEQ ID NO: 9948
guuaccacggucaaucuaa

SEQ ID NO: 9950 - RNA, 19 nt, Artificial Sequence
  Description of Artificial Sequence: Synthetic oligonucleotide
  Sense strand starting at position 873 of SEQ ID NO: 77
ucugauuaaugugcagaaa

SEQ ID NO: 9951 - RNA, 19 nt, Artificial Sequence
  Description of Artificial Sequence: Synthetic oligonucleotide
  Antisense strand to SEQ ID NO: 9950
uuucugcacauuaaucaga

SEQ ID NO: 9952 - RNA, 19 nt, Artificial Sequence
  Description of Artificial Sequence: Synthetic oligonucleotide
  Sense strand starting at position 874 of SEQ ID NO: 77
cugauuaaugugcagaaau

SEQ ID NO: 9953 - RNA, 19 nt, Artificial Sequence
  Description of Artificial Sequence: Synthetic oligonucleotide
  Antisense strand to SEQ ID NO: 9952
auuucugcacauuaaucag

SEQ ID NO: 9954 - RNA, 19 nt, Artificial Sequence
  Description of Artificial Sequence: Synthetic oligonucleotide
  Sense strand starting at position 913 of SEQ ID NO: 77
agacaaaguccucauucgu

SEQ ID NO: 9955 - RNA, 19 nt, Artificial Sequence
  Description of Artificial Sequence: Synthetic oligonucleotide
  Antisense strand to SEQ ID NO: 9954
acgaaugaggacuuugucu

SEQ ID NO: 9956 - RNA, 19 nt, Artificial Sequence
  Description of Artificial Sequence: Synthetic oligonucleotide
  Sense strand starting at position 922 of SEQ ID NO: 77
ccucauucguagucauuag

SEQ ID NO: 9957 - RNA, 19 nt, Artificial Sequence
  Description of Artificial Sequence: Synthetic oligonucleotide
  Antisense strand to SEQ ID NO: 9956
cuaaugacuacgaaugagg

SEQ ID NO: 9958 - RNA, 19 nt, Artificial Sequence
  Description of Artificial Sequence: Synthetic oligonucleotide
  Sense strand starting at position 926 of SEQ ID NO: 77
auucguagucauuagaaac

SEQ ID NO: 9959 - RNA, 19 nt, Artificial Sequence
  Description of Artificial Sequence: Synthetic oligonucleotide
  Antisense strand to SEQ ID NO: 9958
guuucuaaugacuacgaau

SEQ ID NO: 9960 - RNA, 19 nt, Artificial Sequence
  Description of Artificial Sequence: Synthetic oligonucleotide
  Sense strand starting at position 939 of SEQ ID NO: 77
agaaacuaucugugagcgu

SEQ ID NO: 9961 - RNA, 19 nt, Artificial Sequence
  Description of Artificial Sequence: Synthetic oligonucleotide
  Antisense strand to SEQ ID NO: 9960
acgcucacagauaguuucu

SEQ ID NO: 9962 - RNA, 19 nt, Artificial Sequence
  Description of Artificial Sequence: Synthetic oligonucleotide
  Sense strand starting at position 1617 of SEQ ID NO: 77
ucaagucaacgcugcagaa

SEQ ID NO: 9963 - RNA, 19 nt, Artificial Sequence
  Description of Artificial Sequence: Synthetic oligonucleotide
  Antisense strand to SEQ ID NO: 9962
uucugcagcguugacuuga

SEQ ID NO: 9964 - RNA, 19 nt, Artificial Sequence
  Description of Artificial Sequence: Synthetic oligonucleotide
  Sense strand starting at position 1724 of SEQ ID NO: 77
gcucgaaagcuuucucggu

SEQ ID NO: 9965 - RNA, 19 nt, Artificial Sequence
  Description of Artificial Sequence: Synthetic oligonucleotide
  Antisense strand to SEQ ID NO: 9964
accgagaaagcuuucgagc

SEQ ID NO: 9966 - RNA, 19 nt, Artificial Sequence
  Description of Artificial Sequence: Synthetic oligonucleotide
  Sense strand starting at position 1730 of SEQ ID NO: 77
aagcuuucucgguaccgga

SEQ ID NO: 9967 - RNA, 19 nt, Artificial Sequence
  Description of Artificial Sequence: Synthetic oligonucleotide
  Antisense strand to SEQ ID NO: 9966
uccgguaccgagaaagcuu

SEQ ID NO: 9968 - RNA, 19 nt, Artificial Sequence
  Description of Artificial Sequence: Synthetic oligonucleotide
  Sense strand starting at position 1840 of SEQ ID NO: 77
ggccgaagacugcgaagaa

SEQ ID NO: 9969 - RNA, 19 nt, Artificial Sequence
  Description of Artificial Sequence: Synthetic oligonucleotide
  Antisense strand to SEQ ID NO: 9968
uucuucgcagucuucggcc

SEQ ID NO: 9970 - RNA, 19 nt, Artificial Sequence
  Description of Artificial Sequence: Synthetic oligonucleotide
  Sense strand starting at position 1874 of SEQ ID NO: 77
ccaggccugcucggagaaa

SEQ ID NO: 9971 - RNA, 19 nt, Artificial Sequence
  Description of Artificial Sequence: Synthetic oligonucleotide
  Antisense strand to SEQ ID NO: 9970
uuucuccgagcaggccugg

SEQ ID NO: 9972 - RNA, 19 nt, Artificial Sequence
  Description of Artificial Sequence: Synthetic oligonucleotide
  Sense strand starting at position 1971 of SEQ ID NO: 77
gggaucgguucuaggagau

SEQ ID NO: 9973 - RNA, 19 nt, Artificial Sequence
  Description of Artificial Sequence: Synthetic oligonucleotide
  Antisense strand to SEQ ID NO: 9972
aucuccuagaaccgauccc

SEQ ID NO: 9974 - RNA, 19 nt, Artificial Sequence
  Description of Artificial Sequence: Synthetic oligonucleotide
  Sense strand starting at position 2209 of SEQ ID NO: 77
auccuaucgccugaagaag

SEQ ID NO: 9975 - RNA, 19 nt, Artificial Sequence
  Description of Artificial Sequence: Synthetic oligonucleotide
  Antisense strand to SEQ ID NO: 9974
cuucuucaggcgauaggau

SEQ ID NO: 9976 - RNA, 19 nt, Artificial Sequence
  Description of Artificial Sequence: Synthetic oligonucleotide
  Sense strand starting at position 2247 of SEQ ID NO: 77
agagucuuuggugguuacu

SEQ ID NO: 9977 - RNA, 19 nt, Artificial Sequence
  Description of Artificial Sequence: Synthetic oligonucleotide
  Antisense strand to SEQ ID NO: 9976
aguaaccaccaaagacucu

SEQ ID NO: 9978 - RNA, 19 nt, Artificial Sequence
  Description of Artificial Sequence: Synthetic oligonucleotide
  Sense strand starting at position 2285 of SEQ ID NO: 77
ucuguaauuguauaaugcu

SEQ ID NO: 9979 - RNA, 19 nt, Artificial Sequence
  Description of Artificial Sequence: Synthetic oligonucleotide
  Antisense strand to SEQ ID NO: 9978
agcauuauacaauuacaga

SEQ ID NO: 9980 - RNA, 19 nt, Artificial Sequence
  Description of Artificial Sequence: Synthetic oligonucleotide
  Sense strand starting at position 2350 of SEQ ID NO: 77
augauauugugaucugaaa

SEQ ID NO: 9981 - RNA, 19 nt, Artificial Sequence
  Description of Artificial Sequence: Synthetic oligonucleotide
  Antisense strand to SEQ ID NO: 9980
uuucagaucacaauaucau

SEQ ID NO: 9982 - RNA, 19 nt, Artificial Sequence
  Description of Artificial Sequence: Synthetic oligonucleotide
  Sense strand starting at position 2441 of SEQ ID NO: 77
ggaguuugcgggcaacaga

SEQ ID NO: 9983 - RNA, 19 nt, Artificial Sequence
  Description of Artificial Sequence: Synthetic oligonucleotide
  Antisense strand to SEQ ID NO: 9982
ucuguugcccgcaaacucc

SEQ ID NO: 9984 - RNA, 19 nt, Artificial Sequence
  Description of Artificial Sequence: Synthetic oligonucleotide
  Sense strand starting at position 2462 of SEQ ID NO: 77
gagaucccgugucuauaaa

SEQ ID NO: 9985 - RNA, 19 nt, Artificial Sequence
  Description of Artificial Sequence: Synthetic oligonucleotide
  Antisense strand to SEQ ID NO: 9984
uuuauagacacgggaucuc

SEQ ID NO: 9986 - RNA, 19 nt, Artificial Sequence
  Description of Artificial Sequence: Synthetic oligonucleotide
  Sense strand starting at position 3195 of SEQ ID NO: 77
gaaaguaauuggcaauuug

SEQ ID NO: 9987 - RNA, 19 nt, Artificial Sequence
  Description of Artificial Sequence: Synthetic oligonucleotide
  Antisense strand to SEQ ID NO: 9986
caaauugccaauuacuuuc

SEQ ID NO: 9988 - RNA, 19 nt, Artificial Sequence
  Description of Artificial Sequence: Synthetic oligonucleotide
  Sense strand starting at position 3284 of SEQ ID NO: 77
agcucaccagcgcaauauu

SEQ ID NO: 9989 - RNA, 19 nt, Artificial Sequence
  Description of Artificial Sequence: Synthetic oligonucleotide
  Antisense strand to SEQ ID NO: 9988
aauauugcgcuggugagcu

SEQ ID NO: 9990 - RNA, 19 nt, Artificial Sequence
  Description of Artificial Sequence: Synthetic oligonucleotide
  Sense strand starting at position 3297 of SEQ ID NO: 77
aauauuagggagugugguu

SEQ ID NO: 9991 - RNA, 19 nt, Artificial Sequence
  Description of Artificial Sequence: Synthetic oligonucleotide
  Antisense strand to SEQ ID NO: 9990
aaccacacucccuaauauu

SEQ ID NO: 9992 - RNA, 19 nt, Artificial Sequence
  Description of Artificial Sequence: Synthetic oligonucleotide
  Sense strand starting at position 3337 of SEQ ID NO: 77
auguauucugaucaaguuu

SEQ ID NO: 9993 - RNA, 19 nt, Artificial Sequence
  Description of Artificial Sequence: Synthetic oligonucleotide
  Antisense strand to SEQ ID NO: 9992
aaacuugaucagaauacau

SEQ ID NO: 9994 - RNA, 19 nt, Artificial Sequence
  Description of Artificial Sequence: Synthetic oligonucleotide
  Sense strand starting at position 3390 of SEQ ID NO: 77
gugcuacugagauguguag

SEQ ID NO: 9995 - RNA, 19 nt, Artificial Sequence
  Description of Artificial Sequence: Synthetic oligonucleotide
  Antisense strand to SEQ ID NO: 9994
cuacacaucucaguagcac

SEQ ID NO: 9996 - RNA, 19 nt, Artificial Sequence
  Description of Artificial Sequence: Synthetic oligonucleotide
  Sense strand starting at position 3407 of SEQ ID NO: 77
aggucuugguccucagaug

SEQ ID NO: 9997 - RNA, 19 nt, Artificial Sequence
  Description of Artificial Sequence: Synthetic oligonucleotide
  Antisense strand to SEQ ID NO: 9996
caucugaggaccaagaccu

SEQ ID NO: 9998 - RNA, 19 nt, Artificial Sequence
  Description of Artificial Sequence: Synthetic oligonucleotide
  Sense strand starting at position 3477 of SEQ ID NO: 77
uuuauuauuguccauugca

SEQ ID NO: 9999 - RNA, 19 nt, Artificial Sequence
  Description of Artificial Sequence: Synthetic oligonucleotide
  Antisense strand to SEQ ID NO: 9998
ugcaauggacaauaauaaa

SEQ ID NO: 10000 - RNA, 19 nt, Artificial Sequence
  Description of Artificial Sequence: Synthetic oligonucleotide
  Sense strand starting at position 3678 of SEQ ID NO: 77
uuggaaauguggucgugau

SEQ ID NO: 10001 - RNA, 19 nt, Artificial Sequence
  Description of Artificial Sequence: Synthetic oligonucleotide
  Antisense strand to SEQ ID NO: 10000
aucacgaccacauuuccaa

SEQ ID NO: 10002 - RNA, 19 nt, Artificial Sequence
  Description of Artificial Sequence: Synthetic oligonucleotide
  Sense strand starting at position 3679 of SEQ ID NO: 77
uggaaauguggucgugaug

SEQ ID NO: 10003 - RNA, 19 nt, Artificial Sequence
  Description of Artificial Sequence: Synthetic oligonucleotide
  Antisense strand to SEQ ID NO: 10002
caucacgaccacauuucca

SEQ ID NO: 10004 - RNA, 19 nt, Artificial Sequence
  Description of Artificial Sequence: Synthetic oligonucleotide
  Sense strand starting at position 3682 of SEQ ID NO: 77
aaauguggucgugaugucu

SEQ ID NO: 10005 - RNA, 19 nt, Artificial Sequence
  Description of Artificial Sequence: Synthetic oligonucleotide
  Antisense strand to SEQ ID NO: 10004
agacaucacgaccacauuu

SEQ ID NO: 10006 - RNA, 19 nt, Artificial Sequence
  Description of Artificial Sequence: Synthetic oligonucleotide
  Sense strand starting at position 3685 of SEQ ID NO: 77
uguggucgugaugucuauu

SEQ ID NO: 10007 - RNA, 19 nt, Artificial Sequence
  Description of Artificial Sequence: Synthetic oligonucleotide
  Antisense strand to SEQ ID NO: 10006
aauagacaucacgaccaca

SEQ ID NO: 10008 - RNA, 19 nt, Artificial Sequence
  Description of Artificial Sequence: Synthetic oligonucleotide
  Sense strand starting at position 3688 of SEQ ID NO: 77
ggucgugaugucuauugaa

SEQ ID NO: 10009 - RNA, 19 nt, Artificial Sequence
  Description of Artificial Sequence: Synthetic oligonucleotide
  Antisense strand to SEQ ID NO: 10008
uucaauagacaucacgacc

SEQ ID NO: 10010 - RNA, 19 nt, Artificial Sequence
  Description of Artificial Sequence: Synthetic oligonucleotide
  Sense strand starting at position 166 of SEQ ID NO: 78
guuaacuaauugccugaga

SEQ ID NO: 10011 - RNA, 19 nt, Artificial Sequence
  Description of Artificial Sequence: Synthetic oligonucleotide
  Antisense strand to SEQ ID NO: 10010
ucucaggcaauuaguuaac

SEQ ID NO: 10012 - RNA, 19 nt, Artificial Sequence
  Description of Artificial Sequence: Synthetic oligonucleotide
  Sense strand starting at position 167 of SEQ ID NO: 78
uuaacuaauugccugagau

SEQ ID NO: 10013 - RNA, 19 nt, Artificial Sequence
  Description of Artificial Sequence: Synthetic oligonucleotide
  Antisense strand to SEQ ID NO: 10012
aucucaggcaauuaguuaa

SEQ ID NO: 10014 - RNA, 19 nt, Artificial Sequence
  Description of Artificial Sequence: Synthetic oligonucleotide
  Sense strand starting at position 194 of SEQ ID NO: 78
uaguaaguggcagaaaugu

SEQ ID NO: 10015 - RNA, 19 nt, Artificial Sequence
  Description of Artificial Sequence: Synthetic oligonucleotide
  Antisense strand to SEQ ID NO: 10014
acauuucugccacuuacua

SEQ ID NO: 10016 - RNA, 19 nt, Artificial Sequence
  Description of Artificial Sequence: Synthetic oligonucleotide
  Sense strand starting at position 266 of SEQ ID NO: 78
ugauaucaacaguggagua

SEQ ID NO: 10017 - RNA, 19 nt, Artificial Sequence
  Description of Artificial Sequence: Synthetic oligonucleotide
  Antisense strand to SEQ ID NO: 10016
uacuccacuguugauauca

SEQ ID NO: 10018 - RNA, 19 nt, Artificial Sequence
  Description of Artificial Sequence: Synthetic oligonucleotide
  Sense strand starting at position 757 of SEQ ID NO: 78
ugacuaauucugggucauc

SEQ ID NO: 10019 - RNA, 19 nt, Artificial Sequence
  Description of Artificial Sequence: Synthetic oligonucleotide
  Antisense strand to SEQ ID NO: 10018
gaugacccagaauuaguca

SEQ ID NO: 10020 - RNA, 19 nt, Artificial Sequence
  Description of Artificial Sequence: Synthetic oligonucleotide
  Sense strand starting at position 758 of SEQ ID NO: 78
gacuaauucugggucaucu

SEQ ID NO: 10021 - RNA, 19 nt, Artificial Sequence
  Description of Artificial Sequence: Synthetic oligonucleotide
  Antisense strand to SEQ ID NO: 10020
agaugacccagaauuaguc

SEQ ID NO: 10022 - RNA, 19 nt, Artificial Sequence
  Description of Artificial Sequence: Synthetic oligonucleotide
  Sense strand starting at position 760 of SEQ ID NO: 78
cuaauucugggucaucuuu

SEQ ID NO: 10023 - RNA, 19 nt, Artificial Sequence
  Description of Artificial Sequence: Synthetic oligonucleotide
  Antisense strand to SEQ ID NO: 10022
aaagaugacccagaauuag

SEQ ID NO: 10024 - RNA, 19 nt, Artificial Sequence
  Description of Artificial Sequence: Synthetic oligonucleotide
  Sense strand starting at position 847 of SEQ ID NO: 78
cuuccugaagacugccaua

SEQ ID NO: 10025 - RNA, 19 nt, Artificial Sequence
  Description of Artificial Sequence: Synthetic oligonucleotide
  Antisense strand to SEQ ID NO: 10024
uauggcagucuucaggaag

SEQ ID NO: 10026 - RNA, 19 nt, Artificial Sequence
  Description of Artificial Sequence: Synthetic oligonucleotide
  Sense strand starting at position 852 of SEQ ID NO: 78
ugaagacugccauagcaau

SEQ ID NO: 10027 - RNA, 19 nt, Artificial Sequence
  Description of Artificial Sequence: Synthetic oligonucleotide
  Antisense strand to SEQ ID NO: 10026
auugcuauggcagucuuca

SEQ ID NO: 10028 - RNA, 19 nt, Artificial Sequence
  Description of Artificial Sequence: Synthetic oligonucleotide
  Sense strand starting at position 1054 of SEQ ID NO: 78
guuauuuccagagguuagu

SEQ ID NO: 10029 - RNA, 19 nt, Artificial Sequence
  Description of Artificial Sequence: Synthetic oligonucleotide
  Antisense strand to SEQ ID NO: 10028
acuaaccucuggaaauaac

SEQ ID NO: 10030 - RNA, 19 nt, Artificial Sequence
  Description of Artificial Sequence: Synthetic oligonucleotide
  Sense strand starting at position 1170 of SEQ ID NO: 78
auguucuaucuggaugcaa

SEQ ID NO: 10031 - RNA, 19 nt, Artificial Sequence
  Description of Artificial Sequence: Synthetic oligonucleotide
  Antisense strand to SEQ ID NO: 10030
uugcauccagauagaacau

SEQ ID NO: 10032 - RNA, 19 nt, Artificial Sequence
  Description of Artificial Sequence: Synthetic oligonucleotide
  Sense strand starting at position 1273 of SEQ ID NO: 78
ccuacagaguugguggauu

SEQ ID NO: 10033 - RNA, 19 nt, Artificial Sequence
  Description of Artificial Sequence: Synthetic oligonucleotide
  Antisense strand to SEQ ID NO: 10032
aauccaccaacucuguagg

SEQ ID NO: 10034 - RNA, 19 nt, Artificial Sequence
  Description of Artificial Sequence: Synthetic oligonucleotide
  Sense strand starting at position 1295 of SEQ ID NO: 78
auuguauuaccugacaggu

SEQ ID NO: 10035 - RNA, 19 nt, Artificial Sequence
  Description of Artificial Sequence: Synthetic oligonucleotide
  Antisense strand to SEQ ID NO: 10034
accugucagguaauacaau

SEQ ID NO: 10036 - RNA, 19 nt, Artificial Sequence
  Description of Artificial Sequence: Synthetic oligonucleotide
  Sense strand starting at position 1421 of SEQ ID NO: 78
uugccucauuugucaugua

SEQ ID NO: 10037 - RNA, 19 nt, Artificial Sequence
  Description of Artificial Sequence: Synthetic oligonucleotide
  Antisense strand to SEQ ID NO: 10036
uacaugacaaaugaggcaa

SEQ ID NO: 10038 - RNA, 19 nt, Artificial Sequence
  Description of Artificial Sequence: Synthetic oligonucleotide
  Sense strand starting at position 1437 of SEQ ID NO: 78
guagcauucguguuuccua

SEQ ID NO: 10039 - RNA, 19 nt, Artificial Sequence
  Description of Artificial Sequence: Synthetic oligonucleotide
  Antisense strand to SEQ ID NO: 10038
uaggaaacacgaaugcuac

SEQ ID NO: 10040 - RNA, 19 nt, Artificial Sequence
  Description of Artificial Sequence: Synthetic oligonucleotide
  Sense strand starting at position 2136 of SEQ ID NO: 78
uguaguauucguguuuccu

SEQ ID NO: 10041 - RNA, 19 nt, Artificial Sequence
  Description of Artificial Sequence: Synthetic oligonucleotide
  Antisense strand to SEQ ID NO: 10040
aggaaacacgaauacuaca

SEQ ID NO: 10042 - RNA, 19 nt, Artificial Sequence
  Description of Artificial Sequence: Synthetic oligonucleotide
  Sense strand starting at position 2137 of SEQ ID NO: 78
guaguauucguguuuccua

SEQ ID NO: 10043 - RNA, 19 nt, Artificial Sequence
  Description of Artificial Sequence: Synthetic oligonucleotide
  Antisense strand to SEQ ID NO: 10042
uaggaaacacgaauacuac

SEQ ID NO: 10044 - RNA, 19 nt, Artificial Sequence
  Description of Artificial Sequence: Synthetic oligonucleotide
  Sense strand starting at position 2164 of SEQ ID NO: 78
acgcaauaccuagauuaau

SEQ ID NO: 10045 - RNA, 19 nt, Artificial Sequence
  Description of Artificial Sequence: Synthetic oligonucleotide
  Antisense strand to SEQ ID NO: 10044
auuaaucuagguauugcgu

SEQ ID NO: 10046 - RNA, 19 nt, Artificial Sequence
  Description of Artificial Sequence: Synthetic oligonucleotide
  Sense strand starting at position 2368 of SEQ ID NO: 78
gcagucucugcgcccuaaa

SEQ ID NO: 10047 - RNA, 19 nt, Artificial Sequence
  Description of Artificial Sequence: Synthetic oligonucleotide
  Antisense strand to SEQ ID NO: 10046
uuuagggcgcagagacugc

SEQ ID NO: 10048 - RNA, 19 nt, Artificial Sequence
  Description of Artificial Sequence: Synthetic oligonucleotide
  Sense strand starting at position 2455 of SEQ ID NO: 78
gggaauacauccuuucuuu

SEQ ID NO: 10049 - RNA, 19 nt, Artificial Sequence
  Description of Artificial Sequence: Synthetic oligonucleotide
  Antisense strand to SEQ ID NO: 10048
aaagaaaggauguauuccc

SEQ ID NO: 10050 - RNA, 19 nt, Artificial Sequence
  Description of Artificial Sequence: Synthetic oligonucleotide
  Sense strand starting at position 2595 of SEQ ID NO: 78
ccugucucccaacauguau

SEQ ID NO: 10051 - RNA, 19 nt, Artificial Sequence
  Description of Artificial Sequence: Synthetic oligonucleotide
  Antisense strand to SEQ ID NO: 10050
auacauguugggagacagg

SEQ ID NO: 10052 - RNA, 19 nt, Artificial Sequence
  Description of Artificial Sequence: Synthetic oligonucleotide
  Sense strand starting at position 2649 of SEQ ID NO: 78
gugugaccagaguaguuga

SEQ ID NO: 10053 - RNA, 19 nt, Artificial Sequence
  Description of Artificial Sequence: Synthetic oligonucleotide
  Antisense strand to SEQ ID NO: 10052
ucaacuacucuggucacac

SEQ ID NO: 10054 - RNA, 19 nt, Artificial Sequence
  Description of Artificial Sequence: Synthetic oligonucleotide
  Sense strand starting at position 2744 of SEQ ID NO: 78
ggcacaguccuacaauuaa

SEQ ID NO: 10055 - RNA, 19 nt, Artificial Sequence
  Description of Artificial Sequence: Synthetic oligonucleotide
  Antisense strand to SEQ ID NO: 10054
uuaauuguaggacugugcc

SEQ ID NO: 10056 - RNA, 19 nt, Artificial Sequence
  Description of Artificial Sequence: Synthetic oligonucleotide
  Sense strand starting at position 2784 of SEQ ID NO: 78
aagcauuuccaguguguuu

SEQ ID NO: 10057 - RNA, 19 nt, Artificial Sequence
  Description of Artificial Sequence: Synthetic oligonucleotide
  Antisense strand to SEQ ID NO: 10056
aaacacacuggaaaugcuu

SEQ ID NO: 10058 - RNA, 19 nt, Artificial Sequence
  Description of Artificial Sequence: Synthetic oligonucleotide
  Sense strand starting at position 2982 of SEQ ID NO: 78
uagaccuaccuguagguua

SEQ ID NO: 10059 - RNA, 19 nt, Artificial Sequence
  Description of Artificial Sequence: Synthetic oligonucleotide
  Antisense strand to SEQ ID NO: 10058
uaaccuacagguaggucua

SEQ ID NO: 10060 - RNA, 19 nt, Artificial Sequence
  Description of Artificial Sequence: Synthetic oligonucleotide
  Sense strand starting at position 2984 of SEQ ID NO: 78
gaccuaccuguagguuaua

SEQ ID NO: 10061 - RNA, 19 nt, Artificial Sequence
  Description of Artificial Sequence: Synthetic oligonucleotide
  Antisense strand to SEQ ID NO: 10060
uauaaccuacagguagguc

SEQ ID NO: 10062 - RNA, 19 nt, Artificial Sequence
  Description of Artificial Sequence: Synthetic oligonucleotide
  Sense strand starting at position 3067 of SEQ ID NO: 78
gcgucagaucuagaaucag

SEQ ID NO: 10063 - RNA, 19 nt, Artificial Sequence
  Description of Artificial Sequence: Synthetic oligonucleotide
  Antisense strand to SEQ ID NO: 10062
cugauucuagaucugacgc

SEQ ID NO: 10064 - RNA, 19 nt, Artificial Sequence
  Description of Artificial Sequence: Synthetic oligonucleotide
  Sense strand starting at position 3181 of SEQ ID NO: 78
uagaauguguuauuaaagg

SEQ ID NO: 10065 - RNA, 19 nt, Artificial Sequence
  Description of Artificial Sequence: Synthetic oligonucleotide
  Antisense strand to SEQ ID NO: 10064
ccuuuaauaacacauucua

SEQ ID NO: 10066 - RNA, 19 nt, Artificial Sequence
  Description of Artificial Sequence: Synthetic oligonucleotide
  Sense strand starting at position 3258 of SEQ ID NO: 78
cugggauuagcuuauguaa

SEQ ID NO: 10067 - RNA, 19 nt, Artificial Sequence
  Description of Artificial Sequence: Synthetic oligonucleotide
  Antisense strand to SEQ ID NO: 10066
uuacauaagcuaaucccag

SEQ ID NO: 10068 - RNA, 19 nt, Artificial Sequence
  Description of Artificial Sequence: Synthetic oligonucleotide
  Sense strand starting at position 3261 of SEQ ID NO: 78
ggauuagcuuauguaacca

SEQ ID NO: 10069 - RNA, 19 nt, Artificial Sequence
  Description of Artificial Sequence: Synthetic oligonucleotide
  Antisense strand to SEQ ID NO: 10068
ugguuacauaagcuaaucc

SEQ ID NO: 10070 - RNA, 19 nt, Artificial Sequence
  Description of Artificial Sequence: Synthetic oligonucleotide
  Sense strand starting at position 3308 of SEQ ID NO: 78
uugggagacuuugugagua

SEQ ID NO: 10071 - RNA, 19 nt, Artificial Sequence
  Description of Artificial Sequence: Synthetic oligonucleotide
  Antisense strand to SEQ ID NO: 10070
uacucacaaagucucccaa

SEQ ID NO: 10072 - RNA, 19 nt, Artificial Sequence
  Description of Artificial Sequence: Synthetic oligonucleotide
  Sense strand starting at position 3312 of SEQ ID NO: 78
gagacuuugugaguagagu

SEQ ID NO: 10073 - RNA, 19 nt, Artificial Sequence
  Description of Artificial Sequence: Synthetic oligonucleotide
  Antisense strand to SEQ ID NO: 10072
acucuacucacaaagucuc

SEQ ID NO: 10074 - RNA, 19 nt, Artificial Sequence
  Description of Artificial Sequence: Synthetic oligonucleotide
  Sense strand starting at position 3313 of SEQ ID NO: 78
agacuuugugaguagaguc

SEQ ID NO: 10075 - RNA, 19 nt, Artificial Sequence
  Description of Artificial Sequence: Synthetic oligonucleotide
  Antisense strand to SEQ ID NO: 10074
gacucuacucacaaagucu

SEQ ID NO: 10076 - RNA, 19 nt, Artificial Sequence
  Description of Artificial Sequence: Synthetic oligonucleotide
  Sense strand starting at position 3727 of SEQ ID NO: 78
gcaguaagaccuuaaagug

SEQ ID NO: 10077 - RNA, 19 nt, Artificial Sequence
  Description of Artificial Sequence: Synthetic oligonucleotide
  Antisense strand to SEQ ID NO: 10076
cacuuuaaggucuuacugc

SEQ ID NO: 10078 - RNA, 19 nt, Artificial Sequence
  Description of Artificial Sequence: Synthetic oligonucleotide
  Sense strand starting at position 3736 of SEQ ID NO: 78
ccuuaaaguggauauuagu

SEQ ID NO: 10079 - RNA, 19 nt, Artificial Sequence
  Description of Artificial Sequence: Synthetic oligonucleotide
  Antisense strand to SEQ ID NO: 10078
acuaauauccacuuuaagg

SEQ ID NO: 10080 - RNA, 19 nt, Artificial Sequence
  Description of Artificial Sequence: Synthetic oligonucleotide
  Sense strand starting at position 3818 of SEQ ID NO: 78
gcuaguaaggguggagaaa

SEQ ID NO: 10081 - RNA, 19 nt, Artificial Sequence
  Description of Artificial Sequence: Synthetic oligonucleotide
  Antisense strand to SEQ ID NO: 10080
uuucuccacccuuacuagc

SEQ ID NO: 10082 - RNA, 19 nt, Artificial Sequence
  Description of Artificial Sequence: Synthetic oligonucleotide
  Sense strand starting at position 3885 of SEQ ID NO: 78
aucagaauucucugggcuu

SEQ ID NO: 10083 - RNA, 19 nt, Artificial Sequence
  Description of Artificial Sequence: Synthetic oligonucleotide
  Antisense strand to SEQ ID NO: 10082
aagcccagagaauucugau

SEQ ID NO: 10084 - RNA, 19 nt, Artificial Sequence
  Description of Artificial Sequence: Synthetic oligonucleotide
  Sense strand starting at position 3888 of SEQ ID NO: 78
agaauucucugggcuuaca

SEQ ID NO: 10085 - RNA, 19 nt, Artificial Sequence
  Description of Artificial Sequence: Synthetic oligonucleotide
  Antisense strand to SEQ ID NO: 10084
uguaagcccagagaauucu

SEQ ID NO: 10086 - RNA, 19 nt, Artificial Sequence
  Description of Artificial Sequence: Synthetic oligonucleotide
  Sense strand starting at position 3891 of SEQ ID NO: 78
auucucugggcuuacaaau

SEQ ID NO: 10087 - RNA, 19 nt, Artificial Sequence
  Description of Artificial Sequence: Synthetic oligonucleotide
  Antisense strand to SEQ ID NO: 10086
auuuguaagcccagagaau

SEQ ID NO: 10088 - RNA, 19 nt, Artificial Sequence
  Description of Artificial Sequence: Synthetic oligonucleotide
  Sense strand starting at position 3933 of SEQ ID NO: 78
gggucuuugguguaguaag

SEQ ID NO: 10089 - RNA, 19 nt, Artificial Sequence
  Description of Artificial Sequence: Synthetic oligonucleotide
  Antisense strand to SEQ ID NO: 10088
cuuacuacaccaaagaccc

SEQ ID NO: 10090 - RNA, 19 nt, Artificial Sequence
  Description of Artificial Sequence: Synthetic oligonucleotide
  Sense strand starting at position 3971 of SEQ ID NO: 79
agaauaaucuggcuuggag

SEQ ID NO: 10091 - RNA, 19 nt, Artificial Sequence
  Description of Artificial Sequence: Synthetic oligonucleotide
  Antisense strand to SEQ ID NO: 10090
cuccaagccagauuauucu

SEQ ID NO: 10092 - RNA, 19 nt, Artificial Sequence
  Description of Artificial Sequence: Synthetic oligonucleotide
  Sense strand starting at position 3968 of SEQ ID NO: 79
uggagaauaaucuggcuug

SEQ ID NO: 10093 - RNA, 19 nt, Artificial Sequence
  Description of Artificial Sequence: Synthetic oligonucleotide
  Antisense strand to SEQ ID NO: 10092
caagccagauuauucucca

SEQ ID NO: 10094 - RNA, 19 nt, Artificial Sequence
  Description of Artificial Sequence: Synthetic oligonucleotide
  Sense strand starting at position 3929 of SEQ ID NO: 79
gcauuacaguucccaagaa

SEQ ID NO: 10095 - RNA, 19 nt, Artificial Sequence
  Description of Artificial Sequence: Synthetic oligonucleotide
  Antisense strand to SEQ ID NO: 10094
uucuugggaacuguaaugc

SEQ ID NO: 10096 - RNA, 19 nt, Artificial Sequence
  Description of Artificial Sequence: Synthetic oligonucleotide
  Sense strand starting at position 3921 of SEQ ID NO: 79
ucaagugugcauuacaguu

SEQ ID NO: 10097 - RNA, 19 nt, Artificial Sequence
  Description of Artificial Sequence: Synthetic oligonucleotide
  Antisense strand to SEQ ID NO: 10096
aacuguaaugcacacuuga

SEQ ID NO: 10098 - RNA, 19 nt, Artificial Sequence
  Description of Artificial Sequence: Synthetic oligonucleotide
  Sense strand starting at position 3711 of SEQ ID NO: 79
guauguuuaguagacauag

SEQ ID NO: 10099 - RNA, 19 nt, Artificial Sequence
  Description of Artificial Sequence: Synthetic oligonucleotide
  Antisense strand to SEQ ID NO: 10098
cuaugucuacuaaacauac

SEQ ID NO: 10100 - RNA, 19 nt, Artificial Sequence
  Description of Artificial Sequence: Synthetic oligonucleotide
  Sense strand starting at position 3464 of SEQ ID NO: 79
cuuggacugagauggcaau

SEQ ID NO: 10101 - RNA, 19 nt, Artificial Sequence
  Description of Artificial Sequence: Synthetic oligonucleotide
  Antisense strand to SEQ ID NO: 10100
auugccaucucaguccaag

SEQ ID NO: 10102 - RNA, 19 nt, Artificial Sequence
  Description of Artificial Sequence: Synthetic oligonucleotide
  Sense strand starting at position 3439 of SEQ ID NO: 79
caguccacgcaugauuaga

SEQ ID NO: 10103 - RNA, 19 nt, Artificial Sequence
  Description of Artificial Sequence: Synthetic oligonucleotide
  Antisense strand to SEQ ID NO: 10102
ucuaaucaugcguggacug

SEQ ID NO: 10104 - RNA, 19 nt, Artificial Sequence
  Description of Artificial Sequence: Synthetic oligonucleotide
  Sense strand starting at position 3353 of SEQ ID NO: 79
gggagucaaguauacagua

SEQ ID NO: 10105 - RNA, 19 nt, Artificial Sequence
  Description of Artificial Sequence: Synthetic oligonucleotide
  Antisense strand to SEQ ID NO: 10104
uacuguauacuugacuccc

SEQ ID NO: 10106 - RNA, 19 nt, Artificial Sequence
  Description of Artificial Sequence: Synthetic oligonucleotide
  Sense strand starting at position 3310 of SEQ ID NO: 79
uguauccagugaucaguaa

SEQ ID NO: 10107 - RNA, 19 nt, Artificial Sequence
  Description of Artificial Sequence: Synthetic oligonucleotide
  Antisense strand to SEQ ID NO: 10106
uuacugaucacuggauaca

SEQ ID NO: 10108 - RNA, 19 nt, Artificial Sequence
  Description of Artificial Sequence: Synthetic oligonucleotide
  Sense strand starting at position 3307 of SEQ ID NO: 79
gaauguauccagugaucag

SEQ ID NO: 10109 - RNA, 19 nt, Artificial Sequence
  Description of Artificial Sequence: Synthetic oligonucleotide
  Antisense strand to SEQ ID NO: 10108
cugaucacuggauacauuc

SEQ ID NO: 10110 - RNA, 19 nt, Artificial Sequence
  Description of Artificial Sequence: Synthetic oligonucleotide
  Sense strand starting at position 3304 of SEQ ID NO: 79
cuggaauguauccagugau

SEQ ID NO: 10111 - RNA, 19 nt, Artificial Sequence
  Description of Artificial Sequence: Synthetic oligonucleotide
  Antisense strand to SEQ ID NO: 10110
aucacuggauacauuccag

SEQ ID NO: 10112 - RNA, 19 nt, Artificial Sequence
  Description of Artificial Sequence: Synthetic oligonucleotide
  Sense strand starting at position 3303 of SEQ ID NO: 79
ucuggaauguauccaguga

SEQ ID NO: 10113 - RNA, 19 nt, Artificial Sequence
  Description of Artificial Sequence: Synthetic oligonucleotide
  Antisense strand to SEQ ID NO: 10112
ucacuggauacauuccaga

SEQ ID NO: 10114 - RNA, 19 nt, Artificial Sequence
  Description of Artificial Sequence: Synthetic oligonucleotide
  Sense strand starting at position 3292 of SEQ ID NO: 79
aggcuauggugucuggaau

SEQ ID NO: 10115 - RNA, 19 nt, Artificial Sequence
  Description of Artificial Sequence: Synthetic oligonucleotide
  Antisense strand to SEQ ID NO: 10114
auuccagacaccauagccu

SEQ ID NO: 10116 - RNA, 19 nt, Artificial Sequence
  Description of Artificial Sequence: Synthetic oligonucleotide
  Sense strand starting at position 3272 of SEQ ID NO: 79
uguagagagccuugaauac

SEQ ID NO: 10117 - RNA, 19 nt, Artificial Sequence
  Description of Artificial Sequence: Synthetic oligonucleotide
  Antisense strand to SEQ ID NO: 10116
guauucaaggcucucuaca

SEQ ID NO: 10118 - RNA, 19 nt, Artificial Sequence
  Description of Artificial Sequence: Synthetic oligonucleotide
  Sense strand starting at position 3266 of SEQ ID NO: 79
gguaauuguagagagccuu

SEQ ID NO: 10119 - RNA, 19 nt, Artificial Sequence
  Description of Artificial Sequence: Synthetic oligonucleotide
  Antisense strand to SEQ ID NO: 10118
aaggcucucuacaauuacc

SEQ ID NO: 10120 - RNA, 19 nt, Artificial Sequence
  Description of Artificial Sequence: Synthetic oligonucleotide
  Sense strand starting at position 3253 of SEQ ID NO: 79
gcuggaaaggacugguaau

SEQ ID NO: 10121 - RNA, 19 nt, Artificial Sequence
  Description of Artificial Sequence: Synthetic oligonucleotide
  Antisense strand to SEQ ID NO: 10120
auuaccaguccuuuccagc

SEQ ID NO: 10122 - RNA, 19 nt, Artificial Sequence
  Description of Artificial Sequence: Synthetic oligonucleotide
  Sense strand starting at position 3151 of SEQ ID NO: 79
gaaugagaguaagaaucua

SEQ ID NO: 10123 - RNA, 19 nt, Artificial Sequence
  Description of Artificial Sequence: Synthetic oligonucleotide
  Antisense strand to SEQ ID NO: 10122
uagauucuuacucucauuc

SEQ ID NO: 10124 - RNA, 19 nt, Artificial Sequence
  Description of Artificial Sequence: Synthetic oligonucleotide
  Sense strand starting at position 3124 of SEQ ID NO: 79
aggaaagccuggcuggaua

SEQ ID NO: 10125 - RNA, 19 nt, Artificial Sequence
  Description of Artificial Sequence: Synthetic oligonucleotide
  Antisense strand to SEQ ID NO: 10124
uauccagccaggcuuuccu

SEQ ID NO: 10126 - RNA, 19 nt, Artificial Sequence
  Description of Artificial Sequence: Synthetic oligonucleotide
  Sense strand starting at position 3102 of SEQ ID NO: 79
ggaggagucagcugagcuu

SEQ ID NO: 10127 - RNA, 19 nt, Artificial Sequence
  Description of Artificial Sequence: Synthetic oligonucleotide
  Antisense strand to SEQ ID NO: 10126
aagcucagcugacuccucc

SEQ ID NO: 10128 - RNA, 19 nt, Artificial Sequence
  Description of Artificial Sequence: Synthetic oligonucleotide
  Sense strand starting at position 2940 of SEQ ID NO: 79
uuuaauucucauuggaaag

SEQ ID NO: 10129 - RNA, 19 nt, Artificial Sequence
  Description of Artificial Sequence: Synthetic oligonucleotide
  Antisense strand to SEQ ID NO: 10128
cuuuccaaugagaauuaaa

SEQ ID NO: 10130 - RNA, 19 nt, Artificial Sequence
  Description of Artificial Sequence: Synthetic oligonucleotide
  Sense strand starting at position 2937 of SEQ ID NO: 79
gcauuuaauucucauugga

SEQ ID NO: 10131 - RNA, 19 nt, Artificial Sequence
  Description of Artificial Sequence: Synthetic oligonucleotide
  Antisense strand to SEQ ID NO: 10130
uccaaugagaauuaaaugc

SEQ ID NO: 10132 - RNA, 19 nt, Artificial Sequence
  Description of Artificial Sequence: Synthetic oligonucleotide
  Sense strand starting at position 2888 of SEQ ID NO: 79
ccaucagcacugggaauau

SEQ ID NO: 10133 - RNA, 19 nt, Artificial Sequence
  Description of Artificial Sequence: Synthetic oligonucleotide
  Antisense strand to SEQ ID NO: 10132
auauucccagugcugaugg

SEQ ID NO: 10134 - RNA, 19 nt, Artificial Sequence
  Description of Artificial Sequence: Synthetic oligonucleotide
  Sense strand starting at position 2886 of SEQ ID NO: 79
gaccaucagcacugggaau

SEQ ID NO: 10135 - RNA, 19 nt, Artificial Sequence
  Description of Artificial Sequence: Synthetic oligonucleotide
  Antisense strand to SEQ ID NO: 10134
auucccagugcugaugguc

SEQ ID NO: 10136 - RNA, 19 nt, Artificial Sequence
  Description of Artificial Sequence: Synthetic oligonucleotide
  Sense strand starting at position 2848 of SEQ ID NO: 79
ggugaacuuccaggucuaa

SEQ ID NO: 10137 - RNA, 19 nt, Artificial Sequence
  Description of Artificial Sequence: Synthetic oligonucleotide
  Antisense strand to SEQ ID NO: 10136
uuagaccuggaaguucacc

SEQ ID NO: 10138 - RNA, 19 nt, Artificial Sequence
  Description of Artificial Sequence: Synthetic oligonucleotide
  Sense strand starting at position 2778 of SEQ ID NO: 79
uucuacugagucugaauaa

SEQ ID NO: 10139 - RNA, 19 nt, Artificial Sequence
  Description of Artificial Sequence: Synthetic oligonucleotide
  Antisense strand to SEQ ID NO: 10138
uuauucagacucaguagaa

SEQ ID NO: 10140 - RNA, 19 nt, Artificial Sequence
  Description of Artificial Sequence: Synthetic oligonucleotide
  Sense strand starting at position 2775 of SEQ ID NO: 79
gcuuucuacugagucugaa

SEQ ID NO: 10141 - RNA, 19 nt, Artificial Sequence
  Description of Artificial Sequence: Synthetic oligonucleotide
  Antisense strand to SEQ ID NO: 10140
uucagacucaguagaaagc

SEQ ID NO: 10142 - RNA, 19 nt, Artificial Sequence
  Description of Artificial Sequence: Synthetic oligonucleotide
  Sense strand starting at position 2768 of SEQ ID NO: 79
gacuauggcuuucuacuga

SEQ ID NO: 10143 - RNA, 19 nt, Artificial Sequence
  Description of Artificial Sequence: Synthetic oligonucleotide
  Antisense strand to SEQ ID NO: 10142
ucaguagaaagccauaguc

SEQ ID NO: 10144 - RNA, 19 nt, Artificial Sequence
  Description of Artificial Sequence: Synthetic oligonucleotide
  Sense strand starting at position 2740 of SEQ ID NO: 79
uuguaaguguuagcaaaua

SEQ ID NO: 10145 - RNA, 19 nt, Artificial Sequence
  Description of Artificial Sequence: Synthetic oligonucleotide
  Antisense strand to SEQ ID NO: 10144
uauuugcuaacacuuacaa

SEQ ID NO: 10146 - RNA, 19 nt, Artificial Sequence
  Description of Artificial Sequence: Synthetic oligonucleotide
  Sense strand starting at position 2637 of SEQ ID NO: 79
cauggacggcugugaugau

SEQ ID NO: 10147 - RNA, 19 nt, Artificial Sequence
  Description of Artificial Sequence: Synthetic oligonucleotide
  Antisense strand to SEQ ID NO: 10146
aucaucacagccguccaug

SEQ ID NO: 10148 - RNA, 19 nt, Artificial Sequence
  Description of Artificial Sequence: Synthetic oligonucleotide
  Sense strand starting at position 2616 of SEQ ID NO: 79
cuaggcuucuguccaauca

SEQ ID NO: 10149 - RNA, 19 nt, Artificial Sequence
  Description of Artificial Sequence: Synthetic oligonucleotide
  Antisense strand to SEQ ID NO: 10148
ugauuggacagaagccuag

SEQ ID NO: 10150 - RNA, 19 nt, Artificial Sequence
  Description of Artificial Sequence: Synthetic oligonucleotide
  Sense strand starting at position 2532 of SEQ ID NO: 79
ccuaucuaguaaguuagua

SEQ ID NO: 10151 - RNA, 19 nt, Artificial Sequence
  Description of Artificial Sequence: Synthetic oligonucleotide
  Antisense strand to SEQ ID NO: 10150
uacuaacuuacuagauagg

SEQ ID NO: 10152 - RNA, 19 nt, Artificial Sequence
  Description of Artificial Sequence: Synthetic oligonucleotide
  Sense strand starting at position 2500 of SEQ ID NO: 79
ugaaucaccuggucccaaa

SEQ ID NO: 10153 - RNA, 19 nt, Artificial Sequence
  Description of Artificial Sequence: Synthetic oligonucleotide
  Antisense strand to SEQ ID NO: 10152
uuugggaccaggugauuca

SEQ ID NO: 10154 - RNA, 19 nt, Artificial Sequence
  Description of Artificial Sequence: Synthetic oligonucleotide
  Sense strand starting at position 1320 of SEQ ID NO: 79
cgacucucuucugcuuaaa

SEQ ID NO: 10155 - RNA, 19 nt, Artificial Sequence
  Description of Artificial Sequence: Synthetic oligonucleotide
  Antisense strand to SEQ ID NO: 10154
uuuaagcagaagagagucg

SEQ ID NO: 10156 - RNA, 19 nt, Artificial Sequence
  Description of Artificial Sequence: Synthetic oligonucleotide
  Sense strand starting at position 1202 of SEQ ID NO: 79
gcagguacccaagaaguau

SEQ ID NO: 10157 - RNA, 19 nt, Artificial Sequence
  Description of Artificial Sequence: Synthetic oligonucleotide
  Antisense strand to SEQ ID NO: 10156
auacuucuuggguaccugc

SEQ ID NO: 10158 - RNA, 19 nt, Artificial Sequence
  Description of Artificial Sequence: Synthetic oligonucleotide
  Sense strand starting at position 1106 of SEQ ID NO: 79
cuuggauguguugacuaaa

SEQ ID NO: 10159 - RNA, 19 nt, Artificial Sequence
  Description of Artificial Sequence: Synthetic oligonucleotide
  Antisense strand to SEQ ID NO: 10158
uuuagucaacacauccaag

SEQ ID NO: 10160 - RNA, 19 nt, Artificial Sequence
  Description of Artificial Sequence: Synthetic oligonucleotide
  Sense strand starting at position 730 of SEQ ID NO: 79
cuuauaauuugcguacagu

SEQ ID NO: 10161 - RNA, 19 nt, Artificial Sequence
  Description of Artificial Sequence: Synthetic oligonucleotide
  Antisense strand to SEQ ID NO: 10160
acuguacgcaaauuauaag

SEQ ID NO: 10162 - RNA, 19 nt, Artificial Sequence
  Description of Artificial Sequence: Synthetic oligonucleotide
  Sense strand starting at position 695 of SEQ ID NO: 79
auguguugacuuuaggaua

SEQ ID NO: 10163 - RNA, 19 nt, Artificial Sequence
  Description of Artificial Sequence: Synthetic oligonucleotide
  Antisense strand to SEQ ID NO: 10162
uauccuaaagucaacacau

SEQ ID NO: 10164 - RNA, 19 nt, Artificial Sequence
  Description of Artificial Sequence: Synthetic oligonucleotide
  Sense strand starting at position 677 of SEQ ID NO: 79
uugaguagugguuaggaaa

SEQ ID NO: 10165 - RNA, 19 nt, Artificial Sequence
  Description of Artificial Sequence: Synthetic oligonucleotide
  Antisense strand to SEQ ID NO: 10164
uuuccuaaccacuacucaa

SEQ ID NO: 10166 - RNA, 19 nt, Artificial Sequence
  Description of Artificial Sequence: Synthetic oligonucleotide
  Sense strand starting at position 656 of SEQ ID NO: 79
cugugaaucuuccuucuug

SEQ ID NO: 10167 - RNA, 19 nt, Artificial Sequence
  Description of Artificial Sequence: Synthetic oligonucleotide
  Antisense strand to SEQ ID NO: 10166
caagaaggaagauucacag

SEQ ID NO: 10168 - RNA, 19 nt, Artificial Sequence
  Description of Artificial Sequence: Synthetic oligonucleotide
  Sense strand starting at position 292 of SEQ ID NO: 79
aacugauuggaauggcuaa

SEQ ID NO: 10169 - RNA, 19 nt, Artificial Sequence
  Description of Artificial Sequence: Synthetic oligonucleotide
  Antisense strand to SEQ ID NO: 10168
uuagccauuccaaucaguu

SEQ ID NO: 10170 - RNA, 19 nt, Artificial Sequence
  Description of Artificial Sequence: Synthetic oligonucleotide
  Sense strand starting at position 3633 of SEQ ID NO: 80
augguaucaucaucaguga

SEQ ID NO: 10171 - RNA, 19 nt, Artificial Sequence
  Description of Artificial Sequence: Synthetic oligonucleotide
  Antisense strand to SEQ ID NO: 10170
ucacugaugaugauaccau

SEQ ID NO: 10172 - RNA, 19 nt, Artificial Sequence
  Description of Artificial Sequence: Synthetic oligonucleotide
  Sense strand starting at position 3628 of SEQ ID NO: 80
uuaagaugguaucaucauc

SEQ ID NO: 10173 - RNA, 19 nt, Artificial Sequence
  Description of Artificial Sequence: Synthetic oligonucleotide
  Antisense strand to SEQ ID NO: 10172
gaugaugauaccaucuuaa

SEQ ID NO: 10174 - RNA, 19 nt, Artificial Sequence
  Description of Artificial Sequence: Synthetic oligonucleotide
  Sense strand starting at position 3625 of SEQ ID NO: 80
gacuuaagaugguaucauc

SEQ ID NO: 10175 - RNA, 19 nt, Artificial Sequence
  Description of Artificial Sequence: Synthetic oligonucleotide
  Antisense strand to SEQ ID NO: 10174
gaugauaccaucuuaaguc

SEQ ID NO: 10176 - RNA, 19 nt, Artificial Sequence
  Description of Artificial Sequence: Synthetic oligonucleotide
  Sense strand starting at position 3608 of SEQ ID NO: 80
guuuaaggauuccaggaga

SEQ ID NO: 10177 - RNA, 19 nt, Artificial Sequence
  Description of Artificial Sequence: Synthetic oligonucleotide
  Antisense strand to SEQ ID NO: 10176
ucuccuggaauccuuaaac

SEQ ID NO: 10178 - RNA, 19 nt, Artificial Sequence
  Description of Artificial Sequence: Synthetic oligonucleotide
  Sense strand starting at position 3525 of SEQ ID NO: 80
uaagaaauugcaggugaaa

SEQ ID NO: 10179 - RNA, 19 nt, Artificial Sequence
  Description of Artificial Sequence: Synthetic oligonucleotide
  Antisense strand to SEQ ID NO: 10178
uuucaccugcaauuucuua

SEQ ID NO: 10180 - RNA, 19 nt, Artificial Sequence
  Description of Artificial Sequence: Synthetic oligonucleotide
  Sense strand starting at position 3487 of SEQ ID NO: 80
guagcaaaugaauggaguu

SEQ ID NO: 10181 - RNA, 19 nt, Artificial Sequence
  Description of Artificial Sequence: Synthetic oligonucleotide
  Antisense strand to SEQ ID NO: 10180
aacuccauucauuugcuac

SEQ ID NO: 10182 - RNA, 19 nt, Artificial Sequence
  Description of Artificial Sequence: Synthetic oligonucleotide
  Sense strand starting at position 3354 of SEQ ID NO: 80
uguuuauuuagaggcguga

SEQ ID NO: 10183 - RNA, 19 nt, Artificial Sequence
  Description of Artificial Sequence: Synthetic oligonucleotide
  Antisense strand to SEQ ID NO: 10182
ucacgccucuaaauaaaca

SEQ ID NO: 10184 - RNA, 19 nt, Artificial Sequence
  Description of Artificial Sequence: Synthetic oligonucleotide
  Sense strand starting at position 3302 of SEQ ID NO: 80
ccaagaaugucuuuguauu

SEQ ID NO: 10185 - RNA, 19 nt, Artificial Sequence
  Description of Artificial Sequence: Synthetic oligonucleotide
  Antisense strand to SEQ ID NO: 10184
aauacaaagacauucuugg

SEQ ID NO: 10186 - RNA, 19 nt, Artificial Sequence
  Description of Artificial Sequence: Synthetic oligonucleotide
  Sense strand starting at position 3253 of SEQ ID NO: 80
gugacuucucaguaagguu

SEQ ID NO: 10187 - RNA, 19 nt, Artificial Sequence
  Description of Artificial Sequence: Synthetic oligonucleotide
  Antisense strand to SEQ ID NO: 10186
aaccuuacugagaagucac

SEQ ID NO: 10188 - RNA, 19 nt, Artificial Sequence
  Description of Artificial Sequence: Synthetic oligonucleotide
  Sense strand starting at position 3252 of SEQ ID NO: 80
ugugacuucucaguaaggu

SEQ ID NO: 10189 - RNA, 19 nt, Artificial Sequence
  Description of Artificial Sequence: Synthetic oligonucleotide
  Antisense strand to SEQ ID NO: 10188
accuuacugagaagucaca

SEQ ID NO: 10190 - RNA, 19 nt, Artificial Sequence
  Description of Artificial Sequence: Synthetic oligonucleotide
  Sense strand starting at position 3249 of SEQ ID NO: 80
ucaugugacuucucaguaa

SEQ ID NO: 10191 - RNA, 19 nt, Artificial Sequence
  Description of Artificial Sequence: Synthetic oligonucleotide
  Antisense strand to SEQ ID NO: 10190
uuacugagaagucacauga

SEQ ID NO: 10192 - RNA, 19 nt, Artificial Sequence
  Description of Artificial Sequence: Synthetic oligonucleotide
  Sense strand starting at position 3245 of SEQ ID NO: 80
gagaucaugugacuucuca

SEQ ID NO: 10193 - RNA, 19 nt, Artificial Sequence
  Description of Artificial Sequence: Synthetic oligonucleotide
  Antisense strand to SEQ ID NO: 10192
ugagaagucacaugaucuc

SEQ ID NO: 10194 - RNA, 19 nt, Artificial Sequence
  Description of Artificial Sequence: Synthetic oligonucleotide
  Sense strand starting at position 3243 of SEQ ID NO: 80
gagagaucaugugacuucu

SEQ ID NO: 10195 - RNA, 19 nt, Artificial Sequence
  Description of Artificial Sequence: Synthetic oligonucleotide
  Antisense strand to SEQ ID NO: 10194
agaagucacaugaucucuc

SEQ ID NO: 10196 - RNA, 19 nt, Artificial Sequence
  Description of Artificial Sequence: Synthetic oligonucleotide
  Sense strand starting at position 3087 of SEQ ID NO: 80
cucaguggcccuugggaaa

SEQ ID NO: 10197 - RNA, 19 nt, Artificial Sequence
  Description of Artificial Sequence: Synthetic oligonucleotide
  Antisense strand to SEQ ID NO: 10196
uuucccaagggccacugag

SEQ ID NO: 10198 - RNA, 19 nt, Artificial Sequence
  Description of Artificial Sequence: Synthetic oligonucleotide
  Sense strand starting at position 3074 of SEQ ID NO: 80
acaggagggucuucucagu

SEQ ID NO: 10199 - RNA, 19 nt, Artificial Sequence
  Description of Artificial Sequence: Synthetic oligonucleotide
  Antisense strand to SEQ ID NO: 10198
acugagaagacccuccugu

SEQ ID NO: 10200 - RNA, 19 nt, Artificial Sequence
  Description of Artificial Sequence: Synthetic oligonucleotide
  Sense strand starting at position 3024 of SEQ ID NO: 80
uccgcaggcucuguuugaa

SEQ ID NO: 10201 - RNA, 19 nt, Artificial Sequence
  Description of Artificial Sequence: Synthetic oligonucleotide
  Antisense strand to SEQ ID NO: 10200
uucaaacagagccugcgga

SEQ ID NO: 10202 - RNA, 19 nt, Artificial Sequence
  Description of Artificial Sequence: Synthetic oligonucleotide
  Sense strand starting at position 3005 of SEQ ID NO: 80
gcaacuucgcagugagaag

SEQ ID NO: 10203 - RNA, 19 nt, Artificial Sequence
  Description of Artificial Sequence: Synthetic oligonucleotide
  Antisense strand to SEQ ID NO: 10202
cuucucacugcgaaguugc

SEQ ID NO: 10204 - RNA, 19 nt, Artificial Sequence
  Description of Artificial Sequence: Synthetic oligonucleotide
  Sense strand starting at position 2993 of SEQ ID NO: 80
ugaauucucugggcaacuu

SEQ ID NO: 10205 - RNA, 19 nt, Artificial Sequence
  Description of Artificial Sequence: Synthetic oligonucleotide
  Antisense strand to SEQ ID NO: 10204
aaguugcccagagaauuca

SEQ ID NO: 10206 - RNA, 19 nt, Artificial Sequence
  Description of Artificial Sequence: Synthetic oligonucleotide
  Sense strand starting at position 2992 of SEQ ID NO: 80
cugaauucucugggcaacu

SEQ ID NO: 10207 - RNA, 19 nt, Artificial Sequence
  Description of Artificial Sequence: Synthetic oligonucleotide
  Antisense strand to SEQ ID NO: 10206
aguugcccagagaauucag

SEQ ID NO: 10208 - RNA, 19 nt, Artificial Sequence
  Description of Artificial Sequence: Synthetic oligonucleotide
  Sense strand starting at position 2952 of SEQ ID NO: 80
accagcucugauggaauaa

SEQ ID NO: 10209 - RNA, 19 nt, Artificial Sequence
  Description of Artificial Sequence: Synthetic oligonucleotide
  Antisense strand to SEQ ID NO: 10208
uuauuccaucagagcuggu

SEQ ID NO: 10210 - RNA, 19 nt, Artificial Sequence
  Description of Artificial Sequence: Synthetic oligonucleotide
  Sense strand starting at position 2949 of SEQ ID NO: 80
ggaaccagcucugauggaa

SEQ ID NO: 10211 - RNA, 19 nt, Artificial Sequence
  Description of Artificial Sequence: Synthetic oligonucleotide
  Antisense strand to SEQ ID NO: 10210
uuccaucagagcugguucc

SEQ ID NO: 10212 - RNA, 19 nt, Artificial Sequence
  Description of Artificial Sequence: Synthetic oligonucleotide
  Sense strand starting at position 2837 of SEQ ID NO: 80
gcgagagucauaugagaca

SEQ ID NO: 10213 - RNA, 19 nt, Artificial Sequence
  Description of Artificial Sequence: Synthetic oligonucleotide
  Antisense strand to SEQ ID NO: 10212
ugucucauaugacucucgc

SEQ ID NO: 10214 - RNA, 19 nt, Artificial Sequence
  Description of Artificial Sequence: Synthetic oligonucleotide
  Sense strand starting at position 2833 of SEQ ID NO: 80
uggugcgagagucauauga

SEQ ID NO: 10215 - RNA, 19 nt, Artificial Sequence
  Description of Artificial Sequence: Synthetic oligonucleotide
  Antisense strand to SEQ ID NO: 10214
ucauaugacucucgcacca

SEQ ID NO: 10216 - RNA, 19 nt, Artificial Sequence
  Description of Artificial Sequence: Synthetic oligonucleotide
  Sense strand starting at position 2608 of SEQ ID NO: 80
ucucuuuagagacguaaag

SEQ ID NO: 10217 - RNA, 19 nt, Artificial Sequence
  Description of Artificial Sequence: Synthetic oligonucleotide
  Antisense strand to SEQ ID NO: 10216
cuuuacgucucuaaagaga

SEQ ID NO: 10218 - RNA, 19 nt, Artificial Sequence
  Description of Artificial Sequence: Synthetic oligonucleotide
  Sense strand starting at position 2557 of SEQ ID NO: 80
gguggcaucuggagggaaa

SEQ ID NO: 10219 - RNA, 19 nt, Artificial Sequence
  Description of Artificial Sequence: Synthetic oligonucleotide
  Antisense strand to SEQ ID NO: 10218
uuucccuccagaugccacc

SEQ ID NO: 10220 - RNA, 19 nt, Artificial Sequence
  Description of Artificial Sequence: Synthetic oligonucleotide
  Sense strand starting at position 2371 of SEQ ID NO: 80
gucucugugucugucaaca

SEQ ID NO: 10221 - RNA, 19 nt, Artificial Sequence
  Description of Artificial Sequence: Synthetic oligonucleotide
  Antisense strand to SEQ ID NO: 10220
uguugacagacacagagac

SEQ ID NO: 10222 - RNA, 19 nt, Artificial Sequence
  Description of Artificial Sequence: Synthetic oligonucleotide
  Sense strand starting at position 2318 of SEQ ID NO: 80
gugggagucuuugucucca

SEQ ID NO: 10223 - RNA, 19 nt, Artificial Sequence
  Description of Artificial Sequence: Synthetic oligonucleotide
  Antisense strand to SEQ ID NO: 10222
uggagacaaagacucccac

SEQ ID NO: 10224 - RNA, 19 nt, Artificial Sequence
  Description of Artificial Sequence: Synthetic oligonucleotide
  Sense strand starting at position 2280 of SEQ ID NO: 80
uugucuuuaccgucggcau

SEQ ID NO: 10225 - RNA, 19 nt, Artificial Sequence
  Description of Artificial Sequence: Synthetic oligonucleotide
  Antisense strand to SEQ ID NO: 10224
augccgacgguaaagacaa

SEQ ID NO: 10226 - RNA, 19 nt, Artificial Sequence
  Description of Artificial Sequence: Synthetic oligonucleotide
  Sense strand starting at position 1115 of SEQ ID NO: 80
ugcugagaccugcguuuaa

SEQ ID NO: 10227 - RNA, 19 nt, Artificial Sequence
  Description of Artificial Sequence: Synthetic oligonucleotide
  Antisense strand to SEQ ID NO: 10226
uuaaacgcaggucucagca

SEQ ID NO: 10228 - RNA, 19 nt, Artificial Sequence
  Description of Artificial Sequence: Synthetic oligonucleotide
  Sense strand starting at position 1008 of SEQ ID NO: 80
cccagaggccuuuguaaag

SEQ ID NO: 10229 - RNA, 19 nt, Artificial Sequence
  Description of Artificial Sequence: Synthetic oligonucleotide
  Antisense strand to SEQ ID NO: 10228
cuuuacaaaggccucuggg

SEQ ID NO: 10230 - RNA, 19 nt, Artificial Sequence
  Description of Artificial Sequence: Synthetic oligonucleotide
  Sense strand starting at position 952 of SEQ ID NO: 80
cccuuccuggcccaagaau

SEQ ID NO: 10231 - RNA, 19 nt, Artificial Sequence
  Description of Artificial Sequence: Synthetic oligonucleotide
  Antisense strand to SEQ ID NO: 10230
auucuugggccaggaaggg

SEQ ID NO: 10232 - RNA, 19 nt, Artificial Sequence
  Description of Artificial Sequence: Synthetic oligonucleotide
  Sense strand starting at position 917 of SEQ ID NO: 80
accugagcggucugacuuu

SEQ ID NO: 10233 - RNA, 19 nt, Artificial Sequence
  Description of Artificial Sequence: Synthetic oligonucleotide
  Antisense strand to SEQ ID NO: 10232
aaagucagaccgcucaggu

SEQ ID NO: 10234 - RNA, 19 nt, Artificial Sequence
  Description of Artificial Sequence: Synthetic oligonucleotide
  Sense strand starting at position 802 of SEQ ID NO: 80
auguacaugagaugucaga

SEQ ID NO: 10235 - RNA, 19 nt, Artificial Sequence
  Description of Artificial Sequence: Synthetic oligonucleotide
  Antisense strand to SEQ ID NO: 10234
ucugacaucucauguacau

SEQ ID NO: 10236 - RNA, 19 nt, Artificial Sequence
  Description of Artificial Sequence: Synthetic oligonucleotide
  Sense strand starting at position 800 of SEQ ID NO: 80
ugauguacaugagauguca

SEQ ID NO: 10237 - RNA, 19 nt, Artificial Sequence
  Description of Artificial Sequence: Synthetic oligonucleotide
  Antisense strand to SEQ ID NO: 10236
ugacaucucauguacauca

SEQ ID NO: 10238 - RNA, 19 nt, Artificial Sequence
  Description of Artificial Sequence: Synthetic oligonucleotide
  Sense strand starting at position 453 of SEQ ID NO: 80
gccucuucugagggaauuc

SEQ ID NO: 10239 - RNA, 19 nt, Artificial Sequence
  Description of Artificial Sequence: Synthetic oligonucleotide
  Antisense strand to SEQ ID NO: 10238
gaauucccucagaagaggc

SEQ ID NO: 10240 - RNA, 19 nt, Artificial Sequence
  Description of Artificial Sequence: Synthetic oligonucleotide
  Sense strand starting at position 280 of SEQ ID NO: 80
gcuuaaguauuugcugaau

SEQ ID NO: 10241 - RNA, 19 nt, Artificial Sequence
  Description of Artificial Sequence: Synthetic oligonucleotide
  Antisense strand to SEQ ID NO: 10240
auucagcaaauacuuaagc

SEQ ID NO: 10242 - RNA, 19 nt, Artificial Sequence
  Description of Artificial Sequence: Synthetic oligonucleotide
  Sense strand starting at position 225 of SEQ ID NO: 80
gcugauuuacuguggcauu

SEQ ID NO: 10243 - RNA, 19 nt, Artificial Sequence
  Description of Artificial Sequence: Synthetic oligonucleotide
  Antisense strand to SEQ ID NO: 10242
aaugccacaguaaaucagc

SEQ ID NO: 10244 - RNA, 19 nt, Artificial Sequence
  Description of Artificial Sequence: Synthetic oligonucleotide
  Sense strand starting at position 141 of SEQ ID NO: 80
ucaagucuacacugugaau

SEQ ID NO: 10245 - RNA, 19 nt, Artificial Sequence
  Description of Artificial Sequence: Synthetic oligonucleotide
  Antisense strand to SEQ ID NO: 10244
auucacaguguagacuuga

SEQ ID NO: 10246 - RNA, 19 nt, Artificial Sequence
  Description of Artificial Sequence: Synthetic oligonucleotide
  Sense strand starting at position 122 of SEQ ID NO: 80
ccuuaugaauagcuugauu

SEQ ID NO: 10247 - RNA, 19 nt, Artificial Sequence
  Description of Artificial Sequence: Synthetic oligonucleotide
  Antisense strand to SEQ ID NO: 10246
aaucaagcuauucauaagg

SEQ ID NO: 10248 - RNA, 19 nt, Artificial Sequence
  Description of Artificial Sequence: Synthetic oligonucleotide
  Sense strand starting at position 96 of SEQ ID NO: 80
acaggugauugcgucuuaa

SEQ ID NO: 10249 - RNA, 19 nt, Artificial Sequence
  Description of Artificial Sequence: Synthetic oligonucleotide
  Antisense strand to SEQ ID NO: 10248
uuaagacgcaaucaccugu

SEQ ID NO: 10250 - RNA, 19 nt, Artificial Sequence
  Description of Artificial Sequence: Synthetic oligonucleotide
  Sense strand starting at position 133 of SEQ ID NO: 81
cucgguauuucguugucaa

SEQ ID NO: 10251 - RNA, 19 nt, Artificial Sequence
  Description of Artificial Sequence: Synthetic oligonucleotide
  Antisense strand to SEQ ID NO: 10250
uugacaacgaaauaccgag

SEQ ID NO: 10252 - RNA, 19 nt, Artificial Sequence
  Description of Artificial Sequence: Synthetic oligonucleotide
  Sense strand starting at position 134 of SEQ ID NO: 81
ucgguauuucguugucaag

SEQ ID NO: 10253 - RNA, 19 nt, Artificial Sequence
  Description of Artificial Sequence: Synthetic oligonucleotide
  Antisense strand to SEQ ID NO: 10252
cuugacaacgaaauaccga

SEQ ID NO: 10254 - RNA, 19 nt, Artificial Sequence
  Description of Artificial Sequence: Synthetic oligonucleotide
  Sense strand starting at position 681 of SEQ ID NO: 81
gggauauggcagcgcagau

SEQ ID NO: 10255 - RNA, 19 nt, Artificial Sequence
  Description of Artificial Sequence: Synthetic oligonucleotide
  Antisense strand to SEQ ID NO: 10254
aucugcgcugccauauccc

SEQ ID NO: 10256 - RNA, 19 nt, Artificial Sequence
  Description of Artificial Sequence: Synthetic oligonucleotide
  Sense strand starting at position 724 of SEQ ID NO: 81
agacgccuuacaggucaua

SEQ ID NO: 10257 - RNA, 19 nt, Artificial Sequence
  Description of Artificial Sequence: Synthetic oligonucleotide
  Antisense strand to SEQ ID NO: 10256
uaugaccuguaaggcgucu

SEQ ID NO: 10258 - RNA, 19 nt, Artificial Sequence
  Description of Artificial Sequence: Synthetic oligonucleotide
  Sense strand starting at position 950 of SEQ ID NO: 81
gcggcuaucauagugcaua

SEQ ID NO: 10259 - RNA, 19 nt, Artificial Sequence
  Description of Artificial Sequence: Synthetic oligonucleotide
  Antisense strand to SEQ ID NO: 10258
uaugcacuaugauagccgc

SEQ ID NO: 10260 - RNA, 19 nt, Artificial Sequence
  Description of Artificial Sequence: Synthetic oligonucleotide
  Sense strand starting at position 980 of SEQ ID NO: 81
gccagcuuaguaugagaaa

SEQ ID NO: 10261 - RNA, 19 nt, Artificial Sequence
  Description of Artificial Sequence: Synthetic oligonucleotide
  Antisense strand to SEQ ID NO: 10260
uuucucauacuaagcuggc

SEQ ID NO: 10262 - RNA, 19 nt, Artificial Sequence
  Description of Artificial Sequence: Synthetic oligonucleotide
  Sense strand starting at position 1005 of SEQ ID NO: 81
uacaguuauuccgucuuga

SEQ ID NO: 10263 - RNA, 19 nt, Artificial Sequence
  Description of Artificial Sequence: Synthetic oligonucleotide
  Antisense strand to SEQ ID NO: 10262
ucaagacggaauaacugua

SEQ ID NO: 10264 - RNA, 19 nt, Artificial Sequence
  Description of Artificial Sequence: Synthetic oligonucleotide
  Sense strand starting at position 2081 of SEQ ID NO: 81
ugacuuaaugcuggaacca

SEQ ID NO: 10265 - RNA, 19 nt, Artificial Sequence
  Description of Artificial Sequence: Synthetic oligonucleotide
  Antisense strand to SEQ ID NO: 10264
ugguuccagcauuaaguca

SEQ ID NO: 10266 - RNA, 19 nt, Artificial Sequence
  Description of Artificial Sequence: Synthetic oligonucleotide
  Sense strand starting at position 2221 of SEQ ID NO: 81
gcaggaucccuuugucuac

SEQ ID NO: 10267 - RNA, 19 nt, Artificial Sequence
  Description of Artificial Sequence: Synthetic oligonucleotide
  Antisense strand to SEQ ID NO: 10266
guagacaaagggauccugc

SEQ ID NO: 10268 - RNA, 19 nt, Artificial Sequence
  Description of Artificial Sequence: Synthetic oligonucleotide
  Sense strand starting at position 2248 of SEQ ID NO: 81
gugagucucuugcucagag

SEQ ID NO: 10269 - RNA, 19 nt, Artificial Sequence
  Description of Artificial Sequence: Synthetic oligonucleotide
  Antisense strand to SEQ ID NO: 10268
cucugagcaagagacucac

SEQ ID NO: 10270 - RNA, 19 nt, Artificial Sequence
  Description of Artificial Sequence: Synthetic oligonucleotide
  Sense strand starting at position 2250 of SEQ ID NO: 81
gagucucuugcucagagca

SEQ ID NO: 10271 - RNA, 19 nt, Artificial Sequence
  Description of Artificial Sequence: Synthetic oligonucleotide
  Antisense strand to SEQ ID NO: 10270
ugcucugagcaagagacuc

SEQ ID NO: 10272 - RNA, 19 nt, Artificial Sequence
  Description of Artificial Sequence: Synthetic oligonucleotide
  Sense strand starting at position 2365 of SEQ ID NO: 81
ggacaucagccugggauga

SEQ ID NO: 10273 - RNA, 19 nt, Artificial Sequence
  Description of Artificial Sequence: Synthetic oligonucleotide
  Antisense strand to SEQ ID NO: 10272
ucaucccaggcugaugucc

SEQ ID NO: 10274 - RNA, 19 nt, Artificial Sequence
  Description of Artificial Sequence: Synthetic oligonucleotide
  Sense strand starting at position 2484 of SEQ ID NO: 81
agagaucucuuguuucuca

SEQ ID NO: 10275 - RNA, 19 nt, Artificial Sequence
  Description of Artificial Sequence: Synthetic oligonucleotide
  Antisense strand to SEQ ID NO: 10274
ugagaaacaagagaucucu

SEQ ID NO: 10276 - RNA, 19 nt, Artificial Sequence
  Description of Artificial Sequence: Synthetic oligonucleotide
  Sense strand starting at position 2537 of SEQ ID NO: 81
gcagaucuaagcugggaau

SEQ ID NO: 10277 - RNA, 19 nt, Artificial Sequence
  Description of Artificial Sequence: Synthetic oligonucleotide
  Antisense strand to SEQ ID NO: 10276
auucccagcuuagaucugc

SEQ ID NO: 10278 - RNA, 19 nt, Artificial Sequence
  Description of Artificial Sequence: Synthetic oligonucleotide
  Sense strand starting at position 2617 of SEQ ID NO: 81
ucauuaguguccucaucug

SEQ ID NO: 10279 - RNA, 19 nt, Artificial Sequence
  Description of Artificial Sequence: Synthetic oligonucleotide
  Antisense strand to SEQ ID NO: 10278
cagaugaggacacuaauga

SEQ ID NO: 10280 - RNA, 19 nt, Artificial Sequence
  Description of Artificial Sequence: Synthetic oligonucleotide
  Sense strand starting at position 2663 of SEQ ID NO: 81
ugggucuuucuauguauuu

SEQ ID NO: 10281 - RNA, 19 nt, Artificial Sequence
  Description of Artificial Sequence: Synthetic oligonucleotide
  Antisense strand to SEQ ID NO: 10280
aaauacauagaaagaccca

SEQ ID NO: 10282 - RNA, 19 nt, Artificial Sequence
  Description of Artificial Sequence: Synthetic oligonucleotide
  Sense strand starting at position 2674 of SEQ ID NO: 81
auguauuugagguguguuu

SEQ ID NO: 10283 - RNA, 19 nt, Artificial Sequence
  Description of Artificial Sequence: Synthetic oligonucleotide
  Antisense strand to SEQ ID NO: 10282
aaacacaccucaaauacau

SEQ ID NO: 10284 - RNA, 19 nt, Artificial Sequence
  Description of Artificial Sequence: Synthetic oligonucleotide
  Sense strand starting at position 2676 of SEQ ID NO: 81
guauuugagguguguuuca

SEQ ID NO: 10285 - RNA, 19 nt, Artificial Sequence
  Description of Artificial Sequence: Synthetic oligonucleotide
  Antisense strand to SEQ ID NO: 10284
ugaaacacaccucaaauac

SEQ ID NO: 10286 - RNA, 19 nt, Artificial Sequence
  Description of Artificial Sequence: Synthetic oligonucleotide
  Sense strand starting at position 2794 of SEQ ID NO: 81
agcagaagggcugguguuu

SEQ ID NO: 10287 - RNA, 19 nt, Artificial Sequence
  Description of Artificial Sequence: Synthetic oligonucleotide
  Antisense strand to SEQ ID NO: 10286
aaacaccagcccuucugcu

SEQ ID NO: 10288 - RNA, 19 nt, Artificial Sequence
  Description of Artificial Sequence: Synthetic oligonucleotide
  Sense strand starting at position 2952 of SEQ ID NO: 81
agaacugcaucuucuaaga

SEQ ID NO: 10289 - RNA, 19 nt, Artificial Sequence
  Description of Artificial Sequence: Synthetic oligonucleotide
  Antisense strand to SEQ ID NO: 10288
ucuuagaagaugcaguucu

SEQ ID NO: 10290 - RNA, 19 nt, Artificial Sequence
  Description of Artificial Sequence: Synthetic oligonucleotide
  Sense strand starting at position 2999 of SEQ ID NO: 81
ggauuagagcaguagcuua

SEQ ID NO: 10291 - RNA, 19 nt, Artificial Sequence
  Description of Artificial Sequence: Synthetic oligonucleotide
  Antisense strand to SEQ ID NO: 10290
uaagcuacugcucuaaucc

SEQ ID NO: 10292 - RNA, 19 nt, Artificial Sequence
  Description of Artificial Sequence: Synthetic oligonucleotide
  Sense strand starting at position 3004 of SEQ ID NO: 81
agagcaguagcuuagaauu

SEQ ID NO: 10293 - RNA, 19 nt, Artificial Sequence
  Description of Artificial Sequence: Synthetic oligonucleotide
  Antisense strand to SEQ ID NO: 10292
aauucuaagcuacugcucu

SEQ ID NO: 10294 - RNA, 19 nt, Artificial Sequence
  Description of Artificial Sequence: Synthetic oligonucleotide
  Sense strand starting at position 3093 of SEQ ID NO: 81
cucacuucccauggauuga

SEQ ID NO: 10295 - RNA, 19 nt, Artificial Sequence
  Description of Artificial Sequence: Synthetic oligonucleotide
  Antisense strand to SEQ ID NO: 10294
ucaauccaugggaagugag

SEQ ID NO: 10296 - RNA, 19 nt, Artificial Sequence
  Description of Artificial Sequence: Synthetic oligonucleotide
  Sense strand starting at position 3300 of SEQ ID NO: 81
agaguugggcuguaaauca

SEQ ID NO: 10297 - RNA, 19 nt, Artificial Sequence
  Description of Artificial Sequence: Synthetic oligonucleotide
  Antisense strand to SEQ ID NO: 10296
ugauuuacagcccaacucu

SEQ ID NO: 10298 - RNA, 19 nt, Artificial Sequence
  Description of Artificial Sequence: Synthetic oligonucleotide
  Sense strand starting at position 3354 of SEQ ID NO: 81
aggagucauuaagccguua

SEQ ID NO: 10299 - RNA, 19 nt, Artificial Sequence
  Description of Artificial Sequence: Synthetic oligonucleotide
  Antisense strand to SEQ ID NO: 10298
uaacggcuuaaugacuccu

SEQ ID NO: 10300 - RNA, 19 nt, Artificial Sequence
  Description of Artificial Sequence: Synthetic oligonucleotide
  Sense strand starting at position 3359 of SEQ ID NO: 81
ucauuaagccguuauuaaa

SEQ ID NO: 10301 - RNA, 19 nt, Artificial Sequence
  Description of Artificial Sequence: Synthetic oligonucleotide
  Antisense strand to SEQ ID NO: 10300
uuuaauaacggcuuaauga

SEQ ID NO: 10302 - RNA, 19 nt, Artificial Sequence
  Description of Artificial Sequence: Synthetic oligonucleotide
  Sense strand starting at position 3392 of SEQ ID NO: 81
ucugaagacuuauugguuu

SEQ ID NO: 10303 - RNA, 19 nt, Artificial Sequence
  Description of Artificial Sequence: Synthetic oligonucleotide
  Antisense strand to SEQ ID NO: 10302
aaaccaauaagucuucaga

SEQ ID NO: 10304 - RNA, 19 nt, Artificial Sequence
  Description of Artificial Sequence: Synthetic oligonucleotide
  Sense strand starting at position 3461 of SEQ ID NO: 81
gcagacuggccagagagau

SEQ ID NO: 10305 - RNA, 19 nt, Artificial Sequence
  Description of Artificial Sequence: Synthetic oligonucleotide
  Antisense strand to SEQ ID NO: 10304
aucucucuggccagucugc

SEQ ID NO: 10306 - RNA, 19 nt, Artificial Sequence
  Description of Artificial Sequence: Synthetic oligonucleotide
  Sense strand starting at position 3511 of SEQ ID NO: 81
gagggaggcucggcuugaa

SEQ ID NO: 10307 - RNA, 19 nt, Artificial Sequence
  Description of Artificial Sequence: Synthetic oligonucleotide
  Antisense strand to SEQ ID NO: 10306
uucaagccgagccucccuc

SEQ ID NO: 10308 - RNA, 19 nt, Artificial Sequence
  Description of Artificial Sequence: Synthetic oligonucleotide
  Sense strand starting at position 3514 of SEQ ID NO: 81
ggaggcucggcuugaaauu

SEQ ID NO: 10309 - RNA, 19 nt, Artificial Sequence
  Description of Artificial Sequence: Synthetic oligonucleotide
  Antisense strand to SEQ ID NO: 10308
aauuucaagccgagccucc

SEQ ID NO: 10310 - RNA, 19 nt, Artificial Sequence
  Description of Artificial Sequence: Synthetic oligonucleotide
  Sense strand starting at position 3515 of SEQ ID NO: 81
gaggcucggcuugaaauua

SEQ ID NO: 10311 - RNA, 19 nt, Artificial Sequence
  Description of Artificial Sequence: Synthetic oligonucleotide
  Antisense strand to SEQ ID NO: 10310
uaauuucaagccgagccuc

SEQ ID NO: 10312 - RNA, 19 nt, Artificial Sequence
  Description of Artificial Sequence: Synthetic oligonucleotide
  Sense strand starting at position 3558 of SEQ ID NO: 81
gggauccuuucuccaggau

SEQ ID NO: 10313 - RNA, 19 nt, Artificial Sequence
  Description of Artificial Sequence: Synthetic oligonucleotide
  Antisense strand to SEQ ID NO: 10312
auccuggagaaaggauccc

SEQ ID NO: 10314 - RNA, 19 nt, Artificial Sequence
  Description of Artificial Sequence: Synthetic oligonucleotide
  Sense strand starting at position 3640 of SEQ ID NO: 81
ucaauaguuguugauugga

SEQ ID NO: 10315 - RNA, 19 nt, Artificial Sequence
  Description of Artificial Sequence: Synthetic oligonucleotide
  Antisense strand to SEQ ID NO: 10314
uccaaucaacaacuauuga

SEQ ID NO: 10316 - RNA, 19 nt, Artificial Sequence
  Description of Artificial Sequence: Synthetic oligonucleotide
  Sense strand starting at position 3642 of SEQ ID NO: 81
aauaguuguugauuggaua

SEQ ID NO: 10317 - RNA, 19 nt, Artificial Sequence
  Description of Artificial Sequence: Synthetic oligonucleotide
  Antisense strand to SEQ ID NO: 10316
uauccaaucaacaacuauu

SEQ ID NO: 10318 - RNA, 19 nt, Artificial Sequence
  Description of Artificial Sequence: Synthetic oligonucleotide
  Sense strand starting at position 3643 of SEQ ID NO: 81
auaguuguugauuggauau

SEQ ID NO: 10319 - RNA, 19 nt, Artificial Sequence
  Description of Artificial Sequence: Synthetic oligonucleotide
  Antisense strand to SEQ ID NO: 10318
auauccaaucaacaacuau

SEQ ID NO: 10320 - RNA, 19 nt, Artificial Sequence
  Description of Artificial Sequence: Synthetic oligonucleotide
  Sense strand starting at position 3689 of SEQ ID NO: 81
ugcgaaauuggauauuguu

SEQ ID NO: 10321 - RNA, 19 nt, Artificial Sequence
  Description of Artificial Sequence: Synthetic oligonucleotide
  Antisense strand to SEQ ID NO: 10320
aacaauauccaauuucgca

SEQ ID NO: 10322 - RNA, 19 nt, Artificial Sequence
  Description of Artificial Sequence: Synthetic oligonucleotide
  Sense strand starting at position 3698 of SEQ ID NO: 81
ggauauuguugacuuucua

SEQ ID NO: 10323 - RNA, 19 nt, Artificial Sequence
  Description of Artificial Sequence: Synthetic oligonucleotide
  Antisense strand to SEQ ID NO: 10322
uagaaagucaacaauaucc

SEQ ID NO: 10324 - RNA, 19 nt, Artificial Sequence
  Description of Artificial Sequence: Synthetic oligonucleotide
  Sense strand starting at position 3758 of SEQ ID NO: 81
ucaagaaguuuacuaugga

SEQ ID NO: 10325 - RNA, 19 nt, Artificial Sequence
  Description of Artificial Sequence: Synthetic oligonucleotide
  Antisense strand to SEQ ID NO: 10324
uccauaguaaacuucuuga

SEQ ID NO: 10326 - RNA, 19 nt, Artificial Sequence
  Description of Artificial Sequence: Synthetic oligonucleotide
  Sense strand starting at position 3830 of SEQ ID NO: 81
ggaucaaaggcugagucuu

SEQ ID NO: 10327 - RNA, 19 nt, Artificial Sequence
  Description of Artificial Sequence: Synthetic oligonucleotide
  Antisense strand to SEQ ID NO: 10326
aagacucagccuuugaucc

SEQ ID NO: 10328 - RNA, 19 nt, Artificial Sequence
  Description of Artificial Sequence: Synthetic oligonucleotide
  Sense strand starting at position 3973 of SEQ ID NO: 81
ugaugauggugauuaccau

SEQ ID NO: 10329 - RNA, 19 nt, Artificial Sequence
  Description of Artificial Sequence: Synthetic oligonucleotide
  Antisense strand to SEQ ID NO: 10328
augguaaucaccaucauca

SEQ ID NO: 10330 - RNA, 19 nt, Artificial Sequence
  Description of Artificial Sequence: Synthetic oligonucleotide
  Sense strand starting at position 16 of SEQ ID NO: 82
gggugagguauagguauau

SEQ ID NO: 10331 - RNA, 19 nt, Artificial Sequence
  Description of Artificial Sequence: Synthetic oligonucleotide
  Antisense strand to SEQ ID NO: 10330
auauaccuauaccucaccc

SEQ ID NO: 10332 - RNA, 19 nt, Artificial Sequence
  Description of Artificial Sequence: Synthetic oligonucleotide
  Sense strand starting at position 112 of SEQ ID NO: 82
aggugaaauugugcacuuu

SEQ ID NO: 10333 - RNA, 19 nt, Artificial Sequence
  Description of Artificial Sequence: Synthetic oligonucleotide
  Antisense strand to SEQ ID NO: 10332
aaagugcacaauuucaccu

SEQ ID NO: 10334 - RNA, 19 nt, Artificial Sequence
  Description of Artificial Sequence: Synthetic oligonucleotide
  Sense strand starting at position 113 of SEQ ID NO: 82
ggugaaauugugcacuuuc

SEQ ID NO: 10335 - RNA, 19 nt, Artificial Sequence
  Description of Artificial Sequence: Synthetic oligonucleotide
  Antisense strand to SEQ ID NO: 10334
gaaagugcacaauuucacc

SEQ ID NO: 10336 - RNA, 19 nt, Artificial Sequence
  Description of Artificial Sequence: Synthetic oligonucleotide
  Sense strand starting at position 141 of SEQ ID NO: 82
gacagugucucauugaaag

SEQ ID NO: 10337 - RNA, 19 nt, Artificial Sequence
  Description of Artificial Sequence: Synthetic oligonucleotide
  Antisense strand to SEQ ID NO: 10336
cuuucaaugagacacuguc

SEQ ID NO: 10338 - RNA, 19 nt, Artificial Sequence
  Description of Artificial Sequence: Synthetic oligonucleotide
  Sense strand starting at position 322 of SEQ ID NO: 82
uggugucacacuugaugau

SEQ ID NO: 10339 - RNA, 19 nt, Artificial Sequence
  Description of Artificial Sequence: Synthetic oligonucleotide
  Antisense strand to SEQ ID NO: 10338
aucaucaagugugacacca

SEQ ID NO: 10340 - RNA, 19 nt, Artificial Sequence
  Description of Artificial Sequence: Synthetic oligonucleotide
  Sense strand starting at position 332 of SEQ ID NO: 82
cuugaugaucaagguguca

SEQ ID NO: 10341 - RNA, 19 nt, Artificial Sequence
  Description of Artificial Sequence: Synthetic oligonucleotide
  Antisense strand to SEQ ID NO: 10340
ugacaccuugaucaucaag

SEQ ID NO: 10342 - RNA, 19 nt, Artificial Sequence
  Description of Artificial Sequence: Synthetic oligonucleotide
  Sense strand starting at position 483 of SEQ ID NO: 82
cgauacugccagugugaaa

SEQ ID NO: 10343 - RNA, 19 nt, Artificial Sequence
  Description of Artificial Sequence: Synthetic oligonucleotide
  Antisense strand to SEQ ID NO: 10342
uuucacacuggcaguaucg

SEQ ID NO: 10344 - RNA, 19 nt, Artificial Sequence
  Description of Artificial Sequence: Synthetic oligonucleotide
  Sense strand starting at position 681 of SEQ ID NO: 82
aagcgagagaucugguucu

SEQ ID NO: 10345 - RNA, 19 nt, Artificial Sequence
  Description of Artificial Sequence: Synthetic oligonucleotide
  Antisense strand to SEQ ID NO: 10344
agaaccagaucucucgcuu

SEQ ID NO: 10346 - RNA, 19 nt, Artificial Sequence
  Description of Artificial Sequence: Synthetic oligonucleotide
  Sense strand starting at position 757 of SEQ ID NO: 82
ccaugaugugguuauugua

SEQ ID NO: 10347 - RNA, 19 nt, Artificial Sequence
  Description of Artificial Sequence: Synthetic oligonucleotide
  Antisense strand to SEQ ID NO: 10346
uacaauaaccacaucaugg

SEQ ID NO: 10348 - RNA, 19 nt, Artificial Sequence
  Description of Artificial Sequence: Synthetic oligonucleotide
  Sense strand starting at position 997 of SEQ ID NO: 82
gguccaguagugcugugua

SEQ ID NO: 10349 - RNA, 19 nt, Artificial Sequence
  Description of Artificial Sequence: Synthetic oligonucleotide
  Antisense strand to SEQ ID NO: 10348
uacacagcacuacuggacc

SEQ ID NO: 10350 - RNA, 19 nt, Artificial Sequence
  Description of Artificial Sequence: Synthetic oligonucleotide
  Sense strand starting at position 1274 of SEQ ID NO: 82
acggaagggucacuugaga

SEQ ID NO: 10351 - RNA, 19 nt, Artificial Sequence
  Description of Artificial Sequence: Synthetic oligonucleotide
  Antisense strand to SEQ ID NO: 10350
ucucaagugacccuuccgu

SEQ ID NO: 10352 - RNA, 19 nt, Artificial Sequence
  Description of Artificial Sequence: Synthetic oligonucleotide
  Sense strand starting at position 1301 of SEQ ID NO: 82
auggguuuguggucaccaa

SEQ ID NO: 10353 - RNA, 19 nt, Artificial Sequence
  Description of Artificial Sequence: Synthetic oligonucleotide
  Antisense strand to SEQ ID NO: 10352
uuggugaccacaaacccau

SEQ ID NO: 10354 - RNA, 19 nt, Artificial Sequence
  Description of Artificial Sequence: Synthetic oligonucleotide
  Sense strand starting at position 1393 of SEQ ID NO: 82
gagagaugcuggguaguuu

SEQ ID NO: 10355 - RNA, 19 nt, Artificial Sequence
  Description of Artificial Sequence: Synthetic oligonucleotide
  Antisense strand to SEQ ID NO: 10354
aaacuacccagcaucucuc

SEQ ID NO: 10356 - RNA, 19 nt, Artificial Sequence
  Description of Artificial Sequence: Synthetic oligonucleotide
  Sense strand starting at position 1424 of SEQ ID NO: 82
caggcagugggcuguaaau

SEQ ID NO: 10357 - RNA, 19 nt, Artificial Sequence
  Description of Artificial Sequence: Synthetic oligonucleotide
  Antisense strand to SEQ ID NO: 10356
auuuacagcccacugccug

SEQ ID NO: 10358 - RNA, 19 nt, Artificial Sequence
  Description of Artificial Sequence: Synthetic oligonucleotide
  Sense strand starting at position 1426 of SEQ ID NO: 82
ggcagugggcuguaaauau

SEQ ID NO: 10359 - RNA, 19 nt, Artificial Sequence
  Description of Artificial Sequence: Synthetic oligonucleotide
  Antisense strand to SEQ ID NO: 10358
auauuuacagcccacugcc

SEQ ID NO: 10360 - RNA, 19 nt, Artificial Sequence
  Description of Artificial Sequence: Synthetic oligonucleotide
  Sense strand starting at position 1437 of SEQ ID NO: 82
guaaauaucggccgaagag

SEQ ID NO: 10361 - RNA, 19 nt, Artificial Sequence
  Description of Artificial Sequence: Synthetic oligonucleotide
  Antisense strand to SEQ ID NO: 10360
cucuucggccgauauuuac

SEQ ID NO: 10362 - RNA, 19 nt, Artificial Sequence
  Description of Artificial Sequence: Synthetic oligonucleotide
  Sense strand starting at position 2354 of SEQ ID NO: 82
gaagaaaucuggcucagcu

SEQ ID NO: 10363 - RNA, 19 nt, Artificial Sequence
  Description of Artificial Sequence: Synthetic oligonucleotide
  Antisense strand to SEQ ID NO: 10362
agcugagccagauuucuuc

SEQ ID NO: 10364 - RNA, 19 nt, Artificial Sequence
  Description of Artificial Sequence: Synthetic oligonucleotide
  Sense strand starting at position 2382 of SEQ ID NO: 82
caauguuggcgggaaauuc

SEQ ID NO: 10365 - RNA, 19 nt, Artificial Sequence
  Description of Artificial Sequence: Synthetic oligonucleotide
  Antisense strand to SEQ ID NO: 10364
gaauuucccgccaacauug

SEQ ID NO: 10366 - RNA, 19 nt, Artificial Sequence
  Description of Artificial Sequence: Synthetic oligonucleotide
  Sense strand starting at position 2390 of SEQ ID NO: 82
gcgggaaauucauuaguca

SEQ ID NO: 10367 - RNA, 19 nt, Artificial Sequence
  Description of Artificial Sequence: Synthetic oligonucleotide
  Antisense strand to SEQ ID NO: 10366
ugacuaaugaauuucccgc

SEQ ID NO: 10368 - RNA, 19 nt, Artificial Sequence
  Description of Artificial Sequence: Synthetic oligonucleotide
  Sense strand starting at position 2839 of SEQ ID NO: 82
gagcaauugcaacauaguu

SEQ ID NO: 10369 - RNA, 19 nt, Artificial Sequence
  Description of Artificial Sequence: Synthetic oligonucleotide
  Antisense strand to SEQ ID NO: 10368
aacuauguugcaauugcuc

SEQ ID NO: 10370 - RNA, 19 nt, Artificial Sequence
  Description of Artificial Sequence: Synthetic oligonucleotide
  Sense strand starting at position 2943 of SEQ ID NO: 82
gcuguuacuaguguauguu

SEQ ID NO: 10371 - RNA, 19 nt, Artificial Sequence
  Description of Artificial Sequence: Synthetic oligonucleotide
  Antisense strand to SEQ ID NO: 10370
aacauacacuaguaacagc

SEQ ID NO: 10372 - RNA, 19 nt, Artificial Sequence
  Description of Artificial Sequence: Synthetic oligonucleotide
  Sense strand starting at position 3023 of SEQ ID NO: 82
gauguuagcuguucuugag

SEQ ID NO: 10373 - RNA, 19 nt, Artificial Sequence
  Description of Artificial Sequence: Synthetic oligonucleotide
  Antisense strand to SEQ ID NO: 10372
cucaagaacagcuaacauc

SEQ ID NO: 10374 - RNA, 19 nt, Artificial Sequence
  Description of Artificial Sequence: Synthetic oligonucleotide
  Sense strand starting at position 3031 of SEQ ID NO: 82
cuguucuugagauggugga

SEQ ID NO: 10375 - RNA, 19 nt, Artificial Sequence
  Description of Artificial Sequence: Synthetic oligonucleotide
  Antisense strand to SEQ ID NO: 10374
uccaccaucucaagaacag

SEQ ID NO: 10376 - RNA, 19 nt, Artificial Sequence
  Description of Artificial Sequence: Synthetic oligonucleotide
  Sense strand starting at position 3044 of SEQ ID NO: 82
gguggaccauaagaaauua

SEQ ID NO: 10377 - RNA, 19 nt, Artificial Sequence
  Description of Artificial Sequence: Synthetic oligonucleotide
  Antisense strand to SEQ ID NO: 10376
uaauuucuuaugguccacc

SEQ ID NO: 10378 - RNA, 19 nt, Artificial Sequence
  Description of Artificial Sequence: Synthetic oligonucleotide
  Sense strand starting at position 3072 of SEQ ID NO: 82
uuguuccagucucuuauaa

SEQ ID NO: 10379 - RNA, 19 nt, Artificial Sequence
  Description of Artificial Sequence: Synthetic oligonucleotide
  Antisense strand to SEQ ID NO: 10378
uuauaagagacuggaacaa

SEQ ID NO: 10380 - RNA, 19 nt, Artificial Sequence
  Description of Artificial Sequence: Synthetic oligonucleotide
  Sense strand starting at position 3106 of SEQ ID NO: 82
ugaaauuaaugucucagua

SEQ ID NO: 10381 - RNA, 19 nt, Artificial Sequence
  Description of Artificial Sequence: Synthetic oligonucleotide
  Antisense strand to SEQ ID NO: 10380
uacugagacauuaauuuca

SEQ ID NO: 10382 - RNA, 19 nt, Artificial Sequence
  Description of Artificial Sequence: Synthetic oligonucleotide
  Sense strand starting at position 3110 of SEQ ID NO: 82
auuaaugucucaguagauu

SEQ ID NO: 10383 - RNA, 19 nt, Artificial Sequence
  Description of Artificial Sequence: Synthetic oligonucleotide
  Antisense strand to SEQ ID NO: 10382
aaucuacugagacauuaau

SEQ ID NO: 10384 - RNA, 19 nt, Artificial Sequence
  Description of Artificial Sequence: Synthetic oligonucleotide
  Sense strand starting at position 3119 of SEQ ID NO: 82
ucaguagauuagcuugcua

SEQ ID NO: 10385 - RNA, 19 nt, Artificial Sequence
  Description of Artificial Sequence: Synthetic oligonucleotide
  Antisense strand to SEQ ID NO: 10384
uagcaagcuaaucuacuga

SEQ ID NO: 10386 - RNA, 19 nt, Artificial Sequence
  Description of Artificial Sequence: Synthetic oligonucleotide
  Sense strand starting at position 3121 of SEQ ID NO: 82
aguagauuagcuugcuaag

SEQ ID NO: 10387 - RNA, 19 nt, Artificial Sequence
  Description of Artificial Sequence: Synthetic oligonucleotide
  Antisense strand to SEQ ID NO: 10386
cuuagcaagcuaaucuacu

SEQ ID NO: 10388 - RNA, 19 nt, Artificial Sequence
  Description of Artificial Sequence: Synthetic oligonucleotide
  Sense strand starting at position 3123 of SEQ ID NO: 82
uagauuagcuugcuaagag

SEQ ID NO: 10389 - RNA, 19 nt, Artificial Sequence
  Description of Artificial Sequence: Synthetic oligonucleotide
  Antisense strand to SEQ ID NO: 10388
cucuuagcaagcuaaucua

SEQ ID NO: 10390 - RNA, 19 nt, Artificial Sequence
  Description of Artificial Sequence: Synthetic oligonucleotide
  Sense strand starting at position 3221 of SEQ ID NO: 82
uguuaaucuuaugcauagu

SEQ ID NO: 10391 - RNA, 19 nt, Artificial Sequence
  Description of Artificial Sequence: Synthetic oligonucleotide
  Antisense strand to SEQ ID NO: 10390
acuaugcauaagauuaaca

SEQ ID NO: 10392 - RNA, 19 nt, Artificial Sequence
  Description of Artificial Sequence: Synthetic oligonucleotide
  Sense strand starting at position 3599 of SEQ ID NO: 82
agagaaagauguucuguuc

SEQ ID NO: 10393 - RNA, 19 nt, Artificial Sequence
  Description of Artificial Sequence: Synthetic oligonucleotide
  Antisense strand to SEQ ID NO: 10392
gaacagaacaucuuucucu

SEQ ID NO: 10394 - RNA, 19 nt, Artificial Sequence
  Description of Artificial Sequence: Synthetic oligonucleotide
  Sense strand starting at position 3602 of SEQ ID NO: 82
gaaagauguucuguucugu

SEQ ID NO: 10395 - RNA, 19 nt, Artificial Sequence
  Description of Artificial Sequence: Synthetic oligonucleotide
  Antisense strand to SEQ ID NO: 10394
acagaacagaacaucuuuc

SEQ ID NO: 10396 - RNA, 19 nt, Artificial Sequence
  Description of Artificial Sequence: Synthetic oligonucleotide
  Sense strand starting at position 3691 of SEQ ID NO: 82
aucacauugcaucaguuau

SEQ ID NO: 10397 - RNA, 19 nt, Artificial Sequence
  Description of Artificial Sequence: Synthetic oligonucleotide
  Antisense strand to SEQ ID NO: 10396
auaacugaugcaaugugau

SEQ ID NO: 10398 - RNA, 19 nt, Artificial Sequence
  Description of Artificial Sequence: Synthetic oligonucleotide
  Sense strand starting at position 3743 of SEQ ID NO: 82
agugacuuccuacagcaau

SEQ ID NO: 10399 - RNA, 19 nt, Artificial Sequence
  Description of Artificial Sequence: Synthetic oligonucleotide
  Antisense strand to SEQ ID NO: 10398
auugcuguaggaagucacu

SEQ ID NO: 10400 - RNA, 19 nt, Artificial Sequence
  Description of Artificial Sequence: Synthetic oligonucleotide
  Sense strand starting at position 3860 of SEQ ID NO: 82
uggagcuacagucauuaga

SEQ ID NO: 10401 - RNA, 19 nt, Artificial Sequence
  Description of Artificial Sequence: Synthetic oligonucleotide
  Antisense strand to SEQ ID NO: 10400
ucuaaugacuguagcucca

SEQ ID NO: 10402 - RNA, 19 nt, Artificial Sequence
  Description of Artificial Sequence: Synthetic oligonucleotide
  Sense strand starting at position 3862 of SEQ ID NO: 82
gagcuacagucauuagaag

SEQ ID NO: 10403 - RNA, 19 nt, Artificial Sequence
  Description of Artificial Sequence: Synthetic oligonucleotide
  Antisense strand to SEQ ID NO: 10402
cuucuaaugacuguagcuc

SEQ ID NO: 10404 - RNA, 19 nt, Artificial Sequence
  Description of Artificial Sequence: Synthetic oligonucleotide
  Sense strand starting at position 3892 of SEQ ID NO: 82
gccauagaggcucacuuaa

SEQ ID NO: 10405 - RNA, 19 nt, Artificial Sequence
  Description of Artificial Sequence: Synthetic oligonucleotide
  Antisense strand to SEQ ID NO: 10404
uuaagugagccucuauggc

SEQ ID NO: 10406 - RNA, 19 nt, Artificial Sequence
  Description of Artificial Sequence: Synthetic oligonucleotide
  Sense strand starting at position 3931 of SEQ ID NO: 82
gcaggaaaccucuauucuu

SEQ ID NO: 10407 - RNA, 19 nt, Artificial Sequence
  Description of Artificial Sequence: Synthetic oligonucleotide
  Antisense strand to SEQ ID NO: 10406
aagaauagagguuuccugc

SEQ ID NO: 10408 - RNA, 19 nt, Artificial Sequence
  Description of Artificial Sequence: Synthetic oligonucleotide
  Sense strand starting at position 3976 of SEQ ID NO: 82
gcuugaguuuccucacaac

SEQ ID NO: 10409 - RNA, 19 nt, Artificial Sequence
  Description of Artificial Sequence: Synthetic oligonucleotide
  Antisense strand to SEQ ID NO: 10408
guugugaggaaacucaagc

SEQ ID NO: 10410 - RNA, 19 nt, Artificial Sequence
  Description of Artificial Sequence: Synthetic oligonucleotide
  Sense strand starting at position 124 of SEQ ID NO: 83
ucauaugauguugguagua

SEQ ID NO: 10411 - RNA, 19 nt, Artificial Sequence
  Description of Artificial Sequence: Synthetic oligonucleotide
  Antisense strand to SEQ ID NO: 10410
uacuaccaacaucauauga

SEQ ID NO: 10412 - RNA, 19 nt, Artificial Sequence
  Description of Artificial Sequence: Synthetic oligonucleotide
  Sense strand starting at position 206 of SEQ ID NO: 83
gaagcuauccuacggaaau

SEQ ID NO: 10413 - RNA, 19 nt, Artificial Sequence
  Description of Artificial Sequence: Synthetic oligonucleotide
  Antisense strand to SEQ ID NO: 10412
auuuccguaggauagcuuc

SEQ ID NO: 10414 - RNA, 19 nt, Artificial Sequence
  Description of Artificial Sequence: Synthetic oligonucleotide
  Sense strand starting at position 218 of SEQ ID NO: 83
cggaaaucauccuuaaaca

SEQ ID NO: 10415 - RNA, 19 nt, Artificial Sequence
  Description of Artificial Sequence: Synthetic oligonucleotide
  Antisense strand to SEQ ID NO: 10414
uguuuaaggaugauuuccg

SEQ ID NO: 10416 - RNA, 19 nt, Artificial Sequence
  Description of Artificial Sequence: Synthetic oligonucleotide
  Sense strand starting at position 409 of SEQ ID NO: 83
cuguguuauaugugaaaca

SEQ ID NO: 10417 - RNA, 19 nt, Artificial Sequence
  Description of Artificial Sequence: Synthetic oligonucleotide
  Antisense strand to SEQ ID NO: 10416
uguuucacauauaacacag

SEQ ID NO: 10418 - RNA, 19 nt, Artificial Sequence
  Description of Artificial Sequence: Synthetic oligonucleotide
  Sense strand starting at position 892 of SEQ ID NO: 83
gagugaauaucuuuggaua

SEQ ID NO: 10419 - RNA, 19 nt, Artificial Sequence
  Description of Artificial Sequence: Synthetic oligonucleotide
  Antisense strand to SEQ ID NO: 10418
uauccaaagauauucacuc

SEQ ID NO: 10420 - RNA, 19 nt, Artificial Sequence
  Description of Artificial Sequence: Synthetic oligonucleotide
  Sense strand starting at position 893 of SEQ ID NO: 83
agugaauaucuuuggauaa

SEQ ID NO: 10421 - RNA, 19 nt, Artificial Sequence
  Description of Artificial Sequence: Synthetic oligonucleotide
  Antisense strand to SEQ ID NO: 10420
uuauccaaagauauucacu

SEQ ID NO: 10422 - RNA, 19 nt, Artificial Sequence
  Description of Artificial Sequence: Synthetic oligonucleotide
  Sense strand starting at position 906 of SEQ ID NO: 83
ggauaauggaugugcagau

SEQ ID NO: 10423 - RNA, 19 nt, Artificial Sequence
  Description of Artificial Sequence: Synthetic oligonucleotide
  Antisense strand to SEQ ID NO: 10422
aucugcacauccauuaucc

SEQ ID NO: 10424 - RNA, 19 nt, Artificial Sequence
  Description of Artificial Sequence: Synthetic oligonucleotide
  Sense strand starting at position 907 of SEQ ID NO: 83
gauaauggaugugcagauu

SEQ ID NO: 10425 - RNA, 19 nt, Artificial Sequence
  Description of Artificial Sequence: Synthetic oligonucleotide
  Antisense strand to SEQ ID NO: 10424
aaucugcacauccauuauc

SEQ ID NO: 10426 - RNA, 19 nt, Artificial Sequence
  Description of Artificial Sequence: Synthetic oligonucleotide
  Sense strand starting at position 1420 of SEQ ID NO: 83
agcuauucucgugaaccau

SEQ ID NO: 10427 - RNA, 19 nt, Artificial Sequence
  Description of Artificial Sequence: Synthetic oligonucleotide
  Antisense strand to SEQ ID NO: 10426
augguucacgagaauagcu

SEQ ID NO: 10428 - RNA, 19 nt, Artificial Sequence
  Description of Artificial Sequence: Synthetic oligonucleotide
  Sense strand starting at position 1487 of SEQ ID NO: 83
auaccauagcuagagucau

SEQ ID NO: 10429 - RNA, 19 nt, Artificial Sequence
  Description of Artificial Sequence: Synthetic oligonucleotide
  Antisense strand to SEQ ID NO: 10428
augacucuagcuaugguau

SEQ ID NO: 10430 - RNA, 19 nt, Artificial Sequence
  Description of Artificial Sequence: Synthetic oligonucleotide
  Sense strand starting at position 1497 of SEQ ID NO: 83
uagagucauuauguagaag

SEQ ID NO: 10431 - RNA, 19 nt, Artificial Sequence
  Description of Artificial Sequence: Synthetic oligonucleotide
  Antisense strand to SEQ ID NO: 10430
cuucuacauaaugacucua

SEQ ID NO: 10432 - RNA, 19 nt, Artificial Sequence
  Description of Artificial Sequence: Synthetic oligonucleotide
  Sense strand starting at position 1695 of SEQ ID NO: 83
uccugaaauguauguuaaa

SEQ ID NO: 10433 - RNA, 19 nt, Artificial Sequence
  Description of Artificial Sequence: Synthetic oligonucleotide
  Antisense strand to SEQ ID NO: 10432
uuuaacauacauuucagga

SEQ ID NO: 10434 - RNA, 19 nt, Artificial Sequence
  Description of Artificial Sequence: Synthetic oligonucleotide
  Sense strand starting at position 1696 of SEQ ID NO: 83
ccugaaauguauguuaaag

SEQ ID NO: 10435 - RNA, 19 nt, Artificial Sequence
  Description of Artificial Sequence: Synthetic oligonucleotide
  Antisense strand to SEQ ID NO: 10434
cuuuaacauacauuucagg

SEQ ID NO: 10436 - RNA, 19 nt, Artificial Sequence
  Description of Artificial Sequence: Synthetic oligonucleotide
  Sense strand starting at position 1762 of SEQ ID NO: 83
ggaacaguugcuugucaaa

SEQ ID NO: 10437 - RNA, 19 nt, Artificial Sequence
  Description of Artificial Sequence: Synthetic oligonucleotide
  Antisense strand to SEQ ID NO: 10436
uuugacaagcaacuguucc

SEQ ID NO: 10438 - RNA, 19 nt, Artificial Sequence
  Description of Artificial Sequence: Synthetic oligonucleotide
  Sense strand starting at position 1857 of SEQ ID NO: 83
ugcugaaauccuugauucu

SEQ ID NO: 10439 - RNA, 19 nt, Artificial Sequence
  Description of Artificial Sequence: Synthetic oligonucleotide
  Antisense strand to SEQ ID NO: 10438
agaaucaaggauuucagca

SEQ ID NO: 10440 - RNA, 19 nt, Artificial Sequence
  Description of Artificial Sequence: Synthetic oligonucleotide
  Sense strand starting at position 1858 of SEQ ID NO: 83
gcugaaauccuugauucua

SEQ ID NO: 10441 - RNA, 19 nt, Artificial Sequence
  Description of Artificial Sequence: Synthetic oligonucleotide
  Antisense strand to SEQ ID NO: 10440
uagaaucaaggauuucagc

SEQ ID NO: 10442 - RNA, 19 nt, Artificial Sequence
  Description of Artificial Sequence: Synthetic oligonucleotide
  Sense strand starting at position 2031 of SEQ ID NO: 83
gcuugaggcauuugauagu

SEQ ID NO: 10443 - RNA, 19 nt, Artificial Sequence
  Description of Artificial Sequence: Synthetic oligonucleotide
  Antisense strand to SEQ ID NO: 10442
acuaucaaaugccucaagc

SEQ ID NO: 10444 - RNA, 19 nt, Artificial Sequence
  Description of Artificial Sequence: Synthetic oligonucleotide
  Sense strand starting at position 2069 of SEQ ID NO: 83
cagucuuuacuuugggauu

SEQ ID NO: 10445 - RNA, 19 nt, Artificial Sequence
  Description of Artificial Sequence: Synthetic oligonucleotide
  Antisense strand to SEQ ID NO: 10444
aaucccaaaguaaagacug

SEQ ID NO: 10446 - RNA, 19 nt, Artificial Sequence
  Description of Artificial Sequence: Synthetic oligonucleotide
  Sense strand starting at position 2144 of SEQ ID NO: 83
cagacuggaucuuuggcaa

SEQ ID NO: 10447 - RNA, 19 nt, Artificial Sequence
  Description of Artificial Sequence: Synthetic oligonucleotide
  Antisense strand to SEQ ID NO: 10446
uugccaaagauccagucug

SEQ ID NO: 10448 - RNA, 19 nt, Artificial Sequence
  Description of Artificial Sequence: Synthetic oligonucleotide
  Sense strand starting at position 2196 of SEQ ID NO: 83
gugaaauacagugaagucu

SEQ ID NO: 10449 - RNA, 19 nt, Artificial Sequence
  Description of Artificial Sequence: Synthetic oligonucleotide
  Antisense strand to SEQ ID NO: 10448
agacuucacuguauuucac

SEQ ID NO: 10450 - RNA, 19 nt, Artificial Sequence
  Description of Artificial Sequence: Synthetic oligonucleotide
  Sense strand starting at position 2219 of SEQ ID NO: 83
gguuucugaagcuaugauc

SEQ ID NO: 10451 - RNA, 19 nt, Artificial Sequence
  Description of Artificial Sequence: Synthetic oligonucleotide
  Antisense strand to SEQ ID NO: 10450
gaucauagcuucagaaacc

SEQ ID NO: 10452 - RNA, 19 nt, Artificial Sequence
  Description of Artificial Sequence: Synthetic oligonucleotide
  Sense strand starting at position 2227 of SEQ ID NO: 83
aagcuaugauccucagggu

SEQ ID NO: 10453 - RNA, 19 nt, Artificial Sequence
  Description of Artificial Sequence: Synthetic oligonucleotide
  Antisense strand to SEQ ID NO: 10452
acccugaggaucauagcuu

SEQ ID NO: 10454 - RNA, 19 nt, Artificial Sequence
  Description of Artificial Sequence: Synthetic oligonucleotide
  Sense strand starting at position 2228 of SEQ ID NO: 83
agcuaugauccucaggguu

SEQ ID NO: 10455 - RNA, 19 nt, Artificial Sequence
  Description of Artificial Sequence: Synthetic oligonucleotide
  Antisense strand to SEQ ID NO: 10454
aacccugaggaucauagcu

SEQ ID NO: 10456 - RNA, 19 nt, Artificial Sequence
  Description of Artificial Sequence: Synthetic oligonucleotide
  Sense strand starting at position 2362 of SEQ ID NO: 83
augugucugacuuagcaga

SEQ ID NO: 10457 - RNA, 19 nt, Artificial Sequence
  Description of Artificial Sequence: Synthetic oligonucleotide
  Antisense strand to SEQ ID NO: 10456
ucugcuaagucagacacau

SEQ ID NO: 10458 - RNA, 19 nt, Artificial Sequence
  Description of Artificial Sequence: Synthetic oligonucleotide
  Sense strand starting at position 2441 of SEQ ID NO: 83
ucaacuguccuccagagua

SEQ ID NO: 10459 - RNA, 19 nt, Artificial Sequence
  Description of Artificial Sequence: Synthetic oligonucleotide
  Antisense strand to SEQ ID NO: 10458
uacucuggaggacaguuga

SEQ ID NO: 10460 - RNA, 19 nt, Artificial Sequence
  Description of Artificial Sequence: Synthetic oligonucleotide
  Sense strand starting at position 2568 of SEQ ID NO: 83
auuacaauccuguaaggca

SEQ ID NO: 10461 - RNA, 19 nt, Artificial Sequence
  Description of Artificial Sequence: Synthetic oligonucleotide
  Antisense strand to SEQ ID NO: 10460
ugccuuacaggauuguaau

SEQ ID NO: 10462 - RNA, 19 nt, Artificial Sequence
  Description of Artificial Sequence: Synthetic oligonucleotide
  Sense strand starting at position 2633 of SEQ ID NO: 83
acagguaucuugcucaaag

SEQ ID NO: 10463 - RNA, 19 nt, Artificial Sequence
  Description of Artificial Sequence: Synthetic oligonucleotide
  Antisense strand to SEQ ID NO: 10462
cuuugagcaagauaccugu

SEQ ID NO: 10464 - RNA, 19 nt, Artificial Sequence
  Description of Artificial Sequence: Synthetic oligonucleotide
  Sense strand starting at position 2635 of SEQ ID NO: 83
agguaucuugcucaaaguc

SEQ ID NO: 10465 - RNA, 19 nt, Artificial Sequence
  Description of Artificial Sequence: Synthetic oligonucleotide
  Antisense strand to SEQ ID NO: 10464
gacuuugagcaagauaccu

SEQ ID NO: 10466 - RNA, 19 nt, Artificial Sequence
  Description of Artificial Sequence: Synthetic oligonucleotide
  Sense strand starting at position 2730 of SEQ ID NO: 83
cuuaguuaugacuguauau

SEQ ID NO: 10467 - RNA, 19 nt, Artificial Sequence
  Description of Artificial Sequence: Synthetic oligonucleotide
  Antisense strand to SEQ ID NO: 10466
auauacagucauaacuaag

SEQ ID NO: 10468 - RNA, 19 nt, Artificial Sequence
  Description of Artificial Sequence: Synthetic oligonucleotide
  Sense strand starting at position 3088 of SEQ ID NO: 83
gccaguuaugacuaaauau

SEQ ID NO: 10469 - RNA, 19 nt, Artificial Sequence
  Description of Artificial Sequence: Synthetic oligonucleotide
  Antisense strand to SEQ ID NO: 10468
auauuuagucauaacuggc

SEQ ID NO: 10470 - RNA, 19 nt, Artificial Sequence
  Description of Artificial Sequence: Synthetic oligonucleotide
  Sense strand starting at position 3113 of SEQ ID NO: 83
guugcugcuagguaaagaa

SEQ ID NO: 10471 - RNA, 19 nt, Artificial Sequence
  Description of Artificial Sequence: Synthetic oligonucleotide
  Antisense strand to SEQ ID NO: 10470
uucuuuaccuagcagcaac

SEQ ID NO: 10472 - RNA, 19 nt, Artificial Sequence
  Description of Artificial Sequence: Synthetic oligonucleotide
  Sense strand starting at position 3542 of SEQ ID NO: 83
auuccaauuguguaaauac

SEQ ID NO: 10473 - RNA, 19 nt, Artificial Sequence
  Description of Artificial Sequence: Synthetic oligonucleotide
  Antisense strand to SEQ ID NO: 10472
guauuuacacaauuggaau

SEQ ID NO: 10474 - RNA, 19 nt, Artificial Sequence
  Description of Artificial Sequence: Synthetic oligonucleotide
  Sense strand starting at position 3562 of SEQ ID NO: 83
cuaguugccuacccaaaga

SEQ ID NO: 10475 - RNA, 19 nt, Artificial Sequence
  Description of Artificial Sequence: Synthetic oligonucleotide
  Antisense strand to SEQ ID NO: 10474
ucuuuggguaggcaacuag

SEQ ID NO: 10476 - RNA, 19 nt, Artificial Sequence
  Description of Artificial Sequence: Synthetic oligonucleotide
  Sense strand starting at position 3618 of SEQ ID NO: 83
ugguuugagcauuaaugug

SEQ ID NO: 10477 - RNA, 19 nt, Artificial Sequence
  Description of Artificial Sequence: Synthetic oligonucleotide
  Antisense strand to SEQ ID NO: 10476
cacauuaaugcucaaacca

SEQ ID NO: 10478 - RNA, 19 nt, Artificial Sequence
  Description of Artificial Sequence: Synthetic oligonucleotide
  Sense strand starting at position 3663 of SEQ ID NO: 83
aauccuuuguggcuagaag

SEQ ID NO: 10479 - RNA, 19 nt, Artificial Sequence
  Description of Artificial Sequence: Synthetic oligonucleotide
  Antisense strand to SEQ ID NO: 10478
cuucuagccacaaaggauu

SEQ ID NO: 10480 - RNA, 19 nt, Artificial Sequence
  Description of Artificial Sequence: Synthetic oligonucleotide
  Sense strand starting at position 3674 of SEQ ID NO: 83
gcuagaagcggccauuuga

SEQ ID NO: 10481 - RNA, 19 nt, Artificial Sequence
  Description of Artificial Sequence: Synthetic oligonucleotide
  Antisense strand to SEQ ID NO: 10480
ucaaauggccgcuucuagc

SEQ ID NO: 10482 - RNA, 19 nt, Artificial Sequence
  Description of Artificial Sequence: Synthetic oligonucleotide
  Sense strand starting at position 3702 of SEQ ID NO: 83
gccaaagugauguaagcag

SEQ ID NO: 10483 - RNA, 19 nt, Artificial Sequence
  Description of Artificial Sequence: Synthetic oligonucleotide
  Antisense strand to SEQ ID NO: 10482
cugcuuacaucacuuuggc

SEQ ID NO: 10484 - RNA, 19 nt, Artificial Sequence
  Description of Artificial Sequence: Synthetic oligonucleotide
  Sense strand starting at position 3717 of SEQ ID NO: 83
gcagaauugcuggguggga

SEQ ID NO: 10485 - RNA, 19 nt, Artificial Sequence
  Description of Artificial Sequence: Synthetic oligonucleotide
  Antisense strand to SEQ ID NO: 10484
ucccacccagcaauucugc

SEQ ID NO: 10486 - RNA, 19 nt, Artificial Sequence
  Description of Artificial Sequence: Synthetic oligonucleotide
  Sense strand starting at position 3718 of SEQ ID NO: 83
cagaauugcugggugggau

SEQ ID NO: 10487 - RNA, 19 nt, Artificial Sequence
  Description of Artificial Sequence: Synthetic oligonucleotide
  Antisense strand to SEQ ID NO: 10486
aucccacccagcaauucug

SEQ ID NO: 10488 - RNA, 19 nt, Artificial Sequence
  Description of Artificial Sequence: Synthetic oligonucleotide
  Sense strand starting at position 3947 of SEQ ID NO: 83
ccaccauauuaguccagga

SEQ ID NO: 10489 - RNA, 19 nt, Artificial Sequence
  Description of Artificial Sequence: Synthetic oligonucleotide
  Antisense strand to SEQ ID NO: 10488
uccuggacuaauauggugg

SEQ ID NO: 10490 - RNA, 19 nt, Artificial Sequence
  Description of Artificial Sequence: Synthetic oligonucleotide
  Sense strand starting at position 3952 of SEQ ID NO: 85
ugucauguaucuucugaua

SEQ ID NO: 10491 - RNA, 19 nt, Artificial Sequence
  Description of Artificial Sequence: Synthetic oligonucleotide
  Antisense strand to SEQ ID NO: 10490
uaucagaagauacaugaca

SEQ ID NO: 10492 - RNA, 19 nt, Artificial Sequence
  Description of Artificial Sequence: Synthetic oligonucleotide
  Sense strand starting at position 3650 of SEQ ID NO: 85
auggaauuauggguuauau

SEQ ID NO: 10493 - RNA, 19 nt, Artificial Sequence
  Description of Artificial Sequence: Synthetic oligonucleotide
  Antisense strand to SEQ ID NO: 10492
auauaacccauaauuccau

SEQ ID NO: 10494 - RNA, 19 nt, Artificial Sequence
  Description of Artificial Sequence: Synthetic oligonucleotide
  Sense strand starting at position 3641 of SEQ ID NO: 85
ucuguagugauggaauuau

SEQ ID NO: 10495 - RNA, 19 nt, Artificial Sequence
  Description of Artificial Sequence: Synthetic oligonucleotide
  Antisense strand to SEQ ID NO: 10494
auaauuccaucacuacaga

SEQ ID NO: 10496 - RNA, 19 nt, Artificial Sequence
  Description of Artificial Sequence: Synthetic oligonucleotide
  Sense strand starting at position 3640 of SEQ ID NO: 85
aucuguagugauggaauua

SEQ ID NO: 10497 - RNA, 19 nt, Artificial Sequence
  Description of Artificial Sequence: Synthetic oligonucleotide
  Antisense strand to SEQ ID NO: 10496
uaauuccaucacuacagau

SEQ ID NO: 10498 - RNA, 19 nt, Artificial Sequence
  Description of Artificial Sequence: Synthetic oligonucleotide
  Sense strand starting at position 3633 of SEQ ID NO: 85
aaugauuaucuguagugau

SEQ ID NO: 10499 - RNA, 19 nt, Artificial Sequence
  Description of Artificial Sequence: Synthetic oligonucleotide
  Antisense strand to SEQ ID NO: 10498
aucacuacagauaaucauu

SEQ ID NO: 10500 - RNA, 19 nt, Artificial Sequence
  Description of Artificial Sequence: Synthetic oligonucleotide
  Sense strand starting at position 3632 of SEQ ID NO: 85
caaugauuaucuguaguga

SEQ ID NO: 10501 - RNA, 19 nt, Artificial Sequence
  Description of Artificial Sequence: Synthetic oligonucleotide
  Antisense strand to SEQ ID NO: 10500
ucacuacagauaaucauug

SEQ ID NO: 10502 - RNA, 19 nt, Artificial Sequence
  Description of Artificial Sequence: Synthetic oligonucleotide
  Sense strand starting at position 3630 of SEQ ID NO: 85
accaaugauuaucuguagu

SEQ ID NO: 10503 - RNA, 19 nt, Artificial Sequence
  Description of Artificial Sequence: Synthetic oligonucleotide
  Antisense strand to SEQ ID NO: 10502
acuacagauaaucauuggu

SEQ ID NO: 10504 - RNA, 19 nt, Artificial Sequence
  Description of Artificial Sequence: Synthetic oligonucleotide
  Sense strand starting at position 3590 of SEQ ID NO: 85
gugauauacauggguagaa

SEQ ID NO: 10505 - RNA, 19 nt, Artificial Sequence
  Description of Artificial Sequence: Synthetic oligonucleotide
  Antisense strand to SEQ ID NO: 10504
uucuacccauguauaucac

SEQ ID NO: 10506 - RNA, 19 nt, Artificial Sequence
  Description of Artificial Sequence: Synthetic oligonucleotide
  Sense strand starting at position 3589 of SEQ ID NO: 85
ugugauauacauggguaga

SEQ ID NO: 10507 - RNA, 19 nt, Artificial Sequence
  Description of Artificial Sequence: Synthetic oligonucleotide
  Antisense strand to SEQ ID NO: 10506
ucuacccauguauaucaca

SEQ ID NO: 10508 - RNA, 19 nt, Artificial Sequence
  Description of Artificial Sequence: Synthetic oligonucleotide
  Sense strand starting at position 3588 of SEQ ID NO: 85
augugauauacauggguag

SEQ ID NO: 10509 - RNA, 19 nt, Artificial Sequence
  Description of Artificial Sequence: Synthetic oligonucleotide
  Antisense strand to SEQ ID NO: 10508
cuacccauguauaucacau

SEQ ID NO: 10510 - RNA, 19 nt, Artificial Sequence
  Description of Artificial Sequence: Synthetic oligonucleotide
  Sense strand starting at position 3578 of SEQ ID NO: 85
gguccuacuuaugugauau

SEQ ID NO: 10511 - RNA, 19 nt, Artificial Sequence
  Description of Artificial Sequence: Synthetic oligonucleotide
  Antisense strand to SEQ ID NO: 10510
auaucacauaaguaggacc

SEQ ID NO: 10512 - RNA, 19 nt, Artificial Sequence
  Description of Artificial Sequence: Synthetic oligonucleotide
  Sense strand starting at position 3505 of SEQ ID NO: 85
uguuuaaugauguggaaau

SEQ ID NO: 10513 - RNA, 19 nt, Artificial Sequence
  Description of Artificial Sequence: Synthetic oligonucleotide
  Antisense strand to SEQ ID NO: 10512
auuuccacaucauuaaaca

SEQ ID NO: 10514 - RNA, 19 nt, Artificial Sequence
  Description of Artificial Sequence: Synthetic oligonucleotide
  Sense strand starting at position 3489 of SEQ ID NO: 85
auuguucuuggagaaaugu

SEQ ID NO: 10515 - RNA, 19 nt, Artificial Sequence
  Description of Artificial Sequence: Synthetic oligonucleotide
  Antisense strand to SEQ ID NO: 10514
acauuucuccaagaacaau

SEQ ID NO: 10516 - RNA, 19 nt, Artificial Sequence
  Description of Artificial Sequence: Synthetic oligonucleotide
  Sense strand starting at position 3443 of SEQ ID NO: 85
gggaauguuuauguaauau

SEQ ID NO: 10517 - RNA, 19 nt, Artificial Sequence
  Description of Artificial Sequence: Synthetic oligonucleotide
  Antisense strand to SEQ ID NO: 10516
auauuacauaaacauuccc

SEQ ID NO: 10518 - RNA, 19 nt, Artificial Sequence
  Description of Artificial Sequence: Synthetic oligonucleotide
  Sense strand starting at position 3418 of SEQ ID NO: 85
agauacuuuaaaggucgaa

SEQ ID NO: 10519 - RNA, 19 nt, Artificial Sequence
  Description of Artificial Sequence: Synthetic oligonucleotide
  Antisense strand to SEQ ID NO: 10518
uucgaccuuuaaaguaucu

SEQ ID NO: 10520 - RNA, 19 nt, Artificial Sequence
  Description of Artificial Sequence: Synthetic oligonucleotide
  Sense strand starting at position 3168 of SEQ ID NO: 85
aggguauaguuagugagau

SEQ ID NO: 10521 - RNA, 19 nt, Artificial Sequence
  Description of Artificial Sequence: Synthetic oligonucleotide
  Antisense strand to SEQ ID NO: 10520
aucucacuaacuauacccu

SEQ ID NO: 10522 - RNA, 19 nt, Artificial Sequence
  Description of Artificial Sequence: Synthetic oligonucleotide
  Sense strand starting at position 3157 of SEQ ID NO: 85
gcagguuggcaaggguaua

SEQ ID NO: 10523 - RNA, 19 nt, Artificial Sequence
  Description of Artificial Sequence: Synthetic oligonucleotide
  Antisense strand to SEQ ID NO: 10522
uauacccuugccaaccugc

SEQ ID NO: 10524 - RNA, 19 nt, Artificial Sequence
  Description of Artificial Sequence: Synthetic oligonucleotide
  Sense strand starting at position 3085 of SEQ ID NO: 85
cagagauaaccagguuuac

SEQ ID NO: 10525 - RNA, 19 nt, Artificial Sequence
  Description of Artificial Sequence: Synthetic oligonucleotide
  Antisense strand to SEQ ID NO: 10524
guaaaccugguuaucucug

SEQ ID NO: 10526 - RNA, 19 nt, Artificial Sequence
  Description of Artificial Sequence: Synthetic oligonucleotide
  Sense strand starting at position 3008 of SEQ ID NO: 85
gcuacuguucccugaacaa

SEQ ID NO: 10527 - RNA, 19 nt, Artificial Sequence
  Description of Artificial Sequence: Synthetic oligonucleotide
  Antisense strand to SEQ ID NO: 10526
uuguucagggaacaguagc

SEQ ID NO: 10528 - RNA, 19 nt, Artificial Sequence
  Description of Artificial Sequence: Synthetic oligonucleotide
  Sense strand starting at position 3007 of SEQ ID NO: 85
ggcuacuguucccugaaca

SEQ ID NO: 10529 - RNA, 19 nt, Artificial Sequence
  Description of Artificial Sequence: Synthetic oligonucleotide
  Antisense strand to SEQ ID NO: 10528
uguucagggaacaguagcc

SEQ ID NO: 10530 - RNA, 19 nt, Artificial Sequence
  Description of Artificial Sequence: Synthetic oligonucleotide
  Sense strand starting at position 2993 of SEQ ID NO: 85
uuccauugaucccuggcua

SEQ ID NO: 10531 - RNA, 19 nt, Artificial Sequence
  Description of Artificial Sequence: Synthetic oligonucleotide
  Antisense strand to SEQ ID NO: 10530
uagccagggaucaauggaa

SEQ ID NO: 10532 - RNA, 19 nt, Artificial Sequence
  Description of Artificial Sequence: Synthetic oligonucleotide
  Sense strand starting at position 2853 of SEQ ID NO: 85
guucuaaugcuguuugucu

SEQ ID NO: 10533 - RNA, 19 nt, Artificial Sequence
  Description of Artificial Sequence: Synthetic oligonucleotide
  Antisense strand to SEQ ID NO: 10532
agacaaacagcauuagaac

SEQ ID NO: 10534 - RNA, 19 nt, Artificial Sequence
  Description of Artificial Sequence: Synthetic oligonucleotide
  Sense strand starting at position 2782 of SEQ ID NO: 85
augcauuagcaggaauuaa

SEQ ID NO: 10535 - RNA, 19 nt, Artificial Sequence
  Description of Artificial Sequence: Synthetic oligonucleotide
  Antisense strand to SEQ ID NO: 10534
uuaauuccugcuaaugcau

SEQ ID NO: 10536 - RNA, 19 nt, Artificial Sequence
  Description of Artificial Sequence: Synthetic oligonucleotide
  Sense strand starting at position 2736 of SEQ ID NO: 85
ggaacuuguggagggaagu

SEQ ID NO: 10537 - RNA, 19 nt, Artificial Sequence
  Description of Artificial Sequence: Synthetic oligonucleotide
  Antisense strand to SEQ ID NO: 10536
acuucccuccacaaguucc

SEQ ID NO: 10538 - RNA, 19 nt, Artificial Sequence
  Description of Artificial Sequence: Synthetic oligonucleotide
  Sense strand starting at position 2682 of SEQ ID NO: 85
gggucuauccaacaagcau

SEQ ID NO: 10539 - RNA, 19 nt, Artificial Sequence
  Description of Artificial Sequence: Synthetic oligonucleotide
  Antisense strand to SEQ ID NO: 10538
augcuuguuggauagaccc

SEQ ID NO: 10540 - RNA, 19 nt, Artificial Sequence
  Description of Artificial Sequence: Synthetic oligonucleotide
  Sense strand starting at position 2586 of SEQ ID NO: 85
guaguuaguacucaguauu

SEQ ID NO: 10541 - RNA, 19 nt, Artificial Sequence
  Description of Artificial Sequence: Synthetic oligonucleotide
  Antisense strand to SEQ ID NO: 10540
aauacugaguacuaacuac

SEQ ID NO: 10542 - RNA, 19 nt, Artificial Sequence
  Description of Artificial Sequence: Synthetic oligonucleotide
  Sense strand starting at position 2533 of SEQ ID NO: 85
gguuaagauaaaugaguua

SEQ ID NO: 10543 - RNA, 19 nt, Artificial Sequence
  Description of Artificial Sequence: Synthetic oligonucleotide
  Antisense strand to SEQ ID NO: 10542
uaacucauuuaucuuaacc

SEQ ID NO: 10544 - RNA, 19 nt, Artificial Sequence
  Description of Artificial Sequence: Synthetic oligonucleotide
  Sense strand starting at position 2523 of SEQ ID NO: 85
uuuauauggugguuaagau

SEQ ID NO: 10545 - RNA, 19 nt, Artificial Sequence
  Description of Artificial Sequence: Synthetic oligonucleotide
  Antisense strand to SEQ ID NO: 10544
aucuuaaccaccauauaaa

SEQ ID NO: 10546 - RNA, 19 nt, Artificial Sequence
  Description of Artificial Sequence: Synthetic oligonucleotide
  Sense strand starting at position 2521 of SEQ ID NO: 85
gcuuuauauggugguuaag

SEQ ID NO: 10547 - RNA, 19 nt, Artificial Sequence
  Description of Artificial Sequence: Synthetic oligonucleotide
  Antisense strand to SEQ ID NO: 10546
cuuaaccaccauauaaagc

SEQ ID NO: 10548 - RNA, 19 nt, Artificial Sequence
  Description of Artificial Sequence: Synthetic oligonucleotide
  Sense strand starting at position 2483 of SEQ ID NO: 85
gcuucuauuucgucuguaa

SEQ ID NO: 10549 - RNA, 19 nt, Artificial Sequence
  Description of Artificial Sequence: Synthetic oligonucleotide
  Antisense strand to SEQ ID NO: 10548
uuacagacgaaauagaagc

SEQ ID NO: 10550 - RNA, 19 nt, Artificial Sequence
  Description of Artificial Sequence: Synthetic oligonucleotide
  Sense strand starting at position 2450 of SEQ ID NO: 85
acugauacugggcaaguua

SEQ ID NO: 10551 - RNA, 19 nt, Artificial Sequence
  Description of Artificial Sequence: Synthetic oligonucleotide
  Antisense strand to SEQ ID NO: 10550
uaacuugcccaguaucagu

SEQ ID NO: 10552 - RNA, 19 nt, Artificial Sequence
  Description of Artificial Sequence: Synthetic oligonucleotide
  Sense strand starting at position 2449 of SEQ ID NO: 85
gacugauacugggcaaguu

SEQ ID NO: 10553 - RNA, 19 nt, Artificial Sequence
  Description of Artificial Sequence: Synthetic oligonucleotide
  Antisense strand to SEQ ID NO: 10552
aacuugcccaguaucaguc

SEQ ID NO: 10554 - RNA, 19 nt, Artificial Sequence
  Description of Artificial Sequence: Synthetic oligonucleotide
  Sense strand starting at position 2387 of SEQ ID NO: 85
gguuaagagcuuuaacucu

SEQ ID NO: 10555 - RNA, 19 nt, Artificial Sequence
  Description of Artificial Sequence: Synthetic oligonucleotide
  Antisense strand to SEQ ID NO: 10554
agaguuaaagcucuuaacc

SEQ ID NO: 10556 - RNA, 19 nt, Artificial Sequence
  Description of Artificial Sequence: Synthetic oligonucleotide
  Sense strand starting at position 2375 of SEQ ID NO: 85
ucuguauuuggugguuaag

SEQ ID NO: 10557 - RNA, 19 nt, Artificial Sequence
  Description of Artificial Sequence: Synthetic oligonucleotide
  Antisense strand to SEQ ID NO: 10556
cuuaaccaccaaauacaga

SEQ ID NO: 10558 - RNA, 19 nt, Artificial Sequence
  Description of Artificial Sequence: Synthetic oligonucleotide
  Sense strand starting at position 2245 of SEQ ID NO: 85
uguuaucauugucccagga

SEQ ID NO: 10559 - RNA, 19 nt, Artificial Sequence
  Description of Artificial Sequence: Synthetic oligonucleotide
  Antisense strand to SEQ ID NO: 10558
uccugggacaaugauaaca

SEQ ID NO: 10560 - RNA, 19 nt, Artificial Sequence
  Description of Artificial Sequence: Synthetic oligonucleotide
  Sense strand starting at position 2232 of SEQ ID NO: 85
agugaaagguagcuguuau

SEQ ID NO: 10561 - RNA, 19 nt, Artificial Sequence
  Description of Artificial Sequence: Synthetic oligonucleotide
  Antisense strand to SEQ ID NO: 10560
auaacagcuaccuuucacu

SEQ ID NO: 10562 - RNA, 19 nt, Artificial Sequence
  Description of Artificial Sequence: Synthetic oligonucleotide
  Sense strand starting at position 1347 of SEQ ID NO: 85
acccuagccucuuuggauu

SEQ ID NO: 10563 - RNA, 19 nt, Artificial Sequence
  Description of Artificial Sequence: Synthetic oligonucleotide
  Antisense strand to SEQ ID NO: 10562
aauccaaagaggcuagggu

SEQ ID NO: 10564 - RNA, 19 nt, Artificial Sequence
  Description of Artificial Sequence: Synthetic oligonucleotide
  Sense strand starting at position 503 of SEQ ID NO: 85
gacagagcccagcaucuau

SEQ ID NO: 10565 - RNA, 19 nt, Artificial Sequence
  Description of Artificial Sequence: Synthetic oligonucleotide
  Antisense strand to SEQ ID NO: 10564
auagaugcugggcucuguc

SEQ ID NO: 10566 - RNA, 19 nt, Artificial Sequence
  Description of Artificial Sequence: Synthetic oligonucleotide
  Sense strand starting at position 307 of SEQ ID NO: 85
augcccacuccuugugaca

SEQ ID NO: 10567 - RNA, 19 nt, Artificial Sequence
  Description of Artificial Sequence: Synthetic oligonucleotide
  Antisense strand to SEQ ID NO: 10566
ugucacaaggagugggcau

SEQ ID NO: 10568 - RNA, 19 nt, Artificial Sequence
  Description of Artificial Sequence: Synthetic oligonucleotide
  Sense strand starting at position 63 of SEQ ID NO: 85
aaugguugugcccagaugu

SEQ ID NO: 10569 - RNA, 19 nt, Artificial Sequence
  Description of Artificial Sequence: Synthetic oligonucleotide
  Antisense strand to SEQ ID NO: 10568
acaucugggcacaaccauu

SEQ ID NO: 10570 - RNA, 19 nt, Artificial Sequence
  Description of Artificial Sequence: Synthetic oligonucleotide
  Sense strand starting at position 3951 of SEQ ID NO: 86
agauaucccucugcaagca

SEQ ID NO: 10571 - RNA, 19 nt, Artificial Sequence
  Description of Artificial Sequence: Synthetic oligonucleotide
  Antisense strand to SEQ ID NO: 10570
ugcuugcagagggauaucu

SEQ ID NO: 10572 - RNA, 19 nt, Artificial Sequence
  Description of Artificial Sequence: Synthetic oligonucleotide
  Sense strand starting at position 3910 of SEQ ID NO: 86
ggucuuuccuuagccacaa

SEQ ID NO: 10573 - RNA, 19 nt, Artificial Sequence
  Description of Artificial Sequence: Synthetic oligonucleotide
  Antisense strand to SEQ ID NO: 10572
uuguggcuaaggaaagacc

SEQ ID NO: 10574 - RNA, 19 nt, Artificial Sequence
  Description of Artificial Sequence: Synthetic oligonucleotide
  Sense strand starting at position 3907 of SEQ ID NO: 86
gugggucuuuccuuagcca

SEQ ID NO: 10575 - RNA, 19 nt, Artificial Sequence
  Description of Artificial Sequence: Synthetic oligonucleotide
  Antisense strand to SEQ ID NO: 10574
uggcuaaggaaagacccac

SEQ ID NO: 10576 - RNA, 19 nt, Artificial Sequence
  Description of Artificial Sequence: Synthetic oligonucleotide
  Sense strand starting at position 3903 of SEQ ID NO: 86
cagggugggucuuuccuua

SEQ ID NO: 10577 - RNA, 19 nt, Artificial Sequence
  Description of Artificial Sequence: Synthetic oligonucleotide
  Antisense strand to SEQ ID NO: 10576
uaaggaaagacccacccug

SEQ ID NO: 10578 - RNA, 19 nt, Artificial Sequence
  Description of Artificial Sequence: Synthetic oligonucleotide
  Sense strand starting at position 3884 of SEQ ID NO: 86
augaucuggucaucaaagu

SEQ ID NO: 10579 - RNA, 19 nt, Artificial Sequence
  Description of Artificial Sequence: Synthetic oligonucleotide
  Antisense strand to SEQ ID NO: 10578
acuuugaugaccagaucau

SEQ ID NO: 10580 - RNA, 19 nt, Artificial Sequence
  Description of Artificial Sequence: Synthetic oligonucleotide
  Sense strand starting at position 3882 of SEQ ID NO: 86
gcaugaucuggucaucaaa

SEQ ID NO: 10581 - RNA, 19 nt, Artificial Sequence
  Description of Artificial Sequence: Synthetic oligonucleotide
  Antisense strand to SEQ ID NO: 10580
uuugaugaccagaucaugc

SEQ ID NO: 10582 - RNA, 19 nt, Artificial Sequence
  Description of Artificial Sequence: Synthetic oligonucleotide
  Sense strand starting at position 3878 of SEQ ID NO: 86
gucggcaugaucuggucau

SEQ ID NO: 10583 - RNA, 19 nt, Artificial Sequence
  Description of Artificial Sequence: Synthetic oligonucleotide
  Antisense strand to SEQ ID NO: 10582
augaccagaucaugccgac

SEQ ID NO: 10584 - RNA, 19 nt, Artificial Sequence
  Description of Artificial Sequence: Synthetic oligonucleotide
  Sense strand starting at position 3831 of SEQ ID NO: 86
gguugauacuugggcuaua

SEQ ID NO: 10585 - RNA, 19 nt, Artificial Sequence
  Description of Artificial Sequence: Synthetic oligonucleotide
  Antisense strand to SEQ ID NO: 10584
uauagcccaaguaucaacc

SEQ ID NO: 10586 - RNA, 19 nt, Artificial Sequence
  Description of Artificial Sequence: Synthetic oligonucleotide
  Sense strand starting at position 3829 of SEQ ID NO: 86
gagguugauacuugggcua

SEQ ID NO: 10587 - RNA, 19 nt, Artificial Sequence
  Description of Artificial Sequence: Synthetic oligonucleotide
  Antisense strand to SEQ ID NO: 10586
uagcccaaguaucaaccuc

SEQ ID NO: 10588 - RNA, 19 nt, Artificial Sequence
  Description of Artificial Sequence: Synthetic oligonucleotide
  Sense strand starting at position 3684 of SEQ ID NO: 86
ugcccuauugcugaaccaa

SEQ ID NO: 10589 - RNA, 19 nt, Artificial Sequence
  Description of Artificial Sequence: Synthetic oligonucleotide
  Antisense strand to SEQ ID NO: 10588
uugguucagcaauagggca

SEQ ID NO: 10590 - RNA, 19 nt, Artificial Sequence
  Description of Artificial Sequence: Synthetic oligonucleotide
  Sense strand starting at position 3674 of SEQ ID NO: 86
ccguaucaguugcccuauu

SEQ ID NO: 10591 - RNA, 19 nt, Artificial Sequence
  Description of Artificial Sequence: Synthetic oligonucleotide
  Antisense strand to SEQ ID NO: 10590
aauagggcaacugauacgg

SEQ ID NO: 10592 - RNA, 19 nt, Artificial Sequence
  Description of Artificial Sequence: Synthetic oligonucleotide
  Sense strand starting at position 3665 of SEQ ID NO: 86
gggcuagauccguaucagu

SEQ ID NO: 10593 - RNA, 19 nt, Artificial Sequence
  Description of Artificial Sequence: Synthetic oligonucleotide
  Antisense strand to SEQ ID NO: 10592
acugauacggaucuagccc

SEQ ID NO: 10594 - RNA, 19 nt, Artificial Sequence
  Description of Artificial Sequence: Synthetic oligonucleotide
  Sense strand starting at position 3199 of SEQ ID NO: 86
gagucaaaggcucaaaucu

SEQ ID NO: 10595 - RNA, 19 nt, Artificial Sequence
  Description of Artificial Sequence: Synthetic oligonucleotide
  Antisense strand to SEQ ID NO: 10594
agauuugagccuuugacuc

SEQ ID NO: 10596 - RNA, 19 nt, Artificial Sequence
  Description of Artificial Sequence: Synthetic oligonucleotide
  Sense strand starting at position 3195 of SEQ ID NO: 86
aguugagucaaaggcucaa

SEQ ID NO: 10597 - RNA, 19 nt, Artificial Sequence
  Description of Artificial Sequence: Synthetic oligonucleotide
  Antisense strand to SEQ ID NO: 10596
uugagccuuugacucaacu

SEQ ID NO: 10598 - RNA, 19 nt, Artificial Sequence
  Description of Artificial Sequence: Synthetic oligonucleotide
  Sense strand starting at position 3174 of SEQ ID NO: 86
gguucauauugggucagca

SEQ ID NO: 10599 - RNA, 19 nt, Artificial Sequence
  Description of Artificial Sequence: Synthetic oligonucleotide
  Antisense strand to SEQ ID NO: 10598
ugcugacccaauaugaacc

SEQ ID NO: 10600 - RNA, 19 nt, Artificial Sequence
  Description of Artificial Sequence: Synthetic oligonucleotide
  Sense strand starting at position 3054 of SEQ ID NO: 86
cccagaguguaagaucuuu

SEQ ID NO: 10601 - RNA, 19 nt, Artificial Sequence
  Description of Artificial Sequence: Synthetic oligonucleotide
  Antisense strand to SEQ ID NO: 10600
aaagaucuuacacucuggg

SEQ ID NO: 10602 - RNA, 19 nt, Artificial Sequence
  Description of Artificial Sequence: Synthetic oligonucleotide
  Sense strand starting at position 2985 of SEQ ID NO: 86
gugacucuaucucuuacuu

SEQ ID NO: 10603 - RNA, 19 nt, Artificial Sequence
  Description of Artificial Sequence: Synthetic oligonucleotide
  Antisense strand to SEQ ID NO: 10602
aaguaagagauagagucac

SEQ ID NO: 10604 - RNA, 19 nt, Artificial Sequence
  Description of Artificial Sequence: Synthetic oligonucleotide
  Sense strand starting at position 2983 of SEQ ID NO: 86
gggugacucuaucucuuac

SEQ ID NO: 10605 - RNA, 19 nt, Artificial Sequence
  Description of Artificial Sequence: Synthetic oligonucleotide
  Antisense strand to SEQ ID NO: 10604
guaagagauagagucaccc

SEQ ID NO: 10606 - RNA, 19 nt, Artificial Sequence
  Description of Artificial Sequence: Synthetic oligonucleotide
  Sense strand starting at position 2957 of SEQ ID NO: 86
aagugaacuuggcaggagu

SEQ ID NO: 10607 - RNA, 19 nt, Artificial Sequence
  Description of Artificial Sequence: Synthetic oligonucleotide
  Antisense strand to SEQ ID NO: 10606
acuccugccaaguucacuu

SEQ ID NO: 10608 - RNA, 19 nt, Artificial Sequence
  Description of Artificial Sequence: Synthetic oligonucleotide
  Sense strand starting at position 2825 of SEQ ID NO: 86
aggcaaggccugcaauuau

SEQ ID NO: 10609 - RNA, 19 nt, Artificial Sequence
  Description of Artificial Sequence: Synthetic oligonucleotide
  Antisense strand to SEQ ID NO: 10608
auaauugcaggccuugccu

SEQ ID NO: 10610 - RNA, 19 nt, Artificial Sequence
  Description of Artificial Sequence: Synthetic oligonucleotide
  Sense strand starting at position 2787 of SEQ ID NO: 86
cucugcaaguguucugcaa

SEQ ID NO: 10611 - RNA, 19 nt, Artificial Sequence
  Description of Artificial Sequence: Synthetic oligonucleotide
  Antisense strand to SEQ ID NO: 10610
uugcagaacacuugcagag

SEQ ID NO: 10612 - RNA, 19 nt, Artificial Sequence
  Description of Artificial Sequence: Synthetic oligonucleotide
  Sense strand starting at position 2778 of SEQ ID NO: 86
agauaauggcucugcaagu

SEQ ID NO: 10613 - RNA, 19 nt, Artificial Sequence
  Description of Artificial Sequence: Synthetic oligonucleotide
  Antisense strand to SEQ ID NO: 10612
acuugcagagccauuaucu

SEQ ID NO: 10614 - RNA, 19 nt, Artificial Sequence
  Description of Artificial Sequence: Synthetic oligonucleotide
  Sense strand starting at position 2775 of SEQ ID NO: 86
cagagauaauggcucugca

SEQ ID NO: 10615 - RNA, 19 nt, Artificial Sequence
  Description of Artificial Sequence: Synthetic oligonucleotide
  Antisense strand to SEQ ID NO: 10614
ugcagagccauuaucucug

SEQ ID NO: 10616 - RNA, 19 nt, Artificial Sequence
  Description of Artificial Sequence: Synthetic oligonucleotide
  Sense strand starting at position 2763 of SEQ ID NO: 86
ccauaaggcucacagagau

SEQ ID NO: 10617 - RNA, 19 nt, Artificial Sequence
  Description of Artificial Sequence: Synthetic oligonucleotide
  Antisense strand to SEQ ID NO: 10616
aucucugugagccuuaugg

SEQ ID NO: 10618 - RNA, 19 nt, Artificial Sequence
  Description of Artificial Sequence: Synthetic oligonucleotide
  Sense strand starting at position 2700 of SEQ ID NO: 86
ggcuuuggguccucaucua

SEQ ID NO: 10619 - RNA, 19 nt, Artificial Sequence
  Description of Artificial Sequence: Synthetic oligonucleotide
  Antisense strand to SEQ ID NO: 10618
uagaugaggacccaaagcc

SEQ ID NO: 10620 - RNA, 19 nt, Artificial Sequence
  Description of Artificial Sequence: Synthetic oligonucleotide
  Sense strand starting at position 2672 of SEQ ID NO: 86
ccgggcaugucucuaccua

SEQ ID NO: 10621 - RNA, 19 nt, Artificial Sequence
  Description of Artificial Sequence: Synthetic oligonucleotide
  Antisense strand to SEQ ID NO: 10620
uagguagagacaugcccgg

SEQ ID NO: 10622 - RNA, 19 nt, Artificial Sequence
  Description of Artificial Sequence: Synthetic oligonucleotide
  Sense strand starting at position 2609 of SEQ ID NO: 86
gaauaaguuugggagaaag

SEQ ID NO: 10623 - RNA, 19 nt, Artificial Sequence
  Description of Artificial Sequence: Synthetic oligonucleotide
  Antisense strand to SEQ ID NO: 10622
cuuucucccaaacuuauuc

SEQ ID NO: 10624 - RNA, 19 nt, Artificial Sequence
  Description of Artificial Sequence: Synthetic oligonucleotide
  Sense strand starting at position 2608 of SEQ ID NO: 86
agaauaaguuugggagaaa

SEQ ID NO: 10625 - RNA, 19 nt, Artificial Sequence
  Description of Artificial Sequence: Synthetic oligonucleotide
  Antisense strand to SEQ ID NO: 10624
uuucucccaaacuuauucu

SEQ ID NO: 10626 - RNA, 19 nt, Artificial Sequence
  Description of Artificial Sequence: Synthetic oligonucleotide
  Sense strand starting at position 2607 of SEQ ID NO: 86
cagaauaaguuugggagaa

SEQ ID NO: 10627 - RNA, 19 nt, Artificial Sequence
  Description of Artificial Sequence: Synthetic oligonucleotide
  Antisense strand to SEQ ID NO: 10626
uucucccaaacuuauucug

SEQ ID NO: 10628 - RNA, 19 nt, Artificial Sequence
  Description of Artificial Sequence: Synthetic oligonucleotide
  Sense strand starting at position 2416 of SEQ ID NO: 86
uggcaucccucaggagaga

SEQ ID NO: 10629 - RNA, 19 nt, Artificial Sequence
  Description of Artificial Sequence: Synthetic oligonucleotide
  Antisense strand to SEQ ID NO: 10628
ucucuccugagggaugcca

SEQ ID NO: 10630 - RNA, 19 nt, Artificial Sequence
  Description of Artificial Sequence: Synthetic oligonucleotide
  Sense strand starting at position 2398 of SEQ ID NO: 86
uccucugggcccugauuau

SEQ ID NO: 10631 - RNA, 19 nt, Artificial Sequence
  Description of Artificial Sequence: Synthetic oligonucleotide
  Antisense strand to SEQ ID NO: 10630
auaaucagggcccagagga

SEQ ID NO: 10632 - RNA, 19 nt, Artificial Sequence
  Description of Artificial Sequence: Synthetic oligonucleotide
  Sense strand starting at position 2091 of SEQ ID NO: 86
gcaucagaguugggagaua

SEQ ID NO: 10633 - RNA, 19 nt, Artificial Sequence
  Description of Artificial Sequence: Synthetic oligonucleotide
  Antisense strand to SEQ ID NO: 10632
uaucucccaacucugaugc

SEQ ID NO: 10634 - RNA, 19 nt, Artificial Sequence
  Description of Artificial Sequence: Synthetic oligonucleotide
  Sense strand starting at position 2089 of SEQ ID NO: 86
gagcaucagaguugggaga

SEQ ID NO: 10635 - RNA, 19 nt, Artificial Sequence
  Description of Artificial Sequence: Synthetic oligonucleotide
  Antisense strand to SEQ ID NO: 10634
ucucccaacucugaugcuc

SEQ ID NO: 10636 - RNA, 19 nt, Artificial Sequence
  Description of Artificial Sequence: Synthetic oligonucleotide
  Sense strand starting at position 1641 of SEQ ID NO: 86
cccagcuccucagugagaa

SEQ ID NO: 10637 - RNA, 19 nt, Artificial Sequence
  Description of Artificial Sequence: Synthetic oligonucleotide
  Antisense strand to SEQ ID NO: 10636
uucucacugaggagcuggg

SEQ ID NO: 10638 - RNA, 19 nt, Artificial Sequence
  Description of Artificial Sequence: Synthetic oligonucleotide
  Sense strand starting at position 1567 of SEQ ID NO: 86
cgugaagcugcuggucuau

SEQ ID NO: 10639 - RNA, 19 nt, Artificial Sequence
  Description of Artificial Sequence: Synthetic oligonucleotide
  Antisense strand to SEQ ID NO: 10638
auagaccagcagcuucacg

SEQ ID NO: 10640 - RNA, 19 nt, Artificial Sequence
  Description of Artificial Sequence: Synthetic oligonucleotide
  Sense strand starting at position 981 of SEQ ID NO: 86
ugagaaucuccacgugacu

SEQ ID NO: 10641 - RNA, 19 nt, Artificial Sequence
  Description of Artificial Sequence: Synthetic oligonucleotide
  Antisense strand to SEQ ID NO: 10640
agucacguggagauucuca

SEQ ID NO: 10642 - RNA, 19 nt, Artificial Sequence
  Description of Artificial Sequence: Synthetic oligonucleotide
  Sense strand starting at position 969 of SEQ ID NO: 86
ucccucaggccaugagaau

SEQ ID NO: 10643 - RNA, 19 nt, Artificial Sequence
  Description of Artificial Sequence: Synthetic oligonucleotide
  Antisense strand to SEQ ID NO: 10642
auucucauggccugaggga

SEQ ID NO: 10644 - RNA, 19 nt, Artificial Sequence
  Description of Artificial Sequence: Synthetic oligonucleotide
  Sense strand starting at position 696 of SEQ ID NO: 86
cagugaugccagggucaaa

SEQ ID NO: 10645 - RNA, 19 nt, Artificial Sequence
  Description of Artificial Sequence: Synthetic oligonucleotide
  Antisense strand to SEQ ID NO: 10644
uuugacccuggcaucacug

SEQ ID NO: 10646 - RNA, 19 nt, Artificial Sequence
  Description of Artificial Sequence: Synthetic oligonucleotide
  Sense strand starting at position 548 of SEQ ID NO: 86
ggugauaccucggcgaucu

SEQ ID NO: 10647 - RNA, 19 nt, Artificial Sequence
  Description of Artificial Sequence: Synthetic oligonucleotide
  Antisense strand to SEQ ID NO: 10646
agaucgccgagguaucacc

SEQ ID NO: 10648 - RNA, 19 nt, Artificial Sequence
  Description of Artificial Sequence: Synthetic oligonucleotide
  Sense strand starting at position 547 of SEQ ID NO: 86
aggugauaccucggcgauc

SEQ ID NO: 10649 - RNA, 19 nt, Artificial Sequence
  Description of Artificial Sequence: Synthetic oligonucleotide
  Antisense strand to SEQ ID NO: 10648
gaucgccgagguaucaccu

SEQ ID NO: 10650 - RNA, 19 nt, Artificial Sequence
  Description of Artificial Sequence: Synthetic oligonucleotide
  Sense strand starting at position 3936 of SEQ ID NO: 84
aggguauaguuagugagau

SEQ ID NO: 10651 - RNA, 19 nt, Artificial Sequence
  Description of Artificial Sequence: Synthetic oligonucleotide
  Antisense strand to SEQ ID NO: 10650
aucucacuaacuauacccu

SEQ ID NO: 10652 - RNA, 19 nt, Artificial Sequence
  Description of Artificial Sequence: Synthetic oligonucleotide
  Sense strand starting at position 3925 of SEQ ID NO: 84
gcagguuggcaaggguaua

SEQ ID NO: 10653 - RNA, 19 nt, Artificial Sequence
  Description of Artificial Sequence: Synthetic oligonucleotide
  Antisense strand to SEQ ID NO: 10652
uauacccuugccaaccugc

SEQ ID NO: 10654 - RNA, 19 nt, Artificial Sequence
  Description of Artificial Sequence: Synthetic oligonucleotide
  Sense strand starting at position 3853 of SEQ ID NO: 84
cagagauaaccagguuuac

SEQ ID NO: 10655 - RNA, 19 nt, Artificial Sequence
  Description of Artificial Sequence: Synthetic oligonucleotide
  Antisense strand to SEQ ID NO: 10654
guaaaccugguuaucucug

SEQ ID NO: 10656 - RNA, 19 nt, Artificial Sequence
  Description of Artificial Sequence: Synthetic oligonucleotide
  Sense strand starting at position 3776 of SEQ ID NO: 84
gcuacuguucccugaacaa

SEQ ID NO: 10657 - RNA, 19 nt, Artificial Sequence
  Description of Artificial Sequence: Synthetic oligonucleotide
  Antisense strand to SEQ ID NO: 10656
uuguucagggaacaguagc

SEQ ID NO: 10658 - RNA, 19 nt, Artificial Sequence
  Description of Artificial Sequence: Synthetic oligonucleotide
  Sense strand starting at position 3775 of SEQ ID NO: 84
ggcuacuguucccugaaca

SEQ ID NO: 10659 - RNA, 19 nt, Artificial Sequence
  Description of Artificial Sequence: Synthetic oligonucleotide
  Antisense strand to SEQ ID NO: 10658
uguucagggaacaguagcc

SEQ ID NO: 10660 - RNA, 19 nt, Artificial Sequence
  Description of Artificial Sequence: Synthetic oligonucleotide
  Sense strand starting at position 3761 of SEQ ID NO: 84
uuccauugaucccuggcua

SEQ ID NO: 10661 - RNA, 19 nt, Artificial Sequence
  Description of Artificial Sequence: Synthetic oligonucleotide
  Antisense strand to SEQ ID NO: 10660
uagccagggaucaauggaa

SEQ ID NO: 10662 - RNA, 19 nt, Artificial Sequence
  Description of Artificial Sequence: Synthetic oligonucleotide
  Sense strand starting at position 3621 of SEQ ID NO: 84
guucuaaugcuguuugucu

SEQ ID NO: 10663 - RNA, 19 nt, Artificial Sequence
  Description of Artificial Sequence: Synthetic oligonucleotide
  Antisense strand to SEQ ID NO: 10662
agacaaacagcauuagaac

SEQ ID NO: 10664 - RNA, 19 nt, Artificial Sequence
  Description of Artificial Sequence: Synthetic oligonucleotide
  Sense strand starting at position 3550 of SEQ ID NO: 84
augcauuagcaggaauuaa

SEQ ID NO: 10665 - RNA, 19 nt, Artificial Sequence
  Description of Artificial Sequence: Synthetic oligonucleotide
  Antisense strand to SEQ ID NO: 10664
uuaauuccugcuaaugcau

SEQ ID NO: 10666 - RNA, 19 nt, Artificial Sequence
  Description of Artificial Sequence: Synthetic oligonucleotide
  Sense strand starting at position 3504 of SEQ ID NO: 84
ggaacuuguggagggaagu

SEQ ID NO: 10667 - RNA, 19 nt, Artificial Sequence
  Description of Artificial Sequence: Synthetic oligonucleotide
  Antisense strand to SEQ ID NO: 10666
acuucccuccacaaguucc

SEQ ID NO: 10668 - RNA, 19 nt, Artificial Sequence
  Description of Artificial Sequence: Synthetic oligonucleotide
  Sense strand starting at position 3450 of SEQ ID NO: 84
gggucuauccaacaagcau

SEQ ID NO: 10669 - RNA, 19 nt, Artificial Sequence
  Description of Artificial Sequence: Synthetic oligonucleotide
  Antisense strand to SEQ ID NO: 10668
augcuuguuggauagaccc

SEQ ID NO: 10670 - RNA, 19 nt, Artificial Sequence
  Description of Artificial Sequence: Synthetic oligonucleotide
  Sense strand starting at position 3398 of SEQ ID NO: 84
ggccuugguucucuauuga

SEQ ID NO: 10671 - RNA, 19 nt, Artificial Sequence
  Description of Artificial Sequence: Synthetic oligonucleotide
  Antisense strand to SEQ ID NO: 10670
ucaauagagaaccaaggcc

SEQ ID NO: 10672 - RNA, 19 nt, Artificial Sequence
  Description of Artificial Sequence: Synthetic oligonucleotide
  Sense strand starting at position 3354 of SEQ ID NO: 84
guaguuaguacucaguauu

SEQ ID NO: 10673 - RNA, 19 nt, Artificial Sequence
  Description of Artificial Sequence: Synthetic oligonucleotide
  Antisense strand to SEQ ID NO: 10672
aauacugaguacuaacuac

SEQ ID NO: 10674 - RNA, 19 nt, Artificial Sequence
  Description of Artificial Sequence: Synthetic oligonucleotide
  Sense strand starting at position 3353 of SEQ ID NO: 84
uguaguuaguacucaguau

SEQ ID NO: 10675 - RNA, 19 nt, Artificial Sequence
  Description of Artificial Sequence: Synthetic oligonucleotide
  Antisense strand to SEQ ID NO: 10674
auacugaguacuaacuaca

SEQ ID NO: 10676 - RNA, 19 nt, Artificial Sequence
  Description of Artificial Sequence: Synthetic oligonucleotide
  Sense strand starting at position 3301 of SEQ ID NO: 84
gguuaagauaaaugaguua

SEQ ID NO: 10677 - RNA, 19 nt, Artificial Sequence
  Description of Artificial Sequence: Synthetic oligonucleotide
  Antisense strand to SEQ ID NO: 10676
uaacucauuuaucuuaacc

SEQ ID NO: 10678 - RNA, 19 nt, Artificial Sequence
  Description of Artificial Sequence: Synthetic oligonucleotide
  Sense strand starting at position 3291 of SEQ ID NO: 84
uuuauauggugguuaagau

SEQ ID NO: 10679 - RNA, 19 nt, Artificial Sequence
  Description of Artificial Sequence: Synthetic oligonucleotide
  Antisense strand to SEQ ID NO: 10678
aucuuaaccaccauauaaa

SEQ ID NO: 10680 - RNA, 19 nt, Artificial Sequence
  Description of Artificial Sequence: Synthetic oligonucleotide
  Sense strand starting at position 3289 of SEQ ID NO: 84
gcuuuauauggugguuaag

SEQ ID NO: 10681 - RNA, 19 nt, Artificial Sequence
  Description of Artificial Sequence: Synthetic oligonucleotide
  Antisense strand to SEQ ID NO: 10680
cuuaaccaccauauaaagc

SEQ ID NO: 10682 - RNA, 19 nt, Artificial Sequence
  Description of Artificial Sequence: Synthetic oligonucleotide
  Sense strand starting at position 3275 of SEQ ID NO: 84
guguaagaguaccugcuuu

SEQ ID NO: 10683 - RNA, 19 nt, Artificial Sequence
  Description of Artificial Sequence: Synthetic oligonucleotide
  Antisense strand to SEQ ID NO: 10682
aaagcagguacucuuacac

SEQ ID NO: 10684 - RNA, 19 nt, Artificial Sequence
  Description of Artificial Sequence: Synthetic oligonucleotide
  Sense strand starting at position 3251 of SEQ ID NO: 84
gcuucuauuucgucuguaa

SEQ ID NO: 10685 - RNA, 19 nt, Artificial Sequence
  Description of Artificial Sequence: Synthetic oligonucleotide
  Antisense strand to SEQ ID NO: 10684
uuacagacgaaauagaagc

SEQ ID NO: 10686 - RNA, 19 nt, Artificial Sequence
  Description of Artificial Sequence: Synthetic oligonucleotide
  Sense strand starting at position 3218 of SEQ ID NO: 84
acugauacugggcaaguua

SEQ ID NO: 10687 - RNA, 19 nt, Artificial Sequence
  Description of Artificial Sequence: Synthetic oligonucleotide
  Antisense strand to SEQ ID NO: 10686
uaacuugcccaguaucagu

SEQ ID NO: 10688 - RNA, 19 nt, Artificial Sequence
  Description of Artificial Sequence: Synthetic oligonucleotide
  Sense strand starting at position 3217 of SEQ ID NO: 84
gacugauacugggcaaguu

SEQ ID NO: 10689 - RNA, 19 nt, Artificial Sequence
  Description of Artificial Sequence: Synthetic oligonucleotide
  Antisense strand to SEQ ID NO: 10688
aacuugcccaguaucaguc

SEQ ID NO: 10690 - RNA, 19 nt, Artificial Sequence
  Description of Artificial Sequence: Synthetic oligonucleotide
  Sense strand starting at position 3155 of SEQ ID NO: 84
gguuaagagcuuuaacucu

SEQ ID NO: 10691 - RNA, 19 nt, Artificial Sequence
  Description of Artificial Sequence: Synthetic oligonucleotide
  Antisense strand to SEQ ID NO: 10690
agaguuaaagcucuuaacc

SEQ ID NO: 10692 - RNA, 19 nt, Artificial Sequence
  Description of Artificial Sequence: Synthetic oligonucleotide
  Sense strand starting at position 3143 of SEQ ID NO: 84
ucuguauuuggugguuaag

SEQ ID NO: 10693 - RNA, 19 nt, Artificial Sequence
  Description of Artificial Sequence: Synthetic oligonucleotide
  Antisense strand to SEQ ID NO: 10692
cuuaaccaccaaauacaga

SEQ ID NO: 10694 - RNA, 19 nt, Artificial Sequence
  Description of Artificial Sequence: Synthetic oligonucleotide
  Sense strand starting at position 3013 of SEQ ID NO: 84
uguuaucauugucccagga

SEQ ID NO: 10695 - RNA, 19 nt, Artificial Sequence
  Description of Artificial Sequence: Synthetic oligonucleotide
  Antisense strand to SEQ ID NO: 10694
uccugggacaaugauaaca

SEQ ID NO: 10696 - RNA, 19 nt, Artificial Sequence
  Description of Artificial Sequence: Synthetic oligonucleotide
  Sense strand starting at position 3001 of SEQ ID NO: 84
gugaaagguagcuguuauc

SEQ ID NO: 10697 - RNA, 19 nt, Artificial Sequence
  Description of Artificial Sequence: Synthetic oligonucleotide
  Antisense strand to SEQ ID NO: 10696
gauaacagcuaccuuucac

SEQ ID NO: 10698 - RNA, 19 nt, Artificial Sequence
  Description of Artificial Sequence: Synthetic oligonucleotide
  Sense strand starting at position 3000 of SEQ ID NO: 84
agugaaagguagcuguuau

SEQ ID NO: 10699 - RNA, 19 nt, Artificial Sequence
  Description of Artificial Sequence: Synthetic oligonucleotide
  Antisense strand to SEQ ID NO: 10698
auaacagcuaccuuucacu

SEQ ID NO: 10700 - RNA, 19 nt, Artificial Sequence
  Description of Artificial Sequence: Synthetic oligonucleotide
  Sense strand starting at position 2115 of SEQ ID NO: 84
acccuagccucuuuggauu

SEQ ID NO: 10701 - RNA, 19 nt, Artificial Sequence
  Description of Artificial Sequence: Synthetic oligonucleotide
  Antisense strand to SEQ ID NO: 10700
aauccaaagaggcuagggu

SEQ ID NO: 10702 - RNA, 19 nt, Artificial Sequence
  Description of Artificial Sequence: Synthetic oligonucleotide
  Sense strand starting at position 1271 of SEQ ID NO: 84
gacagagcccagcaucuau

SEQ ID NO: 10703 - RNA, 19 nt, Artificial Sequence
  Description of Artificial Sequence: Synthetic oligonucleotide
  Antisense strand to SEQ ID NO: 10702
auagaugcugggcucuguc

SEQ ID NO: 10704 - RNA, 19 nt, Artificial Sequence
  Description of Artificial Sequence: Synthetic oligonucleotide
  Sense strand starting at position 1075 of SEQ ID NO: 84
augcccacuccuugugaca

SEQ ID NO: 10705 - RNA, 19 nt, Artificial Sequence
  Description of Artificial Sequence: Synthetic oligonucleotide
  Antisense strand to SEQ ID NO: 10704
ugucacaaggagugggcau

SEQ ID NO: 10706 - RNA, 19 nt, Artificial Sequence
  Description of Artificial Sequence: Synthetic oligonucleotide
  Sense strand starting at position 831 of SEQ ID NO: 84
aaugguugugcccagaugu

SEQ ID NO: 10707 - RNA, 19 nt, Artificial Sequence
  Description of Artificial Sequence: Synthetic oligonucleotide
  Antisense strand to SEQ ID NO: 10706
acaucugggcacaaccauu

SEQ ID NO: 10708 - RNA, 19 nt, Artificial Sequence
  Description of Artificial Sequence: Synthetic oligonucleotide
  Sense strand starting at position 637 of SEQ ID NO: 84
ugcuuacuagagugagaga

SEQ ID NO: 10709 - RNA, 19 nt, Artificial Sequence
  Description of Artificial Sequence: Synthetic oligonucleotide
  Antisense strand to SEQ ID NO: 10708
ucucucacucuaguaagca

SEQ ID NO: 10710 - RNA, 19 nt, Artificial Sequence
  Description of Artificial Sequence: Synthetic oligonucleotide
  Sense strand starting at position 631 of SEQ ID NO: 84
cagagaugcuuacuagagu

SEQ ID NO: 10711 - RNA, 19 nt, Artificial Sequence
  Description of Artificial Sequence: Synthetic oligonucleotide
  Antisense strand to SEQ ID NO: 10710
acucuaguaagcaucucug

SEQ ID NO: 10712 - RNA, 19 nt, Artificial Sequence
  Description of Artificial Sequence: Synthetic oligonucleotide
  Sense strand starting at position 629 of SEQ ID NO: 84
ugcagagaugcuuacuaga

SEQ ID NO: 10713 - RNA, 19 nt, Artificial Sequence
  Description of Artificial Sequence: Synthetic oligonucleotide
  Antisense strand to SEQ ID NO: 10712
ucuaguaagcaucucugca

SEQ ID NO: 10714 - RNA, 19 nt, Artificial Sequence
  Description of Artificial Sequence: Synthetic oligonucleotide
  Sense strand starting at position 544 of SEQ ID NO: 84
agauaucccucugcaagca

SEQ ID NO: 10715 - RNA, 19 nt, Artificial Sequence
  Description of Artificial Sequence: Synthetic oligonucleotide
  Antisense strand to SEQ ID NO: 10714
ugcuugcagagggauaucu

SEQ ID NO: 10716 - RNA, 19 nt, Artificial Sequence
  Description of Artificial Sequence: Synthetic oligonucleotide
  Sense strand starting at position 503 of SEQ ID NO: 84
ggucuuuccuuagccacaa

SEQ ID NO: 10717 - RNA, 19 nt, Artificial Sequence
  Description of Artificial Sequence: Synthetic oligonucleotide
  Antisense strand to SEQ ID NO: 10716
uuguggcuaaggaaagacc

SEQ ID NO: 10718 - RNA, 19 nt, Artificial Sequence
  Description of Artificial Sequence: Synthetic oligonucleotide
  Sense strand starting at position 496 of SEQ ID NO: 84
cagggugggucuuuccuua

SEQ ID NO: 10719 - RNA, 19 nt, Artificial Sequence
  Description of Artificial Sequence: Synthetic oligonucleotide
  Antisense strand to SEQ ID NO: 10718
uaaggaaagacccacccug

SEQ ID NO: 10720 - RNA, 19 nt, Artificial Sequence
  Description of Artificial Sequence: Synthetic oligonucleotide
  Sense strand starting at position 477 of SEQ ID NO: 84
augaucuggucaucaaagu

SEQ ID NO: 10721 - RNA, 19 nt, Artificial Sequence
  Description of Artificial Sequence: Synthetic oligonucleotide
  Antisense strand to SEQ ID NO: 10720
acuuugaugaccagaucau

SEQ ID NO: 10722 - RNA, 19 nt, Artificial Sequence
  Description of Artificial Sequence: Synthetic oligonucleotide
  Sense strand starting at position 475 of SEQ ID NO: 84
gcaugaucuggucaucaaa

SEQ ID NO: 10723 - RNA, 19 nt, Artificial Sequence
  Description of Artificial Sequence: Synthetic oligonucleotide
  Antisense strand to SEQ ID NO: 10722
uuugaugaccagaucaugc

SEQ ID NO: 10724 - RNA, 19 nt, Artificial Sequence
  Description of Artificial Sequence: Synthetic oligonucleotide
  Sense strand starting at position 422 of SEQ ID NO: 84
gagguugauacuugggcua

SEQ ID NO: 10725 - RNA, 19 nt, Artificial Sequence
  Description of Artificial Sequence: Synthetic oligonucleotide
  Antisense strand to SEQ ID NO: 10724
uagcccaaguaucaaccuc

SEQ ID NO: 10726 - RNA, 19 nt, Artificial Sequence
  Description of Artificial Sequence: Synthetic oligonucleotide
  Sense strand starting at position 277 of SEQ ID NO: 84
ugcccuauugcugaaccaa

SEQ ID NO: 10727 - RNA, 19 nt, Artificial Sequence
  Description of Artificial Sequence: Synthetic oligonucleotide
  Antisense strand to SEQ ID NO: 10726
uugguucagcaauagggca

SEQ ID NO: 10728 - RNA, 19 nt, Artificial Sequence
  Description of Artificial Sequence: Synthetic oligonucleotide
  Sense strand starting at position 258 of SEQ ID NO: 84
gggcuagauccguaucagu

SEQ ID NO: 10729 - RNA, 19 nt, Artificial Sequence
  Description of Artificial Sequence: Synthetic oligonucleotide
  Antisense strand to SEQ ID NO: 10728
acugauacggaucuagccc

SEQ ID NO: 10730 - RNA, 19 nt, Artificial Sequence
  Description of Artificial Sequence: Synthetic oligonucleotide
  Sense strand starting at position 3855 of SEQ ID NO: 87
uggcaucccucaggagaga

SEQ ID NO: 10731 - RNA, 19 nt, Artificial Sequence
  Description of Artificial Sequence: Synthetic oligonucleotide
  Antisense strand to SEQ ID NO: 10730
ucucuccugagggaugcca

SEQ ID NO: 10732 - RNA, 19 nt, Artificial Sequence
  Description of Artificial Sequence: Synthetic oligonucleotide
  Sense strand starting at position 3837 of SEQ ID NO: 87
uccucugggcccugauuau

SEQ ID NO: 10733 - RNA, 19 nt, Artificial Sequence
  Description of Artificial Sequence: Synthetic oligonucleotide
  Antisense strand to SEQ ID NO: 10732
auaaucagggcccagagga

SEQ ID NO: 10734 - RNA, 19 nt, Artificial Sequence
  Description of Artificial Sequence: Synthetic oligonucleotide
  Sense strand starting at position 3530 of SEQ ID NO: 87
gcaucagaguugggagaua

SEQ ID NO: 10735 - RNA, 19 nt, Artificial Sequence
  Description of Artificial Sequence: Synthetic oligonucleotide
  Antisense strand to SEQ ID NO: 10734
uaucucccaacucugaugc

SEQ ID NO: 10736 - RNA, 19 nt, Artificial Sequence
  Description of Artificial Sequence: Synthetic oligonucleotide
  Sense strand starting at position 3528 of SEQ ID NO: 87
gagcaucagaguugggaga

SEQ ID NO: 10737 - RNA, 19 nt, Artificial Sequence
  Description of Artificial Sequence: Synthetic oligonucleotide
  Antisense strand to SEQ ID NO: 10736
ucucccaacucugaugcuc

SEQ ID NO: 10738 - RNA, 19 nt, Artificial Sequence
  Description of Artificial Sequence: Synthetic oligonucleotide
  Sense strand starting at position 3080 of SEQ ID NO: 87
cccagcuccucagugagaa

SEQ ID NO: 10739 - RNA, 19 nt, Artificial Sequence
  Description of Artificial Sequence: Synthetic oligonucleotide
  Antisense strand to SEQ ID NO: 10738
uucucacugaggagcuggg

SEQ ID NO: 10740 - RNA, 19 nt, Artificial Sequence
  Description of Artificial Sequence: Synthetic oligonucleotide
  Sense strand starting at position 3006 of SEQ ID NO: 87
cgugaagcugcuggucuau

SEQ ID NO: 10741 - RNA, 19 nt, Artificial Sequence
  Description of Artificial Sequence: Synthetic oligonucleotide
  Antisense strand to SEQ ID NO: 10740
auagaccagcagcuucacg

SEQ ID NO: 10742 - RNA, 19 nt, Artificial Sequence
  Description of Artificial Sequence: Synthetic oligonucleotide
  Sense strand starting at position 3005 of SEQ ID NO: 87
ccgugaagcugcuggucua

SEQ ID NO: 10743 - RNA, 19 nt, Artificial Sequence
  Description of Artificial Sequence: Synthetic oligonucleotide
  Antisense strand to SEQ ID NO: 10742
uagaccagcagcuucacgg

SEQ ID NO: 10744 - RNA, 19 nt, Artificial Sequence
  Description of Artificial Sequence: Synthetic oligonucleotide
  Sense strand starting at position 2420 of SEQ ID NO: 87
ugagaaucuccacgugacu

SEQ ID NO: 10745 - RNA, 19 nt, Artificial Sequence
  Description of Artificial Sequence: Synthetic oligonucleotide
  Antisense strand to SEQ ID NO: 10744
agucacguggagauucuca

SEQ ID NO: 10746 - RNA, 19 nt, Artificial Sequence
  Description of Artificial Sequence: Synthetic oligonucleotide
  Sense strand starting at position 2408 of SEQ ID NO: 87
ucccucaggccaugagaau

SEQ ID NO: 10747 - RNA, 19 nt, Artificial Sequence
  Description of Artificial Sequence: Synthetic oligonucleotide
  Antisense strand to SEQ ID NO: 10746
auucucauggccugaggga

SEQ ID NO: 10748 - RNA, 19 nt, Artificial Sequence
  Description of Artificial Sequence: Synthetic oligonucleotide
  Sense strand starting at position 2135 of SEQ ID NO: 87
cagugaugccagggucaaa

SEQ ID NO: 10749 - RNA, 19 nt, Artificial Sequence
  Description of Artificial Sequence: Synthetic oligonucleotide
  Antisense strand to SEQ ID NO: 10748
uuugacccuggcaucacug

SEQ ID NO: 10750 - RNA, 19 nt, Artificial Sequence
  Description of Artificial Sequence: Synthetic oligonucleotide
  Sense strand starting at position 1987 of SEQ ID NO: 87
ggugauaccucggcgaucu

SEQ ID NO: 10751 - RNA, 19 nt, Artificial Sequence
  Description of Artificial Sequence: Synthetic oligonucleotide
  Antisense strand to SEQ ID NO: 10750
agaucgccgagguaucacc

SEQ ID NO: 10752 - RNA, 19 nt, Artificial Sequence
  Description of Artificial Sequence: Synthetic oligonucleotide
  Sense strand starting at position 1986 of SEQ ID NO: 87
aggugauaccucggcgauc

SEQ ID NO: 10753 - RNA, 19 nt, Artificial Sequence
  Description of Artificial Sequence: Synthetic oligonucleotide
  Antisense strand to SEQ ID NO: 10752
gaucgccgagguaucaccu

SEQ ID NO: 10754 - RNA, 19 nt, Artificial Sequence
  Description of Artificial Sequence: Synthetic oligonucleotide
  Sense strand starting at position 1408 of SEQ ID NO: 87
ucacucacuuuagagauga

SEQ ID NO: 10755 - RNA, 19 nt, Artificial Sequence
  Description of Artificial Sequence: Synthetic oligonucleotide
  Antisense strand to SEQ ID NO: 10754
ucaucucuaaagugaguga

SEQ ID NO: 10756 - RNA, 19 nt, Artificial Sequence
  Description of Artificial Sequence: Synthetic oligonucleotide
  Sense strand starting at position 1403 of SEQ ID NO: 87
uguucucacucacuuuaga

SEQ ID NO: 10757 - RNA, 19 nt, Artificial Sequence
  Description of Artificial Sequence: Synthetic oligonucleotide
  Antisense strand to SEQ ID NO: 10756
ucuaaagugagugagaaca

SEQ ID NO: 10758 - RNA, 19 nt, Artificial Sequence
  Description of Artificial Sequence: Synthetic oligonucleotide
  Sense strand starting at position 1388 of SEQ ID NO: 87
ugcagaacccugugcuguu

SEQ ID NO: 10759 - RNA, 19 nt, Artificial Sequence
  Description of Artificial Sequence: Synthetic oligonucleotide
  Antisense strand to SEQ ID NO: 10758
aacagcacaggguucugca

SEQ ID NO: 10760 - RNA, 19 nt, Artificial Sequence
  Description of Artificial Sequence: Synthetic oligonucleotide
  Sense strand starting at position 1360 of SEQ ID NO: 87
ugucacaugugauccucaa

SEQ ID NO: 10761 - RNA, 19 nt, Artificial Sequence
  Description of Artificial Sequence: Synthetic oligonucleotide
  Antisense strand to SEQ ID NO: 10760
uugaggaucacaugugaca

SEQ ID NO: 10762 - RNA, 19 nt, Artificial Sequence
  Description of Artificial Sequence: Synthetic oligonucleotide
  Sense strand starting at position 1134 of SEQ ID NO: 87
ggguuuagagccggcagaa

SEQ ID NO: 10763 - RNA, 19 nt, Artificial Sequence
  Description of Artificial Sequence: Synthetic oligonucleotide
  Antisense strand to SEQ ID NO: 10762
uucugccggcucuaaaccc

SEQ ID NO: 10764 - RNA, 19 nt, Artificial Sequence
  Description of Artificial Sequence: Synthetic oligonucleotide
  Sense strand starting at position 763 of SEQ ID NO: 87
ggccuuaucuuagaaccca

SEQ ID NO: 10765 - RNA, 19 nt, Artificial Sequence
  Description of Artificial Sequence: Synthetic oligonucleotide
  Antisense strand to SEQ ID NO: 10764
uggguucuaagauaaggcc

SEQ ID NO: 10766 - RNA, 19 nt, Artificial Sequence
  Description of Artificial Sequence: Synthetic oligonucleotide
  Sense strand starting at position 328 of SEQ ID NO: 87
gagggcaagagauguugaa

SEQ ID NO: 10767 - RNA, 19 nt, Artificial Sequence
  Description of Artificial Sequence: Synthetic oligonucleotide
  Antisense strand to SEQ ID NO: 10766
uucaacaucucuugcccuc

SEQ ID NO: 10768 - RNA, 19 nt, Artificial Sequence
  Description of Artificial Sequence: Synthetic oligonucleotide
  Sense strand starting at position 2284 of SEQ ID NO: 93
gugacaucuuuaguguugu

SEQ ID NO: 10769 - RNA, 19 nt, Artificial Sequence
  Description of Artificial Sequence: Synthetic oligonucleotide
  Antisense strand to SEQ ID NO: 10768
acaacacuaaagaugucac

SEQ ID NO: 10770 - RNA, 19 nt, Artificial Sequence
  Description of Artificial Sequence: Synthetic oligonucleotide
  Sense strand starting at position 2282 of SEQ ID NO: 93
augugacaucuuuaguguu

SEQ ID NO: 10771 - RNA, 19 nt, Artificial Sequence
  Description of Artificial Sequence: Synthetic oligonucleotide
  Antisense strand to SEQ ID NO: 10770
aacacuaaagaugucacau

SEQ ID NO: 10772 - RNA, 19 nt, Artificial Sequence
  Description of Artificial Sequence: Synthetic oligonucleotide
  Sense strand starting at position 2 of SEQ ID NO: 91
agacacaacucagaugaga

SEQ ID NO: 10773 - RNA, 19 nt, Artificial Sequence
  Description of Artificial Sequence: Synthetic oligonucleotide
  Antisense strand to SEQ ID NO: 10772
ucucaucugaguugugucu

SEQ ID NO: 10774 - RNA, 19 nt, Artificial Sequence
  Description of Artificial Sequence: Synthetic oligonucleotide
  Sense strand starting at position 61 of SEQ ID NO: 91
ggagaaagccuguacucuc

SEQ ID NO: 10775 - RNA, 19 nt, Artificial Sequence
  Description of Artificial Sequence: Synthetic oligonucleotide
  Antisense strand to SEQ ID NO: 10774
gagaguacaggcuuucucc

SEQ ID NO: 10776 - RNA, 19 nt, Artificial Sequence
  Description of Artificial Sequence: Synthetic oligonucleotide
  Sense strand starting at position 68 of SEQ ID NO: 91
gccuguacucucuacuaag

SEQ ID NO: 10777 - RNA, 19 nt, Artificial Sequence
  Description of Artificial Sequence: Synthetic oligonucleotide
  Antisense strand to SEQ ID NO: 10776
cuuaguagagaguacaggc

SEQ ID NO: 10778 - RNA, 19 nt, Artificial Sequence
  Description of Artificial Sequence: Synthetic oligonucleotide
  Sense strand starting at position 306 of SEQ ID NO: 91
agaaguaaacucugcuaua

SEQ ID NO: 10779 - RNA, 19 nt, Artificial Sequence
  Description of Artificial Sequence: Synthetic oligonucleotide
  Antisense strand to SEQ ID NO: 10778
uauagcagaguuuacuucu

SEQ ID NO: 10780 - RNA, 19 nt, Artificial Sequence
  Description of Artificial Sequence: Synthetic oligonucleotide
  Sense strand starting at position 333 of SEQ ID NO: 91
cuuaucucuuuaguagaga

SEQ ID NO: 10781 - RNA, 19 nt, Artificial Sequence
  Description of Artificial Sequence: Synthetic oligonucleotide
  Antisense strand to SEQ ID NO: 10780
ucucuacuaaagagauaag

SEQ ID NO: 10782 - RNA, 19 nt, Artificial Sequence
  Description of Artificial Sequence: Synthetic oligonucleotide
  Sense strand starting at position 578 of SEQ ID NO: 91
ccagaucuugugcauaauu

SEQ ID NO: 10783 - RNA, 19 nt, Artificial Sequence
  Description of Artificial Sequence: Synthetic oligonucleotide
  Antisense strand to SEQ ID NO: 10782
aauuaugcacaagaucugg

SEQ ID NO: 10784 - RNA, 19 nt, Artificial Sequence
  Description of Artificial Sequence: Synthetic oligonucleotide
  Sense strand starting at position 630 of SEQ ID NO: 91
gucugaaaggguugugaau

SEQ ID NO: 10785 - RNA, 19 nt, Artificial Sequence
  Description of Artificial Sequence: Synthetic oligonucleotide
  Antisense strand to SEQ ID NO: 10784
auucacaacccuuucagac

SEQ ID NO: 10786 - RNA, 19 nt, Artificial Sequence
  Description of Artificial Sequence: Synthetic oligonucleotide
  Sense strand starting at position 709 of SEQ ID NO: 91
ucugucuuacuguauauca

SEQ ID NO: 10787 - RNA, 19 nt, Artificial Sequence
  Description of Artificial Sequence: Synthetic oligonucleotide
  Antisense strand to SEQ ID NO: 10786
ugauauacaguaagacaga

SEQ ID NO: 10788 - RNA, 19 nt, Artificial Sequence
  Description of Artificial Sequence: Synthetic oligonucleotide
  Sense strand starting at position 711 of SEQ ID NO: 91
ugucuuacuguauaucauu

SEQ ID NO: 10789 - RNA, 19 nt, Artificial Sequence
  Description of Artificial Sequence: Synthetic oligonucleotide
  Antisense strand to SEQ ID NO: 10788
aaugauauacaguaagaca

SEQ ID NO: 10790 - RNA, 19 nt, Artificial Sequence
  Description of Artificial Sequence: Synthetic oligonucleotide
  Sense strand starting at position 717 of SEQ ID NO: 91
acuguauaucauugaaugu

SEQ ID NO: 10791 - RNA, 19 nt, Artificial Sequence
  Description of Artificial Sequence: Synthetic oligonucleotide
  Antisense strand to SEQ ID NO: 10790
acauucaaugauauacagu

SEQ ID NO: 10792 - RNA, 19 nt, Artificial Sequence
  Description of Artificial Sequence: Synthetic oligonucleotide
  Sense strand starting at position 765 of SEQ ID NO: 91
ucuugaaucuugguauagg

SEQ ID NO: 10793 - RNA, 19 nt, Artificial Sequence
  Description of Artificial Sequence: Synthetic oligonucleotide
  Antisense strand to SEQ ID NO: 10792
ccuauaccaagauucaaga

SEQ ID NO: 10794 - RNA, 19 nt, Artificial Sequence
  Description of Artificial Sequence: Synthetic oligonucleotide
  Sense strand starting at position 821 of SEQ ID NO: 91
gcucuuguugaagaaagau

SEQ ID NO: 10795 - RNA, 19 nt, Artificial Sequence
  Description of Artificial Sequence: Synthetic oligonucleotide
  Antisense strand to SEQ ID NO: 10794
aucuuucuucaacaagagc

SEQ ID NO: 10796 - RNA, 19 nt, Artificial Sequence
  Description of Artificial Sequence: Synthetic oligonucleotide
  Sense strand starting at position 908 of SEQ ID NO: 91
uuagaauacuuaccuguga

SEQ ID NO: 10797 - RNA, 19 nt, Artificial Sequence
  Description of Artificial Sequence: Synthetic oligonucleotide
  Antisense strand to SEQ ID NO: 10796
ucacagguaaguauucuaa

SEQ ID NO: 10798 - RNA, 19 nt, Artificial Sequence
  Description of Artificial Sequence: Synthetic oligonucleotide
  Sense strand starting at position 959 of SEQ ID NO: 91
ucagaauaguguuuacuac

SEQ ID NO: 10799 - RNA, 19 nt, Artificial Sequence
  Description of Artificial Sequence: Synthetic oligonucleotide
  Antisense strand to SEQ ID NO: 10798
guaguaaacacuauucuga

SEQ ID NO: 10800 - RNA, 19 nt, Artificial Sequence
  Description of Artificial Sequence: Synthetic oligonucleotide
  Sense strand starting at position 983 of SEQ ID NO: 91
cagugaauucugcaauuga

SEQ ID NO: 10801 - RNA, 19 nt, Artificial Sequence
  Description of Artificial Sequence: Synthetic oligonucleotide
  Antisense strand to SEQ ID NO: 10800
ucaauugcagaauucacug

SEQ ID NO: 10802 - RNA, 19 nt, Artificial Sequence
  Description of Artificial Sequence: Synthetic oligonucleotide
  Sense strand starting at position 1119 of SEQ ID NO: 91
cuuguuguguauuugagga

SEQ ID NO: 10803 - RNA, 19 nt, Artificial Sequence
  Description of Artificial Sequence: Synthetic oligonucleotide
  Antisense strand to SEQ ID NO: 10802
uccucaaauacacaacaag

SEQ ID NO: 10804 - RNA, 19 nt, Artificial Sequence
  Description of Artificial Sequence: Synthetic oligonucleotide
  Sense strand starting at position 1149 of SEQ ID NO: 91
agcagaacccaauggugaa

SEQ ID NO: 10805 - RNA, 19 nt, Artificial Sequence
  Description of Artificial Sequence: Synthetic oligonucleotide
  Antisense strand to SEQ ID NO: 10804
uucaccauuggguucugcu

SEQ ID NO: 10806 - RNA, 19 nt, Artificial Sequence
  Description of Artificial Sequence: Synthetic oligonucleotide
  Sense strand starting at position 1150 of SEQ ID NO: 91
gcagaacccaauggugaaa

SEQ ID NO: 10807 - RNA, 19 nt, Artificial Sequence
  Description of Artificial Sequence: Synthetic oligonucleotide
  Antisense strand to SEQ ID NO: 10806
uuucaccauuggguucugc

SEQ ID NO: 10808 - RNA, 19 nt, Artificial Sequence
  Description of Artificial Sequence: Synthetic oligonucleotide
  Sense strand starting at position 1207 of SEQ ID NO: 91
guguccuuuccagaaacua

SEQ ID NO: 10809 - RNA, 19 nt, Artificial Sequence
  Description of Artificial Sequence: Synthetic oligonucleotide
  Antisense strand to SEQ ID NO: 10808
uaguuucuggaaaggacac

SEQ ID NO: 10810 - RNA, 19 nt, Artificial Sequence
  Description of Artificial Sequence: Synthetic oligonucleotide
  Sense strand starting at position 1536 of SEQ ID NO: 91
ucgagaauugcauacuaaa

SEQ ID NO: 10811 - RNA, 19 nt, Artificial Sequence
  Description of Artificial Sequence: Synthetic oligonucleotide
  Antisense strand to SEQ ID NO: 10810
uuuaguaugcaauucucga

SEQ ID NO: 10812 - RNA, 19 nt, Artificial Sequence
  Description of Artificial Sequence: Synthetic oligonucleotide
  Sense strand starting at position 1648 of SEQ ID NO: 91
uagauaacguaagcuaaga

SEQ ID NO: 10813 - RNA, 19 nt, Artificial Sequence
  Description of Artificial Sequence: Synthetic oligonucleotide
  Antisense strand to SEQ ID NO: 10812
ucuuagcuuacguuaucua

SEQ ID NO: 10814 - RNA, 19 nt, Artificial Sequence
  Description of Artificial Sequence: Synthetic oligonucleotide
  Sense strand starting at position 1904 of SEQ ID NO: 91
caucaaagguauguacaga

SEQ ID NO: 10815 - RNA, 19 nt, Artificial Sequence
  Description of Artificial Sequence: Synthetic oligonucleotide
  Antisense strand to SEQ ID NO: 10814
ucuguacauaccuuugaug

SEQ ID NO: 10816 - RNA, 19 nt, Artificial Sequence
  Description of Artificial Sequence: Synthetic oligonucleotide
  Sense strand starting at position 2227 of SEQ ID NO: 91
cauguaguccuugucgcau

SEQ ID NO: 10817 - RNA, 19 nt, Artificial Sequence
  Description of Artificial Sequence: Synthetic oligonucleotide
  Antisense strand to SEQ ID NO: 10816
augcgacaaggacuacaug

SEQ ID NO: 10818 - RNA, 19 nt, Artificial Sequence
  Description of Artificial Sequence: Synthetic oligonucleotide
  Sense strand starting at position 2281 of SEQ ID NO: 91
augugacaucuuuagugcu

SEQ ID NO: 10819 - RNA, 19 nt, Artificial Sequence
  Description of Artificial Sequence: Synthetic oligonucleotide
  Antisense strand to SEQ ID NO: 10818
agcacuaaagaugucacau

SEQ ID NO: 10820 - RNA, 19 nt, Artificial Sequence
  Description of Artificial Sequence: Synthetic oligonucleotide
  Sense strand starting at position 2603 of SEQ ID NO: 91
aggaaauggcccugguuga

SEQ ID NO: 10821 - RNA, 19 nt, Artificial Sequence
  Description of Artificial Sequence: Synthetic oligonucleotide
  Antisense strand to SEQ ID NO: 10820
ucaaccagggccauuuccu

SEQ ID NO: 10822 - RNA, 19 nt, Artificial Sequence
  Description of Artificial Sequence: Synthetic oligonucleotide
  Sense strand starting at position 2604 of SEQ ID NO: 91
ggaaauggcccugguugaa

SEQ ID NO: 10823 - RNA, 19 nt, Artificial Sequence
  Description of Artificial Sequence: Synthetic oligonucleotide
  Antisense strand to SEQ ID NO: 10822
uucaaccagggccauuucc

SEQ ID NO: 10824 - RNA, 19 nt, Artificial Sequence
  Description of Artificial Sequence: Synthetic oligonucleotide
  Sense strand starting at position 2811 of SEQ ID NO: 91
agagauuccuaguuacagc

SEQ ID NO: 10825 - RNA, 19 nt, Artificial Sequence
  Description of Artificial Sequence: Synthetic oligonucleotide
  Antisense strand to SEQ ID NO: 10824
gcuguaacuaggaaucucu

SEQ ID NO: 10826 - RNA, 19 nt, Artificial Sequence
  Description of Artificial Sequence: Synthetic oligonucleotide
  Sense strand starting at position 2838 of SEQ ID NO: 91
gauccucuacagugguaaa

SEQ ID NO: 10827 - RNA, 19 nt, Artificial Sequence
  Description of Artificial Sequence: Synthetic oligonucleotide
  Antisense strand to SEQ ID NO: 10826
uuuaccacuguagaggauc

SEQ ID NO: 10828 - RNA, 19 nt, Artificial Sequence
  Description of Artificial Sequence: Synthetic oligonucleotide
  Sense strand starting at position 2938 of SEQ ID NO: 91
accuaaaguucuguuugac

SEQ ID NO: 10829 - RNA, 19 nt, Artificial Sequence
  Description of Artificial Sequence: Synthetic oligonucleotide
  Antisense strand to SEQ ID NO: 10828
gucaaacagaacuuuaggu

SEQ ID NO: 10830 - RNA, 19 nt, Artificial Sequence
  Description of Artificial Sequence: Synthetic oligonucleotide
  Sense strand starting at position 3159 of SEQ ID NO: 91
agcgauauacuaggacaga

SEQ ID NO: 10831 - RNA, 19 nt, Artificial Sequence
  Description of Artificial Sequence: Synthetic oligonucleotide
  Antisense strand to SEQ ID NO: 10830
ucuguccuaguauaucgcu

SEQ ID NO: 10832 - RNA, 19 nt, Artificial Sequence
  Description of Artificial Sequence: Synthetic oligonucleotide
  Sense strand starting at position 3178 of SEQ ID NO: 91
ugaggucagacauacggua

SEQ ID NO: 10833 - RNA, 19 nt, Artificial Sequence
  Description of Artificial Sequence: Synthetic oligonucleotide
  Antisense strand to SEQ ID NO: 10832
uaccguaugucugaccuca

SEQ ID NO: 10834 - RNA, 19 nt, Artificial Sequence
  Description of Artificial Sequence: Synthetic oligonucleotide
  Sense strand starting at position 3322 of SEQ ID NO: 91
ucagaauccuacuuaggcu

SEQ ID NO: 10835 - RNA, 19 nt, Artificial Sequence
  Description of Artificial Sequence: Synthetic oligonucleotide
  Antisense strand to SEQ ID NO: 10834
agccuaaguaggauucuga

SEQ ID NO: 10836 - RNA, 19 nt, Artificial Sequence
  Description of Artificial Sequence: Synthetic oligonucleotide
  Sense strand starting at position 3405 of SEQ ID NO: 91
caguuaaauggcuggagga

SEQ ID NO: 10837 - RNA, 19 nt, Artificial Sequence
  Description of Artificial Sequence: Synthetic oligonucleotide
  Antisense strand to SEQ ID NO: 10836
uccuccagccauuuaacug

SEQ ID NO: 10838 - RNA, 19 nt, Artificial Sequence
  Description of Artificial Sequence: Synthetic oligonucleotide
  Sense strand starting at position 3534 of SEQ ID NO: 91
gguaccgagaggcauuaau

SEQ ID NO: 10839 - RNA, 19 nt, Artificial Sequence
  Description of Artificial Sequence: Synthetic oligonucleotide
  Antisense strand to SEQ ID NO: 10838
auuaaugccucucgguacc

SEQ ID NO: 10840 - RNA, 19 nt, Artificial Sequence
  Description of Artificial Sequence: Synthetic oligonucleotide
  Sense strand starting at position 3703 of SEQ ID NO: 91
aaaucagccguugauuaau

SEQ ID NO: 10841 - RNA, 19 nt, Artificial Sequence
  Description of Artificial Sequence: Synthetic oligonucleotide
  Antisense strand to SEQ ID NO: 10840
auuaaucaacggcugauuu

SEQ ID NO: 10842 - RNA, 19 nt, Artificial Sequence
  Description of Artificial Sequence: Synthetic oligonucleotide
  Sense strand starting at position 3717 of SEQ ID NO: 91
uuaauacggccuuaguuau

SEQ ID NO: 10843 - RNA, 19 nt, Artificial Sequence
  Description of Artificial Sequence: Synthetic oligonucleotide
  Antisense strand to SEQ ID NO: 10842
auaacuaaggccguauuaa

SEQ ID NO: 10844 - RNA, 19 nt, Artificial Sequence
  Description of Artificial Sequence: Synthetic oligonucleotide
  Sense strand starting at position 3799 of SEQ ID NO: 91
cuugcaguuacuggaaaga

SEQ ID NO: 10845 - RNA, 19 nt, Artificial Sequence
  Description of Artificial Sequence: Synthetic oligonucleotide
  Antisense strand to SEQ ID NO: 10844
ucuuuccaguaacugcaag

SEQ ID NO: 10846 - RNA, 19 nt, Artificial Sequence
  Description of Artificial Sequence: Synthetic oligonucleotide
  Sense strand starting at position 3899 of SEQ ID NO: 91
gcuaguuugcuggcuguga

SEQ ID NO: 10847 - RNA, 19 nt, Artificial Sequence
  Description of Artificial Sequence: Synthetic oligonucleotide
  Antisense strand to SEQ ID NO: 10846
ucacagccagcaaacuagc

SEQ ID NO: 10848 - RNA, 19 nt, Artificial Sequence
  Description of Artificial Sequence: Synthetic oligonucleotide
  Sense strand starting at position 3963 of SEQ ID NO: 91
ggaggaaugcccuguccaa

SEQ ID NO: 10849 - RNA, 19 nt, Artificial Sequence
  Description of Artificial Sequence: Synthetic oligonucleotide
  Antisense strand to SEQ ID NO: 10848
uuggacagggcauuccucc

SEQ ID NO: 10850 - RNA, 19 nt, Artificial Sequence
  Description of Artificial Sequence: Synthetic oligonucleotide
  Sense strand starting at position 2282 of SEQ ID NO: 92
augugacaucuuuagugcu

SEQ ID NO: 10851 - RNA, 19 nt, Artificial Sequence
  Description of Artificial Sequence: Synthetic oligonucleotide
  Antisense strand to SEQ ID NO: 10850
agcacuaaagaugucacau

SEQ ID NO: 10852 - RNA, 19 nt, Artificial Sequence
  Description of Artificial Sequence: Synthetic oligonucleotide
  Sense strand starting at position 2445 of SEQ ID NO: 88
gugacaucuuuaguguugu

SEQ ID NO: 10853 - RNA, 19 nt, Artificial Sequence
  Description of Artificial Sequence: Synthetic oligonucleotide
  Antisense strand to SEQ ID NO: 10852
acaacacuaaagaugucac

SEQ ID NO: 10854 - RNA, 19 nt, Artificial Sequence
  Description of Artificial Sequence: Synthetic oligonucleotide
  Sense strand starting at position 2443 of SEQ ID NO: 88
augugacaucuuuaguguu

SEQ ID NO: 10855 - RNA, 19 nt, Artificial Sequence
  Description of Artificial Sequence: Synthetic oligonucleotide
  Antisense strand to SEQ ID NO: 10854
aacacuaaagaugucacau

SEQ ID NO: 10856 - RNA, 19 nt, Artificial Sequence
  Description of Artificial Sequence: Synthetic oligonucleotide
  Sense strand starting at position 70 of SEQ ID NO: 90
ccagacacuuggccaaaua

SEQ ID NO: 10857 - RNA, 19 nt, Artificial Sequence
  Description of Artificial Sequence: Synthetic oligonucleotide
  Antisense strand to SEQ ID NO: 10856
uauuuggccaagugucugg

SEQ ID NO: 10858 - RNA, 19 nt, Artificial Sequence
  Description of Artificial Sequence: Synthetic oligonucleotide
  Sense strand starting at position 163 of SEQ ID NO: 90
agacacaacucagaugaga

SEQ ID NO: 10859 - RNA, 19 nt, Artificial Sequence
  Description of Artificial Sequence: Synthetic oligonucleotide
  Antisense strand to SEQ ID NO: 10858
ucucaucugaguugugucu

SEQ ID NO: 10860 - RNA, 19 nt, Artificial Sequence
  Description of Artificial Sequence: Synthetic oligonucleotide
  Sense strand starting at position 222 of SEQ ID NO: 90
ggagaaagccuguacucuc

SEQ ID NO: 10861 - RNA, 19 nt, Artificial Sequence
  Description of Artificial Sequence: Synthetic oligonucleotide
  Antisense strand to SEQ ID NO: 10860
gagaguacaggcuuucucc

SEQ ID NO: 10862 - RNA, 19 nt, Artificial Sequence
  Description of Artificial Sequence: Synthetic oligonucleotide
  Sense strand starting at position 229 of SEQ ID NO: 90
gccuguacucucuacuaag

SEQ ID NO: 10863 - RNA, 19 nt, Artificial Sequence
  Description of Artificial Sequence: Synthetic oligonucleotide
  Antisense strand to SEQ ID NO: 10862
cuuaguagagaguacaggc

SEQ ID NO: 10864 - RNA, 19 nt, Artificial Sequence
  Description of Artificial Sequence: Synthetic oligonucleotide
  Sense strand starting at position 467 of SEQ ID NO: 90
agaaguaaacucugcuaua

SEQ ID NO: 10865 - RNA, 19 nt, Artificial Sequence
  Description of Artificial Sequence: Synthetic oligonucleotide
  Antisense strand to SEQ ID NO: 10864
uauagcagaguuuacuucu

SEQ ID NO: 10866 - RNA, 19 nt, Artificial Sequence
  Description of Artificial Sequence: Synthetic oligonucleotide
  Sense strand starting at position 494 of SEQ ID NO: 90
cuuaucucuuuaguagaga

SEQ ID NO: 10867 - RNA, 19 nt, Artificial Sequence
  Description of Artificial Sequence: Synthetic oligonucleotide
  Antisense strand to SEQ ID NO: 10866
ucucuacuaaagagauaag

SEQ ID NO: 10868 - RNA, 19 nt, Artificial Sequence
  Description of Artificial Sequence: Synthetic oligonucleotide
  Sense strand starting at position 709 of SEQ ID NO: 90
gucaccauguuucuaaauu

SEQ ID NO: 10869 - RNA, 19 nt, Artificial Sequence
  Description of Artificial Sequence: Synthetic oligonucleotide
  Antisense strand to SEQ ID NO: 10868
aauuuagaaacauggugac

SEQ ID NO: 10870 - RNA, 19 nt, Artificial Sequence
  Description of Artificial Sequence: Synthetic oligonucleotide
  Sense strand starting at position 739 of SEQ ID NO: 90
ccagaucuugugcauaauu

SEQ ID NO: 10871 - RNA, 19 nt, Artificial Sequence
  Description of Artificial Sequence: Synthetic oligonucleotide
  Antisense strand to SEQ ID NO: 10870
aauuaugcacaagaucugg

SEQ ID NO: 10872 - RNA, 19 nt, Artificial Sequence
  Description of Artificial Sequence: Synthetic oligonucleotide
  Sense strand starting at position 791 of SEQ ID NO: 90
gucugaaaggguugugaau

SEQ ID NO: 10873 - RNA, 19 nt, Artificial Sequence
  Description of Artificial Sequence: Synthetic oligonucleotide
  Antisense strand to SEQ ID NO: 10872
auucacaacccuuucagac

SEQ ID NO: 10874 - RNA, 19 nt, Artificial Sequence
  Description of Artificial Sequence: Synthetic oligonucleotide
  Sense strand starting at position 861 of SEQ ID NO: 90
guaccaaauucugucuuac

SEQ ID NO: 10875 - RNA, 19 nt, Artificial Sequence
  Description of Artificial Sequence: Synthetic oligonucleotide
  Antisense strand to SEQ ID NO: 10874
guaagacagaauuugguac

SEQ ID NO: 10876 - RNA, 19 nt, Artificial Sequence
  Description of Artificial Sequence: Synthetic oligonucleotide
  Sense strand starting at position 870 of SEQ ID NO: 90
ucugucuuacuguauauca

SEQ ID NO: 10877 - RNA, 19 nt, Artificial Sequence
  Description of Artificial Sequence: Synthetic oligonucleotide
  Antisense strand to SEQ ID NO: 10876
ugauauacaguaagacaga

SEQ ID NO: 10878 - RNA, 19 nt, Artificial Sequence
  Description of Artificial Sequence: Synthetic oligonucleotide
  Sense strand starting at position 872 of SEQ ID NO: 90
ugucuuacuguauaucauu

SEQ ID NO: 10879 - RNA, 19 nt, Artificial Sequence
  Description of Artificial Sequence: Synthetic oligonucleotide
  Antisense strand to SEQ ID NO: 10878
aaugauauacaguaagaca

SEQ ID NO: 10880 - RNA, 19 nt, Artificial Sequence
  Description of Artificial Sequence: Synthetic oligonucleotide
  Sense strand starting at position 878 of SEQ ID NO: 90
acuguauaucauugaaugu

SEQ ID NO: 10881 - RNA, 19 nt, Artificial Sequence
  Description of Artificial Sequence: Synthetic oligonucleotide
  Antisense strand to SEQ ID NO: 10880
acauucaaugauauacagu

SEQ ID NO: 10882 - RNA, 19 nt, Artificial Sequence
  Description of Artificial Sequence: Synthetic oligonucleotide
  Sense strand starting at position 926 of SEQ ID NO: 90
ucuugaaucuugguauagg

SEQ ID NO: 10883 - RNA, 19 nt, Artificial Sequence
  Description of Artificial Sequence: Synthetic oligonucleotide
  Antisense strand to SEQ ID NO: 10882
ccuauaccaagauucaaga

SEQ ID NO: 10884 - RNA, 19 nt, Artificial Sequence
  Description of Artificial Sequence: Synthetic oligonucleotide
  Sense strand starting at position 982 of SEQ ID NO: 90
gcucuuguugaagaaagau

SEQ ID NO: 10885 - RNA, 19 nt, Artificial Sequence
  Description of Artificial Sequence: Synthetic oligonucleotide
  Antisense strand to SEQ ID NO: 10884
aucuuucuucaacaagagc

SEQ ID NO: 10886 - RNA, 19 nt, Artificial Sequence
  Description of Artificial Sequence: Synthetic oligonucleotide
  Sense strand starting at position 1069 of SEQ ID NO: 90
uuagaauacuuaccuguga

SEQ ID NO: 10887 - RNA, 19 nt, Artificial Sequence
  Description of Artificial Sequence: Synthetic oligonucleotide
  Antisense strand to SEQ ID NO: 10886
ucacagguaaguauucuaa

SEQ ID NO: 10888 - RNA, 19 nt, Artificial Sequence
  Description of Artificial Sequence: Synthetic oligonucleotide
  Sense strand starting at position 1120 of SEQ ID NO: 90
ucagaauaguguuuacuac

SEQ ID NO: 10889 - RNA, 19 nt, Artificial Sequence
  Description of Artificial Sequence: Synthetic oligonucleotide
  Antisense strand to SEQ ID NO: 10888
guaguaaacacuauucuga

SEQ ID NO: 10890 - RNA, 19 nt, Artificial Sequence
  Description of Artificial Sequence: Synthetic oligonucleotide
  Sense strand starting at position 1144 of SEQ ID NO: 90
cagugaauucugcaauuga

SEQ ID NO: 10891 - RNA, 19 nt, Artificial Sequence
  Description of Artificial Sequence: Synthetic oligonucleotide
  Antisense strand to SEQ ID NO: 10890
ucaauugcagaauucacug

SEQ ID NO: 10892 - RNA, 19 nt, Artificial Sequence
  Description of Artificial Sequence: Synthetic oligonucleotide
  Sense strand starting at position 1280 of SEQ ID NO: 90
cuuguuguguauuugagga

SEQ ID NO: 10893 - RNA, 19 nt, Artificial Sequence
  Description of Artificial Sequence: Synthetic oligonucleotide
  Antisense strand to SEQ ID NO: 10892
uccucaaauacacaacaag

SEQ ID NO: 10894 - RNA, 19 nt, Artificial Sequence
  Description of Artificial Sequence: Synthetic oligonucleotide
  Sense strand starting at position 1310 of SEQ ID NO: 90
agcagaacccaauggugaa

SEQ ID NO: 10895 - RNA, 19 nt, Artificial Sequence
  Description of Artificial Sequence: Synthetic oligonucleotide
  Antisense strand to SEQ ID NO: 10894
uucaccauuggguucugcu

SEQ ID NO: 10896 - RNA, 19 nt, Artificial Sequence
  Description of Artificial Sequence: Synthetic oligonucleotide
  Sense strand starting at position 1311 of SEQ ID NO: 90
gcagaacccaauggugaaa

SEQ ID NO: 10897 - RNA, 19 nt, Artificial Sequence
  Description of Artificial Sequence: Synthetic oligonucleotide
  Antisense strand to SEQ ID NO: 10896
uuucaccauuggguucugc

SEQ ID NO: 10898 - RNA, 19 nt, Artificial Sequence
  Description of Artificial Sequence: Synthetic oligonucleotide
  Sense strand starting at position 1368 of SEQ ID NO: 90
guguccuuuccagaaacua

SEQ ID NO: 10899 - RNA, 19 nt, Artificial Sequence
  Description of Artificial Sequence: Synthetic oligonucleotide
  Antisense strand to SEQ ID NO: 10898
uaguuucuggaaaggacac

SEQ ID NO: 10900 - RNA, 19 nt, Artificial Sequence
  Description of Artificial Sequence: Synthetic oligonucleotide
  Sense strand starting at position 1697 of SEQ ID NO: 90
ucgagaauugcauacuaaa

SEQ ID NO: 10901 - RNA, 19 nt, Artificial Sequence
  Description of Artificial Sequence: Synthetic oligonucleotide
  Antisense strand to SEQ ID NO: 10900
uuuaguaugcaauucucga

SEQ ID NO: 10902 - RNA, 19 nt, Artificial Sequence
  Description of Artificial Sequence: Synthetic oligonucleotide
  Sense strand starting at position 1809 of SEQ ID NO: 90
uagauaacguaagcuaaga

SEQ ID NO: 10903 - RNA, 19 nt, Artificial Sequence
  Description of Artificial Sequence: Synthetic oligonucleotide
  Antisense strand to SEQ ID NO: 10902
ucuuagcuuacguuaucua

SEQ ID NO: 10904 - RNA, 19 nt, Artificial Sequence
  Description of Artificial Sequence: Synthetic oligonucleotide
  Sense strand starting at position 2065 of SEQ ID NO: 90
caucaaagguauguacaga

SEQ ID NO: 10905 - RNA, 19 nt, Artificial Sequence
  Description of Artificial Sequence: Synthetic oligonucleotide
  Antisense strand to SEQ ID NO: 10904
ucuguacauaccuuugaug

SEQ ID NO: 10906 - RNA, 19 nt, Artificial Sequence
  Description of Artificial Sequence: Synthetic oligonucleotide
  Sense strand starting at position 2388 of SEQ ID NO: 90
cauguaguccuugucgcau

SEQ ID NO: 10907 - RNA, 19 nt, Artificial Sequence
  Description of Artificial Sequence: Synthetic oligonucleotide
  Antisense strand to SEQ ID NO: 10906
augcgacaaggacuacaug

SEQ ID NO: 10908 - RNA, 19 nt, Artificial Sequence
  Description of Artificial Sequence: Synthetic oligonucleotide
  Sense strand starting at position 2442 of SEQ ID NO: 90
augugacaucuuuagugcu

SEQ ID NO: 10909 - RNA, 19 nt, Artificial Sequence
  Description of Artificial Sequence: Synthetic oligonucleotide
  Antisense strand to SEQ ID NO: 10908
agcacuaaagaugucacau

SEQ ID NO: 10910 - RNA, 19 nt, Artificial Sequence
  Description of Artificial Sequence: Synthetic oligonucleotide
  Sense strand starting at position 2764 of SEQ ID NO: 90
aggaaauggcccugguuga

SEQ ID NO: 10911 - RNA, 19 nt, Artificial Sequence
  Description of Artificial Sequence: Synthetic oligonucleotide
  Antisense strand to SEQ ID NO: 10910
ucaaccagggccauuuccu

SEQ ID NO: 10912 - RNA, 19 nt, Artificial Sequence
  Description of Artificial Sequence: Synthetic oligonucleotide
  Sense strand starting at position 2765 of SEQ ID NO: 90
ggaaauggcccugguugaa

SEQ ID NO: 10913 - RNA, 19 nt, Artificial Sequence
  Description of Artificial Sequence: Synthetic oligonucleotide
  Antisense strand to SEQ ID NO: 10912
uucaaccagggccauuucc

SEQ ID NO: 10914 - RNA, 19 nt, Artificial Sequence
  Description of Artificial Sequence: Synthetic oligonucleotide
  Sense strand starting at position 2972 of SEQ ID NO: 90
agagauuccuaguuacagc

SEQ ID NO: 10915 - RNA, 19 nt, Artificial Sequence
  Description of Artificial Sequence: Synthetic oligonucleotide
  Antisense strand to SEQ ID NO: 10914
gcuguaacuaggaaucucu

SEQ ID NO: 10916 - RNA, 19 nt, Artificial Sequence
  Description of Artificial Sequence: Synthetic oligonucleotide
  Sense strand starting at position 2999 of SEQ ID NO: 90
gauccucuacagugguaaa

SEQ ID NO: 10917 - RNA, 19 nt, Artificial Sequence
  Description of Artificial Sequence: Synthetic oligonucleotide
  Antisense strand to SEQ ID NO: 10916
uuuaccacuguagaggauc

SEQ ID NO: 10918 - RNA, 19 nt, Artificial Sequence
  Description of Artificial Sequence: Synthetic oligonucleotide
  Sense strand starting at position 3099 of SEQ ID NO: 90
accuaaaguucuguuugac

SEQ ID NO: 10919 - RNA, 19 nt, Artificial Sequence
  Description of Artificial Sequence: Synthetic oligonucleotide
  Antisense strand to SEQ ID NO: 10918
gucaaacagaacuuuaggu

SEQ ID NO: 10920 - RNA, 19 nt, Artificial Sequence
  Description of Artificial Sequence: Synthetic oligonucleotide
  Sense strand starting at position 3320 of SEQ ID NO: 90
agcgauauacuaggacaga

SEQ ID NO: 10921 - RNA, 19 nt, Artificial Sequence
  Description of Artificial Sequence: Synthetic oligonucleotide
  Antisense strand to SEQ ID NO: 10920
ucuguccuaguauaucgcu

SEQ ID NO: 10922 - RNA, 19 nt, Artificial Sequence
  Description of Artificial Sequence: Synthetic oligonucleotide
  Sense strand starting at position 3339 of SEQ ID NO: 90
ugaggucagacauacggua

SEQ ID NO: 10923 - RNA, 19 nt, Artificial Sequence
  Description of Artificial Sequence: Synthetic oligonucleotide
  Antisense strand to SEQ ID NO: 10922
uaccguaugucugaccuca

SEQ ID NO: 10924 - RNA, 19 nt, Artificial Sequence
  Description of Artificial Sequence: Synthetic oligonucleotide
  Sense strand starting at position 3483 of SEQ ID NO: 90
ucagaauccuacuuaggcu

SEQ ID NO: 10925 - RNA, 19 nt, Artificial Sequence
  Description of Artificial Sequence: Synthetic oligonucleotide
  Antisense strand to SEQ ID NO: 10924
agccuaaguaggauucuga

SEQ ID NO: 10926 - RNA, 19 nt, Artificial Sequence
  Description of Artificial Sequence: Synthetic oligonucleotide
  Sense strand starting at position 3566 of SEQ ID NO: 90
caguuaaauggcuggagga

SEQ ID NO: 10927 - RNA, 19 nt, Artificial Sequence
  Description of Artificial Sequence: Synthetic oligonucleotide
  Antisense strand to SEQ ID NO: 10926
uccuccagccauuuaacug

SEQ ID NO: 10928 - RNA, 19 nt, Artificial Sequence
  Description of Artificial Sequence: Synthetic oligonucleotide
  Sense strand starting at position 3695 of SEQ ID NO: 90
gguaccgagaggcauuaau

SEQ ID NO: 10929 - RNA, 19 nt, Artificial Sequence
  Description of Artificial Sequence: Synthetic oligonucleotide
  Antisense strand to SEQ ID NO: 10928
auuaaugccucucgguacc

SEQ ID NO: 10930 - RNA, 19 nt, Artificial Sequence
  Description of Artificial Sequence: Synthetic oligonucleotide
  Sense strand starting at position 3864 of SEQ ID NO: 90
aaaucagccguugauuaau

SEQ ID NO: 10931 - RNA, 19 nt, Artificial Sequence
  Description of Artificial Sequence: Synthetic oligonucleotide
  Antisense strand to SEQ ID NO: 10930
auuaaucaacggcugauuu

SEQ ID NO: 10932 - RNA, 19 nt, Artificial Sequence
  Description of Artificial Sequence: Synthetic oligonucleotide
  Sense strand starting at position 3878 of SEQ ID NO: 90
uuaauacggccuuaguuau

SEQ ID NO: 10933 - RNA, 19 nt, Artificial Sequence
  Description of Artificial Sequence: Synthetic oligonucleotide
  Antisense strand to SEQ ID NO: 10932
auaacuaaggccguauuaa

SEQ ID NO: 10934 - RNA, 19 nt, Artificial Sequence
  Description of Artificial Sequence: Synthetic oligonucleotide
  Sense strand starting at position 3960 of SEQ ID NO: 90
cuugcaguuacuggaaaga

SEQ ID NO: 10935 - RNA, 19 nt, Artificial Sequence
  Description of Artificial Sequence: Synthetic oligonucleotide
  Antisense strand to SEQ ID NO: 10934
ucuuuccaguaacugcaag

SEQ ID NO: 10936 - RNA, 19 nt, Artificial Sequence
  Description of Artificial Sequence: Synthetic oligonucleotide
  Sense strand starting at position 2456 of SEQ ID NO: 89
agugcugugugcccuuaaa

SEQ ID NO: 10937 - RNA, 19 nt, Artificial Sequence
  Description of Artificial Sequence: Synthetic oligonucleotide
  Antisense strand to SEQ ID NO: 10936
uuuaagggcacacagcacu

SEQ ID NO: 10938 - RNA, 19 nt, Artificial Sequence
  Description of Artificial Sequence: Synthetic oligonucleotide
  Sense strand starting at position 2443 of SEQ ID NO: 89
augugacaucuuuagugcu

SEQ ID NO: 10939 - RNA, 19 nt, Artificial Sequence
  Description of Artificial Sequence: Synthetic oligonucleotide
  Antisense strand to SEQ ID NO: 10938
agcacuaaagaugucacau

SEQ ID NO: 10940 - RNA, 19 nt, Artificial Sequence
  Description of Artificial Sequence: Synthetic oligonucleotide
  Sense strand starting at position 2468 of SEQ ID NO: 96
gugacaucuuuaguguugu

SEQ ID NO: 10941 - RNA, 19 nt, Artificial Sequence
  Description of Artificial Sequence: Synthetic oligonucleotide
  Antisense strand to SEQ ID NO: 10940
acaacacuaaagaugucac

SEQ ID NO: 10942 - RNA, 19 nt, Artificial Sequence
  Description of Artificial Sequence: Synthetic oligonucleotide
  Sense strand starting at position 2466 of SEQ ID NO: 96
augugacaucuuuaguguu

SEQ ID NO: 10943 - RNA, 19 nt, Artificial Sequence
  Description of Artificial Sequence: Synthetic oligonucleotide
  Antisense strand to SEQ ID NO: 10942
aacacuaaagaugucacau

SEQ ID NO: 10944 - RNA, 19 nt, Artificial Sequence
  Description of Artificial Sequence: Synthetic oligonucleotide
  Sense strand starting at position 93 of SEQ ID NO: 94
ccagacacuuggccaaaua

SEQ ID NO: 10945 - RNA, 19 nt, Artificial Sequence
  Description of Artificial Sequence: Synthetic oligonucleotide
  Antisense strand to SEQ ID NO: 10944
uauuuggccaagugucugg

SEQ ID NO: 10946 - RNA, 19 nt, Artificial Sequence
  Description of Artificial Sequence: Synthetic oligonucleotide
  Sense strand starting at position 186 of SEQ ID NO: 94
agacacaacucagaugaga

SEQ ID NO: 10947 - RNA, 19 nt, Artificial Sequence
  Description of Artificial Sequence: Synthetic oligonucleotide
  Antisense strand to SEQ ID NO: 10946
ucucaucugaguugugucu

SEQ ID NO: 10948 - RNA, 19 nt, Artificial Sequence
  Description of Artificial Sequence: Synthetic oligonucleotide
  Sense strand starting at position 245 of SEQ ID NO: 94
ggagaaagccuguacucuc

SEQ ID NO: 10949 - RNA, 19 nt, Artificial Sequence
  Description of Artificial Sequence: Synthetic oligonucleotide
  Antisense strand to SEQ ID NO: 10948
gagaguacaggcuuucucc

SEQ ID NO: 10950 - RNA, 19 nt, Artificial Sequence
  Description of Artificial Sequence: Synthetic oligonucleotide
  Sense strand starting at position 252 of SEQ ID NO: 94
gccuguacucucuacuaag

SEQ ID NO: 10951 - RNA, 19 nt, Artificial Sequence
  Description of Artificial Sequence: Synthetic oligonucleotide
  Antisense strand to SEQ ID NO: 10950
cuuaguagagaguacaggc

SEQ ID NO: 10952 - RNA, 19 nt, Artificial Sequence
  Description of Artificial Sequence: Synthetic oligonucleotide
  Sense strand starting at position 490 of SEQ ID NO: 94
agaaguaaacucugcuaua

SEQ ID NO: 10953 - RNA, 19 nt, Artificial Sequence
  Description of Artificial Sequence: Synthetic oligonucleotide
  Antisense strand to SEQ ID NO: 10952
uauagcagaguuuacuucu

SEQ ID NO: 10954 - RNA, 19 nt, Artificial Sequence
  Description of Artificial Sequence: Synthetic oligonucleotide
  Sense strand starting at position 517 of SEQ ID NO: 94
cuuaucucuuuaguagaga

SEQ ID NO: 10955 - RNA, 19 nt, Artificial Sequence
  Description of Artificial Sequence: Synthetic oligonucleotide
  Antisense strand to SEQ ID NO: 10954
ucucuacuaaagagauaag

SEQ ID NO: 10956 - RNA, 19 nt, Artificial Sequence
  Description of Artificial Sequence: Synthetic oligonucleotide
  Sense strand starting at position 732 of SEQ ID NO: 94
gucaccauguuucuaaauu

SEQ ID NO: 10957 - RNA, 19 nt, Artificial Sequence
  Description of Artificial Sequence: Synthetic oligonucleotide
  Antisense strand to SEQ ID NO: 10956
aauuuagaaacauggugac

SEQ ID NO: 10958 - RNA, 19 nt, Artificial Sequence
  Description of Artificial Sequence: Synthetic oligonucleotide
  Sense strand starting at position 762 of SEQ ID NO: 94
ccagaucuugugcauaauu

SEQ ID NO: 10959 - RNA, 19 nt, Artificial Sequence
  Description of Artificial Sequence: Synthetic oligonucleotide
  Antisense strand to SEQ ID NO: 10958
aauuaugcacaagaucugg

SEQ ID NO: 10960 - RNA, 19 nt, Artificial Sequence
  Description of Artificial Sequence: Synthetic oligonucleotide
  Sense strand starting at position 814 of SEQ ID NO: 94
gucugaaaggguugugaau

SEQ ID NO: 10961 - RNA, 19 nt, Artificial Sequence
  Description of Artificial Sequence: Synthetic oligonucleotide
  Antisense strand to SEQ ID NO: 10960
auucacaacccuuucagac

SEQ ID NO: 10962 - RNA, 19 nt, Artificial Sequence
  Description of Artificial Sequence: Synthetic oligonucleotide
  Sense strand starting at position 893 of SEQ ID NO: 94
ucugucuuacuguauauca

SEQ ID NO: 10963 - RNA, 19 nt, Artificial Sequence
  Description of Artificial Sequence: Synthetic oligonucleotide
  Antisense strand to SEQ ID NO: 10962
ugauauacaguaagacaga

SEQ ID NO: 10964 - RNA, 19 nt, Artificial Sequence
  Description of Artificial Sequence: Synthetic oligonucleotide
  Sense strand starting at position 895 of SEQ ID NO: 94
ugucuuacuguauaucauu

SEQ ID NO: 10965 - RNA, 19 nt, Artificial Sequence
  Description of Artificial Sequence: Synthetic oligonucleotide
  Antisense strand to SEQ ID NO: 10964
aaugauauacaguaagaca

SEQ ID NO: 10966 - RNA, 19 nt, Artificial Sequence
  Description of Artificial Sequence: Synthetic oligonucleotide
  Sense strand starting at position 901 of SEQ ID NO: 94
acuguauaucauugaaugu

SEQ ID NO: 10967 - RNA, 19 nt, Artificial Sequence
  Description of Artificial Sequence: Synthetic oligonucleotide
  Antisense strand to SEQ ID NO: 10966
acauucaaugauauacagu

SEQ ID NO: 10968 - RNA, 19 nt, Artificial Sequence
  Description of Artificial Sequence: Synthetic oligonucleotide
  Sense strand starting at position 949 of SEQ ID NO: 94
ucuugaaucuugguauagg

SEQ ID NO: 10969 - RNA, 19 nt, Artificial Sequence
  Description of Artificial Sequence: Synthetic oligonucleotide
  Antisense strand to SEQ ID NO: 10968
ccuauaccaagauucaaga

SEQ ID NO: 10970 - RNA, 19 nt, Artificial Sequence
  Description of Artificial Sequence: Synthetic oligonucleotide
  Sense strand starting at position 1005 of SEQ ID NO: 94
gcucuuguugaagaaagau

SEQ ID NO: 10971 - RNA, 19 nt, Artificial Sequence
  Description of Artificial Sequence: Synthetic oligonucleotide
  Antisense strand to SEQ ID NO: 10970
aucuuucuucaacaagagc

SEQ ID NO: 10972 - RNA, 19 nt, Artificial Sequence
  Description of Artificial Sequence: Synthetic oligonucleotide
  Sense strand starting at position 1092 of SEQ ID NO: 94
uuagaauacuuaccuguga

SEQ ID NO: 10973 - RNA, 19 nt, Artificial Sequence
  Description of Artificial Sequence: Synthetic oligonucleotide
  Antisense strand to SEQ ID NO: 10972
ucacagguaaguauucuaa

SEQ ID NO: 10974 - RNA, 19 nt, Artificial Sequence
  Description of Artificial Sequence: Synthetic oligonucleotide
  Sense strand starting at position 1143 of SEQ ID NO: 94
ucagaauaguguuuacuac

SEQ ID NO: 10975 - RNA, 19 nt, Artificial Sequence
  Description of Artificial Sequence: Synthetic oligonucleotide
  Antisense strand to SEQ ID NO: 10974
guaguaaacacuauucuga

SEQ ID NO: 10976 - RNA, 19 nt, Artificial Sequence
  Description of Artificial Sequence: Synthetic oligonucleotide
  Sense strand starting at position 1167 of SEQ ID NO: 94
cagugaauucugcaauuga

SEQ ID NO: 10977 - RNA, 19 nt, Artificial Sequence
  Description of Artificial Sequence: Synthetic oligonucleotide
  Antisense strand to SEQ ID NO: 10976
ucaauugcagaauucacug

SEQ ID NO: 10978 - RNA, 19 nt, Artificial Sequence
  Description of Artificial Sequence: Synthetic oligonucleotide
  Sense strand starting at position 1303 of SEQ ID NO: 94
cuuguuguguauuugagga

SEQ ID NO: 10979 - RNA, 19 nt, Artificial Sequence
  Description of Artificial Sequence: Synthetic oligonucleotide
  Antisense strand to SEQ ID NO: 10978
uccucaaauacacaacaag

SEQ ID NO: 10980 - RNA, 19 nt, Artificial Sequence
  Description of Artificial Sequence: Synthetic oligonucleotide
  Sense strand starting at position 1333 of SEQ ID NO: 94
agcagaacccaauggugaa

SEQ ID NO: 10981 - RNA, 19 nt, Artificial Sequence
  Description of Artificial Sequence: Synthetic oligonucleotide
  Antisense strand to SEQ ID NO: 10980
uucaccauuggguucugcu

SEQ ID NO: 10982 - RNA, 19 nt, Artificial Sequence
  Description of Artificial Sequence: Synthetic oligonucleotide
  Sense strand starting at position 1334 of SEQ ID NO: 94
gcagaacccaauggugaaa

SEQ ID NO: 10983 - RNA, 19 nt, Artificial Sequence
  Description of Artificial Sequence: Synthetic oligonucleotide
  Antisense strand to SEQ ID NO: 10982
uuucaccauuggguucugc

SEQ ID NO: 10984 - RNA, 19 nt, Artificial Sequence
  Description of Artificial Sequence: Synthetic oligonucleotide
  Sense strand starting at position 1391 of SEQ ID NO: 94
guguccuuuccagaaacua

SEQ ID NO: 10985 - RNA, 19 nt, Artificial Sequence
  Description of Artificial Sequence: Synthetic oligonucleotide
  Antisense strand to SEQ ID NO: 10984
uaguuucuggaaaggacac

SEQ ID NO: 10986 - RNA, 19 nt, Artificial Sequence
  Description of Artificial Sequence: Synthetic oligonucleotide
  Sense strand starting at position 1720 of SEQ ID NO: 94
ucgagaauugcauacuaaa

SEQ ID NO: 10987 - RNA, 19 nt, Artificial Sequence
  Description of Artificial Sequence: Synthetic oligonucleotide
  Antisense strand to SEQ ID NO: 10986
uuuaguaugcaauucucga

SEQ ID NO: 10988 - RNA, 19 nt, Artificial Sequence
  Description of Artificial Sequence: Synthetic oligonucleotide
  Sense strand starting at position 1832 of SEQ ID NO: 94
uagauaacguaagcuaaga

SEQ ID NO: 10989 - RNA, 19 nt, Artificial Sequence
  Description of Artificial Sequence: Synthetic oligonucleotide
  Antisense strand to SEQ ID NO: 10988
ucuuagcuuacguuaucua

SEQ ID NO: 10990 - RNA, 19 nt, Artificial Sequence
  Description of Artificial Sequence: Synthetic oligonucleotide
  Sense strand starting at position 2088 of SEQ ID NO: 94
caucaaagguauguacaga

SEQ ID NO: 10991 - RNA, 19 nt, Artificial Sequence
  Description of Artificial Sequence: Synthetic oligonucleotide
  Antisense strand to SEQ ID NO: 10990
ucuguacauaccuuugaug

SEQ ID NO: 10992 - RNA, 19 nt, Artificial Sequence
  Description of Artificial Sequence: Synthetic oligonucleotide
  Sense strand starting at position 2411 of SEQ ID NO: 94
cauguaguccuugucgcau

SEQ ID NO: 10993 - RNA, 19 nt, Artificial Sequence
  Description of Artificial Sequence: Synthetic oligonucleotide
  Antisense strand to SEQ ID NO: 10992
augcgacaaggacuacaug

SEQ ID NO: 10994 - RNA, 19 nt, Artificial Sequence
  Description of Artificial Sequence: Synthetic oligonucleotide
  Sense strand starting at position 2465 of SEQ ID NO: 94
augugacaucuuuagugcu

SEQ ID NO: 10995 - RNA, 19 nt, Artificial Sequence
  Description of Artificial Sequence: Synthetic oligonucleotide
  Antisense strand to SEQ ID NO: 10994
agcacuaaagaugucacau

SEQ ID NO: 10996 - RNA, 19 nt, Artificial Sequence
  Description of Artificial Sequence: Synthetic oligonucleotide
  Sense strand starting at position 2787 of SEQ ID NO: 94
aggaaauggcccugguuga

SEQ ID NO: 10997 - RNA, 19 nt, Artificial Sequence
  Description of Artificial Sequence: Synthetic oligonucleotide
  Antisense strand to SEQ ID NO: 10996
ucaaccagggccauuuccu

SEQ ID NO: 10998 - RNA, 19 nt, Artificial Sequence
  Description of Artificial Sequence: Synthetic oligonucleotide
  Sense strand starting at position 2788 of SEQ ID NO: 94
ggaaauggcccugguugaa

SEQ ID NO: 10999 - RNA, 19 nt, Artificial Sequence
  Description of Artificial Sequence: Synthetic oligonucleotide
  Antisense strand to SEQ ID NO: 10998
uucaaccagggccauuucc

SEQ ID NO: 11000 - RNA, 19 nt, Artificial Sequence
  Description of Artificial Sequence: Synthetic oligonucleotide
  Sense strand starting at position 2995 of SEQ ID NO: 94
agagauuccuaguuacagc

SEQ ID NO: 11001 - RNA, 19 nt, Artificial Sequence
  Description of Artificial Sequence: Synthetic oligonucleotide
  Antisense strand to SEQ ID NO: 11000
gcuguaacuaggaaucucu

SEQ ID NO: 11002 - RNA, 19 nt, Artificial Sequence
  Description of Artificial Sequence: Synthetic oligonucleotide
  Sense strand starting at position 3022 of SEQ ID NO: 94
gauccucuacagugguaaa

SEQ ID NO: 11003 - RNA, 19 nt, Artificial Sequence
  Description of Artificial Sequence: Synthetic oligonucleotide
  Antisense strand to SEQ ID NO: 11002
uuuaccacuguagaggauc

SEQ ID NO: 11004 - RNA, 19 nt, Artificial Sequence
  Description of Artificial Sequence: Synthetic oligonucleotide
  Sense strand starting at position 3122 of SEQ ID NO: 94
accuaaaguucuguuugac

SEQ ID NO: 11005 - RNA, 19 nt, Artificial Sequence
  Description of Artificial Sequence: Synthetic oligonucleotide
  Antisense strand to SEQ ID NO: 11004
gucaaacagaacuuuaggu

SEQ ID NO: 11006 - RNA, 19 nt, Artificial Sequence
  Description of Artificial Sequence: Synthetic oligonucleotide
  Sense strand starting at position 3343 of SEQ ID NO: 94
agcgauauacuaggacaga

SEQ ID NO: 11007 - RNA, 19 nt, Artificial Sequence
  Description of Artificial Sequence: Synthetic oligonucleotide
  Antisense strand to SEQ ID NO: 11006
ucuguccuaguauaucgcu

SEQ ID NO: 11008 - RNA, 19 nt, Artificial Sequence
  Description of Artificial Sequence: Synthetic oligonucleotide
  Sense strand starting at position 3362 of SEQ ID NO: 94
ugaggucagacauacggua

SEQ ID NO: 11009 - RNA, 19 nt, Artificial Sequence
  Description of Artificial Sequence: Synthetic oligonucleotide
  Antisense strand to SEQ ID NO: 11008
uaccguaugucugaccuca

SEQ ID NO: 11010 - RNA, 19 nt, Artificial Sequence
  Description of Artificial Sequence: Synthetic oligonucleotide
  Sense strand starting at position 3506 of SEQ ID NO: 94
ucagaauccuacuuaggcu

SEQ ID NO: 11011 - RNA, 19 nt, Artificial Sequence
  Description of Artificial Sequence: Synthetic oligonucleotide
  Antisense strand to SEQ ID NO: 11010
agccuaaguaggauucuga

SEQ ID NO: 11012 - RNA, 19 nt, Artificial Sequence
  Description of Artificial Sequence: Synthetic oligonucleotide
  Sense strand starting at position 3589 of SEQ ID NO: 94
caguuaaauggcuggagga

SEQ ID NO: 11013 - RNA, 19 nt, Artificial Sequence
  Description of Artificial Sequence: Synthetic oligonucleotide
  Antisense strand to SEQ ID NO: 11012
uccuccagccauuuaacug

SEQ ID NO: 11014 - RNA, 19 nt, Artificial Sequence
  Description of Artificial Sequence: Synthetic oligonucleotide
  Sense strand starting at position 3718 of SEQ ID NO: 94
gguaccgagaggcauuaau

SEQ ID NO: 11015 - RNA, 19 nt, Artificial Sequence
  Description of Artificial Sequence: Synthetic oligonucleotide
  Antisense strand to SEQ ID NO: 11014
auuaaugccucucgguacc

SEQ ID NO: 11016 - RNA, 19 nt, Artificial Sequence
  Description of Artificial Sequence: Synthetic oligonucleotide
  Sense strand starting at position 3887 of SEQ ID NO: 94
aaaucagccguugauuaau

SEQ ID NO: 11017 - RNA, 19 nt, Artificial Sequence
  Description of Artificial Sequence: Synthetic oligonucleotide
  Antisense strand to SEQ ID NO: 11016
auuaaucaacggcugauuu

SEQ ID NO: 11018 - RNA, 19 nt, Artificial Sequence
  Description of Artificial Sequence: Synthetic oligonucleotide
  Sense strand starting at position 3901 of SEQ ID NO: 94
uuaauacggccuuaguuau

SEQ ID NO: 11019 - RNA, 19 nt, Artificial Sequence
  Description of Artificial Sequence: Synthetic oligonucleotide
  Antisense strand to SEQ ID NO: 11018
auaacuaaggccguauuaa

SEQ ID NO: 11020 - RNA, 19 nt, Artificial Sequence
  Description of Artificial Sequence: Synthetic oligonucleotide
  Sense strand starting at position 3983 of SEQ ID NO: 94
cuugcaguuacuggaaaga

SEQ ID NO: 11021 - RNA, 19 nt, Artificial Sequence
  Description of Artificial Sequence: Synthetic oligonucleotide
  Antisense strand to SEQ ID NO: 11020
ucuuuccaguaacugcaag

SEQ ID NO: 11022 - RNA, 19 nt, Artificial Sequence
  Description of Artificial Sequence: Synthetic oligonucleotide
  Sense strand starting at position 2466 of SEQ ID NO: 95
augugacaucuuuagugcu

SEQ ID NO: 11023 - RNA, 19 nt, Artificial Sequence
  Description of Artificial Sequence: Synthetic oligonucleotide
  Antisense strand to SEQ ID NO: 11022
agcacuaaagaugucacau

SEQ ID NO: 11024 - RNA, 19 nt, Artificial Sequence
  Description of Artificial Sequence: Synthetic oligonucleotide
  Sense strand starting at position 2446 of SEQ ID NO: 97
gugacaucuuuaguguugu

SEQ ID NO: 11025 - RNA, 19 nt, Artificial Sequence
  Description of Artificial Sequence: Synthetic oligonucleotide
  Antisense strand to SEQ ID NO: 11024
acaacacuaaagaugucac

SEQ ID NO: 11026 - RNA, 19 nt, Artificial Sequence
  Description of Artificial Sequence: Synthetic oligonucleotide
  Sense strand starting at position 2444 of SEQ ID NO: 97
augugacaucuuuaguguu

SEQ ID NO: 11027 - RNA, 19 nt, Artificial Sequence
  Description of Artificial Sequence: Synthetic oligonucleotide
  Antisense strand to SEQ ID NO: 11026
aacacuaaagaugucacau

SEQ ID NO: 11028 - RNA, 19 nt, Artificial Sequence
  Description of Artificial Sequence: Synthetic oligonucleotide
  Sense strand starting at position 71 of SEQ ID NO: 99
ccagacacuuggccaaaua

SEQ ID NO: 11029 - RNA, 19 nt, Artificial Sequence
  Description of Artificial Sequence: Synthetic oligonucleotide
  Antisense strand to SEQ ID NO: 11028
uauuuggccaagugucugg

SEQ ID NO: 11030 - RNA, 19 nt, Artificial Sequence
  Description of Artificial Sequence: Synthetic oligonucleotide
  Sense strand starting at position 164 of SEQ ID NO: 99
agacacaacucagaugaga

SEQ ID NO: 11031 - RNA, 19 nt, Artificial Sequence
  Description of Artificial Sequence: Synthetic oligonucleotide
  Antisense strand to SEQ ID NO: 11030
ucucaucugaguugugucu

SEQ ID NO: 11032 - RNA, 19 nt, Artificial Sequence
  Description of Artificial Sequence: Synthetic oligonucleotide
  Sense strand starting at position 223 of SEQ ID NO: 99
ggagaaagccuguacucuc

SEQ ID NO: 11033 - RNA, 19 nt, Artificial Sequence
  Description of Artificial Sequence: Synthetic oligonucleotide
  Antisense strand to SEQ ID NO: 11032
gagaguacaggcuuucucc

SEQ ID NO: 11034 - RNA, 19 nt, Artificial Sequence
  Description of Artificial Sequence: Synthetic oligonucleotide
  Sense strand starting at position 230 of SEQ ID NO: 99
gccuguacucucuacuaag

SEQ ID NO: 11035 - RNA, 19 nt, Artificial Sequence
  Description of Artificial Sequence: Synthetic oligonucleotide
  Antisense strand to SEQ ID NO: 11034
cuuaguagagaguacaggc

SEQ ID NO: 11036 - RNA, 19 nt, Artificial Sequence
  Description of Artificial Sequence: Synthetic oligonucleotide
  Sense strand starting at position 468 of SEQ ID NO: 99
agaaguaaacucugcuaua

SEQ ID NO: 11037 - RNA, 19 nt, Artificial Sequence
  Description of Artificial Sequence: Synthetic oligonucleotide
  Antisense strand to SEQ ID NO: 11036
uauagcagaguuuacuucu

SEQ ID NO: 11038 - RNA, 19 nt, Artificial Sequence
  Description of Artificial Sequence: Synthetic oligonucleotide
  Sense strand starting at position 495 of SEQ ID NO: 99
cuuaucucuuuaguagaga

SEQ ID NO: 11039 - RNA, 19 nt, Artificial Sequence
  Description of Artificial Sequence: Synthetic oligonucleotide
  Antisense strand to SEQ ID NO: 11038
ucucuacuaaagagauaag

SEQ ID NO: 11040 - RNA, 19 nt, Artificial Sequence
  Description of Artificial Sequence: Synthetic oligonucleotide
  Sense strand starting at position 710 of SEQ ID NO: 99
gucaccauguuucuaaauu

SEQ ID NO: 11041 - RNA, 19 nt, Artificial Sequence
  Description of Artificial Sequence: Synthetic oligonucleotide
  Antisense strand to SEQ ID NO: 11040
aauuuagaaacauggugac

SEQ ID NO: 11042 - RNA, 19 nt, Artificial Sequence
  Description of Artificial Sequence: Synthetic oligonucleotide
  Sense strand starting at position 740 of SEQ ID NO: 99
ccagaucuugugcauaauu

SEQ ID NO: 11043 - RNA, 19 nt, Artificial Sequence
  Description of Artificial Sequence: Synthetic oligonucleotide
  Antisense strand to SEQ ID NO: 11042
aauuaugcacaagaucugg

SEQ ID NO: 11044 - RNA, 19 nt, Artificial Sequence
  Description of Artificial Sequence: Synthetic oligonucleotide
  Sense strand starting at position 792 of SEQ ID NO: 99
gucugaaaggguugugaau

SEQ ID NO: 11045 - RNA, 19 nt, Artificial Sequence
  Description of Artificial Sequence: Synthetic oligonucleotide
  Antisense strand to SEQ ID NO: 11044
auucacaacccuuucagac

SEQ ID NO: 11046 - RNA, 19 nt, Artificial Sequence
  Description of Artificial Sequence: Synthetic oligonucleotide
  Sense strand starting at position 871 of SEQ ID NO: 99
ucugucuuacuguauauca

SEQ ID NO: 11047 - RNA, 19 nt, Artificial Sequence
  Description of Artificial Sequence: Synthetic oligonucleotide
  Antisense strand to SEQ ID NO: 11046
ugauauacaguaagacaga

SEQ ID NO: 11048 - RNA, 19 nt, Artificial Sequence
  Description of Artificial Sequence: Synthetic oligonucleotide
  Sense strand starting at position 873 of SEQ ID NO: 99
ugucuuacuguauaucauu

SEQ ID NO: 11049 - RNA, 19 nt, Artificial Sequence
  Description of Artificial Sequence: Synthetic oligonucleotide
  Antisense strand to SEQ ID NO: 11048
aaugauauacaguaagaca

SEQ ID NO: 11050 - RNA, 19 nt, Artificial Sequence
  Description of Artificial Sequence: Synthetic oligonucleotide
  Sense strand starting at position 879 of SEQ ID NO: 99
acuguauaucauugaaugu

SEQ ID NO: 11051 - RNA, 19 nt, Artificial Sequence
  Description of Artificial Sequence: Synthetic oligonucleotide
  Antisense strand to SEQ ID NO: 11050
acauucaaugauauacagu

SEQ ID NO: 11052 - RNA, 19 nt, Artificial Sequence
  Description of Artificial Sequence: Synthetic oligonucleotide
  Sense strand starting at position 927 of SEQ ID NO: 99
ucuugaaucuugguauagg

SEQ ID NO: 11053 - RNA, 19 nt, Artificial Sequence
  Description of Artificial Sequence: Synthetic oligonucleotide
  Antisense strand to SEQ ID NO: 11052
ccuauaccaagauucaaga

SEQ ID NO: 11054 - RNA, 19 nt, Artificial Sequence
  Description of Artificial Sequence: Synthetic oligonucleotide
  Sense strand starting at position 983 of SEQ ID NO: 99
gcucuuguugaagaaagau

SEQ ID NO: 11055 - RNA, 19 nt, Artificial Sequence
  Description of Artificial Sequence: Synthetic oligonucleotide
  Antisense strand to SEQ ID NO: 11054
aucuuucuucaacaagagc

SEQ ID NO: 11056 - RNA, 19 nt, Artificial Sequence
  Description of Artificial Sequence: Synthetic oligonucleotide
  Sense strand starting at position 1070 of SEQ ID NO: 99
uuagaauacuuaccuguga

SEQ ID NO: 11057 - RNA, 19 nt, Artificial Sequence
  Description of Artificial Sequence: Synthetic oligonucleotide
  Antisense strand to SEQ ID NO: 11056
ucacagguaaguauucuaa

SEQ ID NO: 11058 - RNA, 19 nt, Artificial Sequence
  Description of Artificial Sequence: Synthetic oligonucleotide
  Sense strand starting at position 1121 of SEQ ID NO: 99
ucagaauaguguuuacuac

SEQ ID NO: 11059 - RNA, 19 nt, Artificial Sequence
  Description of Artificial Sequence: Synthetic oligonucleotide
  Antisense strand to SEQ ID NO: 11058
guaguaaacacuauucuga

SEQ ID NO: 11060 - RNA, 19 nt, Artificial Sequence
  Description of Artificial Sequence: Synthetic oligonucleotide
  Sense strand starting at position 1145 of SEQ ID NO: 99
cagugaauucugcaauuga

SEQ ID NO: 11061 - RNA, 19 nt, Artificial Sequence
  Description of Artificial Sequence: Synthetic oligonucleotide
  Antisense strand to SEQ ID NO: 11060
ucaauugcagaauucacug

SEQ ID NO: 11062 - RNA, 19 nt, Artificial Sequence
  Description of Artificial Sequence: Synthetic oligonucleotide
  Sense strand starting at position 1281 of SEQ ID NO: 99
cuuguuguguauuugagga

SEQ ID NO: 11063 - RNA, 19 nt, Artificial Sequence
  Description of Artificial Sequence: Synthetic oligonucleotide
  Antisense strand to SEQ ID NO: 11062
uccucaaauacacaacaag

SEQ ID NO: 11064 - RNA, 19 nt, Artificial Sequence
  Description of Artificial Sequence: Synthetic oligonucleotide
  Sense strand starting at position 1311 of SEQ ID NO: 99
agcagaacccaauggugaa

SEQ ID NO: 11065 - RNA, 19 nt, Artificial Sequence
  Description of Artificial Sequence: Synthetic oligonucleotide
  Antisense strand to SEQ ID NO: 11064
uucaccauuggguucugcu

SEQ ID NO: 11066 - RNA, 19 nt, Artificial Sequence
  Description of Artificial Sequence: Synthetic oligonucleotide
  Sense strand starting at position 1312 of SEQ ID NO: 99
gcagaacccaauggugaaa

SEQ ID NO: 11067 - RNA, 19 nt, Artificial Sequence
  Description of Artificial Sequence: Synthetic oligonucleotide
  Antisense strand to SEQ ID NO: 11066
uuucaccauuggguucugc

SEQ ID NO: 11068 - RNA, 19 nt, Artificial Sequence
  Description of Artificial Sequence: Synthetic oligonucleotide
  Sense strand starting at position 1369 of SEQ ID NO: 99
guguccuuuccagaaacua

SEQ ID NO: 11069 - RNA, 19 nt, Artificial Sequence
  Description of Artificial Sequence: Synthetic oligonucleotide
  Antisense strand to SEQ ID NO: 11068
uaguuucuggaaaggacac

SEQ ID NO: 11070 - RNA, 19 nt, Artificial Sequence
  Description of Artificial Sequence: Synthetic oligonucleotide
  Sense strand starting at position 1698 of SEQ ID NO: 99
ucgagaauugcauacuaaa

SEQ ID NO: 11071 - RNA, 19 nt, Artificial Sequence
  Description of Artificial Sequence: Synthetic oligonucleotide
  Antisense strand to SEQ ID NO: 11070
uuuaguaugcaauucucga

SEQ ID NO: 11072 - RNA, 19 nt, Artificial Sequence
  Description of Artificial Sequence: Synthetic oligonucleotide
  Sense strand starting at position 1810 of SEQ ID NO: 99
uagauaacguaagcuaaga

SEQ ID NO: 11073 - RNA, 19 nt, Artificial Sequence
  Description of Artificial Sequence: Synthetic oligonucleotide
  Antisense strand to SEQ ID NO: 11072
ucuuagcuuacguuaucua

SEQ ID NO: 11074 - RNA, 19 nt, Artificial Sequence
  Description of Artificial Sequence: Synthetic oligonucleotide
  Sense strand starting at position 2066 of SEQ ID NO: 99
caucaaagguauguacaga

SEQ ID NO: 11075 - RNA, 19 nt, Artificial Sequence
  Description of Artificial Sequence: Synthetic oligonucleotide
  Antisense strand to SEQ ID NO: 11074
ucuguacauaccuuugaug

SEQ ID NO: 11076 - RNA, 19 nt, Artificial Sequence
  Description of Artificial Sequence: Synthetic oligonucleotide
  Sense strand starting at position 2389 of SEQ ID NO: 99
cauguaguccuugucgcau

SEQ ID NO: 11077 - RNA, 19 nt, Artificial Sequence
  Description of Artificial Sequence: Synthetic oligonucleotide
  Antisense strand to SEQ ID NO: 11076
augcgacaaggacuacaug

SEQ ID NO: 11078 - RNA, 19 nt, Artificial Sequence
  Description of Artificial Sequence: Synthetic oligonucleotide
  Sense strand starting at position 2443 of SEQ ID NO: 99
augugacaucuuuagugcu

SEQ ID NO: 11079 - RNA, 19 nt, Artificial Sequence
  Description of Artificial Sequence: Synthetic oligonucleotide
  Antisense strand to SEQ ID NO: 11078
agcacuaaagaugucacau

SEQ ID NO: 11080 - RNA, 19 nt, Artificial Sequence
  Description of Artificial Sequence: Synthetic oligonucleotide
  Sense strand starting at position 2765 of SEQ ID NO: 99
aggaaauggcccugguuga

SEQ ID NO: 11081 - RNA, 19 nt, Artificial Sequence
  Description of Artificial Sequence: Synthetic oligonucleotide
  Antisense strand to SEQ ID NO: 11080
ucaaccagggccauuuccu

SEQ ID NO: 11082 - RNA, 19 nt, Artificial Sequence
  Description of Artificial Sequence: Synthetic oligonucleotide
  Sense strand starting at position 2766 of SEQ ID NO: 99
ggaaauggcccugguugaa

SEQ ID NO: 11083 - RNA, 19 nt, Artificial Sequence
  Description of Artificial Sequence: Synthetic oligonucleotide
  Antisense strand to SEQ ID NO: 11082
uucaaccagggccauuucc

SEQ ID NO: 11084 - RNA, 19 nt, Artificial Sequence
  Description of Artificial Sequence: Synthetic oligonucleotide
  Sense strand starting at position 2973 of SEQ ID NO: 99
agagauuccuaguuacagc

SEQ ID NO: 11085 - RNA, 19 nt, Artificial Sequence
  Description of Artificial Sequence: Synthetic oligonucleotide
  Antisense strand to SEQ ID NO: 11084
gcuguaacuaggaaucucu

SEQ ID NO: 11086 - RNA, 19 nt, Artificial Sequence
  Description of Artificial Sequence: Synthetic oligonucleotide
  Sense strand starting at position 3000 of SEQ ID NO: 99
gauccucuacagugguaaa

SEQ ID NO: 11087 - RNA, 19 nt, Artificial Sequence
  Description of Artificial Sequence: Synthetic oligonucleotide
  Antisense strand to SEQ ID NO: 11086
uuuaccacuguagaggauc

SEQ ID NO: 11088 - RNA, 19 nt, Artificial Sequence
  Description of Artificial Sequence: Synthetic oligonucleotide
  Sense strand starting at position 3100 of SEQ ID NO: 99
accuaaaguucuguuugac

SEQ ID NO: 11089 - RNA, 19 nt, Artificial Sequence
  Description of Artificial Sequence: Synthetic oligonucleotide
  Antisense strand to SEQ ID NO: 11088
gucaaacagaacuuuaggu

SEQ ID NO: 11090 - RNA, 19 nt, Artificial Sequence
  Description of Artificial Sequence: Synthetic oligonucleotide
  Sense strand starting at position 3321 of SEQ ID NO: 99
agcgauauacuaggacaga

SEQ ID NO: 11091 - RNA, 19 nt, Artificial Sequence
  Description of Artificial Sequence: Synthetic oligonucleotide
  Antisense strand to SEQ ID NO: 11090
ucuguccuaguauaucgcu

SEQ ID NO: 11092 - RNA, 19 nt, Artificial Sequence
  Description of Artificial Sequence: Synthetic oligonucleotide
  Sense strand starting at position 3340 of SEQ ID NO: 99
ugaggucagacauacggua

SEQ ID NO: 11093 - RNA, 19 nt, Artificial Sequence
  Description of Artificial Sequence: Synthetic oligonucleotide
  Antisense strand to SEQ ID NO: 11092
uaccguaugucugaccuca

SEQ ID NO: 11094 - RNA, 19 nt, Artificial Sequence
  Description of Artificial Sequence: Synthetic oligonucleotide
  Sense strand starting at position 3484 of SEQ ID NO: 99
ucagaauccuacuuaggcu

SEQ ID NO: 11095 - RNA, 19 nt, Artificial Sequence
  Description of Artificial Sequence: Synthetic oligonucleotide
  Antisense strand to SEQ ID NO: 11094
agccuaaguaggauucuga

SEQ ID NO: 11096 - RNA, 19 nt, Artificial Sequence
  Description of Artificial Sequence: Synthetic oligonucleotide
  Sense strand starting at position 3567 of SEQ ID NO: 99
caguuaaauggcuggagga

SEQ ID NO: 11097 - RNA, 19 nt, Artificial Sequence
  Description of Artificial Sequence: Synthetic oligonucleotide
  Antisense strand to SEQ ID NO: 11096
uccuccagccauuuaacug

SEQ ID NO: 11098 - RNA, 19 nt, Artificial Sequence
  Description of Artificial Sequence: Synthetic oligonucleotide
  Sense strand starting at position 3696 of SEQ ID NO: 99
gguaccgagaggcauuaau

SEQ ID NO: 11099 - RNA, 19 nt, Artificial Sequence
  Description of Artificial Sequence: Synthetic oligonucleotide
  Antisense strand to SEQ ID NO: 11098
auuaaugccucucgguacc

SEQ ID NO: 11100 - RNA, 19 nt, Artificial Sequence
  Description of Artificial Sequence: Synthetic oligonucleotide
  Sense strand starting at position 3865 of SEQ ID NO: 99
aaaucagccguugauuaau

SEQ ID NO: 11101 - RNA, 19 nt, Artificial Sequence
  Description of Artificial Sequence: Synthetic oligonucleotide
  Antisense strand to SEQ ID NO: 11100
auuaaucaacggcugauuu

SEQ ID NO: 11102 - RNA, 19 nt, Artificial Sequence
  Description of Artificial Sequence: Synthetic oligonucleotide
  Sense strand starting at position 3879 of SEQ ID NO: 99
uuaauacggccuuaguuau

SEQ ID NO: 11103 - RNA, 19 nt, Artificial Sequence
  Description of Artificial Sequence: Synthetic oligonucleotide
  Antisense strand to SEQ ID NO: 11102
auaacuaaggccguauuaa

SEQ ID NO: 11104 - RNA, 19 nt, Artificial Sequence
  Description of Artificial Sequence: Synthetic oligonucleotide
  Sense strand starting at position 3961 of SEQ ID NO: 99
cuugcaguuacuggaaaga

SEQ ID NO: 11105 - RNA, 19 nt, Artificial Sequence
  Description of Artificial Sequence: Synthetic oligonucleotide
  Antisense strand to SEQ ID NO: 11104
ucuuuccaguaacugcaag

SEQ ID NO: 11106 - RNA, 19 nt, Artificial Sequence
  Description of Artificial Sequence: Synthetic oligonucleotide
  Sense strand starting at position 2444 of SEQ ID NO: 98
augugacaucuuuagugcu

SEQ ID NO: 11107 - RNA, 19 nt, Artificial Sequence
  Description of Artificial Sequence: Synthetic oligonucleotide
  Antisense strand to SEQ ID NO: 11106
agcacuaaagaugucacau

SEQ ID NO: 11108 - RNA, 19 nt, Artificial Sequence
  Description of Artificial Sequence: Synthetic oligonucleotide
  Sense strand starting at position 3592 of SEQ ID NO: 100
cuaguagcaguauauuaua

SEQ ID NO: 11109 - RNA, 19 nt, Artificial Sequence
  Description of Artificial Sequence: Synthetic oligonucleotide
  Antisense strand to SEQ ID NO: 11108
uauaauauacugcuacuag

SEQ ID NO: 11110 - RNA, 19 nt, Artificial Sequence
  Description of Artificial Sequence: Synthetic oligonucleotide
  Sense strand starting at position 3505 of SEQ ID NO: 100
agauaaauguaugguaaac

SEQ ID NO: 11111 - RNA, 19 nt, Artificial Sequence
  Description of Artificial Sequence: Synthetic oligonucleotide
  Antisense strand to SEQ ID NO: 11110
guuuaccauacauuuaucu

SEQ ID NO: 11112 - RNA, 19 nt, Artificial Sequence
  Description of Artificial Sequence: Synthetic oligonucleotide
  Sense strand starting at position 3502 of SEQ ID NO: 100
gcuagauaaauguauggua

SEQ ID NO: 11113 - RNA, 19 nt, Artificial Sequence
  Description of Artificial Sequence: Synthetic oligonucleotide
  Antisense strand to SEQ ID NO: 11112
uaccauacauuuaucuagc

SEQ ID NO: 11114 - RNA, 19 nt, Artificial Sequence
  Description of Artificial Sequence: Synthetic oligonucleotide
  Sense strand starting at position 3494 of SEQ ID NO: 100
uucuguaugcuagauaaau

SEQ ID NO: 11115 - RNA, 19 nt, Artificial Sequence
  Description of Artificial Sequence: Synthetic oligonucleotide
  Antisense strand to SEQ ID NO: 11114
auuuaucuagcauacagaa

SEQ ID NO: 11116 - RNA, 19 nt, Artificial Sequence
  Description of Artificial Sequence: Synthetic oligonucleotide
  Sense strand starting at position 3397 of SEQ ID NO: 100
guaugcgccuuauuaauau

SEQ ID NO: 11117 - RNA, 19 nt, Artificial Sequence
  Description of Artificial Sequence: Synthetic oligonucleotide
  Antisense strand to SEQ ID NO: 11116
auauuaauaaggcgcauac

SEQ ID NO: 11118 - RNA, 19 nt, Artificial Sequence
  Description of Artificial Sequence: Synthetic oligonucleotide
  Sense strand starting at position 3395 of SEQ ID NO: 100
cgguaugcgccuuauuaau

SEQ ID NO: 11119 - RNA, 19 nt, Artificial Sequence
  Description of Artificial Sequence: Synthetic oligonucleotide
  Antisense strand to SEQ ID NO: 11118
auuaauaaggcgcauaccg

SEQ ID NO: 11120 - RNA, 19 nt, Artificial Sequence
  Description of Artificial Sequence: Synthetic oligonucleotide
  Sense strand starting at position 3394 of SEQ ID NO: 100
acgguaugcgccuuauuaa

SEQ ID NO: 11121 - RNA, 19 nt, Artificial Sequence
  Description of Artificial Sequence: Synthetic oligonucleotide
  Antisense strand to SEQ ID NO: 11120
uuaauaaggcgcauaccgu

SEQ ID NO: 11122 - RNA, 19 nt, Artificial Sequence
  Description of Artificial Sequence: Synthetic oligonucleotide
  Sense strand starting at position 3393 of SEQ ID NO: 100
uacgguaugcgccuuauua

SEQ ID NO: 11123 - RNA, 19 nt, Artificial Sequence
  Description of Artificial Sequence: Synthetic oligonucleotide
  Antisense strand to SEQ ID NO: 11122
uaauaaggcgcauaccgua

SEQ ID NO: 11124 - RNA, 19 nt, Artificial Sequence
  Description of Artificial Sequence: Synthetic oligonucleotide
  Sense strand starting at position 3381 of SEQ ID NO: 100
ggacuaagaucauacggua

SEQ ID NO: 11125 - RNA, 19 nt, Artificial Sequence
  Description of Artificial Sequence: Synthetic oligonucleotide
  Antisense strand to SEQ ID NO: 11124
uaccguaugaucuuagucc

SEQ ID NO: 11126 - RNA, 19 nt, Artificial Sequence
  Description of Artificial Sequence: Synthetic oligonucleotide
  Sense strand starting at position 3328 of SEQ ID NO: 100
gagucagaaguugagucuu

SEQ ID NO: 11127 - RNA, 19 nt, Artificial Sequence
  Description of Artificial Sequence: Synthetic oligonucleotide
  Antisense strand to SEQ ID NO: 11126
aagacucaacuucugacuc

SEQ ID NO: 11128 - RNA, 19 nt, Artificial Sequence
  Description of Artificial Sequence: Synthetic oligonucleotide
  Sense strand starting at position 3322 of SEQ ID NO: 100
uauauagagucagaaguug

SEQ ID NO: 11129 - RNA, 19 nt, Artificial Sequence
  Description of Artificial Sequence: Synthetic oligonucleotide
  Antisense strand to SEQ ID NO: 11128
caacuucugacucuauaua

SEQ ID NO: 11130 - RNA, 19 nt, Artificial Sequence
  Description of Artificial Sequence: Synthetic oligonucleotide
  Sense strand starting at position 3312 of SEQ ID NO: 100
uuuaaucgucuauauagag

SEQ ID NO: 11131 - RNA, 19 nt, Artificial Sequence
  Description of Artificial Sequence: Synthetic oligonucleotide
  Antisense strand to SEQ ID NO: 11130
cucuauauagacgauuaaa

SEQ ID NO: 11132 - RNA, 19 nt, Artificial Sequence
  Description of Artificial Sequence: Synthetic oligonucleotide
  Sense strand starting at position 2967 of SEQ ID NO: 100
cagugaauguaguccuugu

SEQ ID NO: 11133 - RNA, 19 nt, Artificial Sequence
  Description of Artificial Sequence: Synthetic oligonucleotide
  Antisense strand to SEQ ID NO: 11132
acaaggacuacauucacug

SEQ ID NO: 11134 - RNA, 19 nt, Artificial Sequence
  Description of Artificial Sequence: Synthetic oligonucleotide
  Sense strand starting at position 2713 of SEQ ID NO: 100
ugcugauauugagaggaga

SEQ ID NO: 11135 - RNA, 19 nt, Artificial Sequence
  Description of Artificial Sequence: Synthetic oligonucleotide
  Antisense strand to SEQ ID NO: 11134
ucuccucucaauaucagca

SEQ ID NO: 11136 - RNA, 19 nt, Artificial Sequence
  Description of Artificial Sequence: Synthetic oligonucleotide
  Sense strand starting at position 2614 of SEQ ID NO: 100
acguguaguaaagacugaa

SEQ ID NO: 11137 - RNA, 19 nt, Artificial Sequence
  Description of Artificial Sequence: Synthetic oligonucleotide
  Antisense strand to SEQ ID NO: 11136
uucagucuuuacuacacgu

SEQ ID NO: 11138 - RNA, 19 nt, Artificial Sequence
  Description of Artificial Sequence: Synthetic oligonucleotide
  Sense strand starting at position 1742 of SEQ ID NO: 100
cgcaauugauacuaugaau

SEQ ID NO: 11139 - RNA, 19 nt, Artificial Sequence
  Description of Artificial Sequence: Synthetic oligonucleotide
  Antisense strand to SEQ ID NO: 11138
auucauaguaucaauugcg

SEQ ID NO: 11140 - RNA, 19 nt, Artificial Sequence
  Description of Artificial Sequence: Synthetic oligonucleotide
  Sense strand starting at position 1732 of SEQ ID NO: 100
cagugaauuccgcaauuga

SEQ ID NO: 11141 - RNA, 19 nt, Artificial Sequence
  Description of Artificial Sequence: Synthetic oligonucleotide
  Antisense strand to SEQ ID NO: 11140
ucaauugcggaauucacug

SEQ ID NO: 11142 - RNA, 19 nt, Artificial Sequence
  Description of Artificial Sequence: Synthetic oligonucleotide
  Sense strand starting at position 1566 of SEQ ID NO: 100
gagggcucuuggugaagaa

SEQ ID NO: 11143 - RNA, 19 nt, Artificial Sequence
  Description of Artificial Sequence: Synthetic oligonucleotide
  Antisense strand to SEQ ID NO: 11142
uucuucaccaagagcccuc

SEQ ID NO: 11144 - RNA, 19 nt, Artificial Sequence
  Description of Artificial Sequence: Synthetic oligonucleotide
  Sense strand starting at position 1470 of SEQ ID NO: 100
uguaucauugaauguucua

SEQ ID NO: 11145 - RNA, 19 nt, Artificial Sequence
  Description of Artificial Sequence: Synthetic oligonucleotide
  Antisense strand to SEQ ID NO: 11144
uagaacauucaaugauaca

SEQ ID NO: 11146 - RNA, 19 nt, Artificial Sequence
  Description of Artificial Sequence: Synthetic oligonucleotide
  Sense strand starting at position 1467 of SEQ ID NO: 100
cuguguaucauugaauguu

SEQ ID NO: 11147 - RNA, 19 nt, Artificial Sequence
  Description of Artificial Sequence: Synthetic oligonucleotide
  Antisense strand to SEQ ID NO: 11146
aacauucaaugauacacag

SEQ ID NO: 11148 - RNA, 19 nt, Artificial Sequence
  Description of Artificial Sequence: Synthetic oligonucleotide
  Sense strand starting at position 1465 of SEQ ID NO: 100
uacuguguaucauugaaug

SEQ ID NO: 11149 - RNA, 19 nt, Artificial Sequence
  Description of Artificial Sequence: Synthetic oligonucleotide
  Antisense strand to SEQ ID NO: 11148
cauucaaugauacacagua

SEQ ID NO: 11150 - RNA, 19 nt, Artificial Sequence
  Description of Artificial Sequence: Synthetic oligonucleotide
  Sense strand starting at position 1463 of SEQ ID NO: 100
cuuacuguguaucauugaa

SEQ ID NO: 11151 - RNA, 19 nt, Artificial Sequence
  Description of Artificial Sequence: Synthetic oligonucleotide
  Antisense strand to SEQ ID NO: 11150
uucaaugauacacaguaag

SEQ ID NO: 11152 - RNA, 19 nt, Artificial Sequence
  Description of Artificial Sequence: Synthetic oligonucleotide
  Sense strand starting at position 1460 of SEQ ID NO: 100
ugucuuacuguguaucauu

SEQ ID NO: 11153 - RNA, 19 nt, Artificial Sequence
  Description of Artificial Sequence: Synthetic oligonucleotide
  Antisense strand to SEQ ID NO: 11152
aaugauacacaguaagaca

SEQ ID NO: 11154 - RNA, 19 nt, Artificial Sequence
  Description of Artificial Sequence: Synthetic oligonucleotide
  Sense strand starting at position 1459 of SEQ ID NO: 100
cugucuuacuguguaucau

SEQ ID NO: 11155 - RNA, 19 nt, Artificial Sequence
  Description of Artificial Sequence: Synthetic oligonucleotide
  Antisense strand to SEQ ID NO: 11154
augauacacaguaagacag

SEQ ID NO: 11156 - RNA, 19 nt, Artificial Sequence
  Description of Artificial Sequence: Synthetic oligonucleotide
  Sense strand starting at position 1458 of SEQ ID NO: 100
ucugucuuacuguguauca

SEQ ID NO: 11157 - RNA, 19 nt, Artificial Sequence
  Description of Artificial Sequence: Synthetic oligonucleotide
  Antisense strand to SEQ ID NO: 11156
ugauacacaguaagacaga

SEQ ID NO: 11158 - RNA, 19 nt, Artificial Sequence
  Description of Artificial Sequence: Synthetic oligonucleotide
  Sense strand starting at position 1078 of SEQ ID NO: 100
cuuaccucuuuaguagaua

SEQ ID NO: 11159 - RNA, 19 nt, Artificial Sequence
  Description of Artificial Sequence: Synthetic oligonucleotide
  Antisense strand to SEQ ID NO: 11158
uaucuacuaaagagguaag

SEQ ID NO: 11160 - RNA, 19 nt, Artificial Sequence
  Description of Artificial Sequence: Synthetic oligonucleotide
  Sense strand starting at position 1051 of SEQ ID NO: 100
agaagcaaauucugauuua

SEQ ID NO: 11161 - RNA, 19 nt, Artificial Sequence
  Description of Artificial Sequence: Synthetic oligonucleotide
  Antisense strand to SEQ ID NO: 11160
uaaaucagaauuugcuucu

SEQ ID NO: 11162 - RNA, 19 nt, Artificial Sequence
  Description of Artificial Sequence: Synthetic oligonucleotide
  Sense strand starting at position 995 of SEQ ID NO: 100
aauuguuuccgggaaauac

SEQ ID NO: 11163 - RNA, 19 nt, Artificial Sequence
  Description of Artificial Sequence: Synthetic oligonucleotide
  Antisense strand to SEQ ID NO: 11162
guauuucccggaaacaauu

SEQ ID NO: 11164 - RNA, 19 nt, Artificial Sequence
  Description of Artificial Sequence: Synthetic oligonucleotide
  Sense strand starting at position 993 of SEQ ID NO: 100
uaaauuguuuccgggaaau

SEQ ID NO: 11165 - RNA, 19 nt, Artificial Sequence
  Description of Artificial Sequence: Synthetic oligonucleotide
  Antisense strand to SEQ ID NO: 11164
auuucccggaaacaauuua

SEQ ID NO: 11166 - RNA, 19 nt, Artificial Sequence
  Description of Artificial Sequence: Synthetic oligonucleotide
  Sense strand starting at position 991 of SEQ ID NO: 100
aguaaauuguuuccgggaa

SEQ ID NO: 11167 - RNA, 19 nt, Artificial Sequence
  Description of Artificial Sequence: Synthetic oligonucleotide
  Antisense strand to SEQ ID NO: 11166
uucccggaaacaauuuacu

SEQ ID NO: 11168 - RNA, 19 nt, Artificial Sequence
  Description of Artificial Sequence: Synthetic oligonucleotide
  Sense strand starting at position 849 of SEQ ID NO: 100
gguagcuauuaaucucaau

SEQ ID NO: 11169 - RNA, 19 nt, Artificial Sequence
  Description of Artificial Sequence: Synthetic oligonucleotide
  Antisense strand to SEQ ID NO: 11168
auugagauuaauagcuacc

SEQ ID NO: 11170 - RNA, 19 nt, Artificial Sequence
  Description of Artificial Sequence: Synthetic oligonucleotide
  Sense strand starting at position 816 of SEQ ID NO: 100
uguacucucuaugaagcuu

SEQ ID NO: 11171 - RNA, 19 nt, Artificial Sequence
  Description of Artificial Sequence: Synthetic oligonucleotide
  Antisense strand to SEQ ID NO: 11170
aagcuucauagagaguaca

SEQ ID NO: 11172 - RNA, 19 nt, Artificial Sequence
  Description of Artificial Sequence: Synthetic oligonucleotide
  Sense strand starting at position 815 of SEQ ID NO: 100
cuguacucucuaugaagcu

SEQ ID NO: 11173 - RNA, 19 nt, Artificial Sequence
  Description of Artificial Sequence: Synthetic oligonucleotide
  Antisense strand to SEQ ID NO: 11172
agcuucauagagaguacag

SEQ ID NO: 11174 - RNA, 19 nt, Artificial Sequence
  Description of Artificial Sequence: Synthetic oligonucleotide
  Sense strand starting at position 813 of SEQ ID NO: 100
gccuguacucucuaugaag

SEQ ID NO: 11175 - RNA, 19 nt, Artificial Sequence
  Description of Artificial Sequence: Synthetic oligonucleotide
  Antisense strand to SEQ ID NO: 11174
cuucauagagaguacaggc

SEQ ID NO: 11176 - RNA, 19 nt, Artificial Sequence
  Description of Artificial Sequence: Synthetic oligonucleotide
  Sense strand starting at position 758 of SEQ ID NO: 100
agaugagaguggaaagguu

SEQ ID NO: 11177 - RNA, 19 nt, Artificial Sequence
  Description of Artificial Sequence: Synthetic oligonucleotide
  Antisense strand to SEQ ID NO: 11176
aaccuuuccacucucaucu

SEQ ID NO: 11178 - RNA, 19 nt, Artificial Sequence
  Description of Artificial Sequence: Synthetic oligonucleotide
  Sense strand starting at position 683 of SEQ ID NO: 100
augauaaauugagagacca

SEQ ID NO: 11179 - RNA, 19 nt, Artificial Sequence
  Description of Artificial Sequence: Synthetic oligonucleotide
  Antisense strand to SEQ ID NO: 11178
uggucucucaauuuaucau

SEQ ID NO: 11180 - RNA, 19 nt, Artificial Sequence
  Description of Artificial Sequence: Synthetic oligonucleotide
  Sense strand starting at position 492 of SEQ ID NO: 100
gugugacuuacagagaggu

SEQ ID NO: 11181 - RNA, 19 nt, Artificial Sequence
  Description of Artificial Sequence: Synthetic oligonucleotide
  Antisense strand to SEQ ID NO: 11180
accucucuguaagucacac

SEQ ID NO: 11182 - RNA, 19 nt, Artificial Sequence
  Description of Artificial Sequence: Synthetic oligonucleotide
  Sense strand starting at position 156 of SEQ ID NO: 100
uucugucccuaagagaucu

SEQ ID NO: 11183 - RNA, 19 nt, Artificial Sequence
  Description of Artificial Sequence: Synthetic oligonucleotide
  Antisense strand to SEQ ID NO: 11182
agaucucuuagggacagaa

SEQ ID NO: 11184 - RNA, 19 nt, Artificial Sequence
  Description of Artificial Sequence: Synthetic oligonucleotide
  Sense strand starting at position 148 of SEQ ID NO: 100
uuguuaacuucugucccua

SEQ ID NO: 11185 - RNA, 19 nt, Artificial Sequence
  Description of Artificial Sequence: Synthetic oligonucleotide
  Antisense strand to SEQ ID NO: 11184
uagggacagaaguuaacaa

SEQ ID NO: 11186 - RNA, 19 nt, Artificial Sequence
  Description of Artificial Sequence: Synthetic oligonucleotide
  Sense strand starting at position 55 of SEQ ID NO: 100
cuuagaagugggcaaaugu

SEQ ID NO: 11187 - RNA, 19 nt, Artificial Sequence
  Description of Artificial Sequence: Synthetic oligonucleotide
  Antisense strand to SEQ ID NO: 11186
acauuugcccacuucuaag

SEQ ID NO: 11188 - RNA, 19 nt, Artificial Sequence
  Description of Artificial Sequence: Synthetic oligonucleotide
  Sense strand starting at position 3846 of SEQ ID NO: 101
uuauauacucagcacugua

SEQ ID NO: 11189 - RNA, 19 nt, Artificial Sequence
  Description of Artificial Sequence: Synthetic oligonucleotide
  Antisense strand to SEQ ID NO: 11188
uacagugcugaguauauaa

SEQ ID NO: 11190 - RNA, 19 nt, Artificial Sequence
  Description of Artificial Sequence: Synthetic oligonucleotide
  Sense strand starting at position 3607 of SEQ ID NO: 101
aguaauugugaccaauuac

SEQ ID NO: 11191 - RNA, 19 nt, Artificial Sequence
  Description of Artificial Sequence: Synthetic oligonucleotide
  Antisense strand to SEQ ID NO: 11190
guaauuggucacaauuacu

SEQ ID NO: 11192 - RNA, 19 nt, Artificial Sequence
  Description of Artificial Sequence: Synthetic oligonucleotide
  Sense strand starting at position 3597 of SEQ ID NO: 101
guuaaacaccaguaauugu

SEQ ID NO: 11193 - RNA, 19 nt, Artificial Sequence
  Description of Artificial Sequence: Synthetic oligonucleotide
  Antisense strand to SEQ ID NO: 11192
acaauuacugguguuuaac

SEQ ID NO: 11194 - RNA, 19 nt, Artificial Sequence
  Description of Artificial Sequence: Synthetic oligonucleotide
  Sense strand starting at position 3594 of SEQ ID NO: 101
gcaguuaaacaccaguaau

SEQ ID NO: 11195 - RNA, 19 nt, Artificial Sequence
  Description of Artificial Sequence: Synthetic oligonucleotide
  Antisense strand to SEQ ID NO: 11194
auuacugguguuuaacugc

SEQ ID NO: 11196 - RNA, 19 nt, Artificial Sequence
  Description of Artificial Sequence: Synthetic oligonucleotide
  Sense strand starting at position 3538 of SEQ ID NO: 101
gccaucucagaaggacuaa

SEQ ID NO: 11197 - RNA, 19 nt, Artificial Sequence
  Description of Artificial Sequence: Synthetic oligonucleotide
  Antisense strand to SEQ ID NO: 11196
uuaguccuucugagauggc

SEQ ID NO: 11198 - RNA, 19 nt, Artificial Sequence
  Description of Artificial Sequence: Synthetic oligonucleotide
  Sense strand starting at position 3491 of SEQ ID NO: 101
acuugugacuacccaguau

SEQ ID NO: 11199 - RNA, 19 nt, Artificial Sequence
  Description of Artificial Sequence: Synthetic oligonucleotide
  Antisense strand to SEQ ID NO: 11198
auacuggguagucacaagu

SEQ ID NO: 11200 - RNA, 19 nt, Artificial Sequence
  Description of Artificial Sequence: Synthetic oligonucleotide
  Sense strand starting at position 3473 of SEQ ID NO: 101
cucuaaaguguuuauaaga

SEQ ID NO: 11201 - RNA, 19 nt, Artificial Sequence
  Description of Artificial Sequence: Synthetic oligonucleotide
  Antisense strand to SEQ ID NO: 11200
ucuuauaaacacuuuagag

SEQ ID NO: 11202 - RNA, 19 nt, Artificial Sequence
  Description of Artificial Sequence: Synthetic oligonucleotide
  Sense strand starting at position 3472 of SEQ ID NO: 101
ccucuaaaguguuuauaag

SEQ ID NO: 11203 - RNA, 19 nt, Artificial Sequence
  Description of Artificial Sequence: Synthetic oligonucleotide
  Antisense strand to SEQ ID NO: 11202
cuuauaaacacuuuagagg

SEQ ID NO: 11204 - RNA, 19 nt, Artificial Sequence
  Description of Artificial Sequence: Synthetic oligonucleotide
  Sense strand starting at position 3348 of SEQ ID NO: 101
agcaguauuuacgcaggaa

SEQ ID NO: 11205 - RNA, 19 nt, Artificial Sequence
  Description of Artificial Sequence: Synthetic oligonucleotide
  Antisense strand to SEQ ID NO: 11204
uuccugcguaaauacugcu

SEQ ID NO: 11206 - RNA, 19 nt, Artificial Sequence
  Description of Artificial Sequence: Synthetic oligonucleotide
  Sense strand starting at position 3338 of SEQ ID NO: 101
acaguauuacagcaguauu

SEQ ID NO: 11207 - RNA, 19 nt, Artificial Sequence
  Description of Artificial Sequence: Synthetic oligonucleotide
  Antisense strand to SEQ ID NO: 11206
aauacugcuguaauacugu

SEQ ID NO: 11208 - RNA, 19 nt, Artificial Sequence
  Description of Artificial Sequence: Synthetic oligonucleotide
  Sense strand starting at position 3330 of SEQ ID NO: 101
uuugcaugacaguauuaca

SEQ ID NO: 11209 - RNA, 19 nt, Artificial Sequence
  Description of Artificial Sequence: Synthetic oligonucleotide
  Antisense strand to SEQ ID NO: 11208
uguaauacugucaugcaaa

SEQ ID NO: 11210 - RNA, 19 nt, Artificial Sequence
  Description of Artificial Sequence: Synthetic oligonucleotide
  Sense strand starting at position 3324 of SEQ ID NO: 101
auacacuuugcaugacagu

SEQ ID NO: 11211 - RNA, 19 nt, Artificial Sequence
  Description of Artificial Sequence: Synthetic oligonucleotide
  Antisense strand to SEQ ID NO: 11210
acugucaugcaaaguguau

SEQ ID NO: 11212 - RNA, 19 nt, Artificial Sequence
  Description of Artificial Sequence: Synthetic oligonucleotide
  Sense strand starting at position 3075 of SEQ ID NO: 101
uaaguaaguugaccugauu

SEQ ID NO: 11213 - RNA, 19 nt, Artificial Sequence
  Description of Artificial Sequence: Synthetic oligonucleotide
  Antisense strand to SEQ ID NO: 11212
aaucaggucaacuuacuua

SEQ ID NO: 11214 - RNA, 19 nt, Artificial Sequence
  Description of Artificial Sequence: Synthetic oligonucleotide
  Sense strand starting at position 3041 of SEQ ID NO: 101
uguauucuggguuaaagua

SEQ ID NO: 11215 - RNA, 19 nt, Artificial Sequence
  Description of Artificial Sequence: Synthetic oligonucleotide
  Antisense strand to SEQ ID NO: 11214
uacuuuaacccagaauaca

SEQ ID NO: 11216 - RNA, 19 nt, Artificial Sequence
  Description of Artificial Sequence: Synthetic oligonucleotide
  Sense strand starting at position 3039 of SEQ ID NO: 101
acuguauucuggguuaaag

SEQ ID NO: 11217 - RNA, 19 nt, Artificial Sequence
  Description of Artificial Sequence: Synthetic oligonucleotide
  Antisense strand to SEQ ID NO: 11216
cuuuaacccagaauacagu

SEQ ID NO: 11218 - RNA, 19 nt, Artificial Sequence
  Description of Artificial Sequence: Synthetic oligonucleotide
  Sense strand starting at position 3038 of SEQ ID NO: 101
gacuguauucuggguuaaa

SEQ ID NO: 11219 - RNA, 19 nt, Artificial Sequence
  Description of Artificial Sequence: Synthetic oligonucleotide
  Antisense strand to SEQ ID NO: 11218
uuuaacccagaauacaguc

SEQ ID NO: 11220 - RNA, 19 nt, Artificial Sequence
  Description of Artificial Sequence: Synthetic oligonucleotide
  Sense strand starting at position 2839 of SEQ ID NO: 101
agaugagaggucugcuacu

SEQ ID NO: 11221 - RNA, 19 nt, Artificial Sequence
  Description of Artificial Sequence: Synthetic oligonucleotide
  Antisense strand to SEQ ID NO: 11220
aguagcagaccucucaucu

SEQ ID NO: 11222 - RNA, 19 nt, Artificial Sequence
  Description of Artificial Sequence: Synthetic oligonucleotide
  Sense strand starting at position 2637 of SEQ ID NO: 101
ggugauuacggucaucaac

SEQ ID NO: 11223 - RNA, 19 nt, Artificial Sequence
  Description of Artificial Sequence: Synthetic oligonucleotide
  Antisense strand to SEQ ID NO: 11222
guugaugaccguaaucacc

SEQ ID NO: 11224 - RNA, 19 nt, Artificial Sequence
  Description of Artificial Sequence: Synthetic oligonucleotide
  Sense strand starting at position 2625 of SEQ ID NO: 101
accacuguucuuggugauu

SEQ ID NO: 11225 - RNA, 19 nt, Artificial Sequence
  Description of Artificial Sequence: Synthetic oligonucleotide
  Antisense strand to SEQ ID NO: 11224
aaucaccaagaacaguggu

SEQ ID NO: 11226 - RNA, 19 nt, Artificial Sequence
  Description of Artificial Sequence: Synthetic oligonucleotide
  Sense strand starting at position 2623 of SEQ ID NO: 101
gaaccacuguucuugguga

SEQ ID NO: 11227 - RNA, 19 nt, Artificial Sequence
  Description of Artificial Sequence: Synthetic oligonucleotide
  Antisense strand to SEQ ID NO: 11226
ucaccaagaacagugguuc

SEQ ID NO: 11228 - RNA, 19 nt, Artificial Sequence
  Description of Artificial Sequence: Synthetic oligonucleotide
  Sense strand starting at position 2581 of SEQ ID NO: 101
guauuuaaguuccagauca

SEQ ID NO: 11229 - RNA, 19 nt, Artificial Sequence
  Description of Artificial Sequence: Synthetic oligonucleotide
  Antisense strand to SEQ ID NO: 11228
ugaucuggaacuuaaauac

SEQ ID NO: 11230 - RNA, 19 nt, Artificial Sequence
  Description of Artificial Sequence: Synthetic oligonucleotide
  Sense strand starting at position 2193 of SEQ ID NO: 101
gguuuauuccaacaucugu

SEQ ID NO: 11231 - RNA, 19 nt, Artificial Sequence
  Description of Artificial Sequence: Synthetic oligonucleotide
  Antisense strand to SEQ ID NO: 11230
acagauguuggaauaaacc

SEQ ID NO: 11232 - RNA, 19 nt, Artificial Sequence
  Description of Artificial Sequence: Synthetic oligonucleotide
  Sense strand starting at position 2101 of SEQ ID NO: 101
uuaguucuaggguagagua

SEQ ID NO: 11233 - RNA, 19 nt, Artificial Sequence
  Description of Artificial Sequence: Synthetic oligonucleotide
  Antisense strand to SEQ ID NO: 11232
uacucuacccuagaacuaa

SEQ ID NO: 11234 - RNA, 19 nt, Artificial Sequence
  Description of Artificial Sequence: Synthetic oligonucleotide
  Sense strand starting at position 2098 of SEQ ID NO: 101
guauuaguucuaggguaga

SEQ ID NO: 11235 - RNA, 19 nt, Artificial Sequence
  Description of Artificial Sequence: Synthetic oligonucleotide
  Antisense strand to SEQ ID NO: 11234
ucuacccuagaacuaauac

SEQ ID NO: 11236 - RNA, 19 nt, Artificial Sequence
  Description of Artificial Sequence: Synthetic oligonucleotide
  Sense strand starting at position 2019 of SEQ ID NO: 101
cuaaacuggucaguccuua

SEQ ID NO: 11237 - RNA, 19 nt, Artificial Sequence
  Description of Artificial Sequence: Synthetic oligonucleotide
  Antisense strand to SEQ ID NO: 11236
uaaggacugaccaguuuag

SEQ ID NO: 11238 - RNA, 19 nt, Artificial Sequence
  Description of Artificial Sequence: Synthetic oligonucleotide
  Sense strand starting at position 2004 of SEQ ID NO: 101
cuaacaaagcagugucuaa

SEQ ID NO: 11239 - RNA, 19 nt, Artificial Sequence
  Description of Artificial Sequence: Synthetic oligonucleotide
  Antisense strand to SEQ ID NO: 11238
uuagacacugcuuuguuag

SEQ ID NO: 11240 - RNA, 19 nt, Artificial Sequence
  Description of Artificial Sequence: Synthetic oligonucleotide
  Sense strand starting at position 1361 of SEQ ID NO: 101
uuuccuagauguguuaaac

SEQ ID NO: 11241 - RNA, 19 nt, Artificial Sequence
  Description of Artificial Sequence: Synthetic oligonucleotide
  Antisense strand to SEQ ID NO: 11240
guuuaacacaucuaggaaa

SEQ ID NO: 11242 - RNA, 19 nt, Artificial Sequence
  Description of Artificial Sequence: Synthetic oligonucleotide
  Sense strand starting at position 1266 of SEQ ID NO: 101
ugcuuugguauccagguaa

SEQ ID NO: 11243 - RNA, 19 nt, Artificial Sequence
  Description of Artificial Sequence: Synthetic oligonucleotide
  Antisense strand to SEQ ID NO: 11242
uuaccuggauaccaaagca

SEQ ID NO: 11244 - RNA, 19 nt, Artificial Sequence
  Description of Artificial Sequence: Synthetic oligonucleotide
  Sense strand starting at position 1261 of SEQ ID NO: 101
gaaagugcuuugguaucca

SEQ ID NO: 11245 - RNA, 19 nt, Artificial Sequence
  Description of Artificial Sequence: Synthetic oligonucleotide
  Antisense strand to SEQ ID NO: 11244
uggauaccaaagcacuuuc

SEQ ID NO: 11246 - RNA, 19 nt, Artificial Sequence
  Description of Artificial Sequence: Synthetic oligonucleotide
  Sense strand starting at position 1129 of SEQ ID NO: 101
guauuacagcaaggauaca

SEQ ID NO: 11247 - RNA, 19 nt, Artificial Sequence
  Description of Artificial Sequence: Synthetic oligonucleotide
  Antisense strand to SEQ ID NO: 11246
uguauccuugcuguaauac

SEQ ID NO: 11248 - RNA, 19 nt, Artificial Sequence
  Description of Artificial Sequence: Synthetic oligonucleotide
  Sense strand starting at position 1126 of SEQ ID NO: 101
acuguauuacagcaaggau

SEQ ID NO: 11249 - RNA, 19 nt, Artificial Sequence
  Description of Artificial Sequence: Synthetic oligonucleotide
  Antisense strand to SEQ ID NO: 11248
auccuugcuguaauacagu

SEQ ID NO: 11250 - RNA, 19 nt, Artificial Sequence
  Description of Artificial Sequence: Synthetic oligonucleotide
  Sense strand starting at position 1085 of SEQ ID NO: 101
cguucugacagaugaaaga

SEQ ID NO: 11251 - RNA, 19 nt, Artificial Sequence
  Description of Artificial Sequence: Synthetic oligonucleotide
  Antisense strand to SEQ ID NO: 11250
ucuuucaucugucagaacg

SEQ ID NO: 11252 - RNA, 19 nt, Artificial Sequence
  Description of Artificial Sequence: Synthetic oligonucleotide
  Sense strand starting at position 896 of SEQ ID NO: 101
ugucuucgauacucacuau

SEQ ID NO: 11253 - RNA, 19 nt, Artificial Sequence
  Description of Artificial Sequence: Synthetic oligonucleotide
  Antisense strand to SEQ ID NO: 11252
auagugaguaucgaagaca

SEQ ID NO: 11254 - RNA, 19 nt, Artificial Sequence
  Description of Artificial Sequence: Synthetic oligonucleotide
  Sense strand starting at position 890 of SEQ ID NO: 101
aagaguugucuucgauacu

SEQ ID NO: 11255 - RNA, 19 nt, Artificial Sequence
  Description of Artificial Sequence: Synthetic oligonucleotide
  Antisense strand to SEQ ID NO: 11254
aguaucgaagacaacucuu

SEQ ID NO: 11256 - RNA, 19 nt, Artificial Sequence
  Description of Artificial Sequence: Synthetic oligonucleotide
  Sense strand starting at position 876 of SEQ ID NO: 101
acgcaagacucuuuaagag

SEQ ID NO: 11257 - RNA, 19 nt, Artificial Sequence
  Description of Artificial Sequence: Synthetic oligonucleotide
  Antisense strand to SEQ ID NO: 11256
cucuuaaagagucuugcgu

SEQ ID NO: 11258 - RNA, 19 nt, Artificial Sequence
  Description of Artificial Sequence: Synthetic oligonucleotide
  Sense strand starting at position 778 of SEQ ID NO: 101
gucugauuagcauacaaac

SEQ ID NO: 11259 - RNA, 19 nt, Artificial Sequence
  Description of Artificial Sequence: Synthetic oligonucleotide
  Antisense strand to SEQ ID NO: 11258
guuuguaugcuaaucagac

SEQ ID NO: 11260 - RNA, 19 nt, Artificial Sequence
  Description of Artificial Sequence: Synthetic oligonucleotide
  Sense strand starting at position 772 of SEQ ID NO: 101
gaaucagucugauuagcau

SEQ ID NO: 11261 - RNA, 19 nt, Artificial Sequence
  Description of Artificial Sequence: Synthetic oligonucleotide
  Antisense strand to SEQ ID NO: 11260
augcuaaucagacugauuc

SEQ ID NO: 11262 - RNA, 19 nt, Artificial Sequence
  Description of Artificial Sequence: Synthetic oligonucleotide
  Sense strand starting at position 769 of SEQ ID NO: 101
acugaaucagucugauuag

SEQ ID NO: 11263 - RNA, 19 nt, Artificial Sequence
  Description of Artificial Sequence: Synthetic oligonucleotide
  Antisense strand to SEQ ID NO: 11262
cuaaucagacugauucagu

SEQ ID NO: 11264 - RNA, 19 nt, Artificial Sequence
  Description of Artificial Sequence: Synthetic oligonucleotide
  Sense strand starting at position 460 of SEQ ID NO: 101
cuaagaguauguuuacuuu

SEQ ID NO: 11265 - RNA, 19 nt, Artificial Sequence
  Description of Artificial Sequence: Synthetic oligonucleotide
  Antisense strand to SEQ ID NO: 11264
aaaguaaacauacucuuag

SEQ ID NO: 11266 - RNA, 19 nt, Artificial Sequence
  Description of Artificial Sequence: Synthetic oligonucleotide
  Sense strand starting at position 143 of SEQ ID NO: 101
ucuaguuuguaccucaaga

SEQ ID NO: 11267 - RNA, 19 nt, Artificial Sequence
  Description of Artificial Sequence: Synthetic oligonucleotide
  Antisense strand to SEQ ID NO: 11266
ucuugagguacaaacuaga

SEQ ID NO: 11268 - RNA, 19 nt, Artificial Sequence
  Description of Artificial Sequence: Synthetic oligonucleotide
  Sense strand starting at position 33 of SEQ ID NO: 102
acacuuguauaguuaggaa

SEQ ID NO: 11269 - RNA, 19 nt, Artificial Sequence
  Description of Artificial Sequence: Synthetic oligonucleotide
  Antisense strand to SEQ ID NO: 11268
uuccuaacuauacaagugu

SEQ ID NO: 11270 - RNA, 19 nt, Artificial Sequence
  Description of Artificial Sequence: Synthetic oligonucleotide
  Sense strand starting at position 101 of SEQ ID NO: 102
cuaaucaacggguggauaa

SEQ ID NO: 11271 - RNA, 19 nt, Artificial Sequence
  Description of Artificial Sequence: Synthetic oligonucleotide
  Antisense strand to SEQ ID NO: 11270
uuauccacccguugauuag

SEQ ID NO: 11272 - RNA, 19 nt, Artificial Sequence
  Description of Artificial Sequence: Synthetic oligonucleotide
  Sense strand starting at position 102 of SEQ ID NO: 102
uaaucaacggguggauaau

SEQ ID NO: 11273 - RNA, 19 nt, Artificial Sequence
  Description of Artificial Sequence: Synthetic oligonucleotide
  Antisense strand to SEQ ID NO: 11272
auuauccacccguugauua

SEQ ID NO: 11274 - RNA, 19 nt, Artificial Sequence
  Description of Artificial Sequence: Synthetic oligonucleotide
  Sense strand starting at position 471 of SEQ ID NO: 102
cguuuacuguuauuuaacu

SEQ ID NO: 11275 - RNA, 19 nt, Artificial Sequence
  Description of Artificial Sequence: Synthetic oligonucleotide
  Antisense strand to SEQ ID NO: 11274
aguuaaauaacaguaaacg

SEQ ID NO: 11276 - RNA, 19 nt, Artificial Sequence
  Description of Artificial Sequence: Synthetic oligonucleotide
  Sense strand starting at position 601 of SEQ ID NO: 102
gcauaacaugggcauucua

SEQ ID NO: 11277 - RNA, 19 nt, Artificial Sequence
  Description of Artificial Sequence: Synthetic oligonucleotide
  Antisense strand to SEQ ID NO: 11276
uagaaugcccauguuaugc

SEQ ID NO: 11278 - RNA, 19 nt, Artificial Sequence
  Description of Artificial Sequence: Synthetic oligonucleotide
  Sense strand starting at position 616 of SEQ ID NO: 102
ucuacacugcuuugugaua

SEQ ID NO: 11279 - RNA, 19 nt, Artificial Sequence
  Description of Artificial Sequence: Synthetic oligonucleotide
  Antisense strand to SEQ ID NO: 11278
uaucacaaagcaguguaga

SEQ ID NO: 11280 - RNA, 19 nt, Artificial Sequence
  Description of Artificial Sequence: Synthetic oligonucleotide
  Sense strand starting at position 617 of SEQ ID NO: 102
cuacacugcuuugugauaa

SEQ ID NO: 11281 - RNA, 19 nt, Artificial Sequence
  Description of Artificial Sequence: Synthetic oligonucleotide
  Antisense strand to SEQ ID NO: 11280
uuaucacaaagcaguguag

SEQ ID NO: 11282 - RNA, 19 nt, Artificial Sequence
  Description of Artificial Sequence: Synthetic oligonucleotide
  Sense strand starting at position 659 of SEQ ID NO: 102
gcacuugguccaugcauuu

SEQ ID NO: 11283 - RNA, 19 nt, Artificial Sequence
  Description of Artificial Sequence: Synthetic oligonucleotide
  Antisense strand to SEQ ID NO: 11282
aaaugcauggaccaagugc

SEQ ID NO: 11284 - RNA, 19 nt, Artificial Sequence
  Description of Artificial Sequence: Synthetic oligonucleotide
  Sense strand starting at position 877 of SEQ ID NO: 102
caggaaacauuguugaacu

SEQ ID NO: 11285 - RNA, 19 nt, Artificial Sequence
  Description of Artificial Sequence: Synthetic oligonucleotide
  Antisense strand to SEQ ID NO: 11284
aguucaacaauguuuccug

SEQ ID NO: 11286 - RNA, 19 nt, Artificial Sequence
  Description of Artificial Sequence: Synthetic oligonucleotide
  Sense strand starting at position 940 of SEQ ID NO: 102
cccaucgcuuauguaauaa

SEQ ID NO: 11287 - RNA, 19 nt, Artificial Sequence
  Description of Artificial Sequence: Synthetic oligonucleotide
  Antisense strand to SEQ ID NO: 11286
uuauuacauaagcgauggg

SEQ ID NO: 11288 - RNA, 19 nt, Artificial Sequence
  Description of Artificial Sequence: Synthetic oligonucleotide
  Sense strand starting at position 1213 of SEQ ID NO: 102
agaacuuggccauaacagu

SEQ ID NO: 11289 - RNA, 19 nt, Artificial Sequence
  Description of Artificial Sequence: Synthetic oligonucleotide
  Antisense strand to SEQ ID NO: 11288
acuguuauggccaaguucu

SEQ ID NO: 11290 - RNA, 19 nt, Artificial Sequence
  Description of Artificial Sequence: Synthetic oligonucleotide
  Sense strand starting at position 1248 of SEQ ID NO: 102
gugacuaaaguuugaaaga

SEQ ID NO: 11291 - RNA, 19 nt, Artificial Sequence
  Description of Artificial Sequence: Synthetic oligonucleotide
  Antisense strand to SEQ ID NO: 11290
ucuuucaaacuuuagucac

SEQ ID NO: 11292 - RNA, 19 nt, Artificial Sequence
  Description of Artificial Sequence: Synthetic oligonucleotide
  Sense strand starting at position 1865 of SEQ ID NO: 102
ggccuaaaguaucuaggga

SEQ ID NO: 11293 - RNA, 19 nt, Artificial Sequence
  Description of Artificial Sequence: Synthetic oligonucleotide
  Antisense strand to SEQ ID NO: 11292
ucccuagauacuuuaggcc

SEQ ID NO: 11294 - RNA, 19 nt, Artificial Sequence
  Description of Artificial Sequence: Synthetic oligonucleotide
  Sense strand starting at position 1966 of SEQ ID NO: 102
caucuugcgcagucagagu

SEQ ID NO: 11295 - RNA, 19 nt, Artificial Sequence
  Description of Artificial Sequence: Synthetic oligonucleotide
  Antisense strand to SEQ ID NO: 11294
acucugacugcgcaagaug

SEQ ID NO: 11296 - RNA, 19 nt, Artificial Sequence
  Description of Artificial Sequence: Synthetic oligonucleotide
  Sense strand starting at position 1975 of SEQ ID NO: 102
cagucagagucccugaaug

SEQ ID NO: 11297 - RNA, 19 nt, Artificial Sequence
  Description of Artificial Sequence: Synthetic oligonucleotide
  Antisense strand to SEQ ID NO: 11296
cauucagggacucugacug

SEQ ID NO: 11298 - RNA, 19 nt, Artificial Sequence
  Description of Artificial Sequence: Synthetic oligonucleotide
  Sense strand starting at position 1992 of SEQ ID NO: 102
ugccuuaacccggaauucu

SEQ ID NO: 11299 - RNA, 19 nt, Artificial Sequence
  Description of Artificial Sequence: Synthetic oligonucleotide
  Antisense strand to SEQ ID NO: 11298
agaauuccggguuaaggca

SEQ ID NO: 11300 - RNA, 19 nt, Artificial Sequence
  Description of Artificial Sequence: Synthetic oligonucleotide
  Sense strand starting at position 2001 of SEQ ID NO: 102
ccggaauucugcucaagga

SEQ ID NO: 11301 - RNA, 19 nt, Artificial Sequence
  Description of Artificial Sequence: Synthetic oligonucleotide
  Antisense strand to SEQ ID NO: 11300
uccuugagcagaauuccgg

SEQ ID NO: 11302 - RNA, 19 nt, Artificial Sequence
  Description of Artificial Sequence: Synthetic oligonucleotide
  Sense strand starting at position 2002 of SEQ ID NO: 102
cggaauucugcucaaggag

SEQ ID NO: 11303 - RNA, 19 nt, Artificial Sequence
  Description of Artificial Sequence: Synthetic oligonucleotide
  Antisense strand to SEQ ID NO: 11302
cuccuugagcagaauuccg

SEQ ID NO: 11304 - RNA, 19 nt, Artificial Sequence
  Description of Artificial Sequence: Synthetic oligonucleotide
  Sense strand starting at position 2072 of SEQ ID NO: 102
acccgaacuucgucuuaaa

SEQ ID NO: 11305 - RNA, 19 nt, Artificial Sequence
  Description of Artificial Sequence: Synthetic oligonucleotide
  Antisense strand to SEQ ID NO: 11304
uuuaagacgaaguucgggu

SEQ ID NO: 11306 - RNA, 19 nt, Artificial Sequence
  Description of Artificial Sequence: Synthetic oligonucleotide
  Sense strand starting at position 2921 of SEQ ID NO: 102
uguguccaccuuuauuaaa

SEQ ID NO: 11307 - RNA, 19 nt, Artificial Sequence
  Description of Artificial Sequence: Synthetic oligonucleotide
  Antisense strand to SEQ ID NO: 11306
uuuaauaaagguggacaca

SEQ ID NO: 11308 - RNA, 19 nt, Artificial Sequence
  Description of Artificial Sequence: Synthetic oligonucleotide
  Sense strand starting at position 2941 of SEQ ID NO: 102
guauuauaggacuguagau

SEQ ID NO: 11309 - RNA, 19 nt, Artificial Sequence
  Description of Artificial Sequence: Synthetic oligonucleotide
  Antisense strand to SEQ ID NO: 11308
aucuacaguccuauaauac

SEQ ID NO: 11310 - RNA, 19 nt, Artificial Sequence
  Description of Artificial Sequence: Synthetic oligonucleotide
  Sense strand starting at position 2948 of SEQ ID NO: 102
aggacuguagauuguugaa

SEQ ID NO: 11311 - RNA, 19 nt, Artificial Sequence
  Description of Artificial Sequence: Synthetic oligonucleotide
  Antisense strand to SEQ ID NO: 11310
uucaacaaucuacaguccu

SEQ ID NO: 11312 - RNA, 19 nt, Artificial Sequence
  Description of Artificial Sequence: Synthetic oligonucleotide
  Sense strand starting at position 2950 of SEQ ID NO: 102
gacuguagauuguugaaag

SEQ ID NO: 11313 - RNA, 19 nt, Artificial Sequence
  Description of Artificial Sequence: Synthetic oligonucleotide
  Antisense strand to SEQ ID NO: 11312
cuuucaacaaucuacaguc

SEQ ID NO: 11314 - RNA, 19 nt, Artificial Sequence
  Description of Artificial Sequence: Synthetic oligonucleotide
  Sense strand starting at position 3076 of SEQ ID NO: 102
uuuauaggcucuuugaaac

SEQ ID NO: 11315 - RNA, 19 nt, Artificial Sequence
  Description of Artificial Sequence: Synthetic oligonucleotide
  Antisense strand to SEQ ID NO: 11314
guuucaaagagccuauaaa

SEQ ID NO: 11316 - RNA, 19 nt, Artificial Sequence
  Description of Artificial Sequence: Synthetic oligonucleotide
  Sense strand starting at position 3099 of SEQ ID NO: 102
guaauuucuugggaaggcu

SEQ ID NO: 11317 - RNA, 19 nt, Artificial Sequence
  Description of Artificial Sequence: Synthetic oligonucleotide
  Antisense strand to SEQ ID NO: 11316
agccuucccaagaaauuac

SEQ ID NO: 11318 - RNA, 19 nt, Artificial Sequence
  Description of Artificial Sequence: Synthetic oligonucleotide
  Sense strand starting at position 3165 of SEQ ID NO: 102
accuuucccucaguaugua

SEQ ID NO: 11319 - RNA, 19 nt, Artificial Sequence
  Description of Artificial Sequence: Synthetic oligonucleotide
  Antisense strand to SEQ ID NO: 11318
uacauacugagggaaaggu

SEQ ID NO: 11320 - RNA, 19 nt, Artificial Sequence
  Description of Artificial Sequence: Synthetic oligonucleotide
  Sense strand starting at position 3166 of SEQ ID NO: 102
ccuuucccucaguauguaa

SEQ ID NO: 11321 - RNA, 19 nt, Artificial Sequence
  Description of Artificial Sequence: Synthetic oligonucleotide
  Antisense strand to SEQ ID NO: 11320
uuacauacugagggaaagg

SEQ ID NO: 11322 - RNA, 19 nt, Artificial Sequence
  Description of Artificial Sequence: Synthetic oligonucleotide
  Sense strand starting at position 3168 of SEQ ID NO: 102
uuucccucaguauguaauu

SEQ ID NO: 11323 - RNA, 19 nt, Artificial Sequence
  Description of Artificial Sequence: Synthetic oligonucleotide
  Antisense strand to SEQ ID NO: 11322
aauuacauacugagggaaa

SEQ ID NO: 11324 - RNA, 19 nt, Artificial Sequence
  Description of Artificial Sequence: Synthetic oligonucleotide
  Sense strand starting at position 3193 of SEQ ID NO: 102
uguuauuugcaguaguuag

SEQ ID NO: 11325 - RNA, 19 nt, Artificial Sequence
  Description of Artificial Sequence: Synthetic oligonucleotide
  Antisense strand to SEQ ID NO: 11324
cuaacuacugcaaauaaca

SEQ ID NO: 11326 - RNA, 19 nt, Artificial Sequence
  Description of Artificial Sequence: Synthetic oligonucleotide
  Sense strand starting at position 3214 of SEQ ID NO: 102
ucuguaaaguugcuggaaa

SEQ ID NO: 11327 - RNA, 19 nt, Artificial Sequence
  Description of Artificial Sequence: Synthetic oligonucleotide
  Antisense strand to SEQ ID NO: 11326
uuuccagcaacuuuacaga

SEQ ID NO: 11328 - RNA, 19 nt, Artificial Sequence
  Description of Artificial Sequence: Synthetic oligonucleotide
  Sense strand starting at position 3216 of SEQ ID NO: 102
uguaaaguugcuggaaaca

SEQ ID NO: 11329 - RNA, 19 nt, Artificial Sequence
  Description of Artificial Sequence: Synthetic oligonucleotide
  Antisense strand to SEQ ID NO: 11328
uguuuccagcaacuuuaca

SEQ ID NO: 11330 - RNA, 19 nt, Artificial Sequence
  Description of Artificial Sequence: Synthetic oligonucleotide
  Sense strand starting at position 3488 of SEQ ID NO: 102
ugugcuuaggagcacuaua

SEQ ID NO: 11331 - RNA, 19 nt, Artificial Sequence
  Description of Artificial Sequence: Synthetic oligonucleotide
  Antisense strand to SEQ ID NO: 11330
uauagugcuccuaagcaca

SEQ ID NO: 11332 - RNA, 19 nt, Artificial Sequence
  Description of Artificial Sequence: Synthetic oligonucleotide
  Sense strand starting at position 3773 of SEQ ID NO: 102
uccagaauuugaggugaaa

SEQ ID NO: 11333 - RNA, 19 nt, Artificial Sequence
  Description of Artificial Sequence: Synthetic oligonucleotide
  Antisense strand to SEQ ID NO: 11332
uuucaccucaaauucugga

SEQ ID NO: 11334 - RNA, 19 nt, Artificial Sequence
  Description of Artificial Sequence: Synthetic oligonucleotide
  Sense strand starting at position 3792 of SEQ ID NO: 102
ggauuacuuuagcccgaga

SEQ ID NO: 11335 - RNA, 19 nt, Artificial Sequence
  Description of Artificial Sequence: Synthetic oligonucleotide
  Antisense strand to SEQ ID NO: 11334
ucucgggcuaaaguaaucc

SEQ ID NO: 11336 - RNA, 19 nt, Artificial Sequence
  Description of Artificial Sequence: Synthetic oligonucleotide
  Sense strand starting at position 3831 of SEQ ID NO: 102
aagauagugucacuguacu

SEQ ID NO: 11337 - RNA, 19 nt, Artificial Sequence
  Description of Artificial Sequence: Synthetic oligonucleotide
  Antisense strand to SEQ ID NO: 11336
aguacagugacacuaucuu

SEQ ID NO: 11338 - RNA, 19 nt, Artificial Sequence
  Description of Artificial Sequence: Synthetic oligonucleotide
  Sense strand starting at position 3904 of SEQ ID NO: 102
ggcagagaaugccuuguuu

SEQ ID NO: 11339 - RNA, 19 nt, Artificial Sequence
  Description of Artificial Sequence: Synthetic oligonucleotide
  Antisense strand to SEQ ID NO: 11338
aaacaaggcauucucugcc

SEQ ID NO: 11340 - RNA, 19 nt, Artificial Sequence
  Description of Artificial Sequence: Synthetic oligonucleotide
  Sense strand starting at position 3906 of SEQ ID NO: 102
cagagaaugccuuguuuag

SEQ ID NO: 11341 - RNA, 19 nt, Artificial Sequence
  Description of Artificial Sequence: Synthetic oligonucleotide
  Antisense strand to SEQ ID NO: 11340
cuaaacaaggcauucucug

SEQ ID NO: 11342 - RNA, 19 nt, Artificial Sequence
  Description of Artificial Sequence: Synthetic oligonucleotide
  Sense strand starting at position 3939 of SEQ ID NO: 102
gugcacuuugggcaauuaa

SEQ ID NO: 11343 - RNA, 19 nt, Artificial Sequence
  Description of Artificial Sequence: Synthetic oligonucleotide
  Antisense strand to SEQ ID NO: 11342
uuaauugcccaaagugcac

SEQ ID NO: 11344 - RNA, 19 nt, Artificial Sequence
  Description of Artificial Sequence: Synthetic oligonucleotide
  Sense strand starting at position 3970 of SEQ ID NO: 102
cucuguacauguccaagaa

SEQ ID NO: 11345 - RNA, 19 nt, Artificial Sequence
  Description of Artificial Sequence: Synthetic oligonucleotide
  Antisense strand to SEQ ID NO: 11344
uucuuggacauguacagag

SEQ ID NO: 11346 - RNA, 19 nt, Artificial Sequence
  Description of Artificial Sequence: Synthetic oligonucleotide
  Sense strand starting at position 3971 of SEQ ID NO: 102
ucuguacauguccaagaau

SEQ ID NO: 11347 - RNA, 19 nt, Artificial Sequence
  Description of Artificial Sequence: Synthetic oligonucleotide
  Antisense strand to SEQ ID NO: 11346
auucuuggacauguacaga

SEQ ID NO: 11348 - RNA, 19 nt, Artificial Sequence
  Description of Artificial Sequence: Synthetic oligonucleotide
  Sense strand starting at position 18 of SEQ ID NO: 103
ggcugcuaaaucugugaag

SEQ ID NO: 11349 - RNA, 19 nt, Artificial Sequence
  Description of Artificial Sequence: Synthetic oligonucleotide
  Antisense strand to SEQ ID NO: 11348
cuucacagauuuagcagcc

SEQ ID NO: 11350 - RNA, 19 nt, Artificial Sequence
  Description of Artificial Sequence: Synthetic oligonucleotide
  Sense strand starting at position 20 of SEQ ID NO: 103
cugcuaaaucugugaagga

SEQ ID NO: 11351 - RNA, 19 nt, Artificial Sequence
  Description of Artificial Sequence: Synthetic oligonucleotide
  Antisense strand to SEQ ID NO: 11350
uccuucacagauuuagcag

SEQ ID NO: 11352 - RNA, 19 nt, Artificial Sequence
  Description of Artificial Sequence: Synthetic oligonucleotide
  Sense strand starting at position 399 of SEQ ID NO: 103
acacuuguauaguuaggaa

SEQ ID NO: 11353 - RNA, 19 nt, Artificial Sequence
  Description of Artificial Sequence: Synthetic oligonucleotide
  Antisense strand to SEQ ID NO: 11352
uuccuaacuauacaagugu

SEQ ID NO: 11354 - RNA, 19 nt, Artificial Sequence
  Description of Artificial Sequence: Synthetic oligonucleotide
  Sense strand starting at position 467 of SEQ ID NO: 103
cuaaucaacggguggauaa

SEQ ID NO: 11355 - RNA, 19 nt, Artificial Sequence
  Description of Artificial Sequence: Synthetic oligonucleotide
  Antisense strand to SEQ ID NO: 11354
uuauccacccguugauuag

SEQ ID NO: 11356 - RNA, 19 nt, Artificial Sequence
  Description of Artificial Sequence: Synthetic oligonucleotide
  Sense strand starting at position 468 of SEQ ID NO: 103
uaaucaacggguggauaau

SEQ ID NO: 11357 - RNA, 19 nt, Artificial Sequence
  Description of Artificial Sequence: Synthetic oligonucleotide
  Antisense strand to SEQ ID NO: 11356
auuauccacccguugauua

SEQ ID NO: 11358 - RNA, 19 nt, Artificial Sequence
  Description of Artificial Sequence: Synthetic oligonucleotide
  Sense strand starting at position 686 of SEQ ID NO: 103
gcaccauguuccucucacu

SEQ ID NO: 11359 - RNA, 19 nt, Artificial Sequence
  Description of Artificial Sequence: Synthetic oligonucleotide
  Antisense strand to SEQ ID NO: 11358
agugagaggaacauggugc

SEQ ID NO: 11360 - RNA, 19 nt, Artificial Sequence
  Description of Artificial Sequence: Synthetic oligonucleotide
  Sense strand starting at position 837 of SEQ ID NO: 103
cguuuacuguuauuuaacu

SEQ ID NO: 11361 - RNA, 19 nt, Artificial Sequence
  Description of Artificial Sequence: Synthetic oligonucleotide
  Antisense strand to SEQ ID NO: 11360
aguuaaauaacaguaaacg

SEQ ID NO: 11362 - RNA, 19 nt, Artificial Sequence
  Description of Artificial Sequence: Synthetic oligonucleotide
  Sense strand starting at position 914 of SEQ ID NO: 103
uuaaguauucgcuaguugu

SEQ ID NO: 11363 - RNA, 19 nt, Artificial Sequence
  Description of Artificial Sequence: Synthetic oligonucleotide
  Antisense strand to SEQ ID NO: 11362
acaacuagcgaauacuuaa

SEQ ID NO: 11364 - RNA, 19 nt, Artificial Sequence
  Description of Artificial Sequence: Synthetic oligonucleotide
  Sense strand starting at position 967 of SEQ ID NO: 103
gcauaacaugggcauucua

SEQ ID NO: 11365 - RNA, 19 nt, Artificial Sequence
  Description of Artificial Sequence: Synthetic oligonucleotide
  Antisense strand to SEQ ID NO: 11364
uagaaugcccauguuaugc

SEQ ID NO: 11366 - RNA, 19 nt, Artificial Sequence
  Description of Artificial Sequence: Synthetic oligonucleotide
  Sense strand starting at position 982 of SEQ ID NO: 103
ucuacacugcuuugugaua

SEQ ID NO: 11367 - RNA, 19 nt, Artificial Sequence
  Description of Artificial Sequence: Synthetic oligonucleotide
  Antisense strand to SEQ ID NO: 11366
uaucacaaagcaguguaga

SEQ ID NO: 11368 - RNA, 19 nt, Artificial Sequence
  Description of Artificial Sequence: Synthetic oligonucleotide
  Sense strand starting at position 983 of SEQ ID NO: 103
cuacacugcuuugugauaa

SEQ ID NO: 11369 - RNA, 19 nt, Artificial Sequence
  Description of Artificial Sequence: Synthetic oligonucleotide
  Antisense strand to SEQ ID NO: 11368
uuaucacaaagcaguguag

SEQ ID NO: 11370 - RNA, 19 nt, Artificial Sequence
  Description of Artificial Sequence: Synthetic oligonucleotide
  Sense strand starting at position 1025 of SEQ ID NO: 103
gcacuugguccaugcauuu

SEQ ID NO: 11371 - RNA, 19 nt, Artificial Sequence
  Description of Artificial Sequence: Synthetic oligonucleotide
  Antisense strand to SEQ ID NO: 11370
aaaugcauggaccaagugc

SEQ ID NO: 11372 - RNA, 19 nt, Artificial Sequence
  Description of Artificial Sequence: Synthetic oligonucleotide
  Sense strand starting at position 1243 of SEQ ID NO: 103
caggaaacauuguugaacu

SEQ ID NO: 11373 - RNA, 19 nt, Artificial Sequence
  Description of Artificial Sequence: Synthetic oligonucleotide
  Antisense strand to SEQ ID NO: 11372
aguucaacaauguuuccug

SEQ ID NO: 11374 - RNA, 19 nt, Artificial Sequence
  Description of Artificial Sequence: Synthetic oligonucleotide
  Sense strand starting at position 1306 of SEQ ID NO: 103
cccaucgcuuauguaauaa

SEQ ID NO: 11375 - RNA, 19 nt, Artificial Sequence
  Description of Artificial Sequence: Synthetic oligonucleotide
  Antisense strand to SEQ ID NO: 11374
uuauuacauaagcgauggg

SEQ ID NO: 11376 - RNA, 19 nt, Artificial Sequence
  Description of Artificial Sequence: Synthetic oligonucleotide
  Sense strand starting at position 1579 of SEQ ID NO: 103
agaacuuggccauaacagu

SEQ ID NO: 11377 - RNA, 19 nt, Artificial Sequence
  Description of Artificial Sequence: Synthetic oligonucleotide
  Antisense strand to SEQ ID NO: 11376
acuguuauggccaaguucu

SEQ ID NO: 11378 - RNA, 19 nt, Artificial Sequence
  Description of Artificial Sequence: Synthetic oligonucleotide
  Sense strand starting at position 1614 of SEQ ID NO: 103
gugacuaaaguuugaaaga

SEQ ID NO: 11379 - RNA, 19 nt, Artificial Sequence
  Description of Artificial Sequence: Synthetic oligonucleotide
  Antisense strand to SEQ ID NO: 11378
ucuuucaaacuuuagucac

SEQ ID NO: 11380 - RNA, 19 nt, Artificial Sequence
  Description of Artificial Sequence: Synthetic oligonucleotide
  Sense strand starting at position 1615 of SEQ ID NO: 103
ugacuaaaguuugaaagac

SEQ ID NO: 11381 - RNA, 19 nt, Artificial Sequence
  Description of Artificial Sequence: Synthetic oligonucleotide
  Antisense strand to SEQ ID NO: 11380
gucuuucaaacuuuaguca

SEQ ID NO: 11382 - RNA, 19 nt, Artificial Sequence
  Description of Artificial Sequence: Synthetic oligonucleotide
  Sense strand starting at position 2231 of SEQ ID NO: 103
ggccuaaaguaucuaggga

SEQ ID NO: 11383 - RNA, 19 nt, Artificial Sequence
  Description of Artificial Sequence: Synthetic oligonucleotide
  Antisense strand to SEQ ID NO: 11382
ucccuagauacuuuaggcc

SEQ ID NO: 11384 - RNA, 19 nt, Artificial Sequence
  Description of Artificial Sequence: Synthetic oligonucleotide
  Sense strand starting at position 2332 of SEQ ID NO: 103
caucuugcgcagucagagu

SEQ ID NO: 11385 - RNA, 19 nt, Artificial Sequence
  Description of Artificial Sequence: Synthetic oligonucleotide
  Antisense strand to SEQ ID NO: 11384
acucugacugcgcaagaug

SEQ ID NO: 11386 - RNA, 19 nt, Artificial Sequence
  Description of Artificial Sequence: Synthetic oligonucleotide
  Sense strand starting at position 2341 of SEQ ID NO: 103
cagucagagucccugaaug

SEQ ID NO: 11387 - RNA, 19 nt, Artificial Sequence
  Description of Artificial Sequence: Synthetic oligonucleotide
  Antisense strand to SEQ ID NO: 11386
cauucagggacucugacug

SEQ ID NO: 11388 - RNA, 19 nt, Artificial Sequence
  Description of Artificial Sequence: Synthetic oligonucleotide
  Sense strand starting at position 2358 of SEQ ID NO: 103
ugccuuaacccggaauucu

SEQ ID NO: 11389 - RNA, 19 nt, Artificial Sequence
  Description of Artificial Sequence: Synthetic oligonucleotide
  Antisense strand to SEQ ID NO: 11388
agaauuccggguuaaggca

SEQ ID NO: 11390 - RNA, 19 nt, Artificial Sequence
  Description of Artificial Sequence: Synthetic oligonucleotide
  Sense strand starting at position 2367 of SEQ ID NO: 103
ccggaauucugcucaagga

SEQ ID NO: 11391 - RNA, 19 nt, Artificial Sequence
  Description of Artificial Sequence: Synthetic oligonucleotide
  Antisense strand to SEQ ID NO: 11390
uccuugagcagaauuccgg

SEQ ID NO: 11392 - RNA, 19 nt, Artificial Sequence
  Description of Artificial Sequence: Synthetic oligonucleotide
  Sense strand starting at position 2368 of SEQ ID NO: 103
cggaauucugcucaaggag

SEQ ID NO: 11393 - RNA, 19 nt, Artificial Sequence
  Description of Artificial Sequence: Synthetic oligonucleotide
  Antisense strand to SEQ ID NO: 11392
cuccuugagcagaauuccg

SEQ ID NO: 11394 - RNA, 19 nt, Artificial Sequence
  Description of Artificial Sequence: Synthetic oligonucleotide
  Sense strand starting at position 2438 of SEQ ID NO: 103
acccgaacuucgucuuaaa

SEQ ID NO: 11395 - RNA, 19 nt, Artificial Sequence
  Description of Artificial Sequence: Synthetic oligonucleotide
  Antisense strand to SEQ ID NO: 11394
uuuaagacgaaguucgggu

SEQ ID NO: 11396 - RNA, 19 nt, Artificial Sequence
  Description of Artificial Sequence: Synthetic oligonucleotide
  Sense strand starting at position 3287 of SEQ ID NO: 103
uguguccaccuuuauuaaa

SEQ ID NO: 11397 - RNA, 19 nt, Artificial Sequence
  Description of Artificial Sequence: Synthetic oligonucleotide
  Antisense strand to SEQ ID NO: 11396
uuuaauaaagguggacaca

SEQ ID NO: 11398 - RNA, 19 nt, Artificial Sequence
  Description of Artificial Sequence: Synthetic oligonucleotide
  Sense strand starting at position 3307 of SEQ ID NO: 103
guauuauaggacuguagau

SEQ ID NO: 11399 - RNA, 19 nt, Artificial Sequence
  Description of Artificial Sequence: Synthetic oligonucleotide
  Antisense strand to SEQ ID NO: 11398
aucuacaguccuauaauac

SEQ ID NO: 11400 - RNA, 19 nt, Artificial Sequence
  Description of Artificial Sequence: Synthetic oligonucleotide
  Sense strand starting at position 3314 of SEQ ID NO: 103
aggacuguagauuguugaa

SEQ ID NO: 11401 - RNA, 19 nt, Artificial Sequence
  Description of Artificial Sequence: Synthetic oligonucleotide
  Antisense strand to SEQ ID NO: 11400
uucaacaaucuacaguccu

SEQ ID NO: 11402 - RNA, 19 nt, Artificial Sequence
  Description of Artificial Sequence: Synthetic oligonucleotide
  Sense strand starting at position 3316 of SEQ ID NO: 103
gacuguagauuguugaaag

SEQ ID NO: 11403 - RNA, 19 nt, Artificial Sequence
  Description of Artificial Sequence: Synthetic oligonucleotide
  Antisense strand to SEQ ID NO: 11402
cuuucaacaaucuacaguc

SEQ ID NO: 11404 - RNA, 19 nt, Artificial Sequence
  Description of Artificial Sequence: Synthetic oligonucleotide
  Sense strand starting at position 3442 of SEQ ID NO: 103
uuuauaggcucuuugaaac

SEQ ID NO: 11405 - RNA, 19 nt, Artificial Sequence
  Description of Artificial Sequence: Synthetic oligonucleotide
  Antisense strand to SEQ ID NO: 11404
guuucaaagagccuauaaa

SEQ ID NO: 11406 - RNA, 19 nt, Artificial Sequence
  Description of Artificial Sequence: Synthetic oligonucleotide
  Sense strand starting at position 3462 of SEQ ID NO: 103
gugguaauuucuugggaag

SEQ ID NO: 11407 - RNA, 19 nt, Artificial Sequence
  Description of Artificial Sequence: Synthetic oligonucleotide
  Antisense strand to SEQ ID NO: 11406
cuucccaagaaauuaccac

SEQ ID NO: 11408 - RNA, 19 nt, Artificial Sequence
  Description of Artificial Sequence: Synthetic oligonucleotide
  Sense strand starting at position 3465 of SEQ ID NO: 103
guaauuucuugggaaggcu

SEQ ID NO: 11409 - RNA, 19 nt, Artificial Sequence
  Description of Artificial Sequence: Synthetic oligonucleotide
  Antisense strand to SEQ ID NO: 11408
agccuucccaagaaauuac

SEQ ID NO: 11410 - RNA, 19 nt, Artificial Sequence
  Description of Artificial Sequence: Synthetic oligonucleotide
  Sense strand starting at position 3484 of SEQ ID NO: 103
uuucuuaucccuggugcau

SEQ ID NO: 11411 - RNA, 19 nt, Artificial Sequence
  Description of Artificial Sequence: Synthetic oligonucleotide
  Antisense strand to SEQ ID NO: 11410
augcaccagggauaagaaa

SEQ ID NO: 11412 - RNA, 19 nt, Artificial Sequence
  Description of Artificial Sequence: Synthetic oligonucleotide
  Sense strand starting at position 3531 of SEQ ID NO: 103
accuuucccucaguaugua

SEQ ID NO: 11413 - RNA, 19 nt, Artificial Sequence
  Description of Artificial Sequence: Synthetic oligonucleotide
  Antisense strand to SEQ ID NO: 11412
uacauacugagggaaaggu

SEQ ID NO: 11414 - RNA, 19 nt, Artificial Sequence
  Description of Artificial Sequence: Synthetic oligonucleotide
  Sense strand starting at position 3532 of SEQ ID NO: 103
ccuuucccucaguauguaa

SEQ ID NO: 11415 - RNA, 19 nt, Artificial Sequence
  Description of Artificial Sequence: Synthetic oligonucleotide
  Antisense strand to SEQ ID NO: 11414
uuacauacugagggaaagg

SEQ ID NO: 11416 - RNA, 19 nt, Artificial Sequence
  Description of Artificial Sequence: Synthetic oligonucleotide
  Sense strand starting at position 3534 of SEQ ID NO: 103
uuucccucaguauguaauu

SEQ ID NO: 11417 - RNA, 19 nt, Artificial Sequence
  Description of Artificial Sequence: Synthetic oligonucleotide
  Antisense strand to SEQ ID NO: 11416
aauuacauacugagggaaa

SEQ ID NO: 11418 - RNA, 19 nt, Artificial Sequence
  Description of Artificial Sequence: Synthetic oligonucleotide
  Sense strand starting at position 3559 of SEQ ID NO: 103
uguuauuugcaguaguuag

SEQ ID NO: 11419 - RNA, 19 nt, Artificial Sequence
  Description of Artificial Sequence: Synthetic oligonucleotide
  Antisense strand to SEQ ID NO: 11418
cuaacuacugcaaauaaca

SEQ ID NO: 11420 - RNA, 19 nt, Artificial Sequence
  Description of Artificial Sequence: Synthetic oligonucleotide
  Sense strand starting at position 3580 of SEQ ID NO: 103
ucuguaaaguugcuggaaa

SEQ ID NO: 11421 - RNA, 19 nt, Artificial Sequence
  Description of Artificial Sequence: Synthetic oligonucleotide
  Antisense strand to SEQ ID NO: 11420
uuuccagcaacuuuacaga

SEQ ID NO: 11422 - RNA, 19 nt, Artificial Sequence
  Description of Artificial Sequence: Synthetic oligonucleotide
  Sense strand starting at position 3582 of SEQ ID NO: 103
uguaaaguugcuggaaaca

SEQ ID NO: 11423 - RNA, 19 nt, Artificial Sequence
  Description of Artificial Sequence: Synthetic oligonucleotide
  Antisense strand to SEQ ID NO: 11422
uguuuccagcaacuuuaca

SEQ ID NO: 11424 - RNA, 19 nt, Artificial Sequence
  Description of Artificial Sequence: Synthetic oligonucleotide
  Sense strand starting at position 3712 of SEQ ID NO: 103
uguguuuccgcuuaaagac

SEQ ID NO: 11425 - RNA, 19 nt, Artificial Sequence
  Description of Artificial Sequence: Synthetic oligonucleotide
  Antisense strand to SEQ ID NO: 11424
gucuuuaagcggaaacaca

SEQ ID NO: 11426 - RNA, 19 nt, Artificial Sequence
  Description of Artificial Sequence: Synthetic oligonucleotide
  Sense strand starting at position 3854 of SEQ ID NO: 103
ugugcuuaggagcacuaua

SEQ ID NO: 11427 - RNA, 19 nt, Artificial Sequence
  Description of Artificial Sequence: Synthetic oligonucleotide
  Antisense strand to SEQ ID NO: 11426
uauagugcuccuaagcaca

SEQ ID NO: 11428 - RNA, 19 nt, Artificial Sequence
  Description of Artificial Sequence: Synthetic oligonucleotide
  Sense strand starting at position 206 of SEQ ID NO: 104
cauuuaacuggcuguguca

SEQ ID NO: 11429 - RNA, 19 nt, Artificial Sequence
  Description of Artificial Sequence: Synthetic oligonucleotide
  Antisense strand to SEQ ID NO: 11428
ugacacagccaguuaaaug

SEQ ID NO: 11430 - RNA, 19 nt, Artificial Sequence
  Description of Artificial Sequence: Synthetic oligonucleotide
  Sense strand starting at position 238 of SEQ ID NO: 104
gcaugaggcaaugaaguua

SEQ ID NO: 11431 - RNA, 19 nt, Artificial Sequence
  Description of Artificial Sequence: Synthetic oligonucleotide
  Antisense strand to SEQ ID NO: 11430
uaacuucauugccucaugc

SEQ ID NO: 11432 - RNA, 19 nt, Artificial Sequence
  Description of Artificial Sequence: Synthetic oligonucleotide
  Sense strand starting at position 415 of SEQ ID NO: 104
aagacagcgucaguaagaa

SEQ ID NO: 11433 - RNA, 19 nt, Artificial Sequence
  Description of Artificial Sequence: Synthetic oligonucleotide
  Antisense strand to SEQ ID NO: 11432
uucuuacugacgcugucuu

SEQ ID NO: 11434 - RNA, 19 nt, Artificial Sequence
  Description of Artificial Sequence: Synthetic oligonucleotide
  Sense strand starting at position 729 of SEQ ID NO: 104
ugguuuaaggcauacuauu

SEQ ID NO: 11435 - RNA, 19 nt, Artificial Sequence
  Description of Artificial Sequence: Synthetic oligonucleotide
  Antisense strand to SEQ ID NO: 11434
aauaguaugccuuaaacca

SEQ ID NO: 11436 - RNA, 19 nt, Artificial Sequence
  Description of Artificial Sequence: Synthetic oligonucleotide
  Sense strand starting at position 742 of SEQ ID NO: 104
acuauugguaacgaguaau

SEQ ID NO: 11437 - RNA, 19 nt, Artificial Sequence
  Description of Artificial Sequence: Synthetic oligonucleotide
  Antisense strand to SEQ ID NO: 11436
auuacucguuaccaauagu

SEQ ID NO: 11438 - RNA, 19 nt, Artificial Sequence
  Description of Artificial Sequence: Synthetic oligonucleotide
  Sense strand starting at position 984 of SEQ ID NO: 104
gugauuccauuuguagcaa

SEQ ID NO: 11439 - RNA, 19 nt, Artificial Sequence
  Description of Artificial Sequence: Synthetic oligonucleotide
  Antisense strand to SEQ ID NO: 11438
uugcuacaaauggaaucac

SEQ ID NO: 11440 - RNA, 19 nt, Artificial Sequence
  Description of Artificial Sequence: Synthetic oligonucleotide
  Sense strand starting at position 1038 of SEQ ID NO: 104
cauguaagccuggaaagcu

SEQ ID NO: 11441 - RNA, 19 nt, Artificial Sequence
  Description of Artificial Sequence: Synthetic oligonucleotide
  Antisense strand to SEQ ID NO: 11440
agcuuuccaggcuuacaug

SEQ ID NO: 11442 - RNA, 19 nt, Artificial Sequence
  Description of Artificial Sequence: Synthetic oligonucleotide
  Sense strand starting at position 1131 of SEQ ID NO: 104
uugguuauacuguaauuga

SEQ ID NO: 11443 - RNA, 19 nt, Artificial Sequence
  Description of Artificial Sequence: Synthetic oligonucleotide
  Antisense strand to SEQ ID NO: 11442
ucaauuacaguauaaccaa

SEQ ID NO: 11444 - RNA, 19 nt, Artificial Sequence
  Description of Artificial Sequence: Synthetic oligonucleotide
  Sense strand starting at position 1134 of SEQ ID NO: 104
guuauacuguaauugagau

SEQ ID NO: 11445 - RNA, 19 nt, Artificial Sequence
  Description of Artificial Sequence: Synthetic oligonucleotide
  Antisense strand to SEQ ID NO: 11444
aucucaauuacaguauaac

SEQ ID NO: 11446 - RNA, 19 nt, Artificial Sequence
  Description of Artificial Sequence: Synthetic oligonucleotide
  Sense strand starting at position 1262 of SEQ ID NO: 104
aagagaaacuaauuguguu

SEQ ID NO: 11447 - RNA, 19 nt, Artificial Sequence
  Description of Artificial Sequence: Synthetic oligonucleotide
  Antisense strand to SEQ ID NO: 11446
aacacaauuaguuucucuu

SEQ ID NO: 11448 - RNA, 19 nt, Artificial Sequence
  Description of Artificial Sequence: Synthetic oligonucleotide
  Sense strand starting at position 1282 of SEQ ID NO: 104
acgacuauuuaguuuguau

SEQ ID NO: 11449 - RNA, 19 nt, Artificial Sequence
  Description of Artificial Sequence: Synthetic oligonucleotide
  Antisense strand to SEQ ID NO: 11448
auacaaacuaaauagucgu

SEQ ID NO: 11450 - RNA, 19 nt, Artificial Sequence
  Description of Artificial Sequence: Synthetic oligonucleotide
  Sense strand starting at position 1415 of SEQ ID NO: 104
uguaucagucuguaaucau

SEQ ID NO: 11451 - RNA, 19 nt, Artificial Sequence
  Description of Artificial Sequence: Synthetic oligonucleotide
  Antisense strand to SEQ ID NO: 11450
augauuacagacugauaca

SEQ ID NO: 11452 - RNA, 19 nt, Artificial Sequence
  Description of Artificial Sequence: Synthetic oligonucleotide
  Sense strand starting at position 1418 of SEQ ID NO: 104
aucagucuguaaucauaua

SEQ ID NO: 11453 - RNA, 19 nt, Artificial Sequence
  Description of Artificial Sequence: Synthetic oligonucleotide
  Antisense strand to SEQ ID NO: 11452
uauaugauuacagacugau

SEQ ID NO: 11454 - RNA, 19 nt, Artificial Sequence
  Description of Artificial Sequence: Synthetic oligonucleotide
  Sense strand starting at position 1542 of SEQ ID NO: 104
acuguaguauauuccaaag

SEQ ID NO: 11455 - RNA, 19 nt, Artificial Sequence
  Description of Artificial Sequence: Synthetic oligonucleotide
  Antisense strand to SEQ ID NO: 11454
cuuuggaauauacuacagu

SEQ ID NO: 11456 - RNA, 19 nt, Artificial Sequence
  Description of Artificial Sequence: Synthetic oligonucleotide
  Sense strand starting at position 1558 of SEQ ID NO: 104
aaggucuuuguuuaguaaa

SEQ ID NO: 11457 - RNA, 19 nt, Artificial Sequence
  Description of Artificial Sequence: Synthetic oligonucleotide
  Antisense strand to SEQ ID NO: 11456
uuuacuaaacaaagaccuu

SEQ ID NO: 11458 - RNA, 19 nt, Artificial Sequence
  Description of Artificial Sequence: Synthetic oligonucleotide
  Sense strand starting at position 1889 of SEQ ID NO: 104
gucugugggccgucuuuaa

SEQ ID NO: 11459 - RNA, 19 nt, Artificial Sequence
  Description of Artificial Sequence: Synthetic oligonucleotide
  Antisense strand to SEQ ID NO: 11458
uuaaagacggcccacagac

SEQ ID NO: 11460 - RNA, 19 nt, Artificial Sequence
  Description of Artificial Sequence: Synthetic oligonucleotide
  Sense strand starting at position 1937 of SEQ ID NO: 104
cugucugccacauggagaa

SEQ ID NO: 11461 - RNA, 19 nt, Artificial Sequence
  Description of Artificial Sequence: Synthetic oligonucleotide
  Antisense strand to SEQ ID NO: 11460
uucuccauguggcagacag

SEQ ID NO: 11462 - RNA, 19 nt, Artificial Sequence
  Description of Artificial Sequence: Synthetic oligonucleotide
  Sense strand starting at position 1939 of SEQ ID NO: 104
gucugccacauggagaaau

SEQ ID NO: 11463 - RNA, 19 nt, Artificial Sequence
  Description of Artificial Sequence: Synthetic oligonucleotide
  Antisense strand to SEQ ID NO: 11462
auuucuccauguggcagac

SEQ ID NO: 11464 - RNA, 19 nt, Artificial Sequence
  Description of Artificial Sequence: Synthetic oligonucleotide
  Sense strand starting at position 1971 of SEQ ID NO: 104
gcagcugacccagauugua

SEQ ID NO: 11465 - RNA, 19 nt, Artificial Sequence
  Description of Artificial Sequence: Synthetic oligonucleotide
  Antisense strand to SEQ ID NO: 11464
uacaaucugggucagcugc

SEQ ID NO: 11466 - RNA, 19 nt, Artificial Sequence
  Description of Artificial Sequence: Synthetic oligonucleotide
  Sense strand starting at position 2082 of SEQ ID NO: 104
gcgggaaucuccuuaggau

SEQ ID NO: 11467 - RNA, 19 nt, Artificial Sequence
  Description of Artificial Sequence: Synthetic oligonucleotide
  Antisense strand to SEQ ID NO: 11466
auccuaaggagauucccgc

SEQ ID NO: 11468 - RNA, 19 nt, Artificial Sequence
  Description of Artificial Sequence: Synthetic oligonucleotide
  Sense strand starting at position 2248 of SEQ ID NO: 104
uagucugcuggccagagau

SEQ ID NO: 11469 - RNA, 19 nt, Artificial Sequence
  Description of Artificial Sequence: Synthetic oligonucleotide
  Antisense strand to SEQ ID NO: 11468
aucucuggccagcagacua

SEQ ID NO: 11470 - RNA, 19 nt, Artificial Sequence
  Description of Artificial Sequence: Synthetic oligonucleotide
  Sense strand starting at position 2361 of SEQ ID NO: 104
gagcuagacuuugucagga

SEQ ID NO: 11471 - RNA, 19 nt, Artificial Sequence
  Description of Artificial Sequence: Synthetic oligonucleotide
  Antisense strand to SEQ ID NO: 11470
uccugacaaagucuagcuc

SEQ ID NO: 11472 - RNA, 19 nt, Artificial Sequence
  Description of Artificial Sequence: Synthetic oligonucleotide
  Sense strand starting at position 2408 of SEQ ID NO: 104
cucuuuauagccuagaaga

SEQ ID NO: 11473 - RNA, 19 nt, Artificial Sequence
  Description of Artificial Sequence: Synthetic oligonucleotide
  Antisense strand to SEQ ID NO: 11472
ucuucuaggcuauaaagag

SEQ ID NO: 11474 - RNA, 19 nt, Artificial Sequence
  Description of Artificial Sequence: Synthetic oligonucleotide
  Sense strand starting at position 2439 of SEQ ID NO: 104
uuuacuaaguugcuaauga

SEQ ID NO: 11475 - RNA, 19 nt, Artificial Sequence
  Description of Artificial Sequence: Synthetic oligonucleotide
  Antisense strand to SEQ ID NO: 11474
ucauuagcaacuuaguaaa

SEQ ID NO: 11476 - RNA, 19 nt, Artificial Sequence
  Description of Artificial Sequence: Synthetic oligonucleotide
  Sense strand starting at position 2834 of SEQ ID NO: 104
ugaauaaguguugaguaca

SEQ ID NO: 11477 - RNA, 19 nt, Artificial Sequence
  Description of Artificial Sequence: Synthetic oligonucleotide
  Antisense strand to SEQ ID NO: 11476
uguacucaacacuuauuca

SEQ ID NO: 11478 - RNA, 19 nt, Artificial Sequence
  Description of Artificial Sequence: Synthetic oligonucleotide
  Sense strand starting at position 2837 of SEQ ID NO: 104
auaaguguugaguacaacu

SEQ ID NO: 11479 - RNA, 19 nt, Artificial Sequence
  Description of Artificial Sequence: Synthetic oligonucleotide
  Antisense strand to SEQ ID NO: 11478
aguuguacucaacacuuau

SEQ ID NO: 11480 - RNA, 19 nt, Artificial Sequence
  Description of Artificial Sequence: Synthetic oligonucleotide
  Sense strand starting at position 2839 of SEQ ID NO: 104
aaguguugaguacaacuau

SEQ ID NO: 11481 - RNA, 19 nt, Artificial Sequence
  Description of Artificial Sequence: Synthetic oligonucleotide
  Antisense strand to SEQ ID NO: 11480
auaguuguacucaacacuu

SEQ ID NO: 11482 - RNA, 19 nt, Artificial Sequence
  Description of Artificial Sequence: Synthetic oligonucleotide
  Sense strand starting at position 3005 of SEQ ID NO: 104
cucugucauugauuaccua

SEQ ID NO: 11483 - RNA, 19 nt, Artificial Sequence
  Description of Artificial Sequence: Synthetic oligonucleotide
  Antisense strand to SEQ ID NO: 11482
uagguaaucaaugacagag

SEQ ID NO: 11484 - RNA, 19 nt, Artificial Sequence
  Description of Artificial Sequence: Synthetic oligonucleotide
  Sense strand starting at position 3056 of SEQ ID NO: 104
gggcuuucucuacauaccu

SEQ ID NO: 11485 - RNA, 19 nt, Artificial Sequence
  Description of Artificial Sequence: Synthetic oligonucleotide
  Antisense strand to SEQ ID NO: 11484
agguauguagagaaagccc

SEQ ID NO: 11486 - RNA, 19 nt, Artificial Sequence
  Description of Artificial Sequence: Synthetic oligonucleotide
  Sense strand starting at position 3299 of SEQ ID NO: 104
agugaaguaaaucaguagu

SEQ ID NO: 11487 - RNA, 19 nt, Artificial Sequence
  Description of Artificial Sequence: Synthetic oligonucleotide
  Antisense strand to SEQ ID NO: 11486
acuacugauuuacuucacu

SEQ ID NO: 11488 - RNA, 19 nt, Artificial Sequence
  Description of Artificial Sequence: Synthetic oligonucleotide
  Sense strand starting at position 3301 of SEQ ID NO: 104
ugaaguaaaucaguaguaa

SEQ ID NO: 11489 - RNA, 19 nt, Artificial Sequence
  Description of Artificial Sequence: Synthetic oligonucleotide
  Antisense strand to SEQ ID NO: 11488
uuacuacugauuuacuuca

SEQ ID NO: 11490 - RNA, 19 nt, Artificial Sequence
  Description of Artificial Sequence: Synthetic oligonucleotide
  Sense strand starting at position 3403 of SEQ ID NO: 104
gcuuguggccaugaaggau

SEQ ID NO: 11491 - RNA, 19 nt, Artificial Sequence
  Description of Artificial Sequence: Synthetic oligonucleotide
  Antisense strand to SEQ ID NO: 11490
auccuucauggccacaagc

SEQ ID NO: 11492 - RNA, 19 nt, Artificial Sequence
  Description of Artificial Sequence: Synthetic oligonucleotide
  Sense strand starting at position 3534 of SEQ ID NO: 104
ucuggccucugauuuguau

SEQ ID NO: 11493 - RNA, 19 nt, Artificial Sequence
  Description of Artificial Sequence: Synthetic oligonucleotide
  Antisense strand to SEQ ID NO: 11492
auacaaaucagaggccaga

SEQ ID NO: 11494 - RNA, 19 nt, Artificial Sequence
  Description of Artificial Sequence: Synthetic oligonucleotide
  Sense strand starting at position 3537 of SEQ ID NO: 104
ggccucugauuuguauuau

SEQ ID NO: 11495 - RNA, 19 nt, Artificial Sequence
  Description of Artificial Sequence: Synthetic oligonucleotide
  Antisense strand to SEQ ID NO: 11494
auaauacaaaucagaggcc

SEQ ID NO: 11496 - RNA, 19 nt, Artificial Sequence
  Description of Artificial Sequence: Synthetic oligonucleotide
  Sense strand starting at position 3590 of SEQ ID NO: 104
agucacuaauggcuuaaau

SEQ ID NO: 11497 - RNA, 19 nt, Artificial Sequence
  Description of Artificial Sequence: Synthetic oligonucleotide
  Antisense strand to SEQ ID NO: 11496
auuuaagccauuagugacu

SEQ ID NO: 11498 - RNA, 19 nt, Artificial Sequence
  Description of Artificial Sequence: Synthetic oligonucleotide
  Sense strand starting at position 3723 of SEQ ID NO: 104
acagguauuuagggacaga

SEQ ID NO: 11499 - RNA, 19 nt, Artificial Sequence
  Description of Artificial Sequence: Synthetic oligonucleotide
  Antisense strand to SEQ ID NO: 11498
ucugucccuaaauaccugu

SEQ ID NO: 11500 - RNA, 19 nt, Artificial Sequence
  Description of Artificial Sequence: Synthetic oligonucleotide
  Sense strand starting at position 3772 of SEQ ID NO: 104
aagucaggagcucaguuau

SEQ ID NO: 11501 - RNA, 19 nt, Artificial Sequence
  Description of Artificial Sequence: Synthetic oligonucleotide
  Antisense strand to SEQ ID NO: 11500
auaacugagcuccugacuu

SEQ ID NO: 11502 - RNA, 19 nt, Artificial Sequence
  Description of Artificial Sequence: Synthetic oligonucleotide
  Sense strand starting at position 3780 of SEQ ID NO: 104
agcucaguuauauggagag

SEQ ID NO: 11503 - RNA, 19 nt, Artificial Sequence
  Description of Artificial Sequence: Synthetic oligonucleotide
  Antisense strand to SEQ ID NO: 11502
cucuccauauaacugagcu

SEQ ID NO: 11504 - RNA, 19 nt, Artificial Sequence
  Description of Artificial Sequence: Synthetic oligonucleotide
  Sense strand starting at position 3800 of SEQ ID NO: 104
uuugaaagucaccagcaau

SEQ ID NO: 11505 - RNA, 19 nt, Artificial Sequence
  Description of Artificial Sequence: Synthetic oligonucleotide
  Antisense strand to SEQ ID NO: 11504
auugcuggugacuuucaaa

SEQ ID NO: 11506 - RNA, 19 nt, Artificial Sequence
  Description of Artificial Sequence: Synthetic oligonucleotide
  Sense strand starting at position 3860 of SEQ ID NO: 104
guacauguagaauguaaag

SEQ ID NO: 11507 - RNA, 19 nt, Artificial Sequence
  Description of Artificial Sequence: Synthetic oligonucleotide
  Antisense strand to SEQ ID NO: 11506
cuuuacauucuacauguac

SEQ ID NO: 11508 - RNA, 19 nt, Artificial Sequence
  Description of Artificial Sequence: Synthetic oligonucleotide
  Sense strand starting at position 3957 of SEQ ID NO: 105
agugguuaagagcaugauu

SEQ ID NO: 11509 - RNA, 19 nt, Artificial Sequence
  Description of Artificial Sequence: Synthetic oligonucleotide
  Antisense strand to SEQ ID NO: 11508
aaucaugcucuuaaccacu

SEQ ID NO: 11510 - RNA, 19 nt, Artificial Sequence
  Description of Artificial Sequence: Synthetic oligonucleotide
  Sense strand starting at position 3950 of SEQ ID NO: 105
auuccauagugguuaagag

SEQ ID NO: 11511 - RNA, 19 nt, Artificial Sequence
  Description of Artificial Sequence: Synthetic oligonucleotide
  Antisense strand to SEQ ID NO: 11510
cucuuaaccacuauggaau

SEQ ID NO: 11512 - RNA, 19 nt, Artificial Sequence
  Description of Artificial Sequence: Synthetic oligonucleotide
  Sense strand starting at position 3923 of SEQ ID NO: 105
ggguauaauaguuacagua

SEQ ID NO: 11513 - RNA, 19 nt, Artificial Sequence
  Description of Artificial Sequence: Synthetic oligonucleotide
  Antisense strand to SEQ ID NO: 11512
uacuguaacuauuauaccc

SEQ ID NO: 11514 - RNA, 19 nt, Artificial Sequence
  Description of Artificial Sequence: Synthetic oligonucleotide
  Sense strand starting at position 3831 of SEQ ID NO: 105
ugugcucgucccuaaauuu

SEQ ID NO: 11515 - RNA, 19 nt, Artificial Sequence
  Description of Artificial Sequence: Synthetic oligonucleotide
  Antisense strand to SEQ ID NO: 11514
aaauuuagggacgagcaca

SEQ ID NO: 11516 - RNA, 19 nt, Artificial Sequence
  Description of Artificial Sequence: Synthetic oligonucleotide
  Sense strand starting at position 3807 of SEQ ID NO: 105
gcugauauuaaaggaguaa

SEQ ID NO: 11517 - RNA, 19 nt, Artificial Sequence
  Description of Artificial Sequence: Synthetic oligonucleotide
  Antisense strand to SEQ ID NO: 11516
uuacuccuuuaauaucagc

SEQ ID NO: 11518 - RNA, 19 nt, Artificial Sequence
  Description of Artificial Sequence: Synthetic oligonucleotide
  Sense strand starting at position 3235 of SEQ ID NO: 105
ggauuagucuccucaucug

SEQ ID NO: 11519 - RNA, 19 nt, Artificial Sequence
  Description of Artificial Sequence: Synthetic oligonucleotide
  Antisense strand to SEQ ID NO: 11518
cagaugaggagacuaaucc

SEQ ID NO: 11520 - RNA, 19 nt, Artificial Sequence
  Description of Artificial Sequence: Synthetic oligonucleotide
  Sense strand starting at position 3233 of SEQ ID NO: 105
auggauuagucuccucauc

SEQ ID NO: 11521 - RNA, 19 nt, Artificial Sequence
  Description of Artificial Sequence: Synthetic oligonucleotide
  Antisense strand to SEQ ID NO: 11520
gaugaggagacuaauccau

SEQ ID NO: 11522 - RNA, 19 nt, Artificial Sequence
  Description of Artificial Sequence: Synthetic oligonucleotide
  Sense strand starting at position 3144 of SEQ ID NO: 105
uaagaauaugggugcugga

SEQ ID NO: 11523 - RNA, 19 nt, Artificial Sequence
  Description of Artificial Sequence: Synthetic oligonucleotide
  Antisense strand to SEQ ID NO: 11522
uccagcacccauauucuua

SEQ ID NO: 11524 - RNA, 19 nt, Artificial Sequence
  Description of Artificial Sequence: Synthetic oligonucleotide
  Sense strand starting at position 2880 of SEQ ID NO: 105
uggaaauacugggcucaag

SEQ ID NO: 11525 - RNA, 19 nt, Artificial Sequence
  Description of Artificial Sequence: Synthetic oligonucleotide
  Antisense strand to SEQ ID NO: 11524
cuugagcccaguauuucca

SEQ ID NO: 11526 - RNA, 19 nt, Artificial Sequence
  Description of Artificial Sequence: Synthetic oligonucleotide
  Sense strand starting at position 2879 of SEQ ID NO: 105
cuggaaauacugggcucaa

SEQ ID NO: 11527 - RNA, 19 nt, Artificial Sequence
  Description of Artificial Sequence: Synthetic oligonucleotide
  Antisense strand to SEQ ID NO: 11526
uugagcccaguauuuccag

SEQ ID NO: 11528 - RNA, 19 nt, Artificial Sequence
  Description of Artificial Sequence: Synthetic oligonucleotide
  Sense strand starting at position 2689 of SEQ ID NO: 105
uguggucaucuaggaccaa

SEQ ID NO: 11529 - RNA, 19 nt, Artificial Sequence
  Description of Artificial Sequence: Synthetic oligonucleotide
  Antisense strand to SEQ ID NO: 11528
uugguccuagaugaccaca

SEQ ID NO: 11530 - RNA, 19 nt, Artificial Sequence
  Description of Artificial Sequence: Synthetic oligonucleotide
  Sense strand starting at position 2683 of SEQ ID NO: 105
uggauauguggucaucuag

SEQ ID NO: 11531 - RNA, 19 nt, Artificial Sequence
  Description of Artificial Sequence: Synthetic oligonucleotide
  Antisense strand to SEQ ID NO: 11530
cuagaugaccacauaucca

SEQ ID NO: 11532 - RNA, 19 nt, Artificial Sequence
  Description of Artificial Sequence: Synthetic oligonucleotide
  Sense strand starting at position 2682 of SEQ ID NO: 105
auggauauguggucaucua

SEQ ID NO: 11533 - RNA, 19 nt, Artificial Sequence
  Description of Artificial Sequence: Synthetic oligonucleotide
  Antisense strand to SEQ ID NO: 11532
uagaugaccacauauccau

SEQ ID NO: 11534 - RNA, 19 nt, Artificial Sequence
  Description of Artificial Sequence: Synthetic oligonucleotide
  Sense strand starting at position 2586 of SEQ ID NO: 105
uaguaagugucauuaaaga

SEQ ID NO: 11535 - RNA, 19 nt, Artificial Sequence
  Description of Artificial Sequence: Synthetic oligonucleotide
  Antisense strand to SEQ ID NO: 11534
ucuuuaaugacacuuacua

SEQ ID NO: 11536 - RNA, 19 nt, Artificial Sequence
  Description of Artificial Sequence: Synthetic oligonucleotide
  Sense strand starting at position 2457 of SEQ ID NO: 105
ugguacucuguauaaauca

SEQ ID NO: 11537 - RNA, 19 nt, Artificial Sequence
  Description of Artificial Sequence: Synthetic oligonucleotide
  Antisense strand to SEQ ID NO: 11536
ugauuuauacagaguacca

SEQ ID NO: 11538 - RNA, 19 nt, Artificial Sequence
  Description of Artificial Sequence: Synthetic oligonucleotide
  Sense strand starting at position 2455 of SEQ ID NO: 105
ucugguacucuguauaaau

SEQ ID NO: 11539 - RNA, 19 nt, Artificial Sequence
  Description of Artificial Sequence: Synthetic oligonucleotide
  Antisense strand to SEQ ID NO: 11538
auuuauacagaguaccaga

SEQ ID NO: 11540 - RNA, 19 nt, Artificial Sequence
  Description of Artificial Sequence: Synthetic oligonucleotide
  Sense strand starting at position 2248 of SEQ ID NO: 105
uuaagagauuuacaaguca

SEQ ID NO: 11541 - RNA, 19 nt, Artificial Sequence
  Description of Artificial Sequence: Synthetic oligonucleotide
  Antisense strand to SEQ ID NO: 11540
ugacuuguaaaucucuuaa

SEQ ID NO: 11542 - RNA, 19 nt, Artificial Sequence
  Description of Artificial Sequence: Synthetic oligonucleotide
  Sense strand starting at position 2161 of SEQ ID NO: 105
guauuuaacuuugcuguau

SEQ ID NO: 11543 - RNA, 19 nt, Artificial Sequence
  Description of Artificial Sequence: Synthetic oligonucleotide
  Antisense strand to SEQ ID NO: 11542
auacagcaaaguuaaauac

SEQ ID NO: 11544 - RNA, 19 nt, Artificial Sequence
  Description of Artificial Sequence: Synthetic oligonucleotide
  Sense strand starting at position 2096 of SEQ ID NO: 105
gaguuagaucaaugcuaaa

SEQ ID NO: 11545 - RNA, 19 nt, Artificial Sequence
  Description of Artificial Sequence: Synthetic oligonucleotide
  Antisense strand to SEQ ID NO: 11544
uuuagcauugaucuaacuc

SEQ ID NO: 11546 - RNA, 19 nt, Artificial Sequence
  Description of Artificial Sequence: Synthetic oligonucleotide
  Sense strand starting at position 2086 of SEQ ID NO: 105
cuuccacauugaguuagau

SEQ ID NO: 11547 - RNA, 19 nt, Artificial Sequence
  Description of Artificial Sequence: Synthetic oligonucleotide
  Antisense strand to SEQ ID NO: 11546
aucuaacucaauguggaag

SEQ ID NO: 11548 - RNA, 19 nt, Artificial Sequence
  Description of Artificial Sequence: Synthetic oligonucleotide
  Sense strand starting at position 2034 of SEQ ID NO: 105
aggugaacauaguuaauca

SEQ ID NO: 11549 - RNA, 19 nt, Artificial Sequence
  Description of Artificial Sequence: Synthetic oligonucleotide
  Antisense strand to SEQ ID NO: 11548
ugauuaacuauguucaccu

SEQ ID NO: 11550 - RNA, 19 nt, Artificial Sequence
  Description of Artificial Sequence: Synthetic oligonucleotide
  Sense strand starting at position 2025 of SEQ ID NO: 105
aagguugguaggugaacau

SEQ ID NO: 11551 - RNA, 19 nt, Artificial Sequence
  Description of Artificial Sequence: Synthetic oligonucleotide
  Antisense strand to SEQ ID NO: 11550
auguucaccuaccaaccuu

SEQ ID NO: 11552 - RNA, 19 nt, Artificial Sequence
  Description of Artificial Sequence: Synthetic oligonucleotide
  Sense strand starting at position 1160 of SEQ ID NO: 105
cauaguguucuagauugua

SEQ ID NO: 11553 - RNA, 19 nt, Artificial Sequence
  Description of Artificial Sequence: Synthetic oligonucleotide
  Antisense strand to SEQ ID NO: 11552
uacaaucuagaacacuaug

SEQ ID NO: 11554 - RNA, 19 nt, Artificial Sequence
  Description of Artificial Sequence: Synthetic oligonucleotide
  Sense strand starting at position 1156 of SEQ ID NO: 105
augacauaguguucuagau

SEQ ID NO: 11555 - RNA, 19 nt, Artificial Sequence
  Description of Artificial Sequence: Synthetic oligonucleotide
  Antisense strand to SEQ ID NO: 11554
aucuagaacacuaugucau

SEQ ID NO: 11556 - RNA, 19 nt, Artificial Sequence
  Description of Artificial Sequence: Synthetic oligonucleotide
  Sense strand starting at position 1150 of SEQ ID NO: 105
aguguaaugacauaguguu

SEQ ID NO: 11557 - RNA, 19 nt, Artificial Sequence
  Description of Artificial Sequence: Synthetic oligonucleotide
  Antisense strand to SEQ ID NO: 11556
aacacuaugucauuacacu

SEQ ID NO: 11558 - RNA, 19 nt, Artificial Sequence
  Description of Artificial Sequence: Synthetic oligonucleotide
  Sense strand starting at position 803 of SEQ ID NO: 105
agaguagguugguuauaag

SEQ ID NO: 11559 - RNA, 19 nt, Artificial Sequence
  Description of Artificial Sequence: Synthetic oligonucleotide
  Antisense strand to SEQ ID NO: 11558
cuuauaaccaaccuacucu

SEQ ID NO: 11560 - RNA, 19 nt, Artificial Sequence
  Description of Artificial Sequence: Synthetic oligonucleotide
  Sense strand starting at position 802 of SEQ ID NO: 105
gagaguagguugguuauaa

SEQ ID NO: 11561 - RNA, 19 nt, Artificial Sequence
  Description of Artificial Sequence: Synthetic oligonucleotide
  Antisense strand to SEQ ID NO: 11560
uuauaaccaaccuacucuc

SEQ ID NO: 11562 - RNA, 19 nt, Artificial Sequence
  Description of Artificial Sequence: Synthetic oligonucleotide
  Sense strand starting at position 643 of SEQ ID NO: 105
gugugaaagaugggacaua

SEQ ID NO: 11563 - RNA, 19 nt, Artificial Sequence
  Description of Artificial Sequence: Synthetic oligonucleotide
  Antisense strand to SEQ ID NO: 11562
uaugucccaucuuucacac

SEQ ID NO: 11564 - RNA, 19 nt, Artificial Sequence
  Description of Artificial Sequence: Synthetic oligonucleotide
  Sense strand starting at position 634 of SEQ ID NO: 105
uacagaccugugugaaaga

SEQ ID NO: 11565 - RNA, 19 nt, Artificial Sequence
  Description of Artificial Sequence: Synthetic oligonucleotide
  Antisense strand to SEQ ID NO: 11564
ucuuucacacaggucugua

SEQ ID NO: 11566 - RNA, 19 nt, Artificial Sequence
  Description of Artificial Sequence: Synthetic oligonucleotide
  Sense strand starting at position 632 of SEQ ID NO: 105
uuuacagaccugugugaaa

SEQ ID NO: 11567 - RNA, 19 nt, Artificial Sequence
  Description of Artificial Sequence: Synthetic oligonucleotide
  Antisense strand to SEQ ID NO: 11566
uuucacacaggucuguaaa

SEQ ID NO: 11568 - RNA, 19 nt, Artificial Sequence
  Description of Artificial Sequence: Synthetic oligonucleotide
  Sense strand starting at position 559 of SEQ ID NO: 105
aacaguuaugcugauguga

SEQ ID NO: 11569 - RNA, 19 nt, Artificial Sequence
  Description of Artificial Sequence: Synthetic oligonucleotide
  Antisense strand to SEQ ID NO: 11568
ucacaucagcauaacuguu

SEQ ID NO: 11570 - RNA, 19 nt, Artificial Sequence
  Description of Artificial Sequence: Synthetic oligonucleotide
  Sense strand starting at position 450 of SEQ ID NO: 105
ugaggaaacugagagauaa

SEQ ID NO: 11571 - RNA, 19 nt, Artificial Sequence
  Description of Artificial Sequence: Synthetic oligonucleotide
  Antisense strand to SEQ ID NO: 11570
uuaucucucaguuuccuca

SEQ ID NO: 11572 - RNA, 19 nt, Artificial Sequence
  Description of Artificial Sequence: Synthetic oligonucleotide
  Sense strand starting at position 434 of SEQ ID NO: 105
aucuuuguaguauauguga

SEQ ID NO: 11573 - RNA, 19 nt, Artificial Sequence
  Description of Artificial Sequence: Synthetic oligonucleotide
  Antisense strand to SEQ ID NO: 11572
ucacauauacuacaaagau

SEQ ID NO: 11574 - RNA, 19 nt, Artificial Sequence
  Description of Artificial Sequence: Synthetic oligonucleotide
  Sense strand starting at position 295 of SEQ ID NO: 105
agccaauaugagugaaaug

SEQ ID NO: 11575 - RNA, 19 nt, Artificial Sequence
  Description of Artificial Sequence: Synthetic oligonucleotide
  Antisense strand to SEQ ID NO: 11574
cauuucacucauauuggcu

SEQ ID NO: 11576 - RNA, 19 nt, Artificial Sequence
  Description of Artificial Sequence: Synthetic oligonucleotide
  Sense strand starting at position 294 of SEQ ID NO: 105
gagccaauaugagugaaau

SEQ ID NO: 11577 - RNA, 19 nt, Artificial Sequence
  Description of Artificial Sequence: Synthetic oligonucleotide
  Antisense strand to SEQ ID NO: 11576
auuucacucauauuggcuc

SEQ ID NO: 11578 - RNA, 19 nt, Artificial Sequence
  Description of Artificial Sequence: Synthetic oligonucleotide
  Sense strand starting at position 276 of SEQ ID NO: 105
ggguaaucuuggucuaaag

SEQ ID NO: 11579 - RNA, 19 nt, Artificial Sequence
  Description of Artificial Sequence: Synthetic oligonucleotide
  Antisense strand to SEQ ID NO: 11578
cuuuagaccaagauuaccc

SEQ ID NO: 11580 - RNA, 19 nt, Artificial Sequence
  Description of Artificial Sequence: Synthetic oligonucleotide
  Sense strand starting at position 275 of SEQ ID NO: 105
uggguaaucuuggucuaaa

SEQ ID NO: 11581 - RNA, 19 nt, Artificial Sequence
  Description of Artificial Sequence: Synthetic oligonucleotide
  Antisense strand to SEQ ID NO: 11580
uuuagaccaagauuaccca

SEQ ID NO: 11582 - RNA, 19 nt, Artificial Sequence
  Description of Artificial Sequence: Synthetic oligonucleotide
  Sense strand starting at position 264 of SEQ ID NO: 105
ugacgaaggguuggguaau

SEQ ID NO: 11583 - RNA, 19 nt, Artificial Sequence
  Description of Artificial Sequence: Synthetic oligonucleotide
  Antisense strand to SEQ ID NO: 11582
auuacccaacccuucguca

SEQ ID NO: 11584 - RNA, 19 nt, Artificial Sequence
  Description of Artificial Sequence: Synthetic oligonucleotide
  Sense strand starting at position 247 of SEQ ID NO: 105
aggugaagucagugagaug

SEQ ID NO: 11585 - RNA, 19 nt, Artificial Sequence
  Description of Artificial Sequence: Synthetic oligonucleotide
  Antisense strand to SEQ ID NO: 11584
caucucacugacuucaccu

SEQ ID NO: 11586 - RNA, 19 nt, Artificial Sequence
  Description of Artificial Sequence: Synthetic oligonucleotide
  Sense strand starting at position 215 of SEQ ID NO: 105
ugguaaagcggucagaaua

SEQ ID NO: 11587 - RNA, 19 nt, Artificial Sequence
  Description of Artificial Sequence: Synthetic oligonucleotide
  Antisense strand to SEQ ID NO: 11586
uauucugaccgcuuuacca

SEQ ID NO: 11588 - RNA, 19 nt, Artificial Sequence
  Description of Artificial Sequence: Synthetic oligonucleotide
  Sense strand starting at position 3899 of SEQ ID NO: 106
uaaguacugccugaagauc

SEQ ID NO: 11589 - RNA, 19 nt, Artificial Sequence
  Description of Artificial Sequence: Synthetic oligonucleotide
  Antisense strand to SEQ ID NO: 11588
gaucuucaggcaguacuua

SEQ ID NO: 11590 - RNA, 19 nt, Artificial Sequence
  Description of Artificial Sequence: Synthetic oligonucleotide
  Sense strand starting at position 3617 of SEQ ID NO: 106
aucaaaugacacugagcuu

SEQ ID NO: 11591 - RNA, 19 nt, Artificial Sequence
  Description of Artificial Sequence: Synthetic oligonucleotide
  Antisense strand to SEQ ID NO: 11590
aagcucagugucauuugau

SEQ ID NO: 11592 - RNA, 19 nt, Artificial Sequence
  Description of Artificial Sequence: Synthetic oligonucleotide
  Sense strand starting at position 3604 of SEQ ID NO: 106
ggaucuccuggccaucaaa

SEQ ID NO: 11593 - RNA, 19 nt, Artificial Sequence
  Description of Artificial Sequence: Synthetic oligonucleotide
  Antisense strand to SEQ ID NO: 11592
uuugauggccaggagaucc

SEQ ID NO: 11594 - RNA, 19 nt, Artificial Sequence
  Description of Artificial Sequence: Synthetic oligonucleotide
  Sense strand starting at position 3396 of SEQ ID NO: 106
uguuacugauacccuuaua

SEQ ID NO: 11595 - RNA, 19 nt, Artificial Sequence
  Description of Artificial Sequence: Synthetic oligonucleotide
  Antisense strand to SEQ ID NO: 11594
uauaaggguaucaguaaca

SEQ ID NO: 11596 - RNA, 19 nt, Artificial Sequence
  Description of Artificial Sequence: Synthetic oligonucleotide
  Sense strand starting at position 3279 of SEQ ID NO: 106
gcuggaguuacugaacaau

SEQ ID NO: 11597 - RNA, 19 nt, Artificial Sequence
  Description of Artificial Sequence: Synthetic oligonucleotide
  Antisense strand to SEQ ID NO: 11596
auuguucaguaacuccagc

SEQ ID NO: 11598 - RNA, 19 nt, Artificial Sequence
  Description of Artificial Sequence: Synthetic oligonucleotide
  Sense strand starting at position 3243 of SEQ ID NO: 106
cuucuagcuccucagaaag

SEQ ID NO: 11599 - RNA, 19 nt, Artificial Sequence
  Description of Artificial Sequence: Synthetic oligonucleotide
  Antisense strand to SEQ ID NO: 11598
cuuucugaggagcuagaag

SEQ ID NO: 11600 - RNA, 19 nt, Artificial Sequence
  Description of Artificial Sequence: Synthetic oligonucleotide
  Sense strand starting at position 3088 of SEQ ID NO: 106
gucuuuggaacauacgauu

SEQ ID NO: 11601 - RNA, 19 nt, Artificial Sequence
  Description of Artificial Sequence: Synthetic oligonucleotide
  Antisense strand to SEQ ID NO: 11600
aaucguauguuccaaagac

SEQ ID NO: 11602 - RNA, 19 nt, Artificial Sequence
  Description of Artificial Sequence: Synthetic oligonucleotide
  Sense strand starting at position 2870 of SEQ ID NO: 106
cugguaugguuugcaauuu

SEQ ID NO: 11603 - RNA, 19 nt, Artificial Sequence
  Description of Artificial Sequence: Synthetic oligonucleotide
  Antisense strand to SEQ ID NO: 11602
aaauugcaaaccauaccag

SEQ ID NO: 11604 - RNA, 19 nt, Artificial Sequence
  Description of Artificial Sequence: Synthetic oligonucleotide
  Sense strand starting at position 2524 of SEQ ID NO: 106
uagaguaaaucucuuagga

SEQ ID NO: 11605 - RNA, 19 nt, Artificial Sequence
  Description of Artificial Sequence: Synthetic oligonucleotide
  Antisense strand to SEQ ID NO: 11604
uccuaagagauuuacucua

SEQ ID NO: 11606 - RNA, 19 nt, Artificial Sequence
  Description of Artificial Sequence: Synthetic oligonucleotide
  Sense strand starting at position 2395 of SEQ ID NO: 106
uuuaucuaggcugauuauu

SEQ ID NO: 11607 - RNA, 19 nt, Artificial Sequence
  Description of Artificial Sequence: Synthetic oligonucleotide
  Antisense strand to SEQ ID NO: 11606
aauaaucagccuagauaaa

SEQ ID NO: 11608 - RNA, 19 nt, Artificial Sequence
  Description of Artificial Sequence: Synthetic oligonucleotide
  Sense strand starting at position 2340 of SEQ ID NO: 106
auccaugcuguuuauauga

SEQ ID NO: 11609 - RNA, 19 nt, Artificial Sequence
  Description of Artificial Sequence: Synthetic oligonucleotide
  Antisense strand to SEQ ID NO: 11608
ucauauaaacagcauggau

SEQ ID NO: 11610 - RNA, 19 nt, Artificial Sequence
  Description of Artificial Sequence: Synthetic oligonucleotide
  Sense strand starting at position 2154 of SEQ ID NO: 106
gugaauuuguguguuucca

SEQ ID NO: 11611 - RNA, 19 nt, Artificial Sequence
  Description of Artificial Sequence: Synthetic oligonucleotide
  Antisense strand to SEQ ID NO: 11610
uggaaacacacaaauucac

SEQ ID NO: 11612 - RNA, 19 nt, Artificial Sequence
  Description of Artificial Sequence: Synthetic oligonucleotide
  Sense strand starting at position 2150 of SEQ ID NO: 106
gacugugaauuuguguguu

SEQ ID NO: 11613 - RNA, 19 nt, Artificial Sequence
  Description of Artificial Sequence: Synthetic oligonucleotide
  Antisense strand to SEQ ID NO: 11612
aacacacaaauucacaguc

SEQ ID NO: 11614 - RNA, 19 nt, Artificial Sequence
  Description of Artificial Sequence: Synthetic oligonucleotide
  Sense strand starting at position 1219 of SEQ ID NO: 106
gggaaaguguacccacaaa

SEQ ID NO: 11615 - RNA, 19 nt, Artificial Sequence
  Description of Artificial Sequence: Synthetic oligonucleotide
  Antisense strand to SEQ ID NO: 11614
uuuguggguacacuuuccc

SEQ ID NO: 11616 - RNA, 19 nt, Artificial Sequence
  Description of Artificial Sequence: Synthetic oligonucleotide
  Sense strand starting at position 1169 of SEQ ID NO: 106
cuuacauagcauuagaagu

SEQ ID NO: 11617 - RNA, 19 nt, Artificial Sequence
  Description of Artificial Sequence: Synthetic oligonucleotide
  Antisense strand to SEQ ID NO: 11616
acuucuaaugcuauguaag

SEQ ID NO: 11618 - RNA, 19 nt, Artificial Sequence
  Description of Artificial Sequence: Synthetic oligonucleotide
  Sense strand starting at position 1153 of SEQ ID NO: 106
gaagguguuagguaaacuu

SEQ ID NO: 11619 - RNA, 19 nt, Artificial Sequence
  Description of Artificial Sequence: Synthetic oligonucleotide
  Antisense strand to SEQ ID NO: 11618
aaguuuaccuaacaccuuc

SEQ ID NO: 11620 - RNA, 19 nt, Artificial Sequence
  Description of Artificial Sequence: Synthetic oligonucleotide
  Sense strand starting at position 1123 of SEQ ID NO: 106
ugaaacacuguguggauaa

SEQ ID NO: 11621 - RNA, 19 nt, Artificial Sequence
  Description of Artificial Sequence: Synthetic oligonucleotide
  Antisense strand to SEQ ID NO: 11620
uuauccacacaguguuuca

SEQ ID NO: 11622 - RNA, 19 nt, Artificial Sequence
  Description of Artificial Sequence: Synthetic oligonucleotide
  Sense strand starting at position 1122 of SEQ ID NO: 106
cugaaacacuguguggaua

SEQ ID NO: 11623 - RNA, 19 nt, Artificial Sequence
  Description of Artificial Sequence: Synthetic oligonucleotide
  Antisense strand to SEQ ID NO: 11622
uauccacacaguguuucag

SEQ ID NO: 11624 - RNA, 19 nt, Artificial Sequence
  Description of Artificial Sequence: Synthetic oligonucleotide
  Sense strand starting at position 1109 of SEQ ID NO: 106
ccaagaugguaggcugaaa

SEQ ID NO: 11625 - RNA, 19 nt, Artificial Sequence
  Description of Artificial Sequence: Synthetic oligonucleotide
  Antisense strand to SEQ ID NO: 11624
uuucagccuaccaucuugg

SEQ ID NO: 11626 - RNA, 19 nt, Artificial Sequence
  Description of Artificial Sequence: Synthetic oligonucleotide
  Sense strand starting at position 1082 of SEQ ID NO: 106
gggcaaaccauguaguauc

SEQ ID NO: 11627 - RNA, 19 nt, Artificial Sequence
  Description of Artificial Sequence: Synthetic oligonucleotide
  Antisense strand to SEQ ID NO: 11626
gauacuacaugguuugccc

SEQ ID NO: 11628 - RNA, 19 nt, Artificial Sequence
  Description of Artificial Sequence: Synthetic oligonucleotide
  Sense strand starting at position 978 of SEQ ID NO: 106
ggaauuucuugagauauag

SEQ ID NO: 11629 - RNA, 19 nt, Artificial Sequence
  Description of Artificial Sequence: Synthetic oligonucleotide
  Antisense strand to SEQ ID NO: 11628
cuauaucucaagaaauucc

SEQ ID NO: 11630 - RNA, 19 nt, Artificial Sequence
  Description of Artificial Sequence: Synthetic oligonucleotide
  Sense strand starting at position 966 of SEQ ID NO: 106
uggugcuuccuuggaauuu

SEQ ID NO: 11631 - RNA, 19 nt, Artificial Sequence
  Description of Artificial Sequence: Synthetic oligonucleotide
  Antisense strand to SEQ ID NO: 11630
aaauuccaaggaagcacca

SEQ ID NO: 11632 - RNA, 19 nt, Artificial Sequence
  Description of Artificial Sequence: Synthetic oligonucleotide
  Sense strand starting at position 914 of SEQ ID NO: 106
agagaacuguuucuggcaa

SEQ ID NO: 11633 - RNA, 19 nt, Artificial Sequence
  Description of Artificial Sequence: Synthetic oligonucleotide
  Antisense strand to SEQ ID NO: 11632
uugccagaaacaguucucu

SEQ ID NO: 11634 - RNA, 19 nt, Artificial Sequence
  Description of Artificial Sequence: Synthetic oligonucleotide
  Sense strand starting at position 843 of SEQ ID NO: 106
aagaguuacguuuacagag

SEQ ID NO: 11635 - RNA, 19 nt, Artificial Sequence
  Description of Artificial Sequence: Synthetic oligonucleotide
  Antisense strand to SEQ ID NO: 11634
cucuguaaacguaacucuu

SEQ ID NO: 11636 - RNA, 19 nt, Artificial Sequence
  Description of Artificial Sequence: Synthetic oligonucleotide
  Sense strand starting at position 741 of SEQ ID NO: 106
acguaucacaauugaggaa

SEQ ID NO: 11637 - RNA, 19 nt, Artificial Sequence
  Description of Artificial Sequence: Synthetic oligonucleotide
  Antisense strand to SEQ ID NO: 11636
uuccucaauugugauacgu

SEQ ID NO: 11638 - RNA, 19 nt, Artificial Sequence
  Description of Artificial Sequence: Synthetic oligonucleotide
  Sense strand starting at position 698 of SEQ ID NO: 106
ccuguauucggagaaauuc

SEQ ID NO: 11639 - RNA, 19 nt, Artificial Sequence
  Description of Artificial Sequence: Synthetic oligonucleotide
  Antisense strand to SEQ ID NO: 11638
gaauuucuccgaauacagg

SEQ ID NO: 11640 - RNA, 19 nt, Artificial Sequence
  Description of Artificial Sequence: Synthetic oligonucleotide
  Sense strand starting at position 507 of SEQ ID NO: 106
ggauaugcuccuuacaacu

SEQ ID NO: 11641 - RNA, 19 nt, Artificial Sequence
  Description of Artificial Sequence: Synthetic oligonucleotide
  Antisense strand to SEQ ID NO: 11640
aguuguaaggagcauaucc

SEQ ID NO: 11642 - RNA, 19 nt, Artificial Sequence
  Description of Artificial Sequence: Synthetic oligonucleotide
  Sense strand starting at position 506 of SEQ ID NO: 106
aggauaugcuccuuacaac

SEQ ID NO: 11643 - RNA, 19 nt, Artificial Sequence
  Description of Artificial Sequence: Synthetic oligonucleotide
  Antisense strand to SEQ ID NO: 11642
guuguaaggagcauauccu

SEQ ID NO: 11644 - RNA, 19 nt, Artificial Sequence
  Description of Artificial Sequence: Synthetic oligonucleotide
  Sense strand starting at position 452 of SEQ ID NO: 106
guaguuuauaaugggacca

SEQ ID NO: 11645 - RNA, 19 nt, Artificial Sequence
  Description of Artificial Sequence: Synthetic oligonucleotide
  Antisense strand to SEQ ID NO: 11644
uggucccauuauaaacuac

SEQ ID NO: 11646 - RNA, 19 nt, Artificial Sequence
  Description of Artificial Sequence: Synthetic oligonucleotide
  Sense strand starting at position 411 of SEQ ID NO: 106
ugacuuagucaguagaagc

SEQ ID NO: 11647 - RNA, 19 nt, Artificial Sequence
  Description of Artificial Sequence: Synthetic oligonucleotide
  Antisense strand to SEQ ID NO: 11646
gcuucuacugacuaaguca

SEQ ID NO: 11648 - RNA, 19 nt, Artificial Sequence
  Description of Artificial Sequence: Synthetic oligonucleotide
  Sense strand starting at position 410 of SEQ ID NO: 106
uugacuuagucaguagaag

SEQ ID NO: 11649 - RNA, 19 nt, Artificial Sequence
  Description of Artificial Sequence: Synthetic oligonucleotide
  Antisense strand to SEQ ID NO: 11648
cuucuacugacuaagucaa

SEQ ID NO: 11650 - RNA, 19 nt, Artificial Sequence
  Description of Artificial Sequence: Synthetic oligonucleotide
  Sense strand starting at position 399 of SEQ ID NO: 106
gagguuaaccauugacuua

SEQ ID NO: 11651 - RNA, 19 nt, Artificial Sequence
  Description of Artificial Sequence: Synthetic oligonucleotide
  Antisense strand to SEQ ID NO: 11650
uaagucaaugguuaaccuc

SEQ ID NO: 11652 - RNA, 19 nt, Artificial Sequence
  Description of Artificial Sequence: Synthetic oligonucleotide
  Sense strand starting at position 314 of SEQ ID NO: 106
cuuagaaagugauugauac

SEQ ID NO: 11653 - RNA, 19 nt, Artificial Sequence
  Description of Artificial Sequence: Synthetic oligonucleotide
  Antisense strand to SEQ ID NO: 11652
guaucaaucacuuucuaag

SEQ ID NO: 11654 - RNA, 19 nt, Artificial Sequence
  Description of Artificial Sequence: Synthetic oligonucleotide
  Sense strand starting at position 312 of SEQ ID NO: 106
ugcuuagaaagugauugau

SEQ ID NO: 11655 - RNA, 19 nt, Artificial Sequence
  Description of Artificial Sequence: Synthetic oligonucleotide
  Antisense strand to SEQ ID NO: 11654
aucaaucacuuucuaagca

SEQ ID NO: 11656 - RNA, 19 nt, Artificial Sequence
  Description of Artificial Sequence: Synthetic oligonucleotide
  Sense strand starting at position 311 of SEQ ID NO: 106
augcuuagaaagugauuga

SEQ ID NO: 11657 - RNA, 19 nt, Artificial Sequence
  Description of Artificial Sequence: Synthetic oligonucleotide
  Antisense strand to SEQ ID NO: 11656
ucaaucacuuucuaagcau

SEQ ID NO: 11658 - RNA, 19 nt, Artificial Sequence
  Description of Artificial Sequence: Synthetic oligonucleotide
  Sense strand starting at position 303 of SEQ ID NO: 106
ggaaguccaugcuuagaaa

SEQ ID NO: 11659 - RNA, 19 nt, Artificial Sequence
  Description of Artificial Sequence: Synthetic oligonucleotide
  Antisense strand to SEQ ID NO: 11658
uuucuaagcauggacuucc

SEQ ID NO: 11660 - RNA, 19 nt, Artificial Sequence
  Description of Artificial Sequence: Synthetic oligonucleotide
  Sense strand starting at position 244 of SEQ ID NO: 106
ggacucacuugucuggaaa

SEQ ID NO: 11661 - RNA, 19 nt, Artificial Sequence
  Description of Artificial Sequence: Synthetic oligonucleotide
  Antisense strand to SEQ ID NO: 11660
uuuccagacaagugagucc

SEQ ID NO: 11662 - RNA, 19 nt, Artificial Sequence
  Description of Artificial Sequence: Synthetic oligonucleotide
  Sense strand starting at position 243 of SEQ ID NO: 106
aggacucacuugucuggaa

SEQ ID NO: 11663 - RNA, 19 nt, Artificial Sequence
  Description of Artificial Sequence: Synthetic oligonucleotide
  Antisense strand to SEQ ID NO: 11662
uuccagacaagugaguccu

SEQ ID NO: 11664 - RNA, 19 nt, Artificial Sequence
  Description of Artificial Sequence: Synthetic oligonucleotide
  Sense strand starting at position 65 of SEQ ID NO: 106
aaugauguccugggcaaga

SEQ ID NO: 11665 - RNA, 19 nt, Artificial Sequence
  Description of Artificial Sequence: Synthetic oligonucleotide
  Antisense strand to SEQ ID NO: 11664
ucuugcccaggacaucauu

SEQ ID NO: 11666 - RNA, 19 nt, Artificial Sequence
  Description of Artificial Sequence: Synthetic oligonucleotide
  Sense strand starting at position 64 of SEQ ID NO: 106
gaaugauguccugggcaag

SEQ ID NO: 11667 - RNA, 19 nt, Artificial Sequence
  Description of Artificial Sequence: Synthetic oligonucleotide
  Antisense strand to SEQ ID NO: 11666
cuugcccaggacaucauuc

SEQ ID NO: 11668 - RNA, 19 nt, Artificial Sequence
  Description of Artificial Sequence: Synthetic oligonucleotide
  Sense strand starting at position 89 of SEQ ID NO: 107
auaaaugauagguggugau

SEQ ID NO: 11669 - RNA, 19 nt, Artificial Sequence
  Description of Artificial Sequence: Synthetic oligonucleotide
  Antisense strand to SEQ ID NO: 11668
aucaccaccuaucauuuau

SEQ ID NO: 11670 - RNA, 19 nt, Artificial Sequence
  Description of Artificial Sequence: Synthetic oligonucleotide
  Sense strand starting at position 173 of SEQ ID NO: 107
agagaaaucuuacucguuu

SEQ ID NO: 11671 - RNA, 19 nt, Artificial Sequence
  Description of Artificial Sequence: Synthetic oligonucleotide
  Antisense strand to SEQ ID NO: 11670
aaacgaguaagauuucucu

SEQ ID NO: 11672 - RNA, 19 nt, Artificial Sequence
  Description of Artificial Sequence: Synthetic oligonucleotide
  Sense strand starting at position 233 of SEQ ID NO: 107
ggaauuaagugagcuuauu

SEQ ID NO: 11673 - RNA, 19 nt, Artificial Sequence
  Description of Artificial Sequence: Synthetic oligonucleotide
  Antisense strand to SEQ ID NO: 11672
aauaagcucacuuaauucc

SEQ ID NO: 11674 - RNA, 19 nt, Artificial Sequence
  Description of Artificial Sequence: Synthetic oligonucleotide
  Sense strand starting at position 311 of SEQ ID NO: 107
guucuaacugaauguauac

SEQ ID NO: 11675 - RNA, 19 nt, Artificial Sequence
  Description of Artificial Sequence: Synthetic oligonucleotide
  Antisense strand to SEQ ID NO: 11674
guauacauucaguuagaac

SEQ ID NO: 11676 - RNA, 19 nt, Artificial Sequence
  Description of Artificial Sequence: Synthetic oligonucleotide
  Sense strand starting at position 337 of SEQ ID NO: 107
auauuaauagcagagcgau

SEQ ID NO: 11677 - RNA, 19 nt, Artificial Sequence
  Description of Artificial Sequence: Synthetic oligonucleotide
  Antisense strand to SEQ ID NO: 11676
aucgcucugcuauuaauau

SEQ ID NO: 11678 - RNA, 19 nt, Artificial Sequence
  Description of Artificial Sequence: Synthetic oligonucleotide
  Sense strand starting at position 340 of SEQ ID NO: 107
uuaauagcagagcgaucaa

SEQ ID NO: 11679 - RNA, 19 nt, Artificial Sequence
  Description of Artificial Sequence: Synthetic oligonucleotide
  Antisense strand to SEQ ID NO: 11678
uugaucgcucugcuauuaa

SEQ ID NO: 11680 - RNA, 19 nt, Artificial Sequence
  Description of Artificial Sequence: Synthetic oligonucleotide
  Sense strand starting at position 520 of SEQ ID NO: 107
ggucaauauugacuaagau

SEQ ID NO: 11681 - RNA, 19 nt, Artificial Sequence
  Description of Artificial Sequence: Synthetic oligonucleotide
  Antisense strand to SEQ ID NO: 11680
aucuuagucaauauugacc

SEQ ID NO: 11682 - RNA, 19 nt, Artificial Sequence
  Description of Artificial Sequence: Synthetic oligonucleotide
  Sense strand starting at position 579 of SEQ ID NO: 107
ucaucaagaugagacauua

SEQ ID NO: 11683 - RNA, 19 nt, Artificial Sequence
  Description of Artificial Sequence: Synthetic oligonucleotide
  Antisense strand to SEQ ID NO: 11682
uaaugucucaucuugauga

SEQ ID NO: 11684 - RNA, 19 nt, Artificial Sequence
  Description of Artificial Sequence: Synthetic oligonucleotide
  Sense strand starting at position 676 of SEQ ID NO: 107
uuaacuguucuacguauca

SEQ ID NO: 11685 - RNA, 19 nt, Artificial Sequence
  Description of Artificial Sequence: Synthetic oligonucleotide
  Antisense strand to SEQ ID NO: 11684
ugauacguagaacaguuaa

SEQ ID NO: 11686 - RNA, 19 nt, Artificial Sequence
  Description of Artificial Sequence: Synthetic oligonucleotide
  Sense strand starting at position 796 of SEQ ID NO: 107
accaguugcagucaagaug

SEQ ID NO: 11687 - RNA, 19 nt, Artificial Sequence
  Description of Artificial Sequence: Synthetic oligonucleotide
  Antisense strand to SEQ ID NO: 11686
caucuugacugcaacuggu

SEQ ID NO: 11688 - RNA, 19 nt, Artificial Sequence
  Description of Artificial Sequence: Synthetic oligonucleotide
  Sense strand starting at position 808 of SEQ ID NO: 107
caagaugggaucuguaugu

SEQ ID NO: 11689 - RNA, 19 nt, Artificial Sequence
  Description of Artificial Sequence: Synthetic oligonucleotide
  Antisense strand to SEQ ID NO: 11688
acauacagaucccaucuug

SEQ ID NO: 11690 - RNA, 19 nt, Artificial Sequence
  Description of Artificial Sequence: Synthetic oligonucleotide
  Sense strand starting at position 814 of SEQ ID NO: 107
gggaucuguaugugagcaa

SEQ ID NO: 11691 - RNA, 19 nt, Artificial Sequence
  Description of Artificial Sequence: Synthetic oligonucleotide
  Antisense strand to SEQ ID NO: 11690
uugcucacauacagauccc

SEQ ID NO: 11692 - RNA, 19 nt, Artificial Sequence
  Description of Artificial Sequence: Synthetic oligonucleotide
  Sense strand starting at position 817 of SEQ ID NO: 107
aucuguaugugagcaauga

SEQ ID NO: 11693 - RNA, 19 nt, Artificial Sequence
  Description of Artificial Sequence: Synthetic oligonucleotide
  Antisense strand to SEQ ID NO: 11692
ucauugcucacauacagau

SEQ ID NO: 11694 - RNA, 19 nt, Artificial Sequence
  Description of Artificial Sequence: Synthetic oligonucleotide
  Sense strand starting at position 818 of SEQ ID NO: 107
ucuguaugugagcaaugaa

SEQ ID NO: 11695 - RNA, 19 nt, Artificial Sequence
  Description of Artificial Sequence: Synthetic oligonucleotide
  Antisense strand to SEQ ID NO: 11694
uucauugcucacauacaga

SEQ ID NO: 11696 - RNA, 19 nt, Artificial Sequence
  Description of Artificial Sequence: Synthetic oligonucleotide
  Sense strand starting at position 1010 of SEQ ID NO: 107
agcuucucacgacaaacuu

SEQ ID NO: 11697 - RNA, 19 nt, Artificial Sequence
  Description of Artificial Sequence: Synthetic oligonucleotide
  Antisense strand to SEQ ID NO: 11696
aaguuugucgugagaagcu

SEQ ID NO: 11698 - RNA, 19 nt, Artificial Sequence
  Description of Artificial Sequence: Synthetic oligonucleotide
  Sense strand starting at position 1042 of SEQ ID NO: 107
gaggauacauuccuuugca

SEQ ID NO: 11699 - RNA, 19 nt, Artificial Sequence
  Description of Artificial Sequence: Synthetic oligonucleotide
  Antisense strand to SEQ ID NO: 11698
ugcaaaggaauguauccuc

SEQ ID NO: 11700 - RNA, 19 nt, Artificial Sequence
  Description of Artificial Sequence: Synthetic oligonucleotide
  Sense strand starting at position 1098 of SEQ ID NO: 107
uacugagucgaucaugauu

SEQ ID NO: 11701 - RNA, 19 nt, Artificial Sequence
  Description of Artificial Sequence: Synthetic oligonucleotide
  Antisense strand to SEQ ID NO: 11700
aaucaugaucgacucagua

SEQ ID NO: 11702 - RNA, 19 nt, Artificial Sequence
  Description of Artificial Sequence: Synthetic oligonucleotide
  Sense strand starting at position 1248 of SEQ ID NO: 107
gauuaucuuucugcccgau

SEQ ID NO: 11703 - RNA, 19 nt, Artificial Sequence
  Description of Artificial Sequence: Synthetic oligonucleotide
  Antisense strand to SEQ ID NO: 11702
aucgggcagaaagauaauc

SEQ ID NO: 11704 - RNA, 19 nt, Artificial Sequence
  Description of Artificial Sequence: Synthetic oligonucleotide
  Sense strand starting at position 1252 of SEQ ID NO: 107
aucuuucugcccgauauug

SEQ ID NO: 11705 - RNA, 19 nt, Artificial Sequence
  Description of Artificial Sequence: Synthetic oligonucleotide
  Antisense strand to SEQ ID NO: 11704
caauaucgggcagaaagau

SEQ ID NO: 11706 - RNA, 19 nt, Artificial Sequence
  Description of Artificial Sequence: Synthetic oligonucleotide
  Sense strand starting at position 1285 of SEQ ID NO: 107
agaggagagucuccucaca

SEQ ID NO: 11707 - RNA, 19 nt, Artificial Sequence
  Description of Artificial Sequence: Synthetic oligonucleotide
  Antisense strand to SEQ ID NO: 11706
ugugaggagacucuccucu

SEQ ID NO: 11708 - RNA, 19 nt, Artificial Sequence
  Description of Artificial Sequence: Synthetic oligonucleotide
  Sense strand starting at position 1287 of SEQ ID NO: 107
aggagagucuccucacauc

SEQ ID NO: 11709 - RNA, 19 nt, Artificial Sequence
  Description of Artificial Sequence: Synthetic oligonucleotide
  Antisense strand to SEQ ID NO: 11708
gaugugaggagacucuccu

SEQ ID NO: 11710 - RNA, 19 nt, Artificial Sequence
  Description of Artificial Sequence: Synthetic oligonucleotide
  Sense strand starting at position 1412 of SEQ ID NO: 107
uuggcagucacggaggaau

SEQ ID NO: 11711 - RNA, 19 nt, Artificial Sequence
  Description of Artificial Sequence: Synthetic oligonucleotide
  Antisense strand to SEQ ID NO: 11710
auuccuccgugacugccaa

SEQ ID NO: 11712 - RNA, 19 nt, Artificial Sequence
  Description of Artificial Sequence: Synthetic oligonucleotide
  Sense strand starting at position 1496 of SEQ ID NO: 107
cgguggugaugguuacuga

SEQ ID NO: 11713 - RNA, 19 nt, Artificial Sequence
  Description of Artificial Sequence: Synthetic oligonucleotide
  Antisense strand to SEQ ID NO: 11712
ucaguaaccaucaccaccg

SEQ ID NO: 11714 - RNA, 19 nt, Artificial Sequence
  Description of Artificial Sequence: Synthetic oligonucleotide
  Sense strand starting at position 1497 of SEQ ID NO: 107
gguggugaugguuacugaa

SEQ ID NO: 11715 - RNA, 19 nt, Artificial Sequence
  Description of Artificial Sequence: Synthetic oligonucleotide
  Antisense strand to SEQ ID NO: 11714
uucaguaaccaucaccacc

SEQ ID NO: 11716 - RNA, 19 nt, Artificial Sequence
  Description of Artificial Sequence: Synthetic oligonucleotide
  Sense strand starting at position 1499 of SEQ ID NO: 107
uggugaugguuacugaaga

SEQ ID NO: 11717 - RNA, 19 nt, Artificial Sequence
  Description of Artificial Sequence: Synthetic oligonucleotide
  Antisense strand to SEQ ID NO: 11716
ucuucaguaaccaucacca

SEQ ID NO: 11718 - RNA, 19 nt, Artificial Sequence
  Description of Artificial Sequence: Synthetic oligonucleotide
  Sense strand starting at position 2510 of SEQ ID NO: 107
aguguugaguugucaggaa

SEQ ID NO: 11719 - RNA, 19 nt, Artificial Sequence
  Description of Artificial Sequence: Synthetic oligonucleotide
  Antisense strand to SEQ ID NO: 11718
uuccugacaacucaacacu

SEQ ID NO: 11720 - RNA, 19 nt, Artificial Sequence
  Description of Artificial Sequence: Synthetic oligonucleotide
  Sense strand starting at position 2514 of SEQ ID NO: 107
uugaguugucaggaaaguc

SEQ ID NO: 11721 - RNA, 19 nt, Artificial Sequence
  Description of Artificial Sequence: Synthetic oligonucleotide
  Antisense strand to SEQ ID NO: 11720
gacuuuccugacaacucaa

SEQ ID NO: 11722 - RNA, 19 nt, Artificial Sequence
  Description of Artificial Sequence: Synthetic oligonucleotide
  Sense strand starting at position 2522 of SEQ ID NO: 107
ucaggaaagucauagaaga

SEQ ID NO: 11723 - RNA, 19 nt, Artificial Sequence
  Description of Artificial Sequence: Synthetic oligonucleotide
  Antisense strand to SEQ ID NO: 11722
ucuucuaugacuuuccuga

SEQ ID NO: 11724 - RNA, 19 nt, Artificial Sequence
  Description of Artificial Sequence: Synthetic oligonucleotide
  Sense strand starting at position 2535 of SEQ ID NO: 107
agaagaguuuaggugcuga

SEQ ID NO: 11725 - RNA, 19 nt, Artificial Sequence
  Description of Artificial Sequence: Synthetic oligonucleotide
  Antisense strand to SEQ ID NO: 11724
ucagcaccuaaacucuucu

SEQ ID NO: 11726 - RNA, 19 nt, Artificial Sequence
  Description of Artificial Sequence: Synthetic oligonucleotide
  Sense strand starting at position 2676 of SEQ ID NO: 107
agggcaaagaaucguguaa

SEQ ID NO: 11727 - RNA, 19 nt, Artificial Sequence
  Description of Artificial Sequence: Synthetic oligonucleotide
  Antisense strand to SEQ ID NO: 11726
uuacacgauucuuugcccu

SEQ ID NO: 11728 - RNA, 19 nt, Artificial Sequence
  Description of Artificial Sequence: Synthetic oligonucleotide
  Sense strand starting at position 2680 of SEQ ID NO: 107
caaagaaucguguaacuga

SEQ ID NO: 11729 - RNA, 19 nt, Artificial Sequence
  Description of Artificial Sequence: Synthetic oligonucleotide
  Antisense strand to SEQ ID NO: 11728
ucaguuacacgauucuuug

SEQ ID NO: 11730 - RNA, 19 nt, Artificial Sequence
  Description of Artificial Sequence: Synthetic oligonucleotide
  Sense strand starting at position 2683 of SEQ ID NO: 107
agaaucguguaacugaaau

SEQ ID NO: 11731 - RNA, 19 nt, Artificial Sequence
  Description of Artificial Sequence: Synthetic oligonucleotide
  Antisense strand to SEQ ID NO: 11730
auuucaguuacacgauucu

SEQ ID NO: 11732 - RNA, 19 nt, Artificial Sequence
  Description of Artificial Sequence: Synthetic oligonucleotide
  Sense strand starting at position 2735 of SEQ ID NO: 107
agugucaaacucugaagaa

SEQ ID NO: 11733 - RNA, 19 nt, Artificial Sequence
  Description of Artificial Sequence: Synthetic oligonucleotide
  Antisense strand to SEQ ID NO: 11732
uucuucagaguuugacacu

SEQ ID NO: 11734 - RNA, 19 nt, Artificial Sequence
  Description of Artificial Sequence: Synthetic oligonucleotide
  Sense strand starting at position 2934 of SEQ ID NO: 107
uugacagagucucuguagu

SEQ ID NO: 11735 - RNA, 19 nt, Artificial Sequence
  Description of Artificial Sequence: Synthetic oligonucleotide
  Antisense strand to SEQ ID NO: 11734
acuacagagacucugucaa

SEQ ID NO: 11736 - RNA, 19 nt, Artificial Sequence
  Description of Artificial Sequence: Synthetic oligonucleotide
  Sense strand starting at position 3502 of SEQ ID NO: 107
uauuguuaacgcuaagcca

SEQ ID NO: 11737 - RNA, 19 nt, Artificial Sequence
  Description of Artificial Sequence: Synthetic oligonucleotide
  Antisense strand to SEQ ID NO: 11736
uggcuuagcguuaacaaua

SEQ ID NO: 11738 - RNA, 19 nt, Artificial Sequence
  Description of Artificial Sequence: Synthetic oligonucleotide
  Sense strand starting at position 3558 of SEQ ID NO: 107
ccugauuagcauuaguauc

SEQ ID NO: 11739 - RNA, 19 nt, Artificial Sequence
  Description of Artificial Sequence: Synthetic oligonucleotide
  Antisense strand to SEQ ID NO: 11738
gauacuaaugcuaaucagg

SEQ ID NO: 11740 - RNA, 19 nt, Artificial Sequence
  Description of Artificial Sequence: Synthetic oligonucleotide
  Sense strand starting at position 3566 of SEQ ID NO: 107
gcauuaguauccucacuug

SEQ ID NO: 11741 - RNA, 19 nt, Artificial Sequence
  Description of Artificial Sequence: Synthetic oligonucleotide
  Antisense strand to SEQ ID NO: 11740
caagugaggauacuaaugc

SEQ ID NO: 11742 - RNA, 19 nt, Artificial Sequence
  Description of Artificial Sequence: Synthetic oligonucleotide
  Sense strand starting at position 3569 of SEQ ID NO: 107
uuaguauccucacuugaca

SEQ ID NO: 11743 - RNA, 19 nt, Artificial Sequence
  Description of Artificial Sequence: Synthetic oligonucleotide
  Antisense strand to SEQ ID NO: 11742
ugucaagugaggauacuaa

SEQ ID NO: 11744 - RNA, 19 nt, Artificial Sequence
  Description of Artificial Sequence: Synthetic oligonucleotide
  Sense strand starting at position 3619 of SEQ ID NO: 107
uagaaugugguacagucaa

SEQ ID NO: 11745 - RNA, 19 nt, Artificial Sequence
  Description of Artificial Sequence: Synthetic oligonucleotide
  Antisense strand to SEQ ID NO: 11744
uugacuguaccacauucua

SEQ ID NO: 11746 - RNA, 19 nt, Artificial Sequence
  Description of Artificial Sequence: Synthetic oligonucleotide
  Sense strand starting at position 3685 of SEQ ID NO: 107
cuuuguaugucaucuuaaa

SEQ ID NO: 11747 - RNA, 19 nt, Artificial Sequence
  Description of Artificial Sequence: Synthetic oligonucleotide
  Antisense strand to SEQ ID NO: 11746
uuuaagaugacauacaaag

SEQ ID NO: 11748 - RNA, 19 nt, Artificial Sequence
  Description of Artificial Sequence: Synthetic oligonucleotide
  Sense strand starting at position 285 of SEQ ID NO: 108
agauucuucgcugagauuc

SEQ ID NO: 11749 - RNA, 19 nt, Artificial Sequence
  Description of Artificial Sequence: Synthetic oligonucleotide
  Antisense strand to SEQ ID NO: 11748
gaaucucagcgaagaaucu

SEQ ID NO: 11750 - RNA, 19 nt, Artificial Sequence
  Description of Artificial Sequence: Synthetic oligonucleotide
  Sense strand starting at position 380 of SEQ ID NO: 108
uggcacacuguguaagaaa

SEQ ID NO: 11751 - RNA, 19 nt, Artificial Sequence
  Description of Artificial Sequence: Synthetic oligonucleotide
  Antisense strand to SEQ ID NO: 11750
uuucuuacacagugugcca

SEQ ID NO: 11752 - RNA, 19 nt, Artificial Sequence
  Description of Artificial Sequence: Synthetic oligonucleotide
  Sense strand starting at position 389 of SEQ ID NO: 108
guguaagaaagguguagaa

SEQ ID NO: 11753 - RNA, 19 nt, Artificial Sequence
  Description of Artificial Sequence: Synthetic oligonucleotide
  Antisense strand to SEQ ID NO: 11752
uucuacaccuuucuuacac

SEQ ID NO: 11754 - RNA, 19 nt, Artificial Sequence
  Description of Artificial Sequence: Synthetic oligonucleotide
  Sense strand starting at position 431 of SEQ ID NO: 108
uguccauacugugcaaaga

SEQ ID NO: 11755 - RNA, 19 nt, Artificial Sequence
  Description of Artificial Sequence: Synthetic oligonucleotide
  Antisense strand to SEQ ID NO: 11754
ucuuugcacaguauggaca

SEQ ID NO: 11756 - RNA, 19 nt, Artificial Sequence
  Description of Artificial Sequence: Synthetic oligonucleotide
  Sense strand starting at position 480 of SEQ ID NO: 108
uuuaauugugaaggagauc

SEQ ID NO: 11757 - RNA, 19 nt, Artificial Sequence
  Description of Artificial Sequence: Synthetic oligonucleotide
  Antisense strand to SEQ ID NO: 11756
gaucuccuucacaauuaaa

SEQ ID NO: 11758 - RNA, 19 nt, Artificial Sequence
  Description of Artificial Sequence: Synthetic oligonucleotide
  Sense strand starting at position 612 of SEQ ID NO: 108
guaugaggaagguggauau

SEQ ID NO: 11759 - RNA, 19 nt, Artificial Sequence
  Description of Artificial Sequence: Synthetic oligonucleotide
  Antisense strand to SEQ ID NO: 11758
auauccaccuuccucauac

SEQ ID NO: 11760 - RNA, 19 nt, Artificial Sequence
  Description of Artificial Sequence: Synthetic oligonucleotide
  Sense strand starting at position 679 of SEQ ID NO: 108
guauuauugugggcaggga

SEQ ID NO: 11761 - RNA, 19 nt, Artificial Sequence
  Description of Artificial Sequence: Synthetic oligonucleotide
  Antisense strand to SEQ ID NO: 11760
ucccugcccacaauaauac

SEQ ID NO: 11762 - RNA, 19 nt, Artificial Sequence
  Description of Artificial Sequence: Synthetic oligonucleotide
  Sense strand starting at position 683 of SEQ ID NO: 108
uauugugggcagggagaua

SEQ ID NO: 11763 - RNA, 19 nt, Artificial Sequence
  Description of Artificial Sequence: Synthetic oligonucleotide
  Antisense strand to SEQ ID NO: 11762
uaucucccugcccacaaua

SEQ ID NO: 11764 - RNA, 19 nt, Artificial Sequence
  Description of Artificial Sequence: Synthetic oligonucleotide
  Sense strand starting at position 718 of SEQ ID NO: 108
aagagcgaaccuuguaaua

SEQ ID NO: 11765 - RNA, 19 nt, Artificial Sequence
  Description of Artificial Sequence: Synthetic oligonucleotide
  Antisense strand to SEQ ID NO: 11764
uauuacaagguucgcucuu

SEQ ID NO: 11766 - RNA, 19 nt, Artificial Sequence
  Description of Artificial Sequence: Synthetic oligonucleotide
  Sense strand starting at position 804 of SEQ ID NO: 108
gacgaucucugucugaaac

SEQ ID NO: 11767 - RNA, 19 nt, Artificial Sequence
  Description of Artificial Sequence: Synthetic oligonucleotide
  Antisense strand to SEQ ID NO: 11766
guuucagacagagaucguc

SEQ ID NO: 11768 - RNA, 19 nt, Artificial Sequence
  Description of Artificial Sequence: Synthetic oligonucleotide
  Sense strand starting at position 805 of SEQ ID NO: 108
acgaucucugucugaaaca

SEQ ID NO: 11769 - RNA, 19 nt, Artificial Sequence
  Description of Artificial Sequence: Synthetic oligonucleotide
  Antisense strand to SEQ ID NO: 11768
uguuucagacagagaucgu

SEQ ID NO: 11770 - RNA, 19 nt, Artificial Sequence
  Description of Artificial Sequence: Synthetic oligonucleotide
  Sense strand starting at position 936 of SEQ ID NO: 108
aggaaugaguuugugucca

SEQ ID NO: 11771 - RNA, 19 nt, Artificial Sequence
  Description of Artificial Sequence: Synthetic oligonucleotide
  Antisense strand to SEQ ID NO: 11770
uggacacaaacucauuccu

SEQ ID NO: 11772 - RNA, 19 nt, Artificial Sequence
  Description of Artificial Sequence: Synthetic oligonucleotide
  Sense strand starting at position 1099 of SEQ ID NO: 108
gagaaauauuugcaggaag

SEQ ID NO: 11773 - RNA, 19 nt, Artificial Sequence
  Description of Artificial Sequence: Synthetic oligonucleotide
  Antisense strand to SEQ ID NO: 11772
cuuccugcaaauauuucuc

SEQ ID NO: 11774 - RNA, 19 nt, Artificial Sequence
  Description of Artificial Sequence: Synthetic oligonucleotide
  Sense strand starting at position 1197 of SEQ ID NO: 108
acaacuuuauaagauagga

SEQ ID NO: 11775 - RNA, 19 nt, Artificial Sequence
  Description of Artificial Sequence: Synthetic oligonucleotide
  Antisense strand to SEQ ID NO: 11774
uccuaucuuauaaaguugu

SEQ ID NO: 11776 - RNA, 19 nt, Artificial Sequence
  Description of Artificial Sequence: Synthetic oligonucleotide
  Sense strand starting at position 1219 of SEQ ID NO: 108
aucaucuucuuguuacaga

SEQ ID NO: 11777 - RNA, 19 nt, Artificial Sequence
  Description of Artificial Sequence: Synthetic oligonucleotide
  Antisense strand to SEQ ID NO: 11776
ucuguaacaagaagaugau

SEQ ID NO: 11778 - RNA, 19 nt, Artificial Sequence
  Description of Artificial Sequence: Synthetic oligonucleotide
  Sense strand starting at position 1361 of SEQ ID NO: 108
cucugacaucugggauguu

SEQ ID NO: 11779 - RNA, 19 nt, Artificial Sequence
  Description of Artificial Sequence: Synthetic oligonucleotide
  Antisense strand to SEQ ID NO: 11778
aacaucccagaugucagag

SEQ ID NO: 11780 - RNA, 19 nt, Artificial Sequence
  Description of Artificial Sequence: Synthetic oligonucleotide
  Sense strand starting at position 1364 of SEQ ID NO: 108
ugacaucugggauguucuu

SEQ ID NO: 11781 - RNA, 19 nt, Artificial Sequence
  Description of Artificial Sequence: Synthetic oligonucleotide
  Antisense strand to SEQ ID NO: 11780
aagaacaucccagauguca

SEQ ID NO: 11782 - RNA, 19 nt, Artificial Sequence
  Description of Artificial Sequence: Synthetic oligonucleotide
  Sense strand starting at position 1648 of SEQ ID NO: 108
agaaguauccauugguggu

SEQ ID NO: 11783 - RNA, 19 nt, Artificial Sequence
  Description of Artificial Sequence: Synthetic oligonucleotide
  Antisense strand to SEQ ID NO: 11782
accaccaauggauacuucu

SEQ ID NO: 11784 - RNA, 19 nt, Artificial Sequence
  Description of Artificial Sequence: Synthetic oligonucleotide
  Sense strand starting at position 1674 of SEQ ID NO: 108
agaggcaguguaugauuga

SEQ ID NO: 11785 - RNA, 19 nt, Artificial Sequence
  Description of Artificial Sequence: Synthetic oligonucleotide
  Antisense strand to SEQ ID NO: 11784
ucaaucauacacugccucu

SEQ ID NO: 11786 - RNA, 19 nt, Artificial Sequence
  Description of Artificial Sequence: Synthetic oligonucleotide
  Sense strand starting at position 1677 of SEQ ID NO: 108
ggcaguguaugauugaaag

SEQ ID NO: 11787 - RNA, 19 nt, Artificial Sequence
  Description of Artificial Sequence: Synthetic oligonucleotide
  Antisense strand to SEQ ID NO: 11786
cuuucaaucauacacugcc

SEQ ID NO: 11788 - RNA, 19 nt, Artificial Sequence
  Description of Artificial Sequence: Synthetic oligonucleotide
  Sense strand starting at position 1834 of SEQ ID NO: 108
acggucccucgaugagaua

SEQ ID NO: 11789 - RNA, 19 nt, Artificial Sequence
  Description of Artificial Sequence: Synthetic oligonucleotide
  Antisense strand to SEQ ID NO: 11788
uaucucaucgagggaccgu

SEQ ID NO: 11790 - RNA, 19 nt, Artificial Sequence
  Description of Artificial Sequence: Synthetic oligonucleotide
  Sense strand starting at position 1835 of SEQ ID NO: 108
cggucccucgaugagauau

SEQ ID NO: 11791 - RNA, 19 nt, Artificial Sequence
  Description of Artificial Sequence: Synthetic oligonucleotide
  Antisense strand to SEQ ID NO: 11790
auaucucaucgagggaccg

SEQ ID NO: 11792 - RNA, 19 nt, Artificial Sequence
  Description of Artificial Sequence: Synthetic oligonucleotide
  Sense strand starting at position 1904 of SEQ ID NO: 108
uggagugagaccggaaaua

SEQ ID NO: 11793 - RNA, 19 nt, Artificial Sequence
  Description of Artificial Sequence: Synthetic oligonucleotide
  Antisense strand to SEQ ID NO: 11792
uauuuccggucucacucca

SEQ ID NO: 11794 - RNA, 19 nt, Artificial Sequence
  Description of Artificial Sequence: Synthetic oligonucleotide
  Sense strand starting at position 2255 of SEQ ID NO: 108
caacgcuuuccgucagguu

SEQ ID NO: 11795 - RNA, 19 nt, Artificial Sequence
  Description of Artificial Sequence: Synthetic oligonucleotide
  Antisense strand to SEQ ID NO: 11794
aaccugacggaaagcguug

SEQ ID NO: 11796 - RNA, 19 nt, Artificial Sequence
  Description of Artificial Sequence: Synthetic oligonucleotide
  Sense strand starting at position 2315 of SEQ ID NO: 108
gggcuuccauuucuguauu

SEQ ID NO: 11797 - RNA, 19 nt, Artificial Sequence
  Description of Artificial Sequence: Synthetic oligonucleotide
  Antisense strand to SEQ ID NO: 11796
aauacagaaauggaagccc

SEQ ID NO: 11798 - RNA, 19 nt, Artificial Sequence
  Description of Artificial Sequence: Synthetic oligonucleotide
  Sense strand starting at position 2317 of SEQ ID NO: 108
gcuuccauuucuguauuga

SEQ ID NO: 11799 - RNA, 19 nt, Artificial Sequence
  Description of Artificial Sequence: Synthetic oligonucleotide
  Antisense strand to SEQ ID NO: 11798
ucaauacagaaauggaagc

SEQ ID NO: 11800 - RNA, 19 nt, Artificial Sequence
  Description of Artificial Sequence: Synthetic oligonucleotide
  Sense strand starting at position 2458 of SEQ ID NO: 108
aucccaagagccugacaaa

SEQ ID NO: 11801 - RNA, 19 nt, Artificial Sequence
  Description of Artificial Sequence: Synthetic oligonucleotide
  Antisense strand to SEQ ID NO: 11800
uuugucaggcucuugggau

SEQ ID NO: 11802 - RNA, 19 nt, Artificial Sequence
  Description of Artificial Sequence: Synthetic oligonucleotide
  Sense strand starting at position 2478 of SEQ ID NO: 108
uccuguuaucuaugaagac

SEQ ID NO: 11803 - RNA, 19 nt, Artificial Sequence
  Description of Artificial Sequence: Synthetic oligonucleotide
  Antisense strand to SEQ ID NO: 11802
gucuucauagauaacagga

SEQ ID NO: 11804 - RNA, 19 nt, Artificial Sequence
  Description of Artificial Sequence: Synthetic oligonucleotide
  Sense strand starting at position 2659 of SEQ ID NO: 108
ggugcuaguaguuaauaua

SEQ ID NO: 11805 - RNA, 19 nt, Artificial Sequence
  Description of Artificial Sequence: Synthetic oligonucleotide
  Antisense strand to SEQ ID NO: 11804
uauauuaacuacuagcacc

SEQ ID NO: 11806 - RNA, 19 nt, Artificial Sequence
  Description of Artificial Sequence: Synthetic oligonucleotide
  Sense strand starting at position 2683 of SEQ ID NO: 108
cccaauaaacguuaguuaa

SEQ ID NO: 11807 - RNA, 19 nt, Artificial Sequence
  Description of Artificial Sequence: Synthetic oligonucleotide
  Antisense strand to SEQ ID NO: 11806
uuaacuaacguuuauuggg

SEQ ID NO: 11808 - RNA, 19 nt, Artificial Sequence
  Description of Artificial Sequence: Synthetic oligonucleotide
  Sense strand starting at position 2707 of SEQ ID NO: 108
auugauuucugguaacuag

SEQ ID NO: 11809 - RNA, 19 nt, Artificial Sequence
  Description of Artificial Sequence: Synthetic oligonucleotide
  Antisense strand to SEQ ID NO: 11808
cuaguuaccagaaaucaau

SEQ ID NO: 11810 - RNA, 19 nt, Artificial Sequence
  Description of Artificial Sequence: Synthetic oligonucleotide
  Sense strand starting at position 2787 of SEQ ID NO: 108
uacaguauguaauuaagag

SEQ ID NO: 11811 - RNA, 19 nt, Artificial Sequence
  Description of Artificial Sequence: Synthetic oligonucleotide
  Antisense strand to SEQ ID NO: 11810
cucuuaauuacauacugua

SEQ ID NO: 11812 - RNA, 19 nt, Artificial Sequence
  Description of Artificial Sequence: Synthetic oligonucleotide
  Sense strand starting at position 2900 of SEQ ID NO: 108
ggcuuuauggaucacaauu

SEQ ID NO: 11813 - RNA, 19 nt, Artificial Sequence
  Description of Artificial Sequence: Synthetic oligonucleotide
  Antisense strand to SEQ ID NO: 11812
aauugugauccauaaagcc

SEQ ID NO: 11814 - RNA, 19 nt, Artificial Sequence
  Description of Artificial Sequence: Synthetic oligonucleotide
  Sense strand starting at position 2934 of SEQ ID NO: 108
ggcccauagaaaugaugua

SEQ ID NO: 11815 - RNA, 19 nt, Artificial Sequence
  Description of Artificial Sequence: Synthetic oligonucleotide
  Antisense strand to SEQ ID NO: 11814
uacaucauuucuaugggcc

SEQ ID NO: 11816 - RNA, 19 nt, Artificial Sequence
  Description of Artificial Sequence: Synthetic oligonucleotide
  Sense strand starting at position 3056 of SEQ ID NO: 108
uuacaaacccuauguagua

SEQ ID NO: 11817 - RNA, 19 nt, Artificial Sequence
  Description of Artificial Sequence: Synthetic oligonucleotide
  Antisense strand to SEQ ID NO: 11816
uacuacauaggguuuguaa

SEQ ID NO: 11818 - RNA, 19 nt, Artificial Sequence
  Description of Artificial Sequence: Synthetic oligonucleotide
  Sense strand starting at position 3094 of SEQ ID NO: 108
uguaaacaucuuuaguaag

SEQ ID NO: 11819 - RNA, 19 nt, Artificial Sequence
  Description of Artificial Sequence: Synthetic oligonucleotide
  Antisense strand to SEQ ID NO: 11818
cuuacuaaagauguuuaca

SEQ ID NO: 11820 - RNA, 19 nt, Artificial Sequence
  Description of Artificial Sequence: Synthetic oligonucleotide
  Sense strand starting at position 3124 of SEQ ID NO: 108
aucucucuuguagaucauu

SEQ ID NO: 11821 - RNA, 19 nt, Artificial Sequence
  Description of Artificial Sequence: Synthetic oligonucleotide
  Antisense strand to SEQ ID NO: 11820
aaugaucuacaagagagau

SEQ ID NO: 11822 - RNA, 19 nt, Artificial Sequence
  Description of Artificial Sequence: Synthetic oligonucleotide
  Sense strand starting at position 3149 of SEQ ID NO: 108
uuugauaccuguucuuuag

SEQ ID NO: 11823 - RNA, 19 nt, Artificial Sequence
  Description of Artificial Sequence: Synthetic oligonucleotide
  Antisense strand to SEQ ID NO: 11822
cuaaagaacagguaucaaa

SEQ ID NO: 11824 - RNA, 19 nt, Artificial Sequence
  Description of Artificial Sequence: Synthetic oligonucleotide
  Sense strand starting at position 3153 of SEQ ID NO: 108
auaccuguucuuuagucaa

SEQ ID NO: 11825 - RNA, 19 nt, Artificial Sequence
  Description of Artificial Sequence: Synthetic oligonucleotide
  Antisense strand to SEQ ID NO: 11824
uugacuaaagaacagguau

SEQ ID NO: 11826 - RNA, 19 nt, Artificial Sequence
  Description of Artificial Sequence: Synthetic oligonucleotide
  Sense strand starting at position 3155 of SEQ ID NO: 108
accuguucuuuagucaaua

SEQ ID NO: 11827 - RNA, 19 nt, Artificial Sequence
  Description of Artificial Sequence: Synthetic oligonucleotide
  Antisense strand to SEQ ID NO: 11826
uauugacuaaagaacaggu

SEQ ID NO: 11828 - RNA, 19 nt, Artificial Sequence
  Description of Artificial Sequence: Synthetic oligonucleotide
  Sense strand starting at position 91 of SEQ ID NO: 109
uuuagaauggguggucauu

SEQ ID NO: 11829 - RNA, 19 nt, Artificial Sequence
  Description of Artificial Sequence: Synthetic oligonucleotide
  Antisense strand to SEQ ID NO: 11828
aaugaccacccauucuaaa

SEQ ID NO: 11830 - RNA, 19 nt, Artificial Sequence
  Description of Artificial Sequence: Synthetic oligonucleotide
  Sense strand starting at position 125 of SEQ ID NO: 109
ucuguacagcuagaaucaa

SEQ ID NO: 11831 - RNA, 19 nt, Artificial Sequence
  Description of Artificial Sequence: Synthetic oligonucleotide
  Antisense strand to SEQ ID NO: 11830
uugauucuagcuguacaga

SEQ ID NO: 11832 - RNA, 19 nt, Artificial Sequence
  Description of Artificial Sequence: Synthetic oligonucleotide
  Sense strand starting at position 206 of SEQ ID NO: 109
ggagguacugcccaaggau

SEQ ID NO: 11833 - RNA, 19 nt, Artificial Sequence
  Description of Artificial Sequence: Synthetic oligonucleotide
  Antisense strand to SEQ ID NO: 11832
auccuugggcaguaccucc

SEQ ID NO: 11834 - RNA, 19 nt, Artificial Sequence
  Description of Artificial Sequence: Synthetic oligonucleotide
  Sense strand starting at position 352 of SEQ ID NO: 109
aagucauuaugaguuaaga

SEQ ID NO: 11835 - RNA, 19 nt, Artificial Sequence
  Description of Artificial Sequence: Synthetic oligonucleotide
  Antisense strand to SEQ ID NO: 11834
ucuuaacucauaaugacuu

SEQ ID NO: 11836 - RNA, 19 nt, Artificial Sequence
  Description of Artificial Sequence: Synthetic oligonucleotide
  Sense strand starting at position 360 of SEQ ID NO: 109
augaguuaagacugagucu

SEQ ID NO: 11837 - RNA, 19 nt, Artificial Sequence
  Description of Artificial Sequence: Synthetic oligonucleotide
  Antisense strand to SEQ ID NO: 11836
agacucagucuuaacucau

SEQ ID NO: 11838 - RNA, 19 nt, Artificial Sequence
  Description of Artificial Sequence: Synthetic oligonucleotide
  Sense strand starting at position 388 of SEQ ID NO: 109
caguuucuggugcauauaa

SEQ ID NO: 11839 - RNA, 19 nt, Artificial Sequence
  Description of Artificial Sequence: Synthetic oligonucleotide
  Antisense strand to SEQ ID NO: 11838
uuauaugcaccagaaacug

SEQ ID NO: 11840 - RNA, 19 nt, Artificial Sequence
  Description of Artificial Sequence: Synthetic oligonucleotide
  Sense strand starting at position 390 of SEQ ID NO: 109
guuucuggugcauauaaua

SEQ ID NO: 11841 - RNA, 19 nt, Artificial Sequence
  Description of Artificial Sequence: Synthetic oligonucleotide
  Antisense strand to SEQ ID NO: 11840
uauuauaugcaccagaaac

SEQ ID NO: 11842 - RNA, 19 nt, Artificial Sequence
  Description of Artificial Sequence: Synthetic oligonucleotide
  Sense strand starting at position 420 of SEQ ID NO: 109
uugauugguugaucaaugu

SEQ ID NO: 11843 - RNA, 19 nt, Artificial Sequence
  Description of Artificial Sequence: Synthetic oligonucleotide
  Antisense strand to SEQ ID NO: 11842
acauugaucaaccaaucaa

SEQ ID NO: 11844 - RNA, 19 nt, Artificial Sequence
  Description of Artificial Sequence: Synthetic oligonucleotide
  Sense strand starting at position 426 of SEQ ID NO: 109
gguugaucaauguguggaa

SEQ ID NO: 11845 - RNA, 19 nt, Artificial Sequence
  Description of Artificial Sequence: Synthetic oligonucleotide
  Antisense strand to SEQ ID NO: 11844
uuccacacauugaucaacc

SEQ ID NO: 11846 - RNA, 19 nt, Artificial Sequence
  Description of Artificial Sequence: Synthetic oligonucleotide
  Sense strand starting at position 427 of SEQ ID NO: 109
guugaucaauguguggaaa

SEQ ID NO: 11847 - RNA, 19 nt, Artificial Sequence
  Description of Artificial Sequence: Synthetic oligonucleotide
  Antisense strand to SEQ ID NO: 11846
uuuccacacauugaucaac

SEQ ID NO: 11848 - RNA, 19 nt, Artificial Sequence
  Description of Artificial Sequence: Synthetic oligonucleotide
  Sense strand starting at position 458 of SEQ ID NO: 109
gcaaauguaagugggacaa

SEQ ID NO: 11849 - RNA, 19 nt, Artificial Sequence
  Description of Artificial Sequence: Synthetic oligonucleotide
  Antisense strand to SEQ ID NO: 11848
uugucccacuuacauuugc

SEQ ID NO: 11850 - RNA, 19 nt, Artificial Sequence
  Description of Artificial Sequence: Synthetic oligonucleotide
  Sense strand starting at position 587 of SEQ ID NO: 109
cgauacuacuaagucaagu

SEQ ID NO: 11851 - RNA, 19 nt, Artificial Sequence
  Description of Artificial Sequence: Synthetic oligonucleotide
  Antisense strand to SEQ ID NO: 11850
acuugacuuaguaguaucg

SEQ ID NO: 11852 - RNA, 19 nt, Artificial Sequence
  Description of Artificial Sequence: Synthetic oligonucleotide
  Sense strand starting at position 613 of SEQ ID NO: 109
gcaauauugcuacaaguag

SEQ ID NO: 11853 - RNA, 19 nt, Artificial Sequence
  Description of Artificial Sequence: Synthetic oligonucleotide
  Antisense strand to SEQ ID NO: 11852
cuacuuguagcaauauugc

SEQ ID NO: 11854 - RNA, 19 nt, Artificial Sequence
  Description of Artificial Sequence: Synthetic oligonucleotide
  Sense strand starting at position 624 of SEQ ID NO: 109
acaaguagcuggcuaauuu

SEQ ID NO: 11855 - RNA, 19 nt, Artificial Sequence
  Description of Artificial Sequence: Synthetic oligonucleotide
  Antisense strand to SEQ ID NO: 11854
aaauuagccagcuacuugu

SEQ ID NO: 11856 - RNA, 19 nt, Artificial Sequence
  Description of Artificial Sequence: Synthetic oligonucleotide
  Sense strand starting at position 632 of SEQ ID NO: 109
cuggcuaauuugcuucuaa

SEQ ID NO: 11857 - RNA, 19 nt, Artificial Sequence
  Description of Artificial Sequence: Synthetic oligonucleotide
  Antisense strand to SEQ ID NO: 11856
uuagaagcaaauuagccag

SEQ ID NO: 11858 - RNA, 19 nt, Artificial Sequence
  Description of Artificial Sequence: Synthetic oligonucleotide
  Sense strand starting at position 806 of SEQ ID NO: 109
gugacuucugcugggaacu

SEQ ID NO: 11859 - RNA, 19 nt, Artificial Sequence
  Description of Artificial Sequence: Synthetic oligonucleotide
  Antisense strand to SEQ ID NO: 11858
aguucccagcagaagucac

SEQ ID NO: 11860 - RNA, 19 nt, Artificial Sequence
  Description of Artificial Sequence: Synthetic oligonucleotide
  Sense strand starting at position 820 of SEQ ID NO: 109
gaacucugagucugcucua

SEQ ID NO: 11861 - RNA, 19 nt, Artificial Sequence
  Description of Artificial Sequence: Synthetic oligonucleotide
  Antisense strand to SEQ ID NO: 11860
uagagcagacucagaguuc

SEQ ID NO: 11862 - RNA, 19 nt, Artificial Sequence
  Description of Artificial Sequence: Synthetic oligonucleotide
  Sense strand starting at position 886 of SEQ ID NO: 109
agaguaucauuccuaagca

SEQ ID NO: 11863 - RNA, 19 nt, Artificial Sequence
  Description of Artificial Sequence: Synthetic oligonucleotide
  Antisense strand to SEQ ID NO: 11862
ugcuuaggaaugauacucu

SEQ ID NO: 11864 - RNA, 19 nt, Artificial Sequence
  Description of Artificial Sequence: Synthetic oligonucleotide
  Sense strand starting at position 976 of SEQ ID NO: 109
caagaaccagucugaugau

SEQ ID NO: 11865 - RNA, 19 nt, Artificial Sequence
  Description of Artificial Sequence: Synthetic oligonucleotide
  Antisense strand to SEQ ID NO: 11864
aucaucagacugguucuug

SEQ ID NO: 11866 - RNA, 19 nt, Artificial Sequence
  Description of Artificial Sequence: Synthetic oligonucleotide
  Sense strand starting at position 982 of SEQ ID NO: 109
ccagucugaugaucagaca

SEQ ID NO: 11867 - RNA, 19 nt, Artificial Sequence
  Description of Artificial Sequence: Synthetic oligonucleotide
  Antisense strand to SEQ ID NO: 11866
ugucugaucaucagacugg

SEQ ID NO: 11868 - RNA, 19 nt, Artificial Sequence
  Description of Artificial Sequence: Synthetic oligonucleotide
  Sense strand starting at position 1229 of SEQ ID NO: 109
aaagguuuggagugauguu

SEQ ID NO: 11869 - RNA, 19 nt, Artificial Sequence
  Description of Artificial Sequence: Synthetic oligonucleotide
  Antisense strand to SEQ ID NO: 11868
aacaucacuccaaaccuuu

SEQ ID NO: 11870 - RNA, 19 nt, Artificial Sequence
  Description of Artificial Sequence: Synthetic oligonucleotide
  Sense strand starting at position 1230 of SEQ ID NO: 109
aagguuuggagugauguuu

SEQ ID NO: 11871 - RNA, 19 nt, Artificial Sequence
  Description of Artificial Sequence: Synthetic oligonucleotide
  Antisense strand to SEQ ID NO: 11870
aaacaucacuccaaaccuu

SEQ ID NO: 11872 - RNA, 19 nt, Artificial Sequence
  Description of Artificial Sequence: Synthetic oligonucleotide
  Sense strand starting at position 1236 of SEQ ID NO: 109
uggagugauguuugaggaa

SEQ ID NO: 11873 - RNA, 19 nt, Artificial Sequence
  Description of Artificial Sequence: Synthetic oligonucleotide
  Antisense strand to SEQ ID NO: 11872
uuccucaaacaucacucca

SEQ ID NO: 11874 - RNA, 19 nt, Artificial Sequence
  Description of Artificial Sequence: Synthetic oligonucleotide
  Sense strand starting at position 1256 of SEQ ID NO: 109
agcagugcuggugagagau

SEQ ID NO: 11875 - RNA, 19 nt, Artificial Sequence
  Description of Artificial Sequence: Synthetic oligonucleotide
  Antisense strand to SEQ ID NO: 11874
aucucucaccagcacugcu

SEQ ID NO: 11876 - RNA, 19 nt, Artificial Sequence
  Description of Artificial Sequence: Synthetic oligonucleotide
  Sense strand starting at position 1718 of SEQ ID NO: 109
gcuuccuugcaagacuaga

SEQ ID NO: 11877 - RNA, 19 nt, Artificial Sequence
  Description of Artificial Sequence: Synthetic oligonucleotide
  Antisense strand to SEQ ID NO: 11876
ucuagucuugcaaggaagc

SEQ ID NO: 11878 - RNA, 19 nt, Artificial Sequence
  Description of Artificial Sequence: Synthetic oligonucleotide
  Sense strand starting at position 1771 of SEQ ID NO: 109
gaugcauugagacgggacu

SEQ ID NO: 11879 - RNA, 19 nt, Artificial Sequence
  Description of Artificial Sequence: Synthetic oligonucleotide
  Antisense strand to SEQ ID NO: 11878
agucccgucucaaugcauc

SEQ ID NO: 11880 - RNA, 19 nt, Artificial Sequence
  Description of Artificial Sequence: Synthetic oligonucleotide
  Sense strand starting at position 1773 of SEQ ID NO: 109
ugcauugagacgggacuaa

SEQ ID NO: 11881 - RNA, 19 nt, Artificial Sequence
  Description of Artificial Sequence: Synthetic oligonucleotide
  Antisense strand to SEQ ID NO: 11880
uuagucccgucucaaugca

SEQ ID NO: 11882 - RNA, 19 nt, Artificial Sequence
  Description of Artificial Sequence: Synthetic oligonucleotide
  Sense strand starting at position 1792 of SEQ ID NO: 109
agacuucugucaccacaga

SEQ ID NO: 11883 - RNA, 19 nt, Artificial Sequence
  Description of Artificial Sequence: Synthetic oligonucleotide
  Antisense strand to SEQ ID NO: 11882
ucuguggugacagaagucu

SEQ ID NO: 11884 - RNA, 19 nt, Artificial Sequence
  Description of Artificial Sequence: Synthetic oligonucleotide
  Sense strand starting at position 1978 of SEQ ID NO: 109
gcaagagacagcugucaaa

SEQ ID NO: 11885 - RNA, 19 nt, Artificial Sequence
  Description of Artificial Sequence: Synthetic oligonucleotide
  Antisense strand to SEQ ID NO: 11884
uuugacagcugucucuugc

SEQ ID NO: 11886 - RNA, 19 nt, Artificial Sequence
  Description of Artificial Sequence: Synthetic oligonucleotide
  Sense strand starting at position 2498 of SEQ ID NO: 109
aagagagcaguucggaaau

SEQ ID NO: 11887 - RNA, 19 nt, Artificial Sequence
  Description of Artificial Sequence: Synthetic oligonucleotide
  Antisense strand to SEQ ID NO: 11886
auuuccgaacugcucucuu

SEQ ID NO: 11888 - RNA, 19 nt, Artificial Sequence
  Description of Artificial Sequence: Synthetic oligonucleotide
  Sense strand starting at position 2526 of SEQ ID NO: 109
uaguguuaagcagagcaga

SEQ ID NO: 11889 - RNA, 19 nt, Artificial Sequence
  Description of Artificial Sequence: Synthetic oligonucleotide
  Antisense strand to SEQ ID NO: 11888
ucugcucugcuuaacacua

SEQ ID NO: 11890 - RNA, 19 nt, Artificial Sequence
  Description of Artificial Sequence: Synthetic oligonucleotide
  Sense strand starting at position 2628 of SEQ ID NO: 109
cugagacagugucucuaau

SEQ ID NO: 11891 - RNA, 19 nt, Artificial Sequence
  Description of Artificial Sequence: Synthetic oligonucleotide
  Antisense strand to SEQ ID NO: 11890
auuagagacacugucucag

SEQ ID NO: 11892 - RNA, 19 nt, Artificial Sequence
  Description of Artificial Sequence: Synthetic oligonucleotide
  Sense strand starting at position 2630 of SEQ ID NO: 109
gagacagugucucuaaucu

SEQ ID NO: 11893 - RNA, 19 nt, Artificial Sequence
  Description of Artificial Sequence: Synthetic oligonucleotide
  Antisense strand to SEQ ID NO: 11892
agauuagagacacugucuc

SEQ ID NO: 11894 - RNA, 19 nt, Artificial Sequence
  Description of Artificial Sequence: Synthetic oligonucleotide
  Sense strand starting at position 2670 of SEQ ID NO: 109
gagugcauggcgcuaucau

SEQ ID NO: 11895 - RNA, 19 nt, Artificial Sequence
  Description of Artificial Sequence: Synthetic oligonucleotide
  Antisense strand to SEQ ID NO: 11894
augauagcgccaugcacuc

SEQ ID NO: 11896 - RNA, 19 nt, Artificial Sequence
  Description of Artificial Sequence: Synthetic oligonucleotide
  Sense strand starting at position 3091 of SEQ ID NO: 109
uugguaauucuugaacagu

SEQ ID NO: 11897 - RNA, 19 nt, Artificial Sequence
  Description of Artificial Sequence: Synthetic oligonucleotide
  Antisense strand to SEQ ID NO: 11896
acuguucaagaauuaccaa

SEQ ID NO: 11898 - RNA, 19 nt, Artificial Sequence
  Description of Artificial Sequence: Synthetic oligonucleotide
  Sense strand starting at position 3205 of SEQ ID NO: 109
caaaguucuuaagugguuu

SEQ ID NO: 11899 - RNA, 19 nt, Artificial Sequence
  Description of Artificial Sequence: Synthetic oligonucleotide
  Antisense strand to SEQ ID NO: 11898
aaaccacuuaagaacuuug

SEQ ID NO: 11900 - RNA, 19 nt, Artificial Sequence
  Description of Artificial Sequence: Synthetic oligonucleotide
  Sense strand starting at position 3209 of SEQ ID NO: 109
guucuuaagugguuuacaa

SEQ ID NO: 11901 - RNA, 19 nt, Artificial Sequence
  Description of Artificial Sequence: Synthetic oligonucleotide
  Antisense strand to SEQ ID NO: 11900
uuguaaaccacuuaagaac

SEQ ID NO: 11902 - RNA, 19 nt, Artificial Sequence
  Description of Artificial Sequence: Synthetic oligonucleotide
  Sense strand starting at position 3789 of SEQ ID NO: 109
ucauauauuugguagagau

SEQ ID NO: 11903 - RNA, 19 nt, Artificial Sequence
  Description of Artificial Sequence: Synthetic oligonucleotide
  Antisense strand to SEQ ID NO: 11902
aucucuaccaaauauauga

SEQ ID NO: 11904 - RNA, 19 nt, Artificial Sequence
  Description of Artificial Sequence: Synthetic oligonucleotide
  Sense strand starting at position 3918 of SEQ ID NO: 109
uuugcagcuggugauuaau

SEQ ID NO: 11905 - RNA, 19 nt, Artificial Sequence
  Description of Artificial Sequence: Synthetic oligonucleotide
  Antisense strand to SEQ ID NO: 11904
auuaaucaccagcugcaaa

SEQ ID NO: 11906 - RNA, 19 nt, Artificial Sequence
  Description of Artificial Sequence: Synthetic oligonucleotide
  Sense strand starting at position 3927 of SEQ ID NO: 109
ggugauuaauccucccaag

SEQ ID NO: 11907 - RNA, 19 nt, Artificial Sequence
  Description of Artificial Sequence: Synthetic oligonucleotide
  Antisense strand to SEQ ID NO: 11906
cuugggaggauuaaucacc

SEQ ID NO: 11908 - RNA, 19 nt, Artificial Sequence
  Description of Artificial Sequence: Synthetic oligonucleotide
  Sense strand starting at position 265 of SEQ ID NO: 110
aaggaaagcucuucgggau

SEQ ID NO: 11909 - RNA, 19 nt, Artificial Sequence
  Description of Artificial Sequence: Synthetic oligonucleotide
  Antisense strand to SEQ ID NO: 11908
aucccgaagagcuuuccuu

SEQ ID NO: 11910 - RNA, 19 nt, Artificial Sequence
  Description of Artificial Sequence: Synthetic oligonucleotide
  Sense strand starting at position 266 of SEQ ID NO: 110
aggaaagcucuucgggauc

SEQ ID NO: 11911 - RNA, 19 nt, Artificial Sequence
  Description of Artificial Sequence: Synthetic oligonucleotide
  Antisense strand to SEQ ID NO: 11910
gaucccgaagagcuuuccu

SEQ ID NO: 11912 - RNA, 19 nt, Artificial Sequence
  Description of Artificial Sequence: Synthetic oligonucleotide
  Sense strand starting at position 269 of SEQ ID NO: 110
aaagcucuucgggaucauu

SEQ ID NO: 11913 - RNA, 19 nt, Artificial Sequence
  Description of Artificial Sequence: Synthetic oligonucleotide
  Antisense strand to SEQ ID NO: 11912
aaugaucccgaagagcuuu

SEQ ID NO: 11914 - RNA, 19 nt, Artificial Sequence
  Description of Artificial Sequence: Synthetic oligonucleotide
  Sense strand starting at position 279 of SEQ ID NO: 110
gggaucauuucuuaagagu

SEQ ID NO: 11915 - RNA, 19 nt, Artificial Sequence
  Description of Artificial Sequence: Synthetic oligonucleotide
  Antisense strand to SEQ ID NO: 11914
acucuuaagaaaugauccc

SEQ ID NO: 11916 - RNA, 19 nt, Artificial Sequence
  Description of Artificial Sequence: Synthetic oligonucleotide
  Sense strand starting at position 327 of SEQ ID NO: 110
agagcacugccuuaggaua

SEQ ID NO: 11917 - RNA, 19 nt, Artificial Sequence
  Description of Artificial Sequence: Synthetic oligonucleotide
  Antisense strand to SEQ ID NO: 11916
uauccuaaggcagugcucu

SEQ ID NO: 11918 - RNA, 19 nt, Artificial Sequence
  Description of Artificial Sequence: Synthetic oligonucleotide
  Sense strand starting at position 378 of SEQ ID NO: 110
ggaugcuugcccuacucaa

SEQ ID NO: 11919 - RNA, 19 nt, Artificial Sequence
  Description of Artificial Sequence: Synthetic oligonucleotide
  Antisense strand to SEQ ID NO: 11918
uugaguagggcaagcaucc

SEQ ID NO: 11920 - RNA, 19 nt, Artificial Sequence
  Description of Artificial Sequence: Synthetic oligonucleotide
  Sense strand starting at position 598 of SEQ ID NO: 110
gggagcacucgguauacca

SEQ ID NO: 11921 - RNA, 19 nt, Artificial Sequence
  Description of Artificial Sequence: Synthetic oligonucleotide
  Antisense strand to SEQ ID NO: 11920
ugguauaccgagugcuccc

SEQ ID NO: 11922 - RNA, 19 nt, Artificial Sequence
  Description of Artificial Sequence: Synthetic oligonucleotide
  Sense strand starting at position 605 of SEQ ID NO: 110
cucgguauaccaggaacau

SEQ ID NO: 11923 - RNA, 19 nt, Artificial Sequence
  Description of Artificial Sequence: Synthetic oligonucleotide
  Antisense strand to SEQ ID NO: 11922
auguuccugguauaccgag

SEQ ID NO: 11924 - RNA, 19 nt, Artificial Sequence
  Description of Artificial Sequence: Synthetic oligonucleotide
  Sense strand starting at position 672 of SEQ ID NO: 110
aacugauuccgugagccau

SEQ ID NO: 11925 - RNA, 19 nt, Artificial Sequence
  Description of Artificial Sequence: Synthetic oligonucleotide
  Antisense strand to SEQ ID NO: 11924
auggcucacggaaucaguu

SEQ ID NO: 11926 - RNA, 19 nt, Artificial Sequence
  Description of Artificial Sequence: Synthetic oligonucleotide
  Sense strand starting at position 704 of SEQ ID NO: 110
gcaccaucucaaggaaaga

SEQ ID NO: 11927 - RNA, 19 nt, Artificial Sequence
  Description of Artificial Sequence: Synthetic oligonucleotide
  Antisense strand to SEQ ID NO: 11926
ucuuuccuugagauggugc

SEQ ID NO: 11928 - RNA, 19 nt, Artificial Sequence
  Description of Artificial Sequence: Synthetic oligonucleotide
  Sense strand starting at position 789 of SEQ ID NO: 110
ucaauucuagauugagcua

SEQ ID NO: 11929 - RNA, 19 nt, Artificial Sequence
  Description of Artificial Sequence: Synthetic oligonucleotide
  Antisense strand to SEQ ID NO: 11928
uagcucaaucuagaauuga

SEQ ID NO: 11930 - RNA, 19 nt, Artificial Sequence
  Description of Artificial Sequence: Synthetic oligonucleotide
  Sense strand starting at position 792 of SEQ ID NO: 110
auucuagauugagcuaaac

SEQ ID NO: 11931 - RNA, 19 nt, Artificial Sequence
  Description of Artificial Sequence: Synthetic oligonucleotide
  Antisense strand to SEQ ID NO: 11930
guuuagcucaaucuagaau

SEQ ID NO: 11932 - RNA, 19 nt, Artificial Sequence
  Description of Artificial Sequence: Synthetic oligonucleotide
  Sense strand starting at position 852 of SEQ ID NO: 110
auaaguaaaugcucaugaa

SEQ ID NO: 11933 - RNA, 19 nt, Artificial Sequence
  Description of Artificial Sequence: Synthetic oligonucleotide
  Antisense strand to SEQ ID NO: 11932
uucaugagcauuuacuuau

SEQ ID NO: 11934 - RNA, 19 nt, Artificial Sequence
  Description of Artificial Sequence: Synthetic oligonucleotide
  Sense strand starting at position 872 of SEQ ID NO: 110
ggaaccagaucagucauau

SEQ ID NO: 11935 - RNA, 19 nt, Artificial Sequence
  Description of Artificial Sequence: Synthetic oligonucleotide
  Antisense strand to SEQ ID NO: 11934
auaugacugaucugguucc

SEQ ID NO: 11936 - RNA, 19 nt, Artificial Sequence
  Description of Artificial Sequence: Synthetic oligonucleotide
  Sense strand starting at position 1054 of SEQ ID NO: 110
guuacuaauuaugugacuu

SEQ ID NO: 11937 - RNA, 19 nt, Artificial Sequence
  Description of Artificial Sequence: Synthetic oligonucleotide
  Antisense strand to SEQ ID NO: 11936
aagucacauaauuaguaac

SEQ ID NO: 11938 - RNA, 19 nt, Artificial Sequence
  Description of Artificial Sequence: Synthetic oligonucleotide
  Sense strand starting at position 1148 of SEQ ID NO: 110
auagaaugugauugcuuuc

SEQ ID NO: 11939 - RNA, 19 nt, Artificial Sequence
  Description of Artificial Sequence: Synthetic oligonucleotide
  Antisense strand to SEQ ID NO: 11938
gaaagcaaucacauucuau

SEQ ID NO: 11940 - RNA, 19 nt, Artificial Sequence
  Description of Artificial Sequence: Synthetic oligonucleotide
  Sense strand starting at position 1241 of SEQ ID NO: 110
acaaguaaaucagcaauga

SEQ ID NO: 11941 - RNA, 19 nt, Artificial Sequence
  Description of Artificial Sequence: Synthetic oligonucleotide
  Antisense strand to SEQ ID NO: 11940
ucauugcugauuuacuugu

SEQ ID NO: 11942 - RNA, 19 nt, Artificial Sequence
  Description of Artificial Sequence: Synthetic oligonucleotide
  Sense strand starting at position 1245 of SEQ ID NO: 110
guaaaucagcaaugacaga

SEQ ID NO: 11943 - RNA, 19 nt, Artificial Sequence
  Description of Artificial Sequence: Synthetic oligonucleotide
  Antisense strand to SEQ ID NO: 11942
ucugucauugcugauuuac

SEQ ID NO: 11944 - RNA, 19 nt, Artificial Sequence
  Description of Artificial Sequence: Synthetic oligonucleotide
  Sense strand starting at position 1288 of SEQ ID NO: 110
uagguagagugcuuugaaa

SEQ ID NO: 11945 - RNA, 19 nt, Artificial Sequence
  Description of Artificial Sequence: Synthetic oligonucleotide
  Antisense strand to SEQ ID NO: 11944
uuucaaagcacucuaccua

SEQ ID NO: 11946 - RNA, 19 nt, Artificial Sequence
  Description of Artificial Sequence: Synthetic oligonucleotide
  Sense strand starting at position 1338 of SEQ ID NO: 110
gguggcggucucagaaagu

SEQ ID NO: 11947 - RNA, 19 nt, Artificial Sequence
  Description of Artificial Sequence: Synthetic oligonucleotide
  Antisense strand to SEQ ID NO: 11946
acuuucugagaccgccacc

SEQ ID NO: 11948 - RNA, 19 nt, Artificial Sequence
  Description of Artificial Sequence: Synthetic oligonucleotide
  Sense strand starting at position 1368 of SEQ ID NO: 110
aggugaaaccucgauagug

SEQ ID NO: 11949 - RNA, 19 nt, Artificial Sequence
  Description of Artificial Sequence: Synthetic oligonucleotide
  Antisense strand to SEQ ID NO: 11948
cacuaucgagguuucaccu

SEQ ID NO: 11950 - RNA, 19 nt, Artificial Sequence
  Description of Artificial Sequence: Synthetic oligonucleotide
  Sense strand starting at position 1370 of SEQ ID NO: 110
gugaaaccucgauagugaa

SEQ ID NO: 11951 - RNA, 19 nt, Artificial Sequence
  Description of Artificial Sequence: Synthetic oligonucleotide
  Antisense strand to SEQ ID NO: 11950
uucacuaucgagguuucac

SEQ ID NO: 11952 - RNA, 19 nt, Artificial Sequence
  Description of Artificial Sequence: Synthetic oligonucleotide
  Sense strand starting at position 1549 of SEQ ID NO: 110
aaaguagucgcuuaaucaa

SEQ ID NO: 11953 - RNA, 19 nt, Artificial Sequence
  Description of Artificial Sequence: Synthetic oligonucleotide
  Antisense strand to SEQ ID NO: 11952
uugauuaagcgacuacuuu

SEQ ID NO: 11954 - RNA, 19 nt, Artificial Sequence
  Description of Artificial Sequence: Synthetic oligonucleotide
  Sense strand starting at position 1733 of SEQ ID NO: 110
gccugaauucccuagggac

SEQ ID NO: 11955 - RNA, 19 nt, Artificial Sequence
  Description of Artificial Sequence: Synthetic oligonucleotide
  Antisense strand to SEQ ID NO: 11954
gucccuagggaauucaggc

SEQ ID NO: 11956 - RNA, 19 nt, Artificial Sequence
  Description of Artificial Sequence: Synthetic oligonucleotide
  Sense strand starting at position 1796 of SEQ ID NO: 110
cgcaaagcucuggacagaa

SEQ ID NO: 11957 - RNA, 19 nt, Artificial Sequence
  Description of Artificial Sequence: Synthetic oligonucleotide
  Antisense strand to SEQ ID NO: 11956
uucuguccagagcuuugcg

SEQ ID NO: 11958 - RNA, 19 nt, Artificial Sequence
  Description of Artificial Sequence: Synthetic oligonucleotide
  Sense strand starting at position 1874 of SEQ ID NO: 110
gagggaagauguccgucua

SEQ ID NO: 11959 - RNA, 19 nt, Artificial Sequence
  Description of Artificial Sequence: Synthetic oligonucleotide
  Antisense strand to SEQ ID NO: 11958
uagacggacaucuucccuc

SEQ ID NO: 11960 - RNA, 19 nt, Artificial Sequence
  Description of Artificial Sequence: Synthetic oligonucleotide
  Sense strand starting at position 2252 of SEQ ID NO: 110
gaaauaugagguugcauuc

SEQ ID NO: 11961 - RNA, 19 nt, Artificial Sequence
  Description of Artificial Sequence: Synthetic oligonucleotide
  Antisense strand to SEQ ID NO: 11960
gaaugcaaccucauauuuc

SEQ ID NO: 11962 - RNA, 19 nt, Artificial Sequence
  Description of Artificial Sequence: Synthetic oligonucleotide
  Sense strand starting at position 2315 of SEQ ID NO: 110
cuaguuauuggauaucuuu

SEQ ID NO: 11963 - RNA, 19 nt, Artificial Sequence
  Description of Artificial Sequence: Synthetic oligonucleotide
  Antisense strand to SEQ ID NO: 11962
aaagauauccaauaacuag

SEQ ID NO: 11964 - RNA, 19 nt, Artificial Sequence
  Description of Artificial Sequence: Synthetic oligonucleotide
  Sense strand starting at position 2323 of SEQ ID NO: 110
uggauaucuuucucccaug

SEQ ID NO: 11965 - RNA, 19 nt, Artificial Sequence
  Description of Artificial Sequence: Synthetic oligonucleotide
  Antisense strand to SEQ ID NO: 11964
caugggagaaagauaucca

SEQ ID NO: 11966 - RNA, 19 nt, Artificial Sequence
  Description of Artificial Sequence: Synthetic oligonucleotide
  Sense strand starting at position 2410 of SEQ ID NO: 110
agaagaaacuuggagacua

SEQ ID NO: 11967 - RNA, 19 nt, Artificial Sequence
  Description of Artificial Sequence: Synthetic oligonucleotide
  Antisense strand to SEQ ID NO: 11966
uagucuccaaguuucuucu

SEQ ID NO: 11968 - RNA, 19 nt, Artificial Sequence
  Description of Artificial Sequence: Synthetic oligonucleotide
  Sense strand starting at position 2689 of SEQ ID NO: 110
ucugaacaucugugcugaa

SEQ ID NO: 11969 - RNA, 19 nt, Artificial Sequence
  Description of Artificial Sequence: Synthetic oligonucleotide
  Antisense strand to SEQ ID NO: 11968
uucagcacagauguucaga

SEQ ID NO: 11970 - RNA, 19 nt, Artificial Sequence
  Description of Artificial Sequence: Synthetic oligonucleotide
  Sense strand starting at position 2907 of SEQ ID NO: 110
gcacucuccgaauagauag

SEQ ID NO: 11971 - RNA, 19 nt, Artificial Sequence
  Description of Artificial Sequence: Synthetic oligonucleotide
  Antisense strand to SEQ ID NO: 11970
cuaucuauucggagagugc

SEQ ID NO: 11972 - RNA, 19 nt, Artificial Sequence
  Description of Artificial Sequence: Synthetic oligonucleotide
  Sense strand starting at position 2931 of SEQ ID NO: 110
aucugaaacugguuaucag

SEQ ID NO: 11973 - RNA, 19 nt, Artificial Sequence
  Description of Artificial Sequence: Synthetic oligonucleotide
  Antisense strand to SEQ ID NO: 11972
cugauaaccaguuucagau

SEQ ID NO: 11974 - RNA, 19 nt, Artificial Sequence
  Description of Artificial Sequence: Synthetic oligonucleotide
  Sense strand starting at position 2957 of SEQ ID NO: 110
cccauaagagcucaggagu

SEQ ID NO: 11975 - RNA, 19 nt, Artificial Sequence
  Description of Artificial Sequence: Synthetic oligonucleotide
  Antisense strand to SEQ ID NO: 11974
acuccugagcucuuauggg

SEQ ID NO: 11976 - RNA, 19 nt, Artificial Sequence
  Description of Artificial Sequence: Synthetic oligonucleotide
  Sense strand starting at position 3367 of SEQ ID NO: 110
cccagaugucuguagcaug

SEQ ID NO: 11977 - RNA, 19 nt, Artificial Sequence
  Description of Artificial Sequence: Synthetic oligonucleotide
  Antisense strand to SEQ ID NO: 11976
caugcuacagacaucuggg

SEQ ID NO: 11978 - RNA, 19 nt, Artificial Sequence
  Description of Artificial Sequence: Synthetic oligonucleotide
  Sense strand starting at position 3472 of SEQ ID NO: 110
ggugagugggcucaaggau

SEQ ID NO: 11979 - RNA, 19 nt, Artificial Sequence
  Description of Artificial Sequence: Synthetic oligonucleotide
  Antisense strand to SEQ ID NO: 11978
auccuugagcccacucacc

SEQ ID NO: 11980 - RNA, 19 nt, Artificial Sequence
  Description of Artificial Sequence: Synthetic oligonucleotide
  Sense strand starting at position 3530 of SEQ ID NO: 110
ugaccuucuuggguacauu

SEQ ID NO: 11981 - RNA, 19 nt, Artificial Sequence
  Description of Artificial Sequence: Synthetic oligonucleotide
  Antisense strand to SEQ ID NO: 11980
aauguacccaagaagguca

SEQ ID NO: 11982 - RNA, 19 nt, Artificial Sequence
  Description of Artificial Sequence: Synthetic oligonucleotide
  Sense strand starting at position 3560 of SEQ ID NO: 110
agaagaaugccucaagugu

SEQ ID NO: 11983 - RNA, 19 nt, Artificial Sequence
  Description of Artificial Sequence: Synthetic oligonucleotide
  Antisense strand to SEQ ID NO: 11982
acacuugaggcauucuucu

SEQ ID NO: 11984 - RNA, 19 nt, Artificial Sequence
  Description of Artificial Sequence: Synthetic oligonucleotide
  Sense strand starting at position 3573 of SEQ ID NO: 110
aagugucaugcauagaacu

SEQ ID NO: 11985 - RNA, 19 nt, Artificial Sequence
  Description of Artificial Sequence: Synthetic oligonucleotide
  Antisense strand to SEQ ID NO: 11984
aguucuaugcaugacacuu

SEQ ID NO: 11986 - RNA, 19 nt, Artificial Sequence
  Description of Artificial Sequence: Synthetic oligonucleotide
  Sense strand starting at position 3686 of SEQ ID NO: 110
gacgcaagacccuagaagu

SEQ ID NO: 11987 - RNA, 19 nt, Artificial Sequence
  Description of Artificial Sequence: Synthetic oligonucleotide
  Antisense strand to SEQ ID NO: 11986
acuucuagggucuugcguc

SEQ ID NO: 11988 - RNA, 19 nt, Artificial Sequence
  Description of Artificial Sequence: Synthetic oligonucleotide
  Sense strand starting at position 93 of SEQ ID NO: 111
gcaccucaauguccuagaa

SEQ ID NO: 11989 - RNA, 19 nt, Artificial Sequence
  Description of Artificial Sequence: Synthetic oligonucleotide
  Antisense strand to SEQ ID NO: 11988
uucuaggacauugaggugc

SEQ ID NO: 11990 - RNA, 19 nt, Artificial Sequence
  Description of Artificial Sequence: Synthetic oligonucleotide
  Sense strand starting at position 95 of SEQ ID NO: 111
accucaauguccuagaaga

SEQ ID NO: 11991 - RNA, 19 nt, Artificial Sequence
  Description of Artificial Sequence: Synthetic oligonucleotide
  Antisense strand to SEQ ID NO: 11990
ucuucuaggacauugaggu

SEQ ID NO: 11992 - RNA, 19 nt, Artificial Sequence
  Description of Artificial Sequence: Synthetic oligonucleotide
  Sense strand starting at position 1678 of SEQ ID NO: 111
ggcucuguuacccaaggga

SEQ ID NO: 11993 - RNA, 19 nt, Artificial Sequence
  Description of Artificial Sequence: Synthetic oligonucleotide
  Antisense strand to SEQ ID NO: 11992
ucccuuggguaacagagcc

SEQ ID NO: 11994 - RNA, 19 nt, Artificial Sequence
  Description of Artificial Sequence: Synthetic oligonucleotide
  Sense strand starting at position 1905 of SEQ ID NO: 111
gcuguuuacucagccacuu

SEQ ID NO: 11995 - RNA, 19 nt, Artificial Sequence
  Description of Artificial Sequence: Synthetic oligonucleotide
  Antisense strand to SEQ ID NO: 11994
aaguggcugaguaaacagc

SEQ ID NO: 11996 - RNA, 19 nt, Artificial Sequence
  Description of Artificial Sequence: Synthetic oligonucleotide
  Sense strand starting at position 2051 of SEQ ID NO: 111
caugcuuguggacgaaagu

SEQ ID NO: 11997 - RNA, 19 nt, Artificial Sequence
  Description of Artificial Sequence: Synthetic oligonucleotide
  Antisense strand to SEQ ID NO: 11996
acuuucguccacaagcaug

SEQ ID NO: 11998 - RNA, 19 nt, Artificial Sequence
  Description of Artificial Sequence: Synthetic oligonucleotide
  Sense strand starting at position 2052 of SEQ ID NO: 111
augcuuguggacgaaaguu

SEQ ID NO: 11999 - RNA, 19 nt, Artificial Sequence
  Description of Artificial Sequence: Synthetic oligonucleotide
  Antisense strand to SEQ ID NO: 11998
aacuuucguccacaagcau

SEQ ID NO: 12000 - RNA, 19 nt, Artificial Sequence
  Description of Artificial Sequence: Synthetic oligonucleotide
  Sense strand starting at position 2064 of SEQ ID NO: 111
gaaaguugcucagacgcca

SEQ ID NO: 12001 - RNA, 19 nt, Artificial Sequence
  Description of Artificial Sequence: Synthetic oligonucleotide
  Antisense strand to SEQ ID NO: 12000
uggcgucugagcaacuuuc

SEQ ID NO: 12002 - RNA, 19 nt, Artificial Sequence
  Description of Artificial Sequence: Synthetic oligonucleotide
  Sense strand starting at position 2272 of SEQ ID NO: 111
uggccuuccuuucuguaaa

SEQ ID NO: 12003 - RNA, 19 nt, Artificial Sequence
  Description of Artificial Sequence: Synthetic oligonucleotide
  Antisense strand to SEQ ID NO: 12002
uuuacagaaaggaaggcca

SEQ ID NO: 12004 - RNA, 19 nt, Artificial Sequence
  Description of Artificial Sequence: Synthetic oligonucleotide
  Sense strand starting at position 2273 of SEQ ID NO: 111
ggccuuccuuucuguaaau

SEQ ID NO: 12005 - RNA, 19 nt, Artificial Sequence
  Description of Artificial Sequence: Synthetic oligonucleotide
  Antisense strand to SEQ ID NO: 12004
auuuacagaaaggaaggcc

SEQ ID NO: 12006 - RNA, 19 nt, Artificial Sequence
  Description of Artificial Sequence: Synthetic oligonucleotide
  Sense strand starting at position 2686 of SEQ ID NO: 111
gguaaugagggcuacccau

SEQ ID NO: 12007 - RNA, 19 nt, Artificial Sequence
  Description of Artificial Sequence: Synthetic oligonucleotide
  Antisense strand to SEQ ID NO: 12006
auggguagcccucauuacc

SEQ ID NO: 12008 - RNA, 19 nt, Artificial Sequence
  Description of Artificial Sequence: Synthetic oligonucleotide
  Sense strand starting at position 2949 of SEQ ID NO: 111
uuuaguuuguucuuagcau

SEQ ID NO: 12009 - RNA, 19 nt, Artificial Sequence
  Description of Artificial Sequence: Synthetic oligonucleotide
  Antisense strand to SEQ ID NO: 12008
augcuaagaacaaacuaaa

SEQ ID NO: 12010 - RNA, 19 nt, Artificial Sequence
  Description of Artificial Sequence: Synthetic oligonucleotide
  Sense strand starting at position 2950 of SEQ ID NO: 111
uuaguuuguucuuagcauu

SEQ ID NO: 12011 - RNA, 19 nt, Artificial Sequence
  Description of Artificial Sequence: Synthetic oligonucleotide
  Antisense strand to SEQ ID NO: 12010
aaugcuaagaacaaacuaa

SEQ ID NO: 12012 - RNA, 19 nt, Artificial Sequence
  Description of Artificial Sequence: Synthetic oligonucleotide
  Sense strand starting at position 2953 of SEQ ID NO: 111
guuuguucuuagcauuuau

SEQ ID NO: 12013 - RNA, 19 nt, Artificial Sequence
  Description of Artificial Sequence: Synthetic oligonucleotide
  Antisense strand to SEQ ID NO: 12012
auaaaugcuaagaacaaac

SEQ ID NO: 12014 - RNA, 19 nt, Artificial Sequence
  Description of Artificial Sequence: Synthetic oligonucleotide
  Sense strand starting at position 2980 of SEQ ID NO: 111
gaaaguaucuauguguuua

SEQ ID NO: 12015 - RNA, 19 nt, Artificial Sequence
  Description of Artificial Sequence: Synthetic oligonucleotide
  Antisense strand to SEQ ID NO: 12014
uaaacacauagauacuuuc

SEQ ID NO: 12016 - RNA, 19 nt, Artificial Sequence
  Description of Artificial Sequence: Synthetic oligonucleotide
  Sense strand starting at position 3026 of SEQ ID NO: 111
aggaaagcuccguaaggcu

SEQ ID NO: 12017 - RNA, 19 nt, Artificial Sequence
  Description of Artificial Sequence: Synthetic oligonucleotide
  Antisense strand to SEQ ID NO: 12016
agccuuacggagcuuuccu

SEQ ID NO: 12018 - RNA, 19 nt, Artificial Sequence
  Description of Artificial Sequence: Synthetic oligonucleotide
  Sense strand starting at position 3080 of SEQ ID NO: 111
uggaaagucccguacucau

SEQ ID NO: 12019 - RNA, 19 nt, Artificial Sequence
  Description of Artificial Sequence: Synthetic oligonucleotide
  Antisense strand to SEQ ID NO: 12018
augaguacgggacuuucca

SEQ ID NO: 12020 - RNA, 19 nt, Artificial Sequence
  Description of Artificial Sequence: Synthetic oligonucleotide
  Sense strand starting at position 3316 of SEQ ID NO: 111
uggagugauucugcagaga

SEQ ID NO: 12021 - RNA, 19 nt, Artificial Sequence
  Description of Artificial Sequence: Synthetic oligonucleotide
  Antisense strand to SEQ ID NO: 12020
ucucugcagaaucacucca

SEQ ID NO: 12022 - RNA, 19 nt, Artificial Sequence
  Description of Artificial Sequence: Synthetic oligonucleotide
  Sense strand starting at position 3319 of SEQ ID NO: 111
agugauucugcagagacgu

SEQ ID NO: 12023 - RNA, 19 nt, Artificial Sequence
  Description of Artificial Sequence: Synthetic oligonucleotide
  Antisense strand to SEQ ID NO: 12022
acgucucugcagaaucacu

SEQ ID NO: 12024 - RNA, 19 nt, Artificial Sequence
  Description of Artificial Sequence: Synthetic oligonucleotide
  Sense strand starting at position 3549 of SEQ ID NO: 111
augugcugauuauaauaca

SEQ ID NO: 12025 - RNA, 19 nt, Artificial Sequence
  Description of Artificial Sequence: Synthetic oligonucleotide
  Antisense strand to SEQ ID NO: 12024
uguauuauaaucagcacau

SEQ ID NO: 12026 - RNA, 19 nt, Artificial Sequence
  Description of Artificial Sequence: Synthetic oligonucleotide
  Sense strand starting at position 3560 of SEQ ID NO: 111
auaauacauuagcaugaga

SEQ ID NO: 12027 - RNA, 19 nt, Artificial Sequence
  Description of Artificial Sequence: Synthetic oligonucleotide
  Antisense strand to SEQ ID NO: 12026
ucucaugcuaauguauuau

SEQ ID NO: 12028 - RNA, 19 nt, Artificial Sequence
  Description of Artificial Sequence: Synthetic oligonucleotide
  Sense strand starting at position 3623 of SEQ ID NO: 111
ccgggaaguuacccuagau

SEQ ID NO: 12029 - RNA, 19 nt, Artificial Sequence
  Description of Artificial Sequence: Synthetic oligonucleotide
  Antisense strand to SEQ ID NO: 12028
aucuaggguaacuucccgg

SEQ ID NO: 12030 - RNA, 19 nt, Artificial Sequence
  Description of Artificial Sequence: Synthetic oligonucleotide
  Sense strand starting at position 3660 of SEQ ID NO: 111
acccucacuuccgggaauu

SEQ ID NO: 12031 - RNA, 19 nt, Artificial Sequence
  Description of Artificial Sequence: Synthetic oligonucleotide
  Antisense strand to SEQ ID NO: 12030
aauucccggaagugagggu

SEQ ID NO: 12032 - RNA, 19 nt, Artificial Sequence
  Description of Artificial Sequence: Synthetic oligonucleotide
  Sense strand starting at position 3717 of SEQ ID NO: 111
ccauguuuaguacauauca

SEQ ID NO: 12033 - RNA, 19 nt, Artificial Sequence
  Description of Artificial Sequence: Synthetic oligonucleotide
  Antisense strand to SEQ ID NO: 12032
ugauauguacuaaacaugg

SEQ ID NO: 12034 - RNA, 19 nt, Artificial Sequence
  Description of Artificial Sequence: Synthetic oligonucleotide
  Sense strand starting at position 3748 of SEQ ID NO: 111
aaguguucucgucggagua

SEQ ID NO: 12035 - RNA, 19 nt, Artificial Sequence
  Description of Artificial Sequence: Synthetic oligonucleotide
  Antisense strand to SEQ ID NO: 12034
uacuccgacgagaacacuu

SEQ ID NO: 12036 - RNA, 19 nt, Artificial Sequence
  Description of Artificial Sequence: Synthetic oligonucleotide
  Sense strand starting at position 3749 of SEQ ID NO: 111
aguguucucgucggaguag

SEQ ID NO: 12037 - RNA, 19 nt, Artificial Sequence
  Description of Artificial Sequence: Synthetic oligonucleotide
  Antisense strand to SEQ ID NO: 12036
cuacuccgacgagaacacu

SEQ ID NO: 12038 - RNA, 19 nt, Artificial Sequence
  Description of Artificial Sequence: Synthetic oligonucleotide
  Sense strand starting at position 3836 of SEQ ID NO: 111
ucaguuuacuccguggacu

SEQ ID NO: 12039 - RNA, 19 nt, Artificial Sequence
  Description of Artificial Sequence: Synthetic oligonucleotide
  Antisense strand to SEQ ID NO: 12038
aguccacggaguaaacuga

SEQ ID NO: 12040 - RNA, 19 nt, Artificial Sequence
  Description of Artificial Sequence: Synthetic oligonucleotide
  Sense strand starting at position 3857 of SEQ ID NO: 111
cccgaauucuuccuugugu

SEQ ID NO: 12041 - RNA, 19 nt, Artificial Sequence
  Description of Artificial Sequence: Synthetic oligonucleotide
  Antisense strand to SEQ ID NO: 12040
acacaaggaagaauucggg

SEQ ID NO: 12042 - RNA, 19 nt, Artificial Sequence
  Description of Artificial Sequence: Synthetic oligonucleotide
  Sense strand starting at position 3945 of SEQ ID NO: 111
guagcaguucagcaguguu

SEQ ID NO: 12043 - RNA, 19 nt, Artificial Sequence
  Description of Artificial Sequence: Synthetic oligonucleotide
  Antisense strand to SEQ ID NO: 12042
aacacugcugaacugcuac

SEQ ID NO: 12044 - RNA, 19 nt, Artificial Sequence
  Description of Artificial Sequence: Synthetic oligonucleotide
  Sense strand starting at position 107 of SEQ ID NO: 113
gcuugugagagacagcuuu

SEQ ID NO: 12045 - RNA, 19 nt, Artificial Sequence
  Description of Artificial Sequence: Synthetic oligonucleotide
  Antisense strand to SEQ ID NO: 12044
aaagcugucucucacaagc

SEQ ID NO: 12046 - RNA, 19 nt, Artificial Sequence
  Description of Artificial Sequence: Synthetic oligonucleotide
  Sense strand starting at position 156 of SEQ ID NO: 113
uccugaagccucuaagaau

SEQ ID NO: 12047 - RNA, 19 nt, Artificial Sequence
  Description of Artificial Sequence: Synthetic oligonucleotide
  Antisense strand to SEQ ID NO: 12046
auucuuagaggcuucagga

SEQ ID NO: 12048 - RNA, 19 nt, Artificial Sequence
  Description of Artificial Sequence: Synthetic oligonucleotide
  Sense strand starting at position 189 of SEQ ID NO: 113
ucaaguuaucuccgggaug

SEQ ID NO: 12049 - RNA, 19 nt, Artificial Sequence
  Description of Artificial Sequence: Synthetic oligonucleotide
  Antisense strand to SEQ ID NO: 12048
caucccggagauaacuuga

SEQ ID NO: 12050 - RNA, 19 nt, Artificial Sequence
  Description of Artificial Sequence: Synthetic oligonucleotide
  Sense strand starting at position 191 of SEQ ID NO: 113
aaguuaucuccgggaugac

SEQ ID NO: 12051 - RNA, 19 nt, Artificial Sequence
  Description of Artificial Sequence: Synthetic oligonucleotide
  Antisense strand to SEQ ID NO: 12050
gucaucccggagauaacuu

SEQ ID NO: 12052 - RNA, 19 nt, Artificial Sequence
  Description of Artificial Sequence: Synthetic oligonucleotide
  Sense strand starting at position 201 of SEQ ID NO: 113
cgggaugacccugauagca

SEQ ID NO: 12053 - RNA, 19 nt, Artificial Sequence
  Description of Artificial Sequence: Synthetic oligonucleotide
  Antisense strand to SEQ ID NO: 12052
ugcuaucagggucaucccg

SEQ ID NO: 12054 - RNA, 19 nt, Artificial Sequence
  Description of Artificial Sequence: Synthetic oligonucleotide
  Sense strand starting at position 735 of SEQ ID NO: 113
gagagcgcaucauuuaguu

SEQ ID NO: 12055 - RNA, 19 nt, Artificial Sequence
  Description of Artificial Sequence: Synthetic oligonucleotide
  Antisense strand to SEQ ID NO: 12054
aacuaaaugaugcgcucuc

SEQ ID NO: 12056 - RNA, 19 nt, Artificial Sequence
  Description of Artificial Sequence: Synthetic oligonucleotide
  Sense strand starting at position 765 of SEQ ID NO: 113
aucuuuaaagcacgaaacu

SEQ ID NO: 12057 - RNA, 19 nt, Artificial Sequence
  Description of Artificial Sequence: Synthetic oligonucleotide
  Antisense strand to SEQ ID NO: 12056
aguuucgugcuuuaaagau

SEQ ID NO: 12058 - RNA, 19 nt, Artificial Sequence
  Description of Artificial Sequence: Synthetic oligonucleotide
  Sense strand starting at position 766 of SEQ ID NO: 113
ucuuuaaagcacgaaacua

SEQ ID NO: 12059 - RNA, 19 nt, Artificial Sequence
  Description of Artificial Sequence: Synthetic oligonucleotide
  Antisense strand to SEQ ID NO: 12058
uaguuucgugcuuuaaaga

SEQ ID NO: 12060 - RNA, 19 nt, Artificial Sequence
  Description of Artificial Sequence: Synthetic oligonucleotide
  Sense strand starting at position 812 of SEQ ID NO: 113
aaccgucuccagggaucaa

SEQ ID NO: 12061 - RNA, 19 nt, Artificial Sequence
  Description of Artificial Sequence: Synthetic oligonucleotide
  Antisense strand to SEQ ID NO: 12060
uugaucccuggagacgguu

SEQ ID NO: 12062 - RNA, 19 nt, Artificial Sequence
  Description of Artificial Sequence: Synthetic oligonucleotide
  Sense strand starting at position 813 of SEQ ID NO: 113
accgucuccagggaucaaa

SEQ ID NO: 12063 - RNA, 19 nt, Artificial Sequence
  Description of Artificial Sequence: Synthetic oligonucleotide
  Antisense strand to SEQ ID NO: 12062
uuugaucccuggagacggu

SEQ ID NO: 12064 - RNA, 19 nt, Artificial Sequence
  Description of Artificial Sequence: Synthetic oligonucleotide
  Sense strand starting at position 1585 of SEQ ID NO: 113
gggaucuguuccuuaacuc

SEQ ID NO: 12065 - RNA, 19 nt, Artificial Sequence
  Description of Artificial Sequence: Synthetic oligonucleotide
  Antisense strand to SEQ ID NO: 12064
gaguuaaggaacagauccc

SEQ ID NO: 12066 - RNA, 19 nt, Artificial Sequence
  Description of Artificial Sequence: Synthetic oligonucleotide
  Sense strand starting at position 1592 of SEQ ID NO: 113
guuccuuaacuccagguua

SEQ ID NO: 12067 - RNA, 19 nt, Artificial Sequence
  Description of Artificial Sequence: Synthetic oligonucleotide
  Antisense strand to SEQ ID NO: 12066
uaaccuggaguuaaggaac

SEQ ID NO: 12068 - RNA, 19 nt, Artificial Sequence
  Description of Artificial Sequence: Synthetic oligonucleotide
  Sense strand starting at position 1795 of SEQ ID NO: 113
gcaaauggaguccaagagu

SEQ ID NO: 12069 - RNA, 19 nt, Artificial Sequence
  Description of Artificial Sequence: Synthetic oligonucleotide
  Antisense strand to SEQ ID NO: 12068
acucuuggacuccauuugc

SEQ ID NO: 12070 - RNA, 19 nt, Artificial Sequence
  Description of Artificial Sequence: Synthetic oligonucleotide
  Sense strand starting at position 2052 of SEQ ID NO: 113
gggcuagguaaaggucuau

SEQ ID NO: 12071 - RNA, 19 nt, Artificial Sequence
  Description of Artificial Sequence: Synthetic oligonucleotide
  Antisense strand to SEQ ID NO: 12070
auagaccuuuaccuagccc

SEQ ID NO: 12072 - RNA, 19 nt, Artificial Sequence
  Description of Artificial Sequence: Synthetic oligonucleotide
  Sense strand starting at position 2056 of SEQ ID NO: 113
uagguaaaggucuaucagu

SEQ ID NO: 12073 - RNA, 19 nt, Artificial Sequence
  Description of Artificial Sequence: Synthetic oligonucleotide
  Antisense strand to SEQ ID NO: 12072
acugauagaccuuuaccua

SEQ ID NO: 12074 - RNA, 19 nt, Artificial Sequence
  Description of Artificial Sequence: Synthetic oligonucleotide
  Sense strand starting at position 2092 of SEQ ID NO: 113
accagaaauuccguaccua

SEQ ID NO: 12075 - RNA, 19 nt, Artificial Sequence
  Description of Artificial Sequence: Synthetic oligonucleotide
  Antisense strand to SEQ ID NO: 12074
uagguacggaauuucuggu

SEQ ID NO: 12076 - RNA, 19 nt, Artificial Sequence
  Description of Artificial Sequence: Synthetic oligonucleotide
  Sense strand starting at position 2093 of SEQ ID NO: 113
ccagaaauuccguaccuau

SEQ ID NO: 12077 - RNA, 19 nt, Artificial Sequence
  Description of Artificial Sequence: Synthetic oligonucleotide
  Antisense strand to SEQ ID NO: 12076
auagguacggaauuucugg

SEQ ID NO: 12078 - RNA, 19 nt, Artificial Sequence
  Description of Artificial Sequence: Synthetic oligonucleotide
  Sense strand starting at position 2106 of SEQ ID NO: 113
accuauuggcuacgaucaa

SEQ ID NO: 12079 - RNA, 19 nt, Artificial Sequence
  Description of Artificial Sequence: Synthetic oligonucleotide
  Antisense strand to SEQ ID NO: 12078
uugaucguagccaauaggu

SEQ ID NO: 12080 - RNA, 19 nt, Artificial Sequence
  Description of Artificial Sequence: Synthetic oligonucleotide
  Sense strand starting at position 2156 of SEQ ID NO: 113
guguacgucccggagaaau

SEQ ID NO: 12081 - RNA, 19 nt, Artificial Sequence
  Description of Artificial Sequence: Synthetic oligonucleotide
  Antisense strand to SEQ ID NO: 12080
auuucuccgggacguacac

SEQ ID NO: 12082 - RNA, 19 nt, Artificial Sequence
  Description of Artificial Sequence: Synthetic oligonucleotide
  Sense strand starting at position 2158 of SEQ ID NO: 113
guacgucccggagaaauga

SEQ ID NO: 12083 - RNA, 19 nt, Artificial Sequence
  Description of Artificial Sequence: Synthetic oligonucleotide
  Antisense strand to SEQ ID NO: 12082
ucauuucuccgggacguac

SEQ ID NO: 12084 - RNA, 19 nt, Artificial Sequence
  Description of Artificial Sequence: Synthetic oligonucleotide
  Sense strand starting at position 2241 of SEQ ID NO: 113
gacaguuucguugucuguu

SEQ ID NO: 12085 - RNA, 19 nt, Artificial Sequence
  Description of Artificial Sequence: Synthetic oligonucleotide
  Antisense strand to SEQ ID NO: 12084
aacagacaacgaaacuguc

SEQ ID NO: 12086 - RNA, 19 nt, Artificial Sequence
  Description of Artificial Sequence: Synthetic oligonucleotide
  Sense strand starting at position 2335 of SEQ ID NO: 113
acuugcgauacugagaauu

SEQ ID NO: 12087 - RNA, 19 nt, Artificial Sequence
  Description of Artificial Sequence: Synthetic oligonucleotide
  Antisense strand to SEQ ID NO: 12086
aauucucaguaucgcaagu

SEQ ID NO: 12088 - RNA, 19 nt, Artificial Sequence
  Description of Artificial Sequence: Synthetic oligonucleotide
  Sense strand starting at position 2474 of SEQ ID NO: 113
gggucaggcucuucacaga

SEQ ID NO: 12089 - RNA, 19 nt, Artificial Sequence
  Description of Artificial Sequence: Synthetic oligonucleotide
  Antisense strand to SEQ ID NO: 12088
ucugugaagagccugaccc

SEQ ID NO: 12090 - RNA, 19 nt, Artificial Sequence
  Description of Artificial Sequence: Synthetic oligonucleotide
  Sense strand starting at position 2531 of SEQ ID NO: 113
uaaagaugguagguuaaca

SEQ ID NO: 12091 - RNA, 19 nt, Artificial Sequence
  Description of Artificial Sequence: Synthetic oligonucleotide
  Antisense strand to SEQ ID NO: 12090
uguuaaccuaccaucuuua

SEQ ID NO: 12092 - RNA, 19 nt, Artificial Sequence
  Description of Artificial Sequence: Synthetic oligonucleotide
  Sense strand starting at position 2580 of SEQ ID NO: 113
gggugaaagcaguauguaa

SEQ ID NO: 12093 - RNA, 19 nt, Artificial Sequence
  Description of Artificial Sequence: Synthetic oligonucleotide
  Antisense strand to SEQ ID NO: 12092
uuacauacugcuuucaccc

SEQ ID NO: 12094 - RNA, 19 nt, Artificial Sequence
  Description of Artificial Sequence: Synthetic oligonucleotide
  Sense strand starting at position 2628 of SEQ ID NO: 113
gaggaauuguuacugaguu

SEQ ID NO: 12095 - RNA, 19 nt, Artificial Sequence
  Description of Artificial Sequence: Synthetic oligonucleotide
  Antisense strand to SEQ ID NO: 12094
aacucaguaacaauuccuc

SEQ ID NO: 12096 - RNA, 19 nt, Artificial Sequence
  Description of Artificial Sequence: Synthetic oligonucleotide
  Sense strand starting at position 2634 of SEQ ID NO: 113
uuguuacugaguuaauugu

SEQ ID NO: 12097 - RNA, 19 nt, Artificial Sequence
  Description of Artificial Sequence: Synthetic oligonucleotide
  Antisense strand to SEQ ID NO: 12096
acaauuaacucaguaacaa

SEQ ID NO: 12098 - RNA, 19 nt, Artificial Sequence
  Description of Artificial Sequence: Synthetic oligonucleotide
  Sense strand starting at position 2735 of SEQ ID NO: 113
ccgcgaugccgcucuaauu

SEQ ID NO: 12099 - RNA, 19 nt, Artificial Sequence
  Description of Artificial Sequence: Synthetic oligonucleotide
  Antisense strand to SEQ ID NO: 12098
aauuagagcggcaucgcgg

SEQ ID NO: 12100 - RNA, 19 nt, Artificial Sequence
  Description of Artificial Sequence: Synthetic oligonucleotide
  Sense strand starting at position 2745 of SEQ ID NO: 113
gcucuaauuucccuuuggu

SEQ ID NO: 12101 - RNA, 19 nt, Artificial Sequence
  Description of Artificial Sequence: Synthetic oligonucleotide
  Antisense strand to SEQ ID NO: 12100
accaaagggaaauuagagc

SEQ ID NO: 12102 - RNA, 19 nt, Artificial Sequence
  Description of Artificial Sequence: Synthetic oligonucleotide
  Sense strand starting at position 2762 of SEQ ID NO: 113
guugguuuccauggaaauc

SEQ ID NO: 12103 - RNA, 19 nt, Artificial Sequence
  Description of Artificial Sequence: Synthetic oligonucleotide
  Antisense strand to SEQ ID NO: 12102
gauuuccauggaaaccaac

SEQ ID NO: 12104 - RNA, 19 nt, Artificial Sequence
  Description of Artificial Sequence: Synthetic oligonucleotide
  Sense strand starting at position 2773 of SEQ ID NO: 113
uggaaaucuguagguaaag

SEQ ID NO: 12105 - RNA, 19 nt, Artificial Sequence
  Description of Artificial Sequence: Synthetic oligonucleotide
  Antisense strand to SEQ ID NO: 12104
cuuuaccuacagauuucca

SEQ ID NO: 12106 - RNA, 19 nt, Artificial Sequence
  Description of Artificial Sequence: Synthetic oligonucleotide
  Sense strand starting at position 2774 of SEQ ID NO: 113
ggaaaucuguagguaaagu

SEQ ID NO: 12107 - RNA, 19 nt, Artificial Sequence
  Description of Artificial Sequence: Synthetic oligonucleotide
  Antisense strand to SEQ ID NO: 12106
acuuuaccuacagauuucc

SEQ ID NO: 12108 - RNA, 19 nt, Artificial Sequence
  Description of Artificial Sequence: Synthetic oligonucleotide
  Sense strand starting at position 2775 of SEQ ID NO: 113
gaaaucuguagguaaagug

SEQ ID NO: 12109 - RNA, 19 nt, Artificial Sequence
  Description of Artificial Sequence: Synthetic oligonucleotide
  Antisense strand to SEQ ID NO: 12108
cacuuuaccuacagauuuc

SEQ ID NO: 12110 - RNA, 19 nt, Artificial Sequence
  Description of Artificial Sequence: Synthetic oligonucleotide
  Sense strand starting at position 2882 of SEQ ID NO: 113
ucuauccgaguccaauaua

SEQ ID NO: 12111 - RNA, 19 nt, Artificial Sequence
  Description of Artificial Sequence: Synthetic oligonucleotide
  Antisense strand to SEQ ID NO: 12110
uauauuggacucggauaga

SEQ ID NO: 12112 - RNA, 19 nt, Artificial Sequence
  Description of Artificial Sequence: Synthetic oligonucleotide
  Sense strand starting at position 2885 of SEQ ID NO: 113
auccgaguccaauauauua

SEQ ID NO: 12113 - RNA, 19 nt, Artificial Sequence
  Description of Artificial Sequence: Synthetic oligonucleotide
  Antisense strand to SEQ ID NO: 12112
uaauauauuggacucggau

SEQ ID NO: 12114 - RNA, 19 nt, Artificial Sequence
  Description of Artificial Sequence: Synthetic oligonucleotide
  Sense strand starting at position 3053 of SEQ ID NO: 113
gucuaugugggaugggaua

SEQ ID NO: 12115 - RNA, 19 nt, Artificial Sequence
  Description of Artificial Sequence: Synthetic oligonucleotide
  Antisense strand to SEQ ID NO: 12114
uaucccaucccacauagac

SEQ ID NO: 12116 - RNA, 19 nt, Artificial Sequence
  Description of Artificial Sequence: Synthetic oligonucleotide
  Sense strand starting at position 3559 of SEQ ID NO: 113
cccagaacugguugcuauu

SEQ ID NO: 12117 - RNA, 19 nt, Artificial Sequence
  Description of Artificial Sequence: Synthetic oligonucleotide
  Antisense strand to SEQ ID NO: 12116
aauagcaaccaguucuggg

SEQ ID NO: 12118 - RNA, 19 nt, Artificial Sequence
  Description of Artificial Sequence: Synthetic oligonucleotide
  Sense strand starting at position 3583 of SEQ ID NO: 113
uguuucucagguuagagau

SEQ ID NO: 12119 - RNA, 19 nt, Artificial Sequence
  Description of Artificial Sequence: Synthetic oligonucleotide
  Antisense strand to SEQ ID NO: 12118
aucucuaaccugagaaaca

SEQ ID NO: 12120 - RNA, 19 nt, Artificial Sequence
  Description of Artificial Sequence: Synthetic oligonucleotide
  Sense strand starting at position 3596 of SEQ ID NO: 113
agagaucuuuggcuuucca

SEQ ID NO: 12121 - RNA, 19 nt, Artificial Sequence
  Description of Artificial Sequence: Synthetic oligonucleotide
  Antisense strand to SEQ ID NO: 12120
uggaaagccaaagaucucu

SEQ ID NO: 12122 - RNA, 19 nt, Artificial Sequence
  Description of Artificial Sequence: Synthetic oligonucleotide
  Sense strand starting at position 3899 of SEQ ID NO: 113
gggagauugcaaugagccu

SEQ ID NO: 12123 - RNA, 19 nt, Artificial Sequence
  Description of Artificial Sequence: Synthetic oligonucleotide
  Antisense strand to SEQ ID NO: 12122
aggcucauugcaaucuccc

SEQ ID NO: 12124 - RNA, 19 nt, Artificial Sequence
  Description of Artificial Sequence: Synthetic oligonucleotide
  Sense strand starting at position 189 of SEQ ID NO: 112
uguuucugacccugauaag

SEQ ID NO: 12125 - RNA, 19 nt, Artificial Sequence
  Description of Artificial Sequence: Synthetic oligonucleotide
  Antisense strand to SEQ ID NO: 12124
cuuaucagggucagaaaca

SEQ ID NO: 12126 - RNA, 19 nt, Artificial Sequence
  Description of Artificial Sequence: Synthetic oligonucleotide
  Sense strand starting at position 657 of SEQ ID NO: 112
ccuucucuuugguugauaa

SEQ ID NO: 12127 - RNA, 19 nt, Artificial Sequence
  Description of Artificial Sequence: Synthetic oligonucleotide
  Antisense strand to SEQ ID NO: 12126
uuaucaaccaaagagaagg

SEQ ID NO: 12128 - RNA, 19 nt, Artificial Sequence
  Description of Artificial Sequence: Synthetic oligonucleotide
  Sense strand starting at position 658 of SEQ ID NO: 112
cuucucuuugguugauaaa

SEQ ID NO: 12129 - RNA, 19 nt, Artificial Sequence
  Description of Artificial Sequence: Synthetic oligonucleotide
  Antisense strand to SEQ ID NO: 12128
uuuaucaaccaaagagaag

SEQ ID NO: 12130 - RNA, 19 nt, Artificial Sequence
  Description of Artificial Sequence: Synthetic oligonucleotide
  Sense strand starting at position 704 of SEQ ID NO: 112
acccuuuaugaagaaacgu

SEQ ID NO: 12131 - RNA, 19 nt, Artificial Sequence
  Description of Artificial Sequence: Synthetic oligonucleotide
  Antisense strand to SEQ ID NO: 12130
acguuucuucauaaagggu

SEQ ID NO: 12132 - RNA, 19 nt, Artificial Sequence
  Description of Artificial Sequence: Synthetic oligonucleotide
  Sense strand starting at position 782 of SEQ ID NO: 112
cgguaucacccagaacaau

SEQ ID NO: 12133 - RNA, 19 nt, Artificial Sequence
  Description of Artificial Sequence: Synthetic oligonucleotide
  Antisense strand to SEQ ID NO: 12132
auuguucugggugauaccg

SEQ ID NO: 12134 - RNA, 19 nt, Artificial Sequence
  Description of Artificial Sequence: Synthetic oligonucleotide
  Sense strand starting at position 825 of SEQ ID NO: 112
ucccuaccacucugguaua

SEQ ID NO: 12135 - RNA, 19 nt, Artificial Sequence
  Description of Artificial Sequence: Synthetic oligonucleotide
  Antisense strand to SEQ ID NO: 12134
uauaccagagugguaggga

SEQ ID NO: 12136 - RNA, 19 nt, Artificial Sequence
  Description of Artificial Sequence: Synthetic oligonucleotide
  Sense strand starting at position 844 of SEQ ID NO: 112
auagcauuucugugcacuu

SEQ ID NO: 12137 - RNA, 19 nt, Artificial Sequence
  Description of Artificial Sequence: Synthetic oligonucleotide
  Antisense strand to SEQ ID NO: 12136
aagugcacagaaaugcuau

SEQ ID NO: 12138 - RNA, 19 nt, Artificial Sequence
  Description of Artificial Sequence: Synthetic oligonucleotide
  Sense strand starting at position 885 of SEQ ID NO: 112
ggcugaauucccuauuagg

SEQ ID NO: 12139 - RNA, 19 nt, Artificial Sequence
  Description of Artificial Sequence: Synthetic oligonucleotide
  Antisense strand to SEQ ID NO: 12138
ccuaauagggaauucagcc

SEQ ID NO: 12140 - RNA, 19 nt, Artificial Sequence
  Description of Artificial Sequence: Synthetic oligonucleotide
  Sense strand starting at position 968 of SEQ ID NO: 112
ugaagauccugguucucua

SEQ ID NO: 12141 - RNA, 19 nt, Artificial Sequence
  Description of Artificial Sequence: Synthetic oligonucleotide
  Antisense strand to SEQ ID NO: 12140
uagagaaccaggaucuuca

SEQ ID NO: 12142 - RNA, 19 nt, Artificial Sequence
  Description of Artificial Sequence: Synthetic oligonucleotide
  Sense strand starting at position 1001 of SEQ ID NO: 112
accuguuugagguauccga

SEQ ID NO: 12143 - RNA, 19 nt, Artificial Sequence
  Description of Artificial Sequence: Synthetic oligonucleotide
  Antisense strand to SEQ ID NO: 12142
ucggauaccucaaacaggu

SEQ ID NO: 12144 - RNA, 19 nt, Artificial Sequence
  Description of Artificial Sequence: Synthetic oligonucleotide
  Sense strand starting at position 1008 of SEQ ID NO: 112
ugagguauccgagggcuaa

SEQ ID NO: 12145 - RNA, 19 nt, Artificial Sequence
  Description of Artificial Sequence: Synthetic oligonucleotide
  Antisense strand to SEQ ID NO: 12144
uuagcccucggauaccuca

SEQ ID NO: 12146 - RNA, 19 nt, Artificial Sequence
  Description of Artificial Sequence: Synthetic oligonucleotide
  Sense strand starting at position 1009 of SEQ ID NO: 112
gagguauccgagggcuaaa

SEQ ID NO: 12147 - RNA, 19 nt, Artificial Sequence
  Description of Artificial Sequence: Synthetic oligonucleotide
  Antisense strand to SEQ ID NO: 12146
uuuagcccucggauaccuc

SEQ ID NO: 12148 - RNA, 19 nt, Artificial Sequence
  Description of Artificial Sequence: Synthetic oligonucleotide
  Sense strand starting at position 1147 of SEQ ID NO: 112
ugaagaauggcuugccuag

SEQ ID NO: 12149 - RNA, 19 nt, Artificial Sequence
  Description of Artificial Sequence: Synthetic oligonucleotide
  Antisense strand to SEQ ID NO: 12148
cuaggcaagccauucuuca

SEQ ID NO: 12150 - RNA, 19 nt, Artificial Sequence
  Description of Artificial Sequence: Synthetic oligonucleotide
  Sense strand starting at position 1181 of SEQ ID NO: 112
gccgaaggacugugaauug

SEQ ID NO: 12151 - RNA, 19 nt, Artificial Sequence
  Description of Artificial Sequence: Synthetic oligonucleotide
  Antisense strand to SEQ ID NO: 12150
caauucacaguccuucggc

SEQ ID NO: 12152 - RNA, 19 nt, Artificial Sequence
  Description of Artificial Sequence: Synthetic oligonucleotide
  Sense strand starting at position 1365 of SEQ ID NO: 112
guaaauaacaaacggguaa

SEQ ID NO: 12153 - RNA, 19 nt, Artificial Sequence
  Description of Artificial Sequence: Synthetic oligonucleotide
  Antisense strand to SEQ ID NO: 12152
uuacccguuuguuauuuac

SEQ ID NO: 12154 - RNA, 19 nt, Artificial Sequence
  Description of Artificial Sequence: Synthetic oligonucleotide
  Sense strand starting at position 1389 of SEQ ID NO: 112
uuuguaaacugucuauaca

SEQ ID NO: 12155 - RNA, 19 nt, Artificial Sequence
  Description of Artificial Sequence: Synthetic oligonucleotide
  Antisense strand to SEQ ID NO: 12154
uguauagacaguuuacaaa

SEQ ID NO: 12156 - RNA, 19 nt, Artificial Sequence
  Description of Artificial Sequence: Synthetic oligonucleotide
  Sense strand starting at position 1390 of SEQ ID NO: 112
uuguaaacugucuauacaa

SEQ ID NO: 12157 - RNA, 19 nt, Artificial Sequence
  Description of Artificial Sequence: Synthetic oligonucleotide
  Antisense strand to SEQ ID NO: 12156
uuguauagacaguuuacaa

SEQ ID NO: 12158 - RNA, 19 nt, Artificial Sequence
  Description of Artificial Sequence: Synthetic oligonucleotide
  Sense strand starting at position 1408 of SEQ ID NO: 112
aauauaagagaccguuauu

SEQ ID NO: 12159 - RNA, 19 nt, Artificial Sequence
  Description of Artificial Sequence: Synthetic oligonucleotide
  Antisense strand to SEQ ID NO: 12158
aauaacggucucuuauauu

SEQ ID NO: 12160 - RNA, 19 nt, Artificial Sequence
  Description of Artificial Sequence: Synthetic oligonucleotide
  Sense strand starting at position 1585 of SEQ ID NO: 112
gcuugugagagacagcuuu

SEQ ID NO: 12161 - RNA, 19 nt, Artificial Sequence
  Description of Artificial Sequence: Synthetic oligonucleotide
  Antisense strand to SEQ ID NO: 12160
aaagcugucucucacaagc

SEQ ID NO: 12162 - RNA, 19 nt, Artificial Sequence
  Description of Artificial Sequence: Synthetic oligonucleotide
  Sense strand starting at position 1634 of SEQ ID NO: 112
uccugaagccucuaagaau

SEQ ID NO: 12163 - RNA, 19 nt, Artificial Sequence
  Description of Artificial Sequence: Synthetic oligonucleotide
  Antisense strand to SEQ ID NO: 12162
auucuuagaggcuucagga

SEQ ID NO: 12164 - RNA, 19 nt, Artificial Sequence
  Description of Artificial Sequence: Synthetic oligonucleotide
  Sense strand starting at position 1667 of SEQ ID NO: 112
ucaaguuaucuccgggaug

SEQ ID NO: 12165 - RNA, 19 nt, Artificial Sequence
  Description of Artificial Sequence: Synthetic oligonucleotide
  Antisense strand to SEQ ID NO: 12164
caucccggagauaacuuga

SEQ ID NO: 12166 - RNA, 19 nt, Artificial Sequence
  Description of Artificial Sequence: Synthetic oligonucleotide
  Sense strand starting at position 1669 of SEQ ID NO: 112
aaguuaucuccgggaugac

SEQ ID NO: 12167 - RNA, 19 nt, Artificial Sequence
  Description of Artificial Sequence: Synthetic oligonucleotide
  Antisense strand to SEQ ID NO: 12166
gucaucccggagauaacuu

SEQ ID NO: 12168 - RNA, 19 nt, Artificial Sequence
  Description of Artificial Sequence: Synthetic oligonucleotide
  Sense strand starting at position 1679 of SEQ ID NO: 112
cgggaugacccugauagca

SEQ ID NO: 12169 - RNA, 19 nt, Artificial Sequence
  Description of Artificial Sequence: Synthetic oligonucleotide
  Antisense strand to SEQ ID NO: 12168
ugcuaucagggucaucccg

SEQ ID NO: 12170 - RNA, 19 nt, Artificial Sequence
  Description of Artificial Sequence: Synthetic oligonucleotide
  Sense strand starting at position 2213 of SEQ ID NO: 112
gagagcgcaucauuuaguu

SEQ ID NO: 12171 - RNA, 19 nt, Artificial Sequence
  Description of Artificial Sequence: Synthetic oligonucleotide
  Antisense strand to SEQ ID NO: 12170
aacuaaaugaugcgcucuc

SEQ ID NO: 12172 - RNA, 19 nt, Artificial Sequence
  Description of Artificial Sequence: Synthetic oligonucleotide
  Sense strand starting at position 2243 of SEQ ID NO: 112
aucuuuaaagcacgaaacu

SEQ ID NO: 12173 - RNA, 19 nt, Artificial Sequence
  Description of Artificial Sequence: Synthetic oligonucleotide
  Antisense strand to SEQ ID NO: 12172
aguuucgugcuuuaaagau

SEQ ID NO: 12174 - RNA, 19 nt, Artificial Sequence
  Description of Artificial Sequence: Synthetic oligonucleotide
  Sense strand starting at position 2244 of SEQ ID NO: 112
ucuuuaaagcacgaaacua

SEQ ID NO: 12175 - RNA, 19 nt, Artificial Sequence
  Description of Artificial Sequence: Synthetic oligonucleotide
  Antisense strand to SEQ ID NO: 12174
uaguuucgugcuuuaaaga

SEQ ID NO: 12176 - RNA, 19 nt, Artificial Sequence
  Description of Artificial Sequence: Synthetic oligonucleotide
  Sense strand starting at position 2290 of SEQ ID NO: 112
aaccgucuccagggaucaa

SEQ ID NO: 12177 - RNA, 19 nt, Artificial Sequence
  Description of Artificial Sequence: Synthetic oligonucleotide
  Antisense strand to SEQ ID NO: 12176
uugaucccuggagacgguu

SEQ ID NO: 12178 - RNA, 19 nt, Artificial Sequence
  Description of Artificial Sequence: Synthetic oligonucleotide
  Sense strand starting at position 2291 of SEQ ID NO: 112
accgucuccagggaucaaa

SEQ ID NO: 12179 - RNA, 19 nt, Artificial Sequence
  Description of Artificial Sequence: Synthetic oligonucleotide
  Antisense strand to SEQ ID NO: 12178
uuugaucccuggagacggu

SEQ ID NO: 12180 - RNA, 19 nt, Artificial Sequence
  Description of Artificial Sequence: Synthetic oligonucleotide
  Sense strand starting at position 3063 of SEQ ID NO: 112
gggaucuguuccuuaacuc

SEQ ID NO: 12181 - RNA, 19 nt, Artificial Sequence
  Description of Artificial Sequence: Synthetic oligonucleotide
  Antisense strand to SEQ ID NO: 12180
gaguuaaggaacagauccc

SEQ ID NO: 12182 - RNA, 19 nt, Artificial Sequence
  Description of Artificial Sequence: Synthetic oligonucleotide
  Sense strand starting at position 3070 of SEQ ID NO: 112
guuccuuaacuccagguua

SEQ ID NO: 12183 - RNA, 19 nt, Artificial Sequence
  Description of Artificial Sequence: Synthetic oligonucleotide
  Antisense strand to SEQ ID NO: 12182
uaaccuggaguuaaggaac

SEQ ID NO: 12184 - RNA, 19 nt, Artificial Sequence
  Description of Artificial Sequence: Synthetic oligonucleotide
  Sense strand starting at position 3273 of SEQ ID NO: 112
gcaaauggaguccaagagu

SEQ ID NO: 12185 - RNA, 19 nt, Artificial Sequence
  Description of Artificial Sequence: Synthetic oligonucleotide
  Antisense strand to SEQ ID NO: 12184
acucuuggacuccauuugc

SEQ ID NO: 12186 - RNA, 19 nt, Artificial Sequence
  Description of Artificial Sequence: Synthetic oligonucleotide
  Sense strand starting at position 3530 of SEQ ID NO: 112
gggcuagguaaaggucuau

SEQ ID NO: 12187 - RNA, 19 nt, Artificial Sequence
  Description of Artificial Sequence: Synthetic oligonucleotide
  Antisense strand to SEQ ID NO: 12186
auagaccuuuaccuagccc

SEQ ID NO: 12188 - RNA, 19 nt, Artificial Sequence
  Description of Artificial Sequence: Synthetic oligonucleotide
  Sense strand starting at position 3534 of SEQ ID NO: 112
uagguaaaggucuaucagu

SEQ ID NO: 12189 - RNA, 19 nt, Artificial Sequence
  Description of Artificial Sequence: Synthetic oligonucleotide
  Antisense strand to SEQ ID NO: 12188
acugauagaccuuuaccua

SEQ ID NO: 12190 - RNA, 19 nt, Artificial Sequence
  Description of Artificial Sequence: Synthetic oligonucleotide
  Sense strand starting at position 3570 of SEQ ID NO: 112
accagaaauuccguaccua

SEQ ID NO: 12191 - RNA, 19 nt, Artificial Sequence
  Description of Artificial Sequence: Synthetic oligonucleotide
  Antisense strand to SEQ ID NO: 12190
uagguacggaauuucuggu

SEQ ID NO: 12192 - RNA, 19 nt, Artificial Sequence
  Description of Artificial Sequence: Synthetic oligonucleotide
  Sense strand starting at position 3571 of SEQ ID NO: 112
ccagaaauuccguaccuau

SEQ ID NO: 12193 - RNA, 19 nt, Artificial Sequence
  Description of Artificial Sequence: Synthetic oligonucleotide
  Antisense strand to SEQ ID NO: 12192
auagguacggaauuucugg

SEQ ID NO: 12194 - RNA, 19 nt, Artificial Sequence
  Description of Artificial Sequence: Synthetic oligonucleotide
  Sense strand starting at position 3584 of SEQ ID NO: 112
accuauuggcuacgaucaa

SEQ ID NO: 12195 - RNA, 19 nt, Artificial Sequence
  Description of Artificial Sequence: Synthetic oligonucleotide
  Antisense strand to SEQ ID NO: 12194
uugaucguagccaauaggu

SEQ ID NO: 12196 - RNA, 19 nt, Artificial Sequence
  Description of Artificial Sequence: Synthetic oligonucleotide
  Sense strand starting at position 3636 of SEQ ID NO: 112
guacgucccggagaaauga

SEQ ID NO: 12197 - RNA, 19 nt, Artificial Sequence
  Description of Artificial Sequence: Synthetic oligonucleotide
  Antisense strand to SEQ ID NO: 12196
ucauuucuccgggacguac

SEQ ID NO: 12198 - RNA, 19 nt, Artificial Sequence
  Description of Artificial Sequence: Synthetic oligonucleotide
  Sense strand starting at position 3719 of SEQ ID NO: 112
gacaguuucguugucuguu

SEQ ID NO: 12199 - RNA, 19 nt, Artificial Sequence
  Description of Artificial Sequence: Synthetic oligonucleotide
  Antisense strand to SEQ ID NO: 12198
aacagacaacgaaacuguc

SEQ ID NO: 12200 - RNA, 19 nt, Artificial Sequence
  Description of Artificial Sequence: Synthetic oligonucleotide
  Sense strand starting at position 3813 of SEQ ID NO: 112
acuugcgauacugagaauu

SEQ ID NO: 12201 - RNA, 19 nt, Artificial Sequence
  Description of Artificial Sequence: Synthetic oligonucleotide
  Antisense strand to SEQ ID NO: 12200
aauucucaguaucgcaagu

SEQ ID NO: 12202 - RNA, 19 nt, Artificial Sequence
  Description of Artificial Sequence: Synthetic oligonucleotide
  Sense strand starting at position 3952 of SEQ ID NO: 112
gggucaggcucuucacaga

SEQ ID NO: 12203 - RNA, 19 nt, Artificial Sequence
  Description of Artificial Sequence: Synthetic oligonucleotide
  Antisense strand to SEQ ID NO: 12202
ucugugaagagccugaccc

SEQ ID NO: 12204 - RNA, 19 nt, Artificial Sequence
  Description of Artificial Sequence: Synthetic oligonucleotide
  Sense strand starting at position 3939 of SEQ ID NO: 114
uuaacaguguguccuguau

SEQ ID NO: 12205 - RNA, 19 nt, Artificial Sequence
  Description of Artificial Sequence: Synthetic oligonucleotide
  Antisense strand to SEQ ID NO: 12204
auacaggacacacuguuaa

SEQ ID NO: 12206 - RNA, 19 nt, Artificial Sequence
  Description of Artificial Sequence: Synthetic oligonucleotide
  Sense strand starting at position 3669 of SEQ ID NO: 114
ggcauuauguuggcucacu

SEQ ID NO: 12207 - RNA, 19 nt, Artificial Sequence
  Description of Artificial Sequence: Synthetic oligonucleotide
  Antisense strand to SEQ ID NO: 12206
agugagccaacauaaugcc

SEQ ID NO: 12208 - RNA, 19 nt, Artificial Sequence
  Description of Artificial Sequence: Synthetic oligonucleotide
  Sense strand starting at position 3578 of SEQ ID NO: 114
guacaaguaugacccaaau

SEQ ID NO: 12209 - RNA, 19 nt, Artificial Sequence
  Description of Artificial Sequence: Synthetic oligonucleotide
  Antisense strand to SEQ ID NO: 12208
auuugggucauacuuguac

SEQ ID NO: 12210 - RNA, 19 nt, Artificial Sequence
  Description of Artificial Sequence: Synthetic oligonucleotide
  Sense strand starting at position 3567 of SEQ ID NO: 114
aucauuuguugguacaagu

SEQ ID NO: 12211 - RNA, 19 nt, Artificial Sequence
  Description of Artificial Sequence: Synthetic oligonucleotide
  Antisense strand to SEQ ID NO: 12210
acuuguaccaacaaaugau

SEQ ID NO: 12212 - RNA, 19 nt, Artificial Sequence
  Description of Artificial Sequence: Synthetic oligonucleotide
  Sense strand starting at position 3564 of SEQ ID NO: 114
ggaaucauuuguugguaca

SEQ ID NO: 12213 - RNA, 19 nt, Artificial Sequence
  Description of Artificial Sequence: Synthetic oligonucleotide
  Antisense strand to SEQ ID NO: 12212
uguaccaacaaaugauucc

SEQ ID NO: 12214 - RNA, 19 nt, Artificial Sequence
  Description of Artificial Sequence: Synthetic oligonucleotide
  Sense strand starting at position 3535 of SEQ ID NO: 114
gcagcuuaaucagaauuuc

SEQ ID NO: 12215 - RNA, 19 nt, Artificial Sequence
  Description of Artificial Sequence: Synthetic oligonucleotide
  Antisense strand to SEQ ID NO: 12214
gaaauucugauuaagcugc

SEQ ID NO: 12216 - RNA, 19 nt, Artificial Sequence
  Description of Artificial Sequence: Synthetic oligonucleotide
  Sense strand starting at position 3460 of SEQ ID NO: 114
uguaauugcauguggcaga

SEQ ID NO: 12217 - RNA, 19 nt, Artificial Sequence
  Description of Artificial Sequence: Synthetic oligonucleotide
  Antisense strand to SEQ ID NO: 12216
ucugccacaugcaauuaca

SEQ ID NO: 12218 - RNA, 19 nt, Artificial Sequence
  Description of Artificial Sequence: Synthetic oligonucleotide
  Sense strand starting at position 3449 of SEQ ID NO: 114
aaaguaaucuguguaauug

SEQ ID NO: 12219 - RNA, 19 nt, Artificial Sequence
  Description of Artificial Sequence: Synthetic oligonucleotide
  Antisense strand to SEQ ID NO: 12218
caauuacacagauuacuuu

SEQ ID NO: 12220 - RNA, 19 nt, Artificial Sequence
  Description of Artificial Sequence: Synthetic oligonucleotide
  Sense strand starting at position 3032 of SEQ ID NO: 114
gaaguaauguguccacuaa

SEQ ID NO: 12221 - RNA, 19 nt, Artificial Sequence
  Description of Artificial Sequence: Synthetic oligonucleotide
  Antisense strand to SEQ ID NO: 12220
uuaguggacacauuacuuc

SEQ ID NO: 12222 - RNA, 19 nt, Artificial Sequence
  Description of Artificial Sequence: Synthetic oligonucleotide
  Sense strand starting at position 3011 of SEQ ID NO: 114
gguuuccugggaugauuaa

SEQ ID NO: 12223 - RNA, 19 nt, Artificial Sequence
  Description of Artificial Sequence: Synthetic oligonucleotide
  Antisense strand to SEQ ID NO: 12222
uuaaucaucccaggaaacc

SEQ ID NO: 12224 - RNA, 19 nt, Artificial Sequence
  Description of Artificial Sequence: Synthetic oligonucleotide
  Sense strand starting at position 3008 of SEQ ID NO: 114
acagguuuccugggaugau

SEQ ID NO: 12225 - RNA, 19 nt, Artificial Sequence
  Description of Artificial Sequence: Synthetic oligonucleotide
  Antisense strand to SEQ ID NO: 12224
aucaucccaggaaaccugu

SEQ ID NO: 12226 - RNA, 19 nt, Artificial Sequence
  Description of Artificial Sequence: Synthetic oligonucleotide
  Sense strand starting at position 3005 of SEQ ID NO: 114
aggacagguuuccugggau

SEQ ID NO: 12227 - RNA, 19 nt, Artificial Sequence
  Description of Artificial Sequence: Synthetic oligonucleotide
  Antisense strand to SEQ ID NO: 12226
aucccaggaaaccuguccu

SEQ ID NO: 12228 - RNA, 19 nt, Artificial Sequence
  Description of Artificial Sequence: Synthetic oligonucleotide
  Sense strand starting at position 2948 of SEQ ID NO: 114
cucucuaaaugggaggauu

SEQ ID NO: 12229 - RNA, 19 nt, Artificial Sequence
  Description of Artificial Sequence: Synthetic oligonucleotide
  Antisense strand to SEQ ID NO: 12228
aauccucccauuuagagag

SEQ ID NO: 12230 - RNA, 19 nt, Artificial Sequence
  Description of Artificial Sequence: Synthetic oligonucleotide
  Sense strand starting at position 2919 of SEQ ID NO: 114
uguucuguaagcuucgcua

SEQ ID NO: 12231 - RNA, 19 nt, Artificial Sequence
  Description of Artificial Sequence: Synthetic oligonucleotide
  Antisense strand to SEQ ID NO: 12230
uagcgaagcuuacagaaca

SEQ ID NO: 12232 - RNA, 19 nt, Artificial Sequence
  Description of Artificial Sequence: Synthetic oligonucleotide
  Sense strand starting at position 2914 of SEQ ID NO: 114
accuauguucuguaagcuu

SEQ ID NO: 12233 - RNA, 19 nt, Artificial Sequence
  Description of Artificial Sequence: Synthetic oligonucleotide
  Antisense strand to SEQ ID NO: 12232
aagcuuacagaacauaggu

SEQ ID NO: 12234 - RNA, 19 nt, Artificial Sequence
  Description of Artificial Sequence: Synthetic oligonucleotide
  Sense strand starting at position 2870 of SEQ ID NO: 114
cugugucagaacuggagaa

SEQ ID NO: 12235 - RNA, 19 nt, Artificial Sequence
  Description of Artificial Sequence: Synthetic oligonucleotide
  Antisense strand to SEQ ID NO: 12234
uucuccaguucugacacag

SEQ ID NO: 12236 - RNA, 19 nt, Artificial Sequence
  Description of Artificial Sequence: Synthetic oligonucleotide
  Sense strand starting at position 2804 of SEQ ID NO: 114
aggauauuucuguggcggu

SEQ ID NO: 12237 - RNA, 19 nt, Artificial Sequence
  Description of Artificial Sequence: Synthetic oligonucleotide
  Antisense strand to SEQ ID NO: 12236
accgccacagaaauauccu

SEQ ID NO: 12238 - RNA, 19 nt, Artificial Sequence
  Description of Artificial Sequence: Synthetic oligonucleotide
  Sense strand starting at position 2508 of SEQ ID NO: 114
gaggcugucucugcacaga

SEQ ID NO: 12239 - RNA, 19 nt, Artificial Sequence
  Description of Artificial Sequence: Synthetic oligonucleotide
  Antisense strand to SEQ ID NO: 12238
ucugugcagagacagccuc

SEQ ID NO: 12240 - RNA, 19 nt, Artificial Sequence
  Description of Artificial Sequence: Synthetic oligonucleotide
  Sense strand starting at position 2422 of SEQ ID NO: 114
uucuuagauugcuucuguu

SEQ ID NO: 12241 - RNA, 19 nt, Artificial Sequence
  Description of Artificial Sequence: Synthetic oligonucleotide
  Antisense strand to SEQ ID NO: 12240
aacagaagcaaucuaagaa

SEQ ID NO: 12242 - RNA, 19 nt, Artificial Sequence
  Description of Artificial Sequence: Synthetic oligonucleotide
  Sense strand starting at position 2419 of SEQ ID NO: 114
gguuucuuagauugcuucu

SEQ ID NO: 12243 - RNA, 19 nt, Artificial Sequence
  Description of Artificial Sequence: Synthetic oligonucleotide
  Antisense strand to SEQ ID NO: 12242
agaagcaaucuaagaaacc

SEQ ID NO: 12244 - RNA, 19 nt, Artificial Sequence
  Description of Artificial Sequence: Synthetic oligonucleotide
  Sense strand starting at position 2409 of SEQ ID NO: 114
ucccuugccugguuucuua

SEQ ID NO: 12245 - RNA, 19 nt, Artificial Sequence
  Description of Artificial Sequence: Synthetic oligonucleotide
  Antisense strand to SEQ ID NO: 12244
uaagaaaccaggcaaggga

SEQ ID NO: 12246 - RNA, 19 nt, Artificial Sequence
  Description of Artificial Sequence: Synthetic oligonucleotide
  Sense strand starting at position 2294 of SEQ ID NO: 114
acaaguauuugggagugga

SEQ ID NO: 12247 - RNA, 19 nt, Artificial Sequence
  Description of Artificial Sequence: Synthetic oligonucleotide
  Antisense strand to SEQ ID NO: 12246
uccacucccaaauacuugu

SEQ ID NO: 12248 - RNA, 19 nt, Artificial Sequence
  Description of Artificial Sequence: Synthetic oligonucleotide
  Sense strand starting at position 2267 of SEQ ID NO: 114
uguguauaucuguggagaa

SEQ ID NO: 12249 - RNA, 19 nt, Artificial Sequence
  Description of Artificial Sequence: Synthetic oligonucleotide
  Antisense strand to SEQ ID NO: 12248
uucuccacagauauacaca

SEQ ID NO: 12250 - RNA, 19 nt, Artificial Sequence
  Description of Artificial Sequence: Synthetic oligonucleotide
  Sense strand starting at position 2266 of SEQ ID NO: 114
uuguguauaucuguggaga

SEQ ID NO: 12251 - RNA, 19 nt, Artificial Sequence
  Description of Artificial Sequence: Synthetic oligonucleotide
  Antisense strand to SEQ ID NO: 12250
ucuccacagauauacacaa

SEQ ID NO: 12252 - RNA, 19 nt, Artificial Sequence
  Description of Artificial Sequence: Synthetic oligonucleotide
  Sense strand starting at position 2261 of SEQ ID NO: 114
agggauuguguauaucugu

SEQ ID NO: 12253 - RNA, 19 nt, Artificial Sequence
  Description of Artificial Sequence: Synthetic oligonucleotide
  Antisense strand to SEQ ID NO: 12252
acagauauacacaaucccu

SEQ ID NO: 12254 - RNA, 19 nt, Artificial Sequence
  Description of Artificial Sequence: Synthetic oligonucleotide
  Sense strand starting at position 2255 of SEQ ID NO: 114
gugcccagggauuguguau

SEQ ID NO: 12255 - RNA, 19 nt, Artificial Sequence
  Description of Artificial Sequence: Synthetic oligonucleotide
  Antisense strand to SEQ ID NO: 12254
auacacaaucccugggcac

SEQ ID NO: 12256 - RNA, 19 nt, Artificial Sequence
  Description of Artificial Sequence: Synthetic oligonucleotide
  Sense strand starting at position 2251 of SEQ ID NO: 114
gagagugcccagggauugu

SEQ ID NO: 12257 - RNA, 19 nt, Artificial Sequence
  Description of Artificial Sequence: Synthetic oligonucleotide
  Antisense strand to SEQ ID NO: 12256
acaaucccugggcacucuc

SEQ ID NO: 12258 - RNA, 19 nt, Artificial Sequence
  Description of Artificial Sequence: Synthetic oligonucleotide
  Sense strand starting at position 1529 of SEQ ID NO: 114
cguggaugccuggacagaa

SEQ ID NO: 12259 - RNA, 19 nt, Artificial Sequence
  Description of Artificial Sequence: Synthetic oligonucleotide
  Antisense strand to SEQ ID NO: 12258
uucuguccaggcauccacg

SEQ ID NO: 12260 - RNA, 19 nt, Artificial Sequence
  Description of Artificial Sequence: Synthetic oligonucleotide
  Sense strand starting at position 1326 of SEQ ID NO: 114
ggugagguggcaggauuaa

SEQ ID NO: 12261 - RNA, 19 nt, Artificial Sequence
  Description of Artificial Sequence: Synthetic oligonucleotide
  Antisense strand to SEQ ID NO: 12260
uuaauccugccaccucacc

SEQ ID NO: 12262 - RNA, 19 nt, Artificial Sequence
  Description of Artificial Sequence: Synthetic oligonucleotide
  Sense strand starting at position 1160 of SEQ ID NO: 114
gggauugaugcggaaugcu

SEQ ID NO: 12263 - RNA, 19 nt, Artificial Sequence
  Description of Artificial Sequence: Synthetic oligonucleotide
  Antisense strand to SEQ ID NO: 12262
agcauuccgcaucaauccc

SEQ ID NO: 12264 - RNA, 19 nt, Artificial Sequence
  Description of Artificial Sequence: Synthetic oligonucleotide
  Sense strand starting at position 1093 of SEQ ID NO: 114
agcugaaauggugagguaa

SEQ ID NO: 12265 - RNA, 19 nt, Artificial Sequence
  Description of Artificial Sequence: Synthetic oligonucleotide
  Antisense strand to SEQ ID NO: 12264
uuaccucaccauuucagcu

SEQ ID NO: 12266 - RNA, 19 nt, Artificial Sequence
  Description of Artificial Sequence: Synthetic oligonucleotide
  Sense strand starting at position 962 of SEQ ID NO: 114
gcugaauuuccuggcccuu

SEQ ID NO: 12267 - RNA, 19 nt, Artificial Sequence
  Description of Artificial Sequence: Synthetic oligonucleotide
  Antisense strand to SEQ ID NO: 12266
aagggccaggaaauucagc

SEQ ID NO: 12268 - RNA, 19 nt, Artificial Sequence
  Description of Artificial Sequence: Synthetic oligonucleotide
  Sense strand starting at position 584 of SEQ ID NO: 114
gcucaccuuggccaguaau

SEQ ID NO: 12269 - RNA, 19 nt, Artificial Sequence
  Description of Artificial Sequence: Synthetic oligonucleotide
  Antisense strand to SEQ ID NO: 12268
auuacuggccaaggugagc

SEQ ID NO: 12270 - RNA, 19 nt, Artificial Sequence
  Description of Artificial Sequence: Synthetic oligonucleotide
  Sense strand starting at position 537 of SEQ ID NO: 114
ucuacagauuggcucuaaa

SEQ ID NO: 12271 - RNA, 19 nt, Artificial Sequence
  Description of Artificial Sequence: Synthetic oligonucleotide
  Antisense strand to SEQ ID NO: 12270
uuuagagccaaucuguaga

SEQ ID NO: 12272 - RNA, 19 nt, Artificial Sequence
  Description of Artificial Sequence: Synthetic oligonucleotide
  Sense strand starting at position 536 of SEQ ID NO: 114
gucuacagauuggcucuaa

SEQ ID NO: 12273 - RNA, 19 nt, Artificial Sequence
  Description of Artificial Sequence: Synthetic oligonucleotide
  Antisense strand to SEQ ID NO: 12272
uuagagccaaucuguagac

SEQ ID NO: 12274 - RNA, 19 nt, Artificial Sequence
  Description of Artificial Sequence: Synthetic oligonucleotide
  Sense strand starting at position 527 of SEQ ID NO: 114
uccuccuuggucuacagau

SEQ ID NO: 12275 - RNA, 19 nt, Artificial Sequence
  Description of Artificial Sequence: Synthetic oligonucleotide
  Antisense strand to SEQ ID NO: 12274
aucuguagaccaaggagga

SEQ ID NO: 12276 - RNA, 19 nt, Artificial Sequence
  Description of Artificial Sequence: Synthetic oligonucleotide
  Sense strand starting at position 299 of SEQ ID NO: 114
ggcugaccuagaugagaau

SEQ ID NO: 12277 - RNA, 19 nt, Artificial Sequence
  Description of Artificial Sequence: Synthetic oligonucleotide
  Antisense strand to SEQ ID NO: 12276
auucucaucuaggucagcc

SEQ ID NO: 12278 - RNA, 19 nt, Artificial Sequence
  Description of Artificial Sequence: Synthetic oligonucleotide
  Sense strand starting at position 297 of SEQ ID NO: 114
ucggcugaccuagaugaga

SEQ ID NO: 12279 - RNA, 19 nt, Artificial Sequence
  Description of Artificial Sequence: Synthetic oligonucleotide
  Antisense strand to SEQ ID NO: 12278
ucucaucuaggucagccga

SEQ ID NO: 12280 - RNA, 19 nt, Artificial Sequence
  Description of Artificial Sequence: Synthetic oligonucleotide
  Sense strand starting at position 101 of SEQ ID NO: 114
guuccuacuccuuggagga

SEQ ID NO: 12281 - RNA, 19 nt, Artificial Sequence
  Description of Artificial Sequence: Synthetic oligonucleotide
  Antisense strand to SEQ ID NO: 12280
uccuccaaggaguaggaac

SEQ ID NO: 12282 - RNA, 19 nt, Artificial Sequence
  Description of Artificial Sequence: Synthetic oligonucleotide
  Sense strand starting at position 75 of SEQ ID NO: 114
ugagcagggucuuuacaua

SEQ ID NO: 12283 - RNA, 19 nt, Artificial Sequence
  Description of Artificial Sequence: Synthetic oligonucleotide
  Antisense strand to SEQ ID NO: 12282
uauguaaagacccugcuca

SEQ ID NO: 12284 - RNA, 19 nt, Artificial Sequence
  Description of Artificial Sequence: Synthetic oligonucleotide
  Sense strand starting at position 50 of SEQ ID NO: 116
acuagauugugaucucuua

SEQ ID NO: 12285 - RNA, 19 nt, Artificial Sequence
  Description of Artificial Sequence: Synthetic oligonucleotide
  Antisense strand to SEQ ID NO: 12284
uaagagaucacaaucuagu

SEQ ID NO: 12286 - RNA, 19 nt, Artificial Sequence
  Description of Artificial Sequence: Synthetic oligonucleotide
  Sense strand starting at position 80 of SEQ ID NO: 116
ccaggauuaccuugucuau

SEQ ID NO: 12287 - RNA, 19 nt, Artificial Sequence
  Description of Artificial Sequence: Synthetic oligonucleotide
  Antisense strand to SEQ ID NO: 12286
auagacaagguaauccugg

SEQ ID NO: 12288 - RNA, 19 nt, Artificial Sequence
  Description of Artificial Sequence: Synthetic oligonucleotide
  Sense strand starting at position 82 of SEQ ID NO: 116
aggauuaccuugucuauua

SEQ ID NO: 12289 - RNA, 19 nt, Artificial Sequence
  Description of Artificial Sequence: Synthetic oligonucleotide
  Antisense strand to SEQ ID NO: 12288
uaauagacaagguaauccu

SEQ ID NO: 12290 - RNA, 19 nt, Artificial Sequence
  Description of Artificial Sequence: Synthetic oligonucleotide
  Sense strand starting at position 83 of SEQ ID NO: 116
ggauuaccuugucuauuau

SEQ ID NO: 12291 - RNA, 19 nt, Artificial Sequence
  Description of Artificial Sequence: Synthetic oligonucleotide
  Antisense strand to SEQ ID NO: 12290
auaauagacaagguaaucc

SEQ ID NO: 12292 - RNA, 19 nt, Artificial Sequence
  Description of Artificial Sequence: Synthetic oligonucleotide
  Sense strand starting at position 224 of SEQ ID NO: 116
acaaucucggcucauuaua

SEQ ID NO: 12293 - RNA, 19 nt, Artificial Sequence
  Description of Artificial Sequence: Synthetic oligonucleotide
  Antisense strand to SEQ ID NO: 12292
uauaaugagccgagauugu

SEQ ID NO: 12294 - RNA, 19 nt, Artificial Sequence
  Description of Artificial Sequence: Synthetic oligonucleotide
  Sense strand starting at position 484 of SEQ ID NO: 116
ccuaguacuuuggugaaau

SEQ ID NO: 12295 - RNA, 19 nt, Artificial Sequence
  Description of Artificial Sequence: Synthetic oligonucleotide
  Antisense strand to SEQ ID NO: 12294
auuucaccaaaguacuagg

SEQ ID NO: 12296 - RNA, 19 nt, Artificial Sequence
  Description of Artificial Sequence: Synthetic oligonucleotide
  Sense strand starting at position 520 of SEQ ID NO: 116
ggacaugcucuugggacau

SEQ ID NO: 12297 - RNA, 19 nt, Artificial Sequence
  Description of Artificial Sequence: Synthetic oligonucleotide
  Antisense strand to SEQ ID NO: 12296
augucccaagagcaugucc

SEQ ID NO: 12298 - RNA, 19 nt, Artificial Sequence
  Description of Artificial Sequence: Synthetic oligonucleotide
  Sense strand starting at position 581 of SEQ ID NO: 116
aucuauuaaugagccagau

SEQ ID NO: 12299 - RNA, 19 nt, Artificial Sequence
  Description of Artificial Sequence: Synthetic oligonucleotide
  Antisense strand to SEQ ID NO: 12298
aucuggcucauuaauagau

SEQ ID NO: 12300 - RNA, 19 nt, Artificial Sequence
  Description of Artificial Sequence: Synthetic oligonucleotide
  Sense strand starting at position 599 of SEQ ID NO: 116
ugagaauaccguuaauuac

SEQ ID NO: 12301 - RNA, 19 nt, Artificial Sequence
  Description of Artificial Sequence: Synthetic oligonucleotide
  Antisense strand to SEQ ID NO: 12300
guaauuaacgguauucuca

SEQ ID NO: 12302 - RNA, 19 nt, Artificial Sequence
  Description of Artificial Sequence: Synthetic oligonucleotide
  Sense strand starting at position 608 of SEQ ID NO: 116
cguuaauuacaguaugaua

SEQ ID NO: 12303 - RNA, 19 nt, Artificial Sequence
  Description of Artificial Sequence: Synthetic oligonucleotide
  Antisense strand to SEQ ID NO: 12302
uaucauacuguaauuaacg

SEQ ID NO: 12304 - RNA, 19 nt, Artificial Sequence
  Description of Artificial Sequence: Synthetic oligonucleotide
  Sense strand starting at position 719 of SEQ ID NO: 116
gaaguaauacuuuagcuga

SEQ ID NO: 12305 - RNA, 19 nt, Artificial Sequence
  Description of Artificial Sequence: Synthetic oligonucleotide
  Antisense strand to SEQ ID NO: 12304
ucagcuaaaguauuacuuc

SEQ ID NO: 12306 - RNA, 19 nt, Artificial Sequence
  Description of Artificial Sequence: Synthetic oligonucleotide
  Sense strand starting at position 722 of SEQ ID NO: 116
guaauacuuuagcugaaug

SEQ ID NO: 12307 - RNA, 19 nt, Artificial Sequence
  Description of Artificial Sequence: Synthetic oligonucleotide
  Antisense strand to SEQ ID NO: 12306
cauucagcuaaaguauuac

SEQ ID NO: 12308 - RNA, 19 nt, Artificial Sequence
  Description of Artificial Sequence: Synthetic oligonucleotide
  Sense strand starting at position 748 of SEQ ID NO: 116
gcucacuaggcagauguaa

SEQ ID NO: 12309 - RNA, 19 nt, Artificial Sequence
  Description of Artificial Sequence: Synthetic oligonucleotide
  Antisense strand to SEQ ID NO: 12308
uuacaucugccuagugagc

SEQ ID NO: 12310 - RNA, 19 nt, Artificial Sequence
  Description of Artificial Sequence: Synthetic oligonucleotide
  Sense strand starting at position 761 of SEQ ID NO: 116
auguaauagcaagguaaag

SEQ ID NO: 12311 - RNA, 19 nt, Artificial Sequence
  Description of Artificial Sequence: Synthetic oligonucleotide
  Antisense strand to SEQ ID NO: 12310
cuuuaccuugcuauuacau

SEQ ID NO: 12312 - RNA, 19 nt, Artificial Sequence
  Description of Artificial Sequence: Synthetic oligonucleotide
  Sense strand starting at position 773 of SEQ ID NO: 116
gguaaagauacaugcuaug

SEQ ID NO: 12313 - RNA, 19 nt, Artificial Sequence
  Description of Artificial Sequence: Synthetic oligonucleotide
  Antisense strand to SEQ ID NO: 12312
cauagcauguaucuuuacc

SEQ ID NO: 12314 - RNA, 19 nt, Artificial Sequence
  Description of Artificial Sequence: Synthetic oligonucleotide
  Sense strand starting at position 778 of SEQ ID NO: 116
agauacaugcuaugaggua

SEQ ID NO: 12315 - RNA, 19 nt, Artificial Sequence
  Description of Artificial Sequence: Synthetic oligonucleotide
  Antisense strand to SEQ ID NO: 12314
uaccucauagcauguaucu

SEQ ID NO: 12316 - RNA, 19 nt, Artificial Sequence
  Description of Artificial Sequence: Synthetic oligonucleotide
  Sense strand starting at position 874 of SEQ ID NO: 116
cugugauaaguuuggacuu

SEQ ID NO: 12317 - RNA, 19 nt, Artificial Sequence
  Description of Artificial Sequence: Synthetic oligonucleotide
  Antisense strand to SEQ ID NO: 12316
aaguccaaacuuaucacag

SEQ ID NO: 12318 - RNA, 19 nt, Artificial Sequence
  Description of Artificial Sequence: Synthetic oligonucleotide
  Sense strand starting at position 889 of SEQ ID NO: 116
acuuuauuguuucucagac

SEQ ID NO: 12319 - RNA, 19 nt, Artificial Sequence
  Description of Artificial Sequence: Synthetic oligonucleotide
  Antisense strand to SEQ ID NO: 12318
gucugagaaacaauaaagu

SEQ ID NO: 12320 - RNA, 19 nt, Artificial Sequence
  Description of Artificial Sequence: Synthetic oligonucleotide
  Sense strand starting at position 899 of SEQ ID NO: 116
uucucagacuggucuccua

SEQ ID NO: 12321 - RNA, 19 nt, Artificial Sequence
  Description of Artificial Sequence: Synthetic oligonucleotide
  Antisense strand to SEQ ID NO: 12320
uaggagaccagucugagaa

SEQ ID NO: 12322 - RNA, 19 nt, Artificial Sequence
  Description of Artificial Sequence: Synthetic oligonucleotide
  Sense strand starting at position 1035 of SEQ ID NO: 116
cauaguaaaguuugugaac

SEQ ID NO: 12323 - RNA, 19 nt, Artificial Sequence
  Description of Artificial Sequence: Synthetic oligonucleotide
  Antisense strand to SEQ ID NO: 12322
guucacaaacuuuacuaug

SEQ ID NO: 12324 - RNA, 19 nt, Artificial Sequence
  Description of Artificial Sequence: Synthetic oligonucleotide
  Sense strand starting at position 1050 of SEQ ID NO: 116
gaaccauagcuguaggcaa

SEQ ID NO: 12325 - RNA, 19 nt, Artificial Sequence
  Description of Artificial Sequence: Synthetic oligonucleotide
  Antisense strand to SEQ ID NO: 12324
uugccuacagcuaugguuc

SEQ ID NO: 12326 - RNA, 19 nt, Artificial Sequence
  Description of Artificial Sequence: Synthetic oligonucleotide
  Sense strand starting at position 1057 of SEQ ID NO: 116
agcuguaggcaagaguuau

SEQ ID NO: 12327 - RNA, 19 nt, Artificial Sequence
  Description of Artificial Sequence: Synthetic oligonucleotide
  Antisense strand to SEQ ID NO: 12326
auaacucuugccuacagcu

SEQ ID NO: 12328 - RNA, 19 nt, Artificial Sequence
  Description of Artificial Sequence: Synthetic oligonucleotide
  Sense strand starting at position 1142 of SEQ ID NO: 116
cugcaauugcuuuauugau

SEQ ID NO: 12329 - RNA, 19 nt, Artificial Sequence
  Description of Artificial Sequence: Synthetic oligonucleotide
  Antisense strand to SEQ ID NO: 12328
aucaauaaagcaauugcag

SEQ ID NO: 12330 - RNA, 19 nt, Artificial Sequence
  Description of Artificial Sequence: Synthetic oligonucleotide
  Sense strand starting at position 1322 of SEQ ID NO: 116
gcugaacagguuugaggaa

SEQ ID NO: 12331 - RNA, 19 nt, Artificial Sequence
  Description of Artificial Sequence: Synthetic oligonucleotide
  Antisense strand to SEQ ID NO: 12330
uuccucaaaccuguucagc

SEQ ID NO: 12332 - RNA, 19 nt, Artificial Sequence
  Description of Artificial Sequence: Synthetic oligonucleotide
  Sense strand starting at position 1413 of SEQ ID NO: 116
ugggauacgugggucugaa

SEQ ID NO: 12333 - RNA, 19 nt, Artificial Sequence
  Description of Artificial Sequence: Synthetic oligonucleotide
  Antisense strand to SEQ ID NO: 12332
uucagacccacguauccca

SEQ ID NO: 12334 - RNA, 19 nt, Artificial Sequence
  Description of Artificial Sequence: Synthetic oligonucleotide
  Sense strand starting at position 1447 of SEQ ID NO: 116
cuguacuagcuauauuaua

SEQ ID NO: 12335 - RNA, 19 nt, Artificial Sequence
  Description of Artificial Sequence: Synthetic oligonucleotide
  Antisense strand to SEQ ID NO: 12334
uauaauauagcuaguacag

SEQ ID NO: 12336 - RNA, 19 nt, Artificial Sequence
  Description of Artificial Sequence: Synthetic oligonucleotide
  Sense strand starting at position 1467 of SEQ ID NO: 116
auccaagagucaccaguaa

SEQ ID NO: 12337 - RNA, 19 nt, Artificial Sequence
  Description of Artificial Sequence: Synthetic oligonucleotide
  Antisense strand to SEQ ID NO: 12336
uuacuggugacucuuggau

SEQ ID NO: 12338 - RNA, 19 nt, Artificial Sequence
  Description of Artificial Sequence: Synthetic oligonucleotide
  Sense strand starting at position 1494 of SEQ ID NO: 116
gcccgugauauggaggaaa

SEQ ID NO: 12339 - RNA, 19 nt, Artificial Sequence
  Description of Artificial Sequence: Synthetic oligonucleotide
  Antisense strand to SEQ ID NO: 12338
uuuccuccauaucacgggc

SEQ ID NO: 12340 - RNA, 19 nt, Artificial Sequence
  Description of Artificial Sequence: Synthetic oligonucleotide
  Sense strand starting at position 1496 of SEQ ID NO: 116
ccgugauauggaggaaacu

SEQ ID NO: 12341 - RNA, 19 nt, Artificial Sequence
  Description of Artificial Sequence: Synthetic oligonucleotide
  Antisense strand to SEQ ID NO: 12340
aguuuccuccauaucacgg

SEQ ID NO: 12342 - RNA, 19 nt, Artificial Sequence
  Description of Artificial Sequence: Synthetic oligonucleotide
  Sense strand starting at position 1543 of SEQ ID NO: 116
gggagacugacaugguacu

SEQ ID NO: 12343 - RNA, 19 nt, Artificial Sequence
  Description of Artificial Sequence: Synthetic oligonucleotide
  Antisense strand to SEQ ID NO: 12342
aguaccaugucagucuccc

SEQ ID NO: 12344 - RNA, 19 nt, Artificial Sequence
  Description of Artificial Sequence: Synthetic oligonucleotide
  Sense strand starting at position 1741 of SEQ ID NO: 116
ucagcuugaaugugaggau

SEQ ID NO: 12345 - RNA, 19 nt, Artificial Sequence
  Description of Artificial Sequence: Synthetic oligonucleotide
  Antisense strand to SEQ ID NO: 12344
auccucacauucaagcuga

SEQ ID NO: 12346 - RNA, 19 nt, Artificial Sequence
  Description of Artificial Sequence: Synthetic oligonucleotide
  Sense strand starting at position 1745 of SEQ ID NO: 116
cuugaaugugaggauugca

SEQ ID NO: 12347 - RNA, 19 nt, Artificial Sequence
  Description of Artificial Sequence: Synthetic oligonucleotide
  Antisense strand to SEQ ID NO: 12346
ugcaauccucacauucaag

SEQ ID NO: 12348 - RNA, 19 nt, Artificial Sequence
  Description of Artificial Sequence: Synthetic oligonucleotide
  Sense strand starting at position 2174 of SEQ ID NO: 116
gccguucucaucgcggaua

SEQ ID NO: 12349 - RNA, 19 nt, Artificial Sequence
  Description of Artificial Sequence: Synthetic oligonucleotide
  Antisense strand to SEQ ID NO: 12348
uauccgcgaugagaacggc

SEQ ID NO: 12350 - RNA, 19 nt, Artificial Sequence
  Description of Artificial Sequence: Synthetic oligonucleotide
  Sense strand starting at position 3011 of SEQ ID NO: 116
ccagaauaggaacguguuu

SEQ ID NO: 12351 - RNA, 19 nt, Artificial Sequence
  Description of Artificial Sequence: Synthetic oligonucleotide
  Antisense strand to SEQ ID NO: 12350
aaacacguuccuauucugg

SEQ ID NO: 12352 - RNA, 19 nt, Artificial Sequence
  Description of Artificial Sequence: Synthetic oligonucleotide
  Sense strand starting at position 3044 of SEQ ID NO: 116
uugagauaguuagccauaa

SEQ ID NO: 12353 - RNA, 19 nt, Artificial Sequence
  Description of Artificial Sequence: Synthetic oligonucleotide
  Antisense strand to SEQ ID NO: 12352
uuauggcuaacuaucucaa

SEQ ID NO: 12354 - RNA, 19 nt, Artificial Sequence
  Description of Artificial Sequence: Synthetic oligonucleotide
  Sense strand starting at position 3045 of SEQ ID NO: 116
ugagauaguuagccauaag

SEQ ID NO: 12355 - RNA, 19 nt, Artificial Sequence
  Description of Artificial Sequence: Synthetic oligonucleotide
  Antisense strand to SEQ ID NO: 12354
cuuauggcuaacuaucuca

SEQ ID NO: 12356 - RNA, 19 nt, Artificial Sequence
  Description of Artificial Sequence: Synthetic oligonucleotide
  Sense strand starting at position 3048 of SEQ ID NO: 116
gauaguuagccauaaguug

SEQ ID NO: 12357 - RNA, 19 nt, Artificial Sequence
  Description of Artificial Sequence: Synthetic oligonucleotide
  Antisense strand to SEQ ID NO: 12356
caacuuauggcuaacuauc

SEQ ID NO: 12358 - RNA, 19 nt, Artificial Sequence
  Description of Artificial Sequence: Synthetic oligonucleotide
  Sense strand starting at position 3561 of SEQ ID NO: 116
gggaauugcugacuagacu

SEQ ID NO: 12359 - RNA, 19 nt, Artificial Sequence
  Description of Artificial Sequence: Synthetic oligonucleotide
  Antisense strand to SEQ ID NO: 12358
agucuagucagcaauuccc

SEQ ID NO: 12360 - RNA, 19 nt, Artificial Sequence
  Description of Artificial Sequence: Synthetic oligonucleotide
  Sense strand starting at position 3940 of SEQ ID NO: 116
agggcagauugcuugggaa

SEQ ID NO: 12361 - RNA, 19 nt, Artificial Sequence
  Description of Artificial Sequence: Synthetic oligonucleotide
  Antisense strand to SEQ ID NO: 12360
uucccaagcaaucugcccu

SEQ ID NO: 12362 - RNA, 19 nt, Artificial Sequence
  Description of Artificial Sequence: Synthetic oligonucleotide
  Sense strand starting at position 3942 of SEQ ID NO: 116
ggcagauugcuugggaauc

SEQ ID NO: 12363 - RNA, 19 nt, Artificial Sequence
  Description of Artificial Sequence: Synthetic oligonucleotide
  Antisense strand to SEQ ID NO: 12362
gauucccaagcaaucugcc

SEQ ID NO: 12364 - RNA, 19 nt, Artificial Sequence
  Description of Artificial Sequence: Synthetic oligonucleotide
  Sense strand starting at position 8 of SEQ ID NO: 115
acaaucucggcucauuaua

SEQ ID NO: 12365 - RNA, 19 nt, Artificial Sequence
  Description of Artificial Sequence: Synthetic oligonucleotide
  Antisense strand to SEQ ID NO: 12364
uauaaugagccgagauugu

SEQ ID NO: 12366 - RNA, 19 nt, Artificial Sequence
  Description of Artificial Sequence: Synthetic oligonucleotide
  Sense strand starting at position 268 of SEQ ID NO: 115
ccuaguacuuuggugaaau

SEQ ID NO: 12367 - RNA, 19 nt, Artificial Sequence
  Description of Artificial Sequence: Synthetic oligonucleotide
  Antisense strand to SEQ ID NO: 12366
auuucaccaaaguacuagg

SEQ ID NO: 12368 - RNA, 19 nt, Artificial Sequence
  Description of Artificial Sequence: Synthetic oligonucleotide
  Sense strand starting at position 304 of SEQ ID NO: 115
ggacaugcucuugggacau

SEQ ID NO: 12369 - RNA, 19 nt, Artificial Sequence
  Description of Artificial Sequence: Synthetic oligonucleotide
  Antisense strand to SEQ ID NO: 12368
augucccaagagcaugucc

SEQ ID NO: 12370 - RNA, 19 nt, Artificial Sequence
  Description of Artificial Sequence: Synthetic oligonucleotide
  Sense strand starting at position 365 of SEQ ID NO: 115
aucuauuaaugagccagau

SEQ ID NO: 12371 - RNA, 19 nt, Artificial Sequence
  Description of Artificial Sequence: Synthetic oligonucleotide
  Antisense strand to SEQ ID NO: 12370
aucuggcucauuaauagau

SEQ ID NO: 12372 - RNA, 19 nt, Artificial Sequence
  Description of Artificial Sequence: Synthetic oligonucleotide
  Sense strand starting at position 383 of SEQ ID NO: 115
ugagaauaccguuaauuac

SEQ ID NO: 12373 - RNA, 19 nt, Artificial Sequence
  Description of Artificial Sequence: Synthetic oligonucleotide
  Antisense strand to SEQ ID NO: 12372
guaauuaacgguauucuca

SEQ ID NO: 12374 - RNA, 19 nt, Artificial Sequence
  Description of Artificial Sequence: Synthetic oligonucleotide
  Sense strand starting at position 392 of SEQ ID NO: 115
cguuaauuacaguaugaua

SEQ ID NO: 12375 - RNA, 19 nt, Artificial Sequence
  Description of Artificial Sequence: Synthetic oligonucleotide
  Antisense strand to SEQ ID NO: 12374
uaucauacuguaauuaacg

SEQ ID NO: 12376 - RNA, 19 nt, Artificial Sequence
  Description of Artificial Sequence: Synthetic oligonucleotide
  Sense strand starting at position 503 of SEQ ID NO: 115
gaaguaauacuuuagcuga

SEQ ID NO: 12377 - RNA, 19 nt, Artificial Sequence
  Description of Artificial Sequence: Synthetic oligonucleotide
  Antisense strand to SEQ ID NO: 12376
ucagcuaaaguauuacuuc

SEQ ID NO: 12378 - RNA, 19 nt, Artificial Sequence
  Description of Artificial Sequence: Synthetic oligonucleotide
  Sense strand starting at position 506 of SEQ ID NO: 115
guaauacuuuagcugaaug

SEQ ID NO: 12379 - RNA, 19 nt, Artificial Sequence
  Description of Artificial Sequence: Synthetic oligonucleotide
  Antisense strand to SEQ ID NO: 12378
cauucagcuaaaguauuac

SEQ ID NO: 12380 - RNA, 19 nt, Artificial Sequence
  Description of Artificial Sequence: Synthetic oligonucleotide
  Sense strand starting at position 532 of SEQ ID NO: 115
gcucacuaggcagauguaa

SEQ ID NO: 12381 - RNA, 19 nt, Artificial Sequence
  Description of Artificial Sequence: Synthetic oligonucleotide
  Antisense strand to SEQ ID NO: 12380
uuacaucugccuagugagc

SEQ ID NO: 12382 - RNA, 19 nt, Artificial Sequence
  Description of Artificial Sequence: Synthetic oligonucleotide
  Sense strand starting at position 545 of SEQ ID NO: 115
auguaauagcaagguaaag

SEQ ID NO: 12383 - RNA, 19 nt, Artificial Sequence
  Description of Artificial Sequence: Synthetic oligonucleotide
  Antisense strand to SEQ ID NO: 12382
cuuuaccuugcuauuacau

SEQ ID NO: 12384 - RNA, 19 nt, Artificial Sequence
  Description of Artificial Sequence: Synthetic oligonucleotide
  Sense strand starting at position 557 of SEQ ID NO: 115
gguaaagauacaugcuaug

SEQ ID NO: 12385 - RNA, 19 nt, Artificial Sequence
  Description of Artificial Sequence: Synthetic oligonucleotide
  Antisense strand to SEQ ID NO: 12384
cauagcauguaucuuuacc

SEQ ID NO: 12386 - RNA, 19 nt, Artificial Sequence
  Description of Artificial Sequence: Synthetic oligonucleotide
  Sense strand starting at position 562 of SEQ ID NO: 115
agauacaugcuaugaggua

SEQ ID NO: 12387 - RNA, 19 nt, Artificial Sequence
  Description of Artificial Sequence: Synthetic oligonucleotide
  Antisense strand to SEQ ID NO: 12386
uaccucauagcauguaucu

SEQ ID NO: 12388 - RNA, 19 nt, Artificial Sequence
  Description of Artificial Sequence: Synthetic oligonucleotide
  Sense strand starting at position 658 of SEQ ID NO: 115
cugugauaaguuuggacuu

SEQ ID NO: 12389 - RNA, 19 nt, Artificial Sequence
  Description of Artificial Sequence: Synthetic oligonucleotide
  Antisense strand to SEQ ID NO: 12388
aaguccaaacuuaucacag

SEQ ID NO: 12390 - RNA, 19 nt, Artificial Sequence
  Description of Artificial Sequence: Synthetic oligonucleotide
  Sense strand starting at position 673 of SEQ ID NO: 115
acuuuauuguuucucagac

SEQ ID NO: 12391 - RNA, 19 nt, Artificial Sequence
  Description of Artificial Sequence: Synthetic oligonucleotide
  Antisense strand to SEQ ID NO: 12390
gucugagaaacaauaaagu

SEQ ID NO: 12392 - RNA, 19 nt, Artificial Sequence
  Description of Artificial Sequence: Synthetic oligonucleotide
  Sense strand starting at position 683 of SEQ ID NO: 115
uucucagacuggucuccua

SEQ ID NO: 12393 - RNA, 19 nt, Artificial Sequence
  Description of Artificial Sequence: Synthetic oligonucleotide
  Antisense strand to SEQ ID NO: 12392
uaggagaccagucugagaa

SEQ ID NO: 12394 - RNA, 19 nt, Artificial Sequence
  Description of Artificial Sequence: Synthetic oligonucleotide
  Sense strand starting at position 819 of SEQ ID NO: 115
cauaguaaaguuugugaac

SEQ ID NO: 12395 - RNA, 19 nt, Artificial Sequence
  Description of Artificial Sequence: Synthetic oligonucleotide
  Antisense strand to SEQ ID NO: 12394
guucacaaacuuuacuaug

SEQ ID NO: 12396 - RNA, 19 nt, Artificial Sequence
  Description of Artificial Sequence: Synthetic oligonucleotide
  Sense strand starting at position 834 of SEQ ID NO: 115
gaaccauagcuguaggcaa

SEQ ID NO: 12397 - RNA, 19 nt, Artificial Sequence
  Description of Artificial Sequence: Synthetic oligonucleotide
  Antisense strand to SEQ ID NO: 12396
uugccuacagcuaugguuc

SEQ ID NO: 12398 - RNA, 19 nt, Artificial Sequence
  Description of Artificial Sequence: Synthetic oligonucleotide
  Sense strand starting at position 841 of SEQ ID NO: 115
agcuguaggcaagaguuau

SEQ ID NO: 12399 - RNA, 19 nt, Artificial Sequence
  Description of Artificial Sequence: Synthetic oligonucleotide
  Antisense strand to SEQ ID NO: 12398
auaacucuugccuacagcu

SEQ ID NO: 12400 - RNA, 19 nt, Artificial Sequence
  Description of Artificial Sequence: Synthetic oligonucleotide
  Sense strand starting at position 926 of SEQ ID NO: 115
cugcaauugcuuuauugau

SEQ ID NO: 12401 - RNA, 19 nt, Artificial Sequence
  Description of Artificial Sequence: Synthetic oligonucleotide
  Antisense strand to SEQ ID NO: 12400
aucaauaaagcaauugcag

SEQ ID NO: 12402 - RNA, 19 nt, Artificial Sequence
  Description of Artificial Sequence: Synthetic oligonucleotide
  Sense strand starting at position 1106 of SEQ ID NO: 115
gcugaacagguuugaggaa

SEQ ID NO: 12403 - RNA, 19 nt, Artificial Sequence
  Description of Artificial Sequence: Synthetic oligonucleotide
  Antisense strand to SEQ ID NO: 12402
uuccucaaaccuguucagc

SEQ ID NO: 12404 - RNA, 19 nt, Artificial Sequence
  Description of Artificial Sequence: Synthetic oligonucleotide
  Sense strand starting at position 1197 of SEQ ID NO: 115
ugggauacgugggucugaa

SEQ ID NO: 12405 - RNA, 19 nt, Artificial Sequence
  Description of Artificial Sequence: Synthetic oligonucleotide
  Antisense strand to SEQ ID NO: 12404
uucagacccacguauccca

SEQ ID NO: 12406 - RNA, 19 nt, Artificial Sequence
  Description of Artificial Sequence: Synthetic oligonucleotide
  Sense strand starting at position 1231 of SEQ ID NO: 115
cuguacuagcuauauuaua

SEQ ID NO: 12407 - RNA, 19 nt, Artificial Sequence
  Description of Artificial Sequence: Synthetic oligonucleotide
  Antisense strand to SEQ ID NO: 12406
uauaauauagcuaguacag

SEQ ID NO: 12408 - RNA, 19 nt, Artificial Sequence
  Description of Artificial Sequence: Synthetic oligonucleotide
  Sense strand starting at position 1251 of SEQ ID NO: 115
auccaagagucaccaguaa

SEQ ID NO: 12409 - RNA, 19 nt, Artificial Sequence
  Description of Artificial Sequence: Synthetic oligonucleotide
  Antisense strand to SEQ ID NO: 12408
uuacuggugacucuuggau

SEQ ID NO: 12410 - RNA, 19 nt, Artificial Sequence
  Description of Artificial Sequence: Synthetic oligonucleotide
  Sense strand starting at position 1278 of SEQ ID NO: 115
gcccgugauauggaggaaa

SEQ ID NO: 12411 - RNA, 19 nt, Artificial Sequence
  Description of Artificial Sequence: Synthetic oligonucleotide
  Antisense strand to SEQ ID NO: 12410
uuuccuccauaucacgggc

SEQ ID NO: 12412 - RNA, 19 nt, Artificial Sequence
  Description of Artificial Sequence: Synthetic oligonucleotide
  Sense strand starting at position 1280 of SEQ ID NO: 115
ccgugauauggaggaaacu

SEQ ID NO: 12413 - RNA, 19 nt, Artificial Sequence
  Description of Artificial Sequence: Synthetic oligonucleotide
  Antisense strand to SEQ ID NO: 12412
aguuuccuccauaucacgg

SEQ ID NO: 12414 - RNA, 19 nt, Artificial Sequence
  Description of Artificial Sequence: Synthetic oligonucleotide
  Sense strand starting at position 1327 of SEQ ID NO: 115
gggagacugacaugguacu

SEQ ID NO: 12415 - RNA, 19 nt, Artificial Sequence
  Description of Artificial Sequence: Synthetic oligonucleotide
  Antisense strand to SEQ ID NO: 12414
aguaccaugucagucuccc

SEQ ID NO: 12416 - RNA, 19 nt, Artificial Sequence
  Description of Artificial Sequence: Synthetic oligonucleotide
  Sense strand starting at position 1486 of SEQ ID NO: 115
cuaaucacucgcuggauga

SEQ ID NO: 12417 - RNA, 19 nt, Artificial Sequence
  Description of Artificial Sequence: Synthetic oligonucleotide
  Antisense strand to SEQ ID NO: 12416
ucauccagcgagugauuag

SEQ ID NO: 12418 - RNA, 19 nt, Artificial Sequence
  Description of Artificial Sequence: Synthetic oligonucleotide
  Sense strand starting at position 1525 of SEQ ID NO: 115
ucagcuugaaugugaggau

SEQ ID NO: 12419 - RNA, 19 nt, Artificial Sequence
  Description of Artificial Sequence: Synthetic oligonucleotide
  Antisense strand to SEQ ID NO: 12418
auccucacauucaagcuga

SEQ ID NO: 12420 - RNA, 19 nt, Artificial Sequence
  Description of Artificial Sequence: Synthetic oligonucleotide
  Sense strand starting at position 1529 of SEQ ID NO: 115
cuugaaugugaggauugca

SEQ ID NO: 12421 - RNA, 19 nt, Artificial Sequence
  Description of Artificial Sequence: Synthetic oligonucleotide
  Antisense strand to SEQ ID NO: 12420
ugcaauccucacauucaag

SEQ ID NO: 12422 - RNA, 19 nt, Artificial Sequence
  Description of Artificial Sequence: Synthetic oligonucleotide
  Sense strand starting at position 1958 of SEQ ID NO: 115
gccguucucaucgcggaua

SEQ ID NO: 12423 - RNA, 19 nt, Artificial Sequence
  Description of Artificial Sequence: Synthetic oligonucleotide
  Antisense strand to SEQ ID NO: 12422
uauccgcgaugagaacggc

SEQ ID NO: 12424 - RNA, 19 nt, Artificial Sequence
  Description of Artificial Sequence: Synthetic oligonucleotide
  Sense strand starting at position 2795 of SEQ ID NO: 115
ccagaauaggaacguguuu

SEQ ID NO: 12425 - RNA, 19 nt, Artificial Sequence
  Description of Artificial Sequence: Synthetic oligonucleotide
  Antisense strand to SEQ ID NO: 12424
aaacacguuccuauucugg

SEQ ID NO: 12426 - RNA, 19 nt, Artificial Sequence
  Description of Artificial Sequence: Synthetic oligonucleotide
  Sense strand starting at position 2828 of SEQ ID NO: 115
uugagauaguuagccauaa

SEQ ID NO: 12427 - RNA, 19 nt, Artificial Sequence
  Description of Artificial Sequence: Synthetic oligonucleotide
  Antisense strand to SEQ ID NO: 12426
uuauggcuaacuaucucaa

SEQ ID NO: 12428 - RNA, 19 nt, Artificial Sequence
  Description of Artificial Sequence: Synthetic oligonucleotide
  Sense strand starting at position 2829 of SEQ ID NO: 115
ugagauaguuagccauaag

SEQ ID NO: 12429 - RNA, 19 nt, Artificial Sequence
  Description of Artificial Sequence: Synthetic oligonucleotide
  Antisense strand to SEQ ID NO: 12428
cuuauggcuaacuaucuca

SEQ ID NO: 12430 - RNA, 19 nt, Artificial Sequence
  Description of Artificial Sequence: Synthetic oligonucleotide
  Sense strand starting at position 2832 of SEQ ID NO: 115
gauaguuagccauaaguug

SEQ ID NO: 12431 - RNA, 19 nt, Artificial Sequence
  Description of Artificial Sequence: Synthetic oligonucleotide
  Antisense strand to SEQ ID NO: 12430
caacuuauggcuaacuauc

SEQ ID NO: 12432 - RNA, 19 nt, Artificial Sequence
  Description of Artificial Sequence: Synthetic oligonucleotide
  Sense strand starting at position 3345 of SEQ ID NO: 115
gggaauugcugacuagacu

SEQ ID NO: 12433 - RNA, 19 nt, Artificial Sequence
  Description of Artificial Sequence: Synthetic oligonucleotide
  Antisense strand to SEQ ID NO: 12432
agucuagucagcaauuccc

SEQ ID NO: 12434 - RNA, 19 nt, Artificial Sequence
  Description of Artificial Sequence: Synthetic oligonucleotide
  Sense strand starting at position 3354 of SEQ ID NO: 115
ugacuagacuguuugcuga

SEQ ID NO: 12435 - RNA, 19 nt, Artificial Sequence
  Description of Artificial Sequence: Synthetic oligonucleotide
  Antisense strand to SEQ ID NO: 12434
ucagcaaacagucuaguca

SEQ ID NO: 12436 - RNA, 19 nt, Artificial Sequence
  Description of Artificial Sequence: Synthetic oligonucleotide
  Sense strand starting at position 3724 of SEQ ID NO: 115
agggcagauugcuugggaa

SEQ ID NO: 12437 - RNA, 19 nt, Artificial Sequence
  Description of Artificial Sequence: Synthetic oligonucleotide
  Antisense strand to SEQ ID NO: 12436
uucccaagcaaucugcccu

SEQ ID NO: 12438 - RNA, 19 nt, Artificial Sequence
  Description of Artificial Sequence: Synthetic oligonucleotide
  Sense strand starting at position 3726 of SEQ ID NO: 115
ggcagauugcuugggaauc

SEQ ID NO: 12439 - RNA, 19 nt, Artificial Sequence
  Description of Artificial Sequence: Synthetic oligonucleotide
  Antisense strand to SEQ ID NO: 12438
gauucccaagcaaucugcc

SEQ ID NO: 12440 - RNA, 19 nt, Artificial Sequence
  Description of Artificial Sequence: Synthetic oligonucleotide
  Sense strand starting at position 3835 of SEQ ID NO: 115
agaggagucaguggucacu

SEQ ID NO: 12441 - RNA, 19 nt, Artificial Sequence
  Description of Artificial Sequence: Synthetic oligonucleotide
  Antisense strand to SEQ ID NO: 12440
agugaccacugacuccucu

SEQ ID NO: 12442 - RNA, 19 nt, Artificial Sequence
  Description of Artificial Sequence: Synthetic oligonucleotide
  Sense strand starting at position 3846 of SEQ ID NO: 115
uggucacugggaugacuaa

SEQ ID NO: 12443 - RNA, 19 nt, Artificial Sequence
  Description of Artificial Sequence: Synthetic oligonucleotide
  Antisense strand to SEQ ID NO: 12442
uuagucaucccagugacca

SEQ ID NO: 12444 - RNA, 19 nt, Artificial Sequence
  Description of Artificial Sequence: Synthetic oligonucleotide
  Sense strand starting at position 3927 of SEQ ID NO: 117
guaucuggaugguuauuau

SEQ ID NO: 12445 - RNA, 19 nt, Artificial Sequence
  Description of Artificial Sequence: Synthetic oligonucleotide
  Antisense strand to SEQ ID NO: 12444
auaauaaccauccagauac

SEQ ID NO: 12446 - RNA, 19 nt, Artificial Sequence
  Description of Artificial Sequence: Synthetic oligonucleotide
  Sense strand starting at position 3925 of SEQ ID NO: 117
caguaucuggaugguuauu

SEQ ID NO: 12447 - RNA, 19 nt, Artificial Sequence
  Description of Artificial Sequence: Synthetic oligonucleotide
  Antisense strand to SEQ ID NO: 12446
aauaaccauccagauacug

SEQ ID NO: 12448 - RNA, 19 nt, Artificial Sequence
  Description of Artificial Sequence: Synthetic oligonucleotide
  Sense strand starting at position 3924 of SEQ ID NO: 117
acaguaucuggaugguuau

SEQ ID NO: 12449 - RNA, 19 nt, Artificial Sequence
  Description of Artificial Sequence: Synthetic oligonucleotide
  Antisense strand to SEQ ID NO: 12448
auaaccauccagauacugu

SEQ ID NO: 12450 - RNA, 19 nt, Artificial Sequence
  Description of Artificial Sequence: Synthetic oligonucleotide
  Sense strand starting at position 3869 of SEQ ID NO: 117
cacaguguuucucuaagga

SEQ ID NO: 12451 - RNA, 19 nt, Artificial Sequence
  Description of Artificial Sequence: Synthetic oligonucleotide
  Antisense strand to SEQ ID NO: 12450
uccuuagagaaacacugug

SEQ ID NO: 12452 - RNA, 19 nt, Artificial Sequence
  Description of Artificial Sequence: Synthetic oligonucleotide
  Sense strand starting at position 3791 of SEQ ID NO: 117
cugacuauucugcaaguca

SEQ ID NO: 12453 - RNA, 19 nt, Artificial Sequence
  Description of Artificial Sequence: Synthetic oligonucleotide
  Antisense strand to SEQ ID NO: 12452
ugacuugcagaauagucag

SEQ ID NO: 12454 - RNA, 19 nt, Artificial Sequence
  Description of Artificial Sequence: Synthetic oligonucleotide
  Sense strand starting at position 3781 of SEQ ID NO: 117
uuacuaguggcugacuauu

SEQ ID NO: 12455 - RNA, 19 nt, Artificial Sequence
  Description of Artificial Sequence: Synthetic oligonucleotide
  Antisense strand to SEQ ID NO: 12454
aauagucagccacuaguaa

SEQ ID NO: 12456 - RNA, 19 nt, Artificial Sequence
  Description of Artificial Sequence: Synthetic oligonucleotide
  Sense strand starting at position 3723 of SEQ ID NO: 117
ucguacuucccauaagguu

SEQ ID NO: 12457 - RNA, 19 nt, Artificial Sequence
  Description of Artificial Sequence: Synthetic oligonucleotide
  Antisense strand to SEQ ID NO: 12456
aaccuuaugggaaguacga

SEQ ID NO: 12458 - RNA, 19 nt, Artificial Sequence
  Description of Artificial Sequence: Synthetic oligonucleotide
  Sense strand starting at position 3623 of SEQ ID NO: 117
acuuguaugccuugaauuu

SEQ ID NO: 12459 - RNA, 19 nt, Artificial Sequence
  Description of Artificial Sequence: Synthetic oligonucleotide
  Antisense strand to SEQ ID NO: 12458
aaauucaaggcauacaagu

SEQ ID NO: 12460 - RNA, 19 nt, Artificial Sequence
  Description of Artificial Sequence: Synthetic oligonucleotide
  Sense strand starting at position 3554 of SEQ ID NO: 117
uuaggugaugguuauagua

SEQ ID NO: 12461 - RNA, 19 nt, Artificial Sequence
  Description of Artificial Sequence: Synthetic oligonucleotide
  Antisense strand to SEQ ID NO: 12460
uacuauaaccaucaccuaa

SEQ ID NO: 12462 - RNA, 19 nt, Artificial Sequence
  Description of Artificial Sequence: Synthetic oligonucleotide
  Sense strand starting at position 3547 of SEQ ID NO: 117
agcuuauuuaggugauggu

SEQ ID NO: 12463 - RNA, 19 nt, Artificial Sequence
  Description of Artificial Sequence: Synthetic oligonucleotide
  Antisense strand to SEQ ID NO: 12462
accaucaccuaaauaagcu

SEQ ID NO: 12464 - RNA, 19 nt, Artificial Sequence
  Description of Artificial Sequence: Synthetic oligonucleotide
  Sense strand starting at position 3398 of SEQ ID NO: 117
gucaaacaccucuaauugu

SEQ ID NO: 12465 - RNA, 19 nt, Artificial Sequence
  Description of Artificial Sequence: Synthetic oligonucleotide
  Antisense strand to SEQ ID NO: 12464
acaauuagagguguuugac

SEQ ID NO: 12466 - RNA, 19 nt, Artificial Sequence
  Description of Artificial Sequence: Synthetic oligonucleotide
  Sense strand starting at position 3362 of SEQ ID NO: 117
ccuggcuauuaucucagaa

SEQ ID NO: 12467 - RNA, 19 nt, Artificial Sequence
  Description of Artificial Sequence: Synthetic oligonucleotide
  Antisense strand to SEQ ID NO: 12466
uucugagauaauagccagg

SEQ ID NO: 12468 - RNA, 19 nt, Artificial Sequence
  Description of Artificial Sequence: Synthetic oligonucleotide
  Sense strand starting at position 3275 of SEQ ID NO: 117
uaaaguugggauuaugcau

SEQ ID NO: 12469 - RNA, 19 nt, Artificial Sequence
  Description of Artificial Sequence: Synthetic oligonucleotide
  Antisense strand to SEQ ID NO: 12468
augcauaaucccaacuuua

SEQ ID NO: 12470 - RNA, 19 nt, Artificial Sequence
  Description of Artificial Sequence: Synthetic oligonucleotide
  Sense strand starting at position 3270 of SEQ ID NO: 117
agugauaaaguugggauua

SEQ ID NO: 12471 - RNA, 19 nt, Artificial Sequence
  Description of Artificial Sequence: Synthetic oligonucleotide
  Antisense strand to SEQ ID NO: 12470
uaaucccaacuuuaucacu

SEQ ID NO: 12472 - RNA, 19 nt, Artificial Sequence
  Description of Artificial Sequence: Synthetic oligonucleotide
  Sense strand starting at position 3269 of SEQ ID NO: 117
uagugauaaaguugggauu

SEQ ID NO: 12473 - RNA, 19 nt, Artificial Sequence
  Description of Artificial Sequence: Synthetic oligonucleotide
  Antisense strand to SEQ ID NO: 12472
aaucccaacuuuaucacua

SEQ ID NO: 12474 - RNA, 19 nt, Artificial Sequence
  Description of Artificial Sequence: Synthetic oligonucleotide
  Sense strand starting at position 3259 of SEQ ID NO: 117
caguauagguuagugauaa

SEQ ID NO: 12475 - RNA, 19 nt, Artificial Sequence
  Description of Artificial Sequence: Synthetic oligonucleotide
  Antisense strand to SEQ ID NO: 12474
uuaucacuaaccuauacug

SEQ ID NO: 12476 - RNA, 19 nt, Artificial Sequence
  Description of Artificial Sequence: Synthetic oligonucleotide
  Sense strand starting at position 3257 of SEQ ID NO: 117
cacaguauagguuagugau

SEQ ID NO: 12477 - RNA, 19 nt, Artificial Sequence
  Description of Artificial Sequence: Synthetic oligonucleotide
  Antisense strand to SEQ ID NO: 12476
aucacuaaccuauacugug

SEQ ID NO: 12478 - RNA, 19 nt, Artificial Sequence
  Description of Artificial Sequence: Synthetic oligonucleotide
  Sense strand starting at position 2772 of SEQ ID NO: 117
aauccaucuuuggugauga

SEQ ID NO: 12479 - RNA, 19 nt, Artificial Sequence
  Description of Artificial Sequence: Synthetic oligonucleotide
  Antisense strand to SEQ ID NO: 12478
ucaucaccaaagauggauu

SEQ ID NO: 12480 - RNA, 19 nt, Artificial Sequence
  Description of Artificial Sequence: Synthetic oligonucleotide
  Sense strand starting at position 2770 of SEQ ID NO: 117
cuaauccaucuuuggugau

SEQ ID NO: 12481 - RNA, 19 nt, Artificial Sequence
  Description of Artificial Sequence: Synthetic oligonucleotide
  Antisense strand to SEQ ID NO: 12480
aucaccaaagauggauuag

SEQ ID NO: 12482 - RNA, 19 nt, Artificial Sequence
  Description of Artificial Sequence: Synthetic oligonucleotide
  Sense strand starting at position 2762 of SEQ ID NO: 117
guguauaucuaauccaucu

SEQ ID NO: 12483 - RNA, 19 nt, Artificial Sequence
  Description of Artificial Sequence: Synthetic oligonucleotide
  Antisense strand to SEQ ID NO: 12482
agauggauuagauauacac

SEQ ID NO: 12484 - RNA, 19 nt, Artificial Sequence
  Description of Artificial Sequence: Synthetic oligonucleotide
  Sense strand starting at position 2753 of SEQ ID NO: 117
ggucauugaguguauaucu

SEQ ID NO: 12485 - RNA, 19 nt, Artificial Sequence
  Description of Artificial Sequence: Synthetic oligonucleotide
  Antisense strand to SEQ ID NO: 12484
agauauacacucaaugacc

SEQ ID NO: 12486 - RNA, 19 nt, Artificial Sequence
  Description of Artificial Sequence: Synthetic oligonucleotide
  Sense strand starting at position 2743 of SEQ ID NO: 117
uugaguccuuggucauuga

SEQ ID NO: 12487 - RNA, 19 nt, Artificial Sequence
  Description of Artificial Sequence: Synthetic oligonucleotide
  Antisense strand to SEQ ID NO: 12486
ucaaugaccaaggacucaa

SEQ ID NO: 12488 - RNA, 19 nt, Artificial Sequence
  Description of Artificial Sequence: Synthetic oligonucleotide
  Sense strand starting at position 2690 of SEQ ID NO: 117
ucaugcuaccugcagagau

SEQ ID NO: 12489 - RNA, 19 nt, Artificial Sequence
  Description of Artificial Sequence: Synthetic oligonucleotide
  Antisense strand to SEQ ID NO: 12488
aucucugcagguagcauga

SEQ ID NO: 12490 - RNA, 19 nt, Artificial Sequence
  Description of Artificial Sequence: Synthetic oligonucleotide
  Sense strand starting at position 2438 of SEQ ID NO: 117
uaggauauucuaggauucu

SEQ ID NO: 12491 - RNA, 19 nt, Artificial Sequence
  Description of Artificial Sequence: Synthetic oligonucleotide
  Antisense strand to SEQ ID NO: 12490
agaauccuagaauauccua

SEQ ID NO: 12492 - RNA, 19 nt, Artificial Sequence
  Description of Artificial Sequence: Synthetic oligonucleotide
  Sense strand starting at position 2425 of SEQ ID NO: 117
ugucuuguauuuguaggau

SEQ ID NO: 12493 - RNA, 19 nt, Artificial Sequence
  Description of Artificial Sequence: Synthetic oligonucleotide
  Antisense strand to SEQ ID NO: 12492
auccuacaaauacaagaca

SEQ ID NO: 12494 - RNA, 19 nt, Artificial Sequence
  Description of Artificial Sequence: Synthetic oligonucleotide
  Sense strand starting at position 2424 of SEQ ID NO: 117
uugucuuguauuuguagga

SEQ ID NO: 12495 - RNA, 19 nt, Artificial Sequence
  Description of Artificial Sequence: Synthetic oligonucleotide
  Antisense strand to SEQ ID NO: 12494
uccuacaaauacaagacaa

SEQ ID NO: 12496 - RNA, 19 nt, Artificial Sequence
  Description of Artificial Sequence: Synthetic oligonucleotide
  Sense strand starting at position 2161 of SEQ ID NO: 117
gagacaagugauggcuaga

SEQ ID NO: 12497 - RNA, 19 nt, Artificial Sequence
  Description of Artificial Sequence: Synthetic oligonucleotide
  Antisense strand to SEQ ID NO: 12496
ucuagccaucacuugucuc

SEQ ID NO: 12498 - RNA, 19 nt, Artificial Sequence
  Description of Artificial Sequence: Synthetic oligonucleotide
  Sense strand starting at position 2147 of SEQ ID NO: 117
ggaguuauuuauuagagac

SEQ ID NO: 12499 - RNA, 19 nt, Artificial Sequence
  Description of Artificial Sequence: Synthetic oligonucleotide
  Antisense strand to SEQ ID NO: 12498
gucucuaauaaauaacucc

SEQ ID NO: 12500 - RNA, 19 nt, Artificial Sequence
  Description of Artificial Sequence: Synthetic oligonucleotide
  Sense strand starting at position 1723 of SEQ ID NO: 117
aggucugcgggauaaagaa

SEQ ID NO: 12501 - RNA, 19 nt, Artificial Sequence
  Description of Artificial Sequence: Synthetic oligonucleotide
  Antisense strand to SEQ ID NO: 12500
uucuuuaucccgcagaccu

SEQ ID NO: 12502 - RNA, 19 nt, Artificial Sequence
  Description of Artificial Sequence: Synthetic oligonucleotide
  Sense strand starting at position 1721 of SEQ ID NO: 117
ugaggucugcgggauaaag

SEQ ID NO: 12503 - RNA, 19 nt, Artificial Sequence
  Description of Artificial Sequence: Synthetic oligonucleotide
  Antisense strand to SEQ ID NO: 12502
cuuuaucccgcagaccuca

SEQ ID NO: 12504 - RNA, 19 nt, Artificial Sequence
  Description of Artificial Sequence: Synthetic oligonucleotide
  Sense strand starting at position 626 of SEQ ID NO: 117
aguugucuaccugaugcaa

SEQ ID NO: 12505 - RNA, 19 nt, Artificial Sequence
  Description of Artificial Sequence: Synthetic oligonucleotide
  Antisense strand to SEQ ID NO: 12504
uugcaucagguagacaacu

SEQ ID NO: 12506 - RNA, 19 nt, Artificial Sequence
  Description of Artificial Sequence: Synthetic oligonucleotide
  Sense strand starting at position 621 of SEQ ID NO: 117
auuauaguugucuaccuga

SEQ ID NO: 12507 - RNA, 19 nt, Artificial Sequence
  Description of Artificial Sequence: Synthetic oligonucleotide
  Antisense strand to SEQ ID NO: 12506
ucagguagacaacuauaau

SEQ ID NO: 12508 - RNA, 19 nt, Artificial Sequence
  Description of Artificial Sequence: Synthetic oligonucleotide
  Sense strand starting at position 356 of SEQ ID NO: 117
gugugaauccauggaagaa

SEQ ID NO: 12509 - RNA, 19 nt, Artificial Sequence
  Description of Artificial Sequence: Synthetic oligonucleotide
  Antisense strand to SEQ ID NO: 12508
uucuuccauggauucacac

SEQ ID NO: 12510 - RNA, 19 nt, Artificial Sequence
  Description of Artificial Sequence: Synthetic oligonucleotide
  Sense strand starting at position 345 of SEQ ID NO: 117
uccuguaagaagugugaau

SEQ ID NO: 12511 - RNA, 19 nt, Artificial Sequence
  Description of Artificial Sequence: Synthetic oligonucleotide
  Antisense strand to SEQ ID NO: 12510
auucacacuucuuacagga

SEQ ID NO: 12512 - RNA, 19 nt, Artificial Sequence
  Description of Artificial Sequence: Synthetic oligonucleotide
  Sense strand starting at position 334 of SEQ ID NO: 117
uuuaaaucauguccuguaa

SEQ ID NO: 12513 - RNA, 19 nt, Artificial Sequence
  Description of Artificial Sequence: Synthetic oligonucleotide
  Antisense strand to SEQ ID NO: 12512
uuacaggacaugauuuaaa

SEQ ID NO: 12514 - RNA, 19 nt, Artificial Sequence
  Description of Artificial Sequence: Synthetic oligonucleotide
  Sense strand starting at position 307 of SEQ ID NO: 117
uauagagggcaaugucaua

SEQ ID NO: 12515 - RNA, 19 nt, Artificial Sequence
  Description of Artificial Sequence: Synthetic oligonucleotide
  Antisense strand to SEQ ID NO: 12514
uaugacauugcccucuaua

SEQ ID NO: 12516 - RNA, 19 nt, Artificial Sequence
  Description of Artificial Sequence: Synthetic oligonucleotide
  Sense strand starting at position 301 of SEQ ID NO: 117
ccagguuauagagggcaau

SEQ ID NO: 12517 - RNA, 19 nt, Artificial Sequence
  Description of Artificial Sequence: Synthetic oligonucleotide
  Antisense strand to SEQ ID NO: 12516
auugcccucuauaaccugg

SEQ ID NO: 12518 - RNA, 19 nt, Artificial Sequence
  Description of Artificial Sequence: Synthetic oligonucleotide
  Sense strand starting at position 251 of SEQ ID NO: 117
gaguauucuguguauacuc

SEQ ID NO: 12519 - RNA, 19 nt, Artificial Sequence
  Description of Artificial Sequence: Synthetic oligonucleotide
  Antisense strand to SEQ ID NO: 12518
gaguauacacagaauacuc

SEQ ID NO: 12520 - RNA, 19 nt, Artificial Sequence
  Description of Artificial Sequence: Synthetic oligonucleotide
  Sense strand starting at position 177 of SEQ ID NO: 117
cagugugauaguuaggaug

SEQ ID NO: 12521 - RNA, 19 nt, Artificial Sequence
  Description of Artificial Sequence: Synthetic oligonucleotide
  Antisense strand to SEQ ID NO: 12520
cauccuaacuaucacacug

SEQ ID NO: 12522 - RNA, 19 nt, Artificial Sequence
  Description of Artificial Sequence: Synthetic oligonucleotide
  Sense strand starting at position 84 of SEQ ID NO: 117
cuuauaucuguugacgaug

SEQ ID NO: 12523 - RNA, 19 nt, Artificial Sequence
  Description of Artificial Sequence: Synthetic oligonucleotide
  Antisense strand to SEQ ID NO: 12522
caucgucaacagauauaag

SEQ ID NO: 12524 - RNA, 19 nt, Artificial Sequence
  Description of Artificial Sequence: Synthetic oligonucleotide
  Sense strand starting at position 15 of SEQ ID NO: 118
ggagauacaucccugaucu

SEQ ID NO: 12525 - RNA, 19 nt, Artificial Sequence
  Description of Artificial Sequence: Synthetic oligonucleotide
  Antisense strand to SEQ ID NO: 12524
agaucagggauguaucucc

SEQ ID NO: 12526 - RNA, 19 nt, Artificial Sequence
  Description of Artificial Sequence: Synthetic oligonucleotide
  Sense strand starting at position 46 of SEQ ID NO: 118
cugagauguugagccaaag

SEQ ID NO: 12527 - RNA, 19 nt, Artificial Sequence
  Description of Artificial Sequence: Synthetic oligonucleotide
  Antisense strand to SEQ ID NO: 12526
cuuuggcucaacaucucag

SEQ ID NO: 12528 - RNA, 19 nt, Artificial Sequence
  Description of Artificial Sequence: Synthetic oligonucleotide
  Sense strand starting at position 135 of SEQ ID NO: 118
gguggaucuuaccugaagu

SEQ ID NO: 12529 - RNA, 19 nt, Artificial Sequence
  Description of Artificial Sequence: Synthetic oligonucleotide
  Antisense strand to SEQ ID NO: 12528
acuucagguaagauccacc

SEQ ID NO: 12530 - RNA, 19 nt, Artificial Sequence
  Description of Artificial Sequence: Synthetic oligonucleotide
  Sense strand starting at position 136 of SEQ ID NO: 118
guggaucuuaccugaaguc

SEQ ID NO: 12531 - RNA, 19 nt, Artificial Sequence
  Description of Artificial Sequence: Synthetic oligonucleotide
  Antisense strand to SEQ ID NO: 12530
gacuucagguaagauccac

SEQ ID NO: 12532 - RNA, 19 nt, Artificial Sequence
  Description of Artificial Sequence: Synthetic oligonucleotide
  Sense strand starting at position 157 of SEQ ID NO: 118
gaaguaauagggugagucu

SEQ ID NO: 12533 - RNA, 19 nt, Artificial Sequence
  Description of Artificial Sequence: Synthetic oligonucleotide
  Antisense strand to SEQ ID NO: 12532
agacucacccuauuacuuc

SEQ ID NO: 12534 - RNA, 19 nt, Artificial Sequence
  Description of Artificial Sequence: Synthetic oligonucleotide
  Sense strand starting at position 277 of SEQ ID NO: 118
aagggaggaucucaucaau

SEQ ID NO: 12535 - RNA, 19 nt, Artificial Sequence
  Description of Artificial Sequence: Synthetic oligonucleotide
  Antisense strand to SEQ ID NO: 12534
auugaugagauccucccuu

SEQ ID NO: 12536 - RNA, 19 nt, Artificial Sequence
  Description of Artificial Sequence: Synthetic oligonucleotide
  Sense strand starting at position 283 of SEQ ID NO: 118
ggaucucaucaaugucaga

SEQ ID NO: 12537 - RNA, 19 nt, Artificial Sequence
  Description of Artificial Sequence: Synthetic oligonucleotide
  Antisense strand to SEQ ID NO: 12536
ucugacauugaugagaucc

SEQ ID NO: 12538 - RNA, 19 nt, Artificial Sequence
  Description of Artificial Sequence: Synthetic oligonucleotide
  Sense strand starting at position 336 of SEQ ID NO: 118
cccauucccgguuacaauu

SEQ ID NO: 12539 - RNA, 19 nt, Artificial Sequence
  Description of Artificial Sequence: Synthetic oligonucleotide
  Antisense strand to SEQ ID NO: 12538
aauuguaaccgggaauggg

SEQ ID NO: 12540 - RNA, 19 nt, Artificial Sequence
  Description of Artificial Sequence: Synthetic oligonucleotide
  Sense strand starting at position 379 of SEQ ID NO: 118
accaacuuucuuuggaagu

SEQ ID NO: 12541 - RNA, 19 nt, Artificial Sequence
  Description of Artificial Sequence: Synthetic oligonucleotide
  Antisense strand to SEQ ID NO: 12540
acuuccaaagaaaguuggu

SEQ ID NO: 12542 - RNA, 19 nt, Artificial Sequence
  Description of Artificial Sequence: Synthetic oligonucleotide
  Sense strand starting at position 433 of SEQ ID NO: 118
uguggauauuuagagacuu

SEQ ID NO: 12543 - RNA, 19 nt, Artificial Sequence
  Description of Artificial Sequence: Synthetic oligonucleotide
  Antisense strand to SEQ ID NO: 12542
aagucucuaaauauccaca

SEQ ID NO: 12544 - RNA, 19 nt, Artificial Sequence
  Description of Artificial Sequence: Synthetic oligonucleotide
  Sense strand starting at position 523 of SEQ ID NO: 118
gauggagaugggugaucuu

SEQ ID NO: 12545 - RNA, 19 nt, Artificial Sequence
  Description of Artificial Sequence: Synthetic oligonucleotide
  Antisense strand to SEQ ID NO: 12544
aagaucacccaucuccauc

SEQ ID NO: 12546 - RNA, 19 nt, Artificial Sequence
  Description of Artificial Sequence: Synthetic oligonucleotide
  Sense strand starting at position 1051 of SEQ ID NO: 118
ggguaacugucuccaccaa

SEQ ID NO: 12547 - RNA, 19 nt, Artificial Sequence
  Description of Artificial Sequence: Synthetic oligonucleotide
  Antisense strand to SEQ ID NO: 12546
uugguggagacaguuaccc

SEQ ID NO: 12548 - RNA, 19 nt, Artificial Sequence
  Description of Artificial Sequence: Synthetic oligonucleotide
  Sense strand starting at position 1066 of SEQ ID NO: 118
ccaagagacucaucuguag

SEQ ID NO: 12549 - RNA, 19 nt, Artificial Sequence
  Description of Artificial Sequence: Synthetic oligonucleotide
  Antisense strand to SEQ ID NO: 12548
cuacagaugagucucuugg

SEQ ID NO: 12550 - RNA, 19 nt, Artificial Sequence
  Description of Artificial Sequence: Synthetic oligonucleotide
  Sense strand starting at position 1267 of SEQ ID NO: 118
cgucgcugggaggaauaua

SEQ ID NO: 12551 - RNA, 19 nt, Artificial Sequence
  Description of Artificial Sequence: Synthetic oligonucleotide
  Antisense strand to SEQ ID NO: 12550
uauauuccucccagcgacg

SEQ ID NO: 12552 - RNA, 19 nt, Artificial Sequence
  Description of Artificial Sequence: Synthetic oligonucleotide
  Sense strand starting at position 1275 of SEQ ID NO: 118
ggaggaauauaggaggaau

SEQ ID NO: 12553 - RNA, 19 nt, Artificial Sequence
  Description of Artificial Sequence: Synthetic oligonucleotide
  Antisense strand to SEQ ID NO: 12552
auuccuccuauauuccucc

SEQ ID NO: 12554 - RNA, 19 nt, Artificial Sequence
  Description of Artificial Sequence: Synthetic oligonucleotide
  Sense strand starting at position 1294 of SEQ ID NO: 118
cugugagauccuuggaagg

SEQ ID NO: 12555 - RNA, 19 nt, Artificial Sequence
  Description of Artificial Sequence: Synthetic oligonucleotide
  Antisense strand to SEQ ID NO: 12554
ccuuccaaggaucucacag

SEQ ID NO: 12556 - RNA, 19 nt, Artificial Sequence
  Description of Artificial Sequence: Synthetic oligonucleotide
  Sense strand starting at position 1523 of SEQ ID NO: 118
cagccacagugaucaagaa

SEQ ID NO: 12557 - RNA, 19 nt, Artificial Sequence
  Description of Artificial Sequence: Synthetic oligonucleotide
  Antisense strand to SEQ ID NO: 12556
uucuugaucacuguggcug

SEQ ID NO: 12558 - RNA, 19 nt, Artificial Sequence
  Description of Artificial Sequence: Synthetic oligonucleotide
  Sense strand starting at position 1899 of SEQ ID NO: 118
cgaccugcugggaguugua

SEQ ID NO: 12559 - RNA, 19 nt, Artificial Sequence
  Description of Artificial Sequence: Synthetic oligonucleotide
  Antisense strand to SEQ ID NO: 12558
uacaacucccagcaggucg

SEQ ID NO: 12560 - RNA, 19 nt, Artificial Sequence
  Description of Artificial Sequence: Synthetic oligonucleotide
  Sense strand starting at position 2103 of SEQ ID NO: 118
gguagauccuguuugaauc

SEQ ID NO: 12561 - RNA, 19 nt, Artificial Sequence
  Description of Artificial Sequence: Synthetic oligonucleotide
  Antisense strand to SEQ ID NO: 12560
gauucaaacaggaucuacc

SEQ ID NO: 12562 - RNA, 19 nt, Artificial Sequence
  Description of Artificial Sequence: Synthetic oligonucleotide
  Sense strand starting at position 2104 of SEQ ID NO: 118
guagauccuguuugaaucu

SEQ ID NO: 12563 - RNA, 19 nt, Artificial Sequence
  Description of Artificial Sequence: Synthetic oligonucleotide
  Antisense strand to SEQ ID NO: 12562
agauucaaacaggaucuac

SEQ ID NO: 12564 - RNA, 19 nt, Artificial Sequence
  Description of Artificial Sequence: Synthetic oligonucleotide
  Sense strand starting at position 2184 of SEQ ID NO: 118
uuacuugaaugagaggaaa

SEQ ID NO: 12565 - RNA, 19 nt, Artificial Sequence
  Description of Artificial Sequence: Synthetic oligonucleotide
  Antisense strand to SEQ ID NO: 12564
uuuccucucauucaaguaa

SEQ ID NO: 12566 - RNA, 19 nt, Artificial Sequence
  Description of Artificial Sequence: Synthetic oligonucleotide
  Sense strand starting at position 2209 of SEQ ID NO: 118
agagcugcugccuaagaga

SEQ ID NO: 12567 - RNA, 19 nt, Artificial Sequence
  Description of Artificial Sequence: Synthetic oligonucleotide
  Antisense strand to SEQ ID NO: 12566
ucucuuaggcagcagcucu

SEQ ID NO: 12568 - RNA, 19 nt, Artificial Sequence
  Description of Artificial Sequence: Synthetic oligonucleotide
  Sense strand starting at position 2250 of SEQ ID NO: 118
gagcucuucggacagacua

SEQ ID NO: 12569 - RNA, 19 nt, Artificial Sequence
  Description of Artificial Sequence: Synthetic oligonucleotide
  Antisense strand to SEQ ID NO: 12568
uagucuguccgaagagcuc

SEQ ID NO: 12570 - RNA, 19 nt, Artificial Sequence
  Description of Artificial Sequence: Synthetic oligonucleotide
  Sense strand starting at position 2286 of SEQ ID NO: 118
uacaguauaucgcuaauga

SEQ ID NO: 12571 - RNA, 19 nt, Artificial Sequence
  Description of Artificial Sequence: Synthetic oligonucleotide
  Antisense strand to SEQ ID NO: 12570
ucauuagcgauauacugua

SEQ ID NO: 12572 - RNA, 19 nt, Artificial Sequence
  Description of Artificial Sequence: Synthetic oligonucleotide
  Sense strand starting at position 2287 of SEQ ID NO: 118
acaguauaucgcuaaugaa

SEQ ID NO: 12573 - RNA, 19 nt, Artificial Sequence
  Description of Artificial Sequence: Synthetic oligonucleotide
  Antisense strand to SEQ ID NO: 12572
uucauuagcgauauacugu

SEQ ID NO: 12574 - RNA, 19 nt, Artificial Sequence
  Description of Artificial Sequence: Synthetic oligonucleotide
  Sense strand starting at position 2322 of SEQ ID NO: 118
acaagagaaucggagagaa

SEQ ID NO: 12575 - RNA, 19 nt, Artificial Sequence
  Description of Artificial Sequence: Synthetic oligonucleotide
  Antisense strand to SEQ ID NO: 12574
uucucuccgauucucuugu

SEQ ID NO: 12576 - RNA, 19 nt, Artificial Sequence
  Description of Artificial Sequence: Synthetic oligonucleotide
  Sense strand starting at position 2380 of SEQ ID NO: 118
gaaagaguccgggaguuua

SEQ ID NO: 12577 - RNA, 19 nt, Artificial Sequence
  Description of Artificial Sequence: Synthetic oligonucleotide
  Antisense strand to SEQ ID NO: 12576
uaaacucccggacucuuuc

SEQ ID NO: 12578 - RNA, 19 nt, Artificial Sequence
  Description of Artificial Sequence: Synthetic oligonucleotide
  Sense strand starting at position 2540 of SEQ ID NO: 118
uguauauuagagugaauga

SEQ ID NO: 12579 - RNA, 19 nt, Artificial Sequence
  Description of Artificial Sequence: Synthetic oligonucleotide
  Antisense strand to SEQ ID NO: 12578
ucauucacucuaauauaca

SEQ ID NO: 12580 - RNA, 19 nt, Artificial Sequence
  Description of Artificial Sequence: Synthetic oligonucleotide
  Sense strand starting at position 2732 of SEQ ID NO: 118
gggcaaauauagcuugaac

SEQ ID NO: 12581 - RNA, 19 nt, Artificial Sequence
  Description of Artificial Sequence: Synthetic oligonucleotide
  Antisense strand to SEQ ID NO: 12580
guucaagcuauauuugccc

SEQ ID NO: 12582 - RNA, 19 nt, Artificial Sequence
  Description of Artificial Sequence: Synthetic oligonucleotide
  Sense strand starting at position 2859 of SEQ ID NO: 118
aggguauuguaaucucauu

SEQ ID NO: 12583 - RNA, 19 nt, Artificial Sequence
  Description of Artificial Sequence: Synthetic oligonucleotide
  Antisense strand to SEQ ID NO: 12582
aaugagauuacaauacccu

SEQ ID NO: 12584 - RNA, 19 nt, Artificial Sequence
  Description of Artificial Sequence: Synthetic oligonucleotide
  Sense strand starting at position 2887 of SEQ ID NO: 118
agagguuaguccuuaggga

SEQ ID NO: 12585 - RNA, 19 nt, Artificial Sequence
  Description of Artificial Sequence: Synthetic oligonucleotide
  Antisense strand to SEQ ID NO: 12584
ucccuaaggacuaaccucu

SEQ ID NO: 12586 - RNA, 19 nt, Artificial Sequence
  Description of Artificial Sequence: Synthetic oligonucleotide
  Sense strand starting at position 2895 of SEQ ID NO: 118
guccuuagggaagauguua

SEQ ID NO: 12587 - RNA, 19 nt, Artificial Sequence
  Description of Artificial Sequence: Synthetic oligonucleotide
  Antisense strand to SEQ ID NO: 12586
uaacaucuucccuaaggac

SEQ ID NO: 12588 - RNA, 19 nt, Artificial Sequence
  Description of Artificial Sequence: Synthetic oligonucleotide
  Sense strand starting at position 2917 of SEQ ID NO: 118
aaaggaaucugaggaugga

SEQ ID NO: 12589 - RNA, 19 nt, Artificial Sequence
  Description of Artificial Sequence: Synthetic oligonucleotide
  Antisense strand to SEQ ID NO: 12588
uccauccucagauuccuuu

SEQ ID NO: 12590 - RNA, 19 nt, Artificial Sequence
  Description of Artificial Sequence: Synthetic oligonucleotide
  Sense strand starting at position 2965 of SEQ ID NO: 118
uugaaagcauaaucaaagu

SEQ ID NO: 12591 - RNA, 19 nt, Artificial Sequence
  Description of Artificial Sequence: Synthetic oligonucleotide
  Antisense strand to SEQ ID NO: 12590
acuuugauuaugcuuucaa

SEQ ID NO: 12592 - RNA, 19 nt, Artificial Sequence
  Description of Artificial Sequence: Synthetic oligonucleotide
  Sense strand starting at position 3029 of SEQ ID NO: 118
cuuuccuuccuggaaguga

SEQ ID NO: 12593 - RNA, 19 nt, Artificial Sequence
  Description of Artificial Sequence: Synthetic oligonucleotide
  Antisense strand to SEQ ID NO: 12592
ucacuuccaggaaggaaag

SEQ ID NO: 12594 - RNA, 19 nt, Artificial Sequence
  Description of Artificial Sequence: Synthetic oligonucleotide
  Sense strand starting at position 3090 of SEQ ID NO: 118
acaugucuuccaggauauu

SEQ ID NO: 12595 - RNA, 19 nt, Artificial Sequence
  Description of Artificial Sequence: Synthetic oligonucleotide
  Antisense strand to SEQ ID NO: 12594
aauauccuggaagacaugu

SEQ ID NO: 12596 - RNA, 19 nt, Artificial Sequence
  Description of Artificial Sequence: Synthetic oligonucleotide
  Sense strand starting at position 3123 of SEQ ID NO: 118
aggaauagauuguauagau

SEQ ID NO: 12597 - RNA, 19 nt, Artificial Sequence
  Description of Artificial Sequence: Synthetic oligonucleotide
  Antisense strand to SEQ ID NO: 12596
aucuauacaaucuauuccu

SEQ ID NO: 12598 - RNA, 19 nt, Artificial Sequence
  Description of Artificial Sequence: Synthetic oligonucleotide
  Sense strand starting at position 3338 of SEQ ID NO: 118
ccacgagaauagcuugaau

SEQ ID NO: 12599 - RNA, 19 nt, Artificial Sequence
  Description of Artificial Sequence: Synthetic oligonucleotide
  Antisense strand to SEQ ID NO: 12598
auucaagcuauucucgugg

SEQ ID NO: 12600 - RNA, 19 nt, Artificial Sequence
  Description of Artificial Sequence: Synthetic oligonucleotide
  Sense strand starting at position 3474 of SEQ ID NO: 118
ggcaaauuauucccuaaug

SEQ ID NO: 12601 - RNA, 19 nt, Artificial Sequence
  Description of Artificial Sequence: Synthetic oligonucleotide
  Antisense strand to SEQ ID NO: 12600
cauuagggaauaauuugcc

SEQ ID NO: 12602 - RNA, 19 nt, Artificial Sequence
  Description of Artificial Sequence: Synthetic oligonucleotide
  Sense strand starting at position 3815 of SEQ ID NO: 118
uagcguuaucaugaccugu

SEQ ID NO: 12603 - RNA, 19 nt, Artificial Sequence
  Description of Artificial Sequence: Synthetic oligonucleotide
  Antisense strand to SEQ ID NO: 12602
acaggucaugauaacgcua

SEQ ID NO: 12604 - RNA, 19 nt, Artificial Sequence
  Description of Artificial Sequence: Synthetic oligonucleotide
  Sense strand starting at position 3853 of SEQ ID NO: 119
acuagaugucaguguugca

SEQ ID NO: 12605 - RNA, 19 nt, Artificial Sequence
  Description of Artificial Sequence: Synthetic oligonucleotide
  Antisense strand to SEQ ID NO: 12604
ugcaacacugacaucuagu

SEQ ID NO: 12606 - RNA, 19 nt, Artificial Sequence
  Description of Artificial Sequence: Synthetic oligonucleotide
  Sense strand starting at position 3840 of SEQ ID NO: 119
cuauaaucuggccacuaga

SEQ ID NO: 12607 - RNA, 19 nt, Artificial Sequence
  Description of Artificial Sequence: Synthetic oligonucleotide
  Antisense strand to SEQ ID NO: 12606
ucuaguggccagauuauag

SEQ ID NO: 12608 - RNA, 19 nt, Artificial Sequence
  Description of Artificial Sequence: Synthetic oligonucleotide
  Sense strand starting at position 3831 of SEQ ID NO: 119
gaaguagcccuauaaucug

SEQ ID NO: 12609 - RNA, 19 nt, Artificial Sequence
  Description of Artificial Sequence: Synthetic oligonucleotide
  Antisense strand to SEQ ID NO: 12608
cagauuauagggcuacuuc

SEQ ID NO: 12610 - RNA, 19 nt, Artificial Sequence
  Description of Artificial Sequence: Synthetic oligonucleotide
  Sense strand starting at position 3596 of SEQ ID NO: 119
ggucgaggguugagguauu

SEQ ID NO: 12611 - RNA, 19 nt, Artificial Sequence
  Description of Artificial Sequence: Synthetic oligonucleotide
  Antisense strand to SEQ ID NO: 12610
aauaccucaacccucgacc

SEQ ID NO: 12612 - RNA, 19 nt, Artificial Sequence
  Description of Artificial Sequence: Synthetic oligonucleotide
  Sense strand starting at position 3590 of SEQ ID NO: 119
gaaauaggucgaggguuga

SEQ ID NO: 12613 - RNA, 19 nt, Artificial Sequence
  Description of Artificial Sequence: Synthetic oligonucleotide
  Antisense strand to SEQ ID NO: 12612
ucaacccucgaccuauuuc

SEQ ID NO: 12614 - RNA, 19 nt, Artificial Sequence
  Description of Artificial Sequence: Synthetic oligonucleotide
  Sense strand starting at position 3587 of SEQ ID NO: 119
ugagaaauaggucgagggu

SEQ ID NO: 12615 - RNA, 19 nt, Artificial Sequence
  Description of Artificial Sequence: Synthetic oligonucleotide
  Antisense strand to SEQ ID NO: 12614
acccucgaccuauuucuca

SEQ ID NO: 12616 - RNA, 19 nt, Artificial Sequence
  Description of Artificial Sequence: Synthetic oligonucleotide
  Sense strand starting at position 3252 of SEQ ID NO: 119
gugacaugugugcaauaca

SEQ ID NO: 12617 - RNA, 19 nt, Artificial Sequence
  Description of Artificial Sequence: Synthetic oligonucleotide
  Antisense strand to SEQ ID NO: 12616
uguauugcacacaugucac

SEQ ID NO: 12618 - RNA, 19 nt, Artificial Sequence
  Description of Artificial Sequence: Synthetic oligonucleotide
  Sense strand starting at position 3250 of SEQ ID NO: 119
cagugacaugugugcaaua

SEQ ID NO: 12619 - RNA, 19 nt, Artificial Sequence
  Description of Artificial Sequence: Synthetic oligonucleotide
  Antisense strand to SEQ ID NO: 12618
uauugcacacaugucacug

SEQ ID NO: 12620 - RNA, 19 nt, Artificial Sequence
  Description of Artificial Sequence: Synthetic oligonucleotide
  Sense strand starting at position 3248 of SEQ ID NO: 119
uccagugacaugugugcaa

SEQ ID NO: 12621 - RNA, 19 nt, Artificial Sequence
  Description of Artificial Sequence: Synthetic oligonucleotide
  Antisense strand to SEQ ID NO: 12620
uugcacacaugucacugga

SEQ ID NO: 12622 - RNA, 19 nt, Artificial Sequence
  Description of Artificial Sequence: Synthetic oligonucleotide
  Sense strand starting at position 3241 of SEQ ID NO: 119
acaguauuccagugacaug

SEQ ID NO: 12623 - RNA, 19 nt, Artificial Sequence
  Description of Artificial Sequence: Synthetic oligonucleotide
  Antisense strand to SEQ ID NO: 12622
caugucacuggaauacugu

SEQ ID NO: 12624 - RNA, 19 nt, Artificial Sequence
  Description of Artificial Sequence: Synthetic oligonucleotide
  Sense strand starting at position 3220 of SEQ ID NO: 119
guugcuucccaggauuaaa

SEQ ID NO: 12625 - RNA, 19 nt, Artificial Sequence
  Description of Artificial Sequence: Synthetic oligonucleotide
  Antisense strand to SEQ ID NO: 12624
uuuaauccugggaagcaac

SEQ ID NO: 12626 - RNA, 19 nt, Artificial Sequence
  Description of Artificial Sequence: Synthetic oligonucleotide
  Sense strand starting at position 3219 of SEQ ID NO: 119
aguugcuucccaggauuaa

SEQ ID NO: 12627 - RNA, 19 nt, Artificial Sequence
  Description of Artificial Sequence: Synthetic oligonucleotide
  Antisense strand to SEQ ID NO: 12626
uuaauccugggaagcaacu

SEQ ID NO: 12628 - RNA, 19 nt, Artificial Sequence
  Description of Artificial Sequence: Synthetic oligonucleotide
  Sense strand starting at position 3216 of SEQ ID NO: 119
agcaguugcuucccaggau

SEQ ID NO: 12629 - RNA, 19 nt, Artificial Sequence
  Description of Artificial Sequence: Synthetic oligonucleotide
  Antisense strand to SEQ ID NO: 12628
auccugggaagcaacugcu

SEQ ID NO: 12630 - RNA, 19 nt, Artificial Sequence
  Description of Artificial Sequence: Synthetic oligonucleotide
  Sense strand starting at position 3193 of SEQ ID NO: 119
accuguguguucccucauu

SEQ ID NO: 12631 - RNA, 19 nt, Artificial Sequence
  Description of Artificial Sequence: Synthetic oligonucleotide
  Antisense strand to SEQ ID NO: 12630
aaugagggaacacacaggu

SEQ ID NO: 12632 - RNA, 19 nt, Artificial Sequence
  Description of Artificial Sequence: Synthetic oligonucleotide
  Sense strand starting at position 3174 of SEQ ID NO: 119
ggaaguuccugugcuuugu

SEQ ID NO: 12633 - RNA, 19 nt, Artificial Sequence
  Description of Artificial Sequence: Synthetic oligonucleotide
  Antisense strand to SEQ ID NO: 12632
acaaagcacaggaacuucc

SEQ ID NO: 12634 - RNA, 19 nt, Artificial Sequence
  Description of Artificial Sequence: Synthetic oligonucleotide
  Sense strand starting at position 3162 of SEQ ID NO: 119
caauucgucccaggaaguu

SEQ ID NO: 12635 - RNA, 19 nt, Artificial Sequence
  Description of Artificial Sequence: Synthetic oligonucleotide
  Antisense strand to SEQ ID NO: 12634
aacuuccugggacgaauug

SEQ ID NO: 12636 - RNA, 19 nt, Artificial Sequence
  Description of Artificial Sequence: Synthetic oligonucleotide
  Sense strand starting at position 2857 of SEQ ID NO: 119
gggcaagccucugacggau

SEQ ID NO: 12637 - RNA, 19 nt, Artificial Sequence
  Description of Artificial Sequence: Synthetic oligonucleotide
  Antisense strand to SEQ ID NO: 12636
auccgucagaggcuugccc

SEQ ID NO: 12638 - RNA, 19 nt, Artificial Sequence
  Description of Artificial Sequence: Synthetic oligonucleotide
  Sense strand starting at position 2762 of SEQ ID NO: 119
guggguggcaucuggaaau

SEQ ID NO: 12639 - RNA, 19 nt, Artificial Sequence
  Description of Artificial Sequence: Synthetic oligonucleotide
  Antisense strand to SEQ ID NO: 12638
auuuccagaugccacccac

SEQ ID NO: 12640 - RNA, 19 nt, Artificial Sequence
  Description of Artificial Sequence: Synthetic oligonucleotide
  Sense strand starting at position 2736 of SEQ ID NO: 119
ugaggacuuuccucugcau

SEQ ID NO: 12641 - RNA, 19 nt, Artificial Sequence
  Description of Artificial Sequence: Synthetic oligonucleotide
  Antisense strand to SEQ ID NO: 12640
augcagaggaaaguccuca

SEQ ID NO: 12642 - RNA, 19 nt, Artificial Sequence
  Description of Artificial Sequence: Synthetic oligonucleotide
  Sense strand starting at position 2724 of SEQ ID NO: 119
gaaucagccuucugaggac

SEQ ID NO: 12643 - RNA, 19 nt, Artificial Sequence
  Description of Artificial Sequence: Synthetic oligonucleotide
  Antisense strand to SEQ ID NO: 12642
guccucagaaggcugauuc

SEQ ID NO: 12644 - RNA, 19 nt, Artificial Sequence
  Description of Artificial Sequence: Synthetic oligonucleotide
  Sense strand starting at position 2568 of SEQ ID NO: 119
gccuauauuucuguauucu

SEQ ID NO: 12645 - RNA, 19 nt, Artificial Sequence
  Description of Artificial Sequence: Synthetic oligonucleotide
  Antisense strand to SEQ ID NO: 12644
agaauacagaaauauaggc

SEQ ID NO: 12646 - RNA, 19 nt, Artificial Sequence
  Description of Artificial Sequence: Synthetic oligonucleotide
  Sense strand starting at position 2566 of SEQ ID NO: 119
uugccuauauuucuguauu

SEQ ID NO: 12647 - RNA, 19 nt, Artificial Sequence
  Description of Artificial Sequence: Synthetic oligonucleotide
  Antisense strand to SEQ ID NO: 12646
aauacagaaauauaggcaa

SEQ ID NO: 12648 - RNA, 19 nt, Artificial Sequence
  Description of Artificial Sequence: Synthetic oligonucleotide
  Sense strand starting at position 2189 of SEQ ID NO: 119
uauguuaacgaugaaguga

SEQ ID NO: 12649 - RNA, 19 nt, Artificial Sequence
  Description of Artificial Sequence: Synthetic oligonucleotide
  Antisense strand to SEQ ID NO: 12648
ucacuucaucguuaacaua

SEQ ID NO: 12650 - RNA, 19 nt, Artificial Sequence
  Description of Artificial Sequence: Synthetic oligonucleotide
  Sense strand starting at position 2188 of SEQ ID NO: 119
uuauguuaacgaugaagug

SEQ ID NO: 12651 - RNA, 19 nt, Artificial Sequence
  Description of Artificial Sequence: Synthetic oligonucleotide
  Antisense strand to SEQ ID NO: 12650
cacuucaucguuaacauaa

SEQ ID NO: 12652 - RNA, 19 nt, Artificial Sequence
  Description of Artificial Sequence: Synthetic oligonucleotide
  Sense strand starting at position 2186 of SEQ ID NO: 119
cuuuauguuaacgaugaag

SEQ ID NO: 12653 - RNA, 19 nt, Artificial Sequence
  Description of Artificial Sequence: Synthetic oligonucleotide
  Antisense strand to SEQ ID NO: 12652
cuucaucguuaacauaaag

SEQ ID NO: 12654 - RNA, 19 nt, Artificial Sequence
  Description of Artificial Sequence: Synthetic oligonucleotide
  Sense strand starting at position 2185 of SEQ ID NO: 119
ccuuuauguuaacgaugaa

SEQ ID NO: 12655 - RNA, 19 nt, Artificial Sequence
  Description of Artificial Sequence: Synthetic oligonucleotide
  Antisense strand to SEQ ID NO: 12654
uucaucguuaacauaaagg

SEQ ID NO: 12656 - RNA, 19 nt, Artificial Sequence
  Description of Artificial Sequence: Synthetic oligonucleotide
  Sense strand starting at position 2182 of SEQ ID NO: 119
uuuccuuuauguuaacgau

SEQ ID NO: 12657 - RNA, 19 nt, Artificial Sequence
  Description of Artificial Sequence: Synthetic oligonucleotide
  Antisense strand to SEQ ID NO: 12656
aucguuaacauaaaggaaa

SEQ ID NO: 12658 - RNA, 19 nt, Artificial Sequence
  Description of Artificial Sequence: Synthetic oligonucleotide
  Sense strand starting at position 2156 of SEQ ID NO: 119
auaguucugacacaagugu

SEQ ID NO: 12659 - RNA, 19 nt, Artificial Sequence
  Description of Artificial Sequence: Synthetic oligonucleotide
  Antisense strand to SEQ ID NO: 12658
acacuugugucagaacuau

SEQ ID NO: 12660 - RNA, 19 nt, Artificial Sequence
  Description of Artificial Sequence: Synthetic oligonucleotide
  Sense strand starting at position 2152 of SEQ ID NO: 119
gaguauaguucugacacaa

SEQ ID NO: 12661 - RNA, 19 nt, Artificial Sequence
  Description of Artificial Sequence: Synthetic oligonucleotide
  Antisense strand to SEQ ID NO: 12660
uugugucagaacuauacuc

SEQ ID NO: 12662 - RNA, 19 nt, Artificial Sequence
  Description of Artificial Sequence: Synthetic oligonucleotide
  Sense strand starting at position 2151 of SEQ ID NO: 119
ggaguauaguucugacaca

SEQ ID NO: 12663 - RNA, 19 nt, Artificial Sequence
  Description of Artificial Sequence: Synthetic oligonucleotide
  Antisense strand to SEQ ID NO: 12662
ugugucagaacuauacucc

SEQ ID NO: 12664 - RNA, 19 nt, Artificial Sequence
  Description of Artificial Sequence: Synthetic oligonucleotide
  Sense strand starting at position 2140 of SEQ ID NO: 119
ugccauuggcaggaguaua

SEQ ID NO: 12665 - RNA, 19 nt, Artificial Sequence
  Description of Artificial Sequence: Synthetic oligonucleotide
  Antisense strand to SEQ ID NO: 12664
uauacuccugccaauggca

SEQ ID NO: 12666 - RNA, 19 nt, Artificial Sequence
  Description of Artificial Sequence: Synthetic oligonucleotide
  Sense strand starting at position 2139 of SEQ ID NO: 119
uugccauuggcaggaguau

SEQ ID NO: 12667 - RNA, 19 nt, Artificial Sequence
  Description of Artificial Sequence: Synthetic oligonucleotide
  Antisense strand to SEQ ID NO: 12666
auacuccugccaauggcaa

SEQ ID NO: 12668 - RNA, 19 nt, Artificial Sequence
  Description of Artificial Sequence: Synthetic oligonucleotide
  Sense strand starting at position 2108 of SEQ ID NO: 119
ucauucagcgaguggaaca

SEQ ID NO: 12669 - RNA, 19 nt, Artificial Sequence
  Description of Artificial Sequence: Synthetic oligonucleotide
  Antisense strand to SEQ ID NO: 12668
uguuccacucgcugaauga

SEQ ID NO: 12670 - RNA, 19 nt, Artificial Sequence
  Description of Artificial Sequence: Synthetic oligonucleotide
  Sense strand starting at position 1530 of SEQ ID NO: 119
uguaccuguugguaagaga

SEQ ID NO: 12671 - RNA, 19 nt, Artificial Sequence
  Description of Artificial Sequence: Synthetic oligonucleotide
  Antisense strand to SEQ ID NO: 12670
ucucuuaccaacagguaca

SEQ ID NO: 12672 - RNA, 19 nt, Artificial Sequence
  Description of Artificial Sequence: Synthetic oligonucleotide
  Sense strand starting at position 1528 of SEQ ID NO: 119
ccuguaccuguugguaaga

SEQ ID NO: 12673 - RNA, 19 nt, Artificial Sequence
  Description of Artificial Sequence: Synthetic oligonucleotide
  Antisense strand to SEQ ID NO: 12672
ucuuaccaacagguacagg

SEQ ID NO: 12674 - RNA, 19 nt, Artificial Sequence
  Description of Artificial Sequence: Synthetic oligonucleotide
  Sense strand starting at position 653 of SEQ ID NO: 119
augcuaacuaguggugaau

SEQ ID NO: 12675 - RNA, 19 nt, Artificial Sequence
  Description of Artificial Sequence: Synthetic oligonucleotide
  Antisense strand to SEQ ID NO: 12674
auucaccacuaguuagcau

SEQ ID NO: 12676 - RNA, 19 nt, Artificial Sequence
  Description of Artificial Sequence: Synthetic oligonucleotide
  Sense strand starting at position 545 of SEQ ID NO: 119
ggagauguguacuaaagaa

SEQ ID NO: 12677 - RNA, 19 nt, Artificial Sequence
  Description of Artificial Sequence: Synthetic oligonucleotide
  Antisense strand to SEQ ID NO: 12676
uucuuuaguacacaucucc

SEQ ID NO: 12678 - RNA, 19 nt, Artificial Sequence
  Description of Artificial Sequence: Synthetic oligonucleotide
  Sense strand starting at position 195 of SEQ ID NO: 119
gggacaauuuauugaaaug

SEQ ID NO: 12679 - RNA, 19 nt, Artificial Sequence
  Description of Artificial Sequence: Synthetic oligonucleotide
  Antisense strand to SEQ ID NO: 12678
cauuucaauaaauuguccc

SEQ ID NO: 12680 - RNA, 19 nt, Artificial Sequence
  Description of Artificial Sequence: Synthetic oligonucleotide
  Sense strand starting at position 185 of SEQ ID NO: 119
cuuccugagugggacaauu

SEQ ID NO: 12681 - RNA, 19 nt, Artificial Sequence
  Description of Artificial Sequence: Synthetic oligonucleotide
  Antisense strand to SEQ ID NO: 12680
aauugucccacucaggaag

SEQ ID NO: 12682 - RNA, 19 nt, Artificial Sequence
  Description of Artificial Sequence: Synthetic oligonucleotide
  Sense strand starting at position 72 of SEQ ID NO: 119
uuaacugaauccuggauga

SEQ ID NO: 12683 - RNA, 19 nt, Artificial Sequence
  Description of Artificial Sequence: Synthetic oligonucleotide
  Antisense strand to SEQ ID NO: 12682
ucauccaggauucaguuaa

SEQ ID NO: 12684 - RNA, 19 nt, Artificial Sequence
  Description of Artificial Sequence: Synthetic oligonucleotide
  Sense strand starting at position 3897 of SEQ ID NO: 120
gugacaugugugcaauaca

SEQ ID NO: 12685 - RNA, 19 nt, Artificial Sequence
  Description of Artificial Sequence: Synthetic oligonucleotide
  Antisense strand to SEQ ID NO: 12684
uguauugcacacaugucac

SEQ ID NO: 12686 - RNA, 19 nt, Artificial Sequence
  Description of Artificial Sequence: Synthetic oligonucleotide
  Sense strand starting at position 3895 of SEQ ID NO: 120
cagugacaugugugcaaua

SEQ ID NO: 12687 - RNA, 19 nt, Artificial Sequence
  Description of Artificial Sequence: Synthetic oligonucleotide
  Antisense strand to SEQ ID NO: 12686
uauugcacacaugucacug

SEQ ID NO: 12688 - RNA, 19 nt, Artificial Sequence
  Description of Artificial Sequence: Synthetic oligonucleotide
  Sense strand starting at position 3893 of SEQ ID NO: 120
uccagugacaugugugcaa

SEQ ID NO: 12689 - RNA, 19 nt, Artificial Sequence
  Description of Artificial Sequence: Synthetic oligonucleotide
  Antisense strand to SEQ ID NO: 12688
uugcacacaugucacugga

SEQ ID NO: 12690 - RNA, 19 nt, Artificial Sequence
  Description of Artificial Sequence: Synthetic oligonucleotide
  Sense strand starting at position 3886 of SEQ ID NO: 120
acaguauuccagugacaug

SEQ ID NO: 12691 - RNA, 19 nt, Artificial Sequence
  Description of Artificial Sequence: Synthetic oligonucleotide
  Antisense strand to SEQ ID NO: 12690
caugucacuggaauacugu

SEQ ID NO: 12692 - RNA, 19 nt, Artificial Sequence
  Description of Artificial Sequence: Synthetic oligonucleotide
  Sense strand starting at position 3865 of SEQ ID NO: 120
guugcuucccaggauuaaa

SEQ ID NO: 12693 - RNA, 19 nt, Artificial Sequence
  Description of Artificial Sequence: Synthetic oligonucleotide
  Antisense strand to SEQ ID NO: 12692
uuuaauccugggaagcaac

SEQ ID NO: 12694 - RNA, 19 nt, Artificial Sequence
  Description of Artificial Sequence: Synthetic oligonucleotide
  Sense strand starting at position 3864 of SEQ ID NO: 120
aguugcuucccaggauuaa

SEQ ID NO: 12695 - RNA, 19 nt, Artificial Sequence
  Description of Artificial Sequence: Synthetic oligonucleotide
  Antisense strand to SEQ ID NO: 12694
uuaauccugggaagcaacu

SEQ ID NO: 12696 - RNA, 19 nt, Artificial Sequence
  Description of Artificial Sequence: Synthetic oligonucleotide
  Sense strand starting at position 3861 of SEQ ID NO: 120
agcaguugcuucccaggau

SEQ ID NO: 12697 - RNA, 19 nt, Artificial Sequence
  Description of Artificial Sequence: Synthetic oligonucleotide
  Antisense strand to SEQ ID NO: 12696
auccugggaagcaacugcu

SEQ ID NO: 12698 - RNA, 19 nt, Artificial Sequence
  Description of Artificial Sequence: Synthetic oligonucleotide
  Sense strand starting at position 3838 of SEQ ID NO: 120
accuguguguucccucauu

SEQ ID NO: 12699 - RNA, 19 nt, Artificial Sequence
  Description of Artificial Sequence: Synthetic oligonucleotide
  Antisense strand to SEQ ID NO: 12698
aaugagggaacacacaggu

SEQ ID NO: 12700 - RNA, 19 nt, Artificial Sequence
  Description of Artificial Sequence: Synthetic oligonucleotide
  Sense strand starting at position 3819 of SEQ ID NO: 120
ggaaguuccugugcuuugu

SEQ ID NO: 12701 - RNA, 19 nt, Artificial Sequence
  Description of Artificial Sequence: Synthetic oligonucleotide
  Antisense strand to SEQ ID NO: 12700
acaaagcacaggaacuucc

SEQ ID NO: 12702 - RNA, 19 nt, Artificial Sequence
  Description of Artificial Sequence: Synthetic oligonucleotide
  Sense strand starting at position 3807 of SEQ ID NO: 120
caauucgucccaggaaguu

SEQ ID NO: 12703 - RNA, 19 nt, Artificial Sequence
  Description of Artificial Sequence: Synthetic oligonucleotide
  Antisense strand to SEQ ID NO: 12702
aacuuccugggacgaauug

SEQ ID NO: 12704 - RNA, 19 nt, Artificial Sequence
  Description of Artificial Sequence: Synthetic oligonucleotide
  Sense strand starting at position 3407 of SEQ ID NO: 120
guggguggcaucuggaaau

SEQ ID NO: 12705 - RNA, 19 nt, Artificial Sequence
  Description of Artificial Sequence: Synthetic oligonucleotide
  Antisense strand to SEQ ID NO: 12704
auuuccagaugccacccac

SEQ ID NO: 12706 - RNA, 19 nt, Artificial Sequence
  Description of Artificial Sequence: Synthetic oligonucleotide
  Sense strand starting at position 3381 of SEQ ID NO: 120
ugaggacuuuccucugcau

SEQ ID NO: 12707 - RNA, 19 nt, Artificial Sequence
  Description of Artificial Sequence: Synthetic oligonucleotide
  Antisense strand to SEQ ID NO: 12706
augcagaggaaaguccuca

SEQ ID NO: 12708 - RNA, 19 nt, Artificial Sequence
  Description of Artificial Sequence: Synthetic oligonucleotide
  Sense strand starting at position 3213 of SEQ ID NO: 120
gccuauauuucuguauucu

SEQ ID NO: 12709 - RNA, 19 nt, Artificial Sequence
  Description of Artificial Sequence: Synthetic oligonucleotide
  Antisense strand to SEQ ID NO: 12708
agaauacagaaauauaggc

SEQ ID NO: 12710 - RNA, 19 nt, Artificial Sequence
  Description of Artificial Sequence: Synthetic oligonucleotide
  Sense strand starting at position 3211 of SEQ ID NO: 120
uugccuauauuucuguauu

SEQ ID NO: 12711 - RNA, 19 nt, Artificial Sequence
  Description of Artificial Sequence: Synthetic oligonucleotide
  Antisense strand to SEQ ID NO: 12710
aauacagaaauauaggcaa

SEQ ID NO: 12712 - RNA, 19 nt, Artificial Sequence
  Description of Artificial Sequence: Synthetic oligonucleotide
  Sense strand starting at position 2834 of SEQ ID NO: 120
uauguuaacgaugaaguga

SEQ ID NO: 12713 - RNA, 19 nt, Artificial Sequence
  Description of Artificial Sequence: Synthetic oligonucleotide
  Antisense strand to SEQ ID NO: 12712
ucacuucaucguuaacaua

SEQ ID NO: 12714 - RNA, 19 nt, Artificial Sequence
  Description of Artificial Sequence: Synthetic oligonucleotide
  Sense strand starting at position 2833 of SEQ ID NO: 120
uuauguuaacgaugaagug

SEQ ID NO: 12715 - RNA, 19 nt, Artificial Sequence
  Description of Artificial Sequence: Synthetic oligonucleotide
  Antisense strand to SEQ ID NO: 12714
cacuucaucguuaacauaa

SEQ ID NO: 12716 - RNA, 19 nt, Artificial Sequence
  Description of Artificial Sequence: Synthetic oligonucleotide
  Sense strand starting at position 2831 of SEQ ID NO: 120
cuuuauguuaacgaugaag

SEQ ID NO: 12717 - RNA, 19 nt, Artificial Sequence
  Description of Artificial Sequence: Synthetic oligonucleotide
  Antisense strand to SEQ ID NO: 12716
cuucaucguuaacauaaag

SEQ ID NO: 12718 - RNA, 19 nt, Artificial Sequence
  Description of Artificial Sequence: Synthetic oligonucleotide
  Sense strand starting at position 2801 of SEQ ID NO: 120
auaguucugacacaagugu

SEQ ID NO: 12719 - RNA, 19 nt, Artificial Sequence
  Description of Artificial Sequence: Synthetic oligonucleotide
  Antisense strand to SEQ ID NO: 12718
acacuugugucagaacuau

SEQ ID NO: 12720 - RNA, 19 nt, Artificial Sequence
  Description of Artificial Sequence: Synthetic oligonucleotide
  Sense strand starting at position 2797 of SEQ ID NO: 120
gaguauaguucugacacaa

SEQ ID NO: 12721 - RNA, 19 nt, Artificial Sequence
  Description of Artificial Sequence: Synthetic oligonucleotide
  Antisense strand to SEQ ID NO: 12720
uugugucagaacuauacuc

SEQ ID NO: 12722 - RNA, 19 nt, Artificial Sequence
  Description of Artificial Sequence: Synthetic oligonucleotide
  Sense strand starting at position 2785 of SEQ ID NO: 120
ugccauuggcaggaguaua

SEQ ID NO: 12723 - RNA, 19 nt, Artificial Sequence
  Description of Artificial Sequence: Synthetic oligonucleotide
  Antisense strand to SEQ ID NO: 12722
uauacuccugccaauggca

SEQ ID NO: 12724 - RNA, 19 nt, Artificial Sequence
  Description of Artificial Sequence: Synthetic oligonucleotide
  Sense strand starting at position 2784 of SEQ ID NO: 120
uugccauuggcaggaguau

SEQ ID NO: 12725 - RNA, 19 nt, Artificial Sequence
  Description of Artificial Sequence: Synthetic oligonucleotide
  Antisense strand to SEQ ID NO: 12724
auacuccugccaauggcaa

SEQ ID NO: 12726 - RNA, 19 nt, Artificial Sequence
  Description of Artificial Sequence: Synthetic oligonucleotide
  Sense strand starting at position 2753 of SEQ ID NO: 120
ucauucagcgaguggaaca

SEQ ID NO: 12727 - RNA, 19 nt, Artificial Sequence
  Description of Artificial Sequence: Synthetic oligonucleotide
  Antisense strand to SEQ ID NO: 12726
uguuccacucgcugaauga

SEQ ID NO: 12728 - RNA, 19 nt, Artificial Sequence
  Description of Artificial Sequence: Synthetic oligonucleotide
  Sense strand starting at position 2175 of SEQ ID NO: 120
uguaccuguugguaagaga

SEQ ID NO: 12729 - RNA, 19 nt, Artificial Sequence
  Description of Artificial Sequence: Synthetic oligonucleotide
  Antisense strand to SEQ ID NO: 12728
ucucuuaccaacagguaca

SEQ ID NO: 12730 - RNA, 19 nt, Artificial Sequence
  Description of Artificial Sequence: Synthetic oligonucleotide
  Sense strand starting at position 2173 of SEQ ID NO: 120
ccuguaccuguugguaaga

SEQ ID NO: 12731 - RNA, 19 nt, Artificial Sequence
  Description of Artificial Sequence: Synthetic oligonucleotide
  Antisense strand to SEQ ID NO: 12730
ucuuaccaacagguacagg

SEQ ID NO: 12732 - RNA, 19 nt, Artificial Sequence
  Description of Artificial Sequence: Synthetic oligonucleotide
  Sense strand starting at position 1298 of SEQ ID NO: 120
augcuaacuaguggugaau

SEQ ID NO: 12733 - RNA, 19 nt, Artificial Sequence
  Description of Artificial Sequence: Synthetic oligonucleotide
  Antisense strand to SEQ ID NO: 12732
auucaccacuaguuagcau

SEQ ID NO: 12734 - RNA, 19 nt, Artificial Sequence
  Description of Artificial Sequence: Synthetic oligonucleotide
  Sense strand starting at position 1190 of SEQ ID NO: 120
ggagauguguacuaaagaa

SEQ ID NO: 12735 - RNA, 19 nt, Artificial Sequence
  Description of Artificial Sequence: Synthetic oligonucleotide
  Antisense strand to SEQ ID NO: 12734
uucuuuaguacacaucucc

SEQ ID NO: 12736 - RNA, 19 nt, Artificial Sequence
  Description of Artificial Sequence: Synthetic oligonucleotide
  Sense strand starting at position 840 of SEQ ID NO: 120
gggacaauuuauugaaaug

SEQ ID NO: 12737 - RNA, 19 nt, Artificial Sequence
  Description of Artificial Sequence: Synthetic oligonucleotide
  Antisense strand to SEQ ID NO: 12736
cauuucaauaaauuguccc

SEQ ID NO: 12738 - RNA, 19 nt, Artificial Sequence
  Description of Artificial Sequence: Synthetic oligonucleotide
  Sense strand starting at position 830 of SEQ ID NO: 120
cuuccugagugggacaauu

SEQ ID NO: 12739 - RNA, 19 nt, Artificial Sequence
  Description of Artificial Sequence: Synthetic oligonucleotide
  Antisense strand to SEQ ID NO: 12738
aauugucccacucaggaag

SEQ ID NO: 12740 - RNA, 19 nt, Artificial Sequence
  Description of Artificial Sequence: Synthetic oligonucleotide
  Sense strand starting at position 717 of SEQ ID NO: 120
uuaacugaauccuggauga

SEQ ID NO: 12741 - RNA, 19 nt, Artificial Sequence
  Description of Artificial Sequence: Synthetic oligonucleotide
  Antisense strand to SEQ ID NO: 12740
ucauccaggauucaguuaa

SEQ ID NO: 12742 - RNA, 19 nt, Artificial Sequence
  Description of Artificial Sequence: Synthetic oligonucleotide
  Sense strand starting at position 339 of SEQ ID NO: 120
ggcucuguucuagggacua

SEQ ID NO: 12743 - RNA, 19 nt, Artificial Sequence
  Description of Artificial Sequence: Synthetic oligonucleotide
  Antisense strand to SEQ ID NO: 12742
uagucccuagaacagagcc

SEQ ID NO: 12744 - RNA, 19 nt, Artificial Sequence
  Description of Artificial Sequence: Synthetic oligonucleotide
  Sense strand starting at position 312 of SEQ ID NO: 120
aagcauuuguuggucuauu

SEQ ID NO: 12745 - RNA, 19 nt, Artificial Sequence
  Description of Artificial Sequence: Synthetic oligonucleotide
  Antisense strand to SEQ ID NO: 12744
aauagaccaacaaaugcuu

SEQ ID NO: 12746 - RNA, 19 nt, Artificial Sequence
  Description of Artificial Sequence: Synthetic oligonucleotide
  Sense strand starting at position 307 of SEQ ID NO: 120
ucaguaagcauuuguuggu

SEQ ID NO: 12747 - RNA, 19 nt, Artificial Sequence
  Description of Artificial Sequence: Synthetic oligonucleotide
  Antisense strand to SEQ ID NO: 12746
accaacaaaugcuuacuga

SEQ ID NO: 12748 - RNA, 19 nt, Artificial Sequence
  Description of Artificial Sequence: Synthetic oligonucleotide
  Sense strand starting at position 243 of SEQ ID NO: 120
ggaaaucgucuacaagcua

SEQ ID NO: 12749 - RNA, 19 nt, Artificial Sequence
  Description of Artificial Sequence: Synthetic oligonucleotide
  Antisense strand to SEQ ID NO: 12748
uagcuuguagacgauuucc

SEQ ID NO: 12750 - RNA, 19 nt, Artificial Sequence
  Description of Artificial Sequence: Synthetic oligonucleotide
  Sense strand starting at position 220 of SEQ ID NO: 120
aacaguugguuacaugaau

SEQ ID NO: 12751 - RNA, 19 nt, Artificial Sequence
  Description of Artificial Sequence: Synthetic oligonucleotide
  Antisense strand to SEQ ID NO: 12750
auucauguaaccaacuguu

SEQ ID NO: 12752 - RNA, 19 nt, Artificial Sequence
  Description of Artificial Sequence: Synthetic oligonucleotide
  Sense strand starting at position 216 of SEQ ID NO: 120
cuagaacaguugguuacau

SEQ ID NO: 12753 - RNA, 19 nt, Artificial Sequence
  Description of Artificial Sequence: Synthetic oligonucleotide
  Antisense strand to SEQ ID NO: 12752
auguaaccaacuguucuag

SEQ ID NO: 12754 - RNA, 19 nt, Artificial Sequence
  Description of Artificial Sequence: Synthetic oligonucleotide
  Sense strand starting at position 215 of SEQ ID NO: 120
ccuagaacaguugguuaca

SEQ ID NO: 12755 - RNA, 19 nt, Artificial Sequence
  Description of Artificial Sequence: Synthetic oligonucleotide
  Antisense strand to SEQ ID NO: 12754
uguaaccaacuguucuagg

SEQ ID NO: 12756 - RNA, 19 nt, Artificial Sequence
  Description of Artificial Sequence: Synthetic oligonucleotide
  Sense strand starting at position 171 of SEQ ID NO: 120
agggcaggacccugucaau

SEQ ID NO: 12757 - RNA, 19 nt, Artificial Sequence
  Description of Artificial Sequence: Synthetic oligonucleotide
  Antisense strand to SEQ ID NO: 12756
auugacaggguccugcccu

SEQ ID NO: 12758 - RNA, 19 nt, Artificial Sequence
  Description of Artificial Sequence: Synthetic oligonucleotide
  Sense strand starting at position 140 of SEQ ID NO: 120
gcacuuagaggcuaaauca

SEQ ID NO: 12759 - RNA, 19 nt, Artificial Sequence
  Description of Artificial Sequence: Synthetic oligonucleotide
  Antisense strand to SEQ ID NO: 12758
ugauuuagccucuaagugc

SEQ ID NO: 12760 - RNA, 19 nt, Artificial Sequence
  Description of Artificial Sequence: Synthetic oligonucleotide
  Sense strand starting at position 61 of SEQ ID NO: 120
ugcucuuggcuccaggaau

SEQ ID NO: 12761 - RNA, 19 nt, Artificial Sequence
  Description of Artificial Sequence: Synthetic oligonucleotide
  Antisense strand to SEQ ID NO: 12760
auuccuggagccaagagca

SEQ ID NO: 12762 - RNA, 19 nt, Artificial Sequence
  Description of Artificial Sequence: Synthetic oligonucleotide
  Sense strand starting at position 46 of SEQ ID NO: 120
augaauucuucugaaugcu

SEQ ID NO: 12763 - RNA, 19 nt, Artificial Sequence
  Description of Artificial Sequence: Synthetic oligonucleotide
  Antisense strand to SEQ ID NO: 12762
agcauucagaagaauucau

SEQ ID NO: 12764 - RNA, 19 nt, Artificial Sequence
  Description of Artificial Sequence: Synthetic oligonucleotide
  Sense strand starting at position 3853 of SEQ ID NO: 119
acuagaugucaguguugca

SEQ ID NO: 12765 - RNA, 19 nt, Artificial Sequence
  Description of Artificial Sequence: Synthetic oligonucleotide
  Antisense strand to SEQ ID NO: 12764
ugcaacacugacaucuagu

SEQ ID NO: 12766 - RNA, 19 nt, Artificial Sequence
  Description of Artificial Sequence: Synthetic oligonucleotide
  Sense strand starting at position 3840 of SEQ ID NO: 119
cuauaaucuggccacuaga

SEQ ID NO: 12767 - RNA, 19 nt, Artificial Sequence
  Description of Artificial Sequence: Synthetic oligonucleotide
  Antisense strand to SEQ ID NO: 12766
ucuaguggccagauuauag

SEQ ID NO: 12768 - RNA, 19 nt, Artificial Sequence
  Description of Artificial Sequence: Synthetic oligonucleotide
  Sense strand starting at position 3831 of SEQ ID NO: 119
gaaguagcccuauaaucug

SEQ ID NO: 12769 - RNA, 19 nt, Artificial Sequence
  Description of Artificial Sequence: Synthetic oligonucleotide
  Antisense strand to SEQ ID NO: 12768
cagauuauagggcuacuuc

SEQ ID NO: 12770 - RNA, 19 nt, Artificial Sequence
  Description of Artificial Sequence: Synthetic oligonucleotide
  Sense strand starting at position 3596 of SEQ ID NO: 119
ggucgaggguugagguauu

SEQ ID NO: 12771 - RNA, 19 nt, Artificial Sequence
  Description of Artificial Sequence: Synthetic oligonucleotide
  Antisense strand to SEQ ID NO: 12770
aauaccucaacccucgacc

SEQ ID NO: 12772 - RNA, 19 nt, Artificial Sequence
  Description of Artificial Sequence: Synthetic oligonucleotide
  Sense strand starting at position 3590 of SEQ ID NO: 119
gaaauaggucgaggguuga

SEQ ID NO: 12773 - RNA, 19 nt, Artificial Sequence
  Description of Artificial Sequence: Synthetic oligonucleotide
  Antisense strand to SEQ ID NO: 12772
ucaacccucgaccuauuuc

SEQ ID NO: 12774 - RNA, 19 nt, Artificial Sequence
  Description of Artificial Sequence: Synthetic oligonucleotide
  Sense strand starting at position 3587 of SEQ ID NO: 119
ugagaaauaggucgagggu

SEQ ID NO: 12775 - RNA, 19 nt, Artificial Sequence
  Description of Artificial Sequence: Synthetic oligonucleotide
  Antisense strand to SEQ ID NO: 12774
acccucgaccuauuucuca

SEQ ID NO: 12776 - RNA, 19 nt, Artificial Sequence
  Description of Artificial Sequence: Synthetic oligonucleotide
  Sense strand starting at position 3252 of SEQ ID NO: 119
gugacaugugugcaauaca

SEQ ID NO: 12777 - RNA, 19 nt, Artificial Sequence
  Description of Artificial Sequence: Synthetic oligonucleotide
  Antisense strand to SEQ ID NO: 12776
uguauugcacacaugucac

SEQ ID NO: 12778 - RNA, 19 nt, Artificial Sequence
  Description of Artificial Sequence: Synthetic oligonucleotide
  Sense strand starting at position 3250 of SEQ ID NO: 119
cagugacaugugugcaaua

SEQ ID NO: 12779 - RNA, 19 nt, Artificial Sequence
  Description of Artificial Sequence: Synthetic oligonucleotide
  Antisense strand to SEQ ID NO: 12778
uauugcacacaugucacug

SEQ ID NO: 12780 - RNA, 19 nt, Artificial Sequence
  Description of Artificial Sequence: Synthetic oligonucleotide
  Sense strand starting at position 3248 of SEQ ID NO: 119
uccagugacaugugugcaa

SEQ ID NO: 12781 - RNA, 19 nt, Artificial Sequence
  Description of Artificial Sequence: Synthetic oligonucleotide
  Antisense strand to SEQ ID NO: 12780
uugcacacaugucacugga

SEQ ID NO: 12782 - RNA, 19 nt, Artificial Sequence
  Description of Artificial Sequence: Synthetic oligonucleotide
  Sense strand starting at position 3241 of SEQ ID NO: 119
acaguauuccagugacaug

SEQ ID NO: 12783 - RNA, 19 nt, Artificial Sequence
  Description of Artificial Sequence: Synthetic oligonucleotide
  Antisense strand to SEQ ID NO: 12782
caugucacuggaauacugu

SEQ ID NO: 12784 - RNA, 19 nt, Artificial Sequence
  Description of Artificial Sequence: Synthetic oligonucleotide
  Sense strand starting at position 3220 of SEQ ID NO: 119
guugcuucccaggauuaaa

SEQ ID NO: 12785 - RNA, 19 nt, Artificial Sequence
  Description of Artificial Sequence: Synthetic oligonucleotide
  Antisense strand to SEQ ID NO: 12784
uuuaauccugggaagcaac

SEQ ID NO: 12786 - RNA, 19 nt, Artificial Sequence
  Description of Artificial Sequence: Synthetic oligonucleotide
  Sense strand starting at position 3219 of SEQ ID NO: 119
aguugcuucccaggauuaa

SEQ ID NO: 12787 - RNA, 19 nt, Artificial Sequence
  Description of Artificial Sequence: Synthetic oligonucleotide
  Antisense strand to SEQ ID NO: 12786
uuaauccugggaagcaacu

SEQ ID NO: 12788 - RNA, 19 nt, Artificial Sequence
  Description of Artificial Sequence: Synthetic oligonucleotide
  Sense strand starting at position 3216 of SEQ ID NO: 119
agcaguugcuucccaggau

SEQ ID NO: 12789 - RNA, 19 nt, Artificial Sequence
  Description of Artificial Sequence: Synthetic oligonucleotide
  Antisense strand to SEQ ID NO: 12788
auccugggaagcaacugcu

SEQ ID NO: 12790 - RNA, 19 nt, Artificial Sequence
  Description of Artificial Sequence: Synthetic oligonucleotide
  Sense strand starting at position 3193 of SEQ ID NO: 119
accuguguguucccucauu

SEQ ID NO: 12791 - RNA, 19 nt, Artificial Sequence
  Description of Artificial Sequence: Synthetic oligonucleotide
  Antisense strand to SEQ ID NO: 12790
aaugagggaacacacaggu

SEQ ID NO: 12792 - RNA, 19 nt, Artificial Sequence
  Description of Artificial Sequence: Synthetic oligonucleotide
  Sense strand starting at position 3174 of SEQ ID NO: 119
ggaaguuccugugcuuugu

SEQ ID NO: 12793 - RNA, 19 nt, Artificial Sequence
  Description of Artificial Sequence: Synthetic oligonucleotide
  Antisense strand to SEQ ID NO: 12792
acaaagcacaggaacuucc

SEQ ID NO: 12794 - RNA, 19 nt, Artificial Sequence
  Description of Artificial Sequence: Synthetic oligonucleotide
  Sense strand starting at position 3162 of SEQ ID NO: 119
caauucgucccaggaaguu

SEQ ID NO: 12795 - RNA, 19 nt, Artificial Sequence
  Description of Artificial Sequence: Synthetic oligonucleotide
  Antisense strand to SEQ ID NO: 12794
aacuuccugggacgaauug

SEQ ID NO: 12796 - RNA, 19 nt, Artificial Sequence
  Description of Artificial Sequence: Synthetic oligonucleotide
  Sense strand starting at position 2857 of SEQ ID NO: 119
gggcaagccucugacggau

SEQ ID NO: 12797 - RNA, 19 nt, Artificial Sequence
  Description of Artificial Sequence: Synthetic oligonucleotide
  Antisense strand to SEQ ID NO: 12796
auccgucagaggcuugccc

SEQ ID NO: 12798 - RNA, 19 nt, Artificial Sequence
  Description of Artificial Sequence: Synthetic oligonucleotide
  Sense strand starting at position 2762 of SEQ ID NO: 119
guggguggcaucuggaaau

SEQ ID NO: 12799 - RNA, 19 nt, Artificial Sequence
  Description of Artificial Sequence: Synthetic oligonucleotide
  Antisense strand to SEQ ID NO: 12798
auuuccagaugccacccac

SEQ ID NO: 12800 - RNA, 19 nt, Artificial Sequence
  Description of Artificial Sequence: Synthetic oligonucleotide
  Sense strand starting at position 2736 of SEQ ID NO: 119
ugaggacuuuccucugcau

SEQ ID NO: 12801 - RNA, 19 nt, Artificial Sequence
  Description of Artificial Sequence: Synthetic oligonucleotide
  Antisense strand to SEQ ID NO: 12800
augcagaggaaaguccuca

SEQ ID NO: 12802 - RNA, 19 nt, Artificial Sequence
  Description of Artificial Sequence: Synthetic oligonucleotide
  Sense strand starting at position 2724 of SEQ ID NO: 119
gaaucagccuucugaggac

SEQ ID NO: 12803 - RNA, 19 nt, Artificial Sequence
  Description of Artificial Sequence: Synthetic oligonucleotide
  Antisense strand to SEQ ID NO: 12802
guccucagaaggcugauuc

SEQ ID NO: 12804 - RNA, 19 nt, Artificial Sequence
  Description of Artificial Sequence: Synthetic oligonucleotide
  Sense strand starting at position 2568 of SEQ ID NO: 119
gccuauauuucuguauucu

SEQ ID NO: 12805 - RNA, 19 nt, Artificial Sequence
  Description of Artificial Sequence: Synthetic oligonucleotide
  Antisense strand to SEQ ID NO: 12804
agaauacagaaauauaggc

SEQ ID NO: 12806 - RNA, 19 nt, Artificial Sequence
  Description of Artificial Sequence: Synthetic oligonucleotide
  Sense strand starting at position 2566 of SEQ ID NO: 119
uugccuauauuucuguauu

SEQ ID NO: 12807 - RNA, 19 nt, Artificial Sequence
  Description of Artificial Sequence: Synthetic oligonucleotide
  Antisense strand to SEQ ID NO: 12806
aauacagaaauauaggcaa

SEQ ID NO: 12808 - RNA, 19 nt, Artificial Sequence
  Description of Artificial Sequence: Synthetic oligonucleotide
  Sense strand starting at position 2189 of SEQ ID NO: 119
uauguuaacgaugaaguga

SEQ ID NO: 12809 - RNA, 19 nt, Artificial Sequence
  Description of Artificial Sequence: Synthetic oligonucleotide
  Antisense strand to SEQ ID NO: 12808
ucacuucaucguuaacaua

SEQ ID NO: 12810 - RNA, 19 nt, Artificial Sequence
  Description of Artificial Sequence: Synthetic oligonucleotide
  Sense strand starting at position 2188 of SEQ ID NO: 119
uuauguuaacgaugaagug

SEQ ID NO: 12811 - RNA, 19 nt, Artificial Sequence
  Description of Artificial Sequence: Synthetic oligonucleotide
  Antisense strand to SEQ ID NO: 12810
cacuucaucguuaacauaa

SEQ ID NO: 12812 - RNA, 19 nt, Artificial Sequence
  Description of Artificial Sequence: Synthetic oligonucleotide
  Sense strand starting at position 2186 of SEQ ID NO: 119
cuuuauguuaacgaugaag

SEQ ID NO: 12813 - RNA, 19 nt, Artificial Sequence
  Description of Artificial Sequence: Synthetic oligonucleotide
  Antisense strand to SEQ ID NO: 12812
cuucaucguuaacauaaag

SEQ ID NO: 12814 - RNA, 19 nt, Artificial Sequence
  Description of Artificial Sequence: Synthetic oligonucleotide
  Sense strand starting at position 2185 of SEQ ID NO: 119
ccuuuauguuaacgaugaa

SEQ ID NO: 12815 - RNA, 19 nt, Artificial Sequence
  Description of Artificial Sequence: Synthetic oligonucleotide
  Antisense strand to SEQ ID NO: 12814
uucaucguuaacauaaagg

SEQ ID NO: 12816 - RNA, 19 nt, Artificial Sequence
  Description of Artificial Sequence: Synthetic oligonucleotide
  Sense strand starting at position 2182 of SEQ ID NO: 119
uuuccuuuauguuaacgau

SEQ ID NO: 12817 - RNA, 19 nt, Artificial Sequence
  Description of Artificial Sequence: Synthetic oligonucleotide
  Antisense strand to SEQ ID NO: 12816
aucguuaacauaaaggaaa

SEQ ID NO: 12818 - RNA, 19 nt, Artificial Sequence
  Description of Artificial Sequence: Synthetic oligonucleotide
  Sense strand starting at position 2156 of SEQ ID NO: 119
auaguucugacacaagugu

SEQ ID NO: 12819 - RNA, 19 nt, Artificial Sequence
  Description of Artificial Sequence: Synthetic oligonucleotide
  Antisense strand to SEQ ID NO: 12818
acacuugugucagaacuau

SEQ ID NO: 12820 - RNA, 19 nt, Artificial Sequence
  Description of Artificial Sequence: Synthetic oligonucleotide
  Sense strand starting at position 2152 of SEQ ID NO: 119
gaguauaguucugacacaa

SEQ ID NO: 12821 - RNA, 19 nt, Artificial Sequence
  Description of Artificial Sequence: Synthetic oligonucleotide
  Antisense strand to SEQ ID NO: 12820
uugugucagaacuauacuc

SEQ ID NO: 12822 - RNA, 19 nt, Artificial Sequence
  Description of Artificial Sequence: Synthetic oligonucleotide
  Sense strand starting at position 2151 of SEQ ID NO: 119
ggaguauaguucugacaca

SEQ ID NO: 12823 - RNA, 19 nt, Artificial Sequence
  Description of Artificial Sequence: Synthetic oligonucleotide
  Antisense strand to SEQ ID NO: 12822
ugugucagaacuauacucc

SEQ ID NO: 12824 - RNA, 19 nt, Artificial Sequence
  Description of Artificial Sequence: Synthetic oligonucleotide
  Sense strand starting at position 2140 of SEQ ID NO: 119
ugccauuggcaggaguaua

SEQ ID NO: 12825 - RNA, 19 nt, Artificial Sequence
  Description of Artificial Sequence: Synthetic oligonucleotide
  Antisense strand to SEQ ID NO: 12824
uauacuccugccaauggca

SEQ ID NO: 12826 - RNA, 19 nt, Artificial Sequence
  Description of Artificial Sequence: Synthetic oligonucleotide
  Sense strand starting at position 2139 of SEQ ID NO: 119
uugccauuggcaggaguau

SEQ ID NO: 12827 - RNA, 19 nt, Artificial Sequence
  Description of Artificial Sequence: Synthetic oligonucleotide
  Antisense strand to SEQ ID NO: 12826
auacuccugccaauggcaa

SEQ ID NO: 12828 - RNA, 19 nt, Artificial Sequence
  Description of Artificial Sequence: Synthetic oligonucleotide
  Sense strand starting at position 2108 of SEQ ID NO: 119
ucauucagcgaguggaaca

SEQ ID NO: 12829 - RNA, 19 nt, Artificial Sequence
  Description of Artificial Sequence: Synthetic oligonucleotide
  Antisense strand to SEQ ID NO: 12828
uguuccacucgcugaauga

SEQ ID NO: 12830 - RNA, 19 nt, Artificial Sequence
  Description of Artificial Sequence: Synthetic oligonucleotide
  Sense strand starting at position 1530 of SEQ ID NO: 119
uguaccuguugguaagaga

SEQ ID NO: 12831 - RNA, 19 nt, Artificial Sequence
  Description of Artificial Sequence: Synthetic oligonucleotide
  Antisense strand to SEQ ID NO: 12830
ucucuuaccaacagguaca

SEQ ID NO: 12832 - RNA, 19 nt, Artificial Sequence
  Description of Artificial Sequence: Synthetic oligonucleotide
  Sense strand starting at position 1528 of SEQ ID NO: 119
ccuguaccuguugguaaga

SEQ ID NO: 12833 - RNA, 19 nt, Artificial Sequence
  Description of Artificial Sequence: Synthetic oligonucleotide
  Antisense strand to SEQ ID NO: 12832
ucuuaccaacagguacagg

SEQ ID NO: 12834 - RNA, 19 nt, Artificial Sequence
  Description of Artificial Sequence: Synthetic oligonucleotide
  Sense strand starting at position 653 of SEQ ID NO: 119
augcuaacuaguggugaau

SEQ ID NO: 12835 - RNA, 19 nt, Artificial Sequence
  Description of Artificial Sequence: Synthetic oligonucleotide
  Antisense strand to SEQ ID NO: 12834
auucaccacuaguuagcau

SEQ ID NO: 12836 - RNA, 19 nt, Artificial Sequence
  Description of Artificial Sequence: Synthetic oligonucleotide
  Sense strand starting at position 545 of SEQ ID NO: 119
ggagauguguacuaaagaa

SEQ ID NO: 12837 - RNA, 19 nt, Artificial Sequence
  Description of Artificial Sequence: Synthetic oligonucleotide
  Antisense strand to SEQ ID NO: 12836
uucuuuaguacacaucucc

SEQ ID NO: 12838 - RNA, 19 nt, Artificial Sequence
  Description of Artificial Sequence: Synthetic oligonucleotide
  Sense strand starting at position 195 of SEQ ID NO: 119
gggacaauuuauugaaaug

SEQ ID NO: 12839 - RNA, 19 nt, Artificial Sequence
  Description of Artificial Sequence: Synthetic oligonucleotide
  Antisense strand to SEQ ID NO: 12838
cauuucaauaaauuguccc

SEQ ID NO: 12840 - RNA, 19 nt, Artificial Sequence
  Description of Artificial Sequence: Synthetic oligonucleotide
  Sense strand starting at position 185 of SEQ ID NO: 119
cuuccugagugggacaauu

SEQ ID NO: 12841 - RNA, 19 nt, Artificial Sequence
  Description of Artificial Sequence: Synthetic oligonucleotide
  Antisense strand to SEQ ID NO: 12840
aauugucccacucaggaag

SEQ ID NO: 12842 - RNA, 19 nt, Artificial Sequence
  Description of Artificial Sequence: Synthetic oligonucleotide
  Sense strand starting at position 72 of SEQ ID NO: 119
uuaacugaauccuggauga

SEQ ID NO: 12843 - RNA, 19 nt, Artificial Sequence
  Description of Artificial Sequence: Synthetic oligonucleotide
  Antisense strand to SEQ ID NO: 12842
ucauccaggauucaguuaa

SEQ ID NO: 12844 - RNA, 19 nt, Artificial Sequence
  Description of Artificial Sequence: Synthetic oligonucleotide
  Sense strand starting at position 3942 of SEQ ID NO: 121
agaagagugcucuaaccuc

SEQ ID NO: 12845 - RNA, 19 nt, Artificial Sequence
  Description of Artificial Sequence: Synthetic oligonucleotide
  Antisense strand to SEQ ID NO: 12844
gagguuagagcacucuucu

SEQ ID NO: 12846 - RNA, 19 nt, Artificial Sequence
  Description of Artificial Sequence: Synthetic oligonucleotide
  Sense strand starting at position 3937 of SEQ ID NO: 121
guauaagaagagugcucua

SEQ ID NO: 12847 - RNA, 19 nt, Artificial Sequence
  Description of Artificial Sequence: Synthetic oligonucleotide
  Antisense strand to SEQ ID NO: 12846
uagagcacucuucuuauac

SEQ ID NO: 12848 - RNA, 19 nt, Artificial Sequence
  Description of Artificial Sequence: Synthetic oligonucleotide
  Sense strand starting at position 3221 of SEQ ID NO: 121
ccuggaccucugggaucaa

SEQ ID NO: 12849 - RNA, 19 nt, Artificial Sequence
  Description of Artificial Sequence: Synthetic oligonucleotide
  Antisense strand to SEQ ID NO: 12848
uugaucccagagguccagg

SEQ ID NO: 12850 - RNA, 19 nt, Artificial Sequence
  Description of Artificial Sequence: Synthetic oligonucleotide
  Sense strand starting at position 3068 of SEQ ID NO: 121
uaauuuguugcuugagcau

SEQ ID NO: 12851 - RNA, 19 nt, Artificial Sequence
  Description of Artificial Sequence: Synthetic oligonucleotide
  Antisense strand to SEQ ID NO: 12850
augcucaagcaacaaauua

SEQ ID NO: 12852 - RNA, 19 nt, Artificial Sequence
  Description of Artificial Sequence: Synthetic oligonucleotide
  Sense strand starting at position 3067 of SEQ ID NO: 121
uuaauuuguugcuugagca

SEQ ID NO: 12853 - RNA, 19 nt, Artificial Sequence
  Description of Artificial Sequence: Synthetic oligonucleotide
  Antisense strand to SEQ ID NO: 12852
ugcucaagcaacaaauuaa

SEQ ID NO: 12854 - RNA, 19 nt, Artificial Sequence
  Description of Artificial Sequence: Synthetic oligonucleotide
  Sense strand starting at position 2949 of SEQ ID NO: 121
agucccugaacugguagaa

SEQ ID NO: 12855 - RNA, 19 nt, Artificial Sequence
  Description of Artificial Sequence: Synthetic oligonucleotide
  Antisense strand to SEQ ID NO: 12854
uucuaccaguucagggacu

SEQ ID NO: 12856 - RNA, 19 nt, Artificial Sequence
  Description of Artificial Sequence: Synthetic oligonucleotide
  Sense strand starting at position 2943 of SEQ ID NO: 121
agagguagucccugaacug

SEQ ID NO: 12857 - RNA, 19 nt, Artificial Sequence
  Description of Artificial Sequence: Synthetic oligonucleotide
  Antisense strand to SEQ ID NO: 12856
caguucagggacuaccucu

SEQ ID NO: 12858 - RNA, 19 nt, Artificial Sequence
  Description of Artificial Sequence: Synthetic oligonucleotide
  Sense strand starting at position 2923 of SEQ ID NO: 121
uuagcauuaguugggauau

SEQ ID NO: 12859 - RNA, 19 nt, Artificial Sequence
  Description of Artificial Sequence: Synthetic oligonucleotide
  Antisense strand to SEQ ID NO: 12858
auaucccaacuaaugcuaa

SEQ ID NO: 12860 - RNA, 19 nt, Artificial Sequence
  Description of Artificial Sequence: Synthetic oligonucleotide
  Sense strand starting at position 2922 of SEQ ID NO: 121
auuagcauuaguugggaua

SEQ ID NO: 12861 - RNA, 19 nt, Artificial Sequence
  Description of Artificial Sequence: Synthetic oligonucleotide
  Antisense strand to SEQ ID NO: 12860
uaucccaacuaaugcuaau

SEQ ID NO: 12862 - RNA, 19 nt, Artificial Sequence
  Description of Artificial Sequence: Synthetic oligonucleotide
  Sense strand starting at position 2912 of SEQ ID NO: 121
ggugguugggauuagcauu

SEQ ID NO: 12863 - RNA, 19 nt, Artificial Sequence
  Description of Artificial Sequence: Synthetic oligonucleotide
  Antisense strand to SEQ ID NO: 12862
aaugcuaaucccaaccacc

SEQ ID NO: 12864 - RNA, 19 nt, Artificial Sequence
  Description of Artificial Sequence: Synthetic oligonucleotide
  Sense strand starting at position 2890 of SEQ ID NO: 121
guguaaugguauucggaga

SEQ ID NO: 12865 - RNA, 19 nt, Artificial Sequence
  Description of Artificial Sequence: Synthetic oligonucleotide
  Antisense strand to SEQ ID NO: 12864
ucuccgaauaccauuacac

SEQ ID NO: 12866 - RNA, 19 nt, Artificial Sequence
  Description of Artificial Sequence: Synthetic oligonucleotide
  Sense strand starting at position 2691 of SEQ ID NO: 121
aggaguagaguuuaggcua

SEQ ID NO: 12867 - RNA, 19 nt, Artificial Sequence
  Description of Artificial Sequence: Synthetic oligonucleotide
  Antisense strand to SEQ ID NO: 12866
uagccuaaacucuacuccu

SEQ ID NO: 12868 - RNA, 19 nt, Artificial Sequence
  Description of Artificial Sequence: Synthetic oligonucleotide
  Sense strand starting at position 2611 of SEQ ID NO: 121
uuggguaagcuaugguuua

SEQ ID NO: 12869 - RNA, 19 nt, Artificial Sequence
  Description of Artificial Sequence: Synthetic oligonucleotide
  Antisense strand to SEQ ID NO: 12868
uaaaccauagcuuacccaa

SEQ ID NO: 12870 - RNA, 19 nt, Artificial Sequence
  Description of Artificial Sequence: Synthetic oligonucleotide
  Sense strand starting at position 2603 of SEQ ID NO: 121
uaaauaguuuggguaagcu

SEQ ID NO: 12871 - RNA, 19 nt, Artificial Sequence
  Description of Artificial Sequence: Synthetic oligonucleotide
  Antisense strand to SEQ ID NO: 12870
agcuuacccaaacuauuua

SEQ ID NO: 12872 - RNA, 19 nt, Artificial Sequence
  Description of Artificial Sequence: Synthetic oligonucleotide
  Sense strand starting at position 2600 of SEQ ID NO: 121
ccuuaaauaguuuggguaa

SEQ ID NO: 12873 - RNA, 19 nt, Artificial Sequence
  Description of Artificial Sequence: Synthetic oligonucleotide
  Antisense strand to SEQ ID NO: 12872
uuacccaaacuauuuaagg

SEQ ID NO: 12874 - RNA, 19 nt, Artificial Sequence
  Description of Artificial Sequence: Synthetic oligonucleotide
  Sense strand starting at position 2568 of SEQ ID NO: 121
cugagauaauagcuaugga

SEQ ID NO: 12875 - RNA, 19 nt, Artificial Sequence
  Description of Artificial Sequence: Synthetic oligonucleotide
  Antisense strand to SEQ ID NO: 12874
uccauagcuauuaucucag

SEQ ID NO: 12876 - RNA, 19 nt, Artificial Sequence
  Description of Artificial Sequence: Synthetic oligonucleotide
  Sense strand starting at position 2535 of SEQ ID NO: 121
gcuguacuucccgagucau

SEQ ID NO: 12877 - RNA, 19 nt, Artificial Sequence
  Description of Artificial Sequence: Synthetic oligonucleotide
  Antisense strand to SEQ ID NO: 12876
augacucgggaaguacagc

SEQ ID NO: 12878 - RNA, 19 nt, Artificial Sequence
  Description of Artificial Sequence: Synthetic oligonucleotide
  Sense strand starting at position 2421 of SEQ ID NO: 121
gggcgugguauagaaauua

SEQ ID NO: 12879 - RNA, 19 nt, Artificial Sequence
  Description of Artificial Sequence: Synthetic oligonucleotide
  Antisense strand to SEQ ID NO: 12878
uaauuucuauaccacgccc

SEQ ID NO: 12880 - RNA, 19 nt, Artificial Sequence
  Description of Artificial Sequence: Synthetic oligonucleotide
  Sense strand starting at position 2419 of SEQ ID NO: 121
gagggcgugguauagaaau

SEQ ID NO: 12881 - RNA, 19 nt, Artificial Sequence
  Description of Artificial Sequence: Synthetic oligonucleotide
  Antisense strand to SEQ ID NO: 12880
auuucuauaccacgcccuc

SEQ ID NO: 12882 - RNA, 19 nt, Artificial Sequence
  Description of Artificial Sequence: Synthetic oligonucleotide
  Sense strand starting at position 2374 of SEQ ID NO: 121
acgaguacauacuuccaua

SEQ ID NO: 12883 - RNA, 19 nt, Artificial Sequence
  Description of Artificial Sequence: Synthetic oligonucleotide
  Antisense strand to SEQ ID NO: 12882
uauggaaguauguacucgu

SEQ ID NO: 12884 - RNA, 19 nt, Artificial Sequence
  Description of Artificial Sequence: Synthetic oligonucleotide
  Sense strand starting at position 2331 of SEQ ID NO: 121
gugggaacugcugguguca

SEQ ID NO: 12885 - RNA, 19 nt, Artificial Sequence
  Description of Artificial Sequence: Synthetic oligonucleotide
  Antisense strand to SEQ ID NO: 12884
ugacaccagcaguucccac

SEQ ID NO: 12886 - RNA, 19 nt, Artificial Sequence
  Description of Artificial Sequence: Synthetic oligonucleotide
  Sense strand starting at position 2311 of SEQ ID NO: 121
ugcuuaguggcugagugaa

SEQ ID NO: 12887 - RNA, 19 nt, Artificial Sequence
  Description of Artificial Sequence: Synthetic oligonucleotide
  Antisense strand to SEQ ID NO: 12886
uucacucagccacuaagca

SEQ ID NO: 12888 - RNA, 19 nt, Artificial Sequence
  Description of Artificial Sequence: Synthetic oligonucleotide
  Sense strand starting at position 2285 of SEQ ID NO: 121
gcaguuagccuugauuccu

SEQ ID NO: 12889 - RNA, 19 nt, Artificial Sequence
  Description of Artificial Sequence: Synthetic oligonucleotide
  Antisense strand to SEQ ID NO: 12888
aggaaucaaggcuaacugc

SEQ ID NO: 12890 - RNA, 19 nt, Artificial Sequence
  Description of Artificial Sequence: Synthetic oligonucleotide
  Sense strand starting at position 2205 of SEQ ID NO: 121
cgaaaugccuugcucccaa

SEQ ID NO: 12891 - RNA, 19 nt, Artificial Sequence
  Description of Artificial Sequence: Synthetic oligonucleotide
  Antisense strand to SEQ ID NO: 12890
uugggagcaaggcauuucg

SEQ ID NO: 12892 - RNA, 19 nt, Artificial Sequence
  Description of Artificial Sequence: Synthetic oligonucleotide
  Sense strand starting at position 2174 of SEQ ID NO: 121
uuuacagaucgccacacau

SEQ ID NO: 12893 - RNA, 19 nt, Artificial Sequence
  Description of Artificial Sequence: Synthetic oligonucleotide
  Antisense strand to SEQ ID NO: 12892
auguguggcgaucuguaaa

SEQ ID NO: 12894 - RNA, 19 nt, Artificial Sequence
  Description of Artificial Sequence: Synthetic oligonucleotide
  Sense strand starting at position 1433 of SEQ ID NO: 121
gguuucaggcgguaauaga

SEQ ID NO: 12895 - RNA, 19 nt, Artificial Sequence
  Description of Artificial Sequence: Synthetic oligonucleotide
  Antisense strand to SEQ ID NO: 12894
ucuauuaccgccugaaacc

SEQ ID NO: 12896 - RNA, 19 nt, Artificial Sequence
  Description of Artificial Sequence: Synthetic oligonucleotide
  Sense strand starting at position 1408 of SEQ ID NO: 121
ggcagagucaagggugguu

SEQ ID NO: 12897 - RNA, 19 nt, Artificial Sequence
  Description of Artificial Sequence: Synthetic oligonucleotide
  Antisense strand to SEQ ID NO: 12896
aaccacccuugacucugcc

SEQ ID NO: 12898 - RNA, 19 nt, Artificial Sequence
  Description of Artificial Sequence: Synthetic oligonucleotide
  Sense strand starting at position 1214 of SEQ ID NO: 121
ggaagaaagugguaauuca

SEQ ID NO: 12899 - RNA, 19 nt, Artificial Sequence
  Description of Artificial Sequence: Synthetic oligonucleotide
  Antisense strand to SEQ ID NO: 12898
ugaauuaccacuuucuucc

SEQ ID NO: 12900 - RNA, 19 nt, Artificial Sequence
  Description of Artificial Sequence: Synthetic oligonucleotide
  Sense strand starting at position 1202 of SEQ ID NO: 121
cucguagcccuaggaagaa

SEQ ID NO: 12901 - RNA, 19 nt, Artificial Sequence
  Description of Artificial Sequence: Synthetic oligonucleotide
  Antisense strand to SEQ ID NO: 12900
uucuuccuagggcuacgag

SEQ ID NO: 12902 - RNA, 19 nt, Artificial Sequence
  Description of Artificial Sequence: Synthetic oligonucleotide
  Sense strand starting at position 957 of SEQ ID NO: 121
uugcacacuuauucgaaua

SEQ ID NO: 12903 - RNA, 19 nt, Artificial Sequence
  Description of Artificial Sequence: Synthetic oligonucleotide
  Antisense strand to SEQ ID NO: 12902
uauucgaauaagugugcaa

SEQ ID NO: 12904 - RNA, 19 nt, Artificial Sequence
  Description of Artificial Sequence: Synthetic oligonucleotide
  Sense strand starting at position 956 of SEQ ID NO: 121
cuugcacacuuauucgaau

SEQ ID NO: 12905 - RNA, 19 nt, Artificial Sequence
  Description of Artificial Sequence: Synthetic oligonucleotide
  Antisense strand to SEQ ID NO: 12904
auucgaauaagugugcaag

SEQ ID NO: 12906 - RNA, 19 nt, Artificial Sequence
  Description of Artificial Sequence: Synthetic oligonucleotide
  Sense strand starting at position 838 of SEQ ID NO: 121
gcaagaggaucugacuaca

SEQ ID NO: 12907 - RNA, 19 nt, Artificial Sequence
  Description of Artificial Sequence: Synthetic oligonucleotide
  Antisense strand to SEQ ID NO: 12906
uguagucagauccucuugc

SEQ ID NO: 12908 - RNA, 19 nt, Artificial Sequence
  Description of Artificial Sequence: Synthetic oligonucleotide
  Sense strand starting at position 817 of SEQ ID NO: 121
auguguuuacugcaugcua

SEQ ID NO: 12909 - RNA, 19 nt, Artificial Sequence
  Description of Artificial Sequence: Synthetic oligonucleotide
  Antisense strand to SEQ ID NO: 12908
uagcaugcaguaaacacau

SEQ ID NO: 12910 - RNA, 19 nt, Artificial Sequence
  Description of Artificial Sequence: Synthetic oligonucleotide
  Sense strand starting at position 812 of SEQ ID NO: 121
agaucauguguuuacugca

SEQ ID NO: 12911 - RNA, 19 nt, Artificial Sequence
  Description of Artificial Sequence: Synthetic oligonucleotide
  Antisense strand to SEQ ID NO: 12910
ugcaguaaacacaugaucu

SEQ ID NO: 12912 - RNA, 19 nt, Artificial Sequence
  Description of Artificial Sequence: Synthetic oligonucleotide
  Sense strand starting at position 809 of SEQ ID NO: 121
gguagaucauguguuuacu

SEQ ID NO: 12913 - RNA, 19 nt, Artificial Sequence
  Description of Artificial Sequence: Synthetic oligonucleotide
  Antisense strand to SEQ ID NO: 12912
aguaaacacaugaucuacc

SEQ ID NO: 12914 - RNA, 19 nt, Artificial Sequence
  Description of Artificial Sequence: Synthetic oligonucleotide
  Sense strand starting at position 640 of SEQ ID NO: 121
ucagcucugccaugauaca

SEQ ID NO: 12915 - RNA, 19 nt, Artificial Sequence
  Description of Artificial Sequence: Synthetic oligonucleotide
  Antisense strand to SEQ ID NO: 12914
uguaucauggcagagcuga

SEQ ID NO: 12916 - RNA, 19 nt, Artificial Sequence
  Description of Artificial Sequence: Synthetic oligonucleotide
  Sense strand starting at position 587 of SEQ ID NO: 121
gaggcuacaggcugagaua

SEQ ID NO: 12917 - RNA, 19 nt, Artificial Sequence
  Description of Artificial Sequence: Synthetic oligonucleotide
  Antisense strand to SEQ ID NO: 12916
uaucucagccuguagccuc

SEQ ID NO: 12918 - RNA, 19 nt, Artificial Sequence
  Description of Artificial Sequence: Synthetic oligonucleotide
  Sense strand starting at position 507 of SEQ ID NO: 121
gugaguuggucacugauuc

SEQ ID NO: 12919 - RNA, 19 nt, Artificial Sequence
  Description of Artificial Sequence: Synthetic oligonucleotide
  Antisense strand to SEQ ID NO: 12918
gaaucagugaccaacucac

SEQ ID NO: 12920 - RNA, 19 nt, Artificial Sequence
  Description of Artificial Sequence: Synthetic oligonucleotide
  Sense strand starting at position 505 of SEQ ID NO: 121
gugugaguuggucacugau

SEQ ID NO: 12921 - RNA, 19 nt, Artificial Sequence
  Description of Artificial Sequence: Synthetic oligonucleotide
  Antisense strand to SEQ ID NO: 12920
aucagugaccaacucacac

SEQ ID NO: 12922 - RNA, 19 nt, Artificial Sequence
  Description of Artificial Sequence: Synthetic oligonucleotide
  Sense strand starting at position 485 of SEQ ID NO: 121
cagccugaggccuagagaa

SEQ ID NO: 12923 - RNA, 19 nt, Artificial Sequence
  Description of Artificial Sequence: Synthetic oligonucleotide
  Antisense strand to SEQ ID NO: 12922
uucucuaggccucaggcug

SEQ ID NO: 12924 - RNA, 19 nt, Artificial Sequence
  Description of Artificial Sequence: Synthetic oligonucleotide
  Sense strand starting at position 367 of SEQ ID NO: 122
uccagaaaucgagggauuc

SEQ ID NO: 12925 - RNA, 19 nt, Artificial Sequence
  Description of Artificial Sequence: Synthetic oligonucleotide
  Antisense strand to SEQ ID NO: 12924
gaaucccucgauuucugga

SEQ ID NO: 12926 - RNA, 19 nt, Artificial Sequence
  Description of Artificial Sequence: Synthetic oligonucleotide
  Sense strand starting at position 378 of SEQ ID NO: 122
agggauucaguuugugaau

SEQ ID NO: 12927 - RNA, 19 nt, Artificial Sequence
  Description of Artificial Sequence: Synthetic oligonucleotide
  Antisense strand to SEQ ID NO: 12926
auucacaaacugaaucccu

SEQ ID NO: 12928 - RNA, 19 nt, Artificial Sequence
  Description of Artificial Sequence: Synthetic oligonucleotide
  Sense strand starting at position 379 of SEQ ID NO: 122
gggauucaguuugugaauc

SEQ ID NO: 12929 - RNA, 19 nt, Artificial Sequence
  Description of Artificial Sequence: Synthetic oligonucleotide
  Antisense strand to SEQ ID NO: 12928
gauucacaaacugaauccc

SEQ ID NO: 12930 - RNA, 19 nt, Artificial Sequence
  Description of Artificial Sequence: Synthetic oligonucleotide
  Sense strand starting at position 787 of SEQ ID NO: 122
gcaggcuguguuccaaguu

SEQ ID NO: 12931 - RNA, 19 nt, Artificial Sequence
  Description of Artificial Sequence: Synthetic oligonucleotide
  Antisense strand to SEQ ID NO: 12930
aacuuggaacacagccugc

SEQ ID NO: 12932 - RNA, 19 nt, Artificial Sequence
  Description of Artificial Sequence: Synthetic oligonucleotide
  Sense strand starting at position 797 of SEQ ID NO: 122
uuccaaguuccacgaaaua

SEQ ID NO: 12933 - RNA, 19 nt, Artificial Sequence
  Description of Artificial Sequence: Synthetic oligonucleotide
  Antisense strand to SEQ ID NO: 12932
uauuucguggaacuuggaa

SEQ ID NO: 12934 - RNA, 19 nt, Artificial Sequence
  Description of Artificial Sequence: Synthetic oligonucleotide
  Sense strand starting at position 838 of SEQ ID NO: 122
guuccagccuucuugauca

SEQ ID NO: 12935 - RNA, 19 nt, Artificial Sequence
  Description of Artificial Sequence: Synthetic oligonucleotide
  Antisense strand to SEQ ID NO: 12934
ugaucaagaaggcuggaac

SEQ ID NO: 12936 - RNA, 19 nt, Artificial Sequence
  Description of Artificial Sequence: Synthetic oligonucleotide
  Sense strand starting at position 917 of SEQ ID NO: 122
guuuaaucugagggacccu

SEQ ID NO: 12937 - RNA, 19 nt, Artificial Sequence
  Description of Artificial Sequence: Synthetic oligonucleotide
  Antisense strand to SEQ ID NO: 12936
agggucccucagauuaaac

SEQ ID NO: 12938 - RNA, 19 nt, Artificial Sequence
  Description of Artificial Sequence: Synthetic oligonucleotide
  Sense strand starting at position 1047 of SEQ ID NO: 122
ucaagaccuuugcuaggua

SEQ ID NO: 12939 - RNA, 19 nt, Artificial Sequence
  Description of Artificial Sequence: Synthetic oligonucleotide
  Antisense strand to SEQ ID NO: 12938
uaccuagcaaaggucuuga

SEQ ID NO: 12940 - RNA, 19 nt, Artificial Sequence
  Description of Artificial Sequence: Synthetic oligonucleotide
  Sense strand starting at position 1132 of SEQ ID NO: 122
gugugggaucuuuggguga

SEQ ID NO: 12941 - RNA, 19 nt, Artificial Sequence
  Description of Artificial Sequence: Synthetic oligonucleotide
  Antisense strand to SEQ ID NO: 12940
ucacccaaagaucccacac

SEQ ID NO: 12942 - RNA, 19 nt, Artificial Sequence
  Description of Artificial Sequence: Synthetic oligonucleotide
  Sense strand starting at position 1327 of SEQ ID NO: 122
ccaucagguccuugccaua

SEQ ID NO: 12943 - RNA, 19 nt, Artificial Sequence
  Description of Artificial Sequence: Synthetic oligonucleotide
  Antisense strand to SEQ ID NO: 12942
uauggcaaggaccugaugg

SEQ ID NO: 12944 - RNA, 19 nt, Artificial Sequence
  Description of Artificial Sequence: Synthetic oligonucleotide
  Sense strand starting at position 1557 of SEQ ID NO: 122
gguauccagccagaucuuu

SEQ ID NO: 12945 - RNA, 19 nt, Artificial Sequence
  Description of Artificial Sequence: Synthetic oligonucleotide
  Antisense strand to SEQ ID NO: 12944
aaagaucuggcuggauacc

SEQ ID NO: 12946 - RNA, 19 nt, Artificial Sequence
  Description of Artificial Sequence: Synthetic oligonucleotide
  Sense strand starting at position 1628 of SEQ ID NO: 122
gguugccagaccuggauau

SEQ ID NO: 12947 - RNA, 19 nt, Artificial Sequence
  Description of Artificial Sequence: Synthetic oligonucleotide
  Antisense strand to SEQ ID NO: 12946
auauccaggucuggcaacc

SEQ ID NO: 12948 - RNA, 19 nt, Artificial Sequence
  Description of Artificial Sequence: Synthetic oligonucleotide
  Sense strand starting at position 1629 of SEQ ID NO: 122
guugccagaccuggauaua

SEQ ID NO: 12949 - RNA, 19 nt, Artificial Sequence
  Description of Artificial Sequence: Synthetic oligonucleotide
  Antisense strand to SEQ ID NO: 12948
uauauccaggucuggcaac

SEQ ID NO: 12950 - RNA, 19 nt, Artificial Sequence
  Description of Artificial Sequence: Synthetic oligonucleotide
  Sense strand starting at position 1657 of SEQ ID NO: 122
gcagauagguagcuauaac

SEQ ID NO: 12951 - RNA, 19 nt, Artificial Sequence
  Description of Artificial Sequence: Synthetic oligonucleotide
  Antisense strand to SEQ ID NO: 12950
guuauagcuaccuaucugc

SEQ ID NO: 12952 - RNA, 19 nt, Artificial Sequence
  Description of Artificial Sequence: Synthetic oligonucleotide
  Sense strand starting at position 2023 of SEQ ID NO: 122
cuauauaccugucuguuua

SEQ ID NO: 12953 - RNA, 19 nt, Artificial Sequence
  Description of Artificial Sequence: Synthetic oligonucleotide
  Antisense strand to SEQ ID NO: 12952
uaaacagacagguauauag

SEQ ID NO: 12954 - RNA, 19 nt, Artificial Sequence
  Description of Artificial Sequence: Synthetic oligonucleotide
  Sense strand starting at position 2088 of SEQ ID NO: 122
cagggauuaugugaggaua

SEQ ID NO: 12955 - RNA, 19 nt, Artificial Sequence
  Description of Artificial Sequence: Synthetic oligonucleotide
  Antisense strand to SEQ ID NO: 12954
uauccucacauaaucccug

SEQ ID NO: 12956 - RNA, 19 nt, Artificial Sequence
  Description of Artificial Sequence: Synthetic oligonucleotide
  Sense strand starting at position 2104 of SEQ ID NO: 122
auaaacaaguuggagaaau

SEQ ID NO: 12957 - RNA, 19 nt, Artificial Sequence
  Description of Artificial Sequence: Synthetic oligonucleotide
  Antisense strand to SEQ ID NO: 12956
auuucuccaacuuguuuau

SEQ ID NO: 12958 - RNA, 19 nt, Artificial Sequence
  Description of Artificial Sequence: Synthetic oligonucleotide
  Sense strand starting at position 2244 of SEQ ID NO: 122
aucugagguccuuggacuu

SEQ ID NO: 12959 - RNA, 19 nt, Artificial Sequence
  Description of Artificial Sequence: Synthetic oligonucleotide
  Antisense strand to SEQ ID NO: 12958
aaguccaaggaccucagau

SEQ ID NO: 12960 - RNA, 19 nt, Artificial Sequence
  Description of Artificial Sequence: Synthetic oligonucleotide
  Sense strand starting at position 2366 of SEQ ID NO: 122
ucuuuauuccauuaugggu

SEQ ID NO: 12961 - RNA, 19 nt, Artificial Sequence
  Description of Artificial Sequence: Synthetic oligonucleotide
  Antisense strand to SEQ ID NO: 12960
acccauaauggaauaaaga

SEQ ID NO: 12962 - RNA, 19 nt, Artificial Sequence
  Description of Artificial Sequence: Synthetic oligonucleotide
  Sense strand starting at position 2372 of SEQ ID NO: 122
uuccauuauggguagaucu

SEQ ID NO: 12963 - RNA, 19 nt, Artificial Sequence
  Description of Artificial Sequence: Synthetic oligonucleotide
  Antisense strand to SEQ ID NO: 12962
agaucuacccauaauggaa

SEQ ID NO: 12964 - RNA, 19 nt, Artificial Sequence
  Description of Artificial Sequence: Synthetic oligonucleotide
  Sense strand starting at position 2417 of SEQ ID NO: 122
ugcaacuuggcagagagau

SEQ ID NO: 12965 - RNA, 19 nt, Artificial Sequence
  Description of Artificial Sequence: Synthetic oligonucleotide
  Antisense strand to SEQ ID NO: 12964
aucucucugccaaguugca

SEQ ID NO: 12966 - RNA, 19 nt, Artificial Sequence
  Description of Artificial Sequence: Synthetic oligonucleotide
  Sense strand starting at position 2552 of SEQ ID NO: 122
uugaguuaauguguaauga

SEQ ID NO: 12967 - RNA, 19 nt, Artificial Sequence
  Description of Artificial Sequence: Synthetic oligonucleotide
  Antisense strand to SEQ ID NO: 12966
ucauuacacauuaacucaa

SEQ ID NO: 12968 - RNA, 19 nt, Artificial Sequence
  Description of Artificial Sequence: Synthetic oligonucleotide
  Sense strand starting at position 2553 of SEQ ID NO: 122
ugaguuaauguguaaugag

SEQ ID NO: 12969 - RNA, 19 nt, Artificial Sequence
  Description of Artificial Sequence: Synthetic oligonucleotide
  Antisense strand to SEQ ID NO: 12968
cucauuacacauuaacuca

SEQ ID NO: 12970 - RNA, 19 nt, Artificial Sequence
  Description of Artificial Sequence: Synthetic oligonucleotide
  Sense strand starting at position 2602 of SEQ ID NO: 122
ccuggaugcugaucacuga

SEQ ID NO: 12971 - RNA, 19 nt, Artificial Sequence
  Description of Artificial Sequence: Synthetic oligonucleotide
  Antisense strand to SEQ ID NO: 12970
ucagugaucagcauccagg

SEQ ID NO: 12972 - RNA, 19 nt, Artificial Sequence
  Description of Artificial Sequence: Synthetic oligonucleotide
  Sense strand starting at position 2605 of SEQ ID NO: 122
ggaugcugaucacugaaca

SEQ ID NO: 12973 - RNA, 19 nt, Artificial Sequence
  Description of Artificial Sequence: Synthetic oligonucleotide
  Antisense strand to SEQ ID NO: 12972
uguucagugaucagcaucc

SEQ ID NO: 12974 - RNA, 19 nt, Artificial Sequence
  Description of Artificial Sequence: Synthetic oligonucleotide
  Sense strand starting at position 2713 of SEQ ID NO: 122
aggcuucuaccaggguaaa

SEQ ID NO: 12975 - RNA, 19 nt, Artificial Sequence
  Description of Artificial Sequence: Synthetic oligonucleotide
  Antisense strand to SEQ ID NO: 12974
uuuacccugguagaagccu

SEQ ID NO: 12976 - RNA, 19 nt, Artificial Sequence
  Description of Artificial Sequence: Synthetic oligonucleotide
  Sense strand starting at position 2714 of SEQ ID NO: 122
ggcuucuaccaggguaaag

SEQ ID NO: 12977 - RNA, 19 nt, Artificial Sequence
  Description of Artificial Sequence: Synthetic oligonucleotide
  Antisense strand to SEQ ID NO: 12976
cuuuacccugguagaagcc

SEQ ID NO: 12978 - RNA, 19 nt, Artificial Sequence
  Description of Artificial Sequence: Synthetic oligonucleotide
  Sense strand starting at position 2763 of SEQ ID NO: 122
aucaguucuaggcagugau

SEQ ID NO: 12979 - RNA, 19 nt, Artificial Sequence
  Description of Artificial Sequence: Synthetic oligonucleotide
  Antisense strand to SEQ ID NO: 12978
aucacugccuagaacugau

SEQ ID NO: 12980 - RNA, 19 nt, Artificial Sequence
  Description of Artificial Sequence: Synthetic oligonucleotide
  Sense strand starting at position 2766 of SEQ ID NO: 122
aguucuaggcagugauuag

SEQ ID NO: 12981 - RNA, 19 nt, Artificial Sequence
  Description of Artificial Sequence: Synthetic oligonucleotide
  Antisense strand to SEQ ID NO: 12980
cuaaucacugccuagaacu

SEQ ID NO: 12982 - RNA, 19 nt, Artificial Sequence
  Description of Artificial Sequence: Synthetic oligonucleotide
  Sense strand starting at position 2773 of SEQ ID NO: 122
ggcagugauuagccaauau

SEQ ID NO: 12983 - RNA, 19 nt, Artificial Sequence
  Description of Artificial Sequence: Synthetic oligonucleotide
  Antisense strand to SEQ ID NO: 12982
auauuggcuaaucacugcc

SEQ ID NO: 12984 - RNA, 19 nt, Artificial Sequence
  Description of Artificial Sequence: Synthetic oligonucleotide
  Sense strand starting at position 2777 of SEQ ID NO: 122
gugauuagccaauauugag

SEQ ID NO: 12985 - RNA, 19 nt, Artificial Sequence
  Description of Artificial Sequence: Synthetic oligonucleotide
  Antisense strand to SEQ ID NO: 12984
cucaauauuggcuaaucac

SEQ ID NO: 12986 - RNA, 19 nt, Artificial Sequence
  Description of Artificial Sequence: Synthetic oligonucleotide
  Sense strand starting at position 2943 of SEQ ID NO: 122
agcauacucgcugaguaug

SEQ ID NO: 12987 - RNA, 19 nt, Artificial Sequence
  Description of Artificial Sequence: Synthetic oligonucleotide
  Antisense strand to SEQ ID NO: 12986
cauacucagcgaguaugcu

SEQ ID NO: 12988 - RNA, 19 nt, Artificial Sequence
  Description of Artificial Sequence: Synthetic oligonucleotide
  Sense strand starting at position 3062 of SEQ ID NO: 122
agaaguauaugugcagguu

SEQ ID NO: 12989 - RNA, 19 nt, Artificial Sequence
  Description of Artificial Sequence: Synthetic oligonucleotide
  Antisense strand to SEQ ID NO: 12988
aaccugcacauauacuucu

SEQ ID NO: 12990 - RNA, 19 nt, Artificial Sequence
  Description of Artificial Sequence: Synthetic oligonucleotide
  Sense strand starting at position 3630 of SEQ ID NO: 122
ggcuccauauuccuagauu

SEQ ID NO: 12991 - RNA, 19 nt, Artificial Sequence
  Description of Artificial Sequence: Synthetic oligonucleotide
  Antisense strand to SEQ ID NO: 12990
aaucuaggaauauggagcc

SEQ ID NO: 12992 - RNA, 19 nt, Artificial Sequence
  Description of Artificial Sequence: Synthetic oligonucleotide
  Sense strand starting at position 3714 of SEQ ID NO: 122
gcgaauaguucugcuagaa

SEQ ID NO: 12993 - RNA, 19 nt, Artificial Sequence
  Description of Artificial Sequence: Synthetic oligonucleotide
  Antisense strand to SEQ ID NO: 12992
uucuagcagaacuauucgc

SEQ ID NO: 12994 - RNA, 19 nt, Artificial Sequence
  Description of Artificial Sequence: Synthetic oligonucleotide
  Sense strand starting at position 3718 of SEQ ID NO: 122
auaguucugcuagaacuua

SEQ ID NO: 12995 - RNA, 19 nt, Artificial Sequence
  Description of Artificial Sequence: Synthetic oligonucleotide
  Antisense strand to SEQ ID NO: 12994
uaaguucuagcagaacuau

SEQ ID NO: 12996 - RNA, 19 nt, Artificial Sequence
  Description of Artificial Sequence: Synthetic oligonucleotide
  Sense strand starting at position 3844 of SEQ ID NO: 122
gggagugcugcgcuuaaug

SEQ ID NO: 12997 - RNA, 19 nt, Artificial Sequence
  Description of Artificial Sequence: Synthetic oligonucleotide
  Antisense strand to SEQ ID NO: 12996
cauuaagcgcagcacuccc

SEQ ID NO: 12998 - RNA, 19 nt, Artificial Sequence
  Description of Artificial Sequence: Synthetic oligonucleotide
  Sense strand starting at position 3853 of SEQ ID NO: 122
gcgcuuaaugaguaguacu

SEQ ID NO: 12999 - RNA, 19 nt, Artificial Sequence
  Description of Artificial Sequence: Synthetic oligonucleotide
  Antisense strand to SEQ ID NO: 12998
aguacuacucauuaagcgc

SEQ ID NO: 13000 - RNA, 19 nt, Artificial Sequence
  Description of Artificial Sequence: Synthetic oligonucleotide
  Sense strand starting at position 3915 of SEQ ID NO: 122
uggguucuuuggagagaag

SEQ ID NO: 13001 - RNA, 19 nt, Artificial Sequence
  Description of Artificial Sequence: Synthetic oligonucleotide
  Antisense strand to SEQ ID NO: 13000
cuucucuccaaagaaccca

SEQ ID NO: 13002 - RNA, 19 nt, Artificial Sequence
  Description of Artificial Sequence: Synthetic oligonucleotide
  Sense strand starting at position 3948 of SEQ ID NO: 122
gaaccaggguuccaaagaa

SEQ ID NO: 13003 - RNA, 19 nt, Artificial Sequence
  Description of Artificial Sequence: Synthetic oligonucleotide
  Antisense strand to SEQ ID NO: 13002
uucuuuggaacccugguuc

SEQ ID NO: 13004 - RNA, 19 nt, Artificial Sequence
  Description of Artificial Sequence: Synthetic oligonucleotide
  Sense strand starting at position 46 of SEQ ID NO: 123
augaauacuugugcuaaua

SEQ ID NO: 13005 - RNA, 19 nt, Artificial Sequence
  Description of Artificial Sequence: Synthetic oligonucleotide
  Antisense strand to SEQ ID NO: 13004
uauuagcacaaguauucau

SEQ ID NO: 13006 - RNA, 19 nt, Artificial Sequence
  Description of Artificial Sequence: Synthetic oligonucleotide
  Sense strand starting at position 195 of SEQ ID NO: 123
auccuauccugggcagaaa

SEQ ID NO: 13007 - RNA, 19 nt, Artificial Sequence
  Description of Artificial Sequence: Synthetic oligonucleotide
  Antisense strand to SEQ ID NO: 13006
uuucugcccaggauaggau

SEQ ID NO: 13008 - RNA, 19 nt, Artificial Sequence
  Description of Artificial Sequence: Synthetic oligonucleotide
  Sense strand starting at position 492 of SEQ ID NO: 123
aguggacgaucucuuggaa

SEQ ID NO: 13009 - RNA, 19 nt, Artificial Sequence
  Description of Artificial Sequence: Synthetic oligonucleotide
  Antisense strand to SEQ ID NO: 13008
uuccaagagaucguccacu

SEQ ID NO: 13010 - RNA, 19 nt, Artificial Sequence
  Description of Artificial Sequence: Synthetic oligonucleotide
  Sense strand starting at position 495 of SEQ ID NO: 123
ggacgaucucuuggaaccu

SEQ ID NO: 13011 - RNA, 19 nt, Artificial Sequence
  Description of Artificial Sequence: Synthetic oligonucleotide
  Antisense strand to SEQ ID NO: 13010
agguuccaagagaucgucc

SEQ ID NO: 13012 - RNA, 19 nt, Artificial Sequence
  Description of Artificial Sequence: Synthetic oligonucleotide
  Sense strand starting at position 527 of SEQ ID NO: 123
gcuuacucccgagcauugu

SEQ ID NO: 13013 - RNA, 19 nt, Artificial Sequence
  Description of Artificial Sequence: Synthetic oligonucleotide
  Antisense strand to SEQ ID NO: 13012
acaaugcucgggaguaagc

SEQ ID NO: 13014 - RNA, 19 nt, Artificial Sequence
  Description of Artificial Sequence: Synthetic oligonucleotide
  Sense strand starting at position 692 of SEQ ID NO: 123
cagguuacugcucagauua

SEQ ID NO: 13015 - RNA, 19 nt, Artificial Sequence
  Description of Artificial Sequence: Synthetic oligonucleotide
  Antisense strand to SEQ ID NO: 13014
uaaucugagcaguaaccug

SEQ ID NO: 13016 - RNA, 19 nt, Artificial Sequence
  Description of Artificial Sequence: Synthetic oligonucleotide
  Sense strand starting at position 907 of SEQ ID NO: 123
auggaaacucccuauugcu

SEQ ID NO: 13017 - RNA, 19 nt, Artificial Sequence
  Description of Artificial Sequence: Synthetic oligonucleotide
  Antisense strand to SEQ ID NO: 13016
agcaauagggaguuuccau

SEQ ID NO: 13018 - RNA, 19 nt, Artificial Sequence
  Description of Artificial Sequence: Synthetic oligonucleotide
  Sense strand starting at position 989 of SEQ ID NO: 123
ucauuacugucuuuaagga

SEQ ID NO: 13019 - RNA, 19 nt, Artificial Sequence
  Description of Artificial Sequence: Synthetic oligonucleotide
  Antisense strand to SEQ ID NO: 13018
uccuuaaagacaguaauga

SEQ ID NO: 13020 - RNA, 19 nt, Artificial Sequence
  Description of Artificial Sequence: Synthetic oligonucleotide
  Sense strand starting at position 1013 of SEQ ID NO: 123
agaggacuguggcuuuaac

SEQ ID NO: 13021 - RNA, 19 nt, Artificial Sequence
  Description of Artificial Sequence: Synthetic oligonucleotide
  Antisense strand to SEQ ID NO: 13020
guuaaagccacaguccucu

SEQ ID NO: 13022 - RNA, 19 nt, Artificial Sequence
  Description of Artificial Sequence: Synthetic oligonucleotide
  Sense strand starting at position 1023 of SEQ ID NO: 123
ggcuuuaacacauagugga

SEQ ID NO: 13023 - RNA, 19 nt, Artificial Sequence
  Description of Artificial Sequence: Synthetic oligonucleotide
  Antisense strand to SEQ ID NO: 13022
uccacuauguguuaaagcc

SEQ ID NO: 13024 - RNA, 19 nt, Artificial Sequence
  Description of Artificial Sequence: Synthetic oligonucleotide
  Sense strand starting at position 1224 of SEQ ID NO: 123
uguaucaauuuguuaucga

SEQ ID NO: 13025 - RNA, 19 nt, Artificial Sequence
  Description of Artificial Sequence: Synthetic oligonucleotide
  Antisense strand to SEQ ID NO: 13024
ucgauaacaaauugauaca

SEQ ID NO: 13026 - RNA, 19 nt, Artificial Sequence
  Description of Artificial Sequence: Synthetic oligonucleotide
  Sense strand starting at position 1232 of SEQ ID NO: 123
uuuguuaucgaccacagau

SEQ ID NO: 13027 - RNA, 19 nt, Artificial Sequence
  Description of Artificial Sequence: Synthetic oligonucleotide
  Antisense strand to SEQ ID NO: 13026
aucuguggucgauaacaaa

SEQ ID NO: 13028 - RNA, 19 nt, Artificial Sequence
  Description of Artificial Sequence: Synthetic oligonucleotide
  Sense strand starting at position 1234 of SEQ ID NO: 123
uguuaucgaccacagauua

SEQ ID NO: 13029 - RNA, 19 nt, Artificial Sequence
  Description of Artificial Sequence: Synthetic oligonucleotide
  Antisense strand to SEQ ID NO: 13028
uaaucuguggucgauaaca

SEQ ID NO: 13030 - RNA, 19 nt, Artificial Sequence
  Description of Artificial Sequence: Synthetic oligonucleotide
  Sense strand starting at position 1242 of SEQ ID NO: 123
accacagauuaucuuguua

SEQ ID NO: 13031 - RNA, 19 nt, Artificial Sequence
  Description of Artificial Sequence: Synthetic oligonucleotide
  Antisense strand to SEQ ID NO: 13030
uaacaagauaaucuguggu

SEQ ID NO: 13032 - RNA, 19 nt, Artificial Sequence
  Description of Artificial Sequence: Synthetic oligonucleotide
  Sense strand starting at position 1465 of SEQ ID NO: 123
agcagauuugcuggcagua

SEQ ID NO: 13033 - RNA, 19 nt, Artificial Sequence
  Description of Artificial Sequence: Synthetic oligonucleotide
  Antisense strand to SEQ ID NO: 13032
uacugccagcaaaucugcu

SEQ ID NO: 13034 - RNA, 19 nt, Artificial Sequence
  Description of Artificial Sequence: Synthetic oligonucleotide
  Sense strand starting at position 1676 of SEQ ID NO: 123
guaauuggagaauggaguu

SEQ ID NO: 13035 - RNA, 19 nt, Artificial Sequence
  Description of Artificial Sequence: Synthetic oligonucleotide
  Antisense strand to SEQ ID NO: 13034
aacuccauucuccaauuac

SEQ ID NO: 13036 - RNA, 19 nt, Artificial Sequence
  Description of Artificial Sequence: Synthetic oligonucleotide
  Sense strand starting at position 1796 of SEQ ID NO: 123
guuagaagagaugguccau

SEQ ID NO: 13037 - RNA, 19 nt, Artificial Sequence
  Description of Artificial Sequence: Synthetic oligonucleotide
  Antisense strand to SEQ ID NO: 13036
auggaccaucucuucuaac

SEQ ID NO: 13038 - RNA, 19 nt, Artificial Sequence
  Description of Artificial Sequence: Synthetic oligonucleotide
  Sense strand starting at position 1892 of SEQ ID NO: 123
uuguaauggguucaggacu

SEQ ID NO: 13039 - RNA, 19 nt, Artificial Sequence
  Description of Artificial Sequence: Synthetic oligonucleotide
  Antisense strand to SEQ ID NO: 13038
aguccugaacccauuacaa

SEQ ID NO: 13040 - RNA, 19 nt, Artificial Sequence
  Description of Artificial Sequence: Synthetic oligonucleotide
  Sense strand starting at position 1948 of SEQ ID NO: 123
gcuguuccaaguuagaaag

SEQ ID NO: 13041 - RNA, 19 nt, Artificial Sequence
  Description of Artificial Sequence: Synthetic oligonucleotide
  Antisense strand to SEQ ID NO: 13040
cuuucuaacuuggaacagc

SEQ ID NO: 13042 - RNA, 19 nt, Artificial Sequence
  Description of Artificial Sequence: Synthetic oligonucleotide
  Sense strand starting at position 1988 of SEQ ID NO: 123
cucuaagaacacuguugau

SEQ ID NO: 13043 - RNA, 19 nt, Artificial Sequence
  Description of Artificial Sequence: Synthetic oligonucleotide
  Antisense strand to SEQ ID NO: 13042
aucaacaguguucuuagag

SEQ ID NO: 13044 - RNA, 19 nt, Artificial Sequence
  Description of Artificial Sequence: Synthetic oligonucleotide
  Sense strand starting at position 2044 of SEQ ID NO: 123
aggauacagcucugacacu

SEQ ID NO: 13045 - RNA, 19 nt, Artificial Sequence
  Description of Artificial Sequence: Synthetic oligonucleotide
  Antisense strand to SEQ ID NO: 13044
agugucagagcuguauccu

SEQ ID NO: 13046 - RNA, 19 nt, Artificial Sequence
  Description of Artificial Sequence: Synthetic oligonucleotide
  Sense strand starting at position 2140 of SEQ ID NO: 123
aggauaauagcugacuguu

SEQ ID NO: 13047 - RNA, 19 nt, Artificial Sequence
  Description of Artificial Sequence: Synthetic oligonucleotide
  Antisense strand to SEQ ID NO: 13046
aacagucagcuauuauccu

SEQ ID NO: 13048 - RNA, 19 nt, Artificial Sequence
  Description of Artificial Sequence: Synthetic oligonucleotide
  Sense strand starting at position 2142 of SEQ ID NO: 123
gauaauagcugacuguuga

SEQ ID NO: 13049 - RNA, 19 nt, Artificial Sequence
  Description of Artificial Sequence: Synthetic oligonucleotide
  Antisense strand to SEQ ID NO: 13048
ucaacagucagcuauuauc

SEQ ID NO: 13050 - RNA, 19 nt, Artificial Sequence
  Description of Artificial Sequence: Synthetic oligonucleotide
  Sense strand starting at position 2143 of SEQ ID NO: 123
auaauagcugacuguugaa

SEQ ID NO: 13051 - RNA, 19 nt, Artificial Sequence
  Description of Artificial Sequence: Synthetic oligonucleotide
  Antisense strand to SEQ ID NO: 13050
uucaacagucagcuauuau

SEQ ID NO: 13052 - RNA, 19 nt, Artificial Sequence
  Description of Artificial Sequence: Synthetic oligonucleotide
  Sense strand starting at position 2185 of SEQ ID NO: 123
cugcuagcugaagaaucaa

SEQ ID NO: 13053 - RNA, 19 nt, Artificial Sequence
  Description of Artificial Sequence: Synthetic oligonucleotide
  Antisense strand to SEQ ID NO: 13052
uugauucuucagcuagcag

SEQ ID NO: 13054 - RNA, 19 nt, Artificial Sequence
  Description of Artificial Sequence: Synthetic oligonucleotide
  Sense strand starting at position 2425 of SEQ ID NO: 123
uagaaauugccuggaagac

SEQ ID NO: 13055 - RNA, 19 nt, Artificial Sequence
  Description of Artificial Sequence: Synthetic oligonucleotide
  Antisense strand to SEQ ID NO: 13054
gucuuccaggcaauuucua

SEQ ID NO: 13056 - RNA, 19 nt, Artificial Sequence
  Description of Artificial Sequence: Synthetic oligonucleotide
  Sense strand starting at position 2603 of SEQ ID NO: 123
gcacauugauagucacaau

SEQ ID NO: 13057 - RNA, 19 nt, Artificial Sequence
  Description of Artificial Sequence: Synthetic oligonucleotide
  Antisense strand to SEQ ID NO: 13056
auugugacuaucaaugugc

SEQ ID NO: 13058 - RNA, 19 nt, Artificial Sequence
  Description of Artificial Sequence: Synthetic oligonucleotide
  Sense strand starting at position 2626 of SEQ ID NO: 123
ugucaaucacucuggauua

SEQ ID NO: 13059 - RNA, 19 nt, Artificial Sequence
  Description of Artificial Sequence: Synthetic oligonucleotide
  Antisense strand to SEQ ID NO: 13058
uaauccagagugauugaca

SEQ ID NO: 13060 - RNA, 19 nt, Artificial Sequence
  Description of Artificial Sequence: Synthetic oligonucleotide
  Sense strand starting at position 2700 of SEQ ID NO: 123
uguacauuccaguaauaac

SEQ ID NO: 13061 - RNA, 19 nt, Artificial Sequence
  Description of Artificial Sequence: Synthetic oligonucleotide
  Antisense strand to SEQ ID NO: 13060
guuauuacuggaauguaca

SEQ ID NO: 13062 - RNA, 19 nt, Artificial Sequence
  Description of Artificial Sequence: Synthetic oligonucleotide
  Sense strand starting at position 2872 of SEQ ID NO: 123
ccuacuagacgagauguuu

SEQ ID NO: 13063 - RNA, 19 nt, Artificial Sequence
  Description of Artificial Sequence: Synthetic oligonucleotide
  Antisense strand to SEQ ID NO: 13062
aaacaucucgucuaguagg

SEQ ID NO: 13064 - RNA, 19 nt, Artificial Sequence
  Description of Artificial Sequence: Synthetic oligonucleotide
  Sense strand starting at position 3226 of SEQ ID NO: 123
ccgcuagcugaagaaucaa

SEQ ID NO: 13065 - RNA, 19 nt, Artificial Sequence
  Description of Artificial Sequence: Synthetic oligonucleotide
  Antisense strand to SEQ ID NO: 13064
uugauucuucagcuagcgg

SEQ ID NO: 13066 - RNA, 19 nt, Artificial Sequence
  Description of Artificial Sequence: Synthetic oligonucleotide
  Sense strand starting at position 3257 of SEQ ID NO: 123
ugcucaguucuguaagaaa

SEQ ID NO: 13067 - RNA, 19 nt, Artificial Sequence
  Description of Artificial Sequence: Synthetic oligonucleotide
  Antisense strand to SEQ ID NO: 13066
uuucuuacagaacugagca

SEQ ID NO: 13068 - RNA, 19 nt, Artificial Sequence
  Description of Artificial Sequence: Synthetic oligonucleotide
  Sense strand starting at position 3378 of SEQ ID NO: 123
ggauuagaugcucagcaaa

SEQ ID NO: 13069 - RNA, 19 nt, Artificial Sequence
  Description of Artificial Sequence: Synthetic oligonucleotide
  Antisense strand to SEQ ID NO: 13068
uuugcugagcaucuaaucc

SEQ ID NO: 13070 - RNA, 19 nt, Artificial Sequence
  Description of Artificial Sequence: Synthetic oligonucleotide
  Sense strand starting at position 3381 of SEQ ID NO: 123
uuagaugcucagcaaauga

SEQ ID NO: 13071 - RNA, 19 nt, Artificial Sequence
  Description of Artificial Sequence: Synthetic oligonucleotide
  Antisense strand to SEQ ID NO: 13070
ucauuugcugagcaucuaa

SEQ ID NO: 13072 - RNA, 19 nt, Artificial Sequence
  Description of Artificial Sequence: Synthetic oligonucleotide
  Sense strand starting at position 3509 of SEQ ID NO: 123
agucauuauucuuuaaagg

SEQ ID NO: 13073 - RNA, 19 nt, Artificial Sequence
  Description of Artificial Sequence: Synthetic oligonucleotide
  Antisense strand to SEQ ID NO: 13072
ccuuuaaagaauaaugacu
